United States Patent Application Publication US 2025/0333767 A1 - sequence listing, part 13

SEQ ID NO: 44957 - protein, 979 aa, synthetic construct
  REGION 1..979: note = engineered CasX variant
QEIKRINKIRRRLVKDSNTKKAGKTGPMKTLLVRVMTPDLRERLENLRKKPENIPQPISNTSRANLNKLLTDYTEMKKAILHVYWEEFQKDPVGLMSRVAQPASKKIDQNKLKPEMDEKGNLTTAGFACSQCGQPLFVYKLEQVSEKGKAYTNYFGRCNVAEHEKLILLAQLKPEKDSDEAVTYSLGKFGQRALDFYSIHVTKESTHPVKPLAQIAGNRYASVPVGKALSDACMGTIASFLSKYQDIIIEHQKVVKGNQKRLESLRELAGKENLEYPSVTLPPQPHTKEGVDAYNEVIARVRMWVNLNLWQKLKLSRDDAKPLLRLKGFPSFPLVERQANEVDWWDMVCNVKKLINEKKEDGKVFWQNLAGYKRQEALRPYLSSEEDRKKGKKFARYQLGDLLLHLEKKHGERDWGKVYDEAWERIDKKVEGLSKHIKLEEERRSEDAQSKAALTDWLRAKASFVIEGLKEADKDEFCRCELKLQKWYGDLRGKPFAIEAENSILDISGFSKQYNCAFIWQKDGVKKLNLYLIINYFKGGKLRFKKIKPEAFEANRFYTVINKKSGEIVPMEVNFNFDDPNLIILPLAFGKRFGREFIWNDLLSLETGSLKLANGRVIEKTLYNRRTRQDEPALFVALTFERREVLDSSNIKPMNLIGVDRGENIPAVIALTDPEGCPLSRFKDSLGNPTHILRIGESYKEKQRTIQAKKEVEQRRAGGYSRKYASKAKNLADDMVRNTARDLLYYAVTQDAMLIFENLSRGFGRQGKRTFMAERQYTRMEDWLTAKLAYEGLPSKTYLSKTLAQYTSKTCSNCGFTITSADYDRVLEKLKKTATGWMTTINGKELKVEGQITYYNRYKRQNVVKDLSVELDRLSEESVNNDISSWTKGRSGEALSLLKKRFSHRPVQEKFVCLNCGFETHADEQAALNIARSWLFLRSQEYKKYQTNKTTGNTDKRAFVETWQSFYRKKLKEVWKPAV

SEQ ID NO: 44958 - protein, 979 aa, synthetic construct
  REGION 1..979: note = engineered CasX variant
QEIKRINKIRRRLVKDSNTKKAGKTGPMKTLLVRVMTPDLRERLENLRKKPENIPQPISNTSRANLNKLLTDYTEMKKAILHVYWEEFQKDPVGLMSRVAQPASKKIDQNKLKPEMDEKGNLTTAGFACSQCGQPLFVYKLEQVSEKGKAYTNYFGRCNVAEHEKLIKLAQLKPEKDSDEAVTYSLGKFGQRALDFYSIHVTKESTHPVKPLAQIAGNRYASGPVGKALSDACMGTIASFLSKYQDIIIEHQKVVKGNQKRLESLRELAGKENLEYPSVTLPPQPHTKEGVDAYNEVIARVRMWVNLNLWQKLKLSRDDAKPLLRLKGFPSFPLVERQANEVDWWDMVCNVKKLINEKKEDGKVFWQNLAGYKRQEALRPYLSSEEDRKKGKKFARYQLGDLLLHLEKKHGERDWGKVYDEAWERIDKKVEGLSKHIKLEEERRSEDAQSKAALTDWLRAKASFVIEGLKEADKDEFCRCELKLQKWYGDLRGKPFAIEAENSILDISGFSKQYNCAFIWQKDGVKKLNLYLIINYFKGGKLRFKKIKPEAFEANRFYTVINKKSGEIVPMEVNFNFDDPNLIILPLAFGKRFGREFIWNDLLSLETGSLKLANGRVIEKTLYNRRTRQDEPALFVALTFERREVLDSSNIKPMNLIGVDRGENIPAVIALTDPEGCPLSRFKDSLGNPTHILRIGESYKEKQRTIQAKKEVEQRRAGGYSRKYASKAKNLADDMVRNTARDLLYYAVTQDAMLIFENLSRGFGRQGKRTFMAERQYTRMEDWLTAKLAYEGLPSKTYLSKTLAQYTSKTCSNCGFTITSADYDRVLEKLKKTATGWMTTINGKELKVEGQITYYNRYKRQNVVKDLSVELDRLSEESVNNDISSWTKGRSGEALSLLKKRFSHRPVQEKFVCLNCGFETHADEQAALNIARSWLFLRSQEYKKYQTNKTTGNTDKRAFVETWQSFYRKKLKEVWKPAV

SEQ ID NO: 44959 - protein, 978 aa, synthetic construct
  REGION 1..978: note = engineered CasX variant
QEIKRINKIRRRLVKDSNTKKAGKTGPMKTLLVRVMTPDLRERLENLRKKPENIPQPISNTSRANLNKLLTDYTEMKKAILHVYWEEFQKDPVGLMSRVAQPASKKIDQNKLKPEMDEKGNLTTAGFACSQCGQPLFVYKLEQVSEKGKAYTNYFGRCNVAEHEKLILLAQLKPEKDSDEAVTYSLGKFGQRALDFYSIHVTKESTHPVKPLAQIAGNRYASPVGKALSDACMGTIASFLSKYQDIIIEHQKVVKGNQKRLESLRELAGKENLEYPSVTLPPQPHTKEGVDAYNEVIARVRMWVNLNLWQKLKLSRDDAKPLLRLKGFPSFPLVERQANEVDWWDMVCNVKKLINEKKEDGKVFWQNLAGYKRQEALRPYLSSEEDRKKGKKFARYQLGDLLLHLEKKHGERDWGKVYDEAWERIDKKVEGLSKHIKLEEERRSEDAQSKAALTDWLRAKASFVIEGLKEADKDEFCRCELKLQKWYGDLRGKPFAIEAENSILDISGFSKQYNCAFIWQKDGVKKLNLYLIINYFKGGKLRFKKIKPEAFEANRFYTVINKKSGEIVPMEVNFNFDDPNLIILPLAFGKRFGREFIWNDLLSLETGSLKLANGRVIEKTLYNRRTRQDEPALFVALTFERREVLDSSNIKPMNLIGVDRGENIPAVIALTDPEGCPLSRFKDSLGNPTHILRIGESYKEKQRTIQAKKEVEQRRAGGYSRKYASKAKNLADDMVRNTARDLLYYAVTQDAMLIFENLSRGFGRQGKRTFMAERQYTRMEDWLTAKLAYEGLPSKTYLSKTLAQYTSKTCSNCGFTITSADYDRVLEKLKKTATGWMTTINGKELKVEGQITYYNRYKRQNVVKDLSVELDRLSEESVNNDISSWTKGRSGEALSLLKKRFSHRPVQEKFVCLNCGFETHADEQAALNIARSWLFLRSQEYKKYQTNKTTGNTDKRAFVETWQSFYRKKLKEVWKPAV

SEQ ID NO: 44960 - protein, 979 aa, synthetic construct
  REGION 1..979: note = engineered CasX variant
QEIKRINKIRRRLVKDSNTKKAGKTGPMKTLLVRVMTPDLRERLENLRKKPENIPQPISNTSRANLNKLLTDYTEMKKAILHVYWEEFQKDPVGLMSRVAQPASKKIDQNKLKPEMDEKGNLTTAGFACSQCGQPLFVYKLEQVSEKGKAYTNYFGRCNVAEHEKLILLAQLKPEKDSDEAVTYSLGKFGQRALDFYSIHVTKESTHPVKPLAQIAGNRYASYPVGKALSDACMGTIASFLSKYQDIIIEHQKVVKGNQKRLESLRELAGKENLEYPSVTLPPQPHTKEGVDAYNEVIARVRMWVNLNLWQKLKLSRDDAKPLLRLKGFPSFPLVERQANEVDWWDMVCNVKKLINEKKEDGKVFWQNLAGYKRQEALRPYLSSEEDRKKGKKFARYQLGDLLLHLEKKHGEYDWGKVYDEAWERIDKKVEGLSKHIKLEEERRSEDAQSKAALTDWLRAKASFVIEGLKEADKDEFCRCELKLQKWYGDLRGKPFAIEAENSILDISGFSKQYNCAFIWQKDGVKKLNLYLIINYFKGGKLRFKKIKPEAFEANRFYTVINKKSGEIVPMEVNFNFDDPNLIILPLAFGKRFGREFIWNDLLSLETGSLKLANGRVIEKTLYNRRTRQDEPALFVALTFERREVLDSSNIKPMNLIGVDRGENIPAVIALTDPEGCPLSRFKDSLGNPTHILRIGESYKEKQRTIQAKKEVEQRRAGGYSRKYASKAKNLADDMVRNTARDLLYYAVTQDAMLIFENLSRGFGRQGKRTFMAERQYTRMEDWLTAKLAYEGLPSKTYLSKTLAQYTSKTCSNCGFTITSADYDRVLEKLKKTATGWMTTINGKELKVEGQITYYNRYKRQNVVKDLSVELDRLSEESVNNDISSWTKGRSGEALSLLKKRFSHRPVQEKFVCLNCGFETHADEQAALNIARSWLFLRSQEYKKYQTNKTTGNTDKRAFVETWQSFYRKKLKEVWKPAV

SEQ ID NO: 44961 - protein, 979 aa, synthetic construct
  REGION 1..979: note = engineered CasX variant
QEIKRINKIRRRLVKDSNTKKAGKTGPMKTLLVRVMTPDLRERLENLRKKPENIPQPISNTSRANLNKLLTDYTEMKKAILHVYWEEFQKDPVGLMSRVAQPASKKIDQNKLKPEMDEKGNLTTAGFACSQCGQPLFVYKLEQVSEKGKAYTNYFGRCNVAEHEKLILLAQLKPEKDSDEAVTYSLGKFGQRALDFYSIHVTKESTHPVKPLAQIAGNRYASHPVGKALSDACMGTIASFLSKYQDIIIEHQKVVKGNQKRLESLRELAGKENLEYPSVTLPPQPHTKEGVDAYNEVIARVRMWVNLNLWQKLKLSRDDAKPLLRLKGFPSFPLVERQANEVDWWDMVCNVKKLINEKKEDGKVFWQNLAGYKRQEALRPYLSSEEDRKKGKKFARYQLGDLLLHLEKKHGEYDWGKVYDEAWERIDKKVEGLSKHIKLEEERRSEDAQSKAALTDWLRAKASFVIEGLKEADKDEFCRCELKLQKWYGDLRGKPFAIEAENSILDISGFSKQYNCAFIWQKDGVKKLNLYLIINYFKGGKLRFKKIKPEAFEANRFYTVINKKSGEIVPMEVNFNFDDPNLIILPLAFGKRFGREFIWNDLLSLETGSLKLANGRVIEKTLYNRRTRQDEPALFVALTFERREVLDSSNIKPMNLIGVDRGENIPAVIALTDPEGCPLSRFKDSLGNPTHILRIGESYKEKQRTIQAKKEVEQRRAGGYSRKYASKAKNLADDMVRNTARDLLYYAVTQDAMLIFENLSRGFGRQGKRTFMAERQYTRMEDWLTAKLAYEGLPSKTYLSKTLAQYTSKTCSNCGFTITSADYDRVLEKLKKTATGWMTTINGKELKVEGQITYYNRYKRQNVVKDLSVELDRLSEESVNNDISSWTKGRSGEALSLLKKRFSHRPVQEKFVCLNCGFETHADEQAALNIARSWLFLRSQEYKKYQTNKTTGNTDKRAFVETWQSFYRKKLKEVWKPAV

SEQ ID NO: 44962 - protein, 979 aa, synthetic construct
  REGION 1..979: note = engineered CasX variant
QEIKRINKIRRRLVKDSNTKKAGKTGPMKTLLVRVMTPDLRERLENLRKKPENIPQPISNTSRANLNKLLTDYTEMKKAILHVYWEEFQKDPVGLMSRVAQPASKKIDQNKLKPEMDEKGNLTTAGFACSQCGQPLFVYKLEQVSEKGKAYTNYFGRCNVAEHEKLILLAQLKPEKDSDEAVTYSLGKFGQRALDFYSIHVTKESTHPVKPLAQIAGNRYASSPVGKALSDACMGTIASFLSKYQDIIIEHQKVVKGNQKRLESLRELAGKENLEYPSVTLPPQPHTKEGVDAYNEVIARVRMWVNLNLWQKLKLSRDDAKPLLRLKGFPSFPLVERQANEVDWWDMVCNVKKLINEKKEDGKVFWQNLAGYKRQEALRPYLSSEEDRKKGKKFARYQLGDLLLHLEKKHGEYDWGKVYDEAWERIDKKVEGLSKHIKLEEERRSEDAQSKAALTDWLRAKASFVIEGLKEADKDEFCRCELKLQKWYGDLRGKPFAIEAENSILDISGFSKQYNCAFIWQKDGVKKLNLYLIINYFKGGKLRFKKIKPEAFEANRFYTVINKKSGEIVPMEVNFNFDDPNLIILPLAFGKRFGREFIWNDLLSLETGSLKLANGRVIEKTLYNRRTRQDEPALFVALTFERREVLDSSNIKPMNLIGVDRGENIPAVIALTDPEGCPLSRFKDSLGNPTHILRIGESYKEKQRTIQAKKEVEQRRAGGYSRKYASKAKNLADDMVRNTARDLLYYAVTQDAMLIFENLSRGFGRQGKRTFMAERQYTRMEDWLTAKLAYEGLPSKTYLSKTLAQYTSKTCSNCGFTITSADYDRVLEKLKKTATGWMTTINGKELKVEGQITYYNRYKRQNVVKDLSVELDRLSEESVNNDISSWTKGRSGEALSLLKKRFSHRPVQEKFVCLNCGFETHADEQAALNIARSWLFLRSQEYKKYQTNKTTGNTDKRAFVETWQSFYRKKLKEVWKPAV

SEQ ID NO: 44963 - protein, 979 aa, synthetic construct
  REGION 1..979: note = engineered CasX variant
QEIKRINKIRRRLVKDSNTKKAGKTGPMKTLLVRVMTPDLRERLENLRKKPENIPQPISNTSRANLNKLLTDYTEMKKAILHVYWEEFQKDPVGLMSRVAQPASKKIDQNKLKPEMDEKGNLTTAGFACSQCGQPLFVYKLEQVSEKGKAYTNYFGRCNVAEHEKLILLAQLKPEKDSDEAVTYSLGKFGQRALDFYSIHVTKESTHPVKPLAQIAGNRYASTPVGKALSDACMGTIASFLSKYQDIIIEHQKVVKGNQKRLESLRELAGKENLEYPSVTLPPQPHTKEGVDAYNEVIARVRMWVNLNLWQKLKLSRDDAKPLLRLKGFPSFPLVERQANEVDWWDMVCNVKKLINEKKEDGKVFWQNLAGYKRQEALRPYLSSEEDRKKGKKFARYQLGDLLLHLEKKHGEYDWGKVYDEAWERIDKKVEGLSKHIKLEEERRSEDAQSKAALTDWLRAKASFVIEGLKEADKDEFCRCELKLQKWYGDLRGKPFAIEAENSILDISGFSKQYNCAFIWQKDGVKKLNLYLIINYFKGGKLRFKKIKPEAFEANRFYTVINKKSGEIVPMEVNFNFDDPNLIILPLAFGKRFGREFIWNDLLSLETGSLKLANGRVIEKTLYNRRTRQDEPALFVALTFERREVLDSSNIKPMNLIGVDRGENIPAVIALTDPEGCPLSRFKDSLGNPTHILRIGESYKEKQRTIQAKKEVEQRRAGGYSRKYASKAKNLADDMVRNTARDLLYYAVTQDAMLIFENLSRGFGRQGKRTFMAERQYTRMEDWLTAKLAYEGLPSKTYLSKTLAQYTSKTCSNCGFTITSADYDRVLEKLKKTATGWMTTINGKELKVEGQITYYNRYKRQNVVKDLSVELDRLSEESVNNDISSWTKGRSGEALSLLKKRFSHRPVQEKFVCLNCGFETHADEQAALNIARSWLFLRSQEYKKYQTNKTTGNTDKRAFVETWQSFYRKKLKEVWKPAV

SEQ ID NO: 44964 - protein, 979 aa, synthetic construct
  REGION 1..979: note = engineered CasX variant
QEIKRINKIRRRLVKDSNTKKAGKTGPMKTLLVRVMTPDLRERLENLRKKPENIPQPISNTSRANLNKLLTDYTEMKKAILHVYWEEFQKDPVGLMSRVAQPASKKIDQNKLKPEMDEKGNLTTAGFACSQCGQPLFVYKLEQVSEKGKAYTNYFGRCNVAEHEKLILLAQLKPEKDSDEAVTYSLGKFGQRALDFYSIHVTKESTHPVKPLAQIAGNRYASAPVGKALSDACMGTIASFLSKYQDIIIEHQKVVKGNQKRLESLRELAGKENLEYPSVTLPPQPHTKEGVDAYNEVIARVRMWVNLNLWQKLKLSRDDAKPLLRLKGFPSFPLVERQANEVDWWDMVCNVKKLINEKKEDGKVFWQNLAGYKRQEALRPYLSSEEDRKKGKKFARYQLGDLLLHLEKKHGEYDWGKVYDEAWERIDKKVEGLSKHIKLEEERRSEDAQSKAALTDWLRAKASFVIEGLKEADKDEFCRCELKLQKWYGDLRGKPFAIEAENSILDISGFSKQYNCAFIWQKDGVKKLNLYLIINYFKGGKLRFKKIKPEAFEANRFYTVINKKSGEIVPMEVNFNFDDPNLIILPLAFGKRFGREFIWNDLLSLETGSLKLANGRVIEKTLYNRRTRQDEPALFVALTFERREVLDSSNIKPMNLIGVDRGENIPAVIALTDPEGCPLSRFKDSLGNPTHILRIGESYKEKQRTIQAKKEVEQRRAGGYSRKYASKAKNLADDMVRNTARDLLYYAVTQDAMLIFENLSRGFGRQGKRTFMAERQYTRMEDWLTAKLAYEGLPSKTYLSKTLAQYTSKTCSNCGFTITSADYDRVLEKLKKTATGWMTTINGKELKVEGQITYYNRYKRQNVVKDLSVELDRLSEESVNNDISSWTKGRSGEALSLLKKRFSHRPVQEKFVCLNCGFETHADEQAALNIARSWLFLRSQEYKKYQTNKTTGNTDKRAFVETWQSFYRKKLKEVWKPAV

SEQ ID NO: 44965 - protein, 979 aa, synthetic construct
  REGION 1..979: note = engineered CasX variant
QEIKRINKIRRRLVKDSNTKKAGKTGPMKTLLVRVMTPDLRERLENLRKKPENIPQPISNTSRANLNKLLTDYTEMKKAILHVYWEEFQKDPVGLMSRVAQPASKKIDQNKLKPEMDEKGNLTTAGFACSQCGQPLFVYKLEQVSEKGKAYTNYFGRCNVAEHEKLILLAQLKPEKDSDEAVTYSLGKFGQRALDFYSIHVTKESTHPVKPLAQIAGNRYASVPVGKALSDACMGTIASFLSKYQDIIIEHQKVVKGNQKRLESLRELAGKENLEYPSVTLPPQPHTKEGVDAYNEVIARVRMWVNLNLWQKLKLSRDDAKPLLRLKGFPSFPLVERQANEVDWWDMVCNVKKLINEKKEDGKVFWQNLAGYKRQEALRPYLSSEEDRKKGKKFARYQLGDLLLHLEKKHGEYDWGKVYDEAWERIDKKVEGLSKHIKLEEERRSEDAQSKAALTDWLRAKASFVIEGLKEADKDEFCRCELKLQKWYGDLRGKPFAIEAENSILDISGFSKQYNCAFIWQKDGVKKLNLYLIINYFKGGKLRFKKIKPEAFEANRFYTVINKKSGEIVPMEVNFNFDDPNLIILPLAFGKRFGREFIWNDLLSLETGSLKLANGRVIEKTLYNRRTRQDEPALFVALTFERREVLDSSNIKPMNLIGVDRGENIPAVIALTDPEGCPLSRFKDSLGNPTHILRIGESYKEKQRTIQAKKEVEQRRAGGYSRKYASKAKNLADDMVRNTARDLLYYAVTQDAMLIFENLSRGFGRQGKRTFMAERQYTRMEDWLTAKLAYEGLPSKTYLSKTLAQYTSKTCSNCGFTITSADYDRVLEKLKKTATGWMTTINGKELKVEGQITYYNRYKRQNVVKDLSVELDRLSEESVNNDISSWTKGRSGEALSLLKKRFSHRPVQEKFVCLNCGFETHADEQAALNIARSWLFLRSQEYKKYQTNKTTGNTDKRAFVETWQSFYRKKLKEVWKPAV

SEQ ID NO: 44966 - protein, 979 aa, synthetic construct
  REGION 1..979: note = engineered CasX variant
QEIKRINKIRRRLVKDSNTKKAGKTGPMKTLLVRVMTPDLRERLENLRKKPENIPQPISNTSRANLNKLLTDYTEMKKAILHVYWEEFQKDPVGLMSRVAQPASKKIDQNKLKPEMDEKGNLTTAGFACSQCGQPLFVYKLEQVSEKGKAYTNYFGRCNVAEHEKLIKLAQLKPEKDSDEAVTYSLGKFGQRALDFYSIHVTKESTHPVKPLAQIAGNRYASGPVGKALSDACMGTIASFLSKYQDIIIEHQKVVKGNQKRLESLRELAGKENLEYPSVTLPPQPHTKEGVDAYNEVIARVRMWVNLNLWQKLKLSRDDAKPLLRLKGFPSFPLVERQANEVDWWDMVCNVKKLINEKKEDGKVFWQNLAGYKRQEALRPYLSSEEDRKKGKKFARYQLGDLLLHLEKKHGEYDWGKVYDEAWERIDKKVEGLSKHIKLEEERRSEDAQSKAALTDWLRAKASFVIEGLKEADKDEFCRCELKLQKWYGDLRGKPFAIEAENSILDISGFSKQYNCAFIWQKDGVKKLNLYLIINYFKGGKLRFKKIKPEAFEANRFYTVINKKSGEIVPMEVNFNFDDPNLIILPLAFGKRFGREFIWNDLLSLETGSLKLANGRVIEKTLYNRRTRQDEPALFVALTFERREVLDSSNIKPMNLIGVDRGENIPAVIALTDPEGCPLSRFKDSLGNPTHILRIGESYKEKQRTIQAKKEVEQRRAGGYSRKYASKAKNLADDMVRNTARDLLYYAVTQDAMLIFENLSRGFGRQGKRTFMAERQYTRMEDWLTAKLAYEGLPSKTYLSKTLAQYTSKTCSNCGFTITSADYDRVLEKLKKTATGWMTTINGKELKVEGQITYYNRYKRQNVVKDLSVELDRLSEESVNNDISSWTKGRSGEALSLLKKRFSHRPVQEKFVCLNCGFETHADEQAALNIARSWLFLRSQEYKKYQTNKTTGNTDKRAFVETWQSFYRKKLKEVWKPAV

SEQ ID NO: 44967 - protein, 978 aa, synthetic construct
  REGION 1..978: note = engineered CasX variant
QEIKRINKIRRRLVKDSNTKKAGKTGPMKTLLVRVMTPDLRERLENLRKKPENIPQPISNTSRANLNKLLTDYTEMKKAILHVYWEEFQKDPVGLMSRVAQPASKKIDQNKLKPEMDEKGNLTTAGFACSQCGQPLFVYKLEQVSEKGKAYTNYFGRCNVAEHEKLILLAQLKPEKDSDEAVTYSLGKFGQRALDFYSIHVTKESTHPVKPLAQIAGNRYASPVGKALSDACMGTIASFLSKYQDIIIEHQKVVKGNQKRLESLRELAGKENLEYPSVTLPPQPHTKEGVDAYNEVIARVRMWVNLNLWQKLKLSRDDAKPLLRLKGFPSFPLVERQANEVDWWDMVCNVKKLINEKKEDGKVFWQNLAGYKRQEALRPYLSSEEDRKKGKKFARYQLGDLLLHLEKKHGEYDWGKVYDEAWERIDKKVEGLSKHIKLEEERRSEDAQSKAALTDWLRAKASFVIEGLKEADKDEFCRCELKLQKWYGDLRGKPFAIEAENSILDISGFSKQYNCAFIWQKDGVKKLNLYLIINYFKGGKLRFKKIKPEAFEANRFYTVINKKSGEIVPMEVNFNFDDPNLIILPLAFGKRFGREFIWNDLLSLETGSLKLANGRVIEKTLYNRRTRQDEPALFVALTFERREVLDSSNIKPMNLIGVDRGENIPAVIALTDPEGCPLSRFKDSLGNPTHILRIGESYKEKQRTIQAKKEVEQRRAGGYSRKYASKAKNLADDMVRNTARDLLYYAVTQDAMLIFENLSRGFGRQGKRTFMAERQYTRMEDWLTAKLAYEGLPSKTYLSKTLAQYTSKTCSNCGFTITSADYDRVLEKLKKTATGWMTTINGKELKVEGQITYYNRYKRQNVVKDLSVELDRLSEESVNNDISSWTKGRSGEALSLLKKRFSHRPVQEKFVCLNCGFETHADEQAALNIARSWLFLRSQEYKKYQTNKTTGNTDKRAFVETWQSFYRKKLKEVWKPAV

SEQ ID NO: 44968 - protein, 978 aa, synthetic construct
  REGION 1..978: note = engineered CasX variant
QEIKRINKIRRRLVKDSNTKKAGKTGPMKTLLVRVMTPDLRERLENLRKKPENIPQPISNTSRANLNKLLTDYTEMKKAILHVYWEEFQKDPVGLMSRVAQPASKKIDQNKLKPEMDEKGNLTTAGFACSQCGQPLFVYKLEQVSEKGKAYTNYFGRCNVAEHEKLILLAQLKPEKDSDEAVTYSLGKFGQRALDFYSIHVTKESTHPVKPLAQIAGNRYASYPVGKALSDACMGTIASFLSKYQDIIIEHQKVVKGNQKRLESLRELAGKENLEYPSVTLPPQPHTKEGVDAYNEVIARVRMWVNLNLWQKLKLSRDDAKPLLRLKGFPSFPLVERQANEVDWWDMVCNVKKLINEKKEDGKVFWQNLAGYKRQEALRPYLSSEEDRKKGKKFARYQLGDLLLHLEKKHGEDWGDVYDEAWERIDKKVEGLSKHIKLEEERRSEDAQSKAALTDWLRAKASFVIEGLKEADKDEFCRCELKLQKWYGDLRGKPFAIEAENSILDISGFSKQYNCAFIWQKDGVKKLNLYLIINYFKGGKLRFKKIKPEAFEANRFYTVINKKSGEIVPMEVNFNFDDPNLIILPLAFGKRFGREFIWNDLLSLETGSLKLANGRVIEKTLYNRRTRQDEPALFVALTFERREVLDSSNIKPMNLIGVDRGENIPAVIALTDPEGCPLSRFKDSLGNPTHILRIGESYKEKQRTIQAKKEVEQRRAGGYSRKYASKAKNLADDMVRNTARDLLYYAVTQDAMLIFENLSRGFGRQGKRTFMAERQYTRMEDWLTAKLAYEGLPSKTYLSKTLAQYTSKTCSNCGFTITSADYDRVLEKLKKTATGWMTTINGKELKVEGQITYYNRYKRQNVVKDLSVELDRLSEESVNNDISSWTKGRSGEALSLLKKRFSHRPVQEKFVCLNCGFETHADEQAALNIARSWLFLRSQEYKKYQTNKTTGNTDKRAFVETWQSFYRKKLKEVWKPAV

SEQ ID NO: 44969 - protein, 978 aa, synthetic construct
  REGION 1..978: note = engineered CasX variant
QEIKRINKIRRRLVKDSNTKKAGKTGPMKTLLVRVMTPDLRERLENLRKKPENIPQPISNTSRANLNKLLTDYTEMKKAILHVYWEEFQKDPVGLMSRVAQPASKKIDQNKLKPEMDEKGNLTTAGFACSQCGQPLFVYKLEQVSEKGKAYTNYFGRCNVAEHEKLILLAQLKPEKDSDEAVTYSLGKFGQRALDFYSIHVTKESTHPVKPLAQIAGNRYASHPVGKALSDACMGTIASFLSKYQDIIIEHQKVVKGNQKRLESLRELAGKENLEYPSVTLPPQPHTKEGVDAYNEVIARVRMWVNLNLWQKLKLSRDDAKPLLRLKGFPSFPLVERQANEVDWWDMVCNVKKLINEKKEDGKVFWQNLAGYKRQEALRPYLSSEEDRKKGKKFARYQLGDLLLHLEKKHGEDWGDVYDEAWERIDKKVEGLSKHIKLEEERRSEDAQSKAALTDWLRAKASFVIEGLKEADKDEFCRCELKLQKWYGDLRGKPFAIEAENSILDISGFSKQYNCAFIWQKDGVKKLNLYLIINYFKGGKLRFKKIKPEAFEANRFYTVINKKSGEIVPMEVNFNFDDPNLIILPLAFGKRFGREFIWNDLLSLETGSLKLANGRVIEKTLYNRRTRQDEPALFVALTFERREVLDSSNIKPMNLIGVDRGENIPAVIALTDPEGCPLSRFKDSLGNPTHILRIGESYKEKQRTIQAKKEVEQRRAGGYSRKYASKAKNLADDMVRNTARDLLYYAVTQDAMLIFENLSRGFGRQGKRTFMAERQYTRMEDWLTAKLAYEGLPSKTYLSKTLAQYTSKTCSNCGFTITSADYDRVLEKLKKTATGWMTTINGKELKVEGQITYYNRYKRQNVVKDLSVELDRLSEESVNNDISSWTKGRSGEALSLLKKRFSHRPVQEKFVCLNCGFETHADEQAALNIARSWLFLRSQEYKKYQTNKTTGNTDKRAFVETWQSFYRKKLKEVWKPAV

SEQ ID NO: 44970 - protein, 978 aa, synthetic construct
  REGION 1..978: note = engineered CasX variant
QEIKRINKIRRRLVKDSNTKKAGKTGPMKTLLVRVMTPDLRERLENLRKKPENIPQPISNTSRANLNKLLTDYTEMKKAILHVYWEEFQKDPVGLMSRVAQPASKKIDQNKLKPEMDEKGNLTTAGFACSQCGQPLFVYKLEQVSEKGKAYTNYFGRCNVAEHEKLILLAQLKPEKDSDEAVTYSLGKFGQRALDFYSIHVTKESTHPVKPLAQIAGNRYASSPVGKALSDACMGTIASFLSKYQDIIIEHQKVVKGNQKRLESLRELAGKENLEYPSVTLPPQPHTKEGVDAYNEVIARVRMWVNLNLWQKLKLSRDDAKPLLRLKGFPSFPLVERQANEVDWWDMVCNVKKLINEKKEDGKVFWQNLAGYKRQEALRPYLSSEEDRKKGKKFARYQLGDLLLHLEKKHGEDWGDVYDEAWERIDKKVEGLSKHIKLEEERRSEDAQSKAALTDWLRAKASFVIEGLKEADKDEFCRCELKLQKWYGDLRGKPFAIEAENSILDISGFSKQYNCAFIWQKDGVKKLNLYLIINYFKGGKLRFKKIKPEAFEANRFYTVINKKSGEIVPMEVNFNFDDPNLIILPLAFGKRFGREFIWNDLLSLETGSLKLANGRVIEKTLYNRRTRQDEPALFVALTFERREVLDSSNIKPMNLIGVDRGENIPAVIALTDPEGCPLSRFKDSLGNPTHILRIGESYKEKQRTIQAKKEVEQRRAGGYSRKYASKAKNLADDMVRNTARDLLYYAVTQDAMLIFENLSRGFGRQGKRTFMAERQYTRMEDWLTAKLAYEGLPSKTYLSKTLAQYTSKTCSNCGFTITSADYDRVLEKLKKTATGWMTTINGKELKVEGQITYYNRYKRQNVVKDLSVELDRLSEESVNNDISSWTKGRSGEALSLLKKRFSHRPVQEKFVCLNCGFETHADEQAALNIARSWLFLRSQEYKKYQTNKTTGNTDKRAFVETWQSFYRKKLKEVWKPAV

SEQ ID NO: 44971 - protein, 978 aa, synthetic construct
  REGION 1..978: note = engineered CasX variant
QEIKRINKIRRRLVKDSNTKKAGKTGPMKTLLVRVMTPDLRERLENLRKKPENIPQPISNTSRANLNKLLTDYTEMKKAILHVYWEEFQKDPVGLMSRVAQPASKKIDQNKLKPEMDEKGNLTTAGFACSQCGQPLFVYKLEQVSEKGKAYTNYFGRCNVAEHEKLILLAQLKPEKDSDEAVTYSLGKFGQRALDFYSIHVTKESTHPVKPLAQIAGNRYASTPVGKALSDACMGTIASFLSKYQDIIIEHQKVVKGNQKRLESLRELAGKENLEYPSVTLPPQPHTKEGVDAYNEVIARVRMWVNLNLWQKLKLSRDDAKPLLRLKGFPSFPLVERQANEVDWWDMVCNVKKLINEKKEDGKVFWQNLAGYKRQEALRPYLSSEEDRKKGKKFARYQLGDLLLHLEKKHGEDWGDVYDEAWERIDKKVEGLSKHIKLEEERRSEDAQSKAALTDWLRAKASFVIEGLKEADKDEFCRCELKLQKWYGDLRGKPFAIEAENSILDISGFSKQYNCAFIWQKDGVKKLNLYLIINYFKGGKLRFKKIKPEAFEANRFYTVINKKSGEIVPMEVNFNFDDPNLIILPLAFGKRFGREFIWNDLLSLETGSLKLANGRVIEKTLYNRRTRQDEPALFVALTFERREVLDSSNIKPMNLIGVDRGENIPAVIALTDPEGCPLSRFKDSLGNPTHILRIGESYKEKQRTIQAKKEVEQRRAGGYSRKYASKAKNLADDMVRNTARDLLYYAVTQDAMLIFENLSRGFGRQGKRTFMAERQYTRMEDWLTAKLAYEGLPSKTYLSKTLAQYTSKTCSNCGFTITSADYDRVLEKLKKTATGWMTTINGKELKVEGQITYYNRYKRQNVVKDLSVELDRLSEESVNNDISSWTKGRSGEALSLLKKRFSHRPVQEKFVCLNCGFETHADEQAALNIARSWLFLRSQEYKKYQTNKTTGNTDKRAFVETWQSFYRKKLKEVWKPAV

SEQ ID NO: 44972 - protein, 978 aa, synthetic construct
  REGION 1..978: note = engineered CasX variant
QEIKRINKIRRRLVKDSNTKKAGKTGPMKTLLVRVMTPDLRERLENLRKKPENIPQPISNTSRANLNKLLTDYTEMKKAILHVYWEEFQKDPVGLMSRVAQPASKKIDQNKLKPEMDEKGNLTTAGFACSQCGQPLFVYKLEQVSEKGKAYTNYFGRCNVAEHEKLILLAQLKPEKDSDEAVTYSLGKFGQRALDFYSIHVTKESTHPVKPLAQIAGNRYASAPVGKALSDACMGTIASFLSKYQDIIIEHQKVVKGNQKRLESLRELAGKENLEYPSVTLPPQPHTKEGVDAYNEVIARVRMWVNLNLWQKLKLSRDDAKPLLRLKGFPSFPLVERQANEVDWWDMVCNVKKLINEKKEDGKVFWQNLAGYKRQEALRPYLSSEEDRKKGKKFARYQLGDLLLHLEKKHGEDWGDVYDEAWERIDKKVEGLSKHIKLEEERRSEDAQSKAALTDWLRAKASFVIEGLKEADKDEFCRCELKLQKWYGDLRGKPFAIEAENSILDISGFSKQYNCAFIWQKDGVKKLNLYLIINYFKGGKLRFKKIKPEAFEANRFYTVINKKSGEIVPMEVNFNFDDPNLIILPLAFGKRFGREFIWNDLLSLETGSLKLANGRVIEKTLYNRRTRQDEPALFVALTFERREVLDSSNIKPMNLIGVDRGENIPAVIALTDPEGCPLSRFKDSLGNPTHILRIGESYKEKQRTIQAKKEVEQRRAGGYSRKYASKAKNLADDMVRNTARDLLYYAVTQDAMLIFENLSRGFGRQGKRTFMAERQYTRMEDWLTAKLAYEGLPSKTYLSKTLAQYTSKTCSNCGFTITSADYDRVLEKLKKTATGWMTTINGKELKVEGQITYYNRYKRQNVVKDLSVELDRLSEESVNNDISSWTKGRSGEALSLLKKRFSHRPVQEKFVCLNCGFETHADEQAALNIARSWLFLRSQEYKKYQTNKTTGNTDKRAFVETWQSFYRKKLKEVWKPAV

SEQ ID NO: 44973 - protein, 978 aa, synthetic construct
  REGION 1..978: note = engineered CasX variant
QEIKRINKIRRRLVKDSNTKKAGKTGPMKTLLVRVMTPDLRERLENLRKKPENIPQPISNTSRANLNKLLTDYTEMKKAILHVYWEEFQKDPVGLMSRVAQPASKKIDQNKLKPEMDEKGNLTTAGFACSQCGQPLFVYKLEQVSEKGKAYTNYFGRCNVAEHEKLILLAQLKPEKDSDEAVTYSLGKFGQRALDFYSIHVTKESTHPVKPLAQIAGNRYASVPVGKALSDACMGTIASFLSKYQDIIIEHQKVVKGNQKRLESLRELAGKENLEYPSVTLPPQPHTKEGVDAYNEVIARVRMWVNLNLWQKLKLSRDDAKPLLRLKGFPSFPLVERQANEVDWWDMVCNVKKLINEKKEDGKVFWQNLAGYKRQEALRPYLSSEEDRKKGKKFARYQLGDLLLHLEKKHGEDWGDVYDEAWERIDKKVEGLSKHIKLEEERRSEDAQSKAALTDWLRAKASFVIEGLKEADKDEFCRCELKLQKWYGDLRGKPFAIEAENSILDISGFSKQYNCAFIWQKDGVKKLNLYLIINYFKGGKLRFKKIKPEAFEANRFYTVINKKSGEIVPMEVNFNFDDPNLIILPLAFGKRFGREFIWNDLLSLETGSLKLANGRVIEKTLYNRRTRQDEPALFVALTFERREVLDSSNIKPMNLIGVDRGENIPAVIALTDPEGCPLSRFKDSLGNPTHILRIGESYKEKQRTIQAKKEVEQRRAGGYSRKYASKAKNLADDMVRNTARDLLYYAVTQDAMLIFENLSRGFGRQGKRTFMAERQYTRMEDWLTAKLAYEGLPSKTYLSKTLAQYTSKTCSNCGFTITSADYDRVLEKLKKTATGWMTTINGKELKVEGQITYYNRYKRQNVVKDLSVELDRLSEESVNNDISSWTKGRSGEALSLLKKRFSHRPVQEKFVCLNCGFETHADEQAALNIARSWLFLRSQEYKKYQTNKTTGNTDKRAFVETWQSFYRKKLKEVWKPAV

SEQ ID NO: 44974 - protein, 978 aa, synthetic construct
  REGION 1..978: note = engineered CasX variant
QEIKRINKIRRRLVKDSNTKKAGKTGPMKTLLVRVMTPDLRERLENLRKKPENIPQPISNTSRANLNKLLTDYTEMKKAILHVYWEEFQKDPVGLMSRVAQPASKKIDQNKLKPEMDEKGNLTTAGFACSQCGQPLFVYKLEQVSEKGKAYTNYFGRCNVAEHEKLIKLAQLKPEKDSDEAVTYSLGKFGQRALDFYSIHVTKESTHPVKPLAQIAGNRYASGPVGKALSDACMGTIASFLSKYQDIIIEHQKVVKGNQKRLESLRELAGKENLEYPSVTLPPQPHTKEGVDAYNEVIARVRMWVNLNLWQKLKLSRDDAKPLLRLKGFPSFPLVERQANEVDWWDMVCNVKKLINEKKEDGKVFWQNLAGYKRQEALRPYLSSEEDRKKGKKFARYQLGDLLLHLEKKHGEDWGDVYDEAWERIDKKVEGLSKHIKLEEERRSEDAQSKAALTDWLRAKASFVIEGLKEADKDEFCRCELKLQKWYGDLRGKPFAIEAENSILDISGFSKQYNCAFIWQKDGVKKLNLYLIINYFKGGKLRFKKIKPEAFEANRFYTVINKKSGEIVPMEVNFNFDDPNLIILPLAFGKRFGREFIWNDLLSLETGSLKLANGRVIEKTLYNRRTRQDEPALFVALTFERREVLDSSNIKPMNLIGVDRGENIPAVIALTDPEGCPLSRFKDSLGNPTHILRIGESYKEKQRTIQAKKEVEQRRAGGYSRKYASKAKNLADDMVRNTARDLLYYAVTQDAMLIFENLSRGFGRQGKRTFMAERQYTRMEDWLTAKLAYEGLPSKTYLSKTLAQYTSKTCSNCGFTITSADYDRVLEKLKKTATGWMTTINGKELKVEGQITYYNRYKRQNVVKDLSVELDRLSEESVNNDISSWTKGRSGEALSLLKKRFSHRPVQEKFVCLNCGFETHADEQAALNIARSWLFLRSQEYKKYQTNKTTGNTDKRAFVETWQSFYRKKLKEVWKPAV

SEQ ID NO: 44975 - protein, 977 aa, synthetic construct
  REGION 1..977: note = engineered CasX variant
QEIKRINKIRRRLVKDSNTKKAGKTGPMKTLLVRVMTPDLRERLENLRKKPENIPQPISNTSRANLNKLLTDYTEMKKAILHVYWEEFQKDPVGLMSRVAQPASKKIDQNKLKPEMDEKGNLTTAGFACSQCGQPLFVYKLEQVSEKGKAYTNYFGRCNVAEHEKLILLAQLKPEKDSDEAVTYSLGKFGQRALDFYSIHVTKESTHPVKPLAQIAGNRYASPVGKALSDACMGTIASFLSKYQDIIIEHQKVVKGNQKRLESLRELAGKENLEYPSVTLPPQPHTKEGVDAYNEVIARVRMWVNLNLWQKLKLSRDDAKPLLRLKGFPSFPLVERQANEVDWWDMVCNVKKLINEKKEDGKVFWQNLAGYKRQEALRPYLSSEEDRKKGKKFARYQLGDLLLHLEKKHGEDWGDVYDEAWERIDKKVEGLSKHIKLEEERRSEDAQSKAALTDWLRAKASFVIEGLKEADKDEFCRCELKLQKWYGDLRGKPFAIEAENSILDISGFSKQYNCAFIWQKDGVKKLNLYLIINYFKGGKLRFKKIKPEAFEANRFYTVINKKSGEIVPMEVNFNFDDPNLIILPLAFGKRFGREFIWNDLLSLETGSLKLANGRVIEKTLYNRRTRQDEPALFVALTFERREVLDSSNIKPMNLIGVDRGENIPAVIALTDPEGCPLSRFKDSLGNPTHILRIGESYKEKQRTIQAKKEVEQRRAGGYSRKYASKAKNLADDMVRNTARDLLYYAVTQDAMLIFENLSRGFGRQGKRTFMAERQYTRMEDWLTAKLAYEGLPSKTYLSKTLAQYTSKTCSNCGFTITSADYDRVLEKLKKTATGWMTTINGKELKVEGQITYYNRYKRQNVVKDLSVELDRLSEESVNNDISSWTKGRSGEALSLLKKRFSHRPVQEKFVCLNCGFETHADEQAALNIARSWLFLRSQEYKKYQTNKTTGNTDKRAFVETWQSFYRKKLKEVWKPAV

SEQ ID NO: 44976 - protein, 978 aa, synthetic construct
  REGION 1..978: note = engineered CasX variant
QEIKRINKIRRRLVKDSNTKKAGKTGPMKTLLVRVMTPDLRERLENLRKKPENIPQPISNTSRANLNKLLTDYTEMKKAILHVYWEEFQKDPVGLMSRVAQPASKKIDQNKLKPEMDEKGNLTTAGFACSQCGQPLFVYKLEQVSEKGKAYTNYFGRCNVAEHEKLILLAQLKPEKDSDEAVTYSLGKFGQRALDFYSIHVTKESTHPVKPLAQIAGNRYASYPVGKALSDACMGTIASFLSKYQDIIIEHQKVVKGNQKRLESLRELAGKENLEYPSVTLPPQPHTKEGVDAYNEVIARVRMWVNLNLWQKLKLSRDDAKPLLRLKGFPSFPLVERQANEVDWWDMVCNVKKLINEKKEDGKVFWQNLAGYKRQEALRPYLSSEEDRKKGKKFARYQLGDLLLHLEKKHGEDWGKVYGEAWERIDKKVEGLSKHIKLEEERRSEDAQSKAALTDWLRAKASFVIEGLKEADKDEFCRCELKLQKWYGDLRGKPFAIEAENSILDISGFSKQYNCAFIWQKDGVKKLNLYLIINYFKGGKLRFKKIKPEAFEANRFYTVINKKSGEIVPMEVNFNFDDPNLIILPLAFGKRFGREFIWNDLLSLETGSLKLANGRVIEKTLYNRRTRQDEPALFVALTFERREVLDSSNIKPMNLIGVDRGENIPAVIALTDPEGCPLSRFKDSLGNPTHILRIGESYKEKQRTIQAKKEVEQRRAGGYSRKYASKAKNLADDMVRNTARDLLYYAVTQDAMLIFENLSRGFGRQGKRTFMAERQYTRMEDWLTAKLAYEGLPSKTYLSKTLAQYTSKTCSNCGFTITSADYDRVLEKLKKTATGWMTTINGKELKVEGQITYYNRYKRQNVVKDLSVELDRLSEESVNNDISSWTKGRSGEALSLLKKRFSHRPVQEKFVCLNCGFETHADEQAALNIARSWLFLRSQEYKKYQTNKTTGNTDKRAFVETWQSFYRKKLKEVWKPAV

SEQ ID NO: 44977 - protein, 978 aa, synthetic construct
  REGION 1..978: note = engineered CasX variant
QEIKRINKIRRRLVKDSNTKKAGKTGPMKTLLVRVMTPDLRERLENLRKKPENIPQPISNTSRANLNKLLTDYTEMKKAILHVYWEEFQKDPVGLMSRVAQPASKKIDQNKLKPEMDEKGNLTTAGFACSQCGQPLFVYKLEQVSEKGKAYTNYFGRCNVAEHEKLILLAQLKPEKDSDEAVTYSLGKFGQRALDFYSIHVTKESTHPVKPLAQIAGNRYASHPVGKALSDACMGTIASFLSKYQDIIIEHQKVVKGNQKRLESLRELAGKENLEYPSVTLPPQPHTKEGVDAYNEVIARVRMWVNLNLWQKLKLSRDDAKPLLRLKGFPSFPLVERQANEVDWWDMVCNVKKLINEKKEDGKVFWQNLAGYKRQEALRPYLSSEEDRKKGKKFARYQLGDLLLHLEKKHGEDWGKVYGEAWERIDKKVEGLSKHIKLEEERRSEDAQSKAALTDWLRAKASFVIEGLKEADKDEFCRCELKLQKWYGDLRGKPFAIEAENSILDISGFSKQYNCAFIWQKDGVKKLNLYLIINYFKGGKLRFKKIKPEAFEANRFYTVINKKSGEIVPMEVNFNFDDPNLIILPLAFGKRFGREFIWNDLLSLETGSLKLANGRVIEKTLYNRRTRQDEPALFVALTFERREVLDSSNIKPMNLIGVDRGENIPAVIALTDPEGCPLSRFKDSLGNPTHILRIGESYKEKQRTIQAKKEVEQRRAGGYSRKYASKAKNLADDMVRNTARDLLYYAVTQDAMLIFENLSRGFGRQGKRTFMAERQYTRMEDWLTAKLAYEGLPSKTYLSKTLAQYTSKTCSNCGFTITSADYDRVLEKLKKTATGWMTTINGKELKVEGQITYYNRYKRQNVVKDLSVELDRLSEESVNNDISSWTKGRSGEALSLLKKRFSHRPVQEKFVCLNCGFETHADEQAALNIARSWLFLRSQEYKKYQTNKTTGNTDKRAFVETWQSFYRKKLKEVWKPAV

SEQ ID NO: 44978 - protein, 978 aa, synthetic construct
  REGION 1..978: note = engineered CasX variant
QEIKRINKIRRRLVKDSNTKKAGKTGPMKTLLVRVMTPDLRERLENLRKKPENIPQPISNTSRANLNKLLTDYTEMKKAILHVYWEEFQKDPVGLMSRVAQPASKKIDQNKLKPEMDEKGNLTTAGFACSQCGQPLFVYKLEQVSEKGKAYTNYFGRCNVAEHEKLILLAQLKPEKDSDEAVTYSLGKFGQRALDFYSIHVTKESTHPVKPLAQIAGNRYASSPVGKALSDACMGTIASFLSKYQDIIIEHQKVVKGNQKRLESLRELAGKENLEYPSVTLPPQPHTKEGVDAYNEVIARVRMWVNLNLWQKLKLSRDDAKPLLRLKGFPSFPLVERQANEVDWWDMVCNVKKLINEKKEDGKVFWQNLAGYKRQEALRPYLSSEEDRKKGKKFARYQLGDLLLHLEKKHGEDWGKVYGEAWERIDKKVEGLSKHIKLEEERRSEDAQSKAALTDWLRAKASFVIEGLKEADKDEFCRCELKLQKWYGDLRGKPFAIEAENSILDISGFSKQYNCAFIWQKDGVKKLNLYLIINYFKGGKLRFKKIKPEAFEANRFYTVINKKSGEIVPMEVNFNFDDPNLIILPLAFGKRFGREFIWNDLLSLETGSLKLANGRVIEKTLYNRRTRQDEPALFVALTFERREVLDSSNIKPMNLIGVDRGENIPAVIALTDPEGCPLSRFKDSLGNPTHILRIGESYKEKQRTIQAKKEVEQRRAGGYSRKYASKAKNLADDMVRNTARDLLYYAVTQDAMLIFENLSRGFGRQGKRTFMAERQYTRMEDWLTAKLAYEGLPSKTYLSKTLAQYTSKTCSNCGFTITSADYDRVLEKLKKTATGWMTTINGKELKVEGQITYYNRYKRQNVVKDLSVELDRLSEESVNNDISSWTKGRSGEALSLLKKRFSHRPVQEKFVCLNCGFETHADEQAALNIARSWLFLRSQEYKKYQTNKTTGNTDKRAFVETWQSFYRKKLKEVWKPAV

SEQ ID NO: 44979 - protein, 978 aa, synthetic construct
  REGION 1..978: note = engineered CasX variant
QEIKRINKIRRRLVKDSNTKKAGKTGPMKTLLVRVMTPDLRERLENLRKKPENIPQPISNTSRANLNKLLTDYTEMKKAILHVYWEEFQKDPVGLMSRVAQPASKKIDQNKLKPEMDEKGNLTTAGFACSQCGQPLFVYKLEQVSEKGKAYTNYFGRCNVAEHEKLILLAQLKPEKDSDEAVTYSLGKFGQRALDFYSIHVTKESTHPVKPLAQIAGNRYASTPVGKALSDACMGTIASFLSKYQDIIIEHQKVVKGNQKRLESLRELAGKENLEYPSVTLPPQPHTKEGVDAYNEVIARVRMWVNLNLWQKLKLSRDDAKPLLRLKGFPSFPLVERQANEVDWWDMVCNVKKLINEKKEDGKVFWQNLAGYKRQEALRPYLSSEEDRKKGKKFARYQLGDLLLHLEKKHGEDWGKVYGEAWERIDKKVEGLSKHIKLEEERRSEDAQSKAALTDWLRAKASFVIEGLKEADKDEFCRCELKLQKWYGDLRGKPFAIEAENSILDISGFSKQYNCAFIWQKDGVKKLNLYLIINYFKGGKLRFKKIKPEAFEANRFYTVINKKSGEIVPMEVNFNFDDPNLIILPLAFGKRFGREFIWNDLLSLETGSLKLANGRVIEKTLYNRRTRQDEPALFVALTFERREVLDSSNIKPMNLIGVDRGENIPAVIALTDPEGCPLSRFKDSLGNPTHILRIGESYKEKQRTIQAKKEVEQRRAGGYSRKYASKAKNLADDMVRNTARDLLYYAVTQDAMLIFENLSRGFGRQGKRTFMAERQYTRMEDWLTAKLAYEGLPSKTYLSKTLAQYTSKTCSNCGFTITSADYDRVLEKLKKTATGWMTTINGKELKVEGQITYYNRYKRQNVVKDLSVELDRLSEESVNNDISSWTKGRSGEALSLLKKRFSHRPVQEKFVCLNCGFETHADEQAALNIARSWLFLRSQEYKKYQTNKTTGNTDKRAFVETWQSFYRKKLKEVWKPAV

SEQ ID NO: 44980 - protein, 978 aa, synthetic construct
  REGION 1..978: note = engineered CasX variant
QEIKRINKIRRRLVKDSNTKKAGKTGPMKTLLVRVMTPDLRERLENLRKKPENIPQPISNTSRANLNKLLTDYTEMKKAILHVYWEEFQKDPVGLMSRVAQPASKKIDQNKLKPEMDEKGNLTTAGFACSQCGQPLFVYKLEQVSEKGKAYTNYFGRCNVAEHEKLILLAQLKPEKDSDEAVTYSLGKFGQRALDFYSIHVTKESTHPVKPLAQIAGNRYASAPVGKALSDACMGTIASFLSKYQDIIIEHQKVVKGNQKRLESLRELAGKENLEYPSVTLPPQPHTKEGVDAYNEVIARVRMWVNLNLWQKLKLSRDDAKPLLRLKGFPSFPLVERQANEVDWWDMVCNVKKLINEKKEDGKVFWQNLAGYKRQEALRPYLSSEEDRKKGKKFARYQLGDLLLHLEKKHGEDWGKVYGEAWERIDKKVEGLSKHIKLEEERRSEDAQSKAALTDWLRAKASFVIEGLKEADKDEFCRCELKLQKWYGDLRGKPFAIEAENSILDISGFSKQYNCAFIWQKDGVKKLNLYLIINYFKGGKLRFKKIKPEAFEANRFYTVINKKSGEIVPMEVNFNFDDPNLIILPLAFGKRFGREFIWNDLLSLETGSLKLANGRVIEKTLYNRRTRQDEPALFVALTFERREVLDSSNIKPMNLIGVDRGENIPAVIALTDPEGCPLSRFKDSLGNPTHILRIGESYKEKQRTIQAKKEVEQRRAGGYSRKYASKAKNLADDMVRNTARDLLYYAVTQDAMLIFENLSRGFGRQGKRTFMAERQYTRMEDWLTAKLAYEGLPSKTYLSKTLAQYTSKTCSNCGFTITSADYDRVLEKLKKTATGWMTTINGKELKVEGQITYYNRYKRQNVVKDLSVELDRLSEESVNNDISSWTKGRSGEALSLLKKRFSHRPVQEKFVCLNCGFETHADEQAALNIARSWLFLRSQEYKKYQTNKTTGNTDKRAFVETWQSFYRKKLKEVWKPAV

SEQ ID NO: 44981 - protein, 978 aa, synthetic construct
  REGION 1..978: note = engineered CasX variant
QEIKRINKIRRRLVKDSNTKKAGKTGPMKTLLVRVMTPDLRERLENLRKKPENIPQPISNTSRANLNKLLTDYTEMKKAILHVYWEEFQKDPVGLMSRVAQPASKKIDQNKLKPEMDEKGNLTTAGFACSQCGQPLFVYKLEQVSEKGKAYTNYFGRCNVAEHEKLILLAQLKPEKDSDEAVTYSLGKFGQRALDFYSIHVTKESTHPVKPLAQIAGNRYASVPVGKALSDACMGTIASFLSKYQDIIIEHQKVVKGNQKRLESLRELAGKENLEYPSVTLPPQPHTKEGVDAYNEVIARVRMWVNLNLWQKLKLSRDDAKPLLRLKGFPSFPLVERQANEVDWWDMVCNVKKLINEKKEDGKVFWQNLAGYKRQEALRPYLSSEEDRKKGKKFARYQLGDLLLHLEKKHGEDWGKVYGEAWERIDKKVEGLSKHIKLEEERRSEDAQSKAALTDWLRAKASFVIEGLKEADKDEFCRCELKLQKWYGDLRGKPFAIEAENSILDISGFSKQYNCAFIWQKDGVKKLNLYLIINYFKGGKLRFKKIKPEAFEANRFYTVINKKSGEIVPMEVNFNFDDPNLIILPLAFGKRFGREFIWNDLLSLETGSLKLANGRVIEKTLYNRRTRQDEPALFVALTFERREVLDSSNIKPMNLIGVDRGENIPAVIALTDPEGCPLSRFKDSLGNPTHILRIGESYKEKQRTIQAKKEVEQRRAGGYSRKYASKAKNLADDMVRNTARDLLYYAVTQDAMLIFENLSRGFGRQGKRTFMAERQYTRMEDWLTAKLAYEGLPSKTYLSKTLAQYTSKTCSNCGFTITSADYDRVLEKLKKTATGWMTTINGKELKVEGQITYYNRYKRQNVVKDLSVELDRLSEESVNNDISSWTKGRSGEALSLLKKRFSHRPVQEKFVCLNCGFETHADEQAALNIARSWLFLRSQEYKKYQTNKTTGNTDKRAFVETWQSFYRKKLKEVWKPAV

SEQ ID NO: 44982 - protein, 978 aa, synthetic construct
  REGION 1..978: note = engineered CasX variant
QEIKRINKIRRRLVKDSNTKKAGKTGPMKTLLVRVMTPDLRERLENLRKKPENIPQPISNTSRANLNKLLTDYTEMKKAILHVYWEEFQKDPVGLMSRVAQPASKKIDQNKLKPEMDEKGNLTTAGFACSQCGQPLFVYKLEQVSEKGKAYTNYFGRCNVAEHEKLIKLAQLKPEKDSDEAVTYSLGKFGQRALDFYSIHVTKESTHPVKPLAQIAGNRYASGPVGKALSDACMGTIASFLSKYQDIIIEHQKVVKGNQKRLESLRELAGKENLEYPSVTLPPQPHTKEGVDAYNEVIARVRMWVNLNLWQKLKLSRDDAKPLLRLKGFPSFPLVERQANEVDWWDMVCNVKKLINEKKEDGKVFWQNLAGYKRQEALRPYLSSEEDRKKGKKFARYQLGDLLLHLEKKHGEDWGKVYGEAWERIDKKVEGLSKHIKLEEERRSEDAQSKAALTDWLRAKASFVIEGLKEADKDEFCRCELKLQKWYGDLRGKPFAIEAENSILDISGFSKQYNCAFIWQKDGVKKLNLYLIINYFKGGKLRFKKIKPEAFEANRFYTVINKKSGEIVPMEVNFNFDDPNLIILPLAFGKRFGREFIWNDLLSLETGSLKLANGRVIEKTLYNRRTRQDEPALFVALTFERREVLDSSNIKPMNLIGVDRGENIPAVIALTDPEGCPLSRFKDSLGNPTHILRIGESYKEKQRTIQAKKEVEQRRAGGYSRKYASKAKNLADDMVRNTARDLLYYAVTQDAMLIFENLSRGFGRQGKRTFMAERQYTRMEDWLTAKLAYEGLPSKTYLSKTLAQYTSKTCSNCGFTITSADYDRVLEKLKKTATGWMTTINGKELKVEGQITYYNRYKRQNVVKDLSVELDRLSEESVNNDISSWTKGRSGEALSLLKKRFSHRPVQEKFVCLNCGFETHADEQAALNIARSWLFLRSQEYKKYQTNKTTGNTDKRAFVETWQSFYRKKLKEVWKPAV

SEQ ID NO: 44983 - protein, 977 aa, synthetic construct
  REGION 1..977: note = engineered CasX variant
QEIKRINKIRRRLVKDSNTKKAGKTGPMKTLLVRVMTPDLRERLENLRKKPENIPQPISNTSRANLNKLLTDYTEMKKAILHVYWEEFQKDPVGLMSRVAQPASKKIDQNKLKPEMDEKGNLTTAGFACSQCGQPLFVYKLEQVSEKGKAYTNYFGRCNVAEHEKLILLAQLKPEKDSDEAVTYSLGKFGQRALDFYSIHVTKESTHPVKPLAQIAGNRYASPVGKALSDACMGTIASFLSKYQDIIIEHQKVVKGNQKRLESLRELAGKENLEYPSVTLPPQPHTKEGVDAYNEVIARVRMWVNLNLWQKLKLSRDDAKPLLRLKGFPSFPLVERQANEVDWWDMVCNVKKLINEKKEDGKVFWQNLAGYKRQEALRPYLSSEEDRKKGKKFARYQLGDLLLHLEKKHGEDWGKVYGEAWERIDKKVEGLSKHIKLEEERRSEDAQSKAALTDWLRAKASFVIEGLKEADKDEFCRCELKLQKWYGDLRGKPFAIEAENSILDISGFSKQYNCAFIWQKDGVKKLNLYLIINYFKGGKLRFKKIKPEAFEANRFYTVINKKSGEIVPMEVNFNFDDPNLIILPLAFGKRFGREFIWNDLLSLETGSLKLANGRVIEKTLYNRRTRQDEPALFVALTFERREVLDSSNIKPMNLIGVDRGENIPAVIALTDPEGCPLSRFKDSLGNPTHILRIGESYKEKQRTIQAKKEVEQRRAGGYSRKYASKAKNLADDMVRNTARDLLYYAVTQDAMLIFENLSRGFGRQGKRTFMAERQYTRMEDWLTAKLAYEGLPSKTYLSKTLAQYTSKTCSNCGFTITSADYDRVLEKLKKTATGWMTTINGKELKVEGQITYYNRYKRQNVVKDLSVELDRLSEESVNNDISSWTKGRSGEALSLLKKRFSHRPVQEKFVCLNCGFETHADEQAALNIARSWLFLRSQEYKKYQTNKTTGNTDKRAFVETWQSFYRKKLKEVWKPAV

SEQ ID NO: 44984 - protein, 978 aa, synthetic construct
  REGION 1..978: note = engineered CasX variant
QEIKRINKIRRRLVKDSNTKKAGKTGPMKTLLVRVMTPDLRERLENLRKKPENIPQPISNTSRANLNKLLTDYTEMKKAILHVYWEEFQKDPVGLMSRVAQPASKKIDQNKLKPEMDEKGNLTTAGFACSQCGQPLFVYKLEQVSEKGKAYTNYFGRCNVAEHEKLILLAQLKPEKDSDEAVTYSLGKFGQRALDFYSIHVTKESTHPVKPLAQIAGNRYASYPVGKALSDACMGTIASFLSKYQDIIIEHQKVVKGNQKRLESLRELAGKENLEYPSVTLPPQPHTKEGVDAYNEVIARVRMWVNLNLWQKLKLSRDDAKPLLRLKGFPSFPLVERQANEVDWWDMVCNVKKLINEKKEDGKVFWQNLAGYKRQEALRPYLSSEEDRKKGKKFARYQLGDLLLHLEKKHGEDWGKVYDEAWERIDKKVEGLSKHIKLEEERRSEDAQSKAALTDWLRAKASFVIEGKKEADKDEFCRCELKLQKWYGDLRGKPFAIEAENSILDISGFSKQYNCAFIWQKDGVKKLNLYLIINYFKGGKLRFKKIKPEAFEANRFYTVINKKSGEIVPMEVNFNFDDPNLIILPLAFGKRFGREFIWNDLLSLETGSLKLANGRVIEKTLYNRRTRQDEPALFVALTFERREVLDSSNIKPMNLIGVDRGENIPAVIALTDPEGCPLSRFKDSLGNPTHILRIGESYKEKQRTIQAKKEVEQRRAGGYSRKYASKAKNLADDMVRNTARDLLYYAVTQDAMLIFENLSRGFGRQGKRTFMAERQYTRMEDWLTAKLAYEGLPSKTYLSKTLAQYTSKTCSNCGFTITSADYDRVLEKLKKTATGWMTTINGKELKVEGQITYYNRYKRQNVVKDLSVELDRLSEESVNNDISSWTKGRSGEALSLLKKRFSHRPVQEKFVCLNCGFETHADEQAALNIARSWLFLRSQEYKKYQTNKTTGNTDKRAFVETWQSFYRKKLKEVWKPAV

SEQ ID NO: 44985 - protein, 978 aa, synthetic construct
  REGION 1..978: note = engineered CasX variant
QEIKRINKIRRRLVKDSNTKKAGKTGPMKTLLVRVMTPDLRERLENLRKKPENIPQPISNTSRANLNKLLTDYTEMKKAILHVYWEEFQKDPVGLMSRVAQPASKKIDQNKLKPEMDEKGNLTTAGFACSQCGQPLFVYKLEQVSEKGKAYTNYFGRCNVAEHEKLILLAQLKPEKDSDEAVTYSLGKFGQRALDFYSIHVTKESTHPVKPLAQIAGNRYASHPVGKALSDACMGTIASFLSKYQDIIIEHQKVVKGNQKRLESLRELAGKENLEYPSVTLPPQPHTKEGVDAYNEVIARVRMWVNLNLWQKLKLSRDDAKPLLRLKGFPSFPLVERQANEVDWWDMVCNVKKLINEKKEDGKVFWQNLAGYKRQEALRPYLSSEEDRKKGKKFARYQLGDLLLHLEKKHGEDWGKVYDEAWERIDKKVEGLSKHIKLEEERRSEDAQSKAALTDWLRAKASFVIEGKKEADKDEFCRCELKLQKWYGDLRGKPFAIEAENSILDISGFSKQYNCAFIWQKDGVKKLNLYLIINYFKGGKLRFKKIKPEAFEANRFYTVINKKSGEIVPMEVNFNFDDPNLIILPLAFGKRFGREFIWNDLLSLETGSLKLANGRVIEKTLYNRRTRQDEPALFVALTFERREVLDSSNIKPMNLIGVDRGENIPAVIALTDPEGCPLSRFKDSLGNPTHILRIGESYKEKQRTIQAKKEVEQRRAGGYSRKYASKAKNLADDMVRNTARDLLYYAVTQDAMLIFENLSRGFGRQGKRTFMAERQYTRMEDWLTAKLAYEGLPSKTYLSKTLAQYTSKTCSNCGFTITSADYDRVLEKLKKTATGWMTTINGKELKVEGQITYYNRYKRQNVVKDLSVELDRLSEESVNNDISSWTKGRSGEALSLLKKRFSHRPVQEKFVCLNCGFETHADEQAALNIARSWLFLRSQEYKKYQTNKTTGNTDKRAFVETWQSFYRKKLKEVWKPAV

SEQ ID NO: 44986 - protein, 978 aa, synthetic construct
  REGION 1..978: note = engineered CasX variant
QEIKRINKIRRRLVKDSNTKKAGKTGPMKTLLVRVMTPDLRERLENLRKKPENIPQPISNTSRANLNKLLTDYTEMKKAILHVYWEEFQKDPVGLMSRVAQPASKKIDQNKLKPEMDEKGNLTTAGFACSQCGQPLFVYKLEQVSEKGKAYTNYFGRCNVAEHEKLILLAQLKPEKDSDEAVTYSLGKFGQRALDFYSIHVTKESTHPVKPLAQIAGNRYASSPVGKALSDACMGTIASFLSKYQDIIIEHQKVVKGNQKRLESLRELAGKENLEYPSVTLPPQPHTKEGVDAYNEVIARVRMWVNLNLWQKLKLSRDDAKPLLRLKGFPSFPLVERQANEVDWWDMVCNVKKLINEKKEDGKVFWQNLAGYKRQEALRPYLSSEEDRKKGKKFARYQLGDLLLHLEKKHGEDWGKVYDEAWERIDKKVEGLSKHIKLEEERRSEDAQSKAALTDWLRAKASFVIEGKKEADKDEFCRCELKLQKWYGDLRGKPFAIEAENSILDISGFSKQYNCAFIWQKDGVKKLNLYLIINYFKGGKLRFKKIKPEAFEANRFYTVINKKSGEIVPMEVNFNFDDPNLIILPLAFGKRFGREFIWNDLLSLETGSLKLANGRVIEKTLYNRRTRQDEPALFVALTFERREVLDSSNIKPMNLIGVDRGENIPAVIALTDPEGCPLSRFKDSLGNPTHILRIGESYKEKQRTIQAKKEVEQRRAGGYSRKYASKAKNLADDMVRNTARDLLYYAVTQDAMLIFENLSRGFGRQGKRTFMAERQYTRMEDWLTAKLAYEGLPSKTYLSKTLAQYTSKTCSNCGFTITSADYDRVLEKLKKTATGWMTTINGKELKVEGQITYYNRYKRQNVVKDLSVELDRLSEESVNNDISSWTKGRSGEALSLLKKRFSHRPVQEKFVCLNCGFETHADEQAALNIARSWLFLRSQEYKKYQTNKTTGNTDKRAFVETWQSFYRKKLKEVWKPAV

SEQ ID NO: 44987 - protein, 978 aa, synthetic construct
  REGION 1..978: note = engineered CasX variant
QEIKRINKIRRRLVKDSNTKKAGKTGPMKTLLVRVMTPDLRERLENLRKKPENIPQPISNTSRANLNKLLTDYTEMKKAILHVYWEEFQKDPVGLMSRVAQPASKKIDQNKLKPEMDEKGNLTTAGFACSQCGQPLFVYKLEQVSEKGKAYTNYFGRCNVAEHEKLILLAQLKPEKDSDEAVTYSLGKFGQRALDFYSIHVTKESTHPVKPLAQIAGNRYASTPVGKALSDACMGTIASFLSKYQDIIIEHQKVVKGNQKRLESLRELAGKENLEYPSVTLPPQPHTKEGVDAYNEVIARVRMWVNLNLWQKLKLSRDDAKPLLRLKGFPSFPLVERQANEVDWWDMVCNVKKLINEKKEDGKVFWQNLAGYKRQEALRPYLSSEEDRKKGKKFARYQLGDLLLHLEKKHGEDWGKVYDEAWERIDKKVEGLSKHIKLEEERRSEDAQSKAALTDWLRAKASFVIEGKKEADKDEFCRCELKLQKWYGDLRGKPFAIEAENSILDISGFSKQYNCAFIWQKDGVKKLNLYLIINYFKGGKLRFKKIKPEAFEANRFYTVINKKSGEIVPMEVNFNFDDPNLIILPLAFGKRFGREFIWNDLLSLETGSLKLANGRVIEKTLYNRRTRQDEPALFVALTFERREVLDSSNIKPMNLIGVDRGENIPAVIALTDPEGCPLSRFKDSLGNPTHILRIGESYKEKQRTIQAKKEVEQRRAGGYSRKYASKAKNLADDMVRNTARDLLYYAVTQDAMLIFENLSRGFGRQGKRTFMAERQYTRMEDWLTAKLAYEGLPSKTYLSKTLAQYTSKTCSNCGFTITSADYDRVLEKLKKTATGWMTTINGKELKVEGQITYYNRYKRQNVVKDLSVELDRLSEESVNNDISSWTKGRSGEALSLLKKRFSHRPVQEKFVCLNCGFETHADEQAALNIARSWLFLRSQEYKKYQTNKTTGNTDKRAFVETWQSFYRKKLKEVWKPAV

SEQ ID NO: 44988 - protein, 978 aa, synthetic construct
  REGION 1..978: note = engineered CasX variant
QEIKRINKIRRRLVKDSNTKKAGKTGPMKTLLVRVMTPDLRERLENLRKKPENIPQPISNTSRANLNKLLTDYTEMKKAILHVYWEEFQKDPVGLMSRVAQPASKKIDQNKLKPEMDEKGNLTTAGFACSQCGQPLFVYKLEQVSEKGKAYTNYFGRCNVAEHEKLILLAQLKPEKDSDEAVTYSLGKFGQRALDFYSIHVTKESTHPVKPLAQIAGNRYASAPVGKALSDACMGTIASFLSKYQDIIIEHQKVVKGNQKRLESLRELAGKENLEYPSVTLPPQPHTKEGVDAYNEVIARVRMWVNLNLWQKLKLSRDDAKPLLRLKGFPSFPLVERQANEVDWWDMVCNVKKLINEKKEDGKVFWQNLAGYKRQEALRPYLSSEEDRKKGKKFARYQLGDLLLHLEKKHGEDWGKVYDEAWERIDKKVEGLSKHIKLEEERRSEDAQSKAALTDWLRAKASFVIEGKKEADKDEFCRCELKLQKWYGDLRGKPFAIEAENSILDISGFSKQYNCAFIWQKDGVKKLNLYLIINYFKGGKLRFKKIKPEAFEANRFYTVINKKSGEIVPMEVNFNFDDPNLIILPLAFGKRFGREFIWNDLLSLETGSLKLANGRVIEKTLYNRRTRQDEPALFVALTFERREVLDSSNIKPMNLIGVDRGENIPAVIALTDPEGCPLSRFKDSLGNPTHILRIGESYKEKQRTIQAKKEVEQRRAGGYSRKYASKAKNLADDMVRNTARDLLYYAVTQDAMLIFENLSRGFGRQGKRTFMAERQYTRMEDWLTAKLAYEGLPSKTYLSKTLAQYTSKTCSNCGFTITSADYDRVLEKLKKTATGWMTTINGKELKVEGQITYYNRYKRQNVVKDLSVELDRLSEESVNNDISSWTKGRSGEALSLLKKRFSHRPVQEKFVCLNCGFETHADEQAALNIARSWLFLRSQEYKKYQTNKTTGNTDKRAFVETWQSFYRKKLKEVWKPAV

SEQ ID NO: 44989 - protein, 978 aa, synthetic construct
  REGION 1..978: note = engineered CasX variant
QEIKRINKIRRRLVKDSNTKKAGKTGPMKTLLVRVMTPDLRERLENLRKKPENIPQPISNTSRANLNKLLTDYTEMKKAILHVYWEEFQKDPVGLMSRVAQPASKKIDQNKLKPEMDEKGNLTTAGFACSQCGQPLFVYKLEQVSEKGKAYTNYFGRCNVAEHEKLILLAQLKPEKDSDEAVTYSLGKFGQRALDFYSIHVTKESTHPVKPLAQIAGNRYASVPVGKALSDACMGTIASFLSKYQDIIIEHQKVVKGNQKRLESLRELAGKENLEYPSVTLPPQPHTKEGVDAYNEVIARVRMWVNLNLWQKLKLSRDDAKPLLRLKGFPSFPLVERQANEVDWWDMVCNVKKLINEKKEDGKVFWQNLAGYKRQEALRPYLSSEEDRKKGKKFARYQLGDLLLHLEKKHGEDWGKVYDEAWERIDKKVEGLSKHIKLEEERRSEDAQSKAALTDWLRAKASFVIEGKKEADKDEFCRCELKLQKWYGDLRGKPFAIEAENSILDISGFSKQYNCAFIWQKDGVKKLNLYLIINYFKGGKLRFKKIKPEAFEANRFYTVINKKSGEIVPMEVNFNFDDPNLIILPLAFGKRFGREFIWNDLLSLETGSLKLANGRVIEKTLYNRRTRQDEPALFVALTFERREVLDSSNIKPMNLIGVDRGENIPAVIALTDPEGCPLSRFKDSLGNPTHILRIGESYKEKQRTIQAKKEVEQRRAGGYSRKYASKAKNLADDMVRNTARDLLYYAVTQDAMLIFENLSRGFGRQGKRTFMAERQYTRMEDWLTAKLAYEGLPSKTYLSKTLAQYTSKTCSNCGFTITSADYDRVLEKLKKTATGWMTTINGKELKVEGQITYYNRYKRQNVVKDLSVELDRLSEESVNNDISSWTKGRSGEALSLLKKRFSHRPVQEKFVCLNCGFETHADEQAALNIARSWLFLRSQEYKKYQTNKTTGNTDKRAFVETWQSFYRKKLKEVWKPAV

SEQ ID NO: 44990 - protein, 978 aa, synthetic construct
  REGION 1..978: note = engineered CasX variant
QEIKRINKIRRRLVKDSNTKKAGKTGPMKTLLVRVMTPDLRERLENLRKKPENIPQPISNTSRANLNKLLTDYTEMKKAILHVYWEEFQKDPVGLMSRVAQPASKKIDQNKLKPEMDEKGNLTTAGFACSQCGQPLFVYKLEQVSEKGKAYTNYFGRCNVAEHEKLIKLAQLKPEKDSDEAVTYSLGKFGQRALDFYSIHVTKESTHPVKPLAQIAGNRYASGPVGKALSDACMGTIASFLSKYQDIIIEHQKVVKGNQKRLESLRELAGKENLEYPSVTLPPQPHTKEGVDAYNEVIARVRMWVNLNLWQKLKLSRDDAKPLLRLKGFPSFPLVERQANEVDWWDMVCNVKKLINEKKEDGKVFWQNLAGYKRQEALRPYLSSEEDRKKGKKFARYQLGDLLLHLEKKHGEDWGKVYDEAWERIDKKVEGLSKHIKLEEERRSEDAQSKAALTDWLRAKASFVIEGKKEADKDEFCRCELKLQKWYGDLRGKPFAIEAENSILDISGFSKQYNCAFIWQKDGVKKLNLYLIINYFKGGKLRFKKIKPEAFEANRFYTVINKKSGEIVPMEVNFNFDDPNLIILPLAFGKRFGREFIWNDLLSLETGSLKLANGRVIEKTLYNRRTRQDEPALFVALTFERREVLDSSNIKPMNLIGVDRGENIPAVIALTDPEGCPLSRFKDSLGNPTHILRIGESYKEKQRTIQAKKEVEQRRAGGYSRKYASKAKNLADDMVRNTARDLLYYAVTQDAMLIFENLSRGFGRQGKRTFMAERQYTRMEDWLTAKLAYEGLPSKTYLSKTLAQYTSKTCSNCGFTITSADYDRVLEKLKKTATGWMTTINGKELKVEGQITYYNRYKRQNVVKDLSVELDRLSEESVNNDISSWTKGRSGEALSLLKKRFSHRPVQEKFVCLNCGFETHADEQAALNIARSWLFLRSQEYKKYQTNKTTGNTDKRAFVETWQSFYRKKLKEVWKPAV

SEQ ID NO: 44991 - protein, 977 aa, synthetic construct
  REGION 1..977: note = engineered CasX variant
QEIKRINKIRRRLVKDSNTKKAGKTGPMKTLLVRVMTPDLRERLENLRKKPENIPQPISNTSRANLNKLLTDYTEMKKAILHVYWEEFQKDPVGLMSRVAQPASKKIDQNKLKPEMDEKGNLTTAGFACSQCGQPLFVYKLEQVSEKGKAYTNYFGRCNVAEHEKLILLAQLKPEKDSDEAVTYSLGKFGQRALDFYSIHVTKESTHPVKPLAQIAGNRYASPVGKALSDACMGTIASFLSKYQDIIIEHQKVVKGNQKRLESLRELAGKENLEYPSVTLPPQPHTKEGVDAYNEVIARVRMWVNLNLWQKLKLSRDDAKPLLRLKGFPSFPLVERQANEVDWWDMVCNVKKLINEKKEDGKVFWQNLAGYKRQEALRPYLSSEEDRKKGKKFARYQLGDLLLHLEKKHGEDWGKVYDEAWERIDKKVEGLSKHIKLEEERRSEDAQSKAALTDWLRAKASFVIEGKKEADKDEFCRCELKLQKWYGDLRGKPFAIEAENSILDISGFSKQYNCAFIWQKDGVKKLNLYLIINYFKGGKLRFKKIKPEAFEANRFYTVINKKSGEIVPMEVNFNFDDPNLIILPLAFGKRFGREFIWNDLLSLETGSLKLANGRVIEKTLYNRRTRQDEPALFVALTFERREVLDSSNIKPMNLIGVDRGENIPAVIALTDPEGCPLSRFKDSLGNPTHILRIGESYKEKQRTIQAKKEVEQRRAGGYSRKYASKAKNLADDMVRNTARDLLYYAVTQDAMLIFENLSRGFGRQGKRTFMAERQYTRMEDWLTAKLAYEGLPSKTYLSKTLAQYTSKTCSNCGFTITSADYDRVLEKLKKTATGWMTTINGKELKVEGQITYYNRYKRQNVVKDLSVELDRLSEESVNNDISSWTKGRSGEALSLLKKRFSHRPVQEKFVCLNCGFETHADEQAALNIARSWLFLRSQEYKKYQTNKTTGNTDKRAFVETWQSFYRKKLKEVWKPAV

SEQ ID NO: 44992 - protein, 978 aa, synthetic construct
  REGION 1..978: note = engineered CasX variant
QEIKRINKIRRRLVKDSNTKKAGKTGPMKTLLVRVMTPDLRERLENLRKKPENIPQPISNTSRANLNKLLTDYTEMKKAILHVYWEEFQKDPVGLMSRVAQPASKKIDQNKLKPEMDEKGNLTTAGFACSQCGQPLFVYKLEQVSEKGKAYTNYFGRCNVAEHEKLILLAQLKPEKDSDEAVTYSLGKFGQRALDFYSIHVTKESTHPVKPLAQIAGNRYASYPVGKALSDACMGTIASFLSKYQDIIIEHQKVVKGNQKRLESLRELAGKENLEYPSVTLPPQPHTKEGVDAYNEVIARVRMWVNLNLWQKLKLSRDDAKPLLRLKGFPSFPLVERQANEVDWWDMVCNVKKLINEKKEDGKVFWQNLAGYKRQEALRPYLSSEEDRKKGKKFARYQLGDLLLHLEKKHGEDWGKVYDEAWERIDKKVEGLSKHIKLEEERRSEDAQSKAALTDWLRAKASFVIEGSKEADKDEFCRCELKLQKWYGDLRGKPFAIEAENSILDISGFSKQYNCAFIWQKDGVKKLNLYLIINYFKGGKLRFKKIKPEAFEANRFYTVINKKSGEIVPMEVNFNFDDPNLIILPLAFGKRFGREFIWNDLLSLETGSLKLANGRVIEKTLYNRRTRQDEPALFVALTFERREVLDSSNIKPMNLIGVDRGENIPAVIALTDPEGCPLSRFKDSLGNPTHILRIGESYKEKQRTIQAKKEVEQRRAGGYSRKYASKAKNLADDMVRNTARDLLYYAVTQDAMLIFENLSRGFGRQGKRTFMAERQYTRMEDWLTAKLAYEGLPSKTYLSKTLAQYTSKTCSNCGFTITSADYDRVLEKLKKTATGWMTTINGKELKVEGQITYYNRYKRQNVVKDLSVELDRLSEESVNNDISSWTKGRSGEALSLLKKRFSHRPVQEKFVCLNCGFETHADEQAALNIARSWLFLRSQEYKKYQTNKTTGNTDKRAFVETWQSFYRKKLKEVWKPAV

SEQ ID NO: 44993 - protein, 978 aa, synthetic construct
  REGION 1..978: note = engineered CasX variant
QEIKRINKIRRRLVKDSNTKKAGKTGPMKTLLVRVMTPDLRERLENLRKKPENIPQPISNTSRANLNKLLTDYTEMKKAILHVYWEEFQKDPVGLMSRVAQPASKKIDQNKLKPEMDEKGNLTTAGFACSQCGQPLFVYKLEQVSEKGKAYTNYFGRCNVAEHEKLILLAQLKPEKDSDEAVTYSLGKFGQRALDFYSIHVTKESTHPVKPLAQIAGNRYASHPVGKALSDACMGTIASFLSKYQDIIIEHQKVVKGNQKRLESLRELAGKENLEYPSVTLPPQPHTKEGVDAYNEVIARVRMWVNLNLWQKLKLSRDDAKPLLRLKGFPSFPLVERQANEVDWWDMVCNVKKLINEKKEDGKVFWQNLAGYKRQEALRPYLSSEEDRKKGKKFARYQLGDLLLHLEKKHGEDWGKVYDEAWERIDKKVEGLSKHIKLEEERRSEDAQSKAALTDWLRAKASFVIEGSKEADKDEFCRCELKLQKWYGDLRGKPFAIEAENSILDISGFSKQYNCAFIWQKDGVKKLNLYLIINYFKGGKLRFKKIKPEAFEANRFYTVINKKSGEIVPMEVNFNFDDPNLIILPLAFGKRFGREFIWNDLLSLETGSLKLANGRVIEKTLYNRRTRQDEPALFVALTFERREVLDSSNIKPMNLIGVDRGENIPAVIALTDPEGCPLSRFKDSLGNPTHILRIGESYKEKQRTIQAKKEVEQRRAGGYSRKYASKAKNLADDMVRNTARDLLYYAVTQDAMLIFENLSRGFGRQGKRTFMAERQYTRMEDWLTAKLAYEGLPSKTYLSKTLAQYTSKTCSNCGFTITSADYDRVLEKLKKTATGWMTTINGKELKVEGQITYYNRYKRQNVVKDLSVELDRLSEESVNNDISSWTKGRSGEALSLLKKRFSHRPVQEKFVCLNCGFETHADEQAALNIARSWLFLRSQEYKKYQTNKTTGNTDKRAFVETWQSFYRKKLKEVWKPAV

SEQ ID NO: 44994 - protein, 978 aa, synthetic construct
  REGION 1..978: note = engineered CasX variant
QEIKRINKIRRRLVKDSNTKKAGKTGPMKTLLVRVMTPDLRERLENLRKKPENIPQPISNTSRANLNKLLTDYTEMKKAILHVYWEEFQKDPVGLMSRVAQPASKKIDQNKLKPEMDEKGNLTTAGFACSQCGQPLFVYKLEQVSEKGKAYTNYFGRCNVAEHEKLILLAQLKPEKDSDEAVTYSLGKFGQRALDFYSIHVTKESTHPVKPLAQIAGNRYASSPVGKALSDACMGTIASFLSKYQDIIIEHQKVVKGNQKRLESLRELAGKENLEYPSVTLPPQPHTKEGVDAYNEVIARVRMWVNLNLWQKLKLSRDDAKPLLRLKGFPSFPLVERQANEVDWWDMVCNVKKLINEKKEDGKVFWQNLAGYKRQEALRPYLSSEEDRKKGKKFARYQLGDLLLHLEKKHGEDWGKVYDEAWERIDKKVEGLSKHIKLEEERRSEDAQSKAALTDWLRAKASFVIEGSKEADKDEFCRCELKLQKWYGDLRGKPFAIEAENSILDISGFSKQYNCAFIWQKDGVKKLNLYLIINYFKGGKLRFKKIKPEAFEANRFYTVINKKSGEIVPMEVNFNFDDPNLIILPLAFGKRFGREFIWNDLLSLETGSLKLANGRVIEKTLYNRRTRQDEPALFVALTFERREVLDSSNIKPMNLIGVDRGENIPAVIALTDPEGCPLSRFKDSLGNPTHILRIGESYKEKQRTIQAKKEVEQRRAGGYSRKYASKAKNLADDMVRNTARDLLYYAVTQDAMLIFENLSRGFGRQGKRTFMAERQYTRMEDWLTAKLAYEGLPSKTYLSKTLAQYTSKTCSNCGFTITSADYDRVLEKLKKTATGWMTTINGKELKVEGQITYYNRYKRQNVVKDLSVELDRLSEESVNNDISSWTKGRSGEALSLLKKRFSHRPVQEKFVCLNCGFETHADEQAALNIARSWLFLRSQEYKKYQTNKTTGNTDKRAFVETWQSFYRKKLKEVWKPAV

SEQ ID NO: 44995 - protein, 978 aa, synthetic construct
  REGION 1..978: note = engineered CasX variant
QEIKRINKIRRRLVKDSNTKKAGKTGPMKTLLVRVMTPDLRERLENLRKKPENIPQPISNTSRANLNKLLTDYTEMKKAILHVYWEEFQKDPVGLMSRVAQPASKKIDQNKLKPEMDEKGNLTTAGFACSQCGQPLFVYKLEQVSEKGKAYTNYFGRCNVAEHEKLILLAQLKPEKDSDEAVTYSLGKFGQRALDFYSIHVTKESTHPVKPLAQIAGNRYASTPVGKALSDACMGTIASFLSKYQDIIIEHQKVVKGNQKRLESLRELAGKENLEYPSVTLPPQPHTKEGVDAYNEVIARVRMWVNLNLWQKLKLSRDDAKPLLRLKGFPSFPLVERQANEVDWWDMVCNVKKLINEKKEDGKVFWQNLAGYKRQEALRPYLSSEEDRKKGKKFARYQLGDLLLHLEKKHGEDWGKVYDEAWERIDKKVEGLSKHIKLEEERRSEDAQSKAALTDWLRAKASFVIEGSKEADKDEFCRCELKLQKWYGDLRGKPFAIEAENSILDISGFSKQYNCAFIWQKDGVKKLNLYLIINYFKGGKLRFKKIKPEAFEANRFYTVINKKSGEIVPMEVNFNFDDPNLIILPLAFGKRFGREFIWNDLLSLETGSLKLANGRVIEKTLYNRRTRQDEPALFVALTFERREVLDSSNIKPMNLIGVDRGENIPAVIALTDPEGCPLSRFKDSLGNPTHILRIGESYKEKQRTIQAKKEVEQRRAGGYSRKYASKAKNLADDMVRNTARDLLYYAVTQDAMLIFENLSRGFGRQGKRTFMAERQYTRMEDWLTAKLAYEGLPSKTYLSKTLAQYTSKTCSNCGFTITSADYDRVLEKLKKTATGWMTTINGKELKVEGQITYYNRYKRQNVVKDLSVELDRLSEESVNNDISSWTKGRSGEALSLLKKRFSHRPVQEKFVCLNCGFETHADEQAALNIARSWLFLRSQEYKKYQTNKTTGNTDKRAFVETWQSFYRKKLKEVWKPAV

SEQ ID NO: 44996 - protein, 978 aa, synthetic construct
  REGION 1..978: note = engineered CasX variant
QEIKRINKIRRRLVKDSNTKKAGKTGPMKTLLVRVMTPDLRERLENLRKKPENIPQPISNTSRANLNKLLTDYTEMKKAILHVYWEEFQKDPVGLMSRVAQPASKKIDQNKLKPEMDEKGNLTTAGFACSQCGQPLFVYKLEQVSEKGKAYTNYFGRCNVAEHEKLILLAQLKPEKDSDEAVTYSLGKFGQRALDFYSIHVTKESTHPVKPLAQIAGNRYASAPVGKALSDACMGTIASFLSKYQDIIIEHQKVVKGNQKRLESLRELAGKENLEYPSVTLPPQPHTKEGVDAYNEVIARVRMWVNLNLWQKLKLSRDDAKPLLRLKGFPSFPLVERQANEVDWWDMVCNVKKLINEKKEDGKVFWQNLAGYKRQEALRPYLSSEEDRKKGKKFARYQLGDLLLHLEKKHGEDWGKVYDEAWERIDKKVEGLSKHIKLEEERRSEDAQSKAALTDWLRAKASFVIEGSKEADKDEFCRCELKLQKWYGDLRGKPFAIEAENSILDISGFSKQYNCAFIWQKDGVKKLNLYLIINYFKGGKLRFKKIKPEAFEANRFYTVINKKSGEIVPMEVNFNFDDPNLIILPLAFGKRFGREFIWNDLLSLETGSLKLANGRVIEKTLYNRRTRQDEPALFVALTFERREVLDSSNIKPMNLIGVDRGENIPAVIALTDPEGCPLSRFKDSLGNPTHILRIGESYKEKQRTIQAKKEVEQRRAGGYSRKYASKAKNLADDMVRNTARDLLYYAVTQDAMLIFENLSRGFGRQGKRTFMAERQYTRMEDWLTAKLAYEGLPSKTYLSKTLAQYTSKTCSNCGFTITSADYDRVLEKLKKTATGWMTTINGKELKVEGQITYYNRYKRQNVVKDLSVELDRLSEESVNNDISSWTKGRSGEALSLLKKRFSHRPVQEKFVCLNCGFETHADEQAALNIARSWLFLRSQEYKKYQTNKTTGNTDKRAFVETWQSFYRKKLKEVWKPAV

SEQ ID NO: 44997 - protein, 978 aa, synthetic construct
  REGION 1..978: note = engineered CasX variant
QEIKRINKIRRRLVKDSNTKKAGKTGPMKTLLVRVMTPDLRERLENLRKKPENIPQPISNTSRANLNKLLTDYTEMKKAILHVYWEEFQKDPVGLMSRVAQPASKKIDQNKLKPEMDEKGNLTTAGFACSQCGQPLFVYKLEQVSEKGKAYTNYFGRCNVAEHEKLILLAQLKPEKDSDEAVTYSLGKFGQRALDFYSIHVTKESTHPVKPLAQIAGNRYASVPVGKALSDACMGTIASFLSKYQDIIIEHQKVVKGNQKRLESLRELAGKENLEYPSVTLPPQPHTKEGVDAYNEVIARVRMWVNLNLWQKLKLSRDDAKPLLRLKGFPSFPLVERQANEVDWWDMVCNVKKLINEKKEDGKVFWQNLAGYKRQEALRPYLSSEEDRKKGKKFARYQLGDLLLHLEKKHGEDWGKVYDEAWERIDKKVEGLSKHIKLEEERRSEDAQSKAALTDWLRAKASFVIEGSKEADKDEFCRCELKLQKWYGDLRGKPFAIEAENSILDISGFSKQYNCAFIWQKDGVKKLNLYLIINYFKGGKLRFKKIKPEAFEANRFYTVINKKSGEIVPMEVNFNFDDPNLIILPLAFGKRFGREFIWNDLLSLETGSLKLANGRVIEKTLYNRRTRQDEPALFVALTFERREVLDSSNIKPMNLIGVDRGENIPAVIALTDPEGCPLSRFKDSLGNPTHILRIGESYKEKQRTIQAKKEVEQRRAGGYSRKYASKAKNLADDMVRNTARDLLYYAVTQDAMLIFENLSRGFGRQGKRTFMAERQYTRMEDWLTAKLAYEGLPSKTYLSKTLAQYTSKTCSNCGFTITSADYDRVLEKLKKTATGWMTTINGKELKVEGQITYYNRYKRQNVVKDLSVELDRLSEESVNNDISSWTKGRSGEALSLLKKRFSHRPVQEKFVCLNCGFETHADEQAALNIARSWLFLRSQEYKKYQTNKTTGNTDKRAFVETWQSFYRKKLKEVWKPAV

SEQ ID NO: 44998 - protein, 978 aa, synthetic construct
  REGION 1..978: note = engineered CasX variant
QEIKRINKIRRRLVKDSNTKKAGKTGPMKTLLVRVMTPDLRERLENLRKKPENIPQPISNTSRANLNKLLTDYTEMKKAILHVYWEEFQKDPVGLMSRVAQPASKKIDQNKLKPEMDEKGNLTTAGFACSQCGQPLFVYKLEQVSEKGKAYTNYFGRCNVAEHEKLIKLAQLKPEKDSDEAVTYSLGKFGQRALDFYSIHVTKESTHPVKPLAQIAGNRYASGPVGKALSDACMGTIASFLSKYQDIIIEHQKVVKGNQKRLESLRELAGKENLEYPSVTLPPQPHTKEGVDAYNEVIARVRMWVNLNLWQKLKLSRDDAKPLLRLKGFPSFPLVERQANEVDWWDMVCNVKKLINEKKEDGKVFWQNLAGYKRQEALRPYLSSEEDRKKGKKFARYQLGDLLLHLEKKHGEDWGKVYDEAWERIDKKVEGLSKHIKLEEERRSEDAQSKAALTDWLRAKASFVIEGSKEADKDEFCRCELKLQKWYGDLRGKPFAIEAENSILDISGFSKQYNCAFIWQKDGVKKLNLYLIINYFKGGKLRFKKIKPEAFEANRFYTVINKKSGEIVPMEVNFNFDDPNLIILPLAFGKRFGREFIWNDLLSLETGSLKLANGRVIEKTLYNRRTRQDEPALFVALTFERREVLDSSNIKPMNLIGVDRGENIPAVIALTDPEGCPLSRFKDSLGNPTHILRIGESYKEKQRTIQAKKEVEQRRAGGYSRKYASKAKNLADDMVRNTARDLLYYAVTQDAMLIFENLSRGFGRQGKRTFMAERQYTRMEDWLTAKLAYEGLPSKTYLSKTLAQYTSKTCSNCGFTITSADYDRVLEKLKKTATGWMTTINGKELKVEGQITYYNRYKRQNVVKDLSVELDRLSEESVNNDISSWTKGRSGEALSLLKKRFSHRPVQEKFVCLNCGFETHADEQAALNIARSWLFLRSQEYKKYQTNKTTGNTDKRAFVETWQSFYRKKLKEVWKPAV

SEQ ID NO: 44999 - protein, 977 aa, synthetic construct
  REGION 1..977: note = engineered CasX variant
QEIKRINKIRRRLVKDSNTKKAGKTGPMKTLLVRVMTPDLRERLENLRKKPENIPQPISNTSRANLNKLLTDYTEMKKAILHVYWEEFQKDPVGLMSRVAQPASKKIDQNKLKPEMDEKGNLTTAGFACSQCGQPLFVYKLEQVSEKGKAYTNYFGRCNVAEHEKLILLAQLKPEKDSDEAVTYSLGKFGQRALDFYSIHVTKESTHPVKPLAQIAGNRYASPVGKALSDACMGTIASFLSKYQDIIIEHQKVVKGNQKRLESLRELAGKENLEYPSVTLPPQPHTKEGVDAYNEVIARVRMWVNLNLWQKLKLSRDDAKPLLRLKGFPSFPLVERQANEVDWWDMVCNVKKLINEKKEDGKVFWQNLAGYKRQEALRPYLSSEEDRKKGKKFARYQLGDLLLHLEKKHGEDWGKVYDEAWERIDKKVEGLSKHIKLEEERRSEDAQSKAALTDWLRAKASFVIEGSKEADKDEFCRCELKLQKWYGDLRGKPFAIEAENSILDISGFSKQYNCAFIWQKDGVKKLNLYLIINYFKGGKLRFKKIKPEAFEANRFYTVINKKSGEIVPMEVNFNFDDPNLIILPLAFGKRFGREFIWNDLLSLETGSLKLANGRVIEKTLYNRRTRQDEPALFVALTFERREVLDSSNIKPMNLIGVDRGENIPAVIALTDPEGCPLSRFKDSLGNPTHILRIGESYKEKQRTIQAKKEVEQRRAGGYSRKYASKAKNLADDMVRNTARDLLYYAVTQDAMLIFENLSRGFGRQGKRTFMAERQYTRMEDWLTAKLAYEGLPSKTYLSKTLAQYTSKTCSNCGFTITSADYDRVLEKLKKTATGWMTTINGKELKVEGQITYYNRYKRQNVVKDLSVELDRLSEESVNNDISSWTKGRSGEALSLLKKRFSHRPVQEKFVCLNCGFETHADEQAALNIARSWLFLRSQEYKKYQTNKTTGNTDKRAFVETWQSFYRKKLKEVWKPAV

SEQ ID NO: 45000 - protein, 979 aa, synthetic construct
  REGION 1..979: note = engineered CasX variant
QEIKRINKIRRRLVKDSNTKKAGKTGPMKTLLVRVMTPDLRERLENLRKKPENIPQPISNTSRANLNKLLTDYTEMKKAILHVYWEEFQKDPVGLMSRVAQPASKKIDQNKLKPEMDEKGNLTTAGFACSQCGQPLFVYKLEQVSEKGKAYTNYFGRCNVAEHEKLILLAQLKPEKDSDEAVTYSLGKFGQRALDFYSIHVTKESTHPVKPLAQIAGNRYASYPVGKALSDACMGTIASFLSKYQDIIIEHQKVVKGNQKRLESLRELAGKENLEYPSVTLPPQPHTKEGVDAYNEVIARVRMWVNLNLWQKLKLSRDDAKPLLRLKGFPSFPLVERQANEVDWWDMVCNVKKLINEKKEDGKVFWQNLAGYKRQEALRPYLSSEEDRKKGKKFARYQLGDLLLHLEKKHGEDWGKVYDEAWERIDKKVEGLSKHIKLEEERRSEDAQSKAALTDWLRAKASFVIEGLKEADDKDEFCRCELKLQKWYGDLRGKPFAIEAENSILDISGFSKQYNCAFIWQKDGVKKLNLYLIINYFKGGKLRFKKIKPEAFEANRFYTVINKKSGEIVPMEVNFNFDDPNLIILPLAFGKRFGREFIWNDLLSLETGSLKLANGRVIEKTLYNRRTRQDEPALFVALTFERREVLDSSNIKPMNLIGVDRGENIPAVIALTDPEGCPLSRFKDSLGNPTHILRIGESYKEKQRTIQAKKEVEQRRAGGYSRKYASKAKNLADDMVRNTARDLLYYAVTQDAMLIFENLSRGFGRQGKRTFMAERQYTRMEDWLTAKLAYEGLPSKTYLSKTLAQYTSKTCSNCGFTITSADYDRVLEKLKKTATGWMTTINGKELKVEGQITYYNRYKRQNVVKDLSVELDRLSEESVNNDISSWTKGRSGEALSLLKKRFSHRPVQEKFVCLNCGFETHADEQAALNIARSWLFLRSQEYKKYQTNKTTGNTDKRAFVETWQSFYRKKLKEVWKPAV

SEQ ID NO: 45001 - protein, 979 aa, synthetic construct
  REGION 1..979: note = engineered CasX variant
QEIKRINKIRRRLVKDSNTKKAGKTGPMKTLLVRVMTPDLRERLENLRKKPENIPQPISNTSRANLNKLLTDYTEMKKAILHVYWEEFQKDPVGLMSRVAQPASKKIDQNKLKPEMDEKGNLTTAGFACSQCGQPLFVYKLEQVSEKGKAYTNYFGRCNVAEHEKLILLAQLKPEKDSDEAVTYSLGKFGQRALDFYSIHVTKESTHPVKPLAQIAGNRYASHPVGKALSDACMGTIASFLSKYQDIIIEHQKVVKGNQKRLESLRELAGKENLEYPSVTLPPQPHTKEGVDAYNEVIARVRMWVNLNLWQKLKLSRDDAKPLLRLKGFPSFPLVERQANEVDWWDMVCNVKKLINEKKEDGKVFWQNLAGYKRQEALRPYLSSEEDRKKGKKFARYQLGDLLLHLEKKHGEDWGKVYDEAWERIDKKVEGLSKHIKLEEERRSEDAQSKAALTDWLRAKASFVIEGLKEADDKDEFCRCELKLQKWYGDLRGKPFAIEAENSILDISGFSKQYNCAFIWQKDGVKKLNLYLIINYFKGGKLRFKKIKPEAFEANRFYTVINKKSGEIVPMEVNFNFDDPNLIILPLAFGKRFGREFIWNDLLSLETGSLKLANGRVIEKTLYNRRTRQDEPALFVALTFERREVLDSSNIKPMNLIGVDRGENIPAVIALTDPEGCPLSRFKDSLGNPTHILRIGESYKEKQRTIQAKKEVEQRRAGGYSRKYASKAKNLADDMVRNTARDLLYYAVTQDAMLIFENLSRGFGRQGKRTFMAERQYTRMEDWLTAKLAYEGLPSKTYLSKTLAQYTSKTCSNCGFTITSADYDRVLEKLKKTATGWMTTINGKELKVEGQITYYNRYKRQNVVKDLSVELDRLSEESVNNDISSWTKGRSGEALSLLKKRFSHRPVQEKFVCLNCGFETHADEQAALNIARSWLFLRSQEYKKYQTNKTTGNTDKRAFVETWQSFYRKKLKEVWKPAV

SEQ ID NO: 45002 - protein, 979 aa, synthetic construct
  REGION 1..979: note = engineered CasX variant
QEIKRINKIRRRLVKDSNTKKAGKTGPMKTLLVRVMTPDLRERLENLRKKPENIPQPISNTSRANLNKLLTDYTEMKKAILHVYWEEFQKDPVGLMSRVAQPASKKIDQNKLKPEMDEKGNLTTAGFACSQCGQPLFVYKLEQVSEKGKAYTNYFGRCNVAEHEKLILLAQLKPEKDSDEAVTYSLGKFGQRALDFYSIHVTKESTHPVKPLAQIAGNRYASSPVGKALSDACMGTIASFLSKYQDIIIEHQKVVKGNQKRLESLRELAGKENLEYPSVTLPPQPHTKEGVDAYNEVIARVRMWVNLNLWQKLKLSRDDAKPLLRLKGFPSFPLVERQANEVDWWDMVCNVKKLINEKKEDGKVFWQNLAGYKRQEALRPYLSSEEDRKKGKKFARYQLGDLLLHLEKKHGEDWGKVYDEAWERIDKKVEGLSKHIKLEEERRSEDAQSKAALTDWLRAKASFVIEGLKEADDKDEFCRCELKLQKWYGDLRGKPFAIEAENSILDISGFSKQYNCAFIWQKDGVKKLNLYLIINYFKGGKLRFKKIKPEAFEANRFYTVINKKSGEIVPMEVNFNFDDPNLIILPLAFGKRFGREFIWNDLLSLETGSLKLANGRVIEKTLYNRRTRQDEPALFVALTFERREVLDSSNIKPMNLIGVDRGENIPAVIALTDPEGCPLSRFKDSLGNPTHILRIGESYKEKQRTIQAKKEVEQRRAGGYSRKYASKAKNLADDMVRNTARDLLYYAVTQDAMLIFENLSRGFGRQGKRTFMAERQYTRMEDWLTAKLAYEGLPSKTYLSKTLAQYTSKTCSNCGFTITSADYDRVLEKLKKTATGWMTTINGKELKVEGQITYYNRYKRQNVVKDLSVELDRLSEESVNNDISSWTKGRSGEALSLLKKRFSHRPVQEKFVCLNCGFETHADEQAALNIARSWLFLRSQEYKKYQTNKTTGNTDKRAFVETWQSFYRKKLKEVWKPAV

SEQ ID NO: 45003 - protein, 979 aa, synthetic construct
  REGION 1..979: note = engineered CasX variant
QEIKRINKIRRRLVKDSNTKKAGKTGPMKTLLVRVMTPDLRERLENLRKKPENIPQPISNTSRANLNKLLTDYTEMKKAILHVYWEEFQKDPVGLMSRVAQPASKKIDQNKLKPEMDEKGNLTTAGFACSQCGQPLFVYKLEQVSEKGKAYTNYFGRCNVAEHEKLILLAQLKPEKDSDEAVTYSLGKFGQRALDFYSIHVTKESTHPVKPLAQIAGNRYASTPVGKALSDACMGTIASFLSKYQDIIIEHQKVVKGNQKRLESLRELAGKENLEYPSVTLPPQPHTKEGVDAYNEVIARVRMWVNLNLWQKLKLSRDDAKPLLRLKGFPSFPLVERQANEVDWWDMVCNVKKLINEKKEDGKVFWQNLAGYKRQEALRPYLSSEEDRKKGKKFARYQLGDLLLHLEKKHGEDWGKVYDEAWERIDKKVEGLSKHIKLEEERRSEDAQSKAALTDWLRAKASFVIEGLKEADDKDEFCRCELKLQKWYGDLRGKPFAIEAENSILDISGFSKQYNCAFIWQKDGVKKLNLYLIINYFKGGKLRFKKIKPEAFEANRFYTVINKKSGEIVPMEVNFNFDDPNLIILPLAFGKRFGREFIWNDLLSLETGSLKLANGRVIEKTLYNRRTRQDEPALFVALTFERREVLDSSNIKPMNLIGVDRGENIPAVIALTDPEGCPLSRFKDSLGNPTHILRIGESYKEKQRTIQAKKEVEQRRAGGYSRKYASKAKNLADDMVRNTARDLLYYAVTQDAMLIFENLSRGFGRQGKRTFMAERQYTRMEDWLTAKLAYEGLPSKTYLSKTLAQYTSKTCSNCGFTITSADYDRVLEKLKKTATGWMTTINGKELKVEGQITYYNRYKRQNVVKDLSVELDRLSEESVNNDISSWTKGRSGEALSLLKKRFSHRPVQEKFVCLNCGFETHADEQAALNIARSWLFLRSQEYKKYQTNKTTGNTDKRAFVETWQSFYRKKLKEVWKPAV

SEQ ID NO: 45004 - protein, 979 aa, synthetic construct
  REGION 1..979: note = engineered CasX variant
QEIKRINKIRRRLVKDSNTKKAGKTGPMKTLLVRVMTPDLRERLENLRKKPENIPQPISNTSRANLNKLLTDYTEMKKAILHVYWEEFQKDPVGLMSRVAQPASKKIDQNKLKPEMDEKGNLTTAGFACSQCGQPLFVYKLEQVSEKGKAYTNYFGRCNVAEHEKLILLAQLKPEKDSDEAVTYSLGKFGQRALDFYSIHVTKESTHPVKPLAQIAGNRYASAPVGKALSDACMGTIASFLSKYQDIIIEHQKVVKGNQKRLESLRELAGKENLEYPSVTLPPQPHTKEGVDAYNEVIARVRMWVNLNLWQKLKLSRDDAKPLLRLKGFPSFPLVERQANEVDWWDMVCNVKKLINEKKEDGKVFWQNLAGYKRQEALRPYLSSEEDRKKGKKFARYQLGDLLLHLEKKHGEDWGKVYDEAWERIDKKVEGLSKHIKLEEERRSEDAQSKAALTDWLRAKASFVIEGLKEADDKDEFCRCELKLQKWYGDLRGKPFAIEAENSILDISGFSKQYNCAFIWQKDGVKKLNLYLIINYFKGGKLRFKKIKPEAFEANRFYTVINKKSGEIVPMEVNFNFDDPNLIILPLAFGKRFGREFIWNDLLSLETGSLKLANGRVIEKTLYNRRTRQDEPALFVALTFERREVLDSSNIKPMNLIGVDRGENIPAVIALTDPEGCPLSRFKDSLGNPTHILRIGESYKEKQRTIQAKKEVEQRRAGGYSRKYASKAKNLADDMVRNTARDLLYYAVTQDAMLIFENLSRGFGRQGKRTFMAERQYTRMEDWLTAKLAYEGLPSKTYLSKTLAQYTSKTCSNCGFTITSADYDRVLEKLKKTATGWMTTINGKELKVEGQITYYNRYKRQNVVKDLSVELDRLSEESVNNDISSWTKGRSGEALSLLKKRFSHRPVQEKFVCLNCGFETHADEQAALNIARSWLFLRSQEYKKYQTNKTTGNTDKRAFVETWQSFYRKKLKEVWKPAV

SEQ ID NO: 45005 - protein, 979 aa, synthetic construct
  REGION 1..979: note = engineered CasX variant
QEIKRINKIRRRLVKDSNTKKAGKTGPMKTLLVRVMTPDLRERLENLRKKPENIPQPISNTSRANLNKLLTDYTEMKKAILHVYWEEFQKDPVGLMSRVAQPASKKIDQNKLKPEMDEKGNLTTAGFACSQCGQPLFVYKLEQVSEKGKAYTNYFGRCNVAEHEKLILLAQLKPEKDSDEAVTYSLGKFGQRALDFYSIHVTKESTHPVKPLAQIAGNRYASVPVGKALSDACMGTIASFLSKYQDIIIEHQKVVKGNQKRLESLRELAGKENLEYPSVTLPPQPHTKEGVDAYNEVIARVRMWVNLNLWQKLKLSRDDAKPLLRLKGFPSFPLVERQANEVDWWDMVCNVKKLINEKKEDGKVFWQNLAGYKRQEALRPYLSSEEDRKKGKKFARYQLGDLLLHLEKKHGEDWGKVYDEAWERIDKKVEGLSKHIKLEEERRSEDAQSKAALTDWLRAKASFVIEGLKEADDKDEFCRCELKLQKWYGDLRGKPFAIEAENSILDISGFSKQYNCAFIWQKDGVKKLNLYLIINYFKGGKLRFKKIKPEAFEANRFYTVINKKSGEIVPMEVNFNFDDPNLIILPLAFGKRFGREFIWNDLLSLETGSLKLANGRVIEKTLYNRRTRQDEPALFVALTFERREVLDSSNIKPMNLIGVDRGENIPAVIALTDPEGCPLSRFKDSLGNPTHILRIGESYKEKQRTIQAKKEVEQRRAGGYSRKYASKAKNLADDMVRNTARDLLYYAVTQDAMLIFENLSRGFGRQGKRTFMAERQYTRMEDWLTAKLAYEGLPSKTYLSKTLAQYTSKTCSNCGFTITSADYDRVLEKLKKTATGWMTTINGKELKVEGQITYYNRYKRQNVVKDLSVELDRLSEESVNNDISSWTKGRSGEALSLLKKRFSHRPVQEKFVCLNCGFETHADEQAALNIARSWLFLRSQEYKKYQTNKTTGNTDKRAFVETWQSFYRKKLKEVWKPAV

SEQ ID NO: 45006 - protein, 979 aa, synthetic construct
  REGION 1..979: note = engineered CasX variant
QEIKRINKIRRRLVKDSNTKKAGKTGPMKTLLVRVMTPDLRERLENLRKKPENIPQPISNTSRANLNKLLTDYTEMKKAILHVYWEEFQKDPVGLMSRVAQPASKKIDQNKLKPEMDEKGNLTTAGFACSQCGQPLFVYKLEQVSEKGKAYTNYFGRCNVAEHEKLIKLAQLKPEKDSDEAVTYSLGKFGQRALDFYSIHVTKESTHPVKPLAQIAGNRYASGPVGKALSDACMGTIASFLSKYQDIIIEHQKVVKGNQKRLESLRELAGKENLEYPSVTLPPQPHTKEGVDAYNEVIARVRMWVNLNLWQKLKLSRDDAKPLLRLKGFPSFPLVERQANEVDWWDMVCNVKKLINEKKEDGKVFWQNLAGYKRQEALRPYLSSEEDRKKGKKFARYQLGDLLLHLEKKHGEDWGKVYDEAWERIDKKVEGLSKHIKLEEERRSEDAQSKAALTDWLRAKASFVIEGLKEADDKDEFCRCELKLQKWYGDLRGKPFAIEAENSILDISGFSKQYNCAFIWQKDGVKKLNLYLIINYFKGGKLRFKKIKPEAFEANRFYTVINKKSGEIVPMEVNFNFDDPNLIILPLAFGKRFGREFIWNDLLSLETGSLKLANGRVIEKTLYNRRTRQDEPALFVALTFERREVLDSSNIKPMNLIGVDRGENIPAVIALTDPEGCPLSRFKDSLGNPTHILRIGESYKEKQRTIQAKKEVEQRRAGGYSRKYASKAKNLADDMVRNTARDLLYYAVTQDAMLIFENLSRGFGRQGKRTFMAERQYTRMEDWLTAKLAYEGLPSKTYLSKTLAQYTSKTCSNCGFTITSADYDRVLEKLKKTATGWMTTINGKELKVEGQITYYNRYKRQNVVKDLSVELDRLSEESVNNDISSWTKGRSGEALSLLKKRFSHRPVQEKFVCLNCGFETHADEQAALNIARSWLFLRSQEYKKYQTNKTTGNTDKRAFVETWQSFYRKKLKEVWKPAV

SEQ ID NO: 45007 - protein, 978 aa, synthetic construct
  REGION 1..978: note = engineered CasX variant
QEIKRINKIRRRLVKDSNTKKAGKTGPMKTLLVRVMTPDLRERLENLRKKPENIPQPISNTSRANLNKLLTDYTEMKKAILHVYWEEFQKDPVGLMSRVAQPASKKIDQNKLKPEMDEKGNLTTAGFACSQCGQPLFVYKLEQVSEKGKAYTNYFGRCNVAEHEKLILLAQLKPEKDSDEAVTYSLGKFGQRALDFYSIHVTKESTHPVKPLAQIAGNRYASPVGKALSDACMGTIASFLSKYQDIIIEHQKVVKGNQKRLESLRELAGKENLEYPSVTLPPQPHTKEGVDAYNEVIARVRMWVNLNLWQKLKLSRDDAKPLLRLKGFPSFPLVERQANEVDWWDMVCNVKKLINEKKEDGKVFWQNLAGYKRQEALRPYLSSEEDRKKGKKFARYQLGDLLLHLEKKHGEDWGKVYDEAWERIDKKVEGLSKHIKLEEERRSEDAQSKAALTDWLRAKASFVIEGLKEADDKDEFCRCELKLQKWYGDLRGKPFAIEAENSILDISGFSKQYNCAFIWQKDGVKKLNLYLIINYFKGGKLRFKKIKPEAFEANRFYTVINKKSGEIVPMEVNFNFDDPNLIILPLAFGKRFGREFIWNDLLSLETGSLKLANGRVIEKTLYNRRTRQDEPALFVALTFERREVLDSSNIKPMNLIGVDRGENIPAVIALTDPEGCPLSRFKDSLGNPTHILRIGESYKEKQRTIQAKKEVEQRRAGGYSRKYASKAKNLADDMVRNTARDLLYYAVTQDAMLIFENLSRGFGRQGKRTFMAERQYTRMEDWLTAKLAYEGLPSKTYLSKTLAQYTSKTCSNCGFTITSADYDRVLEKLKKTATGWMTTINGKELKVEGQITYYNRYKRQNVVKDLSVELDRLSEESVNNDISSWTKGRSGEALSLLKKRFSHRPVQEKFVCLNCGFETHADEQAALNIARSWLFLRSQEYKKYQTNKTTGNTDKRAFVETWQSFYRKKLKEVWKPAV

SEQ ID NO: 45008 - protein, 979 aa, synthetic construct
  REGION 1..979: note = engineered CasX variant
QEIKRINKIRRRLVKDSNTKKAGKTGPMKTLLVRVMTPDLRERLENLRKKPENIPQPISNTSRANLNKLLTDYTEMKKAILHVYWEEFQKDPVGLMSRVAQPASKKIDQNKLKPEMDEKGNLTTAGFACSQCGQPLFVYKLEQVSEKGKAYTNYFGRCNVAEHEKLILLAQLKPEKDSDEAVTYSLGKFGQRALDFYSIHVTKESTHPVKPLAQIAGNRYASYPVGKALSDACMGTIASFLSKYQDIIIEHQKVVKGNQKRLESLRELAGKENLEYPSVTLPPQPHTKEGVDAYNEVIARVRMWVNLNLWQKLKLSRDDAKPLLRLKGFPSFPLVERQANEVDWWDMVCNVKKLINEKKEDGKVFWQNLAGYKRQEALRPYLSSEEDRKKGKKFARYQLGDLLLHLEKKHGEDWGKVYDEAWERIDKKVEGLSKHIKLEEERRSEDAQSKAALTDWLRAKASFVIEGLKEADKDEFCRCELKLQKWYGDLRGKPFAIEAENSILDISGFSKQYNCAFIWQKDGVKKLNLYLIINYFKGGKLRFKKIKPEAFEANRFYTVINKKSGEIVPMEVNFNFDDPNLIILPLAFGKRFGREFIWNDLLSLETGSLKLANGRVIEKTLYNRRTRQDEPALFVALTFERREVLDSSNIKPMNLIGVDRGENIPAVIALTDPEGCPLSRFKDSLGNPTHILRIGESYKEKQRTIQAKKEVEQRRAGGYSRKYASKAKNLADDMVRNTARDLLYYAVTQDAMLIFENLSRGFGRQGKRTFMAERQYTRMEDWLTAKLAYEGLPSKTYLSKTLAQYTSKTCSNCGFTITSADYDRVLEKLKKTATGWMTTINGKELKVEGQITYYNRYKRQNVVKDLSVELDRLSEESVNNDISSWTKGRSGNEALSLLKKRFSHRPVQEKFVCLNCGFETHADEQAALNIARSWLFLRSQEYKKYQTNKTTGNTDKRAFVETWQSFYRKKLKEVWKPAV

SEQ ID NO: 45009 - protein, 979 aa, synthetic construct
  REGION 1..979: note = engineered CasX variant
QEIKRINKIRRRLVKDSNTKKAGKTGPMKTLLVRVMTPDLRERLENLRKKPENIPQPISNTSRANLNKLLTDYTEMKKAILHVYWEEFQKDPVGLMSRVAQPASKKIDQNKLKPEMDEKGNLTTAGFACSQCGQPLFVYKLEQVSEKGKAYTNYFGRCNVAEHEKLILLAQLKPEKDSDEAVTYSLGKFGQRALDFYSIHVTKESTHPVKPLAQIAGNRYASHPVGKALSDACMGTIASFLSKYQDIIIEHQKVVKGNQKRLESLRELAGKENLEYPSVTLPPQPHTKEGVDAYNEVIARVRMWVNLNLWQKLKLSRDDAKPLLRLKGFPSFPLVERQANEVDWWDMVCNVKKLINEKKEDGKVFWQNLAGYKRQEALRPYLSSEEDRKKGKKFARYQLGDLLLHLEKKHGEDWGKVYDEAWERIDKKVEGLSKHIKLEEERRSEDAQSKAALTDWLRAKASFVIEGLKEADKDEFCRCELKLQKWYGDLRGKPFAIEAENSILDISGFSKQYNCAFIWQKDGVKKLNLYLIINYFKGGKLRFKKIKPEAFEANRFYTVINKKSGEIVPMEVNFNFDDPNLIILPLAFGKRFGREFIWNDLLSLETGSLKLANGRVIEKTLYNRRTRQDEPALFVALTFERREVLDSSNIKPMNLIGVDRGENIPAVIALTDPEGCPLSRFKDSLGNPTHILRIGESYKEKQRTIQAKKEVEQRRAGGYSRKYASKAKNLADDMVRNTARDLLYYAVTQDAMLIFENLSRGFGRQGKRTFMAERQYTRMEDWLTAKLAYEGLPSKTYLSKTLAQYTSKTCSNCGFTITSADYDRVLEKLKKTATGWMTTINGKELKVEGQITYYNRYKRQNVVKDLSVELDRLSEESVNNDISSWTKGRSGNEALSLLKKRFSHRPVQEKFVCLNCGFETHADEQAALNIARSWLFLRSQEYKKYQTNKTTGNTDKRAFVETWQSFYRKKLKEVWKPAV

SEQ ID NO: 45010 - protein, 979 aa, synthetic construct
  REGION 1..979: note = engineered CasX variant
QEIKRINKIRRRLVKDSNTKKAGKTGPMKTLLVRVMTPDLRERLENLRKKPENIPQPISNTSRANLNKLLTDYTEMKKAILHVYWEEFQKDPVGLMSRVAQPASKKIDQNKLKPEMDEKGNLTTAGFACSQCGQPLFVYKLEQVSEKGKAYTNYFGRCNVAEHEKLILLAQLKPEKDSDEAVTYSLGKFGQRALDFYSIHVTKESTHPVKPLAQIAGNRYASSPVGKALSDACMGTIASFLSKYQDIIIEHQKVVKGNQKRLESLRELAGKENLEYPSVTLPPQPHTKEGVDAYNEVIARVRMWVNLNLWQKLKLSRDDAKPLLRLKGFPSFPLVERQANEVDWWDMVCNVKKLINEKKEDGKVFWQNLAGYKRQEALRPYLSSEEDRKKGKKFARYQLGDLLLHLEKKHGEDWGKVYDEAWERIDKKVEGLSKHIKLEEERRSEDAQSKAALTDWLRAKASFVIEGLKEADKDEFCRCELKLQKWYGDLRGKPFAIEAENSILDISGFSKQYNCAFIWQKDGVKKLNLYLIINYFKGGKLRFKKIKPEAFEANRFYTVINKKSGEIVPMEVNFNFDDPNLIILPLAFGKRFGREFIWNDLLSLETGSLKLANGRVIEKTLYNRRTRQDEPALFVALTFERREVLDSSNIKPMNLIGVDRGENIPAVIALTDPEGCPLSRFKDSLGNPTHILRIGESYKEKQRTIQAKKEVEQRRAGGYSRKYASKAKNLADDMVRNTARDLLYYAVTQDAMLIFENLSRGFGRQGKRTFMAERQYTRMEDWLTAKLAYEGLPSKTYLSKTLAQYTSKTCSNCGFTITSADYDRVLEKLKKTATGWMTTINGKELKVEGQITYYNRYKRQNVVKDLSVELDRLSEESVNNDISSWTKGRSGNEALSLLKKRFSHRPVQEKFVCLNCGFETHADEQAALNIARSWLFLRSQEYKKYQTNKTTGNTDKRAFVETWQSFYRKKLKEVWKPAV

SEQ ID NO: 45011 - protein, 979 aa, synthetic construct
  REGION 1..979: note = engineered CasX variant
QEIKRINKIRRRLVKDSNTKKAGKTGPMKTLLVRVMTPDLRERLENLRKKPENIPQPISNTSRANLNKLLTDYTEMKKAILHVYWEEFQKDPVGLMSRVAQPASKKIDQNKLKPEMDEKGNLTTAGFACSQCGQPLFVYKLEQVSEKGKAYTNYFGRCNVAEHEKLILLAQLKPEKDSDEAVTYSLGKFGQRALDFYSIHVTKESTHPVKPLAQIAGNRYASTPVGKALSDACMGTIASFLSKYQDIIIEHQKVVKGNQKRLESLRELAGKENLEYPSVTLPPQPHTKEGVDAYNEVIARVRMWVNLNLWQKLKLSRDDAKPLLRLKGFPSFPLVERQANEVDWWDMVCNVKKLINEKKEDGKVFWQNLAGYKRQEALRPYLSSEEDRKKGKKFARYQLGDLLLHLEKKHGEDWGKVYDEAWERIDKKVEGLSKHIKLEEERRSEDAQSKAALTDWLRAKASFVIEGLKEADKDEFCRCELKLQKWYGDLRGKPFAIEAENSILDISGFSKQYNCAFIWQKDGVKKLNLYLIINYFKGGKLRFKKIKPEAFEANRFYTVINKKSGEIVPMEVNFNFDDPNLIILPLAFGKRFGREFIWNDLLSLETGSLKLANGRVIEKTLYNRRTRQDEPALFVALTFERREVLDSSNIKPMNLIGVDRGENIPAVIALTDPEGCPLSRFKDSLGNPTHILRIGESYKEKQRTIQAKKEVEQRRAGGYSRKYASKAKNLADDMVRNTARDLLYYAVTQDAMLIFENLSRGFGRQGKRTFMAERQYTRMEDWLTAKLAYEGLPSKTYLSKTLAQYTSKTCSNCGFTITSADYDRVLEKLKKTATGWMTTINGKELKVEGQITYYNRYKRQNVVKDLSVELDRLSEESVNNDISSWTKGRSGNEALSLLKKRFSHRPVQEKFVCLNCGFETHADEQAALNIARSWLFLRSQEYKKYQTNKTTGNTDKRAFVETWQSFYRKKLKEVWKPAV

SEQ ID NO: 45012 - protein, 979 aa, synthetic construct
  REGION 1..979: note = engineered CasX variant
QEIKRINKIRRRLVKDSNTKKAGKTGPMKTLLVRVMTPDLRERLENLRKKPENIPQPISNTSRANLNKLLTDYTEMKKAILHVYWEEFQKDPVGLMSRVAQPASKKIDQNKLKPEMDEKGNLTTAGFACSQCGQPLFVYKLEQVSEKGKAYTNYFGRCNVAEHEKLILLAQLKPEKDSDEAVTYSLGKFGQRALDFYSIHVTKESTHPVKPLAQIAGNRYASAPVGKALSDACMGTIASFLSKYQDIIIEHQKVVKGNQKRLESLRELAGKENLEYPSVTLPPQPHTKEGVDAYNEVIARVRMWVNLNLWQKLKLSRDDAKPLLRLKGFPSFPLVERQANEVDWWDMVCNVKKLINEKKEDGKVFWQNLAGYKRQEALRPYLSSEEDRKKGKKFARYQLGDLLLHLEKKHGEDWGKVYDEAWERIDKKVEGLSKHIKLEEERRSEDAQSKAALTDWLRAKASFVIEGLKEADKDEFCRCELKLQKWYGDLRGKPFAIEAENSILDISGFSKQYNCAFIWQKDGVKKLNLYLIINYFKGGKLRFKKIKPEAFEANRFYTVINKKSGEIVPMEVNFNFDDPNLIILPLAFGKRFGREFIWNDLLSLETGSLKLANGRVIEKTLYNRRTRQDEPALFVALTFERREVLDSSNIKPMNLIGVDRGENIPAVIALTDPEGCPLSRFKDSLGNPTHILRIGESYKEKQRTIQAKKEVEQRRAGGYSRKYASKAKNLADDMVRNTARDLLYYAVTQDAMLIFENLSRGFGRQGKRTFMAERQYTRMEDWLTAKLAYEGLPSKTYLSKTLAQYTSKTCSNCGFTITSADYDRVLEKLKKTATGWMTTINGKELKVEGQITYYNRYKRQNVVKDLSVELDRLSEESVNNDISSWTKGRSGNEALSLLKKRFSHRPVQEKFVCLNCGFETHADEQAALNIARSWLFLRSQEYKKYQTNKTTGNTDKRAFVETWQSFYRKKLKEVWKPAV

SEQ ID NO: 45013 - protein, 979 aa, synthetic construct
  REGION 1..979: note = engineered CasX variant
QEIKRINKIRRRLVKDSNTKKAGKTGPMKTLLVRVMTPDLRERLENLRKKPENIPQPISNTSRANLNKLLTDYTEMKKAILHVYWEEFQKDPVGLMSRVAQPASKKIDQNKLKPEMDEKGNLTTAGFACSQCGQPLFVYKLEQVSEKGKAYTNYFGRCNVAEHEKLILLAQLKPEKDSDEAVTYSLGKFGQRALDFYSIHVTKESTHPVKPLAQIAGNRYASVPVGKALSDACMGTIASFLSKYQDIIIEHQKVVKGNQKRLESLRELAGKENLEYPSVTLPPQPHTKEGVDAYNEVIARVRMWVNLNLWQKLKLSRDDAKPLLRLKGFPSFPLVERQANEVDWWDMVCNVKKLINEKKEDGKVFWQNLAGYKRQEALRPYLSSEEDRKKGKKFARYQLGDLLLHLEKKHGEDWGKVYDEAWERIDKKVEGLSKHIKLEEERRSEDAQSKAALTDWLRAKASFVIEGLKEADKDEFCRCELKLQKWYGDLRGKPFAIEAENSILDISGFSKQYNCAFIWQKDGVKKLNLYLIINYFKGGKLRFKKIKPEAFEANRFYTVINKKSGEIVPMEVNFNFDDPNLIILPLAFGKRFGREFIWNDLLSLETGSLKLANGRVIEKTLYNRRTRQDEPALFVALTFERREVLDSSNIKPMNLIGVDRGENIPAVIALTDPEGCPLSRFKDSLGNPTHILRIGESYKEKQRTIQAKKEVEQRRAGGYSRKYASKAKNLADDMVRNTARDLLYYAVTQDAMLIFENLSRGFGRQGKRTFMAERQYTRMEDWLTAKLAYEGLPSKTYLSKTLAQYTSKTCSNCGFTITSADYDRVLEKLKKTATGWMTTINGKELKVEGQITYYNRYKRQNVVKDLSVELDRLSEESVNNDISSWTKGRSGNEALSLLKKRFSHRPVQEKFVCLNCGFETHADEQAALNIARSWLFLRSQEYKKYQTNKTTGNTDKRAFVETWQSFYRKKLKEVWKPAV

SEQ ID NO: 45014 - protein, 979 aa, synthetic construct
  REGION 1..979: note = engineered CasX variant
QEIKRINKIRRRLVKDSNTKKAGKTGPMKTLLVRVMTPDLRERLENLRKKPENIPQPISNTSRANLNKLLTDYTEMKKAILHVYWEEFQKDPVGLMSRVAQPASKKIDQNKLKPEMDEKGNLTTAGFACSQCGQPLFVYKLEQVSEKGKAYTNYFGRCNVAEHEKLIKLAQLKPEKDSDEAVTYSLGKFGQRALDFYSIHVTKESTHPVKPLAQIAGNRYASGPVGKALSDACMGTIASFLSKYQDIIIEHQKVVKGNQKRLESLRELAGKENLEYPSVTLPPQPHTKEGVDAYNEVIARVRMWVNLNLWQKLKLSRDDAKPLLRLKGFPSFPLVERQANEVDWWDMVCNVKKLINEKKEDGKVFWQNLAGYKRQEALRPYLSSEEDRKKGKKFARYQLGDLLLHLEKKHGEDWGKVYDEAWERIDKKVEGLSKHIKLEEERRSEDAQSKAALTDWLRAKASFVIEGLKEADKDEFCRCELKLQKWYGDLRGKPFAIEAENSILDISGFSKQYNCAFIWQKDGVKKLNLYLIINYFKGGKLRFKKIKPEAFEANRFYTVINKKSGEIVPMEVNFNFDDPNLIILPLAFGKRFGREFIWNDLLSLETGSLKLANGRVIEKTLYNRRTRQDEPALFVALTFERREVLDSSNIKPMNLIGVDRGENIPAVIALTDPEGCPLSRFKDSLGNPTHILRIGESYKEKQRTIQAKKEVEQRRAGGYSRKYASKAKNLADDMVRNTARDLLYYAVTQDAMLIFENLSRGFGRQGKRTFMAERQYTRMEDWLTAKLAYEGLPSKTYLSKTLAQYTSKTCSNCGFTITSADYDRVLEKLKKTATGWMTTINGKELKVEGQITYYNRYKRQNVVKDLSVELDRLSEESVNNDISSWTKGRSGNEALSLLKKRFSHRPVQEKFVCLNCGFETHADEQAALNIARSWLFLRSQEYKKYQTNKTTGNTDKRAFVETWQSFYRKKLKEVWKPAV

SEQ ID NO: 45015 - protein, 978 aa, synthetic construct
  REGION 1..978: note = engineered CasX variant
QEIKRINKIRRRLVKDSNTKKAGKTGPMKTLLVRVMTPDLRERLENLRKKPENIPQPISNTSRANLNKLLTDYTEMKKAILHVYWEEFQKDPVGLMSRVAQPASKKIDQNKLKPEMDEKGNLTTAGFACSQCGQPLFVYKLEQVSEKGKAYTNYFGRCNVAEHEKLILLAQLKPEKDSDEAVTYSLGKFGQRALDFYSIHVTKESTHPVKPLAQIAGNRYASPVGKALSDACMGTIASFLSKYQDIIIEHQKVVKGNQKRLESLRELAGKENLEYPSVTLPPQPHTKEGVDAYNEVIARVRMWVNLNLWQKLKLSRDDAKPLLRLKGFPSFPLVERQANEVDWWDMVCNVKKLINEKKEDGKVFWQNLAGYKRQEALRPYLSSEEDRKKGKKFARYQLGDLLLHLEKKHGEDWGKVYDEAWERIDKKVEGLSKHIKLEEERRSEDAQSKAALTDWLRAKASFVIEGLKEADKDEFCRCELKLQKWYGDLRGKPFAIEAENSILDISGFSKQYNCAFIWQKDGVKKLNLYLIINYFKGGKLRFKKIKPEAFEANRFYTVINKKSGEIVPMEVNFNFDDPNLIILPLAFGKRFGREFIWNDLLSLETGSLKLANGRVIEKTLYNRRTRQDEPALFVALTFERREVLDSSNIKPMNLIGVDRGENIPAVIALTDPEGCPLSRFKDSLGNPTHILRIGESYKEKQRTIQAKKEVEQRRAGGYSRKYASKAKNLADDMVRNTARDLLYYAVTQDAMLIFENLSRGFGRQGKRTFMAERQYTRMEDWLTAKLAYEGLPSKTYLSKTLAQYTSKTCSNCGFTITSADYDRVLEKLKKTATGWMTTINGKELKVEGQITYYNRYKRQNVVKDLSVELDRLSEESVNNDISSWTKGRSGNEALSLLKKRFSHRPVQEKFVCLNCGFETHADEQAALNIARSWLFLRSQEYKKYQTNKTTGNTDKRAFVETWQSFYRKKLKEVWKPAV

SEQ ID NO: 45016 - protein, 978 aa, synthetic construct
  REGION 1..978: note = engineered CasX variant
QEIKRINKIRRRLVKDSNTKKAGKTGPMKTLLVRVMTPDLRERLENLRKKPENIPQPISNTSRANLNKLLTDYTEMKKAILHVYWEEFQKDPVGLMSRVAQPASKKIDQNKLKPEMDEKGNLTTAGFACSQCGQPLFVYKLEQVSEKGKAYTNYFGRCNVAEHEKLILLAQLKPEKDSDEAVTYSLGKFGQRALDFYSIHVTKESTHPVKPLAQIAGNRYASYPVGKALSDACMGTIASFLSKYQDIIIEHQKVVKGNQKRLESLRELAGKENLEYPSVTLPPQPHTKEGVDAYNEVIARVRMWVNLNLWQKLKLSRDDAKPLLRLKGFPSFPLVERQANEVDWWDMVCNVKKLINEKKEDGKVFWQNLAGYKRQEALRPYLSSEEDRQKGKKFARYQLGDLLLHLEKKHGEDWGKVYDEAWERIDKKVEGLSKHIKLEEERRSEDAQSKAALTDWLRAKASFVIEGLKEADKDEFCRCELKLQKWYGDLRGKPFAIEAENSILDISGFSKQYNCAFIWQKDGVKKLNLYLIINYFKGGKLRFKKIKPEAFEANRFYTVINKKSGEIVPMEVNFNFDDPNLIILPLAFGKRFGREFIWNDLLSLETGSLKLANGRVIEKTLYNRRTRQDEPALFVALTFERREVLDSSNIKPMNLIGVDRGENIPAVIALTDPEGCPLSRFKDSLGNPTHILRIGESYKEKQRTIQAKKEVEQRRAGGYSRKYASKAKNLADDMVRNTARDLLYYAVTQDAMLIFENLSRGFGRQGKRTFMAERQYTRMEDWLTAKLAYEGLPSKTYLSKTLAQYTSKTCSNCGFTITSADYDRVLEKLKKTATGWMTTINGKELKVEGQITYYNRYKRQNVVKDLSVELDRLSEESVNNDISSWTKGRSGEALSLLKKRFSHRPVQEKFVCLNCGFETHADEQAALNIARSWLFLRSQEYKKYQTNKTTGNTDKRAFVETWQSFYRKKLKEVWKPAV

SEQ ID NO: 45017 - protein, 978 aa, synthetic construct
  REGION 1..978: note = engineered CasX variant
QEIKRINKIRRRLVKDSNTKKAGKTGPMKTLLVRVMTPDLRERLENLRKKPENIPQPISNTSRANLNKLLTDYTEMKKAILHVYWEEFQKDPVGLMSRVAQPASKKIDQNKLKPEMDEKGNLTTAGFACSQCGQPLFVYKLEQVSEKGKAYTNYFGRCNVAEHEKLILLAQLKPEKDSDEAVTYSLGKFGQRALDFYSIHVTKESTHPVKPLAQIAGNRYASHPVGKALSDACMGTIASFLSKYQDIIIEHQKVVKGNQKRLESLRELAGKENLEYPSVTLPPQPHTKEGVDAYNEVIARVRMWVNLNLWQKLKLSRDDAKPLLRLKGFPSFPLVERQANEVDWWDMVCNVKKLINEKKEDGKVFWQNLAGYKRQEALRPYLSSEEDRQKGKKFARYQLGDLLLHLEKKHGEDWGKVYDEAWERIDKKVEGLSKHIKLEEERRSEDAQSKAALTDWLRAKASFVIEGLKEADKDEFCRCELKLQKWYGDLRGKPFAIEAENSILDISGFSKQYNCAFIWQKDGVKKLNLYLIINYFKGGKLRFKKIKPEAFEANRFYTVINKKSGEIVPMEVNFNFDDPNLIILPLAFGKRFGREFIWNDLLSLETGSLKLANGRVIEKTLYNRRTRQDEPALFVALTFERREVLDSSNIKPMNLIGVDRGENIPAVIALTDPEGCPLSRFKDSLGNPTHILRIGESYKEKQRTIQAKKEVEQRRAGGYSRKYASKAKNLADDMVRNTARDLLYYAVTQDAMLIFENLSRGFGRQGKRTFMAERQYTRMEDWLTAKLAYEGLPSKTYLSKTLAQYTSKTCSNCGFTITSADYDRVLEKLKKTATGWMTTINGKELKVEGQITYYNRYKRQNVVKDLSVELDRLSEESVNNDISSWTKGRSGEALSLLKKRFSHRPVQEKFVCLNCGFETHADEQAALNIARSWLFLRSQEYKKYQTNKTTGNTDKRAFVETWQSFYRKKLKEVWKPAV

SEQ ID NO: 45018 - protein, 978 aa, synthetic construct
  REGION 1..978: note = engineered CasX variant
QEIKRINKIRRRLVKDSNTKKAGKTGPMKTLLVRVMTPDLRERLENLRKKPENIPQPISNTSRANLNKLLTDYTEMKKAILHVYWEEFQKDPVGLMSRVAQPASKKIDQNKLKPEMDEKGNLTTAGFACSQCGQPLFVYKLEQVSEKGKAYTNYFGRCNVAEHEKLILLAQLKPEKDSDEAVTYSLGKFGQRALDFYSIHVTKESTHPVKPLAQIAGNRYASSPVGKALSDACMGTIASFLSKYQDIIIEHQKVVKGNQKRLESLRELAGKENLEYPSVTLPPQPHTKEGVDAYNEVIARVRMWVNLNLWQKLKLSRDDAKPLLRLKGFPSFPLVERQANEVDWWDMVCNVKKLINEKKEDGKVFWQNLAGYKRQEALRPYLSSEEDRQKGKKFARYQLGDLLLHLEKKHGEDWGKVYDEAWERIDKKVEGLSKHIKLEEERRSEDAQSKAALTDWLRAKASFVIEGLKEADKDEFCRCELKLQKWYGDLRGKPFAIEAENSILDISGFSKQYNCAFIWQKDGVKKLNLYLIINYFKGGKLRFKKIKPEAFEANRFYTVINKKSGEIVPMEVNFNFDDPNLIILPLAFGKRFGREFIWNDLLSLETGSLKLANGRVIEKTLYNRRTRQDEPALFVALTFERREVLDSSNIKPMNLIGVDRGENIPAVIALTDPEGCPLSRFKDSLGNPTHILRIGESYKEKQRTIQAKKEVEQRRAGGYSRKYASKAKNLADDMVRNTARDLLYYAVTQDAMLIFENLSRGFGRQGKRTFMAERQYTRMEDWLTAKLAYEGLPSKTYLSKTLAQYTSKTCSNCGFTITSADYDRVLEKLKKTATGWMTTINGKELKVEGQITYYNRYKRQNVVKDLSVELDRLSEESVNNDISSWTKGRSGEALSLLKKRFSHRPVQEKFVCLNCGFETHADEQAALNIARSWLFLRSQEYKKYQTNKTTGNTDKRAFVETWQSFYRKKLKEVWKPAV

SEQ ID NO: 45019 - protein, 978 aa, synthetic construct
  REGION 1..978: note = engineered CasX variant
QEIKRINKIRRRLVKDSNTKKAGKTGPMKTLLVRVMTPDLRERLENLRKKPENIPQPISNTSRANLNKLLTDYTEMKKAILHVYWEEFQKDPVGLMSRVAQPASKKIDQNKLKPEMDEKGNLTTAGFACSQCGQPLFVYKLEQVSEKGKAYTNYFGRCNVAEHEKLILLAQLKPEKDSDEAVTYSLGKFGQRALDFYSIHVTKESTHPVKPLAQIAGNRYASTPVGKALSDACMGTIASFLSKYQDIIIEHQKVVKGNQKRLESLRELAGKENLEYPSVTLPPQPHTKEGVDAYNEVIARVRMWVNLNLWQKLKLSRDDAKPLLRLKGFPSFPLVERQANEVDWWDMVCNVKKLINEKKEDGKVFWQNLAGYKRQEALRPYLSSEEDRQKGKKFARYQLGDLLLHLEKKHGEDWGKVYDEAWERIDKKVEGLSKHIKLEEERRSEDAQSKAALTDWLRAKASFVIEGLKEADKDEFCRCELKLQKWYGDLRGKPFAIEAENSILDISGFSKQYNCAFIWQKDGVKKLNLYLIINYFKGGKLRFKKIKPEAFEANRFYTVINKKSGEIVPMEVNFNFDDPNLIILPLAFGKRFGREFIWNDLLSLETGSLKLANGRVIEKTLYNRRTRQDEPALFVALTFERREVLDSSNIKPMNLIGVDRGENIPAVIALTDPEGCPLSRFKDSLGNPTHILRIGESYKEKQRTIQAKKEVEQRRAGGYSRKYASKAKNLADDMVRNTARDLLYYAVTQDAMLIFENLSRGFGRQGKRTFMAERQYTRMEDWLTAKLAYEGLPSKTYLSKTLAQYTSKTCSNCGFTITSADYDRVLEKLKKTATGWMTTINGKELKVEGQITYYNRYKRQNVVKDLSVELDRLSEESVNNDISSWTKGRSGEALSLLKKRFSHRPVQEKFVCLNCGFETHADEQAALNIARSWLFLRSQEYKKYQTNKTTGNTDKRAFVETWQSFYRKKLKEVWKPAV

SEQ ID NO: 45020 - protein, 978 aa, synthetic construct
  REGION 1..978: note = engineered CasX variant
QEIKRINKIRRRLVKDSNTKKAGKTGPMKTLLVRVMTPDLRERLENLRKKPENIPQPISNTSRANLNKLLTDYTEMKKAILHVYWEEFQKDPVGLMSRVAQPASKKIDQNKLKPEMDEKGNLTTAGFACSQCGQPLFVYKLEQVSEKGKAYTNYFGRCNVAEHEKLILLAQLKPEKDSDEAVTYSLGKFGQRALDFYSIHVTKESTHPVKPLAQIAGNRYASAPVGKALSDACMGTIASFLSKYQDIIIEHQKVVKGNQKRLESLRELAGKENLEYPSVTLPPQPHTKEGVDAYNEVIARVRMWVNLNLWQKLKLSRDDAKPLLRLKGFPSFPLVERQANEVDWWDMVCNVKKLINEKKEDGKVFWQNLAGYKRQEALRPYLSSEEDRQKGKKFARYQLGDLLLHLEKKHGEDWGKVYDEAWERIDKKVEGLSKHIKLEEERRSEDAQSKAALTDWLRAKASFVIEGLKEADKDEFCRCELKLQKWYGDLRGKPFAIEAENSILDISGFSKQYNCAFIWQKDGVKKLNLYLIINYFKGGKLRFKKIKPEAFEANRFYTVINKKSGEIVPMEVNFNFDDPNLIILPLAFGKRFGREFIWNDLLSLETGSLKLANGRVIEKTLYNRRTRQDEPALFVALTFERREVLDSSNIKPMNLIGVDRGENIPAVIALTDPEGCPLSRFKDSLGNPTHILRIGESYKEKQRTIQAKKEVEQRRAGGYSRKYASKAKNLADDMVRNTARDLLYYAVTQDAMLIFENLSRGFGRQGKRTFMAERQYTRMEDWLTAKLAYEGLPSKTYLSKTLAQYTSKTCSNCGFTITSADYDRVLEKLKKTATGWMTTINGKELKVEGQITYYNRYKRQNVVKDLSVELDRLSEESVNNDISSWTKGRSGEALSLLKKRFSHRPVQEKFVCLNCGFETHADEQAALNIARSWLFLRSQEYKKYQTNKTTGNTDKRAFVETWQSFYRKKLKEVWKPAV

SEQ ID NO: 45021 - protein, 978 aa, synthetic construct
  REGION 1..978: note = engineered CasX variant
QEIKRINKIRRRLVKDSNTKKAGKTGPMKTLLVRVMTPDLRERLENLRKKPENIPQPISNTSRANLNKLLTDYTEMKKAILHVYWEEFQKDPVGLMSRVAQPASKKIDQNKLKPEMDEKGNLTTAGFACSQCGQPLFVYKLEQVSEKGKAYTNYFGRCNVAEHEKLILLAQLKPEKDSDEAVTYSLGKFGQRALDFYSIHVTKESTHPVKPLAQIAGNRYASVPVGKALSDACMGTIASFLSKYQDIIIEHQKVVKGNQKRLESLRELAGKENLEYPSVTLPPQPHTKEGVDAYNEVIARVRMWVNLNLWQKLKLSRDDAKPLLRLKGFPSFPLVERQANEVDWWDMVCNVKKLINEKKEDGKVFWQNLAGYKRQEALRPYLSSEEDRQKGKKFARYQLGDLLLHLEKKHGEDWGKVYDEAWERIDKKVEGLSKHIKLEEERRSEDAQSKAALTDWLRAKASFVIEGLKEADKDEFCRCELKLQKWYGDLRGKPFAIEAENSILDISGFSKQYNCAFIWQKDGVKKLNLYLIINYFKGGKLRFKKIKPEAFEANRFYTVINKKSGEIVPMEVNFNFDDPNLIILPLAFGKRFGREFIWNDLLSLETGSLKLANGRVIEKTLYNRRTRQDEPALFVALTFERREVLDSSNIKPMNLIGVDRGENIPAVIALTDPEGCPLSRFKDSLGNPTHILRIGESYKEKQRTIQAKKEVEQRRAGGYSRKYASKAKNLADDMVRNTARDLLYYAVTQDAMLIFENLSRGFGRQGKRTFMAERQYTRMEDWLTAKLAYEGLPSKTYLSKTLAQYTSKTCSNCGFTITSADYDRVLEKLKKTATGWMTTINGKELKVEGQITYYNRYKRQNVVKDLSVELDRLSEESVNNDISSWTKGRSGEALSLLKKRFSHRPVQEKFVCLNCGFETHADEQAALNIARSWLFLRSQEYKKYQTNKTTGNTDKRAFVETWQSFYRKKLKEVWKPAV

SEQ ID NO: 45022 - protein, 978 aa, synthetic construct
  REGION 1..978: note = engineered CasX variant
QEIKRINKIRRRLVKDSNTKKAGKTGPMKTLLVRVMTPDLRERLENLRKKPENIPQPISNTSRANLNKLLTDYTEMKKAILHVYWEEFQKDPVGLMSRVAQPASKKIDQNKLKPEMDEKGNLTTAGFACSQCGQPLFVYKLEQVSEKGKAYTNYFGRCNVAEHEKLIKLAQLKPEKDSDEAVTYSLGKFGQRALDFYSIHVTKESTHPVKPLAQIAGNRYASGPVGKALSDACMGTIASFLSKYQDIIIEHQKVVKGNQKRLESLRELAGKENLEYPSVTLPPQPHTKEGVDAYNEVIARVRMWVNLNLWQKLKLSRDDAKPLLRLKGFPSFPLVERQANEVDWWDMVCNVKKLINEKKEDGKVFWQNLAGYKRQEALRPYLSSEEDRQKGKKFARYQLGDLLLHLEKKHGEDWGKVYDEAWERIDKKVEGLSKHIKLEEERRSEDAQSKAALTDWLRAKASFVIEGLKEADKDEFCRCELKLQKWYGDLRGKPFAIEAENSILDISGFSKQYNCAFIWQKDGVKKLNLYLIINYFKGGKLRFKKIKPEAFEANRFYTVINKKSGEIVPMEVNFNFDDPNLIILPLAFGKRFGREFIWNDLLSLETGSLKLANGRVIEKTLYNRRTRQDEPALFVALTFERREVLDSSNIKPMNLIGVDRGENIPAVIALTDPEGCPLSRFKDSLGNPTHILRIGESYKEKQRTIQAKKEVEQRRAGGYSRKYASKAKNLADDMVRNTARDLLYYAVTQDAMLIFENLSRGFGRQGKRTFMAERQYTRMEDWLTAKLAYEGLPSKTYLSKTLAQYTSKTCSNCGFTITSADYDRVLEKLKKTATGWMTTINGKELKVEGQITYYNRYKRQNVVKDLSVELDRLSEESVNNDISSWTKGRSGEALSLLKKRFSHRPVQEKFVCLNCGFETHADEQAALNIARSWLFLRSQEYKKYQTNKTTGNTDKRAFVETWQSFYRKKLKEVWKPAV

SEQ ID NO: 45023 - protein, 977 aa, synthetic construct
  REGION 1..977: note = engineered CasX variant
QEIKRINKIRRRLVKDSNTKKAGKTGPMKTLLVRVMTPDLRERLENLRKKPENIPQPISNTSRANLNKLLTDYTEMKKAILHVYWEEFQKDPVGLMSRVAQPASKKIDQNKLKPEMDEKGNLTTAGFACSQCGQPLFVYKLEQVSEKGKAYTNYFGRCNVAEHEKLILLAQLKPEKDSDEAVTYSLGKFGQRALDFYSIHVTKESTHPVKPLAQIAGNRYASPVGKALSDACMGTIASFLSKYQDIIIEHQKVVKGNQKRLESLRELAGKENLEYPSVTLPPQPHTKEGVDAYNEVIARVRMWVNLNLWQKLKLSRDDAKPLLRLKGFPSFPLVERQANEVDWWDMVCNVKKLINEKKEDGKVFWQNLAGYKRQEALRPYLSSEEDRQKGKKFARYQLGDLLLHLEKKHGEDWGKVYDEAWERIDKKVEGLSKHIKLEEERRSEDAQSKAALTDWLRAKASFVIEGLKEADKDEFCRCELKLQKWYGDLRGKPFAIEAENSILDISGFSKQYNCAFIWQKDGVKKLNLYLIINYFKGGKLRFKKIKPEAFEANRFYTVINKKSGEIVPMEVNFNFDDPNLIILPLAFGKRFGREFIWNDLLSLETGSLKLANGRVIEKTLYNRRTRQDEPALFVALTFERREVLDSSNIKPMNLIGVDRGENIPAVIALTDPEGCPLSRFKDSLGNPTHILRIGESYKEKQRTIQAKKEVEQRRAGGYSRKYASKAKNLADDMVRNTARDLLYYAVTQDAMLIFENLSRGFGRQGKRTFMAERQYTRMEDWLTAKLAYEGLPSKTYLSKTLAQYTSKTCSNCGFTITSADYDRVLEKLKKTATGWMTTINGKELKVEGQITYYNRYKRQNVVKDLSVELDRLSEESVNNDISSWTKGRSGEALSLLKKRFSHRPVQEKFVCLNCGFETHADEQAALNIARSWLFLRSQEYKKYQTNKTTGNTDKRAFVETWQSFYRKKLKEVWKPAV

SEQ ID NO: 45024 - protein, 978 aa, synthetic construct
  REGION 1..978: note = engineered CasX variant
QEIKRINKIRRRLVKDSNTKKAGKTGPMKTLLVRVMTPDLRERLENLRKKPENIPQPISNTSRANLNKLLTDYTEMKKAILHVYWEEFQKDPVGLMSRVAQPASKKIDQNKLKPEMDEKGNLTTAGFACSQCGQPLFVYKLEQVSEKGKAYTNYFGRCNVAEHEKLILLAQLKPEKDSDEAVTYSLGKFGQRALDFYSIHVTKESTHPVKPLAQIAGNRYASYPVGKALSDACMGTIASFLSKYQDIIIEHQKVVKGNQKRLESLRELAGKENLEYPSVTLPPQPHTKEGVDAYNEVIARVRMWVNLNLWQKLKLSRDDAKPLLRLKGFPSFPLVERQANEVDWWDMVCNVKKLINEKKEDGKVFWQNLAGYKRQEALRPYLSSEEDRKKGKKFARYQLGDLLLHLEKKHGEDWGKVYDEAWERIDKKVEGLSKHIKLEEERRSEDAQSKAALTDWLRAKASFVIEGLKEADKDEFCRCELKLQKWYGDLRGKPFAIEAENSILDISGFSKQYNCAFIWQKDGVKKLNLYLIINYFKGGKLRFKKIKPEAFEANRFYTVINKKSGEIVPMEVNFNFDDPNLIILPLAFGKRFGREFIWNDLLSLETGSLKLANGRVIEKTLYNRRTRQDEPALFVALTFERREVLDSSNIKPMNLIGVDRGENIPAVIALTDPEGCPLSRFKDSLGNPTHILRIGESYKEKQRTIQAKKEVEQRRAGGYSRKYASKAKNLADDMVRNTARDLLYYAVTQDAMLIFENLSRGFGRQGKRTFMAERQYTRMEDWLTAKLAYEGLPSQTYLSKTLAQYTSKTCSNCGFTITSADYDRVLEKLKKTATGWMTTINGKELKVEGQITYYNRYKRQNVVKDLSVELDRLSEESVNNDISSWTKGRSGEALSLLKKRFSHRPVQEKFVCLNCGFETHADEQAALNIARSWLFLRSQEYKKYQTNKTTGNTDKRAFVETWQSFYRKKLKEVWKPAV

SEQ ID NO: 45025 - protein, 978 aa, synthetic construct
  REGION 1..978: note = engineered CasX variant
QEIKRINKIRRRLVKDSNTKKAGKTGPMKTLLVRVMTPDLRERLENLRKKPENIPQPISNTSRANLNKLLTDYTEMKKAILHVYWEEFQKDPVGLMSRVAQPASKKIDQNKLKPEMDEKGNLTTAGFACSQCGQPLFVYKLEQVSEKGKAYTNYFGRCNVAEHEKLILLAQLKPEKDSDEAVTYSLGKFGQRALDFYSIHVTKESTHPVKPLAQIAGNRYASHPVGKALSDACMGTIASFLSKYQDIIIEHQKVVKGNQKRLESLRELAGKENLEYPSVTLPPQPHTKEGVDAYNEVIARVRMWVNLNLWQKLKLSRDDAKPLLRLKGFPSFPLVERQANEVDWWDMVCNVKKLINEKKEDGKVFWQNLAGYKRQEALRPYLSSEEDRKKGKKFARYQLGDLLLHLEKKHGEDWGKVYDEAWERIDKKVEGLSKHIKLEEERRSEDAQSKAALTDWLRAKASFVIEGLKEADKDEFCRCELKLQKWYGDLRGKPFAIEAENSILDISGFSKQYNCAFIWQKDGVKKLNLYLIINYFKGGKLRFKKIKPEAFEANRFYTVINKKSGEIVPMEVNFNFDDPNLIILPLAFGKRFGREFIWNDLLSLETGSLKLANGRVIEKTLYNRRTRQDEPALFVALTFERREVLDSSNIKPMNLIGVDRGENIPAVIALTDPEGCPLSRFKDSLGNPTHILRIGESYKEKQRTIQAKKEVEQRRAGGYSRKYASKAKNLADDMVRNTARDLLYYAVTQDAMLIFENLSRGFGRQGKRTFMAERQYTRMEDWLTAKLAYEGLPSQTYLSKTLAQYTSKTCSNCGFTITSADYDRVLEKLKKTATGWMTTINGKELKVEGQITYYNRYKRQNVVKDLSVELDRLSEESVNNDISSWTKGRSGEALSLLKKRFSHRPVQEKFVCLNCGFETHADEQAALNIARSWLFLRSQEYKKYQTNKTTGNTDKRAFVETWQSFYRKKLKEVWKPAV

SEQ ID NO: 45026 - protein, 978 aa, synthetic construct
  REGION 1..978: note = engineered CasX variant
QEIKRINKIRRRLVKDSNTKKAGKTGPMKTLLVRVMTPDLRERLENLRKKPENIPQPISNTSRANLNKLLTDYTEMKKAILHVYWEEFQKDPVGLMSRVAQPASKKIDQNKLKPEMDEKGNLTTAGFACSQCGQPLFVYKLEQVSEKGKAYTNYFGRCNVAEHEKLILLAQLKPEKDSDEAVTYSLGKFGQRALDFYSIHVTKESTHPVKPLAQIAGNRYASSPVGKALSDACMGTIASFLSKYQDIIIEHQKVVKGNQKRLESLRELAGKENLEYPSVTLPPQPHTKEGVDAYNEVIARVRMWVNLNLWQKLKLSRDDAKPLLRLKGFPSFPLVERQANEVDWWDMVCNVKKLINEKKEDGKVFWQNLAGYKRQEALRPYLSSEEDRKKGKKFARYQLGDLLLHLEKKHGEDWGKVYDEAWERIDKKVEGLSKHIKLEEERRSEDAQSKAALTDWLRAKASFVIEGLKEADKDEFCRCELKLQKWYGDLRGKPFAIEAENSILDISGFSKQYNCAFIWQKDGVKKLNLYLIINYFKGGKLRFKKIKPEAFEANRFYTVINKKSGEIVPMEVNFNFDDPNLIILPLAFGKRFGREFIWNDLLSLETGSLKLANGRVIEKTLYNRRTRQDEPALFVALTFERREVLDSSNIKPMNLIGVDRGENIPAVIALTDPEGCPLSRFKDSLGNPTHILRIGESYKEKQRTIQAKKEVEQRRAGGYSRKYASKAKNLADDMVRNTARDLLYYAVTQDAMLIFENLSRGFGRQGKRTFMAERQYTRMEDWLTAKLAYEGLPSQTYLSKTLAQYTSKTCSNCGFTITSADYDRVLEKLKKTATGWMTTINGKELKVEGQITYYNRYKRQNVVKDLSVELDRLSEESVNNDISSWTKGRSGEALSLLKKRFSHRPVQEKFVCLNCGFETHADEQAALNIARSWLFLRSQEYKKYQTNKTTGNTDKRAFVETWQSFYRKKLKEVWKPAV

SEQ ID NO: 45027 - protein, 978 aa, synthetic construct
  REGION 1..978: note = engineered CasX variant
QEIKRINKIRRRLVKDSNTKKAGKTGPMKTLLVRVMTPDLRERLENLRKKPENIPQPISNTSRANLNKLLTDYTEMKKAILHVYWEEFQKDPVGLMSRVAQPASKKIDQNKLKPEMDEKGNLTTAGFACSQCGQPLFVYKLEQVSEKGKAYTNYFGRCNVAEHEKLILLAQLKPEKDSDEAVTYSLGKFGQRALDFYSIHVTKESTHPVKPLAQIAGNRYASTPVGKALSDACMGTIASFLSKYQDIIIEHQKVVKGNQKRLESLRELAGKENLEYPSVTLPPQPHTKEGVDAYNEVIARVRMWVNLNLWQKLKLSRDDAKPLLRLKGFPSFPLVERQANEVDWWDMVCNVKKLINEKKEDGKVFWQNLAGYKRQEALRPYLSSEEDRKKGKKFARYQLGDLLLHLEKKHGEDWGKVYDEAWERIDKKVEGLSKHIKLEEERRSEDAQSKAALTDWLRAKASFVIEGLKEADKDEFCRCELKLQKWYGDLRGKPFAIEAENSILDISGFSKQYNCAFIWQKDGVKKLNLYLIINYFKGGKLRFKKIKPEAFEANRFYTVINKKSGEIVPMEVNFNFDDPNLIILPLAFGKRFGREFIWNDLLSLETGSLKLANGRVIEKTLYNRRTRQDEPALFVALTFERREVLDSSNIKPMNLIGVDRGENIPAVIALTDPEGCPLSRFKDSLGNPTHILRIGESYKEKQRTIQAKKEVEQRRAGGYSRKYASKAKNLADDMVRNTARDLLYYAVTQDAMLIFENLSRGFGRQGKRTFMAERQYTRMEDWLTAKLAYEGLPSQTYLSKTLAQYTSKTCSNCGFTITSADYDRVLEKLKKTATGWMTTINGKELKVEGQITYYNRYKRQNVVKDLSVELDRLSEESVNNDISSWTKGRSGEALSLLKKRFSHRPVQEKFVCLNCGFETHADEQAALNIARSWLFLRSQEYKKYQTNKTTGNTDKRAFVETWQSFYRKKLKEVWKPAV

SEQ ID NO: 45028 - protein, 978 aa, synthetic construct
  REGION 1..978: note = engineered CasX variant
QEIKRINKIRRRLVKDSNTKKAGKTGPMKTLLVRVMTPDLRERLENLRKKPENIPQPISNTSRANLNKLLTDYTEMKKAILHVYWEEFQKDPVGLMSRVAQPASKKIDQNKLKPEMDEKGNLTTAGFACSQCGQPLFVYKLEQVSEKGKAYTNYFGRCNVAEHEKLILLAQLKPEKDSDEAVTYSLGKFGQRALDFYSIHVTKESTHPVKPLAQIAGNRYASAPVGKALSDACMGTIASFLSKYQDIIIEHQKVVKGNQKRLESLRELAGKENLEYPSVTLPPQPHTKEGVDAYNEVIARVRMWVNLNLWQKLKLSRDDAKPLLRLKGFPSFPLVERQANEVDWWDMVCNVKKLINEKKEDGKVFWQNLAGYKRQEALRPYLSSEEDRKKGKKFARYQLGDLLLHLEKKHGEDWGKVYDEAWERIDKKVEGLSKHIKLEEERRSEDAQSKAALTDWLRAKASFVIEGLKEADKDEFCRCELKLQKWYGDLRGKPFAIEAENSILDISGFSKQYNCAFIWQKDGVKKLNLYLIINYFKGGKLRFKKIKPEAFEANRFYTVINKKSGEIVPMEVNFNFDDPNLIILPLAFGKRFGREFIWNDLLSLETGSLKLANGRVIEKTLYNRRTRQDEPALFVALTFERREVLDSSNIKPMNLIGVDRGENIPAVIALTDPEGCPLSRFKDSLGNPTHILRIGESYKEKQRTIQAKKEVEQRRAGGYSRKYASKAKNLADDMVRNTARDLLYYAVTQDAMLIFENLSRGFGRQGKRTFMAERQYTRMEDWLTAKLAYEGLPSQTYLSKTLAQYTSKTCSNCGFTITSADYDRVLEKLKKTATGWMTTINGKELKVEGQITYYNRYKRQNVVKDLSVELDRLSEESVNNDISSWTKGRSGEALSLLKKRFSHRPVQEKFVCLNCGFETHADEQAALNIARSWLFLRSQEYKKYQTNKTTGNTDKRAFVETWQSFYRKKLKEVWKPAV

SEQ ID NO: 45029 - protein, 978 aa, synthetic construct
  REGION 1..978: note = engineered CasX variant
QEIKRINKIRRRLVKDSNTKKAGKTGPMKTLLVRVMTPDLRERLENLRKKPENIPQPISNTSRANLNKLLTDYTEMKKAILHVYWEEFQKDPVGLMSRVAQPASKKIDQNKLKPEMDEKGNLTTAGFACSQCGQPLFVYKLEQVSEKGKAYTNYFGRCNVAEHEKLILLAQLKPEKDSDEAVTYSLGKFGQRALDFYSIHVTKESTHPVKPLAQIAGNRYASVPVGKALSDACMGTIASFLSKYQDIIIEHQKVVKGNQKRLESLRELAGKENLEYPSVTLPPQPHTKEGVDAYNEVIARVRMWVNLNLWQKLKLSRDDAKPLLRLKGFPSFPLVERQANEVDWWDMVCNVKKLINEKKEDGKVFWQNLAGYKRQEALRPYLSSEEDRKKGKKFARYQLGDLLLHLEKKHGEDWGKVYDEAWERIDKKVEGLSKHIKLEEERRSEDAQSKAALTDWLRAKASFVIEGLKEADKDEFCRCELKLQKWYGDLRGKPFAIEAENSILDISGFSKQYNCAFIWQKDGVKKLNLYLIINYFKGGKLRFKKIKPEAFEANRFYTVINKKSGEIVPMEVNFNFDDPNLIILPLAFGKRFGREFIWNDLLSLETGSLKLANGRVIEKTLYNRRTRQDEPALFVALTFERREVLDSSNIKPMNLIGVDRGENIPAVIALTDPEGCPLSRFKDSLGNPTHILRIGESYKEKQRTIQAKKEVEQRRAGGYSRKYASKAKNLADDMVRNTARDLLYYAVTQDAMLIFENLSRGFGRQGKRTFMAERQYTRMEDWLTAKLAYEGLPSQTYLSKTLAQYTSKTCSNCGFTITSADYDRVLEKLKKTATGWMTTINGKELKVEGQITYYNRYKRQNVVKDLSVELDRLSEESVNNDISSWTKGRSGEALSLLKKRFSHRPVQEKFVCLNCGFETHADEQAALNIARSWLFLRSQEYKKYQTNKTTGNTDKRAFVETWQSFYRKKLKEVWKPAV

SEQ ID NO: 45030 - protein, 978 aa, synthetic construct
  REGION 1..978: note = engineered CasX variant
QEIKRINKIRRRLVKDSNTKKAGKTGPMKTLLVRVMTPDLRERLENLRKKPENIPQPISNTSRANLNKLLTDYTEMKKAILHVYWEEFQKDPVGLMSRVAQPASKKIDQNKLKPEMDEKGNLTTAGFACSQCGQPLFVYKLEQVSEKGKAYTNYFGRCNVAEHEKLIKLAQLKPEKDSDEAVTYSLGKFGQRALDFYSIHVTKESTHPVKPLAQIAGNRYASGPVGKALSDACMGTIASFLSKYQDIIIEHQKVVKGNQKRLESLRELAGKENLEYPSVTLPPQPHTKEGVDAYNEVIARVRMWVNLNLWQKLKLSRDDAKPLLRLKGFPSFPLVERQANEVDWWDMVCNVKKLINEKKEDGKVFWQNLAGYKRQEALRPYLSSEEDRKKGKKFARYQLGDLLLHLEKKHGEDWGKVYDEAWERIDKKVEGLSKHIKLEEERRSEDAQSKAALTDWLRAKASFVIEGLKEADKDEFCRCELKLQKWYGDLRGKPFAIEAENSILDISGFSKQYNCAFIWQKDGVKKLNLYLIINYFKGGKLRFKKIKPEAFEANRFYTVINKKSGEIVPMEVNFNFDDPNLIILPLAFGKRFGREFIWNDLLSLETGSLKLANGRVIEKTLYNRRTRQDEPALFVALTFERREVLDSSNIKPMNLIGVDRGENIPAVIALTDPEGCPLSRFKDSLGNPTHILRIGESYKEKQRTIQAKKEVEQRRAGGYSRKYASKAKNLADDMVRNTARDLLYYAVTQDAMLIFENLSRGFGRQGKRTFMAERQYTRMEDWLTAKLAYEGLPSQTYLSKTLAQYTSKTCSNCGFTITSADYDRVLEKLKKTATGWMTTINGKELKVEGQITYYNRYKRQNVVKDLSVELDRLSEESVNNDISSWTKGRSGEALSLLKKRFSHRPVQEKFVCLNCGFETHADEQAALNIARSWLFLRSQEYKKYQTNKTTGNTDKRAFVETWQSFYRKKLKEVWKPAV

SEQ ID NO: 45031 - protein, 977 aa, synthetic construct
  REGION 1..977: note = engineered CasX variant
QEIKRINKIRRRLVKDSNTKKAGKTGPMKTLLVRVMTPDLRERLENLRKKPENIPQPISNTSRANLNKLLTDYTEMKKAILHVYWEEFQKDPVGLMSRVAQPASKKIDQNKLKPEMDEKGNLTTAGFACSQCGQPLFVYKLEQVSEKGKAYTNYFGRCNVAEHEKLILLAQLKPEKDSDEAVTYSLGKFGQRALDFYSIHVTKESTHPVKPLAQIAGNRYASPVGKALSDACMGTIASFLSKYQDIIIEHQKVVKGNQKRLESLRELAGKENLEYPSVTLPPQPHTKEGVDAYNEVIARVRMWVNLNLWQKLKLSRDDAKPLLRLKGFPSFPLVERQANEVDWWDMVCNVKKLINEKKEDGKVFWQNLAGYKRQEALRPYLSSEEDRKKGKKFARYQLGDLLLHLEKKHGEDWGKVYDEAWERIDKKVEGLSKHIKLEEERRSEDAQSKAALTDWLRAKASFVIEGLKEADKDEFCRCELKLQKWYGDLRGKPFAIEAENSILDISGFSKQYNCAFIWQKDGVKKLNLYLIINYFKGGKLRFKKIKPEAFEANRFYTVINKKSGEIVPMEVNFNFDDPNLIILPLAFGKRFGREFIWNDLLSLETGSLKLANGRVIEKTLYNRRTRQDEPALFVALTFERREVLDSSNIKPMNLIGVDRGENIPAVIALTDPEGCPLSRFKDSLGNPTHILRIGESYKEKQRTIQAKKEVEQRRAGGYSRKYASKAKNLADDMVRNTARDLLYYAVTQDAMLIFENLSRGFGRQGKRTFMAERQYTRMEDWLTAKLAYEGLPSQTYLSKTLAQYTSKTCSNCGFTITSADYDRVLEKLKKTATGWMTTINGKELKVEGQITYYNRYKRQNVVKDLSVELDRLSEESVNNDISSWTKGRSGEALSLLKKRFSHRPVQEKFVCLNCGFETHADEQAALNIARSWLFLRSQEYKKYQTNKTTGNTDKRAFVETWQSFYRKKLKEVWKPAV

SEQ ID NO: 45032 - protein, 978 aa, synthetic construct
  REGION 1..978: note = engineered CasX variant
QEIKRINKIRRRLVKDSNTKKAGKTGPMKTLLVRVMTPDLRERLENLRKKPENIPQPISNTSRANLNKLLTDYTEMKKAILHVYWEEFQKDPVGLMSRVAQPASKKIDQNKLKPEMDEKGNLTTAGFACSQCGQPLFVYKLEQVSEKGKAYTNYFGRCNVAEHEKLILLAQLKPEKDSDEAVTYSLGKFGQRALDFYSIHVTKESTHPVKPLAQIAGNRYASYPVGKALSDACMGTIASFLSKYQDIIIEHQKVVKGNQKRLESLRELAGKENLEYPSVTLPPQPHTKEGVDAYNEVIARVRMWVNLNLWQKLKLSRDDAKPLLRLKGFPSFPLVERQANEVDWWDMVCNVKKLINEKKEDGKVFWQNLAGYKRQEALRPYLSSEEDRKKGKKFARYQLGDLLLHLEKKHGEDWGKVYDEAWERIDKKVEGLSKHIKLEEERRSEDAQSKAALTDWLRAKASFVIEGLKEADKDEFCRCELKLQKWYGDLRGKPFAIEAENSILDISGFSKQYNCAFIWQKDGVKKLNLYLIINYFKGGKLRFKKIKPEAFEANRFYTVINKKSGEIVPMEVNFNFDDPNLIILPLAFGKRFGREFIWNDLLSLETGSLKLANGRVIEKTLYNRRTRQDEPALFVALTFERREVLDSSNIKPMNLIGVDRGENIPAVIALTDPEGCPLSRFKDSLGNPTHILRIGESYKEKQRTIQAKKEVEQRRAGGYSRKYASKAKNLADDMVRNTARDLLYYAVTQDAMLIFENLSRGFGRQGKRTFMAERQYTRMEDWLTAKLAYNGLPSKTYLSKTLAQYTSKTCSNCGFTITSADYDRVLEKLKKTATGWMTTINGKELKVEGQITYYNRYKRQNVVKDLSVELDRLSEESVNNDISSWTKGRSGEALSLLKKRFSHRPVQEKFVCLNCGFETHADEQAALNIARSWLFLRSQEYKKYQTNKTTGNTDKRAFVETWQSFYRKKLKEVWKPAV

SEQ ID NO: 45033 - protein, 978 aa, synthetic construct
  REGION 1..978: note = engineered CasX variant
QEIKRINKIRRRLVKDSNTKKAGKTGPMKTLLVRVMTPDLRERLENLRKKPENIPQPISNTSRANLNKLLTDYTEMKKAILHVYWEEFQKDPVGLMSRVAQPASKKIDQNKLKPEMDEKGNLTTAGFACSQCGQPLFVYKLEQVSEKGKAYTNYFGRCNVAEHEKLILLAQLKPEKDSDEAVTYSLGKFGQRALDFYSIHVTKESTHPVKPLAQIAGNRYASHPVGKALSDACMGTIASFLSKYQDIIIEHQKVVKGNQKRLESLRELAGKENLEYPSVTLPPQPHTKEGVDAYNEVIARVRMWVNLNLWQKLKLSRDDAKPLLRLKGFPSFPLVERQANEVDWWDMVCNVKKLINEKKEDGKVFWQNLAGYKRQEALRPYLSSEEDRKKGKKFARYQLGDLLLHLEKKHGEDWGKVYDEAWERIDKKVEGLSKHIKLEEERRSEDAQSKAALTDWLRAKASFVIEGLKEADKDEFCRCELKLQKWYGDLRGKPFAIEAENSILDISGFSKQYNCAFIWQKDGVKKLNLYLIINYFKGGKLRFKKIKPEAFEANRFYTVINKKSGEIVPMEVNFNFDDPNLIILPLAFGKRFGREFIWNDLLSLETGSLKLANGRVIEKTLYNRRTRQDEPALFVALTFERREVLDSSNIKPMNLIGVDRGENIPAVIALTDPEGCPLSRFKDSLGNPTHILRIGESYKEKQRTIQAKKEVEQRRAGGYSRKYASKAKNLADDMVRNTARDLLYYAVTQDAMLIFENLSRGFGRQGKRTFMAERQYTRMEDWLTAKLAYNGLPSKTYLSKTLAQYTSKTCSNCGFTITSADYDRVLEKLKKTATGWMTTINGKELKVEGQITYYNRYKRQNVVKDLSVELDRLSEESVNNDISSWTKGRSGEALSLLKKRFSHRPVQEKFVCLNCGFETHADEQAALNIARSWLFLRSQEYKKYQTNKTTGNTDKRAFVETWQSFYRKKLKEVWKPAV

SEQ ID NO: 45034 - protein, 978 aa, synthetic construct
  REGION 1..978: note = engineered CasX variant
QEIKRINKIRRRLVKDSNTKKAGKTGPMKTLLVRVMTPDLRERLENLRKKPENIPQPISNTSRANLNKLLTDYTEMKKAILHVYWEEFQKDPVGLMSRVAQPASKKIDQNKLKPEMDEKGNLTTAGFACSQCGQPLFVYKLEQVSEKGKAYTNYFGRCNVAEHEKLILLAQLKPEKDSDEAVTYSLGKFGQRALDFYSIHVTKESTHPVKPLAQIAGNRYASSPVGKALSDACMGTIASFLSKYQDIIIEHQKVVKGNQKRLESLRELAGKENLEYPSVTLPPQPHTKEGVDAYNEVIARVRMWVNLNLWQKLKLSRDDAKPLLRLKGFPSFPLVERQANEVDWWDMVCNVKKLINEKKEDGKVFWQNLAGYKRQEALRPYLSSEEDRKKGKKFARYQLGDLLLHLEKKHGEDWGKVYDEAWERIDKKVEGLSKHIKLEEERRSEDAQSKAALTDWLRAKASFVIEGLKEADKDEFCRCELKLQKWYGDLRGKPFAIEAENSILDISGFSKQYNCAFIWQKDGVKKLNLYLIINYFKGGKLRFKKIKPEAFEANRFYTVINKKSGEIVPMEVNFNFDDPNLIILPLAFGKRFGREFIWNDLLSLETGSLKLANGRVIEKTLYNRRTRQDEPALFVALTFERREVLDSSNIKPMNLIGVDRGENIPAVIALTDPEGCPLSRFKDSLGNPTHILRIGESYKEKQRTIQAKKEVEQRRAGGYSRKYASKAKNLADDMVRNTARDLLYYAVTQDAMLIFENLSRGFGRQGKRTFMAERQYTRMEDWLTAKLAYNGLPSKTYLSKTLAQYTSKTCSNCGFTITSADYDRVLEKLKKTATGWMTTINGKELKVEGQITYYNRYKRQNVVKDLSVELDRLSEESVNNDISSWTKGRSGEALSLLKKRFSHRPVQEKFVCLNCGFETHADEQAALNIARSWLFLRSQEYKKYQTNKTTGNTDKRAFVETWQSFYRKKLKEVWKPAV

SEQ ID NO: 45035 - protein, 978 aa, synthetic construct
  REGION 1..978: note = engineered CasX variant
QEIKRINKIRRRLVKDSNTKKAGKTGPMKTLLVRVMTPDLRERLENLRKKPENIPQPISNTSRANLNKLLTDYTEMKKAILHVYWEEFQKDPVGLMSRVAQPASKKIDQNKLKPEMDEKGNLTTAGFACSQCGQPLFVYKLEQVSEKGKAYTNYFGRCNVAEHEKLILLAQLKPEKDSDEAVTYSLGKFGQRALDFYSIHVTKESTHPVKPLAQIAGNRYASTPVGKALSDACMGTIASFLSKYQDIIIEHQKVVKGNQKRLESLRELAGKENLEYPSVTLPPQPHTKEGVDAYNEVIARVRMWVNLNLWQKLKLSRDDAKPLLRLKGFPSFPLVERQANEVDWWDMVCNVKKLINEKKEDGKVFWQNLAGYKRQEALRPYLSSEEDRKKGKKFARYQLGDLLLHLEKKHGEDWGKVYDEAWERIDKKVEGLSKHIKLEEERRSEDAQSKAALTDWLRAKASFVIEGLKEADKDEFCRCELKLQKWYGDLRGKPFAIEAENSILDISGFSKQYNCAFIWQKDGVKKLNLYLIINYFKGGKLRFKKIKPEAFEANRFYTVINKKSGEIVPMEVNFNFDDPNLIILPLAFGKRFGREFIWNDLLSLETGSLKLANGRVIEKTLYNRRTRQDEPALFVALTFERREVLDSSNIKPMNLIGVDRGENIPAVIALTDPEGCPLSRFKDSLGNPTHILRIGESYKEKQRTIQAKKEVEQRRAGGYSRKYASKAKNLADDMVRNTARDLLYYAVTQDAMLIFENLSRGFGRQGKRTFMAERQYTRMEDWLTAKLAYNGLPSKTYLSKTLAQYTSKTCSNCGFTITSADYDRVLEKLKKTATGWMTTINGKELKVEGQITYYNRYKRQNVVKDLSVELDRLSEESVNNDISSWTKGRSGEALSLLKKRFSHRPVQEKFVCLNCGFETHADEQAALNIARSWLFLRSQEYKKYQTNKTTGNTDKRAFVETWQSFYRKKLKEVWKPAV

SEQ ID NO: 45036 - protein, 978 aa, synthetic construct
  REGION 1..978: note = engineered CasX variant
QEIKRINKIRRRLVKDSNTKKAGKTGPMKTLLVRVMTPDLRERLENLRKKPENIPQPISNTSRANLNKLLTDYTEMKKAILHVYWEEFQKDPVGLMSRVAQPASKKIDQNKLKPEMDEKGNLTTAGFACSQCGQPLFVYKLEQVSEKGKAYTNYFGRCNVAEHEKLILLAQLKPEKDSDEAVTYSLGKFGQRALDFYSIHVTKESTHPVKPLAQIAGNRYASAPVGKALSDACMGTIASFLSKYQDIIIEHQKVVKGNQKRLESLRELAGKENLEYPSVTLPPQPHTKEGVDAYNEVIARVRMWVNLNLWQKLKLSRDDAKPLLRLKGFPSFPLVERQANEVDWWDMVCNVKKLINEKKEDGKVFWQNLAGYKRQEALRPYLSSEEDRKKGKKFARYQLGDLLLHLEKKHGEDWGKVYDEAWERIDKKVEGLSKHIKLEEERRSEDAQSKAALTDWLRAKASFVIEGLKEADKDEFCRCELKLQKWYGDLRGKPFAIEAENSILDISGFSKQYNCAFIWQKDGVKKLNLYLIINYFKGGKLRFKKIKPEAFEANRFYTVINKKSGEIVPMEVNFNFDDPNLIILPLAFGKRFGREFIWNDLLSLETGSLKLANGRVIEKTLYNRRTRQDEPALFVALTFERREVLDSSNIKPMNLIGVDRGENIPAVIALTDPEGCPLSRFKDSLGNPTHILRIGESYKEKQRTIQAKKEVEQRRAGGYSRKYASKAKNLADDMVRNTARDLLYYAVTQDAMLIFENLSRGFGRQGKRTFMAERQYTRMEDWLTAKLAYNGLPSKTYLSKTLAQYTSKTCSNCGFTITSADYDRVLEKLKKTATGWMTTINGKELKVEGQITYYNRYKRQNVVKDLSVELDRLSEESVNNDISSWTKGRSGEALSLLKKRFSHRPVQEKFVCLNCGFETHADEQAALNIARSWLFLRSQEYKKYQTNKTTGNTDKRAFVETWQSFYRKKLKEVWKPAV

SEQ ID NO: 45037 - protein, 978 aa, synthetic construct
  REGION 1..978: note = engineered CasX variant
QEIKRINKIRRRLVKDSNTKKAGKTGPMKTLLVRVMTPDLRERLENLRKKPENIPQPISNTSRANLNKLLTDYTEMKKAILHVYWEEFQKDPVGLMSRVAQPASKKIDQNKLKPEMDEKGNLTTAGFACSQCGQPLFVYKLEQVSEKGKAYTNYFGRCNVAEHEKLILLAQLKPEKDSDEAVTYSLGKFGQRALDFYSIHVTKESTHPVKPLAQIAGNRYASVPVGKALSDACMGTIASFLSKYQDIIIEHQKVVKGNQKRLESLRELAGKENLEYPSVTLPPQPHTKEGVDAYNEVIARVRMWVNLNLWQKLKLSRDDAKPLLRLKGFPSFPLVERQANEVDWWDMVCNVKKLINEKKEDGKVFWQNLAGYKRQEALRPYLSSEEDRKKGKKFARYQLGDLLLHLEKKHGEDWGKVYDEAWERIDKKVEGLSKHIKLEEERRSEDAQSKAALTDWLRAKASFVIEGLKEADKDEFCRCELKLQKWYGDLRGKPFAIEAENSILDISGFSKQYNCAFIWQKDGVKKLNLYLIINYFKGGKLRFKKIKPEAFEANRFYTVINKKSGEIVPMEVNFNFDDPNLIILPLAFGKRFGREFIWNDLLSLETGSLKLANGRVIEKTLYNRRTRQDEPALFVALTFERREVLDSSNIKPMNLIGVDRGENIPAVIALTDPEGCPLSRFKDSLGNPTHILRIGESYKEKQRTIQAKKEVEQRRAGGYSRKYASKAKNLADDMVRNTARDLLYYAVTQDAMLIFENLSRGFGRQGKRTFMAERQYTRMEDWLTAKLAYNGLPSKTYLSKTLAQYTSKTCSNCGFTITSADYDRVLEKLKKTATGWMTTINGKELKVEGQITYYNRYKRQNVVKDLSVELDRLSEESVNNDISSWTKGRSGEALSLLKKRFSHRPVQEKFVCLNCGFETHADEQAALNIARSWLFLRSQEYKKYQTNKTTGNTDKRAFVETWQSFYRKKLKEVWKPAV

SEQ ID NO: 45038 - protein, 978 aa, synthetic construct
  REGION 1..978: note = engineered CasX variant
QEIKRINKIRRRLVKDSNTKKAGKTGPMKTLLVRVMTPDLRERLENLRKKPENIPQPISNTSRANLNKLLTDYTEMKKAILHVYWEEFQKDPVGLMSRVAQPASKKIDQNKLKPEMDEKGNLTTAGFACSQCGQPLFVYKLEQVSEKGKAYTNYFGRCNVAEHEKLIKLAQLKPEKDSDEAVTYSLGKFGQRALDFYSIHVTKESTHPVKPLAQIAGNRYASGPVGKALSDACMGTIASFLSKYQDIIIEHQKVVKGNQKRLESLRELAGKENLEYPSVTLPPQPHTKEGVDAYNEVIARVRMWVNLNLWQKLKLSRDDAKPLLRLKGFPSFPLVERQANEVDWWDMVCNVKKLINEKKEDGKVFWQNLAGYKRQEALRPYLSSEEDRKKGKKFARYQLGDLLLHLEKKHGEDWGKVYDEAWERIDKKVEGLSKHIKLEEERRSEDAQSKAALTDWLRAKASFVIEGLKEADKDEFCRCELKLQKWYGDLRGKPFAIEAENSILDISGFSKQYNCAFIWQKDGVKKLNLYLIINYFKGGKLRFKKIKPEAFEANRFYTVINKKSGEIVPMEVNFNFDDPNLIILPLAFGKRFGREFIWNDLLSLETGSLKLANGRVIEKTLYNRRTRQDEPALFVALTFERREVLDSSNIKPMNLIGVDRGENIPAVIALTDPEGCPLSRFKDSLGNPTHILRIGESYKEKQRTIQAKKEVEQRRAGGYSRKYASKAKNLADDMVRNTARDLLYYAVTQDAMLIFENLSRGFGRQGKRTFMAERQYTRMEDWLTAKLAYNGLPSKTYLSKTLAQYTSKTCSNCGFTITSADYDRVLEKLKKTATGWMTTINGKELKVEGQITYYNRYKRQNVVKDLSVELDRLSEESVNNDISSWTKGRSGEALSLLKKRFSHRPVQEKFVCLNCGFETHADEQAALNIARSWLFLRSQEYKKYQTNKTTGNTDKRAFVETWQSFYRKKLKEVWKPAV

SEQ ID NO: 45039 - protein, 977 aa, synthetic construct
  REGION 1..977: note = engineered CasX variant
QEIKRINKIRRRLVKDSNTKKAGKTGPMKTLLVRVMTPDLRERLENLRKKPENIPQPISNTSRANLNKLLTDYTEMKKAILHVYWEEFQKDPVGLMSRVAQPASKKIDQNKLKPEMDEKGNLTTAGFACSQCGQPLFVYKLEQVSEKGKAYTNYFGRCNVAEHEKLILLAQLKPEKDSDEAVTYSLGKFGQRALDFYSIHVTKESTHPVKPLAQIAGNRYASPVGKALSDACMGTIASFLSKYQDIIIEHQKVVKGNQKRLESLRELAGKENLEYPSVTLPPQPHTKEGVDAYNEVIARVRMWVNLNLWQKLKLSRDDAKPLLRLKGFPSFPLVERQANEVDWWDMVCNVKKLINEKKEDGKVFWQNLAGYKRQEALRPYLSSEEDRKKGKKFARYQLGDLLLHLEKKHGEDWGKVYDEAWERIDKKVEGLSKHIKLEEERRSEDAQSKAALTDWLRAKASFVIEGLKEADKDEFCRCELKLQKWYGDLRGKPFAIEAENSILDISGFSKQYNCAFIWQKDGVKKLNLYLIINYFKGGKLRFKKIKPEAFEANRFYTVINKKSGEIVPMEVNFNFDDPNLIILPLAFGKRFGREFIWNDLLSLETGSLKLANGRVIEKTLYNRRTRQDEPALFVALTFERREVLDSSNIKPMNLIGVDRGENIPAVIALTDPEGCPLSRFKDSLGNPTHILRIGESYKEKQRTIQAKKEVEQRRAGGYSRKYASKAKNLADDMVRNTARDLLYYAVTQDAMLIFENLSRGFGRQGKRTFMAERQYTRMEDWLTAKLAYNGLPSKTYLSKTLAQYTSKTCSNCGFTITSADYDRVLEKLKKTATGWMTTINGKELKVEGQITYYNRYKRQNVVKDLSVELDRLSEESVNNDISSWTKGRSGEALSLLKKRFSHRPVQEKFVCLNCGFETHADEQAALNIARSWLFLRSQEYKKYQTNKTTGNTDKRAFVETWQSFYRKKLKEVWKPAV

SEQ ID NO: 45040 - protein, 978 aa, synthetic construct
  REGION 1..978: note = engineered CasX variant
QEIKRINKIRRRLVKDSNTKKAGKTGPMKTLLVRVMTPDLRERLENLRKKPENIPQPISNTSRANLNKLLTDYTEMKKAILHVYWEEFQKDPVGLMSRVAQPASKKIDQNKLKPEMDEKGNLTTAGFACSQCGQPLFVYKLEQVSEKGKAYTNYFGRCNVAEHEKLIQLAQLKPEKDSDEAVTYSLGKFGQRALDFYSIHVTKESTHPVKPLAQIAGNRYASYPVGKALSDACMGTIASFLSKYQDIIIEHQKVVKGNQKRLESLRELAGKENLEYPSVTLPPQPHTKEGVDAYNEVIARVRMWVNLNLWQKLKLSRDDAKPLLRLKGFPSFPLVERQANEVDWWDMVCNVKKLINEKKEDGKVFWQNLAGYKRQEALRPYLSSEEDRKKGKKFARYQLGDLLLHLEKKHGEDWGKVYDEAWERIDKKVEGLSKHIKLEEERRSEDAQSKAALTDWLRAKASFVIEGLKEADKDEFCRCELKLQKWYGDLRGKPFAIEAENSILDISGFSKQYNCAFIWQKDGVKKLNLYLIINYFKGGKLRFKKIKPEAFEANRFYTVINKKSGEIVPMEVNFNFDDPNLIILPLAFGKRFGREFIWNDLLSLETGSLKLANGRVIEKTLYNRRTRQDEPALFVALTFERREVLDSSNIKPMNLIGVDRGENIPAVIALTDPEGCPLSRFKDSLGNPTHILRIGESYKEKQRTIQAKKEVEQRRAGGYSRKYASKAKNLADDMVRNTARDLLYYAVTQDAMLIFENLSRGFGRQGKRTFMAERQYTRMEDWLTAKLAYEGLPSKTYLSKTLAQYTSKTCSNCGFTITSADYDRVLEKLKKTATGWMTTINGKELKVEGQITYYNRYKRQNVVKDLSVELDRLSEESVNNDISSWTKGRSGEALSLLKKRFSHRPVQEKFVCLNCGFETHADEQAALNIARSWLFLRSQEYKKYQTNKTTGNTDKRAFVETWQSFYRKKLKEVWKPAV

SEQ ID NO: 45041 - protein, 978 aa, synthetic construct
  REGION 1..978: note = engineered CasX variant
QEIKRINKIRRRLVKDSNTKKAGKTGPMKTLLVRVMTPDLRERLENLRKKPENIPQPISNTSRANLNKLLTDYTEMKKAILHVYWEEFQKDPVGLMSRVAQPASKKIDQNKLKPEMDEKGNLTTAGFACSQCGQPLFVYKLEQVSEKGKAYTNYFGRCNVAEHEKLIQLAQLKPEKDSDEAVTYSLGKFGQRALDFYSIHVTKESTHPVKPLAQIAGNRYASHPVGKALSDACMGTIASFLSKYQDIIIEHQKVVKGNQKRLESLRELAGKENLEYPSVTLPPQPHTKEGVDAYNEVIARVRMWVNLNLWQKLKLSRDDAKPLLRLKGFPSFPLVERQANEVDWWDMVCNVKKLINEKKEDGKVFWQNLAGYKRQEALRPYLSSEEDRKKGKKFARYQLGDLLLHLEKKHGEDWGKVYDEAWERIDKKVEGLSKHIKLEEERRSEDAQSKAALTDWLRAKASFVIEGLKEADKDEFCRCELKLQKWYGDLRGKPFAIEAENSILDISGFSKQYNCAFIWQKDGVKKLNLYLIINYFKGGKLRFKKIKPEAFEANRFYTVINKKSGEIVPMEVNFNFDDPNLIILPLAFGKRFGREFIWNDLLSLETGSLKLANGRVIEKTLYNRRTRQDEPALFVALTFERREVLDSSNIKPMNLIGVDRGENIPAVIALTDPEGCPLSRFKDSLGNPTHILRIGESYKEKQRTIQAKKEVEQRRAGGYSRKYASKAKNLADDMVRNTARDLLYYAVTQDAMLIFENLSRGFGRQGKRTFMAERQYTRMEDWLTAKLAYEGLPSKTYLSKTLAQYTSKTCSNCGFTITSADYDRVLEKLKKTATGWMTTINGKELKVEGQITYYNRYKRQNVVKDLSVELDRLSEESVNNDISSWTKGRSGEALSLLKKRFSHRPVQEKFVCLNCGFETHADEQAALNIARSWLFLRSQEYKKYQTNKTTGNTDKRAFVETWQSFYRKKLKEVWKPAV

SEQ ID NO: 45042 - protein, 978 aa, synthetic construct
  REGION 1..978: note = engineered CasX variant
QEIKRINKIRRRLVKDSNTKKAGKTGPMKTLLVRVMTPDLRERLENLRKKPENIPQPISNTSRANLNKLLTDYTEMKKAILHVYWEEFQKDPVGLMSRVAQPASKKIDQNKLKPEMDEKGNLTTAGFACSQCGQPLFVYKLEQVSEKGKAYTNYFGRCNVAEHEKLIQLAQLKPEKDSDEAVTYSLGKFGQRALDFYSIHVTKESTHPVKPLAQIAGNRYASSPVGKALSDACMGTIASFLSKYQDIIIEHQKVVKGNQKRLESLRELAGKENLEYPSVTLPPQPHTKEGVDAYNEVIARVRMWVNLNLWQKLKLSRDDAKPLLRLKGFPSFPLVERQANEVDWWDMVCNVKKLINEKKEDGKVFWQNLAGYKRQEALRPYLSSEEDRKKGKKFARYQLGDLLLHLEKKHGEDWGKVYDEAWERIDKKVEGLSKHIKLEEERRSEDAQSKAALTDWLRAKASFVIEGLKEADKDEFCRCELKLQKWYGDLRGKPFAIEAENSILDISGFSKQYNCAFIWQKDGVKKLNLYLIINYFKGGKLRFKKIKPEAFEANRFYTVINKKSGEIVPMEVNFNFDDPNLIILPLAFGKRFGREFIWNDLLSLETGSLKLANGRVIEKTLYNRRTRQDEPALFVALTFERREVLDSSNIKPMNLIGVDRGENIPAVIALTDPEGCPLSRFKDSLGNPTHILRIGESYKEKQRTIQAKKEVEQRRAGGYSRKYASKAKNLADDMVRNTARDLLYYAVTQDAMLIFENLSRGFGRQGKRTFMAERQYTRMEDWLTAKLAYEGLPSKTYLSKTLAQYTSKTCSNCGFTITSADYDRVLEKLKKTATGWMTTINGKELKVEGQITYYNRYKRQNVVKDLSVELDRLSEESVNNDISSWTKGRSGEALSLLKKRFSHRPVQEKFVCLNCGFETHADEQAALNIARSWLFLRSQEYKKYQTNKTTGNTDKRAFVETWQSFYRKKLKEVWKPAV

SEQ ID NO: 45043 - protein, 978 aa, synthetic construct
  REGION 1..978: note = engineered CasX variant
QEIKRINKIRRRLVKDSNTKKAGKTGPMKTLLVRVMTPDLRERLENLRKKPENIPQPISNTSRANLNKLLTDYTEMKKAILHVYWEEFQKDPVGLMSRVAQPASKKIDQNKLKPEMDEKGNLTTAGFACSQCGQPLFVYKLEQVSEKGKAYTNYFGRCNVAEHEKLIQLAQLKPEKDSDEAVTYSLGKFGQRALDFYSIHVTKESTHPVKPLAQIAGNRYASTPVGKALSDACMGTIASFLSKYQDIIIEHQKVVKGNQKRLESLRELAGKENLEYPSVTLPPQPHTKEGVDAYNEVIARVRMWVNLNLWQKLKLSRDDAKPLLRLKGFPSFPLVERQANEVDWWDMVCNVKKLINEKKEDGKVFWQNLAGYKRQEALRPYLSSEEDRKKGKKFARYQLGDLLLHLEKKHGEDWGKVYDEAWERIDKKVEGLSKHIKLEEERRSEDAQSKAALTDWLRAKASFVIEGLKEADKDEFCRCELKLQKWYGDLRGKPFAIEAENSILDISGFSKQYNCAFIWQKDGVKKLNLYLIINYFKGGKLRFKKIKPEAFEANRFYTVINKKSGEIVPMEVNFNFDDPNLIILPLAFGKRFGREFIWNDLLSLETGSLKLANGRVIEKTLYNRRTRQDEPALFVALTFERREVLDSSNIKPMNLIGVDRGENIPAVIALTDPEGCPLSRFKDSLGNPTHILRIGESYKEKQRTIQAKKEVEQRRAGGYSRKYASKAKNLADDMVRNTARDLLYYAVTQDAMLIFENLSRGFGRQGKRTFMAERQYTRMEDWLTAKLAYEGLPSKTYLSKTLAQYTSKTCSNCGFTITSADYDRVLEKLKKTATGWMTTINGKELKVEGQITYYNRYKRQNVVKDLSVELDRLSEESVNNDISSWTKGRSGEALSLLKKRFSHRPVQEKFVCLNCGFETHADEQAALNIARSWLFLRSQEYKKYQTNKTTGNTDKRAFVETWQSFYRKKLKEVWKPAV

SEQ ID NO: 45044 - protein, 978 aa, synthetic construct
  REGION 1..978: note = engineered CasX variant
QEIKRINKIRRRLVKDSNTKKAGKTGPMKTLLVRVMTPDLRERLENLRKKPENIPQPISNTSRANLNKLLTDYTEMKKAILHVYWEEFQKDPVGLMSRVAQPASKKIDQNKLKPEMDEKGNLTTAGFACSQCGQPLFVYKLEQVSEKGKAYTNYFGRCNVAEHEKLIQLAQLKPEKDSDEAVTYSLGKFGQRALDFYSIHVTKESTHPVKPLAQIAGNRYASAPVGKALSDACMGTIASFLSKYQDIIIEHQKVVKGNQKRLESLRELAGKENLEYPSVTLPPQPHTKEGVDAYNEVIARVRMWVNLNLWQKLKLSRDDAKPLLRLKGFPSFPLVERQANEVDWWDMVCNVKKLINEKKEDGKVFWQNLAGYKRQEALRPYLSSEEDRKKGKKFARYQLGDLLLHLEKKHGEDWGKVYDEAWERIDKKVEGLSKHIKLEEERRSEDAQSKAALTDWLRAKASFVIEGLKEADKDEFCRCELKLQKWYGDLRGKPFAIEAENSILDISGFSKQYNCAFIWQKDGVKKLNLYLIINYFKGGKLRFKKIKPEAFEANRFYTVINKKSGEIVPMEVNFNFDDPNLIILPLAFGKRFGREFIWNDLLSLETGSLKLANGRVIEKTLYNRRTRQDEPALFVALTFERREVLDSSNIKPMNLIGVDRGENIPAVIALTDPEGCPLSRFKDSLGNPTHILRIGESYKEKQRTIQAKKEVEQRRAGGYSRKYASKAKNLADDMVRNTARDLLYYAVTQDAMLIFENLSRGFGRQGKRTFMAERQYTRMEDWLTAKLAYEGLPSKTYLSKTLAQYTSKTCSNCGFTITSADYDRVLEKLKKTATGWMTTINGKELKVEGQITYYNRYKRQNVVKDLSVELDRLSEESVNNDISSWTKGRSGEALSLLKKRFSHRPVQEKFVCLNCGFETHADEQAALNIARSWLFLRSQEYKKYQTNKTTGNTDKRAFVETWQSFYRKKLKEVWKPAV

SEQ ID NO: 45045 - protein, 978 aa, synthetic construct
  REGION 1..978: note = engineered CasX variant
QEIKRINKIRRRLVKDSNTKKAGKTGPMKTLLVRVMTPDLRERLENLRKKPENIPQPISNTSRANLNKLLTDYTEMKKAILHVYWEEFQKDPVGLMSRVAQPASKKIDQNKLKPEMDEKGNLTTAGFACSQCGQPLFVYKLEQVSEKGKAYTNYFGRCNVAEHEKLIQLAQLKPEKDSDEAVTYSLGKFGQRALDFYSIHVTKESTHPVKPLAQIAGNRYASVPVGKALSDACMGTIASFLSKYQDIIIEHQKVVKGNQKRLESLRELAGKENLEYPSVTLPPQPHTKEGVDAYNEVIARVRMWVNLNLWQKLKLSRDDAKPLLRLKGFPSFPLVERQANEVDWWDMVCNVKKLINEKKEDGKVFWQNLAGYKRQEALRPYLSSEEDRKKGKKFARYQLGDLLLHLEKKHGEDWGKVYDEAWERIDKKVEGLSKHIKLEEERRSEDAQSKAALTDWLRAKASFVIEGLKEADKDEFCRCELKLQKWYGDLRGKPFAIEAENSILDISGFSKQYNCAFIWQKDGVKKLNLYLIINYFKGGKLRFKKIKPEAFEANRFYTVINKKSGEIVPMEVNFNFDDPNLIILPLAFGKRFGREFIWNDLLSLETGSLKLANGRVIEKTLYNRRTRQDEPALFVALTFERREVLDSSNIKPMNLIGVDRGENIPAVIALTDPEGCPLSRFKDSLGNPTHILRIGESYKEKQRTIQAKKEVEQRRAGGYSRKYASKAKNLADDMVRNTARDLLYYAVTQDAMLIFENLSRGFGRQGKRTFMAERQYTRMEDWLTAKLAYEGLPSKTYLSKTLAQYTSKTCSNCGFTITSADYDRVLEKLKKTATGWMTTINGKELKVEGQITYYNRYKRQNVVKDLSVELDRLSEESVNNDISSWTKGRSGEALSLLKKRFSHRPVQEKFVCLNCGFETHADEQAALNIARSWLFLRSQEYKKYQTNKTTGNTDKRAFVETWQSFYRKKLKEVWKPAV

SEQ ID NO: 45046 - protein, 979 aa, synthetic construct
  REGION 1..979: note = engineered CasX variant
QEIKRINKIRRRLVKDSNTKKAGKTGPMKTLLVRVMTPDLRERLENLRKKPENIPQPISNTSRANLNKLLTDYTEMKKAILHVYWEEFQKDPVGLMSRVAQPASKKIDQNKLKPEMDEKGNLTTAGFACSQCGQPLFVYKLEQVSEKGKAYTNYFGRCNVAEHEKLIQKLAQLKPEKDSDEAVTYSLGKFGQRALDFYSIHVTKESTHPVKPLAQIAGNRYASGPVGKALSDACMGTIASFLSKYQDIIIEHQKVVKGNQKRLESLRELAGKENLEYPSVTLPPQPHTKEGVDAYNEVIARVRMWVNLNLWQKLKLSRDDAKPLLRLKGFPSFPLVERQANEVDWWDMVCNVKKLINEKKEDGKVFWQNLAGYKRQEALRPYLSSEEDRKKGKKFARYQLGDLLLHLEKKHGEDWGKVYDEAWERIDKKVEGLSKHIKLEEERRSEDAQSKAALTDWLRAKASFVIEGLKEADKDEFCRCELKLQKWYGDLRGKPFAIEAENSILDISGFSKQYNCAFIWQKDGVKKLNLYLIINYFKGGKLRFKKIKPEAFEANRFYTVINKKSGEIVPMEVNFNFDDPNLIILPLAFGKRFGREFIWNDLLSLETGSLKLANGRVIEKTLYNRRTRQDEPALFVALTFERREVLDSSNIKPMNLIGVDRGENIPAVIALTDPEGCPLSRFKDSLGNPTHILRIGESYKEKQRTIQAKKEVEQRRAGGYSRKYASKAKNLADDMVRNTARDLLYYAVTQDAMLIFENLSRGFGRQGKRTFMAERQYTRMEDWLTAKLAYEGLPSKTYLSKTLAQYTSKTCSNCGFTITSADYDRVLEKLKKTATGWMTTINGKELKVEGQITYYNRYKRQNVVKDLSVELDRLSEESVNNDISSWTKGRSGEALSLLKKRFSHRPVQEKFVCLNCGFETHADEQAALNIARSWLFLRSQEYKKYQTNKTTGNTDKRAFVETWQSFYRKKLKEVWKPAV

SEQ ID NO: 45047 - protein, 977 aa, synthetic construct
  REGION 1..977: note = engineered CasX variant
QEIKRINKIRRRLVKDSNTKKAGKTGPMKTLLVRVMTPDLRERLENLRKKPENIPQPISNTSRANLNKLLTDYTEMKKAILHVYWEEFQKDPVGLMSRVAQPASKKIDQNKLKPEMDEKGNLTTAGFACSQCGQPLFVYKLEQVSEKGKAYTNYFGRCNVAEHEKLIQLAQLKPEKDSDEAVTYSLGKFGQRALDFYSIHVTKESTHPVKPLAQIAGNRYASPVGKALSDACMGTIASFLSKYQDIIIEHQKVVKGNQKRLESLRELAGKENLEYPSVTLPPQPHTKEGVDAYNEVIARVRMWVNLNLWQKLKLSRDDAKPLLRLKGFPSFPLVERQANEVDWWDMVCNVKKLINEKKEDGKVFWQNLAGYKRQEALRPYLSSEEDRKKGKKFARYQLGDLLLHLEKKHGEDWGKVYDEAWERIDKKVEGLSKHIKLEEERRSEDAQSKAALTDWLRAKASFVIEGLKEADKDEFCRCELKLQKWYGDLRGKPFAIEAENSILDISGFSKQYNCAFIWQKDGVKKLNLYLIINYFKGGKLRFKKIKPEAFEANRFYTVINKKSGEIVPMEVNFNFDDPNLIILPLAFGKRFGREFIWNDLLSLETGSLKLANGRVIEKTLYNRRTRQDEPALFVALTFERREVLDSSNIKPMNLIGVDRGENIPAVIALTDPEGCPLSRFKDSLGNPTHILRIGESYKEKQRTIQAKKEVEQRRAGGYSRKYASKAKNLADDMVRNTARDLLYYAVTQDAMLIFENLSRGFGRQGKRTFMAERQYTRMEDWLTAKLAYEGLPSKTYLSKTLAQYTSKTCSNCGFTITSADYDRVLEKLKKTATGWMTTINGKELKVEGQITYYNRYKRQNVVKDLSVELDRLSEESVNNDISSWTKGRSGEALSLLKKRFSHRPVQEKFVCLNCGFETHADEQAALNIARSWLFLRSQEYKKYQTNKTTGNTDKRAFVETWQSFYRKKLKEVWKPAV

SEQ ID NO: 45048 - protein, 978 aa, synthetic construct
  REGION 1..978: note = engineered CasX variant
QEIKRINKIRRRLVKDSNTKKAGKTGPMKTLLVRVMTPDLRERLENLRKKPENIPQPISNTSRANLNKLLTDYTEMKKAILHVYWEEFQKDPVGLMSRVAQPASKKIDQNKLKPEMDEKGNLTTAGFACSQCGQPLFVYKLEQVSEKGKAYTNYFGRCNVAEHEKLILLAQLKPEKDSDEAVTYSLGKFGQRALDFYSIHVTKESTHPVKPLAQIAGNRYASYPVGKALSDACMGTIASFLSKYQDIIIEHQKVVKGNQKRLESLRELAGKENLEYPSVTLPPQPHTKEGVDAYNEVIARVRMWVNLNLWQKLKLSRDDAKPLLRLKGFPSFPLVERQANEVDWWDMVCNVKKLINEKKEDGKVFWQNLAIYKRQEALRPYLSSEEDRKKGKKFARYQLGDLLLHLEKKHGEDWGKVYDEAWERIDKKVEGLSKHIKLEEERRSEDAQSKAALTDWLRAKASFVIEGLKEADKDEFCRCELKLQKWYGDLRGKPFAIEAENSILDISGFSKQYNCAFIWQKDGVKKLNLYLIINYFKGGKLRFKKIKPEAFEANRFYTVINKKSGEIVPMEVNFNFDDPNLIILPLAFGKRFGREFIWNDLLSLETGSLKLANGRVIEKTLYNRRTRQDEPALFVALTFERREVLDSSNIKPMNLIGVDRGENIPAVIALTDPEGCPLSRFKDSLGNPTHILRIGESYKEKQRTIQAKKEVEQRRAGGYSRKYASKAKNLADDMVRNTARDLLYYAVTQDAMLIFENLSRGFGRQGKRTFMAERQYTRMEDWLTAKLAYEGLPSKTYLSKTLAQYTSKTCSNCGFTITSADYDRVLEKLKKTATGWMTTINGKELKVEGQITYYNRYKRQNVVKDLSVELDRLSEESVNNDISSWTKGRSGEALSLLKKRFSHRPVQEKFVCLNCGFETHADEQAALNIARSWLFLRSQEYKKYQTNKTTGNTDKRAFVETWQSFYRKKLKEVWKPAV

SEQ ID NO: 45049 - protein, 978 aa, synthetic construct
  REGION 1..978: note = engineered CasX variant
QEIKRINKIRRRLVKDSNTKKAGKTGPMKTLLVRVMTPDLRERLENLRKKPENIPQPISNTSRANLNKLLTDYTEMKKAILHVYWEEFQKDPVGLMSRVAQPASKKIDQNKLKPEMDEKGNLTTAGFACSQCGQPLFVYKLEQVSEKGKAYTNYFGRCNVAEHEKLILLAQLKPEKDSDEAVTYSLGKFGQRALDFYSIHVTKESTHPVKPLAQIAGNRYASHPVGKALSDACMGTIASFLSKYQDIIIEHQKVVKGNQKRLESLRELAGKENLEYPSVTLPPQPHTKEGVDAYNEVIARVRMWVNLNLWQKLKLSRDDAKPLLRLKGFPSFPLVERQANEVDWWDMVCNVKKLINEKKEDGKVFWQNLAIYKRQEALRPYLSSEEDRKKGKKFARYQLGDLLLHLEKKHGEDWGKVYDEAWERIDKKVEGLSKHIKLEEERRSEDAQSKAALTDWLRAKASFVIEGLKEADKDEFCRCELKLQKWYGDLRGKPFAIEAENSILDISGFSKQYNCAFIWQKDGVKKLNLYLIINYFKGGKLRFKKIKPEAFEANRFYTVINKKSGEIVPMEVNFNFDDPNLIILPLAFGKRFGREFIWNDLLSLETGSLKLANGRVIEKTLYNRRTRQDEPALFVALTFERREVLDSSNIKPMNLIGVDRGENIPAVIALTDPEGCPLSRFKDSLGNPTHILRIGESYKEKQRTIQAKKEVEQRRAGGYSRKYASKAKNLADDMVRNTARDLLYYAVTQDAMLIFENLSRGFGRQGKRTFMAERQYTRMEDWLTAKLAYEGLPSKTYLSKTLAQYTSKTCSNCGFTITSADYDRVLEKLKKTATGWMTTINGKELKVEGQITYYNRYKRQNVVKDLSVELDRLSEESVNNDISSWTKGRSGEALSLLKKRFSHRPVQEKFVCLNCGFETHADEQAALNIARSWLFLRSQEYKKYQTNKTTGNTDKRAFVETWQSFYRKKLKEVWKPAV

SEQ ID NO: 45050 - protein, 978 aa, synthetic construct
  REGION 1..978: note = engineered CasX variant
QEIKRINKIRRRLVKDSNTKKAGKTGPMKTLLVRVMTPDLRERLENLRKKPENIPQPISNTSRANLNKLLTDYTEMKKAILHVYWEEFQKDPVGLMSRVAQPASKKIDQNKLKPEMDEKGNLTTAGFACSQCGQPLFVYKLEQVSEKGKAYTNYFGRCNVAEHEKLILLAQLKPEKDSDEAVTYSLGKFGQRALDFYSIHVTKESTHPVKPLAQIAGNRYASSPVGKALSDACMGTIASFLSKYQDIIIEHQKVVKGNQKRLESLRELAGKENLEYPSVTLPPQPHTKEGVDAYNEVIARVRMWVNLNLWQKLKLSRDDAKPLLRLKGFPSFPLVERQANEVDWWDMVCNVKKLINEKKEDGKVFWQNLAIYKRQEALRPYLSSEEDRKKGKKFARYQLGDLLLHLEKKHGEDWGKVYDEAWERIDKKVEGLSKHIKLEEERRSEDAQSKAALTDWLRAKASFVIEGLKEADKDEFCRCELKLQKWYGDLRGKPFAIEAENSILDISGFSKQYNCAFIWQKDGVKKLNLYLIINYFKGGKLRFKKIKPEAFEANRFYTVINKKSGEIVPMEVNFNFDDPNLIILPLAFGKRFGREFIWNDLLSLETGSLKLANGRVIEKTLYNRRTRQDEPALFVALTFERREVLDSSNIKPMNLIGVDRGENIPAVIALTDPEGCPLSRFKDSLGNPTHILRIGESYKEKQRTIQAKKEVEQRRAGGYSRKYASKAKNLADDMVRNTARDLLYYAVTQDAMLIFENLSRGFGRQGKRTFMAERQYTRMEDWLTAKLAYEGLPSKTYLSKTLAQYTSKTCSNCGFTITSADYDRVLEKLKKTATGWMTTINGKELKVEGQITYYNRYKRQNVVKDLSVELDRLSEESVNNDISSWTKGRSGEALSLLKKRFSHRPVQEKFVCLNCGFETHADEQAALNIARSWLFLRSQEYKKYQTNKTTGNTDKRAFVETWQSFYRKKLKEVWKPAV

SEQ ID NO: 45051 - protein, 978 aa, synthetic construct
  REGION 1..978: note = engineered CasX variant
QEIKRINKIRRRLVKDSNTKKAGKTGPMKTLLVRVMTPDLRERLENLRKKPENIPQPISNTSRANLNKLLTDYTEMKKAILHVYWEEFQKDPVGLMSRVAQPASKKIDQNKLKPEMDEKGNLTTAGFACSQCGQPLFVYKLEQVSEKGKAYTNYFGRCNVAEHEKLILLAQLKPEKDSDEAVTYSLGKFGQRALDFYSIHVTKESTHPVKPLAQIAGNRYASTPVGKALSDACMGTIASFLSKYQDIIIEHQKVVKGNQKRLESLRELAGKENLEYPSVTLPPQPHTKEGVDAYNEVIARVRMWVNLNLWQKLKLSRDDAKPLLRLKGFPSFPLVERQANEVDWWDMVCNVKKLINEKKEDGKVFWQNLAIYKRQEALRPYLSSEEDRKKGKKFARYQLGDLLLHLEKKHGEDWGKVYDEAWERIDKKVEGLSKHIKLEEERRSEDAQSKAALTDWLRAKASFVIEGLKEADKDEFCRCELKLQKWYGDLRGKPFAIEAENSILDISGFSKQYNCAFIWQKDGVKKLNLYLIINYFKGGKLRFKKIKPEAFEANRFYTVINKKSGEIVPMEVNFNFDDPNLIILPLAFGKRFGREFIWNDLLSLETGSLKLANGRVIEKTLYNRRTRQDEPALFVALTFERREVLDSSNIKPMNLIGVDRGENIPAVIALTDPEGCPLSRFKDSLGNPTHILRIGESYKEKQRTIQAKKEVEQRRAGGYSRKYASKAKNLADDMVRNTARDLLYYAVTQDAMLIFENLSRGFGRQGKRTFMAERQYTRMEDWLTAKLAYEGLPSKTYLSKTLAQYTSKTCSNCGFTITSADYDRVLEKLKKTATGWMTTINGKELKVEGQITYYNRYKRQNVVKDLSVELDRLSEESVNNDISSWTKGRSGEALSLLKKRFSHRPVQEKFVCLNCGFETHADEQAALNIARSWLFLRSQEYKKYQTNKTTGNTDKRAFVETWQSFYRKKLKEVWKPAV

SEQ ID NO: 45052 - protein, 978 aa, synthetic construct
  REGION 1..978: note = engineered CasX variant
QEIKRINKIRRRLVKDSNTKKAGKTGPMKTLLVRVMTPDLRERLENLRKKPENIPQPISNTSRANLNKLLTDYTEMKKAILHVYWEEFQKDPVGLMSRVAQPASKKIDQNKLKPEMDEKGNLTTAGFACSQCGQPLFVYKLEQVSEKGKAYTNYFGRCNVAEHEKLILLAQLKPEKDSDEAVTYSLGKFGQRALDFYSIHVTKESTHPVKPLAQIAGNRYASAPVGKALSDACMGTIASFLSKYQDIIIEHQKVVKGNQKRLESLRELAGKENLEYPSVTLPPQPHTKEGVDAYNEVIARVRMWVNLNLWQKLKLSRDDAKPLLRLKGFPSFPLVERQANEVDWWDMVCNVKKLINEKKEDGKVFWQNLAIYKRQEALRPYLSSEEDRKKGKKFARYQLGDLLLHLEKKHGEDWGKVYDEAWERIDKKVEGLSKHIKLEEERRSEDAQSKAALTDWLRAKASFVIEGLKEADKDEFCRCELKLQKWYGDLRGKPFAIEAENSILDISGFSKQYNCAFIWQKDGVKKLNLYLIINYFKGGKLRFKKIKPEAFEANRFYTVINKKSGEIVPMEVNFNFDDPNLIILPLAFGKRFGREFIWNDLLSLETGSLKLANGRVIEKTLYNRRTRQDEPALFVALTFERREVLDSSNIKPMNLIGVDRGENIPAVIALTDPEGCPLSRFKDSLGNPTHILRIGESYKEKQRTIQAKKEVEQRRAGGYSRKYASKAKNLADDMVRNTARDLLYYAVTQDAMLIFENLSRGFGRQGKRTFMAERQYTRMEDWLTAKLAYEGLPSKTYLSKTLAQYTSKTCSNCGFTITSADYDRVLEKLKKTATGWMTTINGKELKVEGQITYYNRYKRQNVVKDLSVELDRLSEESVNNDISSWTKGRSGEALSLLKKRFSHRPVQEKFVCLNCGFETHADEQAALNIARSWLFLRSQEYKKYQTNKTTGNTDKRAFVETWQSFYRKKLKEVWKPAV

SEQ ID NO: 45053 - protein, 978 aa, synthetic construct
  REGION 1..978: note = engineered CasX variant
QEIKRINKIRRRLVKDSNTKKAGKTGPMKTLLVRVMTPDLRERLENLRKKPENIPQPISNTSRANLNKLLTDYTEMKKAILHVYWEEFQKDPVGLMSRVAQPASKKIDQNKLKPEMDEKGNLTTAGFACSQCGQPLFVYKLEQVSEKGKAYTNYFGRCNVAEHEKLILLAQLKPEKDSDEAVTYSLGKFGQRALDFYSIHVTKESTHPVKPLAQIAGNRYASVPVGKALSDACMGTIASFLSKYQDIIIEHQKVVKGNQKRLESLRELAGKENLEYPSVTLPPQPHTKEGVDAYNEVIARVRMWVNLNLWQKLKLSRDDAKPLLRLKGFPSFPLVERQANEVDWWDMVCNVKKLINEKKEDGKVFWQNLAIYKRQEALRPYLSSEEDRKKGKKFARYQLGDLLLHLEKKHGEDWGKVYDEAWERIDKKVEGLSKHIKLEEERRSEDAQSKAALTDWLRAKASFVIEGLKEADKDEFCRCELKLQKWYGDLRGKPFAIEAENSILDISGFSKQYNCAFIWQKDGVKKLNLYLIINYFKGGKLRFKKIKPEAFEANRFYTVINKKSGEIVPMEVNFNFDDPNLIILPLAFGKRFGREFIWNDLLSLETGSLKLANGRVIEKTLYNRRTRQDEPALFVALTFERREVLDSSNIKPMNLIGVDRGENIPAVIALTDPEGCPLSRFKDSLGNPTHILRIGESYKEKQRTIQAKKEVEQRRAGGYSRKYASKAKNLADDMVRNTARDLLYYAVTQDAMLIFENLSRGFGRQGKRTFMAERQYTRMEDWLTAKLAYEGLPSKTYLSKTLAQYTSKTCSNCGFTITSADYDRVLEKLKKTATGWMTTINGKELKVEGQITYYNRYKRQNVVKDLSVELDRLSEESVNNDISSWTKGRSGEALSLLKKRFSHRPVQEKFVCLNCGFETHADEQAALNIARSWLFLRSQEYKKYQTNKTTGNTDKRAFVETWQSFYRKKLKEVWKPAV

SEQ ID NO: 45054 - protein, 978 aa, synthetic construct
  REGION 1..978: note = engineered CasX variant
QEIKRINKIRRRLVKDSNTKKAGKTGPMKTLLVRVMTPDLRERLENLRKKPENIPQPISNTSRANLNKLLTDYTEMKKAILHVYWEEFQKDPVGLMSRVAQPASKKIDQNKLKPEMDEKGNLTTAGFACSQCGQPLFVYKLEQVSEKGKAYTNYFGRCNVAEHEKLIKLAQLKPEKDSDEAVTYSLGKFGQRALDFYSIHVTKESTHPVKPLAQIAGNRYASGPVGKALSDACMGTIASFLSKYQDIIIEHQKVVKGNQKRLESLRELAGKENLEYPSVTLPPQPHTKEGVDAYNEVIARVRMWVNLNLWQKLKLSRDDAKPLLRLKGFPSFPLVERQANEVDWWDMVCNVKKLINEKKEDGKVFWQNLAIYKRQEALRPYLSSEEDRKKGKKFARYQLGDLLLHLEKKHGEDWGKVYDEAWERIDKKVEGLSKHIKLEEERRSEDAQSKAALTDWLRAKASFVIEGLKEADKDEFCRCELKLQKWYGDLRGKPFAIEAENSILDISGFSKQYNCAFIWQKDGVKKLNLYLIINYFKGGKLRFKKIKPEAFEANRFYTVINKKSGEIVPMEVNFNFDDPNLIILPLAFGKRFGREFIWNDLLSLETGSLKLANGRVIEKTLYNRRTRQDEPALFVALTFERREVLDSSNIKPMNLIGVDRGENIPAVIALTDPEGCPLSRFKDSLGNPTHILRIGESYKEKQRTIQAKKEVEQRRAGGYSRKYASKAKNLADDMVRNTARDLLYYAVTQDAMLIFENLSRGFGRQGKRTFMAERQYTRMEDWLTAKLAYEGLPSKTYLSKTLAQYTSKTCSNCGFTITSADYDRVLEKLKKTATGWMTTINGKELKVEGQITYYNRYKRQNVVKDLSVELDRLSEESVNNDISSWTKGRSGEALSLLKKRFSHRPVQEKFVCLNCGFETHADEQAALNIARSWLFLRSQEYKKYQTNKTTGNTDKRAFVETWQSFYRKKLKEVWKPAV

SEQ ID NO: 45055 - protein, 977 aa, synthetic construct
  REGION 1..977: note = engineered CasX variant
QEIKRINKIRRRLVKDSNTKKAGKTGPMKTLLVRVMTPDLRERLENLRKKPENIPQPISNTSRANLNKLLTDYTEMKKAILHVYWEEFQKDPVGLMSRVAQPASKKIDQNKLKPEMDEKGNLTTAGFACSQCGQPLFVYKLEQVSEKGKAYTNYFGRCNVAEHEKLILLAQLKPEKDSDEAVTYSLGKFGQRALDFYSIHVTKESTHPVKPLAQIAGNRYASPVGKALSDACMGTIASFLSKYQDIIIEHQKVVKGNQKRLESLRELAGKENLEYPSVTLPPQPHTKEGVDAYNEVIARVRMWVNLNLWQKLKLSRDDAKPLLRLKGFPSFPLVERQANEVDWWDMVCNVKKLINEKKEDGKVFWQNLAIYKRQEALRPYLSSEEDRKKGKKFARYQLGDLLLHLEKKHGEDWGKVYDEAWERIDKKVEGLSKHIKLEEERRSEDAQSKAALTDWLRAKASFVIEGLKEADKDEFCRCELKLQKWYGDLRGKPFAIEAENSILDISGFSKQYNCAFIWQKDGVKKLNLYLIINYFKGGKLRFKKIKPEAFEANRFYTVINKKSGEIVPMEVNFNFDDPNLIILPLAFGKRFGREFIWNDLLSLETGSLKLANGRVIEKTLYNRRTRQDEPALFVALTFERREVLDSSNIKPMNLIGVDRGENIPAVIALTDPEGCPLSRFKDSLGNPTHILRIGESYKEKQRTIQAKKEVEQRRAGGYSRKYASKAKNLADDMVRNTARDLLYYAVTQDAMLIFENLSRGFGRQGKRTFMAERQYTRMEDWLTAKLAYEGLPSKTYLSKTLAQYTSKTCSNCGFTITSADYDRVLEKLKKTATGWMTTINGKELKVEGQITYYNRYKRQNVVKDLSVELDRLSEESVNNDISSWTKGRSGEALSLLKKRFSHRPVQEKFVCLNCGFETHADEQAALNIARSWLFLRSQEYKKYQTNKTTGNTDKRAFVETWQSFYRKKLKEVWKPAV

SEQ ID NO: 45056 - protein, 978 aa, synthetic construct
  REGION 1..978: note = engineered CasX variant
QEIKRINKIRRRLVKDSNTKKAGKTGPMKTLLVRVMTPDLRERLENLRKKPENIPQPISNTSRANLNKLLTDYTEMKKAILHVYWEEFQKDPVGLMSRVAQPASKKIDQNKLKPEMDEKGNLTTAGFACSQCGQPLFVYKLEQVSEKGKAYTNYFGRCNVAEHEKLILLAQLKPEKDSDEAVTYSLGKFGQRALDFYSIHVTKESTHPVKPLAQIAGNRYASYPVGKALSDACMGTIASFLSKYQDIIIEHQKVVKGNQKRLESLRELAGKENLEYPSVTLPPQPHTKEGVDAYNEVIARVRMWVNLNLWQKLKLSRDDAKPLLRLKGFPSFPLVERQANEVDWWDMVCNVKKLINEKKEDGKVFWQNLAGYKRQEALRPYLSSEEDREKGKKFARYQLGDLLLHLEKKHGEDWGKVYDEAWERIDKKVEGLSKHIKLEEERRSEDAQSKAALTDWLRAKASFVIEGLKEADKDEFCRCELKLQKWYGDLRGKPFAIEAENSILDISGFSKQYNCAFIWQKDGVKKLNLYLIINYFKGGKLRFKKIKPEAFEANRFYTVINKKSGEIVPMEVNFNFDDPNLIILPLAFGKRFGREFIWNDLLSLETGSLKLANGRVIEKTLYNRRTRQDEPALFVALTFERREVLDSSNIKPMNLIGVDRGENIPAVIALTDPEGCPLSRFKDSLGNPTHILRIGESYKEKQRTIQAKKEVEQRRAGGYSRKYASKAKNLADDMVRNTARDLLYYAVTQDAMLIFENLSRGFGRQGKRTFMAERQYTRMEDWLTAKLAYEGLPSKTYLSKTLAQYTSKTCSNCGFTITSADYDRVLEKLKKTATGWMTTINGKELKVEGQITYYNRYKRQNVVKDLSVELDRLSEESVNNDISSWTKGRSGEALSLLKKRFSHRPVQEKFVCLNCGFETHADEQAALNIARSWLFLRSQEYKKYQTNKTTGNTDKRAFVETWQSFYRKKLKEVWKPAV

SEQ ID NO: 45057 - protein, 978 aa, synthetic construct
  REGION 1..978: note = engineered CasX variant
QEIKRINKIRRRLVKDSNTKKAGKTGPMKTLLVRVMTPDLRERLENLRKKPENIPQPISNTSRANLNKLLTDYTEMKKAILHVYWEEFQKDPVGLMSRVAQPASKKIDQNKLKPEMDEKGNLTTAGFACSQCGQPLFVYKLEQVSEKGKAYTNYFGRCNVAEHEKLILLAQLKPEKDSDEAVTYSLGKFGQRALDFYSIHVTKESTHPVKPLAQIAGNRYASHPVGKALSDACMGTIASFLSKYQDIIIEHQKVVKGNQKRLESLRELAGKENLEYPSVTLPPQPHTKEGVDAYNEVIARVRMWVNLNLWQKLKLSRDDAKPLLRLKGFPSFPLVERQANEVDWWDMVCNVKKLINEKKEDGKVFWQNLAGYKRQEALRPYLSSEEDREKGKKFARYQLGDLLLHLEKKHGEDWGKVYDEAWERIDKKVEGLSKHIKLEEERRSEDAQSKAALTDWLRAKASFVIEGLKEADKDEFCRCELKLQKWYGDLRGKPFAIEAENSILDISGFSKQYNCAFIWQKDGVKKLNLYLIINYFKGGKLRFKKIKPEAFEANRFYTVINKKSGEIVPMEVNFNFDDPNLIILPLAFGKRFGREFIWNDLLSLETGSLKLANGRVIEKTLYNRRTRQDEPALFVALTFERREVLDSSNIKPMNLIGVDRGENIPAVIALTDPEGCPLSRFKDSLGNPTHILRIGESYKEKQRTIQAKKEVEQRRAGGYSRKYASKAKNLADDMVRNTARDLLYYAVTQDAMLIFENLSRGFGRQGKRTFMAERQYTRMEDWLTAKLAYEGLPSKTYLSKTLAQYTSKTCSNCGFTITSADYDRVLEKLKKTATGWMTTINGKELKVEGQITYYNRYKRQNVVKDLSVELDRLSEESVNNDISSWTKGRSGEALSLLKKRFSHRPVQEKFVCLNCGFETHADEQAALNIARSWLFLRSQEYKKYQTNKTTGNTDKRAFVETWQSFYRKKLKEVWKPAV

SEQ ID NO: 45058 - protein, 978 aa, synthetic construct
  REGION 1..978: note = engineered CasX variant
QEIKRINKIRRRLVKDSNTKKAGKTGPMKTLLVRVMTPDLRERLENLRKKPENIPQPISNTSRANLNKLLTDYTEMKKAILHVYWEEFQKDPVGLMSRVAQPASKKIDQNKLKPEMDEKGNLTTAGFACSQCGQPLFVYKLEQVSEKGKAYTNYFGRCNVAEHEKLILLAQLKPEKDSDEAVTYSLGKFGQRALDFYSIHVTKESTHPVKPLAQIAGNRYASSPVGKALSDACMGTIASFLSKYQDIIIEHQKVVKGNQKRLESLRELAGKENLEYPSVTLPPQPHTKEGVDAYNEVIARVRMWVNLNLWQKLKLSRDDAKPLLRLKGFPSFPLVERQANEVDWWDMVCNVKKLINEKKEDGKVFWQNLAGYKRQEALRPYLSSEEDREKGKKFARYQLGDLLLHLEKKHGEDWGKVYDEAWERIDKKVEGLSKHIKLEEERRSEDAQSKAALTDWLRAKASFVIEGLKEADKDEFCRCELKLQKWYGDLRGKPFAIEAENSILDISGFSKQYNCAFIWQKDGVKKLNLYLIINYFKGGKLRFKKIKPEAFEANRFYTVINKKSGEIVPMEVNFNFDDPNLIILPLAFGKRFGREFIWNDLLSLETGSLKLANGRVIEKTLYNRRTRQDEPALFVALTFERREVLDSSNIKPMNLIGVDRGENIPAVIALTDPEGCPLSRFKDSLGNPTHILRIGESYKEKQRTIQAKKEVEQRRAGGYSRKYASKAKNLADDMVRNTARDLLYYAVTQDAMLIFENLSRGFGRQGKRTFMAERQYTRMEDWLTAKLAYEGLPSKTYLSKTLAQYTSKTCSNCGFTITSADYDRVLEKLKKTATGWMTTINGKELKVEGQITYYNRYKRQNVVKDLSVELDRLSEESVNNDISSWTKGRSGEALSLLKKRFSHRPVQEKFVCLNCGFETHADEQAALNIARSWLFLRSQEYKKYQTNKTTGNTDKRAFVETWQSFYRKKLKEVWKPAV

SEQ ID NO: 45059 - protein, 978 aa, synthetic construct
  REGION 1..978: note = engineered CasX variant
QEIKRINKIRRRLVKDSNTKKAGKTGPMKTLLVRVMTPDLRERLENLRKKPENIPQPISNTSRANLNKLLTDYTEMKKAILHVYWEEFQKDPVGLMSRVAQPASKKIDQNKLKPEMDEKGNLTTAGFACSQCGQPLFVYKLEQVSEKGKAYTNYFGRCNVAEHEKLILLAQLKPEKDSDEAVTYSLGKFGQRALDFYSIHVTKESTHPVKPLAQIAGNRYASTPVGKALSDACMGTIASFLSKYQDIIIEHQKVVKGNQKRLESLRELAGKENLEYPSVTLPPQPHTKEGVDAYNEVIARVRMWVNLNLWQKLKLSRDDAKPLLRLKGFPSFPLVERQANEVDWWDMVCNVKKLINEKKEDGKVFWQNLAGYKRQEALRPYLSSEEDREKGKKFARYQLGDLLLHLEKKHGEDWGKVYDEAWERIDKKVEGLSKHIKLEEERRSEDAQSKAALTDWLRAKASFVIEGLKEADKDEFCRCELKLQKWYGDLRGKPFAIEAENSILDISGFSKQYNCAFIWQKDGVKKLNLYLIINYFKGGKLRFKKIKPEAFEANRFYTVINKKSGEIVPMEVNFNFDDPNLIILPLAFGKRFGREFIWNDLLSLETGSLKLANGRVIEKTLYNRRTRQDEPALFVALTFERREVLDSSNIKPMNLIGVDRGENIPAVIALTDPEGCPLSRFKDSLGNPTHILRIGESYKEKQRTIQAKKEVEQRRAGGYSRKYASKAKNLADDMVRNTARDLLYYAVTQDAMLIFENLSRGFGRQGKRTFMAERQYTRMEDWLTAKLAYEGLPSKTYLSKTLAQYTSKTCSNCGFTITSADYDRVLEKLKKTATGWMTTINGKELKVEGQITYYNRYKRQNVVKDLSVELDRLSEESVNNDISSWTKGRSGEALSLLKKRFSHRPVQEKFVCLNCGFETHADEQAALNIARSWLFLRSQEYKKYQTNKTTGNTDKRAFVETWQSFYRKKLKEVWKPAV

SEQ ID NO: 45060 - protein, 978 aa, synthetic construct
  REGION 1..978: note = engineered CasX variant
QEIKRINKIRRRLVKDSNTKKAGKTGPMKTLLVRVMTPDLRERLENLRKKPENIPQPISNTSRANLNKLLTDYTEMKKAILHVYWEEFQKDPVGLMSRVAQPASKKIDQNKLKPEMDEKGNLTTAGFACSQCGQPLFVYKLEQVSEKGKAYTNYFGRCNVAEHEKLILLAQLKPEKDSDEAVTYSLGKFGQRALDFYSIHVTKESTHPVKPLAQIAGNRYASAPVGKALSDACMGTIASFLSKYQDIIIEHQKVVKGNQKRLESLRELAGKENLEYPSVTLPPQPHTKEGVDAYNEVIARVRMWVNLNLWQKLKLSRDDAKPLLRLKGFPSFPLVERQANEVDWWDMVCNVKKLINEKKEDGKVFWQNLAGYKRQEALRPYLSSEEDREKGKKFARYQLGDLLLHLEKKHGEDWGKVYDEAWERIDKKVEGLSKHIKLEEERRSEDAQSKAALTDWLRAKASFVIEGLKEADKDEFCRCELKLQKWYGDLRGKPFAIEAENSILDISGFSKQYNCAFIWQKDGVKKLNLYLIINYFKGGKLRFKKIKPEAFEANRFYTVINKKSGEIVPMEVNFNFDDPNLIILPLAFGKRFGREFIWNDLLSLETGSLKLANGRVIEKTLYNRRTRQDEPALFVALTFERREVLDSSNIKPMNLIGVDRGENIPAVIALTDPEGCPLSRFKDSLGNPTHILRIGESYKEKQRTIQAKKEVEQRRAGGYSRKYASKAKNLADDMVRNTARDLLYYAVTQDAMLIFENLSRGFGRQGKRTFMAERQYTRMEDWLTAKLAYEGLPSKTYLSKTLAQYTSKTCSNCGFTITSADYDRVLEKLKKTATGWMTTINGKELKVEGQITYYNRYKRQNVVKDLSVELDRLSEESVNNDISSWTKGRSGEALSLLKKRFSHRPVQEKFVCLNCGFETHADEQAALNIARSWLFLRSQEYKKYQTNKTTGNTDKRAFVETWQSFYRKKLKEVWKPAV

SEQ ID NO: 45061 - protein, 978 aa, synthetic construct
  REGION 1..978: note = engineered CasX variant
QEIKRINKIRRRLVKDSNTKKAGKTGPMKTLLVRVMTPDLRERLENLRKKPENIPQPISNTSRANLNKLLTDYTEMKKAILHVYWEEFQKDPVGLMSRVAQPASKKIDQNKLKPEMDEKGNLTTAGFACSQCGQPLFVYKLEQVSEKGKAYTNYFGRCNVAEHEKLILLAQLKPEKDSDEAVTYSLGKFGQRALDFYSIHVTKESTHPVKPLAQIAGNRYASVPVGKALSDACMGTIASFLSKYQDIIIEHQKVVKGNQKRLESLRELAGKENLEYPSVTLPPQPHTKEGVDAYNEVIARVRMWVNLNLWQKLKLSRDDAKPLLRLKGFPSFPLVERQANEVDWWDMVCNVKKLINEKKEDGKVFWQNLAGYKRQEALRPYLSSEEDREKGKKFARYQLGDLLLHLEKKHGEDWGKVYDEAWERIDKKVEGLSKHIKLEEERRSEDAQSKAALTDWLRAKASFVIEGLKEADKDEFCRCELKLQKWYGDLRGKPFAIEAENSILDISGFSKQYNCAFIWQKDGVKKLNLYLIINYFKGGKLRFKKIKPEAFEANRFYTVINKKSGEIVPMEVNFNFDDPNLIILPLAFGKRFGREFIWNDLLSLETGSLKLANGRVIEKTLYNRRTRQDEPALFVALTFERREVLDSSNIKPMNLIGVDRGENIPAVIALTDPEGCPLSRFKDSLGNPTHILRIGESYKEKQRTIQAKKEVEQRRAGGYSRKYASKAKNLADDMVRNTARDLLYYAVTQDAMLIFENLSRGFGRQGKRTFMAERQYTRMEDWLTAKLAYEGLPSKTYLSKTLAQYTSKTCSNCGFTITSADYDRVLEKLKKTATGWMTTINGKELKVEGQITYYNRYKRQNVVKDLSVELDRLSEESVNNDISSWTKGRSGEALSLLKKRFSHRPVQEKFVCLNCGFETHADEQAALNIARSWLFLRSQEYKKYQTNKTTGNTDKRAFVETWQSFYRKKLKEVWKPAV

SEQ ID NO: 45062 - protein, 978 aa, synthetic construct
  REGION 1..978: note = engineered CasX variant
QEIKRINKIRRRLVKDSNTKKAGKTGPMKTLLVRVMTPDLRERLENLRKKPENIPQPISNTSRANLNKLLTDYTEMKKAILHVYWEEFQKDPVGLMSRVAQPASKKIDQNKLKPEMDEKGNLTTAGFACSQCGQPLFVYKLEQVSEKGKAYTNYFGRCNVAEHEKLIKLAQLKPEKDSDEAVTYSLGKFGQRALDFYSIHVTKESTHPVKPLAQIAGNRYASGPVGKALSDACMGTIASFLSKYQDIIIEHQKVVKGNQKRLESLRELAGKENLEYPSVTLPPQPHTKEGVDAYNEVIARVRMWVNLNLWQKLKLSRDDAKPLLRLKGFPSFPLVERQANEVDWWDMVCNVKKLINEKKEDGKVFWQNLAGYKRQEALRPYLSSEEDREKGKKFARYQLGDLLLHLEKKHGEDWGKVYDEAWERIDKKVEGLSKHIKLEEERRSEDAQSKAALTDWLRAKASFVIEGLKEADKDEFCRCELKLQKWYGDLRGKPFAIEAENSILDISGFSKQYNCAFIWQKDGVKKLNLYLIINYFKGGKLRFKKIKPEAFEANRFYTVINKKSGEIVPMEVNFNFDDPNLIILPLAFGKRFGREFIWNDLLSLETGSLKLANGRVIEKTLYNRRTRQDEPALFVALTFERREVLDSSNIKPMNLIGVDRGENIPAVIALTDPEGCPLSRFKDSLGNPTHILRIGESYKEKQRTIQAKKEVEQRRAGGYSRKYASKAKNLADDMVRNTARDLLYYAVTQDAMLIFENLSRGFGRQGKRTFMAERQYTRMEDWLTAKLAYEGLPSKTYLSKTLAQYTSKTCSNCGFTITSADYDRVLEKLKKTATGWMTTINGKELKVEGQITYYNRYKRQNVVKDLSVELDRLSEESVNNDISSWTKGRSGEALSLLKKRFSHRPVQEKFVCLNCGFETHADEQAALNIARSWLFLRSQEYKKYQTNKTTGNTDKRAFVETWQSFYRKKLKEVWKPAV

SEQ ID NO: 45063 - protein, 977 aa, synthetic construct
  REGION 1..977: note = engineered CasX variant
QEIKRINKIRRRLVKDSNTKKAGKTGPMKTLLVRVMTPDLRERLENLRKKPENIPQPISNTSRANLNKLLTDYTEMKKAILHVYWEEFQKDPVGLMSRVAQPASKKIDQNKLKPEMDEKGNLTTAGFACSQCGQPLFVYKLEQVSEKGKAYTNYFGRCNVAEHEKLILLAQLKPEKDSDEAVTYSLGKFGQRALDFYSIHVTKESTHPVKPLAQIAGNRYASPVGKALSDACMGTIASFLSKYQDIIIEHQKVVKGNQKRLESLRELAGKENLEYPSVTLPPQPHTKEGVDAYNEVIARVRMWVNLNLWQKLKLSRDDAKPLLRLKGFPSFPLVERQANEVDWWDMVCNVKKLINEKKEDGKVFWQNLAGYKRQEALRPYLSSEEDREKGKKFARYQLGDLLLHLEKKHGEDWGKVYDEAWERIDKKVEGLSKHIKLEEERRSEDAQSKAALTDWLRAKASFVIEGLKEADKDEFCRCELKLQKWYGDLRGKPFAIEAENSILDISGFSKQYNCAFIWQKDGVKKLNLYLIINYFKGGKLRFKKIKPEAFEANRFYTVINKKSGEIVPMEVNFNFDDPNLIILPLAFGKRFGREFIWNDLLSLETGSLKLANGRVIEKTLYNRRTRQDEPALFVALTFERREVLDSSNIKPMNLIGVDRGENIPAVIALTDPEGCPLSRFKDSLGNPTHILRIGESYKEKQRTIQAKKEVEQRRAGGYSRKYASKAKNLADDMVRNTARDLLYYAVTQDAMLIFENLSRGFGRQGKRTFMAERQYTRMEDWLTAKLAYEGLPSKTYLSKTLAQYTSKTCSNCGFTITSADYDRVLEKLKKTATGWMTTINGKELKVEGQITYYNRYKRQNVVKDLSVELDRLSEESVNNDISSWTKGRSGEALSLLKKRFSHRPVQEKFVCLNCGFETHADEQAALNIARSWLFLRSQEYKKYQTNKTTGNTDKRAFVETWQSFYRKKLKEVWKPAV

SEQ ID NO: 45064 - protein, 978 aa, synthetic construct
  REGION 1..978: note = engineered CasX variant
QEIKRINKIRRRLVKDSNTKKAGKTGPMKTLLVRVMTPDLRERLENLRKKPENIPQPISNTSRANLNKLLTDYTEMKKAILHVYWEEFQKDPVGLMSRVAQPASKKIDQNKLKPEMDEKGNLTTAGFACSQCGQPLFVYKLEQVSEKGKAYTNYFGRCNVAEHEKLILLAQLKPEKDSDEAVTYSLGKFGQRALDFYSIHVTKESTHPVKPLAQIAGNRYASYPVGKALSDACMGTIASFLSKYQDIIIEHQKVVKGNQKRLESLRELAGKENLEYPSVTLPPQPHTKEGVDAYNEVIARVRMWVNLNLWQKLKLSRDDAKPLLRLKGFPSFPLVERQANEVDWWDMVCNVKKLINEKKEDGKVFWQNLAGYKRQEALRPYLSSEEDRKKGKKFARYQLGDLLLHLEKKHGEDWGKVYDEAWERIDKKVEGLSKHIKLEEERRSEDAQSKAALTDWLRAKASFVIEGLKEADKDEFCRCELKLQKWYGDLRGKPFAIEAENSILDISGFSKQYNCAFIWQKDGVKKLNLYLIINYFKGGKLRFKKIKPEAFEANRFYTVINKKSGEIVIMEVNFNFDDPNLIILPLAFGKRFGREFIWNDLLSLETGSLKLANGRVIEKTLYNRRTRQDEPALFVALTFERREVLDSSNIKPMNLIGVDRGENIPAVIALTDPEGCPLSRFKDSLGNPTHILRIGESYKEKQRTIQAKKEVEQRRAGGYSRKYASKAKNLADDMVRNTARDLLYYAVTQDAMLIFENLSRGFGRQGKRTFMAERQYTRMEDWLTAKLAYEGLPSKTYLSKTLAQYTSKTCSNCGFTITSADYDRVLEKLKKTATGWMTTINGKELKVEGQITYYNRYKRQNVVKDLSVELDRLSEESVNNDISSWTKGRSGEALSLLKKRFSHRPVQEKFVCLNCGFETHADEQAALNIARSWLFLRSQEYKKYQTNKTTGNTDKRAFVETWQSFYRKKLKEVWKPAV

SEQ ID NO: 45065 - protein, 978 aa, synthetic construct
  REGION 1..978: note = engineered CasX variant
QEIKRINKIRRRLVKDSNTKKAGKTGPMKTLLVRVMTPDLRERLENLRKKPENIPQPISNTSRANLNKLLTDYTEMKKAILHVYWEEFQKDPVGLMSRVAQPASKKIDQNKLKPEMDEKGNLTTAGFACSQCGQPLFVYKLEQVSEKGKAYTNYFGRCNVAEHEKLILLAQLKPEKDSDEAVTYSLGKFGQRALDFYSIHVTKESTHPVKPLAQIAGNRYASHPVGKALSDACMGTIASFLSKYQDIIIEHQKVVKGNQKRLESLRELAGKENLEYPSVTLPPQPHTKEGVDAYNEVIARVRMWVNLNLWQKLKLSRDDAKPLLRLKGFPSFPLVERQANEVDWWDMVCNVKKLINEKKEDGKVFWQNLAGYKRQEALRPYLSSEEDRKKGKKFARYQLGDLLLHLEKKHGEDWGKVYDEAWERIDKKVEGLSKHIKLEEERRSEDAQSKAALTDWLRAKASFVIEGLKEADKDEFCRCELKLQKWYGDLRGKPFAIEAENSILDISGFSKQYNCAFIWQKDGVKKLNLYLIINYFKGGKLRFKKIKPEAFEANRFYTVINKKSGEIVIMEVNFNFDDPNLIILPLAFGKRFGREFIWNDLLSLETGSLKLANGRVIEKTLYNRRTRQDEPALFVALTFERREVLDSSNIKPMNLIGVDRGENIPAVIALTDPEGCPLSRFKDSLGNPTHILRIGESYKEKQRTIQAKKEVEQRRAGGYSRKYASKAKNLADDMVRNTARDLLYYAVTQDAMLIFENLSRGFGRQGKRTFMAERQYTRMEDWLTAKLAYEGLPSKTYLSKTLAQYTSKTCSNCGFTITSADYDRVLEKLKKTATGWMTTINGKELKVEGQITYYNRYKRQNVVKDLSVELDRLSEESVNNDISSWTKGRSGEALSLLKKRFSHRPVQEKFVCLNCGFETHADEQAALNIARSWLFLRSQEYKKYQTNKTTGNTDKRAFVETWQSFYRKKLKEVWKPAV

SEQ ID NO: 45066 - protein, 978 aa, synthetic construct
  REGION 1..978: note = engineered CasX variant
QEIKRINKIRRRLVKDSNTKKAGKTGPMKTLLVRVMTPDLRERLENLRKKPENIPQPISNTSRANLNKLLTDYTEMKKAILHVYWEEFQKDPVGLMSRVAQPASKKIDQNKLKPEMDEKGNLTTAGFACSQCGQPLFVYKLEQVSEKGKAYTNYFGRCNVAEHEKLILLAQLKPEKDSDEAVTYSLGKFGQRALDFYSIHVTKESTHPVKPLAQIAGNRYASSPVGKALSDACMGTIASFLSKYQDIIIEHQKVVKGNQKRLESLRELAGKENLEYPSVTLPPQPHTKEGVDAYNEVIARVRMWVNLNLWQKLKLSRDDAKPLLRLKGFPSFPLVERQANEVDWWDMVCNVKKLINEKKEDGKVFWQNLAGYKRQEALRPYLSSEEDRKKGKKFARYQLGDLLLHLEKKHGEDWGKVYDEAWERIDKKVEGLSKHIKLEEERRSEDAQSKAALTDWLRAKASFVIEGLKEADKDEFCRCELKLQKWYGDLRGKPFAIEAENSILDISGFSKQYNCAFIWQKDGVKKLNLYLIINYFKGGKLRFKKIKPEAFEANRFYTVINKKSGEIVIMEVNFNFDDPNLIILPLAFGKRFGREFIWNDLLSLETGSLKLANGRVIEKTLYNRRTRQDEPALFVALTFERREVLDSSNIKPMNLIGVDRGENIPAVIALTDPEGCPLSRFKDSLGNPTHILRIGESYKEKQRTIQAKKEVEQRRAGGYSRKYASKAKNLADDMVRNTARDLLYYAVTQDAMLIFENLSRGFGRQGKRTFMAERQYTRMEDWLTAKLAYEGLPSKTYLSKTLAQYTSKTCSNCGFTITSADYDRVLEKLKKTATGWMTTINGKELKVEGQITYYNRYKRQNVVKDLSVELDRLSEESVNNDISSWTKGRSGEALSLLKKRFSHRPVQEKFVCLNCGFETHADEQAALNIARSWLFLRSQEYKKYQTNKTTGNTDKRAFVETWQSFYRKKLKEVWKPAV

SEQ ID NO: 45067 - protein, 978 aa, synthetic construct
  REGION 1..978: note = engineered CasX variant
QEIKRINKIRRRLVKDSNTKKAGKTGPMKTLLVRVMTPDLRERLENLRKKPENIPQPISNTSRANLNKLLTDYTEMKKAILHVYWEEFQKDPVGLMSRVAQPASKKIDQNKLKPEMDEKGNLTTAGFACSQCGQPLFVYKLEQVSEKGKAYTNYFGRCNVAEHEKLILLAQLKPEKDSDEAVTYSLGKFGQRALDFYSIHVTKESTHPVKPLAQIAGNRYASTPVGKALSDACMGTIASFLSKYQDIIIEHQKVVKGNQKRLESLRELAGKENLEYPSVTLPPQPHTKEGVDAYNEVIARVRMWVNLNLWQKLKLSRDDAKPLLRLKGFPSFPLVERQANEVDWWDMVCNVKKLINEKKEDGKVFWQNLAGYKRQEALRPYLSSEEDRKKGKKFARYQLGDLLLHLEKKHGEDWGKVYDEAWERIDKKVEGLSKHIKLEEERRSEDAQSKAALTDWLRAKASFVIEGLKEADKDEFCRCELKLQKWYGDLRGKPFAIEAENSILDISGFSKQYNCAFIWQKDGVKKLNLYLIINYFKGGKLRFKKIKPEAFEANRFYTVINKKSGEIVIMEVNFNFDDPNLIILPLAFGKRFGREFIWNDLLSLETGSLKLANGRVIEKTLYNRRTRQDEPALFVALTFERREVLDSSNIKPMNLIGVDRGENIPAVIALTDPEGCPLSRFKDSLGNPTHILRIGESYKEKQRTIQAKKEVEQRRAGGYSRKYASKAKNLADDMVRNTARDLLYYAVTQDAMLIFENLSRGFGRQGKRTFMAERQYTRMEDWLTAKLAYEGLPSKTYLSKTLAQYTSKTCSNCGFTITSADYDRVLEKLKKTATGWMTTINGKELKVEGQITYYNRYKRQNVVKDLSVELDRLSEESVNNDISSWTKGRSGEALSLLKKRFSHRPVQEKFVCLNCGFETHADEQAALNIARSWLFLRSQEYKKYQTNKTTGNTDKRAFVETWQSFYRKKLKEVWKPAV

SEQ ID NO: 45068 - protein, 978 aa, synthetic construct
  REGION 1..978: note = engineered CasX variant
QEIKRINKIRRRLVKDSNTKKAGKTGPMKTLLVRVMTPDLRERLENLRKKPENIPQPISNTSRANLNKLLTDYTEMKKAILHVYWEEFQKDPVGLMSRVAQPASKKIDQNKLKPEMDEKGNLTTAGFACSQCGQPLFVYKLEQVSEKGKAYTNYFGRCNVAEHEKLILLAQLKPEKDSDEAVTYSLGKFGQRALDFYSIHVTKESTHPVKPLAQIAGNRYASAPVGKALSDACMGTIASFLSKYQDIIIEHQKVVKGNQKRLESLRELAGKENLEYPSVTLPPQPHTKEGVDAYNEVIARVRMWVNLNLWQKLKLSRDDAKPLLRLKGFPSFPLVERQANEVDWWDMVCNVKKLINEKKEDGKVFWQNLAGYKRQEALRPYLSSEEDRKKGKKFARYQLGDLLLHLEKKHGEDWGKVYDEAWERIDKKVEGLSKHIKLEEERRSEDAQSKAALTDWLRAKASFVIEGLKEADKDEFCRCELKLQKWYGDLRGKPFAIEAENSILDISGFSKQYNCAFIWQKDGVKKLNLYLIINYFKGGKLRFKKIKPEAFEANRFYTVINKKSGEIVIMEVNFNFDDPNLIILPLAFGKRFGREFIWNDLLSLETGSLKLANGRVIEKTLYNRRTRQDEPALFVALTFERREVLDSSNIKPMNLIGVDRGENIPAVIALTDPEGCPLSRFKDSLGNPTHILRIGESYKEKQRTIQAKKEVEQRRAGGYSRKYASKAKNLADDMVRNTARDLLYYAVTQDAMLIFENLSRGFGRQGKRTFMAERQYTRMEDWLTAKLAYEGLPSKTYLSKTLAQYTSKTCSNCGFTITSADYDRVLEKLKKTATGWMTTINGKELKVEGQITYYNRYKRQNVVKDLSVELDRLSEESVNNDISSWTKGRSGEALSLLKKRFSHRPVQEKFVCLNCGFETHADEQAALNIARSWLFLRSQEYKKYQTNKTTGNTDKRAFVETWQSFYRKKLKEVWKPAV

SEQ ID NO: 45069 - protein, 978 aa, synthetic construct
  REGION 1..978: note = engineered CasX variant
QEIKRINKIRRRLVKDSNTKKAGKTGPMKTLLVRVMTPDLRERLENLRKKPENIPQPISNTSRANLNKLLTDYTEMKKAILHVYWEEFQKDPVGLMSRVAQPASKKIDQNKLKPEMDEKGNLTTAGFACSQCGQPLFVYKLEQVSEKGKAYTNYFGRCNVAEHEKLILLAQLKPEKDSDEAVTYSLGKFGQRALDFYSIHVTKESTHPVKPLAQIAGNRYASVPVGKALSDACMGTIASFLSKYQDIIIEHQKVVKGNQKRLESLRELAGKENLEYPSVTLPPQPHTKEGVDAYNEVIARVRMWVNLNLWQKLKLSRDDAKPLLRLKGFPSFPLVERQANEVDWWDMVCNVKKLINEKKEDGKVFWQNLAGYKRQEALRPYLSSEEDRKKGKKFARYQLGDLLLHLEKKHGEDWGKVYDEAWERIDKKVEGLSKHIKLEEERRSEDAQSKAALTDWLRAKASFVIEGLKEADKDEFCRCELKLQKWYGDLRGKPFAIEAENSILDISGFSKQYNCAFIWQKDGVKKLNLYLIINYFKGGKLRFKKIKPEAFEANRFYTVINKKSGEIVIMEVNFNFDDPNLIILPLAFGKRFGREFIWNDLLSLETGSLKLANGRVIEKTLYNRRTRQDEPALFVALTFERREVLDSSNIKPMNLIGVDRGENIPAVIALTDPEGCPLSRFKDSLGNPTHILRIGESYKEKQRTIQAKKEVEQRRAGGYSRKYASKAKNLADDMVRNTARDLLYYAVTQDAMLIFENLSRGFGRQGKRTFMAERQYTRMEDWLTAKLAYEGLPSKTYLSKTLAQYTSKTCSNCGFTITSADYDRVLEKLKKTATGWMTTINGKELKVEGQITYYNRYKRQNVVKDLSVELDRLSEESVNNDISSWTKGRSGEALSLLKKRFSHRPVQEKFVCLNCGFETHADEQAALNIARSWLFLRSQEYKKYQTNKTTGNTDKRAFVETWQSFYRKKLKEVWKPAV

SEQ ID NO: 45070 - protein, 978 aa, synthetic construct
  REGION 1..978: note = engineered CasX variant
QEIKRINKIRRRLVKDSNTKKAGKTGPMKTLLVRVMTPDLRERLENLRKKPENIPQPISNTSRANLNKLLTDYTEMKKAILHVYWEEFQKDPVGLMSRVAQPASKKIDQNKLKPEMDEKGNLTTAGFACSQCGQPLFVYKLEQVSEKGKAYTNYFGRCNVAEHEKLIKLAQLKPEKDSDEAVTYSLGKFGQRALDFYSIHVTKESTHPVKPLAQIAGNRYASGPVGKALSDACMGTIASFLSKYQDIIIEHQKVVKGNQKRLESLRELAGKENLEYPSVTLPPQPHTKEGVDAYNEVIARVRMWVNLNLWQKLKLSRDDAKPLLRLKGFPSFPLVERQANEVDWWDMVCNVKKLINEKKEDGKVFWQNLAGYKRQEALRPYLSSEEDRKKGKKFARYQLGDLLLHLEKKHGEDWGKVYDEAWERIDKKVEGLSKHIKLEEERRSEDAQSKAALTDWLRAKASFVIEGLKEADKDEFCRCELKLQKWYGDLRGKPFAIEAENSILDISGFSKQYNCAFIWQKDGVKKLNLYLIINYFKGGKLRFKKIKPEAFEANRFYTVINKKSGEIVIMEVNFNFDDPNLIILPLAFGKRFGREFIWNDLLSLETGSLKLANGRVIEKTLYNRRTRQDEPALFVALTFERREVLDSSNIKPMNLIGVDRGENIPAVIALTDPEGCPLSRFKDSLGNPTHILRIGESYKEKQRTIQAKKEVEQRRAGGYSRKYASKAKNLADDMVRNTARDLLYYAVTQDAMLIFENLSRGFGRQGKRTFMAERQYTRMEDWLTAKLAYEGLPSKTYLSKTLAQYTSKTCSNCGFTITSADYDRVLEKLKKTATGWMTTINGKELKVEGQITYYNRYKRQNVVKDLSVELDRLSEESVNNDISSWTKGRSGEALSLLKKRFSHRPVQEKFVCLNCGFETHADEQAALNIARSWLFLRSQEYKKYQTNKTTGNTDKRAFVETWQSFYRKKLKEVWKPAV

SEQ ID NO: 45071 - protein, 977 aa, synthetic construct
  REGION 1..977: note = engineered CasX variant
QEIKRINKIRRRLVKDSNTKKAGKTGPMKTLLVRVMTPDLRERLENLRKKPENIPQPISNTSRANLNKLLTDYTEMKKAILHVYWEEFQKDPVGLMSRVAQPASKKIDQNKLKPEMDEKGNLTTAGFACSQCGQPLFVYKLEQVSEKGKAYTNYFGRCNVAEHEKLILLAQLKPEKDSDEAVTYSLGKFGQRALDFYSIHVTKESTHPVKPLAQIAGNRYASPVGKALSDACMGTIASFLSKYQDIIIEHQKVVKGNQKRLESLRELAGKENLEYPSVTLPPQPHTKEGVDAYNEVIARVRMWVNLNLWQKLKLSRDDAKPLLRLKGFPSFPLVERQANEVDWWDMVCNVKKLINEKKEDGKVFWQNLAGYKRQEALRPYLSSEEDRKKGKKFARYQLGDLLLHLEKKHGEDWGKVYDEAWERIDKKVEGLSKHIKLEEERRSEDAQSKAALTDWLRAKASFVIEGLKEADKDEFCRCELKLQKWYGDLRGKPFAIEAENSILDISGFSKQYNCAFIWQKDGVKKLNLYLIINYFKGGKLRFKKIKPEAFEANRFYTVINKKSGEIVIMEVNFNFDDPNLIILPLAFGKRFGREFIWNDLLSLETGSLKLANGRVIEKTLYNRRTRQDEPALFVALTFERREVLDSSNIKPMNLIGVDRGENIPAVIALTDPEGCPLSRFKDSLGNPTHILRIGESYKEKQRTIQAKKEVEQRRAGGYSRKYASKAKNLADDMVRNTARDLLYYAVTQDAMLIFENLSRGFGRQGKRTFMAERQYTRMEDWLTAKLAYEGLPSKTYLSKTLAQYTSKTCSNCGFTITSADYDRVLEKLKKTATGWMTTINGKELKVEGQITYYNRYKRQNVVKDLSVELDRLSEESVNNDISSWTKGRSGEALSLLKKRFSHRPVQEKFVCLNCGFETHADEQAALNIARSWLFLRSQEYKKYQTNKTTGNTDKRAFVETWQSFYRKKLKEVWKPAV

SEQ ID NO: 45072 - protein, 978 aa, synthetic construct
  REGION 1..978: note = engineered CasX variant
QEIKRINKIRRRLVKDSNTKKAGKTGPMKTLLVRVMTPDLRERLENLRKKPENIPQPISNTSRANLNKLLTDYTEMKKAILHVYWEEFQKDPVGLMSRVAQPASKKIDQNKLKPEMDEKGNLTTAGFACSQCGQPLFVYKLEQVSEKGKAYTNYFGRCNVAEHEKLILLAQLKPEKDSDEAVTYSLGKFGQRALDFYSIHVTKESTHPVKPLAQIAGNRYASYPVGKALSGACMGTIASFLSKYQDIIIEHQKVVKGNQKRLESLRELAGKENLEYPSVTLPPQPHTKEGVDAYNEVIARVRMWVNLNLWQKLKLSRDDAKPLLRLKGFPSFPLVERQANEVDWWDMVCNVKKLINEKKEDGKVFWQNLAGYKRQEALRPYLSSEEDRKKGKKFARYQLGDLLLHLEKKHGEDWGKVYDEAWERIDKKVEGLSKHIKLEEERRSEDAQSKAALTDWLRAKASFVIEGLKEADKDEFCRCELKLQKWYGDLRGKPFAIEAENSILDISGFSKQYNCAFIWQKDGVKKLNLYLIINYFKGGKLRFKKIKPEAFEANRFYTVINKKSGEIVPMEVNFNFDDPNLIILPLAFGKRVGREFIWNDLLSLETGSLKLANGRVIEKTLYNRRTRQDEPALFVALTFERREVLDSSNIKPMNLIGVDRGENIPAVIALTDPEGCPLSRFKDSLGNPTHILRIGESYKEKQRTIQAKKEVEQRRAGGYSRKYASKAKNLADDMVRNTARDLLYYAVTQDAMLIFENLSRGFGRQGKRTFMAERQYTRMEDWLTAKLAYEGLPSKTYLSKTLAQYTSKTCSNCGFTITSADYDRVLEKLKKTATGWMTTINGKELKVEGQITYYNRYKRQNVVKDLSVELDRLSEESVNNDISSWTKGRSGEALSLLKKRFSHRPVQEKFVCLNCGFETHADEQAALNIARSWLFLRSQEYKKYQTNKTTGNTDKRAFVETWQSFYRKKLKEVWKPAV

SEQ ID NO: 45073 - protein, 978 aa, synthetic construct
  REGION 1..978: note = engineered CasX variant
QEIKRINKIRRRLVKDSNTKKAGKTGPMKTLLVRVMTPDLRERLENLRKKPENIPQPISNTSRANLNKLLTDYTEMKKAILHVYWEEFQKDPVGLMSRVAQPASKKIDQNKLKPEMDEKGNLTTAGFACSQCGQPLFVYKLEQVSEKGKAYTNYFGRCNVAEHEKLILLAQLKPEKDSDEAVTYSLGKFGQRALDFYSIHVTKESTHPVKPLAQIAGNRYASHPVGKALSGACMGTIASFLSKYQDIIIEHQKVVKGNQKRLESLRELAGKENLEYPSVTLPPQPHTKEGVDAYNEVIARVRMWVNLNLWQKLKLSRDDAKPLLRLKGFPSFPLVERQANEVDWWDMVCNVKKLINEKKEDGKVFWQNLAGYKRQEALRPYLSSEEDRKKGKKFARYQLGDLLLHLEKKHGEDWGKVYDEAWERIDKKVEGLSKHIKLEEERRSEDAQSKAALTDWLRAKASFVIEGLKEADKDEFCRCELKLQKWYGDLRGKPFAIEAENSILDISGFSKQYNCAFIWQKDGVKKLNLYLIINYFKGGKLRFKKIKPEAFEANRFYTVINKKSGEIVPMEVNFNFDDPNLIILPLAFGKRVGREFIWNDLLSLETGSLKLANGRVIEKTLYNRRTRQDEPALFVALTFERREVLDSSNIKPMNLIGVDRGENIPAVIALTDPEGCPLSRFKDSLGNPTHILRIGESYKEKQRTIQAKKEVEQRRAGGYSRKYASKAKNLADDMVRNTARDLLYYAVTQDAMLIFENLSRGFGRQGKRTFMAERQYTRMEDWLTAKLAYEGLPSKTYLSKTLAQYTSKTCSNCGFTITSADYDRVLEKLKKTATGWMTTINGKELKVEGQITYYNRYKRQNVVKDLSVELDRLSEESVNNDISSWTKGRSGEALSLLKKRFSHRPVQEKFVCLNCGFETHADEQAALNIARSWLFLRSQEYKKYQTNKTTGNTDKRAFVETWQSFYRKKLKEVWKPAV

SEQ ID NO: 45074 - protein, 978 aa, synthetic construct
  REGION 1..978: note = engineered CasX variant
QEIKRINKIRRRLVKDSNTKKAGKTGPMKTLLVRVMTPDLRERLENLRKKPENIPQPISNTSRANLNKLLTDYTEMKKAILHVYWEEFQKDPVGLMSRVAQPASKKIDQNKLKPEMDEKGNLTTAGFACSQCGQPLFVYKLEQVSEKGKAYTNYFGRCNVAEHEKLILLAQLKPEKDSDEAVTYSLGKFGQRALDFYSIHVTKESTHPVKPLAQIAGNRYASSPVGKALSGACMGTIASFLSKYQDIIIEHQKVVKGNQKRLESLRELAGKENLEYPSVTLPPQPHTKEGVDAYNEVIARVRMWVNLNLWQKLKLSRDDAKPLLRLKGFPSFPLVERQANEVDWWDMVCNVKKLINEKKEDGKVFWQNLAGYKRQEALRPYLSSEEDRKKGKKFARYQLGDLLLHLEKKHGEDWGKVYDEAWERIDKKVEGLSKHIKLEEERRSEDAQSKAALTDWLRAKASFVIEGLKEADKDEFCRCELKLQKWYGDLRGKPFAIEAENSILDISGFSKQYNCAFIWQKDGVKKLNLYLIINYFKGGKLRFKKIKPEAFEANRFYTVINKKSGEIVPMEVNFNFDDPNLIILPLAFGKRVGREFIWNDLLSLETGSLKLANGRVIEKTLYNRRTRQDEPALFVALTFERREVLDSSNIKPMNLIGVDRGENIPAVIALTDPEGCPLSRFKDSLGNPTHILRIGESYKEKQRTIQAKKEVEQRRAGGYSRKYASKAKNLADDMVRNTARDLLYYAVTQDAMLIFENLSRGFGRQGKRTFMAERQYTRMEDWLTAKLAYEGLPSKTYLSKTLAQYTSKTCSNCGFTITSADYDRVLEKLKKTATGWMTTINGKELKVEGQITYYNRYKRQNVVKDLSVELDRLSEESVNNDISSWTKGRSGEALSLLKKRFSHRPVQEKFVCLNCGFETHADEQAALNIARSWLFLRSQEYKKYQTNKTTGNTDKRAFVETWQSFYRKKLKEVWKPAV

SEQ ID NO: 45075 - protein, 978 aa, synthetic construct
  REGION 1..978: note = engineered CasX variant
QEIKRINKIRRRLVKDSNTKKAGKTGPMKTLLVRVMTPDLRERLENLRKKPENIPQPISNTSRANLNKLLTDYTEMKKAILHVYWEEFQKDPVGLMSRVAQPASKKIDQNKLKPEMDEKGNLTTAGFACSQCGQPLFVYKLEQVSEKGKAYTNYFGRCNVAEHEKLILLAQLKPEKDSDEAVTYSLGKFGQRALDFYSIHVTKESTHPVKPLAQIAGNRYASTPVGKALSGACMGTIASFLSKYQDIIIEHQKVVKGNQKRLESLRELAGKENLEYPSVTLPPQPHTKEGVDAYNEVIARVRMWVNLNLWQKLKLSRDDAKPLLRLKGFPSFPLVERQANEVDWWDMVCNVKKLINEKKEDGKVFWQNLAGYKRQEALRPYLSSEEDRKKGKKFARYQLGDLLLHLEKKHGEDWGKVYDEAWERIDKKVEGLSKHIKLEEERRSEDAQSKAALTDWLRAKASFVIEGLKEADKDEFCRCELKLQKWYGDLRGKPFAIEAENSILDISGFSKQYNCAFIWQKDGVKKLNLYLIINYFKGGKLRFKKIKPEAFEANRFYTVINKKSGEIVPMEVNFNFDDPNLIILPLAFGKRVGREFIWNDLLSLETGSLKLANGRVIEKTLYNRRTRQDEPALFVALTFERREVLDSSNIKPMNLIGVDRGENIPAVIALTDPEGCPLSRFKDSLGNPTHILRIGESYKEKQRTIQAKKEVEQRRAGGYSRKYASKAKNLADDMVRNTARDLLYYAVTQDAMLIFENLSRGFGRQGKRTFMAERQYTRMEDWLTAKLAYEGLPSKTYLSKTLAQYTSKTCSNCGFTITSADYDRVLEKLKKTATGWMTTINGKELKVEGQITYYNRYKRQNVVKDLSVELDRLSEESVNNDISSWTKGRSGEALSLLKKRFSHRPVQEKFVCLNCGFETHADEQAALNIARSWLFLRSQEYKKYQTNKTTGNTDKRAFVETWQSFYRKKLKEVWKPAV

SEQ ID NO: 45076 - protein, 978 aa, synthetic construct
  REGION 1..978: note = engineered CasX variant
QEIKRINKIRRRLVKDSNTKKAGKTGPMKTLLVRVMTPDLRERLENLRKKPENIPQPISNTSRANLNKLLTDYTEMKKAILHVYWEEFQKDPVGLMSRVAQPASKKIDQNKLKPEMDEKGNLTTAGFACSQCGQPLFVYKLEQVSEKGKAYTNYFGRCNVAEHEKLILLAQLKPEKDSDEAVTYSLGKFGQRALDFYSIHVTKESTHPVKPLAQIAGNRYASAPVGKALSGACMGTIASFLSKYQDIIIEHQKVVKGNQKRLESLRELAGKENLEYPSVTLPPQPHTKEGVDAYNEVIARVRMWVNLNLWQKLKLSRDDAKPLLRLKGFPSFPLVERQANEVDWWDMVCNVKKLINEKKEDGKVFWQNLAGYKRQEALRPYLSSEEDRKKGKKFARYQLGDLLLHLEKKHGEDWGKVYDEAWERIDKKVEGLSKHIKLEEERRSEDAQSKAALTDWLRAKASFVIEGLKEADKDEFCRCELKLQKWYGDLRGKPFAIEAENSILDISGFSKQYNCAFIWQKDGVKKLNLYLIINYFKGGKLRFKKIKPEAFEANRFYTVINKKSGEIVPMEVNFNFDDPNLIILPLAFGKRVGREFIWNDLLSLETGSLKLANGRVIEKTLYNRRTRQDEPALFVALTFERREVLDSSNIKPMNLIGVDRGENIPAVIALTDPEGCPLSRFKDSLGNPTHILRIGESYKEKQRTIQAKKEVEQRRAGGYSRKYASKAKNLADDMVRNTARDLLYYAVTQDAMLIFENLSRGFGRQGKRTFMAERQYTRMEDWLTAKLAYEGLPSKTYLSKTLAQYTSKTCSNCGFTITSADYDRVLEKLKKTATGWMTTINGKELKVEGQITYYNRYKRQNVVKDLSVELDRLSEESVNNDISSWTKGRSGEALSLLKKRFSHRPVQEKFVCLNCGFETHADEQAALNIARSWLFLRSQEYKKYQTNKTTGNTDKRAFVETWQSFYRKKLKEVWKPAV

SEQ ID NO: 45077 - protein, 978 aa, synthetic construct
  REGION 1..978: note = engineered CasX variant
QEIKRINKIRRRLVKDSNTKKAGKTGPMKTLLVRVMTPDLRERLENLRKKPENIPQPISNTSRANLNKLLTDYTEMKKAILHVYWEEFQKDPVGLMSRVAQPASKKIDQNKLKPEMDEKGNLTTAGFACSQCGQPLFVYKLEQVSEKGKAYTNYFGRCNVAEHEKLILLAQLKPEKDSDEAVTYSLGKFGQRALDFYSIHVTKESTHPVKPLAQIAGNRYASVPVGKALSGACMGTIASFLSKYQDIIIEHQKVVKGNQKRLESLRELAGKENLEYPSVTLPPQPHTKEGVDAYNEVIARVRMWVNLNLWQKLKLSRDDAKPLLRLKGFPSFPLVERQANEVDWWDMVCNVKKLINEKKEDGKVFWQNLAGYKRQEALRPYLSSEEDRKKGKKFARYQLGDLLLHLEKKHGEDWGKVYDEAWERIDKKVEGLSKHIKLEEERRSEDAQSKAALTDWLRAKASFVIEGLKEADKDEFCRCELKLQKWYGDLRGKPFAIEAENSILDISGFSKQYNCAFIWQKDGVKKLNLYLIINYFKGGKLRFKKIKPEAFEANRFYTVINKKSGEIVPMEVNFNFDDPNLIILPLAFGKRVGREFIWNDLLSLETGSLKLANGRVIEKTLYNRRTRQDEPALFVALTFERREVLDSSNIKPMNLIGVDRGENIPAVIALTDPEGCPLSRFKDSLGNPTHILRIGESYKEKQRTIQAKKEVEQRRAGGYSRKYASKAKNLADDMVRNTARDLLYYAVTQDAMLIFENLSRGFGRQGKRTFMAERQYTRMEDWLTAKLAYEGLPSKTYLSKTLAQYTSKTCSNCGFTITSADYDRVLEKLKKTATGWMTTINGKELKVEGQITYYNRYKRQNVVKDLSVELDRLSEESVNNDISSWTKGRSGEALSLLKKRFSHRPVQEKFVCLNCGFETHADEQAALNIARSWLFLRSQEYKKYQTNKTTGNTDKRAFVETWQSFYRKKLKEVWKPAV

SEQ ID NO: 45078 - protein, 978 aa, synthetic construct
  REGION 1..978: note = engineered CasX variant
QEIKRINKIRRRLVKDSNTKKAGKTGPMKTLLVRVMTPDLRERLENLRKKPENIPQPISNTSRANLNKLLTDYTEMKKAILHVYWEEFQKDPVGLMSRVAQPASKKIDQNKLKPEMDEKGNLTTAGFACSQCGQPLFVYKLEQVSEKGKAYTNYFGRCNVAEHEKLIKLAQLKPEKDSDEAVTYSLGKFGQRALDFYSIHVTKESTHPVKPLAQIAGNRYASGPVGKALSGACMGTIASFLSKYQDIIIEHQKVVKGNQKRLESLRELAGKENLEYPSVTLPPQPHTKEGVDAYNEVIARVRMWVNLNLWQKLKLSRDDAKPLLRLKGFPSFPLVERQANEVDWWDMVCNVKKLINEKKEDGKVFWQNLAGYKRQEALRPYLSSEEDRKKGKKFARYQLGDLLLHLEKKHGEDWGKVYDEAWERIDKKVEGLSKHIKLEEERRSEDAQSKAALTDWLRAKASFVIEGLKEADKDEFCRCELKLQKWYGDLRGKPFAIEAENSILDISGFSKQYNCAFIWQKDGVKKLNLYLIINYFKGGKLRFKKIKPEAFEANRFYTVINKKSGEIVPMEVNFNFDDPNLIILPLAFGKRVGREFIWNDLLSLETGSLKLANGRVIEKTLYNRRTRQDEPALFVALTFERREVLDSSNIKPMNLIGVDRGENIPAVIALTDPEGCPLSRFKDSLGNPTHILRIGESYKEKQRTIQAKKEVEQRRAGGYSRKYASKAKNLADDMVRNTARDLLYYAVTQDAMLIFENLSRGFGRQGKRTFMAERQYTRMEDWLTAKLAYEGLPSKTYLSKTLAQYTSKTCSNCGFTITSADYDRVLEKLKKTATGWMTTINGKELKVEGQITYYNRYKRQNVVKDLSVELDRLSEESVNNDISSWTKGRSGEALSLLKKRFSHRPVQEKFVCLNCGFETHADEQAALNIARSWLFLRSQEYKKYQTNKTTGNTDKRAFVETWQSFYRKKLKEVWKPAV

SEQ ID NO: 45079 - protein, 977 aa, synthetic construct
  REGION 1..977: note = engineered CasX variant
QEIKRINKIRRRLVKDSNTKKAGKTGPMKTLLVRVMTPDLRERLENLRKKPENIPQPISNTSRANLNKLLTDYTEMKKAILHVYWEEFQKDPVGLMSRVAQPASKKIDQNKLKPEMDEKGNLTTAGFACSQCGQPLFVYKLEQVSEKGKAYTNYFGRCNVAEHEKLILLAQLKPEKDSDEAVTYSLGKFGQRALDFYSIHVTKESTHPVKPLAQIAGNRYASPVGKALSGACMGTIASFLSKYQDIIIEHQKVVKGNQKRLESLRELAGKENLEYPSVTLPPQPHTKEGVDAYNEVIARVRMWVNLNLWQKLKLSRDDAKPLLRLKGFPSFPLVERQANEVDWWDMVCNVKKLINEKKEDGKVFWQNLAGYKRQEALRPYLSSEEDRKKGKKFARYQLGDLLLHLEKKHGEDWGKVYDEAWERIDKKVEGLSKHIKLEEERRSEDAQSKAALTDWLRAKASFVIEGLKEADKDEFCRCELKLQKWYGDLRGKPFAIEAENSILDISGFSKQYNCAFIWQKDGVKKLNLYLIINYFKGGKLRFKKIKPEAFEANRFYTVINKKSGEIVPMEVNFNFDDPNLIILPLAFGKRVGREFIWNDLLSLETGSLKLANGRVIEKTLYNRRTRQDEPALFVALTFERREVLDSSNIKPMNLIGVDRGENIPAVIALTDPEGCPLSRFKDSLGNPTHILRIGESYKEKQRTIQAKKEVEQRRAGGYSRKYASKAKNLADDMVRNTARDLLYYAVTQDAMLIFENLSRGFGRQGKRTFMAERQYTRMEDWLTAKLAYEGLPSKTYLSKTLAQYTSKTCSNCGFTITSADYDRVLEKLKKTATGWMTTINGKELKVEGQITYYNRYKRQNVVKDLSVELDRLSEESVNNDISSWTKGRSGEALSLLKKRFSHRPVQEKFVCLNCGFETHADEQAALNIARSWLFLRSQEYKKYQTNKTTGNTDKRAFVETWQSFYRKKLKEVWKPAV

SEQ ID NO: 45080 - protein, 978 aa, synthetic construct
  REGION 1..978: note = engineered CasX variant
QEIKRINKIRRRLVKDSNTKKAGKTGPMKTLLVRVMTPDLRERLENLRKKPENIPQPISNTSRANLNKLLTDYTEMKKAILHVYWEEFQKDPVGLMSRVAQPASKKIDQNKLKPEMDEKGNLTTAGFACSQCGQPLFVYKLEQVSEKGKAYTNYFGRCNVAEHEKLILLAQLKPEKDSDEAVTYSLGKFGQRALDFYSIHVTKESTHPVKPLAQIAGNRYASYPVGKALSDACMGTIASFLSKYQDIIIEHQKVVKGNQKRLESLRELAGKENLEYPSVTLPPQPHTKEGVDAYNEVIARVRMWVNLNLWQKLKLSRDDAKPLLRLKNFPSFPLVERQANEVDWWDMVCNVKKLINEKKEDGKVFWQNLAGYKRQEALRPYLSSEEDRKKGKKFARYQLGDLLLHLEKKHGEDWGKVYDEAWERIDKKVEGLSKHIKLEEERRSEDAQSKAALTDWLRAKASFVIEGLKEADKDEFCRCELKLQKWYGDLRGKPFAIEAENSILDISGFSKQYNCAFIWQKDGVKKLNLYLIINYFKGGKLRFKKIKPEAFEANRFYTVINKKSGEIVPMEVNFNFDDPNLIILPLAFGKRVGREFIWNDLLSLETGSLKLANGRVIEKTLYNRRTRQDEPALFVALTFERREVLDSSNIKPMNLIGVDRGENIPAVIALTDPEGCPLSRFKDSLGNPTHILRIGESYKEKQRTIQAKKEVEQRRAGGYSRKYASKAKNLADDMVRNTARDLLYYAVTQDAMLIFENLSRGFGRQGKRTFMAERQYTRMEDWLTAKLAYEGLPSKTYLSKTLAQYTSKTCSNCGFTITSADYDRVLEKLKKTATGWMTTINGKELKVEGQITYYNRYKRQNVVKDLSVELDRLSEESVNNDISSWTKGRSGEALSLLKKRFSHRPVQEKFVCLNCGFETHADEQAALNIARSWLFLRSQEYKKYQTNKTTGNTDKRAFVETWQSFYRKKLKEVWKPAV

SEQ ID NO: 45081 - protein, 978 aa, synthetic construct
  REGION 1..978: note = engineered CasX variant
QEIKRINKIRRRLVKDSNTKKAGKTGPMKTLLVRVMTPDLRERLENLRKKPENIPQPISNTSRANLNKLLTDYTEMKKAILHVYWEEFQKDPVGLMSRVAQPASKKIDQNKLKPEMDEKGNLTTAGFACSQCGQPLFVYKLEQVSEKGKAYTNYFGRCNVAEHEKLILLAQLKPEKDSDEAVTYSLGKFGQRALDFYSIHVTKESTHPVKPLAQIAGNRYASHPVGKALSDACMGTIASFLSKYQDIIIEHQKVVKGNQKRLESLRELAGKENLEYPSVTLPPQPHTKEGVDAYNEVIARVRMWVNLNLWQKLKLSRDDAKPLLRLKNFPSFPLVERQANEVDWWDMVCNVKKLINEKKEDGKVFWQNLAGYKRQEALRPYLSSEEDRKKGKKFARYQLGDLLLHLEKKHGEDWGKVYDEAWERIDKKVEGLSKHIKLEEERRSEDAQSKAALTDWLRAKASFVIEGLKEADKDEFCRCELKLQKWYGDLRGKPFAIEAENSILDISGFSKQYNCAFIWQKDGVKKLNLYLIINYFKGGKLRFKKIKPEAFEANRFYTVINKKSGEIVPMEVNFNFDDPNLIILPLAFGKRVGREFIWNDLLSLETGSLKLANGRVIEKTLYNRRTRQDEPALFVALTFERREVLDSSNIKPMNLIGVDRGENIPAVIALTDPEGCPLSRFKDSLGNPTHILRIGESYKEKQRTIQAKKEVEQRRAGGYSRKYASKAKNLADDMVRNTARDLLYYAVTQDAMLIFENLSRGFGRQGKRTFMAERQYTRMEDWLTAKLAYEGLPSKTYLSKTLAQYTSKTCSNCGFTITSADYDRVLEKLKKTATGWMTTINGKELKVEGQITYYNRYKRQNVVKDLSVELDRLSEESVNNDISSWTKGRSGEALSLLKKRFSHRPVQEKFVCLNCGFETHADEQAALNIARSWLFLRSQEYKKYQTNKTTGNTDKRAFVETWQSFYRKKLKEVWKPAV

SEQ ID NO: 45082 - protein, 978 aa, synthetic construct
  REGION 1..978: note = engineered CasX variant
QEIKRINKIRRRLVKDSNTKKAGKTGPMKTLLVRVMTPDLRERLENLRKKPENIPQPISNTSRANLNKLLTDYTEMKKAILHVYWEEFQKDPVGLMSRVAQPASKKIDQNKLKPEMDEKGNLTTAGFACSQCGQPLFVYKLEQVSEKGKAYTNYFGRCNVAEHEKLILLAQLKPEKDSDEAVTYSLGKFGQRALDFYSIHVTKESTHPVKPLAQIAGNRYASSPVGKALSDACMGTIASFLSKYQDIIIEHQKVVKGNQKRLESLRELAGKENLEYPSVTLPPQPHTKEGVDAYNEVIARVRMWVNLNLWQKLKLSRDDAKPLLRLKNFPSFPLVERQANEVDWWDMVCNVKKLINEKKEDGKVFWQNLAGYKRQEALRPYLSSEEDRKKGKKFARYQLGDLLLHLEKKHGEDWGKVYDEAWERIDKKVEGLSKHIKLEEERRSEDAQSKAALTDWLRAKASFVIEGLKEADKDEFCRCELKLQKWYGDLRGKPFAIEAENSILDISGFSKQYNCAFIWQKDGVKKLNLYLIINYFKGGKLRFKKIKPEAFEANRFYTVINKKSGEIVPMEVNFNFDDPNLIILPLAFGKRVGREFIWNDLLSLETGSLKLANGRVIEKTLYNRRTRQDEPALFVALTFERREVLDSSNIKPMNLIGVDRGENIPAVIALTDPEGCPLSRFKDSLGNPTHILRIGESYKEKQRTIQAKKEVEQRRAGGYSRKYASKAKNLADDMVRNTARDLLYYAVTQDAMLIFENLSRGFGRQGKRTFMAERQYTRMEDWLTAKLAYEGLPSKTYLSKTLAQYTSKTCSNCGFTITSADYDRVLEKLKKTATGWMTTINGKELKVEGQITYYNRYKRQNVVKDLSVELDRLSEESVNNDISSWTKGRSGEALSLLKKRFSHRPVQEKFVCLNCGFETHADEQAALNIARSWLFLRSQEYKKYQTNKTTGNTDKRAFVETWQSFYRKKLKEVWKPAV

SEQ ID NO: 45083 - protein, 978 aa, synthetic construct
  REGION 1..978: note = engineered CasX variant
QEIKRINKIRRRLVKDSNTKKAGKTGPMKTLLVRVMTPDLRERLENLRKKPENIPQPISNTSRANLNKLLTDYTEMKKAILHVYWEEFQKDPVGLMSRVAQPASKKIDQNKLKPEMDEKGNLTTAGFACSQCGQPLFVYKLEQVSEKGKAYTNYFGRCNVAEHEKLILLAQLKPEKDSDEAVTYSLGKFGQRALDFYSIHVTKESTHPVKPLAQIAGNRYASTPVGKALSDACMGTIASFLSKYQDIIIEHQKVVKGNQKRLESLRELAGKENLEYPSVTLPPQPHTKEGVDAYNEVIARVRMWVNLNLWQKLKLSRDDAKPLLRLKNFPSFPLVERQANEVDWWDMVCNVKKLINEKKEDGKVFWQNLAGYKRQEALRPYLSSEEDRKKGKKFARYQLGDLLLHLEKKHGEDWGKVYDEAWERIDKKVEGLSKHIKLEEERRSEDAQSKAALTDWLRAKASFVIEGLKEADKDEFCRCELKLQKWYGDLRGKPFAIEAENSILDISGFSKQYNCAFIWQKDGVKKLNLYLIINYFKGGKLRFKKIKPEAFEANRFYTVINKKSGEIVPMEVNFNFDDPNLIILPLAFGKRVGREFIWNDLLSLETGSLKLANGRVIEKTLYNRRTRQDEPALFVALTFERREVLDSSNIKPMNLIGVDRGENIPAVIALTDPEGCPLSRFKDSLGNPTHILRIGESYKEKQRTIQAKKEVEQRRAGGYSRKYASKAKNLADDMVRNTARDLLYYAVTQDAMLIFENLSRGFGRQGKRTFMAERQYTRMEDWLTAKLAYEGLPSKTYLSKTLAQYTSKTCSNCGFTITSADYDRVLEKLKKTATGWMTTINGKELKVEGQITYYNRYKRQNVVKDLSVELDRLSEESVNNDISSWTKGRSGEALSLLKKRFSHRPVQEKFVCLNCGFETHADEQAALNIARSWLFLRSQEYKKYQTNKTTGNTDKRAFVETWQSFYRKKLKEVWKPAV

SEQ ID NO: 45084 - protein, 978 aa, synthetic construct
  REGION 1..978: note = engineered CasX variant
QEIKRINKIRRRLVKDSNTKKAGKTGPMKTLLVRVMTPDLRERLENLRKKPENIPQPISNTSRANLNKLLTDYTEMKKAILHVYWEEFQKDPVGLMSRVAQPASKKIDQNKLKPEMDEKGNLTTAGFACSQCGQPLFVYKLEQVSEKGKAYTNYFGRCNVAEHEKLILLAQLKPEKDSDEAVTYSLGKFGQRALDFYSIHVTKESTHPVKPLAQIAGNRYASAPVGKALSDACMGTIASFLSKYQDIIIEHQKVVKGNQKRLESLRELAGKENLEYPSVTLPPQPHTKEGVDAYNEVIARVRMWVNLNLWQKLKLSRDDAKPLLRLKNFPSFPLVERQANEVDWWDMVCNVKKLINEKKEDGKVFWQNLAGYKRQEALRPYLSSEEDRKKGKKFARYQLGDLLLHLEKKHGEDWGKVYDEAWERIDKKVEGLSKHIKLEEERRSEDAQSKAALTDWLRAKASFVIEGLKEADKDEFCRCELKLQKWYGDLRGKPFAIEAENSILDISGFSKQYNCAFIWQKDGVKKLNLYLIINYFKGGKLRFKKIKPEAFEANRFYTVINKKSGEIVPMEVNFNFDDPNLIILPLAFGKRVGREFIWNDLLSLETGSLKLANGRVIEKTLYNRRTRQDEPALFVALTFERREVLDSSNIKPMNLIGVDRGENIPAVIALTDPEGCPLSRFKDSLGNPTHILRIGESYKEKQRTIQAKKEVEQRRAGGYSRKYASKAKNLADDMVRNTARDLLYYAVTQDAMLIFENLSRGFGRQGKRTFMAERQYTRMEDWLTAKLAYEGLPSKTYLSKTLAQYTSKTCSNCGFTITSADYDRVLEKLKKTATGWMTTINGKELKVEGQITYYNRYKRQNVVKDLSVELDRLSEESVNNDISSWTKGRSGEALSLLKKRFSHRPVQEKFVCLNCGFETHADEQAALNIARSWLFLRSQEYKKYQTNKTTGNTDKRAFVETWQSFYRKKLKEVWKPAV

SEQ ID NO: 45085 - protein, 978 aa, synthetic construct
  REGION 1..978: note = engineered CasX variant
QEIKRINKIRRRLVKDSNTKKAGKTGPMKTLLVRVMTPDLRERLENLRKKPENIPQPISNTSRANLNKLLTDYTEMKKAILHVYWEEFQKDPVGLMSRVAQPASKKIDQNKLKPEMDEKGNLTTAGFACSQCGQPLFVYKLEQVSEKGKAYTNYFGRCNVAEHEKLILLAQLKPEKDSDEAVTYSLGKFGQRALDFYSIHVTKESTHPVKPLAQIAGNRYASVPVGKALSDACMGTIASFLSKYQDIIIEHQKVVKGNQKRLESLRELAGKENLEYPSVTLPPQPHTKEGVDAYNEVIARVRMWVNLNLWQKLKLSRDDAKPLLRLKNFPSFPLVERQANEVDWWDMVCNVKKLINEKKEDGKVFWQNLAGYKRQEALRPYLSSEEDRKKGKKFARYQLGDLLLHLEKKHGEDWGKVYDEAWERIDKKVEGLSKHIKLEEERRSEDAQSKAALTDWLRAKASFVIEGLKEADKDEFCRCELKLQKWYGDLRGKPFAIEAENSILDISGFSKQYNCAFIWQKDGVKKLNLYLIINYFKGGKLRFKKIKPEAFEANRFYTVINKKSGEIVPMEVNFNFDDPNLIILPLAFGKRVGREFIWNDLLSLETGSLKLANGRVIEKTLYNRRTRQDEPALFVALTFERREVLDSSNIKPMNLIGVDRGENIPAVIALTDPEGCPLSRFKDSLGNPTHILRIGESYKEKQRTIQAKKEVEQRRAGGYSRKYASKAKNLADDMVRNTARDLLYYAVTQDAMLIFENLSRGFGRQGKRTFMAERQYTRMEDWLTAKLAYEGLPSKTYLSKTLAQYTSKTCSNCGFTITSADYDRVLEKLKKTATGWMTTINGKELKVEGQITYYNRYKRQNVVKDLSVELDRLSEESVNNDISSWTKGRSGEALSLLKKRFSHRPVQEKFVCLNCGFETHADEQAALNIARSWLFLRSQEYKKYQTNKTTGNTDKRAFVETWQSFYRKKLKEVWKPAV

SEQ ID NO: 45086 - protein, 978 aa, synthetic construct
  REGION 1..978: note = engineered CasX variant
QEIKRINKIRRRLVKDSNTKKAGKTGPMKTLLVRVMTPDLRERLENLRKKPENIPQPISNTSRANLNKLLTDYTEMKKAILHVYWEEFQKDPVGLMSRVAQPASKKIDQNKLKPEMDEKGNLTTAGFACSQCGQPLFVYKLEQVSEKGKAYTNYFGRCNVAEHEKLIKLAQLKPEKDSDEAVTYSLGKFGQRALDFYSIHVTKESTHPVKPLAQIAGNRYASGPVGKALSDACMGTIASFLSKYQDIIIEHQKVVKGNQKRLESLRELAGKENLEYPSVTLPPQPHTKEGVDAYNEVIARVRMWVNLNLWQKLKLSRDDAKPLLRLKNFPSFPLVERQANEVDWWDMVCNVKKLINEKKEDGKVFWQNLAGYKRQEALRPYLSSEEDRKKGKKFARYQLGDLLLHLEKKHGEDWGKVYDEAWERIDKKVEGLSKHIKLEEERRSEDAQSKAALTDWLRAKASFVIEGLKEADKDEFCRCELKLQKWYGDLRGKPFAIEAENSILDISGFSKQYNCAFIWQKDGVKKLNLYLIINYFKGGKLRFKKIKPEAFEANRFYTVINKKSGEIVPMEVNFNFDDPNLIILPLAFGKRVGREFIWNDLLSLETGSLKLANGRVIEKTLYNRRTRQDEPALFVALTFERREVLDSSNIKPMNLIGVDRGENIPAVIALTDPEGCPLSRFKDSLGNPTHILRIGESYKEKQRTIQAKKEVEQRRAGGYSRKYASKAKNLADDMVRNTARDLLYYAVTQDAMLIFENLSRGFGRQGKRTFMAERQYTRMEDWLTAKLAYEGLPSKTYLSKTLAQYTSKTCSNCGFTITSADYDRVLEKLKKTATGWMTTINGKELKVEGQITYYNRYKRQNVVKDLSVELDRLSEESVNNDISSWTKGRSGEALSLLKKRFSHRPVQEKFVCLNCGFETHADEQAALNIARSWLFLRSQEYKKYQTNKTTGNTDKRAFVETWQSFYRKKLKEVWKPAV

SEQ ID NO: 45087 - protein, 977 aa, synthetic construct
  REGION 1..977: note = engineered CasX variant
QEIKRINKIRRRLVKDSNTKKAGKTGPMKTLLVRVMTPDLRERLENLRKKPENIPQPISNTSRANLNKLLTDYTEMKKAILHVYWEEFQKDPVGLMSRVAQPASKKIDQNKLKPEMDEKGNLTTAGFACSQCGQPLFVYKLEQVSEKGKAYTNYFGRCNVAEHEKLILLAQLKPEKDSDEAVTYSLGKFGQRALDFYSIHVTKESTHPVKPLAQIAGNRYASPVGKALSDACMGTIASFLSKYQDIIIEHQKVVKGNQKRLESLRELAGKENLEYPSVTLPPQPHTKEGVDAYNEVIARVRMWVNLNLWQKLKLSRDDAKPLLRLKNFPSFPLVERQANEVDWWDMVCNVKKLINEKKEDGKVFWQNLAGYKRQEALRPYLSSEEDRKKGKKFARYQLGDLLLHLEKKHGEDWGKVYDEAWERIDKKVEGLSKHIKLEEERRSEDAQSKAALTDWLRAKASFVIEGLKEADKDEFCRCELKLQKWYGDLRGKPFAIEAENSILDISGFSKQYNCAFIWQKDGVKKLNLYLIINYFKGGKLRFKKIKPEAFEANRFYTVINKKSGEIVPMEVNFNFDDPNLIILPLAFGKRVGREFIWNDLLSLETGSLKLANGRVIEKTLYNRRTRQDEPALFVALTFERREVLDSSNIKPMNLIGVDRGENIPAVIALTDPEGCPLSRFKDSLGNPTHILRIGESYKEKQRTIQAKKEVEQRRAGGYSRKYASKAKNLADDMVRNTARDLLYYAVTQDAMLIFENLSRGFGRQGKRTFMAERQYTRMEDWLTAKLAYEGLPSKTYLSKTLAQYTSKTCSNCGFTITSADYDRVLEKLKKTATGWMTTINGKELKVEGQITYYNRYKRQNVVKDLSVELDRLSEESVNNDISSWTKGRSGEALSLLKKRFSHRPVQEKFVCLNCGFETHADEQAALNIARSWLFLRSQEYKKYQTNKTTGNTDKRAFVETWQSFYRKKLKEVWKPAV

SEQ ID NO: 45088 - protein, 978 aa, synthetic construct
  REGION 1..978: note = engineered CasX variant
QEIKRINKIRRRLVKDSNTKKAGKTGPMKTLLVRVMTPDLRERLENLRKKPENIPQPISNTSRANLNKLLTDYTEMKKAILHVYWEEFQKDPVGLMSRVAQPASKKIDQNKLKPEMDEKGNLTTAGFACSQCGQPLFVYKLEQVSEKGKAYTNYFGRCNVAEHEKLILLAQLKPEKDSDEAVTYSLGKFGQRALDFYSIHVTKESTHPVKPLAQIAGNRYASYPVGKALSDACMGTIASFLSKYQDIIIEHQKVVKGNQKRLESLRELAGKENLEYPSVTLPPQPHTKEGVDAYNEVIARVRMWVNLNLWQKLKLSRDDAKPLLRLKGFPSFPLVERQANEVDWWDMVCNVKKLINEKKEDGKVFWQNLAGYKRQEALRPYLSSEEDRKKGKKFARYQLGDLLNHLEKKHGEDWGKVYDEAWERIDKKVEGLSKHIKLEEERRSEDAQSKAALTDWLRAKASFVIEGLKEADKDEFCRCELKLQKWYGDLRGKPFAIEAENSILDISGFSKQYNCAFIWQKDGVKKLNLYLIINYFKGGKLRFKKIKPEAFEANRFYTVINKKSGEIVPMEVNFNFDDPNLIILPLAFGKRVGREFIWNDLLSLETGSLKLANGRVIEKTLYNRRTRQDEPALFVALTFERREVLDSSNIKPMNLIGVDRGENIPAVIALTDPEGCPLSRFKDSLGNPTHILRIGESYKEKQRTIQAKKEVEQRRAGGYSRKYASKAKNLADDMVRNTARDLLYYAVTQDAMLIFENLSRGFGRQGKRTFMAERQYTRMEDWLTAKLAYEGLPSKTYLSKTLAQYTSKTCSNCGFTITSADYDRVLEKLKKTATGWMTTINGKELKVEGQITYYNRYKRQNVVKDLSVELDRLSEESVNNDISSWTKGRSGEALSLLKKRFSHRPVQEKFVCLNCGFETHADEQAALNIARSWLFLRSQEYKKYQTNKTTGNTDKRAFVETWQSFYRKKLKEVWKPAV

SEQ ID NO: 45089 - protein, 978 aa, synthetic construct
  REGION 1..978: note = engineered CasX variant
QEIKRINKIRRRLVKDSNTKKAGKTGPMKTLLVRVMTPDLRERLENLRKKPENIPQPISNTSRANLNKLLTDYTEMKKAILHVYWEEFQKDPVGLMSRVAQPASKKIDQNKLKPEMDEKGNLTTAGFACSQCGQPLFVYKLEQVSEKGKAYTNYFGRCNVAEHEKLILLAQLKPEKDSDEAVTYSLGKFGQRALDFYSIHVTKESTHPVKPLAQIAGNRYASHPVGKALSDACMGTIASFLSKYQDIIIEHQKVVKGNQKRLESLRELAGKENLEYPSVTLPPQPHTKEGVDAYNEVIARVRMWVNLNLWQKLKLSRDDAKPLLRLKGFPSFPLVERQANEVDWWDMVCNVKKLINEKKEDGKVFWQNLAGYKRQEALRPYLSSEEDRKKGKKFARYQLGDLLNHLEKKHGEDWGKVYDEAWERIDKKVEGLSKHIKLEEERRSEDAQSKAALTDWLRAKASFVIEGLKEADKDEFCRCELKLQKWYGDLRGKPFAIEAENSILDISGFSKQYNCAFIWQKDGVKKLNLYLIINYFKGGKLRFKKIKPEAFEANRFYTVINKKSGEIVPMEVNFNFDDPNLIILPLAFGKRVGREFIWNDLLSLETGSLKLANGRVIEKTLYNRRTRQDEPALFVALTFERREVLDSSNIKPMNLIGVDRGENIPAVIALTDPEGCPLSRFKDSLGNPTHILRIGESYKEKQRTIQAKKEVEQRRAGGYSRKYASKAKNLADDMVRNTARDLLYYAVTQDAMLIFENLSRGFGRQGKRTFMAERQYTRMEDWLTAKLAYEGLPSKTYLSKTLAQYTSKTCSNCGFTITSADYDRVLEKLKKTATGWMTTINGKELKVEGQITYYNRYKRQNVVKDLSVELDRLSEESVNNDISSWTKGRSGEALSLLKKRFSHRPVQEKFVCLNCGFETHADEQAALNIARSWLFLRSQEYKKYQTNKTTGNTDKRAFVETWQSFYRKKLKEVWKPAV

SEQ ID NO: 45090 - protein, 978 aa, synthetic construct
  REGION 1..978: note = engineered CasX variant
QEIKRINKIRRRLVKDSNTKKAGKTGPMKTLLVRVMTPDLRERLENLRKKPENIPQPISNTSRANLNKLLTDYTEMKKAILHVYWEEFQKDPVGLMSRVAQPASKKIDQNKLKPEMDEKGNLTTAGFACSQCGQPLFVYKLEQVSEKGKAYTNYFGRCNVAEHEKLILLAQLKPEKDSDEAVTYSLGKFGQRALDFYSIHVTKESTHPVKPLAQIAGNRYASSPVGKALSDACMGTIASFLSKYQDIIIEHQKVVKGNQKRLESLRELAGKENLEYPSVTLPPQPHTKEGVDAYNEVIARVRMWVNLNLWQKLKLSRDDAKPLLRLKGFPSFPLVERQANEVDWWDMVCNVKKLINEKKEDGKVFWQNLAGYKRQEALRPYLSSEEDRKKGKKFARYQLGDLLNHLEKKHGEDWGKVYDEAWERIDKKVEGLSKHIKLEEERRSEDAQSKAALTDWLRAKASFVIEGLKEADKDEFCRCELKLQKWYGDLRGKPFAIEAENSILDISGFSKQYNCAFIWQKDGVKKLNLYLIINYFKGGKLRFKKIKPEAFEANRFYTVINKKSGEIVPMEVNFNFDDPNLIILPLAFGKRVGREFIWNDLLSLETGSLKLANGRVIEKTLYNRRTRQDEPALFVALTFERREVLDSSNIKPMNLIGVDRGENIPAVIALTDPEGCPLSRFKDSLGNPTHILRIGESYKEKQRTIQAKKEVEQRRAGGYSRKYASKAKNLADDMVRNTARDLLYYAVTQDAMLIFENLSRGFGRQGKRTFMAERQYTRMEDWLTAKLAYEGLPSKTYLSKTLAQYTSKTCSNCGFTITSADYDRVLEKLKKTATGWMTTINGKELKVEGQITYYNRYKRQNVVKDLSVELDRLSEESVNNDISSWTKGRSGEALSLLKKRFSHRPVQEKFVCLNCGFETHADEQAALNIARSWLFLRSQEYKKYQTNKTTGNTDKRAFVETWQSFYRKKLKEVWKPAV

SEQ ID NO: 45091 - protein, 978 aa, synthetic construct
  REGION 1..978: note = engineered CasX variant
QEIKRINKIRRRLVKDSNTKKAGKTGPMKTLLVRVMTPDLRERLENLRKKPENIPQPISNTSRANLNKLLTDYTEMKKAILHVYWEEFQKDPVGLMSRVAQPASKKIDQNKLKPEMDEKGNLTTAGFACSQCGQPLFVYKLEQVSEKGKAYTNYFGRCNVAEHEKLILLAQLKPEKDSDEAVTYSLGKFGQRALDFYSIHVTKESTHPVKPLAQIAGNRYASTPVGKALSDACMGTIASFLSKYQDIIIEHQKVVKGNQKRLESLRELAGKENLEYPSVTLPPQPHTKEGVDAYNEVIARVRMWVNLNLWQKLKLSRDDAKPLLRLKGFPSFPLVERQANEVDWWDMVCNVKKLINEKKEDGKVFWQNLAGYKRQEALRPYLSSEEDRKKGKKFARYQLGDLLNHLEKKHGEDWGKVYDEAWERIDKKVEGLSKHIKLEEERRSEDAQSKAALTDWLRAKASFVIEGLKEADKDEFCRCELKLQKWYGDLRGKPFAIEAENSILDISGFSKQYNCAFIWQKDGVKKLNLYLIINYFKGGKLRFKKIKPEAFEANRFYTVINKKSGEIVPMEVNFNFDDPNLIILPLAFGKRVGREFIWNDLLSLETGSLKLANGRVIEKTLYNRRTRQDEPALFVALTFERREVLDSSNIKPMNLIGVDRGENIPAVIALTDPEGCPLSRFKDSLGNPTHILRIGESYKEKQRTIQAKKEVEQRRAGGYSRKYASKAKNLADDMVRNTARDLLYYAVTQDAMLIFENLSRGFGRQGKRTFMAERQYTRMEDWLTAKLAYEGLPSKTYLSKTLAQYTSKTCSNCGFTITSADYDRVLEKLKKTATGWMTTINGKELKVEGQITYYNRYKRQNVVKDLSVELDRLSEESVNNDISSWTKGRSGEALSLLKKRFSHRPVQEKFVCLNCGFETHADEQAALNIARSWLFLRSQEYKKYQTNKTTGNTDKRAFVETWQSFYRKKLKEVWKPAV

SEQ ID NO: 45092 - protein, 978 aa, synthetic construct
  REGION 1..978: note = engineered CasX variant
QEIKRINKIRRRLVKDSNTKKAGKTGPMKTLLVRVMTPDLRERLENLRKKPENIPQPISNTSRANLNKLLTDYTEMKKAILHVYWEEFQKDPVGLMSRVAQPASKKIDQNKLKPEMDEKGNLTTAGFACSQCGQPLFVYKLEQVSEKGKAYTNYFGRCNVAEHEKLILLAQLKPEKDSDEAVTYSLGKFGQRALDFYSIHVTKESTHPVKPLAQIAGNRYASAPVGKALSDACMGTIASFLSKYQDIIIEHQKVVKGNQKRLESLRELAGKENLEYPSVTLPPQPHTKEGVDAYNEVIARVRMWVNLNLWQKLKLSRDDAKPLLRLKGFPSFPLVERQANEVDWWDMVCNVKKLINEKKEDGKVFWQNLAGYKRQEALRPYLSSEEDRKKGKKFARYQLGDLLNHLEKKHGEDWGKVYDEAWERIDKKVEGLSKHIKLEEERRSEDAQSKAALTDWLRAKASFVIEGLKEADKDEFCRCELKLQKWYGDLRGKPFAIEAENSILDISGFSKQYNCAFIWQKDGVKKLNLYLIINYFKGGKLRFKKIKPEAFEANRFYTVINKKSGEIVPMEVNFNFDDPNLIILPLAFGKRVGREFIWNDLLSLETGSLKLANGRVIEKTLYNRRTRQDEPALFVALTFERREVLDSSNIKPMNLIGVDRGENIPAVIALTDPEGCPLSRFKDSLGNPTHILRIGESYKEKQRTIQAKKEVEQRRAGGYSRKYASKAKNLADDMVRNTARDLLYYAVTQDAMLIFENLSRGFGRQGKRTFMAERQYTRMEDWLTAKLAYEGLPSKTYLSKTLAQYTSKTCSNCGFTITSADYDRVLEKLKKTATGWMTTINGKELKVEGQITYYNRYKRQNVVKDLSVELDRLSEESVNNDISSWTKGRSGEALSLLKKRFSHRPVQEKFVCLNCGFETHADEQAALNIARSWLFLRSQEYKKYQTNKTTGNTDKRAFVETWQSFYRKKLKEVWKPAV

SEQ ID NO: 45093 - protein, 978 aa, synthetic construct
  REGION 1..978: note = engineered CasX variant
QEIKRINKIRRRLVKDSNTKKAGKTGPMKTLLVRVMTPDLRERLENLRKKPENIPQPISNTSRANLNKLLTDYTEMKKAILHVYWEEFQKDPVGLMSRVAQPASKKIDQNKLKPEMDEKGNLTTAGFACSQCGQPLFVYKLEQVSEKGKAYTNYFGRCNVAEHEKLILLAQLKPEKDSDEAVTYSLGKFGQRALDFYSIHVTKESTHPVKPLAQIAGNRYASVPVGKALSDACMGTIASFLSKYQDIIIEHQKVVKGNQKRLESLRELAGKENLEYPSVTLPPQPHTKEGVDAYNEVIARVRMWVNLNLWQKLKLSRDDAKPLLRLKGFPSFPLVERQANEVDWWDMVCNVKKLINEKKEDGKVFWQNLAGYKRQEALRPYLSSEEDRKKGKKFARYQLGDLLNHLEKKHGEDWGKVYDEAWERIDKKVEGLSKHIKLEEERRSEDAQSKAALTDWLRAKASFVIEGLKEADKDEFCRCELKLQKWYGDLRGKPFAIEAENSILDISGFSKQYNCAFIWQKDGVKKLNLYLIINYFKGGKLRFKKIKPEAFEANRFYTVINKKSGEIVPMEVNFNFDDPNLIILPLAFGKRVGREFIWNDLLSLETGSLKLANGRVIEKTLYNRRTRQDEPALFVALTFERREVLDSSNIKPMNLIGVDRGENIPAVIALTDPEGCPLSRFKDSLGNPTHILRIGESYKEKQRTIQAKKEVEQRRAGGYSRKYASKAKNLADDMVRNTARDLLYYAVTQDAMLIFENLSRGFGRQGKRTFMAERQYTRMEDWLTAKLAYEGLPSKTYLSKTLAQYTSKTCSNCGFTITSADYDRVLEKLKKTATGWMTTINGKELKVEGQITYYNRYKRQNVVKDLSVELDRLSEESVNNDISSWTKGRSGEALSLLKKRFSHRPVQEKFVCLNCGFETHADEQAALNIARSWLFLRSQEYKKYQTNKTTGNTDKRAFVETWQSFYRKKLKEVWKPAV

SEQ ID NO: 45094 - protein, 978 aa, synthetic construct
  REGION 1..978: note = engineered CasX variant
QEIKRINKIRRRLVKDSNTKKAGKTGPMKTLLVRVMTPDLRERLENLRKKPENIPQPISNTSRANLNKLLTDYTEMKKAILHVYWEEFQKDPVGLMSRVAQPASKKIDQNKLKPEMDEKGNLTTAGFACSQCGQPLFVYKLEQVSEKGKAYTNYFGRCNVAEHEKLIKLAQLKPEKDSDEAVTYSLGKFGQRALDFYSIHVTKESTHPVKPLAQIAGNRYASGPVGKALSDACMGTIASFLSKYQDIIIEHQKVVKGNQKRLESLRELAGKENLEYPSVTLPPQPHTKEGVDAYNEVIARVRMWVNLNLWQKLKLSRDDAKPLLRLKGFPSFPLVERQANEVDWWDMVCNVKKLINEKKEDGKVFWQNLAGYKRQEALRPYLSSEEDRKKGKKFARYQLGDLLNHLEKKHGEDWGKVYDEAWERIDKKVEGLSKHIKLEEERRSEDAQSKAALTDWLRAKASFVIEGLKEADKDEFCRCELKLQKWYGDLRGKPFAIEAENSILDISGFSKQYNCAFIWQKDGVKKLNLYLIINYFKGGKLRFKKIKPEAFEANRFYTVINKKSGEIVPMEVNFNFDDPNLIILPLAFGKRVGREFIWNDLLSLETGSLKLANGRVIEKTLYNRRTRQDEPALFVALTFERREVLDSSNIKPMNLIGVDRGENIPAVIALTDPEGCPLSRFKDSLGNPTHILRIGESYKEKQRTIQAKKEVEQRRAGGYSRKYASKAKNLADDMVRNTARDLLYYAVTQDAMLIFENLSRGFGRQGKRTFMAERQYTRMEDWLTAKLAYEGLPSKTYLSKTLAQYTSKTCSNCGFTITSADYDRVLEKLKKTATGWMTTINGKELKVEGQITYYNRYKRQNVVKDLSVELDRLSEESVNNDISSWTKGRSGEALSLLKKRFSHRPVQEKFVCLNCGFETHADEQAALNIARSWLFLRSQEYKKYQTNKTTGNTDKRAFVETWQSFYRKKLKEVWKPAV

SEQ ID NO: 45095 - protein, 977 aa, synthetic construct
  REGION 1..977: note = engineered CasX variant
QEIKRINKIRRRLVKDSNTKKAGKTGPMKTLLVRVMTPDLRERLENLRKKPENIPQPISNTSRANLNKLLTDYTEMKKAILHVYWEEFQKDPVGLMSRVAQPASKKIDQNKLKPEMDEKGNLTTAGFACSQCGQPLFVYKLEQVSEKGKAYTNYFGRCNVAEHEKLILLAQLKPEKDSDEAVTYSLGKFGQRALDFYSIHVTKESTHPVKPLAQIAGNRYASPVGKALSDACMGTIASFLSKYQDIIIEHQKVVKGNQKRLESLRELAGKENLEYPSVTLPPQPHTKEGVDAYNEVIARVRMWVNLNLWQKLKLSRDDAKPLLRLKGFPSFPLVERQANEVDWWDMVCNVKKLINEKKEDGKVFWQNLAGYKRQEALRPYLSSEEDRKKGKKFARYQLGDLLNHLEKKHGEDWGKVYDEAWERIDKKVEGLSKHIKLEEERRSEDAQSKAALTDWLRAKASFVIEGLKEADKDEFCRCELKLQKWYGDLRGKPFAIEAENSILDISGFSKQYNCAFIWQKDGVKKLNLYLIINYFKGGKLRFKKIKPEAFEANRFYTVINKKSGEIVPMEVNFNFDDPNLIILPLAFGKRVGREFIWNDLLSLETGSLKLANGRVIEKTLYNRRTRQDEPALFVALTFERREVLDSSNIKPMNLIGVDRGENIPAVIALTDPEGCPLSRFKDSLGNPTHILRIGESYKEKQRTIQAKKEVEQRRAGGYSRKYASKAKNLADDMVRNTARDLLYYAVTQDAMLIFENLSRGFGRQGKRTFMAERQYTRMEDWLTAKLAYEGLPSKTYLSKTLAQYTSKTCSNCGFTITSADYDRVLEKLKKTATGWMTTINGKELKVEGQITYYNRYKRQNVVKDLSVELDRLSEESVNNDISSWTKGRSGEALSLLKKRFSHRPVQEKFVCLNCGFETHADEQAALNIARSWLFLRSQEYKKYQTNKTTGNTDKRAFVETWQSFYRKKLKEVWKPAV

SEQ ID NO: 45096 - protein, 978 aa, synthetic construct
  REGION 1..978: note = engineered CasX variant
QEIKRINKIRRRLVKDSNTKKAGKTGPMKTLLVRVMTPDLRERLENLRKKPENIPQPISNTSRANLNKLLTDYTEMKKAILHVYWEEFQKDPVGLMSRVAQPASKKIDQNKLKPEMDEKGNLTTAGFACSQCGQPLFVYKLEQVSEKGKAYTNYFGRCNVAEHEKLILLAQLKPEKDSDEAVTYSLGKFGQRALDFYSIHVTKESTHPVKPLAQIAGNRYASYPVGKALSDACMGTIASFLSKYQDIIIEHQKVVKGNQKRLESLRELAGKENLEYPSVTLPPQPHTKEGVDAYNEVIARVRMWVNLNLWQKLKLSRDDAKPLLRLKGFPSFPLVERQANEVDWWDMVCNVKKLINEKKEDGKVFWQNLAGYKRQEALRPYLSSEEDRKKGKKFARYQLGDLLWHLEKKHGEDWGKVYDEAWERIDKKVEGLSKHIKLEEERRSEDAQSKAALTDWLRAKASFVIEGLKEADKDEFCRCELKLQKWYGDLRGKPFAIEAENSILDISGFSKQYNCAFIWQKDGVKKLNLYLIINYFKGGKLRFKKIKPEAFEANRFYTVINKKSGEIVPMEVNFNFDDPNLIILPLAFGKRVGREFIWNDLLSLETGSLKLANGRVIEKTLYNRRTRQDEPALFVALTFERREVLDSSNIKPMNLIGVDRGENIPAVIALTDPEGCPLSRFKDSLGNPTHILRIGESYKEKQRTIQAKKEVEQRRAGGYSRKYASKAKNLADDMVRNTARDLLYYAVTQDAMLIFENLSRGFGRQGKRTFMAERQYTRMEDWLTAKLAYEGLPSKTYLSKTLAQYTSKTCSNCGFTITSADYDRVLEKLKKTATGWMTTINGKELKVEGQITYYNRYKRQNVVKDLSVELDRLSEESVNNDISSWTKGRSGEALSLLKKRFSHRPVQEKFVCLNCGFETHADEQAALNIARSWLFLRSQEYKKYQTNKTTGNTDKRAFVETWQSFYRKKLKEVWKPAV

SEQ ID NO: 45097 - protein, 978 aa, synthetic construct
  REGION 1..978: note = engineered CasX variant
QEIKRINKIRRRLVKDSNTKKAGKTGPMKTLLVRVMTPDLRERLENLRKKPENIPQPISNTSRANLNKLLTDYTEMKKAILHVYWEEFQKDPVGLMSRVAQPASKKIDQNKLKPEMDEKGNLTTAGFACSQCGQPLFVYKLEQVSEKGKAYTNYFGRCNVAEHEKLILLAQLKPEKDSDEAVTYSLGKFGQRALDFYSIHVTKESTHPVKPLAQIAGNRYASHPVGKALSDACMGTIASFLSKYQDIIIEHQKVVKGNQKRLESLRELAGKENLEYPSVTLPPQPHTKEGVDAYNEVIARVRMWVNLNLWQKLKLSRDDAKPLLRLKGFPSFPLVERQANEVDWWDMVCNVKKLINEKKEDGKVFWQNLAGYKRQEALRPYLSSEEDRKKGKKFARYQLGDLLWHLEKKHGEDWGKVYDEAWERIDKKVEGLSKHIKLEEERRSEDAQSKAALTDWLRAKASFVIEGLKEADKDEFCRCELKLQKWYGDLRGKPFAIEAENSILDISGFSKQYNCAFIWQKDGVKKLNLYLIINYFKGGKLRFKKIKPEAFEANRFYTVINKKSGEIVPMEVNFNFDDPNLIILPLAFGKRVGREFIWNDLLSLETGSLKLANGRVIEKTLYNRRTRQDEPALFVALTFERREVLDSSNIKPMNLIGVDRGENIPAVIALTDPEGCPLSRFKDSLGNPTHILRIGESYKEKQRTIQAKKEVEQRRAGGYSRKYASKAKNLADDMVRNTARDLLYYAVTQDAMLIFENLSRGFGRQGKRTFMAERQYTRMEDWLTAKLAYEGLPSKTYLSKTLAQYTSKTCSNCGFTITSADYDRVLEKLKKTATGWMTTINGKELKVEGQITYYNRYKRQNVVKDLSVELDRLSEESVNNDISSWTKGRSGEALSLLKKRFSHRPVQEKFVCLNCGFETHADEQAALNIARSWLFLRSQEYKKYQTNKTTGNTDKRAFVETWQSFYRKKLKEVWKPAV

SEQ ID NO: 45098 - protein, 978 aa, synthetic construct
  REGION 1..978: note = engineered CasX variant
QEIKRINKIRRRLVKDSNTKKAGKTGPMKTLLVRVMTPDLRERLENLRKKPENIPQPISNTSRANLNKLLTDYTEMKKAILHVYWEEFQKDPVGLMSRVAQPASKKIDQNKLKPEMDEKGNLTTAGFACSQCGQPLFVYKLEQVSEKGKAYTNYFGRCNVAEHEKLILLAQLKPEKDSDEAVTYSLGKFGQRALDFYSIHVTKESTHPVKPLAQIAGNRYASSPVGKALSDACMGTIASFLSKYQDIIIEHQKVVKGNQKRLESLRELAGKENLEYPSVTLPPQPHTKEGVDAYNEVIARVRMWVNLNLWQKLKLSRDDAKPLLRLKGFPSFPLVERQANEVDWWDMVCNVKKLINEKKEDGKVFWQNLAGYKRQEALRPYLSSEEDRKKGKKFARYQLGDLLWHLEKKHGEDWGKVYDEAWERIDKKVEGLSKHIKLEEERRSEDAQSKAALTDWLRAKASFVIEGLKEADKDEFCRCELKLQKWYGDLRGKPFAIEAENSILDISGFSKQYNCAFIWQKDGVKKLNLYLIINYFKGGKLRFKKIKPEAFEANRFYTVINKKSGEIVPMEVNFNFDDPNLIILPLAFGKRVGREFIWNDLLSLETGSLKLANGRVIEKTLYNRRTRQDEPALFVALTFERREVLDSSNIKPMNLIGVDRGENIPAVIALTDPEGCPLSRFKDSLGNPTHILRIGESYKEKQRTIQAKKEVEQRRAGGYSRKYASKAKNLADDMVRNTARDLLYYAVTQDAMLIFENLSRGFGRQGKRTFMAERQYTRMEDWLTAKLAYEGLPSKTYLSKTLAQYTSKTCSNCGFTITSADYDRVLEKLKKTATGWMTTINGKELKVEGQITYYNRYKRQNVVKDLSVELDRLSEESVNNDISSWTKGRSGEALSLLKKRFSHRPVQEKFVCLNCGFETHADEQAALNIARSWLFLRSQEYKKYQTNKTTGNTDKRAFVETWQSFYRKKLKEVWKPAV

SEQ ID NO: 45099 - protein, 978 aa, synthetic construct
  REGION 1..978: note = engineered CasX variant
QEIKRINKIRRRLVKDSNTKKAGKTGPMKTLLVRVMTPDLRERLENLRKKPENIPQPISNTSRANLNKLLTDYTEMKKAILHVYWEEFQKDPVGLMSRVAQPASKKIDQNKLKPEMDEKGNLTTAGFACSQCGQPLFVYKLEQVSEKGKAYTNYFGRCNVAEHEKLILLAQLKPEKDSDEAVTYSLGKFGQRALDFYSIHVTKESTHPVKPLAQIAGNRYASTPVGKALSDACMGTIASFLSKYQDIIIEHQKVVKGNQKRLESLRELAGKENLEYPSVTLPPQPHTKEGVDAYNEVIARVRMWVNLNLWQKLKLSRDDAKPLLRLKGFPSFPLVERQANEVDWWDMVCNVKKLINEKKEDGKVFWQNLAGYKRQEALRPYLSSEEDRKKGKKFARYQLGDLLWHLEKKHGEDWGKVYDEAWERIDKKVEGLSKHIKLEEERRSEDAQSKAALTDWLRAKASFVIEGLKEADKDEFCRCELKLQKWYGDLRGKPFAIEAENSILDISGFSKQYNCAFIWQKDGVKKLNLYLIINYFKGGKLRFKKIKPEAFEANRFYTVINKKSGEIVPMEVNFNFDDPNLIILPLAFGKRVGREFIWNDLLSLETGSLKLANGRVIEKTLYNRRTRQDEPALFVALTFERREVLDSSNIKPMNLIGVDRGENIPAVIALTDPEGCPLSRFKDSLGNPTHILRIGESYKEKQRTIQAKKEVEQRRAGGYSRKYASKAKNLADDMVRNTARDLLYYAVTQDAMLIFENLSRGFGRQGKRTFMAERQYTRMEDWLTAKLAYEGLPSKTYLSKTLAQYTSKTCSNCGFTITSADYDRVLEKLKKTATGWMTTINGKELKVEGQITYYNRYKRQNVVKDLSVELDRLSEESVNNDISSWTKGRSGEALSLLKKRFSHRPVQEKFVCLNCGFETHADEQAALNIARSWLFLRSQEYKKYQTNKTTGNTDKRAFVETWQSFYRKKLKEVWKPAV

SEQ ID NO: 45100 - protein, 978 aa, synthetic construct
  REGION 1..978: note = engineered CasX variant
QEIKRINKIRRRLVKDSNTKKAGKTGPMKTLLVRVMTPDLRERLENLRKKPENIPQPISNTSRANLNKLLTDYTEMKKAILHVYWEEFQKDPVGLMSRVAQPASKKIDQNKLKPEMDEKGNLTTAGFACSQCGQPLFVYKLEQVSEKGKAYTNYFGRCNVAEHEKLILLAQLKPEKDSDEAVTYSLGKFGQRALDFYSIHVTKESTHPVKPLAQIAGNRYASAPVGKALSDACMGTIASFLSKYQDIIIEHQKVVKGNQKRLESLRELAGKENLEYPSVTLPPQPHTKEGVDAYNEVIARVRMWVNLNLWQKLKLSRDDAKPLLRLKGFPSFPLVERQANEVDWWDMVCNVKKLINEKKEDGKVFWQNLAGYKRQEALRPYLSSEEDRKKGKKFARYQLGDLLWHLEKKHGEDWGKVYDEAWERIDKKVEGLSKHIKLEEERRSEDAQSKAALTDWLRAKASFVIEGLKEADKDEFCRCELKLQKWYGDLRGKPFAIEAENSILDISGFSKQYNCAFIWQKDGVKKLNLYLIINYFKGGKLRFKKIKPEAFEANRFYTVINKKSGEIVPMEVNFNFDDPNLIILPLAFGKRVGREFIWNDLLSLETGSLKLANGRVIEKTLYNRRTRQDEPALFVALTFERREVLDSSNIKPMNLIGVDRGENIPAVIALTDPEGCPLSRFKDSLGNPTHILRIGESYKEKQRTIQAKKEVEQRRAGGYSRKYASKAKNLADDMVRNTARDLLYYAVTQDAMLIFENLSRGFGRQGKRTFMAERQYTRMEDWLTAKLAYEGLPSKTYLSKTLAQYTSKTCSNCGFTITSADYDRVLEKLKKTATGWMTTINGKELKVEGQITYYNRYKRQNVVKDLSVELDRLSEESVNNDISSWTKGRSGEALSLLKKRFSHRPVQEKFVCLNCGFETHADEQAALNIARSWLFLRSQEYKKYQTNKTTGNTDKRAFVETWQSFYRKKLKEVWKPAV

SEQ ID NO: 45101 - protein, 978 aa, synthetic construct
  REGION 1..978: note = engineered CasX variant
QEIKRINKIRRRLVKDSNTKKAGKTGPMKTLLVRVMTPDLRERLENLRKKPENIPQPISNTSRANLNKLLTDYTEMKKAILHVYWEEFQKDPVGLMSRVAQPASKKIDQNKLKPEMDEKGNLTTAGFACSQCGQPLFVYKLEQVSEKGKAYTNYFGRCNVAEHEKLILLAQLKPEKDSDEAVTYSLGKFGQRALDFYSIHVTKESTHPVKPLAQIAGNRYASVPVGKALSDACMGTIASFLSKYQDIIIEHQKVVKGNQKRLESLRELAGKENLEYPSVTLPPQPHTKEGVDAYNEVIARVRMWVNLNLWQKLKLSRDDAKPLLRLKGFPSFPLVERQANEVDWWDMVCNVKKLINEKKEDGKVFWQNLAGYKRQEALRPYLSSEEDRKKGKKFARYQLGDLLWHLEKKHGEDWGKVYDEAWERIDKKVEGLSKHIKLEEERRSEDAQSKAALTDWLRAKASFVIEGLKEADKDEFCRCELKLQKWYGDLRGKPFAIEAENSILDISGFSKQYNCAFIWQKDGVKKLNLYLIINYFKGGKLRFKKIKPEAFEANRFYTVINKKSGEIVPMEVNFNFDDPNLIILPLAFGKRVGREFIWNDLLSLETGSLKLANGRVIEKTLYNRRTRQDEPALFVALTFERREVLDSSNIKPMNLIGVDRGENIPAVIALTDPEGCPLSRFKDSLGNPTHILRIGESYKEKQRTIQAKKEVEQRRAGGYSRKYASKAKNLADDMVRNTARDLLYYAVTQDAMLIFENLSRGFGRQGKRTFMAERQYTRMEDWLTAKLAYEGLPSKTYLSKTLAQYTSKTCSNCGFTITSADYDRVLEKLKKTATGWMTTINGKELKVEGQITYYNRYKRQNVVKDLSVELDRLSEESVNNDISSWTKGRSGEALSLLKKRFSHRPVQEKFVCLNCGFETHADEQAALNIARSWLFLRSQEYKKYQTNKTTGNTDKRAFVETWQSFYRKKLKEVWKPAV

SEQ ID NO: 45102 - protein, 978 aa, synthetic construct
  REGION 1..978: note = engineered CasX variant
QEIKRINKIRRRLVKDSNTKKAGKTGPMKTLLVRVMTPDLRERLENLRKKPENIPQPISNTSRANLNKLLTDYTEMKKAILHVYWEEFQKDPVGLMSRVAQPASKKIDQNKLKPEMDEKGNLTTAGFACSQCGQPLFVYKLEQVSEKGKAYTNYFGRCNVAEHEKLIKLAQLKPEKDSDEAVTYSLGKFGQRALDFYSIHVTKESTHPVKPLAQIAGNRYASGPVGKALSDACMGTIASFLSKYQDIIIEHQKVVKGNQKRLESLRELAGKENLEYPSVTLPPQPHTKEGVDAYNEVIARVRMWVNLNLWQKLKLSRDDAKPLLRLKGFPSFPLVERQANEVDWWDMVCNVKKLINEKKEDGKVFWQNLAGYKRQEALRPYLSSEEDRKKGKKFARYQLGDLLWHLEKKHGEDWGKVYDEAWERIDKKVEGLSKHIKLEEERRSEDAQSKAALTDWLRAKASFVIEGLKEADKDEFCRCELKLQKWYGDLRGKPFAIEAENSILDISGFSKQYNCAFIWQKDGVKKLNLYLIINYFKGGKLRFKKIKPEAFEANRFYTVINKKSGEIVPMEVNFNFDDPNLIILPLAFGKRVGREFIWNDLLSLETGSLKLANGRVIEKTLYNRRTRQDEPALFVALTFERREVLDSSNIKPMNLIGVDRGENIPAVIALTDPEGCPLSRFKDSLGNPTHILRIGESYKEKQRTIQAKKEVEQRRAGGYSRKYASKAKNLADDMVRNTARDLLYYAVTQDAMLIFENLSRGFGRQGKRTFMAERQYTRMEDWLTAKLAYEGLPSKTYLSKTLAQYTSKTCSNCGFTITSADYDRVLEKLKKTATGWMTTINGKELKVEGQITYYNRYKRQNVVKDLSVELDRLSEESVNNDISSWTKGRSGEALSLLKKRFSHRPVQEKFVCLNCGFETHADEQAALNIARSWLFLRSQEYKKYQTNKTTGNTDKRAFVETWQSFYRKKLKEVWKPAV

SEQ ID NO: 45103 - protein, 977 aa, synthetic construct
  REGION 1..977: note = engineered CasX variant
QEIKRINKIRRRLVKDSNTKKAGKTGPMKTLLVRVMTPDLRERLENLRKKPENIPQPISNTSRANLNKLLTDYTEMKKAILHVYWEEFQKDPVGLMSRVAQPASKKIDQNKLKPEMDEKGNLTTAGFACSQCGQPLFVYKLEQVSEKGKAYTNYFGRCNVAEHEKLILLAQLKPEKDSDEAVTYSLGKFGQRALDFYSIHVTKESTHPVKPLAQIAGNRYASPVGKALSDACMGTIASFLSKYQDIIIEHQKVVKGNQKRLESLRELAGKENLEYPSVTLPPQPHTKEGVDAYNEVIARVRMWVNLNLWQKLKLSRDDAKPLLRLKGFPSFPLVERQANEVDWWDMVCNVKKLINEKKEDGKVFWQNLAGYKRQEALRPYLSSEEDRKKGKKFARYQLGDLLWHLEKKHGEDWGKVYDEAWERIDKKVEGLSKHIKLEEERRSEDAQSKAALTDWLRAKASFVIEGLKEADKDEFCRCELKLQKWYGDLRGKPFAIEAENSILDISGFSKQYNCAFIWQKDGVKKLNLYLIINYFKGGKLRFKKIKPEAFEANRFYTVINKKSGEIVPMEVNFNFDDPNLIILPLAFGKRVGREFIWNDLLSLETGSLKLANGRVIEKTLYNRRTRQDEPALFVALTFERREVLDSSNIKPMNLIGVDRGENIPAVIALTDPEGCPLSRFKDSLGNPTHILRIGESYKEKQRTIQAKKEVEQRRAGGYSRKYASKAKNLADDMVRNTARDLLYYAVTQDAMLIFENLSRGFGRQGKRTFMAERQYTRMEDWLTAKLAYEGLPSKTYLSKTLAQYTSKTCSNCGFTITSADYDRVLEKLKKTATGWMTTINGKELKVEGQITYYNRYKRQNVVKDLSVELDRLSEESVNNDISSWTKGRSGEALSLLKKRFSHRPVQEKFVCLNCGFETHADEQAALNIARSWLFLRSQEYKKYQTNKTTGNTDKRAFVETWQSFYRKKLKEVWKPAV

SEQ ID NO: 45104 - protein, 978 aa, synthetic construct
  REGION 1..978: note = engineered CasX variant
QEIKRINKIRRRLVKDSNTKKAGKTGPMKTLLVRVMTPDLRERLENLRKKPENIPQPISNTSRANLNKLLTDYTEMKKAILHVYWEEFQKDPVGLMSRVAQPASKKIDQNKLKPEMDEKGNLTTAGFACSQCGQPLFVYKLEQVSEKGKAYTNYFGRCNVAEHEKLILLAQLKPEKDSDEAVTYSLGKFGQRALDFYSIHVTKESTHPVKPLAQIAGNRYASYPVGKALSDACMGTIASFLSKYQDIIIEHQKVVKGNQKRLESLRELAGKENLEYPSVTLPPQPHTKEGVDAYNEVIARVRMWVNLNLWQKLKLSRDDAKPLLRLKGFPSFPLVERQANEVDWWDMVCNVKKLINEKKEDGKVFWQNLAGYKRQEALRPYLSSEEDRKKGKKFARYQLGDLLLHLYKKHGEDWGKVYDEAWERIDKKVEGLSKHIKLEEERRSEDAQSKAALTDWLRAKASFVIEGLKEADKDEFCRCELKLQKWYGDLRGKPFAIEAENSILDISGFSKQYNCAFIWQKDGVKKLNLYLIINYFKGGKLRFKKIKPEAFEANRFYTVINKKSGEIVPMEVNFNFDDPNLIILPLAFGKRVGREFIWNDLLSLETGSLKLANGRVIEKTLYNRRTRQDEPALFVALTFERREVLDSSNIKPMNLIGVDRGENIPAVIALTDPEGCPLSRFKDSLGNPTHILRIGESYKEKQRTIQAKKEVEQRRAGGYSRKYASKAKNLADDMVRNTARDLLYYAVTQDAMLIFENLSRGFGRQGKRTFMAERQYTRMEDWLTAKLAYEGLPSKTYLSKTLAQYTSKTCSNCGFTITSADYDRVLEKLKKTATGWMTTINGKELKVEGQITYYNRYKRQNVVKDLSVELDRLSEESVNNDISSWTKGRSGEALSLLKKRFSHRPVQEKFVCLNCGFETHADEQAALNIARSWLFLRSQEYKKYQTNKTTGNTDKRAFVETWQSFYRKKLKEVWKPAV

SEQ ID NO: 45105 - protein, 978 aa, synthetic construct
  REGION 1..978: note = engineered CasX variant
QEIKRINKIRRRLVKDSNTKKAGKTGPMKTLLVRVMTPDLRERLENLRKKPENIPQPISNTSRANLNKLLTDYTEMKKAILHVYWEEFQKDPVGLMSRVAQPASKKIDQNKLKPEMDEKGNLTTAGFACSQCGQPLFVYKLEQVSEKGKAYTNYFGRCNVAEHEKLILLAQLKPEKDSDEAVTYSLGKFGQRALDFYSIHVTKESTHPVKPLAQIAGNRYASHPVGKALSDACMGTIASFLSKYQDIIIEHQKVVKGNQKRLESLRELAGKENLEYPSVTLPPQPHTKEGVDAYNEVIARVRMWVNLNLWQKLKLSRDDAKPLLRLKGFPSFPLVERQANEVDWWDMVCNVKKLINEKKEDGKVFWQNLAGYKRQEALRPYLSSEEDRKKGKKFARYQLGDLLLHLYKKHGEDWGKVYDEAWERIDKKVEGLSKHIKLEEERRSEDAQSKAALTDWLRAKASFVIEGLKEADKDEFCRCELKLQKWYGDLRGKPFAIEAENSILDISGFSKQYNCAFIWQKDGVKKLNLYLIINYFKGGKLRFKKIKPEAFEANRFYTVINKKSGEIVPMEVNFNFDDPNLIILPLAFGKRVGREFIWNDLLSLETGSLKLANGRVIEKTLYNRRTRQDEPALFVALTFERREVLDSSNIKPMNLIGVDRGENIPAVIALTDPEGCPLSRFKDSLGNPTHILRIGESYKEKQRTIQAKKEVEQRRAGGYSRKYASKAKNLADDMVRNTARDLLYYAVTQDAMLIFENLSRGFGRQGKRTFMAERQYTRMEDWLTAKLAYEGLPSKTYLSKTLAQYTSKTCSNCGFTITSADYDRVLEKLKKTATGWMTTINGKELKVEGQITYYNRYKRQNVVKDLSVELDRLSEESVNNDISSWTKGRSGEALSLLKKRFSHRPVQEKFVCLNCGFETHADEQAALNIARSWLFLRSQEYKKYQTNKTTGNTDKRAFVETWQSFYRKKLKEVWKPAV

SEQ ID NO: 45106 - protein, 978 aa, synthetic construct
  REGION 1..978: note = engineered CasX variant
QEIKRINKIRRRLVKDSNTKKAGKTGPMKTLLVRVMTPDLRERLENLRKKPENIPQPISNTSRANLNKLLTDYTEMKKAILHVYWEEFQKDPVGLMSRVAQPASKKIDQNKLKPEMDEKGNLTTAGFACSQCGQPLFVYKLEQVSEKGKAYTNYFGRCNVAEHEKLILLAQLKPEKDSDEAVTYSLGKFGQRALDFYSIHVTKESTHPVKPLAQIAGNRYASSPVGKALSDACMGTIASFLSKYQDIIIEHQKVVKGNQKRLESLRELAGKENLEYPSVTLPPQPHTKEGVDAYNEVIARVRMWVNLNLWQKLKLSRDDAKPLLRLKGFPSFPLVERQANEVDWWDMVCNVKKLINEKKEDGKVFWQNLAGYKRQEALRPYLSSEEDRKKGKKFARYQLGDLLLHLYKKHGEDWGKVYDEAWERIDKKVEGLSKHIKLEEERRSEDAQSKAALTDWLRAKASFVIEGLKEADKDEFCRCELKLQKWYGDLRGKPFAIEAENSILDISGFSKQYNCAFIWQKDGVKKLNLYLIINYFKGGKLRFKKIKPEAFEANRFYTVINKKSGEIVPMEVNFNFDDPNLIILPLAFGKRVGREFIWNDLLSLETGSLKLANGRVIEKTLYNRRTRQDEPALFVALTFERREVLDSSNIKPMNLIGVDRGENIPAVIALTDPEGCPLSRFKDSLGNPTHILRIGESYKEKQRTIQAKKEVEQRRAGGYSRKYASKAKNLADDMVRNTARDLLYYAVTQDAMLIFENLSRGFGRQGKRTFMAERQYTRMEDWLTAKLAYEGLPSKTYLSKTLAQYTSKTCSNCGFTITSADYDRVLEKLKKTATGWMTTINGKELKVEGQITYYNRYKRQNVVKDLSVELDRLSEESVNNDISSWTKGRSGEALSLLKKRFSHRPVQEKFVCLNCGFETHADEQAALNIARSWLFLRSQEYKKYQTNKTTGNTDKRAFVETWQSFYRKKLKEVWKPAV

SEQ ID NO: 45107 - protein, 978 aa, synthetic construct
  REGION 1..978: note = engineered CasX variant
QEIKRINKIRRRLVKDSNTKKAGKTGPMKTLLVRVMTPDLRERLENLRKKPENIPQPISNTSRANLNKLLTDYTEMKKAILHVYWEEFQKDPVGLMSRVAQPASKKIDQNKLKPEMDEKGNLTTAGFACSQCGQPLFVYKLEQVSEKGKAYTNYFGRCNVAEHEKLILLAQLKPEKDSDEAVTYSLGKFGQRALDFYSIHVTKESTHPVKPLAQIAGNRYASTPVGKALSDACMGTIASFLSKYQDIIIEHQKVVKGNQKRLESLRELAGKENLEYPSVTLPPQPHTKEGVDAYNEVIARVRMWVNLNLWQKLKLSRDDAKPLLRLKGFPSFPLVERQANEVDWWDMVCNVKKLINEKKEDGKVFWQNLAGYKRQEALRPYLSSEEDRKKGKKFARYQLGDLLLHLYKKHGEDWGKVYDEAWERIDKKVEGLSKHIKLEEERRSEDAQSKAALTDWLRAKASFVIEGLKEADKDEFCRCELKLQKWYGDLRGKPFAIEAENSILDISGFSKQYNCAFIWQKDGVKKLNLYLIINYFKGGKLRFKKIKPEAFEANRFYTVINKKSGEIVPMEVNFNFDDPNLIILPLAFGKRVGREFIWNDLLSLETGSLKLANGRVIEKTLYNRRTRQDEPALFVALTFERREVLDSSNIKPMNLIGVDRGENIPAVIALTDPEGCPLSRFKDSLGNPTHILRIGESYKEKQRTIQAKKEVEQRRAGGYSRKYASKAKNLADDMVRNTARDLLYYAVTQDAMLIFENLSRGFGRQGKRTFMAERQYTRMEDWLTAKLAYEGLPSKTYLSKTLAQYTSKTCSNCGFTITSADYDRVLEKLKKTATGWMTTINGKELKVEGQITYYNRYKRQNVVKDLSVELDRLSEESVNNDISSWTKGRSGEALSLLKKRFSHRPVQEKFVCLNCGFETHADEQAALNIARSWLFLRSQEYKKYQTNKTTGNTDKRAFVETWQSFYRKKLKEVWKPAV

SEQ ID NO: 45108 - protein, 978 aa, synthetic construct
  REGION 1..978: note = engineered CasX variant
QEIKRINKIRRRLVKDSNTKKAGKTGPMKTLLVRVMTPDLRERLENLRKKPENIPQPISNTSRANLNKLLTDYTEMKKAILHVYWEEFQKDPVGLMSRVAQPASKKIDQNKLKPEMDEKGNLTTAGFACSQCGQPLFVYKLEQVSEKGKAYTNYFGRCNVAEHEKLILLAQLKPEKDSDEAVTYSLGKFGQRALDFYSIHVTKESTHPVKPLAQIAGNRYASAPVGKALSDACMGTIASFLSKYQDIIIEHQKVVKGNQKRLESLRELAGKENLEYPSVTLPPQPHTKEGVDAYNEVIARVRMWVNLNLWQKLKLSRDDAKPLLRLKGFPSFPLVERQANEVDWWDMVCNVKKLINEKKEDGKVFWQNLAGYKRQEALRPYLSSEEDRKKGKKFARYQLGDLLLHLYKKHGEDWGKVYDEAWERIDKKVEGLSKHIKLEEERRSEDAQSKAALTDWLRAKASFVIEGLKEADKDEFCRCELKLQKWYGDLRGKPFAIEAENSILDISGFSKQYNCAFIWQKDGVKKLNLYLIINYFKGGKLRFKKIKPEAFEANRFYTVINKKSGEIVPMEVNFNFDDPNLIILPLAFGKRVGREFIWNDLLSLETGSLKLANGRVIEKTLYNRRTRQDEPALFVALTFERREVLDSSNIKPMNLIGVDRGENIPAVIALTDPEGCPLSRFKDSLGNPTHILRIGESYKEKQRTIQAKKEVEQRRAGGYSRKYASKAKNLADDMVRNTARDLLYYAVTQDAMLIFENLSRGFGRQGKRTFMAERQYTRMEDWLTAKLAYEGLPSKTYLSKTLAQYTSKTCSNCGFTITSADYDRVLEKLKKTATGWMTTINGKELKVEGQITYYNRYKRQNVVKDLSVELDRLSEESVNNDISSWTKGRSGEALSLLKKRFSHRPVQEKFVCLNCGFETHADEQAALNIARSWLFLRSQEYKKYQTNKTTGNTDKRAFVETWQSFYRKKLKEVWKPAV

SEQ ID NO: 45109 - protein, 978 aa, synthetic construct
  REGION 1..978: note = engineered CasX variant
QEIKRINKIRRRLVKDSNTKKAGKTGPMKTLLVRVMTPDLRERLENLRKKPENIPQPISNTSRANLNKLLTDYTEMKKAILHVYWEEFQKDPVGLMSRVAQPASKKIDQNKLKPEMDEKGNLTTAGFACSQCGQPLFVYKLEQVSEKGKAYTNYFGRCNVAEHEKLILLAQLKPEKDSDEAVTYSLGKFGQRALDFYSIHVTKESTHPVKPLAQIAGNRYASVPVGKALSDACMGTIASFLSKYQDIIIEHQKVVKGNQKRLESLRELAGKENLEYPSVTLPPQPHTKEGVDAYNEVIARVRMWVNLNLWQKLKLSRDDAKPLLRLKGFPSFPLVERQANEVDWWDMVCNVKKLINEKKEDGKVFWQNLAGYKRQEALRPYLSSEEDRKKGKKFARYQLGDLLLHLYKKHGEDWGKVYDEAWERIDKKVEGLSKHIKLEEERRSEDAQSKAALTDWLRAKASFVIEGLKEADKDEFCRCELKLQKWYGDLRGKPFAIEAENSILDISGFSKQYNCAFIWQKDGVKKLNLYLIINYFKGGKLRFKKIKPEAFEANRFYTVINKKSGEIVPMEVNFNFDDPNLIILPLAFGKRVGREFIWNDLLSLETGSLKLANGRVIEKTLYNRRTRQDEPALFVALTFERREVLDSSNIKPMNLIGVDRGENIPAVIALTDPEGCPLSRFKDSLGNPTHILRIGESYKEKQRTIQAKKEVEQRRAGGYSRKYASKAKNLADDMVRNTARDLLYYAVTQDAMLIFENLSRGFGRQGKRTFMAERQYTRMEDWLTAKLAYEGLPSKTYLSKTLAQYTSKTCSNCGFTITSADYDRVLEKLKKTATGWMTTINGKELKVEGQITYYNRYKRQNVVKDLSVELDRLSEESVNNDISSWTKGRSGEALSLLKKRFSHRPVQEKFVCLNCGFETHADEQAALNIARSWLFLRSQEYKKYQTNKTTGNTDKRAFVETWQSFYRKKLKEVWKPAV

SEQ ID NO: 45110 - protein, 978 aa, synthetic construct
  REGION 1..978: note = engineered CasX variant
QEIKRINKIRRRLVKDSNTKKAGKTGPMKTLLVRVMTPDLRERLENLRKKPENIPQPISNTSRANLNKLLTDYTEMKKAILHVYWEEFQKDPVGLMSRVAQPASKKIDQNKLKPEMDEKGNLTTAGFACSQCGQPLFVYKLEQVSEKGKAYTNYFGRCNVAEHEKLIKLAQLKPEKDSDEAVTYSLGKFGQRALDFYSIHVTKESTHPVKPLAQIAGNRYASGPVGKALSDACMGTIASFLSKYQDIIIEHQKVVKGNQKRLESLRELAGKENLEYPSVTLPPQPHTKEGVDAYNEVIARVRMWVNLNLWQKLKLSRDDAKPLLRLKGFPSFPLVERQANEVDWWDMVCNVKKLINEKKEDGKVFWQNLAGYKRQEALRPYLSSEEDRKKGKKFARYQLGDLLLHLYKKHGEDWGKVYDEAWERIDKKVEGLSKHIKLEEERRSEDAQSKAALTDWLRAKASFVIEGLKEADKDEFCRCELKLQKWYGDLRGKPFAIEAENSILDISGFSKQYNCAFIWQKDGVKKLNLYLIINYFKGGKLRFKKIKPEAFEANRFYTVINKKSGEIVPMEVNFNFDDPNLIILPLAFGKRVGREFIWNDLLSLETGSLKLANGRVIEKTLYNRRTRQDEPALFVALTFERREVLDSSNIKPMNLIGVDRGENIPAVIALTDPEGCPLSRFKDSLGNPTHILRIGESYKEKQRTIQAKKEVEQRRAGGYSRKYASKAKNLADDMVRNTARDLLYYAVTQDAMLIFENLSRGFGRQGKRTFMAERQYTRMEDWLTAKLAYEGLPSKTYLSKTLAQYTSKTCSNCGFTITSADYDRVLEKLKKTATGWMTTINGKELKVEGQITYYNRYKRQNVVKDLSVELDRLSEESVNNDISSWTKGRSGEALSLLKKRFSHRPVQEKFVCLNCGFETHADEQAALNIARSWLFLRSQEYKKYQTNKTTGNTDKRAFVETWQSFYRKKLKEVWKPAV

SEQ ID NO: 45111 - protein, 977 aa, synthetic construct
  REGION 1..977: note = engineered CasX variant
QEIKRINKIRRRLVKDSNTKKAGKTGPMKTLLVRVMTPDLRERLENLRKKPENIPQPISNTSRANLNKLLTDYTEMKKAILHVYWEEFQKDPVGLMSRVAQPASKKIDQNKLKPEMDEKGNLTTAGFACSQCGQPLFVYKLEQVSEKGKAYTNYFGRCNVAEHEKLILLAQLKPEKDSDEAVTYSLGKFGQRALDFYSIHVTKESTHPVKPLAQIAGNRYASPVGKALSDACMGTIASFLSKYQDIIIEHQKVVKGNQKRLESLRELAGKENLEYPSVTLPPQPHTKEGVDAYNEVIARVRMWVNLNLWQKLKLSRDDAKPLLRLKGFPSFPLVERQANEVDWWDMVCNVKKLINEKKEDGKVFWQNLAGYKRQEALRPYLSSEEDRKKGKKFARYQLGDLLLHLYKKHGEDWGKVYDEAWERIDKKVEGLSKHIKLEEERRSEDAQSKAALTDWLRAKASFVIEGLKEADKDEFCRCELKLQKWYGDLRGKPFAIEAENSILDISGFSKQYNCAFIWQKDGVKKLNLYLIINYFKGGKLRFKKIKPEAFEANRFYTVINKKSGEIVPMEVNFNFDDPNLIILPLAFGKRVGREFIWNDLLSLETGSLKLANGRVIEKTLYNRRTRQDEPALFVALTFERREVLDSSNIKPMNLIGVDRGENIPAVIALTDPEGCPLSRFKDSLGNPTHILRIGESYKEKQRTIQAKKEVEQRRAGGYSRKYASKAKNLADDMVRNTARDLLYYAVTQDAMLIFENLSRGFGRQGKRTFMAERQYTRMEDWLTAKLAYEGLPSKTYLSKTLAQYTSKTCSNCGFTITSADYDRVLEKLKKTATGWMTTINGKELKVEGQITYYNRYKRQNVVKDLSVELDRLSEESVNNDISSWTKGRSGEALSLLKKRFSHRPVQEKFVCLNCGFETHADEQAALNIARSWLFLRSQEYKKYQTNKTTGNTDKRAFVETWQSFYRKKLKEVWKPAV

SEQ ID NO: 45112 - protein, 978 aa, synthetic construct
  REGION 1..978: note = engineered CasX variant
QEIKRINKIRRRLVKDSNTKKAGKTGPMKTLLVRVMTPDLRERLENLRKKPENIPQPISNTSRANLNKLLTDYTEMKKAILHVYWEEFQKDPVGLMSRVAQPASKKIDQNKLKPEMDEKGNLTTAGFACSQCGQPLFVYKLEQVSEKGKAYTNYFGRCNVAEHEKLILLAQLKPEKDSDEAVTYSLGKFGQRALDFYSIHVTKESTHPVKPLAQIAGNRYASYPVGKALSDACMGTIASFLSKYQDIIIEHQKVVKGNQKRLESLRELAGKENLEYPSVTLPPQPHTKEGVDAYNEVIARVRMWVNLNLWQKLKLSRDDAKPLLRLKGFPSFPLVERQANEVDWWDMVCNVKKLINEKKEDGKVFWQNLAGYKRQEALRPYLSSEEDRKKGKKFARYQLGDLLLHLEKKHPEDWGKVYDEAWERIDKKVEGLSKHIKLEEERRSEDAQSKAALTDWLRAKASFVIEGLKEADKDEFCRCELKLQKWYGDLRGKPFAIEAENSILDISGFSKQYNCAFIWQKDGVKKLNLYLIINYFKGGKLRFKKIKPEAFEANRFYTVINKKSGEIVPMEVNFNFDDPNLIILPLAFGKRVGREFIWNDLLSLETGSLKLANGRVIEKTLYNRRTRQDEPALFVALTFERREVLDSSNIKPMNLIGVDRGENIPAVIALTDPEGCPLSRFKDSLGNPTHILRIGESYKEKQRTIQAKKEVEQRRAGGYSRKYASKAKNLADDMVRNTARDLLYYAVTQDAMLIFENLSRGFGRQGKRTFMAERQYTRMEDWLTAKLAYEGLPSKTYLSKTLAQYTSKTCSNCGFTITSADYDRVLEKLKKTATGWMTTINGKELKVEGQITYYNRYKRQNVVKDLSVELDRLSEESVNNDISSWTKGRSGEALSLLKKRFSHRPVQEKFVCLNCGFETHADEQAALNIARSWLFLRSQEYKKYQTNKTTGNTDKRAFVETWQSFYRKKLKEVWKPAV

SEQ ID NO: 45113 - protein, 978 aa, synthetic construct
  REGION 1..978: note = engineered CasX variant
QEIKRINKIRRRLVKDSNTKKAGKTGPMKTLLVRVMTPDLRERLENLRKKPENIPQPISNTSRANLNKLLTDYTEMKKAILHVYWEEFQKDPVGLMSRVAQPASKKIDQNKLKPEMDEKGNLTTAGFACSQCGQPLFVYKLEQVSEKGKAYTNYFGRCNVAEHEKLILLAQLKPEKDSDEAVTYSLGKFGQRALDFYSIHVTKESTHPVKPLAQIAGNRYASHPVGKALSDACMGTIASFLSKYQDIIIEHQKVVKGNQKRLESLRELAGKENLEYPSVTLPPQPHTKEGVDAYNEVIARVRMWVNLNLWQKLKLSRDDAKPLLRLKGFPSFPLVERQANEVDWWDMVCNVKKLINEKKEDGKVFWQNLAGYKRQEALRPYLSSEEDRKKGKKFARYQLGDLLLHLEKKHPEDWGKVYDEAWERIDKKVEGLSKHIKLEEERRSEDAQSKAALTDWLRAKASFVIEGLKEADKDEFCRCELKLQKWYGDLRGKPFAIEAENSILDISGFSKQYNCAFIWQKDGVKKLNLYLIINYFKGGKLRFKKIKPEAFEANRFYTVINKKSGEIVPMEVNFNFDDPNLIILPLAFGKRVGREFIWNDLLSLETGSLKLANGRVIEKTLYNRRTRQDEPALFVALTFERREVLDSSNIKPMNLIGVDRGENIPAVIALTDPEGCPLSRFKDSLGNPTHILRIGESYKEKQRTIQAKKEVEQRRAGGYSRKYASKAKNLADDMVRNTARDLLYYAVTQDAMLIFENLSRGFGRQGKRTFMAERQYTRMEDWLTAKLAYEGLPSKTYLSKTLAQYTSKTCSNCGFTITSADYDRVLEKLKKTATGWMTTINGKELKVEGQITYYNRYKRQNVVKDLSVELDRLSEESVNNDISSWTKGRSGEALSLLKKRFSHRPVQEKFVCLNCGFETHADEQAALNIARSWLFLRSQEYKKYQTNKTTGNTDKRAFVETWQSFYRKKLKEVWKPAV

SEQ ID NO: 45114 - protein, 978 aa, synthetic construct
  REGION 1..978: note = engineered CasX variant
QEIKRINKIRRRLVKDSNTKKAGKTGPMKTLLVRVMTPDLRERLENLRKKPENIPQPISNTSRANLNKLLTDYTEMKKAILHVYWEEFQKDPVGLMSRVAQPASKKIDQNKLKPEMDEKGNLTTAGFACSQCGQPLFVYKLEQVSEKGKAYTNYFGRCNVAEHEKLILLAQLKPEKDSDEAVTYSLGKFGQRALDFYSIHVTKESTHPVKPLAQIAGNRYASSPVGKALSDACMGTIASFLSKYQDIIIEHQKVVKGNQKRLESLRELAGKENLEYPSVTLPPQPHTKEGVDAYNEVIARVRMWVNLNLWQKLKLSRDDAKPLLRLKGFPSFPLVERQANEVDWWDMVCNVKKLINEKKEDGKVFWQNLAGYKRQEALRPYLSSEEDRKKGKKFARYQLGDLLLHLEKKHPEDWGKVYDEAWERIDKKVEGLSKHIKLEEERRSEDAQSKAALTDWLRAKASFVIEGLKEADKDEFCRCELKLQKWYGDLRGKPFAIEAENSILDISGFSKQYNCAFIWQKDGVKKLNLYLIINYFKGGKLRFKKIKPEAFEANRFYTVINKKSGEIVPMEVNFNFDDPNLIILPLAFGKRVGREFIWNDLLSLETGSLKLANGRVIEKTLYNRRTRQDEPALFVALTFERREVLDSSNIKPMNLIGVDRGENIPAVIALTDPEGCPLSRFKDSLGNPTHILRIGESYKEKQRTIQAKKEVEQRRAGGYSRKYASKAKNLADDMVRNTARDLLYYAVTQDAMLIFENLSRGFGRQGKRTFMAERQYTRMEDWLTAKLAYEGLPSKTYLSKTLAQYTSKTCSNCGFTITSADYDRVLEKLKKTATGWMTTINGKELKVEGQITYYNRYKRQNVVKDLSVELDRLSEESVNNDISSWTKGRSGEALSLLKKRFSHRPVQEKFVCLNCGFETHADEQAALNIARSWLFLRSQEYKKYQTNKTTGNTDKRAFVETWQSFYRKKLKEVWKPAV

SEQ ID NO: 45115 - protein, 978 aa, synthetic construct
  REGION 1..978: note = engineered CasX variant
QEIKRINKIRRRLVKDSNTKKAGKTGPMKTLLVRVMTPDLRERLENLRKKPENIPQPISNTSRANLNKLLTDYTEMKKAILHVYWEEFQKDPVGLMSRVAQPASKKIDQNKLKPEMDEKGNLTTAGFACSQCGQPLFVYKLEQVSEKGKAYTNYFGRCNVAEHEKLILLAQLKPEKDSDEAVTYSLGKFGQRALDFYSIHVTKESTHPVKPLAQIAGNRYASTPVGKALSDACMGTIASFLSKYQDIIIEHQKVVKGNQKRLESLRELAGKENLEYPSVTLPPQPHTKEGVDAYNEVIARVRMWVNLNLWQKLKLSRDDAKPLLRLKGFPSFPLVERQANEVDWWDMVCNVKKLINEKKEDGKVFWQNLAGYKRQEALRPYLSSEEDRKKGKKFARYQLGDLLLHLEKKHPEDWGKVYDEAWERIDKKVEGLSKHIKLEEERRSEDAQSKAALTDWLRAKASFVIEGLKEADKDEFCRCELKLQKWYGDLRGKPFAIEAENSILDISGFSKQYNCAFIWQKDGVKKLNLYLIINYFKGGKLRFKKIKPEAFEANRFYTVINKKSGEIVPMEVNFNFDDPNLIILPLAFGKRVGREFIWNDLLSLETGSLKLANGRVIEKTLYNRRTRQDEPALFVALTFERREVLDSSNIKPMNLIGVDRGENIPAVIALTDPEGCPLSRFKDSLGNPTHILRIGESYKEKQRTIQAKKEVEQRRAGGYSRKYASKAKNLADDMVRNTARDLLYYAVTQDAMLIFENLSRGFGRQGKRTFMAERQYTRMEDWLTAKLAYEGLPSKTYLSKTLAQYTSKTCSNCGFTITSADYDRVLEKLKKTATGWMTTINGKELKVEGQITYYNRYKRQNVVKDLSVELDRLSEESVNNDISSWTKGRSGEALSLLKKRFSHRPVQEKFVCLNCGFETHADEQAALNIARSWLFLRSQEYKKYQTNKTTGNTDKRAFVETWQSFYRKKLKEVWKPAV

SEQ ID NO: 45116 - protein, 978 aa, synthetic construct
  REGION 1..978: note = engineered CasX variant
QEIKRINKIRRRLVKDSNTKKAGKTGPMKTLLVRVMTPDLRERLENLRKKPENIPQPISNTSRANLNKLLTDYTEMKKAILHVYWEEFQKDPVGLMSRVAQPASKKIDQNKLKPEMDEKGNLTTAGFACSQCGQPLFVYKLEQVSEKGKAYTNYFGRCNVAEHEKLILLAQLKPEKDSDEAVTYSLGKFGQRALDFYSIHVTKESTHPVKPLAQIAGNRYASAPVGKALSDACMGTIASFLSKYQDIIIEHQKVVKGNQKRLESLRELAGKENLEYPSVTLPPQPHTKEGVDAYNEVIARVRMWVNLNLWQKLKLSRDDAKPLLRLKGFPSFPLVERQANEVDWWDMVCNVKKLINEKKEDGKVFWQNLAGYKRQEALRPYLSSEEDRKKGKKFARYQLGDLLLHLEKKHPEDWGKVYDEAWERIDKKVEGLSKHIKLEEERRSEDAQSKAALTDWLRAKASFVIEGLKEADKDEFCRCELKLQKWYGDLRGKPFAIEAENSILDISGFSKQYNCAFIWQKDGVKKLNLYLIINYFKGGKLRFKKIKPEAFEANRFYTVINKKSGEIVPMEVNFNFDDPNLIILPLAFGKRVGREFIWNDLLSLETGSLKLANGRVIEKTLYNRRTRQDEPALFVALTFERREVLDSSNIKPMNLIGVDRGENIPAVIALTDPEGCPLSRFKDSLGNPTHILRIGESYKEKQRTIQAKKEVEQRRAGGYSRKYASKAKNLADDMVRNTARDLLYYAVTQDAMLIFENLSRGFGRQGKRTFMAERQYTRMEDWLTAKLAYEGLPSKTYLSKTLAQYTSKTCSNCGFTITSADYDRVLEKLKKTATGWMTTINGKELKVEGQITYYNRYKRQNVVKDLSVELDRLSEESVNNDISSWTKGRSGEALSLLKKRFSHRPVQEKFVCLNCGFETHADEQAALNIARSWLFLRSQEYKKYQTNKTTGNTDKRAFVETWQSFYRKKLKEVWKPAV

SEQ ID NO: 45117 - protein, 978 aa, synthetic construct
  REGION 1..978: note = engineered CasX variant
QEIKRINKIRRRLVKDSNTKKAGKTGPMKTLLVRVMTPDLRERLENLRKKPENIPQPISNTSRANLNKLLTDYTEMKKAILHVYWEEFQKDPVGLMSRVAQPASKKIDQNKLKPEMDEKGNLTTAGFACSQCGQPLFVYKLEQVSEKGKAYTNYFGRCNVAEHEKLILLAQLKPEKDSDEAVTYSLGKFGQRALDFYSIHVTKESTHPVKPLAQIAGNRYASVPVGKALSDACMGTIASFLSKYQDIIIEHQKVVKGNQKRLESLRELAGKENLEYPSVTLPPQPHTKEGVDAYNEVIARVRMWVNLNLWQKLKLSRDDAKPLLRLKGFPSFPLVERQANEVDWWDMVCNVKKLINEKKEDGKVFWQNLAGYKRQEALRPYLSSEEDRKKGKKFARYQLGDLLLHLEKKHPEDWGKVYDEAWERIDKKVEGLSKHIKLEEERRSEDAQSKAALTDWLRAKASFVIEGLKEADKDEFCRCELKLQKWYGDLRGKPFAIEAENSILDISGFSKQYNCAFIWQKDGVKKLNLYLIINYFKGGKLRFKKIKPEAFEANRFYTVINKKSGEIVPMEVNFNFDDPNLIILPLAFGKRVGREFIWNDLLSLETGSLKLANGRVIEKTLYNRRTRQDEPALFVALTFERREVLDSSNIKPMNLIGVDRGENIPAVIALTDPEGCPLSRFKDSLGNPTHILRIGESYKEKQRTIQAKKEVEQRRAGGYSRKYASKAKNLADDMVRNTARDLLYYAVTQDAMLIFENLSRGFGRQGKRTFMAERQYTRMEDWLTAKLAYEGLPSKTYLSKTLAQYTSKTCSNCGFTITSADYDRVLEKLKKTATGWMTTINGKELKVEGQITYYNRYKRQNVVKDLSVELDRLSEESVNNDISSWTKGRSGEALSLLKKRFSHRPVQEKFVCLNCGFETHADEQAALNIARSWLFLRSQEYKKYQTNKTTGNTDKRAFVETWQSFYRKKLKEVWKPAV

SEQ ID NO: 45118 - protein, 978 aa, synthetic construct
  REGION 1..978: note = engineered CasX variant
QEIKRINKIRRRLVKDSNTKKAGKTGPMKTLLVRVMTPDLRERLENLRKKPENIPQPISNTSRANLNKLLTDYTEMKKAILHVYWEEFQKDPVGLMSRVAQPASKKIDQNKLKPEMDEKGNLTTAGFACSQCGQPLFVYKLEQVSEKGKAYTNYFGRCNVAEHEKLIKLAQLKPEKDSDEAVTYSLGKFGQRALDFYSIHVTKESTHPVKPLAQIAGNRYASGPVGKALSDACMGTIASFLSKYQDIIIEHQKVVKGNQKRLESLRELAGKENLEYPSVTLPPQPHTKEGVDAYNEVIARVRMWVNLNLWQKLKLSRDDAKPLLRLKGFPSFPLVERQANEVDWWDMVCNVKKLINEKKEDGKVFWQNLAGYKRQEALRPYLSSEEDRKKGKKFARYQLGDLLLHLEKKHPEDWGKVYDEAWERIDKKVEGLSKHIKLEEERRSEDAQSKAALTDWLRAKASFVIEGLKEADKDEFCRCELKLQKWYGDLRGKPFAIEAENSILDISGFSKQYNCAFIWQKDGVKKLNLYLIINYFKGGKLRFKKIKPEAFEANRFYTVINKKSGEIVPMEVNFNFDDPNLIILPLAFGKRVGREFIWNDLLSLETGSLKLANGRVIEKTLYNRRTRQDEPALFVALTFERREVLDSSNIKPMNLIGVDRGENIPAVIALTDPEGCPLSRFKDSLGNPTHILRIGESYKEKQRTIQAKKEVEQRRAGGYSRKYASKAKNLADDMVRNTARDLLYYAVTQDAMLIFENLSRGFGRQGKRTFMAERQYTRMEDWLTAKLAYEGLPSKTYLSKTLAQYTSKTCSNCGFTITSADYDRVLEKLKKTATGWMTTINGKELKVEGQITYYNRYKRQNVVKDLSVELDRLSEESVNNDISSWTKGRSGEALSLLKKRFSHRPVQEKFVCLNCGFETHADEQAALNIARSWLFLRSQEYKKYQTNKTTGNTDKRAFVETWQSFYRKKLKEVWKPAV

SEQ ID NO: 45119 - protein, 977 aa, synthetic construct
  REGION 1..977: note = engineered CasX variant
QEIKRINKIRRRLVKDSNTKKAGKTGPMKTLLVRVMTPDLRERLENLRKKPENIPQPISNTSRANLNKLLTDYTEMKKAILHVYWEEFQKDPVGLMSRVAQPASKKIDQNKLKPEMDEKGNLTTAGFACSQCGQPLFVYKLEQVSEKGKAYTNYFGRCNVAEHEKLILLAQLKPEKDSDEAVTYSLGKFGQRALDFYSIHVTKESTHPVKPLAQIAGNRYASPVGKALSDACMGTIASFLSKYQDIIIEHQKVVKGNQKRLESLRELAGKENLEYPSVTLPPQPHTKEGVDAYNEVIARVRMWVNLNLWQKLKLSRDDAKPLLRLKGFPSFPLVERQANEVDWWDMVCNVKKLINEKKEDGKVFWQNLAGYKRQEALRPYLSSEEDRKKGKKFARYQLGDLLLHLEKKHPEDWGKVYDEAWERIDKKVEGLSKHIKLEEERRSEDAQSKAALTDWLRAKASFVIEGLKEADKDEFCRCELKLQKWYGDLRGKPFAIEAENSILDISGFSKQYNCAFIWQKDGVKKLNLYLIINYFKGGKLRFKKIKPEAFEANRFYTVINKKSGEIVPMEVNFNFDDPNLIILPLAFGKRVGREFIWNDLLSLETGSLKLANGRVIEKTLYNRRTRQDEPALFVALTFERREVLDSSNIKPMNLIGVDRGENIPAVIALTDPEGCPLSRFKDSLGNPTHILRIGESYKEKQRTIQAKKEVEQRRAGGYSRKYASKAKNLADDMVRNTARDLLYYAVTQDAMLIFENLSRGFGRQGKRTFMAERQYTRMEDWLTAKLAYEGLPSKTYLSKTLAQYTSKTCSNCGFTITSADYDRVLEKLKKTATGWMTTINGKELKVEGQITYYNRYKRQNVVKDLSVELDRLSEESVNNDISSWTKGRSGEALSLLKKRFSHRPVQEKFVCLNCGFETHADEQAALNIARSWLFLRSQEYKKYQTNKTTGNTDKRAFVETWQSFYRKKLKEVWKPAV

SEQ ID NO: 45120 - protein, 979 aa, synthetic construct
  REGION 1..979: note = engineered CasX variant
QEIKRINKIRRRLVKDSNTKKAGKTGPMKTLLVRVMTPDLRERLENLRKKPENIPQPISNTSRANLNKLLTDYTEMKKAILHVYWEEFQKDPVGLMSRVAQPASKKIDQNKLKPEMDEKGNLTTAGFACSQCGQPLFVYKLEQVSEKGKAYTNYFGRCNVAEHEKLILLAQLKPEKDSDEAVTYSLGKFGQRALDFYSIHVTKESTHPVKPLAQIAGNRYASYPVGKALSDACMGTIASFLSKYQDIIIEHQKVVKGNQKRLESLRELAGKENLEYPSVTLPPQPHTKEGVDAYNEVIARVRMWVNLNLWQKLKLSRDDAKPLLRLKGFPSFPLVERQANEVDWWDMVCNVKKLINEKKEDGKVFWQNLAGYKRQEALRPYLSSEEDRKKGKKFARYQLGDLLLHLEKKHGERDWGKVYDEAWERIDKKVEGLSKHIKLEEERRSEDAQSKAALTDWLRAKASFVIEGLKEADKDEFCRCELKLQKWYGDLRGKPFAIEAENSILDISGFSKQYNCAFIWQKDGVKKLNLYLIINYFKGGKLRFKKIKPEAFEANRFYTVINKKSGEIVPMEVNFNFDDPNLIILPLAFGKRVGREFIWNDLLSLETGSLKLANGRVIEKTLYNRRTRQDEPALFVALTFERREVLDSSNIKPMNLIGVDRGENIPAVIALTDPEGCPLSRFKDSLGNPTHILRIGESYKEKQRTIQAKKEVEQRRAGGYSRKYASKAKNLADDMVRNTARDLLYYAVTQDAMLIFENLSRGFGRQGKRTFMAERQYTRMEDWLTAKLAYEGLPSKTYLSKTLAQYTSKTCSNCGFTITSADYDRVLEKLKKTATGWMTTINGKELKVEGQITYYNRYKRQNVVKDLSVELDRLSEESVNNDISSWTKGRSGEALSLLKKRFSHRPVQEKFVCLNCGFETHADEQAALNIARSWLFLRSQEYKKYQTNKTTGNTDKRAFVETWQSFYRKKLKEVWKPAV

SEQ ID NO: 45121 - protein, 979 aa, synthetic construct
  REGION 1..979: note = engineered CasX variant
QEIKRINKIRRRLVKDSNTKKAGKTGPMKTLLVRVMTPDLRERLENLRKKPENIPQPISNTSRANLNKLLTDYTEMKKAILHVYWEEFQKDPVGLMSRVAQPASKKIDQNKLKPEMDEKGNLTTAGFACSQCGQPLFVYKLEQVSEKGKAYTNYFGRCNVAEHEKLILLAQLKPEKDSDEAVTYSLGKFGQRALDFYSIHVTKESTHPVKPLAQIAGNRYASHPVGKALSDACMGTIASFLSKYQDIIIEHQKVVKGNQKRLESLRELAGKENLEYPSVTLPPQPHTKEGVDAYNEVIARVRMWVNLNLWQKLKLSRDDAKPLLRLKGFPSFPLVERQANEVDWWDMVCNVKKLINEKKEDGKVFWQNLAGYKRQEALRPYLSSEEDRKKGKKFARYQLGDLLLHLEKKHGERDWGKVYDEAWERIDKKVEGLSKHIKLEEERRSEDAQSKAALTDWLRAKASFVIEGLKEADKDEFCRCELKLQKWYGDLRGKPFAIEAENSILDISGFSKQYNCAFIWQKDGVKKLNLYLIINYFKGGKLRFKKIKPEAFEANRFYTVINKKSGEIVPMEVNFNFDDPNLIILPLAFGKRVGREFIWNDLLSLETGSLKLANGRVIEKTLYNRRTRQDEPALFVALTFERREVLDSSNIKPMNLIGVDRGENIPAVIALTDPEGCPLSRFKDSLGNPTHILRIGESYKEKQRTIQAKKEVEQRRAGGYSRKYASKAKNLADDMVRNTARDLLYYAVTQDAMLIFENLSRGFGRQGKRTFMAERQYTRMEDWLTAKLAYEGLPSKTYLSKTLAQYTSKTCSNCGFTITSADYDRVLEKLKKTATGWMTTINGKELKVEGQITYYNRYKRQNVVKDLSVELDRLSEESVNNDISSWTKGRSGEALSLLKKRFSHRPVQEKFVCLNCGFETHADEQAALNIARSWLFLRSQEYKKYQTNKTTGNTDKRAFVETWQSFYRKKLKEVWKPAV

SEQ ID NO: 45122 - protein, 979 aa, synthetic construct
  REGION 1..979: note = engineered CasX variant
QEIKRINKIRRRLVKDSNTKKAGKTGPMKTLLVRVMTPDLRERLENLRKKPENIPQPISNTSRANLNKLLTDYTEMKKAILHVYWEEFQKDPVGLMSRVAQPASKKIDQNKLKPEMDEKGNLTTAGFACSQCGQPLFVYKLEQVSEKGKAYTNYFGRCNVAEHEKLILLAQLKPEKDSDEAVTYSLGKFGQRALDFYSIHVTKESTHPVKPLAQIAGNRYASSPVGKALSDACMGTIASFLSKYQDIIIEHQKVVKGNQKRLESLRELAGKENLEYPSVTLPPQPHTKEGVDAYNEVIARVRMWVNLNLWQKLKLSRDDAKPLLRLKGFPSFPLVERQANEVDWWDMVCNVKKLINEKKEDGKVFWQNLAGYKRQEALRPYLSSEEDRKKGKKFARYQLGDLLLHLEKKHGERDWGKVYDEAWERIDKKVEGLSKHIKLEEERRSEDAQSKAALTDWLRAKASFVIEGLKEADKDEFCRCELKLQKWYGDLRGKPFAIEAENSILDISGFSKQYNCAFIWQKDGVKKLNLYLIINYFKGGKLRFKKIKPEAFEANRFYTVINKKSGEIVPMEVNFNFDDPNLIILPLAFGKRVGREFIWNDLLSLETGSLKLANGRVIEKTLYNRRTRQDEPALFVALTFERREVLDSSNIKPMNLIGVDRGENIPAVIALTDPEGCPLSRFKDSLGNPTHILRIGESYKEKQRTIQAKKEVEQRRAGGYSRKYASKAKNLADDMVRNTARDLLYYAVTQDAMLIFENLSRGFGRQGKRTFMAERQYTRMEDWLTAKLAYEGLPSKTYLSKTLAQYTSKTCSNCGFTITSADYDRVLEKLKKTATGWMTTINGKELKVEGQITYYNRYKRQNVVKDLSVELDRLSEESVNNDISSWTKGRSGEALSLLKKRFSHRPVQEKFVCLNCGFETHADEQAALNIARSWLFLRSQEYKKYQTNKTTGNTDKRAFVETWQSFYRKKLKEVWKPAV

SEQ ID NO: 45123 - protein, 979 aa, synthetic construct
  REGION 1..979: note = engineered CasX variant
QEIKRINKIRRRLVKDSNTKKAGKTGPMKTLLVRVMTPDLRERLENLRKKPENIPQPISNTSRANLNKLLTDYTEMKKAILHVYWEEFQKDPVGLMSRVAQPASKKIDQNKLKPEMDEKGNLTTAGFACSQCGQPLFVYKLEQVSEKGKAYTNYFGRCNVAEHEKLILLAQLKPEKDSDEAVTYSLGKFGQRALDFYSIHVTKESTHPVKPLAQIAGNRYASTPVGKALSDACMGTIASFLSKYQDIIIEHQKVVKGNQKRLESLRELAGKENLEYPSVTLPPQPHTKEGVDAYNEVIARVRMWVNLNLWQKLKLSRDDAKPLLRLKGFPSFPLVERQANEVDWWDMVCNVKKLINEKKEDGKVFWQNLAGYKRQEALRPYLSSEEDRKKGKKFARYQLGDLLLHLEKKHGERDWGKVYDEAWERIDKKVEGLSKHIKLEEERRSEDAQSKAALTDWLRAKASFVIEGLKEADKDEFCRCELKLQKWYGDLRGKPFAIEAENSILDISGFSKQYNCAFIWQKDGVKKLNLYLIINYFKGGKLRFKKIKPEAFEANRFYTVINKKSGEIVPMEVNFNFDDPNLIILPLAFGKRVGREFIWNDLLSLETGSLKLANGRVIEKTLYNRRTRQDEPALFVALTFERREVLDSSNIKPMNLIGVDRGENIPAVIALTDPEGCPLSRFKDSLGNPTHILRIGESYKEKQRTIQAKKEVEQRRAGGYSRKYASKAKNLADDMVRNTARDLLYYAVTQDAMLIFENLSRGFGRQGKRTFMAERQYTRMEDWLTAKLAYEGLPSKTYLSKTLAQYTSKTCSNCGFTITSADYDRVLEKLKKTATGWMTTINGKELKVEGQITYYNRYKRQNVVKDLSVELDRLSEESVNNDISSWTKGRSGEALSLLKKRFSHRPVQEKFVCLNCGFETHADEQAALNIARSWLFLRSQEYKKYQTNKTTGNTDKRAFVETWQSFYRKKLKEVWKPAV

SEQ ID NO: 45124 - protein, 979 aa, synthetic construct
  REGION 1..979: note = engineered CasX variant
QEIKRINKIRRRLVKDSNTKKAGKTGPMKTLLVRVMTPDLRERLENLRKKPENIPQPISNTSRANLNKLLTDYTEMKKAILHVYWEEFQKDPVGLMSRVAQPASKKIDQNKLKPEMDEKGNLTTAGFACSQCGQPLFVYKLEQVSEKGKAYTNYFGRCNVAEHEKLILLAQLKPEKDSDEAVTYSLGKFGQRALDFYSIHVTKESTHPVKPLAQIAGNRYASAPVGKALSDACMGTIASFLSKYQDIIIEHQKVVKGNQKRLESLRELAGKENLEYPSVTLPPQPHTKEGVDAYNEVIARVRMWVNLNLWQKLKLSRDDAKPLLRLKGFPSFPLVERQANEVDWWDMVCNVKKLINEKKEDGKVFWQNLAGYKRQEALRPYLSSEEDRKKGKKFARYQLGDLLLHLEKKHGERDWGKVYDEAWERIDKKVEGLSKHIKLEEERRSEDAQSKAALTDWLRAKASFVIEGLKEADKDEFCRCELKLQKWYGDLRGKPFAIEAENSILDISGFSKQYNCAFIWQKDGVKKLNLYLIINYFKGGKLRFKKIKPEAFEANRFYTVINKKSGEIVPMEVNFNFDDPNLIILPLAFGKRVGREFIWNDLLSLETGSLKLANGRVIEKTLYNRRTRQDEPALFVALTFERREVLDSSNIKPMNLIGVDRGENIPAVIALTDPEGCPLSRFKDSLGNPTHILRIGESYKEKQRTIQAKKEVEQRRAGGYSRKYASKAKNLADDMVRNTARDLLYYAVTQDAMLIFENLSRGFGRQGKRTFMAERQYTRMEDWLTAKLAYEGLPSKTYLSKTLAQYTSKTCSNCGFTITSADYDRVLEKLKKTATGWMTTINGKELKVEGQITYYNRYKRQNVVKDLSVELDRLSEESVNNDISSWTKGRSGEALSLLKKRFSHRPVQEKFVCLNCGFETHADEQAALNIARSWLFLRSQEYKKYQTNKTTGNTDKRAFVETWQSFYRKKLKEVWKPAV

SEQ ID NO: 45125 - protein, 979 aa, synthetic construct
  REGION 1..979: note = engineered CasX variant
QEIKRINKIRRRLVKDSNTKKAGKTGPMKTLLVRVMTPDLRERLENLRKKPENIPQPISNTSRANLNKLLTDYTEMKKAILHVYWEEFQKDPVGLMSRVAQPASKKIDQNKLKPEMDEKGNLTTAGFACSQCGQPLFVYKLEQVSEKGKAYTNYFGRCNVAEHEKLILLAQLKPEKDSDEAVTYSLGKFGQRALDFYSIHVTKESTHPVKPLAQIAGNRYASVPVGKALSDACMGTIASFLSKYQDIIIEHQKVVKGNQKRLESLRELAGKENLEYPSVTLPPQPHTKEGVDAYNEVIARVRMWVNLNLWQKLKLSRDDAKPLLRLKGFPSFPLVERQANEVDWWDMVCNVKKLINEKKEDGKVFWQNLAGYKRQEALRPYLSSEEDRKKGKKFARYQLGDLLLHLEKKHGERDWGKVYDEAWERIDKKVEGLSKHIKLEEERRSEDAQSKAALTDWLRAKASFVIEGLKEADKDEFCRCELKLQKWYGDLRGKPFAIEAENSILDISGFSKQYNCAFIWQKDGVKKLNLYLIINYFKGGKLRFKKIKPEAFEANRFYTVINKKSGEIVPMEVNFNFDDPNLIILPLAFGKRVGREFIWNDLLSLETGSLKLANGRVIEKTLYNRRTRQDEPALFVALTFERREVLDSSNIKPMNLIGVDRGENIPAVIALTDPEGCPLSRFKDSLGNPTHILRIGESYKEKQRTIQAKKEVEQRRAGGYSRKYASKAKNLADDMVRNTARDLLYYAVTQDAMLIFENLSRGFGRQGKRTFMAERQYTRMEDWLTAKLAYEGLPSKTYLSKTLAQYTSKTCSNCGFTITSADYDRVLEKLKKTATGWMTTINGKELKVEGQITYYNRYKRQNVVKDLSVELDRLSEESVNNDISSWTKGRSGEALSLLKKRFSHRPVQEKFVCLNCGFETHADEQAALNIARSWLFLRSQEYKKYQTNKTTGNTDKRAFVETWQSFYRKKLKEVWKPAV

SEQ ID NO: 45126 - protein, 979 aa, synthetic construct
  REGION 1..979: note = engineered CasX variant
QEIKRINKIRRRLVKDSNTKKAGKTGPMKTLLVRVMTPDLRERLENLRKKPENIPQPISNTSRANLNKLLTDYTEMKKAILHVYWEEFQKDPVGLMSRVAQPASKKIDQNKLKPEMDEKGNLTTAGFACSQCGQPLFVYKLEQVSEKGKAYTNYFGRCNVAEHEKLIKLAQLKPEKDSDEAVTYSLGKFGQRALDFYSIHVTKESTHPVKPLAQIAGNRYASGPVGKALSDACMGTIASFLSKYQDIIIEHQKVVKGNQKRLESLRELAGKENLEYPSVTLPPQPHTKEGVDAYNEVIARVRMWVNLNLWQKLKLSRDDAKPLLRLKGFPSFPLVERQANEVDWWDMVCNVKKLINEKKEDGKVFWQNLAGYKRQEALRPYLSSEEDRKKGKKFARYQLGDLLLHLEKKHGERDWGKVYDEAWERIDKKVEGLSKHIKLEEERRSEDAQSKAALTDWLRAKASFVIEGLKEADKDEFCRCELKLQKWYGDLRGKPFAIEAENSILDISGFSKQYNCAFIWQKDGVKKLNLYLIINYFKGGKLRFKKIKPEAFEANRFYTVINKKSGEIVPMEVNFNFDDPNLIILPLAFGKRVGREFIWNDLLSLETGSLKLANGRVIEKTLYNRRTRQDEPALFVALTFERREVLDSSNIKPMNLIGVDRGENIPAVIALTDPEGCPLSRFKDSLGNPTHILRIGESYKEKQRTIQAKKEVEQRRAGGYSRKYASKAKNLADDMVRNTARDLLYYAVTQDAMLIFENLSRGFGRQGKRTFMAERQYTRMEDWLTAKLAYEGLPSKTYLSKTLAQYTSKTCSNCGFTITSADYDRVLEKLKKTATGWMTTINGKELKVEGQITYYNRYKRQNVVKDLSVELDRLSEESVNNDISSWTKGRSGEALSLLKKRFSHRPVQEKFVCLNCGFETHADEQAALNIARSWLFLRSQEYKKYQTNKTTGNTDKRAFVETWQSFYRKKLKEVWKPAV

SEQ ID NO: 45127 - protein, 978 aa, synthetic construct
  REGION 1..978: note = engineered CasX variant
QEIKRINKIRRRLVKDSNTKKAGKTGPMKTLLVRVMTPDLRERLENLRKKPENIPQPISNTSRANLNKLLTDYTEMKKAILHVYWEEFQKDPVGLMSRVAQPASKKIDQNKLKPEMDEKGNLTTAGFACSQCGQPLFVYKLEQVSEKGKAYTNYFGRCNVAEHEKLILLAQLKPEKDSDEAVTYSLGKFGQRALDFYSIHVTKESTHPVKPLAQIAGNRYASPVGKALSDACMGTIASFLSKYQDIIIEHQKVVKGNQKRLESLRELAGKENLEYPSVTLPPQPHTKEGVDAYNEVIARVRMWVNLNLWQKLKLSRDDAKPLLRLKGFPSFPLVERQANEVDWWDMVCNVKKLINEKKEDGKVFWQNLAGYKRQEALRPYLSSEEDRKKGKKFARYQLGDLLLHLEKKHGERDWGKVYDEAWERIDKKVEGLSKHIKLEEERRSEDAQSKAALTDWLRAKASFVIEGLKEADKDEFCRCELKLQKWYGDLRGKPFAIEAENSILDISGFSKQYNCAFIWQKDGVKKLNLYLIINYFKGGKLRFKKIKPEAFEANRFYTVINKKSGEIVPMEVNFNFDDPNLIILPLAFGKRVGREFIWNDLLSLETGSLKLANGRVIEKTLYNRRTRQDEPALFVALTFERREVLDSSNIKPMNLIGVDRGENIPAVIALTDPEGCPLSRFKDSLGNPTHILRIGESYKEKQRTIQAKKEVEQRRAGGYSRKYASKAKNLADDMVRNTARDLLYYAVTQDAMLIFENLSRGFGRQGKRTFMAERQYTRMEDWLTAKLAYEGLPSKTYLSKTLAQYTSKTCSNCGFTITSADYDRVLEKLKKTATGWMTTINGKELKVEGQITYYNRYKRQNVVKDLSVELDRLSEESVNNDISSWTKGRSGEALSLLKKRFSHRPVQEKFVCLNCGFETHADEQAALNIARSWLFLRSQEYKKYQTNKTTGNTDKRAFVETWQSFYRKKLKEVWKPAV

SEQ ID NO: 45128 - protein, 979 aa, synthetic construct
  REGION 1..979: note = engineered CasX variant
QEIKRINKIRRRLVKDSNTKKAGKTGPMKTLLVRVMTPDLRERLENLRKKPENIPQPISNTSRANLNKLLTDYTEMKKAILHVYWEEFQKDPVGLMSRVAQPASKKIDQNKLKPEMDEKGNLTTAGFACSQCGQPLFVYKLEQVSEKGKAYTNYFGRCNVAEHEKLILLAQLKPEKDSDEAVTYSLGKFGQRALDFYSIHVTKESTHPVKPLAQIAGNRYASYPVGKALSDACMGTIASFLSKYQDIIIEHQKVVKGNQKRLESLRELAGKENLEYPSVTLPPQPHTKEGVDAYNEVIARVRMWVNLNLWQKLKLSRDDAKPLLRLKGFPSFPLVERQANEVDWWDMVCNVKKLINEKKEDGKVFWQNLAGYKRQEALRPYLSSEEDRKKGKKFARYQLGDLLLHLEKKHGEYDWGKVYDEAWERIDKKVEGLSKHIKLEEERRSEDAQSKAALTDWLRAKASFVIEGLKEADKDEFCRCELKLQKWYGDLRGKPFAIEAENSILDISGFSKQYNCAFIWQKDGVKKLNLYLIINYFKGGKLRFKKIKPEAFEANRFYTVINKKSGEIVPMEVNFNFDDPNLIILPLAFGKRVGREFIWNDLLSLETGSLKLANGRVIEKTLYNRRTRQDEPALFVALTFERREVLDSSNIKPMNLIGVDRGENIPAVIALTDPEGCPLSRFKDSLGNPTHILRIGESYKEKQRTIQAKKEVEQRRAGGYSRKYASKAKNLADDMVRNTARDLLYYAVTQDAMLIFENLSRGFGRQGKRTFMAERQYTRMEDWLTAKLAYEGLPSKTYLSKTLAQYTSKTCSNCGFTITSADYDRVLEKLKKTATGWMTTINGKELKVEGQITYYNRYKRQNVVKDLSVELDRLSEESVNNDISSWTKGRSGEALSLLKKRFSHRPVQEKFVCLNCGFETHADEQAALNIARSWLFLRSQEYKKYQTNKTTGNTDKRAFVETWQSFYRKKLKEVWKPAV

SEQ ID NO: 45129 - protein, 979 aa, synthetic construct
  REGION 1..979: note = engineered CasX variant
QEIKRINKIRRRLVKDSNTKKAGKTGPMKTLLVRVMTPDLRERLENLRKKPENIPQPISNTSRANLNKLLTDYTEMKKAILHVYWEEFQKDPVGLMSRVAQPASKKIDQNKLKPEMDEKGNLTTAGFACSQCGQPLFVYKLEQVSEKGKAYTNYFGRCNVAEHEKLILLAQLKPEKDSDEAVTYSLGKFGQRALDFYSIHVTKESTHPVKPLAQIAGNRYASHPVGKALSDACMGTIASFLSKYQDIIIEHQKVVKGNQKRLESLRELAGKENLEYPSVTLPPQPHTKEGVDAYNEVIARVRMWVNLNLWQKLKLSRDDAKPLLRLKGFPSFPLVERQANEVDWWDMVCNVKKLINEKKEDGKVFWQNLAGYKRQEALRPYLSSEEDRKKGKKFARYQLGDLLLHLEKKHGEYDWGKVYDEAWERIDKKVEGLSKHIKLEEERRSEDAQSKAALTDWLRAKASFVIEGLKEADKDEFCRCELKLQKWYGDLRGKPFAIEAENSILDISGFSKQYNCAFIWQKDGVKKLNLYLIINYFKGGKLRFKKIKPEAFEANRFYTVINKKSGEIVPMEVNFNFDDPNLIILPLAFGKRVGREFIWNDLLSLETGSLKLANGRVIEKTLYNRRTRQDEPALFVALTFERREVLDSSNIKPMNLIGVDRGENIPAVIALTDPEGCPLSRFKDSLGNPTHILRIGESYKEKQRTIQAKKEVEQRRAGGYSRKYASKAKNLADDMVRNTARDLLYYAVTQDAMLIFENLSRGFGRQGKRTFMAERQYTRMEDWLTAKLAYEGLPSKTYLSKTLAQYTSKTCSNCGFTITSADYDRVLEKLKKTATGWMTTINGKELKVEGQITYYNRYKRQNVVKDLSVELDRLSEESVNNDISSWTKGRSGEALSLLKKRFSHRPVQEKFVCLNCGFETHADEQAALNIARSWLFLRSQEYKKYQTNKTTGNTDKRAFVETWQSFYRKKLKEVWKPAV

SEQ ID NO: 45130 - protein, 979 aa, synthetic construct
  REGION 1..979: note = engineered CasX variant
QEIKRINKIRRRLVKDSNTKKAGKTGPMKTLLVRVMTPDLRERLENLRKKPENIPQPISNTSRANLNKLLTDYTEMKKAILHVYWEEFQKDPVGLMSRVAQPASKKIDQNKLKPEMDEKGNLTTAGFACSQCGQPLFVYKLEQVSEKGKAYTNYFGRCNVAEHEKLILLAQLKPEKDSDEAVTYSLGKFGQRALDFYSIHVTKESTHPVKPLAQIAGNRYASSPVGKALSDACMGTIASFLSKYQDIIIEHQKVVKGNQKRLESLRELAGKENLEYPSVTLPPQPHTKEGVDAYNEVIARVRMWVNLNLWQKLKLSRDDAKPLLRLKGFPSFPLVERQANEVDWWDMVCNVKKLINEKKEDGKVFWQNLAGYKRQEALRPYLSSEEDRKKGKKFARYQLGDLLLHLEKKHGEYDWGKVYDEAWERIDKKVEGLSKHIKLEEERRSEDAQSKAALTDWLRAKASFVIEGLKEADKDEFCRCELKLQKWYGDLRGKPFAIEAENSILDISGFSKQYNCAFIWQKDGVKKLNLYLIINYFKGGKLRFKKIKPEAFEANRFYTVINKKSGEIVPMEVNFNFDDPNLIILPLAFGKRVGREFIWNDLLSLETGSLKLANGRVIEKTLYNRRTRQDEPALFVALTFERREVLDSSNIKPMNLIGVDRGENIPAVIALTDPEGCPLSRFKDSLGNPTHILRIGESYKEKQRTIQAKKEVEQRRAGGYSRKYASKAKNLADDMVRNTARDLLYYAVTQDAMLIFENLSRGFGRQGKRTFMAERQYTRMEDWLTAKLAYEGLPSKTYLSKTLAQYTSKTCSNCGFTITSADYDRVLEKLKKTATGWMTTINGKELKVEGQITYYNRYKRQNVVKDLSVELDRLSEESVNNDISSWTKGRSGEALSLLKKRFSHRPVQEKFVCLNCGFETHADEQAALNIARSWLFLRSQEYKKYQTNKTTGNTDKRAFVETWQSFYRKKLKEVWKPAV

SEQ ID NO: 45131 - protein, 979 aa, synthetic construct
  REGION 1..979: note = engineered CasX variant
QEIKRINKIRRRLVKDSNTKKAGKTGPMKTLLVRVMTPDLRERLENLRKKPENIPQPISNTSRANLNKLLTDYTEMKKAILHVYWEEFQKDPVGLMSRVAQPASKKIDQNKLKPEMDEKGNLTTAGFACSQCGQPLFVYKLEQVSEKGKAYTNYFGRCNVAEHEKLILLAQLKPEKDSDEAVTYSLGKFGQRALDFYSIHVTKESTHPVKPLAQIAGNRYASTPVGKALSDACMGTIASFLSKYQDIIIEHQKVVKGNQKRLESLRELAGKENLEYPSVTLPPQPHTKEGVDAYNEVIARVRMWVNLNLWQKLKLSRDDAKPLLRLKGFPSFPLVERQANEVDWWDMVCNVKKLINEKKEDGKVFWQNLAGYKRQEALRPYLSSEEDRKKGKKFARYQLGDLLLHLEKKHGEYDWGKVYDEAWERIDKKVEGLSKHIKLEEERRSEDAQSKAALTDWLRAKASFVIEGLKEADKDEFCRCELKLQKWYGDLRGKPFAIEAENSILDISGFSKQYNCAFIWQKDGVKKLNLYLIINYFKGGKLRFKKIKPEAFEANRFYTVINKKSGEIVPMEVNFNFDDPNLIILPLAFGKRVGREFIWNDLLSLETGSLKLANGRVIEKTLYNRRTRQDEPALFVALTFERREVLDSSNIKPMNLIGVDRGENIPAVIALTDPEGCPLSRFKDSLGNPTHILRIGESYKEKQRTIQAKKEVEQRRAGGYSRKYASKAKNLADDMVRNTARDLLYYAVTQDAMLIFENLSRGFGRQGKRTFMAERQYTRMEDWLTAKLAYEGLPSKTYLSKTLAQYTSKTCSNCGFTITSADYDRVLEKLKKTATGWMTTINGKELKVEGQITYYNRYKRQNVVKDLSVELDRLSEESVNNDISSWTKGRSGEALSLLKKRFSHRPVQEKFVCLNCGFETHADEQAALNIARSWLFLRSQEYKKYQTNKTTGNTDKRAFVETWQSFYRKKLKEVWKPAV

SEQ ID NO: 45132 - protein, 979 aa, synthetic construct
  REGION 1..979: note = engineered CasX variant
QEIKRINKIRRRLVKDSNTKKAGKTGPMKTLLVRVMTPDLRERLENLRKKPENIPQPISNTSRANLNKLLTDYTEMKKAILHVYWEEFQKDPVGLMSRVAQPASKKIDQNKLKPEMDEKGNLTTAGFACSQCGQPLFVYKLEQVSEKGKAYTNYFGRCNVAEHEKLILLAQLKPEKDSDEAVTYSLGKFGQRALDFYSIHVTKESTHPVKPLAQIAGNRYASAPVGKALSDACMGTIASFLSKYQDIIIEHQKVVKGNQKRLESLRELAGKENLEYPSVTLPPQPHTKEGVDAYNEVIARVRMWVNLNLWQKLKLSRDDAKPLLRLKGFPSFPLVERQANEVDWWDMVCNVKKLINEKKEDGKVFWQNLAGYKRQEALRPYLSSEEDRKKGKKFARYQLGDLLLHLEKKHGEYDWGKVYDEAWERIDKKVEGLSKHIKLEEERRSEDAQSKAALTDWLRAKASFVIEGLKEADKDEFCRCELKLQKWYGDLRGKPFAIEAENSILDISGFSKQYNCAFIWQKDGVKKLNLYLIINYFKGGKLRFKKIKPEAFEANRFYTVINKKSGEIVPMEVNFNFDDPNLIILPLAFGKRVGREFIWNDLLSLETGSLKLANGRVIEKTLYNRRTRQDEPALFVALTFERREVLDSSNIKPMNLIGVDRGENIPAVIALTDPEGCPLSRFKDSLGNPTHILRIGESYKEKQRTIQAKKEVEQRRAGGYSRKYASKAKNLADDMVRNTARDLLYYAVTQDAMLIFENLSRGFGRQGKRTFMAERQYTRMEDWLTAKLAYEGLPSKTYLSKTLAQYTSKTCSNCGFTITSADYDRVLEKLKKTATGWMTTINGKELKVEGQITYYNRYKRQNVVKDLSVELDRLSEESVNNDISSWTKGRSGEALSLLKKRFSHRPVQEKFVCLNCGFETHADEQAALNIARSWLFLRSQEYKKYQTNKTTGNTDKRAFVETWQSFYRKKLKEVWKPAV

SEQ ID NO: 45133 - protein, 979 aa, synthetic construct
  REGION 1..979: note = engineered CasX variant
QEIKRINKIRRRLVKDSNTKKAGKTGPMKTLLVRVMTPDLRERLENLRKKPENIPQPISNTSRANLNKLLTDYTEMKKAILHVYWEEFQKDPVGLMSRVAQPASKKIDQNKLKPEMDEKGNLTTAGFACSQCGQPLFVYKLEQVSEKGKAYTNYFGRCNVAEHEKLILLAQLKPEKDSDEAVTYSLGKFGQRALDFYSIHVTKESTHPVKPLAQIAGNRYASVPVGKALSDACMGTIASFLSKYQDIIIEHQKVVKGNQKRLESLRELAGKENLEYPSVTLPPQPHTKEGVDAYNEVIARVRMWVNLNLWQKLKLSRDDAKPLLRLKGFPSFPLVERQANEVDWWDMVCNVKKLINEKKEDGKVFWQNLAGYKRQEALRPYLSSEEDRKKGKKFARYQLGDLLLHLEKKHGEYDWGKVYDEAWERIDKKVEGLSKHIKLEEERRSEDAQSKAALTDWLRAKASFVIEGLKEADKDEFCRCELKLQKWYGDLRGKPFAIEAENSILDISGFSKQYNCAFIWQKDGVKKLNLYLIINYFKGGKLRFKKIKPEAFEANRFYTVINKKSGEIVPMEVNFNFDDPNLIILPLAFGKRVGREFIWNDLLSLETGSLKLANGRVIEKTLYNRRTRQDEPALFVALTFERREVLDSSNIKPMNLIGVDRGENIPAVIALTDPEGCPLSRFKDSLGNPTHILRIGESYKEKQRTIQAKKEVEQRRAGGYSRKYASKAKNLADDMVRNTARDLLYYAVTQDAMLIFENLSRGFGRQGKRTFMAERQYTRMEDWLTAKLAYEGLPSKTYLSKTLAQYTSKTCSNCGFTITSADYDRVLEKLKKTATGWMTTINGKELKVEGQITYYNRYKRQNVVKDLSVELDRLSEESVNNDISSWTKGRSGEALSLLKKRFSHRPVQEKFVCLNCGFETHADEQAALNIARSWLFLRSQEYKKYQTNKTTGNTDKRAFVETWQSFYRKKLKEVWKPAV

SEQ ID NO: 45134 - protein, 979 aa, synthetic construct
  REGION 1..979: note = engineered CasX variant
QEIKRINKIRRRLVKDSNTKKAGKTGPMKTLLVRVMTPDLRERLENLRKKPENIPQPISNTSRANLNKLLTDYTEMKKAILHVYWEEFQKDPVGLMSRVAQPASKKIDQNKLKPEMDEKGNLTTAGFACSQCGQPLFVYKLEQVSEKGKAYTNYFGRCNVAEHEKLIKLAQLKPEKDSDEAVTYSLGKFGQRALDFYSIHVTKESTHPVKPLAQIAGNRYASGPVGKALSDACMGTIASFLSKYQDIIIEHQKVVKGNQKRLESLRELAGKENLEYPSVTLPPQPHTKEGVDAYNEVIARVRMWVNLNLWQKLKLSRDDAKPLLRLKGFPSFPLVERQANEVDWWDMVCNVKKLINEKKEDGKVFWQNLAGYKRQEALRPYLSSEEDRKKGKKFARYQLGDLLLHLEKKHGEYDWGKVYDEAWERIDKKVEGLSKHIKLEEERRSEDAQSKAALTDWLRAKASFVIEGLKEADKDEFCRCELKLQKWYGDLRGKPFAIEAENSILDISGFSKQYNCAFIWQKDGVKKLNLYLIINYFKGGKLRFKKIKPEAFEANRFYTVINKKSGEIVPMEVNFNFDDPNLIILPLAFGKRVGREFIWNDLLSLETGSLKLANGRVIEKTLYNRRTRQDEPALFVALTFERREVLDSSNIKPMNLIGVDRGENIPAVIALTDPEGCPLSRFKDSLGNPTHILRIGESYKEKQRTIQAKKEVEQRRAGGYSRKYASKAKNLADDMVRNTARDLLYYAVTQDAMLIFENLSRGFGRQGKRTFMAERQYTRMEDWLTAKLAYEGLPSKTYLSKTLAQYTSKTCSNCGFTITSADYDRVLEKLKKTATGWMTTINGKELKVEGQITYYNRYKRQNVVKDLSVELDRLSEESVNNDISSWTKGRSGEALSLLKKRFSHRPVQEKFVCLNCGFETHADEQAALNIARSWLFLRSQEYKKYQTNKTTGNTDKRAFVETWQSFYRKKLKEVWKPAV

SEQ ID NO: 45135 - protein, 978 aa, synthetic construct
  REGION 1..978: note = engineered CasX variant
QEIKRINKIRRRLVKDSNTKKAGKTGPMKTLLVRVMTPDLRERLENLRKKPENIPQPISNTSRANLNKLLTDYTEMKKAILHVYWEEFQKDPVGLMSRVAQPASKKIDQNKLKPEMDEKGNLTTAGFACSQCGQPLFVYKLEQVSEKGKAYTNYFGRCNVAEHEKLILLAQLKPEKDSDEAVTYSLGKFGQRALDFYSIHVTKESTHPVKPLAQIAGNRYASPVGKALSDACMGTIASFLSKYQDIIIEHQKVVKGNQKRLESLRELAGKENLEYPSVTLPPQPHTKEGVDAYNEVIARVRMWVNLNLWQKLKLSRDDAKPLLRLKGFPSFPLVERQANEVDWWDMVCNVKKLINEKKEDGKVFWQNLAGYKRQEALRPYLSSEEDRKKGKKFARYQLGDLLLHLEKKHGEYDWGKVYDEAWERIDKKVEGLSKHIKLEEERRSEDAQSKAALTDWLRAKASFVIEGLKEADKDEFCRCELKLQKWYGDLRGKPFAIEAENSILDISGFSKQYNCAFIWQKDGVKKLNLYLIINYFKGGKLRFKKIKPEAFEANRFYTVINKKSGEIVPMEVNFNFDDPNLIILPLAFGKRVGREFIWNDLLSLETGSLKLANGRVIEKTLYNRRTRQDEPALFVALTFERREVLDSSNIKPMNLIGVDRGENIPAVIALTDPEGCPLSRFKDSLGNPTHILRIGESYKEKQRTIQAKKEVEQRRAGGYSRKYASKAKNLADDMVRNTARDLLYYAVTQDAMLIFENLSRGFGRQGKRTFMAERQYTRMEDWLTAKLAYEGLPSKTYLSKTLAQYTSKTCSNCGFTITSADYDRVLEKLKKTATGWMTTINGKELKVEGQITYYNRYKRQNVVKDLSVELDRLSEESVNNDISSWTKGRSGEALSLLKKRFSHRPVQEKFVCLNCGFETHADEQAALNIARSWLFLRSQEYKKYQTNKTTGNTDKRAFVETWQSFYRKKLKEVWKPAV

SEQ ID NO: 45136 - protein, 978 aa, synthetic construct
  REGION 1..978: note = engineered CasX variant
QEIKRINKIRRRLVKDSNTKKAGKTGPMKTLLVRVMTPDLRERLENLRKKPENIPQPISNTSRANLNKLLTDYTEMKKAILHVYWEEFQKDPVGLMSRVAQPASKKIDQNKLKPEMDEKGNLTTAGFACSQCGQPLFVYKLEQVSEKGKAYTNYFGRCNVAEHEKLILLAQLKPEKDSDEAVTYSLGKFGQRALDFYSIHVTKESTHPVKPLAQIAGNRYASYPVGKALSDACMGTIASFLSKYQDIIIEHQKVVKGNQKRLESLRELAGKENLEYPSVTLPPQPHTKEGVDAYNEVIARVRMWVNLNLWQKLKLSRDDAKPLLRLKGFPSFPLVERQANEVDWWDMVCNVKKLINEKKEDGKVFWQNLAGYKRQEALRPYLSSEEDRKKGKKFARYQLGDLLLHLEKKHGEDWGDVYDEAWERIDKKVEGLSKHIKLEEERRSEDAQSKAALTDWLRAKASFVIEGLKEADKDEFCRCELKLQKWYGDLRGKPFAIEAENSILDISGFSKQYNCAFIWQKDGVKKLNLYLIINYFKGGKLRFKKIKPEAFEANRFYTVINKKSGEIVPMEVNFNFDDPNLIILPLAFGKRVGREFIWNDLLSLETGSLKLANGRVIEKTLYNRRTRQDEPALFVALTFERREVLDSSNIKPMNLIGVDRGENIPAVIALTDPEGCPLSRFKDSLGNPTHILRIGESYKEKQRTIQAKKEVEQRRAGGYSRKYASKAKNLADDMVRNTARDLLYYAVTQDAMLIFENLSRGFGRQGKRTFMAERQYTRMEDWLTAKLAYEGLPSKTYLSKTLAQYTSKTCSNCGFTITSADYDRVLEKLKKTATGWMTTINGKELKVEGQITYYNRYKRQNVVKDLSVELDRLSEESVNNDISSWTKGRSGEALSLLKKRFSHRPVQEKFVCLNCGFETHADEQAALNIARSWLFLRSQEYKKYQTNKTTGNTDKRAFVETWQSFYRKKLKEVWKPAV

SEQ ID NO: 45137 - protein, 978 aa, synthetic construct
  REGION 1..978: note = engineered CasX variant
QEIKRINKIRRRLVKDSNTKKAGKTGPMKTLLVRVMTPDLRERLENLRKKPENIPQPISNTSRANLNKLLTDYTEMKKAILHVYWEEFQKDPVGLMSRVAQPASKKIDQNKLKPEMDEKGNLTTAGFACSQCGQPLFVYKLEQVSEKGKAYTNYFGRCNVAEHEKLILLAQLKPEKDSDEAVTYSLGKFGQRALDFYSIHVTKESTHPVKPLAQIAGNRYASHPVGKALSDACMGTIASFLSKYQDIIIEHQKVVKGNQKRLESLRELAGKENLEYPSVTLPPQPHTKEGVDAYNEVIARVRMWVNLNLWQKLKLSRDDAKPLLRLKGFPSFPLVERQANEVDWWDMVCNVKKLINEKKEDGKVFWQNLAGYKRQEALRPYLSSEEDRKKGKKFARYQLGDLLLHLEKKHGEDWGDVYDEAWERIDKKVEGLSKHIKLEEERRSEDAQSKAALTDWLRAKASFVIEGLKEADKDEFCRCELKLQKWYGDLRGKPFAIEAENSILDISGFSKQYNCAFIWQKDGVKKLNLYLIINYFKGGKLRFKKIKPEAFEANRFYTVINKKSGEIVPMEVNFNFDDPNLIILPLAFGKRVGREFIWNDLLSLETGSLKLANGRVIEKTLYNRRTRQDEPALFVALTFERREVLDSSNIKPMNLIGVDRGENIPAVIALTDPEGCPLSRFKDSLGNPTHILRIGESYKEKQRTIQAKKEVEQRRAGGYSRKYASKAKNLADDMVRNTARDLLYYAVTQDAMLIFENLSRGFGRQGKRTFMAERQYTRMEDWLTAKLAYEGLPSKTYLSKTLAQYTSKTCSNCGFTITSADYDRVLEKLKKTATGWMTTINGKELKVEGQITYYNRYKRQNVVKDLSVELDRLSEESVNNDISSWTKGRSGEALSLLKKRFSHRPVQEKFVCLNCGFETHADEQAALNIARSWLFLRSQEYKKYQTNKTTGNTDKRAFVETWQSFYRKKLKEVWKPAV

SEQ ID NO: 45138 - protein, 978 aa, synthetic construct
  REGION 1..978: note = engineered CasX variant
QEIKRINKIRRRLVKDSNTKKAGKTGPMKTLLVRVMTPDLRERLENLRKKPENIPQPISNTSRANLNKLLTDYTEMKKAILHVYWEEFQKDPVGLMSRVAQPASKKIDQNKLKPEMDEKGNLTTAGFACSQCGQPLFVYKLEQVSEKGKAYTNYFGRCNVAEHEKLILLAQLKPEKDSDEAVTYSLGKFGQRALDFYSIHVTKESTHPVKPLAQIAGNRYASSPVGKALSDACMGTIASFLSKYQDIIIEHQKVVKGNQKRLESLRELAGKENLEYPSVTLPPQPHTKEGVDAYNEVIARVRMWVNLNLWQKLKLSRDDAKPLLRLKGFPSFPLVERQANEVDWWDMVCNVKKLINEKKEDGKVFWQNLAGYKRQEALRPYLSSEEDRKKGKKFARYQLGDLLLHLEKKHGEDWGDVYDEAWERIDKKVEGLSKHIKLEEERRSEDAQSKAALTDWLRAKASFVIEGLKEADKDEFCRCELKLQKWYGDLRGKPFAIEAENSILDISGFSKQYNCAFIWQKDGVKKLNLYLIINYFKGGKLRFKKIKPEAFEANRFYTVINKKSGEIVPMEVNFNFDDPNLIILPLAFGKRVGREFIWNDLLSLETGSLKLANGRVIEKTLYNRRTRQDEPALFVALTFERREVLDSSNIKPMNLIGVDRGENIPAVIALTDPEGCPLSRFKDSLGNPTHILRIGESYKEKQRTIQAKKEVEQRRAGGYSRKYASKAKNLADDMVRNTARDLLYYAVTQDAMLIFENLSRGFGRQGKRTFMAERQYTRMEDWLTAKLAYEGLPSKTYLSKTLAQYTSKTCSNCGFTITSADYDRVLEKLKKTATGWMTTINGKELKVEGQITYYNRYKRQNVVKDLSVELDRLSEESVNNDISSWTKGRSGEALSLLKKRFSHRPVQEKFVCLNCGFETHADEQAALNIARSWLFLRSQEYKKYQTNKTTGNTDKRAFVETWQSFYRKKLKEVWKPAV

SEQ ID NO: 45139 - protein, 978 aa, synthetic construct
  REGION 1..978: note = engineered CasX variant
QEIKRINKIRRRLVKDSNTKKAGKTGPMKTLLVRVMTPDLRERLENLRKKPENIPQPISNTSRANLNKLLTDYTEMKKAILHVYWEEFQKDPVGLMSRVAQPASKKIDQNKLKPEMDEKGNLTTAGFACSQCGQPLFVYKLEQVSEKGKAYTNYFGRCNVAEHEKLILLAQLKPEKDSDEAVTYSLGKFGQRALDFYSIHVTKESTHPVKPLAQIAGNRYASTPVGKALSDACMGTIASFLSKYQDIIIEHQKVVKGNQKRLESLRELAGKENLEYPSVTLPPQPHTKEGVDAYNEVIARVRMWVNLNLWQKLKLSRDDAKPLLRLKGFPSFPLVERQANEVDWWDMVCNVKKLINEKKEDGKVFWQNLAGYKRQEALRPYLSSEEDRKKGKKFARYQLGDLLLHLEKKHGEDWGDVYDEAWERIDKKVEGLSKHIKLEEERRSEDAQSKAALTDWLRAKASFVIEGLKEADKDEFCRCELKLQKWYGDLRGKPFAIEAENSILDISGFSKQYNCAFIWQKDGVKKLNLYLIINYFKGGKLRFKKIKPEAFEANRFYTVINKKSGEIVPMEVNFNFDDPNLIILPLAFGKRVGREFIWNDLLSLETGSLKLANGRVIEKTLYNRRTRQDEPALFVALTFERREVLDSSNIKPMNLIGVDRGENIPAVIALTDPEGCPLSRFKDSLGNPTHILRIGESYKEKQRTIQAKKEVEQRRAGGYSRKYASKAKNLADDMVRNTARDLLYYAVTQDAMLIFENLSRGFGRQGKRTFMAERQYTRMEDWLTAKLAYEGLPSKTYLSKTLAQYTSKTCSNCGFTITSADYDRVLEKLKKTATGWMTTINGKELKVEGQITYYNRYKRQNVVKDLSVELDRLSEESVNNDISSWTKGRSGEALSLLKKRFSHRPVQEKFVCLNCGFETHADEQAALNIARSWLFLRSQEYKKYQTNKTTGNTDKRAFVETWQSFYRKKLKEVWKPAV

SEQ ID NO: 45140 - protein, 978 aa, synthetic construct
  REGION 1..978: note = engineered CasX variant
QEIKRINKIRRRLVKDSNTKKAGKTGPMKTLLVRVMTPDLRERLENLRKKPENIPQPISNTSRANLNKLLTDYTEMKKAILHVYWEEFQKDPVGLMSRVAQPASKKIDQNKLKPEMDEKGNLTTAGFACSQCGQPLFVYKLEQVSEKGKAYTNYFGRCNVAEHEKLILLAQLKPEKDSDEAVTYSLGKFGQRALDFYSIHVTKESTHPVKPLAQIAGNRYASAPVGKALSDACMGTIASFLSKYQDIIIEHQKVVKGNQKRLESLRELAGKENLEYPSVTLPPQPHTKEGVDAYNEVIARVRMWVNLNLWQKLKLSRDDAKPLLRLKGFPSFPLVERQANEVDWWDMVCNVKKLINEKKEDGKVFWQNLAGYKRQEALRPYLSSEEDRKKGKKFARYQLGDLLLHLEKKHGEDWGDVYDEAWERIDKKVEGLSKHIKLEEERRSEDAQSKAALTDWLRAKASFVIEGLKEADKDEFCRCELKLQKWYGDLRGKPFAIEAENSILDISGFSKQYNCAFIWQKDGVKKLNLYLIINYFKGGKLRFKKIKPEAFEANRFYTVINKKSGEIVPMEVNFNFDDPNLIILPLAFGKRVGREFIWNDLLSLETGSLKLANGRVIEKTLYNRRTRQDEPALFVALTFERREVLDSSNIKPMNLIGVDRGENIPAVIALTDPEGCPLSRFKDSLGNPTHILRIGESYKEKQRTIQAKKEVEQRRAGGYSRKYASKAKNLADDMVRNTARDLLYYAVTQDAMLIFENLSRGFGRQGKRTFMAERQYTRMEDWLTAKLAYEGLPSKTYLSKTLAQYTSKTCSNCGFTITSADYDRVLEKLKKTATGWMTTINGKELKVEGQITYYNRYKRQNVVKDLSVELDRLSEESVNNDISSWTKGRSGEALSLLKKRFSHRPVQEKFVCLNCGFETHADEQAALNIARSWLFLRSQEYKKYQTNKTTGNTDKRAFVETWQSFYRKKLKEVWKPAV

SEQ ID NO: 45141 - protein, 978 aa, synthetic construct
  REGION 1..978: note = engineered CasX variant
QEIKRINKIRRRLVKDSNTKKAGKTGPMKTLLVRVMTPDLRERLENLRKKPENIPQPISNTSRANLNKLLTDYTEMKKAILHVYWEEFQKDPVGLMSRVAQPASKKIDQNKLKPEMDEKGNLTTAGFACSQCGQPLFVYKLEQVSEKGKAYTNYFGRCNVAEHEKLILLAQLKPEKDSDEAVTYSLGKFGQRALDFYSIHVTKESTHPVKPLAQIAGNRYASVPVGKALSDACMGTIASFLSKYQDIIIEHQKVVKGNQKRLESLRELAGKENLEYPSVTLPPQPHTKEGVDAYNEVIARVRMWVNLNLWQKLKLSRDDAKPLLRLKGFPSFPLVERQANEVDWWDMVCNVKKLINEKKEDGKVFWQNLAGYKRQEALRPYLSSEEDRKKGKKFARYQLGDLLLHLEKKHGEDWGDVYDEAWERIDKKVEGLSKHIKLEEERRSEDAQSKAALTDWLRAKASFVIEGLKEADKDEFCRCELKLQKWYGDLRGKPFAIEAENSILDISGFSKQYNCAFIWQKDGVKKLNLYLIINYFKGGKLRFKKIKPEAFEANRFYTVINKKSGEIVPMEVNFNFDDPNLIILPLAFGKRVGREFIWNDLLSLETGSLKLANGRVIEKTLYNRRTRQDEPALFVALTFERREVLDSSNIKPMNLIGVDRGENIPAVIALTDPEGCPLSRFKDSLGNPTHILRIGESYKEKQRTIQAKKEVEQRRAGGYSRKYASKAKNLADDMVRNTARDLLYYAVTQDAMLIFENLSRGFGRQGKRTFMAERQYTRMEDWLTAKLAYEGLPSKTYLSKTLAQYTSKTCSNCGFTITSADYDRVLEKLKKTATGWMTTINGKELKVEGQITYYNRYKRQNVVKDLSVELDRLSEESVNNDISSWTKGRSGEALSLLKKRFSHRPVQEKFVCLNCGFETHADEQAALNIARSWLFLRSQEYKKYQTNKTTGNTDKRAFVETWQSFYRKKLKEVWKPAV

SEQ ID NO: 45142 - protein, 978 aa, synthetic construct
  REGION 1..978: note = engineered CasX variant
QEIKRINKIRRRLVKDSNTKKAGKTGPMKTLLVRVMTPDLRERLENLRKKPENIPQPISNTSRANLNKLLTDYTEMKKAILHVYWEEFQKDPVGLMSRVAQPASKKIDQNKLKPEMDEKGNLTTAGFACSQCGQPLFVYKLEQVSEKGKAYTNYFGRCNVAEHEKLIKLAQLKPEKDSDEAVTYSLGKFGQRALDFYSIHVTKESTHPVKPLAQIAGNRYASGPVGKALSDACMGTIASFLSKYQDIIIEHQKVVKGNQKRLESLRELAGKENLEYPSVTLPPQPHTKEGVDAYNEVIARVRMWVNLNLWQKLKLSRDDAKPLLRLKGFPSFPLVERQANEVDWWDMVCNVKKLINEKKEDGKVFWQNLAGYKRQEALRPYLSSEEDRKKGKKFARYQLGDLLLHLEKKHGEDWGDVYDEAWERIDKKVEGLSKHIKLEEERRSEDAQSKAALTDWLRAKASFVIEGLKEADKDEFCRCELKLQKWYGDLRGKPFAIEAENSILDISGFSKQYNCAFIWQKDGVKKLNLYLIINYFKGGKLRFKKIKPEAFEANRFYTVINKKSGEIVPMEVNFNFDDPNLIILPLAFGKRVGREFIWNDLLSLETGSLKLANGRVIEKTLYNRRTRQDEPALFVALTFERREVLDSSNIKPMNLIGVDRGENIPAVIALTDPEGCPLSRFKDSLGNPTHILRIGESYKEKQRTIQAKKEVEQRRAGGYSRKYASKAKNLADDMVRNTARDLLYYAVTQDAMLIFENLSRGFGRQGKRTFMAERQYTRMEDWLTAKLAYEGLPSKTYLSKTLAQYTSKTCSNCGFTITSADYDRVLEKLKKTATGWMTTINGKELKVEGQITYYNRYKRQNVVKDLSVELDRLSEESVNNDISSWTKGRSGEALSLLKKRFSHRPVQEKFVCLNCGFETHADEQAALNIARSWLFLRSQEYKKYQTNKTTGNTDKRAFVETWQSFYRKKLKEVWKPAV

SEQ ID NO: 45143 - protein, 977 aa, synthetic construct
  REGION 1..977: note = engineered CasX variant
QEIKRINKIRRRLVKDSNTKKAGKTGPMKTLLVRVMTPDLRERLENLRKKPENIPQPISNTSRANLNKLLTDYTEMKKAILHVYWEEFQKDPVGLMSRVAQPASKKIDQNKLKPEMDEKGNLTTAGFACSQCGQPLFVYKLEQVSEKGKAYTNYFGRCNVAEHEKLILLAQLKPEKDSDEAVTYSLGKFGQRALDFYSIHVTKESTHPVKPLAQIAGNRYASPVGKALSDACMGTIASFLSKYQDIIIEHQKVVKGNQKRLESLRELAGKENLEYPSVTLPPQPHTKEGVDAYNEVIARVRMWVNLNLWQKLKLSRDDAKPLLRLKGFPSFPLVERQANEVDWWDMVCNVKKLINEKKEDGKVFWQNLAGYKRQEALRPYLSSEEDRKKGKKFARYQLGDLLLHLEKKHGEDWGDVYDEAWERIDKKVEGLSKHIKLEEERRSEDAQSKAALTDWLRAKASFVIEGLKEADKDEFCRCELKLQKWYGDLRGKPFAIEAENSILDISGFSKQYNCAFIWQKDGVKKLNLYLIINYFKGGKLRFKKIKPEAFEANRFYTVINKKSGEIVPMEVNFNFDDPNLIILPLAFGKRVGREFIWNDLLSLETGSLKLANGRVIEKTLYNRRTRQDEPALFVALTFERREVLDSSNIKPMNLIGVDRGENIPAVIALTDPEGCPLSRFKDSLGNPTHILRIGESYKEKQRTIQAKKEVEQRRAGGYSRKYASKAKNLADDMVRNTARDLLYYAVTQDAMLIFENLSRGFGRQGKRTFMAERQYTRMEDWLTAKLAYEGLPSKTYLSKTLAQYTSKTCSNCGFTITSADYDRVLEKLKKTATGWMTTINGKELKVEGQITYYNRYKRQNVVKDLSVELDRLSEESVNNDISSWTKGRSGEALSLLKKRFSHRPVQEKFVCLNCGFETHADEQAALNIARSWLFLRSQEYKKYQTNKTTGNTDKRAFVETWQSFYRKKLKEVWKPAV

SEQ ID NO: 45144 - protein, 978 aa, synthetic construct
  REGION 1..978: note = engineered CasX variant
QEIKRINKIRRRLVKDSNTKKAGKTGPMKTLLVRVMTPDLRERLENLRKKPENIPQPISNTSRANLNKLLTDYTEMKKAILHVYWEEFQKDPVGLMSRVAQPASKKIDQNKLKPEMDEKGNLTTAGFACSQCGQPLFVYKLEQVSEKGKAYTNYFGRCNVAEHEKLILLAQLKPEKDSDEAVTYSLGKFGQRALDFYSIHVTKESTHPVKPLAQIAGNRYASYPVGKALSDACMGTIASFLSKYQDIIIEHQKVVKGNQKRLESLRELAGKENLEYPSVTLPPQPHTKEGVDAYNEVIARVRMWVNLNLWQKLKLSRDDAKPLLRLKGFPSFPLVERQANEVDWWDMVCNVKKLINEKKEDGKVFWQNLAGYKRQEALRPYLSSEEDRKKGKKFARYQLGDLLLHLEKKHGEDWGKVYGEAWERIDKKVEGLSKHIKLEEERRSEDAQSKAALTDWLRAKASFVIEGLKEADKDEFCRCELKLQKWYGDLRGKPFAIEAENSILDISGFSKQYNCAFIWQKDGVKKLNLYLIINYFKGGKLRFKKIKPEAFEANRFYTVINKKSGEIVPMEVNFNFDDPNLIILPLAFGKRVGREFIWNDLLSLETGSLKLANGRVIEKTLYNRRTRQDEPALFVALTFERREVLDSSNIKPMNLIGVDRGENIPAVIALTDPEGCPLSRFKDSLGNPTHILRIGESYKEKQRTIQAKKEVEQRRAGGYSRKYASKAKNLADDMVRNTARDLLYYAVTQDAMLIFENLSRGFGRQGKRTFMAERQYTRMEDWLTAKLAYEGLPSKTYLSKTLAQYTSKTCSNCGFTITSADYDRVLEKLKKTATGWMTTINGKELKVEGQITYYNRYKRQNVVKDLSVELDRLSEESVNNDISSWTKGRSGEALSLLKKRFSHRPVQEKFVCLNCGFETHADEQAALNIARSWLFLRSQEYKKYQTNKTTGNTDKRAFVETWQSFYRKKLKEVWKPAV

SEQ ID NO: 45145 - protein, 978 aa, synthetic construct
  REGION 1..978: note = engineered CasX variant
QEIKRINKIRRRLVKDSNTKKAGKTGPMKTLLVRVMTPDLRERLENLRKKPENIPQPISNTSRANLNKLLTDYTEMKKAILHVYWEEFQKDPVGLMSRVAQPASKKIDQNKLKPEMDEKGNLTTAGFACSQCGQPLFVYKLEQVSEKGKAYTNYFGRCNVAEHEKLILLAQLKPEKDSDEAVTYSLGKFGQRALDFYSIHVTKESTHPVKPLAQIAGNRYASHPVGKALSDACMGTIASFLSKYQDIIIEHQKVVKGNQKRLESLRELAGKENLEYPSVTLPPQPHTKEGVDAYNEVIARVRMWVNLNLWQKLKLSRDDAKPLLRLKGFPSFPLVERQANEVDWWDMVCNVKKLINEKKEDGKVFWQNLAGYKRQEALRPYLSSEEDRKKGKKFARYQLGDLLLHLEKKHGEDWGKVYGEAWERIDKKVEGLSKHIKLEEERRSEDAQSKAALTDWLRAKASFVIEGLKEADKDEFCRCELKLQKWYGDLRGKPFAIEAENSILDISGFSKQYNCAFIWQKDGVKKLNLYLIINYFKGGKLRFKKIKPEAFEANRFYTVINKKSGEIVPMEVNFNFDDPNLIILPLAFGKRVGREFIWNDLLSLETGSLKLANGRVIEKTLYNRRTRQDEPALFVALTFERREVLDSSNIKPMNLIGVDRGENIPAVIALTDPEGCPLSRFKDSLGNPTHILRIGESYKEKQRTIQAKKEVEQRRAGGYSRKYASKAKNLADDMVRNTARDLLYYAVTQDAMLIFENLSRGFGRQGKRTFMAERQYTRMEDWLTAKLAYEGLPSKTYLSKTLAQYTSKTCSNCGFTITSADYDRVLEKLKKTATGWMTTINGKELKVEGQITYYNRYKRQNVVKDLSVELDRLSEESVNNDISSWTKGRSGEALSLLKKRFSHRPVQEKFVCLNCGFETHADEQAALNIARSWLFLRSQEYKKYQTNKTTGNTDKRAFVETWQSFYRKKLKEVWKPAV

SEQ ID NO: 45146 - protein, 978 aa, synthetic construct
  REGION 1..978: note = engineered CasX variant
QEIKRINKIRRRLVKDSNTKKAGKTGPMKTLLVRVMTPDLRERLENLRKKPENIPQPISNTSRANLNKLLTDYTEMKKAILHVYWEEFQKDPVGLMSRVAQPASKKIDQNKLKPEMDEKGNLTTAGFACSQCGQPLFVYKLEQVSEKGKAYTNYFGRCNVAEHEKLILLAQLKPEKDSDEAVTYSLGKFGQRALDFYSIHVTKESTHPVKPLAQIAGNRYASSPVGKALSDACMGTIASFLSKYQDIIIEHQKVVKGNQKRLESLRELAGKENLEYPSVTLPPQPHTKEGVDAYNEVIARVRMWVNLNLWQKLKLSRDDAKPLLRLKGFPSFPLVERQANEVDWWDMVCNVKKLINEKKEDGKVFWQNLAGYKRQEALRPYLSSEEDRKKGKKFARYQLGDLLLHLEKKHGEDWGKVYGEAWERIDKKVEGLSKHIKLEEERRSEDAQSKAALTDWLRAKASFVIEGLKEADKDEFCRCELKLQKWYGDLRGKPFAIEAENSILDISGFSKQYNCAFIWQKDGVKKLNLYLIINYFKGGKLRFKKIKPEAFEANRFYTVINKKSGEIVPMEVNFNFDDPNLIILPLAFGKRVGREFIWNDLLSLETGSLKLANGRVIEKTLYNRRTRQDEPALFVALTFERREVLDSSNIKPMNLIGVDRGENIPAVIALTDPEGCPLSRFKDSLGNPTHILRIGESYKEKQRTIQAKKEVEQRRAGGYSRKYASKAKNLADDMVRNTARDLLYYAVTQDAMLIFENLSRGFGRQGKRTFMAERQYTRMEDWLTAKLAYEGLPSKTYLSKTLAQYTSKTCSNCGFTITSADYDRVLEKLKKTATGWMTTINGKELKVEGQITYYNRYKRQNVVKDLSVELDRLSEESVNNDISSWTKGRSGEALSLLKKRFSHRPVQEKFVCLNCGFETHADEQAALNIARSWLFLRSQEYKKYQTNKTTGNTDKRAFVETWQSFYRKKLKEVWKPAV

SEQ ID NO: 45147 - protein, 978 aa, synthetic construct
  REGION 1..978: note = engineered CasX variant
QEIKRINKIRRRLVKDSNTKKAGKTGPMKTLLVRVMTPDLRERLENLRKKPENIPQPISNTSRANLNKLLTDYTEMKKAILHVYWEEFQKDPVGLMSRVAQPASKKIDQNKLKPEMDEKGNLTTAGFACSQCGQPLFVYKLEQVSEKGKAYTNYFGRCNVAEHEKLILLAQLKPEKDSDEAVTYSLGKFGQRALDFYSIHVTKESTHPVKPLAQIAGNRYASTPVGKALSDACMGTIASFLSKYQDIIIEHQKVVKGNQKRLESLRELAGKENLEYPSVTLPPQPHTKEGVDAYNEVIARVRMWVNLNLWQKLKLSRDDAKPLLRLKGFPSFPLVERQANEVDWWDMVCNVKKLINEKKEDGKVFWQNLAGYKRQEALRPYLSSEEDRKKGKKFARYQLGDLLLHLEKKHGEDWGKVYGEAWERIDKKVEGLSKHIKLEEERRSEDAQSKAALTDWLRAKASFVIEGLKEADKDEFCRCELKLQKWYGDLRGKPFAIEAENSILDISGFSKQYNCAFIWQKDGVKKLNLYLIINYFKGGKLRFKKIKPEAFEANRFYTVINKKSGEIVPMEVNFNFDDPNLIILPLAFGKRVGREFIWNDLLSLETGSLKLANGRVIEKTLYNRRTRQDEPALFVALTFERREVLDSSNIKPMNLIGVDRGENIPAVIALTDPEGCPLSRFKDSLGNPTHILRIGESYKEKQRTIQAKKEVEQRRAGGYSRKYASKAKNLADDMVRNTARDLLYYAVTQDAMLIFENLSRGFGRQGKRTFMAERQYTRMEDWLTAKLAYEGLPSKTYLSKTLAQYTSKTCSNCGFTITSADYDRVLEKLKKTATGWMTTINGKELKVEGQITYYNRYKRQNVVKDLSVELDRLSEESVNNDISSWTKGRSGEALSLLKKRFSHRPVQEKFVCLNCGFETHADEQAALNIARSWLFLRSQEYKKYQTNKTTGNTDKRAFVETWQSFYRKKLKEVWKPAV

SEQ ID NO: 45148 - protein, 978 aa, synthetic construct
  REGION 1..978: note = engineered CasX variant
QEIKRINKIRRRLVKDSNTKKAGKTGPMKTLLVRVMTPDLRERLENLRKKPENIPQPISNTSRANLNKLLTDYTEMKKAILHVYWEEFQKDPVGLMSRVAQPASKKIDQNKLKPEMDEKGNLTTAGFACSQCGQPLFVYKLEQVSEKGKAYTNYFGRCNVAEHEKLILLAQLKPEKDSDEAVTYSLGKFGQRALDFYSIHVTKESTHPVKPLAQIAGNRYASAPVGKALSDACMGTIASFLSKYQDIIIEHQKVVKGNQKRLESLRELAGKENLEYPSVTLPPQPHTKEGVDAYNEVIARVRMWVNLNLWQKLKLSRDDAKPLLRLKGFPSFPLVERQANEVDWWDMVCNVKKLINEKKEDGKVFWQNLAGYKRQEALRPYLSSEEDRKKGKKFARYQLGDLLLHLEKKHGEDWGKVYGEAWERIDKKVEGLSKHIKLEEERRSEDAQSKAALTDWLRAKASFVIEGLKEADKDEFCRCELKLQKWYGDLRGKPFAIEAENSILDISGFSKQYNCAFIWQKDGVKKLNLYLIINYFKGGKLRFKKIKPEAFEANRFYTVINKKSGEIVPMEVNFNFDDPNLIILPLAFGKRVGREFIWNDLLSLETGSLKLANGRVIEKTLYNRRTRQDEPALFVALTFERREVLDSSNIKPMNLIGVDRGENIPAVIALTDPEGCPLSRFKDSLGNPTHILRIGESYKEKQRTIQAKKEVEQRRAGGYSRKYASKAKNLADDMVRNTARDLLYYAVTQDAMLIFENLSRGFGRQGKRTFMAERQYTRMEDWLTAKLAYEGLPSKTYLSKTLAQYTSKTCSNCGFTITSADYDRVLEKLKKTATGWMTTINGKELKVEGQITYYNRYKRQNVVKDLSVELDRLSEESVNNDISSWTKGRSGEALSLLKKRFSHRPVQEKFVCLNCGFETHADEQAALNIARSWLFLRSQEYKKYQTNKTTGNTDKRAFVETWQSFYRKKLKEVWKPAV

SEQ ID NO: 45149 - protein, 978 aa, synthetic construct
  REGION 1..978: note = engineered CasX variant
QEIKRINKIRRRLVKDSNTKKAGKTGPMKTLLVRVMTPDLRERLENLRKKPENIPQPISNTSRANLNKLLTDYTEMKKAILHVYWEEFQKDPVGLMSRVAQPASKKIDQNKLKPEMDEKGNLTTAGFACSQCGQPLFVYKLEQVSEKGKAYTNYFGRCNVAEHEKLILLAQLKPEKDSDEAVTYSLGKFGQRALDFYSIHVTKESTHPVKPLAQIAGNRYASVPVGKALSDACMGTIASFLSKYQDIIIEHQKVVKGNQKRLESLRELAGKENLEYPSVTLPPQPHTKEGVDAYNEVIARVRMWVNLNLWQKLKLSRDDAKPLLRLKGFPSFPLVERQANEVDWWDMVCNVKKLINEKKEDGKVFWQNLAGYKRQEALRPYLSSEEDRKKGKKFARYQLGDLLLHLEKKHGEDWGKVYGEAWERIDKKVEGLSKHIKLEEERRSEDAQSKAALTDWLRAKASFVIEGLKEADKDEFCRCELKLQKWYGDLRGKPFAIEAENSILDISGFSKQYNCAFIWQKDGVKKLNLYLIINYFKGGKLRFKKIKPEAFEANRFYTVINKKSGEIVPMEVNFNFDDPNLIILPLAFGKRVGREFIWNDLLSLETGSLKLANGRVIEKTLYNRRTRQDEPALFVALTFERREVLDSSNIKPMNLIGVDRGENIPAVIALTDPEGCPLSRFKDSLGNPTHILRIGESYKEKQRTIQAKKEVEQRRAGGYSRKYASKAKNLADDMVRNTARDLLYYAVTQDAMLIFENLSRGFGRQGKRTFMAERQYTRMEDWLTAKLAYEGLPSKTYLSKTLAQYTSKTCSNCGFTITSADYDRVLEKLKKTATGWMTTINGKELKVEGQITYYNRYKRQNVVKDLSVELDRLSEESVNNDISSWTKGRSGEALSLLKKRFSHRPVQEKFVCLNCGFETHADEQAALNIARSWLFLRSQEYKKYQTNKTTGNTDKRAFVETWQSFYRKKLKEVWKPAV

SEQ ID NO: 45150 - protein, 978 aa, synthetic construct
  REGION 1..978: note = engineered CasX variant
QEIKRINKIRRRLVKDSNTKKAGKTGPMKTLLVRVMTPDLRERLENLRKKPENIPQPISNTSRANLNKLLTDYTEMKKAILHVYWEEFQKDPVGLMSRVAQPASKKIDQNKLKPEMDEKGNLTTAGFACSQCGQPLFVYKLEQVSEKGKAYTNYFGRCNVAEHEKLIKLAQLKPEKDSDEAVTYSLGKFGQRALDFYSIHVTKESTHPVKPLAQIAGNRYASGPVGKALSDACMGTIASFLSKYQDIIIEHQKVVKGNQKRLESLRELAGKENLEYPSVTLPPQPHTKEGVDAYNEVIARVRMWVNLNLWQKLKLSRDDAKPLLRLKGFPSFPLVERQANEVDWWDMVCNVKKLINEKKEDGKVFWQNLAGYKRQEALRPYLSSEEDRKKGKKFARYQLGDLLLHLEKKHGEDWGKVYGEAWERIDKKVEGLSKHIKLEEERRSEDAQSKAALTDWLRAKASFVIEGLKEADKDEFCRCELKLQKWYGDLRGKPFAIEAENSILDISGFSKQYNCAFIWQKDGVKKLNLYLIINYFKGGKLRFKKIKPEAFEANRFYTVINKKSGEIVPMEVNFNFDDPNLIILPLAFGKRVGREFIWNDLLSLETGSLKLANGRVIEKTLYNRRTRQDEPALFVALTFERREVLDSSNIKPMNLIGVDRGENIPAVIALTDPEGCPLSRFKDSLGNPTHILRIGESYKEKQRTIQAKKEVEQRRAGGYSRKYASKAKNLADDMVRNTARDLLYYAVTQDAMLIFENLSRGFGRQGKRTFMAERQYTRMEDWLTAKLAYEGLPSKTYLSKTLAQYTSKTCSNCGFTITSADYDRVLEKLKKTATGWMTTINGKELKVEGQITYYNRYKRQNVVKDLSVELDRLSEESVNNDISSWTKGRSGEALSLLKKRFSHRPVQEKFVCLNCGFETHADEQAALNIARSWLFLRSQEYKKYQTNKTTGNTDKRAFVETWQSFYRKKLKEVWKPAV

SEQ ID NO: 45151 - protein, 977 aa, synthetic construct
  REGION 1..977: note = engineered CasX variant
QEIKRINKIRRRLVKDSNTKKAGKTGPMKTLLVRVMTPDLRERLENLRKKPENIPQPISNTSRANLNKLLTDYTEMKKAILHVYWEEFQKDPVGLMSRVAQPASKKIDQNKLKPEMDEKGNLTTAGFACSQCGQPLFVYKLEQVSEKGKAYTNYFGRCNVAEHEKLILLAQLKPEKDSDEAVTYSLGKFGQRALDFYSIHVTKESTHPVKPLAQIAGNRYASPVGKALSDACMGTIASFLSKYQDIIIEHQKVVKGNQKRLESLRELAGKENLEYPSVTLPPQPHTKEGVDAYNEVIARVRMWVNLNLWQKLKLSRDDAKPLLRLKGFPSFPLVERQANEVDWWDMVCNVKKLINEKKEDGKVFWQNLAGYKRQEALRPYLSSEEDRKKGKKFARYQLGDLLLHLEKKHGEDWGKVYGEAWERIDKKVEGLSKHIKLEEERRSEDAQSKAALTDWLRAKASFVIEGLKEADKDEFCRCELKLQKWYGDLRGKPFAIEAENSILDISGFSKQYNCAFIWQKDGVKKLNLYLIINYFKGGKLRFKKIKPEAFEANRFYTVINKKSGEIVPMEVNFNFDDPNLIILPLAFGKRVGREFIWNDLLSLETGSLKLANGRVIEKTLYNRRTRQDEPALFVALTFERREVLDSSNIKPMNLIGVDRGENIPAVIALTDPEGCPLSRFKDSLGNPTHILRIGESYKEKQRTIQAKKEVEQRRAGGYSRKYASKAKNLADDMVRNTARDLLYYAVTQDAMLIFENLSRGFGRQGKRTFMAERQYTRMEDWLTAKLAYEGLPSKTYLSKTLAQYTSKTCSNCGFTITSADYDRVLEKLKKTATGWMTTINGKELKVEGQITYYNRYKRQNVVKDLSVELDRLSEESVNNDISSWTKGRSGEALSLLKKRFSHRPVQEKFVCLNCGFETHADEQAALNIARSWLFLRSQEYKKYQTNKTTGNTDKRAFVETWQSFYRKKLKEVWKPAV

SEQ ID NO: 45152 - protein, 978 aa, synthetic construct
  REGION 1..978: note = engineered CasX variant
QEIKRINKIRRRLVKDSNTKKAGKTGPMKTLLVRVMTPDLRERLENLRKKPENIPQPISNTSRANLNKLLTDYTEMKKAILHVYWEEFQKDPVGLMSRVAQPASKKIDQNKLKPEMDEKGNLTTAGFACSQCGQPLFVYKLEQVSEKGKAYTNYFGRCNVAEHEKLILLAQLKPEKDSDEAVTYSLGKFGQRALDFYSIHVTKESTHPVKPLAQIAGNRYASYPVGKALSDACMGTIASFLSKYQDIIIEHQKVVKGNQKRLESLRELAGKENLEYPSVTLPPQPHTKEGVDAYNEVIARVRMWVNLNLWQKLKLSRDDAKPLLRLKGFPSFPLVERQANEVDWWDMVCNVKKLINEKKEDGKVFWQNLAGYKRQEALRPYLSSEEDRKKGKKFARYQLGDLLLHLEKKHGEDWGKVYDEAWERIDKKVEGLSKHIKLEEERRSEDAQSKAALTDWLRAKASFVIEGKKEADKDEFCRCELKLQKWYGDLRGKPFAIEAENSILDISGFSKQYNCAFIWQKDGVKKLNLYLIINYFKGGKLRFKKIKPEAFEANRFYTVINKKSGEIVPMEVNFNFDDPNLIILPLAFGKRVGREFIWNDLLSLETGSLKLANGRVIEKTLYNRRTRQDEPALFVALTFERREVLDSSNIKPMNLIGVDRGENIPAVIALTDPEGCPLSRFKDSLGNPTHILRIGESYKEKQRTIQAKKEVEQRRAGGYSRKYASKAKNLADDMVRNTARDLLYYAVTQDAMLIFENLSRGFGRQGKRTFMAERQYTRMEDWLTAKLAYEGLPSKTYLSKTLAQYTSKTCSNCGFTITSADYDRVLEKLKKTATGWMTTINGKELKVEGQITYYNRYKRQNVVKDLSVELDRLSEESVNNDISSWTKGRSGEALSLLKKRFSHRPVQEKFVCLNCGFETHADEQAALNIARSWLFLRSQEYKKYQTNKTTGNTDKRAFVETWQSFYRKKLKEVWKPAV

SEQ ID NO: 45153 - protein, 978 aa, synthetic construct
  REGION 1..978: note = engineered CasX variant
QEIKRINKIRRRLVKDSNTKKAGKTGPMKTLLVRVMTPDLRERLENLRKKPENIPQPISNTSRANLNKLLTDYTEMKKAILHVYWEEFQKDPVGLMSRVAQPASKKIDQNKLKPEMDEKGNLTTAGFACSQCGQPLFVYKLEQVSEKGKAYTNYFGRCNVAEHEKLILLAQLKPEKDSDEAVTYSLGKFGQRALDFYSIHVTKESTHPVKPLAQIAGNRYASHPVGKALSDACMGTIASFLSKYQDIIIEHQKVVKGNQKRLESLRELAGKENLEYPSVTLPPQPHTKEGVDAYNEVIARVRMWVNLNLWQKLKLSRDDAKPLLRLKGFPSFPLVERQANEVDWWDMVCNVKKLINEKKEDGKVFWQNLAGYKRQEALRPYLSSEEDRKKGKKFARYQLGDLLLHLEKKHGEDWGKVYDEAWERIDKKVEGLSKHIKLEEERRSEDAQSKAALTDWLRAKASFVIEGKKEADKDEFCRCELKLQKWYGDLRGKPFAIEAENSILDISGFSKQYNCAFIWQKDGVKKLNLYLIINYFKGGKLRFKKIKPEAFEANRFYTVINKKSGEIVPMEVNFNFDDPNLIILPLAFGKRVGREFIWNDLLSLETGSLKLANGRVIEKTLYNRRTRQDEPALFVALTFERREVLDSSNIKPMNLIGVDRGENIPAVIALTDPEGCPLSRFKDSLGNPTHILRIGESYKEKQRTIQAKKEVEQRRAGGYSRKYASKAKNLADDMVRNTARDLLYYAVTQDAMLIFENLSRGFGRQGKRTFMAERQYTRMEDWLTAKLAYEGLPSKTYLSKTLAQYTSKTCSNCGFTITSADYDRVLEKLKKTATGWMTTINGKELKVEGQITYYNRYKRQNVVKDLSVELDRLSEESVNNDISSWTKGRSGEALSLLKKRFSHRPVQEKFVCLNCGFETHADEQAALNIARSWLFLRSQEYKKYQTNKTTGNTDKRAFVETWQSFYRKKLKEVWKPAV

SEQ ID NO: 45154 - protein, 978 aa, synthetic construct
  REGION 1..978: note = engineered CasX variant
QEIKRINKIRRRLVKDSNTKKAGKTGPMKTLLVRVMTPDLRERLENLRKKPENIPQPISNTSRANLNKLLTDYTEMKKAILHVYWEEFQKDPVGLMSRVAQPASKKIDQNKLKPEMDEKGNLTTAGFACSQCGQPLFVYKLEQVSEKGKAYTNYFGRCNVAEHEKLILLAQLKPEKDSDEAVTYSLGKFGQRALDFYSIHVTKESTHPVKPLAQIAGNRYASSPVGKALSDACMGTIASFLSKYQDIIIEHQKVVKGNQKRLESLRELAGKENLEYPSVTLPPQPHTKEGVDAYNEVIARVRMWVNLNLWQKLKLSRDDAKPLLRLKGFPSFPLVERQANEVDWWDMVCNVKKLINEKKEDGKVFWQNLAGYKRQEALRPYLSSEEDRKKGKKFARYQLGDLLLHLEKKHGEDWGKVYDEAWERIDKKVEGLSKHIKLEEERRSEDAQSKAALTDWLRAKASFVIEGKKEADKDEFCRCELKLQKWYGDLRGKPFAIEAENSILDISGFSKQYNCAFIWQKDGVKKLNLYLIINYFKGGKLRFKKIKPEAFEANRFYTVINKKSGEIVPMEVNFNFDDPNLIILPLAFGKRVGREFIWNDLLSLETGSLKLANGRVIEKTLYNRRTRQDEPALFVALTFERREVLDSSNIKPMNLIGVDRGENIPAVIALTDPEGCPLSRFKDSLGNPTHILRIGESYKEKQRTIQAKKEVEQRRAGGYSRKYASKAKNLADDMVRNTARDLLYYAVTQDAMLIFENLSRGFGRQGKRTFMAERQYTRMEDWLTAKLAYEGLPSKTYLSKTLAQYTSKTCSNCGFTITSADYDRVLEKLKKTATGWMTTINGKELKVEGQITYYNRYKRQNVVKDLSVELDRLSEESVNNDISSWTKGRSGEALSLLKKRFSHRPVQEKFVCLNCGFETHADEQAALNIARSWLFLRSQEYKKYQTNKTTGNTDKRAFVETWQSFYRKKLKEVWKPAV

SEQ ID NO: 45155 - protein, 978 aa, synthetic construct
  REGION 1..978: note = engineered CasX variant
QEIKRINKIRRRLVKDSNTKKAGKTGPMKTLLVRVMTPDLRERLENLRKKPENIPQPISNTSRANLNKLLTDYTEMKKAILHVYWEEFQKDPVGLMSRVAQPASKKIDQNKLKPEMDEKGNLTTAGFACSQCGQPLFVYKLEQVSEKGKAYTNYFGRCNVAEHEKLILLAQLKPEKDSDEAVTYSLGKFGQRALDFYSIHVTKESTHPVKPLAQIAGNRYASTPVGKALSDACMGTIASFLSKYQDIIIEHQKVVKGNQKRLESLRELAGKENLEYPSVTLPPQPHTKEGVDAYNEVIARVRMWVNLNLWQKLKLSRDDAKPLLRLKGFPSFPLVERQANEVDWWDMVCNVKKLINEKKEDGKVFWQNLAGYKRQEALRPYLSSEEDRKKGKKFARYQLGDLLLHLEKKHGEDWGKVYDEAWERIDKKVEGLSKHIKLEEERRSEDAQSKAALTDWLRAKASFVIEGKKEADKDEFCRCELKLQKWYGDLRGKPFAIEAENSILDISGFSKQYNCAFIWQKDGVKKLNLYLIINYFKGGKLRFKKIKPEAFEANRFYTVINKKSGEIVPMEVNFNFDDPNLIILPLAFGKRVGREFIWNDLLSLETGSLKLANGRVIEKTLYNRRTRQDEPALFVALTFERREVLDSSNIKPMNLIGVDRGENIPAVIALTDPEGCPLSRFKDSLGNPTHILRIGESYKEKQRTIQAKKEVEQRRAGGYSRKYASKAKNLADDMVRNTARDLLYYAVTQDAMLIFENLSRGFGRQGKRTFMAERQYTRMEDWLTAKLAYEGLPSKTYLSKTLAQYTSKTCSNCGFTITSADYDRVLEKLKKTATGWMTTINGKELKVEGQITYYNRYKRQNVVKDLSVELDRLSEESVNNDISSWTKGRSGEALSLLKKRFSHRPVQEKFVCLNCGFETHADEQAALNIARSWLFLRSQEYKKYQTNKTTGNTDKRAFVETWQSFYRKKLKEVWKPAV

SEQ ID NO: 45156 - protein, 978 aa, synthetic construct
  REGION 1..978: note = engineered CasX variant
QEIKRINKIRRRLVKDSNTKKAGKTGPMKTLLVRVMTPDLRERLENLRKKPENIPQPISNTSRANLNKLLTDYTEMKKAILHVYWEEFQKDPVGLMSRVAQPASKKIDQNKLKPEMDEKGNLTTAGFACSQCGQPLFVYKLEQVSEKGKAYTNYFGRCNVAEHEKLILLAQLKPEKDSDEAVTYSLGKFGQRALDFYSIHVTKESTHPVKPLAQIAGNRYASAPVGKALSDACMGTIASFLSKYQDIIIEHQKVVKGNQKRLESLRELAGKENLEYPSVTLPPQPHTKEGVDAYNEVIARVRMWVNLNLWQKLKLSRDDAKPLLRLKGFPSFPLVERQANEVDWWDMVCNVKKLINEKKEDGKVFWQNLAGYKRQEALRPYLSSEEDRKKGKKFARYQLGDLLLHLEKKHGEDWGKVYDEAWERIDKKVEGLSKHIKLEEERRSEDAQSKAALTDWLRAKASFVIEGKKEADKDEFCRCELKLQKWYGDLRGKPFAIEAENSILDISGFSKQYNCAFIWQKDGVKKLNLYLIINYFKGGKLRFKKIKPEAFEANRFYTVINKKSGEIVPMEVNFNFDDPNLIILPLAFGKRVGREFIWNDLLSLETGSLKLANGRVIEKTLYNRRTRQDEPALFVALTFERREVLDSSNIKPMNLIGVDRGENIPAVIALTDPEGCPLSRFKDSLGNPTHILRIGESYKEKQRTIQAKKEVEQRRAGGYSRKYASKAKNLADDMVRNTARDLLYYAVTQDAMLIFENLSRGFGRQGKRTFMAERQYTRMEDWLTAKLAYEGLPSKTYLSKTLAQYTSKTCSNCGFTITSADYDRVLEKLKKTATGWMTTINGKELKVEGQITYYNRYKRQNVVKDLSVELDRLSEESVNNDISSWTKGRSGEALSLLKKRFSHRPVQEKFVCLNCGFETHADEQAALNIARSWLFLRSQEYKKYQTNKTTGNTDKRAFVETWQSFYRKKLKEVWKPAV

SEQ ID NO: 45157 - protein, 978 aa, synthetic construct
  REGION 1..978: note = engineered CasX variant
QEIKRINKIRRRLVKDSNTKKAGKTGPMKTLLVRVMTPDLRERLENLRKKPENIPQPISNTSRANLNKLLTDYTEMKKAILHVYWEEFQKDPVGLMSRVAQPASKKIDQNKLKPEMDEKGNLTTAGFACSQCGQPLFVYKLEQVSEKGKAYTNYFGRCNVAEHEKLILLAQLKPEKDSDEAVTYSLGKFGQRALDFYSIHVTKESTHPVKPLAQIAGNRYASVPVGKALSDACMGTIASFLSKYQDIIIEHQKVVKGNQKRLESLRELAGKENLEYPSVTLPPQPHTKEGVDAYNEVIARVRMWVNLNLWQKLKLSRDDAKPLLRLKGFPSFPLVERQANEVDWWDMVCNVKKLINEKKEDGKVFWQNLAGYKRQEALRPYLSSEEDRKKGKKFARYQLGDLLLHLEKKHGEDWGKVYDEAWERIDKKVEGLSKHIKLEEERRSEDAQSKAALTDWLRAKASFVIEGKKEADKDEFCRCELKLQKWYGDLRGKPFAIEAENSILDISGFSKQYNCAFIWQKDGVKKLNLYLIINYFKGGKLRFKKIKPEAFEANRFYTVINKKSGEIVPMEVNFNFDDPNLIILPLAFGKRVGREFIWNDLLSLETGSLKLANGRVIEKTLYNRRTRQDEPALFVALTFERREVLDSSNIKPMNLIGVDRGENIPAVIALTDPEGCPLSRFKDSLGNPTHILRIGESYKEKQRTIQAKKEVEQRRAGGYSRKYASKAKNLADDMVRNTARDLLYYAVTQDAMLIFENLSRGFGRQGKRTFMAERQYTRMEDWLTAKLAYEGLPSKTYLSKTLAQYTSKTCSNCGFTITSADYDRVLEKLKKTATGWMTTINGKELKVEGQITYYNRYKRQNVVKDLSVELDRLSEESVNNDISSWTKGRSGEALSLLKKRFSHRPVQEKFVCLNCGFETHADEQAALNIARSWLFLRSQEYKKYQTNKTTGNTDKRAFVETWQSFYRKKLKEVWKPAV

SEQ ID NO: 45158 - protein, 978 aa, synthetic construct
  REGION 1..978: note = engineered CasX variant
QEIKRINKIRRRLVKDSNTKKAGKTGPMKTLLVRVMTPDLRERLENLRKKPENIPQPISNTSRANLNKLLTDYTEMKKAILHVYWEEFQKDPVGLMSRVAQPASKKIDQNKLKPEMDEKGNLTTAGFACSQCGQPLFVYKLEQVSEKGKAYTNYFGRCNVAEHEKLIKLAQLKPEKDSDEAVTYSLGKFGQRALDFYSIHVTKESTHPVKPLAQIAGNRYASGPVGKALSDACMGTIASFLSKYQDIIIEHQKVVKGNQKRLESLRELAGKENLEYPSVTLPPQPHTKEGVDAYNEVIARVRMWVNLNLWQKLKLSRDDAKPLLRLKGFPSFPLVERQANEVDWWDMVCNVKKLINEKKEDGKVFWQNLAGYKRQEALRPYLSSEEDRKKGKKFARYQLGDLLLHLEKKHGEDWGKVYDEAWERIDKKVEGLSKHIKLEEERRSEDAQSKAALTDWLRAKASFVIEGKKEADKDEFCRCELKLQKWYGDLRGKPFAIEAENSILDISGFSKQYNCAFIWQKDGVKKLNLYLIINYFKGGKLRFKKIKPEAFEANRFYTVINKKSGEIVPMEVNFNFDDPNLIILPLAFGKRVGREFIWNDLLSLETGSLKLANGRVIEKTLYNRRTRQDEPALFVALTFERREVLDSSNIKPMNLIGVDRGENIPAVIALTDPEGCPLSRFKDSLGNPTHILRIGESYKEKQRTIQAKKEVEQRRAGGYSRKYASKAKNLADDMVRNTARDLLYYAVTQDAMLIFENLSRGFGRQGKRTFMAERQYTRMEDWLTAKLAYEGLPSKTYLSKTLAQYTSKTCSNCGFTITSADYDRVLEKLKKTATGWMTTINGKELKVEGQITYYNRYKRQNVVKDLSVELDRLSEESVNNDISSWTKGRSGEALSLLKKRFSHRPVQEKFVCLNCGFETHADEQAALNIARSWLFLRSQEYKKYQTNKTTGNTDKRAFVETWQSFYRKKLKEVWKPAV

SEQ ID NO: 45159 - protein, 977 aa, synthetic construct
  REGION 1..977: note = engineered CasX variant
QEIKRINKIRRRLVKDSNTKKAGKTGPMKTLLVRVMTPDLRERLENLRKKPENIPQPISNTSRANLNKLLTDYTEMKKAILHVYWEEFQKDPVGLMSRVAQPASKKIDQNKLKPEMDEKGNLTTAGFACSQCGQPLFVYKLEQVSEKGKAYTNYFGRCNVAEHEKLILLAQLKPEKDSDEAVTYSLGKFGQRALDFYSIHVTKESTHPVKPLAQIAGNRYASPVGKALSDACMGTIASFLSKYQDIIIEHQKVVKGNQKRLESLRELAGKENLEYPSVTLPPQPHTKEGVDAYNEVIARVRMWVNLNLWQKLKLSRDDAKPLLRLKGFPSFPLVERQANEVDWWDMVCNVKKLINEKKEDGKVFWQNLAGYKRQEALRPYLSSEEDRKKGKKFARYQLGDLLLHLEKKHGEDWGKVYDEAWERIDKKVEGLSKHIKLEEERRSEDAQSKAALTDWLRAKASFVIEGKKEADKDEFCRCELKLQKWYGDLRGKPFAIEAENSILDISGFSKQYNCAFIWQKDGVKKLNLYLIINYFKGGKLRFKKIKPEAFEANRFYTVINKKSGEIVPMEVNFNFDDPNLIILPLAFGKRVGREFIWNDLLSLETGSLKLANGRVIEKTLYNRRTRQDEPALFVALTFERREVLDSSNIKPMNLIGVDRGENIPAVIALTDPEGCPLSRFKDSLGNPTHILRIGESYKEKQRTIQAKKEVEQRRAGGYSRKYASKAKNLADDMVRNTARDLLYYAVTQDAMLIFENLSRGFGRQGKRTFMAERQYTRMEDWLTAKLAYEGLPSKTYLSKTLAQYTSKTCSNCGFTITSADYDRVLEKLKKTATGWMTTINGKELKVEGQITYYNRYKRQNVVKDLSVELDRLSEESVNNDISSWTKGRSGEALSLLKKRFSHRPVQEKFVCLNCGFETHADEQAALNIARSWLFLRSQEYKKYQTNKTTGNTDKRAFVETWQSFYRKKLKEVWKPAV

SEQ ID NO: 45160 - protein, 978 aa, synthetic construct
  REGION 1..978: note = engineered CasX variant
QEIKRINKIRRRLVKDSNTKKAGKTGPMKTLLVRVMTPDLRERLENLRKKPENIPQPISNTSRANLNKLLTDYTEMKKAILHVYWEEFQKDPVGLMSRVAQPASKKIDQNKLKPEMDEKGNLTTAGFACSQCGQPLFVYKLEQVSEKGKAYTNYFGRCNVAEHEKLILLAQLKPEKDSDEAVTYSLGKFGQRALDFYSIHVTKESTHPVKPLAQIAGNRYASYPVGKALSDACMGTIASFLSKYQDIIIEHQKVVKGNQKRLESLRELAGKENLEYPSVTLPPQPHTKEGVDAYNEVIARVRMWVNLNLWQKLKLSRDDAKPLLRLKGFPSFPLVERQANEVDWWDMVCNVKKLINEKKEDGKVFWQNLAGYKRQEALRPYLSSEEDRKKGKKFARYQLGDLLLHLEKKHGEDWGKVYDEAWERIDKKVEGLSKHIKLEEERRSEDAQSKAALTDWLRAKASFVIEGSKEADKDEFCRCELKLQKWYGDLRGKPFAIEAENSILDISGFSKQYNCAFIWQKDGVKKLNLYLIINYFKGGKLRFKKIKPEAFEANRFYTVINKKSGEIVPMEVNFNFDDPNLIILPLAFGKRVGREFIWNDLLSLETGSLKLANGRVIEKTLYNRRTRQDEPALFVALTFERREVLDSSNIKPMNLIGVDRGENIPAVIALTDPEGCPLSRFKDSLGNPTHILRIGESYKEKQRTIQAKKEVEQRRAGGYSRKYASKAKNLADDMVRNTARDLLYYAVTQDAMLIFENLSRGFGRQGKRTFMAERQYTRMEDWLTAKLAYEGLPSKTYLSKTLAQYTSKTCSNCGFTITSADYDRVLEKLKKTATGWMTTINGKELKVEGQITYYNRYKRQNVVKDLSVELDRLSEESVNNDISSWTKGRSGEALSLLKKRFSHRPVQEKFVCLNCGFETHADEQAALNIARSWLFLRSQEYKKYQTNKTTGNTDKRAFVETWQSFYRKKLKEVWKPAV

SEQ ID NO: 45161 - protein, 978 aa, synthetic construct
  REGION 1..978: note = engineered CasX variant
QEIKRINKIRRRLVKDSNTKKAGKTGPMKTLLVRVMTPDLRERLENLRKKPENIPQPISNTSRANLNKLLTDYTEMKKAILHVYWEEFQKDPVGLMSRVAQPASKKIDQNKLKPEMDEKGNLTTAGFACSQCGQPLFVYKLEQVSEKGKAYTNYFGRCNVAEHEKLILLAQLKPEKDSDEAVTYSLGKFGQRALDFYSIHVTKESTHPVKPLAQIAGNRYASHPVGKALSDACMGTIASFLSKYQDIIIEHQKVVKGNQKRLESLRELAGKENLEYPSVTLPPQPHTKEGVDAYNEVIARVRMWVNLNLWQKLKLSRDDAKPLLRLKGFPSFPLVERQANEVDWWDMVCNVKKLINEKKEDGKVFWQNLAGYKRQEALRPYLSSEEDRKKGKKFARYQLGDLLLHLEKKHGEDWGKVYDEAWERIDKKVEGLSKHIKLEEERRSEDAQSKAALTDWLRAKASFVIEGSKEADKDEFCRCELKLQKWYGDLRGKPFAIEAENSILDISGFSKQYNCAFIWQKDGVKKLNLYLIINYFKGGKLRFKKIKPEAFEANRFYTVINKKSGEIVPMEVNFNFDDPNLIILPLAFGKRVGREFIWNDLLSLETGSLKLANGRVIEKTLYNRRTRQDEPALFVALTFERREVLDSSNIKPMNLIGVDRGENIPAVIALTDPEGCPLSRFKDSLGNPTHILRIGESYKEKQRTIQAKKEVEQRRAGGYSRKYASKAKNLADDMVRNTARDLLYYAVTQDAMLIFENLSRGFGRQGKRTFMAERQYTRMEDWLTAKLAYEGLPSKTYLSKTLAQYTSKTCSNCGFTITSADYDRVLEKLKKTATGWMTTINGKELKVEGQITYYNRYKRQNVVKDLSVELDRLSEESVNNDISSWTKGRSGEALSLLKKRFSHRPVQEKFVCLNCGFETHADEQAALNIARSWLFLRSQEYKKYQTNKTTGNTDKRAFVETWQSFYRKKLKEVWKPAV

SEQ ID NO: 45162 - protein, 978 aa, synthetic construct
  REGION 1..978: note = engineered CasX variant
QEIKRINKIRRRLVKDSNTKKAGKTGPMKTLLVRVMTPDLRERLENLRKKPENIPQPISNTSRANLNKLLTDYTEMKKAILHVYWEEFQKDPVGLMSRVAQPASKKIDQNKLKPEMDEKGNLTTAGFACSQCGQPLFVYKLEQVSEKGKAYTNYFGRCNVAEHEKLILLAQLKPEKDSDEAVTYSLGKFGQRALDFYSIHVTKESTHPVKPLAQIAGNRYASSPVGKALSDACMGTIASFLSKYQDIIIEHQKVVKGNQKRLESLRELAGKENLEYPSVTLPPQPHTKEGVDAYNEVIARVRMWVNLNLWQKLKLSRDDAKPLLRLKGFPSFPLVERQANEVDWWDMVCNVKKLINEKKEDGKVFWQNLAGYKRQEALRPYLSSEEDRKKGKKFARYQLGDLLLHLEKKHGEDWGKVYDEAWERIDKKVEGLSKHIKLEEERRSEDAQSKAALTDWLRAKASFVIEGSKEADKDEFCRCELKLQKWYGDLRGKPFAIEAENSILDISGFSKQYNCAFIWQKDGVKKLNLYLIINYFKGGKLRFKKIKPEAFEANRFYTVINKKSGEIVPMEVNFNFDDPNLIILPLAFGKRVGREFIWNDLLSLETGSLKLANGRVIEKTLYNRRTRQDEPALFVALTFERREVLDSSNIKPMNLIGVDRGENIPAVIALTDPEGCPLSRFKDSLGNPTHILRIGESYKEKQRTIQAKKEVEQRRAGGYSRKYASKAKNLADDMVRNTARDLLYYAVTQDAMLIFENLSRGFGRQGKRTFMAERQYTRMEDWLTAKLAYEGLPSKTYLSKTLAQYTSKTCSNCGFTITSADYDRVLEKLKKTATGWMTTINGKELKVEGQITYYNRYKRQNVVKDLSVELDRLSEESVNNDISSWTKGRSGEALSLLKKRFSHRPVQEKFVCLNCGFETHADEQAALNIARSWLFLRSQEYKKYQTNKTTGNTDKRAFVETWQSFYRKKLKEVWKPAV

SEQ ID NO: 45163 - protein, 978 aa, synthetic construct
  REGION 1..978: note = engineered CasX variant
QEIKRINKIRRRLVKDSNTKKAGKTGPMKTLLVRVMTPDLRERLENLRKKPENIPQPISNTSRANLNKLLTDYTEMKKAILHVYWEEFQKDPVGLMSRVAQPASKKIDQNKLKPEMDEKGNLTTAGFACSQCGQPLFVYKLEQVSEKGKAYTNYFGRCNVAEHEKLILLAQLKPEKDSDEAVTYSLGKFGQRALDFYSIHVTKESTHPVKPLAQIAGNRYASTPVGKALSDACMGTIASFLSKYQDIIIEHQKVVKGNQKRLESLRELAGKENLEYPSVTLPPQPHTKEGVDAYNEVIARVRMWVNLNLWQKLKLSRDDAKPLLRLKGFPSFPLVERQANEVDWWDMVCNVKKLINEKKEDGKVFWQNLAGYKRQEALRPYLSSEEDRKKGKKFARYQLGDLLLHLEKKHGEDWGKVYDEAWERIDKKVEGLSKHIKLEEERRSEDAQSKAALTDWLRAKASFVIEGSKEADKDEFCRCELKLQKWYGDLRGKPFAIEAENSILDISGFSKQYNCAFIWQKDGVKKLNLYLIINYFKGGKLRFKKIKPEAFEANRFYTVINKKSGEIVPMEVNFNFDDPNLIILPLAFGKRVGREFIWNDLLSLETGSLKLANGRVIEKTLYNRRTRQDEPALFVALTFERREVLDSSNIKPMNLIGVDRGENIPAVIALTDPEGCPLSRFKDSLGNPTHILRIGESYKEKQRTIQAKKEVEQRRAGGYSRKYASKAKNLADDMVRNTARDLLYYAVTQDAMLIFENLSRGFGRQGKRTFMAERQYTRMEDWLTAKLAYEGLPSKTYLSKTLAQYTSKTCSNCGFTITSADYDRVLEKLKKTATGWMTTINGKELKVEGQITYYNRYKRQNVVKDLSVELDRLSEESVNNDISSWTKGRSGEALSLLKKRFSHRPVQEKFVCLNCGFETHADEQAALNIARSWLFLRSQEYKKYQTNKTTGNTDKRAFVETWQSFYRKKLKEVWKPAV

SEQ ID NO: 45164 - protein, 978 aa, synthetic construct
  REGION 1..978: note = engineered CasX variant
QEIKRINKIRRRLVKDSNTKKAGKTGPMKTLLVRVMTPDLRERLENLRKKPENIPQPISNTSRANLNKLLTDYTEMKKAILHVYWEEFQKDPVGLMSRVAQPASKKIDQNKLKPEMDEKGNLTTAGFACSQCGQPLFVYKLEQVSEKGKAYTNYFGRCNVAEHEKLILLAQLKPEKDSDEAVTYSLGKFGQRALDFYSIHVTKESTHPVKPLAQIAGNRYASAPVGKALSDACMGTIASFLSKYQDIIIEHQKVVKGNQKRLESLRELAGKENLEYPSVTLPPQPHTKEGVDAYNEVIARVRMWVNLNLWQKLKLSRDDAKPLLRLKGFPSFPLVERQANEVDWWDMVCNVKKLINEKKEDGKVFWQNLAGYKRQEALRPYLSSEEDRKKGKKFARYQLGDLLLHLEKKHGEDWGKVYDEAWERIDKKVEGLSKHIKLEEERRSEDAQSKAALTDWLRAKASFVIEGSKEADKDEFCRCELKLQKWYGDLRGKPFAIEAENSILDISGFSKQYNCAFIWQKDGVKKLNLYLIINYFKGGKLRFKKIKPEAFEANRFYTVINKKSGEIVPMEVNFNFDDPNLIILPLAFGKRVGREFIWNDLLSLETGSLKLANGRVIEKTLYNRRTRQDEPALFVALTFERREVLDSSNIKPMNLIGVDRGENIPAVIALTDPEGCPLSRFKDSLGNPTHILRIGESYKEKQRTIQAKKEVEQRRAGGYSRKYASKAKNLADDMVRNTARDLLYYAVTQDAMLIFENLSRGFGRQGKRTFMAERQYTRMEDWLTAKLAYEGLPSKTYLSKTLAQYTSKTCSNCGFTITSADYDRVLEKLKKTATGWMTTINGKELKVEGQITYYNRYKRQNVVKDLSVELDRLSEESVNNDISSWTKGRSGEALSLLKKRFSHRPVQEKFVCLNCGFETHADEQAALNIARSWLFLRSQEYKKYQTNKTTGNTDKRAFVETWQSFYRKKLKEVWKPAV

SEQ ID NO: 45165 - protein, 978 aa, synthetic construct
  REGION 1..978: note = engineered CasX variant
QEIKRINKIRRRLVKDSNTKKAGKTGPMKTLLVRVMTPDLRERLENLRKKPENIPQPISNTSRANLNKLLTDYTEMKKAILHVYWEEFQKDPVGLMSRVAQPASKKIDQNKLKPEMDEKGNLTTAGFACSQCGQPLFVYKLEQVSEKGKAYTNYFGRCNVAEHEKLILLAQLKPEKDSDEAVTYSLGKFGQRALDFYSIHVTKESTHPVKPLAQIAGNRYASVPVGKALSDACMGTIASFLSKYQDIIIEHQKVVKGNQKRLESLRELAGKENLEYPSVTLPPQPHTKEGVDAYNEVIARVRMWVNLNLWQKLKLSRDDAKPLLRLKGFPSFPLVERQANEVDWWDMVCNVKKLINEKKEDGKVFWQNLAGYKRQEALRPYLSSEEDRKKGKKFARYQLGDLLLHLEKKHGEDWGKVYDEAWERIDKKVEGLSKHIKLEEERRSEDAQSKAALTDWLRAKASFVIEGSKEADKDEFCRCELKLQKWYGDLRGKPFAIEAENSILDISGFSKQYNCAFIWQKDGVKKLNLYLIINYFKGGKLRFKKIKPEAFEANRFYTVINKKSGEIVPMEVNFNFDDPNLIILPLAFGKRVGREFIWNDLLSLETGSLKLANGRVIEKTLYNRRTRQDEPALFVALTFERREVLDSSNIKPMNLIGVDRGENIPAVIALTDPEGCPLSRFKDSLGNPTHILRIGESYKEKQRTIQAKKEVEQRRAGGYSRKYASKAKNLADDMVRNTARDLLYYAVTQDAMLIFENLSRGFGRQGKRTFMAERQYTRMEDWLTAKLAYEGLPSKTYLSKTLAQYTSKTCSNCGFTITSADYDRVLEKLKKTATGWMTTINGKELKVEGQITYYNRYKRQNVVKDLSVELDRLSEESVNNDISSWTKGRSGEALSLLKKRFSHRPVQEKFVCLNCGFETHADEQAALNIARSWLFLRSQEYKKYQTNKTTGNTDKRAFVETWQSFYRKKLKEVWKPAV

SEQ ID NO: 45166 - protein, 978 aa, synthetic construct
  REGION 1..978: note = engineered CasX variant
QEIKRINKIRRRLVKDSNTKKAGKTGPMKTLLVRVMTPDLRERLENLRKKPENIPQPISNTSRANLNKLLTDYTEMKKAILHVYWEEFQKDPVGLMSRVAQPASKKIDQNKLKPEMDEKGNLTTAGFACSQCGQPLFVYKLEQVSEKGKAYTNYFGRCNVAEHEKLIKLAQLKPEKDSDEAVTYSLGKFGQRALDFYSIHVTKESTHPVKPLAQIAGNRYASGPVGKALSDACMGTIASFLSKYQDIIIEHQKVVKGNQKRLESLRELAGKENLEYPSVTLPPQPHTKEGVDAYNEVIARVRMWVNLNLWQKLKLSRDDAKPLLRLKGFPSFPLVERQANEVDWWDMVCNVKKLINEKKEDGKVFWQNLAGYKRQEALRPYLSSEEDRKKGKKFARYQLGDLLLHLEKKHGEDWGKVYDEAWERIDKKVEGLSKHIKLEEERRSEDAQSKAALTDWLRAKASFVIEGSKEADKDEFCRCELKLQKWYGDLRGKPFAIEAENSILDISGFSKQYNCAFIWQKDGVKKLNLYLIINYFKGGKLRFKKIKPEAFEANRFYTVINKKSGEIVPMEVNFNFDDPNLIILPLAFGKRVGREFIWNDLLSLETGSLKLANGRVIEKTLYNRRTRQDEPALFVALTFERREVLDSSNIKPMNLIGVDRGENIPAVIALTDPEGCPLSRFKDSLGNPTHILRIGESYKEKQRTIQAKKEVEQRRAGGYSRKYASKAKNLADDMVRNTARDLLYYAVTQDAMLIFENLSRGFGRQGKRTFMAERQYTRMEDWLTAKLAYEGLPSKTYLSKTLAQYTSKTCSNCGFTITSADYDRVLEKLKKTATGWMTTINGKELKVEGQITYYNRYKRQNVVKDLSVELDRLSEESVNNDISSWTKGRSGEALSLLKKRFSHRPVQEKFVCLNCGFETHADEQAALNIARSWLFLRSQEYKKYQTNKTTGNTDKRAFVETWQSFYRKKLKEVWKPAV

SEQ ID NO: 45167 - protein, 977 aa, synthetic construct
  REGION 1..977: note = engineered CasX variant
QEIKRINKIRRRLVKDSNTKKAGKTGPMKTLLVRVMTPDLRERLENLRKKPENIPQPISNTSRANLNKLLTDYTEMKKAILHVYWEEFQKDPVGLMSRVAQPASKKIDQNKLKPEMDEKGNLTTAGFACSQCGQPLFVYKLEQVSEKGKAYTNYFGRCNVAEHEKLILLAQLKPEKDSDEAVTYSLGKFGQRALDFYSIHVTKESTHPVKPLAQIAGNRYASPVGKALSDACMGTIASFLSKYQDIIIEHQKVVKGNQKRLESLRELAGKENLEYPSVTLPPQPHTKEGVDAYNEVIARVRMWVNLNLWQKLKLSRDDAKPLLRLKGFPSFPLVERQANEVDWWDMVCNVKKLINEKKEDGKVFWQNLAGYKRQEALRPYLSSEEDRKKGKKFARYQLGDLLLHLEKKHGEDWGKVYDEAWERIDKKVEGLSKHIKLEEERRSEDAQSKAALTDWLRAKASFVIEGSKEADKDEFCRCELKLQKWYGDLRGKPFAIEAENSILDISGFSKQYNCAFIWQKDGVKKLNLYLIINYFKGGKLRFKKIKPEAFEANRFYTVINKKSGEIVPMEVNFNFDDPNLIILPLAFGKRVGREFIWNDLLSLETGSLKLANGRVIEKTLYNRRTRQDEPALFVALTFERREVLDSSNIKPMNLIGVDRGENIPAVIALTDPEGCPLSRFKDSLGNPTHILRIGESYKEKQRTIQAKKEVEQRRAGGYSRKYASKAKNLADDMVRNTARDLLYYAVTQDAMLIFENLSRGFGRQGKRTFMAERQYTRMEDWLTAKLAYEGLPSKTYLSKTLAQYTSKTCSNCGFTITSADYDRVLEKLKKTATGWMTTINGKELKVEGQITYYNRYKRQNVVKDLSVELDRLSEESVNNDISSWTKGRSGEALSLLKKRFSHRPVQEKFVCLNCGFETHADEQAALNIARSWLFLRSQEYKKYQTNKTTGNTDKRAFVETWQSFYRKKLKEVWKPAV

SEQ ID NO: 45168 - protein, 979 aa, synthetic construct
  REGION 1..979: note = engineered CasX variant
QEIKRINKIRRRLVKDSNTKKAGKTGPMKTLLVRVMTPDLRERLENLRKKPENIPQPISNTSRANLNKLLTDYTEMKKAILHVYWEEFQKDPVGLMSRVAQPASKKIDQNKLKPEMDEKGNLTTAGFACSQCGQPLFVYKLEQVSEKGKAYTNYFGRCNVAEHEKLILLAQLKPEKDSDEAVTYSLGKFGQRALDFYSIHVTKESTHPVKPLAQIAGNRYASYPVGKALSDACMGTIASFLSKYQDIIIEHQKVVKGNQKRLESLRELAGKENLEYPSVTLPPQPHTKEGVDAYNEVIARVRMWVNLNLWQKLKLSRDDAKPLLRLKGFPSFPLVERQANEVDWWDMVCNVKKLINEKKEDGKVFWQNLAGYKRQEALRPYLSSEEDRKKGKKFARYQLGDLLLHLEKKHGEDWGKVYDEAWERIDKKVEGLSKHIKLEEERRSEDAQSKAALTDWLRAKASFVIEGLKEADDKDEFCRCELKLQKWYGDLRGKPFAIEAENSILDISGFSKQYNCAFIWQKDGVKKLNLYLIINYFKGGKLRFKKIKPEAFEANRFYTVINKKSGEIVPMEVNFNFDDPNLIILPLAFGKRVGREFIWNDLLSLETGSLKLANGRVIEKTLYNRRTRQDEPALFVALTFERREVLDSSNIKPMNLIGVDRGENIPAVIALTDPEGCPLSRFKDSLGNPTHILRIGESYKEKQRTIQAKKEVEQRRAGGYSRKYASKAKNLADDMVRNTARDLLYYAVTQDAMLIFENLSRGFGRQGKRTFMAERQYTRMEDWLTAKLAYEGLPSKTYLSKTLAQYTSKTCSNCGFTITSADYDRVLEKLKKTATGWMTTINGKELKVEGQITYYNRYKRQNVVKDLSVELDRLSEESVNNDISSWTKGRSGEALSLLKKRFSHRPVQEKFVCLNCGFETHADEQAALNIARSWLFLRSQEYKKYQTNKTTGNTDKRAFVETWQSFYRKKLKEVWKPAV

SEQ ID NO: 45169 - protein, 979 aa, synthetic construct
  REGION 1..979: note = engineered CasX variant
QEIKRINKIRRRLVKDSNTKKAGKTGPMKTLLVRVMTPDLRERLENLRKKPENIPQPISNTSRANLNKLLTDYTEMKKAILHVYWEEFQKDPVGLMSRVAQPASKKIDQNKLKPEMDEKGNLTTAGFACSQCGQPLFVYKLEQVSEKGKAYTNYFGRCNVAEHEKLILLAQLKPEKDSDEAVTYSLGKFGQRALDFYSIHVTKESTHPVKPLAQIAGNRYASHPVGKALSDACMGTIASFLSKYQDIIIEHQKVVKGNQKRLESLRELAGKENLEYPSVTLPPQPHTKEGVDAYNEVIARVRMWVNLNLWQKLKLSRDDAKPLLRLKGFPSFPLVERQANEVDWWDMVCNVKKLINEKKEDGKVFWQNLAGYKRQEALRPYLSSEEDRKKGKKFARYQLGDLLLHLEKKHGEDWGKVYDEAWERIDKKVEGLSKHIKLEEERRSEDAQSKAALTDWLRAKASFVIEGLKEADDKDEFCRCELKLQKWYGDLRGKPFAIEAENSILDISGFSKQYNCAFIWQKDGVKKLNLYLIINYFKGGKLRFKKIKPEAFEANRFYTVINKKSGEIVPMEVNFNFDDPNLIILPLAFGKRVGREFIWNDLLSLETGSLKLANGRVIEKTLYNRRTRQDEPALFVALTFERREVLDSSNIKPMNLIGVDRGENIPAVIALTDPEGCPLSRFKDSLGNPTHILRIGESYKEKQRTIQAKKEVEQRRAGGYSRKYASKAKNLADDMVRNTARDLLYYAVTQDAMLIFENLSRGFGRQGKRTFMAERQYTRMEDWLTAKLAYEGLPSKTYLSKTLAQYTSKTCSNCGFTITSADYDRVLEKLKKTATGWMTTINGKELKVEGQITYYNRYKRQNVVKDLSVELDRLSEESVNNDISSWTKGRSGEALSLLKKRFSHRPVQEKFVCLNCGFETHADEQAALNIARSWLFLRSQEYKKYQTNKTTGNTDKRAFVETWQSFYRKKLKEVWKPAV

SEQ ID NO: 45170 - protein, 979 aa, synthetic construct
  REGION 1..979: note = engineered CasX variant
QEIKRINKIRRRLVKDSNTKKAGKTGPMKTLLVRVMTPDLRERLENLRKKPENIPQPISNTSRANLNKLLTDYTEMKKAILHVYWEEFQKDPVGLMSRVAQPASKKIDQNKLKPEMDEKGNLTTAGFACSQCGQPLFVYKLEQVSEKGKAYTNYFGRCNVAEHEKLILLAQLKPEKDSDEAVTYSLGKFGQRALDFYSIHVTKESTHPVKPLAQIAGNRYASSPVGKALSDACMGTIASFLSKYQDIIIEHQKVVKGNQKRLESLRELAGKENLEYPSVTLPPQPHTKEGVDAYNEVIARVRMWVNLNLWQKLKLSRDDAKPLLRLKGFPSFPLVERQANEVDWWDMVCNVKKLINEKKEDGKVFWQNLAGYKRQEALRPYLSSEEDRKKGKKFARYQLGDLLLHLEKKHGEDWGKVYDEAWERIDKKVEGLSKHIKLEEERRSEDAQSKAALTDWLRAKASFVIEGLKEADDKDEFCRCELKLQKWYGDLRGKPFAIEAENSILDISGFSKQYNCAFIWQKDGVKKLNLYLIINYFKGGKLRFKKIKPEAFEANRFYTVINKKSGEIVPMEVNFNFDDPNLIILPLAFGKRVGREFIWNDLLSLETGSLKLANGRVIEKTLYNRRTRQDEPALFVALTFERREVLDSSNIKPMNLIGVDRGENIPAVIALTDPEGCPLSRFKDSLGNPTHILRIGESYKEKQRTIQAKKEVEQRRAGGYSRKYASKAKNLADDMVRNTARDLLYYAVTQDAMLIFENLSRGFGRQGKRTFMAERQYTRMEDWLTAKLAYEGLPSKTYLSKTLAQYTSKTCSNCGFTITSADYDRVLEKLKKTATGWMTTINGKELKVEGQITYYNRYKRQNVVKDLSVELDRLSEESVNNDISSWTKGRSGEALSLLKKRFSHRPVQEKFVCLNCGFETHADEQAALNIARSWLFLRSQEYKKYQTNKTTGNTDKRAFVETWQSFYRKKLKEVWKPAV

SEQ ID NO: 45171 - protein, 979 aa, synthetic construct
  REGION 1..979: note = engineered CasX variant
QEIKRINKIRRRLVKDSNTKKAGKTGPMKTLLVRVMTPDLRERLENLRKKPENIPQPISNTSRANLNKLLTDYTEMKKAILHVYWEEFQKDPVGLMSRVAQPASKKIDQNKLKPEMDEKGNLTTAGFACSQCGQPLFVYKLEQVSEKGKAYTNYFGRCNVAEHEKLILLAQLKPEKDSDEAVTYSLGKFGQRALDFYSIHVTKESTHPVKPLAQIAGNRYASTPVGKALSDACMGTIASFLSKYQDIIIEHQKVVKGNQKRLESLRELAGKENLEYPSVTLPPQPHTKEGVDAYNEVIARVRMWVNLNLWQKLKLSRDDAKPLLRLKGFPSFPLVERQANEVDWWDMVCNVKKLINEKKEDGKVFWQNLAGYKRQEALRPYLSSEEDRKKGKKFARYQLGDLLLHLEKKHGEDWGKVYDEAWERIDKKVEGLSKHIKLEEERRSEDAQSKAALTDWLRAKASFVIEGLKEADDKDEFCRCELKLQKWYGDLRGKPFAIEAENSILDISGFSKQYNCAFIWQKDGVKKLNLYLIINYFKGGKLRFKKIKPEAFEANRFYTVINKKSGEIVPMEVNFNFDDPNLIILPLAFGKRVGREFIWNDLLSLETGSLKLANGRVIEKTLYNRRTRQDEPALFVALTFERREVLDSSNIKPMNLIGVDRGENIPAVIALTDPEGCPLSRFKDSLGNPTHILRIGESYKEKQRTIQAKKEVEQRRAGGYSRKYASKAKNLADDMVRNTARDLLYYAVTQDAMLIFENLSRGFGRQGKRTFMAERQYTRMEDWLTAKLAYEGLPSKTYLSKTLAQYTSKTCSNCGFTITSADYDRVLEKLKKTATGWMTTINGKELKVEGQITYYNRYKRQNVVKDLSVELDRLSEESVNNDISSWTKGRSGEALSLLKKRFSHRPVQEKFVCLNCGFETHADEQAALNIARSWLFLRSQEYKKYQTNKTTGNTDKRAFVETWQSFYRKKLKEVWKPAV

SEQ ID NO: 45172 - protein, 979 aa, synthetic construct
  REGION 1..979: note = engineered CasX variant
QEIKRINKIRRRLVKDSNTKKAGKTGPMKTLLVRVMTPDLRERLENLRKKPENIPQPISNTSRANLNKLLTDYTEMKKAILHVYWEEFQKDPVGLMSRVAQPASKKIDQNKLKPEMDEKGNLTTAGFACSQCGQPLFVYKLEQVSEKGKAYTNYFGRCNVAEHEKLILLAQLKPEKDSDEAVTYSLGKFGQRALDFYSIHVTKESTHPVKPLAQIAGNRYASAPVGKALSDACMGTIASFLSKYQDIIIEHQKVVKGNQKRLESLRELAGKENLEYPSVTLPPQPHTKEGVDAYNEVIARVRMWVNLNLWQKLKLSRDDAKPLLRLKGFPSFPLVERQANEVDWWDMVCNVKKLINEKKEDGKVFWQNLAGYKRQEALRPYLSSEEDRKKGKKFARYQLGDLLLHLEKKHGEDWGKVYDEAWERIDKKVEGLSKHIKLEEERRSEDAQSKAALTDWLRAKASFVIEGLKEADDKDEFCRCELKLQKWYGDLRGKPFAIEAENSILDISGFSKQYNCAFIWQKDGVKKLNLYLIINYFKGGKLRFKKIKPEAFEANRFYTVINKKSGEIVPMEVNFNFDDPNLIILPLAFGKRVGREFIWNDLLSLETGSLKLANGRVIEKTLYNRRTRQDEPALFVALTFERREVLDSSNIKPMNLIGVDRGENIPAVIALTDPEGCPLSRFKDSLGNPTHILRIGESYKEKQRTIQAKKEVEQRRAGGYSRKYASKAKNLADDMVRNTARDLLYYAVTQDAMLIFENLSRGFGRQGKRTFMAERQYTRMEDWLTAKLAYEGLPSKTYLSKTLAQYTSKTCSNCGFTITSADYDRVLEKLKKTATGWMTTINGKELKVEGQITYYNRYKRQNVVKDLSVELDRLSEESVNNDISSWTKGRSGEALSLLKKRFSHRPVQEKFVCLNCGFETHADEQAALNIARSWLFLRSQEYKKYQTNKTTGNTDKRAFVETWQSFYRKKLKEVWKPAV

SEQ ID NO: 45173 - protein, 979 aa, synthetic construct
  REGION 1..979: note = engineered CasX variant
QEIKRINKIRRRLVKDSNTKKAGKTGPMKTLLVRVMTPDLRERLENLRKKPENIPQPISNTSRANLNKLLTDYTEMKKAILHVYWEEFQKDPVGLMSRVAQPASKKIDQNKLKPEMDEKGNLTTAGFACSQCGQPLFVYKLEQVSEKGKAYTNYFGRCNVAEHEKLILLAQLKPEKDSDEAVTYSLGKFGQRALDFYSIHVTKESTHPVKPLAQIAGNRYASVPVGKALSDACMGTIASFLSKYQDIIIEHQKVVKGNQKRLESLRELAGKENLEYPSVTLPPQPHTKEGVDAYNEVIARVRMWVNLNLWQKLKLSRDDAKPLLRLKGFPSFPLVERQANEVDWWDMVCNVKKLINEKKEDGKVFWQNLAGYKRQEALRPYLSSEEDRKKGKKFARYQLGDLLLHLEKKHGEDWGKVYDEAWERIDKKVEGLSKHIKLEEERRSEDAQSKAALTDWLRAKASFVIEGLKEADDKDEFCRCELKLQKWYGDLRGKPFAIEAENSILDISGFSKQYNCAFIWQKDGVKKLNLYLIINYFKGGKLRFKKIKPEAFEANRFYTVINKKSGEIVPMEVNFNFDDPNLIILPLAFGKRVGREFIWNDLLSLETGSLKLANGRVIEKTLYNRRTRQDEPALFVALTFERREVLDSSNIKPMNLIGVDRGENIPAVIALTDPEGCPLSRFKDSLGNPTHILRIGESYKEKQRTIQAKKEVEQRRAGGYSRKYASKAKNLADDMVRNTARDLLYYAVTQDAMLIFENLSRGFGRQGKRTFMAERQYTRMEDWLTAKLAYEGLPSKTYLSKTLAQYTSKTCSNCGFTITSADYDRVLEKLKKTATGWMTTINGKELKVEGQITYYNRYKRQNVVKDLSVELDRLSEESVNNDISSWTKGRSGEALSLLKKRFSHRPVQEKFVCLNCGFETHADEQAALNIARSWLFLRSQEYKKYQTNKTTGNTDKRAFVETWQSFYRKKLKEVWKPAV

SEQ ID NO: 45174 - protein, 979 aa, synthetic construct
  REGION 1..979: note = engineered CasX variant
QEIKRINKIRRRLVKDSNTKKAGKTGPMKTLLVRVMTPDLRERLENLRKKPENIPQPISNTSRANLNKLLTDYTEMKKAILHVYWEEFQKDPVGLMSRVAQPASKKIDQNKLKPEMDEKGNLTTAGFACSQCGQPLFVYKLEQVSEKGKAYTNYFGRCNVAEHEKLIKLAQLKPEKDSDEAVTYSLGKFGQRALDFYSIHVTKESTHPVKPLAQIAGNRYASGPVGKALSDACMGTIASFLSKYQDIIIEHQKVVKGNQKRLESLRELAGKENLEYPSVTLPPQPHTKEGVDAYNEVIARVRMWVNLNLWQKLKLSRDDAKPLLRLKGFPSFPLVERQANEVDWWDMVCNVKKLINEKKEDGKVFWQNLAGYKRQEALRPYLSSEEDRKKGKKFARYQLGDLLLHLEKKHGEDWGKVYDEAWERIDKKVEGLSKHIKLEEERRSEDAQSKAALTDWLRAKASFVIEGLKEADDKDEFCRCELKLQKWYGDLRGKPFAIEAENSILDISGFSKQYNCAFIWQKDGVKKLNLYLIINYFKGGKLRFKKIKPEAFEANRFYTVINKKSGEIVPMEVNFNFDDPNLIILPLAFGKRVGREFIWNDLLSLETGSLKLANGRVIEKTLYNRRTRQDEPALFVALTFERREVLDSSNIKPMNLIGVDRGENIPAVIALTDPEGCPLSRFKDSLGNPTHILRIGESYKEKQRTIQAKKEVEQRRAGGYSRKYASKAKNLADDMVRNTARDLLYYAVTQDAMLIFENLSRGFGRQGKRTFMAERQYTRMEDWLTAKLAYEGLPSKTYLSKTLAQYTSKTCSNCGFTITSADYDRVLEKLKKTATGWMTTINGKELKVEGQITYYNRYKRQNVVKDLSVELDRLSEESVNNDISSWTKGRSGEALSLLKKRFSHRPVQEKFVCLNCGFETHADEQAALNIARSWLFLRSQEYKKYQTNKTTGNTDKRAFVETWQSFYRKKLKEVWKPAV

SEQ ID NO: 45175 - protein, 978 aa, synthetic construct
  REGION 1..978: note = engineered CasX variant
QEIKRINKIRRRLVKDSNTKKAGKTGPMKTLLVRVMTPDLRERLENLRKKPENIPQPISNTSRANLNKLLTDYTEMKKAILHVYWEEFQKDPVGLMSRVAQPASKKIDQNKLKPEMDEKGNLTTAGFACSQCGQPLFVYKLEQVSEKGKAYTNYFGRCNVAEHEKLILLAQLKPEKDSDEAVTYSLGKFGQRALDFYSIHVTKESTHPVKPLAQIAGNRYASPVGKALSDACMGTIASFLSKYQDIIIEHQKVVKGNQKRLESLRELAGKENLEYPSVTLPPQPHTKEGVDAYNEVIARVRMWVNLNLWQKLKLSRDDAKPLLRLKGFPSFPLVERQANEVDWWDMVCNVKKLINEKKEDGKVFWQNLAGYKRQEALRPYLSSEEDRKKGKKFARYQLGDLLLHLEKKHGEDWGKVYDEAWERIDKKVEGLSKHIKLEEERRSEDAQSKAALTDWLRAKASFVIEGLKEADDKDEFCRCELKLQKWYGDLRGKPFAIEAENSILDISGFSKQYNCAFIWQKDGVKKLNLYLIINYFKGGKLRFKKIKPEAFEANRFYTVINKKSGEIVPMEVNFNFDDPNLIILPLAFGKRVGREFIWNDLLSLETGSLKLANGRVIEKTLYNRRTRQDEPALFVALTFERREVLDSSNIKPMNLIGVDRGENIPAVIALTDPEGCPLSRFKDSLGNPTHILRIGESYKEKQRTIQAKKEVEQRRAGGYSRKYASKAKNLADDMVRNTARDLLYYAVTQDAMLIFENLSRGFGRQGKRTFMAERQYTRMEDWLTAKLAYEGLPSKTYLSKTLAQYTSKTCSNCGFTITSADYDRVLEKLKKTATGWMTTINGKELKVEGQITYYNRYKRQNVVKDLSVELDRLSEESVNNDISSWTKGRSGEALSLLKKRFSHRPVQEKFVCLNCGFETHADEQAALNIARSWLFLRSQEYKKYQTNKTTGNTDKRAFVETWQSFYRKKLKEVWKPAV

SEQ ID NO: 45176 - protein, 979 aa, synthetic construct
  REGION 1..979: note = engineered CasX variant
QEIKRINKIRRRLVKDSNTKKAGKTGPMKTLLVRVMTPDLRERLENLRKKPENIPQPISNTSRANLNKLLTDYTEMKKAILHVYWEEFQKDPVGLMSRVAQPASKKIDQNKLKPEMDEKGNLTTAGFACSQCGQPLFVYKLEQVSEKGKAYTNYFGRCNVAEHEKLILLAQLKPEKDSDEAVTYSLGKFGQRALDFYSIHVTKESTHPVKPLAQIAGNRYASYPVGKALSDACMGTIASFLSKYQDIIIEHQKVVKGNQKRLESLRELAGKENLEYPSVTLPPQPHTKEGVDAYNEVIARVRMWVNLNLWQKLKLSRDDAKPLLRLKGFPSFPLVERQANEVDWWDMVCNVKKLINEKKEDGKVFWQNLAGYKRQEALRPYLSSEEDRKKGKKFARYQLGDLLLHLEKKHGEDWGKVYDEAWERIDKKVEGLSKHIKLEEERRSEDAQSKAALTDWLRAKASFVIEGLKEADKDEFCRCELKLQKWYGDLRGKPFAIEAENSILDISGFSKQYNCAFIWQKDGVKKLNLYLIINYFKGGKLRFKKIKPEAFEANRFYTVINKKSGEIVPMEVNFNFDDPNLIILPLAFGKRVGREFIWNDLLSLETGSLKLANGRVIEKTLYNRRTRQDEPALFVALTFERREVLDSSNIKPMNLIGVDRGENIPAVIALTDPEGCPLSRFKDSLGNPTHILRIGESYKEKQRTIQAKKEVEQRRAGGYSRKYASKAKNLADDMVRNTARDLLYYAVTQDAMLIFENLSRGFGRQGKRTFMAERQYTRMEDWLTAKLAYEGLPSKTYLSKTLAQYTSKTCSNCGFTITSADYDRVLEKLKKTATGWMTTINGKELKVEGQITYYNRYKRQNVVKDLSVELDRLSEESVNNDISSWTKGRSGNEALSLLKKRFSHRPVQEKFVCLNCGFETHADEQAALNIARSWLFLRSQEYKKYQTNKTTGNTDKRAFVETWQSFYRKKLKEVWKPAV

SEQ ID NO: 45177 - protein, 979 aa, synthetic construct
  REGION 1..979: note = engineered CasX variant
QEIKRINKIRRRLVKDSNTKKAGKTGPMKTLLVRVMTPDLRERLENLRKKPENIPQPISNTSRANLNKLLTDYTEMKKAILHVYWEEFQKDPVGLMSRVAQPASKKIDQNKLKPEMDEKGNLTTAGFACSQCGQPLFVYKLEQVSEKGKAYTNYFGRCNVAEHEKLILLAQLKPEKDSDEAVTYSLGKFGQRALDFYSIHVTKESTHPVKPLAQIAGNRYASHPVGKALSDACMGTIASFLSKYQDIIIEHQKVVKGNQKRLESLRELAGKENLEYPSVTLPPQPHTKEGVDAYNEVIARVRMWVNLNLWQKLKLSRDDAKPLLRLKGFPSFPLVERQANEVDWWDMVCNVKKLINEKKEDGKVFWQNLAGYKRQEALRPYLSSEEDRKKGKKFARYQLGDLLLHLEKKHGEDWGKVYDEAWERIDKKVEGLSKHIKLEEERRSEDAQSKAALTDWLRAKASFVIEGLKEADKDEFCRCELKLQKWYGDLRGKPFAIEAENSILDISGFSKQYNCAFIWQKDGVKKLNLYLIINYFKGGKLRFKKIKPEAFEANRFYTVINKKSGEIVPMEVNFNFDDPNLIILPLAFGKRVGREFIWNDLLSLETGSLKLANGRVIEKTLYNRRTRQDEPALFVALTFERREVLDSSNIKPMNLIGVDRGENIPAVIALTDPEGCPLSRFKDSLGNPTHILRIGESYKEKQRTIQAKKEVEQRRAGGYSRKYASKAKNLADDMVRNTARDLLYYAVTQDAMLIFENLSRGFGRQGKRTFMAERQYTRMEDWLTAKLAYEGLPSKTYLSKTLAQYTSKTCSNCGFTITSADYDRVLEKLKKTATGWMTTINGKELKVEGQITYYNRYKRQNVVKDLSVELDRLSEESVNNDISSWTKGRSGNEALSLLKKRFSHRPVQEKFVCLNCGFETHADEQAALNIARSWLFLRSQEYKKYQTNKTTGNTDKRAFVETWQSFYRKKLKEVWKPAV

SEQ ID NO: 45178 - protein, 979 aa, synthetic construct
  REGION 1..979: note = engineered CasX variant
QEIKRINKIRRRLVKDSNTKKAGKTGPMKTLLVRVMTPDLRERLENLRKKPENIPQPISNTSRANLNKLLTDYTEMKKAILHVYWEEFQKDPVGLMSRVAQPASKKIDQNKLKPEMDEKGNLTTAGFACSQCGQPLFVYKLEQVSEKGKAYTNYFGRCNVAEHEKLILLAQLKPEKDSDEAVTYSLGKFGQRALDFYSIHVTKESTHPVKPLAQIAGNRYASSPVGKALSDACMGTIASFLSKYQDIIIEHQKVVKGNQKRLESLRELAGKENLEYPSVTLPPQPHTKEGVDAYNEVIARVRMWVNLNLWQKLKLSRDDAKPLLRLKGFPSFPLVERQANEVDWWDMVCNVKKLINEKKEDGKVFWQNLAGYKRQEALRPYLSSEEDRKKGKKFARYQLGDLLLHLEKKHGEDWGKVYDEAWERIDKKVEGLSKHIKLEEERRSEDAQSKAALTDWLRAKASFVIEGLKEADKDEFCRCELKLQKWYGDLRGKPFAIEAENSILDISGFSKQYNCAFIWQKDGVKKLNLYLIINYFKGGKLRFKKIKPEAFEANRFYTVINKKSGEIVPMEVNFNFDDPNLIILPLAFGKRVGREFIWNDLLSLETGSLKLANGRVIEKTLYNRRTRQDEPALFVALTFERREVLDSSNIKPMNLIGVDRGENIPAVIALTDPEGCPLSRFKDSLGNPTHILRIGESYKEKQRTIQAKKEVEQRRAGGYSRKYASKAKNLADDMVRNTARDLLYYAVTQDAMLIFENLSRGFGRQGKRTFMAERQYTRMEDWLTAKLAYEGLPSKTYLSKTLAQYTSKTCSNCGFTITSADYDRVLEKLKKTATGWMTTINGKELKVEGQITYYNRYKRQNVVKDLSVELDRLSEESVNNDISSWTKGRSGNEALSLLKKRFSHRPVQEKFVCLNCGFETHADEQAALNIARSWLFLRSQEYKKYQTNKTTGNTDKRAFVETWQSFYRKKLKEVWKPAV

SEQ ID NO: 45179 - protein, 979 aa, synthetic construct
  REGION 1..979: note = engineered CasX variant
QEIKRINKIRRRLVKDSNTKKAGKTGPMKTLLVRVMTPDLRERLENLRKKPENIPQPISNTSRANLNKLLTDYTEMKKAILHVYWEEFQKDPVGLMSRVAQPASKKIDQNKLKPEMDEKGNLTTAGFACSQCGQPLFVYKLEQVSEKGKAYTNYFGRCNVAEHEKLILLAQLKPEKDSDEAVTYSLGKFGQRALDFYSIHVTKESTHPVKPLAQIAGNRYASTPVGKALSDACMGTIASFLSKYQDIIIEHQKVVKGNQKRLESLRELAGKENLEYPSVTLPPQPHTKEGVDAYNEVIARVRMWVNLNLWQKLKLSRDDAKPLLRLKGFPSFPLVERQANEVDWWDMVCNVKKLINEKKEDGKVFWQNLAGYKRQEALRPYLSSEEDRKKGKKFARYQLGDLLLHLEKKHGEDWGKVYDEAWERIDKKVEGLSKHIKLEEERRSEDAQSKAALTDWLRAKASFVIEGLKEADKDEFCRCELKLQKWYGDLRGKPFAIEAENSILDISGFSKQYNCAFIWQKDGVKKLNLYLIINYFKGGKLRFKKIKPEAFEANRFYTVINKKSGEIVPMEVNFNFDDPNLIILPLAFGKRVGREFIWNDLLSLETGSLKLANGRVIEKTLYNRRTRQDEPALFVALTFERREVLDSSNIKPMNLIGVDRGENIPAVIALTDPEGCPLSRFKDSLGNPTHILRIGESYKEKQRTIQAKKEVEQRRAGGYSRKYASKAKNLADDMVRNTARDLLYYAVTQDAMLIFENLSRGFGRQGKRTFMAERQYTRMEDWLTAKLAYEGLPSKTYLSKTLAQYTSKTCSNCGFTITSADYDRVLEKLKKTATGWMTTINGKELKVEGQITYYNRYKRQNVVKDLSVELDRLSEESVNNDISSWTKGRSGNEALSLLKKRFSHRPVQEKFVCLNCGFETHADEQAALNIARSWLFLRSQEYKKYQTNKTTGNTDKRAFVETWQSFYRKKLKEVWKPAV

SEQ ID NO: 45180 - protein, 979 aa, synthetic construct
  REGION 1..979: note = engineered CasX variant
QEIKRINKIRRRLVKDSNTKKAGKTGPMKTLLVRVMTPDLRERLENLRKKPENIPQPISNTSRANLNKLLTDYTEMKKAILHVYWEEFQKDPVGLMSRVAQPASKKIDQNKLKPEMDEKGNLTTAGFACSQCGQPLFVYKLEQVSEKGKAYTNYFGRCNVAEHEKLILLAQLKPEKDSDEAVTYSLGKFGQRALDFYSIHVTKESTHPVKPLAQIAGNRYASAPVGKALSDACMGTIASFLSKYQDIIIEHQKVVKGNQKRLESLRELAGKENLEYPSVTLPPQPHTKEGVDAYNEVIARVRMWVNLNLWQKLKLSRDDAKPLLRLKGFPSFPLVERQANEVDWWDMVCNVKKLINEKKEDGKVFWQNLAGYKRQEALRPYLSSEEDRKKGKKFARYQLGDLLLHLEKKHGEDWGKVYDEAWERIDKKVEGLSKHIKLEEERRSEDAQSKAALTDWLRAKASFVIEGLKEADKDEFCRCELKLQKWYGDLRGKPFAIEAENSILDISGFSKQYNCAFIWQKDGVKKLNLYLIINYFKGGKLRFKKIKPEAFEANRFYTVINKKSGEIVPMEVNFNFDDPNLIILPLAFGKRVGREFIWNDLLSLETGSLKLANGRVIEKTLYNRRTRQDEPALFVALTFERREVLDSSNIKPMNLIGVDRGENIPAVIALTDPEGCPLSRFKDSLGNPTHILRIGESYKEKQRTIQAKKEVEQRRAGGYSRKYASKAKNLADDMVRNTARDLLYYAVTQDAMLIFENLSRGFGRQGKRTFMAERQYTRMEDWLTAKLAYEGLPSKTYLSKTLAQYTSKTCSNCGFTITSADYDRVLEKLKKTATGWMTTINGKELKVEGQITYYNRYKRQNVVKDLSVELDRLSEESVNNDISSWTKGRSGNEALSLLKKRFSHRPVQEKFVCLNCGFETHADEQAALNIARSWLFLRSQEYKKYQTNKTTGNTDKRAFVETWQSFYRKKLKEVWKPAV

SEQ ID NO: 45181 - protein, 979 aa, synthetic construct
  REGION 1..979: note = engineered CasX variant
QEIKRINKIRRRLVKDSNTKKAGKTGPMKTLLVRVMTPDLRERLENLRKKPENIPQPISNTSRANLNKLLTDYTEMKKAILHVYWEEFQKDPVGLMSRVAQPASKKIDQNKLKPEMDEKGNLTTAGFACSQCGQPLFVYKLEQVSEKGKAYTNYFGRCNVAEHEKLILLAQLKPEKDSDEAVTYSLGKFGQRALDFYSIHVTKESTHPVKPLAQIAGNRYASVPVGKALSDACMGTIASFLSKYQDIIIEHQKVVKGNQKRLESLRELAGKENLEYPSVTLPPQPHTKEGVDAYNEVIARVRMWVNLNLWQKLKLSRDDAKPLLRLKGFPSFPLVERQANEVDWWDMVCNVKKLINEKKEDGKVFWQNLAGYKRQEALRPYLSSEEDRKKGKKFARYQLGDLLLHLEKKHGEDWGKVYDEAWERIDKKVEGLSKHIKLEEERRSEDAQSKAALTDWLRAKASFVIEGLKEADKDEFCRCELKLQKWYGDLRGKPFAIEAENSILDISGFSKQYNCAFIWQKDGVKKLNLYLIINYFKGGKLRFKKIKPEAFEANRFYTVINKKSGEIVPMEVNFNFDDPNLIILPLAFGKRVGREFIWNDLLSLETGSLKLANGRVIEKTLYNRRTRQDEPALFVALTFERREVLDSSNIKPMNLIGVDRGENIPAVIALTDPEGCPLSRFKDSLGNPTHILRIGESYKEKQRTIQAKKEVEQRRAGGYSRKYASKAKNLADDMVRNTARDLLYYAVTQDAMLIFENLSRGFGRQGKRTFMAERQYTRMEDWLTAKLAYEGLPSKTYLSKTLAQYTSKTCSNCGFTITSADYDRVLEKLKKTATGWMTTINGKELKVEGQITYYNRYKRQNVVKDLSVELDRLSEESVNNDISSWTKGRSGNEALSLLKKRFSHRPVQEKFVCLNCGFETHADEQAALNIARSWLFLRSQEYKKYQTNKTTGNTDKRAFVETWQSFYRKKLKEVWKPAV

SEQ ID NO: 45182 - protein, 979 aa, synthetic construct
  REGION 1..979: note = engineered CasX variant
QEIKRINKIRRRLVKDSNTKKAGKTGPMKTLLVRVMTPDLRERLENLRKKPENIPQPISNTSRANLNKLLTDYTEMKKAILHVYWEEFQKDPVGLMSRVAQPASKKIDQNKLKPEMDEKGNLTTAGFACSQCGQPLFVYKLEQVSEKGKAYTNYFGRCNVAEHEKLIKLAQLKPEKDSDEAVTYSLGKFGQRALDFYSIHVTKESTHPVKPLAQIAGNRYASGPVGKALSDACMGTIASFLSKYQDIIIEHQKVVKGNQKRLESLRELAGKENLEYPSVTLPPQPHTKEGVDAYNEVIARVRMWVNLNLWQKLKLSRDDAKPLLRLKGFPSFPLVERQANEVDWWDMVCNVKKLINEKKEDGKVFWQNLAGYKRQEALRPYLSSEEDRKKGKKFARYQLGDLLLHLEKKHGEDWGKVYDEAWERIDKKVEGLSKHIKLEEERRSEDAQSKAALTDWLRAKASFVIEGLKEADKDEFCRCELKLQKWYGDLRGKPFAIEAENSILDISGFSKQYNCAFIWQKDGVKKLNLYLIINYFKGGKLRFKKIKPEAFEANRFYTVINKKSGEIVPMEVNFNFDDPNLIILPLAFGKRVGREFIWNDLLSLETGSLKLANGRVIEKTLYNRRTRQDEPALFVALTFERREVLDSSNIKPMNLIGVDRGENIPAVIALTDPEGCPLSRFKDSLGNPTHILRIGESYKEKQRTIQAKKEVEQRRAGGYSRKYASKAKNLADDMVRNTARDLLYYAVTQDAMLIFENLSRGFGRQGKRTFMAERQYTRMEDWLTAKLAYEGLPSKTYLSKTLAQYTSKTCSNCGFTITSADYDRVLEKLKKTATGWMTTINGKELKVEGQITYYNRYKRQNVVKDLSVELDRLSEESVNNDISSWTKGRSGNEALSLLKKRFSHRPVQEKFVCLNCGFETHADEQAALNIARSWLFLRSQEYKKYQTNKTTGNTDKRAFVETWQSFYRKKLKEVWKPAV

SEQ ID NO: 45183 - protein, 978 aa, synthetic construct
  REGION 1..978: note = engineered CasX variant
QEIKRINKIRRRLVKDSNTKKAGKTGPMKTLLVRVMTPDLRERLENLRKKPENIPQPISNTSRANLNKLLTDYTEMKKAILHVYWEEFQKDPVGLMSRVAQPASKKIDQNKLKPEMDEKGNLTTAGFACSQCGQPLFVYKLEQVSEKGKAYTNYFGRCNVAEHEKLILLAQLKPEKDSDEAVTYSLGKFGQRALDFYSIHVTKESTHPVKPLAQIAGNRYASPVGKALSDACMGTIASFLSKYQDIIIEHQKVVKGNQKRLESLRELAGKENLEYPSVTLPPQPHTKEGVDAYNEVIARVRMWVNLNLWQKLKLSRDDAKPLLRLKGFPSFPLVERQANEVDWWDMVCNVKKLINEKKEDGKVFWQNLAGYKRQEALRPYLSSEEDRKKGKKFARYQLGDLLLHLEKKHGEDWGKVYDEAWERIDKKVEGLSKHIKLEEERRSEDAQSKAALTDWLRAKASFVIEGLKEADKDEFCRCELKLQKWYGDLRGKPFAIEAENSILDISGFSKQYNCAFIWQKDGVKKLNLYLIINYFKGGKLRFKKIKPEAFEANRFYTVINKKSGEIVPMEVNFNFDDPNLIILPLAFGKRVGREFIWNDLLSLETGSLKLANGRVIEKTLYNRRTRQDEPALFVALTFERREVLDSSNIKPMNLIGVDRGENIPAVIALTDPEGCPLSRFKDSLGNPTHILRIGESYKEKQRTIQAKKEVEQRRAGGYSRKYASKAKNLADDMVRNTARDLLYYAVTQDAMLIFENLSRGFGRQGKRTFMAERQYTRMEDWLTAKLAYEGLPSKTYLSKTLAQYTSKTCSNCGFTITSADYDRVLEKLKKTATGWMTTINGKELKVEGQITYYNRYKRQNVVKDLSVELDRLSEESVNNDISSWTKGRSGNEALSLLKKRFSHRPVQEKFVCLNCGFETHADEQAALNIARSWLFLRSQEYKKYQTNKTTGNTDKRAFVETWQSFYRKKLKEVWKPAV

SEQ ID NO: 45184 - protein, 978 aa, synthetic construct
  REGION 1..978: note = engineered CasX variant
QEIKRINKIRRRLVKDSNTKKAGKTGPMKTLLVRVMTPDLRERLENLRKKPENIPQPISNTSRANLNKLLTDYTEMKKAILHVYWEEFQKDPVGLMSRVAQPASKKIDQNKLKPEMDEKGNLTTAGFACSQCGQPLFVYKLEQVSEKGKAYTNYFGRCNVAEHEKLILLAQLKPEKDSDEAVTYSLGKFGQRALDFYSIHVTKESTHPVKPLAQIAGNRYASYPVGKALSDACMGTIASFLSKYQDIIIEHQKVVKGNQKRLESLRELAGKENLEYPSVTLPPQPHTKEGVDAYNEVIARVRMWVNLNLWQKLKLSRDDAKPLLRLKGFPSFPLVERQANEVDWWDMVCNVKKLINEKKEDGKVFWQNLAGYKRQEALRPYLSSEEDRQKGKKFARYQLGDLLLHLEKKHGEDWGKVYDEAWERIDKKVEGLSKHIKLEEERRSEDAQSKAALTDWLRAKASFVIEGLKEADKDEFCRCELKLQKWYGDLRGKPFAIEAENSILDISGFSKQYNCAFIWQKDGVKKLNLYLIINYFKGGKLRFKKIKPEAFEANRFYTVINKKSGEIVPMEVNFNFDDPNLIILPLAFGKRVGREFIWNDLLSLETGSLKLANGRVIEKTLYNRRTRQDEPALFVALTFERREVLDSSNIKPMNLIGVDRGENIPAVIALTDPEGCPLSRFKDSLGNPTHILRIGESYKEKQRTIQAKKEVEQRRAGGYSRKYASKAKNLADDMVRNTARDLLYYAVTQDAMLIFENLSRGFGRQGKRTFMAERQYTRMEDWLTAKLAYEGLPSKTYLSKTLAQYTSKTCSNCGFTITSADYDRVLEKLKKTATGWMTTINGKELKVEGQITYYNRYKRQNVVKDLSVELDRLSEESVNNDISSWTKGRSGEALSLLKKRFSHRPVQEKFVCLNCGFETHADEQAALNIARSWLFLRSQEYKKYQTNKTTGNTDKRAFVETWQSFYRKKLKEVWKPAV

SEQ ID NO: 45185 - protein, 978 aa, synthetic construct
  REGION 1..978: note = engineered CasX variant
QEIKRINKIRRRLVKDSNTKKAGKTGPMKTLLVRVMTPDLRERLENLRKKPENIPQPISNTSRANLNKLLTDYTEMKKAILHVYWEEFQKDPVGLMSRVAQPASKKIDQNKLKPEMDEKGNLTTAGFACSQCGQPLFVYKLEQVSEKGKAYTNYFGRCNVAEHEKLILLAQLKPEKDSDEAVTYSLGKFGQRALDFYSIHVTKESTHPVKPLAQIAGNRYASHPVGKALSDACMGTIASFLSKYQDIIIEHQKVVKGNQKRLESLRELAGKENLEYPSVTLPPQPHTKEGVDAYNEVIARVRMWVNLNLWQKLKLSRDDAKPLLRLKGFPSFPLVERQANEVDWWDMVCNVKKLINEKKEDGKVFWQNLAGYKRQEALRPYLSSEEDRQKGKKFARYQLGDLLLHLEKKHGEDWGKVYDEAWERIDKKVEGLSKHIKLEEERRSEDAQSKAALTDWLRAKASFVIEGLKEADKDEFCRCELKLQKWYGDLRGKPFAIEAENSILDISGFSKQYNCAFIWQKDGVKKLNLYLIINYFKGGKLRFKKIKPEAFEANRFYTVINKKSGEIVPMEVNFNFDDPNLIILPLAFGKRVGREFIWNDLLSLETGSLKLANGRVIEKTLYNRRTRQDEPALFVALTFERREVLDSSNIKPMNLIGVDRGENIPAVIALTDPEGCPLSRFKDSLGNPTHILRIGESYKEKQRTIQAKKEVEQRRAGGYSRKYASKAKNLADDMVRNTARDLLYYAVTQDAMLIFENLSRGFGRQGKRTFMAERQYTRMEDWLTAKLAYEGLPSKTYLSKTLAQYTSKTCSNCGFTITSADYDRVLEKLKKTATGWMTTINGKELKVEGQITYYNRYKRQNVVKDLSVELDRLSEESVNNDISSWTKGRSGEALSLLKKRFSHRPVQEKFVCLNCGFETHADEQAALNIARSWLFLRSQEYKKYQTNKTTGNTDKRAFVETWQSFYRKKLKEVWKPAV

SEQ ID NO: 45186 - protein, 978 aa, synthetic construct
  REGION 1..978: note = engineered CasX variant
QEIKRINKIRRRLVKDSNTKKAGKTGPMKTLLVRVMTPDLRERLENLRKKPENIPQPISNTSRANLNKLLTDYTEMKKAILHVYWEEFQKDPVGLMSRVAQPASKKIDQNKLKPEMDEKGNLTTAGFACSQCGQPLFVYKLEQVSEKGKAYTNYFGRCNVAEHEKLILLAQLKPEKDSDEAVTYSLGKFGQRALDFYSIHVTKESTHPVKPLAQIAGNRYASSPVGKALSDACMGTIASFLSKYQDIIIEHQKVVKGNQKRLESLRELAGKENLEYPSVTLPPQPHTKEGVDAYNEVIARVRMWVNLNLWQKLKLSRDDAKPLLRLKGFPSFPLVERQANEVDWWDMVCNVKKLINEKKEDGKVFWQNLAGYKRQEALRPYLSSEEDRQKGKKFARYQLGDLLLHLEKKHGEDWGKVYDEAWERIDKKVEGLSKHIKLEEERRSEDAQSKAALTDWLRAKASFVIEGLKEADKDEFCRCELKLQKWYGDLRGKPFAIEAENSILDISGFSKQYNCAFIWQKDGVKKLNLYLIINYFKGGKLRFKKIKPEAFEANRFYTVINKKSGEIVPMEVNFNFDDPNLIILPLAFGKRVGREFIWNDLLSLETGSLKLANGRVIEKTLYNRRTRQDEPALFVALTFERREVLDSSNIKPMNLIGVDRGENIPAVIALTDPEGCPLSRFKDSLGNPTHILRIGESYKEKQRTIQAKKEVEQRRAGGYSRKYASKAKNLADDMVRNTARDLLYYAVTQDAMLIFENLSRGFGRQGKRTFMAERQYTRMEDWLTAKLAYEGLPSKTYLSKTLAQYTSKTCSNCGFTITSADYDRVLEKLKKTATGWMTTINGKELKVEGQITYYNRYKRQNVVKDLSVELDRLSEESVNNDISSWTKGRSGEALSLLKKRFSHRPVQEKFVCLNCGFETHADEQAALNIARSWLFLRSQEYKKYQTNKTTGNTDKRAFVETWQSFYRKKLKEVWKPAV

SEQ ID NO: 45187 - protein, 978 aa, synthetic construct
  REGION 1..978: note = engineered CasX variant
QEIKRINKIRRRLVKDSNTKKAGKTGPMKTLLVRVMTPDLRERLENLRKKPENIPQPISNTSRANLNKLLTDYTEMKKAILHVYWEEFQKDPVGLMSRVAQPASKKIDQNKLKPEMDEKGNLTTAGFACSQCGQPLFVYKLEQVSEKGKAYTNYFGRCNVAEHEKLILLAQLKPEKDSDEAVTYSLGKFGQRALDFYSIHVTKESTHPVKPLAQIAGNRYASTPVGKALSDACMGTIASFLSKYQDIIIEHQKVVKGNQKRLESLRELAGKENLEYPSVTLPPQPHTKEGVDAYNEVIARVRMWVNLNLWQKLKLSRDDAKPLLRLKGFPSFPLVERQANEVDWWDMVCNVKKLINEKKEDGKVFWQNLAGYKRQEALRPYLSSEEDRQKGKKFARYQLGDLLLHLEKKHGEDWGKVYDEAWERIDKKVEGLSKHIKLEEERRSEDAQSKAALTDWLRAKASFVIEGLKEADKDEFCRCELKLQKWYGDLRGKPFAIEAENSILDISGFSKQYNCAFIWQKDGVKKLNLYLIINYFKGGKLRFKKIKPEAFEANRFYTVINKKSGEIVPMEVNFNFDDPNLIILPLAFGKRVGREFIWNDLLSLETGSLKLANGRVIEKTLYNRRTRQDEPALFVALTFERREVLDSSNIKPMNLIGVDRGENIPAVIALTDPEGCPLSRFKDSLGNPTHILRIGESYKEKQRTIQAKKEVEQRRAGGYSRKYASKAKNLADDMVRNTARDLLYYAVTQDAMLIFENLSRGFGRQGKRTFMAERQYTRMEDWLTAKLAYEGLPSKTYLSKTLAQYTSKTCSNCGFTITSADYDRVLEKLKKTATGWMTTINGKELKVEGQITYYNRYKRQNVVKDLSVELDRLSEESVNNDISSWTKGRSGEALSLLKKRFSHRPVQEKFVCLNCGFETHADEQAALNIARSWLFLRSQEYKKYQTNKTTGNTDKRAFVETWQSFYRKKLKEVWKPAV

SEQ ID NO: 45188 - protein, 978 aa, synthetic construct
  REGION 1..978: note = engineered CasX variant
QEIKRINKIRRRLVKDSNTKKAGKTGPMKTLLVRVMTPDLRERLENLRKKPENIPQPISNTSRANLNKLLTDYTEMKKAILHVYWEEFQKDPVGLMSRVAQPASKKIDQNKLKPEMDEKGNLTTAGFACSQCGQPLFVYKLEQVSEKGKAYTNYFGRCNVAEHEKLILLAQLKPEKDSDEAVTYSLGKFGQRALDFYSIHVTKESTHPVKPLAQIAGNRYASAPVGKALSDACMGTIASFLSKYQDIIIEHQKVVKGNQKRLESLRELAGKENLEYPSVTLPPQPHTKEGVDAYNEVIARVRMWVNLNLWQKLKLSRDDAKPLLRLKGFPSFPLVERQANEVDWWDMVCNVKKLINEKKEDGKVFWQNLAGYKRQEALRPYLSSEEDRQKGKKFARYQLGDLLLHLEKKHGEDWGKVYDEAWERIDKKVEGLSKHIKLEEERRSEDAQSKAALTDWLRAKASFVIEGLKEADKDEFCRCELKLQKWYGDLRGKPFAIEAENSILDISGFSKQYNCAFIWQKDGVKKLNLYLIINYFKGGKLRFKKIKPEAFEANRFYTVINKKSGEIVPMEVNFNFDDPNLIILPLAFGKRVGREFIWNDLLSLETGSLKLANGRVIEKTLYNRRTRQDEPALFVALTFERREVLDSSNIKPMNLIGVDRGENIPAVIALTDPEGCPLSRFKDSLGNPTHILRIGESYKEKQRTIQAKKEVEQRRAGGYSRKYASKAKNLADDMVRNTARDLLYYAVTQDAMLIFENLSRGFGRQGKRTFMAERQYTRMEDWLTAKLAYEGLPSKTYLSKTLAQYTSKTCSNCGFTITSADYDRVLEKLKKTATGWMTTINGKELKVEGQITYYNRYKRQNVVKDLSVELDRLSEESVNNDISSWTKGRSGEALSLLKKRFSHRPVQEKFVCLNCGFETHADEQAALNIARSWLFLRSQEYKKYQTNKTTGNTDKRAFVETWQSFYRKKLKEVWKPAV

SEQ ID NO: 45189 - protein, 978 aa, synthetic construct
  REGION 1..978: note = engineered CasX variant
QEIKRINKIRRRLVKDSNTKKAGKTGPMKTLLVRVMTPDLRERLENLRKKPENIPQPISNTSRANLNKLLTDYTEMKKAILHVYWEEFQKDPVGLMSRVAQPASKKIDQNKLKPEMDEKGNLTTAGFACSQCGQPLFVYKLEQVSEKGKAYTNYFGRCNVAEHEKLILLAQLKPEKDSDEAVTYSLGKFGQRALDFYSIHVTKESTHPVKPLAQIAGNRYASVPVGKALSDACMGTIASFLSKYQDIIIEHQKVVKGNQKRLESLRELAGKENLEYPSVTLPPQPHTKEGVDAYNEVIARVRMWVNLNLWQKLKLSRDDAKPLLRLKGFPSFPLVERQANEVDWWDMVCNVKKLINEKKEDGKVFWQNLAGYKRQEALRPYLSSEEDRQKGKKFARYQLGDLLLHLEKKHGEDWGKVYDEAWERIDKKVEGLSKHIKLEEERRSEDAQSKAALTDWLRAKASFVIEGLKEADKDEFCRCELKLQKWYGDLRGKPFAIEAENSILDISGFSKQYNCAFIWQKDGVKKLNLYLIINYFKGGKLRFKKIKPEAFEANRFYTVINKKSGEIVPMEVNFNFDDPNLIILPLAFGKRVGREFIWNDLLSLETGSLKLANGRVIEKTLYNRRTRQDEPALFVALTFERREVLDSSNIKPMNLIGVDRGENIPAVIALTDPEGCPLSRFKDSLGNPTHILRIGESYKEKQRTIQAKKEVEQRRAGGYSRKYASKAKNLADDMVRNTARDLLYYAVTQDAMLIFENLSRGFGRQGKRTFMAERQYTRMEDWLTAKLAYEGLPSKTYLSKTLAQYTSKTCSNCGFTITSADYDRVLEKLKKTATGWMTTINGKELKVEGQITYYNRYKRQNVVKDLSVELDRLSEESVNNDISSWTKGRSGEALSLLKKRFSHRPVQEKFVCLNCGFETHADEQAALNIARSWLFLRSQEYKKYQTNKTTGNTDKRAFVETWQSFYRKKLKEVWKPAV

SEQ ID NO: 45190 - protein, 978 aa, synthetic construct
  REGION 1..978: note = engineered CasX variant
QEIKRINKIRRRLVKDSNTKKAGKTGPMKTLLVRVMTPDLRERLENLRKKPENIPQPISNTSRANLNKLLTDYTEMKKAILHVYWEEFQKDPVGLMSRVAQPASKKIDQNKLKPEMDEKGNLTTAGFACSQCGQPLFVYKLEQVSEKGKAYTNYFGRCNVAEHEKLIKLAQLKPEKDSDEAVTYSLGKFGQRALDFYSIHVTKESTHPVKPLAQIAGNRYASGPVGKALSDACMGTIASFLSKYQDIIIEHQKVVKGNQKRLESLRELAGKENLEYPSVTLPPQPHTKEGVDAYNEVIARVRMWVNLNLWQKLKLSRDDAKPLLRLKGFPSFPLVERQANEVDWWDMVCNVKKLINEKKEDGKVFWQNLAGYKRQEALRPYLSSEEDRQKGKKFARYQLGDLLLHLEKKHGEDWGKVYDEAWERIDKKVEGLSKHIKLEEERRSEDAQSKAALTDWLRAKASFVIEGLKEADKDEFCRCELKLQKWYGDLRGKPFAIEAENSILDISGFSKQYNCAFIWQKDGVKKLNLYLIINYFKGGKLRFKKIKPEAFEANRFYTVINKKSGEIVPMEVNFNFDDPNLIILPLAFGKRVGREFIWNDLLSLETGSLKLANGRVIEKTLYNRRTRQDEPALFVALTFERREVLDSSNIKPMNLIGVDRGENIPAVIALTDPEGCPLSRFKDSLGNPTHILRIGESYKEKQRTIQAKKEVEQRRAGGYSRKYASKAKNLADDMVRNTARDLLYYAVTQDAMLIFENLSRGFGRQGKRTFMAERQYTRMEDWLTAKLAYEGLPSKTYLSKTLAQYTSKTCSNCGFTITSADYDRVLEKLKKTATGWMTTINGKELKVEGQITYYNRYKRQNVVKDLSVELDRLSEESVNNDISSWTKGRSGEALSLLKKRFSHRPVQEKFVCLNCGFETHADEQAALNIARSWLFLRSQEYKKYQTNKTTGNTDKRAFVETWQSFYRKKLKEVWKPAV

SEQ ID NO: 45191 - protein, 977 aa, synthetic construct
  REGION 1..977: note = engineered CasX variant
QEIKRINKIRRRLVKDSNTKKAGKTGPMKTLLVRVMTPDLRERLENLRKKPENIPQPISNTSRANLNKLLTDYTEMKKAILHVYWEEFQKDPVGLMSRVAQPASKKIDQNKLKPEMDEKGNLTTAGFACSQCGQPLFVYKLEQVSEKGKAYTNYFGRCNVAEHEKLILLAQLKPEKDSDEAVTYSLGKFGQRALDFYSIHVTKESTHPVKPLAQIAGNRYASPVGKALSDACMGTIASFLSKYQDIIIEHQKVVKGNQKRLESLRELAGKENLEYPSVTLPPQPHTKEGVDAYNEVIARVRMWVNLNLWQKLKLSRDDAKPLLRLKGFPSFPLVERQANEVDWWDMVCNVKKLINEKKEDGKVFWQNLAGYKRQEALRPYLSSEEDRQKGKKFARYQLGDLLLHLEKKHGEDWGKVYDEAWERIDKKVEGLSKHIKLEEERRSEDAQSKAALTDWLRAKASFVIEGLKEADKDEFCRCELKLQKWYGDLRGKPFAIEAENSILDISGFSKQYNCAFIWQKDGVKKLNLYLIINYFKGGKLRFKKIKPEAFEANRFYTVINKKSGEIVPMEVNFNFDDPNLIILPLAFGKRVGREFIWNDLLSLETGSLKLANGRVIEKTLYNRRTRQDEPALFVALTFERREVLDSSNIKPMNLIGVDRGENIPAVIALTDPEGCPLSRFKDSLGNPTHILRIGESYKEKQRTIQAKKEVEQRRAGGYSRKYASKAKNLADDMVRNTARDLLYYAVTQDAMLIFENLSRGFGRQGKRTFMAERQYTRMEDWLTAKLAYEGLPSKTYLSKTLAQYTSKTCSNCGFTITSADYDRVLEKLKKTATGWMTTINGKELKVEGQITYYNRYKRQNVVKDLSVELDRLSEESVNNDISSWTKGRSGEALSLLKKRFSHRPVQEKFVCLNCGFETHADEQAALNIARSWLFLRSQEYKKYQTNKTTGNTDKRAFVETWQSFYRKKLKEVWKPAV

SEQ ID NO: 45192 - protein, 978 aa, synthetic construct
  REGION 1..978: note = engineered CasX variant
QEIKRINKIRRRLVKDSNTKKAGKTGPMKTLLVRVMTPDLRERLENLRKKPENIPQPISNTSRANLNKLLTDYTEMKKAILHVYWEEFQKDPVGLMSRVAQPASKKIDQNKLKPEMDEKGNLTTAGFACSQCGQPLFVYKLEQVSEKGKAYTNYFGRCNVAEHEKLILLAQLKPEKDSDEAVTYSLGKFGQRALDFYSIHVTKESTHPVKPLAQIAGNRYASYPVGKALSDACMGTIASFLSKYQDIIIEHQKVVKGNQKRLESLRELAGKENLEYPSVTLPPQPHTKEGVDAYNEVIARVRMWVNLNLWQKLKLSRDDAKPLLRLKGFPSFPLVERQANEVDWWDMVCNVKKLINEKKEDGKVFWQNLAGYKRQEALRPYLSSEEDRKKGKKFARYQLGDLLLHLEKKHGEDWGKVYDEAWERIDKKVEGLSKHIKLEEERRSEDAQSKAALTDWLRAKASFVIEGLKEADKDEFCRCELKLQKWYGDLRGKPFAIEAENSILDISGFSKQYNCAFIWQKDGVKKLNLYLIINYFKGGKLRFKKIKPEAFEANRFYTVINKKSGEIVPMEVNFNFDDPNLIILPLAFGKRVGREFIWNDLLSLETGSLKLANGRVIEKTLYNRRTRQDEPALFVALTFERREVLDSSNIKPMNLIGVDRGENIPAVIALTDPEGCPLSRFKDSLGNPTHILRIGESYKEKQRTIQAKKEVEQRRAGGYSRKYASKAKNLADDMVRNTARDLLYYAVTQDAMLIFENLSRGFGRQGKRTFMAERQYTRMEDWLTAKLAYEGLPSQTYLSKTLAQYTSKTCSNCGFTITSADYDRVLEKLKKTATGWMTTINGKELKVEGQITYYNRYKRQNVVKDLSVELDRLSEESVNNDISSWTKGRSGEALSLLKKRFSHRPVQEKFVCLNCGFETHADEQAALNIARSWLFLRSQEYKKYQTNKTTGNTDKRAFVETWQSFYRKKLKEVWKPAV

SEQ ID NO: 45193 - protein, 978 aa, synthetic construct
  REGION 1..978: note = engineered CasX variant
QEIKRINKIRRRLVKDSNTKKAGKTGPMKTLLVRVMTPDLRERLENLRKKPENIPQPISNTSRANLNKLLTDYTEMKKAILHVYWEEFQKDPVGLMSRVAQPASKKIDQNKLKPEMDEKGNLTTAGFACSQCGQPLFVYKLEQVSEKGKAYTNYFGRCNVAEHEKLILLAQLKPEKDSDEAVTYSLGKFGQRALDFYSIHVTKESTHPVKPLAQIAGNRYASHPVGKALSDACMGTIASFLSKYQDIIIEHQKVVKGNQKRLESLRELAGKENLEYPSVTLPPQPHTKEGVDAYNEVIARVRMWVNLNLWQKLKLSRDDAKPLLRLKGFPSFPLVERQANEVDWWDMVCNVKKLINEKKEDGKVFWQNLAGYKRQEALRPYLSSEEDRKKGKKFARYQLGDLLLHLEKKHGEDWGKVYDEAWERIDKKVEGLSKHIKLEEERRSEDAQSKAALTDWLRAKASFVIEGLKEADKDEFCRCELKLQKWYGDLRGKPFAIEAENSILDISGFSKQYNCAFIWQKDGVKKLNLYLIINYFKGGKLRFKKIKPEAFEANRFYTVINKKSGEIVPMEVNFNFDDPNLIILPLAFGKRVGREFIWNDLLSLETGSLKLANGRVIEKTLYNRRTRQDEPALFVALTFERREVLDSSNIKPMNLIGVDRGENIPAVIALTDPEGCPLSRFKDSLGNPTHILRIGESYKEKQRTIQAKKEVEQRRAGGYSRKYASKAKNLADDMVRNTARDLLYYAVTQDAMLIFENLSRGFGRQGKRTFMAERQYTRMEDWLTAKLAYEGLPSQTYLSKTLAQYTSKTCSNCGFTITSADYDRVLEKLKKTATGWMTTINGKELKVEGQITYYNRYKRQNVVKDLSVELDRLSEESVNNDISSWTKGRSGEALSLLKKRFSHRPVQEKFVCLNCGFETHADEQAALNIARSWLFLRSQEYKKYQTNKTTGNTDKRAFVETWQSFYRKKLKEVWKPAV

SEQ ID NO: 45194 - protein, 978 aa, synthetic construct
  REGION 1..978: note = engineered CasX variant
QEIKRINKIRRRLVKDSNTKKAGKTGPMKTLLVRVMTPDLRERLENLRKKPENIPQPISNTSRANLNKLLTDYTEMKKAILHVYWEEFQKDPVGLMSRVAQPASKKIDQNKLKPEMDEKGNLTTAGFACSQCGQPLFVYKLEQVSEKGKAYTNYFGRCNVAEHEKLILLAQLKPEKDSDEAVTYSLGKFGQRALDFYSIHVTKESTHPVKPLAQIAGNRYASSPVGKALSDACMGTIASFLSKYQDIIIEHQKVVKGNQKRLESLRELAGKENLEYPSVTLPPQPHTKEGVDAYNEVIARVRMWVNLNLWQKLKLSRDDAKPLLRLKGFPSFPLVERQANEVDWWDMVCNVKKLINEKKEDGKVFWQNLAGYKRQEALRPYLSSEEDRKKGKKFARYQLGDLLLHLEKKHGEDWGKVYDEAWERIDKKVEGLSKHIKLEEERRSEDAQSKAALTDWLRAKASFVIEGLKEADKDEFCRCELKLQKWYGDLRGKPFAIEAENSILDISGFSKQYNCAFIWQKDGVKKLNLYLIINYFKGGKLRFKKIKPEAFEANRFYTVINKKSGEIVPMEVNFNFDDPNLIILPLAFGKRVGREFIWNDLLSLETGSLKLANGRVIEKTLYNRRTRQDEPALFVALTFERREVLDSSNIKPMNLIGVDRGENIPAVIALTDPEGCPLSRFKDSLGNPTHILRIGESYKEKQRTIQAKKEVEQRRAGGYSRKYASKAKNLADDMVRNTARDLLYYAVTQDAMLIFENLSRGFGRQGKRTFMAERQYTRMEDWLTAKLAYEGLPSQTYLSKTLAQYTSKTCSNCGFTITSADYDRVLEKLKKTATGWMTTINGKELKVEGQITYYNRYKRQNVVKDLSVELDRLSEESVNNDISSWTKGRSGEALSLLKKRFSHRPVQEKFVCLNCGFETHADEQAALNIARSWLFLRSQEYKKYQTNKTTGNTDKRAFVETWQSFYRKKLKEVWKPAV

SEQ ID NO: 45195 - protein, 978 aa, synthetic construct
  REGION 1..978: note = engineered CasX variant
QEIKRINKIRRRLVKDSNTKKAGKTGPMKTLLVRVMTPDLRERLENLRKKPENIPQPISNTSRANLNKLLTDYTEMKKAILHVYWEEFQKDPVGLMSRVAQPASKKIDQNKLKPEMDEKGNLTTAGFACSQCGQPLFVYKLEQVSEKGKAYTNYFGRCNVAEHEKLILLAQLKPEKDSDEAVTYSLGKFGQRALDFYSIHVTKESTHPVKPLAQIAGNRYASTPVGKALSDACMGTIASFLSKYQDIIIEHQKVVKGNQKRLESLRELAGKENLEYPSVTLPPQPHTKEGVDAYNEVIARVRMWVNLNLWQKLKLSRDDAKPLLRLKGFPSFPLVERQANEVDWWDMVCNVKKLINEKKEDGKVFWQNLAGYKRQEALRPYLSSEEDRKKGKKFARYQLGDLLLHLEKKHGEDWGKVYDEAWERIDKKVEGLSKHIKLEEERRSEDAQSKAALTDWLRAKASFVIEGLKEADKDEFCRCELKLQKWYGDLRGKPFAIEAENSILDISGFSKQYNCAFIWQKDGVKKLNLYLIINYFKGGKLRFKKIKPEAFEANRFYTVINKKSGEIVPMEVNFNFDDPNLIILPLAFGKRVGREFIWNDLLSLETGSLKLANGRVIEKTLYNRRTRQDEPALFVALTFERREVLDSSNIKPMNLIGVDRGENIPAVIALTDPEGCPLSRFKDSLGNPTHILRIGESYKEKQRTIQAKKEVEQRRAGGYSRKYASKAKNLADDMVRNTARDLLYYAVTQDAMLIFENLSRGFGRQGKRTFMAERQYTRMEDWLTAKLAYEGLPSQTYLSKTLAQYTSKTCSNCGFTITSADYDRVLEKLKKTATGWMTTINGKELKVEGQITYYNRYKRQNVVKDLSVELDRLSEESVNNDISSWTKGRSGEALSLLKKRFSHRPVQEKFVCLNCGFETHADEQAALNIARSWLFLRSQEYKKYQTNKTTGNTDKRAFVETWQSFYRKKLKEVWKPAV

SEQ ID NO: 45196 - protein, 978 aa, synthetic construct
  REGION 1..978: note = engineered CasX variant
QEIKRINKIRRRLVKDSNTKKAGKTGPMKTLLVRVMTPDLRERLENLRKKPENIPQPISNTSRANLNKLLTDYTEMKKAILHVYWEEFQKDPVGLMSRVAQPASKKIDQNKLKPEMDEKGNLTTAGFACSQCGQPLFVYKLEQVSEKGKAYTNYFGRCNVAEHEKLILLAQLKPEKDSDEAVTYSLGKFGQRALDFYSIHVTKESTHPVKPLAQIAGNRYASAPVGKALSDACMGTIASFLSKYQDIIIEHQKVVKGNQKRLESLRELAGKENLEYPSVTLPPQPHTKEGVDAYNEVIARVRMWVNLNLWQKLKLSRDDAKPLLRLKGFPSFPLVERQANEVDWWDMVCNVKKLINEKKEDGKVFWQNLAGYKRQEALRPYLSSEEDRKKGKKFARYQLGDLLLHLEKKHGEDWGKVYDEAWERIDKKVEGLSKHIKLEEERRSEDAQSKAALTDWLRAKASFVIEGLKEADKDEFCRCELKLQKWYGDLRGKPFAIEAENSILDISGFSKQYNCAFIWQKDGVKKLNLYLIINYFKGGKLRFKKIKPEAFEANRFYTVINKKSGEIVPMEVNFNFDDPNLIILPLAFGKRVGREFIWNDLLSLETGSLKLANGRVIEKTLYNRRTRQDEPALFVALTFERREVLDSSNIKPMNLIGVDRGENIPAVIALTDPEGCPLSRFKDSLGNPTHILRIGESYKEKQRTIQAKKEVEQRRAGGYSRKYASKAKNLADDMVRNTARDLLYYAVTQDAMLIFENLSRGFGRQGKRTFMAERQYTRMEDWLTAKLAYEGLPSQTYLSKTLAQYTSKTCSNCGFTITSADYDRVLEKLKKTATGWMTTINGKELKVEGQITYYNRYKRQNVVKDLSVELDRLSEESVNNDISSWTKGRSGEALSLLKKRFSHRPVQEKFVCLNCGFETHADEQAALNIARSWLFLRSQEYKKYQTNKTTGNTDKRAFVETWQSFYRKKLKEVWKPAV

SEQ ID NO: 45197 - protein, 978 aa, synthetic construct
  REGION 1..978: note = engineered CasX variant
QEIKRINKIRRRLVKDSNTKKAGKTGPMKTLLVRVMTPDLRERLENLRKKPENIPQPISNTSRANLNKLLTDYTEMKKAILHVYWEEFQKDPVGLMSRVAQPASKKIDQNKLKPEMDEKGNLTTAGFACSQCGQPLFVYKLEQVSEKGKAYTNYFGRCNVAEHEKLILLAQLKPEKDSDEAVTYSLGKFGQRALDFYSIHVTKESTHPVKPLAQIAGNRYASVPVGKALSDACMGTIASFLSKYQDIIIEHQKVVKGNQKRLESLRELAGKENLEYPSVTLPPQPHTKEGVDAYNEVIARVRMWVNLNLWQKLKLSRDDAKPLLRLKGFPSFPLVERQANEVDWWDMVCNVKKLINEKKEDGKVFWQNLAGYKRQEALRPYLSSEEDRKKGKKFARYQLGDLLLHLEKKHGEDWGKVYDEAWERIDKKVEGLSKHIKLEEERRSEDAQSKAALTDWLRAKASFVIEGLKEADKDEFCRCELKLQKWYGDLRGKPFAIEAENSILDISGFSKQYNCAFIWQKDGVKKLNLYLIINYFKGGKLRFKKIKPEAFEANRFYTVINKKSGEIVPMEVNFNFDDPNLIILPLAFGKRVGREFIWNDLLSLETGSLKLANGRVIEKTLYNRRTRQDEPALFVALTFERREVLDSSNIKPMNLIGVDRGENIPAVIALTDPEGCPLSRFKDSLGNPTHILRIGESYKEKQRTIQAKKEVEQRRAGGYSRKYASKAKNLADDMVRNTARDLLYYAVTQDAMLIFENLSRGFGRQGKRTFMAERQYTRMEDWLTAKLAYEGLPSQTYLSKTLAQYTSKTCSNCGFTITSADYDRVLEKLKKTATGWMTTINGKELKVEGQITYYNRYKRQNVVKDLSVELDRLSEESVNNDISSWTKGRSGEALSLLKKRFSHRPVQEKFVCLNCGFETHADEQAALNIARSWLFLRSQEYKKYQTNKTTGNTDKRAFVETWQSFYRKKLKEVWKPAV

SEQ ID NO: 45198 - protein, 978 aa, synthetic construct
  REGION 1..978: note = engineered CasX variant
QEIKRINKIRRRLVKDSNTKKAGKTGPMKTLLVRVMTPDLRERLENLRKKPENIPQPISNTSRANLNKLLTDYTEMKKAILHVYWEEFQKDPVGLMSRVAQPASKKIDQNKLKPEMDEKGNLTTAGFACSQCGQPLFVYKLEQVSEKGKAYTNYFGRCNVAEHEKLIKLAQLKPEKDSDEAVTYSLGKFGQRALDFYSIHVTKESTHPVKPLAQIAGNRYASGPVGKALSDACMGTIASFLSKYQDIIIEHQKVVKGNQKRLESLRELAGKENLEYPSVTLPPQPHTKEGVDAYNEVIARVRMWVNLNLWQKLKLSRDDAKPLLRLKGFPSFPLVERQANEVDWWDMVCNVKKLINEKKEDGKVFWQNLAGYKRQEALRPYLSSEEDRKKGKKFARYQLGDLLLHLEKKHGEDWGKVYDEAWERIDKKVEGLSKHIKLEEERRSEDAQSKAALTDWLRAKASFVIEGLKEADKDEFCRCELKLQKWYGDLRGKPFAIEAENSILDISGFSKQYNCAFIWQKDGVKKLNLYLIINYFKGGKLRFKKIKPEAFEANRFYTVINKKSGEIVPMEVNFNFDDPNLIILPLAFGKRVGREFIWNDLLSLETGSLKLANGRVIEKTLYNRRTRQDEPALFVALTFERREVLDSSNIKPMNLIGVDRGENIPAVIALTDPEGCPLSRFKDSLGNPTHILRIGESYKEKQRTIQAKKEVEQRRAGGYSRKYASKAKNLADDMVRNTARDLLYYAVTQDAMLIFENLSRGFGRQGKRTFMAERQYTRMEDWLTAKLAYEGLPSQTYLSKTLAQYTSKTCSNCGFTITSADYDRVLEKLKKTATGWMTTINGKELKVEGQITYYNRYKRQNVVKDLSVELDRLSEESVNNDISSWTKGRSGEALSLLKKRFSHRPVQEKFVCLNCGFETHADEQAALNIARSWLFLRSQEYKKYQTNKTTGNTDKRAFVETWQSFYRKKLKEVWKPAV

SEQ ID NO: 45199 - protein, 977 aa, synthetic construct
  REGION 1..977: note = engineered CasX variant
QEIKRINKIRRRLVKDSNTKKAGKTGPMKTLLVRVMTPDLRERLENLRKKPENIPQPISNTSRANLNKLLTDYTEMKKAILHVYWEEFQKDPVGLMSRVAQPASKKIDQNKLKPEMDEKGNLTTAGFACSQCGQPLFVYKLEQVSEKGKAYTNYFGRCNVAEHEKLILLAQLKPEKDSDEAVTYSLGKFGQRALDFYSIHVTKESTHPVKPLAQIAGNRYASPVGKALSDACMGTIASFLSKYQDIIIEHQKVVKGNQKRLESLRELAGKENLEYPSVTLPPQPHTKEGVDAYNEVIARVRMWVNLNLWQKLKLSRDDAKPLLRLKGFPSFPLVERQANEVDWWDMVCNVKKLINEKKEDGKVFWQNLAGYKRQEALRPYLSSEEDRKKGKKFARYQLGDLLLHLEKKHGEDWGKVYDEAWERIDKKVEGLSKHIKLEEERRSEDAQSKAALTDWLRAKASFVIEGLKEADKDEFCRCELKLQKWYGDLRGKPFAIEAENSILDISGFSKQYNCAFIWQKDGVKKLNLYLIINYFKGGKLRFKKIKPEAFEANRFYTVINKKSGEIVPMEVNFNFDDPNLIILPLAFGKRVGREFIWNDLLSLETGSLKLANGRVIEKTLYNRRTRQDEPALFVALTFERREVLDSSNIKPMNLIGVDRGENIPAVIALTDPEGCPLSRFKDSLGNPTHILRIGESYKEKQRTIQAKKEVEQRRAGGYSRKYASKAKNLADDMVRNTARDLLYYAVTQDAMLIFENLSRGFGRQGKRTFMAERQYTRMEDWLTAKLAYEGLPSQTYLSKTLAQYTSKTCSNCGFTITSADYDRVLEKLKKTATGWMTTINGKELKVEGQITYYNRYKRQNVVKDLSVELDRLSEESVNNDISSWTKGRSGEALSLLKKRFSHRPVQEKFVCLNCGFETHADEQAALNIARSWLFLRSQEYKKYQTNKTTGNTDKRAFVETWQSFYRKKLKEVWKPAV

SEQ ID NO: 45200 - protein, 978 aa, synthetic construct
  REGION 1..978: note = engineered CasX variant
QEIKRINKIRRRLVKDSNTKKAGKTGPMKTLLVRVMTPDLRERLENLRKKPENIPQPISNTSRANLNKLLTDYTEMKKAILHVYWEEFQKDPVGLMSRVAQPASKKIDQNKLKPEMDEKGNLTTAGFACSQCGQPLFVYKLEQVSEKGKAYTNYFGRCNVAEHEKLILLAQLKPEKDSDEAVTYSLGKFGQRALDFYSIHVTKESTHPVKPLAQIAGNRYASYPVGKALSDACMGTIASFLSKYQDIIIEHQKVVKGNQKRLESLRELAGKENLEYPSVTLPPQPHTKEGVDAYNEVIARVRMWVNLNLWQKLKLSRDDAKPLLRLKGFPSFPLVERQANEVDWWDMVCNVKKLINEKKEDGKVFWQNLAGYKRQEALRPYLSSEEDRKKGKKFARYQLGDLLLHLEKKHGEDWGKVYDEAWERIDKKVEGLSKHIKLEEERRSEDAQSKAALTDWLRAKASFVIEGLKEADKDEFCRCELKLQKWYGDLRGKPFAIEAENSILDISGFSKQYNCAFIWQKDGVKKLNLYLIINYFKGGKLRFKKIKPEAFEANRFYTVINKKSGEIVPMEVNFNFDDPNLIILPLAFGKRVGREFIWNDLLSLETGSLKLANGRVIEKTLYNRRTRQDEPALFVALTFERREVLDSSNIKPMNLIGVDRGENIPAVIALTDPEGCPLSRFKDSLGNPTHILRIGESYKEKQRTIQAKKEVEQRRAGGYSRKYASKAKNLADDMVRNTARDLLYYAVTQDAMLIFENLSRGFGRQGKRTFMAERQYTRMEDWLTAKLAYNGLPSKTYLSKTLAQYTSKTCSNCGFTITSADYDRVLEKLKKTATGWMTTINGKELKVEGQITYYNRYKRQNVVKDLSVELDRLSEESVNNDISSWTKGRSGEALSLLKKRFSHRPVQEKFVCLNCGFETHADEQAALNIARSWLFLRSQEYKKYQTNKTTGNTDKRAFVETWQSFYRKKLKEVWKPAV

SEQ ID NO: 45201 - protein, 978 aa, synthetic construct
  REGION 1..978: note = engineered CasX variant
QEIKRINKIRRRLVKDSNTKKAGKTGPMKTLLVRVMTPDLRERLENLRKKPENIPQPISNTSRANLNKLLTDYTEMKKAILHVYWEEFQKDPVGLMSRVAQPASKKIDQNKLKPEMDEKGNLTTAGFACSQCGQPLFVYKLEQVSEKGKAYTNYFGRCNVAEHEKLILLAQLKPEKDSDEAVTYSLGKFGQRALDFYSIHVTKESTHPVKPLAQIAGNRYASHPVGKALSDACMGTIASFLSKYQDIIIEHQKVVKGNQKRLESLRELAGKENLEYPSVTLPPQPHTKEGVDAYNEVIARVRMWVNLNLWQKLKLSRDDAKPLLRLKGFPSFPLVERQANEVDWWDMVCNVKKLINEKKEDGKVFWQNLAGYKRQEALRPYLSSEEDRKKGKKFARYQLGDLLLHLEKKHGEDWGKVYDEAWERIDKKVEGLSKHIKLEEERRSEDAQSKAALTDWLRAKASFVIEGLKEADKDEFCRCELKLQKWYGDLRGKPFAIEAENSILDISGFSKQYNCAFIWQKDGVKKLNLYLIINYFKGGKLRFKKIKPEAFEANRFYTVINKKSGEIVPMEVNFNFDDPNLIILPLAFGKRVGREFIWNDLLSLETGSLKLANGRVIEKTLYNRRTRQDEPALFVALTFERREVLDSSNIKPMNLIGVDRGENIPAVIALTDPEGCPLSRFKDSLGNPTHILRIGESYKEKQRTIQAKKEVEQRRAGGYSRKYASKAKNLADDMVRNTARDLLYYAVTQDAMLIFENLSRGFGRQGKRTFMAERQYTRMEDWLTAKLAYNGLPSKTYLSKTLAQYTSKTCSNCGFTITSADYDRVLEKLKKTATGWMTTINGKELKVEGQITYYNRYKRQNVVKDLSVELDRLSEESVNNDISSWTKGRSGEALSLLKKRFSHRPVQEKFVCLNCGFETHADEQAALNIARSWLFLRSQEYKKYQTNKTTGNTDKRAFVETWQSFYRKKLKEVWKPAV

SEQ ID NO: 45202 - protein, 978 aa, synthetic construct
  REGION 1..978: note = engineered CasX variant
QEIKRINKIRRRLVKDSNTKKAGKTGPMKTLLVRVMTPDLRERLENLRKKPENIPQPISNTSRANLNKLLTDYTEMKKAILHVYWEEFQKDPVGLMSRVAQPASKKIDQNKLKPEMDEKGNLTTAGFACSQCGQPLFVYKLEQVSEKGKAYTNYFGRCNVAEHEKLILLAQLKPEKDSDEAVTYSLGKFGQRALDFYSIHVTKESTHPVKPLAQIAGNRYASSPVGKALSDACMGTIASFLSKYQDIIIEHQKVVKGNQKRLESLRELAGKENLEYPSVTLPPQPHTKEGVDAYNEVIARVRMWVNLNLWQKLKLSRDDAKPLLRLKGFPSFPLVERQANEVDWWDMVCNVKKLINEKKEDGKVFWQNLAGYKRQEALRPYLSSEEDRKKGKKFARYQLGDLLLHLEKKHGEDWGKVYDEAWERIDKKVEGLSKHIKLEEERRSEDAQSKAALTDWLRAKASFVIEGLKEADKDEFCRCELKLQKWYGDLRGKPFAIEAENSILDISGFSKQYNCAFIWQKDGVKKLNLYLIINYFKGGKLRFKKIKPEAFEANRFYTVINKKSGEIVPMEVNFNFDDPNLIILPLAFGKRVGREFIWNDLLSLETGSLKLANGRVIEKTLYNRRTRQDEPALFVALTFERREVLDSSNIKPMNLIGVDRGENIPAVIALTDPEGCPLSRFKDSLGNPTHILRIGESYKEKQRTIQAKKEVEQRRAGGYSRKYASKAKNLADDMVRNTARDLLYYAVTQDAMLIFENLSRGFGRQGKRTFMAERQYTRMEDWLTAKLAYNGLPSKTYLSKTLAQYTSKTCSNCGFTITSADYDRVLEKLKKTATGWMTTINGKELKVEGQITYYNRYKRQNVVKDLSVELDRLSEESVNNDISSWTKGRSGEALSLLKKRFSHRPVQEKFVCLNCGFETHADEQAALNIARSWLFLRSQEYKKYQTNKTTGNTDKRAFVETWQSFYRKKLKEVWKPAV

SEQ ID NO: 45203 - protein, 978 aa, synthetic construct
  REGION 1..978: note = engineered CasX variant
QEIKRINKIRRRLVKDSNTKKAGKTGPMKTLLVRVMTPDLRERLENLRKKPENIPQPISNTSRANLNKLLTDYTEMKKAILHVYWEEFQKDPVGLMSRVAQPASKKIDQNKLKPEMDEKGNLTTAGFACSQCGQPLFVYKLEQVSEKGKAYTNYFGRCNVAEHEKLILLAQLKPEKDSDEAVTYSLGKFGQRALDFYSIHVTKESTHPVKPLAQIAGNRYASTPVGKALSDACMGTIASFLSKYQDIIIEHQKVVKGNQKRLESLRELAGKENLEYPSVTLPPQPHTKEGVDAYNEVIARVRMWVNLNLWQKLKLSRDDAKPLLRLKGFPSFPLVERQANEVDWWDMVCNVKKLINEKKEDGKVFWQNLAGYKRQEALRPYLSSEEDRKKGKKFARYQLGDLLLHLEKKHGEDWGKVYDEAWERIDKKVEGLSKHIKLEEERRSEDAQSKAALTDWLRAKASFVIEGLKEADKDEFCRCELKLQKWYGDLRGKPFAIEAENSILDISGFSKQYNCAFIWQKDGVKKLNLYLIINYFKGGKLRFKKIKPEAFEANRFYTVINKKSGEIVPMEVNFNFDDPNLIILPLAFGKRVGREFIWNDLLSLETGSLKLANGRVIEKTLYNRRTRQDEPALFVALTFERREVLDSSNIKPMNLIGVDRGENIPAVIALTDPEGCPLSRFKDSLGNPTHILRIGESYKEKQRTIQAKKEVEQRRAGGYSRKYASKAKNLADDMVRNTARDLLYYAVTQDAMLIFENLSRGFGRQGKRTFMAERQYTRMEDWLTAKLAYNGLPSKTYLSKTLAQYTSKTCSNCGFTITSADYDRVLEKLKKTATGWMTTINGKELKVEGQITYYNRYKRQNVVKDLSVELDRLSEESVNNDISSWTKGRSGEALSLLKKRFSHRPVQEKFVCLNCGFETHADEQAALNIARSWLFLRSQEYKKYQTNKTTGNTDKRAFVETWQSFYRKKLKEVWKPAV

SEQ ID NO: 45204 - protein, 978 aa, synthetic construct
  REGION 1..978: note = engineered CasX variant
QEIKRINKIRRRLVKDSNTKKAGKTGPMKTLLVRVMTPDLRERLENLRKKPENIPQPISNTSRANLNKLLTDYTEMKKAILHVYWEEFQKDPVGLMSRVAQPASKKIDQNKLKPEMDEKGNLTTAGFACSQCGQPLFVYKLEQVSEKGKAYTNYFGRCNVAEHEKLILLAQLKPEKDSDEAVTYSLGKFGQRALDFYSIHVTKESTHPVKPLAQIAGNRYASAPVGKALSDACMGTIASFLSKYQDIIIEHQKVVKGNQKRLESLRELAGKENLEYPSVTLPPQPHTKEGVDAYNEVIARVRMWVNLNLWQKLKLSRDDAKPLLRLKGFPSFPLVERQANEVDWWDMVCNVKKLINEKKEDGKVFWQNLAGYKRQEALRPYLSSEEDRKKGKKFARYQLGDLLLHLEKKHGEDWGKVYDEAWERIDKKVEGLSKHIKLEEERRSEDAQSKAALTDWLRAKASFVIEGLKEADKDEFCRCELKLQKWYGDLRGKPFAIEAENSILDISGFSKQYNCAFIWQKDGVKKLNLYLIINYFKGGKLRFKKIKPEAFEANRFYTVINKKSGEIVPMEVNFNFDDPNLIILPLAFGKRVGREFIWNDLLSLETGSLKLANGRVIEKTLYNRRTRQDEPALFVALTFERREVLDSSNIKPMNLIGVDRGENIPAVIALTDPEGCPLSRFKDSLGNPTHILRIGESYKEKQRTIQAKKEVEQRRAGGYSRKYASKAKNLADDMVRNTARDLLYYAVTQDAMLIFENLSRGFGRQGKRTFMAERQYTRMEDWLTAKLAYNGLPSKTYLSKTLAQYTSKTCSNCGFTITSADYDRVLEKLKKTATGWMTTINGKELKVEGQITYYNRYKRQNVVKDLSVELDRLSEESVNNDISSWTKGRSGEALSLLKKRFSHRPVQEKFVCLNCGFETHADEQAALNIARSWLFLRSQEYKKYQTNKTTGNTDKRAFVETWQSFYRKKLKEVWKPAV

SEQ ID NO: 45205 - protein, 978 aa, synthetic construct
  REGION 1..978: note = engineered CasX variant
QEIKRINKIRRRLVKDSNTKKAGKTGPMKTLLVRVMTPDLRERLENLRKKPENIPQPISNTSRANLNKLLTDYTEMKKAILHVYWEEFQKDPVGLMSRVAQPASKKIDQNKLKPEMDEKGNLTTAGFACSQCGQPLFVYKLEQVSEKGKAYTNYFGRCNVAEHEKLILLAQLKPEKDSDEAVTYSLGKFGQRALDFYSIHVTKESTHPVKPLAQIAGNRYASVPVGKALSDACMGTIASFLSKYQDIIIEHQKVVKGNQKRLESLRELAGKENLEYPSVTLPPQPHTKEGVDAYNEVIARVRMWVNLNLWQKLKLSRDDAKPLLRLKGFPSFPLVERQANEVDWWDMVCNVKKLINEKKEDGKVFWQNLAGYKRQEALRPYLSSEEDRKKGKKFARYQLGDLLLHLEKKHGEDWGKVYDEAWERIDKKVEGLSKHIKLEEERRSEDAQSKAALTDWLRAKASFVIEGLKEADKDEFCRCELKLQKWYGDLRGKPFAIEAENSILDISGFSKQYNCAFIWQKDGVKKLNLYLIINYFKGGKLRFKKIKPEAFEANRFYTVINKKSGEIVPMEVNFNFDDPNLIILPLAFGKRVGREFIWNDLLSLETGSLKLANGRVIEKTLYNRRTRQDEPALFVALTFERREVLDSSNIKPMNLIGVDRGENIPAVIALTDPEGCPLSRFKDSLGNPTHILRIGESYKEKQRTIQAKKEVEQRRAGGYSRKYASKAKNLADDMVRNTARDLLYYAVTQDAMLIFENLSRGFGRQGKRTFMAERQYTRMEDWLTAKLAYNGLPSKTYLSKTLAQYTSKTCSNCGFTITSADYDRVLEKLKKTATGWMTTINGKELKVEGQITYYNRYKRQNVVKDLSVELDRLSEESVNNDISSWTKGRSGEALSLLKKRFSHRPVQEKFVCLNCGFETHADEQAALNIARSWLFLRSQEYKKYQTNKTTGNTDKRAFVETWQSFYRKKLKEVWKPAV

SEQ ID NO: 45206 - protein, 978 aa, synthetic construct
  REGION 1..978: note = engineered CasX variant
QEIKRINKIRRRLVKDSNTKKAGKTGPMKTLLVRVMTPDLRERLENLRKKPENIPQPISNTSRANLNKLLTDYTEMKKAILHVYWEEFQKDPVGLMSRVAQPASKKIDQNKLKPEMDEKGNLTTAGFACSQCGQPLFVYKLEQVSEKGKAYTNYFGRCNVAEHEKLIKLAQLKPEKDSDEAVTYSLGKFGQRALDFYSIHVTKESTHPVKPLAQIAGNRYASGPVGKALSDACMGTIASFLSKYQDIIIEHQKVVKGNQKRLESLRELAGKENLEYPSVTLPPQPHTKEGVDAYNEVIARVRMWVNLNLWQKLKLSRDDAKPLLRLKGFPSFPLVERQANEVDWWDMVCNVKKLINEKKEDGKVFWQNLAGYKRQEALRPYLSSEEDRKKGKKFARYQLGDLLLHLEKKHGEDWGKVYDEAWERIDKKVEGLSKHIKLEEERRSEDAQSKAALTDWLRAKASFVIEGLKEADKDEFCRCELKLQKWYGDLRGKPFAIEAENSILDISGFSKQYNCAFIWQKDGVKKLNLYLIINYFKGGKLRFKKIKPEAFEANRFYTVINKKSGEIVPMEVNFNFDDPNLIILPLAFGKRVGREFIWNDLLSLETGSLKLANGRVIEKTLYNRRTRQDEPALFVALTFERREVLDSSNIKPMNLIGVDRGENIPAVIALTDPEGCPLSRFKDSLGNPTHILRIGESYKEKQRTIQAKKEVEQRRAGGYSRKYASKAKNLADDMVRNTARDLLYYAVTQDAMLIFENLSRGFGRQGKRTFMAERQYTRMEDWLTAKLAYNGLPSKTYLSKTLAQYTSKTCSNCGFTITSADYDRVLEKLKKTATGWMTTINGKELKVEGQITYYNRYKRQNVVKDLSVELDRLSEESVNNDISSWTKGRSGEALSLLKKRFSHRPVQEKFVCLNCGFETHADEQAALNIARSWLFLRSQEYKKYQTNKTTGNTDKRAFVETWQSFYRKKLKEVWKPAV

SEQ ID NO: 45207 - protein, 977 aa, synthetic construct
  REGION 1..977: note = engineered CasX variant
QEIKRINKIRRRLVKDSNTKKAGKTGPMKTLLVRVMTPDLRERLENLRKKPENIPQPISNTSRANLNKLLTDYTEMKKAILHVYWEEFQKDPVGLMSRVAQPASKKIDQNKLKPEMDEKGNLTTAGFACSQCGQPLFVYKLEQVSEKGKAYTNYFGRCNVAEHEKLILLAQLKPEKDSDEAVTYSLGKFGQRALDFYSIHVTKESTHPVKPLAQIAGNRYASPVGKALSDACMGTIASFLSKYQDIIIEHQKVVKGNQKRLESLRELAGKENLEYPSVTLPPQPHTKEGVDAYNEVIARVRMWVNLNLWQKLKLSRDDAKPLLRLKGFPSFPLVERQANEVDWWDMVCNVKKLINEKKEDGKVFWQNLAGYKRQEALRPYLSSEEDRKKGKKFARYQLGDLLLHLEKKHGEDWGKVYDEAWERIDKKVEGLSKHIKLEEERRSEDAQSKAALTDWLRAKASFVIEGLKEADKDEFCRCELKLQKWYGDLRGKPFAIEAENSILDISGFSKQYNCAFIWQKDGVKKLNLYLIINYFKGGKLRFKKIKPEAFEANRFYTVINKKSGEIVPMEVNFNFDDPNLIILPLAFGKRVGREFIWNDLLSLETGSLKLANGRVIEKTLYNRRTRQDEPALFVALTFERREVLDSSNIKPMNLIGVDRGENIPAVIALTDPEGCPLSRFKDSLGNPTHILRIGESYKEKQRTIQAKKEVEQRRAGGYSRKYASKAKNLADDMVRNTARDLLYYAVTQDAMLIFENLSRGFGRQGKRTFMAERQYTRMEDWLTAKLAYNGLPSKTYLSKTLAQYTSKTCSNCGFTITSADYDRVLEKLKKTATGWMTTINGKELKVEGQITYYNRYKRQNVVKDLSVELDRLSEESVNNDISSWTKGRSGEALSLLKKRFSHRPVQEKFVCLNCGFETHADEQAALNIARSWLFLRSQEYKKYQTNKTTGNTDKRAFVETWQSFYRKKLKEVWKPAV

SEQ ID NO: 45208 - protein, 978 aa, synthetic construct
  REGION 1..978: note = engineered CasX variant
QEIKRINKIRRRLVKDSNTKKAGKTGPMKTLLVRVMTPDLRERLENLRKKPENIPQPISNTSRANLNKLLTDYTEMKKAILHVYWEEFQKDPVGLMSRVAQPASKKIDQNKLKPEMDEKGNLTTAGFACSQCGQPLFVYKLEQVSEKGKAYTNYFGRCNVAEHEKLIQLAQLKPEKDSDEAVTYSLGKFGQRALDFYSIHVTKESTHPVKPLAQIAGNRYASYPVGKALSDACMGTIASFLSKYQDIIIEHQKVVKGNQKRLESLRELAGKENLEYPSVTLPPQPHTKEGVDAYNEVIARVRMWVNLNLWQKLKLSRDDAKPLLRLKGFPSFPLVERQANEVDWWDMVCNVKKLINEKKEDGKVFWQNLAGYKRQEALRPYLSSEEDRKKGKKFARYQLGDLLLHLEKKHGEDWGKVYDEAWERIDKKVEGLSKHIKLEEERRSEDAQSKAALTDWLRAKASFVIEGLKEADKDEFCRCELKLQKWYGDLRGKPFAIEAENSILDISGFSKQYNCAFIWQKDGVKKLNLYLIINYFKGGKLRFKKIKPEAFEANRFYTVINKKSGEIVPMEVNFNFDDPNLIILPLAFGKRVGREFIWNDLLSLETGSLKLANGRVIEKTLYNRRTRQDEPALFVALTFERREVLDSSNIKPMNLIGVDRGENIPAVIALTDPEGCPLSRFKDSLGNPTHILRIGESYKEKQRTIQAKKEVEQRRAGGYSRKYASKAKNLADDMVRNTARDLLYYAVTQDAMLIFENLSRGFGRQGKRTFMAERQYTRMEDWLTAKLAYEGLPSKTYLSKTLAQYTSKTCSNCGFTITSADYDRVLEKLKKTATGWMTTINGKELKVEGQITYYNRYKRQNVVKDLSVELDRLSEESVNNDISSWTKGRSGEALSLLKKRFSHRPVQEKFVCLNCGFETHADEQAALNIARSWLFLRSQEYKKYQTNKTTGNTDKRAFVETWQSFYRKKLKEVWKPAV

SEQ ID NO: 45209 - protein, 978 aa, synthetic construct
  REGION 1..978: note = engineered CasX variant
QEIKRINKIRRRLVKDSNTKKAGKTGPMKTLLVRVMTPDLRERLENLRKKPENIPQPISNTSRANLNKLLTDYTEMKKAILHVYWEEFQKDPVGLMSRVAQPASKKIDQNKLKPEMDEKGNLTTAGFACSQCGQPLFVYKLEQVSEKGKAYTNYFGRCNVAEHEKLIQLAQLKPEKDSDEAVTYSLGKFGQRALDFYSIHVTKESTHPVKPLAQIAGNRYASHPVGKALSDACMGTIASFLSKYQDIIIEHQKVVKGNQKRLESLRELAGKENLEYPSVTLPPQPHTKEGVDAYNEVIARVRMWVNLNLWQKLKLSRDDAKPLLRLKGFPSFPLVERQANEVDWWDMVCNVKKLINEKKEDGKVFWQNLAGYKRQEALRPYLSSEEDRKKGKKFARYQLGDLLLHLEKKHGEDWGKVYDEAWERIDKKVEGLSKHIKLEEERRSEDAQSKAALTDWLRAKASFVIEGLKEADKDEFCRCELKLQKWYGDLRGKPFAIEAENSILDISGFSKQYNCAFIWQKDGVKKLNLYLIINYFKGGKLRFKKIKPEAFEANRFYTVINKKSGEIVPMEVNFNFDDPNLIILPLAFGKRVGREFIWNDLLSLETGSLKLANGRVIEKTLYNRRTRQDEPALFVALTFERREVLDSSNIKPMNLIGVDRGENIPAVIALTDPEGCPLSRFKDSLGNPTHILRIGESYKEKQRTIQAKKEVEQRRAGGYSRKYASKAKNLADDMVRNTARDLLYYAVTQDAMLIFENLSRGFGRQGKRTFMAERQYTRMEDWLTAKLAYEGLPSKTYLSKTLAQYTSKTCSNCGFTITSADYDRVLEKLKKTATGWMTTINGKELKVEGQITYYNRYKRQNVVKDLSVELDRLSEESVNNDISSWTKGRSGEALSLLKKRFSHRPVQEKFVCLNCGFETHADEQAALNIARSWLFLRSQEYKKYQTNKTTGNTDKRAFVETWQSFYRKKLKEVWKPAV

SEQ ID NO: 45210 - protein, 978 aa, synthetic construct
  REGION 1..978: note = engineered CasX variant
QEIKRINKIRRRLVKDSNTKKAGKTGPMKTLLVRVMTPDLRERLENLRKKPENIPQPISNTSRANLNKLLTDYTEMKKAILHVYWEEFQKDPVGLMSRVAQPASKKIDQNKLKPEMDEKGNLTTAGFACSQCGQPLFVYKLEQVSEKGKAYTNYFGRCNVAEHEKLIQLAQLKPEKDSDEAVTYSLGKFGQRALDFYSIHVTKESTHPVKPLAQIAGNRYASSPVGKALSDACMGTIASFLSKYQDIIIEHQKVVKGNQKRLESLRELAGKENLEYPSVTLPPQPHTKEGVDAYNEVIARVRMWVNLNLWQKLKLSRDDAKPLLRLKGFPSFPLVERQANEVDWWDMVCNVKKLINEKKEDGKVFWQNLAGYKRQEALRPYLSSEEDRKKGKKFARYQLGDLLLHLEKKHGEDWGKVYDEAWERIDKKVEGLSKHIKLEEERRSEDAQSKAALTDWLRAKASFVIEGLKEADKDEFCRCELKLQKWYGDLRGKPFAIEAENSILDISGFSKQYNCAFIWQKDGVKKLNLYLIINYFKGGKLRFKKIKPEAFEANRFYTVINKKSGEIVPMEVNFNFDDPNLIILPLAFGKRVGREFIWNDLLSLETGSLKLANGRVIEKTLYNRRTRQDEPALFVALTFERREVLDSSNIKPMNLIGVDRGENIPAVIALTDPEGCPLSRFKDSLGNPTHILRIGESYKEKQRTIQAKKEVEQRRAGGYSRKYASKAKNLADDMVRNTARDLLYYAVTQDAMLIFENLSRGFGRQGKRTFMAERQYTRMEDWLTAKLAYEGLPSKTYLSKTLAQYTSKTCSNCGFTITSADYDRVLEKLKKTATGWMTTINGKELKVEGQITYYNRYKRQNVVKDLSVELDRLSEESVNNDISSWTKGRSGEALSLLKKRFSHRPVQEKFVCLNCGFETHADEQAALNIARSWLFLRSQEYKKYQTNKTTGNTDKRAFVETWQSFYRKKLKEVWKPAV

SEQ ID NO: 45211 - protein, 978 aa, synthetic construct
  REGION 1..978: note = engineered CasX variant
QEIKRINKIRRRLVKDSNTKKAGKTGPMKTLLVRVMTPDLRERLENLRKKPENIPQPISNTSRANLNKLLTDYTEMKKAILHVYWEEFQKDPVGLMSRVAQPASKKIDQNKLKPEMDEKGNLTTAGFACSQCGQPLFVYKLEQVSEKGKAYTNYFGRCNVAEHEKLIQLAQLKPEKDSDEAVTYSLGKFGQRALDFYSIHVTKESTHPVKPLAQIAGNRYASTPVGKALSDACMGTIASFLSKYQDIIIEHQKVVKGNQKRLESLRELAGKENLEYPSVTLPPQPHTKEGVDAYNEVIARVRMWVNLNLWQKLKLSRDDAKPLLRLKGFPSFPLVERQANEVDWWDMVCNVKKLINEKKEDGKVFWQNLAGYKRQEALRPYLSSEEDRKKGKKFARYQLGDLLLHLEKKHGEDWGKVYDEAWERIDKKVEGLSKHIKLEEERRSEDAQSKAALTDWLRAKASFVIEGLKEADKDEFCRCELKLQKWYGDLRGKPFAIEAENSILDISGFSKQYNCAFIWQKDGVKKLNLYLIINYFKGGKLRFKKIKPEAFEANRFYTVINKKSGEIVPMEVNFNFDDPNLIILPLAFGKRVGREFIWNDLLSLETGSLKLANGRVIEKTLYNRRTRQDEPALFVALTFERREVLDSSNIKPMNLIGVDRGENIPAVIALTDPEGCPLSRFKDSLGNPTHILRIGESYKEKQRTIQAKKEVEQRRAGGYSRKYASKAKNLADDMVRNTARDLLYYAVTQDAMLIFENLSRGFGRQGKRTFMAERQYTRMEDWLTAKLAYEGLPSKTYLSKTLAQYTSKTCSNCGFTITSADYDRVLEKLKKTATGWMTTINGKELKVEGQITYYNRYKRQNVVKDLSVELDRLSEESVNNDISSWTKGRSGEALSLLKKRFSHRPVQEKFVCLNCGFETHADEQAALNIARSWLFLRSQEYKKYQTNKTTGNTDKRAFVETWQSFYRKKLKEVWKPAV

SEQ ID NO: 45212 - protein, 978 aa, synthetic construct
  REGION 1..978: note = engineered CasX variant
QEIKRINKIRRRLVKDSNTKKAGKTGPMKTLLVRVMTPDLRERLENLRKKPENIPQPISNTSRANLNKLLTDYTEMKKAILHVYWEEFQKDPVGLMSRVAQPASKKIDQNKLKPEMDEKGNLTTAGFACSQCGQPLFVYKLEQVSEKGKAYTNYFGRCNVAEHEKLIQLAQLKPEKDSDEAVTYSLGKFGQRALDFYSIHVTKESTHPVKPLAQIAGNRYASAPVGKALSDACMGTIASFLSKYQDIIIEHQKVVKGNQKRLESLRELAGKENLEYPSVTLPPQPHTKEGVDAYNEVIARVRMWVNLNLWQKLKLSRDDAKPLLRLKGFPSFPLVERQANEVDWWDMVCNVKKLINEKKEDGKVFWQNLAGYKRQEALRPYLSSEEDRKKGKKFARYQLGDLLLHLEKKHGEDWGKVYDEAWERIDKKVEGLSKHIKLEEERRSEDAQSKAALTDWLRAKASFVIEGLKEADKDEFCRCELKLQKWYGDLRGKPFAIEAENSILDISGFSKQYNCAFIWQKDGVKKLNLYLIINYFKGGKLRFKKIKPEAFEANRFYTVINKKSGEIVPMEVNFNFDDPNLIILPLAFGKRVGREFIWNDLLSLETGSLKLANGRVIEKTLYNRRTRQDEPALFVALTFERREVLDSSNIKPMNLIGVDRGENIPAVIALTDPEGCPLSRFKDSLGNPTHILRIGESYKEKQRTIQAKKEVEQRRAGGYSRKYASKAKNLADDMVRNTARDLLYYAVTQDAMLIFENLSRGFGRQGKRTFMAERQYTRMEDWLTAKLAYEGLPSKTYLSKTLAQYTSKTCSNCGFTITSADYDRVLEKLKKTATGWMTTINGKELKVEGQITYYNRYKRQNVVKDLSVELDRLSEESVNNDISSWTKGRSGEALSLLKKRFSHRPVQEKFVCLNCGFETHADEQAALNIARSWLFLRSQEYKKYQTNKTTGNTDKRAFVETWQSFYRKKLKEVWKPAV

SEQ ID NO: 45213 - protein, 978 aa, synthetic construct
  REGION 1..978: note = engineered CasX variant
QEIKRINKIRRRLVKDSNTKKAGKTGPMKTLLVRVMTPDLRERLENLRKKPENIPQPISNTSRANLNKLLTDYTEMKKAILHVYWEEFQKDPVGLMSRVAQPASKKIDQNKLKPEMDEKGNLTTAGFACSQCGQPLFVYKLEQVSEKGKAYTNYFGRCNVAEHEKLIQLAQLKPEKDSDEAVTYSLGKFGQRALDFYSIHVTKESTHPVKPLAQIAGNRYASVPVGKALSDACMGTIASFLSKYQDIIIEHQKVVKGNQKRLESLRELAGKENLEYPSVTLPPQPHTKEGVDAYNEVIARVRMWVNLNLWQKLKLSRDDAKPLLRLKGFPSFPLVERQANEVDWWDMVCNVKKLINEKKEDGKVFWQNLAGYKRQEALRPYLSSEEDRKKGKKFARYQLGDLLLHLEKKHGEDWGKVYDEAWERIDKKVEGLSKHIKLEEERRSEDAQSKAALTDWLRAKASFVIEGLKEADKDEFCRCELKLQKWYGDLRGKPFAIEAENSILDISGFSKQYNCAFIWQKDGVKKLNLYLIINYFKGGKLRFKKIKPEAFEANRFYTVINKKSGEIVPMEVNFNFDDPNLIILPLAFGKRVGREFIWNDLLSLETGSLKLANGRVIEKTLYNRRTRQDEPALFVALTFERREVLDSSNIKPMNLIGVDRGENIPAVIALTDPEGCPLSRFKDSLGNPTHILRIGESYKEKQRTIQAKKEVEQRRAGGYSRKYASKAKNLADDMVRNTARDLLYYAVTQDAMLIFENLSRGFGRQGKRTFMAERQYTRMEDWLTAKLAYEGLPSKTYLSKTLAQYTSKTCSNCGFTITSADYDRVLEKLKKTATGWMTTINGKELKVEGQITYYNRYKRQNVVKDLSVELDRLSEESVNNDISSWTKGRSGEALSLLKKRFSHRPVQEKFVCLNCGFETHADEQAALNIARSWLFLRSQEYKKYQTNKTTGNTDKRAFVETWQSFYRKKLKEVWKPAV

SEQ ID NO: 45214 - protein, 979 aa, synthetic construct
  REGION 1..979: note = engineered CasX variant
QEIKRINKIRRRLVKDSNTKKAGKTGPMKTLLVRVMTPDLRERLENLRKKPENIPQPISNTSRANLNKLLTDYTEMKKAILHVYWEEFQKDPVGLMSRVAQPASKKIDQNKLKPEMDEKGNLTTAGFACSQCGQPLFVYKLEQVSEKGKAYTNYFGRCNVAEHEKLIQKLAQLKPEKDSDEAVTYSLGKFGQRALDFYSIHVTKESTHPVKPLAQIAGNRYASGPVGKALSDACMGTIASFLSKYQDIIIEHQKVVKGNQKRLESLRELAGKENLEYPSVTLPPQPHTKEGVDAYNEVIARVRMWVNLNLWQKLKLSRDDAKPLLRLKGFPSFPLVERQANEVDWWDMVCNVKKLINEKKEDGKVFWQNLAGYKRQEALRPYLSSEEDRKKGKKFARYQLGDLLLHLEKKHGEDWGKVYDEAWERIDKKVEGLSKHIKLEEERRSEDAQSKAALTDWLRAKASFVIEGLKEADKDEFCRCELKLQKWYGDLRGKPFAIEAENSILDISGFSKQYNCAFIWQKDGVKKLNLYLIINYFKGGKLRFKKIKPEAFEANRFYTVINKKSGEIVPMEVNFNFDDPNLIILPLAFGKRVGREFIWNDLLSLETGSLKLANGRVIEKTLYNRRTRQDEPALFVALTFERREVLDSSNIKPMNLIGVDRGENIPAVIALTDPEGCPLSRFKDSLGNPTHILRIGESYKEKQRTIQAKKEVEQRRAGGYSRKYASKAKNLADDMVRNTARDLLYYAVTQDAMLIFENLSRGFGRQGKRTFMAERQYTRMEDWLTAKLAYEGLPSKTYLSKTLAQYTSKTCSNCGFTITSADYDRVLEKLKKTATGWMTTINGKELKVEGQITYYNRYKRQNVVKDLSVELDRLSEESVNNDISSWTKGRSGEALSLLKKRFSHRPVQEKFVCLNCGFETHADEQAALNIARSWLFLRSQEYKKYQTNKTTGNTDKRAFVETWQSFYRKKLKEVWKPAV

SEQ ID NO: 45215 - protein, 977 aa, synthetic construct
  REGION 1..977: note = engineered CasX variant
QEIKRINKIRRRLVKDSNTKKAGKTGPMKTLLVRVMTPDLRERLENLRKKPENIPQPISNTSRANLNKLLTDYTEMKKAILHVYWEEFQKDPVGLMSRVAQPASKKIDQNKLKPEMDEKGNLTTAGFACSQCGQPLFVYKLEQVSEKGKAYTNYFGRCNVAEHEKLIQLAQLKPEKDSDEAVTYSLGKFGQRALDFYSIHVTKESTHPVKPLAQIAGNRYASPVGKALSDACMGTIASFLSKYQDIIIEHQKVVKGNQKRLESLRELAGKENLEYPSVTLPPQPHTKEGVDAYNEVIARVRMWVNLNLWQKLKLSRDDAKPLLRLKGFPSFPLVERQANEVDWWDMVCNVKKLINEKKEDGKVFWQNLAGYKRQEALRPYLSSEEDRKKGKKFARYQLGDLLLHLEKKHGEDWGKVYDEAWERIDKKVEGLSKHIKLEEERRSEDAQSKAALTDWLRAKASFVIEGLKEADKDEFCRCELKLQKWYGDLRGKPFAIEAENSILDISGFSKQYNCAFIWQKDGVKKLNLYLIINYFKGGKLRFKKIKPEAFEANRFYTVINKKSGEIVPMEVNFNFDDPNLIILPLAFGKRVGREFIWNDLLSLETGSLKLANGRVIEKTLYNRRTRQDEPALFVALTFERREVLDSSNIKPMNLIGVDRGENIPAVIALTDPEGCPLSRFKDSLGNPTHILRIGESYKEKQRTIQAKKEVEQRRAGGYSRKYASKAKNLADDMVRNTARDLLYYAVTQDAMLIFENLSRGFGRQGKRTFMAERQYTRMEDWLTAKLAYEGLPSKTYLSKTLAQYTSKTCSNCGFTITSADYDRVLEKLKKTATGWMTTINGKELKVEGQITYYNRYKRQNVVKDLSVELDRLSEESVNNDISSWTKGRSGEALSLLKKRFSHRPVQEKFVCLNCGFETHADEQAALNIARSWLFLRSQEYKKYQTNKTTGNTDKRAFVETWQSFYRKKLKEVWKPAV

SEQ ID NO: 45216 - protein, 978 aa, synthetic construct
  REGION 1..978: note = engineered CasX variant
QEIKRINKIRRRLVKDSNTKKAGKTGPMKTLLVRVMTPDLRERLENLRKKPENIPQPISNTSRANLNKLLTDYTEMKKAILHVYWEEFQKDPVGLMSRVAQPASKKIDQNKLKPEMDEKGNLTTAGFACSQCGQPLFVYKLEQVSEKGKAYTNYFGRCNVAEHEKLILLAQLKPEKDSDEAVTYSLGKFGQRALDFYSIHVTKESTHPVKPLAQIAGNRYASYPVGKALSDACMGTIASFLSKYQDIIIEHQKVVKGNQKRLESLRELAGKENLEYPSVTLPPQPHTKEGVDAYNEVIARVRMWVNLNLWQKLKLSRDDAKPLLRLKGFPSFPLVERQANEVDWWDMVCNVKKLINEKKEDGKVFWQNLAIYKRQEALRPYLSSEEDRKKGKKFARYQLGDLLLHLEKKHGEDWGKVYDEAWERIDKKVEGLSKHIKLEEERRSEDAQSKAALTDWLRAKASFVIEGLKEADKDEFCRCELKLQKWYGDLRGKPFAIEAENSILDISGFSKQYNCAFIWQKDGVKKLNLYLIINYFKGGKLRFKKIKPEAFEANRFYTVINKKSGEIVPMEVNFNFDDPNLIILPLAFGKRVGREFIWNDLLSLETGSLKLANGRVIEKTLYNRRTRQDEPALFVALTFERREVLDSSNIKPMNLIGVDRGENIPAVIALTDPEGCPLSRFKDSLGNPTHILRIGESYKEKQRTIQAKKEVEQRRAGGYSRKYASKAKNLADDMVRNTARDLLYYAVTQDAMLIFENLSRGFGRQGKRTFMAERQYTRMEDWLTAKLAYEGLPSKTYLSKTLAQYTSKTCSNCGFTITSADYDRVLEKLKKTATGWMTTINGKELKVEGQITYYNRYKRQNVVKDLSVELDRLSEESVNNDISSWTKGRSGEALSLLKKRFSHRPVQEKFVCLNCGFETHADEQAALNIARSWLFLRSQEYKKYQTNKTTGNTDKRAFVETWQSFYRKKLKEVWKPAV

SEQ ID NO: 45217 - protein, 978 aa, synthetic construct
  REGION 1..978: note = engineered CasX variant
QEIKRINKIRRRLVKDSNTKKAGKTGPMKTLLVRVMTPDLRERLENLRKKPENIPQPISNTSRANLNKLLTDYTEMKKAILHVYWEEFQKDPVGLMSRVAQPASKKIDQNKLKPEMDEKGNLTTAGFACSQCGQPLFVYKLEQVSEKGKAYTNYFGRCNVAEHEKLILLAQLKPEKDSDEAVTYSLGKFGQRALDFYSIHVTKESTHPVKPLAQIAGNRYASHPVGKALSDACMGTIASFLSKYQDIIIEHQKVVKGNQKRLESLRELAGKENLEYPSVTLPPQPHTKEGVDAYNEVIARVRMWVNLNLWQKLKLSRDDAKPLLRLKGFPSFPLVERQANEVDWWDMVCNVKKLINEKKEDGKVFWQNLAIYKRQEALRPYLSSEEDRKKGKKFARYQLGDLLLHLEKKHGEDWGKVYDEAWERIDKKVEGLSKHIKLEEERRSEDAQSKAALTDWLRAKASFVIEGLKEADKDEFCRCELKLQKWYGDLRGKPFAIEAENSILDISGFSKQYNCAFIWQKDGVKKLNLYLIINYFKGGKLRFKKIKPEAFEANRFYTVINKKSGEIVPMEVNFNFDDPNLIILPLAFGKRVGREFIWNDLLSLETGSLKLANGRVIEKTLYNRRTRQDEPALFVALTFERREVLDSSNIKPMNLIGVDRGENIPAVIALTDPEGCPLSRFKDSLGNPTHILRIGESYKEKQRTIQAKKEVEQRRAGGYSRKYASKAKNLADDMVRNTARDLLYYAVTQDAMLIFENLSRGFGRQGKRTFMAERQYTRMEDWLTAKLAYEGLPSKTYLSKTLAQYTSKTCSNCGFTITSADYDRVLEKLKKTATGWMTTINGKELKVEGQITYYNRYKRQNVVKDLSVELDRLSEESVNNDISSWTKGRSGEALSLLKKRFSHRPVQEKFVCLNCGFETHADEQAALNIARSWLFLRSQEYKKYQTNKTTGNTDKRAFVETWQSFYRKKLKEVWKPAV

SEQ ID NO: 45218 - protein, 978 aa, synthetic construct
  REGION 1..978: note = engineered CasX variant
QEIKRINKIRRRLVKDSNTKKAGKTGPMKTLLVRVMTPDLRERLENLRKKPENIPQPISNTSRANLNKLLTDYTEMKKAILHVYWEEFQKDPVGLMSRVAQPASKKIDQNKLKPEMDEKGNLTTAGFACSQCGQPLFVYKLEQVSEKGKAYTNYFGRCNVAEHEKLILLAQLKPEKDSDEAVTYSLGKFGQRALDFYSIHVTKESTHPVKPLAQIAGNRYASSPVGKALSDACMGTIASFLSKYQDIIIEHQKVVKGNQKRLESLRELAGKENLEYPSVTLPPQPHTKEGVDAYNEVIARVRMWVNLNLWQKLKLSRDDAKPLLRLKGFPSFPLVERQANEVDWWDMVCNVKKLINEKKEDGKVFWQNLAIYKRQEALRPYLSSEEDRKKGKKFARYQLGDLLLHLEKKHGEDWGKVYDEAWERIDKKVEGLSKHIKLEEERRSEDAQSKAALTDWLRAKASFVIEGLKEADKDEFCRCELKLQKWYGDLRGKPFAIEAENSILDISGFSKQYNCAFIWQKDGVKKLNLYLIINYFKGGKLRFKKIKPEAFEANRFYTVINKKSGEIVPMEVNFNFDDPNLIILPLAFGKRVGREFIWNDLLSLETGSLKLANGRVIEKTLYNRRTRQDEPALFVALTFERREVLDSSNIKPMNLIGVDRGENIPAVIALTDPEGCPLSRFKDSLGNPTHILRIGESYKEKQRTIQAKKEVEQRRAGGYSRKYASKAKNLADDMVRNTARDLLYYAVTQDAMLIFENLSRGFGRQGKRTFMAERQYTRMEDWLTAKLAYEGLPSKTYLSKTLAQYTSKTCSNCGFTITSADYDRVLEKLKKTATGWMTTINGKELKVEGQITYYNRYKRQNVVKDLSVELDRLSEESVNNDISSWTKGRSGEALSLLKKRFSHRPVQEKFVCLNCGFETHADEQAALNIARSWLFLRSQEYKKYQTNKTTGNTDKRAFVETWQSFYRKKLKEVWKPAV

SEQ ID NO: 45219 - protein, 978 aa, synthetic construct
  REGION 1..978: note = engineered CasX variant
QEIKRINKIRRRLVKDSNTKKAGKTGPMKTLLVRVMTPDLRERLENLRKKPENIPQPISNTSRANLNKLLTDYTEMKKAILHVYWEEFQKDPVGLMSRVAQPASKKIDQNKLKPEMDEKGNLTTAGFACSQCGQPLFVYKLEQVSEKGKAYTNYFGRCNVAEHEKLILLAQLKPEKDSDEAVTYSLGKFGQRALDFYSIHVTKESTHPVKPLAQIAGNRYASTPVGKALSDACMGTIASFLSKYQDIIIEHQKVVKGNQKRLESLRELAGKENLEYPSVTLPPQPHTKEGVDAYNEVIARVRMWVNLNLWQKLKLSRDDAKPLLRLKGFPSFPLVERQANEVDWWDMVCNVKKLINEKKEDGKVFWQNLAIYKRQEALRPYLSSEEDRKKGKKFARYQLGDLLLHLEKKHGEDWGKVYDEAWERIDKKVEGLSKHIKLEEERRSEDAQSKAALTDWLRAKASFVIEGLKEADKDEFCRCELKLQKWYGDLRGKPFAIEAENSILDISGFSKQYNCAFIWQKDGVKKLNLYLIINYFKGGKLRFKKIKPEAFEANRFYTVINKKSGEIVPMEVNFNFDDPNLIILPLAFGKRVGREFIWNDLLSLETGSLKLANGRVIEKTLYNRRTRQDEPALFVALTFERREVLDSSNIKPMNLIGVDRGENIPAVIALTDPEGCPLSRFKDSLGNPTHILRIGESYKEKQRTIQAKKEVEQRRAGGYSRKYASKAKNLADDMVRNTARDLLYYAVTQDAMLIFENLSRGFGRQGKRTFMAERQYTRMEDWLTAKLAYEGLPSKTYLSKTLAQYTSKTCSNCGFTITSADYDRVLEKLKKTATGWMTTINGKELKVEGQITYYNRYKRQNVVKDLSVELDRLSEESVNNDISSWTKGRSGEALSLLKKRFSHRPVQEKFVCLNCGFETHADEQAALNIARSWLFLRSQEYKKYQTNKTTGNTDKRAFVETWQSFYRKKLKEVWKPAV

SEQ ID NO: 45220 - protein, 978 aa, synthetic construct
  REGION 1..978: note = engineered CasX variant
QEIKRINKIRRRLVKDSNTKKAGKTGPMKTLLVRVMTPDLRERLENLRKKPENIPQPISNTSRANLNKLLTDYTEMKKAILHVYWEEFQKDPVGLMSRVAQPASKKIDQNKLKPEMDEKGNLTTAGFACSQCGQPLFVYKLEQVSEKGKAYTNYFGRCNVAEHEKLILLAQLKPEKDSDEAVTYSLGKFGQRALDFYSIHVTKESTHPVKPLAQIAGNRYASAPVGKALSDACMGTIASFLSKYQDIIIEHQKVVKGNQKRLESLRELAGKENLEYPSVTLPPQPHTKEGVDAYNEVIARVRMWVNLNLWQKLKLSRDDAKPLLRLKGFPSFPLVERQANEVDWWDMVCNVKKLINEKKEDGKVFWQNLAIYKRQEALRPYLSSEEDRKKGKKFARYQLGDLLLHLEKKHGEDWGKVYDEAWERIDKKVEGLSKHIKLEEERRSEDAQSKAALTDWLRAKASFVIEGLKEADKDEFCRCELKLQKWYGDLRGKPFAIEAENSILDISGFSKQYNCAFIWQKDGVKKLNLYLIINYFKGGKLRFKKIKPEAFEANRFYTVINKKSGEIVPMEVNFNFDDPNLIILPLAFGKRVGREFIWNDLLSLETGSLKLANGRVIEKTLYNRRTRQDEPALFVALTFERREVLDSSNIKPMNLIGVDRGENIPAVIALTDPEGCPLSRFKDSLGNPTHILRIGESYKEKQRTIQAKKEVEQRRAGGYSRKYASKAKNLADDMVRNTARDLLYYAVTQDAMLIFENLSRGFGRQGKRTFMAERQYTRMEDWLTAKLAYEGLPSKTYLSKTLAQYTSKTCSNCGFTITSADYDRVLEKLKKTATGWMTTINGKELKVEGQITYYNRYKRQNVVKDLSVELDRLSEESVNNDISSWTKGRSGEALSLLKKRFSHRPVQEKFVCLNCGFETHADEQAALNIARSWLFLRSQEYKKYQTNKTTGNTDKRAFVETWQSFYRKKLKEVWKPAV

SEQ ID NO: 45221 - protein, 978 aa, synthetic construct
  REGION 1..978: note = engineered CasX variant
QEIKRINKIRRRLVKDSNTKKAGKTGPMKTLLVRVMTPDLRERLENLRKKPENIPQPISNTSRANLNKLLTDYTEMKKAILHVYWEEFQKDPVGLMSRVAQPASKKIDQNKLKPEMDEKGNLTTAGFACSQCGQPLFVYKLEQVSEKGKAYTNYFGRCNVAEHEKLILLAQLKPEKDSDEAVTYSLGKFGQRALDFYSIHVTKESTHPVKPLAQIAGNRYASVPVGKALSDACMGTIASFLSKYQDIIIEHQKVVKGNQKRLESLRELAGKENLEYPSVTLPPQPHTKEGVDAYNEVIARVRMWVNLNLWQKLKLSRDDAKPLLRLKGFPSFPLVERQANEVDWWDMVCNVKKLINEKKEDGKVFWQNLAIYKRQEALRPYLSSEEDRKKGKKFARYQLGDLLLHLEKKHGEDWGKVYDEAWERIDKKVEGLSKHIKLEEERRSEDAQSKAALTDWLRAKASFVIEGLKEADKDEFCRCELKLQKWYGDLRGKPFAIEAENSILDISGFSKQYNCAFIWQKDGVKKLNLYLIINYFKGGKLRFKKIKPEAFEANRFYTVINKKSGEIVPMEVNFNFDDPNLIILPLAFGKRVGREFIWNDLLSLETGSLKLANGRVIEKTLYNRRTRQDEPALFVALTFERREVLDSSNIKPMNLIGVDRGENIPAVIALTDPEGCPLSRFKDSLGNPTHILRIGESYKEKQRTIQAKKEVEQRRAGGYSRKYASKAKNLADDMVRNTARDLLYYAVTQDAMLIFENLSRGFGRQGKRTFMAERQYTRMEDWLTAKLAYEGLPSKTYLSKTLAQYTSKTCSNCGFTITSADYDRVLEKLKKTATGWMTTINGKELKVEGQITYYNRYKRQNVVKDLSVELDRLSEESVNNDISSWTKGRSGEALSLLKKRFSHRPVQEKFVCLNCGFETHADEQAALNIARSWLFLRSQEYKKYQTNKTTGNTDKRAFVETWQSFYRKKLKEVWKPAV

SEQ ID NO: 45222 - protein, 978 aa, synthetic construct
  REGION 1..978: note = engineered CasX variant
QEIKRINKIRRRLVKDSNTKKAGKTGPMKTLLVRVMTPDLRERLENLRKKPENIPQPISNTSRANLNKLLTDYTEMKKAILHVYWEEFQKDPVGLMSRVAQPASKKIDQNKLKPEMDEKGNLTTAGFACSQCGQPLFVYKLEQVSEKGKAYTNYFGRCNVAEHEKLIKLAQLKPEKDSDEAVTYSLGKFGQRALDFYSIHVTKESTHPVKPLAQIAGNRYASGPVGKALSDACMGTIASFLSKYQDIIIEHQKVVKGNQKRLESLRELAGKENLEYPSVTLPPQPHTKEGVDAYNEVIARVRMWVNLNLWQKLKLSRDDAKPLLRLKGFPSFPLVERQANEVDWWDMVCNVKKLINEKKEDGKVFWQNLAIYKRQEALRPYLSSEEDRKKGKKFARYQLGDLLLHLEKKHGEDWGKVYDEAWERIDKKVEGLSKHIKLEEERRSEDAQSKAALTDWLRAKASFVIEGLKEADKDEFCRCELKLQKWYGDLRGKPFAIEAENSILDISGFSKQYNCAFIWQKDGVKKLNLYLIINYFKGGKLRFKKIKPEAFEANRFYTVINKKSGEIVPMEVNFNFDDPNLIILPLAFGKRVGREFIWNDLLSLETGSLKLANGRVIEKTLYNRRTRQDEPALFVALTFERREVLDSSNIKPMNLIGVDRGENIPAVIALTDPEGCPLSRFKDSLGNPTHILRIGESYKEKQRTIQAKKEVEQRRAGGYSRKYASKAKNLADDMVRNTARDLLYYAVTQDAMLIFENLSRGFGRQGKRTFMAERQYTRMEDWLTAKLAYEGLPSKTYLSKTLAQYTSKTCSNCGFTITSADYDRVLEKLKKTATGWMTTINGKELKVEGQITYYNRYKRQNVVKDLSVELDRLSEESVNNDISSWTKGRSGEALSLLKKRFSHRPVQEKFVCLNCGFETHADEQAALNIARSWLFLRSQEYKKYQTNKTTGNTDKRAFVETWQSFYRKKLKEVWKPAV

SEQ ID NO: 45223 - protein, 977 aa, synthetic construct
  REGION 1..977: note = engineered CasX variant
QEIKRINKIRRRLVKDSNTKKAGKTGPMKTLLVRVMTPDLRERLENLRKKPENIPQPISNTSRANLNKLLTDYTEMKKAILHVYWEEFQKDPVGLMSRVAQPASKKIDQNKLKPEMDEKGNLTTAGFACSQCGQPLFVYKLEQVSEKGKAYTNYFGRCNVAEHEKLILLAQLKPEKDSDEAVTYSLGKFGQRALDFYSIHVTKESTHPVKPLAQIAGNRYASPVGKALSDACMGTIASFLSKYQDIIIEHQKVVKGNQKRLESLRELAGKENLEYPSVTLPPQPHTKEGVDAYNEVIARVRMWVNLNLWQKLKLSRDDAKPLLRLKGFPSFPLVERQANEVDWWDMVCNVKKLINEKKEDGKVFWQNLAIYKRQEALRPYLSSEEDRKKGKKFARYQLGDLLLHLEKKHGEDWGKVYDEAWERIDKKVEGLSKHIKLEEERRSEDAQSKAALTDWLRAKASFVIEGLKEADKDEFCRCELKLQKWYGDLRGKPFAIEAENSILDISGFSKQYNCAFIWQKDGVKKLNLYLIINYFKGGKLRFKKIKPEAFEANRFYTVINKKSGEIVPMEVNFNFDDPNLIILPLAFGKRVGREFIWNDLLSLETGSLKLANGRVIEKTLYNRRTRQDEPALFVALTFERREVLDSSNIKPMNLIGVDRGENIPAVIALTDPEGCPLSRFKDSLGNPTHILRIGESYKEKQRTIQAKKEVEQRRAGGYSRKYASKAKNLADDMVRNTARDLLYYAVTQDAMLIFENLSRGFGRQGKRTFMAERQYTRMEDWLTAKLAYEGLPSKTYLSKTLAQYTSKTCSNCGFTITSADYDRVLEKLKKTATGWMTTINGKELKVEGQITYYNRYKRQNVVKDLSVELDRLSEESVNNDISSWTKGRSGEALSLLKKRFSHRPVQEKFVCLNCGFETHADEQAALNIARSWLFLRSQEYKKYQTNKTTGNTDKRAFVETWQSFYRKKLKEVWKPAV

SEQ ID NO: 45224 - protein, 978 aa, synthetic construct
  REGION 1..978: note = engineered CasX variant
QEIKRINKIRRRLVKDSNTKKAGKTGPMKTLLVRVMTPDLRERLENLRKKPENIPQPISNTSRANLNKLLTDYTEMKKAILHVYWEEFQKDPVGLMSRVAQPASKKIDQNKLKPEMDEKGNLTTAGFACSQCGQPLFVYKLEQVSEKGKAYTNYFGRCNVAEHEKLILLAQLKPEKDSDEAVTYSLGKFGQRALDFYSIHVTKESTHPVKPLAQIAGNRYASYPVGKALSDACMGTIASFLSKYQDIIIEHQKVVKGNQKRLESLRELAGKENLEYPSVTLPPQPHTKEGVDAYNEVIARVRMWVNLNLWQKLKLSRDDAKPLLRLKGFPSFPLVERQANEVDWWDMVCNVKKLINEKKEDGKVFWQNLAGYKRQEALRPYLSSEEDREKGKKFARYQLGDLLLHLEKKHGEDWGKVYDEAWERIDKKVEGLSKHIKLEEERRSEDAQSKAALTDWLRAKASFVIEGLKEADKDEFCRCELKLQKWYGDLRGKPFAIEAENSILDISGFSKQYNCAFIWQKDGVKKLNLYLIINYFKGGKLRFKKIKPEAFEANRFYTVINKKSGEIVPMEVNFNFDDPNLIILPLAFGKRVGREFIWNDLLSLETGSLKLANGRVIEKTLYNRRTRQDEPALFVALTFERREVLDSSNIKPMNLIGVDRGENIPAVIALTDPEGCPLSRFKDSLGNPTHILRIGESYKEKQRTIQAKKEVEQRRAGGYSRKYASKAKNLADDMVRNTARDLLYYAVTQDAMLIFENLSRGFGRQGKRTFMAERQYTRMEDWLTAKLAYEGLPSKTYLSKTLAQYTSKTCSNCGFTITSADYDRVLEKLKKTATGWMTTINGKELKVEGQITYYNRYKRQNVVKDLSVELDRLSEESVNNDISSWTKGRSGEALSLLKKRFSHRPVQEKFVCLNCGFETHADEQAALNIARSWLFLRSQEYKKYQTNKTTGNTDKRAFVETWQSFYRKKLKEVWKPAV

SEQ ID NO: 45225 - protein, 978 aa, synthetic construct
  REGION 1..978: note = engineered CasX variant
QEIKRINKIRRRLVKDSNTKKAGKTGPMKTLLVRVMTPDLRERLENLRKKPENIPQPISNTSRANLNKLLTDYTEMKKAILHVYWEEFQKDPVGLMSRVAQPASKKIDQNKLKPEMDEKGNLTTAGFACSQCGQPLFVYKLEQVSEKGKAYTNYFGRCNVAEHEKLILLAQLKPEKDSDEAVTYSLGKFGQRALDFYSIHVTKESTHPVKPLAQIAGNRYASHPVGKALSDACMGTIASFLSKYQDIIIEHQKVVKGNQKRLESLRELAGKENLEYPSVTLPPQPHTKEGVDAYNEVIARVRMWVNLNLWQKLKLSRDDAKPLLRLKGFPSFPLVERQANEVDWWDMVCNVKKLINEKKEDGKVFWQNLAGYKRQEALRPYLSSEEDREKGKKFARYQLGDLLLHLEKKHGEDWGKVYDEAWERIDKKVEGLSKHIKLEEERRSEDAQSKAALTDWLRAKASFVIEGLKEADKDEFCRCELKLQKWYGDLRGKPFAIEAENSILDISGFSKQYNCAFIWQKDGVKKLNLYLIINYFKGGKLRFKKIKPEAFEANRFYTVINKKSGEIVPMEVNFNFDDPNLIILPLAFGKRVGREFIWNDLLSLETGSLKLANGRVIEKTLYNRRTRQDEPALFVALTFERREVLDSSNIKPMNLIGVDRGENIPAVIALTDPEGCPLSRFKDSLGNPTHILRIGESYKEKQRTIQAKKEVEQRRAGGYSRKYASKAKNLADDMVRNTARDLLYYAVTQDAMLIFENLSRGFGRQGKRTFMAERQYTRMEDWLTAKLAYEGLPSKTYLSKTLAQYTSKTCSNCGFTITSADYDRVLEKLKKTATGWMTTINGKELKVEGQITYYNRYKRQNVVKDLSVELDRLSEESVNNDISSWTKGRSGEALSLLKKRFSHRPVQEKFVCLNCGFETHADEQAALNIARSWLFLRSQEYKKYQTNKTTGNTDKRAFVETWQSFYRKKLKEVWKPAV

SEQ ID NO: 45226 - protein, 978 aa, synthetic construct
  REGION 1..978: note = engineered CasX variant
QEIKRINKIRRRLVKDSNTKKAGKTGPMKTLLVRVMTPDLRERLENLRKKPENIPQPISNTSRANLNKLLTDYTEMKKAILHVYWEEFQKDPVGLMSRVAQPASKKIDQNKLKPEMDEKGNLTTAGFACSQCGQPLFVYKLEQVSEKGKAYTNYFGRCNVAEHEKLILLAQLKPEKDSDEAVTYSLGKFGQRALDFYSIHVTKESTHPVKPLAQIAGNRYASSPVGKALSDACMGTIASFLSKYQDIIIEHQKVVKGNQKRLESLRELAGKENLEYPSVTLPPQPHTKEGVDAYNEVIARVRMWVNLNLWQKLKLSRDDAKPLLRLKGFPSFPLVERQANEVDWWDMVCNVKKLINEKKEDGKVFWQNLAGYKRQEALRPYLSSEEDREKGKKFARYQLGDLLLHLEKKHGEDWGKVYDEAWERIDKKVEGLSKHIKLEEERRSEDAQSKAALTDWLRAKASFVIEGLKEADKDEFCRCELKLQKWYGDLRGKPFAIEAENSILDISGFSKQYNCAFIWQKDGVKKLNLYLIINYFKGGKLRFKKIKPEAFEANRFYTVINKKSGEIVPMEVNFNFDDPNLIILPLAFGKRVGREFIWNDLLSLETGSLKLANGRVIEKTLYNRRTRQDEPALFVALTFERREVLDSSNIKPMNLIGVDRGENIPAVIALTDPEGCPLSRFKDSLGNPTHILRIGESYKEKQRTIQAKKEVEQRRAGGYSRKYASKAKNLADDMVRNTARDLLYYAVTQDAMLIFENLSRGFGRQGKRTFMAERQYTRMEDWLTAKLAYEGLPSKTYLSKTLAQYTSKTCSNCGFTITSADYDRVLEKLKKTATGWMTTINGKELKVEGQITYYNRYKRQNVVKDLSVELDRLSEESVNNDISSWTKGRSGEALSLLKKRFSHRPVQEKFVCLNCGFETHADEQAALNIARSWLFLRSQEYKKYQTNKTTGNTDKRAFVETWQSFYRKKLKEVWKPAV

SEQ ID NO: 45227 - protein, 978 aa, synthetic construct
  REGION 1..978: note = engineered CasX variant
QEIKRINKIRRRLVKDSNTKKAGKTGPMKTLLVRVMTPDLRERLENLRKKPENIPQPISNTSRANLNKLLTDYTEMKKAILHVYWEEFQKDPVGLMSRVAQPASKKIDQNKLKPEMDEKGNLTTAGFACSQCGQPLFVYKLEQVSEKGKAYTNYFGRCNVAEHEKLILLAQLKPEKDSDEAVTYSLGKFGQRALDFYSIHVTKESTHPVKPLAQIAGNRYASTPVGKALSDACMGTIASFLSKYQDIIIEHQKVVKGNQKRLESLRELAGKENLEYPSVTLPPQPHTKEGVDAYNEVIARVRMWVNLNLWQKLKLSRDDAKPLLRLKGFPSFPLVERQANEVDWWDMVCNVKKLINEKKEDGKVFWQNLAGYKRQEALRPYLSSEEDREKGKKFARYQLGDLLLHLEKKHGEDWGKVYDEAWERIDKKVEGLSKHIKLEEERRSEDAQSKAALTDWLRAKASFVIEGLKEADKDEFCRCELKLQKWYGDLRGKPFAIEAENSILDISGFSKQYNCAFIWQKDGVKKLNLYLIINYFKGGKLRFKKIKPEAFEANRFYTVINKKSGEIVPMEVNFNFDDPNLIILPLAFGKRVGREFIWNDLLSLETGSLKLANGRVIEKTLYNRRTRQDEPALFVALTFERREVLDSSNIKPMNLIGVDRGENIPAVIALTDPEGCPLSRFKDSLGNPTHILRIGESYKEKQRTIQAKKEVEQRRAGGYSRKYASKAKNLADDMVRNTARDLLYYAVTQDAMLIFENLSRGFGRQGKRTFMAERQYTRMEDWLTAKLAYEGLPSKTYLSKTLAQYTSKTCSNCGFTITSADYDRVLEKLKKTATGWMTTINGKELKVEGQITYYNRYKRQNVVKDLSVELDRLSEESVNNDISSWTKGRSGEALSLLKKRFSHRPVQEKFVCLNCGFETHADEQAALNIARSWLFLRSQEYKKYQTNKTTGNTDKRAFVETWQSFYRKKLKEVWKPAV

SEQ ID NO: 45228 - protein, 978 aa, synthetic construct
  REGION 1..978: note = engineered CasX variant
QEIKRINKIRRRLVKDSNTKKAGKTGPMKTLLVRVMTPDLRERLENLRKKPENIPQPISNTSRANLNKLLTDYTEMKKAILHVYWEEFQKDPVGLMSRVAQPASKKIDQNKLKPEMDEKGNLTTAGFACSQCGQPLFVYKLEQVSEKGKAYTNYFGRCNVAEHEKLILLAQLKPEKDSDEAVTYSLGKFGQRALDFYSIHVTKESTHPVKPLAQIAGNRYASAPVGKALSDACMGTIASFLSKYQDIIIEHQKVVKGNQKRLESLRELAGKENLEYPSVTLPPQPHTKEGVDAYNEVIARVRMWVNLNLWQKLKLSRDDAKPLLRLKGFPSFPLVERQANEVDWWDMVCNVKKLINEKKEDGKVFWQNLAGYKRQEALRPYLSSEEDREKGKKFARYQLGDLLLHLEKKHGEDWGKVYDEAWERIDKKVEGLSKHIKLEEERRSEDAQSKAALTDWLRAKASFVIEGLKEADKDEFCRCELKLQKWYGDLRGKPFAIEAENSILDISGFSKQYNCAFIWQKDGVKKLNLYLIINYFKGGKLRFKKIKPEAFEANRFYTVINKKSGEIVPMEVNFNFDDPNLIILPLAFGKRVGREFIWNDLLSLETGSLKLANGRVIEKTLYNRRTRQDEPALFVALTFERREVLDSSNIKPMNLIGVDRGENIPAVIALTDPEGCPLSRFKDSLGNPTHILRIGESYKEKQRTIQAKKEVEQRRAGGYSRKYASKAKNLADDMVRNTARDLLYYAVTQDAMLIFENLSRGFGRQGKRTFMAERQYTRMEDWLTAKLAYEGLPSKTYLSKTLAQYTSKTCSNCGFTITSADYDRVLEKLKKTATGWMTTINGKELKVEGQITYYNRYKRQNVVKDLSVELDRLSEESVNNDISSWTKGRSGEALSLLKKRFSHRPVQEKFVCLNCGFETHADEQAALNIARSWLFLRSQEYKKYQTNKTTGNTDKRAFVETWQSFYRKKLKEVWKPAV

SEQ ID NO: 45229 - protein, 978 aa, synthetic construct
  REGION 1..978: note = engineered CasX variant
QEIKRINKIRRRLVKDSNTKKAGKTGPMKTLLVRVMTPDLRERLENLRKKPENIPQPISNTSRANLNKLLTDYTEMKKAILHVYWEEFQKDPVGLMSRVAQPASKKIDQNKLKPEMDEKGNLTTAGFACSQCGQPLFVYKLEQVSEKGKAYTNYFGRCNVAEHEKLILLAQLKPEKDSDEAVTYSLGKFGQRALDFYSIHVTKESTHPVKPLAQIAGNRYASVPVGKALSDACMGTIASFLSKYQDIIIEHQKVVKGNQKRLESLRELAGKENLEYPSVTLPPQPHTKEGVDAYNEVIARVRMWVNLNLWQKLKLSRDDAKPLLRLKGFPSFPLVERQANEVDWWDMVCNVKKLINEKKEDGKVFWQNLAGYKRQEALRPYLSSEEDREKGKKFARYQLGDLLLHLEKKHGEDWGKVYDEAWERIDKKVEGLSKHIKLEEERRSEDAQSKAALTDWLRAKASFVIEGLKEADKDEFCRCELKLQKWYGDLRGKPFAIEAENSILDISGFSKQYNCAFIWQKDGVKKLNLYLIINYFKGGKLRFKKIKPEAFEANRFYTVINKKSGEIVPMEVNFNFDDPNLIILPLAFGKRVGREFIWNDLLSLETGSLKLANGRVIEKTLYNRRTRQDEPALFVALTFERREVLDSSNIKPMNLIGVDRGENIPAVIALTDPEGCPLSRFKDSLGNPTHILRIGESYKEKQRTIQAKKEVEQRRAGGYSRKYASKAKNLADDMVRNTARDLLYYAVTQDAMLIFENLSRGFGRQGKRTFMAERQYTRMEDWLTAKLAYEGLPSKTYLSKTLAQYTSKTCSNCGFTITSADYDRVLEKLKKTATGWMTTINGKELKVEGQITYYNRYKRQNVVKDLSVELDRLSEESVNNDISSWTKGRSGEALSLLKKRFSHRPVQEKFVCLNCGFETHADEQAALNIARSWLFLRSQEYKKYQTNKTTGNTDKRAFVETWQSFYRKKLKEVWKPAV

SEQ ID NO: 45230 - protein, 978 aa, synthetic construct
  REGION 1..978: note = engineered CasX variant
QEIKRINKIRRRLVKDSNTKKAGKTGPMKTLLVRVMTPDLRERLENLRKKPENIPQPISNTSRANLNKLLTDYTEMKKAILHVYWEEFQKDPVGLMSRVAQPASKKIDQNKLKPEMDEKGNLTTAGFACSQCGQPLFVYKLEQVSEKGKAYTNYFGRCNVAEHEKLIKLAQLKPEKDSDEAVTYSLGKFGQRALDFYSIHVTKESTHPVKPLAQIAGNRYASGPVGKALSDACMGTIASFLSKYQDIIIEHQKVVKGNQKRLESLRELAGKENLEYPSVTLPPQPHTKEGVDAYNEVIARVRMWVNLNLWQKLKLSRDDAKPLLRLKGFPSFPLVERQANEVDWWDMVCNVKKLINEKKEDGKVFWQNLAGYKRQEALRPYLSSEEDREKGKKFARYQLGDLLLHLEKKHGEDWGKVYDEAWERIDKKVEGLSKHIKLEEERRSEDAQSKAALTDWLRAKASFVIEGLKEADKDEFCRCELKLQKWYGDLRGKPFAIEAENSILDISGFSKQYNCAFIWQKDGVKKLNLYLIINYFKGGKLRFKKIKPEAFEANRFYTVINKKSGEIVPMEVNFNFDDPNLIILPLAFGKRVGREFIWNDLLSLETGSLKLANGRVIEKTLYNRRTRQDEPALFVALTFERREVLDSSNIKPMNLIGVDRGENIPAVIALTDPEGCPLSRFKDSLGNPTHILRIGESYKEKQRTIQAKKEVEQRRAGGYSRKYASKAKNLADDMVRNTARDLLYYAVTQDAMLIFENLSRGFGRQGKRTFMAERQYTRMEDWLTAKLAYEGLPSKTYLSKTLAQYTSKTCSNCGFTITSADYDRVLEKLKKTATGWMTTINGKELKVEGQITYYNRYKRQNVVKDLSVELDRLSEESVNNDISSWTKGRSGEALSLLKKRFSHRPVQEKFVCLNCGFETHADEQAALNIARSWLFLRSQEYKKYQTNKTTGNTDKRAFVETWQSFYRKKLKEVWKPAV

SEQ ID NO: 45231 - protein, 977 aa, synthetic construct
  REGION 1..977: note = engineered CasX variant
QEIKRINKIRRRLVKDSNTKKAGKTGPMKTLLVRVMTPDLRERLENLRKKPENIPQPISNTSRANLNKLLTDYTEMKKAILHVYWEEFQKDPVGLMSRVAQPASKKIDQNKLKPEMDEKGNLTTAGFACSQCGQPLFVYKLEQVSEKGKAYTNYFGRCNVAEHEKLILLAQLKPEKDSDEAVTYSLGKFGQRALDFYSIHVTKESTHPVKPLAQIAGNRYASPVGKALSDACMGTIASFLSKYQDIIIEHQKVVKGNQKRLESLRELAGKENLEYPSVTLPPQPHTKEGVDAYNEVIARVRMWVNLNLWQKLKLSRDDAKPLLRLKGFPSFPLVERQANEVDWWDMVCNVKKLINEKKEDGKVFWQNLAGYKRQEALRPYLSSEEDREKGKKFARYQLGDLLLHLEKKHGEDWGKVYDEAWERIDKKVEGLSKHIKLEEERRSEDAQSKAALTDWLRAKASFVIEGLKEADKDEFCRCELKLQKWYGDLRGKPFAIEAENSILDISGFSKQYNCAFIWQKDGVKKLNLYLIINYFKGGKLRFKKIKPEAFEANRFYTVINKKSGEIVPMEVNFNFDDPNLIILPLAFGKRVGREFIWNDLLSLETGSLKLANGRVIEKTLYNRRTRQDEPALFVALTFERREVLDSSNIKPMNLIGVDRGENIPAVIALTDPEGCPLSRFKDSLGNPTHILRIGESYKEKQRTIQAKKEVEQRRAGGYSRKYASKAKNLADDMVRNTARDLLYYAVTQDAMLIFENLSRGFGRQGKRTFMAERQYTRMEDWLTAKLAYEGLPSKTYLSKTLAQYTSKTCSNCGFTITSADYDRVLEKLKKTATGWMTTINGKELKVEGQITYYNRYKRQNVVKDLSVELDRLSEESVNNDISSWTKGRSGEALSLLKKRFSHRPVQEKFVCLNCGFETHADEQAALNIARSWLFLRSQEYKKYQTNKTTGNTDKRAFVETWQSFYRKKLKEVWKPAV

SEQ ID NO: 45232 - protein, 978 aa, synthetic construct
  REGION 1..978: note = engineered CasX variant
QEIKRINKIRRRLVKDSNTKKAGKTGPMKTLLVRVMTPDLRERLENLRKKPENIPQPISNTSRANLNKLLTDYTEMKKAILHVYWEEFQKDPVGLMSRVAQPASKKIDQNKLKPEMDEKGNLTTAGFACSQCGQPLFVYKLEQVSEKGKAYTNYFGRCNVAEHEKLILLAQLKPEKDSDEAVTYSLGKFGQRALDFYSIHVTKESTHPVKPLAQIAGNRYASYPVGKALSDACMGTIASFLSKYQDIIIEHQKVVKGNQKRLESLRELAGKENLEYPSVTLPPQPHTKEGVDAYNEVIARVRMWVNLNLWQKLKLSRDDAKPLLRLKGFPSFPLVERQANEVDWWDMVCNVKKLINEKKEDGKVFWQNLAGYKRQEALRPYLSSEEDRKKGKKFARYQLGDLLLHLEKKHGEDWGKVYDEAWERIDKKVEGLSKHIKLEEERRSEDAQSKAALTDWLRAKASFVIEGLKEADKDEFCRCELKLQKWYGDLRGKPFAIEAENSILDISGFSKQYNCAFIWQKDGVKKLNLYLIINYFKGGKLRFKKIKPEAFEANRFYTVINKKSGEIVIMEVNFNFDDPNLIILPLAFGKRVGREFIWNDLLSLETGSLKLANGRVIEKTLYNRRTRQDEPALFVALTFERREVLDSSNIKPMNLIGVDRGENIPAVIALTDPEGCPLSRFKDSLGNPTHILRIGESYKEKQRTIQAKKEVEQRRAGGYSRKYASKAKNLADDMVRNTARDLLYYAVTQDAMLIFENLSRGFGRQGKRTFMAERQYTRMEDWLTAKLAYEGLPSKTYLSKTLAQYTSKTCSNCGFTITSADYDRVLEKLKKTATGWMTTINGKELKVEGQITYYNRYKRQNVVKDLSVELDRLSEESVNNDISSWTKGRSGEALSLLKKRFSHRPVQEKFVCLNCGFETHADEQAALNIARSWLFLRSQEYKKYQTNKTTGNTDKRAFVETWQSFYRKKLKEVWKPAV

SEQ ID NO: 45233 - protein, 978 aa, synthetic construct
  REGION 1..978: note = engineered CasX variant
QEIKRINKIRRRLVKDSNTKKAGKTGPMKTLLVRVMTPDLRERLENLRKKPENIPQPISNTSRANLNKLLTDYTEMKKAILHVYWEEFQKDPVGLMSRVAQPASKKIDQNKLKPEMDEKGNLTTAGFACSQCGQPLFVYKLEQVSEKGKAYTNYFGRCNVAEHEKLILLAQLKPEKDSDEAVTYSLGKFGQRALDFYSIHVTKESTHPVKPLAQIAGNRYASHPVGKALSDACMGTIASFLSKYQDIIIEHQKVVKGNQKRLESLRELAGKENLEYPSVTLPPQPHTKEGVDAYNEVIARVRMWVNLNLWQKLKLSRDDAKPLLRLKGFPSFPLVERQANEVDWWDMVCNVKKLINEKKEDGKVFWQNLAGYKRQEALRPYLSSEEDRKKGKKFARYQLGDLLLHLEKKHGEDWGKVYDEAWERIDKKVEGLSKHIKLEEERRSEDAQSKAALTDWLRAKASFVIEGLKEADKDEFCRCELKLQKWYGDLRGKPFAIEAENSILDISGFSKQYNCAFIWQKDGVKKLNLYLIINYFKGGKLRFKKIKPEAFEANRFYTVINKKSGEIVIMEVNFNFDDPNLIILPLAFGKRVGREFIWNDLLSLETGSLKLANGRVIEKTLYNRRTRQDEPALFVALTFERREVLDSSNIKPMNLIGVDRGENIPAVIALTDPEGCPLSRFKDSLGNPTHILRIGESYKEKQRTIQAKKEVEQRRAGGYSRKYASKAKNLADDMVRNTARDLLYYAVTQDAMLIFENLSRGFGRQGKRTFMAERQYTRMEDWLTAKLAYEGLPSKTYLSKTLAQYTSKTCSNCGFTITSADYDRVLEKLKKTATGWMTTINGKELKVEGQITYYNRYKRQNVVKDLSVELDRLSEESVNNDISSWTKGRSGEALSLLKKRFSHRPVQEKFVCLNCGFETHADEQAALNIARSWLFLRSQEYKKYQTNKTTGNTDKRAFVETWQSFYRKKLKEVWKPAV

SEQ ID NO: 45234 - protein, 978 aa, synthetic construct
  REGION 1..978: note = engineered CasX variant
QEIKRINKIRRRLVKDSNTKKAGKTGPMKTLLVRVMTPDLRERLENLRKKPENIPQPISNTSRANLNKLLTDYTEMKKAILHVYWEEFQKDPVGLMSRVAQPASKKIDQNKLKPEMDEKGNLTTAGFACSQCGQPLFVYKLEQVSEKGKAYTNYFGRCNVAEHEKLILLAQLKPEKDSDEAVTYSLGKFGQRALDFYSIHVTKESTHPVKPLAQIAGNRYASSPVGKALSDACMGTIASFLSKYQDIIIEHQKVVKGNQKRLESLRELAGKENLEYPSVTLPPQPHTKEGVDAYNEVIARVRMWVNLNLWQKLKLSRDDAKPLLRLKGFPSFPLVERQANEVDWWDMVCNVKKLINEKKEDGKVFWQNLAGYKRQEALRPYLSSEEDRKKGKKFARYQLGDLLLHLEKKHGEDWGKVYDEAWERIDKKVEGLSKHIKLEEERRSEDAQSKAALTDWLRAKASFVIEGLKEADKDEFCRCELKLQKWYGDLRGKPFAIEAENSILDISGFSKQYNCAFIWQKDGVKKLNLYLIINYFKGGKLRFKKIKPEAFEANRFYTVINKKSGEIVIMEVNFNFDDPNLIILPLAFGKRVGREFIWNDLLSLETGSLKLANGRVIEKTLYNRRTRQDEPALFVALTFERREVLDSSNIKPMNLIGVDRGENIPAVIALTDPEGCPLSRFKDSLGNPTHILRIGESYKEKQRTIQAKKEVEQRRAGGYSRKYASKAKNLADDMVRNTARDLLYYAVTQDAMLIFENLSRGFGRQGKRTFMAERQYTRMEDWLTAKLAYEGLPSKTYLSKTLAQYTSKTCSNCGFTITSADYDRVLEKLKKTATGWMTTINGKELKVEGQITYYNRYKRQNVVKDLSVELDRLSEESVNNDISSWTKGRSGEALSLLKKRFSHRPVQEKFVCLNCGFETHADEQAALNIARSWLFLRSQEYKKYQTNKTTGNTDKRAFVETWQSFYRKKLKEVWKPAV

SEQ ID NO: 45235 - protein, 978 aa, synthetic construct
  REGION 1..978: note = engineered CasX variant
QEIKRINKIRRRLVKDSNTKKAGKTGPMKTLLVRVMTPDLRERLENLRKKPENIPQPISNTSRANLNKLLTDYTEMKKAILHVYWEEFQKDPVGLMSRVAQPASKKIDQNKLKPEMDEKGNLTTAGFACSQCGQPLFVYKLEQVSEKGKAYTNYFGRCNVAEHEKLILLAQLKPEKDSDEAVTYSLGKFGQRALDFYSIHVTKESTHPVKPLAQIAGNRYASTPVGKALSDACMGTIASFLSKYQDIIIEHQKVVKGNQKRLESLRELAGKENLEYPSVTLPPQPHTKEGVDAYNEVIARVRMWVNLNLWQKLKLSRDDAKPLLRLKGFPSFPLVERQANEVDWWDMVCNVKKLINEKKEDGKVFWQNLAGYKRQEALRPYLSSEEDRKKGKKFARYQLGDLLLHLEKKHGEDWGKVYDEAWERIDKKVEGLSKHIKLEEERRSEDAQSKAALTDWLRAKASFVIEGLKEADKDEFCRCELKLQKWYGDLRGKPFAIEAENSILDISGFSKQYNCAFIWQKDGVKKLNLYLIINYFKGGKLRFKKIKPEAFEANRFYTVINKKSGEIVIMEVNFNFDDPNLIILPLAFGKRVGREFIWNDLLSLETGSLKLANGRVIEKTLYNRRTRQDEPALFVALTFERREVLDSSNIKPMNLIGVDRGENIPAVIALTDPEGCPLSRFKDSLGNPTHILRIGESYKEKQRTIQAKKEVEQRRAGGYSRKYASKAKNLADDMVRNTARDLLYYAVTQDAMLIFENLSRGFGRQGKRTFMAERQYTRMEDWLTAKLAYEGLPSKTYLSKTLAQYTSKTCSNCGFTITSADYDRVLEKLKKTATGWMTTINGKELKVEGQITYYNRYKRQNVVKDLSVELDRLSEESVNNDISSWTKGRSGEALSLLKKRFSHRPVQEKFVCLNCGFETHADEQAALNIARSWLFLRSQEYKKYQTNKTTGNTDKRAFVETWQSFYRKKLKEVWKPAV

SEQ ID NO: 45236 - protein, 978 aa, synthetic construct
  REGION 1..978: note = engineered CasX variant
QEIKRINKIRRRLVKDSNTKKAGKTGPMKTLLVRVMTPDLRERLENLRKKPENIPQPISNTSRANLNKLLTDYTEMKKAILHVYWEEFQKDPVGLMSRVAQPASKKIDQNKLKPEMDEKGNLTTAGFACSQCGQPLFVYKLEQVSEKGKAYTNYFGRCNVAEHEKLILLAQLKPEKDSDEAVTYSLGKFGQRALDFYSIHVTKESTHPVKPLAQIAGNRYASAPVGKALSDACMGTIASFLSKYQDIIIEHQKVVKGNQKRLESLRELAGKENLEYPSVTLPPQPHTKEGVDAYNEVIARVRMWVNLNLWQKLKLSRDDAKPLLRLKGFPSFPLVERQANEVDWWDMVCNVKKLINEKKEDGKVFWQNLAGYKRQEALRPYLSSEEDRKKGKKFARYQLGDLLLHLEKKHGEDWGKVYDEAWERIDKKVEGLSKHIKLEEERRSEDAQSKAALTDWLRAKASFVIEGLKEADKDEFCRCELKLQKWYGDLRGKPFAIEAENSILDISGFSKQYNCAFIWQKDGVKKLNLYLIINYFKGGKLRFKKIKPEAFEANRFYTVINKKSGEIVIMEVNFNFDDPNLIILPLAFGKRVGREFIWNDLLSLETGSLKLANGRVIEKTLYNRRTRQDEPALFVALTFERREVLDSSNIKPMNLIGVDRGENIPAVIALTDPEGCPLSRFKDSLGNPTHILRIGESYKEKQRTIQAKKEVEQRRAGGYSRKYASKAKNLADDMVRNTARDLLYYAVTQDAMLIFENLSRGFGRQGKRTFMAERQYTRMEDWLTAKLAYEGLPSKTYLSKTLAQYTSKTCSNCGFTITSADYDRVLEKLKKTATGWMTTINGKELKVEGQITYYNRYKRQNVVKDLSVELDRLSEESVNNDISSWTKGRSGEALSLLKKRFSHRPVQEKFVCLNCGFETHADEQAALNIARSWLFLRSQEYKKYQTNKTTGNTDKRAFVETWQSFYRKKLKEVWKPAV

SEQ ID NO: 45237 - protein, 978 aa, synthetic construct
  REGION 1..978: note = engineered CasX variant
QEIKRINKIRRRLVKDSNTKKAGKTGPMKTLLVRVMTPDLRERLENLRKKPENIPQPISNTSRANLNKLLTDYTEMKKAILHVYWEEFQKDPVGLMSRVAQPASKKIDQNKLKPEMDEKGNLTTAGFACSQCGQPLFVYKLEQVSEKGKAYTNYFGRCNVAEHEKLILLAQLKPEKDSDEAVTYSLGKFGQRALDFYSIHVTKESTHPVKPLAQIAGNRYASVPVGKALSDACMGTIASFLSKYQDIIIEHQKVVKGNQKRLESLRELAGKENLEYPSVTLPPQPHTKEGVDAYNEVIARVRMWVNLNLWQKLKLSRDDAKPLLRLKGFPSFPLVERQANEVDWWDMVCNVKKLINEKKEDGKVFWQNLAGYKRQEALRPYLSSEEDRKKGKKFARYQLGDLLLHLEKKHGEDWGKVYDEAWERIDKKVEGLSKHIKLEEERRSEDAQSKAALTDWLRAKASFVIEGLKEADKDEFCRCELKLQKWYGDLRGKPFAIEAENSILDISGFSKQYNCAFIWQKDGVKKLNLYLIINYFKGGKLRFKKIKPEAFEANRFYTVINKKSGEIVIMEVNFNFDDPNLIILPLAFGKRVGREFIWNDLLSLETGSLKLANGRVIEKTLYNRRTRQDEPALFVALTFERREVLDSSNIKPMNLIGVDRGENIPAVIALTDPEGCPLSRFKDSLGNPTHILRIGESYKEKQRTIQAKKEVEQRRAGGYSRKYASKAKNLADDMVRNTARDLLYYAVTQDAMLIFENLSRGFGRQGKRTFMAERQYTRMEDWLTAKLAYEGLPSKTYLSKTLAQYTSKTCSNCGFTITSADYDRVLEKLKKTATGWMTTINGKELKVEGQITYYNRYKRQNVVKDLSVELDRLSEESVNNDISSWTKGRSGEALSLLKKRFSHRPVQEKFVCLNCGFETHADEQAALNIARSWLFLRSQEYKKYQTNKTTGNTDKRAFVETWQSFYRKKLKEVWKPAV

SEQ ID NO: 45238 - protein, 978 aa, synthetic construct
  REGION 1..978: note = engineered CasX variant
QEIKRINKIRRRLVKDSNTKKAGKTGPMKTLLVRVMTPDLRERLENLRKKPENIPQPISNTSRANLNKLLTDYTEMKKAILHVYWEEFQKDPVGLMSRVAQPASKKIDQNKLKPEMDEKGNLTTAGFACSQCGQPLFVYKLEQVSEKGKAYTNYFGRCNVAEHEKLIKLAQLKPEKDSDEAVTYSLGKFGQRALDFYSIHVTKESTHPVKPLAQIAGNRYASGPVGKALSDACMGTIASFLSKYQDIIIEHQKVVKGNQKRLESLRELAGKENLEYPSVTLPPQPHTKEGVDAYNEVIARVRMWVNLNLWQKLKLSRDDAKPLLRLKGFPSFPLVERQANEVDWWDMVCNVKKLINEKKEDGKVFWQNLAGYKRQEALRPYLSSEEDRKKGKKFARYQLGDLLLHLEKKHGEDWGKVYDEAWERIDKKVEGLSKHIKLEEERRSEDAQSKAALTDWLRAKASFVIEGLKEADKDEFCRCELKLQKWYGDLRGKPFAIEAENSILDISGFSKQYNCAFIWQKDGVKKLNLYLIINYFKGGKLRFKKIKPEAFEANRFYTVINKKSGEIVIMEVNFNFDDPNLIILPLAFGKRVGREFIWNDLLSLETGSLKLANGRVIEKTLYNRRTRQDEPALFVALTFERREVLDSSNIKPMNLIGVDRGENIPAVIALTDPEGCPLSRFKDSLGNPTHILRIGESYKEKQRTIQAKKEVEQRRAGGYSRKYASKAKNLADDMVRNTARDLLYYAVTQDAMLIFENLSRGFGRQGKRTFMAERQYTRMEDWLTAKLAYEGLPSKTYLSKTLAQYTSKTCSNCGFTITSADYDRVLEKLKKTATGWMTTINGKELKVEGQITYYNRYKRQNVVKDLSVELDRLSEESVNNDISSWTKGRSGEALSLLKKRFSHRPVQEKFVCLNCGFETHADEQAALNIARSWLFLRSQEYKKYQTNKTTGNTDKRAFVETWQSFYRKKLKEVWKPAV

SEQ ID NO: 45239 - protein, 977 aa, synthetic construct
  REGION 1..977: note = engineered CasX variant
QEIKRINKIRRRLVKDSNTKKAGKTGPMKTLLVRVMTPDLRERLENLRKKPENIPQPISNTSRANLNKLLTDYTEMKKAILHVYWEEFQKDPVGLMSRVAQPASKKIDQNKLKPEMDEKGNLTTAGFACSQCGQPLFVYKLEQVSEKGKAYTNYFGRCNVAEHEKLILLAQLKPEKDSDEAVTYSLGKFGQRALDFYSIHVTKESTHPVKPLAQIAGNRYASPVGKALSDACMGTIASFLSKYQDIIIEHQKVVKGNQKRLESLRELAGKENLEYPSVTLPPQPHTKEGVDAYNEVIARVRMWVNLNLWQKLKLSRDDAKPLLRLKGFPSFPLVERQANEVDWWDMVCNVKKLINEKKEDGKVFWQNLAGYKRQEALRPYLSSEEDRKKGKKFARYQLGDLLLHLEKKHGEDWGKVYDEAWERIDKKVEGLSKHIKLEEERRSEDAQSKAALTDWLRAKASFVIEGLKEADKDEFCRCELKLQKWYGDLRGKPFAIEAENSILDISGFSKQYNCAFIWQKDGVKKLNLYLIINYFKGGKLRFKKIKPEAFEANRFYTVINKKSGEIVIMEVNFNFDDPNLIILPLAFGKRVGREFIWNDLLSLETGSLKLANGRVIEKTLYNRRTRQDEPALFVALTFERREVLDSSNIKPMNLIGVDRGENIPAVIALTDPEGCPLSRFKDSLGNPTHILRIGESYKEKQRTIQAKKEVEQRRAGGYSRKYASKAKNLADDMVRNTARDLLYYAVTQDAMLIFENLSRGFGRQGKRTFMAERQYTRMEDWLTAKLAYEGLPSKTYLSKTLAQYTSKTCSNCGFTITSADYDRVLEKLKKTATGWMTTINGKELKVEGQITYYNRYKRQNVVKDLSVELDRLSEESVNNDISSWTKGRSGEALSLLKKRFSHRPVQEKFVCLNCGFETHADEQAALNIARSWLFLRSQEYKKYQTNKTTGNTDKRAFVETWQSFYRKKLKEVWKPAV

SEQ ID NO: 45240 - protein, 979 aa, synthetic construct
  REGION 1..979: note = engineered CasX variant
QEIKRINKIRRRLVKDSNTKKAGKTGPMKTLLVRVMTPDLRERLENLRKKPENIPQPISNTSRANLNKLLTDYTEMKKAILHVYWEEFQKDPVGLMSRVAQPASKKIDQNKLKPEMDEKGNLTTAGFACSQCGQPLFVYKLEQVSEKGKAYTNYFGRCNVAEHEKLILLAQLKPEKDSDEAVTYSLGKFGQRALDFYSIHVTKESTHPVKPLAQIAGNRYASYPVGKALSGACMGTIASFLSKYQDIIIEHQKVVKGNQKRLESLRELAGKENLEYPSVTLPPQPHTKEGVDAYNEVIARVRMWVNLNLWQKLKLSRDDAKPLLRLKGFPSFPLVERQANEVDWWDMVCNVKKLINEKKEDGKVFWQNLAGYKRQEALRPYLSSEEDRKKGKKFARYQLGDLLLHLEKKHGEDWGKVYDEAWERIDKKVEGLSKHIKLEEERRSEDAQSKAALTDWLRAKASFVIEGLKEADKDEFCRCELKLQKWYGDLRGKPFAIEAENSILDISGFSKQYNCAFIWQKDGVKKLNLYLIINYFKGGKLRFKKIKPEAFEANRFYTVINKKSGEIVPMEVNFNFDDPNLIILPLAFGKRQGREFIWNDLLSLETGSLKLANGRVIEKTLYNRRTRQDEPALFVALTFERREVLDSSNIKTPMNLIGVDRGENIPAVIALTDPEGCPLSRFKDSLGNPTHILRIGESYKEKQRTIQAKKEVEQRRAGGYSRKYASKAKNLADDMVRNTARDLLYYAVTQDAMLIFENLSRGFGRQGKRTFMAERQYTRMEDWLTAKLAYEGLPSKTYLSKTLAQYTSKTCSNCGFTITSADYDRVLEKLKKTATGWMTTINGKELKVEGQITYYNRYKRQNVVKDLSVELDRLSEESVNNDISSWTKGRSGEALSLLKKRFSHRPVQEKFVCLNCGFETHADEQAALNIARSWLFLRSQEYKKYQTNKTTGNTDKRAFVETWQSFYRKKLKEVWKPAV

SEQ ID NO: 45241 - protein, 979 aa, synthetic construct
  REGION 1..979: note = engineered CasX variant
QEIKRINKIRRRLVKDSNTKKAGKTGPMKTLLVRVMTPDLRERLENLRKKPENIPQPISNTSRANLNKLLTDYTEMKKAILHVYWEEFQKDPVGLMSRVAQPASKKIDQNKLKPEMDEKGNLTTAGFACSQCGQPLFVYKLEQVSEKGKAYTNYFGRCNVAEHEKLILLAQLKPEKDSDEAVTYSLGKFGQRALDFYSIHVTKESTHPVKPLAQIAGNRYASHPVGKALSGACMGTIASFLSKYQDIIIEHQKVVKGNQKRLESLRELAGKENLEYPSVTLPPQPHTKEGVDAYNEVIARVRMWVNLNLWQKLKLSRDDAKPLLRLKGFPSFPLVERQANEVDWWDMVCNVKKLINEKKEDGKVFWQNLAGYKRQEALRPYLSSEEDRKKGKKFARYQLGDLLLHLEKKHGEDWGKVYDEAWERIDKKVEGLSKHIKLEEERRSEDAQSKAALTDWLRAKASFVIEGLKEADKDEFCRCELKLQKWYGDLRGKPFAIEAENSILDISGFSKQYNCAFIWQKDGVKKLNLYLIINYFKGGKLRFKKIKPEAFEANRFYTVINKKSGEIVPMEVNFNFDDPNLIILPLAFGKRQGREFIWNDLLSLETGSLKLANGRVIEKTLYNRRTRQDEPALFVALTFERREVLDSSNIKTPMNLIGVDRGENIPAVIALTDPEGCPLSRFKDSLGNPTHILRIGESYKEKQRTIQAKKEVEQRRAGGYSRKYASKAKNLADDMVRNTARDLLYYAVTQDAMLIFENLSRGFGRQGKRTFMAERQYTRMEDWLTAKLAYEGLPSKTYLSKTLAQYTSKTCSNCGFTITSADYDRVLEKLKKTATGWMTTINGKELKVEGQITYYNRYKRQNVVKDLSVELDRLSEESVNNDISSWTKGRSGEALSLLKKRFSHRPVQEKFVCLNCGFETHADEQAALNIARSWLFLRSQEYKKYQTNKTTGNTDKRAFVETWQSFYRKKLKEVWKPAV

SEQ ID NO: 45242 - protein, 979 aa, synthetic construct
  REGION 1..979: note = engineered CasX variant
QEIKRINKIRRRLVKDSNTKKAGKTGPMKTLLVRVMTPDLRERLENLRKKPENIPQPISNTSRANLNKLLTDYTEMKKAILHVYWEEFQKDPVGLMSRVAQPASKKIDQNKLKPEMDEKGNLTTAGFACSQCGQPLFVYKLEQVSEKGKAYTNYFGRCNVAEHEKLILLAQLKPEKDSDEAVTYSLGKFGQRALDFYSIHVTKESTHPVKPLAQIAGNRYASSPVGKALSGACMGTIASFLSKYQDIIIEHQKVVKGNQKRLESLRELAGKENLEYPSVTLPPQPHTKEGVDAYNEVIARVRMWVNLNLWQKLKLSRDDAKPLLRLKGFPSFPLVERQANEVDWWDMVCNVKKLINEKKEDGKVFWQNLAGYKRQEALRPYLSSEEDRKKGKKFARYQLGDLLLHLEKKHGEDWGKVYDEAWERIDKKVEGLSKHIKLEEERRSEDAQSKAALTDWLRAKASFVIEGLKEADKDEFCRCELKLQKWYGDLRGKPFAIEAENSILDISGFSKQYNCAFIWQKDGVKKLNLYLIINYFKGGKLRFKKIKPEAFEANRFYTVINKKSGEIVPMEVNFNFDDPNLIILPLAFGKRQGREFIWNDLLSLETGSLKLANGRVIEKTLYNRRTRQDEPALFVALTFERREVLDSSNIKTPMNLIGVDRGENIPAVIALTDPEGCPLSRFKDSLGNPTHILRIGESYKEKQRTIQAKKEVEQRRAGGYSRKYASKAKNLADDMVRNTARDLLYYAVTQDAMLIFENLSRGFGRQGKRTFMAERQYTRMEDWLTAKLAYEGLPSKTYLSKTLAQYTSKTCSNCGFTITSADYDRVLEKLKKTATGWMTTINGKELKVEGQITYYNRYKRQNVVKDLSVELDRLSEESVNNDISSWTKGRSGEALSLLKKRFSHRPVQEKFVCLNCGFETHADEQAALNIARSWLFLRSQEYKKYQTNKTTGNTDKRAFVETWQSFYRKKLKEVWKPAV

SEQ ID NO: 45243 - protein, 979 aa, synthetic construct
  REGION 1..979: note = engineered CasX variant
QEIKRINKIRRRLVKDSNTKKAGKTGPMKTLLVRVMTPDLRERLENLRKKPENIPQPISNTSRANLNKLLTDYTEMKKAILHVYWEEFQKDPVGLMSRVAQPASKKIDQNKLKPEMDEKGNLTTAGFACSQCGQPLFVYKLEQVSEKGKAYTNYFGRCNVAEHEKLILLAQLKPEKDSDEAVTYSLGKFGQRALDFYSIHVTKESTHPVKPLAQIAGNRYASTPVGKALSGACMGTIASFLSKYQDIIIEHQKVVKGNQKRLESLRELAGKENLEYPSVTLPPQPHTKEGVDAYNEVIARVRMWVNLNLWQKLKLSRDDAKPLLRLKGFPSFPLVERQANEVDWWDMVCNVKKLINEKKEDGKVFWQNLAGYKRQEALRPYLSSEEDRKKGKKFARYQLGDLLLHLEKKHGEDWGKVYDEAWERIDKKVEGLSKHIKLEEERRSEDAQSKAALTDWLRAKASFVIEGLKEADKDEFCRCELKLQKWYGDLRGKPFAIEAENSILDISGFSKQYNCAFIWQKDGVKKLNLYLIINYFKGGKLRFKKIKPEAFEANRFYTVINKKSGEIVPMEVNFNFDDPNLIILPLAFGKRQGREFIWNDLLSLETGSLKLANGRVIEKTLYNRRTRQDEPALFVALTFERREVLDSSNIKTPMNLIGVDRGENIPAVIALTDPEGCPLSRFKDSLGNPTHILRIGESYKEKQRTIQAKKEVEQRRAGGYSRKYASKAKNLADDMVRNTARDLLYYAVTQDAMLIFENLSRGFGRQGKRTFMAERQYTRMEDWLTAKLAYEGLPSKTYLSKTLAQYTSKTCSNCGFTITSADYDRVLEKLKKTATGWMTTINGKELKVEGQITYYNRYKRQNVVKDLSVELDRLSEESVNNDISSWTKGRSGEALSLLKKRFSHRPVQEKFVCLNCGFETHADEQAALNIARSWLFLRSQEYKKYQTNKTTGNTDKRAFVETWQSFYRKKLKEVWKPAV

SEQ ID NO: 45244 - protein, 979 aa, synthetic construct
  REGION 1..979: note = engineered CasX variant
QEIKRINKIRRRLVKDSNTKKAGKTGPMKTLLVRVMTPDLRERLENLRKKPENIPQPISNTSRANLNKLLTDYTEMKKAILHVYWEEFQKDPVGLMSRVAQPASKKIDQNKLKPEMDEKGNLTTAGFACSQCGQPLFVYKLEQVSEKGKAYTNYFGRCNVAEHEKLILLAQLKPEKDSDEAVTYSLGKFGQRALDFYSIHVTKESTHPVKPLAQIAGNRYASAPVGKALSGACMGTIASFLSKYQDIIIEHQKVVKGNQKRLESLRELAGKENLEYPSVTLPPQPHTKEGVDAYNEVIARVRMWVNLNLWQKLKLSRDDAKPLLRLKGFPSFPLVERQANEVDWWDMVCNVKKLINEKKEDGKVFWQNLAGYKRQEALRPYLSSEEDRKKGKKFARYQLGDLLLHLEKKHGEDWGKVYDEAWERIDKKVEGLSKHIKLEEERRSEDAQSKAALTDWLRAKASFVIEGLKEADKDEFCRCELKLQKWYGDLRGKPFAIEAENSILDISGFSKQYNCAFIWQKDGVKKLNLYLIINYFKGGKLRFKKIKPEAFEANRFYTVINKKSGEIVPMEVNFNFDDPNLIILPLAFGKRQGREFIWNDLLSLETGSLKLANGRVIEKTLYNRRTRQDEPALFVALTFERREVLDSSNIKTPMNLIGVDRGENIPAVIALTDPEGCPLSRFKDSLGNPTHILRIGESYKEKQRTIQAKKEVEQRRAGGYSRKYASKAKNLADDMVRNTARDLLYYAVTQDAMLIFENLSRGFGRQGKRTFMAERQYTRMEDWLTAKLAYEGLPSKTYLSKTLAQYTSKTCSNCGFTITSADYDRVLEKLKKTATGWMTTINGKELKVEGQITYYNRYKRQNVVKDLSVELDRLSEESVNNDISSWTKGRSGEALSLLKKRFSHRPVQEKFVCLNCGFETHADEQAALNIARSWLFLRSQEYKKYQTNKTTGNTDKRAFVETWQSFYRKKLKEVWKPAV

SEQ ID NO: 45245 - protein, 979 aa, synthetic construct
  REGION 1..979: note = engineered CasX variant
QEIKRINKIRRRLVKDSNTKKAGKTGPMKTLLVRVMTPDLRERLENLRKKPENIPQPISNTSRANLNKLLTDYTEMKKAILHVYWEEFQKDPVGLMSRVAQPASKKIDQNKLKPEMDEKGNLTTAGFACSQCGQPLFVYKLEQVSEKGKAYTNYFGRCNVAEHEKLILLAQLKPEKDSDEAVTYSLGKFGQRALDFYSIHVTKESTHPVKPLAQIAGNRYASVPVGKALSGACMGTIASFLSKYQDIIIEHQKVVKGNQKRLESLRELAGKENLEYPSVTLPPQPHTKEGVDAYNEVIARVRMWVNLNLWQKLKLSRDDAKPLLRLKGFPSFPLVERQANEVDWWDMVCNVKKLINEKKEDGKVFWQNLAGYKRQEALRPYLSSEEDRKKGKKFARYQLGDLLLHLEKKHGEDWGKVYDEAWERIDKKVEGLSKHIKLEEERRSEDAQSKAALTDWLRAKASFVIEGLKEADKDEFCRCELKLQKWYGDLRGKPFAIEAENSILDISGFSKQYNCAFIWQKDGVKKLNLYLIINYFKGGKLRFKKIKPEAFEANRFYTVINKKSGEIVPMEVNFNFDDPNLIILPLAFGKRQGREFIWNDLLSLETGSLKLANGRVIEKTLYNRRTRQDEPALFVALTFERREVLDSSNIKTPMNLIGVDRGENIPAVIALTDPEGCPLSRFKDSLGNPTHILRIGESYKEKQRTIQAKKEVEQRRAGGYSRKYASKAKNLADDMVRNTARDLLYYAVTQDAMLIFENLSRGFGRQGKRTFMAERQYTRMEDWLTAKLAYEGLPSKTYLSKTLAQYTSKTCSNCGFTITSADYDRVLEKLKKTATGWMTTINGKELKVEGQITYYNRYKRQNVVKDLSVELDRLSEESVNNDISSWTKGRSGEALSLLKKRFSHRPVQEKFVCLNCGFETHADEQAALNIARSWLFLRSQEYKKYQTNKTTGNTDKRAFVETWQSFYRKKLKEVWKPAV

SEQ ID NO: 45246 - protein, 979 aa, synthetic construct
  REGION 1..979: note = engineered CasX variant
QEIKRINKIRRRLVKDSNTKKAGKTGPMKTLLVRVMTPDLRERLENLRKKPENIPQPISNTSRANLNKLLTDYTEMKKAILHVYWEEFQKDPVGLMSRVAQPASKKIDQNKLKPEMDEKGNLTTAGFACSQCGQPLFVYKLEQVSEKGKAYTNYFGRCNVAEHEKLIKLAQLKPEKDSDEAVTYSLGKFGQRALDFYSIHVTKESTHPVKPLAQIAGNRYASGPVGKALSGACMGTIASFLSKYQDIIIEHQKVVKGNQKRLESLRELAGKENLEYPSVTLPPQPHTKEGVDAYNEVIARVRMWVNLNLWQKLKLSRDDAKPLLRLKGFPSFPLVERQANEVDWWDMVCNVKKLINEKKEDGKVFWQNLAGYKRQEALRPYLSSEEDRKKGKKFARYQLGDLLLHLEKKHGEDWGKVYDEAWERIDKKVEGLSKHIKLEEERRSEDAQSKAALTDWLRAKASFVIEGLKEADKDEFCRCELKLQKWYGDLRGKPFAIEAENSILDISGFSKQYNCAFIWQKDGVKKLNLYLIINYFKGGKLRFKKIKPEAFEANRFYTVINKKSGEIVPMEVNFNFDDPNLIILPLAFGKRQGREFIWNDLLSLETGSLKLANGRVIEKTLYNRRTRQDEPALFVALTFERREVLDSSNIKTPMNLIGVDRGENIPAVIALTDPEGCPLSRFKDSLGNPTHILRIGESYKEKQRTIQAKKEVEQRRAGGYSRKYASKAKNLADDMVRNTARDLLYYAVTQDAMLIFENLSRGFGRQGKRTFMAERQYTRMEDWLTAKLAYEGLPSKTYLSKTLAQYTSKTCSNCGFTITSADYDRVLEKLKKTATGWMTTINGKELKVEGQITYYNRYKRQNVVKDLSVELDRLSEESVNNDISSWTKGRSGEALSLLKKRFSHRPVQEKFVCLNCGFETHADEQAALNIARSWLFLRSQEYKKYQTNKTTGNTDKRAFVETWQSFYRKKLKEVWKPAV

SEQ ID NO: 45247 - protein, 978 aa, synthetic construct
  REGION 1..978: note = engineered CasX variant
QEIKRINKIRRRLVKDSNTKKAGKTGPMKTLLVRVMTPDLRERLENLRKKPENIPQPISNTSRANLNKLLTDYTEMKKAILHVYWEEFQKDPVGLMSRVAQPASKKIDQNKLKPEMDEKGNLTTAGFACSQCGQPLFVYKLEQVSEKGKAYTNYFGRCNVAEHEKLILLAQLKPEKDSDEAVTYSLGKFGQRALDFYSIHVTKESTHPVKPLAQIAGNRYASPVGKALSGACMGTIASFLSKYQDIIIEHQKVVKGNQKRLESLRELAGKENLEYPSVTLPPQPHTKEGVDAYNEVIARVRMWVNLNLWQKLKLSRDDAKPLLRLKGFPSFPLVERQANEVDWWDMVCNVKKLINEKKEDGKVFWQNLAGYKRQEALRPYLSSEEDRKKGKKFARYQLGDLLLHLEKKHGEDWGKVYDEAWERIDKKVEGLSKHIKLEEERRSEDAQSKAALTDWLRAKASFVIEGLKEADKDEFCRCELKLQKWYGDLRGKPFAIEAENSILDISGFSKQYNCAFIWQKDGVKKLNLYLIINYFKGGKLRFKKIKPEAFEANRFYTVINKKSGEIVPMEVNFNFDDPNLIILPLAFGKRQGREFIWNDLLSLETGSLKLANGRVIEKTLYNRRTRQDEPALFVALTFERREVLDSSNIKTPMNLIGVDRGENIPAVIALTDPEGCPLSRFKDSLGNPTHILRIGESYKEKQRTIQAKKEVEQRRAGGYSRKYASKAKNLADDMVRNTARDLLYYAVTQDAMLIFENLSRGFGRQGKRTFMAERQYTRMEDWLTAKLAYEGLPSKTYLSKTLAQYTSKTCSNCGFTITSADYDRVLEKLKKTATGWMTTINGKELKVEGQITYYNRYKRQNVVKDLSVELDRLSEESVNNDISSWTKGRSGEALSLLKKRFSHRPVQEKFVCLNCGFETHADEQAALNIARSWLFLRSQEYKKYQTNKTTGNTDKRAFVETWQSFYRKKLKEVWKPAV

SEQ ID NO: 45248 - protein, 979 aa, synthetic construct
  REGION 1..979: note = engineered CasX variant
QEIKRINKIRRRLVKDSNTKKAGKTGPMKTLLVRVMTPDLRERLENLRKKPENIPQPISNTSRANLNKLLTDYTEMKKAILHVYWEEFQKDPVGLMSRVAQPASKKIDQNKLKPEMDEKGNLTTAGFACSQCGQPLFVYKLEQVSEKGKAYTNYFGRCNVAEHEKLILLAQLKPEKDSDEAVTYSLGKFGQRALDFYSIHVTKESTHPVKPLAQIAGNRYASYPVGKALSDACMGTIASFLSKYQDIIIEHQKVVKGNQKRLESLRELAGKENLEYPSVTLPPQPHTKEGVDAYNEVIARVRMWVNLNLWQKLKLSRDDAKPLLRLKNFPSFPLVERQANEVDWWDMVCNVKKLINEKKEDGKVFWQNLAGYKRQEALRPYLSSEEDRKKGKKFARYQLGDLLLHLEKKHGEDWGKVYDEAWERIDKKVEGLSKHIKLEEERRSEDAQSKAALTDWLRAKASFVIEGLKEADKDEFCRCELKLQKWYGDLRGKPFAIEAENSILDISGFSKQYNCAFIWQKDGVKKLNLYLIINYFKGGKLRFKKIKPEAFEANRFYTVINKKSGEIVPMEVNFNFDDPNLIILPLAFGKRQGREFIWNDLLSLETGSLKLANGRVIEKTLYNRRTRQDEPALFVALTFERREVLDSSNIKTPMNLIGVDRGENIPAVIALTDPEGCPLSRFKDSLGNPTHILRIGESYKEKQRTIQAKKEVEQRRAGGYSRKYASKAKNLADDMVRNTARDLLYYAVTQDAMLIFENLSRGFGRQGKRTFMAERQYTRMEDWLTAKLAYEGLPSKTYLSKTLAQYTSKTCSNCGFTITSADYDRVLEKLKKTATGWMTTINGKELKVEGQITYYNRYKRQNVVKDLSVELDRLSEESVNNDISSWTKGRSGEALSLLKKRFSHRPVQEKFVCLNCGFETHADEQAALNIARSWLFLRSQEYKKYQTNKTTGNTDKRAFVETWQSFYRKKLKEVWKPAV

SEQ ID NO: 45249 - protein, 979 aa, synthetic construct
  REGION 1..979: note = engineered CasX variant
QEIKRINKIRRRLVKDSNTKKAGKTGPMKTLLVRVMTPDLRERLENLRKKPENIPQPISNTSRANLNKLLTDYTEMKKAILHVYWEEFQKDPVGLMSRVAQPASKKIDQNKLKPEMDEKGNLTTAGFACSQCGQPLFVYKLEQVSEKGKAYTNYFGRCNVAEHEKLILLAQLKPEKDSDEAVTYSLGKFGQRALDFYSIHVTKESTHPVKPLAQIAGNRYASHPVGKALSDACMGTIASFLSKYQDIIIEHQKVVKGNQKRLESLRELAGKENLEYPSVTLPPQPHTKEGVDAYNEVIARVRMWVNLNLWQKLKLSRDDAKPLLRLKNFPSFPLVERQANEVDWWDMVCNVKKLINEKKEDGKVFWQNLAGYKRQEALRPYLSSEEDRKKGKKFARYQLGDLLLHLEKKHGEDWGKVYDEAWERIDKKVEGLSKHIKLEEERRSEDAQSKAALTDWLRAKASFVIEGLKEADKDEFCRCELKLQKWYGDLRGKPFAIEAENSILDISGFSKQYNCAFIWQKDGVKKLNLYLIINYFKGGKLRFKKIKPEAFEANRFYTVINKKSGEIVPMEVNFNFDDPNLIILPLAFGKRQGREFIWNDLLSLETGSLKLANGRVIEKTLYNRRTRQDEPALFVALTFERREVLDSSNIKTPMNLIGVDRGENIPAVIALTDPEGCPLSRFKDSLGNPTHILRIGESYKEKQRTIQAKKEVEQRRAGGYSRKYASKAKNLADDMVRNTARDLLYYAVTQDAMLIFENLSRGFGRQGKRTFMAERQYTRMEDWLTAKLAYEGLPSKTYLSKTLAQYTSKTCSNCGFTITSADYDRVLEKLKKTATGWMTTINGKELKVEGQITYYNRYKRQNVVKDLSVELDRLSEESVNNDISSWTKGRSGEALSLLKKRFSHRPVQEKFVCLNCGFETHADEQAALNIARSWLFLRSQEYKKYQTNKTTGNTDKRAFVETWQSFYRKKLKEVWKPAV

SEQ ID NO: 45250 - protein, 979 aa, synthetic construct
  REGION 1..979: note = engineered CasX variant
QEIKRINKIRRRLVKDSNTKKAGKTGPMKTLLVRVMTPDLRERLENLRKKPENIPQPISNTSRANLNKLLTDYTEMKKAILHVYWEEFQKDPVGLMSRVAQPASKKIDQNKLKPEMDEKGNLTTAGFACSQCGQPLFVYKLEQVSEKGKAYTNYFGRCNVAEHEKLILLAQLKPEKDSDEAVTYSLGKFGQRALDFYSIHVTKESTHPVKPLAQIAGNRYASSPVGKALSDACMGTIASFLSKYQDIIIEHQKVVKGNQKRLESLRELAGKENLEYPSVTLPPQPHTKEGVDAYNEVIARVRMWVNLNLWQKLKLSRDDAKPLLRLKNFPSFPLVERQANEVDWWDMVCNVKKLINEKKEDGKVFWQNLAGYKRQEALRPYLSSEEDRKKGKKFARYQLGDLLLHLEKKHGEDWGKVYDEAWERIDKKVEGLSKHIKLEEERRSEDAQSKAALTDWLRAKASFVIEGLKEADKDEFCRCELKLQKWYGDLRGKPFAIEAENSILDISGFSKQYNCAFIWQKDGVKKLNLYLIINYFKGGKLRFKKIKPEAFEANRFYTVINKKSGEIVPMEVNFNFDDPNLIILPLAFGKRQGREFIWNDLLSLETGSLKLANGRVIEKTLYNRRTRQDEPALFVALTFERREVLDSSNIKTPMNLIGVDRGENIPAVIALTDPEGCPLSRFKDSLGNPTHILRIGESYKEKQRTIQAKKEVEQRRAGGYSRKYASKAKNLADDMVRNTARDLLYYAVTQDAMLIFENLSRGFGRQGKRTFMAERQYTRMEDWLTAKLAYEGLPSKTYLSKTLAQYTSKTCSNCGFTITSADYDRVLEKLKKTATGWMTTINGKELKVEGQITYYNRYKRQNVVKDLSVELDRLSEESVNNDISSWTKGRSGEALSLLKKRFSHRPVQEKFVCLNCGFETHADEQAALNIARSWLFLRSQEYKKYQTNKTTGNTDKRAFVETWQSFYRKKLKEVWKPAV

SEQ ID NO: 45251 - protein, 979 aa, synthetic construct
  REGION 1..979: note = engineered CasX variant
QEIKRINKIRRRLVKDSNTKKAGKTGPMKTLLVRVMTPDLRERLENLRKKPENIPQPISNTSRANLNKLLTDYTEMKKAILHVYWEEFQKDPVGLMSRVAQPASKKIDQNKLKPEMDEKGNLTTAGFACSQCGQPLFVYKLEQVSEKGKAYTNYFGRCNVAEHEKLILLAQLKPEKDSDEAVTYSLGKFGQRALDFYSIHVTKESTHPVKPLAQIAGNRYASTPVGKALSDACMGTIASFLSKYQDIIIEHQKVVKGNQKRLESLRELAGKENLEYPSVTLPPQPHTKEGVDAYNEVIARVRMWVNLNLWQKLKLSRDDAKPLLRLKNFPSFPLVERQANEVDWWDMVCNVKKLINEKKEDGKVFWQNLAGYKRQEALRPYLSSEEDRKKGKKFARYQLGDLLLHLEKKHGEDWGKVYDEAWERIDKKVEGLSKHIKLEEERRSEDAQSKAALTDWLRAKASFVIEGLKEADKDEFCRCELKLQKWYGDLRGKPFAIEAENSILDISGFSKQYNCAFIWQKDGVKKLNLYLIINYFKGGKLRFKKIKPEAFEANRFYTVINKKSGEIVPMEVNFNFDDPNLIILPLAFGKRQGREFIWNDLLSLETGSLKLANGRVIEKTLYNRRTRQDEPALFVALTFERREVLDSSNIKTPMNLIGVDRGENIPAVIALTDPEGCPLSRFKDSLGNPTHILRIGESYKEKQRTIQAKKEVEQRRAGGYSRKYASKAKNLADDMVRNTARDLLYYAVTQDAMLIFENLSRGFGRQGKRTFMAERQYTRMEDWLTAKLAYEGLPSKTYLSKTLAQYTSKTCSNCGFTITSADYDRVLEKLKKTATGWMTTINGKELKVEGQITYYNRYKRQNVVKDLSVELDRLSEESVNNDISSWTKGRSGEALSLLKKRFSHRPVQEKFVCLNCGFETHADEQAALNIARSWLFLRSQEYKKYQTNKTTGNTDKRAFVETWQSFYRKKLKEVWKPAV

SEQ ID NO: 45252 - protein, 979 aa, synthetic construct
  REGION 1..979: note = engineered CasX variant
QEIKRINKIRRRLVKDSNTKKAGKTGPMKTLLVRVMTPDLRERLENLRKKPENIPQPISNTSRANLNKLLTDYTEMKKAILHVYWEEFQKDPVGLMSRVAQPASKKIDQNKLKPEMDEKGNLTTAGFACSQCGQPLFVYKLEQVSEKGKAYTNYFGRCNVAEHEKLILLAQLKPEKDSDEAVTYSLGKFGQRALDFYSIHVTKESTHPVKPLAQIAGNRYASAPVGKALSDACMGTIASFLSKYQDIIIEHQKVVKGNQKRLESLRELAGKENLEYPSVTLPPQPHTKEGVDAYNEVIARVRMWVNLNLWQKLKLSRDDAKPLLRLKNFPSFPLVERQANEVDWWDMVCNVKKLINEKKEDGKVFWQNLAGYKRQEALRPYLSSEEDRKKGKKFARYQLGDLLLHLEKKHGEDWGKVYDEAWERIDKKVEGLSKHIKLEEERRSEDAQSKAALTDWLRAKASFVIEGLKEADKDEFCRCELKLQKWYGDLRGKPFAIEAENSILDISGFSKQYNCAFIWQKDGVKKLNLYLIINYFKGGKLRFKKIKPEAFEANRFYTVINKKSGEIVPMEVNFNFDDPNLIILPLAFGKRQGREFIWNDLLSLETGSLKLANGRVIEKTLYNRRTRQDEPALFVALTFERREVLDSSNIKTPMNLIGVDRGENIPAVIALTDPEGCPLSRFKDSLGNPTHILRIGESYKEKQRTIQAKKEVEQRRAGGYSRKYASKAKNLADDMVRNTARDLLYYAVTQDAMLIFENLSRGFGRQGKRTFMAERQYTRMEDWLTAKLAYEGLPSKTYLSKTLAQYTSKTCSNCGFTITSADYDRVLEKLKKTATGWMTTINGKELKVEGQITYYNRYKRQNVVKDLSVELDRLSEESVNNDISSWTKGRSGEALSLLKKRFSHRPVQEKFVCLNCGFETHADEQAALNIARSWLFLRSQEYKKYQTNKTTGNTDKRAFVETWQSFYRKKLKEVWKPAV

SEQ ID NO: 45253 - protein, 979 aa, synthetic construct
  REGION 1..979: note = engineered CasX variant
QEIKRINKIRRRLVKDSNTKKAGKTGPMKTLLVRVMTPDLRERLENLRKKPENIPQPISNTSRANLNKLLTDYTEMKKAILHVYWEEFQKDPVGLMSRVAQPASKKIDQNKLKPEMDEKGNLTTAGFACSQCGQPLFVYKLEQVSEKGKAYTNYFGRCNVAEHEKLILLAQLKPEKDSDEAVTYSLGKFGQRALDFYSIHVTKESTHPVKPLAQIAGNRYASVPVGKALSDACMGTIASFLSKYQDIIIEHQKVVKGNQKRLESLRELAGKENLEYPSVTLPPQPHTKEGVDAYNEVIARVRMWVNLNLWQKLKLSRDDAKPLLRLKNFPSFPLVERQANEVDWWDMVCNVKKLINEKKEDGKVFWQNLAGYKRQEALRPYLSSEEDRKKGKKFARYQLGDLLLHLEKKHGEDWGKVYDEAWERIDKKVEGLSKHIKLEEERRSEDAQSKAALTDWLRAKASFVIEGLKEADKDEFCRCELKLQKWYGDLRGKPFAIEAENSILDISGFSKQYNCAFIWQKDGVKKLNLYLIINYFKGGKLRFKKIKPEAFEANRFYTVINKKSGEIVPMEVNFNFDDPNLIILPLAFGKRQGREFIWNDLLSLETGSLKLANGRVIEKTLYNRRTRQDEPALFVALTFERREVLDSSNIKTPMNLIGVDRGENIPAVIALTDPEGCPLSRFKDSLGNPTHILRIGESYKEKQRTIQAKKEVEQRRAGGYSRKYASKAKNLADDMVRNTARDLLYYAVTQDAMLIFENLSRGFGRQGKRTFMAERQYTRMEDWLTAKLAYEGLPSKTYLSKTLAQYTSKTCSNCGFTITSADYDRVLEKLKKTATGWMTTINGKELKVEGQITYYNRYKRQNVVKDLSVELDRLSEESVNNDISSWTKGRSGEALSLLKKRFSHRPVQEKFVCLNCGFETHADEQAALNIARSWLFLRSQEYKKYQTNKTTGNTDKRAFVETWQSFYRKKLKEVWKPAV

SEQ ID NO: 45254 - protein, 979 aa, synthetic construct
  REGION 1..979: note = engineered CasX variant
QEIKRINKIRRRLVKDSNTKKAGKTGPMKTLLVRVMTPDLRERLENLRKKPENIPQPISNTSRANLNKLLTDYTEMKKAILHVYWEEFQKDPVGLMSRVAQPASKKIDQNKLKPEMDEKGNLTTAGFACSQCGQPLFVYKLEQVSEKGKAYTNYFGRCNVAEHEKLIKLAQLKPEKDSDEAVTYSLGKFGQRALDFYSIHVTKESTHPVKPLAQIAGNRYASGPVGKALSDACMGTIASFLSKYQDIIIEHQKVVKGNQKRLESLRELAGKENLEYPSVTLPPQPHTKEGVDAYNEVIARVRMWVNLNLWQKLKLSRDDAKPLLRLKNFPSFPLVERQANEVDWWDMVCNVKKLINEKKEDGKVFWQNLAGYKRQEALRPYLSSEEDRKKGKKFARYQLGDLLLHLEKKHGEDWGKVYDEAWERIDKKVEGLSKHIKLEEERRSEDAQSKAALTDWLRAKASFVIEGLKEADKDEFCRCELKLQKWYGDLRGKPFAIEAENSILDISGFSKQYNCAFIWQKDGVKKLNLYLIINYFKGGKLRFKKIKPEAFEANRFYTVINKKSGEIVPMEVNFNFDDPNLIILPLAFGKRQGREFIWNDLLSLETGSLKLANGRVIEKTLYNRRTRQDEPALFVALTFERREVLDSSNIKTPMNLIGVDRGENIPAVIALTDPEGCPLSRFKDSLGNPTHILRIGESYKEKQRTIQAKKEVEQRRAGGYSRKYASKAKNLADDMVRNTARDLLYYAVTQDAMLIFENLSRGFGRQGKRTFMAERQYTRMEDWLTAKLAYEGLPSKTYLSKTLAQYTSKTCSNCGFTITSADYDRVLEKLKKTATGWMTTINGKELKVEGQITYYNRYKRQNVVKDLSVELDRLSEESVNNDISSWTKGRSGEALSLLKKRFSHRPVQEKFVCLNCGFETHADEQAALNIARSWLFLRSQEYKKYQTNKTTGNTDKRAFVETWQSFYRKKLKEVWKPAV

SEQ ID NO: 45255 - protein, 978 aa, synthetic construct
  REGION 1..978: note = engineered CasX variant
QEIKRINKIRRRLVKDSNTKKAGKTGPMKTLLVRVMTPDLRERLENLRKKPENIPQPISNTSRANLNKLLTDYTEMKKAILHVYWEEFQKDPVGLMSRVAQPASKKIDQNKLKPEMDEKGNLTTAGFACSQCGQPLFVYKLEQVSEKGKAYTNYFGRCNVAEHEKLILLAQLKPEKDSDEAVTYSLGKFGQRALDFYSIHVTKESTHPVKPLAQIAGNRYASPVGKALSDACMGTIASFLSKYQDIIIEHQKVVKGNQKRLESLRELAGKENLEYPSVTLPPQPHTKEGVDAYNEVIARVRMWVNLNLWQKLKLSRDDAKPLLRLKNFPSFPLVERQANEVDWWDMVCNVKKLINEKKEDGKVFWQNLAGYKRQEALRPYLSSEEDRKKGKKFARYQLGDLLLHLEKKHGEDWGKVYDEAWERIDKKVEGLSKHIKLEEERRSEDAQSKAALTDWLRAKASFVIEGLKEADKDEFCRCELKLQKWYGDLRGKPFAIEAENSILDISGFSKQYNCAFIWQKDGVKKLNLYLIINYFKGGKLRFKKIKPEAFEANRFYTVINKKSGEIVPMEVNFNFDDPNLIILPLAFGKRQGREFIWNDLLSLETGSLKLANGRVIEKTLYNRRTRQDEPALFVALTFERREVLDSSNIKTPMNLIGVDRGENIPAVIALTDPEGCPLSRFKDSLGNPTHILRIGESYKEKQRTIQAKKEVEQRRAGGYSRKYASKAKNLADDMVRNTARDLLYYAVTQDAMLIFENLSRGFGRQGKRTFMAERQYTRMEDWLTAKLAYEGLPSKTYLSKTLAQYTSKTCSNCGFTITSADYDRVLEKLKKTATGWMTTINGKELKVEGQITYYNRYKRQNVVKDLSVELDRLSEESVNNDISSWTKGRSGEALSLLKKRFSHRPVQEKFVCLNCGFETHADEQAALNIARSWLFLRSQEYKKYQTNKTTGNTDKRAFVETWQSFYRKKLKEVWKPAV

SEQ ID NO: 45256 - protein, 979 aa, synthetic construct
  REGION 1..979: note = engineered CasX variant
QEIKRINKIRRRLVKDSNTKKAGKTGPMKTLLVRVMTPDLRERLENLRKKPENIPQPISNTSRANLNKLLTDYTEMKKAILHVYWEEFQKDPVGLMSRVAQPASKKIDQNKLKPEMDEKGNLTTAGFACSQCGQPLFVYKLEQVSEKGKAYTNYFGRCNVAEHEKLILLAQLKPEKDSDEAVTYSLGKFGQRALDFYSIHVTKESTHPVKPLAQIAGNRYASYPVGKALSDACMGTIASFLSKYQDIIIEHQKVVKGNQKRLESLRELAGKENLEYPSVTLPPQPHTKEGVDAYNEVIARVRMWVNLNLWQKLKLSRDDAKPLLRLKGFPSFPLVERQANEVDWWDMVCNVKKLINEKKEDGKVFWQNLAGYKRQEALRPYLSSEEDRKKGKKFARYQLGDLLNHLEKKHGEDWGKVYDEAWERIDKKVEGLSKHIKLEEERRSEDAQSKAALTDWLRAKASFVIEGLKEADKDEFCRCELKLQKWYGDLRGKPFAIEAENSILDISGFSKQYNCAFIWQKDGVKKLNLYLIINYFKGGKLRFKKIKPEAFEANRFYTVINKKSGEIVPMEVNFNFDDPNLIILPLAFGKRQGREFIWNDLLSLETGSLKLANGRVIEKTLYNRRTRQDEPALFVALTFERREVLDSSNIKTPMNLIGVDRGENIPAVIALTDPEGCPLSRFKDSLGNPTHILRIGESYKEKQRTIQAKKEVEQRRAGGYSRKYASKAKNLADDMVRNTARDLLYYAVTQDAMLIFENLSRGFGRQGKRTFMAERQYTRMEDWLTAKLAYEGLPSKTYLSKTLAQYTSKTCSNCGFTITSADYDRVLEKLKKTATGWMTTINGKELKVEGQITYYNRYKRQNVVKDLSVELDRLSEESVNNDISSWTKGRSGEALSLLKKRFSHRPVQEKFVCLNCGFETHADEQAALNIARSWLFLRSQEYKKYQTNKTTGNTDKRAFVETWQSFYRKKLKEVWKPAV

SEQ ID NO: 45257 - protein, 979 aa, synthetic construct
  REGION 1..979: note = engineered CasX variant
QEIKRINKIRRRLVKDSNTKKAGKTGPMKTLLVRVMTPDLRERLENLRKKPENIPQPISNTSRANLNKLLTDYTEMKKAILHVYWEEFQKDPVGLMSRVAQPASKKIDQNKLKPEMDEKGNLTTAGFACSQCGQPLFVYKLEQVSEKGKAYTNYFGRCNVAEHEKLILLAQLKPEKDSDEAVTYSLGKFGQRALDFYSIHVTKESTHPVKPLAQIAGNRYASHPVGKALSDACMGTIASFLSKYQDIIIEHQKVVKGNQKRLESLRELAGKENLEYPSVTLPPQPHTKEGVDAYNEVIARVRMWVNLNLWQKLKLSRDDAKPLLRLKGFPSFPLVERQANEVDWWDMVCNVKKLINEKKEDGKVFWQNLAGYKRQEALRPYLSSEEDRKKGKKFARYQLGDLLNHLEKKHGEDWGKVYDEAWERIDKKVEGLSKHIKLEEERRSEDAQSKAALTDWLRAKASFVIEGLKEADKDEFCRCELKLQKWYGDLRGKPFAIEAENSILDISGFSKQYNCAFIWQKDGVKKLNLYLIINYFKGGKLRFKKIKPEAFEANRFYTVINKKSGEIVPMEVNFNFDDPNLIILPLAFGKRQGREFIWNDLLSLETGSLKLANGRVIEKTLYNRRTRQDEPALFVALTFERREVLDSSNIKTPMNLIGVDRGENIPAVIALTDPEGCPLSRFKDSLGNPTHILRIGESYKEKQRTIQAKKEVEQRRAGGYSRKYASKAKNLADDMVRNTARDLLYYAVTQDAMLIFENLSRGFGRQGKRTFMAERQYTRMEDWLTAKLAYEGLPSKTYLSKTLAQYTSKTCSNCGFTITSADYDRVLEKLKKTATGWMTTINGKELKVEGQITYYNRYKRQNVVKDLSVELDRLSEESVNNDISSWTKGRSGEALSLLKKRFSHRPVQEKFVCLNCGFETHADEQAALNIARSWLFLRSQEYKKYQTNKTTGNTDKRAFVETWQSFYRKKLKEVWKPAV

SEQ ID NO: 45258 - protein, 979 aa, synthetic construct
  REGION 1..979: note = engineered CasX variant
QEIKRINKIRRRLVKDSNTKKAGKTGPMKTLLVRVMTPDLRERLENLRKKPENIPQPISNTSRANLNKLLTDYTEMKKAILHVYWEEFQKDPVGLMSRVAQPASKKIDQNKLKPEMDEKGNLTTAGFACSQCGQPLFVYKLEQVSEKGKAYTNYFGRCNVAEHEKLILLAQLKPEKDSDEAVTYSLGKFGQRALDFYSIHVTKESTHPVKPLAQIAGNRYASSPVGKALSDACMGTIASFLSKYQDIIIEHQKVVKGNQKRLESLRELAGKENLEYPSVTLPPQPHTKEGVDAYNEVIARVRMWVNLNLWQKLKLSRDDAKPLLRLKGFPSFPLVERQANEVDWWDMVCNVKKLINEKKEDGKVFWQNLAGYKRQEALRPYLSSEEDRKKGKKFARYQLGDLLNHLEKKHGEDWGKVYDEAWERIDKKVEGLSKHIKLEEERRSEDAQSKAALTDWLRAKASFVIEGLKEADKDEFCRCELKLQKWYGDLRGKPFAIEAENSILDISGFSKQYNCAFIWQKDGVKKLNLYLIINYFKGGKLRFKKIKPEAFEANRFYTVINKKSGEIVPMEVNFNFDDPNLIILPLAFGKRQGREFIWNDLLSLETGSLKLANGRVIEKTLYNRRTRQDEPALFVALTFERREVLDSSNIKTPMNLIGVDRGENIPAVIALTDPEGCPLSRFKDSLGNPTHILRIGESYKEKQRTIQAKKEVEQRRAGGYSRKYASKAKNLADDMVRNTARDLLYYAVTQDAMLIFENLSRGFGRQGKRTFMAERQYTRMEDWLTAKLAYEGLPSKTYLSKTLAQYTSKTCSNCGFTITSADYDRVLEKLKKTATGWMTTINGKELKVEGQITYYNRYKRQNVVKDLSVELDRLSEESVNNDISSWTKGRSGEALSLLKKRFSHRPVQEKFVCLNCGFETHADEQAALNIARSWLFLRSQEYKKYQTNKTTGNTDKRAFVETWQSFYRKKLKEVWKPAV

SEQ ID NO: 45259 - protein, 979 aa, synthetic construct
  REGION 1..979: note = engineered CasX variant
QEIKRINKIRRRLVKDSNTKKAGKTGPMKTLLVRVMTPDLRERLENLRKKPENIPQPISNTSRANLNKLLTDYTEMKKAILHVYWEEFQKDPVGLMSRVAQPASKKIDQNKLKPEMDEKGNLTTAGFACSQCGQPLFVYKLEQVSEKGKAYTNYFGRCNVAEHEKLILLAQLKPEKDSDEAVTYSLGKFGQRALDFYSIHVTKESTHPVKPLAQIAGNRYASTPVGKALSDACMGTIASFLSKYQDIIIEHQKVVKGNQKRLESLRELAGKENLEYPSVTLPPQPHTKEGVDAYNEVIARVRMWVNLNLWQKLKLSRDDAKPLLRLKGFPSFPLVERQANEVDWWDMVCNVKKLINEKKEDGKVFWQNLAGYKRQEALRPYLSSEEDRKKGKKFARYQLGDLLNHLEKKHGEDWGKVYDEAWERIDKKVEGLSKHIKLEEERRSEDAQSKAALTDWLRAKASFVIEGLKEADKDEFCRCELKLQKWYGDLRGKPFAIEAENSILDISGFSKQYNCAFIWQKDGVKKLNLYLIINYFKGGKLRFKKIKPEAFEANRFYTVINKKSGEIVPMEVNFNFDDPNLIILPLAFGKRQGREFIWNDLLSLETGSLKLANGRVIEKTLYNRRTRQDEPALFVALTFERREVLDSSNIKTPMNLIGVDRGENIPAVIALTDPEGCPLSRFKDSLGNPTHILRIGESYKEKQRTIQAKKEVEQRRAGGYSRKYASKAKNLADDMVRNTARDLLYYAVTQDAMLIFENLSRGFGRQGKRTFMAERQYTRMEDWLTAKLAYEGLPSKTYLSKTLAQYTSKTCSNCGFTITSADYDRVLEKLKKTATGWMTTINGKELKVEGQITYYNRYKRQNVVKDLSVELDRLSEESVNNDISSWTKGRSGEALSLLKKRFSHRPVQEKFVCLNCGFETHADEQAALNIARSWLFLRSQEYKKYQTNKTTGNTDKRAFVETWQSFYRKKLKEVWKPAV

SEQ ID NO: 45260 - protein, 979 aa, synthetic construct
  REGION 1..979: note = engineered CasX variant
QEIKRINKIRRRLVKDSNTKKAGKTGPMKTLLVRVMTPDLRERLENLRKKPENIPQPISNTSRANLNKLLTDYTEMKKAILHVYWEEFQKDPVGLMSRVAQPASKKIDQNKLKPEMDEKGNLTTAGFACSQCGQPLFVYKLEQVSEKGKAYTNYFGRCNVAEHEKLILLAQLKPEKDSDEAVTYSLGKFGQRALDFYSIHVTKESTHPVKPLAQIAGNRYASAPVGKALSDACMGTIASFLSKYQDIIIEHQKVVKGNQKRLESLRELAGKENLEYPSVTLPPQPHTKEGVDAYNEVIARVRMWVNLNLWQKLKLSRDDAKPLLRLKGFPSFPLVERQANEVDWWDMVCNVKKLINEKKEDGKVFWQNLAGYKRQEALRPYLSSEEDRKKGKKFARYQLGDLLNHLEKKHGEDWGKVYDEAWERIDKKVEGLSKHIKLEEERRSEDAQSKAALTDWLRAKASFVIEGLKEADKDEFCRCELKLQKWYGDLRGKPFAIEAENSILDISGFSKQYNCAFIWQKDGVKKLNLYLIINYFKGGKLRFKKIKPEAFEANRFYTVINKKSGEIVPMEVNFNFDDPNLIILPLAFGKRQGREFIWNDLLSLETGSLKLANGRVIEKTLYNRRTRQDEPALFVALTFERREVLDSSNIKTPMNLIGVDRGENIPAVIALTDPEGCPLSRFKDSLGNPTHILRIGESYKEKQRTIQAKKEVEQRRAGGYSRKYASKAKNLADDMVRNTARDLLYYAVTQDAMLIFENLSRGFGRQGKRTFMAERQYTRMEDWLTAKLAYEGLPSKTYLSKTLAQYTSKTCSNCGFTITSADYDRVLEKLKKTATGWMTTINGKELKVEGQITYYNRYKRQNVVKDLSVELDRLSEESVNNDISSWTKGRSGEALSLLKKRFSHRPVQEKFVCLNCGFETHADEQAALNIARSWLFLRSQEYKKYQTNKTTGNTDKRAFVETWQSFYRKKLKEVWKPAV

SEQ ID NO: 45261 - protein, 979 aa, synthetic construct
  REGION 1..979: note = engineered CasX variant
QEIKRINKIRRRLVKDSNTKKAGKTGPMKTLLVRVMTPDLRERLENLRKKPENIPQPISNTSRANLNKLLTDYTEMKKAILHVYWEEFQKDPVGLMSRVAQPASKKIDQNKLKPEMDEKGNLTTAGFACSQCGQPLFVYKLEQVSEKGKAYTNYFGRCNVAEHEKLILLAQLKPEKDSDEAVTYSLGKFGQRALDFYSIHVTKESTHPVKPLAQIAGNRYASVPVGKALSDACMGTIASFLSKYQDIIIEHQKVVKGNQKRLESLRELAGKENLEYPSVTLPPQPHTKEGVDAYNEVIARVRMWVNLNLWQKLKLSRDDAKPLLRLKGFPSFPLVERQANEVDWWDMVCNVKKLINEKKEDGKVFWQNLAGYKRQEALRPYLSSEEDRKKGKKFARYQLGDLLNHLEKKHGEDWGKVYDEAWERIDKKVEGLSKHIKLEEERRSEDAQSKAALTDWLRAKASFVIEGLKEADKDEFCRCELKLQKWYGDLRGKPFAIEAENSILDISGFSKQYNCAFIWQKDGVKKLNLYLIINYFKGGKLRFKKIKPEAFEANRFYTVINKKSGEIVPMEVNFNFDDPNLIILPLAFGKRQGREFIWNDLLSLETGSLKLANGRVIEKTLYNRRTRQDEPALFVALTFERREVLDSSNIKTPMNLIGVDRGENIPAVIALTDPEGCPLSRFKDSLGNPTHILRIGESYKEKQRTIQAKKEVEQRRAGGYSRKYASKAKNLADDMVRNTARDLLYYAVTQDAMLIFENLSRGFGRQGKRTFMAERQYTRMEDWLTAKLAYEGLPSKTYLSKTLAQYTSKTCSNCGFTITSADYDRVLEKLKKTATGWMTTINGKELKVEGQITYYNRYKRQNVVKDLSVELDRLSEESVNNDISSWTKGRSGEALSLLKKRFSHRPVQEKFVCLNCGFETHADEQAALNIARSWLFLRSQEYKKYQTNKTTGNTDKRAFVETWQSFYRKKLKEVWKPAV

SEQ ID NO: 45262 - protein, 979 aa, synthetic construct
  REGION 1..979: note = engineered CasX variant
QEIKRINKIRRRLVKDSNTKKAGKTGPMKTLLVRVMTPDLRERLENLRKKPENIPQPISNTSRANLNKLLTDYTEMKKAILHVYWEEFQKDPVGLMSRVAQPASKKIDQNKLKPEMDEKGNLTTAGFACSQCGQPLFVYKLEQVSEKGKAYTNYFGRCNVAEHEKLIKLAQLKPEKDSDEAVTYSLGKFGQRALDFYSIHVTKESTHPVKPLAQIAGNRYASGPVGKALSDACMGTIASFLSKYQDIIIEHQKVVKGNQKRLESLRELAGKENLEYPSVTLPPQPHTKEGVDAYNEVIARVRMWVNLNLWQKLKLSRDDAKPLLRLKGFPSFPLVERQANEVDWWDMVCNVKKLINEKKEDGKVFWQNLAGYKRQEALRPYLSSEEDRKKGKKFARYQLGDLLNHLEKKHGEDWGKVYDEAWERIDKKVEGLSKHIKLEEERRSEDAQSKAALTDWLRAKASFVIEGLKEADKDEFCRCELKLQKWYGDLRGKPFAIEAENSILDISGFSKQYNCAFIWQKDGVKKLNLYLIINYFKGGKLRFKKIKPEAFEANRFYTVINKKSGEIVPMEVNFNFDDPNLIILPLAFGKRQGREFIWNDLLSLETGSLKLANGRVIEKTLYNRRTRQDEPALFVALTFERREVLDSSNIKTPMNLIGVDRGENIPAVIALTDPEGCPLSRFKDSLGNPTHILRIGESYKEKQRTIQAKKEVEQRRAGGYSRKYASKAKNLADDMVRNTARDLLYYAVTQDAMLIFENLSRGFGRQGKRTFMAERQYTRMEDWLTAKLAYEGLPSKTYLSKTLAQYTSKTCSNCGFTITSADYDRVLEKLKKTATGWMTTINGKELKVEGQITYYNRYKRQNVVKDLSVELDRLSEESVNNDISSWTKGRSGEALSLLKKRFSHRPVQEKFVCLNCGFETHADEQAALNIARSWLFLRSQEYKKYQTNKTTGNTDKRAFVETWQSFYRKKLKEVWKPAV

SEQ ID NO: 45263 - protein, 978 aa, synthetic construct
  REGION 1..978: note = engineered CasX variant
QEIKRINKIRRRLVKDSNTKKAGKTGPMKTLLVRVMTPDLRERLENLRKKPENIPQPISNTSRANLNKLLTDYTEMKKAILHVYWEEFQKDPVGLMSRVAQPASKKIDQNKLKPEMDEKGNLTTAGFACSQCGQPLFVYKLEQVSEKGKAYTNYFGRCNVAEHEKLILLAQLKPEKDSDEAVTYSLGKFGQRALDFYSIHVTKESTHPVKPLAQIAGNRYASPVGKALSDACMGTIASFLSKYQDIIIEHQKVVKGNQKRLESLRELAGKENLEYPSVTLPPQPHTKEGVDAYNEVIARVRMWVNLNLWQKLKLSRDDAKPLLRLKGFPSFPLVERQANEVDWWDMVCNVKKLINEKKEDGKVFWQNLAGYKRQEALRPYLSSEEDRKKGKKFARYQLGDLLNHLEKKHGEDWGKVYDEAWERIDKKVEGLSKHIKLEEERRSEDAQSKAALTDWLRAKASFVIEGLKEADKDEFCRCELKLQKWYGDLRGKPFAIEAENSILDISGFSKQYNCAFIWQKDGVKKLNLYLIINYFKGGKLRFKKIKPEAFEANRFYTVINKKSGEIVPMEVNFNFDDPNLIILPLAFGKRQGREFIWNDLLSLETGSLKLANGRVIEKTLYNRRTRQDEPALFVALTFERREVLDSSNIKTPMNLIGVDRGENIPAVIALTDPEGCPLSRFKDSLGNPTHILRIGESYKEKQRTIQAKKEVEQRRAGGYSRKYASKAKNLADDMVRNTARDLLYYAVTQDAMLIFENLSRGFGRQGKRTFMAERQYTRMEDWLTAKLAYEGLPSKTYLSKTLAQYTSKTCSNCGFTITSADYDRVLEKLKKTATGWMTTINGKELKVEGQITYYNRYKRQNVVKDLSVELDRLSEESVNNDISSWTKGRSGEALSLLKKRFSHRPVQEKFVCLNCGFETHADEQAALNIARSWLFLRSQEYKKYQTNKTTGNTDKRAFVETWQSFYRKKLKEVWKPAV

SEQ ID NO: 45264 - protein, 979 aa, synthetic construct
  REGION 1..979: note = engineered CasX variant
QEIKRINKIRRRLVKDSNTKKAGKTGPMKTLLVRVMTPDLRERLENLRKKPENIPQPISNTSRANLNKLLTDYTEMKKAILHVYWEEFQKDPVGLMSRVAQPASKKIDQNKLKPEMDEKGNLTTAGFACSQCGQPLFVYKLEQVSEKGKAYTNYFGRCNVAEHEKLILLAQLKPEKDSDEAVTYSLGKFGQRALDFYSIHVTKESTHPVKPLAQIAGNRYASYPVGKALSDACMGTIASFLSKYQDIIIEHQKVVKGNQKRLESLRELAGKENLEYPSVTLPPQPHTKEGVDAYNEVIARVRMWVNLNLWQKLKLSRDDAKPLLRLKGFPSFPLVERQANEVDWWDMVCNVKKLINEKKEDGKVFWQNLAGYKRQEALRPYLSSEEDRKKGKKFARYQLGDLLWHLEKKHGEDWGKVYDEAWERIDKKVEGLSKHIKLEEERRSEDAQSKAALTDWLRAKASFVIEGLKEADKDEFCRCELKLQKWYGDLRGKPFAIEAENSILDISGFSKQYNCAFIWQKDGVKKLNLYLIINYFKGGKLRFKKIKPEAFEANRFYTVINKKSGEIVPMEVNFNFDDPNLIILPLAFGKRQGREFIWNDLLSLETGSLKLANGRVIEKTLYNRRTRQDEPALFVALTFERREVLDSSNIKTPMNLIGVDRGENIPAVIALTDPEGCPLSRFKDSLGNPTHILRIGESYKEKQRTIQAKKEVEQRRAGGYSRKYASKAKNLADDMVRNTARDLLYYAVTQDAMLIFENLSRGFGRQGKRTFMAERQYTRMEDWLTAKLAYEGLPSKTYLSKTLAQYTSKTCSNCGFTITSADYDRVLEKLKKTATGWMTTINGKELKVEGQITYYNRYKRQNVVKDLSVELDRLSEESVNNDISSWTKGRSGEALSLLKKRFSHRPVQEKFVCLNCGFETHADEQAALNIARSWLFLRSQEYKKYQTNKTTGNTDKRAFVETWQSFYRKKLKEVWKPAV

SEQ ID NO: 45265 - protein, 979 aa, synthetic construct
  REGION 1..979: note = engineered CasX variant
QEIKRINKIRRRLVKDSNTKKAGKTGPMKTLLVRVMTPDLRERLENLRKKPENIPQPISNTSRANLNKLLTDYTEMKKAILHVYWEEFQKDPVGLMSRVAQPASKKIDQNKLKPEMDEKGNLTTAGFACSQCGQPLFVYKLEQVSEKGKAYTNYFGRCNVAEHEKLILLAQLKPEKDSDEAVTYSLGKFGQRALDFYSIHVTKESTHPVKPLAQIAGNRYASHPVGKALSDACMGTIASFLSKYQDIIIEHQKVVKGNQKRLESLRELAGKENLEYPSVTLPPQPHTKEGVDAYNEVIARVRMWVNLNLWQKLKLSRDDAKPLLRLKGFPSFPLVERQANEVDWWDMVCNVKKLINEKKEDGKVFWQNLAGYKRQEALRPYLSSEEDRKKGKKFARYQLGDLLWHLEKKHGEDWGKVYDEAWERIDKKVEGLSKHIKLEEERRSEDAQSKAALTDWLRAKASFVIEGLKEADKDEFCRCELKLQKWYGDLRGKPFAIEAENSILDISGFSKQYNCAFIWQKDGVKKLNLYLIINYFKGGKLRFKKIKPEAFEANRFYTVINKKSGEIVPMEVNFNFDDPNLIILPLAFGKRQGREFIWNDLLSLETGSLKLANGRVIEKTLYNRRTRQDEPALFVALTFERREVLDSSNIKTPMNLIGVDRGENIPAVIALTDPEGCPLSRFKDSLGNPTHILRIGESYKEKQRTIQAKKEVEQRRAGGYSRKYASKAKNLADDMVRNTARDLLYYAVTQDAMLIFENLSRGFGRQGKRTFMAERQYTRMEDWLTAKLAYEGLPSKTYLSKTLAQYTSKTCSNCGFTITSADYDRVLEKLKKTATGWMTTINGKELKVEGQITYYNRYKRQNVVKDLSVELDRLSEESVNNDISSWTKGRSGEALSLLKKRFSHRPVQEKFVCLNCGFETHADEQAALNIARSWLFLRSQEYKKYQTNKTTGNTDKRAFVETWQSFYRKKLKEVWKPAV

SEQ ID NO: 45266 - protein, 979 aa, synthetic construct
  REGION 1..979: note = engineered CasX variant
QEIKRINKIRRRLVKDSNTKKAGKTGPMKTLLVRVMTPDLRERLENLRKKPENIPQPISNTSRANLNKLLTDYTEMKKAILHVYWEEFQKDPVGLMSRVAQPASKKIDQNKLKPEMDEKGNLTTAGFACSQCGQPLFVYKLEQVSEKGKAYTNYFGRCNVAEHEKLILLAQLKPEKDSDEAVTYSLGKFGQRALDFYSIHVTKESTHPVKPLAQIAGNRYASSPVGKALSDACMGTIASFLSKYQDIIIEHQKVVKGNQKRLESLRELAGKENLEYPSVTLPPQPHTKEGVDAYNEVIARVRMWVNLNLWQKLKLSRDDAKPLLRLKGFPSFPLVERQANEVDWWDMVCNVKKLINEKKEDGKVFWQNLAGYKRQEALRPYLSSEEDRKKGKKFARYQLGDLLWHLEKKHGEDWGKVYDEAWERIDKKVEGLSKHIKLEEERRSEDAQSKAALTDWLRAKASFVIEGLKEADKDEFCRCELKLQKWYGDLRGKPFAIEAENSILDISGFSKQYNCAFIWQKDGVKKLNLYLIINYFKGGKLRFKKIKPEAFEANRFYTVINKKSGEIVPMEVNFNFDDPNLIILPLAFGKRQGREFIWNDLLSLETGSLKLANGRVIEKTLYNRRTRQDEPALFVALTFERREVLDSSNIKTPMNLIGVDRGENIPAVIALTDPEGCPLSRFKDSLGNPTHILRIGESYKEKQRTIQAKKEVEQRRAGGYSRKYASKAKNLADDMVRNTARDLLYYAVTQDAMLIFENLSRGFGRQGKRTFMAERQYTRMEDWLTAKLAYEGLPSKTYLSKTLAQYTSKTCSNCGFTITSADYDRVLEKLKKTATGWMTTINGKELKVEGQITYYNRYKRQNVVKDLSVELDRLSEESVNNDISSWTKGRSGEALSLLKKRFSHRPVQEKFVCLNCGFETHADEQAALNIARSWLFLRSQEYKKYQTNKTTGNTDKRAFVETWQSFYRKKLKEVWKPAV

SEQ ID NO: 45267 - protein, 979 aa, synthetic construct
  REGION 1..979: note = engineered CasX variant
QEIKRINKIRRRLVKDSNTKKAGKTGPMKTLLVRVMTPDLRERLENLRKKPENIPQPISNTSRANLNKLLTDYTEMKKAILHVYWEEFQKDPVGLMSRVAQPASKKIDQNKLKPEMDEKGNLTTAGFACSQCGQPLFVYKLEQVSEKGKAYTNYFGRCNVAEHEKLILLAQLKPEKDSDEAVTYSLGKFGQRALDFYSIHVTKESTHPVKPLAQIAGNRYASTPVGKALSDACMGTIASFLSKYQDIIIEHQKVVKGNQKRLESLRELAGKENLEYPSVTLPPQPHTKEGVDAYNEVIARVRMWVNLNLWQKLKLSRDDAKPLLRLKGFPSFPLVERQANEVDWWDMVCNVKKLINEKKEDGKVFWQNLAGYKRQEALRPYLSSEEDRKKGKKFARYQLGDLLWHLEKKHGEDWGKVYDEAWERIDKKVEGLSKHIKLEEERRSEDAQSKAALTDWLRAKASFVIEGLKEADKDEFCRCELKLQKWYGDLRGKPFAIEAENSILDISGFSKQYNCAFIWQKDGVKKLNLYLIINYFKGGKLRFKKIKPEAFEANRFYTVINKKSGEIVPMEVNFNFDDPNLIILPLAFGKRQGREFIWNDLLSLETGSLKLANGRVIEKTLYNRRTRQDEPALFVALTFERREVLDSSNIKTPMNLIGVDRGENIPAVIALTDPEGCPLSRFKDSLGNPTHILRIGESYKEKQRTIQAKKEVEQRRAGGYSRKYASKAKNLADDMVRNTARDLLYYAVTQDAMLIFENLSRGFGRQGKRTFMAERQYTRMEDWLTAKLAYEGLPSKTYLSKTLAQYTSKTCSNCGFTITSADYDRVLEKLKKTATGWMTTINGKELKVEGQITYYNRYKRQNVVKDLSVELDRLSEESVNNDISSWTKGRSGEALSLLKKRFSHRPVQEKFVCLNCGFETHADEQAALNIARSWLFLRSQEYKKYQTNKTTGNTDKRAFVETWQSFYRKKLKEVWKPAV

SEQ ID NO: 45268 - protein, 979 aa, synthetic construct
  REGION 1..979: note = engineered CasX variant
QEIKRINKIRRRLVKDSNTKKAGKTGPMKTLLVRVMTPDLRERLENLRKKPENIPQPISNTSRANLNKLLTDYTEMKKAILHVYWEEFQKDPVGLMSRVAQPASKKIDQNKLKPEMDEKGNLTTAGFACSQCGQPLFVYKLEQVSEKGKAYTNYFGRCNVAEHEKLILLAQLKPEKDSDEAVTYSLGKFGQRALDFYSIHVTKESTHPVKPLAQIAGNRYASAPVGKALSDACMGTIASFLSKYQDIIIEHQKVVKGNQKRLESLRELAGKENLEYPSVTLPPQPHTKEGVDAYNEVIARVRMWVNLNLWQKLKLSRDDAKPLLRLKGFPSFPLVERQANEVDWWDMVCNVKKLINEKKEDGKVFWQNLAGYKRQEALRPYLSSEEDRKKGKKFARYQLGDLLWHLEKKHGEDWGKVYDEAWERIDKKVEGLSKHIKLEEERRSEDAQSKAALTDWLRAKASFVIEGLKEADKDEFCRCELKLQKWYGDLRGKPFAIEAENSILDISGFSKQYNCAFIWQKDGVKKLNLYLIINYFKGGKLRFKKIKPEAFEANRFYTVINKKSGEIVPMEVNFNFDDPNLIILPLAFGKRQGREFIWNDLLSLETGSLKLANGRVIEKTLYNRRTRQDEPALFVALTFERREVLDSSNIKTPMNLIGVDRGENIPAVIALTDPEGCPLSRFKDSLGNPTHILRIGESYKEKQRTIQAKKEVEQRRAGGYSRKYASKAKNLADDMVRNTARDLLYYAVTQDAMLIFENLSRGFGRQGKRTFMAERQYTRMEDWLTAKLAYEGLPSKTYLSKTLAQYTSKTCSNCGFTITSADYDRVLEKLKKTATGWMTTINGKELKVEGQITYYNRYKRQNVVKDLSVELDRLSEESVNNDISSWTKGRSGEALSLLKKRFSHRPVQEKFVCLNCGFETHADEQAALNIARSWLFLRSQEYKKYQTNKTTGNTDKRAFVETWQSFYRKKLKEVWKPAV

SEQ ID NO: 45269 - protein, 979 aa, synthetic construct
  REGION 1..979: note = engineered CasX variant
QEIKRINKIRRRLVKDSNTKKAGKTGPMKTLLVRVMTPDLRERLENLRKKPENIPQPISNTSRANLNKLLTDYTEMKKAILHVYWEEFQKDPVGLMSRVAQPASKKIDQNKLKPEMDEKGNLTTAGFACSQCGQPLFVYKLEQVSEKGKAYTNYFGRCNVAEHEKLILLAQLKPEKDSDEAVTYSLGKFGQRALDFYSIHVTKESTHPVKPLAQIAGNRYASVPVGKALSDACMGTIASFLSKYQDIIIEHQKVVKGNQKRLESLRELAGKENLEYPSVTLPPQPHTKEGVDAYNEVIARVRMWVNLNLWQKLKLSRDDAKPLLRLKGFPSFPLVERQANEVDWWDMVCNVKKLINEKKEDGKVFWQNLAGYKRQEALRPYLSSEEDRKKGKKFARYQLGDLLWHLEKKHGEDWGKVYDEAWERIDKKVEGLSKHIKLEEERRSEDAQSKAALTDWLRAKASFVIEGLKEADKDEFCRCELKLQKWYGDLRGKPFAIEAENSILDISGFSKQYNCAFIWQKDGVKKLNLYLIINYFKGGKLRFKKIKPEAFEANRFYTVINKKSGEIVPMEVNFNFDDPNLIILPLAFGKRQGREFIWNDLLSLETGSLKLANGRVIEKTLYNRRTRQDEPALFVALTFERREVLDSSNIKTPMNLIGVDRGENIPAVIALTDPEGCPLSRFKDSLGNPTHILRIGESYKEKQRTIQAKKEVEQRRAGGYSRKYASKAKNLADDMVRNTARDLLYYAVTQDAMLIFENLSRGFGRQGKRTFMAERQYTRMEDWLTAKLAYEGLPSKTYLSKTLAQYTSKTCSNCGFTITSADYDRVLEKLKKTATGWMTTINGKELKVEGQITYYNRYKRQNVVKDLSVELDRLSEESVNNDISSWTKGRSGEALSLLKKRFSHRPVQEKFVCLNCGFETHADEQAALNIARSWLFLRSQEYKKYQTNKTTGNTDKRAFVETWQSFYRKKLKEVWKPAV

SEQ ID NO: 45270 - protein, 979 aa, synthetic construct
  REGION 1..979: note = engineered CasX variant
QEIKRINKIRRRLVKDSNTKKAGKTGPMKTLLVRVMTPDLRERLENLRKKPENIPQPISNTSRANLNKLLTDYTEMKKAILHVYWEEFQKDPVGLMSRVAQPASKKIDQNKLKPEMDEKGNLTTAGFACSQCGQPLFVYKLEQVSEKGKAYTNYFGRCNVAEHEKLIKLAQLKPEKDSDEAVTYSLGKFGQRALDFYSIHVTKESTHPVKPLAQIAGNRYASGPVGKALSDACMGTIASFLSKYQDIIIEHQKVVKGNQKRLESLRELAGKENLEYPSVTLPPQPHTKEGVDAYNEVIARVRMWVNLNLWQKLKLSRDDAKPLLRLKGFPSFPLVERQANEVDWWDMVCNVKKLINEKKEDGKVFWQNLAGYKRQEALRPYLSSEEDRKKGKKFARYQLGDLLWHLEKKHGEDWGKVYDEAWERIDKKVEGLSKHIKLEEERRSEDAQSKAALTDWLRAKASFVIEGLKEADKDEFCRCELKLQKWYGDLRGKPFAIEAENSILDISGFSKQYNCAFIWQKDGVKKLNLYLIINYFKGGKLRFKKIKPEAFEANRFYTVINKKSGEIVPMEVNFNFDDPNLIILPLAFGKRQGREFIWNDLLSLETGSLKLANGRVIEKTLYNRRTRQDEPALFVALTFERREVLDSSNIKTPMNLIGVDRGENIPAVIALTDPEGCPLSRFKDSLGNPTHILRIGESYKEKQRTIQAKKEVEQRRAGGYSRKYASKAKNLADDMVRNTARDLLYYAVTQDAMLIFENLSRGFGRQGKRTFMAERQYTRMEDWLTAKLAYEGLPSKTYLSKTLAQYTSKTCSNCGFTITSADYDRVLEKLKKTATGWMTTINGKELKVEGQITYYNRYKRQNVVKDLSVELDRLSEESVNNDISSWTKGRSGEALSLLKKRFSHRPVQEKFVCLNCGFETHADEQAALNIARSWLFLRSQEYKKYQTNKTTGNTDKRAFVETWQSFYRKKLKEVWKPAV

SEQ ID NO: 45271 - protein, 978 aa, synthetic construct
  REGION 1..978: note = engineered CasX variant
QEIKRINKIRRRLVKDSNTKKAGKTGPMKTLLVRVMTPDLRERLENLRKKPENIPQPISNTSRANLNKLLTDYTEMKKAILHVYWEEFQKDPVGLMSRVAQPASKKIDQNKLKPEMDEKGNLTTAGFACSQCGQPLFVYKLEQVSEKGKAYTNYFGRCNVAEHEKLILLAQLKPEKDSDEAVTYSLGKFGQRALDFYSIHVTKESTHPVKPLAQIAGNRYASPVGKALSDACMGTIASFLSKYQDIIIEHQKVVKGNQKRLESLRELAGKENLEYPSVTLPPQPHTKEGVDAYNEVIARVRMWVNLNLWQKLKLSRDDAKPLLRLKGFPSFPLVERQANEVDWWDMVCNVKKLINEKKEDGKVFWQNLAGYKRQEALRPYLSSEEDRKKGKKFARYQLGDLLWHLEKKHGEDWGKVYDEAWERIDKKVEGLSKHIKLEEERRSEDAQSKAALTDWLRAKASFVIEGLKEADKDEFCRCELKLQKWYGDLRGKPFAIEAENSILDISGFSKQYNCAFIWQKDGVKKLNLYLIINYFKGGKLRFKKIKPEAFEANRFYTVINKKSGEIVPMEVNFNFDDPNLIILPLAFGKRQGREFIWNDLLSLETGSLKLANGRVIEKTLYNRRTRQDEPALFVALTFERREVLDSSNIKTPMNLIGVDRGENIPAVIALTDPEGCPLSRFKDSLGNPTHILRIGESYKEKQRTIQAKKEVEQRRAGGYSRKYASKAKNLADDMVRNTARDLLYYAVTQDAMLIFENLSRGFGRQGKRTFMAERQYTRMEDWLTAKLAYEGLPSKTYLSKTLAQYTSKTCSNCGFTITSADYDRVLEKLKKTATGWMTTINGKELKVEGQITYYNRYKRQNVVKDLSVELDRLSEESVNNDISSWTKGRSGEALSLLKKRFSHRPVQEKFVCLNCGFETHADEQAALNIARSWLFLRSQEYKKYQTNKTTGNTDKRAFVETWQSFYRKKLKEVWKPAV

SEQ ID NO: 45272 - protein, 979 aa, synthetic construct
  REGION 1..979: note = engineered CasX variant
QEIKRINKIRRRLVKDSNTKKAGKTGPMKTLLVRVMTPDLRERLENLRKKPENIPQPISNTSRANLNKLLTDYTEMKKAILHVYWEEFQKDPVGLMSRVAQPASKKIDQNKLKPEMDEKGNLTTAGFACSQCGQPLFVYKLEQVSEKGKAYTNYFGRCNVAEHEKLILLAQLKPEKDSDEAVTYSLGKFGQRALDFYSIHVTKESTHPVKPLAQIAGNRYASYPVGKALSDACMGTIASFLSKYQDIIIEHQKVVKGNQKRLESLRELAGKENLEYPSVTLPPQPHTKEGVDAYNEVIARVRMWVNLNLWQKLKLSRDDAKPLLRLKGFPSFPLVERQANEVDWWDMVCNVKKLINEKKEDGKVFWQNLAGYKRQEALRPYLSSEEDRKKGKKFARYQLGDLLLHLYKKHGEDWGKVYDEAWERIDKKVEGLSKHIKLEEERRSEDAQSKAALTDWLRAKASFVIEGLKEADKDEFCRCELKLQKWYGDLRGKPFAIEAENSILDISGFSKQYNCAFIWQKDGVKKLNLYLIINYFKGGKLRFKKIKPEAFEANRFYTVINKKSGEIVPMEVNFNFDDPNLIILPLAFGKRQGREFIWNDLLSLETGSLKLANGRVIEKTLYNRRTRQDEPALFVALTFERREVLDSSNIKTPMNLIGVDRGENIPAVIALTDPEGCPLSRFKDSLGNPTHILRIGESYKEKQRTIQAKKEVEQRRAGGYSRKYASKAKNLADDMVRNTARDLLYYAVTQDAMLIFENLSRGFGRQGKRTFMAERQYTRMEDWLTAKLAYEGLPSKTYLSKTLAQYTSKTCSNCGFTITSADYDRVLEKLKKTATGWMTTINGKELKVEGQITYYNRYKRQNVVKDLSVELDRLSEESVNNDISSWTKGRSGEALSLLKKRFSHRPVQEKFVCLNCGFETHADEQAALNIARSWLFLRSQEYKKYQTNKTTGNTDKRAFVETWQSFYRKKLKEVWKPAV

SEQ ID NO: 45273 - protein, 979 aa, synthetic construct
  REGION 1..979: note = engineered CasX variant
QEIKRINKIRRRLVKDSNTKKAGKTGPMKTLLVRVMTPDLRERLENLRKKPENIPQPISNTSRANLNKLLTDYTEMKKAILHVYWEEFQKDPVGLMSRVAQPASKKIDQNKLKPEMDEKGNLTTAGFACSQCGQPLFVYKLEQVSEKGKAYTNYFGRCNVAEHEKLILLAQLKPEKDSDEAVTYSLGKFGQRALDFYSIHVTKESTHPVKPLAQIAGNRYASHPVGKALSDACMGTIASFLSKYQDIIIEHQKVVKGNQKRLESLRELAGKENLEYPSVTLPPQPHTKEGVDAYNEVIARVRMWVNLNLWQKLKLSRDDAKPLLRLKGFPSFPLVERQANEVDWWDMVCNVKKLINEKKEDGKVFWQNLAGYKRQEALRPYLSSEEDRKKGKKFARYQLGDLLLHLYKKHGEDWGKVYDEAWERIDKKVEGLSKHIKLEEERRSEDAQSKAALTDWLRAKASFVIEGLKEADKDEFCRCELKLQKWYGDLRGKPFAIEAENSILDISGFSKQYNCAFIWQKDGVKKLNLYLIINYFKGGKLRFKKIKPEAFEANRFYTVINKKSGEIVPMEVNFNFDDPNLIILPLAFGKRQGREFIWNDLLSLETGSLKLANGRVIEKTLYNRRTRQDEPALFVALTFERREVLDSSNIKTPMNLIGVDRGENIPAVIALTDPEGCPLSRFKDSLGNPTHILRIGESYKEKQRTIQAKKEVEQRRAGGYSRKYASKAKNLADDMVRNTARDLLYYAVTQDAMLIFENLSRGFGRQGKRTFMAERQYTRMEDWLTAKLAYEGLPSKTYLSKTLAQYTSKTCSNCGFTITSADYDRVLEKLKKTATGWMTTINGKELKVEGQITYYNRYKRQNVVKDLSVELDRLSEESVNNDISSWTKGRSGEALSLLKKRFSHRPVQEKFVCLNCGFETHADEQAALNIARSWLFLRSQEYKKYQTNKTTGNTDKRAFVETWQSFYRKKLKEVWKPAV

SEQ ID NO: 45274 - protein, 979 aa, synthetic construct
  REGION 1..979: note = engineered CasX variant
QEIKRINKIRRRLVKDSNTKKAGKTGPMKTLLVRVMTPDLRERLENLRKKPENIPQPISNTSRANLNKLLTDYTEMKKAILHVYWEEFQKDPVGLMSRVAQPASKKIDQNKLKPEMDEKGNLTTAGFACSQCGQPLFVYKLEQVSEKGKAYTNYFGRCNVAEHEKLILLAQLKPEKDSDEAVTYSLGKFGQRALDFYSIHVTKESTHPVKPLAQIAGNRYASSPVGKALSDACMGTIASFLSKYQDIIIEHQKVVKGNQKRLESLRELAGKENLEYPSVTLPPQPHTKEGVDAYNEVIARVRMWVNLNLWQKLKLSRDDAKPLLRLKGFPSFPLVERQANEVDWWDMVCNVKKLINEKKEDGKVFWQNLAGYKRQEALRPYLSSEEDRKKGKKFARYQLGDLLLHLYKKHGEDWGKVYDEAWERIDKKVEGLSKHIKLEEERRSEDAQSKAALTDWLRAKASFVIEGLKEADKDEFCRCELKLQKWYGDLRGKPFAIEAENSILDISGFSKQYNCAFIWQKDGVKKLNLYLIINYFKGGKLRFKKIKPEAFEANRFYTVINKKSGEIVPMEVNFNFDDPNLIILPLAFGKRQGREFIWNDLLSLETGSLKLANGRVIEKTLYNRRTRQDEPALFVALTFERREVLDSSNIKTPMNLIGVDRGENIPAVIALTDPEGCPLSRFKDSLGNPTHILRIGESYKEKQRTIQAKKEVEQRRAGGYSRKYASKAKNLADDMVRNTARDLLYYAVTQDAMLIFENLSRGFGRQGKRTFMAERQYTRMEDWLTAKLAYEGLPSKTYLSKTLAQYTSKTCSNCGFTITSADYDRVLEKLKKTATGWMTTINGKELKVEGQITYYNRYKRQNVVKDLSVELDRLSEESVNNDISSWTKGRSGEALSLLKKRFSHRPVQEKFVCLNCGFETHADEQAALNIARSWLFLRSQEYKKYQTNKTTGNTDKRAFVETWQSFYRKKLKEVWKPAV

SEQ ID NO: 45275 - protein, 979 aa, synthetic construct
  REGION 1..979: note = engineered CasX variant
QEIKRINKIRRRLVKDSNTKKAGKTGPMKTLLVRVMTPDLRERLENLRKKPENIPQPISNTSRANLNKLLTDYTEMKKAILHVYWEEFQKDPVGLMSRVAQPASKKIDQNKLKPEMDEKGNLTTAGFACSQCGQPLFVYKLEQVSEKGKAYTNYFGRCNVAEHEKLILLAQLKPEKDSDEAVTYSLGKFGQRALDFYSIHVTKESTHPVKPLAQIAGNRYASTPVGKALSDACMGTIASFLSKYQDIIIEHQKVVKGNQKRLESLRELAGKENLEYPSVTLPPQPHTKEGVDAYNEVIARVRMWVNLNLWQKLKLSRDDAKPLLRLKGFPSFPLVERQANEVDWWDMVCNVKKLINEKKEDGKVFWQNLAGYKRQEALRPYLSSEEDRKKGKKFARYQLGDLLLHLYKKHGEDWGKVYDEAWERIDKKVEGLSKHIKLEEERRSEDAQSKAALTDWLRAKASFVIEGLKEADKDEFCRCELKLQKWYGDLRGKPFAIEAENSILDISGFSKQYNCAFIWQKDGVKKLNLYLIINYFKGGKLRFKKIKPEAFEANRFYTVINKKSGEIVPMEVNFNFDDPNLIILPLAFGKRQGREFIWNDLLSLETGSLKLANGRVIEKTLYNRRTRQDEPALFVALTFERREVLDSSNIKTPMNLIGVDRGENIPAVIALTDPEGCPLSRFKDSLGNPTHILRIGESYKEKQRTIQAKKEVEQRRAGGYSRKYASKAKNLADDMVRNTARDLLYYAVTQDAMLIFENLSRGFGRQGKRTFMAERQYTRMEDWLTAKLAYEGLPSKTYLSKTLAQYTSKTCSNCGFTITSADYDRVLEKLKKTATGWMTTINGKELKVEGQITYYNRYKRQNVVKDLSVELDRLSEESVNNDISSWTKGRSGEALSLLKKRFSHRPVQEKFVCLNCGFETHADEQAALNIARSWLFLRSQEYKKYQTNKTTGNTDKRAFVETWQSFYRKKLKEVWKPAV

SEQ ID NO: 45276 - protein, 979 aa, synthetic construct
  REGION 1..979: note = engineered CasX variant
QEIKRINKIRRRLVKDSNTKKAGKTGPMKTLLVRVMTPDLRERLENLRKKPENIPQPISNTSRANLNKLLTDYTEMKKAILHVYWEEFQKDPVGLMSRVAQPASKKIDQNKLKPEMDEKGNLTTAGFACSQCGQPLFVYKLEQVSEKGKAYTNYFGRCNVAEHEKLILLAQLKPEKDSDEAVTYSLGKFGQRALDFYSIHVTKESTHPVKPLAQIAGNRYASAPVGKALSDACMGTIASFLSKYQDIIIEHQKVVKGNQKRLESLRELAGKENLEYPSVTLPPQPHTKEGVDAYNEVIARVRMWVNLNLWQKLKLSRDDAKPLLRLKGFPSFPLVERQANEVDWWDMVCNVKKLINEKKEDGKVFWQNLAGYKRQEALRPYLSSEEDRKKGKKFARYQLGDLLLHLYKKHGEDWGKVYDEAWERIDKKVEGLSKHIKLEEERRSEDAQSKAALTDWLRAKASFVIEGLKEADKDEFCRCELKLQKWYGDLRGKPFAIEAENSILDISGFSKQYNCAFIWQKDGVKKLNLYLIINYFKGGKLRFKKIKPEAFEANRFYTVINKKSGEIVPMEVNFNFDDPNLIILPLAFGKRQGREFIWNDLLSLETGSLKLANGRVIEKTLYNRRTRQDEPALFVALTFERREVLDSSNIKTPMNLIGVDRGENIPAVIALTDPEGCPLSRFKDSLGNPTHILRIGESYKEKQRTIQAKKEVEQRRAGGYSRKYASKAKNLADDMVRNTARDLLYYAVTQDAMLIFENLSRGFGRQGKRTFMAERQYTRMEDWLTAKLAYEGLPSKTYLSKTLAQYTSKTCSNCGFTITSADYDRVLEKLKKTATGWMTTINGKELKVEGQITYYNRYKRQNVVKDLSVELDRLSEESVNNDISSWTKGRSGEALSLLKKRFSHRPVQEKFVCLNCGFETHADEQAALNIARSWLFLRSQEYKKYQTNKTTGNTDKRAFVETWQSFYRKKLKEVWKPAV

SEQ ID NO: 45277 - protein, 979 aa, synthetic construct
  REGION 1..979: note = engineered CasX variant
QEIKRINKIRRRLVKDSNTKKAGKTGPMKTLLVRVMTPDLRERLENLRKKPENIPQPISNTSRANLNKLLTDYTEMKKAILHVYWEEFQKDPVGLMSRVAQPASKKIDQNKLKPEMDEKGNLTTAGFACSQCGQPLFVYKLEQVSEKGKAYTNYFGRCNVAEHEKLILLAQLKPEKDSDEAVTYSLGKFGQRALDFYSIHVTKESTHPVKPLAQIAGNRYASVPVGKALSDACMGTIASFLSKYQDIIIEHQKVVKGNQKRLESLRELAGKENLEYPSVTLPPQPHTKEGVDAYNEVIARVRMWVNLNLWQKLKLSRDDAKPLLRLKGFPSFPLVERQANEVDWWDMVCNVKKLINEKKEDGKVFWQNLAGYKRQEALRPYLSSEEDRKKGKKFARYQLGDLLLHLYKKHGEDWGKVYDEAWERIDKKVEGLSKHIKLEEERRSEDAQSKAALTDWLRAKASFVIEGLKEADKDEFCRCELKLQKWYGDLRGKPFAIEAENSILDISGFSKQYNCAFIWQKDGVKKLNLYLIINYFKGGKLRFKKIKPEAFEANRFYTVINKKSGEIVPMEVNFNFDDPNLIILPLAFGKRQGREFIWNDLLSLETGSLKLANGRVIEKTLYNRRTRQDEPALFVALTFERREVLDSSNIKTPMNLIGVDRGENIPAVIALTDPEGCPLSRFKDSLGNPTHILRIGESYKEKQRTIQAKKEVEQRRAGGYSRKYASKAKNLADDMVRNTARDLLYYAVTQDAMLIFENLSRGFGRQGKRTFMAERQYTRMEDWLTAKLAYEGLPSKTYLSKTLAQYTSKTCSNCGFTITSADYDRVLEKLKKTATGWMTTINGKELKVEGQITYYNRYKRQNVVKDLSVELDRLSEESVNNDISSWTKGRSGEALSLLKKRFSHRPVQEKFVCLNCGFETHADEQAALNIARSWLFLRSQEYKKYQTNKTTGNTDKRAFVETWQSFYRKKLKEVWKPAV

SEQ ID NO: 45278 - protein, 979 aa, synthetic construct
  REGION 1..979: note = engineered CasX variant
QEIKRINKIRRRLVKDSNTKKAGKTGPMKTLLVRVMTPDLRERLENLRKKPENIPQPISNTSRANLNKLLTDYTEMKKAILHVYWEEFQKDPVGLMSRVAQPASKKIDQNKLKPEMDEKGNLTTAGFACSQCGQPLFVYKLEQVSEKGKAYTNYFGRCNVAEHEKLIKLAQLKPEKDSDEAVTYSLGKFGQRALDFYSIHVTKESTHPVKPLAQIAGNRYASGPVGKALSDACMGTIASFLSKYQDIIIEHQKVVKGNQKRLESLRELAGKENLEYPSVTLPPQPHTKEGVDAYNEVIARVRMWVNLNLWQKLKLSRDDAKPLLRLKGFPSFPLVERQANEVDWWDMVCNVKKLINEKKEDGKVFWQNLAGYKRQEALRPYLSSEEDRKKGKKFARYQLGDLLLHLYKKHGEDWGKVYDEAWERIDKKVEGLSKHIKLEEERRSEDAQSKAALTDWLRAKASFVIEGLKEADKDEFCRCELKLQKWYGDLRGKPFAIEAENSILDISGFSKQYNCAFIWQKDGVKKLNLYLIINYFKGGKLRFKKIKPEAFEANRFYTVINKKSGEIVPMEVNFNFDDPNLIILPLAFGKRQGREFIWNDLLSLETGSLKLANGRVIEKTLYNRRTRQDEPALFVALTFERREVLDSSNIKTPMNLIGVDRGENIPAVIALTDPEGCPLSRFKDSLGNPTHILRIGESYKEKQRTIQAKKEVEQRRAGGYSRKYASKAKNLADDMVRNTARDLLYYAVTQDAMLIFENLSRGFGRQGKRTFMAERQYTRMEDWLTAKLAYEGLPSKTYLSKTLAQYTSKTCSNCGFTITSADYDRVLEKLKKTATGWMTTINGKELKVEGQITYYNRYKRQNVVKDLSVELDRLSEESVNNDISSWTKGRSGEALSLLKKRFSHRPVQEKFVCLNCGFETHADEQAALNIARSWLFLRSQEYKKYQTNKTTGNTDKRAFVETWQSFYRKKLKEVWKPAV

SEQ ID NO: 45279 - protein, 978 aa, synthetic construct
  REGION 1..978: note = engineered CasX variant
QEIKRINKIRRRLVKDSNTKKAGKTGPMKTLLVRVMTPDLRERLENLRKKPENIPQPISNTSRANLNKLLTDYTEMKKAILHVYWEEFQKDPVGLMSRVAQPASKKIDQNKLKPEMDEKGNLTTAGFACSQCGQPLFVYKLEQVSEKGKAYTNYFGRCNVAEHEKLILLAQLKPEKDSDEAVTYSLGKFGQRALDFYSIHVTKESTHPVKPLAQIAGNRYASPVGKALSDACMGTIASFLSKYQDIIIEHQKVVKGNQKRLESLRELAGKENLEYPSVTLPPQPHTKEGVDAYNEVIARVRMWVNLNLWQKLKLSRDDAKPLLRLKGFPSFPLVERQANEVDWWDMVCNVKKLINEKKEDGKVFWQNLAGYKRQEALRPYLSSEEDRKKGKKFARYQLGDLLLHLYKKHGEDWGKVYDEAWERIDKKVEGLSKHIKLEEERRSEDAQSKAALTDWLRAKASFVIEGLKEADKDEFCRCELKLQKWYGDLRGKPFAIEAENSILDISGFSKQYNCAFIWQKDGVKKLNLYLIINYFKGGKLRFKKIKPEAFEANRFYTVINKKSGEIVPMEVNFNFDDPNLIILPLAFGKRQGREFIWNDLLSLETGSLKLANGRVIEKTLYNRRTRQDEPALFVALTFERREVLDSSNIKTPMNLIGVDRGENIPAVIALTDPEGCPLSRFKDSLGNPTHILRIGESYKEKQRTIQAKKEVEQRRAGGYSRKYASKAKNLADDMVRNTARDLLYYAVTQDAMLIFENLSRGFGRQGKRTFMAERQYTRMEDWLTAKLAYEGLPSKTYLSKTLAQYTSKTCSNCGFTITSADYDRVLEKLKKTATGWMTTINGKELKVEGQITYYNRYKRQNVVKDLSVELDRLSEESVNNDISSWTKGRSGEALSLLKKRFSHRPVQEKFVCLNCGFETHADEQAALNIARSWLFLRSQEYKKYQTNKTTGNTDKRAFVETWQSFYRKKLKEVWKPAV

SEQ ID NO: 45280 - protein, 979 aa, synthetic construct
  REGION 1..979: note = engineered CasX variant
QEIKRINKIRRRLVKDSNTKKAGKTGPMKTLLVRVMTPDLRERLENLRKKPENIPQPISNTSRANLNKLLTDYTEMKKAILHVYWEEFQKDPVGLMSRVAQPASKKIDQNKLKPEMDEKGNLTTAGFACSQCGQPLFVYKLEQVSEKGKAYTNYFGRCNVAEHEKLILLAQLKPEKDSDEAVTYSLGKFGQRALDFYSIHVTKESTHPVKPLAQIAGNRYASYPVGKALSDACMGTIASFLSKYQDIIIEHQKVVKGNQKRLESLRELAGKENLEYPSVTLPPQPHTKEGVDAYNEVIARVRMWVNLNLWQKLKLSRDDAKPLLRLKGFPSFPLVERQANEVDWWDMVCNVKKLINEKKEDGKVFWQNLAGYKRQEALRPYLSSEEDRKKGKKFARYQLGDLLLHLEKKHPEDWGKVYDEAWERIDKKVEGLSKHIKLEEERRSEDAQSKAALTDWLRAKASFVIEGLKEADKDEFCRCELKLQKWYGDLRGKPFAIEAENSILDISGFSKQYNCAFIWQKDGVKKLNLYLIINYFKGGKLRFKKIKPEAFEANRFYTVINKKSGEIVPMEVNFNFDDPNLIILPLAFGKRQGREFIWNDLLSLETGSLKLANGRVIEKTLYNRRTRQDEPALFVALTFERREVLDSSNIKTPMNLIGVDRGENIPAVIALTDPEGCPLSRFKDSLGNPTHILRIGESYKEKQRTIQAKKEVEQRRAGGYSRKYASKAKNLADDMVRNTARDLLYYAVTQDAMLIFENLSRGFGRQGKRTFMAERQYTRMEDWLTAKLAYEGLPSKTYLSKTLAQYTSKTCSNCGFTITSADYDRVLEKLKKTATGWMTTINGKELKVEGQITYYNRYKRQNVVKDLSVELDRLSEESVNNDISSWTKGRSGEALSLLKKRFSHRPVQEKFVCLNCGFETHADEQAALNIARSWLFLRSQEYKKYQTNKTTGNTDKRAFVETWQSFYRKKLKEVWKPAV

SEQ ID NO: 45281 - protein, 979 aa, synthetic construct
  REGION 1..979: note = engineered CasX variant
QEIKRINKIRRRLVKDSNTKKAGKTGPMKTLLVRVMTPDLRERLENLRKKPENIPQPISNTSRANLNKLLTDYTEMKKAILHVYWEEFQKDPVGLMSRVAQPASKKIDQNKLKPEMDEKGNLTTAGFACSQCGQPLFVYKLEQVSEKGKAYTNYFGRCNVAEHEKLILLAQLKPEKDSDEAVTYSLGKFGQRALDFYSIHVTKESTHPVKPLAQIAGNRYASHPVGKALSDACMGTIASFLSKYQDIIIEHQKVVKGNQKRLESLRELAGKENLEYPSVTLPPQPHTKEGVDAYNEVIARVRMWVNLNLWQKLKLSRDDAKPLLRLKGFPSFPLVERQANEVDWWDMVCNVKKLINEKKEDGKVFWQNLAGYKRQEALRPYLSSEEDRKKGKKFARYQLGDLLLHLEKKHPEDWGKVYDEAWERIDKKVEGLSKHIKLEEERRSEDAQSKAALTDWLRAKASFVIEGLKEADKDEFCRCELKLQKWYGDLRGKPFAIEAENSILDISGFSKQYNCAFIWQKDGVKKLNLYLIINYFKGGKLRFKKIKPEAFEANRFYTVINKKSGEIVPMEVNFNFDDPNLIILPLAFGKRQGREFIWNDLLSLETGSLKLANGRVIEKTLYNRRTRQDEPALFVALTFERREVLDSSNIKTPMNLIGVDRGENIPAVIALTDPEGCPLSRFKDSLGNPTHILRIGESYKEKQRTIQAKKEVEQRRAGGYSRKYASKAKNLADDMVRNTARDLLYYAVTQDAMLIFENLSRGFGRQGKRTFMAERQYTRMEDWLTAKLAYEGLPSKTYLSKTLAQYTSKTCSNCGFTITSADYDRVLEKLKKTATGWMTTINGKELKVEGQITYYNRYKRQNVVKDLSVELDRLSEESVNNDISSWTKGRSGEALSLLKKRFSHRPVQEKFVCLNCGFETHADEQAALNIARSWLFLRSQEYKKYQTNKTTGNTDKRAFVETWQSFYRKKLKEVWKPAV

SEQ ID NO: 45282 - protein, 979 aa, synthetic construct
  REGION 1..979: note = engineered CasX variant
QEIKRINKIRRRLVKDSNTKKAGKTGPMKTLLVRVMTPDLRERLENLRKKPENIPQPISNTSRANLNKLLTDYTEMKKAILHVYWEEFQKDPVGLMSRVAQPASKKIDQNKLKPEMDEKGNLTTAGFACSQCGQPLFVYKLEQVSEKGKAYTNYFGRCNVAEHEKLILLAQLKPEKDSDEAVTYSLGKFGQRALDFYSIHVTKESTHPVKPLAQIAGNRYASSPVGKALSDACMGTIASFLSKYQDIIIEHQKVVKGNQKRLESLRELAGKENLEYPSVTLPPQPHTKEGVDAYNEVIARVRMWVNLNLWQKLKLSRDDAKPLLRLKGFPSFPLVERQANEVDWWDMVCNVKKLINEKKEDGKVFWQNLAGYKRQEALRPYLSSEEDRKKGKKFARYQLGDLLLHLEKKHPEDWGKVYDEAWERIDKKVEGLSKHIKLEEERRSEDAQSKAALTDWLRAKASFVIEGLKEADKDEFCRCELKLQKWYGDLRGKPFAIEAENSILDISGFSKQYNCAFIWQKDGVKKLNLYLIINYFKGGKLRFKKIKPEAFEANRFYTVINKKSGEIVPMEVNFNFDDPNLIILPLAFGKRQGREFIWNDLLSLETGSLKLANGRVIEKTLYNRRTRQDEPALFVALTFERREVLDSSNIKTPMNLIGVDRGENIPAVIALTDPEGCPLSRFKDSLGNPTHILRIGESYKEKQRTIQAKKEVEQRRAGGYSRKYASKAKNLADDMVRNTARDLLYYAVTQDAMLIFENLSRGFGRQGKRTFMAERQYTRMEDWLTAKLAYEGLPSKTYLSKTLAQYTSKTCSNCGFTITSADYDRVLEKLKKTATGWMTTINGKELKVEGQITYYNRYKRQNVVKDLSVELDRLSEESVNNDISSWTKGRSGEALSLLKKRFSHRPVQEKFVCLNCGFETHADEQAALNIARSWLFLRSQEYKKYQTNKTTGNTDKRAFVETWQSFYRKKLKEVWKPAV

SEQ ID NO: 45283 - protein, 979 aa, synthetic construct
  REGION 1..979: note = engineered CasX variant
QEIKRINKIRRRLVKDSNTKKAGKTGPMKTLLVRVMTPDLRERLENLRKKPENIPQPISNTSRANLNKLLTDYTEMKKAILHVYWEEFQKDPVGLMSRVAQPASKKIDQNKLKPEMDEKGNLTTAGFACSQCGQPLFVYKLEQVSEKGKAYTNYFGRCNVAEHEKLILLAQLKPEKDSDEAVTYSLGKFGQRALDFYSIHVTKESTHPVKPLAQIAGNRYASTPVGKALSDACMGTIASFLSKYQDIIIEHQKVVKGNQKRLESLRELAGKENLEYPSVTLPPQPHTKEGVDAYNEVIARVRMWVNLNLWQKLKLSRDDAKPLLRLKGFPSFPLVERQANEVDWWDMVCNVKKLINEKKEDGKVFWQNLAGYKRQEALRPYLSSEEDRKKGKKFARYQLGDLLLHLEKKHPEDWGKVYDEAWERIDKKVEGLSKHIKLEEERRSEDAQSKAALTDWLRAKASFVIEGLKEADKDEFCRCELKLQKWYGDLRGKPFAIEAENSILDISGFSKQYNCAFIWQKDGVKKLNLYLIINYFKGGKLRFKKIKPEAFEANRFYTVINKKSGEIVPMEVNFNFDDPNLIILPLAFGKRQGREFIWNDLLSLETGSLKLANGRVIEKTLYNRRTRQDEPALFVALTFERREVLDSSNIKTPMNLIGVDRGENIPAVIALTDPEGCPLSRFKDSLGNPTHILRIGESYKEKQRTIQAKKEVEQRRAGGYSRKYASKAKNLADDMVRNTARDLLYYAVTQDAMLIFENLSRGFGRQGKRTFMAERQYTRMEDWLTAKLAYEGLPSKTYLSKTLAQYTSKTCSNCGFTITSADYDRVLEKLKKTATGWMTTINGKELKVEGQITYYNRYKRQNVVKDLSVELDRLSEESVNNDISSWTKGRSGEALSLLKKRFSHRPVQEKFVCLNCGFETHADEQAALNIARSWLFLRSQEYKKYQTNKTTGNTDKRAFVETWQSFYRKKLKEVWKPAV

SEQ ID NO: 45284 - protein, 979 aa, synthetic construct
  REGION 1..979: note = engineered CasX variant
QEIKRINKIRRRLVKDSNTKKAGKTGPMKTLLVRVMTPDLRERLENLRKKPENIPQPISNTSRANLNKLLTDYTEMKKAILHVYWEEFQKDPVGLMSRVAQPASKKIDQNKLKPEMDEKGNLTTAGFACSQCGQPLFVYKLEQVSEKGKAYTNYFGRCNVAEHEKLILLAQLKPEKDSDEAVTYSLGKFGQRALDFYSIHVTKESTHPVKPLAQIAGNRYASAPVGKALSDACMGTIASFLSKYQDIIIEHQKVVKGNQKRLESLRELAGKENLEYPSVTLPPQPHTKEGVDAYNEVIARVRMWVNLNLWQKLKLSRDDAKPLLRLKGFPSFPLVERQANEVDWWDMVCNVKKLINEKKEDGKVFWQNLAGYKRQEALRPYLSSEEDRKKGKKFARYQLGDLLLHLEKKHPEDWGKVYDEAWERIDKKVEGLSKHIKLEEERRSEDAQSKAALTDWLRAKASFVIEGLKEADKDEFCRCELKLQKWYGDLRGKPFAIEAENSILDISGFSKQYNCAFIWQKDGVKKLNLYLIINYFKGGKLRFKKIKPEAFEANRFYTVINKKSGEIVPMEVNFNFDDPNLIILPLAFGKRQGREFIWNDLLSLETGSLKLANGRVIEKTLYNRRTRQDEPALFVALTFERREVLDSSNIKTPMNLIGVDRGENIPAVIALTDPEGCPLSRFKDSLGNPTHILRIGESYKEKQRTIQAKKEVEQRRAGGYSRKYASKAKNLADDMVRNTARDLLYYAVTQDAMLIFENLSRGFGRQGKRTFMAERQYTRMEDWLTAKLAYEGLPSKTYLSKTLAQYTSKTCSNCGFTITSADYDRVLEKLKKTATGWMTTINGKELKVEGQITYYNRYKRQNVVKDLSVELDRLSEESVNNDISSWTKGRSGEALSLLKKRFSHRPVQEKFVCLNCGFETHADEQAALNIARSWLFLRSQEYKKYQTNKTTGNTDKRAFVETWQSFYRKKLKEVWKPAV

SEQ ID NO: 45285 - protein, 979 aa, synthetic construct
  REGION 1..979: note = engineered CasX variant
QEIKRINKIRRRLVKDSNTKKAGKTGPMKTLLVRVMTPDLRERLENLRKKPENIPQPISNTSRANLNKLLTDYTEMKKAILHVYWEEFQKDPVGLMSRVAQPASKKIDQNKLKPEMDEKGNLTTAGFACSQCGQPLFVYKLEQVSEKGKAYTNYFGRCNVAEHEKLILLAQLKPEKDSDEAVTYSLGKFGQRALDFYSIHVTKESTHPVKPLAQIAGNRYASVPVGKALSDACMGTIASFLSKYQDIIIEHQKVVKGNQKRLESLRELAGKENLEYPSVTLPPQPHTKEGVDAYNEVIARVRMWVNLNLWQKLKLSRDDAKPLLRLKGFPSFPLVERQANEVDWWDMVCNVKKLINEKKEDGKVFWQNLAGYKRQEALRPYLSSEEDRKKGKKFARYQLGDLLLHLEKKHPEDWGKVYDEAWERIDKKVEGLSKHIKLEEERRSEDAQSKAALTDWLRAKASFVIEGLKEADKDEFCRCELKLQKWYGDLRGKPFAIEAENSILDISGFSKQYNCAFIWQKDGVKKLNLYLIINYFKGGKLRFKKIKPEAFEANRFYTVINKKSGEIVPMEVNFNFDDPNLIILPLAFGKRQGREFIWNDLLSLETGSLKLANGRVIEKTLYNRRTRQDEPALFVALTFERREVLDSSNIKTPMNLIGVDRGENIPAVIALTDPEGCPLSRFKDSLGNPTHILRIGESYKEKQRTIQAKKEVEQRRAGGYSRKYASKAKNLADDMVRNTARDLLYYAVTQDAMLIFENLSRGFGRQGKRTFMAERQYTRMEDWLTAKLAYEGLPSKTYLSKTLAQYTSKTCSNCGFTITSADYDRVLEKLKKTATGWMTTINGKELKVEGQITYYNRYKRQNVVKDLSVELDRLSEESVNNDISSWTKGRSGEALSLLKKRFSHRPVQEKFVCLNCGFETHADEQAALNIARSWLFLRSQEYKKYQTNKTTGNTDKRAFVETWQSFYRKKLKEVWKPAV

SEQ ID NO: 45286 - protein, 979 aa, synthetic construct
  REGION 1..979: note = engineered CasX variant
QEIKRINKIRRRLVKDSNTKKAGKTGPMKTLLVRVMTPDLRERLENLRKKPENIPQPISNTSRANLNKLLTDYTEMKKAILHVYWEEFQKDPVGLMSRVAQPASKKIDQNKLKPEMDEKGNLTTAGFACSQCGQPLFVYKLEQVSEKGKAYTNYFGRCNVAEHEKLIKLAQLKPEKDSDEAVTYSLGKFGQRALDFYSIHVTKESTHPVKPLAQIAGNRYASGPVGKALSDACMGTIASFLSKYQDIIIEHQKVVKGNQKRLESLRELAGKENLEYPSVTLPPQPHTKEGVDAYNEVIARVRMWVNLNLWQKLKLSRDDAKPLLRLKGFPSFPLVERQANEVDWWDMVCNVKKLINEKKEDGKVFWQNLAGYKRQEALRPYLSSEEDRKKGKKFARYQLGDLLLHLEKKHPEDWGKVYDEAWERIDKKVEGLSKHIKLEEERRSEDAQSKAALTDWLRAKASFVIEGLKEADKDEFCRCELKLQKWYGDLRGKPFAIEAENSILDISGFSKQYNCAFIWQKDGVKKLNLYLIINYFKGGKLRFKKIKPEAFEANRFYTVINKKSGEIVPMEVNFNFDDPNLIILPLAFGKRQGREFIWNDLLSLETGSLKLANGRVIEKTLYNRRTRQDEPALFVALTFERREVLDSSNIKTPMNLIGVDRGENIPAVIALTDPEGCPLSRFKDSLGNPTHILRIGESYKEKQRTIQAKKEVEQRRAGGYSRKYASKAKNLADDMVRNTARDLLYYAVTQDAMLIFENLSRGFGRQGKRTFMAERQYTRMEDWLTAKLAYEGLPSKTYLSKTLAQYTSKTCSNCGFTITSADYDRVLEKLKKTATGWMTTINGKELKVEGQITYYNRYKRQNVVKDLSVELDRLSEESVNNDISSWTKGRSGEALSLLKKRFSHRPVQEKFVCLNCGFETHADEQAALNIARSWLFLRSQEYKKYQTNKTTGNTDKRAFVETWQSFYRKKLKEVWKPAV

SEQ ID NO: 45287 - protein, 978 aa, synthetic construct
  REGION 1..978: note = engineered CasX variant
QEIKRINKIRRRLVKDSNTKKAGKTGPMKTLLVRVMTPDLRERLENLRKKPENIPQPISNTSRANLNKLLTDYTEMKKAILHVYWEEFQKDPVGLMSRVAQPASKKIDQNKLKPEMDEKGNLTTAGFACSQCGQPLFVYKLEQVSEKGKAYTNYFGRCNVAEHEKLILLAQLKPEKDSDEAVTYSLGKFGQRALDFYSIHVTKESTHPVKPLAQIAGNRYASPVGKALSDACMGTIASFLSKYQDIIIEHQKVVKGNQKRLESLRELAGKENLEYPSVTLPPQPHTKEGVDAYNEVIARVRMWVNLNLWQKLKLSRDDAKPLLRLKGFPSFPLVERQANEVDWWDMVCNVKKLINEKKEDGKVFWQNLAGYKRQEALRPYLSSEEDRKKGKKFARYQLGDLLLHLEKKHPEDWGKVYDEAWERIDKKVEGLSKHIKLEEERRSEDAQSKAALTDWLRAKASFVIEGLKEADKDEFCRCELKLQKWYGDLRGKPFAIEAENSILDISGFSKQYNCAFIWQKDGVKKLNLYLIINYFKGGKLRFKKIKPEAFEANRFYTVINKKSGEIVPMEVNFNFDDPNLIILPLAFGKRQGREFIWNDLLSLETGSLKLANGRVIEKTLYNRRTRQDEPALFVALTFERREVLDSSNIKTPMNLIGVDRGENIPAVIALTDPEGCPLSRFKDSLGNPTHILRIGESYKEKQRTIQAKKEVEQRRAGGYSRKYASKAKNLADDMVRNTARDLLYYAVTQDAMLIFENLSRGFGRQGKRTFMAERQYTRMEDWLTAKLAYEGLPSKTYLSKTLAQYTSKTCSNCGFTITSADYDRVLEKLKKTATGWMTTINGKELKVEGQITYYNRYKRQNVVKDLSVELDRLSEESVNNDISSWTKGRSGEALSLLKKRFSHRPVQEKFVCLNCGFETHADEQAALNIARSWLFLRSQEYKKYQTNKTTGNTDKRAFVETWQSFYRKKLKEVWKPAV

SEQ ID NO: 45288 - protein, 980 aa, synthetic construct
  REGION 1..980: note = engineered CasX variant
QEIKRINKIRRRLVKDSNTKKAGKTGPMKTLLVRVMTPDLRERLENLRKKPENIPQPISNTSRANLNKLLTDYTEMKKAILHVYWEEFQKDPVGLMSRVAQPASKKIDQNKLKPEMDEKGNLTTAGFACSQCGQPLFVYKLEQVSEKGKAYTNYFGRCNVAEHEKLILLAQLKPEKDSDEAVTYSLGKFGQRALDFYSIHVTKESTHPVKPLAQIAGNRYASYPVGKALSDACMGTIASFLSKYQDIIIEHQKVVKGNQKRLESLRELAGKENLEYPSVTLPPQPHTKEGVDAYNEVIARVRMWVNLNLWQKLKLSRDDAKPLLRLKGFPSFPLVERQANEVDWWDMVCNVKKLINEKKEDGKVFWQNLAGYKRQEALRPYLSSEEDRKKGKKFARYQLGDLLLHLEKKHGERDWGKVYDEAWERIDKKVEGLSKHIKLEEERRSEDAQSKAALTDWLRAKASFVIEGLKEADKDEFCRCELKLQKWYGDLRGKPFAIEAENSILDISGFSKQYNCAFIWQKDGVKKLNLYLIINYFKGGKLRFKKIKPEAFEANRFYTVINKKSGEIVPMEVNFNFDDPNLIILPLAFGKRQGREFIWNDLLSLETGSLKLANGRVIEKTLYNRRTRQDEPALFVALTFERREVLDSSNIKTPMNLIGVDRGENIPAVIALTDPEGCPLSRFKDSLGNPTHILRIGESYKEKQRTIQAKKEVEQRRAGGYSRKYASKAKNLADDMVRNTARDLLYYAVTQDAMLIFENLSRGFGRQGKRTFMAERQYTRMEDWLTAKLAYEGLPSKTYLSKTLAQYTSKTCSNCGFTITSADYDRVLEKLKKTATGWMTTINGKELKVEGQITYYNRYKRQNVVKDLSVELDRLSEESVNNDISSWTKGRSGEALSLLKKRFSHRPVQEKFVCLNCGFETHADEQAALNIARSWLFLRSQEYKKYQTNKTTGNTDKRAFVETWQSFYRKKLKEVWKPAV

SEQ ID NO: 45289 - protein, 980 aa, synthetic construct
  REGION 1..980: note = engineered CasX variant
QEIKRINKIRRRLVKDSNTKKAGKTGPMKTLLVRVMTPDLRERLENLRKKPENIPQPISNTSRANLNKLLTDYTEMKKAILHVYWEEFQKDPVGLMSRVAQPASKKIDQNKLKPEMDEKGNLTTAGFACSQCGQPLFVYKLEQVSEKGKAYTNYFGRCNVAEHEKLILLAQLKPEKDSDEAVTYSLGKFGQRALDFYSIHVTKESTHPVKPLAQIAGNRYASHPVGKALSDACMGTIASFLSKYQDIIIEHQKVVKGNQKRLESLRELAGKENLEYPSVTLPPQPHTKEGVDAYNEVIARVRMWVNLNLWQKLKLSRDDAKPLLRLKGFPSFPLVERQANEVDWWDMVCNVKKLINEKKEDGKVFWQNLAGYKRQEALRPYLSSEEDRKKGKKFARYQLGDLLLHLEKKHGERDWGKVYDEAWERIDKKVEGLSKHIKLEEERRSEDAQSKAALTDWLRAKASFVIEGLKEADKDEFCRCELKLQKWYGDLRGKPFAIEAENSILDISGFSKQYNCAFIWQKDGVKKLNLYLIINYFKGGKLRFKKIKPEAFEANRFYTVINKKSGEIVPMEVNFNFDDPNLIILPLAFGKRQGREFIWNDLLSLETGSLKLANGRVIEKTLYNRRTRQDEPALFVALTFERREVLDSSNIKTPMNLIGVDRGENIPAVIALTDPEGCPLSRFKDSLGNPTHILRIGESYKEKQRTIQAKKEVEQRRAGGYSRKYASKAKNLADDMVRNTARDLLYYAVTQDAMLIFENLSRGFGRQGKRTFMAERQYTRMEDWLTAKLAYEGLPSKTYLSKTLAQYTSKTCSNCGFTITSADYDRVLEKLKKTATGWMTTINGKELKVEGQITYYNRYKRQNVVKDLSVELDRLSEESVNNDISSWTKGRSGEALSLLKKRFSHRPVQEKFVCLNCGFETHADEQAALNIARSWLFLRSQEYKKYQTNKTTGNTDKRAFVETWQSFYRKKLKEVWKPAV

SEQ ID NO: 45290 - protein, 980 aa, synthetic construct
  REGION 1..980: note = engineered CasX variant
QEIKRINKIRRRLVKDSNTKKAGKTGPMKTLLVRVMTPDLRERLENLRKKPENIPQPISNTSRANLNKLLTDYTEMKKAILHVYWEEFQKDPVGLMSRVAQPASKKIDQNKLKPEMDEKGNLTTAGFACSQCGQPLFVYKLEQVSEKGKAYTNYFGRCNVAEHEKLILLAQLKPEKDSDEAVTYSLGKFGQRALDFYSIHVTKESTHPVKPLAQIAGNRYASSPVGKALSDACMGTIASFLSKYQDIIIEHQKVVKGNQKRLESLRELAGKENLEYPSVTLPPQPHTKEGVDAYNEVIARVRMWVNLNLWQKLKLSRDDAKPLLRLKGFPSFPLVERQANEVDWWDMVCNVKKLINEKKEDGKVFWQNLAGYKRQEALRPYLSSEEDRKKGKKFARYQLGDLLLHLEKKHGERDWGKVYDEAWERIDKKVEGLSKHIKLEEERRSEDAQSKAALTDWLRAKASFVIEGLKEADKDEFCRCELKLQKWYGDLRGKPFAIEAENSILDISGFSKQYNCAFIWQKDGVKKLNLYLIINYFKGGKLRFKKIKPEAFEANRFYTVINKKSGEIVPMEVNFNFDDPNLIILPLAFGKRQGREFIWNDLLSLETGSLKLANGRVIEKTLYNRRTRQDEPALFVALTFERREVLDSSNIKTPMNLIGVDRGENIPAVIALTDPEGCPLSRFKDSLGNPTHILRIGESYKEKQRTIQAKKEVEQRRAGGYSRKYASKAKNLADDMVRNTARDLLYYAVTQDAMLIFENLSRGFGRQGKRTFMAERQYTRMEDWLTAKLAYEGLPSKTYLSKTLAQYTSKTCSNCGFTITSADYDRVLEKLKKTATGWMTTINGKELKVEGQITYYNRYKRQNVVKDLSVELDRLSEESVNNDISSWTKGRSGEALSLLKKRFSHRPVQEKFVCLNCGFETHADEQAALNIARSWLFLRSQEYKKYQTNKTTGNTDKRAFVETWQSFYRKKLKEVWKPAV

SEQ ID NO: 45291 - protein, 980 aa, synthetic construct
  REGION 1..980: note = engineered CasX variant
QEIKRINKIRRRLVKDSNTKKAGKTGPMKTLLVRVMTPDLRERLENLRKKPENIPQPISNTSRANLNKLLTDYTEMKKAILHVYWEEFQKDPVGLMSRVAQPASKKIDQNKLKPEMDEKGNLTTAGFACSQCGQPLFVYKLEQVSEKGKAYTNYFGRCNVAEHEKLILLAQLKPEKDSDEAVTYSLGKFGQRALDFYSIHVTKESTHPVKPLAQIAGNRYASTPVGKALSDACMGTIASFLSKYQDIIIEHQKVVKGNQKRLESLRELAGKENLEYPSVTLPPQPHTKEGVDAYNEVIARVRMWVNLNLWQKLKLSRDDAKPLLRLKGFPSFPLVERQANEVDWWDMVCNVKKLINEKKEDGKVFWQNLAGYKRQEALRPYLSSEEDRKKGKKFARYQLGDLLLHLEKKHGERDWGKVYDEAWERIDKKVEGLSKHIKLEEERRSEDAQSKAALTDWLRAKASFVIEGLKEADKDEFCRCELKLQKWYGDLRGKPFAIEAENSILDISGFSKQYNCAFIWQKDGVKKLNLYLIINYFKGGKLRFKKIKPEAFEANRFYTVINKKSGEIVPMEVNFNFDDPNLIILPLAFGKRQGREFIWNDLLSLETGSLKLANGRVIEKTLYNRRTRQDEPALFVALTFERREVLDSSNIKTPMNLIGVDRGENIPAVIALTDPEGCPLSRFKDSLGNPTHILRIGESYKEKQRTIQAKKEVEQRRAGGYSRKYASKAKNLADDMVRNTARDLLYYAVTQDAMLIFENLSRGFGRQGKRTFMAERQYTRMEDWLTAKLAYEGLPSKTYLSKTLAQYTSKTCSNCGFTITSADYDRVLEKLKKTATGWMTTINGKELKVEGQITYYNRYKRQNVVKDLSVELDRLSEESVNNDISSWTKGRSGEALSLLKKRFSHRPVQEKFVCLNCGFETHADEQAALNIARSWLFLRSQEYKKYQTNKTTGNTDKRAFVETWQSFYRKKLKEVWKPAV

SEQ ID NO: 45292 - protein, 980 aa, synthetic construct
  REGION 1..980: note = engineered CasX variant
QEIKRINKIRRRLVKDSNTKKAGKTGPMKTLLVRVMTPDLRERLENLRKKPENIPQPISNTSRANLNKLLTDYTEMKKAILHVYWEEFQKDPVGLMSRVAQPASKKIDQNKLKPEMDEKGNLTTAGFACSQCGQPLFVYKLEQVSEKGKAYTNYFGRCNVAEHEKLILLAQLKPEKDSDEAVTYSLGKFGQRALDFYSIHVTKESTHPVKPLAQIAGNRYASAPVGKALSDACMGTIASFLSKYQDIIIEHQKVVKGNQKRLESLRELAGKENLEYPSVTLPPQPHTKEGVDAYNEVIARVRMWVNLNLWQKLKLSRDDAKPLLRLKGFPSFPLVERQANEVDWWDMVCNVKKLINEKKEDGKVFWQNLAGYKRQEALRPYLSSEEDRKKGKKFARYQLGDLLLHLEKKHGERDWGKVYDEAWERIDKKVEGLSKHIKLEEERRSEDAQSKAALTDWLRAKASFVIEGLKEADKDEFCRCELKLQKWYGDLRGKPFAIEAENSILDISGFSKQYNCAFIWQKDGVKKLNLYLIINYFKGGKLRFKKIKPEAFEANRFYTVINKKSGEIVPMEVNFNFDDPNLIILPLAFGKRQGREFIWNDLLSLETGSLKLANGRVIEKTLYNRRTRQDEPALFVALTFERREVLDSSNIKTPMNLIGVDRGENIPAVIALTDPEGCPLSRFKDSLGNPTHILRIGESYKEKQRTIQAKKEVEQRRAGGYSRKYASKAKNLADDMVRNTARDLLYYAVTQDAMLIFENLSRGFGRQGKRTFMAERQYTRMEDWLTAKLAYEGLPSKTYLSKTLAQYTSKTCSNCGFTITSADYDRVLEKLKKTATGWMTTINGKELKVEGQITYYNRYKRQNVVKDLSVELDRLSEESVNNDISSWTKGRSGEALSLLKKRFSHRPVQEKFVCLNCGFETHADEQAALNIARSWLFLRSQEYKKYQTNKTTGNTDKRAFVETWQSFYRKKLKEVWKPAV

SEQ ID NO: 45293 - protein, 980 aa, synthetic construct
  REGION 1..980: note = engineered CasX variant
QEIKRINKIRRRLVKDSNTKKAGKTGPMKTLLVRVMTPDLRERLENLRKKPENIPQPISNTSRANLNKLLTDYTEMKKAILHVYWEEFQKDPVGLMSRVAQPASKKIDQNKLKPEMDEKGNLTTAGFACSQCGQPLFVYKLEQVSEKGKAYTNYFGRCNVAEHEKLILLAQLKPEKDSDEAVTYSLGKFGQRALDFYSIHVTKESTHPVKPLAQIAGNRYASVPVGKALSDACMGTIASFLSKYQDIIIEHQKVVKGNQKRLESLRELAGKENLEYPSVTLPPQPHTKEGVDAYNEVIARVRMWVNLNLWQKLKLSRDDAKPLLRLKGFPSFPLVERQANEVDWWDMVCNVKKLINEKKEDGKVFWQNLAGYKRQEALRPYLSSEEDRKKGKKFARYQLGDLLLHLEKKHGERDWGKVYDEAWERIDKKVEGLSKHIKLEEERRSEDAQSKAALTDWLRAKASFVIEGLKEADKDEFCRCELKLQKWYGDLRGKPFAIEAENSILDISGFSKQYNCAFIWQKDGVKKLNLYLIINYFKGGKLRFKKIKPEAFEANRFYTVINKKSGEIVPMEVNFNFDDPNLIILPLAFGKRQGREFIWNDLLSLETGSLKLANGRVIEKTLYNRRTRQDEPALFVALTFERREVLDSSNIKTPMNLIGVDRGENIPAVIALTDPEGCPLSRFKDSLGNPTHILRIGESYKEKQRTIQAKKEVEQRRAGGYSRKYASKAKNLADDMVRNTARDLLYYAVTQDAMLIFENLSRGFGRQGKRTFMAERQYTRMEDWLTAKLAYEGLPSKTYLSKTLAQYTSKTCSNCGFTITSADYDRVLEKLKKTATGWMTTINGKELKVEGQITYYNRYKRQNVVKDLSVELDRLSEESVNNDISSWTKGRSGEALSLLKKRFSHRPVQEKFVCLNCGFETHADEQAALNIARSWLFLRSQEYKKYQTNKTTGNTDKRAFVETWQSFYRKKLKEVWKPAV

SEQ ID NO: 45294 - protein, 980 aa, synthetic construct
  REGION 1..980: note = engineered CasX variant
QEIKRINKIRRRLVKDSNTKKAGKTGPMKTLLVRVMTPDLRERLENLRKKPENIPQPISNTSRANLNKLLTDYTEMKKAILHVYWEEFQKDPVGLMSRVAQPASKKIDQNKLKPEMDEKGNLTTAGFACSQCGQPLFVYKLEQVSEKGKAYTNYFGRCNVAEHEKLIKLAQLKPEKDSDEAVTYSLGKFGQRALDFYSIHVTKESTHPVKPLAQIAGNRYASGPVGKALSDACMGTIASFLSKYQDIIIEHQKVVKGNQKRLESLRELAGKENLEYPSVTLPPQPHTKEGVDAYNEVIARVRMWVNLNLWQKLKLSRDDAKPLLRLKGFPSFPLVERQANEVDWWDMVCNVKKLINEKKEDGKVFWQNLAGYKRQEALRPYLSSEEDRKKGKKFARYQLGDLLLHLEKKHGERDWGKVYDEAWERIDKKVEGLSKHIKLEEERRSEDAQSKAALTDWLRAKASFVIEGLKEADKDEFCRCELKLQKWYGDLRGKPFAIEAENSILDISGFSKQYNCAFIWQKDGVKKLNLYLIINYFKGGKLRFKKIKPEAFEANRFYTVINKKSGEIVPMEVNFNFDDPNLIILPLAFGKRQGREFIWNDLLSLETGSLKLANGRVIEKTLYNRRTRQDEPALFVALTFERREVLDSSNIKTPMNLIGVDRGENIPAVIALTDPEGCPLSRFKDSLGNPTHILRIGESYKEKQRTIQAKKEVEQRRAGGYSRKYASKAKNLADDMVRNTARDLLYYAVTQDAMLIFENLSRGFGRQGKRTFMAERQYTRMEDWLTAKLAYEGLPSKTYLSKTLAQYTSKTCSNCGFTITSADYDRVLEKLKKTATGWMTTINGKELKVEGQITYYNRYKRQNVVKDLSVELDRLSEESVNNDISSWTKGRSGEALSLLKKRFSHRPVQEKFVCLNCGFETHADEQAALNIARSWLFLRSQEYKKYQTNKTTGNTDKRAFVETWQSFYRKKLKEVWKPAV

SEQ ID NO: 45295 - protein, 979 aa, synthetic construct
  REGION 1..979: note = engineered CasX variant
QEIKRINKIRRRLVKDSNTKKAGKTGPMKTLLVRVMTPDLRERLENLRKKPENIPQPISNTSRANLNKLLTDYTEMKKAILHVYWEEFQKDPVGLMSRVAQPASKKIDQNKLKPEMDEKGNLTTAGFACSQCGQPLFVYKLEQVSEKGKAYTNYFGRCNVAEHEKLILLAQLKPEKDSDEAVTYSLGKFGQRALDFYSIHVTKESTHPVKPLAQIAGNRYASPVGKALSDACMGTIASFLSKYQDIIIEHQKVVKGNQKRLESLRELAGKENLEYPSVTLPPQPHTKEGVDAYNEVIARVRMWVNLNLWQKLKLSRDDAKPLLRLKGFPSFPLVERQANEVDWWDMVCNVKKLINEKKEDGKVFWQNLAGYKRQEALRPYLSSEEDRKKGKKFARYQLGDLLLHLEKKHGERDWGKVYDEAWERIDKKVEGLSKHIKLEEERRSEDAQSKAALTDWLRAKASFVIEGLKEADKDEFCRCELKLQKWYGDLRGKPFAIEAENSILDISGFSKQYNCAFIWQKDGVKKLNLYLIINYFKGGKLRFKKIKPEAFEANRFYTVINKKSGEIVPMEVNFNFDDPNLIILPLAFGKRQGREFIWNDLLSLETGSLKLANGRVIEKTLYNRRTRQDEPALFVALTFERREVLDSSNIKTPMNLIGVDRGENIPAVIALTDPEGCPLSRFKDSLGNPTHILRIGESYKEKQRTIQAKKEVEQRRAGGYSRKYASKAKNLADDMVRNTARDLLYYAVTQDAMLIFENLSRGFGRQGKRTFMAERQYTRMEDWLTAKLAYEGLPSKTYLSKTLAQYTSKTCSNCGFTITSADYDRVLEKLKKTATGWMTTINGKELKVEGQITYYNRYKRQNVVKDLSVELDRLSEESVNNDISSWTKGRSGEALSLLKKRFSHRPVQEKFVCLNCGFETHADEQAALNIARSWLFLRSQEYKKYQTNKTTGNTDKRAFVETWQSFYRKKLKEVWKPAV

SEQ ID NO: 45296 - protein, 980 aa, synthetic construct
  REGION 1..980: note = engineered CasX variant
QEIKRINKIRRRLVKDSNTKKAGKTGPMKTLLVRVMTPDLRERLENLRKKPENIPQPISNTSRANLNKLLTDYTEMKKAILHVYWEEFQKDPVGLMSRVAQPASKKIDQNKLKPEMDEKGNLTTAGFACSQCGQPLFVYKLEQVSEKGKAYTNYFGRCNVAEHEKLILLAQLKPEKDSDEAVTYSLGKFGQRALDFYSIHVTKESTHPVKPLAQIAGNRYASYPVGKALSDACMGTIASFLSKYQDIIIEHQKVVKGNQKRLESLRELAGKENLEYPSVTLPPQPHTKEGVDAYNEVIARVRMWVNLNLWQKLKLSRDDAKPLLRLKGFPSFPLVERQANEVDWWDMVCNVKKLINEKKEDGKVFWQNLAGYKRQEALRPYLSSEEDRKKGKKFARYQLGDLLLHLEKKHGEYDWGKVYDEAWERIDKKVEGLSKHIKLEEERRSEDAQSKAALTDWLRAKASFVIEGLKEADKDEFCRCELKLQKWYGDLRGKPFAIEAENSILDISGFSKQYNCAFIWQKDGVKKLNLYLIINYFKGGKLRFKKIKPEAFEANRFYTVINKKSGEIVPMEVNFNFDDPNLIILPLAFGKRQGREFIWNDLLSLETGSLKLANGRVIEKTLYNRRTRQDEPALFVALTFERREVLDSSNIKTPMNLIGVDRGENIPAVIALTDPEGCPLSRFKDSLGNPTHILRIGESYKEKQRTIQAKKEVEQRRAGGYSRKYASKAKNLADDMVRNTARDLLYYAVTQDAMLIFENLSRGFGRQGKRTFMAERQYTRMEDWLTAKLAYEGLPSKTYLSKTLAQYTSKTCSNCGFTITSADYDRVLEKLKKTATGWMTTINGKELKVEGQITYYNRYKRQNVVKDLSVELDRLSEESVNNDISSWTKGRSGEALSLLKKRFSHRPVQEKFVCLNCGFETHADEQAALNIARSWLFLRSQEYKKYQTNKTTGNTDKRAFVETWQSFYRKKLKEVWKPAV

SEQ ID NO: 45297 - protein, 980 aa, synthetic construct
  REGION 1..980: note = engineered CasX variant
QEIKRINKIRRRLVKDSNTKKAGKTGPMKTLLVRVMTPDLRERLENLRKKPENIPQPISNTSRANLNKLLTDYTEMKKAILHVYWEEFQKDPVGLMSRVAQPASKKIDQNKLKPEMDEKGNLTTAGFACSQCGQPLFVYKLEQVSEKGKAYTNYFGRCNVAEHEKLILLAQLKPEKDSDEAVTYSLGKFGQRALDFYSIHVTKESTHPVKPLAQIAGNRYASHPVGKALSDACMGTIASFLSKYQDIIIEHQKVVKGNQKRLESLRELAGKENLEYPSVTLPPQPHTKEGVDAYNEVIARVRMWVNLNLWQKLKLSRDDAKPLLRLKGFPSFPLVERQANEVDWWDMVCNVKKLINEKKEDGKVFWQNLAGYKRQEALRPYLSSEEDRKKGKKFARYQLGDLLLHLEKKHGEYDWGKVYDEAWERIDKKVEGLSKHIKLEEERRSEDAQSKAALTDWLRAKASFVIEGLKEADKDEFCRCELKLQKWYGDLRGKPFAIEAENSILDISGFSKQYNCAFIWQKDGVKKLNLYLIINYFKGGKLRFKKIKPEAFEANRFYTVINKKSGEIVPMEVNFNFDDPNLIILPLAFGKRQGREFIWNDLLSLETGSLKLANGRVIEKTLYNRRTRQDEPALFVALTFERREVLDSSNIKTPMNLIGVDRGENIPAVIALTDPEGCPLSRFKDSLGNPTHILRIGESYKEKQRTIQAKKEVEQRRAGGYSRKYASKAKNLADDMVRNTARDLLYYAVTQDAMLIFENLSRGFGRQGKRTFMAERQYTRMEDWLTAKLAYEGLPSKTYLSKTLAQYTSKTCSNCGFTITSADYDRVLEKLKKTATGWMTTINGKELKVEGQITYYNRYKRQNVVKDLSVELDRLSEESVNNDISSWTKGRSGEALSLLKKRFSHRPVQEKFVCLNCGFETHADEQAALNIARSWLFLRSQEYKKYQTNKTTGNTDKRAFVETWQSFYRKKLKEVWKPAV

SEQ ID NO: 45298 - protein, 980 aa, synthetic construct
  REGION 1..980: note = engineered CasX variant
QEIKRINKIRRRLVKDSNTKKAGKTGPMKTLLVRVMTPDLRERLENLRKKPENIPQPISNTSRANLNKLLTDYTEMKKAILHVYWEEFQKDPVGLMSRVAQPASKKIDQNKLKPEMDEKGNLTTAGFACSQCGQPLFVYKLEQVSEKGKAYTNYFGRCNVAEHEKLILLAQLKPEKDSDEAVTYSLGKFGQRALDFYSIHVTKESTHPVKPLAQIAGNRYASSPVGKALSDACMGTIASFLSKYQDIIIEHQKVVKGNQKRLESLRELAGKENLEYPSVTLPPQPHTKEGVDAYNEVIARVRMWVNLNLWQKLKLSRDDAKPLLRLKGFPSFPLVERQANEVDWWDMVCNVKKLINEKKEDGKVFWQNLAGYKRQEALRPYLSSEEDRKKGKKFARYQLGDLLLHLEKKHGEYDWGKVYDEAWERIDKKVEGLSKHIKLEEERRSEDAQSKAALTDWLRAKASFVIEGLKEADKDEFCRCELKLQKWYGDLRGKPFAIEAENSILDISGFSKQYNCAFIWQKDGVKKLNLYLIINYFKGGKLRFKKIKPEAFEANRFYTVINKKSGEIVPMEVNFNFDDPNLIILPLAFGKRQGREFIWNDLLSLETGSLKLANGRVIEKTLYNRRTRQDEPALFVALTFERREVLDSSNIKTPMNLIGVDRGENIPAVIALTDPEGCPLSRFKDSLGNPTHILRIGESYKEKQRTIQAKKEVEQRRAGGYSRKYASKAKNLADDMVRNTARDLLYYAVTQDAMLIFENLSRGFGRQGKRTFMAERQYTRMEDWLTAKLAYEGLPSKTYLSKTLAQYTSKTCSNCGFTITSADYDRVLEKLKKTATGWMTTINGKELKVEGQITYYNRYKRQNVVKDLSVELDRLSEESVNNDISSWTKGRSGEALSLLKKRFSHRPVQEKFVCLNCGFETHADEQAALNIARSWLFLRSQEYKKYQTNKTTGNTDKRAFVETWQSFYRKKLKEVWKPAV

SEQ ID NO: 45299 - protein, 980 aa, synthetic construct
  REGION 1..980: note = engineered CasX variant
QEIKRINKIRRRLVKDSNTKKAGKTGPMKTLLVRVMTPDLRERLENLRKKPENIPQPISNTSRANLNKLLTDYTEMKKAILHVYWEEFQKDPVGLMSRVAQPASKKIDQNKLKPEMDEKGNLTTAGFACSQCGQPLFVYKLEQVSEKGKAYTNYFGRCNVAEHEKLILLAQLKPEKDSDEAVTYSLGKFGQRALDFYSIHVTKESTHPVKPLAQIAGNRYASTPVGKALSDACMGTIASFLSKYQDIIIEHQKVVKGNQKRLESLRELAGKENLEYPSVTLPPQPHTKEGVDAYNEVIARVRMWVNLNLWQKLKLSRDDAKPLLRLKGFPSFPLVERQANEVDWWDMVCNVKKLINEKKEDGKVFWQNLAGYKRQEALRPYLSSEEDRKKGKKFARYQLGDLLLHLEKKHGEYDWGKVYDEAWERIDKKVEGLSKHIKLEEERRSEDAQSKAALTDWLRAKASFVIEGLKEADKDEFCRCELKLQKWYGDLRGKPFAIEAENSILDISGFSKQYNCAFIWQKDGVKKLNLYLIINYFKGGKLRFKKIKPEAFEANRFYTVINKKSGEIVPMEVNFNFDDPNLIILPLAFGKRQGREFIWNDLLSLETGSLKLANGRVIEKTLYNRRTRQDEPALFVALTFERREVLDSSNIKTPMNLIGVDRGENIPAVIALTDPEGCPLSRFKDSLGNPTHILRIGESYKEKQRTIQAKKEVEQRRAGGYSRKYASKAKNLADDMVRNTARDLLYYAVTQDAMLIFENLSRGFGRQGKRTFMAERQYTRMEDWLTAKLAYEGLPSKTYLSKTLAQYTSKTCSNCGFTITSADYDRVLEKLKKTATGWMTTINGKELKVEGQITYYNRYKRQNVVKDLSVELDRLSEESVNNDISSWTKGRSGEALSLLKKRFSHRPVQEKFVCLNCGFETHADEQAALNIARSWLFLRSQEYKKYQTNKTTGNTDKRAFVETWQSFYRKKLKEVWKPAV

SEQ ID NO: 45300 - protein, 980 aa, synthetic construct
  REGION 1..980: note = engineered CasX variant
QEIKRINKIRRRLVKDSNTKKAGKTGPMKTLLVRVMTPDLRERLENLRKKPENIPQPISNTSRANLNKLLTDYTEMKKAILHVYWEEFQKDPVGLMSRVAQPASKKIDQNKLKPEMDEKGNLTTAGFACSQCGQPLFVYKLEQVSEKGKAYTNYFGRCNVAEHEKLILLAQLKPEKDSDEAVTYSLGKFGQRALDFYSIHVTKESTHPVKPLAQIAGNRYASAPVGKALSDACMGTIASFLSKYQDIIIEHQKVVKGNQKRLESLRELAGKENLEYPSVTLPPQPHTKEGVDAYNEVIARVRMWVNLNLWQKLKLSRDDAKPLLRLKGFPSFPLVERQANEVDWWDMVCNVKKLINEKKEDGKVFWQNLAGYKRQEALRPYLSSEEDRKKGKKFARYQLGDLLLHLEKKHGEYDWGKVYDEAWERIDKKVEGLSKHIKLEEERRSEDAQSKAALTDWLRAKASFVIEGLKEADKDEFCRCELKLQKWYGDLRGKPFAIEAENSILDISGFSKQYNCAFIWQKDGVKKLNLYLIINYFKGGKLRFKKIKPEAFEANRFYTVINKKSGEIVPMEVNFNFDDPNLIILPLAFGKRQGREFIWNDLLSLETGSLKLANGRVIEKTLYNRRTRQDEPALFVALTFERREVLDSSNIKTPMNLIGVDRGENIPAVIALTDPEGCPLSRFKDSLGNPTHILRIGESYKEKQRTIQAKKEVEQRRAGGYSRKYASKAKNLADDMVRNTARDLLYYAVTQDAMLIFENLSRGFGRQGKRTFMAERQYTRMEDWLTAKLAYEGLPSKTYLSKTLAQYTSKTCSNCGFTITSADYDRVLEKLKKTATGWMTTINGKELKVEGQITYYNRYKRQNVVKDLSVELDRLSEESVNNDISSWTKGRSGEALSLLKKRFSHRPVQEKFVCLNCGFETHADEQAALNIARSWLFLRSQEYKKYQTNKTTGNTDKRAFVETWQSFYRKKLKEVWKPAV

SEQ ID NO: 45301 - protein, 980 aa, synthetic construct
  REGION 1..980: note = engineered CasX variant
QEIKRINKIRRRLVKDSNTKKAGKTGPMKTLLVRVMTPDLRERLENLRKKPENIPQPISNTSRANLNKLLTDYTEMKKAILHVYWEEFQKDPVGLMSRVAQPASKKIDQNKLKPEMDEKGNLTTAGFACSQCGQPLFVYKLEQVSEKGKAYTNYFGRCNVAEHEKLILLAQLKPEKDSDEAVTYSLGKFGQRALDFYSIHVTKESTHPVKPLAQIAGNRYASVPVGKALSDACMGTIASFLSKYQDIIIEHQKVVKGNQKRLESLRELAGKENLEYPSVTLPPQPHTKEGVDAYNEVIARVRMWVNLNLWQKLKLSRDDAKPLLRLKGFPSFPLVERQANEVDWWDMVCNVKKLINEKKEDGKVFWQNLAGYKRQEALRPYLSSEEDRKKGKKFARYQLGDLLLHLEKKHGEYDWGKVYDEAWERIDKKVEGLSKHIKLEEERRSEDAQSKAALTDWLRAKASFVIEGLKEADKDEFCRCELKLQKWYGDLRGKPFAIEAENSILDISGFSKQYNCAFIWQKDGVKKLNLYLIINYFKGGKLRFKKIKPEAFEANRFYTVINKKSGEIVPMEVNFNFDDPNLIILPLAFGKRQGREFIWNDLLSLETGSLKLANGRVIEKTLYNRRTRQDEPALFVALTFERREVLDSSNIKTPMNLIGVDRGENIPAVIALTDPEGCPLSRFKDSLGNPTHILRIGESYKEKQRTIQAKKEVEQRRAGGYSRKYASKAKNLADDMVRNTARDLLYYAVTQDAMLIFENLSRGFGRQGKRTFMAERQYTRMEDWLTAKLAYEGLPSKTYLSKTLAQYTSKTCSNCGFTITSADYDRVLEKLKKTATGWMTTINGKELKVEGQITYYNRYKRQNVVKDLSVELDRLSEESVNNDISSWTKGRSGEALSLLKKRFSHRPVQEKFVCLNCGFETHADEQAALNIARSWLFLRSQEYKKYQTNKTTGNTDKRAFVETWQSFYRKKLKEVWKPAV

SEQ ID NO: 45302 - protein, 980 aa, synthetic construct
  REGION 1..980: note = engineered CasX variant
QEIKRINKIRRRLVKDSNTKKAGKTGPMKTLLVRVMTPDLRERLENLRKKPENIPQPISNTSRANLNKLLTDYTEMKKAILHVYWEEFQKDPVGLMSRVAQPASKKIDQNKLKPEMDEKGNLTTAGFACSQCGQPLFVYKLEQVSEKGKAYTNYFGRCNVAEHEKLIKLAQLKPEKDSDEAVTYSLGKFGQRALDFYSIHVTKESTHPVKPLAQIAGNRYASGPVGKALSDACMGTIASFLSKYQDIIIEHQKVVKGNQKRLESLRELAGKENLEYPSVTLPPQPHTKEGVDAYNEVIARVRMWVNLNLWQKLKLSRDDAKPLLRLKGFPSFPLVERQANEVDWWDMVCNVKKLINEKKEDGKVFWQNLAGYKRQEALRPYLSSEEDRKKGKKFARYQLGDLLLHLEKKHGEYDWGKVYDEAWERIDKKVEGLSKHIKLEEERRSEDAQSKAALTDWLRAKASFVIEGLKEADKDEFCRCELKLQKWYGDLRGKPFAIEAENSILDISGFSKQYNCAFIWQKDGVKKLNLYLIINYFKGGKLRFKKIKPEAFEANRFYTVINKKSGEIVPMEVNFNFDDPNLIILPLAFGKRQGREFIWNDLLSLETGSLKLANGRVIEKTLYNRRTRQDEPALFVALTFERREVLDSSNIKTPMNLIGVDRGENIPAVIALTDPEGCPLSRFKDSLGNPTHILRIGESYKEKQRTIQAKKEVEQRRAGGYSRKYASKAKNLADDMVRNTARDLLYYAVTQDAMLIFENLSRGFGRQGKRTFMAERQYTRMEDWLTAKLAYEGLPSKTYLSKTLAQYTSKTCSNCGFTITSADYDRVLEKLKKTATGWMTTINGKELKVEGQITYYNRYKRQNVVKDLSVELDRLSEESVNNDISSWTKGRSGEALSLLKKRFSHRPVQEKFVCLNCGFETHADEQAALNIARSWLFLRSQEYKKYQTNKTTGNTDKRAFVETWQSFYRKKLKEVWKPAV

SEQ ID NO: 45303 - protein, 979 aa, synthetic construct
  REGION 1..979: note = engineered CasX variant
QEIKRINKIRRRLVKDSNTKKAGKTGPMKTLLVRVMTPDLRERLENLRKKPENIPQPISNTSRANLNKLLTDYTEMKKAILHVYWEEFQKDPVGLMSRVAQPASKKIDQNKLKPEMDEKGNLTTAGFACSQCGQPLFVYKLEQVSEKGKAYTNYFGRCNVAEHEKLILLAQLKPEKDSDEAVTYSLGKFGQRALDFYSIHVTKESTHPVKPLAQIAGNRYASPVGKALSDACMGTIASFLSKYQDIIIEHQKVVKGNQKRLESLRELAGKENLEYPSVTLPPQPHTKEGVDAYNEVIARVRMWVNLNLWQKLKLSRDDAKPLLRLKGFPSFPLVERQANEVDWWDMVCNVKKLINEKKEDGKVFWQNLAGYKRQEALRPYLSSEEDRKKGKKFARYQLGDLLLHLEKKHGEYDWGKVYDEAWERIDKKVEGLSKHIKLEEERRSEDAQSKAALTDWLRAKASFVIEGLKEADKDEFCRCELKLQKWYGDLRGKPFAIEAENSILDISGFSKQYNCAFIWQKDGVKKLNLYLIINYFKGGKLRFKKIKPEAFEANRFYTVINKKSGEIVPMEVNFNFDDPNLIILPLAFGKRQGREFIWNDLLSLETGSLKLANGRVIEKTLYNRRTRQDEPALFVALTFERREVLDSSNIKTPMNLIGVDRGENIPAVIALTDPEGCPLSRFKDSLGNPTHILRIGESYKEKQRTIQAKKEVEQRRAGGYSRKYASKAKNLADDMVRNTARDLLYYAVTQDAMLIFENLSRGFGRQGKRTFMAERQYTRMEDWLTAKLAYEGLPSKTYLSKTLAQYTSKTCSNCGFTITSADYDRVLEKLKKTATGWMTTINGKELKVEGQITYYNRYKRQNVVKDLSVELDRLSEESVNNDISSWTKGRSGEALSLLKKRFSHRPVQEKFVCLNCGFETHADEQAALNIARSWLFLRSQEYKKYQTNKTTGNTDKRAFVETWQSFYRKKLKEVWKPAV

SEQ ID NO: 45304 - protein, 979 aa, synthetic construct
  REGION 1..979: note = engineered CasX variant
QEIKRINKIRRRLVKDSNTKKAGKTGPMKTLLVRVMTPDLRERLENLRKKPENIPQPISNTSRANLNKLLTDYTEMKKAILHVYWEEFQKDPVGLMSRVAQPASKKIDQNKLKPEMDEKGNLTTAGFACSQCGQPLFVYKLEQVSEKGKAYTNYFGRCNVAEHEKLILLAQLKPEKDSDEAVTYSLGKFGQRALDFYSIHVTKESTHPVKPLAQIAGNRYASYPVGKALSDACMGTIASFLSKYQDIIIEHQKVVKGNQKRLESLRELAGKENLEYPSVTLPPQPHTKEGVDAYNEVIARVRMWVNLNLWQKLKLSRDDAKPLLRLKGFPSFPLVERQANEVDWWDMVCNVKKLINEKKEDGKVFWQNLAGYKRQEALRPYLSSEEDRKKGKKFARYQLGDLLLHLEKKHGEDWGDVYDEAWERIDKKVEGLSKHIKLEEERRSEDAQSKAALTDWLRAKASFVIEGLKEADKDEFCRCELKLQKWYGDLRGKPFAIEAENSILDISGFSKQYNCAFIWQKDGVKKLNLYLIINYFKGGKLRFKKIKPEAFEANRFYTVINKKSGEIVPMEVNFNFDDPNLIILPLAFGKRQGREFIWNDLLSLETGSLKLANGRVIEKTLYNRRTRQDEPALFVALTFERREVLDSSNIKTPMNLIGVDRGENIPAVIALTDPEGCPLSRFKDSLGNPTHILRIGESYKEKQRTIQAKKEVEQRRAGGYSRKYASKAKNLADDMVRNTARDLLYYAVTQDAMLIFENLSRGFGRQGKRTFMAERQYTRMEDWLTAKLAYEGLPSKTYLSKTLAQYTSKTCSNCGFTITSADYDRVLEKLKKTATGWMTTINGKELKVEGQITYYNRYKRQNVVKDLSVELDRLSEESVNNDISSWTKGRSGEALSLLKKRFSHRPVQEKFVCLNCGFETHADEQAALNIARSWLFLRSQEYKKYQTNKTTGNTDKRAFVETWQSFYRKKLKEVWKPAV

SEQ ID NO: 45305 - protein, 979 aa, synthetic construct
  REGION 1..979: note = engineered CasX variant
QEIKRINKIRRRLVKDSNTKKAGKTGPMKTLLVRVMTPDLRERLENLRKKPENIPQPISNTSRANLNKLLTDYTEMKKAILHVYWEEFQKDPVGLMSRVAQPASKKIDQNKLKPEMDEKGNLTTAGFACSQCGQPLFVYKLEQVSEKGKAYTNYFGRCNVAEHEKLILLAQLKPEKDSDEAVTYSLGKFGQRALDFYSIHVTKESTHPVKPLAQIAGNRYASHPVGKALSDACMGTIASFLSKYQDIIIEHQKVVKGNQKRLESLRELAGKENLEYPSVTLPPQPHTKEGVDAYNEVIARVRMWVNLNLWQKLKLSRDDAKPLLRLKGFPSFPLVERQANEVDWWDMVCNVKKLINEKKEDGKVFWQNLAGYKRQEALRPYLSSEEDRKKGKKFARYQLGDLLLHLEKKHGEDWGDVYDEAWERIDKKVEGLSKHIKLEEERRSEDAQSKAALTDWLRAKASFVIEGLKEADKDEFCRCELKLQKWYGDLRGKPFAIEAENSILDISGFSKQYNCAFIWQKDGVKKLNLYLIINYFKGGKLRFKKIKPEAFEANRFYTVINKKSGEIVPMEVNFNFDDPNLIILPLAFGKRQGREFIWNDLLSLETGSLKLANGRVIEKTLYNRRTRQDEPALFVALTFERREVLDSSNIKTPMNLIGVDRGENIPAVIALTDPEGCPLSRFKDSLGNPTHILRIGESYKEKQRTIQAKKEVEQRRAGGYSRKYASKAKNLADDMVRNTARDLLYYAVTQDAMLIFENLSRGFGRQGKRTFMAERQYTRMEDWLTAKLAYEGLPSKTYLSKTLAQYTSKTCSNCGFTITSADYDRVLEKLKKTATGWMTTINGKELKVEGQITYYNRYKRQNVVKDLSVELDRLSEESVNNDISSWTKGRSGEALSLLKKRFSHRPVQEKFVCLNCGFETHADEQAALNIARSWLFLRSQEYKKYQTNKTTGNTDKRAFVETWQSFYRKKLKEVWKPAV

SEQ ID NO: 45306 - protein, 979 aa, synthetic construct
  REGION 1..979: note = engineered CasX variant
QEIKRINKIRRRLVKDSNTKKAGKTGPMKTLLVRVMTPDLRERLENLRKKPENIPQPISNTSRANLNKLLTDYTEMKKAILHVYWEEFQKDPVGLMSRVAQPASKKIDQNKLKPEMDEKGNLTTAGFACSQCGQPLFVYKLEQVSEKGKAYTNYFGRCNVAEHEKLILLAQLKPEKDSDEAVTYSLGKFGQRALDFYSIHVTKESTHPVKPLAQIAGNRYASSPVGKALSDACMGTIASFLSKYQDIIIEHQKVVKGNQKRLESLRELAGKENLEYPSVTLPPQPHTKEGVDAYNEVIARVRMWVNLNLWQKLKLSRDDAKPLLRLKGFPSFPLVERQANEVDWWDMVCNVKKLINEKKEDGKVFWQNLAGYKRQEALRPYLSSEEDRKKGKKFARYQLGDLLLHLEKKHGEDWGDVYDEAWERIDKKVEGLSKHIKLEEERRSEDAQSKAALTDWLRAKASFVIEGLKEADKDEFCRCELKLQKWYGDLRGKPFAIEAENSILDISGFSKQYNCAFIWQKDGVKKLNLYLIINYFKGGKLRFKKIKPEAFEANRFYTVINKKSGEIVPMEVNFNFDDPNLIILPLAFGKRQGREFIWNDLLSLETGSLKLANGRVIEKTLYNRRTRQDEPALFVALTFERREVLDSSNIKTPMNLIGVDRGENIPAVIALTDPEGCPLSRFKDSLGNPTHILRIGESYKEKQRTIQAKKEVEQRRAGGYSRKYASKAKNLADDMVRNTARDLLYYAVTQDAMLIFENLSRGFGRQGKRTFMAERQYTRMEDWLTAKLAYEGLPSKTYLSKTLAQYTSKTCSNCGFTITSADYDRVLEKLKKTATGWMTTINGKELKVEGQITYYNRYKRQNVVKDLSVELDRLSEESVNNDISSWTKGRSGEALSLLKKRFSHRPVQEKFVCLNCGFETHADEQAALNIARSWLFLRSQEYKKYQTNKTTGNTDKRAFVETWQSFYRKKLKEVWKPAV

SEQ ID NO: 45307 - protein, 979 aa, synthetic construct
  REGION 1..979: note = engineered CasX variant
QEIKRINKIRRRLVKDSNTKKAGKTGPMKTLLVRVMTPDLRERLENLRKKPENIPQPISNTSRANLNKLLTDYTEMKKAILHVYWEEFQKDPVGLMSRVAQPASKKIDQNKLKPEMDEKGNLTTAGFACSQCGQPLFVYKLEQVSEKGKAYTNYFGRCNVAEHEKLILLAQLKPEKDSDEAVTYSLGKFGQRALDFYSIHVTKESTHPVKPLAQIAGNRYASTPVGKALSDACMGTIASFLSKYQDIIIEHQKVVKGNQKRLESLRELAGKENLEYPSVTLPPQPHTKEGVDAYNEVIARVRMWVNLNLWQKLKLSRDDAKPLLRLKGFPSFPLVERQANEVDWWDMVCNVKKLINEKKEDGKVFWQNLAGYKRQEALRPYLSSEEDRKKGKKFARYQLGDLLLHLEKKHGEDWGDVYDEAWERIDKKVEGLSKHIKLEEERRSEDAQSKAALTDWLRAKASFVIEGLKEADKDEFCRCELKLQKWYGDLRGKPFAIEAENSILDISGFSKQYNCAFIWQKDGVKKLNLYLIINYFKGGKLRFKKIKPEAFEANRFYTVINKKSGEIVPMEVNFNFDDPNLIILPLAFGKRQGREFIWNDLLSLETGSLKLANGRVIEKTLYNRRTRQDEPALFVALTFERREVLDSSNIKTPMNLIGVDRGENIPAVIALTDPEGCPLSRFKDSLGNPTHILRIGESYKEKQRTIQAKKEVEQRRAGGYSRKYASKAKNLADDMVRNTARDLLYYAVTQDAMLIFENLSRGFGRQGKRTFMAERQYTRMEDWLTAKLAYEGLPSKTYLSKTLAQYTSKTCSNCGFTITSADYDRVLEKLKKTATGWMTTINGKELKVEGQITYYNRYKRQNVVKDLSVELDRLSEESVNNDISSWTKGRSGEALSLLKKRFSHRPVQEKFVCLNCGFETHADEQAALNIARSWLFLRSQEYKKYQTNKTTGNTDKRAFVETWQSFYRKKLKEVWKPAV

SEQ ID NO: 45308 - protein, 979 aa, synthetic construct
  REGION 1..979: note = engineered CasX variant
QEIKRINKIRRRLVKDSNTKKAGKTGPMKTLLVRVMTPDLRERLENLRKKPENIPQPISNTSRANLNKLLTDYTEMKKAILHVYWEEFQKDPVGLMSRVAQPASKKIDQNKLKPEMDEKGNLTTAGFACSQCGQPLFVYKLEQVSEKGKAYTNYFGRCNVAEHEKLILLAQLKPEKDSDEAVTYSLGKFGQRALDFYSIHVTKESTHPVKPLAQIAGNRYASAPVGKALSDACMGTIASFLSKYQDIIIEHQKVVKGNQKRLESLRELAGKENLEYPSVTLPPQPHTKEGVDAYNEVIARVRMWVNLNLWQKLKLSRDDAKPLLRLKGFPSFPLVERQANEVDWWDMVCNVKKLINEKKEDGKVFWQNLAGYKRQEALRPYLSSEEDRKKGKKFARYQLGDLLLHLEKKHGEDWGDVYDEAWERIDKKVEGLSKHIKLEEERRSEDAQSKAALTDWLRAKASFVIEGLKEADKDEFCRCELKLQKWYGDLRGKPFAIEAENSILDISGFSKQYNCAFIWQKDGVKKLNLYLIINYFKGGKLRFKKIKPEAFEANRFYTVINKKSGEIVPMEVNFNFDDPNLIILPLAFGKRQGREFIWNDLLSLETGSLKLANGRVIEKTLYNRRTRQDEPALFVALTFERREVLDSSNIKTPMNLIGVDRGENIPAVIALTDPEGCPLSRFKDSLGNPTHILRIGESYKEKQRTIQAKKEVEQRRAGGYSRKYASKAKNLADDMVRNTARDLLYYAVTQDAMLIFENLSRGFGRQGKRTFMAERQYTRMEDWLTAKLAYEGLPSKTYLSKTLAQYTSKTCSNCGFTITSADYDRVLEKLKKTATGWMTTINGKELKVEGQITYYNRYKRQNVVKDLSVELDRLSEESVNNDISSWTKGRSGEALSLLKKRFSHRPVQEKFVCLNCGFETHADEQAALNIARSWLFLRSQEYKKYQTNKTTGNTDKRAFVETWQSFYRKKLKEVWKPAV

SEQ ID NO: 45309 - protein, 979 aa, synthetic construct
  REGION 1..979: note = engineered CasX variant
QEIKRINKIRRRLVKDSNTKKAGKTGPMKTLLVRVMTPDLRERLENLRKKPENIPQPISNTSRANLNKLLTDYTEMKKAILHVYWEEFQKDPVGLMSRVAQPASKKIDQNKLKPEMDEKGNLTTAGFACSQCGQPLFVYKLEQVSEKGKAYTNYFGRCNVAEHEKLILLAQLKPEKDSDEAVTYSLGKFGQRALDFYSIHVTKESTHPVKPLAQIAGNRYASVPVGKALSDACMGTIASFLSKYQDIIIEHQKVVKGNQKRLESLRELAGKENLEYPSVTLPPQPHTKEGVDAYNEVIARVRMWVNLNLWQKLKLSRDDAKPLLRLKGFPSFPLVERQANEVDWWDMVCNVKKLINEKKEDGKVFWQNLAGYKRQEALRPYLSSEEDRKKGKKFARYQLGDLLLHLEKKHGEDWGDVYDEAWERIDKKVEGLSKHIKLEEERRSEDAQSKAALTDWLRAKASFVIEGLKEADKDEFCRCELKLQKWYGDLRGKPFAIEAENSILDISGFSKQYNCAFIWQKDGVKKLNLYLIINYFKGGKLRFKKIKPEAFEANRFYTVINKKSGEIVPMEVNFNFDDPNLIILPLAFGKRQGREFIWNDLLSLETGSLKLANGRVIEKTLYNRRTRQDEPALFVALTFERREVLDSSNIKTPMNLIGVDRGENIPAVIALTDPEGCPLSRFKDSLGNPTHILRIGESYKEKQRTIQAKKEVEQRRAGGYSRKYASKAKNLADDMVRNTARDLLYYAVTQDAMLIFENLSRGFGRQGKRTFMAERQYTRMEDWLTAKLAYEGLPSKTYLSKTLAQYTSKTCSNCGFTITSADYDRVLEKLKKTATGWMTTINGKELKVEGQITYYNRYKRQNVVKDLSVELDRLSEESVNNDISSWTKGRSGEALSLLKKRFSHRPVQEKFVCLNCGFETHADEQAALNIARSWLFLRSQEYKKYQTNKTTGNTDKRAFVETWQSFYRKKLKEVWKPAV

SEQ ID NO: 45310 - protein, 979 aa, synthetic construct
  REGION 1..979: note = engineered CasX variant
QEIKRINKIRRRLVKDSNTKKAGKTGPMKTLLVRVMTPDLRERLENLRKKPENIPQPISNTSRANLNKLLTDYTEMKKAILHVYWEEFQKDPVGLMSRVAQPASKKIDQNKLKPEMDEKGNLTTAGFACSQCGQPLFVYKLEQVSEKGKAYTNYFGRCNVAEHEKLIKLAQLKPEKDSDEAVTYSLGKFGQRALDFYSIHVTKESTHPVKPLAQIAGNRYASGPVGKALSDACMGTIASFLSKYQDIIIEHQKVVKGNQKRLESLRELAGKENLEYPSVTLPPQPHTKEGVDAYNEVIARVRMWVNLNLWQKLKLSRDDAKPLLRLKGFPSFPLVERQANEVDWWDMVCNVKKLINEKKEDGKVFWQNLAGYKRQEALRPYLSSEEDRKKGKKFARYQLGDLLLHLEKKHGEDWGDVYDEAWERIDKKVEGLSKHIKLEEERRSEDAQSKAALTDWLRAKASFVIEGLKEADKDEFCRCELKLQKWYGDLRGKPFAIEAENSILDISGFSKQYNCAFIWQKDGVKKLNLYLIINYFKGGKLRFKKIKPEAFEANRFYTVINKKSGEIVPMEVNFNFDDPNLIILPLAFGKRQGREFIWNDLLSLETGSLKLANGRVIEKTLYNRRTRQDEPALFVALTFERREVLDSSNIKTPMNLIGVDRGENIPAVIALTDPEGCPLSRFKDSLGNPTHILRIGESYKEKQRTIQAKKEVEQRRAGGYSRKYASKAKNLADDMVRNTARDLLYYAVTQDAMLIFENLSRGFGRQGKRTFMAERQYTRMEDWLTAKLAYEGLPSKTYLSKTLAQYTSKTCSNCGFTITSADYDRVLEKLKKTATGWMTTINGKELKVEGQITYYNRYKRQNVVKDLSVELDRLSEESVNNDISSWTKGRSGEALSLLKKRFSHRPVQEKFVCLNCGFETHADEQAALNIARSWLFLRSQEYKKYQTNKTTGNTDKRAFVETWQSFYRKKLKEVWKPAV

SEQ ID NO: 45311 - protein, 978 aa, synthetic construct
  REGION 1..978: note = engineered CasX variant
QEIKRINKIRRRLVKDSNTKKAGKTGPMKTLLVRVMTPDLRERLENLRKKPENIPQPISNTSRANLNKLLTDYTEMKKAILHVYWEEFQKDPVGLMSRVAQPASKKIDQNKLKPEMDEKGNLTTAGFACSQCGQPLFVYKLEQVSEKGKAYTNYFGRCNVAEHEKLILLAQLKPEKDSDEAVTYSLGKFGQRALDFYSIHVTKESTHPVKPLAQIAGNRYASPVGKALSDACMGTIASFLSKYQDIIIEHQKVVKGNQKRLESLRELAGKENLEYPSVTLPPQPHTKEGVDAYNEVIARVRMWVNLNLWQKLKLSRDDAKPLLRLKGFPSFPLVERQANEVDWWDMVCNVKKLINEKKEDGKVFWQNLAGYKRQEALRPYLSSEEDRKKGKKFARYQLGDLLLHLEKKHGEDWGDVYDEAWERIDKKVEGLSKHIKLEEERRSEDAQSKAALTDWLRAKASFVIEGLKEADKDEFCRCELKLQKWYGDLRGKPFAIEAENSILDISGFSKQYNCAFIWQKDGVKKLNLYLIINYFKGGKLRFKKIKPEAFEANRFYTVINKKSGEIVPMEVNFNFDDPNLIILPLAFGKRQGREFIWNDLLSLETGSLKLANGRVIEKTLYNRRTRQDEPALFVALTFERREVLDSSNIKTPMNLIGVDRGENIPAVIALTDPEGCPLSRFKDSLGNPTHILRIGESYKEKQRTIQAKKEVEQRRAGGYSRKYASKAKNLADDMVRNTARDLLYYAVTQDAMLIFENLSRGFGRQGKRTFMAERQYTRMEDWLTAKLAYEGLPSKTYLSKTLAQYTSKTCSNCGFTITSADYDRVLEKLKKTATGWMTTINGKELKVEGQITYYNRYKRQNVVKDLSVELDRLSEESVNNDISSWTKGRSGEALSLLKKRFSHRPVQEKFVCLNCGFETHADEQAALNIARSWLFLRSQEYKKYQTNKTTGNTDKRAFVETWQSFYRKKLKEVWKPAV

SEQ ID NO: 45312 - protein, 979 aa, synthetic construct
  REGION 1..979: note = engineered CasX variant
QEIKRINKIRRRLVKDSNTKKAGKTGPMKTLLVRVMTPDLRERLENLRKKPENIPQPISNTSRANLNKLLTDYTEMKKAILHVYWEEFQKDPVGLMSRVAQPASKKIDQNKLKPEMDEKGNLTTAGFACSQCGQPLFVYKLEQVSEKGKAYTNYFGRCNVAEHEKLILLAQLKPEKDSDEAVTYSLGKFGQRALDFYSIHVTKESTHPVKPLAQIAGNRYASYPVGKALSDACMGTIASFLSKYQDIIIEHQKVVKGNQKRLESLRELAGKENLEYPSVTLPPQPHTKEGVDAYNEVIARVRMWVNLNLWQKLKLSRDDAKPLLRLKGFPSFPLVERQANEVDWWDMVCNVKKLINEKKEDGKVFWQNLAGYKRQEALRPYLSSEEDRKKGKKFARYQLGDLLLHLEKKHGEDWGKVYGEAWERIDKKVEGLSKHIKLEEERRSEDAQSKAALTDWLRAKASFVIEGLKEADKDEFCRCELKLQKWYGDLRGKPFAIEAENSILDISGFSKQYNCAFIWQKDGVKKLNLYLIINYFKGGKLRFKKIKPEAFEANRFYTVINKKSGEIVPMEVNFNFDDPNLIILPLAFGKRQGREFIWNDLLSLETGSLKLANGRVIEKTLYNRRTRQDEPALFVALTFERREVLDSSNIKTPMNLIGVDRGENIPAVIALTDPEGCPLSRFKDSLGNPTHILRIGESYKEKQRTIQAKKEVEQRRAGGYSRKYASKAKNLADDMVRNTARDLLYYAVTQDAMLIFENLSRGFGRQGKRTFMAERQYTRMEDWLTAKLAYEGLPSKTYLSKTLAQYTSKTCSNCGFTITSADYDRVLEKLKKTATGWMTTINGKELKVEGQITYYNRYKRQNVVKDLSVELDRLSEESVNNDISSWTKGRSGEALSLLKKRFSHRPVQEKFVCLNCGFETHADEQAALNIARSWLFLRSQEYKKYQTNKTTGNTDKRAFVETWQSFYRKKLKEVWKPAV

SEQ ID NO: 45313 - protein, 979 aa, synthetic construct
  REGION 1..979: note = engineered CasX variant
QEIKRINKIRRRLVKDSNTKKAGKTGPMKTLLVRVMTPDLRERLENLRKKPENIPQPISNTSRANLNKLLTDYTEMKKAILHVYWEEFQKDPVGLMSRVAQPASKKIDQNKLKPEMDEKGNLTTAGFACSQCGQPLFVYKLEQVSEKGKAYTNYFGRCNVAEHEKLILLAQLKPEKDSDEAVTYSLGKFGQRALDFYSIHVTKESTHPVKPLAQIAGNRYASHPVGKALSDACMGTIASFLSKYQDIIIEHQKVVKGNQKRLESLRELAGKENLEYPSVTLPPQPHTKEGVDAYNEVIARVRMWVNLNLWQKLKLSRDDAKPLLRLKGFPSFPLVERQANEVDWWDMVCNVKKLINEKKEDGKVFWQNLAGYKRQEALRPYLSSEEDRKKGKKFARYQLGDLLLHLEKKHGEDWGKVYGEAWERIDKKVEGLSKHIKLEEERRSEDAQSKAALTDWLRAKASFVIEGLKEADKDEFCRCELKLQKWYGDLRGKPFAIEAENSILDISGFSKQYNCAFIWQKDGVKKLNLYLIINYFKGGKLRFKKIKPEAFEANRFYTVINKKSGEIVPMEVNFNFDDPNLIILPLAFGKRQGREFIWNDLLSLETGSLKLANGRVIEKTLYNRRTRQDEPALFVALTFERREVLDSSNIKTPMNLIGVDRGENIPAVIALTDPEGCPLSRFKDSLGNPTHILRIGESYKEKQRTIQAKKEVEQRRAGGYSRKYASKAKNLADDMVRNTARDLLYYAVTQDAMLIFENLSRGFGRQGKRTFMAERQYTRMEDWLTAKLAYEGLPSKTYLSKTLAQYTSKTCSNCGFTITSADYDRVLEKLKKTATGWMTTINGKELKVEGQITYYNRYKRQNVVKDLSVELDRLSEESVNNDISSWTKGRSGEALSLLKKRFSHRPVQEKFVCLNCGFETHADEQAALNIARSWLFLRSQEYKKYQTNKTTGNTDKRAFVETWQSFYRKKLKEVWKPAV

SEQ ID NO: 45314 - protein, 979 aa, synthetic construct
  REGION 1..979: note = engineered CasX variant
QEIKRINKIRRRLVKDSNTKKAGKTGPMKTLLVRVMTPDLRERLENLRKKPENIPQPISNTSRANLNKLLTDYTEMKKAILHVYWEEFQKDPVGLMSRVAQPASKKIDQNKLKPEMDEKGNLTTAGFACSQCGQPLFVYKLEQVSEKGKAYTNYFGRCNVAEHEKLILLAQLKPEKDSDEAVTYSLGKFGQRALDFYSIHVTKESTHPVKPLAQIAGNRYASSPVGKALSDACMGTIASFLSKYQDIIIEHQKVVKGNQKRLESLRELAGKENLEYPSVTLPPQPHTKEGVDAYNEVIARVRMWVNLNLWQKLKLSRDDAKPLLRLKGFPSFPLVERQANEVDWWDMVCNVKKLINEKKEDGKVFWQNLAGYKRQEALRPYLSSEEDRKKGKKFARYQLGDLLLHLEKKHGEDWGKVYGEAWERIDKKVEGLSKHIKLEEERRSEDAQSKAALTDWLRAKASFVIEGLKEADKDEFCRCELKLQKWYGDLRGKPFAIEAENSILDISGFSKQYNCAFIWQKDGVKKLNLYLIINYFKGGKLRFKKIKPEAFEANRFYTVINKKSGEIVPMEVNFNFDDPNLIILPLAFGKRQGREFIWNDLLSLETGSLKLANGRVIEKTLYNRRTRQDEPALFVALTFERREVLDSSNIKTPMNLIGVDRGENIPAVIALTDPEGCPLSRFKDSLGNPTHILRIGESYKEKQRTIQAKKEVEQRRAGGYSRKYASKAKNLADDMVRNTARDLLYYAVTQDAMLIFENLSRGFGRQGKRTFMAERQYTRMEDWLTAKLAYEGLPSKTYLSKTLAQYTSKTCSNCGFTITSADYDRVLEKLKKTATGWMTTINGKELKVEGQITYYNRYKRQNVVKDLSVELDRLSEESVNNDISSWTKGRSGEALSLLKKRFSHRPVQEKFVCLNCGFETHADEQAALNIARSWLFLRSQEYKKYQTNKTTGNTDKRAFVETWQSFYRKKLKEVWKPAV

SEQ ID NO: 45315 - protein, 979 aa, synthetic construct
  REGION 1..979: note = engineered CasX variant
QEIKRINKIRRRLVKDSNTKKAGKTGPMKTLLVRVMTPDLRERLENLRKKPENIPQPISNTSRANLNKLLTDYTEMKKAILHVYWEEFQKDPVGLMSRVAQPASKKIDQNKLKPEMDEKGNLTTAGFACSQCGQPLFVYKLEQVSEKGKAYTNYFGRCNVAEHEKLILLAQLKPEKDSDEAVTYSLGKFGQRALDFYSIHVTKESTHPVKPLAQIAGNRYASTPVGKALSDACMGTIASFLSKYQDIIIEHQKVVKGNQKRLESLRELAGKENLEYPSVTLPPQPHTKEGVDAYNEVIARVRMWVNLNLWQKLKLSRDDAKPLLRLKGFPSFPLVERQANEVDWWDMVCNVKKLINEKKEDGKVFWQNLAGYKRQEALRPYLSSEEDRKKGKKFARYQLGDLLLHLEKKHGEDWGKVYGEAWERIDKKVEGLSKHIKLEEERRSEDAQSKAALTDWLRAKASFVIEGLKEADKDEFCRCELKLQKWYGDLRGKPFAIEAENSILDISGFSKQYNCAFIWQKDGVKKLNLYLIINYFKGGKLRFKKIKPEAFEANRFYTVINKKSGEIVPMEVNFNFDDPNLIILPLAFGKRQGREFIWNDLLSLETGSLKLANGRVIEKTLYNRRTRQDEPALFVALTFERREVLDSSNIKTPMNLIGVDRGENIPAVIALTDPEGCPLSRFKDSLGNPTHILRIGESYKEKQRTIQAKKEVEQRRAGGYSRKYASKAKNLADDMVRNTARDLLYYAVTQDAMLIFENLSRGFGRQGKRTFMAERQYTRMEDWLTAKLAYEGLPSKTYLSKTLAQYTSKTCSNCGFTITSADYDRVLEKLKKTATGWMTTINGKELKVEGQITYYNRYKRQNVVKDLSVELDRLSEESVNNDISSWTKGRSGEALSLLKKRFSHRPVQEKFVCLNCGFETHADEQAALNIARSWLFLRSQEYKKYQTNKTTGNTDKRAFVETWQSFYRKKLKEVWKPAV

SEQ ID NO: 45316 - protein, 979 aa, synthetic construct
  REGION 1..979: note = engineered CasX variant
QEIKRINKIRRRLVKDSNTKKAGKTGPMKTLLVRVMTPDLRERLENLRKKPENIPQPISNTSRANLNKLLTDYTEMKKAILHVYWEEFQKDPVGLMSRVAQPASKKIDQNKLKPEMDEKGNLTTAGFACSQCGQPLFVYKLEQVSEKGKAYTNYFGRCNVAEHEKLILLAQLKPEKDSDEAVTYSLGKFGQRALDFYSIHVTKESTHPVKPLAQIAGNRYASAPVGKALSDACMGTIASFLSKYQDIIIEHQKVVKGNQKRLESLRELAGKENLEYPSVTLPPQPHTKEGVDAYNEVIARVRMWVNLNLWQKLKLSRDDAKPLLRLKGFPSFPLVERQANEVDWWDMVCNVKKLINEKKEDGKVFWQNLAGYKRQEALRPYLSSEEDRKKGKKFARYQLGDLLLHLEKKHGEDWGKVYGEAWERIDKKVEGLSKHIKLEEERRSEDAQSKAALTDWLRAKASFVIEGLKEADKDEFCRCELKLQKWYGDLRGKPFAIEAENSILDISGFSKQYNCAFIWQKDGVKKLNLYLIINYFKGGKLRFKKIKPEAFEANRFYTVINKKSGEIVPMEVNFNFDDPNLIILPLAFGKRQGREFIWNDLLSLETGSLKLANGRVIEKTLYNRRTRQDEPALFVALTFERREVLDSSNIKTPMNLIGVDRGENIPAVIALTDPEGCPLSRFKDSLGNPTHILRIGESYKEKQRTIQAKKEVEQRRAGGYSRKYASKAKNLADDMVRNTARDLLYYAVTQDAMLIFENLSRGFGRQGKRTFMAERQYTRMEDWLTAKLAYEGLPSKTYLSKTLAQYTSKTCSNCGFTITSADYDRVLEKLKKTATGWMTTINGKELKVEGQITYYNRYKRQNVVKDLSVELDRLSEESVNNDISSWTKGRSGEALSLLKKRFSHRPVQEKFVCLNCGFETHADEQAALNIARSWLFLRSQEYKKYQTNKTTGNTDKRAFVETWQSFYRKKLKEVWKPAV

SEQ ID NO: 45317 - protein, 979 aa, synthetic construct
  REGION 1..979: note = engineered CasX variant
QEIKRINKIRRRLVKDSNTKKAGKTGPMKTLLVRVMTPDLRERLENLRKKPENIPQPISNTSRANLNKLLTDYTEMKKAILHVYWEEFQKDPVGLMSRVAQPASKKIDQNKLKPEMDEKGNLTTAGFACSQCGQPLFVYKLEQVSEKGKAYTNYFGRCNVAEHEKLILLAQLKPEKDSDEAVTYSLGKFGQRALDFYSIHVTKESTHPVKPLAQIAGNRYASVPVGKALSDACMGTIASFLSKYQDIIIEHQKVVKGNQKRLESLRELAGKENLEYPSVTLPPQPHTKEGVDAYNEVIARVRMWVNLNLWQKLKLSRDDAKPLLRLKGFPSFPLVERQANEVDWWDMVCNVKKLINEKKEDGKVFWQNLAGYKRQEALRPYLSSEEDRKKGKKFARYQLGDLLLHLEKKHGEDWGKVYGEAWERIDKKVEGLSKHIKLEEERRSEDAQSKAALTDWLRAKASFVIEGLKEADKDEFCRCELKLQKWYGDLRGKPFAIEAENSILDISGFSKQYNCAFIWQKDGVKKLNLYLIINYFKGGKLRFKKIKPEAFEANRFYTVINKKSGEIVPMEVNFNFDDPNLIILPLAFGKRQGREFIWNDLLSLETGSLKLANGRVIEKTLYNRRTRQDEPALFVALTFERREVLDSSNIKTPMNLIGVDRGENIPAVIALTDPEGCPLSRFKDSLGNPTHILRIGESYKEKQRTIQAKKEVEQRRAGGYSRKYASKAKNLADDMVRNTARDLLYYAVTQDAMLIFENLSRGFGRQGKRTFMAERQYTRMEDWLTAKLAYEGLPSKTYLSKTLAQYTSKTCSNCGFTITSADYDRVLEKLKKTATGWMTTINGKELKVEGQITYYNRYKRQNVVKDLSVELDRLSEESVNNDISSWTKGRSGEALSLLKKRFSHRPVQEKFVCLNCGFETHADEQAALNIARSWLFLRSQEYKKYQTNKTTGNTDKRAFVETWQSFYRKKLKEVWKPAV

SEQ ID NO: 45318 - protein, 979 aa, synthetic construct
  REGION 1..979: note = engineered CasX variant
QEIKRINKIRRRLVKDSNTKKAGKTGPMKTLLVRVMTPDLRERLENLRKKPENIPQPISNTSRANLNKLLTDYTEMKKAILHVYWEEFQKDPVGLMSRVAQPASKKIDQNKLKPEMDEKGNLTTAGFACSQCGQPLFVYKLEQVSEKGKAYTNYFGRCNVAEHEKLIKLAQLKPEKDSDEAVTYSLGKFGQRALDFYSIHVTKESTHPVKPLAQIAGNRYASGPVGKALSDACMGTIASFLSKYQDIIIEHQKVVKGNQKRLESLRELAGKENLEYPSVTLPPQPHTKEGVDAYNEVIARVRMWVNLNLWQKLKLSRDDAKPLLRLKGFPSFPLVERQANEVDWWDMVCNVKKLINEKKEDGKVFWQNLAGYKRQEALRPYLSSEEDRKKGKKFARYQLGDLLLHLEKKHGEDWGKVYGEAWERIDKKVEGLSKHIKLEEERRSEDAQSKAALTDWLRAKASFVIEGLKEADKDEFCRCELKLQKWYGDLRGKPFAIEAENSILDISGFSKQYNCAFIWQKDGVKKLNLYLIINYFKGGKLRFKKIKPEAFEANRFYTVINKKSGEIVPMEVNFNFDDPNLIILPLAFGKRQGREFIWNDLLSLETGSLKLANGRVIEKTLYNRRTRQDEPALFVALTFERREVLDSSNIKTPMNLIGVDRGENIPAVIALTDPEGCPLSRFKDSLGNPTHILRIGESYKEKQRTIQAKKEVEQRRAGGYSRKYASKAKNLADDMVRNTARDLLYYAVTQDAMLIFENLSRGFGRQGKRTFMAERQYTRMEDWLTAKLAYEGLPSKTYLSKTLAQYTSKTCSNCGFTITSADYDRVLEKLKKTATGWMTTINGKELKVEGQITYYNRYKRQNVVKDLSVELDRLSEESVNNDISSWTKGRSGEALSLLKKRFSHRPVQEKFVCLNCGFETHADEQAALNIARSWLFLRSQEYKKYQTNKTTGNTDKRAFVETWQSFYRKKLKEVWKPAV

SEQ ID NO: 45319 - protein, 978 aa, synthetic construct
  REGION 1..978: note = engineered CasX variant
QEIKRINKIRRRLVKDSNTKKAGKTGPMKTLLVRVMTPDLRERLENLRKKPENIPQPISNTSRANLNKLLTDYTEMKKAILHVYWEEFQKDPVGLMSRVAQPASKKIDQNKLKPEMDEKGNLTTAGFACSQCGQPLFVYKLEQVSEKGKAYTNYFGRCNVAEHEKLILLAQLKPEKDSDEAVTYSLGKFGQRALDFYSIHVTKESTHPVKPLAQIAGNRYASPVGKALSDACMGTIASFLSKYQDIIIEHQKVVKGNQKRLESLRELAGKENLEYPSVTLPPQPHTKEGVDAYNEVIARVRMWVNLNLWQKLKLSRDDAKPLLRLKGFPSFPLVERQANEVDWWDMVCNVKKLINEKKEDGKVFWQNLAGYKRQEALRPYLSSEEDRKKGKKFARYQLGDLLLHLEKKHGEDWGKVYGEAWERIDKKVEGLSKHIKLEEERRSEDAQSKAALTDWLRAKASFVIEGLKEADKDEFCRCELKLQKWYGDLRGKPFAIEAENSILDISGFSKQYNCAFIWQKDGVKKLNLYLIINYFKGGKLRFKKIKPEAFEANRFYTVINKKSGEIVPMEVNFNFDDPNLIILPLAFGKRQGREFIWNDLLSLETGSLKLANGRVIEKTLYNRRTRQDEPALFVALTFERREVLDSSNIKTPMNLIGVDRGENIPAVIALTDPEGCPLSRFKDSLGNPTHILRIGESYKEKQRTIQAKKEVEQRRAGGYSRKYASKAKNLADDMVRNTARDLLYYAVTQDAMLIFENLSRGFGRQGKRTFMAERQYTRMEDWLTAKLAYEGLPSKTYLSKTLAQYTSKTCSNCGFTITSADYDRVLEKLKKTATGWMTTINGKELKVEGQITYYNRYKRQNVVKDLSVELDRLSEESVNNDISSWTKGRSGEALSLLKKRFSHRPVQEKFVCLNCGFETHADEQAALNIARSWLFLRSQEYKKYQTNKTTGNTDKRAFVETWQSFYRKKLKEVWKPAV

SEQ ID NO: 45320 - protein, 979 aa, synthetic construct
  REGION 1..979: note = engineered CasX variant
QEIKRINKIRRRLVKDSNTKKAGKTGPMKTLLVRVMTPDLRERLENLRKKPENIPQPISNTSRANLNKLLTDYTEMKKAILHVYWEEFQKDPVGLMSRVAQPASKKIDQNKLKPEMDEKGNLTTAGFACSQCGQPLFVYKLEQVSEKGKAYTNYFGRCNVAEHEKLILLAQLKPEKDSDEAVTYSLGKFGQRALDFYSIHVTKESTHPVKPLAQIAGNRYASYPVGKALSDACMGTIASFLSKYQDIIIEHQKVVKGNQKRLESLRELAGKENLEYPSVTLPPQPHTKEGVDAYNEVIARVRMWVNLNLWQKLKLSRDDAKPLLRLKGFPSFPLVERQANEVDWWDMVCNVKKLINEKKEDGKVFWQNLAGYKRQEALRPYLSSEEDRKKGKKFARYQLGDLLLHLEKKHGEDWGKVYDEAWERIDKKVEGLSKHIKLEEERRSEDAQSKAALTDWLRAKASFVIEGKKEADKDEFCRCELKLQKWYGDLRGKPFAIEAENSILDISGFSKQYNCAFIWQKDGVKKLNLYLIINYFKGGKLRFKKIKPEAFEANRFYTVINKKSGEIVPMEVNFNFDDPNLIILPLAFGKRQGREFIWNDLLSLETGSLKLANGRVIEKTLYNRRTRQDEPALFVALTFERREVLDSSNIKTPMNLIGVDRGENIPAVIALTDPEGCPLSRFKDSLGNPTHILRIGESYKEKQRTIQAKKEVEQRRAGGYSRKYASKAKNLADDMVRNTARDLLYYAVTQDAMLIFENLSRGFGRQGKRTFMAERQYTRMEDWLTAKLAYEGLPSKTYLSKTLAQYTSKTCSNCGFTITSADYDRVLEKLKKTATGWMTTINGKELKVEGQITYYNRYKRQNVVKDLSVELDRLSEESVNNDISSWTKGRSGEALSLLKKRFSHRPVQEKFVCLNCGFETHADEQAALNIARSWLFLRSQEYKKYQTNKTTGNTDKRAFVETWQSFYRKKLKEVWKPAV

SEQ ID NO: 45321 - protein, 979 aa, synthetic construct
  REGION 1..979: note = engineered CasX variant
QEIKRINKIRRRLVKDSNTKKAGKTGPMKTLLVRVMTPDLRERLENLRKKPENIPQPISNTSRANLNKLLTDYTEMKKAILHVYWEEFQKDPVGLMSRVAQPASKKIDQNKLKPEMDEKGNLTTAGFACSQCGQPLFVYKLEQVSEKGKAYTNYFGRCNVAEHEKLILLAQLKPEKDSDEAVTYSLGKFGQRALDFYSIHVTKESTHPVKPLAQIAGNRYASHPVGKALSDACMGTIASFLSKYQDIIIEHQKVVKGNQKRLESLRELAGKENLEYPSVTLPPQPHTKEGVDAYNEVIARVRMWVNLNLWQKLKLSRDDAKPLLRLKGFPSFPLVERQANEVDWWDMVCNVKKLINEKKEDGKVFWQNLAGYKRQEALRPYLSSEEDRKKGKKFARYQLGDLLLHLEKKHGEDWGKVYDEAWERIDKKVEGLSKHIKLEEERRSEDAQSKAALTDWLRAKASFVIEGKKEADKDEFCRCELKLQKWYGDLRGKPFAIEAENSILDISGFSKQYNCAFIWQKDGVKKLNLYLIINYFKGGKLRFKKIKPEAFEANRFYTVINKKSGEIVPMEVNFNFDDPNLIILPLAFGKRQGREFIWNDLLSLETGSLKLANGRVIEKTLYNRRTRQDEPALFVALTFERREVLDSSNIKTPMNLIGVDRGENIPAVIALTDPEGCPLSRFKDSLGNPTHILRIGESYKEKQRTIQAKKEVEQRRAGGYSRKYASKAKNLADDMVRNTARDLLYYAVTQDAMLIFENLSRGFGRQGKRTFMAERQYTRMEDWLTAKLAYEGLPSKTYLSKTLAQYTSKTCSNCGFTITSADYDRVLEKLKKTATGWMTTINGKELKVEGQITYYNRYKRQNVVKDLSVELDRLSEESVNNDISSWTKGRSGEALSLLKKRFSHRPVQEKFVCLNCGFETHADEQAALNIARSWLFLRSQEYKKYQTNKTTGNTDKRAFVETWQSFYRKKLKEVWKPAV

SEQ ID NO: 45322 - protein, 979 aa, synthetic construct
  REGION 1..979: note = engineered CasX variant
QEIKRINKIRRRLVKDSNTKKAGKTGPMKTLLVRVMTPDLRERLENLRKKPENIPQPISNTSRANLNKLLTDYTEMKKAILHVYWEEFQKDPVGLMSRVAQPASKKIDQNKLKPEMDEKGNLTTAGFACSQCGQPLFVYKLEQVSEKGKAYTNYFGRCNVAEHEKLILLAQLKPEKDSDEAVTYSLGKFGQRALDFYSIHVTKESTHPVKPLAQIAGNRYASSPVGKALSDACMGTIASFLSKYQDIIIEHQKVVKGNQKRLESLRELAGKENLEYPSVTLPPQPHTKEGVDAYNEVIARVRMWVNLNLWQKLKLSRDDAKPLLRLKGFPSFPLVERQANEVDWWDMVCNVKKLINEKKEDGKVFWQNLAGYKRQEALRPYLSSEEDRKKGKKFARYQLGDLLLHLEKKHGEDWGKVYDEAWERIDKKVEGLSKHIKLEEERRSEDAQSKAALTDWLRAKASFVIEGKKEADKDEFCRCELKLQKWYGDLRGKPFAIEAENSILDISGFSKQYNCAFIWQKDGVKKLNLYLIINYFKGGKLRFKKIKPEAFEANRFYTVINKKSGEIVPMEVNFNFDDPNLIILPLAFGKRQGREFIWNDLLSLETGSLKLANGRVIEKTLYNRRTRQDEPALFVALTFERREVLDSSNIKTPMNLIGVDRGENIPAVIALTDPEGCPLSRFKDSLGNPTHILRIGESYKEKQRTIQAKKEVEQRRAGGYSRKYASKAKNLADDMVRNTARDLLYYAVTQDAMLIFENLSRGFGRQGKRTFMAERQYTRMEDWLTAKLAYEGLPSKTYLSKTLAQYTSKTCSNCGFTITSADYDRVLEKLKKTATGWMTTINGKELKVEGQITYYNRYKRQNVVKDLSVELDRLSEESVNNDISSWTKGRSGEALSLLKKRFSHRPVQEKFVCLNCGFETHADEQAALNIARSWLFLRSQEYKKYQTNKTTGNTDKRAFVETWQSFYRKKLKEVWKPAV

SEQ ID NO: 45323 - protein, 979 aa, synthetic construct
  REGION 1..979: note = engineered CasX variant
QEIKRINKIRRRLVKDSNTKKAGKTGPMKTLLVRVMTPDLRERLENLRKKPENIPQPISNTSRANLNKLLTDYTEMKKAILHVYWEEFQKDPVGLMSRVAQPASKKIDQNKLKPEMDEKGNLTTAGFACSQCGQPLFVYKLEQVSEKGKAYTNYFGRCNVAEHEKLILLAQLKPEKDSDEAVTYSLGKFGQRALDFYSIHVTKESTHPVKPLAQIAGNRYASTPVGKALSDACMGTIASFLSKYQDIIIEHQKVVKGNQKRLESLRELAGKENLEYPSVTLPPQPHTKEGVDAYNEVIARVRMWVNLNLWQKLKLSRDDAKPLLRLKGFPSFPLVERQANEVDWWDMVCNVKKLINEKKEDGKVFWQNLAGYKRQEALRPYLSSEEDRKKGKKFARYQLGDLLLHLEKKHGEDWGKVYDEAWERIDKKVEGLSKHIKLEEERRSEDAQSKAALTDWLRAKASFVIEGKKEADKDEFCRCELKLQKWYGDLRGKPFAIEAENSILDISGFSKQYNCAFIWQKDGVKKLNLYLIINYFKGGKLRFKKIKPEAFEANRFYTVINKKSGEIVPMEVNFNFDDPNLIILPLAFGKRQGREFIWNDLLSLETGSLKLANGRVIEKTLYNRRTRQDEPALFVALTFERREVLDSSNIKTPMNLIGVDRGENIPAVIALTDPEGCPLSRFKDSLGNPTHILRIGESYKEKQRTIQAKKEVEQRRAGGYSRKYASKAKNLADDMVRNTARDLLYYAVTQDAMLIFENLSRGFGRQGKRTFMAERQYTRMEDWLTAKLAYEGLPSKTYLSKTLAQYTSKTCSNCGFTITSADYDRVLEKLKKTATGWMTTINGKELKVEGQITYYNRYKRQNVVKDLSVELDRLSEESVNNDISSWTKGRSGEALSLLKKRFSHRPVQEKFVCLNCGFETHADEQAALNIARSWLFLRSQEYKKYQTNKTTGNTDKRAFVETWQSFYRKKLKEVWKPAV

SEQ ID NO: 45324 - protein, 979 aa, synthetic construct
  REGION 1..979: note = engineered CasX variant
QEIKRINKIRRRLVKDSNTKKAGKTGPMKTLLVRVMTPDLRERLENLRKKPENIPQPISNTSRANLNKLLTDYTEMKKAILHVYWEEFQKDPVGLMSRVAQPASKKIDQNKLKPEMDEKGNLTTAGFACSQCGQPLFVYKLEQVSEKGKAYTNYFGRCNVAEHEKLILLAQLKPEKDSDEAVTYSLGKFGQRALDFYSIHVTKESTHPVKPLAQIAGNRYASAPVGKALSDACMGTIASFLSKYQDIIIEHQKVVKGNQKRLESLRELAGKENLEYPSVTLPPQPHTKEGVDAYNEVIARVRMWVNLNLWQKLKLSRDDAKPLLRLKGFPSFPLVERQANEVDWWDMVCNVKKLINEKKEDGKVFWQNLAGYKRQEALRPYLSSEEDRKKGKKFARYQLGDLLLHLEKKHGEDWGKVYDEAWERIDKKVEGLSKHIKLEEERRSEDAQSKAALTDWLRAKASFVIEGKKEADKDEFCRCELKLQKWYGDLRGKPFAIEAENSILDISGFSKQYNCAFIWQKDGVKKLNLYLIINYFKGGKLRFKKIKPEAFEANRFYTVINKKSGEIVPMEVNFNFDDPNLIILPLAFGKRQGREFIWNDLLSLETGSLKLANGRVIEKTLYNRRTRQDEPALFVALTFERREVLDSSNIKTPMNLIGVDRGENIPAVIALTDPEGCPLSRFKDSLGNPTHILRIGESYKEKQRTIQAKKEVEQRRAGGYSRKYASKAKNLADDMVRNTARDLLYYAVTQDAMLIFENLSRGFGRQGKRTFMAERQYTRMEDWLTAKLAYEGLPSKTYLSKTLAQYTSKTCSNCGFTITSADYDRVLEKLKKTATGWMTTINGKELKVEGQITYYNRYKRQNVVKDLSVELDRLSEESVNNDISSWTKGRSGEALSLLKKRFSHRPVQEKFVCLNCGFETHADEQAALNIARSWLFLRSQEYKKYQTNKTTGNTDKRAFVETWQSFYRKKLKEVWKPAV

SEQ ID NO: 45325 - protein, 979 aa, synthetic construct
  REGION 1..979: note = engineered CasX variant
QEIKRINKIRRRLVKDSNTKKAGKTGPMKTLLVRVMTPDLRERLENLRKKPENIPQPISNTSRANLNKLLTDYTEMKKAILHVYWEEFQKDPVGLMSRVAQPASKKIDQNKLKPEMDEKGNLTTAGFACSQCGQPLFVYKLEQVSEKGKAYTNYFGRCNVAEHEKLILLAQLKPEKDSDEAVTYSLGKFGQRALDFYSIHVTKESTHPVKPLAQIAGNRYASVPVGKALSDACMGTIASFLSKYQDIIIEHQKVVKGNQKRLESLRELAGKENLEYPSVTLPPQPHTKEGVDAYNEVIARVRMWVNLNLWQKLKLSRDDAKPLLRLKGFPSFPLVERQANEVDWWDMVCNVKKLINEKKEDGKVFWQNLAGYKRQEALRPYLSSEEDRKKGKKFARYQLGDLLLHLEKKHGEDWGKVYDEAWERIDKKVEGLSKHIKLEEERRSEDAQSKAALTDWLRAKASFVIEGKKEADKDEFCRCELKLQKWYGDLRGKPFAIEAENSILDISGFSKQYNCAFIWQKDGVKKLNLYLIINYFKGGKLRFKKIKPEAFEANRFYTVINKKSGEIVPMEVNFNFDDPNLIILPLAFGKRQGREFIWNDLLSLETGSLKLANGRVIEKTLYNRRTRQDEPALFVALTFERREVLDSSNIKTPMNLIGVDRGENIPAVIALTDPEGCPLSRFKDSLGNPTHILRIGESYKEKQRTIQAKKEVEQRRAGGYSRKYASKAKNLADDMVRNTARDLLYYAVTQDAMLIFENLSRGFGRQGKRTFMAERQYTRMEDWLTAKLAYEGLPSKTYLSKTLAQYTSKTCSNCGFTITSADYDRVLEKLKKTATGWMTTINGKELKVEGQITYYNRYKRQNVVKDLSVELDRLSEESVNNDISSWTKGRSGEALSLLKKRFSHRPVQEKFVCLNCGFETHADEQAALNIARSWLFLRSQEYKKYQTNKTTGNTDKRAFVETWQSFYRKKLKEVWKPAV

SEQ ID NO: 45326 - protein, 979 aa, synthetic construct
  REGION 1..979: note = engineered CasX variant
QEIKRINKIRRRLVKDSNTKKAGKTGPMKTLLVRVMTPDLRERLENLRKKPENIPQPISNTSRANLNKLLTDYTEMKKAILHVYWEEFQKDPVGLMSRVAQPASKKIDQNKLKPEMDEKGNLTTAGFACSQCGQPLFVYKLEQVSEKGKAYTNYFGRCNVAEHEKLIKLAQLKPEKDSDEAVTYSLGKFGQRALDFYSIHVTKESTHPVKPLAQIAGNRYASGPVGKALSDACMGTIASFLSKYQDIIIEHQKVVKGNQKRLESLRELAGKENLEYPSVTLPPQPHTKEGVDAYNEVIARVRMWVNLNLWQKLKLSRDDAKPLLRLKGFPSFPLVERQANEVDWWDMVCNVKKLINEKKEDGKVFWQNLAGYKRQEALRPYLSSEEDRKKGKKFARYQLGDLLLHLEKKHGEDWGKVYDEAWERIDKKVEGLSKHIKLEEERRSEDAQSKAALTDWLRAKASFVIEGKKEADKDEFCRCELKLQKWYGDLRGKPFAIEAENSILDISGFSKQYNCAFIWQKDGVKKLNLYLIINYFKGGKLRFKKIKPEAFEANRFYTVINKKSGEIVPMEVNFNFDDPNLIILPLAFGKRQGREFIWNDLLSLETGSLKLANGRVIEKTLYNRRTRQDEPALFVALTFERREVLDSSNIKTPMNLIGVDRGENIPAVIALTDPEGCPLSRFKDSLGNPTHILRIGESYKEKQRTIQAKKEVEQRRAGGYSRKYASKAKNLADDMVRNTARDLLYYAVTQDAMLIFENLSRGFGRQGKRTFMAERQYTRMEDWLTAKLAYEGLPSKTYLSKTLAQYTSKTCSNCGFTITSADYDRVLEKLKKTATGWMTTINGKELKVEGQITYYNRYKRQNVVKDLSVELDRLSEESVNNDISSWTKGRSGEALSLLKKRFSHRPVQEKFVCLNCGFETHADEQAALNIARSWLFLRSQEYKKYQTNKTTGNTDKRAFVETWQSFYRKKLKEVWKPAV

SEQ ID NO: 45327 - protein, 978 aa, synthetic construct
  REGION 1..978: note = engineered CasX variant
QEIKRINKIRRRLVKDSNTKKAGKTGPMKTLLVRVMTPDLRERLENLRKKPENIPQPISNTSRANLNKLLTDYTEMKKAILHVYWEEFQKDPVGLMSRVAQPASKKIDQNKLKPEMDEKGNLTTAGFACSQCGQPLFVYKLEQVSEKGKAYTNYFGRCNVAEHEKLILLAQLKPEKDSDEAVTYSLGKFGQRALDFYSIHVTKESTHPVKPLAQIAGNRYASPVGKALSDACMGTIASFLSKYQDIIIEHQKVVKGNQKRLESLRELAGKENLEYPSVTLPPQPHTKEGVDAYNEVIARVRMWVNLNLWQKLKLSRDDAKPLLRLKGFPSFPLVERQANEVDWWDMVCNVKKLINEKKEDGKVFWQNLAGYKRQEALRPYLSSEEDRKKGKKFARYQLGDLLLHLEKKHGEDWGKVYDEAWERIDKKVEGLSKHIKLEEERRSEDAQSKAALTDWLRAKASFVIEGKKEADKDEFCRCELKLQKWYGDLRGKPFAIEAENSILDISGFSKQYNCAFIWQKDGVKKLNLYLIINYFKGGKLRFKKIKPEAFEANRFYTVINKKSGEIVPMEVNFNFDDPNLIILPLAFGKRQGREFIWNDLLSLETGSLKLANGRVIEKTLYNRRTRQDEPALFVALTFERREVLDSSNIKTPMNLIGVDRGENIPAVIALTDPEGCPLSRFKDSLGNPTHILRIGESYKEKQRTIQAKKEVEQRRAGGYSRKYASKAKNLADDMVRNTARDLLYYAVTQDAMLIFENLSRGFGRQGKRTFMAERQYTRMEDWLTAKLAYEGLPSKTYLSKTLAQYTSKTCSNCGFTITSADYDRVLEKLKKTATGWMTTINGKELKVEGQITYYNRYKRQNVVKDLSVELDRLSEESVNNDISSWTKGRSGEALSLLKKRFSHRPVQEKFVCLNCGFETHADEQAALNIARSWLFLRSQEYKKYQTNKTTGNTDKRAFVETWQSFYRKKLKEVWKPAV

SEQ ID NO: 45328 - protein, 979 aa, synthetic construct
  REGION 1..979: note = engineered CasX variant
QEIKRINKIRRRLVKDSNTKKAGKTGPMKTLLVRVMTPDLRERLENLRKKPENIPQPISNTSRANLNKLLTDYTEMKKAILHVYWEEFQKDPVGLMSRVAQPASKKIDQNKLKPEMDEKGNLTTAGFACSQCGQPLFVYKLEQVSEKGKAYTNYFGRCNVAEHEKLILLAQLKPEKDSDEAVTYSLGKFGQRALDFYSIHVTKESTHPVKPLAQIAGNRYASYPVGKALSDACMGTIASFLSKYQDIIIEHQKVVKGNQKRLESLRELAGKENLEYPSVTLPPQPHTKEGVDAYNEVIARVRMWVNLNLWQKLKLSRDDAKPLLRLKGFPSFPLVERQANEVDWWDMVCNVKKLINEKKEDGKVFWQNLAGYKRQEALRPYLSSEEDRKKGKKFARYQLGDLLLHLEKKHGEDWGKVYDEAWERIDKKVEGLSKHIKLEEERRSEDAQSKAALTDWLRAKASFVIEGSKEADKDEFCRCELKLQKWYGDLRGKPFAIEAENSILDISGFSKQYNCAFIWQKDGVKKLNLYLIINYFKGGKLRFKKIKPEAFEANRFYTVINKKSGEIVPMEVNFNFDDPNLIILPLAFGKRQGREFIWNDLLSLETGSLKLANGRVIEKTLYNRRTRQDEPALFVALTFERREVLDSSNIKTPMNLIGVDRGENIPAVIALTDPEGCPLSRFKDSLGNPTHILRIGESYKEKQRTIQAKKEVEQRRAGGYSRKYASKAKNLADDMVRNTARDLLYYAVTQDAMLIFENLSRGFGRQGKRTFMAERQYTRMEDWLTAKLAYEGLPSKTYLSKTLAQYTSKTCSNCGFTITSADYDRVLEKLKKTATGWMTTINGKELKVEGQITYYNRYKRQNVVKDLSVELDRLSEESVNNDISSWTKGRSGEALSLLKKRFSHRPVQEKFVCLNCGFETHADEQAALNIARSWLFLRSQEYKKYQTNKTTGNTDKRAFVETWQSFYRKKLKEVWKPAV

SEQ ID NO: 45329 - protein, 979 aa, synthetic construct
  REGION 1..979: note = engineered CasX variant
QEIKRINKIRRRLVKDSNTKKAGKTGPMKTLLVRVMTPDLRERLENLRKKPENIPQPISNTSRANLNKLLTDYTEMKKAILHVYWEEFQKDPVGLMSRVAQPASKKIDQNKLKPEMDEKGNLTTAGFACSQCGQPLFVYKLEQVSEKGKAYTNYFGRCNVAEHEKLILLAQLKPEKDSDEAVTYSLGKFGQRALDFYSIHVTKESTHPVKPLAQIAGNRYASHPVGKALSDACMGTIASFLSKYQDIIIEHQKVVKGNQKRLESLRELAGKENLEYPSVTLPPQPHTKEGVDAYNEVIARVRMWVNLNLWQKLKLSRDDAKPLLRLKGFPSFPLVERQANEVDWWDMVCNVKKLINEKKEDGKVFWQNLAGYKRQEALRPYLSSEEDRKKGKKFARYQLGDLLLHLEKKHGEDWGKVYDEAWERIDKKVEGLSKHIKLEEERRSEDAQSKAALTDWLRAKASFVIEGSKEADKDEFCRCELKLQKWYGDLRGKPFAIEAENSILDISGFSKQYNCAFIWQKDGVKKLNLYLIINYFKGGKLRFKKIKPEAFEANRFYTVINKKSGEIVPMEVNFNFDDPNLIILPLAFGKRQGREFIWNDLLSLETGSLKLANGRVIEKTLYNRRTRQDEPALFVALTFERREVLDSSNIKTPMNLIGVDRGENIPAVIALTDPEGCPLSRFKDSLGNPTHILRIGESYKEKQRTIQAKKEVEQRRAGGYSRKYASKAKNLADDMVRNTARDLLYYAVTQDAMLIFENLSRGFGRQGKRTFMAERQYTRMEDWLTAKLAYEGLPSKTYLSKTLAQYTSKTCSNCGFTITSADYDRVLEKLKKTATGWMTTINGKELKVEGQITYYNRYKRQNVVKDLSVELDRLSEESVNNDISSWTKGRSGEALSLLKKRFSHRPVQEKFVCLNCGFETHADEQAALNIARSWLFLRSQEYKKYQTNKTTGNTDKRAFVETWQSFYRKKLKEVWKPAV

SEQ ID NO: 45330 - protein, 979 aa, synthetic construct
  REGION 1..979: note = engineered CasX variant
QEIKRINKIRRRLVKDSNTKKAGKTGPMKTLLVRVMTPDLRERLENLRKKPENIPQPISNTSRANLNKLLTDYTEMKKAILHVYWEEFQKDPVGLMSRVAQPASKKIDQNKLKPEMDEKGNLTTAGFACSQCGQPLFVYKLEQVSEKGKAYTNYFGRCNVAEHEKLILLAQLKPEKDSDEAVTYSLGKFGQRALDFYSIHVTKESTHPVKPLAQIAGNRYASSPVGKALSDACMGTIASFLSKYQDIIIEHQKVVKGNQKRLESLRELAGKENLEYPSVTLPPQPHTKEGVDAYNEVIARVRMWVNLNLWQKLKLSRDDAKPLLRLKGFPSFPLVERQANEVDWWDMVCNVKKLINEKKEDGKVFWQNLAGYKRQEALRPYLSSEEDRKKGKKFARYQLGDLLLHLEKKHGEDWGKVYDEAWERIDKKVEGLSKHIKLEEERRSEDAQSKAALTDWLRAKASFVIEGSKEADKDEFCRCELKLQKWYGDLRGKPFAIEAENSILDISGFSKQYNCAFIWQKDGVKKLNLYLIINYFKGGKLRFKKIKPEAFEANRFYTVINKKSGEIVPMEVNFNFDDPNLIILPLAFGKRQGREFIWNDLLSLETGSLKLANGRVIEKTLYNRRTRQDEPALFVALTFERREVLDSSNIKTPMNLIGVDRGENIPAVIALTDPEGCPLSRFKDSLGNPTHILRIGESYKEKQRTIQAKKEVEQRRAGGYSRKYASKAKNLADDMVRNTARDLLYYAVTQDAMLIFENLSRGFGRQGKRTFMAERQYTRMEDWLTAKLAYEGLPSKTYLSKTLAQYTSKTCSNCGFTITSADYDRVLEKLKKTATGWMTTINGKELKVEGQITYYNRYKRQNVVKDLSVELDRLSEESVNNDISSWTKGRSGEALSLLKKRFSHRPVQEKFVCLNCGFETHADEQAALNIARSWLFLRSQEYKKYQTNKTTGNTDKRAFVETWQSFYRKKLKEVWKPAV

SEQ ID NO: 45331 - protein, 979 aa, synthetic construct
  REGION 1..979: note = engineered CasX variant
QEIKRINKIRRRLVKDSNTKKAGKTGPMKTLLVRVMTPDLRERLENLRKKPENIPQPISNTSRANLNKLLTDYTEMKKAILHVYWEEFQKDPVGLMSRVAQPASKKIDQNKLKPEMDEKGNLTTAGFACSQCGQPLFVYKLEQVSEKGKAYTNYFGRCNVAEHEKLILLAQLKPEKDSDEAVTYSLGKFGQRALDFYSIHVTKESTHPVKPLAQIAGNRYASTPVGKALSDACMGTIASFLSKYQDIIIEHQKVVKGNQKRLESLRELAGKENLEYPSVTLPPQPHTKEGVDAYNEVIARVRMWVNLNLWQKLKLSRDDAKPLLRLKGFPSFPLVERQANEVDWWDMVCNVKKLINEKKEDGKVFWQNLAGYKRQEALRPYLSSEEDRKKGKKFARYQLGDLLLHLEKKHGEDWGKVYDEAWERIDKKVEGLSKHIKLEEERRSEDAQSKAALTDWLRAKASFVIEGSKEADKDEFCRCELKLQKWYGDLRGKPFAIEAENSILDISGFSKQYNCAFIWQKDGVKKLNLYLIINYFKGGKLRFKKIKPEAFEANRFYTVINKKSGEIVPMEVNFNFDDPNLIILPLAFGKRQGREFIWNDLLSLETGSLKLANGRVIEKTLYNRRTRQDEPALFVALTFERREVLDSSNIKTPMNLIGVDRGENIPAVIALTDPEGCPLSRFKDSLGNPTHILRIGESYKEKQRTIQAKKEVEQRRAGGYSRKYASKAKNLADDMVRNTARDLLYYAVTQDAMLIFENLSRGFGRQGKRTFMAERQYTRMEDWLTAKLAYEGLPSKTYLSKTLAQYTSKTCSNCGFTITSADYDRVLEKLKKTATGWMTTINGKELKVEGQITYYNRYKRQNVVKDLSVELDRLSEESVNNDISSWTKGRSGEALSLLKKRFSHRPVQEKFVCLNCGFETHADEQAALNIARSWLFLRSQEYKKYQTNKTTGNTDKRAFVETWQSFYRKKLKEVWKPAV

SEQ ID NO: 45332 - protein, 979 aa, synthetic construct
  REGION 1..979: note = engineered CasX variant
QEIKRINKIRRRLVKDSNTKKAGKTGPMKTLLVRVMTPDLRERLENLRKKPENIPQPISNTSRANLNKLLTDYTEMKKAILHVYWEEFQKDPVGLMSRVAQPASKKIDQNKLKPEMDEKGNLTTAGFACSQCGQPLFVYKLEQVSEKGKAYTNYFGRCNVAEHEKLILLAQLKPEKDSDEAVTYSLGKFGQRALDFYSIHVTKESTHPVKPLAQIAGNRYASAPVGKALSDACMGTIASFLSKYQDIIIEHQKVVKGNQKRLESLRELAGKENLEYPSVTLPPQPHTKEGVDAYNEVIARVRMWVNLNLWQKLKLSRDDAKPLLRLKGFPSFPLVERQANEVDWWDMVCNVKKLINEKKEDGKVFWQNLAGYKRQEALRPYLSSEEDRKKGKKFARYQLGDLLLHLEKKHGEDWGKVYDEAWERIDKKVEGLSKHIKLEEERRSEDAQSKAALTDWLRAKASFVIEGSKEADKDEFCRCELKLQKWYGDLRGKPFAIEAENSILDISGFSKQYNCAFIWQKDGVKKLNLYLIINYFKGGKLRFKKIKPEAFEANRFYTVINKKSGEIVPMEVNFNFDDPNLIILPLAFGKRQGREFIWNDLLSLETGSLKLANGRVIEKTLYNRRTRQDEPALFVALTFERREVLDSSNIKTPMNLIGVDRGENIPAVIALTDPEGCPLSRFKDSLGNPTHILRIGESYKEKQRTIQAKKEVEQRRAGGYSRKYASKAKNLADDMVRNTARDLLYYAVTQDAMLIFENLSRGFGRQGKRTFMAERQYTRMEDWLTAKLAYEGLPSKTYLSKTLAQYTSKTCSNCGFTITSADYDRVLEKLKKTATGWMTTINGKELKVEGQITYYNRYKRQNVVKDLSVELDRLSEESVNNDISSWTKGRSGEALSLLKKRFSHRPVQEKFVCLNCGFETHADEQAALNIARSWLFLRSQEYKKYQTNKTTGNTDKRAFVETWQSFYRKKLKEVWKPAV

SEQ ID NO: 45333 - protein, 979 aa, synthetic construct
  REGION 1..979: note = engineered CasX variant
QEIKRINKIRRRLVKDSNTKKAGKTGPMKTLLVRVMTPDLRERLENLRKKPENIPQPISNTSRANLNKLLTDYTEMKKAILHVYWEEFQKDPVGLMSRVAQPASKKIDQNKLKPEMDEKGNLTTAGFACSQCGQPLFVYKLEQVSEKGKAYTNYFGRCNVAEHEKLILLAQLKPEKDSDEAVTYSLGKFGQRALDFYSIHVTKESTHPVKPLAQIAGNRYASVPVGKALSDACMGTIASFLSKYQDIIIEHQKVVKGNQKRLESLRELAGKENLEYPSVTLPPQPHTKEGVDAYNEVIARVRMWVNLNLWQKLKLSRDDAKPLLRLKGFPSFPLVERQANEVDWWDMVCNVKKLINEKKEDGKVFWQNLAGYKRQEALRPYLSSEEDRKKGKKFARYQLGDLLLHLEKKHGEDWGKVYDEAWERIDKKVEGLSKHIKLEEERRSEDAQSKAALTDWLRAKASFVIEGSKEADKDEFCRCELKLQKWYGDLRGKPFAIEAENSILDISGFSKQYNCAFIWQKDGVKKLNLYLIINYFKGGKLRFKKIKPEAFEANRFYTVINKKSGEIVPMEVNFNFDDPNLIILPLAFGKRQGREFIWNDLLSLETGSLKLANGRVIEKTLYNRRTRQDEPALFVALTFERREVLDSSNIKTPMNLIGVDRGENIPAVIALTDPEGCPLSRFKDSLGNPTHILRIGESYKEKQRTIQAKKEVEQRRAGGYSRKYASKAKNLADDMVRNTARDLLYYAVTQDAMLIFENLSRGFGRQGKRTFMAERQYTRMEDWLTAKLAYEGLPSKTYLSKTLAQYTSKTCSNCGFTITSADYDRVLEKLKKTATGWMTTINGKELKVEGQITYYNRYKRQNVVKDLSVELDRLSEESVNNDISSWTKGRSGEALSLLKKRFSHRPVQEKFVCLNCGFETHADEQAALNIARSWLFLRSQEYKKYQTNKTTGNTDKRAFVETWQSFYRKKLKEVWKPAV

SEQ ID NO: 45334 - protein, 979 aa, synthetic construct
  REGION 1..979: note = engineered CasX variant
QEIKRINKIRRRLVKDSNTKKAGKTGPMKTLLVRVMTPDLRERLENLRKKPENIPQPISNTSRANLNKLLTDYTEMKKAILHVYWEEFQKDPVGLMSRVAQPASKKIDQNKLKPEMDEKGNLTTAGFACSQCGQPLFVYKLEQVSEKGKAYTNYFGRCNVAEHEKLIKLAQLKPEKDSDEAVTYSLGKFGQRALDFYSIHVTKESTHPVKPLAQIAGNRYASGPVGKALSDACMGTIASFLSKYQDIIIEHQKVVKGNQKRLESLRELAGKENLEYPSVTLPPQPHTKEGVDAYNEVIARVRMWVNLNLWQKLKLSRDDAKPLLRLKGFPSFPLVERQANEVDWWDMVCNVKKLINEKKEDGKVFWQNLAGYKRQEALRPYLSSEEDRKKGKKFARYQLGDLLLHLEKKHGEDWGKVYDEAWERIDKKVEGLSKHIKLEEERRSEDAQSKAALTDWLRAKASFVIEGSKEADKDEFCRCELKLQKWYGDLRGKPFAIEAENSILDISGFSKQYNCAFIWQKDGVKKLNLYLIINYFKGGKLRFKKIKPEAFEANRFYTVINKKSGEIVPMEVNFNFDDPNLIILPLAFGKRQGREFIWNDLLSLETGSLKLANGRVIEKTLYNRRTRQDEPALFVALTFERREVLDSSNIKTPMNLIGVDRGENIPAVIALTDPEGCPLSRFKDSLGNPTHILRIGESYKEKQRTIQAKKEVEQRRAGGYSRKYASKAKNLADDMVRNTARDLLYYAVTQDAMLIFENLSRGFGRQGKRTFMAERQYTRMEDWLTAKLAYEGLPSKTYLSKTLAQYTSKTCSNCGFTITSADYDRVLEKLKKTATGWMTTINGKELKVEGQITYYNRYKRQNVVKDLSVELDRLSEESVNNDISSWTKGRSGEALSLLKKRFSHRPVQEKFVCLNCGFETHADEQAALNIARSWLFLRSQEYKKYQTNKTTGNTDKRAFVETWQSFYRKKLKEVWKPAV

SEQ ID NO: 45335 - protein, 978 aa, synthetic construct
  REGION 1..978: note = engineered CasX variant
QEIKRINKIRRRLVKDSNTKKAGKTGPMKTLLVRVMTPDLRERLENLRKKPENIPQPISNTSRANLNKLLTDYTEMKKAILHVYWEEFQKDPVGLMSRVAQPASKKIDQNKLKPEMDEKGNLTTAGFACSQCGQPLFVYKLEQVSEKGKAYTNYFGRCNVAEHEKLILLAQLKPEKDSDEAVTYSLGKFGQRALDFYSIHVTKESTHPVKPLAQIAGNRYASPVGKALSDACMGTIASFLSKYQDIIIEHQKVVKGNQKRLESLRELAGKENLEYPSVTLPPQPHTKEGVDAYNEVIARVRMWVNLNLWQKLKLSRDDAKPLLRLKGFPSFPLVERQANEVDWWDMVCNVKKLINEKKEDGKVFWQNLAGYKRQEALRPYLSSEEDRKKGKKFARYQLGDLLLHLEKKHGEDWGKVYDEAWERIDKKVEGLSKHIKLEEERRSEDAQSKAALTDWLRAKASFVIEGSKEADKDEFCRCELKLQKWYGDLRGKPFAIEAENSILDISGFSKQYNCAFIWQKDGVKKLNLYLIINYFKGGKLRFKKIKPEAFEANRFYTVINKKSGEIVPMEVNFNFDDPNLIILPLAFGKRQGREFIWNDLLSLETGSLKLANGRVIEKTLYNRRTRQDEPALFVALTFERREVLDSSNIKTPMNLIGVDRGENIPAVIALTDPEGCPLSRFKDSLGNPTHILRIGESYKEKQRTIQAKKEVEQRRAGGYSRKYASKAKNLADDMVRNTARDLLYYAVTQDAMLIFENLSRGFGRQGKRTFMAERQYTRMEDWLTAKLAYEGLPSKTYLSKTLAQYTSKTCSNCGFTITSADYDRVLEKLKKTATGWMTTINGKELKVEGQITYYNRYKRQNVVKDLSVELDRLSEESVNNDISSWTKGRSGEALSLLKKRFSHRPVQEKFVCLNCGFETHADEQAALNIARSWLFLRSQEYKKYQTNKTTGNTDKRAFVETWQSFYRKKLKEVWKPAV

SEQ ID NO: 45336 - protein, 980 aa, synthetic construct
  REGION 1..980: note = engineered CasX variant
QEIKRINKIRRRLVKDSNTKKAGKTGPMKTLLVRVMTPDLRERLENLRKKPENIPQPISNTSRANLNKLLTDYTEMKKAILHVYWEEFQKDPVGLMSRVAQPASKKIDQNKLKPEMDEKGNLTTAGFACSQCGQPLFVYKLEQVSEKGKAYTNYFGRCNVAEHEKLILLAQLKPEKDSDEAVTYSLGKFGQRALDFYSIHVTKESTHPVKPLAQIAGNRYASYPVGKALSDACMGTIASFLSKYQDIIIEHQKVVKGNQKRLESLRELAGKENLEYPSVTLPPQPHTKEGVDAYNEVIARVRMWVNLNLWQKLKLSRDDAKPLLRLKGFPSFPLVERQANEVDWWDMVCNVKKLINEKKEDGKVFWQNLAGYKRQEALRPYLSSEEDRKKGKKFARYQLGDLLLHLEKKHGEDWGKVYDEAWERIDKKVEGLSKHIKLEEERRSEDAQSKAALTDWLRAKASFVIEGLKEADDKDEFCRCELKLQKWYGDLRGKPFAIEAENSILDISGFSKQYNCAFIWQKDGVKKLNLYLIINYFKGGKLRFKKIKPEAFEANRFYTVINKKSGEIVPMEVNFNFDDPNLIILPLAFGKRQGREFIWNDLLSLETGSLKLANGRVIEKTLYNRRTRQDEPALFVALTFERREVLDSSNIKTPMNLIGVDRGENIPAVIALTDPEGCPLSRFKDSLGNPTHILRIGESYKEKQRTIQAKKEVEQRRAGGYSRKYASKAKNLADDMVRNTARDLLYYAVTQDAMLIFENLSRGFGRQGKRTFMAERQYTRMEDWLTAKLAYEGLPSKTYLSKTLAQYTSKTCSNCGFTITSADYDRVLEKLKKTATGWMTTINGKELKVEGQITYYNRYKRQNVVKDLSVELDRLSEESVNNDISSWTKGRSGEALSLLKKRFSHRPVQEKFVCLNCGFETHADEQAALNIARSWLFLRSQEYKKYQTNKTTGNTDKRAFVETWQSFYRKKLKEVWKPAV

SEQ ID NO: 45337 - protein, 980 aa, synthetic construct
  REGION 1..980: note = engineered CasX variant
QEIKRINKIRRRLVKDSNTKKAGKTGPMKTLLVRVMTPDLRERLENLRKKPENIPQPISNTSRANLNKLLTDYTEMKKAILHVYWEEFQKDPVGLMSRVAQPASKKIDQNKLKPEMDEKGNLTTAGFACSQCGQPLFVYKLEQVSEKGKAYTNYFGRCNVAEHEKLILLAQLKPEKDSDEAVTYSLGKFGQRALDFYSIHVTKESTHPVKPLAQIAGNRYASHPVGKALSDACMGTIASFLSKYQDIIIEHQKVVKGNQKRLESLRELAGKENLEYPSVTLPPQPHTKEGVDAYNEVIARVRMWVNLNLWQKLKLSRDDAKPLLRLKGFPSFPLVERQANEVDWWDMVCNVKKLINEKKEDGKVFWQNLAGYKRQEALRPYLSSEEDRKKGKKFARYQLGDLLLHLEKKHGEDWGKVYDEAWERIDKKVEGLSKHIKLEEERRSEDAQSKAALTDWLRAKASFVIEGLKEADDKDEFCRCELKLQKWYGDLRGKPFAIEAENSILDISGFSKQYNCAFIWQKDGVKKLNLYLIINYFKGGKLRFKKIKPEAFEANRFYTVINKKSGEIVPMEVNFNFDDPNLIILPLAFGKRQGREFIWNDLLSLETGSLKLANGRVIEKTLYNRRTRQDEPALFVALTFERREVLDSSNIKTPMNLIGVDRGENIPAVIALTDPEGCPLSRFKDSLGNPTHILRIGESYKEKQRTIQAKKEVEQRRAGGYSRKYASKAKNLADDMVRNTARDLLYYAVTQDAMLIFENLSRGFGRQGKRTFMAERQYTRMEDWLTAKLAYEGLPSKTYLSKTLAQYTSKTCSNCGFTITSADYDRVLEKLKKTATGWMTTINGKELKVEGQITYYNRYKRQNVVKDLSVELDRLSEESVNNDISSWTKGRSGEALSLLKKRFSHRPVQEKFVCLNCGFETHADEQAALNIARSWLFLRSQEYKKYQTNKTTGNTDKRAFVETWQSFYRKKLKEVWKPAV

SEQ ID NO: 45338 - protein, 980 aa, synthetic construct
  REGION 1..980: note = engineered CasX variant
QEIKRINKIRRRLVKDSNTKKAGKTGPMKTLLVRVMTPDLRERLENLRKKPENIPQPISNTSRANLNKLLTDYTEMKKAILHVYWEEFQKDPVGLMSRVAQPASKKIDQNKLKPEMDEKGNLTTAGFACSQCGQPLFVYKLEQVSEKGKAYTNYFGRCNVAEHEKLILLAQLKPEKDSDEAVTYSLGKFGQRALDFYSIHVTKESTHPVKPLAQIAGNRYASSPVGKALSDACMGTIASFLSKYQDIIIEHQKVVKGNQKRLESLRELAGKENLEYPSVTLPPQPHTKEGVDAYNEVIARVRMWVNLNLWQKLKLSRDDAKPLLRLKGFPSFPLVERQANEVDWWDMVCNVKKLINEKKEDGKVFWQNLAGYKRQEALRPYLSSEEDRKKGKKFARYQLGDLLLHLEKKHGEDWGKVYDEAWERIDKKVEGLSKHIKLEEERRSEDAQSKAALTDWLRAKASFVIEGLKEADDKDEFCRCELKLQKWYGDLRGKPFAIEAENSILDISGFSKQYNCAFIWQKDGVKKLNLYLIINYFKGGKLRFKKIKPEAFEANRFYTVINKKSGEIVPMEVNFNFDDPNLIILPLAFGKRQGREFIWNDLLSLETGSLKLANGRVIEKTLYNRRTRQDEPALFVALTFERREVLDSSNIKTPMNLIGVDRGENIPAVIALTDPEGCPLSRFKDSLGNPTHILRIGESYKEKQRTIQAKKEVEQRRAGGYSRKYASKAKNLADDMVRNTARDLLYYAVTQDAMLIFENLSRGFGRQGKRTFMAERQYTRMEDWLTAKLAYEGLPSKTYLSKTLAQYTSKTCSNCGFTITSADYDRVLEKLKKTATGWMTTINGKELKVEGQITYYNRYKRQNVVKDLSVELDRLSEESVNNDISSWTKGRSGEALSLLKKRFSHRPVQEKFVCLNCGFETHADEQAALNIARSWLFLRSQEYKKYQTNKTTGNTDKRAFVETWQSFYRKKLKEVWKPAV

SEQ ID NO: 45339 - protein, 980 aa, synthetic construct
  REGION 1..980: note = engineered CasX variant
QEIKRINKIRRRLVKDSNTKKAGKTGPMKTLLVRVMTPDLRERLENLRKKPENIPQPISNTSRANLNKLLTDYTEMKKAILHVYWEEFQKDPVGLMSRVAQPASKKIDQNKLKPEMDEKGNLTTAGFACSQCGQPLFVYKLEQVSEKGKAYTNYFGRCNVAEHEKLILLAQLKPEKDSDEAVTYSLGKFGQRALDFYSIHVTKESTHPVKPLAQIAGNRYASTPVGKALSDACMGTIASFLSKYQDIIIEHQKVVKGNQKRLESLRELAGKENLEYPSVTLPPQPHTKEGVDAYNEVIARVRMWVNLNLWQKLKLSRDDAKPLLRLKGFPSFPLVERQANEVDWWDMVCNVKKLINEKKEDGKVFWQNLAGYKRQEALRPYLSSEEDRKKGKKFARYQLGDLLLHLEKKHGEDWGKVYDEAWERIDKKVEGLSKHIKLEEERRSEDAQSKAALTDWLRAKASFVIEGLKEADDKDEFCRCELKLQKWYGDLRGKPFAIEAENSILDISGFSKQYNCAFIWQKDGVKKLNLYLIINYFKGGKLRFKKIKPEAFEANRFYTVINKKSGEIVPMEVNFNFDDPNLIILPLAFGKRQGREFIWNDLLSLETGSLKLANGRVIEKTLYNRRTRQDEPALFVALTFERREVLDSSNIKTPMNLIGVDRGENIPAVIALTDPEGCPLSRFKDSLGNPTHILRIGESYKEKQRTIQAKKEVEQRRAGGYSRKYASKAKNLADDMVRNTARDLLYYAVTQDAMLIFENLSRGFGRQGKRTFMAERQYTRMEDWLTAKLAYEGLPSKTYLSKTLAQYTSKTCSNCGFTITSADYDRVLEKLKKTATGWMTTINGKELKVEGQITYYNRYKRQNVVKDLSVELDRLSEESVNNDISSWTKGRSGEALSLLKKRFSHRPVQEKFVCLNCGFETHADEQAALNIARSWLFLRSQEYKKYQTNKTTGNTDKRAFVETWQSFYRKKLKEVWKPAV

SEQ ID NO: 45340 - protein, 980 aa, synthetic construct
  REGION 1..980: note = engineered CasX variant
QEIKRINKIRRRLVKDSNTKKAGKTGPMKTLLVRVMTPDLRERLENLRKKPENIPQPISNTSRANLNKLLTDYTEMKKAILHVYWEEFQKDPVGLMSRVAQPASKKIDQNKLKPEMDEKGNLTTAGFACSQCGQPLFVYKLEQVSEKGKAYTNYFGRCNVAEHEKLILLAQLKPEKDSDEAVTYSLGKFGQRALDFYSIHVTKESTHPVKPLAQIAGNRYASAPVGKALSDACMGTIASFLSKYQDIIIEHQKVVKGNQKRLESLRELAGKENLEYPSVTLPPQPHTKEGVDAYNEVIARVRMWVNLNLWQKLKLSRDDAKPLLRLKGFPSFPLVERQANEVDWWDMVCNVKKLINEKKEDGKVFWQNLAGYKRQEALRPYLSSEEDRKKGKKFARYQLGDLLLHLEKKHGEDWGKVYDEAWERIDKKVEGLSKHIKLEEERRSEDAQSKAALTDWLRAKASFVIEGLKEADDKDEFCRCELKLQKWYGDLRGKPFAIEAENSILDISGFSKQYNCAFIWQKDGVKKLNLYLIINYFKGGKLRFKKIKPEAFEANRFYTVINKKSGEIVPMEVNFNFDDPNLIILPLAFGKRQGREFIWNDLLSLETGSLKLANGRVIEKTLYNRRTRQDEPALFVALTFERREVLDSSNIKTPMNLIGVDRGENIPAVIALTDPEGCPLSRFKDSLGNPTHILRIGESYKEKQRTIQAKKEVEQRRAGGYSRKYASKAKNLADDMVRNTARDLLYYAVTQDAMLIFENLSRGFGRQGKRTFMAERQYTRMEDWLTAKLAYEGLPSKTYLSKTLAQYTSKTCSNCGFTITSADYDRVLEKLKKTATGWMTTINGKELKVEGQITYYNRYKRQNVVKDLSVELDRLSEESVNNDISSWTKGRSGEALSLLKKRFSHRPVQEKFVCLNCGFETHADEQAALNIARSWLFLRSQEYKKYQTNKTTGNTDKRAFVETWQSFYRKKLKEVWKPAV

SEQ ID NO: 45341 - protein, 980 aa, synthetic construct
  REGION 1..980: note = engineered CasX variant
QEIKRINKIRRRLVKDSNTKKAGKTGPMKTLLVRVMTPDLRERLENLRKKPENIPQPISNTSRANLNKLLTDYTEMKKAILHVYWEEFQKDPVGLMSRVAQPASKKIDQNKLKPEMDEKGNLTTAGFACSQCGQPLFVYKLEQVSEKGKAYTNYFGRCNVAEHEKLILLAQLKPEKDSDEAVTYSLGKFGQRALDFYSIHVTKESTHPVKPLAQIAGNRYASVPVGKALSDACMGTIASFLSKYQDIIIEHQKVVKGNQKRLESLRELAGKENLEYPSVTLPPQPHTKEGVDAYNEVIARVRMWVNLNLWQKLKLSRDDAKPLLRLKGFPSFPLVERQANEVDWWDMVCNVKKLINEKKEDGKVFWQNLAGYKRQEALRPYLSSEEDRKKGKKFARYQLGDLLLHLEKKHGEDWGKVYDEAWERIDKKVEGLSKHIKLEEERRSEDAQSKAALTDWLRAKASFVIEGLKEADDKDEFCRCELKLQKWYGDLRGKPFAIEAENSILDISGFSKQYNCAFIWQKDGVKKLNLYLIINYFKGGKLRFKKIKPEAFEANRFYTVINKKSGEIVPMEVNFNFDDPNLIILPLAFGKRQGREFIWNDLLSLETGSLKLANGRVIEKTLYNRRTRQDEPALFVALTFERREVLDSSNIKTPMNLIGVDRGENIPAVIALTDPEGCPLSRFKDSLGNPTHILRIGESYKEKQRTIQAKKEVEQRRAGGYSRKYASKAKNLADDMVRNTARDLLYYAVTQDAMLIFENLSRGFGRQGKRTFMAERQYTRMEDWLTAKLAYEGLPSKTYLSKTLAQYTSKTCSNCGFTITSADYDRVLEKLKKTATGWMTTINGKELKVEGQITYYNRYKRQNVVKDLSVELDRLSEESVNNDISSWTKGRSGEALSLLKKRFSHRPVQEKFVCLNCGFETHADEQAALNIARSWLFLRSQEYKKYQTNKTTGNTDKRAFVETWQSFYRKKLKEVWKPAV

SEQ ID NO: 45342 - protein, 980 aa, synthetic construct
  REGION 1..980: note = engineered CasX variant
QEIKRINKIRRRLVKDSNTKKAGKTGPMKTLLVRVMTPDLRERLENLRKKPENIPQPISNTSRANLNKLLTDYTEMKKAILHVYWEEFQKDPVGLMSRVAQPASKKIDQNKLKPEMDEKGNLTTAGFACSQCGQPLFVYKLEQVSEKGKAYTNYFGRCNVAEHEKLIKLAQLKPEKDSDEAVTYSLGKFGQRALDFYSIHVTKESTHPVKPLAQIAGNRYASGPVGKALSDACMGTIASFLSKYQDIIIEHQKVVKGNQKRLESLRELAGKENLEYPSVTLPPQPHTKEGVDAYNEVIARVRMWVNLNLWQKLKLSRDDAKPLLRLKGFPSFPLVERQANEVDWWDMVCNVKKLINEKKEDGKVFWQNLAGYKRQEALRPYLSSEEDRKKGKKFARYQLGDLLLHLEKKHGEDWGKVYDEAWERIDKKVEGLSKHIKLEEERRSEDAQSKAALTDWLRAKASFVIEGLKEADDKDEFCRCELKLQKWYGDLRGKPFAIEAENSILDISGFSKQYNCAFIWQKDGVKKLNLYLIINYFKGGKLRFKKIKPEAFEANRFYTVINKKSGEIVPMEVNFNFDDPNLIILPLAFGKRQGREFIWNDLLSLETGSLKLANGRVIEKTLYNRRTRQDEPALFVALTFERREVLDSSNIKTPMNLIGVDRGENIPAVIALTDPEGCPLSRFKDSLGNPTHILRIGESYKEKQRTIQAKKEVEQRRAGGYSRKYASKAKNLADDMVRNTARDLLYYAVTQDAMLIFENLSRGFGRQGKRTFMAERQYTRMEDWLTAKLAYEGLPSKTYLSKTLAQYTSKTCSNCGFTITSADYDRVLEKLKKTATGWMTTINGKELKVEGQITYYNRYKRQNVVKDLSVELDRLSEESVNNDISSWTKGRSGEALSLLKKRFSHRPVQEKFVCLNCGFETHADEQAALNIARSWLFLRSQEYKKYQTNKTTGNTDKRAFVETWQSFYRKKLKEVWKPAV

SEQ ID NO: 45343 - protein, 979 aa, synthetic construct
  REGION 1..979: note = engineered CasX variant
QEIKRINKIRRRLVKDSNTKKAGKTGPMKTLLVRVMTPDLRERLENLRKKPENIPQPISNTSRANLNKLLTDYTEMKKAILHVYWEEFQKDPVGLMSRVAQPASKKIDQNKLKPEMDEKGNLTTAGFACSQCGQPLFVYKLEQVSEKGKAYTNYFGRCNVAEHEKLILLAQLKPEKDSDEAVTYSLGKFGQRALDFYSIHVTKESTHPVKPLAQIAGNRYASPVGKALSDACMGTIASFLSKYQDIIIEHQKVVKGNQKRLESLRELAGKENLEYPSVTLPPQPHTKEGVDAYNEVIARVRMWVNLNLWQKLKLSRDDAKPLLRLKGFPSFPLVERQANEVDWWDMVCNVKKLINEKKEDGKVFWQNLAGYKRQEALRPYLSSEEDRKKGKKFARYQLGDLLLHLEKKHGEDWGKVYDEAWERIDKKVEGLSKHIKLEEERRSEDAQSKAALTDWLRAKASFVIEGLKEADDKDEFCRCELKLQKWYGDLRGKPFAIEAENSILDISGFSKQYNCAFIWQKDGVKKLNLYLIINYFKGGKLRFKKIKPEAFEANRFYTVINKKSGEIVPMEVNFNFDDPNLIILPLAFGKRQGREFIWNDLLSLETGSLKLANGRVIEKTLYNRRTRQDEPALFVALTFERREVLDSSNIKTPMNLIGVDRGENIPAVIALTDPEGCPLSRFKDSLGNPTHILRIGESYKEKQRTIQAKKEVEQRRAGGYSRKYASKAKNLADDMVRNTARDLLYYAVTQDAMLIFENLSRGFGRQGKRTFMAERQYTRMEDWLTAKLAYEGLPSKTYLSKTLAQYTSKTCSNCGFTITSADYDRVLEKLKKTATGWMTTINGKELKVEGQITYYNRYKRQNVVKDLSVELDRLSEESVNNDISSWTKGRSGEALSLLKKRFSHRPVQEKFVCLNCGFETHADEQAALNIARSWLFLRSQEYKKYQTNKTTGNTDKRAFVETWQSFYRKKLKEVWKPAV

SEQ ID NO: 45344 - protein, 980 aa, synthetic construct
  REGION 1..980: note = engineered CasX variant
QEIKRINKIRRRLVKDSNTKKAGKTGPMKTLLVRVMTPDLRERLENLRKKPENIPQPISNTSRANLNKLLTDYTEMKKAILHVYWEEFQKDPVGLMSRVAQPASKKIDQNKLKPEMDEKGNLTTAGFACSQCGQPLFVYKLEQVSEKGKAYTNYFGRCNVAEHEKLILLAQLKPEKDSDEAVTYSLGKFGQRALDFYSIHVTKESTHPVKPLAQIAGNRYASYPVGKALSDACMGTIASFLSKYQDIIIEHQKVVKGNQKRLESLRELAGKENLEYPSVTLPPQPHTKEGVDAYNEVIARVRMWVNLNLWQKLKLSRDDAKPLLRLKGFPSFPLVERQANEVDWWDMVCNVKKLINEKKEDGKVFWQNLAGYKRQEALRPYLSSEEDRKKGKKFARYQLGDLLLHLEKKHGEDWGKVYDEAWERIDKKVEGLSKHIKLEEERRSEDAQSKAALTDWLRAKASFVIEGLKEADKDEFCRCELKLQKWYGDLRGKPFAIEAENSILDISGFSKQYNCAFIWQKDGVKKLNLYLIINYFKGGKLRFKKIKPEAFEANRFYTVINKKSGEIVPMEVNFNFDDPNLIILPLAFGKRQGREFIWNDLLSLETGSLKLANGRVIEKTLYNRRTRQDEPALFVALTFERREVLDSSNIKTPMNLIGVDRGENIPAVIALTDPEGCPLSRFKDSLGNPTHILRIGESYKEKQRTIQAKKEVEQRRAGGYSRKYASKAKNLADDMVRNTARDLLYYAVTQDAMLIFENLSRGFGRQGKRTFMAERQYTRMEDWLTAKLAYEGLPSKTYLSKTLAQYTSKTCSNCGFTITSADYDRVLEKLKKTATGWMTTINGKELKVEGQITYYNRYKRQNVVKDLSVELDRLSEESVNNDISSWTKGRSGNEALSLLKKRFSHRPVQEKFVCLNCGFETHADEQAALNIARSWLFLRSQEYKKYQTNKTTGNTDKRAFVETWQSFYRKKLKEVWKPAV

SEQ ID NO: 45345 - protein, 980 aa, synthetic construct
  REGION 1..980: note = engineered CasX variant
QEIKRINKIRRRLVKDSNTKKAGKTGPMKTLLVRVMTPDLRERLENLRKKPENIPQPISNTSRANLNKLLTDYTEMKKAILHVYWEEFQKDPVGLMSRVAQPASKKIDQNKLKPEMDEKGNLTTAGFACSQCGQPLFVYKLEQVSEKGKAYTNYFGRCNVAEHEKLILLAQLKPEKDSDEAVTYSLGKFGQRALDFYSIHVTKESTHPVKPLAQIAGNRYASHPVGKALSDACMGTIASFLSKYQDIIIEHQKVVKGNQKRLESLRELAGKENLEYPSVTLPPQPHTKEGVDAYNEVIARVRMWVNLNLWQKLKLSRDDAKPLLRLKGFPSFPLVERQANEVDWWDMVCNVKKLINEKKEDGKVFWQNLAGYKRQEALRPYLSSEEDRKKGKKFARYQLGDLLLHLEKKHGEDWGKVYDEAWERIDKKVEGLSKHIKLEEERRSEDAQSKAALTDWLRAKASFVIEGLKEADKDEFCRCELKLQKWYGDLRGKPFAIEAENSILDISGFSKQYNCAFIWQKDGVKKLNLYLIINYFKGGKLRFKKIKPEAFEANRFYTVINKKSGEIVPMEVNFNFDDPNLIILPLAFGKRQGREFIWNDLLSLETGSLKLANGRVIEKTLYNRRTRQDEPALFVALTFERREVLDSSNIKTPMNLIGVDRGENIPAVIALTDPEGCPLSRFKDSLGNPTHILRIGESYKEKQRTIQAKKEVEQRRAGGYSRKYASKAKNLADDMVRNTARDLLYYAVTQDAMLIFENLSRGFGRQGKRTFMAERQYTRMEDWLTAKLAYEGLPSKTYLSKTLAQYTSKTCSNCGFTITSADYDRVLEKLKKTATGWMTTINGKELKVEGQITYYNRYKRQNVVKDLSVELDRLSEESVNNDISSWTKGRSGNEALSLLKKRFSHRPVQEKFVCLNCGFETHADEQAALNIARSWLFLRSQEYKKYQTNKTTGNTDKRAFVETWQSFYRKKLKEVWKPAV

SEQ ID NO: 45346 - protein, 980 aa, synthetic construct
  REGION 1..980: note = engineered CasX variant
QEIKRINKIRRRLVKDSNTKKAGKTGPMKTLLVRVMTPDLRERLENLRKKPENIPQPISNTSRANLNKLLTDYTEMKKAILHVYWEEFQKDPVGLMSRVAQPASKKIDQNKLKPEMDEKGNLTTAGFACSQCGQPLFVYKLEQVSEKGKAYTNYFGRCNVAEHEKLILLAQLKPEKDSDEAVTYSLGKFGQRALDFYSIHVTKESTHPVKPLAQIAGNRYASSPVGKALSDACMGTIASFLSKYQDIIIEHQKVVKGNQKRLESLRELAGKENLEYPSVTLPPQPHTKEGVDAYNEVIARVRMWVNLNLWQKLKLSRDDAKPLLRLKGFPSFPLVERQANEVDWWDMVCNVKKLINEKKEDGKVFWQNLAGYKRQEALRPYLSSEEDRKKGKKFARYQLGDLLLHLEKKHGEDWGKVYDEAWERIDKKVEGLSKHIKLEEERRSEDAQSKAALTDWLRAKASFVIEGLKEADKDEFCRCELKLQKWYGDLRGKPFAIEAENSILDISGFSKQYNCAFIWQKDGVKKLNLYLIINYFKGGKLRFKKIKPEAFEANRFYTVINKKSGEIVPMEVNFNFDDPNLIILPLAFGKRQGREFIWNDLLSLETGSLKLANGRVIEKTLYNRRTRQDEPALFVALTFERREVLDSSNIKTPMNLIGVDRGENIPAVIALTDPEGCPLSRFKDSLGNPTHILRIGESYKEKQRTIQAKKEVEQRRAGGYSRKYASKAKNLADDMVRNTARDLLYYAVTQDAMLIFENLSRGFGRQGKRTFMAERQYTRMEDWLTAKLAYEGLPSKTYLSKTLAQYTSKTCSNCGFTITSADYDRVLEKLKKTATGWMTTINGKELKVEGQITYYNRYKRQNVVKDLSVELDRLSEESVNNDISSWTKGRSGNEALSLLKKRFSHRPVQEKFVCLNCGFETHADEQAALNIARSWLFLRSQEYKKYQTNKTTGNTDKRAFVETWQSFYRKKLKEVWKPAV

SEQ ID NO: 45347 - protein, 980 aa, synthetic construct
  REGION 1..980: note = engineered CasX variant
QEIKRINKIRRRLVKDSNTKKAGKTGPMKTLLVRVMTPDLRERLENLRKKPENIPQPISNTSRANLNKLLTDYTEMKKAILHVYWEEFQKDPVGLMSRVAQPASKKIDQNKLKPEMDEKGNLTTAGFACSQCGQPLFVYKLEQVSEKGKAYTNYFGRCNVAEHEKLILLAQLKPEKDSDEAVTYSLGKFGQRALDFYSIHVTKESTHPVKPLAQIAGNRYASTPVGKALSDACMGTIASFLSKYQDIIIEHQKVVKGNQKRLESLRELAGKENLEYPSVTLPPQPHTKEGVDAYNEVIARVRMWVNLNLWQKLKLSRDDAKPLLRLKGFPSFPLVERQANEVDWWDMVCNVKKLINEKKEDGKVFWQNLAGYKRQEALRPYLSSEEDRKKGKKFARYQLGDLLLHLEKKHGEDWGKVYDEAWERIDKKVEGLSKHIKLEEERRSEDAQSKAALTDWLRAKASFVIEGLKEADKDEFCRCELKLQKWYGDLRGKPFAIEAENSILDISGFSKQYNCAFIWQKDGVKKLNLYLIINYFKGGKLRFKKIKPEAFEANRFYTVINKKSGEIVPMEVNFNFDDPNLIILPLAFGKRQGREFIWNDLLSLETGSLKLANGRVIEKTLYNRRTRQDEPALFVALTFERREVLDSSNIKTPMNLIGVDRGENIPAVIALTDPEGCPLSRFKDSLGNPTHILRIGESYKEKQRTIQAKKEVEQRRAGGYSRKYASKAKNLADDMVRNTARDLLYYAVTQDAMLIFENLSRGFGRQGKRTFMAERQYTRMEDWLTAKLAYEGLPSKTYLSKTLAQYTSKTCSNCGFTITSADYDRVLEKLKKTATGWMTTINGKELKVEGQITYYNRYKRQNVVKDLSVELDRLSEESVNNDISSWTKGRSGNEALSLLKKRFSHRPVQEKFVCLNCGFETHADEQAALNIARSWLFLRSQEYKKYQTNKTTGNTDKRAFVETWQSFYRKKLKEVWKPAV

SEQ ID NO: 45348 - protein, 980 aa, synthetic construct
  REGION 1..980: note = engineered CasX variant
QEIKRINKIRRRLVKDSNTKKAGKTGPMKTLLVRVMTPDLRERLENLRKKPENIPQPISNTSRANLNKLLTDYTEMKKAILHVYWEEFQKDPVGLMSRVAQPASKKIDQNKLKPEMDEKGNLTTAGFACSQCGQPLFVYKLEQVSEKGKAYTNYFGRCNVAEHEKLILLAQLKPEKDSDEAVTYSLGKFGQRALDFYSIHVTKESTHPVKPLAQIAGNRYASAPVGKALSDACMGTIASFLSKYQDIIIEHQKVVKGNQKRLESLRELAGKENLEYPSVTLPPQPHTKEGVDAYNEVIARVRMWVNLNLWQKLKLSRDDAKPLLRLKGFPSFPLVERQANEVDWWDMVCNVKKLINEKKEDGKVFWQNLAGYKRQEALRPYLSSEEDRKKGKKFARYQLGDLLLHLEKKHGEDWGKVYDEAWERIDKKVEGLSKHIKLEEERRSEDAQSKAALTDWLRAKASFVIEGLKEADKDEFCRCELKLQKWYGDLRGKPFAIEAENSILDISGFSKQYNCAFIWQKDGVKKLNLYLIINYFKGGKLRFKKIKPEAFEANRFYTVINKKSGEIVPMEVNFNFDDPNLIILPLAFGKRQGREFIWNDLLSLETGSLKLANGRVIEKTLYNRRTRQDEPALFVALTFERREVLDSSNIKTPMNLIGVDRGENIPAVIALTDPEGCPLSRFKDSLGNPTHILRIGESYKEKQRTIQAKKEVEQRRAGGYSRKYASKAKNLADDMVRNTARDLLYYAVTQDAMLIFENLSRGFGRQGKRTFMAERQYTRMEDWLTAKLAYEGLPSKTYLSKTLAQYTSKTCSNCGFTITSADYDRVLEKLKKTATGWMTTINGKELKVEGQITYYNRYKRQNVVKDLSVELDRLSEESVNNDISSWTKGRSGNEALSLLKKRFSHRPVQEKFVCLNCGFETHADEQAALNIARSWLFLRSQEYKKYQTNKTTGNTDKRAFVETWQSFYRKKLKEVWKPAV

SEQ ID NO: 45349 - protein, 980 aa, synthetic construct
  REGION 1..980: note = engineered CasX variant
QEIKRINKIRRRLVKDSNTKKAGKTGPMKTLLVRVMTPDLRERLENLRKKPENIPQPISNTSRANLNKLLTDYTEMKKAILHVYWEEFQKDPVGLMSRVAQPASKKIDQNKLKPEMDEKGNLTTAGFACSQCGQPLFVYKLEQVSEKGKAYTNYFGRCNVAEHEKLILLAQLKPEKDSDEAVTYSLGKFGQRALDFYSIHVTKESTHPVKPLAQIAGNRYASVPVGKALSDACMGTIASFLSKYQDIIIEHQKVVKGNQKRLESLRELAGKENLEYPSVTLPPQPHTKEGVDAYNEVIARVRMWVNLNLWQKLKLSRDDAKPLLRLKGFPSFPLVERQANEVDWWDMVCNVKKLINEKKEDGKVFWQNLAGYKRQEALRPYLSSEEDRKKGKKFARYQLGDLLLHLEKKHGEDWGKVYDEAWERIDKKVEGLSKHIKLEEERRSEDAQSKAALTDWLRAKASFVIEGLKEADKDEFCRCELKLQKWYGDLRGKPFAIEAENSILDISGFSKQYNCAFIWQKDGVKKLNLYLIINYFKGGKLRFKKIKPEAFEANRFYTVINKKSGEIVPMEVNFNFDDPNLIILPLAFGKRQGREFIWNDLLSLETGSLKLANGRVIEKTLYNRRTRQDEPALFVALTFERREVLDSSNIKTPMNLIGVDRGENIPAVIALTDPEGCPLSRFKDSLGNPTHILRIGESYKEKQRTIQAKKEVEQRRAGGYSRKYASKAKNLADDMVRNTARDLLYYAVTQDAMLIFENLSRGFGRQGKRTFMAERQYTRMEDWLTAKLAYEGLPSKTYLSKTLAQYTSKTCSNCGFTITSADYDRVLEKLKKTATGWMTTINGKELKVEGQITYYNRYKRQNVVKDLSVELDRLSEESVNNDISSWTKGRSGNEALSLLKKRFSHRPVQEKFVCLNCGFETHADEQAALNIARSWLFLRSQEYKKYQTNKTTGNTDKRAFVETWQSFYRKKLKEVWKPAV

SEQ ID NO: 45350 - protein, 980 aa, synthetic construct
  REGION 1..980: note = engineered CasX variant
QEIKRINKIRRRLVKDSNTKKAGKTGPMKTLLVRVMTPDLRERLENLRKKPENIPQPISNTSRANLNKLLTDYTEMKKAILHVYWEEFQKDPVGLMSRVAQPASKKIDQNKLKPEMDEKGNLTTAGFACSQCGQPLFVYKLEQVSEKGKAYTNYFGRCNVAEHEKLIKLAQLKPEKDSDEAVTYSLGKFGQRALDFYSIHVTKESTHPVKPLAQIAGNRYASGPVGKALSDACMGTIASFLSKYQDIIIEHQKVVKGNQKRLESLRELAGKENLEYPSVTLPPQPHTKEGVDAYNEVIARVRMWVNLNLWQKLKLSRDDAKPLLRLKGFPSFPLVERQANEVDWWDMVCNVKKLINEKKEDGKVFWQNLAGYKRQEALRPYLSSEEDRKKGKKFARYQLGDLLLHLEKKHGEDWGKVYDEAWERIDKKVEGLSKHIKLEEERRSEDAQSKAALTDWLRAKASFVIEGLKEADKDEFCRCELKLQKWYGDLRGKPFAIEAENSILDISGFSKQYNCAFIWQKDGVKKLNLYLIINYFKGGKLRFKKIKPEAFEANRFYTVINKKSGEIVPMEVNFNFDDPNLIILPLAFGKRQGREFIWNDLLSLETGSLKLANGRVIEKTLYNRRTRQDEPALFVALTFERREVLDSSNIKTPMNLIGVDRGENIPAVIALTDPEGCPLSRFKDSLGNPTHILRIGESYKEKQRTIQAKKEVEQRRAGGYSRKYASKAKNLADDMVRNTARDLLYYAVTQDAMLIFENLSRGFGRQGKRTFMAERQYTRMEDWLTAKLAYEGLPSKTYLSKTLAQYTSKTCSNCGFTITSADYDRVLEKLKKTATGWMTTINGKELKVEGQITYYNRYKRQNVVKDLSVELDRLSEESVNNDISSWTKGRSGNEALSLLKKRFSHRPVQEKFVCLNCGFETHADEQAALNIARSWLFLRSQEYKKYQTNKTTGNTDKRAFVETWQSFYRKKLKEVWKPAV

SEQ ID NO: 45351 - protein, 979 aa, synthetic construct
  REGION 1..979: note = engineered CasX variant
QEIKRINKIRRRLVKDSNTKKAGKTGPMKTLLVRVMTPDLRERLENLRKKPENIPQPISNTSRANLNKLLTDYTEMKKAILHVYWEEFQKDPVGLMSRVAQPASKKIDQNKLKPEMDEKGNLTTAGFACSQCGQPLFVYKLEQVSEKGKAYTNYFGRCNVAEHEKLILLAQLKPEKDSDEAVTYSLGKFGQRALDFYSIHVTKESTHPVKPLAQIAGNRYASPVGKALSDACMGTIASFLSKYQDIIIEHQKVVKGNQKRLESLRELAGKENLEYPSVTLPPQPHTKEGVDAYNEVIARVRMWVNLNLWQKLKLSRDDAKPLLRLKGFPSFPLVERQANEVDWWDMVCNVKKLINEKKEDGKVFWQNLAGYKRQEALRPYLSSEEDRKKGKKFARYQLGDLLLHLEKKHGEDWGKVYDEAWERIDKKVEGLSKHIKLEEERRSEDAQSKAALTDWLRAKASFVIEGLKEADKDEFCRCELKLQKWYGDLRGKPFAIEAENSILDISGFSKQYNCAFIWQKDGVKKLNLYLIINYFKGGKLRFKKIKPEAFEANRFYTVINKKSGEIVPMEVNFNFDDPNLIILPLAFGKRQGREFIWNDLLSLETGSLKLANGRVIEKTLYNRRTRQDEPALFVALTFERREVLDSSNIKTPMNLIGVDRGENIPAVIALTDPEGCPLSRFKDSLGNPTHILRIGESYKEKQRTIQAKKEVEQRRAGGYSRKYASKAKNLADDMVRNTARDLLYYAVTQDAMLIFENLSRGFGRQGKRTFMAERQYTRMEDWLTAKLAYEGLPSKTYLSKTLAQYTSKTCSNCGFTITSADYDRVLEKLKKTATGWMTTINGKELKVEGQITYYNRYKRQNVVKDLSVELDRLSEESVNNDISSWTKGRSGNEALSLLKKRFSHRPVQEKFVCLNCGFETHADEQAALNIARSWLFLRSQEYKKYQTNKTTGNTDKRAFVETWQSFYRKKLKEVWKPAV

SEQ ID NO: 45352 - protein, 979 aa, synthetic construct
  REGION 1..979: note = engineered CasX variant
QEIKRINKIRRRLVKDSNTKKAGKTGPMKTLLVRVMTPDLRERLENLRKKPENIPQPISNTSRANLNKLLTDYTEMKKAILHVYWEEFQKDPVGLMSRVAQPASKKIDQNKLKPEMDEKGNLTTAGFACSQCGQPLFVYKLEQVSEKGKAYTNYFGRCNVAEHEKLILLAQLKPEKDSDEAVTYSLGKFGQRALDFYSIHVTKESTHPVKPLAQIAGNRYASYPVGKALSDACMGTIASFLSKYQDIIIEHQKVVKGNQKRLESLRELAGKENLEYPSVTLPPQPHTKEGVDAYNEVIARVRMWVNLNLWQKLKLSRDDAKPLLRLKGFPSFPLVERQANEVDWWDMVCNVKKLINEKKEDGKVFWQNLAGYKRQEALRPYLSSEEDRQKGKKFARYQLGDLLLHLEKKHGEDWGKVYDEAWERIDKKVEGLSKHIKLEEERRSEDAQSKAALTDWLRAKASFVIEGLKEADKDEFCRCELKLQKWYGDLRGKPFAIEAENSILDISGFSKQYNCAFIWQKDGVKKLNLYLIINYFKGGKLRFKKIKPEAFEANRFYTVINKKSGEIVPMEVNFNFDDPNLIILPLAFGKRQGREFIWNDLLSLETGSLKLANGRVIEKTLYNRRTRQDEPALFVALTFERREVLDSSNIKTPMNLIGVDRGENIPAVIALTDPEGCPLSRFKDSLGNPTHILRIGESYKEKQRTIQAKKEVEQRRAGGYSRKYASKAKNLADDMVRNTARDLLYYAVTQDAMLIFENLSRGFGRQGKRTFMAERQYTRMEDWLTAKLAYEGLPSKTYLSKTLAQYTSKTCSNCGFTITSADYDRVLEKLKKTATGWMTTINGKELKVEGQITYYNRYKRQNVVKDLSVELDRLSEESVNNDISSWTKGRSGEALSLLKKRFSHRPVQEKFVCLNCGFETHADEQAALNIARSWLFLRSQEYKKYQTNKTTGNTDKRAFVETWQSFYRKKLKEVWKPAV

SEQ ID NO: 45353 - protein, 979 aa, synthetic construct
  REGION 1..979: note = engineered CasX variant
QEIKRINKIRRRLVKDSNTKKAGKTGPMKTLLVRVMTPDLRERLENLRKKPENIPQPISNTSRANLNKLLTDYTEMKKAILHVYWEEFQKDPVGLMSRVAQPASKKIDQNKLKPEMDEKGNLTTAGFACSQCGQPLFVYKLEQVSEKGKAYTNYFGRCNVAEHEKLILLAQLKPEKDSDEAVTYSLGKFGQRALDFYSIHVTKESTHPVKPLAQIAGNRYASHPVGKALSDACMGTIASFLSKYQDIIIEHQKVVKGNQKRLESLRELAGKENLEYPSVTLPPQPHTKEGVDAYNEVIARVRMWVNLNLWQKLKLSRDDAKPLLRLKGFPSFPLVERQANEVDWWDMVCNVKKLINEKKEDGKVFWQNLAGYKRQEALRPYLSSEEDRQKGKKFARYQLGDLLLHLEKKHGEDWGKVYDEAWERIDKKVEGLSKHIKLEEERRSEDAQSKAALTDWLRAKASFVIEGLKEADKDEFCRCELKLQKWYGDLRGKPFAIEAENSILDISGFSKQYNCAFIWQKDGVKKLNLYLIINYFKGGKLRFKKIKPEAFEANRFYTVINKKSGEIVPMEVNFNFDDPNLIILPLAFGKRQGREFIWNDLLSLETGSLKLANGRVIEKTLYNRRTRQDEPALFVALTFERREVLDSSNIKTPMNLIGVDRGENIPAVIALTDPEGCPLSRFKDSLGNPTHILRIGESYKEKQRTIQAKKEVEQRRAGGYSRKYASKAKNLADDMVRNTARDLLYYAVTQDAMLIFENLSRGFGRQGKRTFMAERQYTRMEDWLTAKLAYEGLPSKTYLSKTLAQYTSKTCSNCGFTITSADYDRVLEKLKKTATGWMTTINGKELKVEGQITYYNRYKRQNVVKDLSVELDRLSEESVNNDISSWTKGRSGEALSLLKKRFSHRPVQEKFVCLNCGFETHADEQAALNIARSWLFLRSQEYKKYQTNKTTGNTDKRAFVETWQSFYRKKLKEVWKPAV

SEQ ID NO: 45354 - protein, 979 aa, synthetic construct
  REGION 1..979: note = engineered CasX variant
QEIKRINKIRRRLVKDSNTKKAGKTGPMKTLLVRVMTPDLRERLENLRKKPENIPQPISNTSRANLNKLLTDYTEMKKAILHVYWEEFQKDPVGLMSRVAQPASKKIDQNKLKPEMDEKGNLTTAGFACSQCGQPLFVYKLEQVSEKGKAYTNYFGRCNVAEHEKLILLAQLKPEKDSDEAVTYSLGKFGQRALDFYSIHVTKESTHPVKPLAQIAGNRYASSPVGKALSDACMGTIASFLSKYQDIIIEHQKVVKGNQKRLESLRELAGKENLEYPSVTLPPQPHTKEGVDAYNEVIARVRMWVNLNLWQKLKLSRDDAKPLLRLKGFPSFPLVERQANEVDWWDMVCNVKKLINEKKEDGKVFWQNLAGYKRQEALRPYLSSEEDRQKGKKFARYQLGDLLLHLEKKHGEDWGKVYDEAWERIDKKVEGLSKHIKLEEERRSEDAQSKAALTDWLRAKASFVIEGLKEADKDEFCRCELKLQKWYGDLRGKPFAIEAENSILDISGFSKQYNCAFIWQKDGVKKLNLYLIINYFKGGKLRFKKIKPEAFEANRFYTVINKKSGEIVPMEVNFNFDDPNLIILPLAFGKRQGREFIWNDLLSLETGSLKLANGRVIEKTLYNRRTRQDEPALFVALTFERREVLDSSNIKTPMNLIGVDRGENIPAVIALTDPEGCPLSRFKDSLGNPTHILRIGESYKEKQRTIQAKKEVEQRRAGGYSRKYASKAKNLADDMVRNTARDLLYYAVTQDAMLIFENLSRGFGRQGKRTFMAERQYTRMEDWLTAKLAYEGLPSKTYLSKTLAQYTSKTCSNCGFTITSADYDRVLEKLKKTATGWMTTINGKELKVEGQITYYNRYKRQNVVKDLSVELDRLSEESVNNDISSWTKGRSGEALSLLKKRFSHRPVQEKFVCLNCGFETHADEQAALNIARSWLFLRSQEYKKYQTNKTTGNTDKRAFVETWQSFYRKKLKEVWKPAV

SEQ ID NO: 45355 - protein, 979 aa, synthetic construct
  REGION 1..979: note = engineered CasX variant
QEIKRINKIRRRLVKDSNTKKAGKTGPMKTLLVRVMTPDLRERLENLRKKPENIPQPISNTSRANLNKLLTDYTEMKKAILHVYWEEFQKDPVGLMSRVAQPASKKIDQNKLKPEMDEKGNLTTAGFACSQCGQPLFVYKLEQVSEKGKAYTNYFGRCNVAEHEKLILLAQLKPEKDSDEAVTYSLGKFGQRALDFYSIHVTKESTHPVKPLAQIAGNRYASTPVGKALSDACMGTIASFLSKYQDIIIEHQKVVKGNQKRLESLRELAGKENLEYPSVTLPPQPHTKEGVDAYNEVIARVRMWVNLNLWQKLKLSRDDAKPLLRLKGFPSFPLVERQANEVDWWDMVCNVKKLINEKKEDGKVFWQNLAGYKRQEALRPYLSSEEDRQKGKKFARYQLGDLLLHLEKKHGEDWGKVYDEAWERIDKKVEGLSKHIKLEEERRSEDAQSKAALTDWLRAKASFVIEGLKEADKDEFCRCELKLQKWYGDLRGKPFAIEAENSILDISGFSKQYNCAFIWQKDGVKKLNLYLIINYFKGGKLRFKKIKPEAFEANRFYTVINKKSGEIVPMEVNFNFDDPNLIILPLAFGKRQGREFIWNDLLSLETGSLKLANGRVIEKTLYNRRTRQDEPALFVALTFERREVLDSSNIKTPMNLIGVDRGENIPAVIALTDPEGCPLSRFKDSLGNPTHILRIGESYKEKQRTIQAKKEVEQRRAGGYSRKYASKAKNLADDMVRNTARDLLYYAVTQDAMLIFENLSRGFGRQGKRTFMAERQYTRMEDWLTAKLAYEGLPSKTYLSKTLAQYTSKTCSNCGFTITSADYDRVLEKLKKTATGWMTTINGKELKVEGQITYYNRYKRQNVVKDLSVELDRLSEESVNNDISSWTKGRSGEALSLLKKRFSHRPVQEKFVCLNCGFETHADEQAALNIARSWLFLRSQEYKKYQTNKTTGNTDKRAFVETWQSFYRKKLKEVWKPAV

SEQ ID NO: 45356 - protein, 979 aa, synthetic construct
  REGION 1..979: note = engineered CasX variant
QEIKRINKIRRRLVKDSNTKKAGKTGPMKTLLVRVMTPDLRERLENLRKKPENIPQPISNTSRANLNKLLTDYTEMKKAILHVYWEEFQKDPVGLMSRVAQPASKKIDQNKLKPEMDEKGNLTTAGFACSQCGQPLFVYKLEQVSEKGKAYTNYFGRCNVAEHEKLILLAQLKPEKDSDEAVTYSLGKFGQRALDFYSIHVTKESTHPVKPLAQIAGNRYASAPVGKALSDACMGTIASFLSKYQDIIIEHQKVVKGNQKRLESLRELAGKENLEYPSVTLPPQPHTKEGVDAYNEVIARVRMWVNLNLWQKLKLSRDDAKPLLRLKGFPSFPLVERQANEVDWWDMVCNVKKLINEKKEDGKVFWQNLAGYKRQEALRPYLSSEEDRQKGKKFARYQLGDLLLHLEKKHGEDWGKVYDEAWERIDKKVEGLSKHIKLEEERRSEDAQSKAALTDWLRAKASFVIEGLKEADKDEFCRCELKLQKWYGDLRGKPFAIEAENSILDISGFSKQYNCAFIWQKDGVKKLNLYLIINYFKGGKLRFKKIKPEAFEANRFYTVINKKSGEIVPMEVNFNFDDPNLIILPLAFGKRQGREFIWNDLLSLETGSLKLANGRVIEKTLYNRRTRQDEPALFVALTFERREVLDSSNIKTPMNLIGVDRGENIPAVIALTDPEGCPLSRFKDSLGNPTHILRIGESYKEKQRTIQAKKEVEQRRAGGYSRKYASKAKNLADDMVRNTARDLLYYAVTQDAMLIFENLSRGFGRQGKRTFMAERQYTRMEDWLTAKLAYEGLPSKTYLSKTLAQYTSKTCSNCGFTITSADYDRVLEKLKKTATGWMTTINGKELKVEGQITYYNRYKRQNVVKDLSVELDRLSEESVNNDISSWTKGRSGEALSLLKKRFSHRPVQEKFVCLNCGFETHADEQAALNIARSWLFLRSQEYKKYQTNKTTGNTDKRAFVETWQSFYRKKLKEVWKPAV

SEQ ID NO: 45357 - protein, 979 aa, synthetic construct
  REGION 1..979: note = engineered CasX variant
QEIKRINKIRRRLVKDSNTKKAGKTGPMKTLLVRVMTPDLRERLENLRKKPENIPQPISNTSRANLNKLLTDYTEMKKAILHVYWEEFQKDPVGLMSRVAQPASKKIDQNKLKPEMDEKGNLTTAGFACSQCGQPLFVYKLEQVSEKGKAYTNYFGRCNVAEHEKLILLAQLKPEKDSDEAVTYSLGKFGQRALDFYSIHVTKESTHPVKPLAQIAGNRYASVPVGKALSDACMGTIASFLSKYQDIIIEHQKVVKGNQKRLESLRELAGKENLEYPSVTLPPQPHTKEGVDAYNEVIARVRMWVNLNLWQKLKLSRDDAKPLLRLKGFPSFPLVERQANEVDWWDMVCNVKKLINEKKEDGKVFWQNLAGYKRQEALRPYLSSEEDRQKGKKFARYQLGDLLLHLEKKHGEDWGKVYDEAWERIDKKVEGLSKHIKLEEERRSEDAQSKAALTDWLRAKASFVIEGLKEADKDEFCRCELKLQKWYGDLRGKPFAIEAENSILDISGFSKQYNCAFIWQKDGVKKLNLYLIINYFKGGKLRFKKIKPEAFEANRFYTVINKKSGEIVPMEVNFNFDDPNLIILPLAFGKRQGREFIWNDLLSLETGSLKLANGRVIEKTLYNRRTRQDEPALFVALTFERREVLDSSNIKTPMNLIGVDRGENIPAVIALTDPEGCPLSRFKDSLGNPTHILRIGESYKEKQRTIQAKKEVEQRRAGGYSRKYASKAKNLADDMVRNTARDLLYYAVTQDAMLIFENLSRGFGRQGKRTFMAERQYTRMEDWLTAKLAYEGLPSKTYLSKTLAQYTSKTCSNCGFTITSADYDRVLEKLKKTATGWMTTINGKELKVEGQITYYNRYKRQNVVKDLSVELDRLSEESVNNDISSWTKGRSGEALSLLKKRFSHRPVQEKFVCLNCGFETHADEQAALNIARSWLFLRSQEYKKYQTNKTTGNTDKRAFVETWQSFYRKKLKEVWKPAV

SEQ ID NO: 45358 - protein, 979 aa, synthetic construct
  REGION 1..979: note = engineered CasX variant
QEIKRINKIRRRLVKDSNTKKAGKTGPMKTLLVRVMTPDLRERLENLRKKPENIPQPISNTSRANLNKLLTDYTEMKKAILHVYWEEFQKDPVGLMSRVAQPASKKIDQNKLKPEMDEKGNLTTAGFACSQCGQPLFVYKLEQVSEKGKAYTNYFGRCNVAEHEKLIKLAQLKPEKDSDEAVTYSLGKFGQRALDFYSIHVTKESTHPVKPLAQIAGNRYASGPVGKALSDACMGTIASFLSKYQDIIIEHQKVVKGNQKRLESLRELAGKENLEYPSVTLPPQPHTKEGVDAYNEVIARVRMWVNLNLWQKLKLSRDDAKPLLRLKGFPSFPLVERQANEVDWWDMVCNVKKLINEKKEDGKVFWQNLAGYKRQEALRPYLSSEEDRQKGKKFARYQLGDLLLHLEKKHGEDWGKVYDEAWERIDKKVEGLSKHIKLEEERRSEDAQSKAALTDWLRAKASFVIEGLKEADKDEFCRCELKLQKWYGDLRGKPFAIEAENSILDISGFSKQYNCAFIWQKDGVKKLNLYLIINYFKGGKLRFKKIKPEAFEANRFYTVINKKSGEIVPMEVNFNFDDPNLIILPLAFGKRQGREFIWNDLLSLETGSLKLANGRVIEKTLYNRRTRQDEPALFVALTFERREVLDSSNIKTPMNLIGVDRGENIPAVIALTDPEGCPLSRFKDSLGNPTHILRIGESYKEKQRTIQAKKEVEQRRAGGYSRKYASKAKNLADDMVRNTARDLLYYAVTQDAMLIFENLSRGFGRQGKRTFMAERQYTRMEDWLTAKLAYEGLPSKTYLSKTLAQYTSKTCSNCGFTITSADYDRVLEKLKKTATGWMTTINGKELKVEGQITYYNRYKRQNVVKDLSVELDRLSEESVNNDISSWTKGRSGEALSLLKKRFSHRPVQEKFVCLNCGFETHADEQAALNIARSWLFLRSQEYKKYQTNKTTGNTDKRAFVETWQSFYRKKLKEVWKPAV

SEQ ID NO: 45359 - protein, 978 aa, synthetic construct
  REGION 1..978: note = engineered CasX variant
QEIKRINKIRRRLVKDSNTKKAGKTGPMKTLLVRVMTPDLRERLENLRKKPENIPQPISNTSRANLNKLLTDYTEMKKAILHVYWEEFQKDPVGLMSRVAQPASKKIDQNKLKPEMDEKGNLTTAGFACSQCGQPLFVYKLEQVSEKGKAYTNYFGRCNVAEHEKLILLAQLKPEKDSDEAVTYSLGKFGQRALDFYSIHVTKESTHPVKPLAQIAGNRYASPVGKALSDACMGTIASFLSKYQDIIIEHQKVVKGNQKRLESLRELAGKENLEYPSVTLPPQPHTKEGVDAYNEVIARVRMWVNLNLWQKLKLSRDDAKPLLRLKGFPSFPLVERQANEVDWWDMVCNVKKLINEKKEDGKVFWQNLAGYKRQEALRPYLSSEEDRQKGKKFARYQLGDLLLHLEKKHGEDWGKVYDEAWERIDKKVEGLSKHIKLEEERRSEDAQSKAALTDWLRAKASFVIEGLKEADKDEFCRCELKLQKWYGDLRGKPFAIEAENSILDISGFSKQYNCAFIWQKDGVKKLNLYLIINYFKGGKLRFKKIKPEAFEANRFYTVINKKSGEIVPMEVNFNFDDPNLIILPLAFGKRQGREFIWNDLLSLETGSLKLANGRVIEKTLYNRRTRQDEPALFVALTFERREVLDSSNIKTPMNLIGVDRGENIPAVIALTDPEGCPLSRFKDSLGNPTHILRIGESYKEKQRTIQAKKEVEQRRAGGYSRKYASKAKNLADDMVRNTARDLLYYAVTQDAMLIFENLSRGFGRQGKRTFMAERQYTRMEDWLTAKLAYEGLPSKTYLSKTLAQYTSKTCSNCGFTITSADYDRVLEKLKKTATGWMTTINGKELKVEGQITYYNRYKRQNVVKDLSVELDRLSEESVNNDISSWTKGRSGEALSLLKKRFSHRPVQEKFVCLNCGFETHADEQAALNIARSWLFLRSQEYKKYQTNKTTGNTDKRAFVETWQSFYRKKLKEVWKPAV

SEQ ID NO: 45360 - protein, 979 aa, synthetic construct
  REGION 1..979: note = engineered CasX variant
QEIKRINKIRRRLVKDSNTKKAGKTGPMKTLLVRVMTPDLRERLENLRKKPENIPQPISNTSRANLNKLLTDYTEMKKAILHVYWEEFQKDPVGLMSRVAQPASKKIDQNKLKPEMDEKGNLTTAGFACSQCGQPLFVYKLEQVSEKGKAYTNYFGRCNVAEHEKLILLAQLKPEKDSDEAVTYSLGKFGQRALDFYSIHVTKESTHPVKPLAQIAGNRYASYPVGKALSDACMGTIASFLSKYQDIIIEHQKVVKGNQKRLESLRELAGKENLEYPSVTLPPQPHTKEGVDAYNEVIARVRMWVNLNLWQKLKLSRDDAKPLLRLKGFPSFPLVERQANEVDWWDMVCNVKKLINEKKEDGKVFWQNLAGYKRQEALRPYLSSEEDRKKGKKFARYQLGDLLLHLEKKHGEDWGKVYDEAWERIDKKVEGLSKHIKLEEERRSEDAQSKAALTDWLRAKASFVIEGLKEADKDEFCRCELKLQKWYGDLRGKPFAIEAENSILDISGFSKQYNCAFIWQKDGVKKLNLYLIINYFKGGKLRFKKIKPEAFEANRFYTVINKKSGEIVPMEVNFNFDDPNLIILPLAFGKRQGREFIWNDLLSLETGSLKLANGRVIEKTLYNRRTRQDEPALFVALTFERREVLDSSNIKTPMNLIGVDRGENIPAVIALTDPEGCPLSRFKDSLGNPTHILRIGESYKEKQRTIQAKKEVEQRRAGGYSRKYASKAKNLADDMVRNTARDLLYYAVTQDAMLIFENLSRGFGRQGKRTFMAERQYTRMEDWLTAKLAYEGLPSQTYLSKTLAQYTSKTCSNCGFTITSADYDRVLEKLKKTATGWMTTINGKELKVEGQITYYNRYKRQNVVKDLSVELDRLSEESVNNDISSWTKGRSGEALSLLKKRFSHRPVQEKFVCLNCGFETHADEQAALNIARSWLFLRSQEYKKYQTNKTTGNTDKRAFVETWQSFYRKKLKEVWKPAV

SEQ ID NO: 45361 - protein, 979 aa, synthetic construct
  REGION 1..979: note = engineered CasX variant
QEIKRINKIRRRLVKDSNTKKAGKTGPMKTLLVRVMTPDLRERLENLRKKPENIPQPISNTSRANLNKLLTDYTEMKKAILHVYWEEFQKDPVGLMSRVAQPASKKIDQNKLKPEMDEKGNLTTAGFACSQCGQPLFVYKLEQVSEKGKAYTNYFGRCNVAEHEKLILLAQLKPEKDSDEAVTYSLGKFGQRALDFYSIHVTKESTHPVKPLAQIAGNRYASHPVGKALSDACMGTIASFLSKYQDIIIEHQKVVKGNQKRLESLRELAGKENLEYPSVTLPPQPHTKEGVDAYNEVIARVRMWVNLNLWQKLKLSRDDAKPLLRLKGFPSFPLVERQANEVDWWDMVCNVKKLINEKKEDGKVFWQNLAGYKRQEALRPYLSSEEDRKKGKKFARYQLGDLLLHLEKKHGEDWGKVYDEAWERIDKKVEGLSKHIKLEEERRSEDAQSKAALTDWLRAKASFVIEGLKEADKDEFCRCELKLQKWYGDLRGKPFAIEAENSILDISGFSKQYNCAFIWQKDGVKKLNLYLIINYFKGGKLRFKKIKPEAFEANRFYTVINKKSGEIVPMEVNFNFDDPNLIILPLAFGKRQGREFIWNDLLSLETGSLKLANGRVIEKTLYNRRTRQDEPALFVALTFERREVLDSSNIKTPMNLIGVDRGENIPAVIALTDPEGCPLSRFKDSLGNPTHILRIGESYKEKQRTIQAKKEVEQRRAGGYSRKYASKAKNLADDMVRNTARDLLYYAVTQDAMLIFENLSRGFGRQGKRTFMAERQYTRMEDWLTAKLAYEGLPSQTYLSKTLAQYTSKTCSNCGFTITSADYDRVLEKLKKTATGWMTTINGKELKVEGQITYYNRYKRQNVVKDLSVELDRLSEESVNNDISSWTKGRSGEALSLLKKRFSHRPVQEKFVCLNCGFETHADEQAALNIARSWLFLRSQEYKKYQTNKTTGNTDKRAFVETWQSFYRKKLKEVWKPAV

SEQ ID NO: 45362 - protein, 979 aa, synthetic construct
  REGION 1..979: note = engineered CasX variant
QEIKRINKIRRRLVKDSNTKKAGKTGPMKTLLVRVMTPDLRERLENLRKKPENIPQPISNTSRANLNKLLTDYTEMKKAILHVYWEEFQKDPVGLMSRVAQPASKKIDQNKLKPEMDEKGNLTTAGFACSQCGQPLFVYKLEQVSEKGKAYTNYFGRCNVAEHEKLILLAQLKPEKDSDEAVTYSLGKFGQRALDFYSIHVTKESTHPVKPLAQIAGNRYASSPVGKALSDACMGTIASFLSKYQDIIIEHQKVVKGNQKRLESLRELAGKENLEYPSVTLPPQPHTKEGVDAYNEVIARVRMWVNLNLWQKLKLSRDDAKPLLRLKGFPSFPLVERQANEVDWWDMVCNVKKLINEKKEDGKVFWQNLAGYKRQEALRPYLSSEEDRKKGKKFARYQLGDLLLHLEKKHGEDWGKVYDEAWERIDKKVEGLSKHIKLEEERRSEDAQSKAALTDWLRAKASFVIEGLKEADKDEFCRCELKLQKWYGDLRGKPFAIEAENSILDISGFSKQYNCAFIWQKDGVKKLNLYLIINYFKGGKLRFKKIKPEAFEANRFYTVINKKSGEIVPMEVNFNFDDPNLIILPLAFGKRQGREFIWNDLLSLETGSLKLANGRVIEKTLYNRRTRQDEPALFVALTFERREVLDSSNIKTPMNLIGVDRGENIPAVIALTDPEGCPLSRFKDSLGNPTHILRIGESYKEKQRTIQAKKEVEQRRAGGYSRKYASKAKNLADDMVRNTARDLLYYAVTQDAMLIFENLSRGFGRQGKRTFMAERQYTRMEDWLTAKLAYEGLPSQTYLSKTLAQYTSKTCSNCGFTITSADYDRVLEKLKKTATGWMTTINGKELKVEGQITYYNRYKRQNVVKDLSVELDRLSEESVNNDISSWTKGRSGEALSLLKKRFSHRPVQEKFVCLNCGFETHADEQAALNIARSWLFLRSQEYKKYQTNKTTGNTDKRAFVETWQSFYRKKLKEVWKPAV

SEQ ID NO: 45363 - protein, 979 aa, synthetic construct
  REGION 1..979: note = engineered CasX variant
QEIKRINKIRRRLVKDSNTKKAGKTGPMKTLLVRVMTPDLRERLENLRKKPENIPQPISNTSRANLNKLLTDYTEMKKAILHVYWEEFQKDPVGLMSRVAQPASKKIDQNKLKPEMDEKGNLTTAGFACSQCGQPLFVYKLEQVSEKGKAYTNYFGRCNVAEHEKLILLAQLKPEKDSDEAVTYSLGKFGQRALDFYSIHVTKESTHPVKPLAQIAGNRYASTPVGKALSDACMGTIASFLSKYQDIIIEHQKVVKGNQKRLESLRELAGKENLEYPSVTLPPQPHTKEGVDAYNEVIARVRMWVNLNLWQKLKLSRDDAKPLLRLKGFPSFPLVERQANEVDWWDMVCNVKKLINEKKEDGKVFWQNLAGYKRQEALRPYLSSEEDRKKGKKFARYQLGDLLLHLEKKHGEDWGKVYDEAWERIDKKVEGLSKHIKLEEERRSEDAQSKAALTDWLRAKASFVIEGLKEADKDEFCRCELKLQKWYGDLRGKPFAIEAENSILDISGFSKQYNCAFIWQKDGVKKLNLYLIINYFKGGKLRFKKIKPEAFEANRFYTVINKKSGEIVPMEVNFNFDDPNLIILPLAFGKRQGREFIWNDLLSLETGSLKLANGRVIEKTLYNRRTRQDEPALFVALTFERREVLDSSNIKTPMNLIGVDRGENIPAVIALTDPEGCPLSRFKDSLGNPTHILRIGESYKEKQRTIQAKKEVEQRRAGGYSRKYASKAKNLADDMVRNTARDLLYYAVTQDAMLIFENLSRGFGRQGKRTFMAERQYTRMEDWLTAKLAYEGLPSQTYLSKTLAQYTSKTCSNCGFTITSADYDRVLEKLKKTATGWMTTINGKELKVEGQITYYNRYKRQNVVKDLSVELDRLSEESVNNDISSWTKGRSGEALSLLKKRFSHRPVQEKFVCLNCGFETHADEQAALNIARSWLFLRSQEYKKYQTNKTTGNTDKRAFVETWQSFYRKKLKEVWKPAV

SEQ ID NO: 45364 - protein, 979 aa, synthetic construct
  REGION 1..979: note = engineered CasX variant
QEIKRINKIRRRLVKDSNTKKAGKTGPMKTLLVRVMTPDLRERLENLRKKPENIPQPISNTSRANLNKLLTDYTEMKKAILHVYWEEFQKDPVGLMSRVAQPASKKIDQNKLKPEMDEKGNLTTAGFACSQCGQPLFVYKLEQVSEKGKAYTNYFGRCNVAEHEKLILLAQLKPEKDSDEAVTYSLGKFGQRALDFYSIHVTKESTHPVKPLAQIAGNRYASAPVGKALSDACMGTIASFLSKYQDIIIEHQKVVKGNQKRLESLRELAGKENLEYPSVTLPPQPHTKEGVDAYNEVIARVRMWVNLNLWQKLKLSRDDAKPLLRLKGFPSFPLVERQANEVDWWDMVCNVKKLINEKKEDGKVFWQNLAGYKRQEALRPYLSSEEDRKKGKKFARYQLGDLLLHLEKKHGEDWGKVYDEAWERIDKKVEGLSKHIKLEEERRSEDAQSKAALTDWLRAKASFVIEGLKEADKDEFCRCELKLQKWYGDLRGKPFAIEAENSILDISGFSKQYNCAFIWQKDGVKKLNLYLIINYFKGGKLRFKKIKPEAFEANRFYTVINKKSGEIVPMEVNFNFDDPNLIILPLAFGKRQGREFIWNDLLSLETGSLKLANGRVIEKTLYNRRTRQDEPALFVALTFERREVLDSSNIKTPMNLIGVDRGENIPAVIALTDPEGCPLSRFKDSLGNPTHILRIGESYKEKQRTIQAKKEVEQRRAGGYSRKYASKAKNLADDMVRNTARDLLYYAVTQDAMLIFENLSRGFGRQGKRTFMAERQYTRMEDWLTAKLAYEGLPSQTYLSKTLAQYTSKTCSNCGFTITSADYDRVLEKLKKTATGWMTTINGKELKVEGQITYYNRYKRQNVVKDLSVELDRLSEESVNNDISSWTKGRSGEALSLLKKRFSHRPVQEKFVCLNCGFETHADEQAALNIARSWLFLRSQEYKKYQTNKTTGNTDKRAFVETWQSFYRKKLKEVWKPAV

SEQ ID NO: 45365 - protein, 979 aa, synthetic construct
  REGION 1..979: note = engineered CasX variant
QEIKRINKIRRRLVKDSNTKKAGKTGPMKTLLVRVMTPDLRERLENLRKKPENIPQPISNTSRANLNKLLTDYTEMKKAILHVYWEEFQKDPVGLMSRVAQPASKKIDQNKLKPEMDEKGNLTTAGFACSQCGQPLFVYKLEQVSEKGKAYTNYFGRCNVAEHEKLILLAQLKPEKDSDEAVTYSLGKFGQRALDFYSIHVTKESTHPVKPLAQIAGNRYASVPVGKALSDACMGTIASFLSKYQDIIIEHQKVVKGNQKRLESLRELAGKENLEYPSVTLPPQPHTKEGVDAYNEVIARVRMWVNLNLWQKLKLSRDDAKPLLRLKGFPSFPLVERQANEVDWWDMVCNVKKLINEKKEDGKVFWQNLAGYKRQEALRPYLSSEEDRKKGKKFARYQLGDLLLHLEKKHGEDWGKVYDEAWERIDKKVEGLSKHIKLEEERRSEDAQSKAALTDWLRAKASFVIEGLKEADKDEFCRCELKLQKWYGDLRGKPFAIEAENSILDISGFSKQYNCAFIWQKDGVKKLNLYLIINYFKGGKLRFKKIKPEAFEANRFYTVINKKSGEIVPMEVNFNFDDPNLIILPLAFGKRQGREFIWNDLLSLETGSLKLANGRVIEKTLYNRRTRQDEPALFVALTFERREVLDSSNIKTPMNLIGVDRGENIPAVIALTDPEGCPLSRFKDSLGNPTHILRIGESYKEKQRTIQAKKEVEQRRAGGYSRKYASKAKNLADDMVRNTARDLLYYAVTQDAMLIFENLSRGFGRQGKRTFMAERQYTRMEDWLTAKLAYEGLPSQTYLSKTLAQYTSKTCSNCGFTITSADYDRVLEKLKKTATGWMTTINGKELKVEGQITYYNRYKRQNVVKDLSVELDRLSEESVNNDISSWTKGRSGEALSLLKKRFSHRPVQEKFVCLNCGFETHADEQAALNIARSWLFLRSQEYKKYQTNKTTGNTDKRAFVETWQSFYRKKLKEVWKPAV

SEQ ID NO: 45366 - protein, 979 aa, synthetic construct
  REGION 1..979: note = engineered CasX variant
QEIKRINKIRRRLVKDSNTKKAGKTGPMKTLLVRVMTPDLRERLENLRKKPENIPQPISNTSRANLNKLLTDYTEMKKAILHVYWEEFQKDPVGLMSRVAQPASKKIDQNKLKPEMDEKGNLTTAGFACSQCGQPLFVYKLEQVSEKGKAYTNYFGRCNVAEHEKLIKLAQLKPEKDSDEAVTYSLGKFGQRALDFYSIHVTKESTHPVKPLAQIAGNRYASGPVGKALSDACMGTIASFLSKYQDIIIEHQKVVKGNQKRLESLRELAGKENLEYPSVTLPPQPHTKEGVDAYNEVIARVRMWVNLNLWQKLKLSRDDAKPLLRLKGFPSFPLVERQANEVDWWDMVCNVKKLINEKKEDGKVFWQNLAGYKRQEALRPYLSSEEDRKKGKKFARYQLGDLLLHLEKKHGEDWGKVYDEAWERIDKKVEGLSKHIKLEEERRSEDAQSKAALTDWLRAKASFVIEGLKEADKDEFCRCELKLQKWYGDLRGKPFAIEAENSILDISGFSKQYNCAFIWQKDGVKKLNLYLIINYFKGGKLRFKKIKPEAFEANRFYTVINKKSGEIVPMEVNFNFDDPNLIILPLAFGKRQGREFIWNDLLSLETGSLKLANGRVIEKTLYNRRTRQDEPALFVALTFERREVLDSSNIKTPMNLIGVDRGENIPAVIALTDPEGCPLSRFKDSLGNPTHILRIGESYKEKQRTIQAKKEVEQRRAGGYSRKYASKAKNLADDMVRNTARDLLYYAVTQDAMLIFENLSRGFGRQGKRTFMAERQYTRMEDWLTAKLAYEGLPSQTYLSKTLAQYTSKTCSNCGFTITSADYDRVLEKLKKTATGWMTTINGKELKVEGQITYYNRYKRQNVVKDLSVELDRLSEESVNNDISSWTKGRSGEALSLLKKRFSHRPVQEKFVCLNCGFETHADEQAALNIARSWLFLRSQEYKKYQTNKTTGNTDKRAFVETWQSFYRKKLKEVWKPAV

SEQ ID NO: 45367 - protein, 978 aa, synthetic construct
  REGION 1..978: note = engineered CasX variant
QEIKRINKIRRRLVKDSNTKKAGKTGPMKTLLVRVMTPDLRERLENLRKKPENIPQPISNTSRANLNKLLTDYTEMKKAILHVYWEEFQKDPVGLMSRVAQPASKKIDQNKLKPEMDEKGNLTTAGFACSQCGQPLFVYKLEQVSEKGKAYTNYFGRCNVAEHEKLILLAQLKPEKDSDEAVTYSLGKFGQRALDFYSIHVTKESTHPVKPLAQIAGNRYASPVGKALSDACMGTIASFLSKYQDIIIEHQKVVKGNQKRLESLRELAGKENLEYPSVTLPPQPHTKEGVDAYNEVIARVRMWVNLNLWQKLKLSRDDAKPLLRLKGFPSFPLVERQANEVDWWDMVCNVKKLINEKKEDGKVFWQNLAGYKRQEALRPYLSSEEDRKKGKKFARYQLGDLLLHLEKKHGEDWGKVYDEAWERIDKKVEGLSKHIKLEEERRSEDAQSKAALTDWLRAKASFVIEGLKEADKDEFCRCELKLQKWYGDLRGKPFAIEAENSILDISGFSKQYNCAFIWQKDGVKKLNLYLIINYFKGGKLRFKKIKPEAFEANRFYTVINKKSGEIVPMEVNFNFDDPNLIILPLAFGKRQGREFIWNDLLSLETGSLKLANGRVIEKTLYNRRTRQDEPALFVALTFERREVLDSSNIKTPMNLIGVDRGENIPAVIALTDPEGCPLSRFKDSLGNPTHILRIGESYKEKQRTIQAKKEVEQRRAGGYSRKYASKAKNLADDMVRNTARDLLYYAVTQDAMLIFENLSRGFGRQGKRTFMAERQYTRMEDWLTAKLAYEGLPSQTYLSKTLAQYTSKTCSNCGFTITSADYDRVLEKLKKTATGWMTTINGKELKVEGQITYYNRYKRQNVVKDLSVELDRLSEESVNNDISSWTKGRSGEALSLLKKRFSHRPVQEKFVCLNCGFETHADEQAALNIARSWLFLRSQEYKKYQTNKTTGNTDKRAFVETWQSFYRKKLKEVWKPAV

SEQ ID NO: 45368 - protein, 979 aa, synthetic construct
  REGION 1..979: note = engineered CasX variant
QEIKRINKIRRRLVKDSNTKKAGKTGPMKTLLVRVMTPDLRERLENLRKKPENIPQPISNTSRANLNKLLTDYTEMKKAILHVYWEEFQKDPVGLMSRVAQPASKKIDQNKLKPEMDEKGNLTTAGFACSQCGQPLFVYKLEQVSEKGKAYTNYFGRCNVAEHEKLILLAQLKPEKDSDEAVTYSLGKFGQRALDFYSIHVTKESTHPVKPLAQIAGNRYASYPVGKALSDACMGTIASFLSKYQDIIIEHQKVVKGNQKRLESLRELAGKENLEYPSVTLPPQPHTKEGVDAYNEVIARVRMWVNLNLWQKLKLSRDDAKPLLRLKGFPSFPLVERQANEVDWWDMVCNVKKLINEKKEDGKVFWQNLAGYKRQEALRPYLSSEEDRKKGKKFARYQLGDLLLHLEKKHGEDWGKVYDEAWERIDKKVEGLSKHIKLEEERRSEDAQSKAALTDWLRAKASFVIEGLKEADKDEFCRCELKLQKWYGDLRGKPFAIEAENSILDISGFSKQYNCAFIWQKDGVKKLNLYLIINYFKGGKLRFKKIKPEAFEANRFYTVINKKSGEIVPMEVNFNFDDPNLIILPLAFGKRQGREFIWNDLLSLETGSLKLANGRVIEKTLYNRRTRQDEPALFVALTFERREVLDSSNIKTPMNLIGVDRGENIPAVIALTDPEGCPLSRFKDSLGNPTHILRIGESYKEKQRTIQAKKEVEQRRAGGYSRKYASKAKNLADDMVRNTARDLLYYAVTQDAMLIFENLSRGFGRQGKRTFMAERQYTRMEDWLTAKLAYNGLPSKTYLSKTLAQYTSKTCSNCGFTITSADYDRVLEKLKKTATGWMTTINGKELKVEGQITYYNRYKRQNVVKDLSVELDRLSEESVNNDISSWTKGRSGEALSLLKKRFSHRPVQEKFVCLNCGFETHADEQAALNIARSWLFLRSQEYKKYQTNKTTGNTDKRAFVETWQSFYRKKLKEVWKPAV

SEQ ID NO: 45369 - protein, 979 aa, synthetic construct
  REGION 1..979: note = engineered CasX variant
QEIKRINKIRRRLVKDSNTKKAGKTGPMKTLLVRVMTPDLRERLENLRKKPENIPQPISNTSRANLNKLLTDYTEMKKAILHVYWEEFQKDPVGLMSRVAQPASKKIDQNKLKPEMDEKGNLTTAGFACSQCGQPLFVYKLEQVSEKGKAYTNYFGRCNVAEHEKLILLAQLKPEKDSDEAVTYSLGKFGQRALDFYSIHVTKESTHPVKPLAQIAGNRYASHPVGKALSDACMGTIASFLSKYQDIIIEHQKVVKGNQKRLESLRELAGKENLEYPSVTLPPQPHTKEGVDAYNEVIARVRMWVNLNLWQKLKLSRDDAKPLLRLKGFPSFPLVERQANEVDWWDMVCNVKKLINEKKEDGKVFWQNLAGYKRQEALRPYLSSEEDRKKGKKFARYQLGDLLLHLEKKHGEDWGKVYDEAWERIDKKVEGLSKHIKLEEERRSEDAQSKAALTDWLRAKASFVIEGLKEADKDEFCRCELKLQKWYGDLRGKPFAIEAENSILDISGFSKQYNCAFIWQKDGVKKLNLYLIINYFKGGKLRFKKIKPEAFEANRFYTVINKKSGEIVPMEVNFNFDDPNLIILPLAFGKRQGREFIWNDLLSLETGSLKLANGRVIEKTLYNRRTRQDEPALFVALTFERREVLDSSNIKTPMNLIGVDRGENIPAVIALTDPEGCPLSRFKDSLGNPTHILRIGESYKEKQRTIQAKKEVEQRRAGGYSRKYASKAKNLADDMVRNTARDLLYYAVTQDAMLIFENLSRGFGRQGKRTFMAERQYTRMEDWLTAKLAYNGLPSKTYLSKTLAQYTSKTCSNCGFTITSADYDRVLEKLKKTATGWMTTINGKELKVEGQITYYNRYKRQNVVKDLSVELDRLSEESVNNDISSWTKGRSGEALSLLKKRFSHRPVQEKFVCLNCGFETHADEQAALNIARSWLFLRSQEYKKYQTNKTTGNTDKRAFVETWQSFYRKKLKEVWKPAV

SEQ ID NO: 45370 - protein, 979 aa, synthetic construct
  REGION 1..979: note = engineered CasX variant
QEIKRINKIRRRLVKDSNTKKAGKTGPMKTLLVRVMTPDLRERLENLRKKPENIPQPISNTSRANLNKLLTDYTEMKKAILHVYWEEFQKDPVGLMSRVAQPASKKIDQNKLKPEMDEKGNLTTAGFACSQCGQPLFVYKLEQVSEKGKAYTNYFGRCNVAEHEKLILLAQLKPEKDSDEAVTYSLGKFGQRALDFYSIHVTKESTHPVKPLAQIAGNRYASSPVGKALSDACMGTIASFLSKYQDIIIEHQKVVKGNQKRLESLRELAGKENLEYPSVTLPPQPHTKEGVDAYNEVIARVRMWVNLNLWQKLKLSRDDAKPLLRLKGFPSFPLVERQANEVDWWDMVCNVKKLINEKKEDGKVFWQNLAGYKRQEALRPYLSSEEDRKKGKKFARYQLGDLLLHLEKKHGEDWGKVYDEAWERIDKKVEGLSKHIKLEEERRSEDAQSKAALTDWLRAKASFVIEGLKEADKDEFCRCELKLQKWYGDLRGKPFAIEAENSILDISGFSKQYNCAFIWQKDGVKKLNLYLIINYFKGGKLRFKKIKPEAFEANRFYTVINKKSGEIVPMEVNFNFDDPNLIILPLAFGKRQGREFIWNDLLSLETGSLKLANGRVIEKTLYNRRTRQDEPALFVALTFERREVLDSSNIKTPMNLIGVDRGENIPAVIALTDPEGCPLSRFKDSLGNPTHILRIGESYKEKQRTIQAKKEVEQRRAGGYSRKYASKAKNLADDMVRNTARDLLYYAVTQDAMLIFENLSRGFGRQGKRTFMAERQYTRMEDWLTAKLAYNGLPSKTYLSKTLAQYTSKTCSNCGFTITSADYDRVLEKLKKTATGWMTTINGKELKVEGQITYYNRYKRQNVVKDLSVELDRLSEESVNNDISSWTKGRSGEALSLLKKRFSHRPVQEKFVCLNCGFETHADEQAALNIARSWLFLRSQEYKKYQTNKTTGNTDKRAFVETWQSFYRKKLKEVWKPAV

SEQ ID NO: 45371 - protein, 979 aa, synthetic construct
  REGION 1..979: note = engineered CasX variant
QEIKRINKIRRRLVKDSNTKKAGKTGPMKTLLVRVMTPDLRERLENLRKKPENIPQPISNTSRANLNKLLTDYTEMKKAILHVYWEEFQKDPVGLMSRVAQPASKKIDQNKLKPEMDEKGNLTTAGFACSQCGQPLFVYKLEQVSEKGKAYTNYFGRCNVAEHEKLILLAQLKPEKDSDEAVTYSLGKFGQRALDFYSIHVTKESTHPVKPLAQIAGNRYASTPVGKALSDACMGTIASFLSKYQDIIIEHQKVVKGNQKRLESLRELAGKENLEYPSVTLPPQPHTKEGVDAYNEVIARVRMWVNLNLWQKLKLSRDDAKPLLRLKGFPSFPLVERQANEVDWWDMVCNVKKLINEKKEDGKVFWQNLAGYKRQEALRPYLSSEEDRKKGKKFARYQLGDLLLHLEKKHGEDWGKVYDEAWERIDKKVEGLSKHIKLEEERRSEDAQSKAALTDWLRAKASFVIEGLKEADKDEFCRCELKLQKWYGDLRGKPFAIEAENSILDISGFSKQYNCAFIWQKDGVKKLNLYLIINYFKGGKLRFKKIKPEAFEANRFYTVINKKSGEIVPMEVNFNFDDPNLIILPLAFGKRQGREFIWNDLLSLETGSLKLANGRVIEKTLYNRRTRQDEPALFVALTFERREVLDSSNIKTPMNLIGVDRGENIPAVIALTDPEGCPLSRFKDSLGNPTHILRIGESYKEKQRTIQAKKEVEQRRAGGYSRKYASKAKNLADDMVRNTARDLLYYAVTQDAMLIFENLSRGFGRQGKRTFMAERQYTRMEDWLTAKLAYNGLPSKTYLSKTLAQYTSKTCSNCGFTITSADYDRVLEKLKKTATGWMTTINGKELKVEGQITYYNRYKRQNVVKDLSVELDRLSEESVNNDISSWTKGRSGEALSLLKKRFSHRPVQEKFVCLNCGFETHADEQAALNIARSWLFLRSQEYKKYQTNKTTGNTDKRAFVETWQSFYRKKLKEVWKPAV

SEQ ID NO: 45372 - protein, 979 aa, synthetic construct
  REGION 1..979: note = engineered CasX variant
QEIKRINKIRRRLVKDSNTKKAGKTGPMKTLLVRVMTPDLRERLENLRKKPENIPQPISNTSRANLNKLLTDYTEMKKAILHVYWEEFQKDPVGLMSRVAQPASKKIDQNKLKPEMDEKGNLTTAGFACSQCGQPLFVYKLEQVSEKGKAYTNYFGRCNVAEHEKLILLAQLKPEKDSDEAVTYSLGKFGQRALDFYSIHVTKESTHPVKPLAQIAGNRYASAPVGKALSDACMGTIASFLSKYQDIIIEHQKVVKGNQKRLESLRELAGKENLEYPSVTLPPQPHTKEGVDAYNEVIARVRMWVNLNLWQKLKLSRDDAKPLLRLKGFPSFPLVERQANEVDWWDMVCNVKKLINEKKEDGKVFWQNLAGYKRQEALRPYLSSEEDRKKGKKFARYQLGDLLLHLEKKHGEDWGKVYDEAWERIDKKVEGLSKHIKLEEERRSEDAQSKAALTDWLRAKASFVIEGLKEADKDEFCRCELKLQKWYGDLRGKPFAIEAENSILDISGFSKQYNCAFIWQKDGVKKLNLYLIINYFKGGKLRFKKIKPEAFEANRFYTVINKKSGEIVPMEVNFNFDDPNLIILPLAFGKRQGREFIWNDLLSLETGSLKLANGRVIEKTLYNRRTRQDEPALFVALTFERREVLDSSNIKTPMNLIGVDRGENIPAVIALTDPEGCPLSRFKDSLGNPTHILRIGESYKEKQRTIQAKKEVEQRRAGGYSRKYASKAKNLADDMVRNTARDLLYYAVTQDAMLIFENLSRGFGRQGKRTFMAERQYTRMEDWLTAKLAYNGLPSKTYLSKTLAQYTSKTCSNCGFTITSADYDRVLEKLKKTATGWMTTINGKELKVEGQITYYNRYKRQNVVKDLSVELDRLSEESVNNDISSWTKGRSGEALSLLKKRFSHRPVQEKFVCLNCGFETHADEQAALNIARSWLFLRSQEYKKYQTNKTTGNTDKRAFVETWQSFYRKKLKEVWKPAV

SEQ ID NO: 45373 - protein, 979 aa, synthetic construct
  REGION 1..979: note = engineered CasX variant
QEIKRINKIRRRLVKDSNTKKAGKTGPMKTLLVRVMTPDLRERLENLRKKPENIPQPISNTSRANLNKLLTDYTEMKKAILHVYWEEFQKDPVGLMSRVAQPASKKIDQNKLKPEMDEKGNLTTAGFACSQCGQPLFVYKLEQVSEKGKAYTNYFGRCNVAEHEKLILLAQLKPEKDSDEAVTYSLGKFGQRALDFYSIHVTKESTHPVKPLAQIAGNRYASVPVGKALSDACMGTIASFLSKYQDIIIEHQKVVKGNQKRLESLRELAGKENLEYPSVTLPPQPHTKEGVDAYNEVIARVRMWVNLNLWQKLKLSRDDAKPLLRLKGFPSFPLVERQANEVDWWDMVCNVKKLINEKKEDGKVFWQNLAGYKRQEALRPYLSSEEDRKKGKKFARYQLGDLLLHLEKKHGEDWGKVYDEAWERIDKKVEGLSKHIKLEEERRSEDAQSKAALTDWLRAKASFVIEGLKEADKDEFCRCELKLQKWYGDLRGKPFAIEAENSILDISGFSKQYNCAFIWQKDGVKKLNLYLIINYFKGGKLRFKKIKPEAFEANRFYTVINKKSGEIVPMEVNFNFDDPNLIILPLAFGKRQGREFIWNDLLSLETGSLKLANGRVIEKTLYNRRTRQDEPALFVALTFERREVLDSSNIKTPMNLIGVDRGENIPAVIALTDPEGCPLSRFKDSLGNPTHILRIGESYKEKQRTIQAKKEVEQRRAGGYSRKYASKAKNLADDMVRNTARDLLYYAVTQDAMLIFENLSRGFGRQGKRTFMAERQYTRMEDWLTAKLAYNGLPSKTYLSKTLAQYTSKTCSNCGFTITSADYDRVLEKLKKTATGWMTTINGKELKVEGQITYYNRYKRQNVVKDLSVELDRLSEESVNNDISSWTKGRSGEALSLLKKRFSHRPVQEKFVCLNCGFETHADEQAALNIARSWLFLRSQEYKKYQTNKTTGNTDKRAFVETWQSFYRKKLKEVWKPAV

SEQ ID NO: 45374 - protein, 979 aa, synthetic construct
  REGION 1..979: note = engineered CasX variant
QEIKRINKIRRRLVKDSNTKKAGKTGPMKTLLVRVMTPDLRERLENLRKKPENIPQPISNTSRANLNKLLTDYTEMKKAILHVYWEEFQKDPVGLMSRVAQPASKKIDQNKLKPEMDEKGNLTTAGFACSQCGQPLFVYKLEQVSEKGKAYTNYFGRCNVAEHEKLIKLAQLKPEKDSDEAVTYSLGKFGQRALDFYSIHVTKESTHPVKPLAQIAGNRYASGPVGKALSDACMGTIASFLSKYQDIIIEHQKVVKGNQKRLESLRELAGKENLEYPSVTLPPQPHTKEGVDAYNEVIARVRMWVNLNLWQKLKLSRDDAKPLLRLKGFPSFPLVERQANEVDWWDMVCNVKKLINEKKEDGKVFWQNLAGYKRQEALRPYLSSEEDRKKGKKFARYQLGDLLLHLEKKHGEDWGKVYDEAWERIDKKVEGLSKHIKLEEERRSEDAQSKAALTDWLRAKASFVIEGLKEADKDEFCRCELKLQKWYGDLRGKPFAIEAENSILDISGFSKQYNCAFIWQKDGVKKLNLYLIINYFKGGKLRFKKIKPEAFEANRFYTVINKKSGEIVPMEVNFNFDDPNLIILPLAFGKRQGREFIWNDLLSLETGSLKLANGRVIEKTLYNRRTRQDEPALFVALTFERREVLDSSNIKTPMNLIGVDRGENIPAVIALTDPEGCPLSRFKDSLGNPTHILRIGESYKEKQRTIQAKKEVEQRRAGGYSRKYASKAKNLADDMVRNTARDLLYYAVTQDAMLIFENLSRGFGRQGKRTFMAERQYTRMEDWLTAKLAYNGLPSKTYLSKTLAQYTSKTCSNCGFTITSADYDRVLEKLKKTATGWMTTINGKELKVEGQITYYNRYKRQNVVKDLSVELDRLSEESVNNDISSWTKGRSGEALSLLKKRFSHRPVQEKFVCLNCGFETHADEQAALNIARSWLFLRSQEYKKYQTNKTTGNTDKRAFVETWQSFYRKKLKEVWKPAV

SEQ ID NO: 45375 - protein, 978 aa, synthetic construct
  REGION 1..978: note = engineered CasX variant
QEIKRINKIRRRLVKDSNTKKAGKTGPMKTLLVRVMTPDLRERLENLRKKPENIPQPISNTSRANLNKLLTDYTEMKKAILHVYWEEFQKDPVGLMSRVAQPASKKIDQNKLKPEMDEKGNLTTAGFACSQCGQPLFVYKLEQVSEKGKAYTNYFGRCNVAEHEKLILLAQLKPEKDSDEAVTYSLGKFGQRALDFYSIHVTKESTHPVKPLAQIAGNRYASPVGKALSDACMGTIASFLSKYQDIIIEHQKVVKGNQKRLESLRELAGKENLEYPSVTLPPQPHTKEGVDAYNEVIARVRMWVNLNLWQKLKLSRDDAKPLLRLKGFPSFPLVERQANEVDWWDMVCNVKKLINEKKEDGKVFWQNLAGYKRQEALRPYLSSEEDRKKGKKFARYQLGDLLLHLEKKHGEDWGKVYDEAWERIDKKVEGLSKHIKLEEERRSEDAQSKAALTDWLRAKASFVIEGLKEADKDEFCRCELKLQKWYGDLRGKPFAIEAENSILDISGFSKQYNCAFIWQKDGVKKLNLYLIINYFKGGKLRFKKIKPEAFEANRFYTVINKKSGEIVPMEVNFNFDDPNLIILPLAFGKRQGREFIWNDLLSLETGSLKLANGRVIEKTLYNRRTRQDEPALFVALTFERREVLDSSNIKTPMNLIGVDRGENIPAVIALTDPEGCPLSRFKDSLGNPTHILRIGESYKEKQRTIQAKKEVEQRRAGGYSRKYASKAKNLADDMVRNTARDLLYYAVTQDAMLIFENLSRGFGRQGKRTFMAERQYTRMEDWLTAKLAYNGLPSKTYLSKTLAQYTSKTCSNCGFTITSADYDRVLEKLKKTATGWMTTINGKELKVEGQITYYNRYKRQNVVKDLSVELDRLSEESVNNDISSWTKGRSGEALSLLKKRFSHRPVQEKFVCLNCGFETHADEQAALNIARSWLFLRSQEYKKYQTNKTTGNTDKRAFVETWQSFYRKKLKEVWKPAV

SEQ ID NO: 45376 - protein, 979 aa, synthetic construct
  REGION 1..979: note = engineered CasX variant
QEIKRINKIRRRLVKDSNTKKAGKTGPMKTLLVRVMTPDLRERLENLRKKPENIPQPISNTSRANLNKLLTDYTEMKKAILHVYWEEFQKDPVGLMSRVAQPASKKIDQNKLKPEMDEKGNLTTAGFACSQCGQPLFVYKLEQVSEKGKAYTNYFGRCNVAEHEKLIQLAQLKPEKDSDEAVTYSLGKFGQRALDFYSIHVTKESTHPVKPLAQIAGNRYASYPVGKALSDACMGTIASFLSKYQDIIIEHQKVVKGNQKRLESLRELAGKENLEYPSVTLPPQPHTKEGVDAYNEVIARVRMWVNLNLWQKLKLSRDDAKPLLRLKGFPSFPLVERQANEVDWWDMVCNVKKLINEKKEDGKVFWQNLAGYKRQEALRPYLSSEEDRKKGKKFARYQLGDLLLHLEKKHGEDWGKVYDEAWERIDKKVEGLSKHIKLEEERRSEDAQSKAALTDWLRAKASFVIEGLKEADKDEFCRCELKLQKWYGDLRGKPFAIEAENSILDISGFSKQYNCAFIWQKDGVKKLNLYLIINYFKGGKLRFKKIKPEAFEANRFYTVINKKSGEIVPMEVNFNFDDPNLIILPLAFGKRQGREFIWNDLLSLETGSLKLANGRVIEKTLYNRRTRQDEPALFVALTFERREVLDSSNIKTPMNLIGVDRGENIPAVIALTDPEGCPLSRFKDSLGNPTHILRIGESYKEKQRTIQAKKEVEQRRAGGYSRKYASKAKNLADDMVRNTARDLLYYAVTQDAMLIFENLSRGFGRQGKRTFMAERQYTRMEDWLTAKLAYEGLPSKTYLSKTLAQYTSKTCSNCGFTITSADYDRVLEKLKKTATGWMTTINGKELKVEGQITYYNRYKRQNVVKDLSVELDRLSEESVNNDISSWTKGRSGEALSLLKKRFSHRPVQEKFVCLNCGFETHADEQAALNIARSWLFLRSQEYKKYQTNKTTGNTDKRAFVETWQSFYRKKLKEVWKPAV

SEQ ID NO: 45377 - protein, 979 aa, synthetic construct
  REGION 1..979: note = engineered CasX variant
QEIKRINKIRRRLVKDSNTKKAGKTGPMKTLLVRVMTPDLRERLENLRKKPENIPQPISNTSRANLNKLLTDYTEMKKAILHVYWEEFQKDPVGLMSRVAQPASKKIDQNKLKPEMDEKGNLTTAGFACSQCGQPLFVYKLEQVSEKGKAYTNYFGRCNVAEHEKLIQLAQLKPEKDSDEAVTYSLGKFGQRALDFYSIHVTKESTHPVKPLAQIAGNRYASHPVGKALSDACMGTIASFLSKYQDIIIEHQKVVKGNQKRLESLRELAGKENLEYPSVTLPPQPHTKEGVDAYNEVIARVRMWVNLNLWQKLKLSRDDAKPLLRLKGFPSFPLVERQANEVDWWDMVCNVKKLINEKKEDGKVFWQNLAGYKRQEALRPYLSSEEDRKKGKKFARYQLGDLLLHLEKKHGEDWGKVYDEAWERIDKKVEGLSKHIKLEEERRSEDAQSKAALTDWLRAKASFVIEGLKEADKDEFCRCELKLQKWYGDLRGKPFAIEAENSILDISGFSKQYNCAFIWQKDGVKKLNLYLIINYFKGGKLRFKKIKPEAFEANRFYTVINKKSGEIVPMEVNFNFDDPNLIILPLAFGKRQGREFIWNDLLSLETGSLKLANGRVIEKTLYNRRTRQDEPALFVALTFERREVLDSSNIKTPMNLIGVDRGENIPAVIALTDPEGCPLSRFKDSLGNPTHILRIGESYKEKQRTIQAKKEVEQRRAGGYSRKYASKAKNLADDMVRNTARDLLYYAVTQDAMLIFENLSRGFGRQGKRTFMAERQYTRMEDWLTAKLAYEGLPSKTYLSKTLAQYTSKTCSNCGFTITSADYDRVLEKLKKTATGWMTTINGKELKVEGQITYYNRYKRQNVVKDLSVELDRLSEESVNNDISSWTKGRSGEALSLLKKRFSHRPVQEKFVCLNCGFETHADEQAALNIARSWLFLRSQEYKKYQTNKTTGNTDKRAFVETWQSFYRKKLKEVWKPAV

SEQ ID NO: 45378 - protein, 979 aa, synthetic construct
  REGION 1..979: note = engineered CasX variant
QEIKRINKIRRRLVKDSNTKKAGKTGPMKTLLVRVMTPDLRERLENLRKKPENIPQPISNTSRANLNKLLTDYTEMKKAILHVYWEEFQKDPVGLMSRVAQPASKKIDQNKLKPEMDEKGNLTTAGFACSQCGQPLFVYKLEQVSEKGKAYTNYFGRCNVAEHEKLIQLAQLKPEKDSDEAVTYSLGKFGQRALDFYSIHVTKESTHPVKPLAQIAGNRYASSPVGKALSDACMGTIASFLSKYQDIIIEHQKVVKGNQKRLESLRELAGKENLEYPSVTLPPQPHTKEGVDAYNEVIARVRMWVNLNLWQKLKLSRDDAKPLLRLKGFPSFPLVERQANEVDWWDMVCNVKKLINEKKEDGKVFWQNLAGYKRQEALRPYLSSEEDRKKGKKFARYQLGDLLLHLEKKHGEDWGKVYDEAWERIDKKVEGLSKHIKLEEERRSEDAQSKAALTDWLRAKASFVIEGLKEADKDEFCRCELKLQKWYGDLRGKPFAIEAENSILDISGFSKQYNCAFIWQKDGVKKLNLYLIINYFKGGKLRFKKIKPEAFEANRFYTVINKKSGEIVPMEVNFNFDDPNLIILPLAFGKRQGREFIWNDLLSLETGSLKLANGRVIEKTLYNRRTRQDEPALFVALTFERREVLDSSNIKTPMNLIGVDRGENIPAVIALTDPEGCPLSRFKDSLGNPTHILRIGESYKEKQRTIQAKKEVEQRRAGGYSRKYASKAKNLADDMVRNTARDLLYYAVTQDAMLIFENLSRGFGRQGKRTFMAERQYTRMEDWLTAKLAYEGLPSKTYLSKTLAQYTSKTCSNCGFTITSADYDRVLEKLKKTATGWMTTINGKELKVEGQITYYNRYKRQNVVKDLSVELDRLSEESVNNDISSWTKGRSGEALSLLKKRFSHRPVQEKFVCLNCGFETHADEQAALNIARSWLFLRSQEYKKYQTNKTTGNTDKRAFVETWQSFYRKKLKEVWKPAV

SEQ ID NO: 45379 - protein, 979 aa, synthetic construct
  REGION 1..979: note = engineered CasX variant
QEIKRINKIRRRLVKDSNTKKAGKTGPMKTLLVRVMTPDLRERLENLRKKPENIPQPISNTSRANLNKLLTDYTEMKKAILHVYWEEFQKDPVGLMSRVAQPASKKIDQNKLKPEMDEKGNLTTAGFACSQCGQPLFVYKLEQVSEKGKAYTNYFGRCNVAEHEKLIQLAQLKPEKDSDEAVTYSLGKFGQRALDFYSIHVTKESTHPVKPLAQIAGNRYASTPVGKALSDACMGTIASFLSKYQDIIIEHQKVVKGNQKRLESLRELAGKENLEYPSVTLPPQPHTKEGVDAYNEVIARVRMWVNLNLWQKLKLSRDDAKPLLRLKGFPSFPLVERQANEVDWWDMVCNVKKLINEKKEDGKVFWQNLAGYKRQEALRPYLSSEEDRKKGKKFARYQLGDLLLHLEKKHGEDWGKVYDEAWERIDKKVEGLSKHIKLEEERRSEDAQSKAALTDWLRAKASFVIEGLKEADKDEFCRCELKLQKWYGDLRGKPFAIEAENSILDISGFSKQYNCAFIWQKDGVKKLNLYLIINYFKGGKLRFKKIKPEAFEANRFYTVINKKSGEIVPMEVNFNFDDPNLIILPLAFGKRQGREFIWNDLLSLETGSLKLANGRVIEKTLYNRRTRQDEPALFVALTFERREVLDSSNIKTPMNLIGVDRGENIPAVIALTDPEGCPLSRFKDSLGNPTHILRIGESYKEKQRTIQAKKEVEQRRAGGYSRKYASKAKNLADDMVRNTARDLLYYAVTQDAMLIFENLSRGFGRQGKRTFMAERQYTRMEDWLTAKLAYEGLPSKTYLSKTLAQYTSKTCSNCGFTITSADYDRVLEKLKKTATGWMTTINGKELKVEGQITYYNRYKRQNVVKDLSVELDRLSEESVNNDISSWTKGRSGEALSLLKKRFSHRPVQEKFVCLNCGFETHADEQAALNIARSWLFLRSQEYKKYQTNKTTGNTDKRAFVETWQSFYRKKLKEVWKPAV

SEQ ID NO: 45380 - protein, 979 aa, synthetic construct
  REGION 1..979: note = engineered CasX variant
QEIKRINKIRRRLVKDSNTKKAGKTGPMKTLLVRVMTPDLRERLENLRKKPENIPQPISNTSRANLNKLLTDYTEMKKAILHVYWEEFQKDPVGLMSRVAQPASKKIDQNKLKPEMDEKGNLTTAGFACSQCGQPLFVYKLEQVSEKGKAYTNYFGRCNVAEHEKLIQLAQLKPEKDSDEAVTYSLGKFGQRALDFYSIHVTKESTHPVKPLAQIAGNRYASAPVGKALSDACMGTIASFLSKYQDIIIEHQKVVKGNQKRLESLRELAGKENLEYPSVTLPPQPHTKEGVDAYNEVIARVRMWVNLNLWQKLKLSRDDAKPLLRLKGFPSFPLVERQANEVDWWDMVCNVKKLINEKKEDGKVFWQNLAGYKRQEALRPYLSSEEDRKKGKKFARYQLGDLLLHLEKKHGEDWGKVYDEAWERIDKKVEGLSKHIKLEEERRSEDAQSKAALTDWLRAKASFVIEGLKEADKDEFCRCELKLQKWYGDLRGKPFAIEAENSILDISGFSKQYNCAFIWQKDGVKKLNLYLIINYFKGGKLRFKKIKPEAFEANRFYTVINKKSGEIVPMEVNFNFDDPNLIILPLAFGKRQGREFIWNDLLSLETGSLKLANGRVIEKTLYNRRTRQDEPALFVALTFERREVLDSSNIKTPMNLIGVDRGENIPAVIALTDPEGCPLSRFKDSLGNPTHILRIGESYKEKQRTIQAKKEVEQRRAGGYSRKYASKAKNLADDMVRNTARDLLYYAVTQDAMLIFENLSRGFGRQGKRTFMAERQYTRMEDWLTAKLAYEGLPSKTYLSKTLAQYTSKTCSNCGFTITSADYDRVLEKLKKTATGWMTTINGKELKVEGQITYYNRYKRQNVVKDLSVELDRLSEESVNNDISSWTKGRSGEALSLLKKRFSHRPVQEKFVCLNCGFETHADEQAALNIARSWLFLRSQEYKKYQTNKTTGNTDKRAFVETWQSFYRKKLKEVWKPAV

SEQ ID NO: 45381 - protein, 979 aa, synthetic construct
  REGION 1..979: note = engineered CasX variant
QEIKRINKIRRRLVKDSNTKKAGKTGPMKTLLVRVMTPDLRERLENLRKKPENIPQPISNTSRANLNKLLTDYTEMKKAILHVYWEEFQKDPVGLMSRVAQPASKKIDQNKLKPEMDEKGNLTTAGFACSQCGQPLFVYKLEQVSEKGKAYTNYFGRCNVAEHEKLIQLAQLKPEKDSDEAVTYSLGKFGQRALDFYSIHVTKESTHPVKPLAQIAGNRYASVPVGKALSDACMGTIASFLSKYQDIIIEHQKVVKGNQKRLESLRELAGKENLEYPSVTLPPQPHTKEGVDAYNEVIARVRMWVNLNLWQKLKLSRDDAKPLLRLKGFPSFPLVERQANEVDWWDMVCNVKKLINEKKEDGKVFWQNLAGYKRQEALRPYLSSEEDRKKGKKFARYQLGDLLLHLEKKHGEDWGKVYDEAWERIDKKVEGLSKHIKLEEERRSEDAQSKAALTDWLRAKASFVIEGLKEADKDEFCRCELKLQKWYGDLRGKPFAIEAENSILDISGFSKQYNCAFIWQKDGVKKLNLYLIINYFKGGKLRFKKIKPEAFEANRFYTVINKKSGEIVPMEVNFNFDDPNLIILPLAFGKRQGREFIWNDLLSLETGSLKLANGRVIEKTLYNRRTRQDEPALFVALTFERREVLDSSNIKTPMNLIGVDRGENIPAVIALTDPEGCPLSRFKDSLGNPTHILRIGESYKEKQRTIQAKKEVEQRRAGGYSRKYASKAKNLADDMVRNTARDLLYYAVTQDAMLIFENLSRGFGRQGKRTFMAERQYTRMEDWLTAKLAYEGLPSKTYLSKTLAQYTSKTCSNCGFTITSADYDRVLEKLKKTATGWMTTINGKELKVEGQITYYNRYKRQNVVKDLSVELDRLSEESVNNDISSWTKGRSGEALSLLKKRFSHRPVQEKFVCLNCGFETHADEQAALNIARSWLFLRSQEYKKYQTNKTTGNTDKRAFVETWQSFYRKKLKEVWKPAV

SEQ ID NO: 45382 - protein, 980 aa, synthetic construct
  REGION 1..980: note = engineered CasX variant
QEIKRINKIRRRLVKDSNTKKAGKTGPMKTLLVRVMTPDLRERLENLRKKPENIPQPISNTSRANLNKLLTDYTEMKKAILHVYWEEFQKDPVGLMSRVAQPASKKIDQNKLKPEMDEKGNLTTAGFACSQCGQPLFVYKLEQVSEKGKAYTNYFGRCNVAEHEKLIQKLAQLKPEKDSDEAVTYSLGKFGQRALDFYSIHVTKESTHPVKPLAQIAGNRYASGPVGKALSDACMGTIASFLSKYQDIIIEHQKVVKGNQKRLESLRELAGKENLEYPSVTLPPQPHTKEGVDAYNEVIARVRMWVNLNLWQKLKLSRDDAKPLLRLKGFPSFPLVERQANEVDWWDMVCNVKKLINEKKEDGKVFWQNLAGYKRQEALRPYLSSEEDRKKGKKFARYQLGDLLLHLEKKHGEDWGKVYDEAWERIDKKVEGLSKHIKLEEERRSEDAQSKAALTDWLRAKASFVIEGLKEADKDEFCRCELKLQKWYGDLRGKPFAIEAENSILDISGFSKQYNCAFIWQKDGVKKLNLYLIINYFKGGKLRFKKIKPEAFEANRFYTVINKKSGEIVPMEVNFNFDDPNLIILPLAFGKRQGREFIWNDLLSLETGSLKLANGRVIEKTLYNRRTRQDEPALFVALTFERREVLDSSNIKTPMNLIGVDRGENIPAVIALTDPEGCPLSRFKDSLGNPTHILRIGESYKEKQRTIQAKKEVEQRRAGGYSRKYASKAKNLADDMVRNTARDLLYYAVTQDAMLIFENLSRGFGRQGKRTFMAERQYTRMEDWLTAKLAYEGLPSKTYLSKTLAQYTSKTCSNCGFTITSADYDRVLEKLKKTATGWMTTINGKELKVEGQITYYNRYKRQNVVKDLSVELDRLSEESVNNDISSWTKGRSGEALSLLKKRFSHRPVQEKFVCLNCGFETHADEQAALNIARSWLFLRSQEYKKYQTNKTTGNTDKRAFVETWQSFYRKKLKEVWKPAV

SEQ ID NO: 45383 - protein, 978 aa, synthetic construct
  REGION 1..978: note = engineered CasX variant
QEIKRINKIRRRLVKDSNTKKAGKTGPMKTLLVRVMTPDLRERLENLRKKPENIPQPISNTSRANLNKLLTDYTEMKKAILHVYWEEFQKDPVGLMSRVAQPASKKIDQNKLKPEMDEKGNLTTAGFACSQCGQPLFVYKLEQVSEKGKAYTNYFGRCNVAEHEKLIQLAQLKPEKDSDEAVTYSLGKFGQRALDFYSIHVTKESTHPVKPLAQIAGNRYASPVGKALSDACMGTIASFLSKYQDIIIEHQKVVKGNQKRLESLRELAGKENLEYPSVTLPPQPHTKEGVDAYNEVIARVRMWVNLNLWQKLKLSRDDAKPLLRLKGFPSFPLVERQANEVDWWDMVCNVKKLINEKKEDGKVFWQNLAGYKRQEALRPYLSSEEDRKKGKKFARYQLGDLLLHLEKKHGEDWGKVYDEAWERIDKKVEGLSKHIKLEEERRSEDAQSKAALTDWLRAKASFVIEGLKEADKDEFCRCELKLQKWYGDLRGKPFAIEAENSILDISGFSKQYNCAFIWQKDGVKKLNLYLIINYFKGGKLRFKKIKPEAFEANRFYTVINKKSGEIVPMEVNFNFDDPNLIILPLAFGKRQGREFIWNDLLSLETGSLKLANGRVIEKTLYNRRTRQDEPALFVALTFERREVLDSSNIKTPMNLIGVDRGENIPAVIALTDPEGCPLSRFKDSLGNPTHILRIGESYKEKQRTIQAKKEVEQRRAGGYSRKYASKAKNLADDMVRNTARDLLYYAVTQDAMLIFENLSRGFGRQGKRTFMAERQYTRMEDWLTAKLAYEGLPSKTYLSKTLAQYTSKTCSNCGFTITSADYDRVLEKLKKTATGWMTTINGKELKVEGQITYYNRYKRQNVVKDLSVELDRLSEESVNNDISSWTKGRSGEALSLLKKRFSHRPVQEKFVCLNCGFETHADEQAALNIARSWLFLRSQEYKKYQTNKTTGNTDKRAFVETWQSFYRKKLKEVWKPAV

SEQ ID NO: 45384 - protein, 979 aa, synthetic construct
  REGION 1..979: note = engineered CasX variant
QEIKRINKIRRRLVKDSNTKKAGKTGPMKTLLVRVMTPDLRERLENLRKKPENIPQPISNTSRANLNKLLTDYTEMKKAILHVYWEEFQKDPVGLMSRVAQPASKKIDQNKLKPEMDEKGNLTTAGFACSQCGQPLFVYKLEQVSEKGKAYTNYFGRCNVAEHEKLILLAQLKPEKDSDEAVTYSLGKFGQRALDFYSIHVTKESTHPVKPLAQIAGNRYASYPVGKALSDACMGTIASFLSKYQDIIIEHQKVVKGNQKRLESLRELAGKENLEYPSVTLPPQPHTKEGVDAYNEVIARVRMWVNLNLWQKLKLSRDDAKPLLRLKGFPSFPLVERQANEVDWWDMVCNVKKLINEKKEDGKVFWQNLAIYKRQEALRPYLSSEEDRKKGKKFARYQLGDLLLHLEKKHGEDWGKVYDEAWERIDKKVEGLSKHIKLEEERRSEDAQSKAALTDWLRAKASFVIEGLKEADKDEFCRCELKLQKWYGDLRGKPFAIEAENSILDISGFSKQYNCAFIWQKDGVKKLNLYLIINYFKGGKLRFKKIKPEAFEANRFYTVINKKSGEIVPMEVNFNFDDPNLIILPLAFGKRQGREFIWNDLLSLETGSLKLANGRVIEKTLYNRRTRQDEPALFVALTFERREVLDSSNIKTPMNLIGVDRGENIPAVIALTDPEGCPLSRFKDSLGNPTHILRIGESYKEKQRTIQAKKEVEQRRAGGYSRKYASKAKNLADDMVRNTARDLLYYAVTQDAMLIFENLSRGFGRQGKRTFMAERQYTRMEDWLTAKLAYEGLPSKTYLSKTLAQYTSKTCSNCGFTITSADYDRVLEKLKKTATGWMTTINGKELKVEGQITYYNRYKRQNVVKDLSVELDRLSEESVNNDISSWTKGRSGEALSLLKKRFSHRPVQEKFVCLNCGFETHADEQAALNIARSWLFLRSQEYKKYQTNKTTGNTDKRAFVETWQSFYRKKLKEVWKPAV

SEQ ID NO: 45385 - protein, 979 aa, synthetic construct
  REGION 1..979: note = engineered CasX variant
QEIKRINKIRRRLVKDSNTKKAGKTGPMKTLLVRVMTPDLRERLENLRKKPENIPQPISNTSRANLNKLLTDYTEMKKAILHVYWEEFQKDPVGLMSRVAQPASKKIDQNKLKPEMDEKGNLTTAGFACSQCGQPLFVYKLEQVSEKGKAYTNYFGRCNVAEHEKLILLAQLKPEKDSDEAVTYSLGKFGQRALDFYSIHVTKESTHPVKPLAQIAGNRYASHPVGKALSDACMGTIASFLSKYQDIIIEHQKVVKGNQKRLESLRELAGKENLEYPSVTLPPQPHTKEGVDAYNEVIARVRMWVNLNLWQKLKLSRDDAKPLLRLKGFPSFPLVERQANEVDWWDMVCNVKKLINEKKEDGKVFWQNLAIYKRQEALRPYLSSEEDRKKGKKFARYQLGDLLLHLEKKHGEDWGKVYDEAWERIDKKVEGLSKHIKLEEERRSEDAQSKAALTDWLRAKASFVIEGLKEADKDEFCRCELKLQKWYGDLRGKPFAIEAENSILDISGFSKQYNCAFIWQKDGVKKLNLYLIINYFKGGKLRFKKIKPEAFEANRFYTVINKKSGEIVPMEVNFNFDDPNLIILPLAFGKRQGREFIWNDLLSLETGSLKLANGRVIEKTLYNRRTRQDEPALFVALTFERREVLDSSNIKTPMNLIGVDRGENIPAVIALTDPEGCPLSRFKDSLGNPTHILRIGESYKEKQRTIQAKKEVEQRRAGGYSRKYASKAKNLADDMVRNTARDLLYYAVTQDAMLIFENLSRGFGRQGKRTFMAERQYTRMEDWLTAKLAYEGLPSKTYLSKTLAQYTSKTCSNCGFTITSADYDRVLEKLKKTATGWMTTINGKELKVEGQITYYNRYKRQNVVKDLSVELDRLSEESVNNDISSWTKGRSGEALSLLKKRFSHRPVQEKFVCLNCGFETHADEQAALNIARSWLFLRSQEYKKYQTNKTTGNTDKRAFVETWQSFYRKKLKEVWKPAV

SEQ ID NO: 45386 - protein, 979 aa, synthetic construct
  REGION 1..979: note = engineered CasX variant
QEIKRINKIRRRLVKDSNTKKAGKTGPMKTLLVRVMTPDLRERLENLRKKPENIPQPISNTSRANLNKLLTDYTEMKKAILHVYWEEFQKDPVGLMSRVAQPASKKIDQNKLKPEMDEKGNLTTAGFACSQCGQPLFVYKLEQVSEKGKAYTNYFGRCNVAEHEKLILLAQLKPEKDSDEAVTYSLGKFGQRALDFYSIHVTKESTHPVKPLAQIAGNRYASSPVGKALSDACMGTIASFLSKYQDIIIEHQKVVKGNQKRLESLRELAGKENLEYPSVTLPPQPHTKEGVDAYNEVIARVRMWVNLNLWQKLKLSRDDAKPLLRLKGFPSFPLVERQANEVDWWDMVCNVKKLINEKKEDGKVFWQNLAIYKRQEALRPYLSSEEDRKKGKKFARYQLGDLLLHLEKKHGEDWGKVYDEAWERIDKKVEGLSKHIKLEEERRSEDAQSKAALTDWLRAKASFVIEGLKEADKDEFCRCELKLQKWYGDLRGKPFAIEAENSILDISGFSKQYNCAFIWQKDGVKKLNLYLIINYFKGGKLRFKKIKPEAFEANRFYTVINKKSGEIVPMEVNFNFDDPNLIILPLAFGKRQGREFIWNDLLSLETGSLKLANGRVIEKTLYNRRTRQDEPALFVALTFERREVLDSSNIKTPMNLIGVDRGENIPAVIALTDPEGCPLSRFKDSLGNPTHILRIGESYKEKQRTIQAKKEVEQRRAGGYSRKYASKAKNLADDMVRNTARDLLYYAVTQDAMLIFENLSRGFGRQGKRTFMAERQYTRMEDWLTAKLAYEGLPSKTYLSKTLAQYTSKTCSNCGFTITSADYDRVLEKLKKTATGWMTTINGKELKVEGQITYYNRYKRQNVVKDLSVELDRLSEESVNNDISSWTKGRSGEALSLLKKRFSHRPVQEKFVCLNCGFETHADEQAALNIARSWLFLRSQEYKKYQTNKTTGNTDKRAFVETWQSFYRKKLKEVWKPAV

SEQ ID NO: 45387 - protein, 979 aa, synthetic construct
  REGION 1..979: note = engineered CasX variant
QEIKRINKIRRRLVKDSNTKKAGKTGPMKTLLVRVMTPDLRERLENLRKKPENIPQPISNTSRANLNKLLTDYTEMKKAILHVYWEEFQKDPVGLMSRVAQPASKKIDQNKLKPEMDEKGNLTTAGFACSQCGQPLFVYKLEQVSEKGKAYTNYFGRCNVAEHEKLILLAQLKPEKDSDEAVTYSLGKFGQRALDFYSIHVTKESTHPVKPLAQIAGNRYASTPVGKALSDACMGTIASFLSKYQDIIIEHQKVVKGNQKRLESLRELAGKENLEYPSVTLPPQPHTKEGVDAYNEVIARVRMWVNLNLWQKLKLSRDDAKPLLRLKGFPSFPLVERQANEVDWWDMVCNVKKLINEKKEDGKVFWQNLAIYKRQEALRPYLSSEEDRKKGKKFARYQLGDLLLHLEKKHGEDWGKVYDEAWERIDKKVEGLSKHIKLEEERRSEDAQSKAALTDWLRAKASFVIEGLKEADKDEFCRCELKLQKWYGDLRGKPFAIEAENSILDISGFSKQYNCAFIWQKDGVKKLNLYLIINYFKGGKLRFKKIKPEAFEANRFYTVINKKSGEIVPMEVNFNFDDPNLIILPLAFGKRQGREFIWNDLLSLETGSLKLANGRVIEKTLYNRRTRQDEPALFVALTFERREVLDSSNIKTPMNLIGVDRGENIPAVIALTDPEGCPLSRFKDSLGNPTHILRIGESYKEKQRTIQAKKEVEQRRAGGYSRKYASKAKNLADDMVRNTARDLLYYAVTQDAMLIFENLSRGFGRQGKRTFMAERQYTRMEDWLTAKLAYEGLPSKTYLSKTLAQYTSKTCSNCGFTITSADYDRVLEKLKKTATGWMTTINGKELKVEGQITYYNRYKRQNVVKDLSVELDRLSEESVNNDISSWTKGRSGEALSLLKKRFSHRPVQEKFVCLNCGFETHADEQAALNIARSWLFLRSQEYKKYQTNKTTGNTDKRAFVETWQSFYRKKLKEVWKPAV

SEQ ID NO: 45388 - protein, 979 aa, synthetic construct
  REGION 1..979: note = engineered CasX variant
QEIKRINKIRRRLVKDSNTKKAGKTGPMKTLLVRVMTPDLRERLENLRKKPENIPQPISNTSRANLNKLLTDYTEMKKAILHVYWEEFQKDPVGLMSRVAQPASKKIDQNKLKPEMDEKGNLTTAGFACSQCGQPLFVYKLEQVSEKGKAYTNYFGRCNVAEHEKLILLAQLKPEKDSDEAVTYSLGKFGQRALDFYSIHVTKESTHPVKPLAQIAGNRYASAPVGKALSDACMGTIASFLSKYQDIIIEHQKVVKGNQKRLESLRELAGKENLEYPSVTLPPQPHTKEGVDAYNEVIARVRMWVNLNLWQKLKLSRDDAKPLLRLKGFPSFPLVERQANEVDWWDMVCNVKKLINEKKEDGKVFWQNLAIYKRQEALRPYLSSEEDRKKGKKFARYQLGDLLLHLEKKHGEDWGKVYDEAWERIDKKVEGLSKHIKLEEERRSEDAQSKAALTDWLRAKASFVIEGLKEADKDEFCRCELKLQKWYGDLRGKPFAIEAENSILDISGFSKQYNCAFIWQKDGVKKLNLYLIINYFKGGKLRFKKIKPEAFEANRFYTVINKKSGEIVPMEVNFNFDDPNLIILPLAFGKRQGREFIWNDLLSLETGSLKLANGRVIEKTLYNRRTRQDEPALFVALTFERREVLDSSNIKTPMNLIGVDRGENIPAVIALTDPEGCPLSRFKDSLGNPTHILRIGESYKEKQRTIQAKKEVEQRRAGGYSRKYASKAKNLADDMVRNTARDLLYYAVTQDAMLIFENLSRGFGRQGKRTFMAERQYTRMEDWLTAKLAYEGLPSKTYLSKTLAQYTSKTCSNCGFTITSADYDRVLEKLKKTATGWMTTINGKELKVEGQITYYNRYKRQNVVKDLSVELDRLSEESVNNDISSWTKGRSGEALSLLKKRFSHRPVQEKFVCLNCGFETHADEQAALNIARSWLFLRSQEYKKYQTNKTTGNTDKRAFVETWQSFYRKKLKEVWKPAV

SEQ ID NO: 45389 - protein, 979 aa, synthetic construct
  REGION 1..979: note = engineered CasX variant
QEIKRINKIRRRLVKDSNTKKAGKTGPMKTLLVRVMTPDLRERLENLRKKPENIPQPISNTSRANLNKLLTDYTEMKKAILHVYWEEFQKDPVGLMSRVAQPASKKIDQNKLKPEMDEKGNLTTAGFACSQCGQPLFVYKLEQVSEKGKAYTNYFGRCNVAEHEKLILLAQLKPEKDSDEAVTYSLGKFGQRALDFYSIHVTKESTHPVKPLAQIAGNRYASVPVGKALSDACMGTIASFLSKYQDIIIEHQKVVKGNQKRLESLRELAGKENLEYPSVTLPPQPHTKEGVDAYNEVIARVRMWVNLNLWQKLKLSRDDAKPLLRLKGFPSFPLVERQANEVDWWDMVCNVKKLINEKKEDGKVFWQNLAIYKRQEALRPYLSSEEDRKKGKKFARYQLGDLLLHLEKKHGEDWGKVYDEAWERIDKKVEGLSKHIKLEEERRSEDAQSKAALTDWLRAKASFVIEGLKEADKDEFCRCELKLQKWYGDLRGKPFAIEAENSILDISGFSKQYNCAFIWQKDGVKKLNLYLIINYFKGGKLRFKKIKPEAFEANRFYTVINKKSGEIVPMEVNFNFDDPNLIILPLAFGKRQGREFIWNDLLSLETGSLKLANGRVIEKTLYNRRTRQDEPALFVALTFERREVLDSSNIKTPMNLIGVDRGENIPAVIALTDPEGCPLSRFKDSLGNPTHILRIGESYKEKQRTIQAKKEVEQRRAGGYSRKYASKAKNLADDMVRNTARDLLYYAVTQDAMLIFENLSRGFGRQGKRTFMAERQYTRMEDWLTAKLAYEGLPSKTYLSKTLAQYTSKTCSNCGFTITSADYDRVLEKLKKTATGWMTTINGKELKVEGQITYYNRYKRQNVVKDLSVELDRLSEESVNNDISSWTKGRSGEALSLLKKRFSHRPVQEKFVCLNCGFETHADEQAALNIARSWLFLRSQEYKKYQTNKTTGNTDKRAFVETWQSFYRKKLKEVWKPAV

SEQ ID NO: 45390 - protein, 979 aa, synthetic construct
  REGION 1..979: note = engineered CasX variant
QEIKRINKIRRRLVKDSNTKKAGKTGPMKTLLVRVMTPDLRERLENLRKKPENIPQPISNTSRANLNKLLTDYTEMKKAILHVYWEEFQKDPVGLMSRVAQPASKKIDQNKLKPEMDEKGNLTTAGFACSQCGQPLFVYKLEQVSEKGKAYTNYFGRCNVAEHEKLIKLAQLKPEKDSDEAVTYSLGKFGQRALDFYSIHVTKESTHPVKPLAQIAGNRYASGPVGKALSDACMGTIASFLSKYQDIIIEHQKVVKGNQKRLESLRELAGKENLEYPSVTLPPQPHTKEGVDAYNEVIARVRMWVNLNLWQKLKLSRDDAKPLLRLKGFPSFPLVERQANEVDWWDMVCNVKKLINEKKEDGKVFWQNLAIYKRQEALRPYLSSEEDRKKGKKFARYQLGDLLLHLEKKHGEDWGKVYDEAWERIDKKVEGLSKHIKLEEERRSEDAQSKAALTDWLRAKASFVIEGLKEADKDEFCRCELKLQKWYGDLRGKPFAIEAENSILDISGFSKQYNCAFIWQKDGVKKLNLYLIINYFKGGKLRFKKIKPEAFEANRFYTVINKKSGEIVPMEVNFNFDDPNLIILPLAFGKRQGREFIWNDLLSLETGSLKLANGRVIEKTLYNRRTRQDEPALFVALTFERREVLDSSNIKTPMNLIGVDRGENIPAVIALTDPEGCPLSRFKDSLGNPTHILRIGESYKEKQRTIQAKKEVEQRRAGGYSRKYASKAKNLADDMVRNTARDLLYYAVTQDAMLIFENLSRGFGRQGKRTFMAERQYTRMEDWLTAKLAYEGLPSKTYLSKTLAQYTSKTCSNCGFTITSADYDRVLEKLKKTATGWMTTINGKELKVEGQITYYNRYKRQNVVKDLSVELDRLSEESVNNDISSWTKGRSGEALSLLKKRFSHRPVQEKFVCLNCGFETHADEQAALNIARSWLFLRSQEYKKYQTNKTTGNTDKRAFVETWQSFYRKKLKEVWKPAV

SEQ ID NO: 45391 - protein, 978 aa, synthetic construct
  REGION 1..978: note = engineered CasX variant
QEIKRINKIRRRLVKDSNTKKAGKTGPMKTLLVRVMTPDLRERLENLRKKPENIPQPISNTSRANLNKLLTDYTEMKKAILHVYWEEFQKDPVGLMSRVAQPASKKIDQNKLKPEMDEKGNLTTAGFACSQCGQPLFVYKLEQVSEKGKAYTNYFGRCNVAEHEKLILLAQLKPEKDSDEAVTYSLGKFGQRALDFYSIHVTKESTHPVKPLAQIAGNRYASPVGKALSDACMGTIASFLSKYQDIIIEHQKVVKGNQKRLESLRELAGKENLEYPSVTLPPQPHTKEGVDAYNEVIARVRMWVNLNLWQKLKLSRDDAKPLLRLKGFPSFPLVERQANEVDWWDMVCNVKKLINEKKEDGKVFWQNLAIYKRQEALRPYLSSEEDRKKGKKFARYQLGDLLLHLEKKHGEDWGKVYDEAWERIDKKVEGLSKHIKLEEERRSEDAQSKAALTDWLRAKASFVIEGLKEADKDEFCRCELKLQKWYGDLRGKPFAIEAENSILDISGFSKQYNCAFIWQKDGVKKLNLYLIINYFKGGKLRFKKIKPEAFEANRFYTVINKKSGEIVPMEVNFNFDDPNLIILPLAFGKRQGREFIWNDLLSLETGSLKLANGRVIEKTLYNRRTRQDEPALFVALTFERREVLDSSNIKTPMNLIGVDRGENIPAVIALTDPEGCPLSRFKDSLGNPTHILRIGESYKEKQRTIQAKKEVEQRRAGGYSRKYASKAKNLADDMVRNTARDLLYYAVTQDAMLIFENLSRGFGRQGKRTFMAERQYTRMEDWLTAKLAYEGLPSKTYLSKTLAQYTSKTCSNCGFTITSADYDRVLEKLKKTATGWMTTINGKELKVEGQITYYNRYKRQNVVKDLSVELDRLSEESVNNDISSWTKGRSGEALSLLKKRFSHRPVQEKFVCLNCGFETHADEQAALNIARSWLFLRSQEYKKYQTNKTTGNTDKRAFVETWQSFYRKKLKEVWKPAV

SEQ ID NO: 45392 - protein, 979 aa, synthetic construct
  REGION 1..979: note = engineered CasX variant
QEIKRINKIRRRLVKDSNTKKAGKTGPMKTLLVRVMTPDLRERLENLRKKPENIPQPISNTSRANLNKLLTDYTEMKKAILHVYWEEFQKDPVGLMSRVAQPASKKIDQNKLKPEMDEKGNLTTAGFACSQCGQPLFVYKLEQVSEKGKAYTNYFGRCNVAEHEKLILLAQLKPEKDSDEAVTYSLGKFGQRALDFYSIHVTKESTHPVKPLAQIAGNRYASYPVGKALSDACMGTIASFLSKYQDIIIEHQKVVKGNQKRLESLRELAGKENLEYPSVTLPPQPHTKEGVDAYNEVIARVRMWVNLNLWQKLKLSRDDAKPLLRLKGFPSFPLVERQANEVDWWDMVCNVKKLINEKKEDGKVFWQNLAGYKRQEALRPYLSSEEDREKGKKFARYQLGDLLLHLEKKHGEDWGKVYDEAWERIDKKVEGLSKHIKLEEERRSEDAQSKAALTDWLRAKASFVIEGLKEADKDEFCRCELKLQKWYGDLRGKPFAIEAENSILDISGFSKQYNCAFIWQKDGVKKLNLYLIINYFKGGKLRFKKIKPEAFEANRFYTVINKKSGEIVPMEVNFNFDDPNLIILPLAFGKRQGREFIWNDLLSLETGSLKLANGRVIEKTLYNRRTRQDEPALFVALTFERREVLDSSNIKTPMNLIGVDRGENIPAVIALTDPEGCPLSRFKDSLGNPTHILRIGESYKEKQRTIQAKKEVEQRRAGGYSRKYASKAKNLADDMVRNTARDLLYYAVTQDAMLIFENLSRGFGRQGKRTFMAERQYTRMEDWLTAKLAYEGLPSKTYLSKTLAQYTSKTCSNCGFTITSADYDRVLEKLKKTATGWMTTINGKELKVEGQITYYNRYKRQNVVKDLSVELDRLSEESVNNDISSWTKGRSGEALSLLKKRFSHRPVQEKFVCLNCGFETHADEQAALNIARSWLFLRSQEYKKYQTNKTTGNTDKRAFVETWQSFYRKKLKEVWKPAV

SEQ ID NO: 45393 - protein, 979 aa, synthetic construct
  REGION 1..979: note = engineered CasX variant
QEIKRINKIRRRLVKDSNTKKAGKTGPMKTLLVRVMTPDLRERLENLRKKPENIPQPISNTSRANLNKLLTDYTEMKKAILHVYWEEFQKDPVGLMSRVAQPASKKIDQNKLKPEMDEKGNLTTAGFACSQCGQPLFVYKLEQVSEKGKAYTNYFGRCNVAEHEKLILLAQLKPEKDSDEAVTYSLGKFGQRALDFYSIHVTKESTHPVKPLAQIAGNRYASHPVGKALSDACMGTIASFLSKYQDIIIEHQKVVKGNQKRLESLRELAGKENLEYPSVTLPPQPHTKEGVDAYNEVIARVRMWVNLNLWQKLKLSRDDAKPLLRLKGFPSFPLVERQANEVDWWDMVCNVKKLINEKKEDGKVFWQNLAGYKRQEALRPYLSSEEDREKGKKFARYQLGDLLLHLEKKHGEDWGKVYDEAWERIDKKVEGLSKHIKLEEERRSEDAQSKAALTDWLRAKASFVIEGLKEADKDEFCRCELKLQKWYGDLRGKPFAIEAENSILDISGFSKQYNCAFIWQKDGVKKLNLYLIINYFKGGKLRFKKIKPEAFEANRFYTVINKKSGEIVPMEVNFNFDDPNLIILPLAFGKRQGREFIWNDLLSLETGSLKLANGRVIEKTLYNRRTRQDEPALFVALTFERREVLDSSNIKTPMNLIGVDRGENIPAVIALTDPEGCPLSRFKDSLGNPTHILRIGESYKEKQRTIQAKKEVEQRRAGGYSRKYASKAKNLADDMVRNTARDLLYYAVTQDAMLIFENLSRGFGRQGKRTFMAERQYTRMEDWLTAKLAYEGLPSKTYLSKTLAQYTSKTCSNCGFTITSADYDRVLEKLKKTATGWMTTINGKELKVEGQITYYNRYKRQNVVKDLSVELDRLSEESVNNDISSWTKGRSGEALSLLKKRFSHRPVQEKFVCLNCGFETHADEQAALNIARSWLFLRSQEYKKYQTNKTTGNTDKRAFVETWQSFYRKKLKEVWKPAV

SEQ ID NO: 45394 - protein, 979 aa, synthetic construct
  REGION 1..979: note = engineered CasX variant
QEIKRINKIRRRLVKDSNTKKAGKTGPMKTLLVRVMTPDLRERLENLRKKPENIPQPISNTSRANLNKLLTDYTEMKKAILHVYWEEFQKDPVGLMSRVAQPASKKIDQNKLKPEMDEKGNLTTAGFACSQCGQPLFVYKLEQVSEKGKAYTNYFGRCNVAEHEKLILLAQLKPEKDSDEAVTYSLGKFGQRALDFYSIHVTKESTHPVKPLAQIAGNRYASSPVGKALSDACMGTIASFLSKYQDIIIEHQKVVKGNQKRLESLRELAGKENLEYPSVTLPPQPHTKEGVDAYNEVIARVRMWVNLNLWQKLKLSRDDAKPLLRLKGFPSFPLVERQANEVDWWDMVCNVKKLINEKKEDGKVFWQNLAGYKRQEALRPYLSSEEDREKGKKFARYQLGDLLLHLEKKHGEDWGKVYDEAWERIDKKVEGLSKHIKLEEERRSEDAQSKAALTDWLRAKASFVIEGLKEADKDEFCRCELKLQKWYGDLRGKPFAIEAENSILDISGFSKQYNCAFIWQKDGVKKLNLYLIINYFKGGKLRFKKIKPEAFEANRFYTVINKKSGEIVPMEVNFNFDDPNLIILPLAFGKRQGREFIWNDLLSLETGSLKLANGRVIEKTLYNRRTRQDEPALFVALTFERREVLDSSNIKTPMNLIGVDRGENIPAVIALTDPEGCPLSRFKDSLGNPTHILRIGESYKEKQRTIQAKKEVEQRRAGGYSRKYASKAKNLADDMVRNTARDLLYYAVTQDAMLIFENLSRGFGRQGKRTFMAERQYTRMEDWLTAKLAYEGLPSKTYLSKTLAQYTSKTCSNCGFTITSADYDRVLEKLKKTATGWMTTINGKELKVEGQITYYNRYKRQNVVKDLSVELDRLSEESVNNDISSWTKGRSGEALSLLKKRFSHRPVQEKFVCLNCGFETHADEQAALNIARSWLFLRSQEYKKYQTNKTTGNTDKRAFVETWQSFYRKKLKEVWKPAV

SEQ ID NO: 45395 - protein, 979 aa, synthetic construct
  REGION 1..979: note = engineered CasX variant
QEIKRINKIRRRLVKDSNTKKAGKTGPMKTLLVRVMTPDLRERLENLRKKPENIPQPISNTSRANLNKLLTDYTEMKKAILHVYWEEFQKDPVGLMSRVAQPASKKIDQNKLKPEMDEKGNLTTAGFACSQCGQPLFVYKLEQVSEKGKAYTNYFGRCNVAEHEKLILLAQLKPEKDSDEAVTYSLGKFGQRALDFYSIHVTKESTHPVKPLAQIAGNRYASTPVGKALSDACMGTIASFLSKYQDIIIEHQKVVKGNQKRLESLRELAGKENLEYPSVTLPPQPHTKEGVDAYNEVIARVRMWVNLNLWQKLKLSRDDAKPLLRLKGFPSFPLVERQANEVDWWDMVCNVKKLINEKKEDGKVFWQNLAGYKRQEALRPYLSSEEDREKGKKFARYQLGDLLLHLEKKHGEDWGKVYDEAWERIDKKVEGLSKHIKLEEERRSEDAQSKAALTDWLRAKASFVIEGLKEADKDEFCRCELKLQKWYGDLRGKPFAIEAENSILDISGFSKQYNCAFIWQKDGVKKLNLYLIINYFKGGKLRFKKIKPEAFEANRFYTVINKKSGEIVPMEVNFNFDDPNLIILPLAFGKRQGREFIWNDLLSLETGSLKLANGRVIEKTLYNRRTRQDEPALFVALTFERREVLDSSNIKTPMNLIGVDRGENIPAVIALTDPEGCPLSRFKDSLGNPTHILRIGESYKEKQRTIQAKKEVEQRRAGGYSRKYASKAKNLADDMVRNTARDLLYYAVTQDAMLIFENLSRGFGRQGKRTFMAERQYTRMEDWLTAKLAYEGLPSKTYLSKTLAQYTSKTCSNCGFTITSADYDRVLEKLKKTATGWMTTINGKELKVEGQITYYNRYKRQNVVKDLSVELDRLSEESVNNDISSWTKGRSGEALSLLKKRFSHRPVQEKFVCLNCGFETHADEQAALNIARSWLFLRSQEYKKYQTNKTTGNTDKRAFVETWQSFYRKKLKEVWKPAV

SEQ ID NO: 45396 - protein, 979 aa, synthetic construct
  REGION 1..979: note = engineered CasX variant
QEIKRINKIRRRLVKDSNTKKAGKTGPMKTLLVRVMTPDLRERLENLRKKPENIPQPISNTSRANLNKLLTDYTEMKKAILHVYWEEFQKDPVGLMSRVAQPASKKIDQNKLKPEMDEKGNLTTAGFACSQCGQPLFVYKLEQVSEKGKAYTNYFGRCNVAEHEKLILLAQLKPEKDSDEAVTYSLGKFGQRALDFYSIHVTKESTHPVKPLAQIAGNRYASAPVGKALSDACMGTIASFLSKYQDIIIEHQKVVKGNQKRLESLRELAGKENLEYPSVTLPPQPHTKEGVDAYNEVIARVRMWVNLNLWQKLKLSRDDAKPLLRLKGFPSFPLVERQANEVDWWDMVCNVKKLINEKKEDGKVFWQNLAGYKRQEALRPYLSSEEDREKGKKFARYQLGDLLLHLEKKHGEDWGKVYDEAWERIDKKVEGLSKHIKLEEERRSEDAQSKAALTDWLRAKASFVIEGLKEADKDEFCRCELKLQKWYGDLRGKPFAIEAENSILDISGFSKQYNCAFIWQKDGVKKLNLYLIINYFKGGKLRFKKIKPEAFEANRFYTVINKKSGEIVPMEVNFNFDDPNLIILPLAFGKRQGREFIWNDLLSLETGSLKLANGRVIEKTLYNRRTRQDEPALFVALTFERREVLDSSNIKTPMNLIGVDRGENIPAVIALTDPEGCPLSRFKDSLGNPTHILRIGESYKEKQRTIQAKKEVEQRRAGGYSRKYASKAKNLADDMVRNTARDLLYYAVTQDAMLIFENLSRGFGRQGKRTFMAERQYTRMEDWLTAKLAYEGLPSKTYLSKTLAQYTSKTCSNCGFTITSADYDRVLEKLKKTATGWMTTINGKELKVEGQITYYNRYKRQNVVKDLSVELDRLSEESVNNDISSWTKGRSGEALSLLKKRFSHRPVQEKFVCLNCGFETHADEQAALNIARSWLFLRSQEYKKYQTNKTTGNTDKRAFVETWQSFYRKKLKEVWKPAV

SEQ ID NO: 45397 - protein, 979 aa, synthetic construct
  REGION 1..979: note = engineered CasX variant
QEIKRINKIRRRLVKDSNTKKAGKTGPMKTLLVRVMTPDLRERLENLRKKPENIPQPISNTSRANLNKLLTDYTEMKKAILHVYWEEFQKDPVGLMSRVAQPASKKIDQNKLKPEMDEKGNLTTAGFACSQCGQPLFVYKLEQVSEKGKAYTNYFGRCNVAEHEKLILLAQLKPEKDSDEAVTYSLGKFGQRALDFYSIHVTKESTHPVKPLAQIAGNRYASVPVGKALSDACMGTIASFLSKYQDIIIEHQKVVKGNQKRLESLRELAGKENLEYPSVTLPPQPHTKEGVDAYNEVIARVRMWVNLNLWQKLKLSRDDAKPLLRLKGFPSFPLVERQANEVDWWDMVCNVKKLINEKKEDGKVFWQNLAGYKRQEALRPYLSSEEDREKGKKFARYQLGDLLLHLEKKHGEDWGKVYDEAWERIDKKVEGLSKHIKLEEERRSEDAQSKAALTDWLRAKASFVIEGLKEADKDEFCRCELKLQKWYGDLRGKPFAIEAENSILDISGFSKQYNCAFIWQKDGVKKLNLYLIINYFKGGKLRFKKIKPEAFEANRFYTVINKKSGEIVPMEVNFNFDDPNLIILPLAFGKRQGREFIWNDLLSLETGSLKLANGRVIEKTLYNRRTRQDEPALFVALTFERREVLDSSNIKTPMNLIGVDRGENIPAVIALTDPEGCPLSRFKDSLGNPTHILRIGESYKEKQRTIQAKKEVEQRRAGGYSRKYASKAKNLADDMVRNTARDLLYYAVTQDAMLIFENLSRGFGRQGKRTFMAERQYTRMEDWLTAKLAYEGLPSKTYLSKTLAQYTSKTCSNCGFTITSADYDRVLEKLKKTATGWMTTINGKELKVEGQITYYNRYKRQNVVKDLSVELDRLSEESVNNDISSWTKGRSGEALSLLKKRFSHRPVQEKFVCLNCGFETHADEQAALNIARSWLFLRSQEYKKYQTNKTTGNTDKRAFVETWQSFYRKKLKEVWKPAV

SEQ ID NO: 45398 - protein, 979 aa, synthetic construct
  REGION 1..979: note = engineered CasX variant
QEIKRINKIRRRLVKDSNTKKAGKTGPMKTLLVRVMTPDLRERLENLRKKPENIPQPISNTSRANLNKLLTDYTEMKKAILHVYWEEFQKDPVGLMSRVAQPASKKIDQNKLKPEMDEKGNLTTAGFACSQCGQPLFVYKLEQVSEKGKAYTNYFGRCNVAEHEKLIKLAQLKPEKDSDEAVTYSLGKFGQRALDFYSIHVTKESTHPVKPLAQIAGNRYASGPVGKALSDACMGTIASFLSKYQDIIIEHQKVVKGNQKRLESLRELAGKENLEYPSVTLPPQPHTKEGVDAYNEVIARVRMWVNLNLWQKLKLSRDDAKPLLRLKGFPSFPLVERQANEVDWWDMVCNVKKLINEKKEDGKVFWQNLAGYKRQEALRPYLSSEEDREKGKKFARYQLGDLLLHLEKKHGEDWGKVYDEAWERIDKKVEGLSKHIKLEEERRSEDAQSKAALTDWLRAKASFVIEGLKEADKDEFCRCELKLQKWYGDLRGKPFAIEAENSILDISGFSKQYNCAFIWQKDGVKKLNLYLIINYFKGGKLRFKKIKPEAFEANRFYTVINKKSGEIVPMEVNFNFDDPNLIILPLAFGKRQGREFIWNDLLSLETGSLKLANGRVIEKTLYNRRTRQDEPALFVALTFERREVLDSSNIKTPMNLIGVDRGENIPAVIALTDPEGCPLSRFKDSLGNPTHILRIGESYKEKQRTIQAKKEVEQRRAGGYSRKYASKAKNLADDMVRNTARDLLYYAVTQDAMLIFENLSRGFGRQGKRTFMAERQYTRMEDWLTAKLAYEGLPSKTYLSKTLAQYTSKTCSNCGFTITSADYDRVLEKLKKTATGWMTTINGKELKVEGQITYYNRYKRQNVVKDLSVELDRLSEESVNNDISSWTKGRSGEALSLLKKRFSHRPVQEKFVCLNCGFETHADEQAALNIARSWLFLRSQEYKKYQTNKTTGNTDKRAFVETWQSFYRKKLKEVWKPAV

SEQ ID NO: 45399 - protein, 978 aa, synthetic construct
  REGION 1..978: note = engineered CasX variant
QEIKRINKIRRRLVKDSNTKKAGKTGPMKTLLVRVMTPDLRERLENLRKKPENIPQPISNTSRANLNKLLTDYTEMKKAILHVYWEEFQKDPVGLMSRVAQPASKKIDQNKLKPEMDEKGNLTTAGFACSQCGQPLFVYKLEQVSEKGKAYTNYFGRCNVAEHEKLILLAQLKPEKDSDEAVTYSLGKFGQRALDFYSIHVTKESTHPVKPLAQIAGNRYASPVGKALSDACMGTIASFLSKYQDIIIEHQKVVKGNQKRLESLRELAGKENLEYPSVTLPPQPHTKEGVDAYNEVIARVRMWVNLNLWQKLKLSRDDAKPLLRLKGFPSFPLVERQANEVDWWDMVCNVKKLINEKKEDGKVFWQNLAGYKRQEALRPYLSSEEDREKGKKFARYQLGDLLLHLEKKHGEDWGKVYDEAWERIDKKVEGLSKHIKLEEERRSEDAQSKAALTDWLRAKASFVIEGLKEADKDEFCRCELKLQKWYGDLRGKPFAIEAENSILDISGFSKQYNCAFIWQKDGVKKLNLYLIINYFKGGKLRFKKIKPEAFEANRFYTVINKKSGEIVPMEVNFNFDDPNLIILPLAFGKRQGREFIWNDLLSLETGSLKLANGRVIEKTLYNRRTRQDEPALFVALTFERREVLDSSNIKTPMNLIGVDRGENIPAVIALTDPEGCPLSRFKDSLGNPTHILRIGESYKEKQRTIQAKKEVEQRRAGGYSRKYASKAKNLADDMVRNTARDLLYYAVTQDAMLIFENLSRGFGRQGKRTFMAERQYTRMEDWLTAKLAYEGLPSKTYLSKTLAQYTSKTCSNCGFTITSADYDRVLEKLKKTATGWMTTINGKELKVEGQITYYNRYKRQNVVKDLSVELDRLSEESVNNDISSWTKGRSGEALSLLKKRFSHRPVQEKFVCLNCGFETHADEQAALNIARSWLFLRSQEYKKYQTNKTTGNTDKRAFVETWQSFYRKKLKEVWKPAV

SEQ ID NO: 45400 - protein, 979 aa, synthetic construct
  REGION 1..979: note = engineered CasX variant
QEIKRINKIRRRLVKDSNTKKAGKTGPMKTLLVRVMTPDLRERLENLRKKPENIPQPISNTSRANLNKLLTDYTEMKKAILHVYWEEFQKDPVGLMSRVAQPASKKIDQNKLKPEMDEKGNLTTAGFACSQCGQPLFVYKLEQVSEKGKAYTNYFGRCNVAEHEKLILLAQLKPEKDSDEAVTYSLGKFGQRALDFYSIHVTKESTHPVKPLAQIAGNRYASYPVGKALSDACMGTIASFLSKYQDIIIEHQKVVKGNQKRLESLRELAGKENLEYPSVTLPPQPHTKEGVDAYNEVIARVRMWVNLNLWQKLKLSRDDAKPLLRLKGFPSFPLVERQANEVDWWDMVCNVKKLINEKKEDGKVFWQNLAGYKRQEALRPYLSSEEDRKKGKKFARYQLGDLLLHLEKKHGEDWGKVYDEAWERIDKKVEGLSKHIKLEEERRSEDAQSKAALTDWLRAKASFVIEGLKEADKDEFCRCELKLQKWYGDLRGKPFAIEAENSILDISGFSKQYNCAFIWQKDGVKKLNLYLIINYFKGGKLRFKKIKPEAFEANRFYTVINKKSGEIVIMEVNFNFDDPNLIILPLAFGKRQGREFIWNDLLSLETGSLKLANGRVIEKTLYNRRTRQDEPALFVALTFERREVLDSSNIKTPMNLIGVDRGENIPAVIALTDPEGCPLSRFKDSLGNPTHILRIGESYKEKQRTIQAKKEVEQRRAGGYSRKYASKAKNLADDMVRNTARDLLYYAVTQDAMLIFENLSRGFGRQGKRTFMAERQYTRMEDWLTAKLAYEGLPSKTYLSKTLAQYTSKTCSNCGFTITSADYDRVLEKLKKTATGWMTTINGKELKVEGQITYYNRYKRQNVVKDLSVELDRLSEESVNNDISSWTKGRSGEALSLLKKRFSHRPVQEKFVCLNCGFETHADEQAALNIARSWLFLRSQEYKKYQTNKTTGNTDKRAFVETWQSFYRKKLKEVWKPAV

SEQ ID NO: 45401 - protein, 979 aa, synthetic construct
  REGION 1..979: note = engineered CasX variant
QEIKRINKIRRRLVKDSNTKKAGKTGPMKTLLVRVMTPDLRERLENLRKKPENIPQPISNTSRANLNKLLTDYTEMKKAILHVYWEEFQKDPVGLMSRVAQPASKKIDQNKLKPEMDEKGNLTTAGFACSQCGQPLFVYKLEQVSEKGKAYTNYFGRCNVAEHEKLILLAQLKPEKDSDEAVTYSLGKFGQRALDFYSIHVTKESTHPVKPLAQIAGNRYASHPVGKALSDACMGTIASFLSKYQDIIIEHQKVVKGNQKRLESLRELAGKENLEYPSVTLPPQPHTKEGVDAYNEVIARVRMWVNLNLWQKLKLSRDDAKPLLRLKGFPSFPLVERQANEVDWWDMVCNVKKLINEKKEDGKVFWQNLAGYKRQEALRPYLSSEEDRKKGKKFARYQLGDLLLHLEKKHGEDWGKVYDEAWERIDKKVEGLSKHIKLEEERRSEDAQSKAALTDWLRAKASFVIEGLKEADKDEFCRCELKLQKWYGDLRGKPFAIEAENSILDISGFSKQYNCAFIWQKDGVKKLNLYLIINYFKGGKLRFKKIKPEAFEANRFYTVINKKSGEIVIMEVNFNFDDPNLIILPLAFGKRQGREFIWNDLLSLETGSLKLANGRVIEKTLYNRRTRQDEPALFVALTFERREVLDSSNIKTPMNLIGVDRGENIPAVIALTDPEGCPLSRFKDSLGNPTHILRIGESYKEKQRTIQAKKEVEQRRAGGYSRKYASKAKNLADDMVRNTARDLLYYAVTQDAMLIFENLSRGFGRQGKRTFMAERQYTRMEDWLTAKLAYEGLPSKTYLSKTLAQYTSKTCSNCGFTITSADYDRVLEKLKKTATGWMTTINGKELKVEGQITYYNRYKRQNVVKDLSVELDRLSEESVNNDISSWTKGRSGEALSLLKKRFSHRPVQEKFVCLNCGFETHADEQAALNIARSWLFLRSQEYKKYQTNKTTGNTDKRAFVETWQSFYRKKLKEVWKPAV

SEQ ID NO: 45402 - protein, 979 aa, synthetic construct
  REGION 1..979: note = engineered CasX variant
QEIKRINKIRRRLVKDSNTKKAGKTGPMKTLLVRVMTPDLRERLENLRKKPENIPQPISNTSRANLNKLLTDYTEMKKAILHVYWEEFQKDPVGLMSRVAQPASKKIDQNKLKPEMDEKGNLTTAGFACSQCGQPLFVYKLEQVSEKGKAYTNYFGRCNVAEHEKLILLAQLKPEKDSDEAVTYSLGKFGQRALDFYSIHVTKESTHPVKPLAQIAGNRYASSPVGKALSDACMGTIASFLSKYQDIIIEHQKVVKGNQKRLESLRELAGKENLEYPSVTLPPQPHTKEGVDAYNEVIARVRMWVNLNLWQKLKLSRDDAKPLLRLKGFPSFPLVERQANEVDWWDMVCNVKKLINEKKEDGKVFWQNLAGYKRQEALRPYLSSEEDRKKGKKFARYQLGDLLLHLEKKHGEDWGKVYDEAWERIDKKVEGLSKHIKLEEERRSEDAQSKAALTDWLRAKASFVIEGLKEADKDEFCRCELKLQKWYGDLRGKPFAIEAENSILDISGFSKQYNCAFIWQKDGVKKLNLYLIINYFKGGKLRFKKIKPEAFEANRFYTVINKKSGEIVIMEVNFNFDDPNLIILPLAFGKRQGREFIWNDLLSLETGSLKLANGRVIEKTLYNRRTRQDEPALFVALTFERREVLDSSNIKTPMNLIGVDRGENIPAVIALTDPEGCPLSRFKDSLGNPTHILRIGESYKEKQRTIQAKKEVEQRRAGGYSRKYASKAKNLADDMVRNTARDLLYYAVTQDAMLIFENLSRGFGRQGKRTFMAERQYTRMEDWLTAKLAYEGLPSKTYLSKTLAQYTSKTCSNCGFTITSADYDRVLEKLKKTATGWMTTINGKELKVEGQITYYNRYKRQNVVKDLSVELDRLSEESVNNDISSWTKGRSGEALSLLKKRFSHRPVQEKFVCLNCGFETHADEQAALNIARSWLFLRSQEYKKYQTNKTTGNTDKRAFVETWQSFYRKKLKEVWKPAV

SEQ ID NO: 45403 - protein, 979 aa, synthetic construct
  REGION 1..979: note = engineered CasX variant
QEIKRINKIRRRLVKDSNTKKAGKTGPMKTLLVRVMTPDLRERLENLRKKPENIPQPISNTSRANLNKLLTDYTEMKKAILHVYWEEFQKDPVGLMSRVAQPASKKIDQNKLKPEMDEKGNLTTAGFACSQCGQPLFVYKLEQVSEKGKAYTNYFGRCNVAEHEKLILLAQLKPEKDSDEAVTYSLGKFGQRALDFYSIHVTKESTHPVKPLAQIAGNRYASTPVGKALSDACMGTIASFLSKYQDIIIEHQKVVKGNQKRLESLRELAGKENLEYPSVTLPPQPHTKEGVDAYNEVIARVRMWVNLNLWQKLKLSRDDAKPLLRLKGFPSFPLVERQANEVDWWDMVCNVKKLINEKKEDGKVFWQNLAGYKRQEALRPYLSSEEDRKKGKKFARYQLGDLLLHLEKKHGEDWGKVYDEAWERIDKKVEGLSKHIKLEEERRSEDAQSKAALTDWLRAKASFVIEGLKEADKDEFCRCELKLQKWYGDLRGKPFAIEAENSILDISGFSKQYNCAFIWQKDGVKKLNLYLIINYFKGGKLRFKKIKPEAFEANRFYTVINKKSGEIVIMEVNFNFDDPNLIILPLAFGKRQGREFIWNDLLSLETGSLKLANGRVIEKTLYNRRTRQDEPALFVALTFERREVLDSSNIKTPMNLIGVDRGENIPAVIALTDPEGCPLSRFKDSLGNPTHILRIGESYKEKQRTIQAKKEVEQRRAGGYSRKYASKAKNLADDMVRNTARDLLYYAVTQDAMLIFENLSRGFGRQGKRTFMAERQYTRMEDWLTAKLAYEGLPSKTYLSKTLAQYTSKTCSNCGFTITSADYDRVLEKLKKTATGWMTTINGKELKVEGQITYYNRYKRQNVVKDLSVELDRLSEESVNNDISSWTKGRSGEALSLLKKRFSHRPVQEKFVCLNCGFETHADEQAALNIARSWLFLRSQEYKKYQTNKTTGNTDKRAFVETWQSFYRKKLKEVWKPAV

SEQ ID NO: 45404 - protein, 979 aa, synthetic construct
  REGION 1..979: note = engineered CasX variant
QEIKRINKIRRRLVKDSNTKKAGKTGPMKTLLVRVMTPDLRERLENLRKKPENIPQPISNTSRANLNKLLTDYTEMKKAILHVYWEEFQKDPVGLMSRVAQPASKKIDQNKLKPEMDEKGNLTTAGFACSQCGQPLFVYKLEQVSEKGKAYTNYFGRCNVAEHEKLILLAQLKPEKDSDEAVTYSLGKFGQRALDFYSIHVTKESTHPVKPLAQIAGNRYASAPVGKALSDACMGTIASFLSKYQDIIIEHQKVVKGNQKRLESLRELAGKENLEYPSVTLPPQPHTKEGVDAYNEVIARVRMWVNLNLWQKLKLSRDDAKPLLRLKGFPSFPLVERQANEVDWWDMVCNVKKLINEKKEDGKVFWQNLAGYKRQEALRPYLSSEEDRKKGKKFARYQLGDLLLHLEKKHGEDWGKVYDEAWERIDKKVEGLSKHIKLEEERRSEDAQSKAALTDWLRAKASFVIEGLKEADKDEFCRCELKLQKWYGDLRGKPFAIEAENSILDISGFSKQYNCAFIWQKDGVKKLNLYLIINYFKGGKLRFKKIKPEAFEANRFYTVINKKSGEIVIMEVNFNFDDPNLIILPLAFGKRQGREFIWNDLLSLETGSLKLANGRVIEKTLYNRRTRQDEPALFVALTFERREVLDSSNIKTPMNLIGVDRGENIPAVIALTDPEGCPLSRFKDSLGNPTHILRIGESYKEKQRTIQAKKEVEQRRAGGYSRKYASKAKNLADDMVRNTARDLLYYAVTQDAMLIFENLSRGFGRQGKRTFMAERQYTRMEDWLTAKLAYEGLPSKTYLSKTLAQYTSKTCSNCGFTITSADYDRVLEKLKKTATGWMTTINGKELKVEGQITYYNRYKRQNVVKDLSVELDRLSEESVNNDISSWTKGRSGEALSLLKKRFSHRPVQEKFVCLNCGFETHADEQAALNIARSWLFLRSQEYKKYQTNKTTGNTDKRAFVETWQSFYRKKLKEVWKPAV

SEQ ID NO: 45405 - protein, 979 aa, synthetic construct
  REGION 1..979: note = engineered CasX variant
QEIKRINKIRRRLVKDSNTKKAGKTGPMKTLLVRVMTPDLRERLENLRKKPENIPQPISNTSRANLNKLLTDYTEMKKAILHVYWEEFQKDPVGLMSRVAQPASKKIDQNKLKPEMDEKGNLTTAGFACSQCGQPLFVYKLEQVSEKGKAYTNYFGRCNVAEHEKLILLAQLKPEKDSDEAVTYSLGKFGQRALDFYSIHVTKESTHPVKPLAQIAGNRYASVPVGKALSDACMGTIASFLSKYQDIIIEHQKVVKGNQKRLESLRELAGKENLEYPSVTLPPQPHTKEGVDAYNEVIARVRMWVNLNLWQKLKLSRDDAKPLLRLKGFPSFPLVERQANEVDWWDMVCNVKKLINEKKEDGKVFWQNLAGYKRQEALRPYLSSEEDRKKGKKFARYQLGDLLLHLEKKHGEDWGKVYDEAWERIDKKVEGLSKHIKLEEERRSEDAQSKAALTDWLRAKASFVIEGLKEADKDEFCRCELKLQKWYGDLRGKPFAIEAENSILDISGFSKQYNCAFIWQKDGVKKLNLYLIINYFKGGKLRFKKIKPEAFEANRFYTVINKKSGEIVIMEVNFNFDDPNLIILPLAFGKRQGREFIWNDLLSLETGSLKLANGRVIEKTLYNRRTRQDEPALFVALTFERREVLDSSNIKTPMNLIGVDRGENIPAVIALTDPEGCPLSRFKDSLGNPTHILRIGESYKEKQRTIQAKKEVEQRRAGGYSRKYASKAKNLADDMVRNTARDLLYYAVTQDAMLIFENLSRGFGRQGKRTFMAERQYTRMEDWLTAKLAYEGLPSKTYLSKTLAQYTSKTCSNCGFTITSADYDRVLEKLKKTATGWMTTINGKELKVEGQITYYNRYKRQNVVKDLSVELDRLSEESVNNDISSWTKGRSGEALSLLKKRFSHRPVQEKFVCLNCGFETHADEQAALNIARSWLFLRSQEYKKYQTNKTTGNTDKRAFVETWQSFYRKKLKEVWKPAV

SEQ ID NO: 45406 - protein, 979 aa, synthetic construct
  REGION 1..979: note = engineered CasX variant
QEIKRINKIRRRLVKDSNTKKAGKTGPMKTLLVRVMTPDLRERLENLRKKPENIPQPISNTSRANLNKLLTDYTEMKKAILHVYWEEFQKDPVGLMSRVAQPASKKIDQNKLKPEMDEKGNLTTAGFACSQCGQPLFVYKLEQVSEKGKAYTNYFGRCNVAEHEKLIKLAQLKPEKDSDEAVTYSLGKFGQRALDFYSIHVTKESTHPVKPLAQIAGNRYASGPVGKALSDACMGTIASFLSKYQDIIIEHQKVVKGNQKRLESLRELAGKENLEYPSVTLPPQPHTKEGVDAYNEVIARVRMWVNLNLWQKLKLSRDDAKPLLRLKGFPSFPLVERQANEVDWWDMVCNVKKLINEKKEDGKVFWQNLAGYKRQEALRPYLSSEEDRKKGKKFARYQLGDLLLHLEKKHGEDWGKVYDEAWERIDKKVEGLSKHIKLEEERRSEDAQSKAALTDWLRAKASFVIEGLKEADKDEFCRCELKLQKWYGDLRGKPFAIEAENSILDISGFSKQYNCAFIWQKDGVKKLNLYLIINYFKGGKLRFKKIKPEAFEANRFYTVINKKSGEIVIMEVNFNFDDPNLIILPLAFGKRQGREFIWNDLLSLETGSLKLANGRVIEKTLYNRRTRQDEPALFVALTFERREVLDSSNIKTPMNLIGVDRGENIPAVIALTDPEGCPLSRFKDSLGNPTHILRIGESYKEKQRTIQAKKEVEQRRAGGYSRKYASKAKNLADDMVRNTARDLLYYAVTQDAMLIFENLSRGFGRQGKRTFMAERQYTRMEDWLTAKLAYEGLPSKTYLSKTLAQYTSKTCSNCGFTITSADYDRVLEKLKKTATGWMTTINGKELKVEGQITYYNRYKRQNVVKDLSVELDRLSEESVNNDISSWTKGRSGEALSLLKKRFSHRPVQEKFVCLNCGFETHADEQAALNIARSWLFLRSQEYKKYQTNKTTGNTDKRAFVETWQSFYRKKLKEVWKPAV

SEQ ID NO: 45407 - protein, 978 aa, synthetic construct
  REGION 1..978: note = engineered CasX variant
QEIKRINKIRRRLVKDSNTKKAGKTGPMKTLLVRVMTPDLRERLENLRKKPENIPQPISNTSRANLNKLLTDYTEMKKAILHVYWEEFQKDPVGLMSRVAQPASKKIDQNKLKPEMDEKGNLTTAGFACSQCGQPLFVYKLEQVSEKGKAYTNYFGRCNVAEHEKLILLAQLKPEKDSDEAVTYSLGKFGQRALDFYSIHVTKESTHPVKPLAQIAGNRYASPVGKALSDACMGTIASFLSKYQDIIIEHQKVVKGNQKRLESLRELAGKENLEYPSVTLPPQPHTKEGVDAYNEVIARVRMWVNLNLWQKLKLSRDDAKPLLRLKGFPSFPLVERQANEVDWWDMVCNVKKLINEKKEDGKVFWQNLAGYKRQEALRPYLSSEEDRKKGKKFARYQLGDLLLHLEKKHGEDWGKVYDEAWERIDKKVEGLSKHIKLEEERRSEDAQSKAALTDWLRAKASFVIEGLKEADKDEFCRCELKLQKWYGDLRGKPFAIEAENSILDISGFSKQYNCAFIWQKDGVKKLNLYLIINYFKGGKLRFKKIKPEAFEANRFYTVINKKSGEIVIMEVNFNFDDPNLIILPLAFGKRQGREFIWNDLLSLETGSLKLANGRVIEKTLYNRRTRQDEPALFVALTFERREVLDSSNIKTPMNLIGVDRGENIPAVIALTDPEGCPLSRFKDSLGNPTHILRIGESYKEKQRTIQAKKEVEQRRAGGYSRKYASKAKNLADDMVRNTARDLLYYAVTQDAMLIFENLSRGFGRQGKRTFMAERQYTRMEDWLTAKLAYEGLPSKTYLSKTLAQYTSKTCSNCGFTITSADYDRVLEKLKKTATGWMTTINGKELKVEGQITYYNRYKRQNVVKDLSVELDRLSEESVNNDISSWTKGRSGEALSLLKKRFSHRPVQEKFVCLNCGFETHADEQAALNIARSWLFLRSQEYKKYQTNKTTGNTDKRAFVETWQSFYRKKLKEVWKPAV

SEQ ID NO: 45408 - protein, 979 aa, synthetic construct
  REGION 1..979: note = engineered CasX variant
QEIKRINKIRRRLVKDSNTKKAGKTGPMKTLLVRVMTPDLRERLENLRKKPENIPQPISNTSRANLNKLLTDYTEMKKAILHVYWEEFQKDPVGLMSRVAQPASKKIDQNKLKPEMDEKGNLTTAGFACSQCGQPLFVYKLEQVSEKGKAYTNYFGRCNVAEHEKLILLAQLKPEKDSDEAVTYSLGKFGQRALDFYSIHVTKESTHPVKPLAQIAGNRYASYPVGKALSGACMGTIASFLSKYQDIIIEHQKVVKGNQKRLESLRELAGKENLEYPSVTLPPQPHTKEGVDAYNEVIARVRMWVNLNLWQKLKLSRDDAKPLLRLKGFPSFPLVERQANEVDWWDMVCNVKKLINEKKEDGKVFWQNLAGYKRQEALRPYLSSEEDRKKGKKFARYQLGDLLLHLEKKHGEDWGKVYDEAWERIDKKVEGLSKHIKLEEERRSEDAQSKAALTDWLRAKASFVIEGLKEADKDEFCRCELKLQKWYGDLRGKPFAIEAENSILDISGFSKQYNCAFIWQKDGVKKLNLYLIINYFKGGKLRFKKIKPEAFEANRFYTVINKKSGEIVPMEVNFNFDDPNLIILPLAFGKRQGREFIWNDLLSLETGSLKLANGRVIEKTLYNRRTRQDEPALFVALTFERREVLDSSNIKPMSNLIGVDRGENIPAVIALTDPEGCPLSRFKDSLGNPTHILRIGESYKEKQRTIQAKKEVEQRRAGGYSRKYASKAKNLADDMVRNTARDLLYYAVTQDAMLIFENLSRGFGRQGKRTFMAERQYTRMEDWLTAKLAYEGLPSKTYLSKTLAQYTSKTCSNCGFTITSADYDRVLEKLKKTATGWMTTINGKELKVEGQITYYNRYKRQNVVKDLSVELDRLSEESVNNDISSWTKGRSGEALSLLKKRFSHRPVQEKFVCLNCGFETHADEQAALNIARSWLFLRSQEYKKYQTNKTTGNTDKRAFVETWQSFYRKKLKEVWKPAV

SEQ ID NO: 45409 - protein, 979 aa, synthetic construct
  REGION 1..979: note = engineered CasX variant
QEIKRINKIRRRLVKDSNTKKAGKTGPMKTLLVRVMTPDLRERLENLRKKPENIPQPISNTSRANLNKLLTDYTEMKKAILHVYWEEFQKDPVGLMSRVAQPASKKIDQNKLKPEMDEKGNLTTAGFACSQCGQPLFVYKLEQVSEKGKAYTNYFGRCNVAEHEKLILLAQLKPEKDSDEAVTYSLGKFGQRALDFYSIHVTKESTHPVKPLAQIAGNRYASHPVGKALSGACMGTIASFLSKYQDIIIEHQKVVKGNQKRLESLRELAGKENLEYPSVTLPPQPHTKEGVDAYNEVIARVRMWVNLNLWQKLKLSRDDAKPLLRLKGFPSFPLVERQANEVDWWDMVCNVKKLINEKKEDGKVFWQNLAGYKRQEALRPYLSSEEDRKKGKKFARYQLGDLLLHLEKKHGEDWGKVYDEAWERIDKKVEGLSKHIKLEEERRSEDAQSKAALTDWLRAKASFVIEGLKEADKDEFCRCELKLQKWYGDLRGKPFAIEAENSILDISGFSKQYNCAFIWQKDGVKKLNLYLIINYFKGGKLRFKKIKPEAFEANRFYTVINKKSGEIVPMEVNFNFDDPNLIILPLAFGKRQGREFIWNDLLSLETGSLKLANGRVIEKTLYNRRTRQDEPALFVALTFERREVLDSSNIKPMSNLIGVDRGENIPAVIALTDPEGCPLSRFKDSLGNPTHILRIGESYKEKQRTIQAKKEVEQRRAGGYSRKYASKAKNLADDMVRNTARDLLYYAVTQDAMLIFENLSRGFGRQGKRTFMAERQYTRMEDWLTAKLAYEGLPSKTYLSKTLAQYTSKTCSNCGFTITSADYDRVLEKLKKTATGWMTTINGKELKVEGQITYYNRYKRQNVVKDLSVELDRLSEESVNNDISSWTKGRSGEALSLLKKRFSHRPVQEKFVCLNCGFETHADEQAALNIARSWLFLRSQEYKKYQTNKTTGNTDKRAFVETWQSFYRKKLKEVWKPAV

SEQ ID NO: 45410 - protein, 979 aa, synthetic construct
  REGION 1..979: note = engineered CasX variant
QEIKRINKIRRRLVKDSNTKKAGKTGPMKTLLVRVMTPDLRERLENLRKKPENIPQPISNTSRANLNKLLTDYTEMKKAILHVYWEEFQKDPVGLMSRVAQPASKKIDQNKLKPEMDEKGNLTTAGFACSQCGQPLFVYKLEQVSEKGKAYTNYFGRCNVAEHEKLILLAQLKPEKDSDEAVTYSLGKFGQRALDFYSIHVTKESTHPVKPLAQIAGNRYASSPVGKALSGACMGTIASFLSKYQDIIIEHQKVVKGNQKRLESLRELAGKENLEYPSVTLPPQPHTKEGVDAYNEVIARVRMWVNLNLWQKLKLSRDDAKPLLRLKGFPSFPLVERQANEVDWWDMVCNVKKLINEKKEDGKVFWQNLAGYKRQEALRPYLSSEEDRKKGKKFARYQLGDLLLHLEKKHGEDWGKVYDEAWERIDKKVEGLSKHIKLEEERRSEDAQSKAALTDWLRAKASFVIEGLKEADKDEFCRCELKLQKWYGDLRGKPFAIEAENSILDISGFSKQYNCAFIWQKDGVKKLNLYLIINYFKGGKLRFKKIKPEAFEANRFYTVINKKSGEIVPMEVNFNFDDPNLIILPLAFGKRQGREFIWNDLLSLETGSLKLANGRVIEKTLYNRRTRQDEPALFVALTFERREVLDSSNIKPMSNLIGVDRGENIPAVIALTDPEGCPLSRFKDSLGNPTHILRIGESYKEKQRTIQAKKEVEQRRAGGYSRKYASKAKNLADDMVRNTARDLLYYAVTQDAMLIFENLSRGFGRQGKRTFMAERQYTRMEDWLTAKLAYEGLPSKTYLSKTLAQYTSKTCSNCGFTITSADYDRVLEKLKKTATGWMTTINGKELKVEGQITYYNRYKRQNVVKDLSVELDRLSEESVNNDISSWTKGRSGEALSLLKKRFSHRPVQEKFVCLNCGFETHADEQAALNIARSWLFLRSQEYKKYQTNKTTGNTDKRAFVETWQSFYRKKLKEVWKPAV

SEQ ID NO: 45411 - protein, 979 aa, synthetic construct
  REGION 1..979: note = engineered CasX variant
QEIKRINKIRRRLVKDSNTKKAGKTGPMKTLLVRVMTPDLRERLENLRKKPENIPQPISNTSRANLNKLLTDYTEMKKAILHVYWEEFQKDPVGLMSRVAQPASKKIDQNKLKPEMDEKGNLTTAGFACSQCGQPLFVYKLEQVSEKGKAYTNYFGRCNVAEHEKLILLAQLKPEKDSDEAVTYSLGKFGQRALDFYSIHVTKESTHPVKPLAQIAGNRYASTPVGKALSGACMGTIASFLSKYQDIIIEHQKVVKGNQKRLESLRELAGKENLEYPSVTLPPQPHTKEGVDAYNEVIARVRMWVNLNLWQKLKLSRDDAKPLLRLKGFPSFPLVERQANEVDWWDMVCNVKKLINEKKEDGKVFWQNLAGYKRQEALRPYLSSEEDRKKGKKFARYQLGDLLLHLEKKHGEDWGKVYDEAWERIDKKVEGLSKHIKLEEERRSEDAQSKAALTDWLRAKASFVIEGLKEADKDEFCRCELKLQKWYGDLRGKPFAIEAENSILDISGFSKQYNCAFIWQKDGVKKLNLYLIINYFKGGKLRFKKIKPEAFEANRFYTVINKKSGEIVPMEVNFNFDDPNLIILPLAFGKRQGREFIWNDLLSLETGSLKLANGRVIEKTLYNRRTRQDEPALFVALTFERREVLDSSNIKPMSNLIGVDRGENIPAVIALTDPEGCPLSRFKDSLGNPTHILRIGESYKEKQRTIQAKKEVEQRRAGGYSRKYASKAKNLADDMVRNTARDLLYYAVTQDAMLIFENLSRGFGRQGKRTFMAERQYTRMEDWLTAKLAYEGLPSKTYLSKTLAQYTSKTCSNCGFTITSADYDRVLEKLKKTATGWMTTINGKELKVEGQITYYNRYKRQNVVKDLSVELDRLSEESVNNDISSWTKGRSGEALSLLKKRFSHRPVQEKFVCLNCGFETHADEQAALNIARSWLFLRSQEYKKYQTNKTTGNTDKRAFVETWQSFYRKKLKEVWKPAV

SEQ ID NO: 45412 - protein, 979 aa, synthetic construct
  REGION 1..979: note = engineered CasX variant
QEIKRINKIRRRLVKDSNTKKAGKTGPMKTLLVRVMTPDLRERLENLRKKPENIPQPISNTSRANLNKLLTDYTEMKKAILHVYWEEFQKDPVGLMSRVAQPASKKIDQNKLKPEMDEKGNLTTAGFACSQCGQPLFVYKLEQVSEKGKAYTNYFGRCNVAEHEKLILLAQLKPEKDSDEAVTYSLGKFGQRALDFYSIHVTKESTHPVKPLAQIAGNRYASAPVGKALSGACMGTIASFLSKYQDIIIEHQKVVKGNQKRLESLRELAGKENLEYPSVTLPPQPHTKEGVDAYNEVIARVRMWVNLNLWQKLKLSRDDAKPLLRLKGFPSFPLVERQANEVDWWDMVCNVKKLINEKKEDGKVFWQNLAGYKRQEALRPYLSSEEDRKKGKKFARYQLGDLLLHLEKKHGEDWGKVYDEAWERIDKKVEGLSKHIKLEEERRSEDAQSKAALTDWLRAKASFVIEGLKEADKDEFCRCELKLQKWYGDLRGKPFAIEAENSILDISGFSKQYNCAFIWQKDGVKKLNLYLIINYFKGGKLRFKKIKPEAFEANRFYTVINKKSGEIVPMEVNFNFDDPNLIILPLAFGKRQGREFIWNDLLSLETGSLKLANGRVIEKTLYNRRTRQDEPALFVALTFERREVLDSSNIKPMSNLIGVDRGENIPAVIALTDPEGCPLSRFKDSLGNPTHILRIGESYKEKQRTIQAKKEVEQRRAGGYSRKYASKAKNLADDMVRNTARDLLYYAVTQDAMLIFENLSRGFGRQGKRTFMAERQYTRMEDWLTAKLAYEGLPSKTYLSKTLAQYTSKTCSNCGFTITSADYDRVLEKLKKTATGWMTTINGKELKVEGQITYYNRYKRQNVVKDLSVELDRLSEESVNNDISSWTKGRSGEALSLLKKRFSHRPVQEKFVCLNCGFETHADEQAALNIARSWLFLRSQEYKKYQTNKTTGNTDKRAFVETWQSFYRKKLKEVWKPAV

SEQ ID NO: 45413 - protein, 979 aa, synthetic construct
  REGION 1..979: note = engineered CasX variant
QEIKRINKIRRRLVKDSNTKKAGKTGPMKTLLVRVMTPDLRERLENLRKKPENIPQPISNTSRANLNKLLTDYTEMKKAILHVYWEEFQKDPVGLMSRVAQPASKKIDQNKLKPEMDEKGNLTTAGFACSQCGQPLFVYKLEQVSEKGKAYTNYFGRCNVAEHEKLILLAQLKPEKDSDEAVTYSLGKFGQRALDFYSIHVTKESTHPVKPLAQIAGNRYASVPVGKALSGACMGTIASFLSKYQDIIIEHQKVVKGNQKRLESLRELAGKENLEYPSVTLPPQPHTKEGVDAYNEVIARVRMWVNLNLWQKLKLSRDDAKPLLRLKGFPSFPLVERQANEVDWWDMVCNVKKLINEKKEDGKVFWQNLAGYKRQEALRPYLSSEEDRKKGKKFARYQLGDLLLHLEKKHGEDWGKVYDEAWERIDKKVEGLSKHIKLEEERRSEDAQSKAALTDWLRAKASFVIEGLKEADKDEFCRCELKLQKWYGDLRGKPFAIEAENSILDISGFSKQYNCAFIWQKDGVKKLNLYLIINYFKGGKLRFKKIKPEAFEANRFYTVINKKSGEIVPMEVNFNFDDPNLIILPLAFGKRQGREFIWNDLLSLETGSLKLANGRVIEKTLYNRRTRQDEPALFVALTFERREVLDSSNIKPMSNLIGVDRGENIPAVIALTDPEGCPLSRFKDSLGNPTHILRIGESYKEKQRTIQAKKEVEQRRAGGYSRKYASKAKNLADDMVRNTARDLLYYAVTQDAMLIFENLSRGFGRQGKRTFMAERQYTRMEDWLTAKLAYEGLPSKTYLSKTLAQYTSKTCSNCGFTITSADYDRVLEKLKKTATGWMTTINGKELKVEGQITYYNRYKRQNVVKDLSVELDRLSEESVNNDISSWTKGRSGEALSLLKKRFSHRPVQEKFVCLNCGFETHADEQAALNIARSWLFLRSQEYKKYQTNKTTGNTDKRAFVETWQSFYRKKLKEVWKPAV

SEQ ID NO: 45414 - protein, 979 aa, synthetic construct
  REGION 1..979: note = engineered CasX variant
QEIKRINKIRRRLVKDSNTKKAGKTGPMKTLLVRVMTPDLRERLENLRKKPENIPQPISNTSRANLNKLLTDYTEMKKAILHVYWEEFQKDPVGLMSRVAQPASKKIDQNKLKPEMDEKGNLTTAGFACSQCGQPLFVYKLEQVSEKGKAYTNYFGRCNVAEHEKLIKLAQLKPEKDSDEAVTYSLGKFGQRALDFYSIHVTKESTHPVKPLAQIAGNRYASGPVGKALSGACMGTIASFLSKYQDIIIEHQKVVKGNQKRLESLRELAGKENLEYPSVTLPPQPHTKEGVDAYNEVIARVRMWVNLNLWQKLKLSRDDAKPLLRLKGFPSFPLVERQANEVDWWDMVCNVKKLINEKKEDGKVFWQNLAGYKRQEALRPYLSSEEDRKKGKKFARYQLGDLLLHLEKKHGEDWGKVYDEAWERIDKKVEGLSKHIKLEEERRSEDAQSKAALTDWLRAKASFVIEGLKEADKDEFCRCELKLQKWYGDLRGKPFAIEAENSILDISGFSKQYNCAFIWQKDGVKKLNLYLIINYFKGGKLRFKKIKPEAFEANRFYTVINKKSGEIVPMEVNFNFDDPNLIILPLAFGKRQGREFIWNDLLSLETGSLKLANGRVIEKTLYNRRTRQDEPALFVALTFERREVLDSSNIKPMSNLIGVDRGENIPAVIALTDPEGCPLSRFKDSLGNPTHILRIGESYKEKQRTIQAKKEVEQRRAGGYSRKYASKAKNLADDMVRNTARDLLYYAVTQDAMLIFENLSRGFGRQGKRTFMAERQYTRMEDWLTAKLAYEGLPSKTYLSKTLAQYTSKTCSNCGFTITSADYDRVLEKLKKTATGWMTTINGKELKVEGQITYYNRYKRQNVVKDLSVELDRLSEESVNNDISSWTKGRSGEALSLLKKRFSHRPVQEKFVCLNCGFETHADEQAALNIARSWLFLRSQEYKKYQTNKTTGNTDKRAFVETWQSFYRKKLKEVWKPAV

SEQ ID NO: 45415 - protein, 978 aa, synthetic construct
  REGION 1..978: note = engineered CasX variant
QEIKRINKIRRRLVKDSNTKKAGKTGPMKTLLVRVMTPDLRERLENLRKKPENIPQPISNTSRANLNKLLTDYTEMKKAILHVYWEEFQKDPVGLMSRVAQPASKKIDQNKLKPEMDEKGNLTTAGFACSQCGQPLFVYKLEQVSEKGKAYTNYFGRCNVAEHEKLILLAQLKPEKDSDEAVTYSLGKFGQRALDFYSIHVTKESTHPVKPLAQIAGNRYASPVGKALSGACMGTIASFLSKYQDIIIEHQKVVKGNQKRLESLRELAGKENLEYPSVTLPPQPHTKEGVDAYNEVIARVRMWVNLNLWQKLKLSRDDAKPLLRLKGFPSFPLVERQANEVDWWDMVCNVKKLINEKKEDGKVFWQNLAGYKRQEALRPYLSSEEDRKKGKKFARYQLGDLLLHLEKKHGEDWGKVYDEAWERIDKKVEGLSKHIKLEEERRSEDAQSKAALTDWLRAKASFVIEGLKEADKDEFCRCELKLQKWYGDLRGKPFAIEAENSILDISGFSKQYNCAFIWQKDGVKKLNLYLIINYFKGGKLRFKKIKPEAFEANRFYTVINKKSGEIVPMEVNFNFDDPNLIILPLAFGKRQGREFIWNDLLSLETGSLKLANGRVIEKTLYNRRTRQDEPALFVALTFERREVLDSSNIKPMSNLIGVDRGENIPAVIALTDPEGCPLSRFKDSLGNPTHILRIGESYKEKQRTIQAKKEVEQRRAGGYSRKYASKAKNLADDMVRNTARDLLYYAVTQDAMLIFENLSRGFGRQGKRTFMAERQYTRMEDWLTAKLAYEGLPSKTYLSKTLAQYTSKTCSNCGFTITSADYDRVLEKLKKTATGWMTTINGKELKVEGQITYYNRYKRQNVVKDLSVELDRLSEESVNNDISSWTKGRSGEALSLLKKRFSHRPVQEKFVCLNCGFETHADEQAALNIARSWLFLRSQEYKKYQTNKTTGNTDKRAFVETWQSFYRKKLKEVWKPAV

SEQ ID NO: 45416 - protein, 979 aa, synthetic construct
  REGION 1..979: note = engineered CasX variant
QEIKRINKIRRRLVKDSNTKKAGKTGPMKTLLVRVMTPDLRERLENLRKKPENIPQPISNTSRANLNKLLTDYTEMKKAILHVYWEEFQKDPVGLMSRVAQPASKKIDQNKLKPEMDEKGNLTTAGFACSQCGQPLFVYKLEQVSEKGKAYTNYFGRCNVAEHEKLILLAQLKPEKDSDEAVTYSLGKFGQRALDFYSIHVTKESTHPVKPLAQIAGNRYASYPVGKALSDACMGTIASFLSKYQDIIIEHQKVVKGNQKRLESLRELAGKENLEYPSVTLPPQPHTKEGVDAYNEVIARVRMWVNLNLWQKLKLSRDDAKPLLRLKNFPSFPLVERQANEVDWWDMVCNVKKLINEKKEDGKVFWQNLAGYKRQEALRPYLSSEEDRKKGKKFARYQLGDLLLHLEKKHGEDWGKVYDEAWERIDKKVEGLSKHIKLEEERRSEDAQSKAALTDWLRAKASFVIEGLKEADKDEFCRCELKLQKWYGDLRGKPFAIEAENSILDISGFSKQYNCAFIWQKDGVKKLNLYLIINYFKGGKLRFKKIKPEAFEANRFYTVINKKSGEIVPMEVNFNFDDPNLIILPLAFGKRQGREFIWNDLLSLETGSLKLANGRVIEKTLYNRRTRQDEPALFVALTFERREVLDSSNIKPMSNLIGVDRGENIPAVIALTDPEGCPLSRFKDSLGNPTHILRIGESYKEKQRTIQAKKEVEQRRAGGYSRKYASKAKNLADDMVRNTARDLLYYAVTQDAMLIFENLSRGFGRQGKRTFMAERQYTRMEDWLTAKLAYEGLPSKTYLSKTLAQYTSKTCSNCGFTITSADYDRVLEKLKKTATGWMTTINGKELKVEGQITYYNRYKRQNVVKDLSVELDRLSEESVNNDISSWTKGRSGEALSLLKKRFSHRPVQEKFVCLNCGFETHADEQAALNIARSWLFLRSQEYKKYQTNKTTGNTDKRAFVETWQSFYRKKLKEVWKPAV

SEQ ID NO: 45417 - protein, 979 aa, synthetic construct
  REGION 1..979: note = engineered CasX variant
QEIKRINKIRRRLVKDSNTKKAGKTGPMKTLLVRVMTPDLRERLENLRKKPENIPQPISNTSRANLNKLLTDYTEMKKAILHVYWEEFQKDPVGLMSRVAQPASKKIDQNKLKPEMDEKGNLTTAGFACSQCGQPLFVYKLEQVSEKGKAYTNYFGRCNVAEHEKLILLAQLKPEKDSDEAVTYSLGKFGQRALDFYSIHVTKESTHPVKPLAQIAGNRYASHPVGKALSDACMGTIASFLSKYQDIIIEHQKVVKGNQKRLESLRELAGKENLEYPSVTLPPQPHTKEGVDAYNEVIARVRMWVNLNLWQKLKLSRDDAKPLLRLKNFPSFPLVERQANEVDWWDMVCNVKKLINEKKEDGKVFWQNLAGYKRQEALRPYLSSEEDRKKGKKFARYQLGDLLLHLEKKHGEDWGKVYDEAWERIDKKVEGLSKHIKLEEERRSEDAQSKAALTDWLRAKASFVIEGLKEADKDEFCRCELKLQKWYGDLRGKPFAIEAENSILDISGFSKQYNCAFIWQKDGVKKLNLYLIINYFKGGKLRFKKIKPEAFEANRFYTVINKKSGEIVPMEVNFNFDDPNLIILPLAFGKRQGREFIWNDLLSLETGSLKLANGRVIEKTLYNRRTRQDEPALFVALTFERREVLDSSNIKPMSNLIGVDRGENIPAVIALTDPEGCPLSRFKDSLGNPTHILRIGESYKEKQRTIQAKKEVEQRRAGGYSRKYASKAKNLADDMVRNTARDLLYYAVTQDAMLIFENLSRGFGRQGKRTFMAERQYTRMEDWLTAKLAYEGLPSKTYLSKTLAQYTSKTCSNCGFTITSADYDRVLEKLKKTATGWMTTINGKELKVEGQITYYNRYKRQNVVKDLSVELDRLSEESVNNDISSWTKGRSGEALSLLKKRFSHRPVQEKFVCLNCGFETHADEQAALNIARSWLFLRSQEYKKYQTNKTTGNTDKRAFVETWQSFYRKKLKEVWKPAV

SEQ ID NO: 45418 - protein, 979 aa, synthetic construct
  REGION 1..979: note = engineered CasX variant
QEIKRINKIRRRLVKDSNTKKAGKTGPMKTLLVRVMTPDLRERLENLRKKPENIPQPISNTSRANLNKLLTDYTEMKKAILHVYWEEFQKDPVGLMSRVAQPASKKIDQNKLKPEMDEKGNLTTAGFACSQCGQPLFVYKLEQVSEKGKAYTNYFGRCNVAEHEKLILLAQLKPEKDSDEAVTYSLGKFGQRALDFYSIHVTKESTHPVKPLAQIAGNRYASSPVGKALSDACMGTIASFLSKYQDIIIEHQKVVKGNQKRLESLRELAGKENLEYPSVTLPPQPHTKEGVDAYNEVIARVRMWVNLNLWQKLKLSRDDAKPLLRLKNFPSFPLVERQANEVDWWDMVCNVKKLINEKKEDGKVFWQNLAGYKRQEALRPYLSSEEDRKKGKKFARYQLGDLLLHLEKKHGEDWGKVYDEAWERIDKKVEGLSKHIKLEEERRSEDAQSKAALTDWLRAKASFVIEGLKEADKDEFCRCELKLQKWYGDLRGKPFAIEAENSILDISGFSKQYNCAFIWQKDGVKKLNLYLIINYFKGGKLRFKKIKPEAFEANRFYTVINKKSGEIVPMEVNFNFDDPNLIILPLAFGKRQGREFIWNDLLSLETGSLKLANGRVIEKTLYNRRTRQDEPALFVALTFERREVLDSSNIKPMSNLIGVDRGENIPAVIALTDPEGCPLSRFKDSLGNPTHILRIGESYKEKQRTIQAKKEVEQRRAGGYSRKYASKAKNLADDMVRNTARDLLYYAVTQDAMLIFENLSRGFGRQGKRTFMAERQYTRMEDWLTAKLAYEGLPSKTYLSKTLAQYTSKTCSNCGFTITSADYDRVLEKLKKTATGWMTTINGKELKVEGQITYYNRYKRQNVVKDLSVELDRLSEESVNNDISSWTKGRSGEALSLLKKRFSHRPVQEKFVCLNCGFETHADEQAALNIARSWLFLRSQEYKKYQTNKTTGNTDKRAFVETWQSFYRKKLKEVWKPAV

SEQ ID NO: 45419 - protein, 979 aa, synthetic construct
  REGION 1..979: note = engineered CasX variant
QEIKRINKIRRRLVKDSNTKKAGKTGPMKTLLVRVMTPDLRERLENLRKKPENIPQPISNTSRANLNKLLTDYTEMKKAILHVYWEEFQKDPVGLMSRVAQPASKKIDQNKLKPEMDEKGNLTTAGFACSQCGQPLFVYKLEQVSEKGKAYTNYFGRCNVAEHEKLILLAQLKPEKDSDEAVTYSLGKFGQRALDFYSIHVTKESTHPVKPLAQIAGNRYASTPVGKALSDACMGTIASFLSKYQDIIIEHQKVVKGNQKRLESLRELAGKENLEYPSVTLPPQPHTKEGVDAYNEVIARVRMWVNLNLWQKLKLSRDDAKPLLRLKNFPSFPLVERQANEVDWWDMVCNVKKLINEKKEDGKVFWQNLAGYKRQEALRPYLSSEEDRKKGKKFARYQLGDLLLHLEKKHGEDWGKVYDEAWERIDKKVEGLSKHIKLEEERRSEDAQSKAALTDWLRAKASFVIEGLKEADKDEFCRCELKLQKWYGDLRGKPFAIEAENSILDISGFSKQYNCAFIWQKDGVKKLNLYLIINYFKGGKLRFKKIKPEAFEANRFYTVINKKSGEIVPMEVNFNFDDPNLIILPLAFGKRQGREFIWNDLLSLETGSLKLANGRVIEKTLYNRRTRQDEPALFVALTFERREVLDSSNIKPMSNLIGVDRGENIPAVIALTDPEGCPLSRFKDSLGNPTHILRIGESYKEKQRTIQAKKEVEQRRAGGYSRKYASKAKNLADDMVRNTARDLLYYAVTQDAMLIFENLSRGFGRQGKRTFMAERQYTRMEDWLTAKLAYEGLPSKTYLSKTLAQYTSKTCSNCGFTITSADYDRVLEKLKKTATGWMTTINGKELKVEGQITYYNRYKRQNVVKDLSVELDRLSEESVNNDISSWTKGRSGEALSLLKKRFSHRPVQEKFVCLNCGFETHADEQAALNIARSWLFLRSQEYKKYQTNKTTGNTDKRAFVETWQSFYRKKLKEVWKPAV

SEQ ID NO: 45420 - protein, 979 aa, synthetic construct
  REGION 1..979: note = engineered CasX variant
QEIKRINKIRRRLVKDSNTKKAGKTGPMKTLLVRVMTPDLRERLENLRKKPENIPQPISNTSRANLNKLLTDYTEMKKAILHVYWEEFQKDPVGLMSRVAQPASKKIDQNKLKPEMDEKGNLTTAGFACSQCGQPLFVYKLEQVSEKGKAYTNYFGRCNVAEHEKLILLAQLKPEKDSDEAVTYSLGKFGQRALDFYSIHVTKESTHPVKPLAQIAGNRYASAPVGKALSDACMGTIASFLSKYQDIIIEHQKVVKGNQKRLESLRELAGKENLEYPSVTLPPQPHTKEGVDAYNEVIARVRMWVNLNLWQKLKLSRDDAKPLLRLKNFPSFPLVERQANEVDWWDMVCNVKKLINEKKEDGKVFWQNLAGYKRQEALRPYLSSEEDRKKGKKFARYQLGDLLLHLEKKHGEDWGKVYDEAWERIDKKVEGLSKHIKLEEERRSEDAQSKAALTDWLRAKASFVIEGLKEADKDEFCRCELKLQKWYGDLRGKPFAIEAENSILDISGFSKQYNCAFIWQKDGVKKLNLYLIINYFKGGKLRFKKIKPEAFEANRFYTVINKKSGEIVPMEVNFNFDDPNLIILPLAFGKRQGREFIWNDLLSLETGSLKLANGRVIEKTLYNRRTRQDEPALFVALTFERREVLDSSNIKPMSNLIGVDRGENIPAVIALTDPEGCPLSRFKDSLGNPTHILRIGESYKEKQRTIQAKKEVEQRRAGGYSRKYASKAKNLADDMVRNTARDLLYYAVTQDAMLIFENLSRGFGRQGKRTFMAERQYTRMEDWLTAKLAYEGLPSKTYLSKTLAQYTSKTCSNCGFTITSADYDRVLEKLKKTATGWMTTINGKELKVEGQITYYNRYKRQNVVKDLSVELDRLSEESVNNDISSWTKGRSGEALSLLKKRFSHRPVQEKFVCLNCGFETHADEQAALNIARSWLFLRSQEYKKYQTNKTTGNTDKRAFVETWQSFYRKKLKEVWKPAV

SEQ ID NO: 45421 - protein, 979 aa, synthetic construct
  REGION 1..979: note = engineered CasX variant
QEIKRINKIRRRLVKDSNTKKAGKTGPMKTLLVRVMTPDLRERLENLRKKPENIPQPISNTSRANLNKLLTDYTEMKKAILHVYWEEFQKDPVGLMSRVAQPASKKIDQNKLKPEMDEKGNLTTAGFACSQCGQPLFVYKLEQVSEKGKAYTNYFGRCNVAEHEKLILLAQLKPEKDSDEAVTYSLGKFGQRALDFYSIHVTKESTHPVKPLAQIAGNRYASVPVGKALSDACMGTIASFLSKYQDIIIEHQKVVKGNQKRLESLRELAGKENLEYPSVTLPPQPHTKEGVDAYNEVIARVRMWVNLNLWQKLKLSRDDAKPLLRLKNFPSFPLVERQANEVDWWDMVCNVKKLINEKKEDGKVFWQNLAGYKRQEALRPYLSSEEDRKKGKKFARYQLGDLLLHLEKKHGEDWGKVYDEAWERIDKKVEGLSKHIKLEEERRSEDAQSKAALTDWLRAKASFVIEGLKEADKDEFCRCELKLQKWYGDLRGKPFAIEAENSILDISGFSKQYNCAFIWQKDGVKKLNLYLIINYFKGGKLRFKKIKPEAFEANRFYTVINKKSGEIVPMEVNFNFDDPNLIILPLAFGKRQGREFIWNDLLSLETGSLKLANGRVIEKTLYNRRTRQDEPALFVALTFERREVLDSSNIKPMSNLIGVDRGENIPAVIALTDPEGCPLSRFKDSLGNPTHILRIGESYKEKQRTIQAKKEVEQRRAGGYSRKYASKAKNLADDMVRNTARDLLYYAVTQDAMLIFENLSRGFGRQGKRTFMAERQYTRMEDWLTAKLAYEGLPSKTYLSKTLAQYTSKTCSNCGFTITSADYDRVLEKLKKTATGWMTTINGKELKVEGQITYYNRYKRQNVVKDLSVELDRLSEESVNNDISSWTKGRSGEALSLLKKRFSHRPVQEKFVCLNCGFETHADEQAALNIARSWLFLRSQEYKKYQTNKTTGNTDKRAFVETWQSFYRKKLKEVWKPAV

SEQ ID NO: 45422 - protein, 979 aa, synthetic construct
  REGION 1..979: note = engineered CasX variant
QEIKRINKIRRRLVKDSNTKKAGKTGPMKTLLVRVMTPDLRERLENLRKKPENIPQPISNTSRANLNKLLTDYTEMKKAILHVYWEEFQKDPVGLMSRVAQPASKKIDQNKLKPEMDEKGNLTTAGFACSQCGQPLFVYKLEQVSEKGKAYTNYFGRCNVAEHEKLIKLAQLKPEKDSDEAVTYSLGKFGQRALDFYSIHVTKESTHPVKPLAQIAGNRYASGPVGKALSDACMGTIASFLSKYQDIIIEHQKVVKGNQKRLESLRELAGKENLEYPSVTLPPQPHTKEGVDAYNEVIARVRMWVNLNLWQKLKLSRDDAKPLLRLKNFPSFPLVERQANEVDWWDMVCNVKKLINEKKEDGKVFWQNLAGYKRQEALRPYLSSEEDRKKGKKFARYQLGDLLLHLEKKHGEDWGKVYDEAWERIDKKVEGLSKHIKLEEERRSEDAQSKAALTDWLRAKASFVIEGLKEADKDEFCRCELKLQKWYGDLRGKPFAIEAENSILDISGFSKQYNCAFIWQKDGVKKLNLYLIINYFKGGKLRFKKIKPEAFEANRFYTVINKKSGEIVPMEVNFNFDDPNLIILPLAFGKRQGREFIWNDLLSLETGSLKLANGRVIEKTLYNRRTRQDEPALFVALTFERREVLDSSNIKPMSNLIGVDRGENIPAVIALTDPEGCPLSRFKDSLGNPTHILRIGESYKEKQRTIQAKKEVEQRRAGGYSRKYASKAKNLADDMVRNTARDLLYYAVTQDAMLIFENLSRGFGRQGKRTFMAERQYTRMEDWLTAKLAYEGLPSKTYLSKTLAQYTSKTCSNCGFTITSADYDRVLEKLKKTATGWMTTINGKELKVEGQITYYNRYKRQNVVKDLSVELDRLSEESVNNDISSWTKGRSGEALSLLKKRFSHRPVQEKFVCLNCGFETHADEQAALNIARSWLFLRSQEYKKYQTNKTTGNTDKRAFVETWQSFYRKKLKEVWKPAV

SEQ ID NO: 45423 - protein, 978 aa, synthetic construct
  REGION 1..978: note = engineered CasX variant
QEIKRINKIRRRLVKDSNTKKAGKTGPMKTLLVRVMTPDLRERLENLRKKPENIPQPISNTSRANLNKLLTDYTEMKKAILHVYWEEFQKDPVGLMSRVAQPASKKIDQNKLKPEMDEKGNLTTAGFACSQCGQPLFVYKLEQVSEKGKAYTNYFGRCNVAEHEKLILLAQLKPEKDSDEAVTYSLGKFGQRALDFYSIHVTKESTHPVKPLAQIAGNRYASPVGKALSDACMGTIASFLSKYQDIIIEHQKVVKGNQKRLESLRELAGKENLEYPSVTLPPQPHTKEGVDAYNEVIARVRMWVNLNLWQKLKLSRDDAKPLLRLKNFPSFPLVERQANEVDWWDMVCNVKKLINEKKEDGKVFWQNLAGYKRQEALRPYLSSEEDRKKGKKFARYQLGDLLLHLEKKHGEDWGKVYDEAWERIDKKVEGLSKHIKLEEERRSEDAQSKAALTDWLRAKASFVIEGLKEADKDEFCRCELKLQKWYGDLRGKPFAIEAENSILDISGFSKQYNCAFIWQKDGVKKLNLYLIINYFKGGKLRFKKIKPEAFEANRFYTVINKKSGEIVPMEVNFNFDDPNLIILPLAFGKRQGREFIWNDLLSLETGSLKLANGRVIEKTLYNRRTRQDEPALFVALTFERREVLDSSNIKPMSNLIGVDRGENIPAVIALTDPEGCPLSRFKDSLGNPTHILRIGESYKEKQRTIQAKKEVEQRRAGGYSRKYASKAKNLADDMVRNTARDLLYYAVTQDAMLIFENLSRGFGRQGKRTFMAERQYTRMEDWLTAKLAYEGLPSKTYLSKTLAQYTSKTCSNCGFTITSADYDRVLEKLKKTATGWMTTINGKELKVEGQITYYNRYKRQNVVKDLSVELDRLSEESVNNDISSWTKGRSGEALSLLKKRFSHRPVQEKFVCLNCGFETHADEQAALNIARSWLFLRSQEYKKYQTNKTTGNTDKRAFVETWQSFYRKKLKEVWKPAV

SEQ ID NO: 45424 - protein, 979 aa, synthetic construct
  REGION 1..979: note = engineered CasX variant
QEIKRINKIRRRLVKDSNTKKAGKTGPMKTLLVRVMTPDLRERLENLRKKPENIPQPISNTSRANLNKLLTDYTEMKKAILHVYWEEFQKDPVGLMSRVAQPASKKIDQNKLKPEMDEKGNLTTAGFACSQCGQPLFVYKLEQVSEKGKAYTNYFGRCNVAEHEKLILLAQLKPEKDSDEAVTYSLGKFGQRALDFYSIHVTKESTHPVKPLAQIAGNRYASYPVGKALSDACMGTIASFLSKYQDIIIEHQKVVKGNQKRLESLRELAGKENLEYPSVTLPPQPHTKEGVDAYNEVIARVRMWVNLNLWQKLKLSRDDAKPLLRLKGFPSFPLVERQANEVDWWDMVCNVKKLINEKKEDGKVFWQNLAGYKRQEALRPYLSSEEDRKKGKKFARYQLGDLLNHLEKKHGEDWGKVYDEAWERIDKKVEGLSKHIKLEEERRSEDAQSKAALTDWLRAKASFVIEGLKEADKDEFCRCELKLQKWYGDLRGKPFAIEAENSILDISGFSKQYNCAFIWQKDGVKKLNLYLIINYFKGGKLRFKKIKPEAFEANRFYTVINKKSGEIVPMEVNFNFDDPNLIILPLAFGKRQGREFIWNDLLSLETGSLKLANGRVIEKTLYNRRTRQDEPALFVALTFERREVLDSSNIKPMSNLIGVDRGENIPAVIALTDPEGCPLSRFKDSLGNPTHILRIGESYKEKQRTIQAKKEVEQRRAGGYSRKYASKAKNLADDMVRNTARDLLYYAVTQDAMLIFENLSRGFGRQGKRTFMAERQYTRMEDWLTAKLAYEGLPSKTYLSKTLAQYTSKTCSNCGFTITSADYDRVLEKLKKTATGWMTTINGKELKVEGQITYYNRYKRQNVVKDLSVELDRLSEESVNNDISSWTKGRSGEALSLLKKRFSHRPVQEKFVCLNCGFETHADEQAALNIARSWLFLRSQEYKKYQTNKTTGNTDKRAFVETWQSFYRKKLKEVWKPAV

SEQ ID NO: 45425 - protein, 979 aa, synthetic construct
  REGION 1..979: note = engineered CasX variant
QEIKRINKIRRRLVKDSNTKKAGKTGPMKTLLVRVMTPDLRERLENLRKKPENIPQPISNTSRANLNKLLTDYTEMKKAILHVYWEEFQKDPVGLMSRVAQPASKKIDQNKLKPEMDEKGNLTTAGFACSQCGQPLFVYKLEQVSEKGKAYTNYFGRCNVAEHEKLILLAQLKPEKDSDEAVTYSLGKFGQRALDFYSIHVTKESTHPVKPLAQIAGNRYASHPVGKALSDACMGTIASFLSKYQDIIIEHQKVVKGNQKRLESLRELAGKENLEYPSVTLPPQPHTKEGVDAYNEVIARVRMWVNLNLWQKLKLSRDDAKPLLRLKGFPSFPLVERQANEVDWWDMVCNVKKLINEKKEDGKVFWQNLAGYKRQEALRPYLSSEEDRKKGKKFARYQLGDLLNHLEKKHGEDWGKVYDEAWERIDKKVEGLSKHIKLEEERRSEDAQSKAALTDWLRAKASFVIEGLKEADKDEFCRCELKLQKWYGDLRGKPFAIEAENSILDISGFSKQYNCAFIWQKDGVKKLNLYLIINYFKGGKLRFKKIKPEAFEANRFYTVINKKSGEIVPMEVNFNFDDPNLIILPLAFGKRQGREFIWNDLLSLETGSLKLANGRVIEKTLYNRRTRQDEPALFVALTFERREVLDSSNIKPMSNLIGVDRGENIPAVIALTDPEGCPLSRFKDSLGNPTHILRIGESYKEKQRTIQAKKEVEQRRAGGYSRKYASKAKNLADDMVRNTARDLLYYAVTQDAMLIFENLSRGFGRQGKRTFMAERQYTRMEDWLTAKLAYEGLPSKTYLSKTLAQYTSKTCSNCGFTITSADYDRVLEKLKKTATGWMTTINGKELKVEGQITYYNRYKRQNVVKDLSVELDRLSEESVNNDISSWTKGRSGEALSLLKKRFSHRPVQEKFVCLNCGFETHADEQAALNIARSWLFLRSQEYKKYQTNKTTGNTDKRAFVETWQSFYRKKLKEVWKPAV

SEQ ID NO: 45426 - protein, 979 aa, synthetic construct
  REGION 1..979: note = engineered CasX variant
QEIKRINKIRRRLVKDSNTKKAGKTGPMKTLLVRVMTPDLRERLENLRKKPENIPQPISNTSRANLNKLLTDYTEMKKAILHVYWEEFQKDPVGLMSRVAQPASKKIDQNKLKPEMDEKGNLTTAGFACSQCGQPLFVYKLEQVSEKGKAYTNYFGRCNVAEHEKLILLAQLKPEKDSDEAVTYSLGKFGQRALDFYSIHVTKESTHPVKPLAQIAGNRYASSPVGKALSDACMGTIASFLSKYQDIIIEHQKVVKGNQKRLESLRELAGKENLEYPSVTLPPQPHTKEGVDAYNEVIARVRMWVNLNLWQKLKLSRDDAKPLLRLKGFPSFPLVERQANEVDWWDMVCNVKKLINEKKEDGKVFWQNLAGYKRQEALRPYLSSEEDRKKGKKFARYQLGDLLNHLEKKHGEDWGKVYDEAWERIDKKVEGLSKHIKLEEERRSEDAQSKAALTDWLRAKASFVIEGLKEADKDEFCRCELKLQKWYGDLRGKPFAIEAENSILDISGFSKQYNCAFIWQKDGVKKLNLYLIINYFKGGKLRFKKIKPEAFEANRFYTVINKKSGEIVPMEVNFNFDDPNLIILPLAFGKRQGREFIWNDLLSLETGSLKLANGRVIEKTLYNRRTRQDEPALFVALTFERREVLDSSNIKPMSNLIGVDRGENIPAVIALTDPEGCPLSRFKDSLGNPTHILRIGESYKEKQRTIQAKKEVEQRRAGGYSRKYASKAKNLADDMVRNTARDLLYYAVTQDAMLIFENLSRGFGRQGKRTFMAERQYTRMEDWLTAKLAYEGLPSKTYLSKTLAQYTSKTCSNCGFTITSADYDRVLEKLKKTATGWMTTINGKELKVEGQITYYNRYKRQNVVKDLSVELDRLSEESVNNDISSWTKGRSGEALSLLKKRFSHRPVQEKFVCLNCGFETHADEQAALNIARSWLFLRSQEYKKYQTNKTTGNTDKRAFVETWQSFYRKKLKEVWKPAV

SEQ ID NO: 45427 - protein, 979 aa, synthetic construct
  REGION 1..979: note = engineered CasX variant
QEIKRINKIRRRLVKDSNTKKAGKTGPMKTLLVRVMTPDLRERLENLRKKPENIPQPISNTSRANLNKLLTDYTEMKKAILHVYWEEFQKDPVGLMSRVAQPASKKIDQNKLKPEMDEKGNLTTAGFACSQCGQPLFVYKLEQVSEKGKAYTNYFGRCNVAEHEKLILLAQLKPEKDSDEAVTYSLGKFGQRALDFYSIHVTKESTHPVKPLAQIAGNRYASTPVGKALSDACMGTIASFLSKYQDIIIEHQKVVKGNQKRLESLRELAGKENLEYPSVTLPPQPHTKEGVDAYNEVIARVRMWVNLNLWQKLKLSRDDAKPLLRLKGFPSFPLVERQANEVDWWDMVCNVKKLINEKKEDGKVFWQNLAGYKRQEALRPYLSSEEDRKKGKKFARYQLGDLLNHLEKKHGEDWGKVYDEAWERIDKKVEGLSKHIKLEEERRSEDAQSKAALTDWLRAKASFVIEGLKEADKDEFCRCELKLQKWYGDLRGKPFAIEAENSILDISGFSKQYNCAFIWQKDGVKKLNLYLIINYFKGGKLRFKKIKPEAFEANRFYTVINKKSGEIVPMEVNFNFDDPNLIILPLAFGKRQGREFIWNDLLSLETGSLKLANGRVIEKTLYNRRTRQDEPALFVALTFERREVLDSSNIKPMSNLIGVDRGENIPAVIALTDPEGCPLSRFKDSLGNPTHILRIGESYKEKQRTIQAKKEVEQRRAGGYSRKYASKAKNLADDMVRNTARDLLYYAVTQDAMLIFENLSRGFGRQGKRTFMAERQYTRMEDWLTAKLAYEGLPSKTYLSKTLAQYTSKTCSNCGFTITSADYDRVLEKLKKTATGWMTTINGKELKVEGQITYYNRYKRQNVVKDLSVELDRLSEESVNNDISSWTKGRSGEALSLLKKRFSHRPVQEKFVCLNCGFETHADEQAALNIARSWLFLRSQEYKKYQTNKTTGNTDKRAFVETWQSFYRKKLKEVWKPAV

SEQ ID NO: 45428 - protein, 979 aa, synthetic construct
  REGION 1..979: note = engineered CasX variant
QEIKRINKIRRRLVKDSNTKKAGKTGPMKTLLVRVMTPDLRERLENLRKKPENIPQPISNTSRANLNKLLTDYTEMKKAILHVYWEEFQKDPVGLMSRVAQPASKKIDQNKLKPEMDEKGNLTTAGFACSQCGQPLFVYKLEQVSEKGKAYTNYFGRCNVAEHEKLILLAQLKPEKDSDEAVTYSLGKFGQRALDFYSIHVTKESTHPVKPLAQIAGNRYASAPVGKALSDACMGTIASFLSKYQDIIIEHQKVVKGNQKRLESLRELAGKENLEYPSVTLPPQPHTKEGVDAYNEVIARVRMWVNLNLWQKLKLSRDDAKPLLRLKGFPSFPLVERQANEVDWWDMVCNVKKLINEKKEDGKVFWQNLAGYKRQEALRPYLSSEEDRKKGKKFARYQLGDLLNHLEKKHGEDWGKVYDEAWERIDKKVEGLSKHIKLEEERRSEDAQSKAALTDWLRAKASFVIEGLKEADKDEFCRCELKLQKWYGDLRGKPFAIEAENSILDISGFSKQYNCAFIWQKDGVKKLNLYLIINYFKGGKLRFKKIKPEAFEANRFYTVINKKSGEIVPMEVNFNFDDPNLIILPLAFGKRQGREFIWNDLLSLETGSLKLANGRVIEKTLYNRRTRQDEPALFVALTFERREVLDSSNIKPMSNLIGVDRGENIPAVIALTDPEGCPLSRFKDSLGNPTHILRIGESYKEKQRTIQAKKEVEQRRAGGYSRKYASKAKNLADDMVRNTARDLLYYAVTQDAMLIFENLSRGFGRQGKRTFMAERQYTRMEDWLTAKLAYEGLPSKTYLSKTLAQYTSKTCSNCGFTITSADYDRVLEKLKKTATGWMTTINGKELKVEGQITYYNRYKRQNVVKDLSVELDRLSEESVNNDISSWTKGRSGEALSLLKKRFSHRPVQEKFVCLNCGFETHADEQAALNIARSWLFLRSQEYKKYQTNKTTGNTDKRAFVETWQSFYRKKLKEVWKPAV

SEQ ID NO: 45429 - protein, 979 aa, synthetic construct
  REGION 1..979: note = engineered CasX variant
QEIKRINKIRRRLVKDSNTKKAGKTGPMKTLLVRVMTPDLRERLENLRKKPENIPQPISNTSRANLNKLLTDYTEMKKAILHVYWEEFQKDPVGLMSRVAQPASKKIDQNKLKPEMDEKGNLTTAGFACSQCGQPLFVYKLEQVSEKGKAYTNYFGRCNVAEHEKLILLAQLKPEKDSDEAVTYSLGKFGQRALDFYSIHVTKESTHPVKPLAQIAGNRYASVPVGKALSDACMGTIASFLSKYQDIIIEHQKVVKGNQKRLESLRELAGKENLEYPSVTLPPQPHTKEGVDAYNEVIARVRMWVNLNLWQKLKLSRDDAKPLLRLKGFPSFPLVERQANEVDWWDMVCNVKKLINEKKEDGKVFWQNLAGYKRQEALRPYLSSEEDRKKGKKFARYQLGDLLNHLEKKHGEDWGKVYDEAWERIDKKVEGLSKHIKLEEERRSEDAQSKAALTDWLRAKASFVIEGLKEADKDEFCRCELKLQKWYGDLRGKPFAIEAENSILDISGFSKQYNCAFIWQKDGVKKLNLYLIINYFKGGKLRFKKIKPEAFEANRFYTVINKKSGEIVPMEVNFNFDDPNLIILPLAFGKRQGREFIWNDLLSLETGSLKLANGRVIEKTLYNRRTRQDEPALFVALTFERREVLDSSNIKPMSNLIGVDRGENIPAVIALTDPEGCPLSRFKDSLGNPTHILRIGESYKEKQRTIQAKKEVEQRRAGGYSRKYASKAKNLADDMVRNTARDLLYYAVTQDAMLIFENLSRGFGRQGKRTFMAERQYTRMEDWLTAKLAYEGLPSKTYLSKTLAQYTSKTCSNCGFTITSADYDRVLEKLKKTATGWMTTINGKELKVEGQITYYNRYKRQNVVKDLSVELDRLSEESVNNDISSWTKGRSGEALSLLKKRFSHRPVQEKFVCLNCGFETHADEQAALNIARSWLFLRSQEYKKYQTNKTTGNTDKRAFVETWQSFYRKKLKEVWKPAV

SEQ ID NO: 45430 - protein, 979 aa, synthetic construct
  REGION 1..979: note = engineered CasX variant
QEIKRINKIRRRLVKDSNTKKAGKTGPMKTLLVRVMTPDLRERLENLRKKPENIPQPISNTSRANLNKLLTDYTEMKKAILHVYWEEFQKDPVGLMSRVAQPASKKIDQNKLKPEMDEKGNLTTAGFACSQCGQPLFVYKLEQVSEKGKAYTNYFGRCNVAEHEKLIKLAQLKPEKDSDEAVTYSLGKFGQRALDFYSIHVTKESTHPVKPLAQIAGNRYASGPVGKALSDACMGTIASFLSKYQDIIIEHQKVVKGNQKRLESLRELAGKENLEYPSVTLPPQPHTKEGVDAYNEVIARVRMWVNLNLWQKLKLSRDDAKPLLRLKGFPSFPLVERQANEVDWWDMVCNVKKLINEKKEDGKVFWQNLAGYKRQEALRPYLSSEEDRKKGKKFARYQLGDLLNHLEKKHGEDWGKVYDEAWERIDKKVEGLSKHIKLEEERRSEDAQSKAALTDWLRAKASFVIEGLKEADKDEFCRCELKLQKWYGDLRGKPFAIEAENSILDISGFSKQYNCAFIWQKDGVKKLNLYLIINYFKGGKLRFKKIKPEAFEANRFYTVINKKSGEIVPMEVNFNFDDPNLIILPLAFGKRQGREFIWNDLLSLETGSLKLANGRVIEKTLYNRRTRQDEPALFVALTFERREVLDSSNIKPMSNLIGVDRGENIPAVIALTDPEGCPLSRFKDSLGNPTHILRIGESYKEKQRTIQAKKEVEQRRAGGYSRKYASKAKNLADDMVRNTARDLLYYAVTQDAMLIFENLSRGFGRQGKRTFMAERQYTRMEDWLTAKLAYEGLPSKTYLSKTLAQYTSKTCSNCGFTITSADYDRVLEKLKKTATGWMTTINGKELKVEGQITYYNRYKRQNVVKDLSVELDRLSEESVNNDISSWTKGRSGEALSLLKKRFSHRPVQEKFVCLNCGFETHADEQAALNIARSWLFLRSQEYKKYQTNKTTGNTDKRAFVETWQSFYRKKLKEVWKPAV

SEQ ID NO: 45431 - protein, 978 aa, synthetic construct
  REGION 1..978: note = engineered CasX variant
QEIKRINKIRRRLVKDSNTKKAGKTGPMKTLLVRVMTPDLRERLENLRKKPENIPQPISNTSRANLNKLLTDYTEMKKAILHVYWEEFQKDPVGLMSRVAQPASKKIDQNKLKPEMDEKGNLTTAGFACSQCGQPLFVYKLEQVSEKGKAYTNYFGRCNVAEHEKLILLAQLKPEKDSDEAVTYSLGKFGQRALDFYSIHVTKESTHPVKPLAQIAGNRYASPVGKALSDACMGTIASFLSKYQDIIIEHQKVVKGNQKRLESLRELAGKENLEYPSVTLPPQPHTKEGVDAYNEVIARVRMWVNLNLWQKLKLSRDDAKPLLRLKGFPSFPLVERQANEVDWWDMVCNVKKLINEKKEDGKVFWQNLAGYKRQEALRPYLSSEEDRKKGKKFARYQLGDLLNHLEKKHGEDWGKVYDEAWERIDKKVEGLSKHIKLEEERRSEDAQSKAALTDWLRAKASFVIEGLKEADKDEFCRCELKLQKWYGDLRGKPFAIEAENSILDISGFSKQYNCAFIWQKDGVKKLNLYLIINYFKGGKLRFKKIKPEAFEANRFYTVINKKSGEIVPMEVNFNFDDPNLIILPLAFGKRQGREFIWNDLLSLETGSLKLANGRVIEKTLYNRRTRQDEPALFVALTFERREVLDSSNIKPMSNLIGVDRGENIPAVIALTDPEGCPLSRFKDSLGNPTHILRIGESYKEKQRTIQAKKEVEQRRAGGYSRKYASKAKNLADDMVRNTARDLLYYAVTQDAMLIFENLSRGFGRQGKRTFMAERQYTRMEDWLTAKLAYEGLPSKTYLSKTLAQYTSKTCSNCGFTITSADYDRVLEKLKKTATGWMTTINGKELKVEGQITYYNRYKRQNVVKDLSVELDRLSEESVNNDISSWTKGRSGEALSLLKKRFSHRPVQEKFVCLNCGFETHADEQAALNIARSWLFLRSQEYKKYQTNKTTGNTDKRAFVETWQSFYRKKLKEVWKPAV

SEQ ID NO: 45432 - protein, 979 aa, synthetic construct
  REGION 1..979: note = engineered CasX variant
QEIKRINKIRRRLVKDSNTKKAGKTGPMKTLLVRVMTPDLRERLENLRKKPENIPQPISNTSRANLNKLLTDYTEMKKAILHVYWEEFQKDPVGLMSRVAQPASKKIDQNKLKPEMDEKGNLTTAGFACSQCGQPLFVYKLEQVSEKGKAYTNYFGRCNVAEHEKLILLAQLKPEKDSDEAVTYSLGKFGQRALDFYSIHVTKESTHPVKPLAQIAGNRYASYPVGKALSDACMGTIASFLSKYQDIIIEHQKVVKGNQKRLESLRELAGKENLEYPSVTLPPQPHTKEGVDAYNEVIARVRMWVNLNLWQKLKLSRDDAKPLLRLKGFPSFPLVERQANEVDWWDMVCNVKKLINEKKEDGKVFWQNLAGYKRQEALRPYLSSEEDRKKGKKFARYQLGDLLWHLEKKHGEDWGKVYDEAWERIDKKVEGLSKHIKLEEERRSEDAQSKAALTDWLRAKASFVIEGLKEADKDEFCRCELKLQKWYGDLRGKPFAIEAENSILDISGFSKQYNCAFIWQKDGVKKLNLYLIINYFKGGKLRFKKIKPEAFEANRFYTVINKKSGEIVPMEVNFNFDDPNLIILPLAFGKRQGREFIWNDLLSLETGSLKLANGRVIEKTLYNRRTRQDEPALFVALTFERREVLDSSNIKPMSNLIGVDRGENIPAVIALTDPEGCPLSRFKDSLGNPTHILRIGESYKEKQRTIQAKKEVEQRRAGGYSRKYASKAKNLADDMVRNTARDLLYYAVTQDAMLIFENLSRGFGRQGKRTFMAERQYTRMEDWLTAKLAYEGLPSKTYLSKTLAQYTSKTCSNCGFTITSADYDRVLEKLKKTATGWMTTINGKELKVEGQITYYNRYKRQNVVKDLSVELDRLSEESVNNDISSWTKGRSGEALSLLKKRFSHRPVQEKFVCLNCGFETHADEQAALNIARSWLFLRSQEYKKYQTNKTTGNTDKRAFVETWQSFYRKKLKEVWKPAV

SEQ ID NO: 45433 - protein, 979 aa, synthetic construct
  REGION 1..979: note = engineered CasX variant
QEIKRINKIRRRLVKDSNTKKAGKTGPMKTLLVRVMTPDLRERLENLRKKPENIPQPISNTSRANLNKLLTDYTEMKKAILHVYWEEFQKDPVGLMSRVAQPASKKIDQNKLKPEMDEKGNLTTAGFACSQCGQPLFVYKLEQVSEKGKAYTNYFGRCNVAEHEKLILLAQLKPEKDSDEAVTYSLGKFGQRALDFYSIHVTKESTHPVKPLAQIAGNRYASHPVGKALSDACMGTIASFLSKYQDIIIEHQKVVKGNQKRLESLRELAGKENLEYPSVTLPPQPHTKEGVDAYNEVIARVRMWVNLNLWQKLKLSRDDAKPLLRLKGFPSFPLVERQANEVDWWDMVCNVKKLINEKKEDGKVFWQNLAGYKRQEALRPYLSSEEDRKKGKKFARYQLGDLLWHLEKKHGEDWGKVYDEAWERIDKKVEGLSKHIKLEEERRSEDAQSKAALTDWLRAKASFVIEGLKEADKDEFCRCELKLQKWYGDLRGKPFAIEAENSILDISGFSKQYNCAFIWQKDGVKKLNLYLIINYFKGGKLRFKKIKPEAFEANRFYTVINKKSGEIVPMEVNFNFDDPNLIILPLAFGKRQGREFIWNDLLSLETGSLKLANGRVIEKTLYNRRTRQDEPALFVALTFERREVLDSSNIKPMSNLIGVDRGENIPAVIALTDPEGCPLSRFKDSLGNPTHILRIGESYKEKQRTIQAKKEVEQRRAGGYSRKYASKAKNLADDMVRNTARDLLYYAVTQDAMLIFENLSRGFGRQGKRTFMAERQYTRMEDWLTAKLAYEGLPSKTYLSKTLAQYTSKTCSNCGFTITSADYDRVLEKLKKTATGWMTTINGKELKVEGQITYYNRYKRQNVVKDLSVELDRLSEESVNNDISSWTKGRSGEALSLLKKRFSHRPVQEKFVCLNCGFETHADEQAALNIARSWLFLRSQEYKKYQTNKTTGNTDKRAFVETWQSFYRKKLKEVWKPAV

SEQ ID NO: 45434 - protein, 979 aa, synthetic construct
  REGION 1..979: note = engineered CasX variant
QEIKRINKIRRRLVKDSNTKKAGKTGPMKTLLVRVMTPDLRERLENLRKKPENIPQPISNTSRANLNKLLTDYTEMKKAILHVYWEEFQKDPVGLMSRVAQPASKKIDQNKLKPEMDEKGNLTTAGFACSQCGQPLFVYKLEQVSEKGKAYTNYFGRCNVAEHEKLILLAQLKPEKDSDEAVTYSLGKFGQRALDFYSIHVTKESTHPVKPLAQIAGNRYASSPVGKALSDACMGTIASFLSKYQDIIIEHQKVVKGNQKRLESLRELAGKENLEYPSVTLPPQPHTKEGVDAYNEVIARVRMWVNLNLWQKLKLSRDDAKPLLRLKGFPSFPLVERQANEVDWWDMVCNVKKLINEKKEDGKVFWQNLAGYKRQEALRPYLSSEEDRKKGKKFARYQLGDLLWHLEKKHGEDWGKVYDEAWERIDKKVEGLSKHIKLEEERRSEDAQSKAALTDWLRAKASFVIEGLKEADKDEFCRCELKLQKWYGDLRGKPFAIEAENSILDISGFSKQYNCAFIWQKDGVKKLNLYLIINYFKGGKLRFKKIKPEAFEANRFYTVINKKSGEIVPMEVNFNFDDPNLIILPLAFGKRQGREFIWNDLLSLETGSLKLANGRVIEKTLYNRRTRQDEPALFVALTFERREVLDSSNIKPMSNLIGVDRGENIPAVIALTDPEGCPLSRFKDSLGNPTHILRIGESYKEKQRTIQAKKEVEQRRAGGYSRKYASKAKNLADDMVRNTARDLLYYAVTQDAMLIFENLSRGFGRQGKRTFMAERQYTRMEDWLTAKLAYEGLPSKTYLSKTLAQYTSKTCSNCGFTITSADYDRVLEKLKKTATGWMTTINGKELKVEGQITYYNRYKRQNVVKDLSVELDRLSEESVNNDISSWTKGRSGEALSLLKKRFSHRPVQEKFVCLNCGFETHADEQAALNIARSWLFLRSQEYKKYQTNKTTGNTDKRAFVETWQSFYRKKLKEVWKPAV

SEQ ID NO: 45435 - protein, 979 aa, synthetic construct
  REGION 1..979: note = engineered CasX variant
QEIKRINKIRRRLVKDSNTKKAGKTGPMKTLLVRVMTPDLRERLENLRKKPENIPQPISNTSRANLNKLLTDYTEMKKAILHVYWEEFQKDPVGLMSRVAQPASKKIDQNKLKPEMDEKGNLTTAGFACSQCGQPLFVYKLEQVSEKGKAYTNYFGRCNVAEHEKLILLAQLKPEKDSDEAVTYSLGKFGQRALDFYSIHVTKESTHPVKPLAQIAGNRYASTPVGKALSDACMGTIASFLSKYQDIIIEHQKVVKGNQKRLESLRELAGKENLEYPSVTLPPQPHTKEGVDAYNEVIARVRMWVNLNLWQKLKLSRDDAKPLLRLKGFPSFPLVERQANEVDWWDMVCNVKKLINEKKEDGKVFWQNLAGYKRQEALRPYLSSEEDRKKGKKFARYQLGDLLWHLEKKHGEDWGKVYDEAWERIDKKVEGLSKHIKLEEERRSEDAQSKAALTDWLRAKASFVIEGLKEADKDEFCRCELKLQKWYGDLRGKPFAIEAENSILDISGFSKQYNCAFIWQKDGVKKLNLYLIINYFKGGKLRFKKIKPEAFEANRFYTVINKKSGEIVPMEVNFNFDDPNLIILPLAFGKRQGREFIWNDLLSLETGSLKLANGRVIEKTLYNRRTRQDEPALFVALTFERREVLDSSNIKPMSNLIGVDRGENIPAVIALTDPEGCPLSRFKDSLGNPTHILRIGESYKEKQRTIQAKKEVEQRRAGGYSRKYASKAKNLADDMVRNTARDLLYYAVTQDAMLIFENLSRGFGRQGKRTFMAERQYTRMEDWLTAKLAYEGLPSKTYLSKTLAQYTSKTCSNCGFTITSADYDRVLEKLKKTATGWMTTINGKELKVEGQITYYNRYKRQNVVKDLSVELDRLSEESVNNDISSWTKGRSGEALSLLKKRFSHRPVQEKFVCLNCGFETHADEQAALNIARSWLFLRSQEYKKYQTNKTTGNTDKRAFVETWQSFYRKKLKEVWKPAV

SEQ ID NO: 45436 - protein, 979 aa, synthetic construct
  REGION 1..979: note = engineered CasX variant
QEIKRINKIRRRLVKDSNTKKAGKTGPMKTLLVRVMTPDLRERLENLRKKPENIPQPISNTSRANLNKLLTDYTEMKKAILHVYWEEFQKDPVGLMSRVAQPASKKIDQNKLKPEMDEKGNLTTAGFACSQCGQPLFVYKLEQVSEKGKAYTNYFGRCNVAEHEKLILLAQLKPEKDSDEAVTYSLGKFGQRALDFYSIHVTKESTHPVKPLAQIAGNRYASAPVGKALSDACMGTIASFLSKYQDIIIEHQKVVKGNQKRLESLRELAGKENLEYPSVTLPPQPHTKEGVDAYNEVIARVRMWVNLNLWQKLKLSRDDAKPLLRLKGFPSFPLVERQANEVDWWDMVCNVKKLINEKKEDGKVFWQNLAGYKRQEALRPYLSSEEDRKKGKKFARYQLGDLLWHLEKKHGEDWGKVYDEAWERIDKKVEGLSKHIKLEEERRSEDAQSKAALTDWLRAKASFVIEGLKEADKDEFCRCELKLQKWYGDLRGKPFAIEAENSILDISGFSKQYNCAFIWQKDGVKKLNLYLIINYFKGGKLRFKKIKPEAFEANRFYTVINKKSGEIVPMEVNFNFDDPNLIILPLAFGKRQGREFIWNDLLSLETGSLKLANGRVIEKTLYNRRTRQDEPALFVALTFERREVLDSSNIKPMSNLIGVDRGENIPAVIALTDPEGCPLSRFKDSLGNPTHILRIGESYKEKQRTIQAKKEVEQRRAGGYSRKYASKAKNLADDMVRNTARDLLYYAVTQDAMLIFENLSRGFGRQGKRTFMAERQYTRMEDWLTAKLAYEGLPSKTYLSKTLAQYTSKTCSNCGFTITSADYDRVLEKLKKTATGWMTTINGKELKVEGQITYYNRYKRQNVVKDLSVELDRLSEESVNNDISSWTKGRSGEALSLLKKRFSHRPVQEKFVCLNCGFETHADEQAALNIARSWLFLRSQEYKKYQTNKTTGNTDKRAFVETWQSFYRKKLKEVWKPAV

SEQ ID NO: 45437 - protein, 979 aa, synthetic construct
  REGION 1..979: note = engineered CasX variant
QEIKRINKIRRRLVKDSNTKKAGKTGPMKTLLVRVMTPDLRERLENLRKKPENIPQPISNTSRANLNKLLTDYTEMKKAILHVYWEEFQKDPVGLMSRVAQPASKKIDQNKLKPEMDEKGNLTTAGFACSQCGQPLFVYKLEQVSEKGKAYTNYFGRCNVAEHEKLILLAQLKPEKDSDEAVTYSLGKFGQRALDFYSIHVTKESTHPVKPLAQIAGNRYASVPVGKALSDACMGTIASFLSKYQDIIIEHQKVVKGNQKRLESLRELAGKENLEYPSVTLPPQPHTKEGVDAYNEVIARVRMWVNLNLWQKLKLSRDDAKPLLRLKGFPSFPLVERQANEVDWWDMVCNVKKLINEKKEDGKVFWQNLAGYKRQEALRPYLSSEEDRKKGKKFARYQLGDLLWHLEKKHGEDWGKVYDEAWERIDKKVEGLSKHIKLEEERRSEDAQSKAALTDWLRAKASFVIEGLKEADKDEFCRCELKLQKWYGDLRGKPFAIEAENSILDISGFSKQYNCAFIWQKDGVKKLNLYLIINYFKGGKLRFKKIKPEAFEANRFYTVINKKSGEIVPMEVNFNFDDPNLIILPLAFGKRQGREFIWNDLLSLETGSLKLANGRVIEKTLYNRRTRQDEPALFVALTFERREVLDSSNIKPMSNLIGVDRGENIPAVIALTDPEGCPLSRFKDSLGNPTHILRIGESYKEKQRTIQAKKEVEQRRAGGYSRKYASKAKNLADDMVRNTARDLLYYAVTQDAMLIFENLSRGFGRQGKRTFMAERQYTRMEDWLTAKLAYEGLPSKTYLSKTLAQYTSKTCSNCGFTITSADYDRVLEKLKKTATGWMTTINGKELKVEGQITYYNRYKRQNVVKDLSVELDRLSEESVNNDISSWTKGRSGEALSLLKKRFSHRPVQEKFVCLNCGFETHADEQAALNIARSWLFLRSQEYKKYQTNKTTGNTDKRAFVETWQSFYRKKLKEVWKPAV

SEQ ID NO: 45438 - protein, 979 aa, synthetic construct
  REGION 1..979: note = engineered CasX variant
QEIKRINKIRRRLVKDSNTKKAGKTGPMKTLLVRVMTPDLRERLENLRKKPENIPQPISNTSRANLNKLLTDYTEMKKAILHVYWEEFQKDPVGLMSRVAQPASKKIDQNKLKPEMDEKGNLTTAGFACSQCGQPLFVYKLEQVSEKGKAYTNYFGRCNVAEHEKLIKLAQLKPEKDSDEAVTYSLGKFGQRALDFYSIHVTKESTHPVKPLAQIAGNRYASGPVGKALSDACMGTIASFLSKYQDIIIEHQKVVKGNQKRLESLRELAGKENLEYPSVTLPPQPHTKEGVDAYNEVIARVRMWVNLNLWQKLKLSRDDAKPLLRLKGFPSFPLVERQANEVDWWDMVCNVKKLINEKKEDGKVFWQNLAGYKRQEALRPYLSSEEDRKKGKKFARYQLGDLLWHLEKKHGEDWGKVYDEAWERIDKKVEGLSKHIKLEEERRSEDAQSKAALTDWLRAKASFVIEGLKEADKDEFCRCELKLQKWYGDLRGKPFAIEAENSILDISGFSKQYNCAFIWQKDGVKKLNLYLIINYFKGGKLRFKKIKPEAFEANRFYTVINKKSGEIVPMEVNFNFDDPNLIILPLAFGKRQGREFIWNDLLSLETGSLKLANGRVIEKTLYNRRTRQDEPALFVALTFERREVLDSSNIKPMSNLIGVDRGENIPAVIALTDPEGCPLSRFKDSLGNPTHILRIGESYKEKQRTIQAKKEVEQRRAGGYSRKYASKAKNLADDMVRNTARDLLYYAVTQDAMLIFENLSRGFGRQGKRTFMAERQYTRMEDWLTAKLAYEGLPSKTYLSKTLAQYTSKTCSNCGFTITSADYDRVLEKLKKTATGWMTTINGKELKVEGQITYYNRYKRQNVVKDLSVELDRLSEESVNNDISSWTKGRSGEALSLLKKRFSHRPVQEKFVCLNCGFETHADEQAALNIARSWLFLRSQEYKKYQTNKTTGNTDKRAFVETWQSFYRKKLKEVWKPAV

SEQ ID NO: 45439 - protein, 978 aa, synthetic construct
  REGION 1..978: note = engineered CasX variant
QEIKRINKIRRRLVKDSNTKKAGKTGPMKTLLVRVMTPDLRERLENLRKKPENIPQPISNTSRANLNKLLTDYTEMKKAILHVYWEEFQKDPVGLMSRVAQPASKKIDQNKLKPEMDEKGNLTTAGFACSQCGQPLFVYKLEQVSEKGKAYTNYFGRCNVAEHEKLILLAQLKPEKDSDEAVTYSLGKFGQRALDFYSIHVTKESTHPVKPLAQIAGNRYASPVGKALSDACMGTIASFLSKYQDIIIEHQKVVKGNQKRLESLRELAGKENLEYPSVTLPPQPHTKEGVDAYNEVIARVRMWVNLNLWQKLKLSRDDAKPLLRLKGFPSFPLVERQANEVDWWDMVCNVKKLINEKKEDGKVFWQNLAGYKRQEALRPYLSSEEDRKKGKKFARYQLGDLLWHLEKKHGEDWGKVYDEAWERIDKKVEGLSKHIKLEEERRSEDAQSKAALTDWLRAKASFVIEGLKEADKDEFCRCELKLQKWYGDLRGKPFAIEAENSILDISGFSKQYNCAFIWQKDGVKKLNLYLIINYFKGGKLRFKKIKPEAFEANRFYTVINKKSGEIVPMEVNFNFDDPNLIILPLAFGKRQGREFIWNDLLSLETGSLKLANGRVIEKTLYNRRTRQDEPALFVALTFERREVLDSSNIKPMSNLIGVDRGENIPAVIALTDPEGCPLSRFKDSLGNPTHILRIGESYKEKQRTIQAKKEVEQRRAGGYSRKYASKAKNLADDMVRNTARDLLYYAVTQDAMLIFENLSRGFGRQGKRTFMAERQYTRMEDWLTAKLAYEGLPSKTYLSKTLAQYTSKTCSNCGFTITSADYDRVLEKLKKTATGWMTTINGKELKVEGQITYYNRYKRQNVVKDLSVELDRLSEESVNNDISSWTKGRSGEALSLLKKRFSHRPVQEKFVCLNCGFETHADEQAALNIARSWLFLRSQEYKKYQTNKTTGNTDKRAFVETWQSFYRKKLKEVWKPAV

SEQ ID NO: 45440 - protein, 979 aa, synthetic construct
  REGION 1..979: note = engineered CasX variant
QEIKRINKIRRRLVKDSNTKKAGKTGPMKTLLVRVMTPDLRERLENLRKKPENIPQPISNTSRANLNKLLTDYTEMKKAILHVYWEEFQKDPVGLMSRVAQPASKKIDQNKLKPEMDEKGNLTTAGFACSQCGQPLFVYKLEQVSEKGKAYTNYFGRCNVAEHEKLILLAQLKPEKDSDEAVTYSLGKFGQRALDFYSIHVTKESTHPVKPLAQIAGNRYASYPVGKALSDACMGTIASFLSKYQDIIIEHQKVVKGNQKRLESLRELAGKENLEYPSVTLPPQPHTKEGVDAYNEVIARVRMWVNLNLWQKLKLSRDDAKPLLRLKGFPSFPLVERQANEVDWWDMVCNVKKLINEKKEDGKVFWQNLAGYKRQEALRPYLSSEEDRKKGKKFARYQLGDLLLHLYKKHGEDWGKVYDEAWERIDKKVEGLSKHIKLEEERRSEDAQSKAALTDWLRAKASFVIEGLKEADKDEFCRCELKLQKWYGDLRGKPFAIEAENSILDISGFSKQYNCAFIWQKDGVKKLNLYLIINYFKGGKLRFKKIKPEAFEANRFYTVINKKSGEIVPMEVNFNFDDPNLIILPLAFGKRQGREFIWNDLLSLETGSLKLANGRVIEKTLYNRRTRQDEPALFVALTFERREVLDSSNIKPMSNLIGVDRGENIPAVIALTDPEGCPLSRFKDSLGNPTHILRIGESYKEKQRTIQAKKEVEQRRAGGYSRKYASKAKNLADDMVRNTARDLLYYAVTQDAMLIFENLSRGFGRQGKRTFMAERQYTRMEDWLTAKLAYEGLPSKTYLSKTLAQYTSKTCSNCGFTITSADYDRVLEKLKKTATGWMTTINGKELKVEGQITYYNRYKRQNVVKDLSVELDRLSEESVNNDISSWTKGRSGEALSLLKKRFSHRPVQEKFVCLNCGFETHADEQAALNIARSWLFLRSQEYKKYQTNKTTGNTDKRAFVETWQSFYRKKLKEVWKPAV

SEQ ID NO: 45441 - protein, 979 aa, synthetic construct
  REGION 1..979: note = engineered CasX variant
QEIKRINKIRRRLVKDSNTKKAGKTGPMKTLLVRVMTPDLRERLENLRKKPENIPQPISNTSRANLNKLLTDYTEMKKAILHVYWEEFQKDPVGLMSRVAQPASKKIDQNKLKPEMDEKGNLTTAGFACSQCGQPLFVYKLEQVSEKGKAYTNYFGRCNVAEHEKLILLAQLKPEKDSDEAVTYSLGKFGQRALDFYSIHVTKESTHPVKPLAQIAGNRYASHPVGKALSDACMGTIASFLSKYQDIIIEHQKVVKGNQKRLESLRELAGKENLEYPSVTLPPQPHTKEGVDAYNEVIARVRMWVNLNLWQKLKLSRDDAKPLLRLKGFPSFPLVERQANEVDWWDMVCNVKKLINEKKEDGKVFWQNLAGYKRQEALRPYLSSEEDRKKGKKFARYQLGDLLLHLYKKHGEDWGKVYDEAWERIDKKVEGLSKHIKLEEERRSEDAQSKAALTDWLRAKASFVIEGLKEADKDEFCRCELKLQKWYGDLRGKPFAIEAENSILDISGFSKQYNCAFIWQKDGVKKLNLYLIINYFKGGKLRFKKIKPEAFEANRFYTVINKKSGEIVPMEVNFNFDDPNLIILPLAFGKRQGREFIWNDLLSLETGSLKLANGRVIEKTLYNRRTRQDEPALFVALTFERREVLDSSNIKPMSNLIGVDRGENIPAVIALTDPEGCPLSRFKDSLGNPTHILRIGESYKEKQRTIQAKKEVEQRRAGGYSRKYASKAKNLADDMVRNTARDLLYYAVTQDAMLIFENLSRGFGRQGKRTFMAERQYTRMEDWLTAKLAYEGLPSKTYLSKTLAQYTSKTCSNCGFTITSADYDRVLEKLKKTATGWMTTINGKELKVEGQITYYNRYKRQNVVKDLSVELDRLSEESVNNDISSWTKGRSGEALSLLKKRFSHRPVQEKFVCLNCGFETHADEQAALNIARSWLFLRSQEYKKYQTNKTTGNTDKRAFVETWQSFYRKKLKEVWKPAV

SEQ ID NO: 45442 - protein, 979 aa, synthetic construct
  REGION 1..979: note = engineered CasX variant
QEIKRINKIRRRLVKDSNTKKAGKTGPMKTLLVRVMTPDLRERLENLRKKPENIPQPISNTSRANLNKLLTDYTEMKKAILHVYWEEFQKDPVGLMSRVAQPASKKIDQNKLKPEMDEKGNLTTAGFACSQCGQPLFVYKLEQVSEKGKAYTNYFGRCNVAEHEKLILLAQLKPEKDSDEAVTYSLGKFGQRALDFYSIHVTKESTHPVKPLAQIAGNRYASSPVGKALSDACMGTIASFLSKYQDIIIEHQKVVKGNQKRLESLRELAGKENLEYPSVTLPPQPHTKEGVDAYNEVIARVRMWVNLNLWQKLKLSRDDAKPLLRLKGFPSFPLVERQANEVDWWDMVCNVKKLINEKKEDGKVFWQNLAGYKRQEALRPYLSSEEDRKKGKKFARYQLGDLLLHLYKKHGEDWGKVYDEAWERIDKKVEGLSKHIKLEEERRSEDAQSKAALTDWLRAKASFVIEGLKEADKDEFCRCELKLQKWYGDLRGKPFAIEAENSILDISGFSKQYNCAFIWQKDGVKKLNLYLIINYFKGGKLRFKKIKPEAFEANRFYTVINKKSGEIVPMEVNFNFDDPNLIILPLAFGKRQGREFIWNDLLSLETGSLKLANGRVIEKTLYNRRTRQDEPALFVALTFERREVLDSSNIKPMSNLIGVDRGENIPAVIALTDPEGCPLSRFKDSLGNPTHILRIGESYKEKQRTIQAKKEVEQRRAGGYSRKYASKAKNLADDMVRNTARDLLYYAVTQDAMLIFENLSRGFGRQGKRTFMAERQYTRMEDWLTAKLAYEGLPSKTYLSKTLAQYTSKTCSNCGFTITSADYDRVLEKLKKTATGWMTTINGKELKVEGQITYYNRYKRQNVVKDLSVELDRLSEESVNNDISSWTKGRSGEALSLLKKRFSHRPVQEKFVCLNCGFETHADEQAALNIARSWLFLRSQEYKKYQTNKTTGNTDKRAFVETWQSFYRKKLKEVWKPAV

SEQ ID NO: 45443 - protein, 979 aa, synthetic construct
  REGION 1..979: note = engineered CasX variant
QEIKRINKIRRRLVKDSNTKKAGKTGPMKTLLVRVMTPDLRERLENLRKKPENIPQPISNTSRANLNKLLTDYTEMKKAILHVYWEEFQKDPVGLMSRVAQPASKKIDQNKLKPEMDEKGNLTTAGFACSQCGQPLFVYKLEQVSEKGKAYTNYFGRCNVAEHEKLILLAQLKPEKDSDEAVTYSLGKFGQRALDFYSIHVTKESTHPVKPLAQIAGNRYASTPVGKALSDACMGTIASFLSKYQDIIIEHQKVVKGNQKRLESLRELAGKENLEYPSVTLPPQPHTKEGVDAYNEVIARVRMWVNLNLWQKLKLSRDDAKPLLRLKGFPSFPLVERQANEVDWWDMVCNVKKLINEKKEDGKVFWQNLAGYKRQEALRPYLSSEEDRKKGKKFARYQLGDLLLHLYKKHGEDWGKVYDEAWERIDKKVEGLSKHIKLEEERRSEDAQSKAALTDWLRAKASFVIEGLKEADKDEFCRCELKLQKWYGDLRGKPFAIEAENSILDISGFSKQYNCAFIWQKDGVKKLNLYLIINYFKGGKLRFKKIKPEAFEANRFYTVINKKSGEIVPMEVNFNFDDPNLIILPLAFGKRQGREFIWNDLLSLETGSLKLANGRVIEKTLYNRRTRQDEPALFVALTFERREVLDSSNIKPMSNLIGVDRGENIPAVIALTDPEGCPLSRFKDSLGNPTHILRIGESYKEKQRTIQAKKEVEQRRAGGYSRKYASKAKNLADDMVRNTARDLLYYAVTQDAMLIFENLSRGFGRQGKRTFMAERQYTRMEDWLTAKLAYEGLPSKTYLSKTLAQYTSKTCSNCGFTITSADYDRVLEKLKKTATGWMTTINGKELKVEGQITYYNRYKRQNVVKDLSVELDRLSEESVNNDISSWTKGRSGEALSLLKKRFSHRPVQEKFVCLNCGFETHADEQAALNIARSWLFLRSQEYKKYQTNKTTGNTDKRAFVETWQSFYRKKLKEVWKPAV

SEQ ID NO: 45444 - protein, 979 aa, synthetic construct
  REGION 1..979: note = engineered CasX variant
QEIKRINKIRRRLVKDSNTKKAGKTGPMKTLLVRVMTPDLRERLENLRKKPENIPQPISNTSRANLNKLLTDYTEMKKAILHVYWEEFQKDPVGLMSRVAQPASKKIDQNKLKPEMDEKGNLTTAGFACSQCGQPLFVYKLEQVSEKGKAYTNYFGRCNVAEHEKLILLAQLKPEKDSDEAVTYSLGKFGQRALDFYSIHVTKESTHPVKPLAQIAGNRYASAPVGKALSDACMGTIASFLSKYQDIIIEHQKVVKGNQKRLESLRELAGKENLEYPSVTLPPQPHTKEGVDAYNEVIARVRMWVNLNLWQKLKLSRDDAKPLLRLKGFPSFPLVERQANEVDWWDMVCNVKKLINEKKEDGKVFWQNLAGYKRQEALRPYLSSEEDRKKGKKFARYQLGDLLLHLYKKHGEDWGKVYDEAWERIDKKVEGLSKHIKLEEERRSEDAQSKAALTDWLRAKASFVIEGLKEADKDEFCRCELKLQKWYGDLRGKPFAIEAENSILDISGFSKQYNCAFIWQKDGVKKLNLYLIINYFKGGKLRFKKIKPEAFEANRFYTVINKKSGEIVPMEVNFNFDDPNLIILPLAFGKRQGREFIWNDLLSLETGSLKLANGRVIEKTLYNRRTRQDEPALFVALTFERREVLDSSNIKPMSNLIGVDRGENIPAVIALTDPEGCPLSRFKDSLGNPTHILRIGESYKEKQRTIQAKKEVEQRRAGGYSRKYASKAKNLADDMVRNTARDLLYYAVTQDAMLIFENLSRGFGRQGKRTFMAERQYTRMEDWLTAKLAYEGLPSKTYLSKTLAQYTSKTCSNCGFTITSADYDRVLEKLKKTATGWMTTINGKELKVEGQITYYNRYKRQNVVKDLSVELDRLSEESVNNDISSWTKGRSGEALSLLKKRFSHRPVQEKFVCLNCGFETHADEQAALNIARSWLFLRSQEYKKYQTNKTTGNTDKRAFVETWQSFYRKKLKEVWKPAV

SEQ ID NO: 45445 - protein, 979 aa, synthetic construct
  REGION 1..979: note = engineered CasX variant
QEIKRINKIRRRLVKDSNTKKAGKTGPMKTLLVRVMTPDLRERLENLRKKPENIPQPISNTSRANLNKLLTDYTEMKKAILHVYWEEFQKDPVGLMSRVAQPASKKIDQNKLKPEMDEKGNLTTAGFACSQCGQPLFVYKLEQVSEKGKAYTNYFGRCNVAEHEKLILLAQLKPEKDSDEAVTYSLGKFGQRALDFYSIHVTKESTHPVKPLAQIAGNRYASVPVGKALSDACMGTIASFLSKYQDIIIEHQKVVKGNQKRLESLRELAGKENLEYPSVTLPPQPHTKEGVDAYNEVIARVRMWVNLNLWQKLKLSRDDAKPLLRLKGFPSFPLVERQANEVDWWDMVCNVKKLINEKKEDGKVFWQNLAGYKRQEALRPYLSSEEDRKKGKKFARYQLGDLLLHLYKKHGEDWGKVYDEAWERIDKKVEGLSKHIKLEEERRSEDAQSKAALTDWLRAKASFVIEGLKEADKDEFCRCELKLQKWYGDLRGKPFAIEAENSILDISGFSKQYNCAFIWQKDGVKKLNLYLIINYFKGGKLRFKKIKPEAFEANRFYTVINKKSGEIVPMEVNFNFDDPNLIILPLAFGKRQGREFIWNDLLSLETGSLKLANGRVIEKTLYNRRTRQDEPALFVALTFERREVLDSSNIKPMSNLIGVDRGENIPAVIALTDPEGCPLSRFKDSLGNPTHILRIGESYKEKQRTIQAKKEVEQRRAGGYSRKYASKAKNLADDMVRNTARDLLYYAVTQDAMLIFENLSRGFGRQGKRTFMAERQYTRMEDWLTAKLAYEGLPSKTYLSKTLAQYTSKTCSNCGFTITSADYDRVLEKLKKTATGWMTTINGKELKVEGQITYYNRYKRQNVVKDLSVELDRLSEESVNNDISSWTKGRSGEALSLLKKRFSHRPVQEKFVCLNCGFETHADEQAALNIARSWLFLRSQEYKKYQTNKTTGNTDKRAFVETWQSFYRKKLKEVWKPAV

SEQ ID NO: 45446 - protein, 979 aa, synthetic construct
  REGION 1..979: note = engineered CasX variant
QEIKRINKIRRRLVKDSNTKKAGKTGPMKTLLVRVMTPDLRERLENLRKKPENIPQPISNTSRANLNKLLTDYTEMKKAILHVYWEEFQKDPVGLMSRVAQPASKKIDQNKLKPEMDEKGNLTTAGFACSQCGQPLFVYKLEQVSEKGKAYTNYFGRCNVAEHEKLIKLAQLKPEKDSDEAVTYSLGKFGQRALDFYSIHVTKESTHPVKPLAQIAGNRYASGPVGKALSDACMGTIASFLSKYQDIIIEHQKVVKGNQKRLESLRELAGKENLEYPSVTLPPQPHTKEGVDAYNEVIARVRMWVNLNLWQKLKLSRDDAKPLLRLKGFPSFPLVERQANEVDWWDMVCNVKKLINEKKEDGKVFWQNLAGYKRQEALRPYLSSEEDRKKGKKFARYQLGDLLLHLYKKHGEDWGKVYDEAWERIDKKVEGLSKHIKLEEERRSEDAQSKAALTDWLRAKASFVIEGLKEADKDEFCRCELKLQKWYGDLRGKPFAIEAENSILDISGFSKQYNCAFIWQKDGVKKLNLYLIINYFKGGKLRFKKIKPEAFEANRFYTVINKKSGEIVPMEVNFNFDDPNLIILPLAFGKRQGREFIWNDLLSLETGSLKLANGRVIEKTLYNRRTRQDEPALFVALTFERREVLDSSNIKPMSNLIGVDRGENIPAVIALTDPEGCPLSRFKDSLGNPTHILRIGESYKEKQRTIQAKKEVEQRRAGGYSRKYASKAKNLADDMVRNTARDLLYYAVTQDAMLIFENLSRGFGRQGKRTFMAERQYTRMEDWLTAKLAYEGLPSKTYLSKTLAQYTSKTCSNCGFTITSADYDRVLEKLKKTATGWMTTINGKELKVEGQITYYNRYKRQNVVKDLSVELDRLSEESVNNDISSWTKGRSGEALSLLKKRFSHRPVQEKFVCLNCGFETHADEQAALNIARSWLFLRSQEYKKYQTNKTTGNTDKRAFVETWQSFYRKKLKEVWKPAV

SEQ ID NO: 45447 - protein, 978 aa, synthetic construct
  REGION 1..978: note = engineered CasX variant
QEIKRINKIRRRLVKDSNTKKAGKTGPMKTLLVRVMTPDLRERLENLRKKPENIPQPISNTSRANLNKLLTDYTEMKKAILHVYWEEFQKDPVGLMSRVAQPASKKIDQNKLKPEMDEKGNLTTAGFACSQCGQPLFVYKLEQVSEKGKAYTNYFGRCNVAEHEKLILLAQLKPEKDSDEAVTYSLGKFGQRALDFYSIHVTKESTHPVKPLAQIAGNRYASPVGKALSDACMGTIASFLSKYQDIIIEHQKVVKGNQKRLESLRELAGKENLEYPSVTLPPQPHTKEGVDAYNEVIARVRMWVNLNLWQKLKLSRDDAKPLLRLKGFPSFPLVERQANEVDWWDMVCNVKKLINEKKEDGKVFWQNLAGYKRQEALRPYLSSEEDRKKGKKFARYQLGDLLLHLYKKHGEDWGKVYDEAWERIDKKVEGLSKHIKLEEERRSEDAQSKAALTDWLRAKASFVIEGLKEADKDEFCRCELKLQKWYGDLRGKPFAIEAENSILDISGFSKQYNCAFIWQKDGVKKLNLYLIINYFKGGKLRFKKIKPEAFEANRFYTVINKKSGEIVPMEVNFNFDDPNLIILPLAFGKRQGREFIWNDLLSLETGSLKLANGRVIEKTLYNRRTRQDEPALFVALTFERREVLDSSNIKPMSNLIGVDRGENIPAVIALTDPEGCPLSRFKDSLGNPTHILRIGESYKEKQRTIQAKKEVEQRRAGGYSRKYASKAKNLADDMVRNTARDLLYYAVTQDAMLIFENLSRGFGRQGKRTFMAERQYTRMEDWLTAKLAYEGLPSKTYLSKTLAQYTSKTCSNCGFTITSADYDRVLEKLKKTATGWMTTINGKELKVEGQITYYNRYKRQNVVKDLSVELDRLSEESVNNDISSWTKGRSGEALSLLKKRFSHRPVQEKFVCLNCGFETHADEQAALNIARSWLFLRSQEYKKYQTNKTTGNTDKRAFVETWQSFYRKKLKEVWKPAV

SEQ ID NO: 45448 - protein, 979 aa, synthetic construct
  REGION 1..979: note = engineered CasX variant
QEIKRINKIRRRLVKDSNTKKAGKTGPMKTLLVRVMTPDLRERLENLRKKPENIPQPISNTSRANLNKLLTDYTEMKKAILHVYWEEFQKDPVGLMSRVAQPASKKIDQNKLKPEMDEKGNLTTAGFACSQCGQPLFVYKLEQVSEKGKAYTNYFGRCNVAEHEKLILLAQLKPEKDSDEAVTYSLGKFGQRALDFYSIHVTKESTHPVKPLAQIAGNRYASYPVGKALSDACMGTIASFLSKYQDIIIEHQKVVKGNQKRLESLRELAGKENLEYPSVTLPPQPHTKEGVDAYNEVIARVRMWVNLNLWQKLKLSRDDAKPLLRLKGFPSFPLVERQANEVDWWDMVCNVKKLINEKKEDGKVFWQNLAGYKRQEALRPYLSSEEDRKKGKKFARYQLGDLLLHLEKKHPEDWGKVYDEAWERIDKKVEGLSKHIKLEEERRSEDAQSKAALTDWLRAKASFVIEGLKEADKDEFCRCELKLQKWYGDLRGKPFAIEAENSILDISGFSKQYNCAFIWQKDGVKKLNLYLIINYFKGGKLRFKKIKPEAFEANRFYTVINKKSGEIVPMEVNFNFDDPNLIILPLAFGKRQGREFIWNDLLSLETGSLKLANGRVIEKTLYNRRTRQDEPALFVALTFERREVLDSSNIKPMSNLIGVDRGENIPAVIALTDPEGCPLSRFKDSLGNPTHILRIGESYKEKQRTIQAKKEVEQRRAGGYSRKYASKAKNLADDMVRNTARDLLYYAVTQDAMLIFENLSRGFGRQGKRTFMAERQYTRMEDWLTAKLAYEGLPSKTYLSKTLAQYTSKTCSNCGFTITSADYDRVLEKLKKTATGWMTTINGKELKVEGQITYYNRYKRQNVVKDLSVELDRLSEESVNNDISSWTKGRSGEALSLLKKRFSHRPVQEKFVCLNCGFETHADEQAALNIARSWLFLRSQEYKKYQTNKTTGNTDKRAFVETWQSFYRKKLKEVWKPAV

SEQ ID NO: 45449 - protein, 979 aa, synthetic construct
  REGION 1..979: note = engineered CasX variant
QEIKRINKIRRRLVKDSNTKKAGKTGPMKTLLVRVMTPDLRERLENLRKKPENIPQPISNTSRANLNKLLTDYTEMKKAILHVYWEEFQKDPVGLMSRVAQPASKKIDQNKLKPEMDEKGNLTTAGFACSQCGQPLFVYKLEQVSEKGKAYTNYFGRCNVAEHEKLILLAQLKPEKDSDEAVTYSLGKFGQRALDFYSIHVTKESTHPVKPLAQIAGNRYASHPVGKALSDACMGTIASFLSKYQDIIIEHQKVVKGNQKRLESLRELAGKENLEYPSVTLPPQPHTKEGVDAYNEVIARVRMWVNLNLWQKLKLSRDDAKPLLRLKGFPSFPLVERQANEVDWWDMVCNVKKLINEKKEDGKVFWQNLAGYKRQEALRPYLSSEEDRKKGKKFARYQLGDLLLHLEKKHPEDWGKVYDEAWERIDKKVEGLSKHIKLEEERRSEDAQSKAALTDWLRAKASFVIEGLKEADKDEFCRCELKLQKWYGDLRGKPFAIEAENSILDISGFSKQYNCAFIWQKDGVKKLNLYLIINYFKGGKLRFKKIKPEAFEANRFYTVINKKSGEIVPMEVNFNFDDPNLIILPLAFGKRQGREFIWNDLLSLETGSLKLANGRVIEKTLYNRRTRQDEPALFVALTFERREVLDSSNIKPMSNLIGVDRGENIPAVIALTDPEGCPLSRFKDSLGNPTHILRIGESYKEKQRTIQAKKEVEQRRAGGYSRKYASKAKNLADDMVRNTARDLLYYAVTQDAMLIFENLSRGFGRQGKRTFMAERQYTRMEDWLTAKLAYEGLPSKTYLSKTLAQYTSKTCSNCGFTITSADYDRVLEKLKKTATGWMTTINGKELKVEGQITYYNRYKRQNVVKDLSVELDRLSEESVNNDISSWTKGRSGEALSLLKKRFSHRPVQEKFVCLNCGFETHADEQAALNIARSWLFLRSQEYKKYQTNKTTGNTDKRAFVETWQSFYRKKLKEVWKPAV

SEQ ID NO: 45450 - protein, 979 aa, synthetic construct
  REGION 1..979: note = engineered CasX variant
QEIKRINKIRRRLVKDSNTKKAGKTGPMKTLLVRVMTPDLRERLENLRKKPENIPQPISNTSRANLNKLLTDYTEMKKAILHVYWEEFQKDPVGLMSRVAQPASKKIDQNKLKPEMDEKGNLTTAGFACSQCGQPLFVYKLEQVSEKGKAYTNYFGRCNVAEHEKLILLAQLKPEKDSDEAVTYSLGKFGQRALDFYSIHVTKESTHPVKPLAQIAGNRYASSPVGKALSDACMGTIASFLSKYQDIIIEHQKVVKGNQKRLESLRELAGKENLEYPSVTLPPQPHTKEGVDAYNEVIARVRMWVNLNLWQKLKLSRDDAKPLLRLKGFPSFPLVERQANEVDWWDMVCNVKKLINEKKEDGKVFWQNLAGYKRQEALRPYLSSEEDRKKGKKFARYQLGDLLLHLEKKHPEDWGKVYDEAWERIDKKVEGLSKHIKLEEERRSEDAQSKAALTDWLRAKASFVIEGLKEADKDEFCRCELKLQKWYGDLRGKPFAIEAENSILDISGFSKQYNCAFIWQKDGVKKLNLYLIINYFKGGKLRFKKIKPEAFEANRFYTVINKKSGEIVPMEVNFNFDDPNLIILPLAFGKRQGREFIWNDLLSLETGSLKLANGRVIEKTLYNRRTRQDEPALFVALTFERREVLDSSNIKPMSNLIGVDRGENIPAVIALTDPEGCPLSRFKDSLGNPTHILRIGESYKEKQRTIQAKKEVEQRRAGGYSRKYASKAKNLADDMVRNTARDLLYYAVTQDAMLIFENLSRGFGRQGKRTFMAERQYTRMEDWLTAKLAYEGLPSKTYLSKTLAQYTSKTCSNCGFTITSADYDRVLEKLKKTATGWMTTINGKELKVEGQITYYNRYKRQNVVKDLSVELDRLSEESVNNDISSWTKGRSGEALSLLKKRFSHRPVQEKFVCLNCGFETHADEQAALNIARSWLFLRSQEYKKYQTNKTTGNTDKRAFVETWQSFYRKKLKEVWKPAV

SEQ ID NO: 45451 - protein, 979 aa, synthetic construct
  REGION 1..979: note = engineered CasX variant
QEIKRINKIRRRLVKDSNTKKAGKTGPMKTLLVRVMTPDLRERLENLRKKPENIPQPISNTSRANLNKLLTDYTEMKKAILHVYWEEFQKDPVGLMSRVAQPASKKIDQNKLKPEMDEKGNLTTAGFACSQCGQPLFVYKLEQVSEKGKAYTNYFGRCNVAEHEKLILLAQLKPEKDSDEAVTYSLGKFGQRALDFYSIHVTKESTHPVKPLAQIAGNRYASTPVGKALSDACMGTIASFLSKYQDIIIEHQKVVKGNQKRLESLRELAGKENLEYPSVTLPPQPHTKEGVDAYNEVIARVRMWVNLNLWQKLKLSRDDAKPLLRLKGFPSFPLVERQANEVDWWDMVCNVKKLINEKKEDGKVFWQNLAGYKRQEALRPYLSSEEDRKKGKKFARYQLGDLLLHLEKKHPEDWGKVYDEAWERIDKKVEGLSKHIKLEEERRSEDAQSKAALTDWLRAKASFVIEGLKEADKDEFCRCELKLQKWYGDLRGKPFAIEAENSILDISGFSKQYNCAFIWQKDGVKKLNLYLIINYFKGGKLRFKKIKPEAFEANRFYTVINKKSGEIVPMEVNFNFDDPNLIILPLAFGKRQGREFIWNDLLSLETGSLKLANGRVIEKTLYNRRTRQDEPALFVALTFERREVLDSSNIKPMSNLIGVDRGENIPAVIALTDPEGCPLSRFKDSLGNPTHILRIGESYKEKQRTIQAKKEVEQRRAGGYSRKYASKAKNLADDMVRNTARDLLYYAVTQDAMLIFENLSRGFGRQGKRTFMAERQYTRMEDWLTAKLAYEGLPSKTYLSKTLAQYTSKTCSNCGFTITSADYDRVLEKLKKTATGWMTTINGKELKVEGQITYYNRYKRQNVVKDLSVELDRLSEESVNNDISSWTKGRSGEALSLLKKRFSHRPVQEKFVCLNCGFETHADEQAALNIARSWLFLRSQEYKKYQTNKTTGNTDKRAFVETWQSFYRKKLKEVWKPAV

SEQ ID NO: 45452 - protein, 979 aa, synthetic construct
  REGION 1..979: note = engineered CasX variant
QEIKRINKIRRRLVKDSNTKKAGKTGPMKTLLVRVMTPDLRERLENLRKKPENIPQPISNTSRANLNKLLTDYTEMKKAILHVYWEEFQKDPVGLMSRVAQPASKKIDQNKLKPEMDEKGNLTTAGFACSQCGQPLFVYKLEQVSEKGKAYTNYFGRCNVAEHEKLILLAQLKPEKDSDEAVTYSLGKFGQRALDFYSIHVTKESTHPVKPLAQIAGNRYASAPVGKALSDACMGTIASFLSKYQDIIIEHQKVVKGNQKRLESLRELAGKENLEYPSVTLPPQPHTKEGVDAYNEVIARVRMWVNLNLWQKLKLSRDDAKPLLRLKGFPSFPLVERQANEVDWWDMVCNVKKLINEKKEDGKVFWQNLAGYKRQEALRPYLSSEEDRKKGKKFARYQLGDLLLHLEKKHPEDWGKVYDEAWERIDKKVEGLSKHIKLEEERRSEDAQSKAALTDWLRAKASFVIEGLKEADKDEFCRCELKLQKWYGDLRGKPFAIEAENSILDISGFSKQYNCAFIWQKDGVKKLNLYLIINYFKGGKLRFKKIKPEAFEANRFYTVINKKSGEIVPMEVNFNFDDPNLIILPLAFGKRQGREFIWNDLLSLETGSLKLANGRVIEKTLYNRRTRQDEPALFVALTFERREVLDSSNIKPMSNLIGVDRGENIPAVIALTDPEGCPLSRFKDSLGNPTHILRIGESYKEKQRTIQAKKEVEQRRAGGYSRKYASKAKNLADDMVRNTARDLLYYAVTQDAMLIFENLSRGFGRQGKRTFMAERQYTRMEDWLTAKLAYEGLPSKTYLSKTLAQYTSKTCSNCGFTITSADYDRVLEKLKKTATGWMTTINGKELKVEGQITYYNRYKRQNVVKDLSVELDRLSEESVNNDISSWTKGRSGEALSLLKKRFSHRPVQEKFVCLNCGFETHADEQAALNIARSWLFLRSQEYKKYQTNKTTGNTDKRAFVETWQSFYRKKLKEVWKPAV

SEQ ID NO: 45453 - protein, 979 aa, synthetic construct
  REGION 1..979: note = engineered CasX variant
QEIKRINKIRRRLVKDSNTKKAGKTGPMKTLLVRVMTPDLRERLENLRKKPENIPQPISNTSRANLNKLLTDYTEMKKAILHVYWEEFQKDPVGLMSRVAQPASKKIDQNKLKPEMDEKGNLTTAGFACSQCGQPLFVYKLEQVSEKGKAYTNYFGRCNVAEHEKLILLAQLKPEKDSDEAVTYSLGKFGQRALDFYSIHVTKESTHPVKPLAQIAGNRYASVPVGKALSDACMGTIASFLSKYQDIIIEHQKVVKGNQKRLESLRELAGKENLEYPSVTLPPQPHTKEGVDAYNEVIARVRMWVNLNLWQKLKLSRDDAKPLLRLKGFPSFPLVERQANEVDWWDMVCNVKKLINEKKEDGKVFWQNLAGYKRQEALRPYLSSEEDRKKGKKFARYQLGDLLLHLEKKHPEDWGKVYDEAWERIDKKVEGLSKHIKLEEERRSEDAQSKAALTDWLRAKASFVIEGLKEADKDEFCRCELKLQKWYGDLRGKPFAIEAENSILDISGFSKQYNCAFIWQKDGVKKLNLYLIINYFKGGKLRFKKIKPEAFEANRFYTVINKKSGEIVPMEVNFNFDDPNLIILPLAFGKRQGREFIWNDLLSLETGSLKLANGRVIEKTLYNRRTRQDEPALFVALTFERREVLDSSNIKPMSNLIGVDRGENIPAVIALTDPEGCPLSRFKDSLGNPTHILRIGESYKEKQRTIQAKKEVEQRRAGGYSRKYASKAKNLADDMVRNTARDLLYYAVTQDAMLIFENLSRGFGRQGKRTFMAERQYTRMEDWLTAKLAYEGLPSKTYLSKTLAQYTSKTCSNCGFTITSADYDRVLEKLKKTATGWMTTINGKELKVEGQITYYNRYKRQNVVKDLSVELDRLSEESVNNDISSWTKGRSGEALSLLKKRFSHRPVQEKFVCLNCGFETHADEQAALNIARSWLFLRSQEYKKYQTNKTTGNTDKRAFVETWQSFYRKKLKEVWKPAV

SEQ ID NO: 45454 - protein, 979 aa, synthetic construct
  REGION 1..979: note = engineered CasX variant
QEIKRINKIRRRLVKDSNTKKAGKTGPMKTLLVRVMTPDLRERLENLRKKPENIPQPISNTSRANLNKLLTDYTEMKKAILHVYWEEFQKDPVGLMSRVAQPASKKIDQNKLKPEMDEKGNLTTAGFACSQCGQPLFVYKLEQVSEKGKAYTNYFGRCNVAEHEKLIKLAQLKPEKDSDEAVTYSLGKFGQRALDFYSIHVTKESTHPVKPLAQIAGNRYASGPVGKALSDACMGTIASFLSKYQDIIIEHQKVVKGNQKRLESLRELAGKENLEYPSVTLPPQPHTKEGVDAYNEVIARVRMWVNLNLWQKLKLSRDDAKPLLRLKGFPSFPLVERQANEVDWWDMVCNVKKLINEKKEDGKVFWQNLAGYKRQEALRPYLSSEEDRKKGKKFARYQLGDLLLHLEKKHPEDWGKVYDEAWERIDKKVEGLSKHIKLEEERRSEDAQSKAALTDWLRAKASFVIEGLKEADKDEFCRCELKLQKWYGDLRGKPFAIEAENSILDISGFSKQYNCAFIWQKDGVKKLNLYLIINYFKGGKLRFKKIKPEAFEANRFYTVINKKSGEIVPMEVNFNFDDPNLIILPLAFGKRQGREFIWNDLLSLETGSLKLANGRVIEKTLYNRRTRQDEPALFVALTFERREVLDSSNIKPMSNLIGVDRGENIPAVIALTDPEGCPLSRFKDSLGNPTHILRIGESYKEKQRTIQAKKEVEQRRAGGYSRKYASKAKNLADDMVRNTARDLLYYAVTQDAMLIFENLSRGFGRQGKRTFMAERQYTRMEDWLTAKLAYEGLPSKTYLSKTLAQYTSKTCSNCGFTITSADYDRVLEKLKKTATGWMTTINGKELKVEGQITYYNRYKRQNVVKDLSVELDRLSEESVNNDISSWTKGRSGEALSLLKKRFSHRPVQEKFVCLNCGFETHADEQAALNIARSWLFLRSQEYKKYQTNKTTGNTDKRAFVETWQSFYRKKLKEVWKPAV

SEQ ID NO: 45455 - protein, 978 aa, synthetic construct
  REGION 1..978: note = engineered CasX variant
QEIKRINKIRRRLVKDSNTKKAGKTGPMKTLLVRVMTPDLRERLENLRKKPENIPQPISNTSRANLNKLLTDYTEMKKAILHVYWEEFQKDPVGLMSRVAQPASKKIDQNKLKPEMDEKGNLTTAGFACSQCGQPLFVYKLEQVSEKGKAYTNYFGRCNVAEHEKLILLAQLKPEKDSDEAVTYSLGKFGQRALDFYSIHVTKESTHPVKPLAQIAGNRYASPVGKALSDACMGTIASFLSKYQDIIIEHQKVVKGNQKRLESLRELAGKENLEYPSVTLPPQPHTKEGVDAYNEVIARVRMWVNLNLWQKLKLSRDDAKPLLRLKGFPSFPLVERQANEVDWWDMVCNVKKLINEKKEDGKVFWQNLAGYKRQEALRPYLSSEEDRKKGKKFARYQLGDLLLHLEKKHPEDWGKVYDEAWERIDKKVEGLSKHIKLEEERRSEDAQSKAALTDWLRAKASFVIEGLKEADKDEFCRCELKLQKWYGDLRGKPFAIEAENSILDISGFSKQYNCAFIWQKDGVKKLNLYLIINYFKGGKLRFKKIKPEAFEANRFYTVINKKSGEIVPMEVNFNFDDPNLIILPLAFGKRQGREFIWNDLLSLETGSLKLANGRVIEKTLYNRRTRQDEPALFVALTFERREVLDSSNIKPMSNLIGVDRGENIPAVIALTDPEGCPLSRFKDSLGNPTHILRIGESYKEKQRTIQAKKEVEQRRAGGYSRKYASKAKNLADDMVRNTARDLLYYAVTQDAMLIFENLSRGFGRQGKRTFMAERQYTRMEDWLTAKLAYEGLPSKTYLSKTLAQYTSKTCSNCGFTITSADYDRVLEKLKKTATGWMTTINGKELKVEGQITYYNRYKRQNVVKDLSVELDRLSEESVNNDISSWTKGRSGEALSLLKKRFSHRPVQEKFVCLNCGFETHADEQAALNIARSWLFLRSQEYKKYQTNKTTGNTDKRAFVETWQSFYRKKLKEVWKPAV

SEQ ID NO: 45456 - protein, 980 aa, synthetic construct
  REGION 1..980: note = engineered CasX variant
QEIKRINKIRRRLVKDSNTKKAGKTGPMKTLLVRVMTPDLRERLENLRKKPENIPQPISNTSRANLNKLLTDYTEMKKAILHVYWEEFQKDPVGLMSRVAQPASKKIDQNKLKPEMDEKGNLTTAGFACSQCGQPLFVYKLEQVSEKGKAYTNYFGRCNVAEHEKLILLAQLKPEKDSDEAVTYSLGKFGQRALDFYSIHVTKESTHPVKPLAQIAGNRYASYPVGKALSDACMGTIASFLSKYQDIIIEHQKVVKGNQKRLESLRELAGKENLEYPSVTLPPQPHTKEGVDAYNEVIARVRMWVNLNLWQKLKLSRDDAKPLLRLKGFPSFPLVERQANEVDWWDMVCNVKKLINEKKEDGKVFWQNLAGYKRQEALRPYLSSEEDRKKGKKFARYQLGDLLLHLEKKHGERDWGKVYDEAWERIDKKVEGLSKHIKLEEERRSEDAQSKAALTDWLRAKASFVIEGLKEADKDEFCRCELKLQKWYGDLRGKPFAIEAENSILDISGFSKQYNCAFIWQKDGVKKLNLYLIINYFKGGKLRFKKIKPEAFEANRFYTVINKKSGEIVPMEVNFNFDDPNLIILPLAFGKRQGREFIWNDLLSLETGSLKLANGRVIEKTLYNRRTRQDEPALFVALTFERREVLDSSNIKPMSNLIGVDRGENIPAVIALTDPEGCPLSRFKDSLGNPTHILRIGESYKEKQRTIQAKKEVEQRRAGGYSRKYASKAKNLADDMVRNTARDLLYYAVTQDAMLIFENLSRGFGRQGKRTFMAERQYTRMEDWLTAKLAYEGLPSKTYLSKTLAQYTSKTCSNCGFTITSADYDRVLEKLKKTATGWMTTINGKELKVEGQITYYNRYKRQNVVKDLSVELDRLSEESVNNDISSWTKGRSGEALSLLKKRFSHRPVQEKFVCLNCGFETHADEQAALNIARSWLFLRSQEYKKYQTNKTTGNTDKRAFVETWQSFYRKKLKEVWKPAV

SEQ ID NO: 45457 - protein, 980 aa, synthetic construct
  REGION 1..980: note = engineered CasX variant
QEIKRINKIRRRLVKDSNTKKAGKTGPMKTLLVRVMTPDLRERLENLRKKPENIPQPISNTSRANLNKLLTDYTEMKKAILHVYWEEFQKDPVGLMSRVAQPASKKIDQNKLKPEMDEKGNLTTAGFACSQCGQPLFVYKLEQVSEKGKAYTNYFGRCNVAEHEKLILLAQLKPEKDSDEAVTYSLGKFGQRALDFYSIHVTKESTHPVKPLAQIAGNRYASHPVGKALSDACMGTIASFLSKYQDIIIEHQKVVKGNQKRLESLRELAGKENLEYPSVTLPPQPHTKEGVDAYNEVIARVRMWVNLNLWQKLKLSRDDAKPLLRLKGFPSFPLVERQANEVDWWDMVCNVKKLINEKKEDGKVFWQNLAGYKRQEALRPYLSSEEDRKKGKKFARYQLGDLLLHLEKKHGERDWGKVYDEAWERIDKKVEGLSKHIKLEEERRSEDAQSKAALTDWLRAKASFVIEGLKEADKDEFCRCELKLQKWYGDLRGKPFAIEAENSILDISGFSKQYNCAFIWQKDGVKKLNLYLIINYFKGGKLRFKKIKPEAFEANRFYTVINKKSGEIVPMEVNFNFDDPNLIILPLAFGKRQGREFIWNDLLSLETGSLKLANGRVIEKTLYNRRTRQDEPALFVALTFERREVLDSSNIKPMSNLIGVDRGENIPAVIALTDPEGCPLSRFKDSLGNPTHILRIGESYKEKQRTIQAKKEVEQRRAGGYSRKYASKAKNLADDMVRNTARDLLYYAVTQDAMLIFENLSRGFGRQGKRTFMAERQYTRMEDWLTAKLAYEGLPSKTYLSKTLAQYTSKTCSNCGFTITSADYDRVLEKLKKTATGWMTTINGKELKVEGQITYYNRYKRQNVVKDLSVELDRLSEESVNNDISSWTKGRSGEALSLLKKRFSHRPVQEKFVCLNCGFETHADEQAALNIARSWLFLRSQEYKKYQTNKTTGNTDKRAFVETWQSFYRKKLKEVWKPAV

SEQ ID NO: 45458 - protein, 980 aa, synthetic construct
  REGION 1..980: note = engineered CasX variant
QEIKRINKIRRRLVKDSNTKKAGKTGPMKTLLVRVMTPDLRERLENLRKKPENIPQPISNTSRANLNKLLTDYTEMKKAILHVYWEEFQKDPVGLMSRVAQPASKKIDQNKLKPEMDEKGNLTTAGFACSQCGQPLFVYKLEQVSEKGKAYTNYFGRCNVAEHEKLILLAQLKPEKDSDEAVTYSLGKFGQRALDFYSIHVTKESTHPVKPLAQIAGNRYASSPVGKALSDACMGTIASFLSKYQDIIIEHQKVVKGNQKRLESLRELAGKENLEYPSVTLPPQPHTKEGVDAYNEVIARVRMWVNLNLWQKLKLSRDDAKPLLRLKGFPSFPLVERQANEVDWWDMVCNVKKLINEKKEDGKVFWQNLAGYKRQEALRPYLSSEEDRKKGKKFARYQLGDLLLHLEKKHGERDWGKVYDEAWERIDKKVEGLSKHIKLEEERRSEDAQSKAALTDWLRAKASFVIEGLKEADKDEFCRCELKLQKWYGDLRGKPFAIEAENSILDISGFSKQYNCAFIWQKDGVKKLNLYLIINYFKGGKLRFKKIKPEAFEANRFYTVINKKSGEIVPMEVNFNFDDPNLIILPLAFGKRQGREFIWNDLLSLETGSLKLANGRVIEKTLYNRRTRQDEPALFVALTFERREVLDSSNIKPMSNLIGVDRGENIPAVIALTDPEGCPLSRFKDSLGNPTHILRIGESYKEKQRTIQAKKEVEQRRAGGYSRKYASKAKNLADDMVRNTARDLLYYAVTQDAMLIFENLSRGFGRQGKRTFMAERQYTRMEDWLTAKLAYEGLPSKTYLSKTLAQYTSKTCSNCGFTITSADYDRVLEKLKKTATGWMTTINGKELKVEGQITYYNRYKRQNVVKDLSVELDRLSEESVNNDISSWTKGRSGEALSLLKKRFSHRPVQEKFVCLNCGFETHADEQAALNIARSWLFLRSQEYKKYQTNKTTGNTDKRAFVETWQSFYRKKLKEVWKPAV

SEQ ID NO: 45459 - protein, 980 aa, synthetic construct
  REGION 1..980: note = engineered CasX variant
QEIKRINKIRRRLVKDSNTKKAGKTGPMKTLLVRVMTPDLRERLENLRKKPENIPQPISNTSRANLNKLLTDYTEMKKAILHVYWEEFQKDPVGLMSRVAQPASKKIDQNKLKPEMDEKGNLTTAGFACSQCGQPLFVYKLEQVSEKGKAYTNYFGRCNVAEHEKLILLAQLKPEKDSDEAVTYSLGKFGQRALDFYSIHVTKESTHPVKPLAQIAGNRYASTPVGKALSDACMGTIASFLSKYQDIIIEHQKVVKGNQKRLESLRELAGKENLEYPSVTLPPQPHTKEGVDAYNEVIARVRMWVNLNLWQKLKLSRDDAKPLLRLKGFPSFPLVERQANEVDWWDMVCNVKKLINEKKEDGKVFWQNLAGYKRQEALRPYLSSEEDRKKGKKFARYQLGDLLLHLEKKHGERDWGKVYDEAWERIDKKVEGLSKHIKLEEERRSEDAQSKAALTDWLRAKASFVIEGLKEADKDEFCRCELKLQKWYGDLRGKPFAIEAENSILDISGFSKQYNCAFIWQKDGVKKLNLYLIINYFKGGKLRFKKIKPEAFEANRFYTVINKKSGEIVPMEVNFNFDDPNLIILPLAFGKRQGREFIWNDLLSLETGSLKLANGRVIEKTLYNRRTRQDEPALFVALTFERREVLDSSNIKPMSNLIGVDRGENIPAVIALTDPEGCPLSRFKDSLGNPTHILRIGESYKEKQRTIQAKKEVEQRRAGGYSRKYASKAKNLADDMVRNTARDLLYYAVTQDAMLIFENLSRGFGRQGKRTFMAERQYTRMEDWLTAKLAYEGLPSKTYLSKTLAQYTSKTCSNCGFTITSADYDRVLEKLKKTATGWMTTINGKELKVEGQITYYNRYKRQNVVKDLSVELDRLSEESVNNDISSWTKGRSGEALSLLKKRFSHRPVQEKFVCLNCGFETHADEQAALNIARSWLFLRSQEYKKYQTNKTTGNTDKRAFVETWQSFYRKKLKEVWKPAV

SEQ ID NO: 45460 - protein, 980 aa, synthetic construct
  REGION 1..980: note = engineered CasX variant
QEIKRINKIRRRLVKDSNTKKAGKTGPMKTLLVRVMTPDLRERLENLRKKPENIPQPISNTSRANLNKLLTDYTEMKKAILHVYWEEFQKDPVGLMSRVAQPASKKIDQNKLKPEMDEKGNLTTAGFACSQCGQPLFVYKLEQVSEKGKAYTNYFGRCNVAEHEKLILLAQLKPEKDSDEAVTYSLGKFGQRALDFYSIHVTKESTHPVKPLAQIAGNRYASAPVGKALSDACMGTIASFLSKYQDIIIEHQKVVKGNQKRLESLRELAGKENLEYPSVTLPPQPHTKEGVDAYNEVIARVRMWVNLNLWQKLKLSRDDAKPLLRLKGFPSFPLVERQANEVDWWDMVCNVKKLINEKKEDGKVFWQNLAGYKRQEALRPYLSSEEDRKKGKKFARYQLGDLLLHLEKKHGERDWGKVYDEAWERIDKKVEGLSKHIKLEEERRSEDAQSKAALTDWLRAKASFVIEGLKEADKDEFCRCELKLQKWYGDLRGKPFAIEAENSILDISGFSKQYNCAFIWQKDGVKKLNLYLIINYFKGGKLRFKKIKPEAFEANRFYTVINKKSGEIVPMEVNFNFDDPNLIILPLAFGKRQGREFIWNDLLSLETGSLKLANGRVIEKTLYNRRTRQDEPALFVALTFERREVLDSSNIKPMSNLIGVDRGENIPAVIALTDPEGCPLSRFKDSLGNPTHILRIGESYKEKQRTIQAKKEVEQRRAGGYSRKYASKAKNLADDMVRNTARDLLYYAVTQDAMLIFENLSRGFGRQGKRTFMAERQYTRMEDWLTAKLAYEGLPSKTYLSKTLAQYTSKTCSNCGFTITSADYDRVLEKLKKTATGWMTTINGKELKVEGQITYYNRYKRQNVVKDLSVELDRLSEESVNNDISSWTKGRSGEALSLLKKRFSHRPVQEKFVCLNCGFETHADEQAALNIARSWLFLRSQEYKKYQTNKTTGNTDKRAFVETWQSFYRKKLKEVWKPAV

SEQ ID NO: 45461 - protein, 980 aa, synthetic construct
  REGION 1..980: note = engineered CasX variant
QEIKRINKIRRRLVKDSNTKKAGKTGPMKTLLVRVMTPDLRERLENLRKKPENIPQPISNTSRANLNKLLTDYTEMKKAILHVYWEEFQKDPVGLMSRVAQPASKKIDQNKLKPEMDEKGNLTTAGFACSQCGQPLFVYKLEQVSEKGKAYTNYFGRCNVAEHEKLILLAQLKPEKDSDEAVTYSLGKFGQRALDFYSIHVTKESTHPVKPLAQIAGNRYASVPVGKALSDACMGTIASFLSKYQDIIIEHQKVVKGNQKRLESLRELAGKENLEYPSVTLPPQPHTKEGVDAYNEVIARVRMWVNLNLWQKLKLSRDDAKPLLRLKGFPSFPLVERQANEVDWWDMVCNVKKLINEKKEDGKVFWQNLAGYKRQEALRPYLSSEEDRKKGKKFARYQLGDLLLHLEKKHGERDWGKVYDEAWERIDKKVEGLSKHIKLEEERRSEDAQSKAALTDWLRAKASFVIEGLKEADKDEFCRCELKLQKWYGDLRGKPFAIEAENSILDISGFSKQYNCAFIWQKDGVKKLNLYLIINYFKGGKLRFKKIKPEAFEANRFYTVINKKSGEIVPMEVNFNFDDPNLIILPLAFGKRQGREFIWNDLLSLETGSLKLANGRVIEKTLYNRRTRQDEPALFVALTFERREVLDSSNIKPMSNLIGVDRGENIPAVIALTDPEGCPLSRFKDSLGNPTHILRIGESYKEKQRTIQAKKEVEQRRAGGYSRKYASKAKNLADDMVRNTARDLLYYAVTQDAMLIFENLSRGFGRQGKRTFMAERQYTRMEDWLTAKLAYEGLPSKTYLSKTLAQYTSKTCSNCGFTITSADYDRVLEKLKKTATGWMTTINGKELKVEGQITYYNRYKRQNVVKDLSVELDRLSEESVNNDISSWTKGRSGEALSLLKKRFSHRPVQEKFVCLNCGFETHADEQAALNIARSWLFLRSQEYKKYQTNKTTGNTDKRAFVETWQSFYRKKLKEVWKPAV

SEQ ID NO: 45462 - protein, 980 aa, synthetic construct
  REGION 1..980: note = engineered CasX variant
QEIKRINKIRRRLVKDSNTKKAGKTGPMKTLLVRVMTPDLRERLENLRKKPENIPQPISNTSRANLNKLLTDYTEMKKAILHVYWEEFQKDPVGLMSRVAQPASKKIDQNKLKPEMDEKGNLTTAGFACSQCGQPLFVYKLEQVSEKGKAYTNYFGRCNVAEHEKLIKLAQLKPEKDSDEAVTYSLGKFGQRALDFYSIHVTKESTHPVKPLAQIAGNRYASGPVGKALSDACMGTIASFLSKYQDIIIEHQKVVKGNQKRLESLRELAGKENLEYPSVTLPPQPHTKEGVDAYNEVIARVRMWVNLNLWQKLKLSRDDAKPLLRLKGFPSFPLVERQANEVDWWDMVCNVKKLINEKKEDGKVFWQNLAGYKRQEALRPYLSSEEDRKKGKKFARYQLGDLLLHLEKKHGERDWGKVYDEAWERIDKKVEGLSKHIKLEEERRSEDAQSKAALTDWLRAKASFVIEGLKEADKDEFCRCELKLQKWYGDLRGKPFAIEAENSILDISGFSKQYNCAFIWQKDGVKKLNLYLIINYFKGGKLRFKKIKPEAFEANRFYTVINKKSGEIVPMEVNFNFDDPNLIILPLAFGKRQGREFIWNDLLSLETGSLKLANGRVIEKTLYNRRTRQDEPALFVALTFERREVLDSSNIKPMSNLIGVDRGENIPAVIALTDPEGCPLSRFKDSLGNPTHILRIGESYKEKQRTIQAKKEVEQRRAGGYSRKYASKAKNLADDMVRNTARDLLYYAVTQDAMLIFENLSRGFGRQGKRTFMAERQYTRMEDWLTAKLAYEGLPSKTYLSKTLAQYTSKTCSNCGFTITSADYDRVLEKLKKTATGWMTTINGKELKVEGQITYYNRYKRQNVVKDLSVELDRLSEESVNNDISSWTKGRSGEALSLLKKRFSHRPVQEKFVCLNCGFETHADEQAALNIARSWLFLRSQEYKKYQTNKTTGNTDKRAFVETWQSFYRKKLKEVWKPAV

SEQ ID NO: 45463 - protein, 979 aa, synthetic construct
  REGION 1..979: note = engineered CasX variant
QEIKRINKIRRRLVKDSNTKKAGKTGPMKTLLVRVMTPDLRERLENLRKKPENIPQPISNTSRANLNKLLTDYTEMKKAILHVYWEEFQKDPVGLMSRVAQPASKKIDQNKLKPEMDEKGNLTTAGFACSQCGQPLFVYKLEQVSEKGKAYTNYFGRCNVAEHEKLILLAQLKPEKDSDEAVTYSLGKFGQRALDFYSIHVTKESTHPVKPLAQIAGNRYASPVGKALSDACMGTIASFLSKYQDIIIEHQKVVKGNQKRLESLRELAGKENLEYPSVTLPPQPHTKEGVDAYNEVIARVRMWVNLNLWQKLKLSRDDAKPLLRLKGFPSFPLVERQANEVDWWDMVCNVKKLINEKKEDGKVFWQNLAGYKRQEALRPYLSSEEDRKKGKKFARYQLGDLLLHLEKKHGERDWGKVYDEAWERIDKKVEGLSKHIKLEEERRSEDAQSKAALTDWLRAKASFVIEGLKEADKDEFCRCELKLQKWYGDLRGKPFAIEAENSILDISGFSKQYNCAFIWQKDGVKKLNLYLIINYFKGGKLRFKKIKPEAFEANRFYTVINKKSGEIVPMEVNFNFDDPNLIILPLAFGKRQGREFIWNDLLSLETGSLKLANGRVIEKTLYNRRTRQDEPALFVALTFERREVLDSSNIKPMSNLIGVDRGENIPAVIALTDPEGCPLSRFKDSLGNPTHILRIGESYKEKQRTIQAKKEVEQRRAGGYSRKYASKAKNLADDMVRNTARDLLYYAVTQDAMLIFENLSRGFGRQGKRTFMAERQYTRMEDWLTAKLAYEGLPSKTYLSKTLAQYTSKTCSNCGFTITSADYDRVLEKLKKTATGWMTTINGKELKVEGQITYYNRYKRQNVVKDLSVELDRLSEESVNNDISSWTKGRSGEALSLLKKRFSHRPVQEKFVCLNCGFETHADEQAALNIARSWLFLRSQEYKKYQTNKTTGNTDKRAFVETWQSFYRKKLKEVWKPAV

SEQ ID NO: 45464 - protein, 980 aa, synthetic construct
  REGION 1..980: note = engineered CasX variant
QEIKRINKIRRRLVKDSNTKKAGKTGPMKTLLVRVMTPDLRERLENLRKKPENIPQPISNTSRANLNKLLTDYTEMKKAILHVYWEEFQKDPVGLMSRVAQPASKKIDQNKLKPEMDEKGNLTTAGFACSQCGQPLFVYKLEQVSEKGKAYTNYFGRCNVAEHEKLILLAQLKPEKDSDEAVTYSLGKFGQRALDFYSIHVTKESTHPVKPLAQIAGNRYASYPVGKALSDACMGTIASFLSKYQDIIIEHQKVVKGNQKRLESLRELAGKENLEYPSVTLPPQPHTKEGVDAYNEVIARVRMWVNLNLWQKLKLSRDDAKPLLRLKGFPSFPLVERQANEVDWWDMVCNVKKLINEKKEDGKVFWQNLAGYKRQEALRPYLSSEEDRKKGKKFARYQLGDLLLHLEKKHGEYDWGKVYDEAWERIDKKVEGLSKHIKLEEERRSEDAQSKAALTDWLRAKASFVIEGLKEADKDEFCRCELKLQKWYGDLRGKPFAIEAENSILDISGFSKQYNCAFIWQKDGVKKLNLYLIINYFKGGKLRFKKIKPEAFEANRFYTVINKKSGEIVPMEVNFNFDDPNLIILPLAFGKRQGREFIWNDLLSLETGSLKLANGRVIEKTLYNRRTRQDEPALFVALTFERREVLDSSNIKPMSNLIGVDRGENIPAVIALTDPEGCPLSRFKDSLGNPTHILRIGESYKEKQRTIQAKKEVEQRRAGGYSRKYASKAKNLADDMVRNTARDLLYYAVTQDAMLIFENLSRGFGRQGKRTFMAERQYTRMEDWLTAKLAYEGLPSKTYLSKTLAQYTSKTCSNCGFTITSADYDRVLEKLKKTATGWMTTINGKELKVEGQITYYNRYKRQNVVKDLSVELDRLSEESVNNDISSWTKGRSGEALSLLKKRFSHRPVQEKFVCLNCGFETHADEQAALNIARSWLFLRSQEYKKYQTNKTTGNTDKRAFVETWQSFYRKKLKEVWKPAV

SEQ ID NO: 45465 - protein, 980 aa, synthetic construct
  REGION 1..980: note = engineered CasX variant
QEIKRINKIRRRLVKDSNTKKAGKTGPMKTLLVRVMTPDLRERLENLRKKPENIPQPISNTSRANLNKLLTDYTEMKKAILHVYWEEFQKDPVGLMSRVAQPASKKIDQNKLKPEMDEKGNLTTAGFACSQCGQPLFVYKLEQVSEKGKAYTNYFGRCNVAEHEKLILLAQLKPEKDSDEAVTYSLGKFGQRALDFYSIHVTKESTHPVKPLAQIAGNRYASHPVGKALSDACMGTIASFLSKYQDIIIEHQKVVKGNQKRLESLRELAGKENLEYPSVTLPPQPHTKEGVDAYNEVIARVRMWVNLNLWQKLKLSRDDAKPLLRLKGFPSFPLVERQANEVDWWDMVCNVKKLINEKKEDGKVFWQNLAGYKRQEALRPYLSSEEDRKKGKKFARYQLGDLLLHLEKKHGEYDWGKVYDEAWERIDKKVEGLSKHIKLEEERRSEDAQSKAALTDWLRAKASFVIEGLKEADKDEFCRCELKLQKWYGDLRGKPFAIEAENSILDISGFSKQYNCAFIWQKDGVKKLNLYLIINYFKGGKLRFKKIKPEAFEANRFYTVINKKSGEIVPMEVNFNFDDPNLIILPLAFGKRQGREFIWNDLLSLETGSLKLANGRVIEKTLYNRRTRQDEPALFVALTFERREVLDSSNIKPMSNLIGVDRGENIPAVIALTDPEGCPLSRFKDSLGNPTHILRIGESYKEKQRTIQAKKEVEQRRAGGYSRKYASKAKNLADDMVRNTARDLLYYAVTQDAMLIFENLSRGFGRQGKRTFMAERQYTRMEDWLTAKLAYEGLPSKTYLSKTLAQYTSKTCSNCGFTITSADYDRVLEKLKKTATGWMTTINGKELKVEGQITYYNRYKRQNVVKDLSVELDRLSEESVNNDISSWTKGRSGEALSLLKKRFSHRPVQEKFVCLNCGFETHADEQAALNIARSWLFLRSQEYKKYQTNKTTGNTDKRAFVETWQSFYRKKLKEVWKPAV

SEQ ID NO: 45466 - protein, 980 aa, synthetic construct
  REGION 1..980: note = engineered CasX variant
QEIKRINKIRRRLVKDSNTKKAGKTGPMKTLLVRVMTPDLRERLENLRKKPENIPQPISNTSRANLNKLLTDYTEMKKAILHVYWEEFQKDPVGLMSRVAQPASKKIDQNKLKPEMDEKGNLTTAGFACSQCGQPLFVYKLEQVSEKGKAYTNYFGRCNVAEHEKLILLAQLKPEKDSDEAVTYSLGKFGQRALDFYSIHVTKESTHPVKPLAQIAGNRYASSPVGKALSDACMGTIASFLSKYQDIIIEHQKVVKGNQKRLESLRELAGKENLEYPSVTLPPQPHTKEGVDAYNEVIARVRMWVNLNLWQKLKLSRDDAKPLLRLKGFPSFPLVERQANEVDWWDMVCNVKKLINEKKEDGKVFWQNLAGYKRQEALRPYLSSEEDRKKGKKFARYQLGDLLLHLEKKHGEYDWGKVYDEAWERIDKKVEGLSKHIKLEEERRSEDAQSKAALTDWLRAKASFVIEGLKEADKDEFCRCELKLQKWYGDLRGKPFAIEAENSILDISGFSKQYNCAFIWQKDGVKKLNLYLIINYFKGGKLRFKKIKPEAFEANRFYTVINKKSGEIVPMEVNFNFDDPNLIILPLAFGKRQGREFIWNDLLSLETGSLKLANGRVIEKTLYNRRTRQDEPALFVALTFERREVLDSSNIKPMSNLIGVDRGENIPAVIALTDPEGCPLSRFKDSLGNPTHILRIGESYKEKQRTIQAKKEVEQRRAGGYSRKYASKAKNLADDMVRNTARDLLYYAVTQDAMLIFENLSRGFGRQGKRTFMAERQYTRMEDWLTAKLAYEGLPSKTYLSKTLAQYTSKTCSNCGFTITSADYDRVLEKLKKTATGWMTTINGKELKVEGQITYYNRYKRQNVVKDLSVELDRLSEESVNNDISSWTKGRSGEALSLLKKRFSHRPVQEKFVCLNCGFETHADEQAALNIARSWLFLRSQEYKKYQTNKTTGNTDKRAFVETWQSFYRKKLKEVWKPAV

SEQ ID NO: 45467 - protein, 980 aa, synthetic construct
  REGION 1..980: note = engineered CasX variant
QEIKRINKIRRRLVKDSNTKKAGKTGPMKTLLVRVMTPDLRERLENLRKKPENIPQPISNTSRANLNKLLTDYTEMKKAILHVYWEEFQKDPVGLMSRVAQPASKKIDQNKLKPEMDEKGNLTTAGFACSQCGQPLFVYKLEQVSEKGKAYTNYFGRCNVAEHEKLILLAQLKPEKDSDEAVTYSLGKFGQRALDFYSIHVTKESTHPVKPLAQIAGNRYASTPVGKALSDACMGTIASFLSKYQDIIIEHQKVVKGNQKRLESLRELAGKENLEYPSVTLPPQPHTKEGVDAYNEVIARVRMWVNLNLWQKLKLSRDDAKPLLRLKGFPSFPLVERQANEVDWWDMVCNVKKLINEKKEDGKVFWQNLAGYKRQEALRPYLSSEEDRKKGKKFARYQLGDLLLHLEKKHGEYDWGKVYDEAWERIDKKVEGLSKHIKLEEERRSEDAQSKAALTDWLRAKASFVIEGLKEADKDEFCRCELKLQKWYGDLRGKPFAIEAENSILDISGFSKQYNCAFIWQKDGVKKLNLYLIINYFKGGKLRFKKIKPEAFEANRFYTVINKKSGEIVPMEVNFNFDDPNLIILPLAFGKRQGREFIWNDLLSLETGSLKLANGRVIEKTLYNRRTRQDEPALFVALTFERREVLDSSNIKPMSNLIGVDRGENIPAVIALTDPEGCPLSRFKDSLGNPTHILRIGESYKEKQRTIQAKKEVEQRRAGGYSRKYASKAKNLADDMVRNTARDLLYYAVTQDAMLIFENLSRGFGRQGKRTFMAERQYTRMEDWLTAKLAYEGLPSKTYLSKTLAQYTSKTCSNCGFTITSADYDRVLEKLKKTATGWMTTINGKELKVEGQITYYNRYKRQNVVKDLSVELDRLSEESVNNDISSWTKGRSGEALSLLKKRFSHRPVQEKFVCLNCGFETHADEQAALNIARSWLFLRSQEYKKYQTNKTTGNTDKRAFVETWQSFYRKKLKEVWKPAV

SEQ ID NO: 45468 - protein, 980 aa, synthetic construct
  REGION 1..980: note = engineered CasX variant
QEIKRINKIRRRLVKDSNTKKAGKTGPMKTLLVRVMTPDLRERLENLRKKPENIPQPISNTSRANLNKLLTDYTEMKKAILHVYWEEFQKDPVGLMSRVAQPASKKIDQNKLKPEMDEKGNLTTAGFACSQCGQPLFVYKLEQVSEKGKAYTNYFGRCNVAEHEKLILLAQLKPEKDSDEAVTYSLGKFGQRALDFYSIHVTKESTHPVKPLAQIAGNRYASAPVGKALSDACMGTIASFLSKYQDIIIEHQKVVKGNQKRLESLRELAGKENLEYPSVTLPPQPHTKEGVDAYNEVIARVRMWVNLNLWQKLKLSRDDAKPLLRLKGFPSFPLVERQANEVDWWDMVCNVKKLINEKKEDGKVFWQNLAGYKRQEALRPYLSSEEDRKKGKKFARYQLGDLLLHLEKKHGEYDWGKVYDEAWERIDKKVEGLSKHIKLEEERRSEDAQSKAALTDWLRAKASFVIEGLKEADKDEFCRCELKLQKWYGDLRGKPFAIEAENSILDISGFSKQYNCAFIWQKDGVKKLNLYLIINYFKGGKLRFKKIKPEAFEANRFYTVINKKSGEIVPMEVNFNFDDPNLIILPLAFGKRQGREFIWNDLLSLETGSLKLANGRVIEKTLYNRRTRQDEPALFVALTFERREVLDSSNIKPMSNLIGVDRGENIPAVIALTDPEGCPLSRFKDSLGNPTHILRIGESYKEKQRTIQAKKEVEQRRAGGYSRKYASKAKNLADDMVRNTARDLLYYAVTQDAMLIFENLSRGFGRQGKRTFMAERQYTRMEDWLTAKLAYEGLPSKTYLSKTLAQYTSKTCSNCGFTITSADYDRVLEKLKKTATGWMTTINGKELKVEGQITYYNRYKRQNVVKDLSVELDRLSEESVNNDISSWTKGRSGEALSLLKKRFSHRPVQEKFVCLNCGFETHADEQAALNIARSWLFLRSQEYKKYQTNKTTGNTDKRAFVETWQSFYRKKLKEVWKPAV

SEQ ID NO: 45469 - protein, 980 aa, synthetic construct
  REGION 1..980: note = engineered CasX variant
QEIKRINKIRRRLVKDSNTKKAGKTGPMKTLLVRVMTPDLRERLENLRKKPENIPQPISNTSRANLNKLLTDYTEMKKAILHVYWEEFQKDPVGLMSRVAQPASKKIDQNKLKPEMDEKGNLTTAGFACSQCGQPLFVYKLEQVSEKGKAYTNYFGRCNVAEHEKLILLAQLKPEKDSDEAVTYSLGKFGQRALDFYSIHVTKESTHPVKPLAQIAGNRYASVPVGKALSDACMGTIASFLSKYQDIIIEHQKVVKGNQKRLESLRELAGKENLEYPSVTLPPQPHTKEGVDAYNEVIARVRMWVNLNLWQKLKLSRDDAKPLLRLKGFPSFPLVERQANEVDWWDMVCNVKKLINEKKEDGKVFWQNLAGYKRQEALRPYLSSEEDRKKGKKFARYQLGDLLLHLEKKHGEYDWGKVYDEAWERIDKKVEGLSKHIKLEEERRSEDAQSKAALTDWLRAKASFVIEGLKEADKDEFCRCELKLQKWYGDLRGKPFAIEAENSILDISGFSKQYNCAFIWQKDGVKKLNLYLIINYFKGGKLRFKKIKPEAFEANRFYTVINKKSGEIVPMEVNFNFDDPNLIILPLAFGKRQGREFIWNDLLSLETGSLKLANGRVIEKTLYNRRTRQDEPALFVALTFERREVLDSSNIKPMSNLIGVDRGENIPAVIALTDPEGCPLSRFKDSLGNPTHILRIGESYKEKQRTIQAKKEVEQRRAGGYSRKYASKAKNLADDMVRNTARDLLYYAVTQDAMLIFENLSRGFGRQGKRTFMAERQYTRMEDWLTAKLAYEGLPSKTYLSKTLAQYTSKTCSNCGFTITSADYDRVLEKLKKTATGWMTTINGKELKVEGQITYYNRYKRQNVVKDLSVELDRLSEESVNNDISSWTKGRSGEALSLLKKRFSHRPVQEKFVCLNCGFETHADEQAALNIARSWLFLRSQEYKKYQTNKTTGNTDKRAFVETWQSFYRKKLKEVWKPAV

SEQ ID NO: 45470 - protein, 980 aa, synthetic construct
  REGION 1..980: note = engineered CasX variant
QEIKRINKIRRRLVKDSNTKKAGKTGPMKTLLVRVMTPDLRERLENLRKKPENIPQPISNTSRANLNKLLTDYTEMKKAILHVYWEEFQKDPVGLMSRVAQPASKKIDQNKLKPEMDEKGNLTTAGFACSQCGQPLFVYKLEQVSEKGKAYTNYFGRCNVAEHEKLIKLAQLKPEKDSDEAVTYSLGKFGQRALDFYSIHVTKESTHPVKPLAQIAGNRYASGPVGKALSDACMGTIASFLSKYQDIIIEHQKVVKGNQKRLESLRELAGKENLEYPSVTLPPQPHTKEGVDAYNEVIARVRMWVNLNLWQKLKLSRDDAKPLLRLKGFPSFPLVERQANEVDWWDMVCNVKKLINEKKEDGKVFWQNLAGYKRQEALRPYLSSEEDRKKGKKFARYQLGDLLLHLEKKHGEYDWGKVYDEAWERIDKKVEGLSKHIKLEEERRSEDAQSKAALTDWLRAKASFVIEGLKEADKDEFCRCELKLQKWYGDLRGKPFAIEAENSILDISGFSKQYNCAFIWQKDGVKKLNLYLIINYFKGGKLRFKKIKPEAFEANRFYTVINKKSGEIVPMEVNFNFDDPNLIILPLAFGKRQGREFIWNDLLSLETGSLKLANGRVIEKTLYNRRTRQDEPALFVALTFERREVLDSSNIKPMSNLIGVDRGENIPAVIALTDPEGCPLSRFKDSLGNPTHILRIGESYKEKQRTIQAKKEVEQRRAGGYSRKYASKAKNLADDMVRNTARDLLYYAVTQDAMLIFENLSRGFGRQGKRTFMAERQYTRMEDWLTAKLAYEGLPSKTYLSKTLAQYTSKTCSNCGFTITSADYDRVLEKLKKTATGWMTTINGKELKVEGQITYYNRYKRQNVVKDLSVELDRLSEESVNNDISSWTKGRSGEALSLLKKRFSHRPVQEKFVCLNCGFETHADEQAALNIARSWLFLRSQEYKKYQTNKTTGNTDKRAFVETWQSFYRKKLKEVWKPAV

SEQ ID NO: 45471 - protein, 979 aa, synthetic construct
  REGION 1..979: note = engineered CasX variant
QEIKRINKIRRRLVKDSNTKKAGKTGPMKTLLVRVMTPDLRERLENLRKKPENIPQPISNTSRANLNKLLTDYTEMKKAILHVYWEEFQKDPVGLMSRVAQPASKKIDQNKLKPEMDEKGNLTTAGFACSQCGQPLFVYKLEQVSEKGKAYTNYFGRCNVAEHEKLILLAQLKPEKDSDEAVTYSLGKFGQRALDFYSIHVTKESTHPVKPLAQIAGNRYASPVGKALSDACMGTIASFLSKYQDIIIEHQKVVKGNQKRLESLRELAGKENLEYPSVTLPPQPHTKEGVDAYNEVIARVRMWVNLNLWQKLKLSRDDAKPLLRLKGFPSFPLVERQANEVDWWDMVCNVKKLINEKKEDGKVFWQNLAGYKRQEALRPYLSSEEDRKKGKKFARYQLGDLLLHLEKKHGEYDWGKVYDEAWERIDKKVEGLSKHIKLEEERRSEDAQSKAALTDWLRAKASFVIEGLKEADKDEFCRCELKLQKWYGDLRGKPFAIEAENSILDISGFSKQYNCAFIWQKDGVKKLNLYLIINYFKGGKLRFKKIKPEAFEANRFYTVINKKSGEIVPMEVNFNFDDPNLIILPLAFGKRQGREFIWNDLLSLETGSLKLANGRVIEKTLYNRRTRQDEPALFVALTFERREVLDSSNIKPMSNLIGVDRGENIPAVIALTDPEGCPLSRFKDSLGNPTHILRIGESYKEKQRTIQAKKEVEQRRAGGYSRKYASKAKNLADDMVRNTARDLLYYAVTQDAMLIFENLSRGFGRQGKRTFMAERQYTRMEDWLTAKLAYEGLPSKTYLSKTLAQYTSKTCSNCGFTITSADYDRVLEKLKKTATGWMTTINGKELKVEGQITYYNRYKRQNVVKDLSVELDRLSEESVNNDISSWTKGRSGEALSLLKKRFSHRPVQEKFVCLNCGFETHADEQAALNIARSWLFLRSQEYKKYQTNKTTGNTDKRAFVETWQSFYRKKLKEVWKPAV

SEQ ID NO: 45472 - protein, 979 aa, synthetic construct
  REGION 1..979: note = engineered CasX variant
QEIKRINKIRRRLVKDSNTKKAGKTGPMKTLLVRVMTPDLRERLENLRKKPENIPQPISNTSRANLNKLLTDYTEMKKAILHVYWEEFQKDPVGLMSRVAQPASKKIDQNKLKPEMDEKGNLTTAGFACSQCGQPLFVYKLEQVSEKGKAYTNYFGRCNVAEHEKLILLAQLKPEKDSDEAVTYSLGKFGQRALDFYSIHVTKESTHPVKPLAQIAGNRYASYPVGKALSDACMGTIASFLSKYQDIIIEHQKVVKGNQKRLESLRELAGKENLEYPSVTLPPQPHTKEGVDAYNEVIARVRMWVNLNLWQKLKLSRDDAKPLLRLKGFPSFPLVERQANEVDWWDMVCNVKKLINEKKEDGKVFWQNLAGYKRQEALRPYLSSEEDRKKGKKFARYQLGDLLLHLEKKHGEDWGDVYDEAWERIDKKVEGLSKHIKLEEERRSEDAQSKAALTDWLRAKASFVIEGLKEADKDEFCRCELKLQKWYGDLRGKPFAIEAENSILDISGFSKQYNCAFIWQKDGVKKLNLYLIINYFKGGKLRFKKIKPEAFEANRFYTVINKKSGEIVPMEVNFNFDDPNLIILPLAFGKRQGREFIWNDLLSLETGSLKLANGRVIEKTLYNRRTRQDEPALFVALTFERREVLDSSNIKPMSNLIGVDRGENIPAVIALTDPEGCPLSRFKDSLGNPTHILRIGESYKEKQRTIQAKKEVEQRRAGGYSRKYASKAKNLADDMVRNTARDLLYYAVTQDAMLIFENLSRGFGRQGKRTFMAERQYTRMEDWLTAKLAYEGLPSKTYLSKTLAQYTSKTCSNCGFTITSADYDRVLEKLKKTATGWMTTINGKELKVEGQITYYNRYKRQNVVKDLSVELDRLSEESVNNDISSWTKGRSGEALSLLKKRFSHRPVQEKFVCLNCGFETHADEQAALNIARSWLFLRSQEYKKYQTNKTTGNTDKRAFVETWQSFYRKKLKEVWKPAV

SEQ ID NO: 45473 - protein, 979 aa, synthetic construct
  REGION 1..979: note = engineered CasX variant
QEIKRINKIRRRLVKDSNTKKAGKTGPMKTLLVRVMTPDLRERLENLRKKPENIPQPISNTSRANLNKLLTDYTEMKKAILHVYWEEFQKDPVGLMSRVAQPASKKIDQNKLKPEMDEKGNLTTAGFACSQCGQPLFVYKLEQVSEKGKAYTNYFGRCNVAEHEKLILLAQLKPEKDSDEAVTYSLGKFGQRALDFYSIHVTKESTHPVKPLAQIAGNRYASHPVGKALSDACMGTIASFLSKYQDIIIEHQKVVKGNQKRLESLRELAGKENLEYPSVTLPPQPHTKEGVDAYNEVIARVRMWVNLNLWQKLKLSRDDAKPLLRLKGFPSFPLVERQANEVDWWDMVCNVKKLINEKKEDGKVFWQNLAGYKRQEALRPYLSSEEDRKKGKKFARYQLGDLLLHLEKKHGEDWGDVYDEAWERIDKKVEGLSKHIKLEEERRSEDAQSKAALTDWLRAKASFVIEGLKEADKDEFCRCELKLQKWYGDLRGKPFAIEAENSILDISGFSKQYNCAFIWQKDGVKKLNLYLIINYFKGGKLRFKKIKPEAFEANRFYTVINKKSGEIVPMEVNFNFDDPNLIILPLAFGKRQGREFIWNDLLSLETGSLKLANGRVIEKTLYNRRTRQDEPALFVALTFERREVLDSSNIKPMSNLIGVDRGENIPAVIALTDPEGCPLSRFKDSLGNPTHILRIGESYKEKQRTIQAKKEVEQRRAGGYSRKYASKAKNLADDMVRNTARDLLYYAVTQDAMLIFENLSRGFGRQGKRTFMAERQYTRMEDWLTAKLAYEGLPSKTYLSKTLAQYTSKTCSNCGFTITSADYDRVLEKLKKTATGWMTTINGKELKVEGQITYYNRYKRQNVVKDLSVELDRLSEESVNNDISSWTKGRSGEALSLLKKRFSHRPVQEKFVCLNCGFETHADEQAALNIARSWLFLRSQEYKKYQTNKTTGNTDKRAFVETWQSFYRKKLKEVWKPAV

SEQ ID NO: 45474 - protein, 979 aa, synthetic construct
  REGION 1..979: note = engineered CasX variant
QEIKRINKIRRRLVKDSNTKKAGKTGPMKTLLVRVMTPDLRERLENLRKKPENIPQPISNTSRANLNKLLTDYTEMKKAILHVYWEEFQKDPVGLMSRVAQPASKKIDQNKLKPEMDEKGNLTTAGFACSQCGQPLFVYKLEQVSEKGKAYTNYFGRCNVAEHEKLILLAQLKPEKDSDEAVTYSLGKFGQRALDFYSIHVTKESTHPVKPLAQIAGNRYASSPVGKALSDACMGTIASFLSKYQDIIIEHQKVVKGNQKRLESLRELAGKENLEYPSVTLPPQPHTKEGVDAYNEVIARVRMWVNLNLWQKLKLSRDDAKPLLRLKGFPSFPLVERQANEVDWWDMVCNVKKLINEKKEDGKVFWQNLAGYKRQEALRPYLSSEEDRKKGKKFARYQLGDLLLHLEKKHGEDWGDVYDEAWERIDKKVEGLSKHIKLEEERRSEDAQSKAALTDWLRAKASFVIEGLKEADKDEFCRCELKLQKWYGDLRGKPFAIEAENSILDISGFSKQYNCAFIWQKDGVKKLNLYLIINYFKGGKLRFKKIKPEAFEANRFYTVINKKSGEIVPMEVNFNFDDPNLIILPLAFGKRQGREFIWNDLLSLETGSLKLANGRVIEKTLYNRRTRQDEPALFVALTFERREVLDSSNIKPMSNLIGVDRGENIPAVIALTDPEGCPLSRFKDSLGNPTHILRIGESYKEKQRTIQAKKEVEQRRAGGYSRKYASKAKNLADDMVRNTARDLLYYAVTQDAMLIFENLSRGFGRQGKRTFMAERQYTRMEDWLTAKLAYEGLPSKTYLSKTLAQYTSKTCSNCGFTITSADYDRVLEKLKKTATGWMTTINGKELKVEGQITYYNRYKRQNVVKDLSVELDRLSEESVNNDISSWTKGRSGEALSLLKKRFSHRPVQEKFVCLNCGFETHADEQAALNIARSWLFLRSQEYKKYQTNKTTGNTDKRAFVETWQSFYRKKLKEVWKPAV

SEQ ID NO: 45475 - protein, 979 aa, synthetic construct
  REGION 1..979: note = engineered CasX variant
QEIKRINKIRRRLVKDSNTKKAGKTGPMKTLLVRVMTPDLRERLENLRKKPENIPQPISNTSRANLNKLLTDYTEMKKAILHVYWEEFQKDPVGLMSRVAQPASKKIDQNKLKPEMDEKGNLTTAGFACSQCGQPLFVYKLEQVSEKGKAYTNYFGRCNVAEHEKLILLAQLKPEKDSDEAVTYSLGKFGQRALDFYSIHVTKESTHPVKPLAQIAGNRYASTPVGKALSDACMGTIASFLSKYQDIIIEHQKVVKGNQKRLESLRELAGKENLEYPSVTLPPQPHTKEGVDAYNEVIARVRMWVNLNLWQKLKLSRDDAKPLLRLKGFPSFPLVERQANEVDWWDMVCNVKKLINEKKEDGKVFWQNLAGYKRQEALRPYLSSEEDRKKGKKFARYQLGDLLLHLEKKHGEDWGDVYDEAWERIDKKVEGLSKHIKLEEERRSEDAQSKAALTDWLRAKASFVIEGLKEADKDEFCRCELKLQKWYGDLRGKPFAIEAENSILDISGFSKQYNCAFIWQKDGVKKLNLYLIINYFKGGKLRFKKIKPEAFEANRFYTVINKKSGEIVPMEVNFNFDDPNLIILPLAFGKRQGREFIWNDLLSLETGSLKLANGRVIEKTLYNRRTRQDEPALFVALTFERREVLDSSNIKPMSNLIGVDRGENIPAVIALTDPEGCPLSRFKDSLGNPTHILRIGESYKEKQRTIQAKKEVEQRRAGGYSRKYASKAKNLADDMVRNTARDLLYYAVTQDAMLIFENLSRGFGRQGKRTFMAERQYTRMEDWLTAKLAYEGLPSKTYLSKTLAQYTSKTCSNCGFTITSADYDRVLEKLKKTATGWMTTINGKELKVEGQITYYNRYKRQNVVKDLSVELDRLSEESVNNDISSWTKGRSGEALSLLKKRFSHRPVQEKFVCLNCGFETHADEQAALNIARSWLFLRSQEYKKYQTNKTTGNTDKRAFVETWQSFYRKKLKEVWKPAV

SEQ ID NO: 45476 - protein, 979 aa, synthetic construct
  REGION 1..979: note = engineered CasX variant
QEIKRINKIRRRLVKDSNTKKAGKTGPMKTLLVRVMTPDLRERLENLRKKPENIPQPISNTSRANLNKLLTDYTEMKKAILHVYWEEFQKDPVGLMSRVAQPASKKIDQNKLKPEMDEKGNLTTAGFACSQCGQPLFVYKLEQVSEKGKAYTNYFGRCNVAEHEKLILLAQLKPEKDSDEAVTYSLGKFGQRALDFYSIHVTKESTHPVKPLAQIAGNRYASAPVGKALSDACMGTIASFLSKYQDIIIEHQKVVKGNQKRLESLRELAGKENLEYPSVTLPPQPHTKEGVDAYNEVIARVRMWVNLNLWQKLKLSRDDAKPLLRLKGFPSFPLVERQANEVDWWDMVCNVKKLINEKKEDGKVFWQNLAGYKRQEALRPYLSSEEDRKKGKKFARYQLGDLLLHLEKKHGEDWGDVYDEAWERIDKKVEGLSKHIKLEEERRSEDAQSKAALTDWLRAKASFVIEGLKEADKDEFCRCELKLQKWYGDLRGKPFAIEAENSILDISGFSKQYNCAFIWQKDGVKKLNLYLIINYFKGGKLRFKKIKPEAFEANRFYTVINKKSGEIVPMEVNFNFDDPNLIILPLAFGKRQGREFIWNDLLSLETGSLKLANGRVIEKTLYNRRTRQDEPALFVALTFERREVLDSSNIKPMSNLIGVDRGENIPAVIALTDPEGCPLSRFKDSLGNPTHILRIGESYKEKQRTIQAKKEVEQRRAGGYSRKYASKAKNLADDMVRNTARDLLYYAVTQDAMLIFENLSRGFGRQGKRTFMAERQYTRMEDWLTAKLAYEGLPSKTYLSKTLAQYTSKTCSNCGFTITSADYDRVLEKLKKTATGWMTTINGKELKVEGQITYYNRYKRQNVVKDLSVELDRLSEESVNNDISSWTKGRSGEALSLLKKRFSHRPVQEKFVCLNCGFETHADEQAALNIARSWLFLRSQEYKKYQTNKTTGNTDKRAFVETWQSFYRKKLKEVWKPAV

SEQ ID NO: 45477 - protein, 979 aa, synthetic construct
  REGION 1..979: note = engineered CasX variant
QEIKRINKIRRRLVKDSNTKKAGKTGPMKTLLVRVMTPDLRERLENLRKKPENIPQPISNTSRANLNKLLTDYTEMKKAILHVYWEEFQKDPVGLMSRVAQPASKKIDQNKLKPEMDEKGNLTTAGFACSQCGQPLFVYKLEQVSEKGKAYTNYFGRCNVAEHEKLILLAQLKPEKDSDEAVTYSLGKFGQRALDFYSIHVTKESTHPVKPLAQIAGNRYASVPVGKALSDACMGTIASFLSKYQDIIIEHQKVVKGNQKRLESLRELAGKENLEYPSVTLPPQPHTKEGVDAYNEVIARVRMWVNLNLWQKLKLSRDDAKPLLRLKGFPSFPLVERQANEVDWWDMVCNVKKLINEKKEDGKVFWQNLAGYKRQEALRPYLSSEEDRKKGKKFARYQLGDLLLHLEKKHGEDWGDVYDEAWERIDKKVEGLSKHIKLEEERRSEDAQSKAALTDWLRAKASFVIEGLKEADKDEFCRCELKLQKWYGDLRGKPFAIEAENSILDISGFSKQYNCAFIWQKDGVKKLNLYLIINYFKGGKLRFKKIKPEAFEANRFYTVINKKSGEIVPMEVNFNFDDPNLIILPLAFGKRQGREFIWNDLLSLETGSLKLANGRVIEKTLYNRRTRQDEPALFVALTFERREVLDSSNIKPMSNLIGVDRGENIPAVIALTDPEGCPLSRFKDSLGNPTHILRIGESYKEKQRTIQAKKEVEQRRAGGYSRKYASKAKNLADDMVRNTARDLLYYAVTQDAMLIFENLSRGFGRQGKRTFMAERQYTRMEDWLTAKLAYEGLPSKTYLSKTLAQYTSKTCSNCGFTITSADYDRVLEKLKKTATGWMTTINGKELKVEGQITYYNRYKRQNVVKDLSVELDRLSEESVNNDISSWTKGRSGEALSLLKKRFSHRPVQEKFVCLNCGFETHADEQAALNIARSWLFLRSQEYKKYQTNKTTGNTDKRAFVETWQSFYRKKLKEVWKPAV

SEQ ID NO: 45478 - protein, 979 aa, synthetic construct
  REGION 1..979: note = engineered CasX variant
QEIKRINKIRRRLVKDSNTKKAGKTGPMKTLLVRVMTPDLRERLENLRKKPENIPQPISNTSRANLNKLLTDYTEMKKAILHVYWEEFQKDPVGLMSRVAQPASKKIDQNKLKPEMDEKGNLTTAGFACSQCGQPLFVYKLEQVSEKGKAYTNYFGRCNVAEHEKLIKLAQLKPEKDSDEAVTYSLGKFGQRALDFYSIHVTKESTHPVKPLAQIAGNRYASGPVGKALSDACMGTIASFLSKYQDIIIEHQKVVKGNQKRLESLRELAGKENLEYPSVTLPPQPHTKEGVDAYNEVIARVRMWVNLNLWQKLKLSRDDAKPLLRLKGFPSFPLVERQANEVDWWDMVCNVKKLINEKKEDGKVFWQNLAGYKRQEALRPYLSSEEDRKKGKKFARYQLGDLLLHLEKKHGEDWGDVYDEAWERIDKKVEGLSKHIKLEEERRSEDAQSKAALTDWLRAKASFVIEGLKEADKDEFCRCELKLQKWYGDLRGKPFAIEAENSILDISGFSKQYNCAFIWQKDGVKKLNLYLIINYFKGGKLRFKKIKPEAFEANRFYTVINKKSGEIVPMEVNFNFDDPNLIILPLAFGKRQGREFIWNDLLSLETGSLKLANGRVIEKTLYNRRTRQDEPALFVALTFERREVLDSSNIKPMSNLIGVDRGENIPAVIALTDPEGCPLSRFKDSLGNPTHILRIGESYKEKQRTIQAKKEVEQRRAGGYSRKYASKAKNLADDMVRNTARDLLYYAVTQDAMLIFENLSRGFGRQGKRTFMAERQYTRMEDWLTAKLAYEGLPSKTYLSKTLAQYTSKTCSNCGFTITSADYDRVLEKLKKTATGWMTTINGKELKVEGQITYYNRYKRQNVVKDLSVELDRLSEESVNNDISSWTKGRSGEALSLLKKRFSHRPVQEKFVCLNCGFETHADEQAALNIARSWLFLRSQEYKKYQTNKTTGNTDKRAFVETWQSFYRKKLKEVWKPAV

SEQ ID NO: 45479 - protein, 978 aa, synthetic construct
  REGION 1..978: note = engineered CasX variant
QEIKRINKIRRRLVKDSNTKKAGKTGPMKTLLVRVMTPDLRERLENLRKKPENIPQPISNTSRANLNKLLTDYTEMKKAILHVYWEEFQKDPVGLMSRVAQPASKKIDQNKLKPEMDEKGNLTTAGFACSQCGQPLFVYKLEQVSEKGKAYTNYFGRCNVAEHEKLILLAQLKPEKDSDEAVTYSLGKFGQRALDFYSIHVTKESTHPVKPLAQIAGNRYASPVGKALSDACMGTIASFLSKYQDIIIEHQKVVKGNQKRLESLRELAGKENLEYPSVTLPPQPHTKEGVDAYNEVIARVRMWVNLNLWQKLKLSRDDAKPLLRLKGFPSFPLVERQANEVDWWDMVCNVKKLINEKKEDGKVFWQNLAGYKRQEALRPYLSSEEDRKKGKKFARYQLGDLLLHLEKKHGEDWGDVYDEAWERIDKKVEGLSKHIKLEEERRSEDAQSKAALTDWLRAKASFVIEGLKEADKDEFCRCELKLQKWYGDLRGKPFAIEAENSILDISGFSKQYNCAFIWQKDGVKKLNLYLIINYFKGGKLRFKKIKPEAFEANRFYTVINKKSGEIVPMEVNFNFDDPNLIILPLAFGKRQGREFIWNDLLSLETGSLKLANGRVIEKTLYNRRTRQDEPALFVALTFERREVLDSSNIKPMSNLIGVDRGENIPAVIALTDPEGCPLSRFKDSLGNPTHILRIGESYKEKQRTIQAKKEVEQRRAGGYSRKYASKAKNLADDMVRNTARDLLYYAVTQDAMLIFENLSRGFGRQGKRTFMAERQYTRMEDWLTAKLAYEGLPSKTYLSKTLAQYTSKTCSNCGFTITSADYDRVLEKLKKTATGWMTTINGKELKVEGQITYYNRYKRQNVVKDLSVELDRLSEESVNNDISSWTKGRSGEALSLLKKRFSHRPVQEKFVCLNCGFETHADEQAALNIARSWLFLRSQEYKKYQTNKTTGNTDKRAFVETWQSFYRKKLKEVWKPAV

SEQ ID NO: 45480 - protein, 979 aa, synthetic construct
  REGION 1..979: note = engineered CasX variant
QEIKRINKIRRRLVKDSNTKKAGKTGPMKTLLVRVMTPDLRERLENLRKKPENIPQPISNTSRANLNKLLTDYTEMKKAILHVYWEEFQKDPVGLMSRVAQPASKKIDQNKLKPEMDEKGNLTTAGFACSQCGQPLFVYKLEQVSEKGKAYTNYFGRCNVAEHEKLILLAQLKPEKDSDEAVTYSLGKFGQRALDFYSIHVTKESTHPVKPLAQIAGNRYASYPVGKALSDACMGTIASFLSKYQDIIIEHQKVVKGNQKRLESLRELAGKENLEYPSVTLPPQPHTKEGVDAYNEVIARVRMWVNLNLWQKLKLSRDDAKPLLRLKGFPSFPLVERQANEVDWWDMVCNVKKLINEKKEDGKVFWQNLAGYKRQEALRPYLSSEEDRKKGKKFARYQLGDLLLHLEKKHGEDWGKVYGEAWERIDKKVEGLSKHIKLEEERRSEDAQSKAALTDWLRAKASFVIEGLKEADKDEFCRCELKLQKWYGDLRGKPFAIEAENSILDISGFSKQYNCAFIWQKDGVKKLNLYLIINYFKGGKLRFKKIKPEAFEANRFYTVINKKSGEIVPMEVNFNFDDPNLIILPLAFGKRQGREFIWNDLLSLETGSLKLANGRVIEKTLYNRRTRQDEPALFVALTFERREVLDSSNIKPMSNLIGVDRGENIPAVIALTDPEGCPLSRFKDSLGNPTHILRIGESYKEKQRTIQAKKEVEQRRAGGYSRKYASKAKNLADDMVRNTARDLLYYAVTQDAMLIFENLSRGFGRQGKRTFMAERQYTRMEDWLTAKLAYEGLPSKTYLSKTLAQYTSKTCSNCGFTITSADYDRVLEKLKKTATGWMTTINGKELKVEGQITYYNRYKRQNVVKDLSVELDRLSEESVNNDISSWTKGRSGEALSLLKKRFSHRPVQEKFVCLNCGFETHADEQAALNIARSWLFLRSQEYKKYQTNKTTGNTDKRAFVETWQSFYRKKLKEVWKPAV

SEQ ID NO: 45481 - protein, 979 aa, synthetic construct
  REGION 1..979: note = engineered CasX variant
QEIKRINKIRRRLVKDSNTKKAGKTGPMKTLLVRVMTPDLRERLENLRKKPENIPQPISNTSRANLNKLLTDYTEMKKAILHVYWEEFQKDPVGLMSRVAQPASKKIDQNKLKPEMDEKGNLTTAGFACSQCGQPLFVYKLEQVSEKGKAYTNYFGRCNVAEHEKLILLAQLKPEKDSDEAVTYSLGKFGQRALDFYSIHVTKESTHPVKPLAQIAGNRYASHPVGKALSDACMGTIASFLSKYQDIIIEHQKVVKGNQKRLESLRELAGKENLEYPSVTLPPQPHTKEGVDAYNEVIARVRMWVNLNLWQKLKLSRDDAKPLLRLKGFPSFPLVERQANEVDWWDMVCNVKKLINEKKEDGKVFWQNLAGYKRQEALRPYLSSEEDRKKGKKFARYQLGDLLLHLEKKHGEDWGKVYGEAWERIDKKVEGLSKHIKLEEERRSEDAQSKAALTDWLRAKASFVIEGLKEADKDEFCRCELKLQKWYGDLRGKPFAIEAENSILDISGFSKQYNCAFIWQKDGVKKLNLYLIINYFKGGKLRFKKIKPEAFEANRFYTVINKKSGEIVPMEVNFNFDDPNLIILPLAFGKRQGREFIWNDLLSLETGSLKLANGRVIEKTLYNRRTRQDEPALFVALTFERREVLDSSNIKPMSNLIGVDRGENIPAVIALTDPEGCPLSRFKDSLGNPTHILRIGESYKEKQRTIQAKKEVEQRRAGGYSRKYASKAKNLADDMVRNTARDLLYYAVTQDAMLIFENLSRGFGRQGKRTFMAERQYTRMEDWLTAKLAYEGLPSKTYLSKTLAQYTSKTCSNCGFTITSADYDRVLEKLKKTATGWMTTINGKELKVEGQITYYNRYKRQNVVKDLSVELDRLSEESVNNDISSWTKGRSGEALSLLKKRFSHRPVQEKFVCLNCGFETHADEQAALNIARSWLFLRSQEYKKYQTNKTTGNTDKRAFVETWQSFYRKKLKEVWKPAV

SEQ ID NO: 45482 - protein, 979 aa, synthetic construct
  REGION 1..979: note = engineered CasX variant
QEIKRINKIRRRLVKDSNTKKAGKTGPMKTLLVRVMTPDLRERLENLRKKPENIPQPISNTSRANLNKLLTDYTEMKKAILHVYWEEFQKDPVGLMSRVAQPASKKIDQNKLKPEMDEKGNLTTAGFACSQCGQPLFVYKLEQVSEKGKAYTNYFGRCNVAEHEKLILLAQLKPEKDSDEAVTYSLGKFGQRALDFYSIHVTKESTHPVKPLAQIAGNRYASSPVGKALSDACMGTIASFLSKYQDIIIEHQKVVKGNQKRLESLRELAGKENLEYPSVTLPPQPHTKEGVDAYNEVIARVRMWVNLNLWQKLKLSRDDAKPLLRLKGFPSFPLVERQANEVDWWDMVCNVKKLINEKKEDGKVFWQNLAGYKRQEALRPYLSSEEDRKKGKKFARYQLGDLLLHLEKKHGEDWGKVYGEAWERIDKKVEGLSKHIKLEEERRSEDAQSKAALTDWLRAKASFVIEGLKEADKDEFCRCELKLQKWYGDLRGKPFAIEAENSILDISGFSKQYNCAFIWQKDGVKKLNLYLIINYFKGGKLRFKKIKPEAFEANRFYTVINKKSGEIVPMEVNFNFDDPNLIILPLAFGKRQGREFIWNDLLSLETGSLKLANGRVIEKTLYNRRTRQDEPALFVALTFERREVLDSSNIKPMSNLIGVDRGENIPAVIALTDPEGCPLSRFKDSLGNPTHILRIGESYKEKQRTIQAKKEVEQRRAGGYSRKYASKAKNLADDMVRNTARDLLYYAVTQDAMLIFENLSRGFGRQGKRTFMAERQYTRMEDWLTAKLAYEGLPSKTYLSKTLAQYTSKTCSNCGFTITSADYDRVLEKLKKTATGWMTTINGKELKVEGQITYYNRYKRQNVVKDLSVELDRLSEESVNNDISSWTKGRSGEALSLLKKRFSHRPVQEKFVCLNCGFETHADEQAALNIARSWLFLRSQEYKKYQTNKTTGNTDKRAFVETWQSFYRKKLKEVWKPAV

SEQ ID NO: 45483 - protein, 979 aa, synthetic construct
  REGION 1..979: note = engineered CasX variant
QEIKRINKIRRRLVKDSNTKKAGKTGPMKTLLVRVMTPDLRERLENLRKKPENIPQPISNTSRANLNKLLTDYTEMKKAILHVYWEEFQKDPVGLMSRVAQPASKKIDQNKLKPEMDEKGNLTTAGFACSQCGQPLFVYKLEQVSEKGKAYTNYFGRCNVAEHEKLILLAQLKPEKDSDEAVTYSLGKFGQRALDFYSIHVTKESTHPVKPLAQIAGNRYASTPVGKALSDACMGTIASFLSKYQDIIIEHQKVVKGNQKRLESLRELAGKENLEYPSVTLPPQPHTKEGVDAYNEVIARVRMWVNLNLWQKLKLSRDDAKPLLRLKGFPSFPLVERQANEVDWWDMVCNVKKLINEKKEDGKVFWQNLAGYKRQEALRPYLSSEEDRKKGKKFARYQLGDLLLHLEKKHGEDWGKVYGEAWERIDKKVEGLSKHIKLEEERRSEDAQSKAALTDWLRAKASFVIEGLKEADKDEFCRCELKLQKWYGDLRGKPFAIEAENSILDISGFSKQYNCAFIWQKDGVKKLNLYLIINYFKGGKLRFKKIKPEAFEANRFYTVINKKSGEIVPMEVNFNFDDPNLIILPLAFGKRQGREFIWNDLLSLETGSLKLANGRVIEKTLYNRRTRQDEPALFVALTFERREVLDSSNIKPMSNLIGVDRGENIPAVIALTDPEGCPLSRFKDSLGNPTHILRIGESYKEKQRTIQAKKEVEQRRAGGYSRKYASKAKNLADDMVRNTARDLLYYAVTQDAMLIFENLSRGFGRQGKRTFMAERQYTRMEDWLTAKLAYEGLPSKTYLSKTLAQYTSKTCSNCGFTITSADYDRVLEKLKKTATGWMTTINGKELKVEGQITYYNRYKRQNVVKDLSVELDRLSEESVNNDISSWTKGRSGEALSLLKKRFSHRPVQEKFVCLNCGFETHADEQAALNIARSWLFLRSQEYKKYQTNKTTGNTDKRAFVETWQSFYRKKLKEVWKPAV

SEQ ID NO: 45484 - protein, 979 aa, synthetic construct
  REGION 1..979: note = engineered CasX variant
QEIKRINKIRRRLVKDSNTKKAGKTGPMKTLLVRVMTPDLRERLENLRKKPENIPQPISNTSRANLNKLLTDYTEMKKAILHVYWEEFQKDPVGLMSRVAQPASKKIDQNKLKPEMDEKGNLTTAGFACSQCGQPLFVYKLEQVSEKGKAYTNYFGRCNVAEHEKLILLAQLKPEKDSDEAVTYSLGKFGQRALDFYSIHVTKESTHPVKPLAQIAGNRYASAPVGKALSDACMGTIASFLSKYQDIIIEHQKVVKGNQKRLESLRELAGKENLEYPSVTLPPQPHTKEGVDAYNEVIARVRMWVNLNLWQKLKLSRDDAKPLLRLKGFPSFPLVERQANEVDWWDMVCNVKKLINEKKEDGKVFWQNLAGYKRQEALRPYLSSEEDRKKGKKFARYQLGDLLLHLEKKHGEDWGKVYGEAWERIDKKVEGLSKHIKLEEERRSEDAQSKAALTDWLRAKASFVIEGLKEADKDEFCRCELKLQKWYGDLRGKPFAIEAENSILDISGFSKQYNCAFIWQKDGVKKLNLYLIINYFKGGKLRFKKIKPEAFEANRFYTVINKKSGEIVPMEVNFNFDDPNLIILPLAFGKRQGREFIWNDLLSLETGSLKLANGRVIEKTLYNRRTRQDEPALFVALTFERREVLDSSNIKPMSNLIGVDRGENIPAVIALTDPEGCPLSRFKDSLGNPTHILRIGESYKEKQRTIQAKKEVEQRRAGGYSRKYASKAKNLADDMVRNTARDLLYYAVTQDAMLIFENLSRGFGRQGKRTFMAERQYTRMEDWLTAKLAYEGLPSKTYLSKTLAQYTSKTCSNCGFTITSADYDRVLEKLKKTATGWMTTINGKELKVEGQITYYNRYKRQNVVKDLSVELDRLSEESVNNDISSWTKGRSGEALSLLKKRFSHRPVQEKFVCLNCGFETHADEQAALNIARSWLFLRSQEYKKYQTNKTTGNTDKRAFVETWQSFYRKKLKEVWKPAV

SEQ ID NO: 45485 - protein, 979 aa, synthetic construct
  REGION 1..979: note = engineered CasX variant
QEIKRINKIRRRLVKDSNTKKAGKTGPMKTLLVRVMTPDLRERLENLRKKPENIPQPISNTSRANLNKLLTDYTEMKKAILHVYWEEFQKDPVGLMSRVAQPASKKIDQNKLKPEMDEKGNLTTAGFACSQCGQPLFVYKLEQVSEKGKAYTNYFGRCNVAEHEKLILLAQLKPEKDSDEAVTYSLGKFGQRALDFYSIHVTKESTHPVKPLAQIAGNRYASVPVGKALSDACMGTIASFLSKYQDIIIEHQKVVKGNQKRLESLRELAGKENLEYPSVTLPPQPHTKEGVDAYNEVIARVRMWVNLNLWQKLKLSRDDAKPLLRLKGFPSFPLVERQANEVDWWDMVCNVKKLINEKKEDGKVFWQNLAGYKRQEALRPYLSSEEDRKKGKKFARYQLGDLLLHLEKKHGEDWGKVYGEAWERIDKKVEGLSKHIKLEEERRSEDAQSKAALTDWLRAKASFVIEGLKEADKDEFCRCELKLQKWYGDLRGKPFAIEAENSILDISGFSKQYNCAFIWQKDGVKKLNLYLIINYFKGGKLRFKKIKPEAFEANRFYTVINKKSGEIVPMEVNFNFDDPNLIILPLAFGKRQGREFIWNDLLSLETGSLKLANGRVIEKTLYNRRTRQDEPALFVALTFERREVLDSSNIKPMSNLIGVDRGENIPAVIALTDPEGCPLSRFKDSLGNPTHILRIGESYKEKQRTIQAKKEVEQRRAGGYSRKYASKAKNLADDMVRNTARDLLYYAVTQDAMLIFENLSRGFGRQGKRTFMAERQYTRMEDWLTAKLAYEGLPSKTYLSKTLAQYTSKTCSNCGFTITSADYDRVLEKLKKTATGWMTTINGKELKVEGQITYYNRYKRQNVVKDLSVELDRLSEESVNNDISSWTKGRSGEALSLLKKRFSHRPVQEKFVCLNCGFETHADEQAALNIARSWLFLRSQEYKKYQTNKTTGNTDKRAFVETWQSFYRKKLKEVWKPAV

SEQ ID NO: 45486 - protein, 979 aa, synthetic construct
  REGION 1..979: note = engineered CasX variant
QEIKRINKIRRRLVKDSNTKKAGKTGPMKTLLVRVMTPDLRERLENLRKKPENIPQPISNTSRANLNKLLTDYTEMKKAILHVYWEEFQKDPVGLMSRVAQPASKKIDQNKLKPEMDEKGNLTTAGFACSQCGQPLFVYKLEQVSEKGKAYTNYFGRCNVAEHEKLIKLAQLKPEKDSDEAVTYSLGKFGQRALDFYSIHVTKESTHPVKPLAQIAGNRYASGPVGKALSDACMGTIASFLSKYQDIIIEHQKVVKGNQKRLESLRELAGKENLEYPSVTLPPQPHTKEGVDAYNEVIARVRMWVNLNLWQKLKLSRDDAKPLLRLKGFPSFPLVERQANEVDWWDMVCNVKKLINEKKEDGKVFWQNLAGYKRQEALRPYLSSEEDRKKGKKFARYQLGDLLLHLEKKHGEDWGKVYGEAWERIDKKVEGLSKHIKLEEERRSEDAQSKAALTDWLRAKASFVIEGLKEADKDEFCRCELKLQKWYGDLRGKPFAIEAENSILDISGFSKQYNCAFIWQKDGVKKLNLYLIINYFKGGKLRFKKIKPEAFEANRFYTVINKKSGEIVPMEVNFNFDDPNLIILPLAFGKRQGREFIWNDLLSLETGSLKLANGRVIEKTLYNRRTRQDEPALFVALTFERREVLDSSNIKPMSNLIGVDRGENIPAVIALTDPEGCPLSRFKDSLGNPTHILRIGESYKEKQRTIQAKKEVEQRRAGGYSRKYASKAKNLADDMVRNTARDLLYYAVTQDAMLIFENLSRGFGRQGKRTFMAERQYTRMEDWLTAKLAYEGLPSKTYLSKTLAQYTSKTCSNCGFTITSADYDRVLEKLKKTATGWMTTINGKELKVEGQITYYNRYKRQNVVKDLSVELDRLSEESVNNDISSWTKGRSGEALSLLKKRFSHRPVQEKFVCLNCGFETHADEQAALNIARSWLFLRSQEYKKYQTNKTTGNTDKRAFVETWQSFYRKKLKEVWKPAV

SEQ ID NO: 45487 - protein, 978 aa, synthetic construct
  REGION 1..978: note = engineered CasX variant
QEIKRINKIRRRLVKDSNTKKAGKTGPMKTLLVRVMTPDLRERLENLRKKPENIPQPISNTSRANLNKLLTDYTEMKKAILHVYWEEFQKDPVGLMSRVAQPASKKIDQNKLKPEMDEKGNLTTAGFACSQCGQPLFVYKLEQVSEKGKAYTNYFGRCNVAEHEKLILLAQLKPEKDSDEAVTYSLGKFGQRALDFYSIHVTKESTHPVKPLAQIAGNRYASPVGKALSDACMGTIASFLSKYQDIIIEHQKVVKGNQKRLESLRELAGKENLEYPSVTLPPQPHTKEGVDAYNEVIARVRMWVNLNLWQKLKLSRDDAKPLLRLKGFPSFPLVERQANEVDWWDMVCNVKKLINEKKEDGKVFWQNLAGYKRQEALRPYLSSEEDRKKGKKFARYQLGDLLLHLEKKHGEDWGKVYGEAWERIDKKVEGLSKHIKLEEERRSEDAQSKAALTDWLRAKASFVIEGLKEADKDEFCRCELKLQKWYGDLRGKPFAIEAENSILDISGFSKQYNCAFIWQKDGVKKLNLYLIINYFKGGKLRFKKIKPEAFEANRFYTVINKKSGEIVPMEVNFNFDDPNLIILPLAFGKRQGREFIWNDLLSLETGSLKLANGRVIEKTLYNRRTRQDEPALFVALTFERREVLDSSNIKPMSNLIGVDRGENIPAVIALTDPEGCPLSRFKDSLGNPTHILRIGESYKEKQRTIQAKKEVEQRRAGGYSRKYASKAKNLADDMVRNTARDLLYYAVTQDAMLIFENLSRGFGRQGKRTFMAERQYTRMEDWLTAKLAYEGLPSKTYLSKTLAQYTSKTCSNCGFTITSADYDRVLEKLKKTATGWMTTINGKELKVEGQITYYNRYKRQNVVKDLSVELDRLSEESVNNDISSWTKGRSGEALSLLKKRFSHRPVQEKFVCLNCGFETHADEQAALNIARSWLFLRSQEYKKYQTNKTTGNTDKRAFVETWQSFYRKKLKEVWKPAV

SEQ ID NO: 45488 - protein, 979 aa, synthetic construct
  REGION 1..979: note = engineered CasX variant
QEIKRINKIRRRLVKDSNTKKAGKTGPMKTLLVRVMTPDLRERLENLRKKPENIPQPISNTSRANLNKLLTDYTEMKKAILHVYWEEFQKDPVGLMSRVAQPASKKIDQNKLKPEMDEKGNLTTAGFACSQCGQPLFVYKLEQVSEKGKAYTNYFGRCNVAEHEKLILLAQLKPEKDSDEAVTYSLGKFGQRALDFYSIHVTKESTHPVKPLAQIAGNRYASYPVGKALSDACMGTIASFLSKYQDIIIEHQKVVKGNQKRLESLRELAGKENLEYPSVTLPPQPHTKEGVDAYNEVIARVRMWVNLNLWQKLKLSRDDAKPLLRLKGFPSFPLVERQANEVDWWDMVCNVKKLINEKKEDGKVFWQNLAGYKRQEALRPYLSSEEDRKKGKKFARYQLGDLLLHLEKKHGEDWGKVYDEAWERIDKKVEGLSKHIKLEEERRSEDAQSKAALTDWLRAKASFVIEGKKEADKDEFCRCELKLQKWYGDLRGKPFAIEAENSILDISGFSKQYNCAFIWQKDGVKKLNLYLIINYFKGGKLRFKKIKPEAFEANRFYTVINKKSGEIVPMEVNFNFDDPNLIILPLAFGKRQGREFIWNDLLSLETGSLKLANGRVIEKTLYNRRTRQDEPALFVALTFERREVLDSSNIKPMSNLIGVDRGENIPAVIALTDPEGCPLSRFKDSLGNPTHILRIGESYKEKQRTIQAKKEVEQRRAGGYSRKYASKAKNLADDMVRNTARDLLYYAVTQDAMLIFENLSRGFGRQGKRTFMAERQYTRMEDWLTAKLAYEGLPSKTYLSKTLAQYTSKTCSNCGFTITSADYDRVLEKLKKTATGWMTTINGKELKVEGQITYYNRYKRQNVVKDLSVELDRLSEESVNNDISSWTKGRSGEALSLLKKRFSHRPVQEKFVCLNCGFETHADEQAALNIARSWLFLRSQEYKKYQTNKTTGNTDKRAFVETWQSFYRKKLKEVWKPAV

SEQ ID NO: 45489 - protein, 979 aa, synthetic construct
  REGION 1..979: note = engineered CasX variant
QEIKRINKIRRRLVKDSNTKKAGKTGPMKTLLVRVMTPDLRERLENLRKKPENIPQPISNTSRANLNKLLTDYTEMKKAILHVYWEEFQKDPVGLMSRVAQPASKKIDQNKLKPEMDEKGNLTTAGFACSQCGQPLFVYKLEQVSEKGKAYTNYFGRCNVAEHEKLILLAQLKPEKDSDEAVTYSLGKFGQRALDFYSIHVTKESTHPVKPLAQIAGNRYASHPVGKALSDACMGTIASFLSKYQDIIIEHQKVVKGNQKRLESLRELAGKENLEYPSVTLPPQPHTKEGVDAYNEVIARVRMWVNLNLWQKLKLSRDDAKPLLRLKGFPSFPLVERQANEVDWWDMVCNVKKLINEKKEDGKVFWQNLAGYKRQEALRPYLSSEEDRKKGKKFARYQLGDLLLHLEKKHGEDWGKVYDEAWERIDKKVEGLSKHIKLEEERRSEDAQSKAALTDWLRAKASFVIEGKKEADKDEFCRCELKLQKWYGDLRGKPFAIEAENSILDISGFSKQYNCAFIWQKDGVKKLNLYLIINYFKGGKLRFKKIKPEAFEANRFYTVINKKSGEIVPMEVNFNFDDPNLIILPLAFGKRQGREFIWNDLLSLETGSLKLANGRVIEKTLYNRRTRQDEPALFVALTFERREVLDSSNIKPMSNLIGVDRGENIPAVIALTDPEGCPLSRFKDSLGNPTHILRIGESYKEKQRTIQAKKEVEQRRAGGYSRKYASKAKNLADDMVRNTARDLLYYAVTQDAMLIFENLSRGFGRQGKRTFMAERQYTRMEDWLTAKLAYEGLPSKTYLSKTLAQYTSKTCSNCGFTITSADYDRVLEKLKKTATGWMTTINGKELKVEGQITYYNRYKRQNVVKDLSVELDRLSEESVNNDISSWTKGRSGEALSLLKKRFSHRPVQEKFVCLNCGFETHADEQAALNIARSWLFLRSQEYKKYQTNKTTGNTDKRAFVETWQSFYRKKLKEVWKPAV

SEQ ID NO: 45490 - protein, 979 aa, synthetic construct
  REGION 1..979: note = engineered CasX variant
QEIKRINKIRRRLVKDSNTKKAGKTGPMKTLLVRVMTPDLRERLENLRKKPENIPQPISNTSRANLNKLLTDYTEMKKAILHVYWEEFQKDPVGLMSRVAQPASKKIDQNKLKPEMDEKGNLTTAGFACSQCGQPLFVYKLEQVSEKGKAYTNYFGRCNVAEHEKLILLAQLKPEKDSDEAVTYSLGKFGQRALDFYSIHVTKESTHPVKPLAQIAGNRYASSPVGKALSDACMGTIASFLSKYQDIIIEHQKVVKGNQKRLESLRELAGKENLEYPSVTLPPQPHTKEGVDAYNEVIARVRMWVNLNLWQKLKLSRDDAKPLLRLKGFPSFPLVERQANEVDWWDMVCNVKKLINEKKEDGKVFWQNLAGYKRQEALRPYLSSEEDRKKGKKFARYQLGDLLLHLEKKHGEDWGKVYDEAWERIDKKVEGLSKHIKLEEERRSEDAQSKAALTDWLRAKASFVIEGKKEADKDEFCRCELKLQKWYGDLRGKPFAIEAENSILDISGFSKQYNCAFIWQKDGVKKLNLYLIINYFKGGKLRFKKIKPEAFEANRFYTVINKKSGEIVPMEVNFNFDDPNLIILPLAFGKRQGREFIWNDLLSLETGSLKLANGRVIEKTLYNRRTRQDEPALFVALTFERREVLDSSNIKPMSNLIGVDRGENIPAVIALTDPEGCPLSRFKDSLGNPTHILRIGESYKEKQRTIQAKKEVEQRRAGGYSRKYASKAKNLADDMVRNTARDLLYYAVTQDAMLIFENLSRGFGRQGKRTFMAERQYTRMEDWLTAKLAYEGLPSKTYLSKTLAQYTSKTCSNCGFTITSADYDRVLEKLKKTATGWMTTINGKELKVEGQITYYNRYKRQNVVKDLSVELDRLSEESVNNDISSWTKGRSGEALSLLKKRFSHRPVQEKFVCLNCGFETHADEQAALNIARSWLFLRSQEYKKYQTNKTTGNTDKRAFVETWQSFYRKKLKEVWKPAV

SEQ ID NO: 45491 - protein, 979 aa, synthetic construct
  REGION 1..979: note = engineered CasX variant
QEIKRINKIRRRLVKDSNTKKAGKTGPMKTLLVRVMTPDLRERLENLRKKPENIPQPISNTSRANLNKLLTDYTEMKKAILHVYWEEFQKDPVGLMSRVAQPASKKIDQNKLKPEMDEKGNLTTAGFACSQCGQPLFVYKLEQVSEKGKAYTNYFGRCNVAEHEKLILLAQLKPEKDSDEAVTYSLGKFGQRALDFYSIHVTKESTHPVKPLAQIAGNRYASTPVGKALSDACMGTIASFLSKYQDIIIEHQKVVKGNQKRLESLRELAGKENLEYPSVTLPPQPHTKEGVDAYNEVIARVRMWVNLNLWQKLKLSRDDAKPLLRLKGFPSFPLVERQANEVDWWDMVCNVKKLINEKKEDGKVFWQNLAGYKRQEALRPYLSSEEDRKKGKKFARYQLGDLLLHLEKKHGEDWGKVYDEAWERIDKKVEGLSKHIKLEEERRSEDAQSKAALTDWLRAKASFVIEGKKEADKDEFCRCELKLQKWYGDLRGKPFAIEAENSILDISGFSKQYNCAFIWQKDGVKKLNLYLIINYFKGGKLRFKKIKPEAFEANRFYTVINKKSGEIVPMEVNFNFDDPNLIILPLAFGKRQGREFIWNDLLSLETGSLKLANGRVIEKTLYNRRTRQDEPALFVALTFERREVLDSSNIKPMSNLIGVDRGENIPAVIALTDPEGCPLSRFKDSLGNPTHILRIGESYKEKQRTIQAKKEVEQRRAGGYSRKYASKAKNLADDMVRNTARDLLYYAVTQDAMLIFENLSRGFGRQGKRTFMAERQYTRMEDWLTAKLAYEGLPSKTYLSKTLAQYTSKTCSNCGFTITSADYDRVLEKLKKTATGWMTTINGKELKVEGQITYYNRYKRQNVVKDLSVELDRLSEESVNNDISSWTKGRSGEALSLLKKRFSHRPVQEKFVCLNCGFETHADEQAALNIARSWLFLRSQEYKKYQTNKTTGNTDKRAFVETWQSFYRKKLKEVWKPAV

SEQ ID NO: 45492 - protein, 979 aa, synthetic construct
  REGION 1..979: note = engineered CasX variant
QEIKRINKIRRRLVKDSNTKKAGKTGPMKTLLVRVMTPDLRERLENLRKKPENIPQPISNTSRANLNKLLTDYTEMKKAILHVYWEEFQKDPVGLMSRVAQPASKKIDQNKLKPEMDEKGNLTTAGFACSQCGQPLFVYKLEQVSEKGKAYTNYFGRCNVAEHEKLILLAQLKPEKDSDEAVTYSLGKFGQRALDFYSIHVTKESTHPVKPLAQIAGNRYASAPVGKALSDACMGTIASFLSKYQDIIIEHQKVVKGNQKRLESLRELAGKENLEYPSVTLPPQPHTKEGVDAYNEVIARVRMWVNLNLWQKLKLSRDDAKPLLRLKGFPSFPLVERQANEVDWWDMVCNVKKLINEKKEDGKVFWQNLAGYKRQEALRPYLSSEEDRKKGKKFARYQLGDLLLHLEKKHGEDWGKVYDEAWERIDKKVEGLSKHIKLEEERRSEDAQSKAALTDWLRAKASFVIEGKKEADKDEFCRCELKLQKWYGDLRGKPFAIEAENSILDISGFSKQYNCAFIWQKDGVKKLNLYLIINYFKGGKLRFKKIKPEAFEANRFYTVINKKSGEIVPMEVNFNFDDPNLIILPLAFGKRQGREFIWNDLLSLETGSLKLANGRVIEKTLYNRRTRQDEPALFVALTFERREVLDSSNIKPMSNLIGVDRGENIPAVIALTDPEGCPLSRFKDSLGNPTHILRIGESYKEKQRTIQAKKEVEQRRAGGYSRKYASKAKNLADDMVRNTARDLLYYAVTQDAMLIFENLSRGFGRQGKRTFMAERQYTRMEDWLTAKLAYEGLPSKTYLSKTLAQYTSKTCSNCGFTITSADYDRVLEKLKKTATGWMTTINGKELKVEGQITYYNRYKRQNVVKDLSVELDRLSEESVNNDISSWTKGRSGEALSLLKKRFSHRPVQEKFVCLNCGFETHADEQAALNIARSWLFLRSQEYKKYQTNKTTGNTDKRAFVETWQSFYRKKLKEVWKPAV

SEQ ID NO: 45493 - protein, 979 aa, synthetic construct
  REGION 1..979: note = engineered CasX variant
QEIKRINKIRRRLVKDSNTKKAGKTGPMKTLLVRVMTPDLRERLENLRKKPENIPQPISNTSRANLNKLLTDYTEMKKAILHVYWEEFQKDPVGLMSRVAQPASKKIDQNKLKPEMDEKGNLTTAGFACSQCGQPLFVYKLEQVSEKGKAYTNYFGRCNVAEHEKLILLAQLKPEKDSDEAVTYSLGKFGQRALDFYSIHVTKESTHPVKPLAQIAGNRYASVPVGKALSDACMGTIASFLSKYQDIIIEHQKVVKGNQKRLESLRELAGKENLEYPSVTLPPQPHTKEGVDAYNEVIARVRMWVNLNLWQKLKLSRDDAKPLLRLKGFPSFPLVERQANEVDWWDMVCNVKKLINEKKEDGKVFWQNLAGYKRQEALRPYLSSEEDRKKGKKFARYQLGDLLLHLEKKHGEDWGKVYDEAWERIDKKVEGLSKHIKLEEERRSEDAQSKAALTDWLRAKASFVIEGKKEADKDEFCRCELKLQKWYGDLRGKPFAIEAENSILDISGFSKQYNCAFIWQKDGVKKLNLYLIINYFKGGKLRFKKIKPEAFEANRFYTVINKKSGEIVPMEVNFNFDDPNLIILPLAFGKRQGREFIWNDLLSLETGSLKLANGRVIEKTLYNRRTRQDEPALFVALTFERREVLDSSNIKPMSNLIGVDRGENIPAVIALTDPEGCPLSRFKDSLGNPTHILRIGESYKEKQRTIQAKKEVEQRRAGGYSRKYASKAKNLADDMVRNTARDLLYYAVTQDAMLIFENLSRGFGRQGKRTFMAERQYTRMEDWLTAKLAYEGLPSKTYLSKTLAQYTSKTCSNCGFTITSADYDRVLEKLKKTATGWMTTINGKELKVEGQITYYNRYKRQNVVKDLSVELDRLSEESVNNDISSWTKGRSGEALSLLKKRFSHRPVQEKFVCLNCGFETHADEQAALNIARSWLFLRSQEYKKYQTNKTTGNTDKRAFVETWQSFYRKKLKEVWKPAV

SEQ ID NO: 45494 - protein, 979 aa, synthetic construct
  REGION 1..979: note = engineered CasX variant
QEIKRINKIRRRLVKDSNTKKAGKTGPMKTLLVRVMTPDLRERLENLRKKPENIPQPISNTSRANLNKLLTDYTEMKKAILHVYWEEFQKDPVGLMSRVAQPASKKIDQNKLKPEMDEKGNLTTAGFACSQCGQPLFVYKLEQVSEKGKAYTNYFGRCNVAEHEKLIKLAQLKPEKDSDEAVTYSLGKFGQRALDFYSIHVTKESTHPVKPLAQIAGNRYASGPVGKALSDACMGTIASFLSKYQDIIIEHQKVVKGNQKRLESLRELAGKENLEYPSVTLPPQPHTKEGVDAYNEVIARVRMWVNLNLWQKLKLSRDDAKPLLRLKGFPSFPLVERQANEVDWWDMVCNVKKLINEKKEDGKVFWQNLAGYKRQEALRPYLSSEEDRKKGKKFARYQLGDLLLHLEKKHGEDWGKVYDEAWERIDKKVEGLSKHIKLEEERRSEDAQSKAALTDWLRAKASFVIEGKKEADKDEFCRCELKLQKWYGDLRGKPFAIEAENSILDISGFSKQYNCAFIWQKDGVKKLNLYLIINYFKGGKLRFKKIKPEAFEANRFYTVINKKSGEIVPMEVNFNFDDPNLIILPLAFGKRQGREFIWNDLLSLETGSLKLANGRVIEKTLYNRRTRQDEPALFVALTFERREVLDSSNIKPMSNLIGVDRGENIPAVIALTDPEGCPLSRFKDSLGNPTHILRIGESYKEKQRTIQAKKEVEQRRAGGYSRKYASKAKNLADDMVRNTARDLLYYAVTQDAMLIFENLSRGFGRQGKRTFMAERQYTRMEDWLTAKLAYEGLPSKTYLSKTLAQYTSKTCSNCGFTITSADYDRVLEKLKKTATGWMTTINGKELKVEGQITYYNRYKRQNVVKDLSVELDRLSEESVNNDISSWTKGRSGEALSLLKKRFSHRPVQEKFVCLNCGFETHADEQAALNIARSWLFLRSQEYKKYQTNKTTGNTDKRAFVETWQSFYRKKLKEVWKPAV

SEQ ID NO: 45495 - protein, 978 aa, synthetic construct
  REGION 1..978: note = engineered CasX variant
QEIKRINKIRRRLVKDSNTKKAGKTGPMKTLLVRVMTPDLRERLENLRKKPENIPQPISNTSRANLNKLLTDYTEMKKAILHVYWEEFQKDPVGLMSRVAQPASKKIDQNKLKPEMDEKGNLTTAGFACSQCGQPLFVYKLEQVSEKGKAYTNYFGRCNVAEHEKLILLAQLKPEKDSDEAVTYSLGKFGQRALDFYSIHVTKESTHPVKPLAQIAGNRYASPVGKALSDACMGTIASFLSKYQDIIIEHQKVVKGNQKRLESLRELAGKENLEYPSVTLPPQPHTKEGVDAYNEVIARVRMWVNLNLWQKLKLSRDDAKPLLRLKGFPSFPLVERQANEVDWWDMVCNVKKLINEKKEDGKVFWQNLAGYKRQEALRPYLSSEEDRKKGKKFARYQLGDLLLHLEKKHGEDWGKVYDEAWERIDKKVEGLSKHIKLEEERRSEDAQSKAALTDWLRAKASFVIEGKKEADKDEFCRCELKLQKWYGDLRGKPFAIEAENSILDISGFSKQYNCAFIWQKDGVKKLNLYLIINYFKGGKLRFKKIKPEAFEANRFYTVINKKSGEIVPMEVNFNFDDPNLIILPLAFGKRQGREFIWNDLLSLETGSLKLANGRVIEKTLYNRRTRQDEPALFVALTFERREVLDSSNIKPMSNLIGVDRGENIPAVIALTDPEGCPLSRFKDSLGNPTHILRIGESYKEKQRTIQAKKEVEQRRAGGYSRKYASKAKNLADDMVRNTARDLLYYAVTQDAMLIFENLSRGFGRQGKRTFMAERQYTRMEDWLTAKLAYEGLPSKTYLSKTLAQYTSKTCSNCGFTITSADYDRVLEKLKKTATGWMTTINGKELKVEGQITYYNRYKRQNVVKDLSVELDRLSEESVNNDISSWTKGRSGEALSLLKKRFSHRPVQEKFVCLNCGFETHADEQAALNIARSWLFLRSQEYKKYQTNKTTGNTDKRAFVETWQSFYRKKLKEVWKPAV

SEQ ID NO: 45496 - protein, 979 aa, synthetic construct
  REGION 1..979: note = engineered CasX variant
QEIKRINKIRRRLVKDSNTKKAGKTGPMKTLLVRVMTPDLRERLENLRKKPENIPQPISNTSRANLNKLLTDYTEMKKAILHVYWEEFQKDPVGLMSRVAQPASKKIDQNKLKPEMDEKGNLTTAGFACSQCGQPLFVYKLEQVSEKGKAYTNYFGRCNVAEHEKLILLAQLKPEKDSDEAVTYSLGKFGQRALDFYSIHVTKESTHPVKPLAQIAGNRYASYPVGKALSDACMGTIASFLSKYQDIIIEHQKVVKGNQKRLESLRELAGKENLEYPSVTLPPQPHTKEGVDAYNEVIARVRMWVNLNLWQKLKLSRDDAKPLLRLKGFPSFPLVERQANEVDWWDMVCNVKKLINEKKEDGKVFWQNLAGYKRQEALRPYLSSEEDRKKGKKFARYQLGDLLLHLEKKHGEDWGKVYDEAWERIDKKVEGLSKHIKLEEERRSEDAQSKAALTDWLRAKASFVIEGSKEADKDEFCRCELKLQKWYGDLRGKPFAIEAENSILDISGFSKQYNCAFIWQKDGVKKLNLYLIINYFKGGKLRFKKIKPEAFEANRFYTVINKKSGEIVPMEVNFNFDDPNLIILPLAFGKRQGREFIWNDLLSLETGSLKLANGRVIEKTLYNRRTRQDEPALFVALTFERREVLDSSNIKPMSNLIGVDRGENIPAVIALTDPEGCPLSRFKDSLGNPTHILRIGESYKEKQRTIQAKKEVEQRRAGGYSRKYASKAKNLADDMVRNTARDLLYYAVTQDAMLIFENLSRGFGRQGKRTFMAERQYTRMEDWLTAKLAYEGLPSKTYLSKTLAQYTSKTCSNCGFTITSADYDRVLEKLKKTATGWMTTINGKELKVEGQITYYNRYKRQNVVKDLSVELDRLSEESVNNDISSWTKGRSGEALSLLKKRFSHRPVQEKFVCLNCGFETHADEQAALNIARSWLFLRSQEYKKYQTNKTTGNTDKRAFVETWQSFYRKKLKEVWKPAV

SEQ ID NO: 45497 - protein, 979 aa, synthetic construct
  REGION 1..979: note = engineered CasX variant
QEIKRINKIRRRLVKDSNTKKAGKTGPMKTLLVRVMTPDLRERLENLRKKPENIPQPISNTSRANLNKLLTDYTEMKKAILHVYWEEFQKDPVGLMSRVAQPASKKIDQNKLKPEMDEKGNLTTAGFACSQCGQPLFVYKLEQVSEKGKAYTNYFGRCNVAEHEKLILLAQLKPEKDSDEAVTYSLGKFGQRALDFYSIHVTKESTHPVKPLAQIAGNRYASHPVGKALSDACMGTIASFLSKYQDIIIEHQKVVKGNQKRLESLRELAGKENLEYPSVTLPPQPHTKEGVDAYNEVIARVRMWVNLNLWQKLKLSRDDAKPLLRLKGFPSFPLVERQANEVDWWDMVCNVKKLINEKKEDGKVFWQNLAGYKRQEALRPYLSSEEDRKKGKKFARYQLGDLLLHLEKKHGEDWGKVYDEAWERIDKKVEGLSKHIKLEEERRSEDAQSKAALTDWLRAKASFVIEGSKEADKDEFCRCELKLQKWYGDLRGKPFAIEAENSILDISGFSKQYNCAFIWQKDGVKKLNLYLIINYFKGGKLRFKKIKPEAFEANRFYTVINKKSGEIVPMEVNFNFDDPNLIILPLAFGKRQGREFIWNDLLSLETGSLKLANGRVIEKTLYNRRTRQDEPALFVALTFERREVLDSSNIKPMSNLIGVDRGENIPAVIALTDPEGCPLSRFKDSLGNPTHILRIGESYKEKQRTIQAKKEVEQRRAGGYSRKYASKAKNLADDMVRNTARDLLYYAVTQDAMLIFENLSRGFGRQGKRTFMAERQYTRMEDWLTAKLAYEGLPSKTYLSKTLAQYTSKTCSNCGFTITSADYDRVLEKLKKTATGWMTTINGKELKVEGQITYYNRYKRQNVVKDLSVELDRLSEESVNNDISSWTKGRSGEALSLLKKRFSHRPVQEKFVCLNCGFETHADEQAALNIARSWLFLRSQEYKKYQTNKTTGNTDKRAFVETWQSFYRKKLKEVWKPAV

SEQ ID NO: 45498 - protein, 979 aa, synthetic construct
  REGION 1..979: note = engineered CasX variant
QEIKRINKIRRRLVKDSNTKKAGKTGPMKTLLVRVMTPDLRERLENLRKKPENIPQPISNTSRANLNKLLTDYTEMKKAILHVYWEEFQKDPVGLMSRVAQPASKKIDQNKLKPEMDEKGNLTTAGFACSQCGQPLFVYKLEQVSEKGKAYTNYFGRCNVAEHEKLILLAQLKPEKDSDEAVTYSLGKFGQRALDFYSIHVTKESTHPVKPLAQIAGNRYASSPVGKALSDACMGTIASFLSKYQDIIIEHQKVVKGNQKRLESLRELAGKENLEYPSVTLPPQPHTKEGVDAYNEVIARVRMWVNLNLWQKLKLSRDDAKPLLRLKGFPSFPLVERQANEVDWWDMVCNVKKLINEKKEDGKVFWQNLAGYKRQEALRPYLSSEEDRKKGKKFARYQLGDLLLHLEKKHGEDWGKVYDEAWERIDKKVEGLSKHIKLEEERRSEDAQSKAALTDWLRAKASFVIEGSKEADKDEFCRCELKLQKWYGDLRGKPFAIEAENSILDISGFSKQYNCAFIWQKDGVKKLNLYLIINYFKGGKLRFKKIKPEAFEANRFYTVINKKSGEIVPMEVNFNFDDPNLIILPLAFGKRQGREFIWNDLLSLETGSLKLANGRVIEKTLYNRRTRQDEPALFVALTFERREVLDSSNIKPMSNLIGVDRGENIPAVIALTDPEGCPLSRFKDSLGNPTHILRIGESYKEKQRTIQAKKEVEQRRAGGYSRKYASKAKNLADDMVRNTARDLLYYAVTQDAMLIFENLSRGFGRQGKRTFMAERQYTRMEDWLTAKLAYEGLPSKTYLSKTLAQYTSKTCSNCGFTITSADYDRVLEKLKKTATGWMTTINGKELKVEGQITYYNRYKRQNVVKDLSVELDRLSEESVNNDISSWTKGRSGEALSLLKKRFSHRPVQEKFVCLNCGFETHADEQAALNIARSWLFLRSQEYKKYQTNKTTGNTDKRAFVETWQSFYRKKLKEVWKPAV

SEQ ID NO: 45499 - protein, 979 aa, synthetic construct
  REGION 1..979: note = engineered CasX variant
QEIKRINKIRRRLVKDSNTKKAGKTGPMKTLLVRVMTPDLRERLENLRKKPENIPQPISNTSRANLNKLLTDYTEMKKAILHVYWEEFQKDPVGLMSRVAQPASKKIDQNKLKPEMDEKGNLTTAGFACSQCGQPLFVYKLEQVSEKGKAYTNYFGRCNVAEHEKLILLAQLKPEKDSDEAVTYSLGKFGQRALDFYSIHVTKESTHPVKPLAQIAGNRYASTPVGKALSDACMGTIASFLSKYQDIIIEHQKVVKGNQKRLESLRELAGKENLEYPSVTLPPQPHTKEGVDAYNEVIARVRMWVNLNLWQKLKLSRDDAKPLLRLKGFPSFPLVERQANEVDWWDMVCNVKKLINEKKEDGKVFWQNLAGYKRQEALRPYLSSEEDRKKGKKFARYQLGDLLLHLEKKHGEDWGKVYDEAWERIDKKVEGLSKHIKLEEERRSEDAQSKAALTDWLRAKASFVIEGSKEADKDEFCRCELKLQKWYGDLRGKPFAIEAENSILDISGFSKQYNCAFIWQKDGVKKLNLYLIINYFKGGKLRFKKIKPEAFEANRFYTVINKKSGEIVPMEVNFNFDDPNLIILPLAFGKRQGREFIWNDLLSLETGSLKLANGRVIEKTLYNRRTRQDEPALFVALTFERREVLDSSNIKPMSNLIGVDRGENIPAVIALTDPEGCPLSRFKDSLGNPTHILRIGESYKEKQRTIQAKKEVEQRRAGGYSRKYASKAKNLADDMVRNTARDLLYYAVTQDAMLIFENLSRGFGRQGKRTFMAERQYTRMEDWLTAKLAYEGLPSKTYLSKTLAQYTSKTCSNCGFTITSADYDRVLEKLKKTATGWMTTINGKELKVEGQITYYNRYKRQNVVKDLSVELDRLSEESVNNDISSWTKGRSGEALSLLKKRFSHRPVQEKFVCLNCGFETHADEQAALNIARSWLFLRSQEYKKYQTNKTTGNTDKRAFVETWQSFYRKKLKEVWKPAV

SEQ ID NO: 45500 - protein, 979 aa, synthetic construct
  REGION 1..979: note = engineered CasX variant
QEIKRINKIRRRLVKDSNTKKAGKTGPMKTLLVRVMTPDLRERLENLRKKPENIPQPISNTSRANLNKLLTDYTEMKKAILHVYWEEFQKDPVGLMSRVAQPASKKIDQNKLKPEMDEKGNLTTAGFACSQCGQPLFVYKLEQVSEKGKAYTNYFGRCNVAEHEKLILLAQLKPEKDSDEAVTYSLGKFGQRALDFYSIHVTKESTHPVKPLAQIAGNRYASAPVGKALSDACMGTIASFLSKYQDIIIEHQKVVKGNQKRLESLRELAGKENLEYPSVTLPPQPHTKEGVDAYNEVIARVRMWVNLNLWQKLKLSRDDAKPLLRLKGFPSFPLVERQANEVDWWDMVCNVKKLINEKKEDGKVFWQNLAGYKRQEALRPYLSSEEDRKKGKKFARYQLGDLLLHLEKKHGEDWGKVYDEAWERIDKKVEGLSKHIKLEEERRSEDAQSKAALTDWLRAKASFVIEGSKEADKDEFCRCELKLQKWYGDLRGKPFAIEAENSILDISGFSKQYNCAFIWQKDGVKKLNLYLIINYFKGGKLRFKKIKPEAFEANRFYTVINKKSGEIVPMEVNFNFDDPNLIILPLAFGKRQGREFIWNDLLSLETGSLKLANGRVIEKTLYNRRTRQDEPALFVALTFERREVLDSSNIKPMSNLIGVDRGENIPAVIALTDPEGCPLSRFKDSLGNPTHILRIGESYKEKQRTIQAKKEVEQRRAGGYSRKYASKAKNLADDMVRNTARDLLYYAVTQDAMLIFENLSRGFGRQGKRTFMAERQYTRMEDWLTAKLAYEGLPSKTYLSKTLAQYTSKTCSNCGFTITSADYDRVLEKLKKTATGWMTTINGKELKVEGQITYYNRYKRQNVVKDLSVELDRLSEESVNNDISSWTKGRSGEALSLLKKRFSHRPVQEKFVCLNCGFETHADEQAALNIARSWLFLRSQEYKKYQTNKTTGNTDKRAFVETWQSFYRKKLKEVWKPAV

SEQ ID NO: 45501 - protein, 979 aa, synthetic construct
  REGION 1..979: note = engineered CasX variant
QEIKRINKIRRRLVKDSNTKKAGKTGPMKTLLVRVMTPDLRERLENLRKKPENIPQPISNTSRANLNKLLTDYTEMKKAILHVYWEEFQKDPVGLMSRVAQPASKKIDQNKLKPEMDEKGNLTTAGFACSQCGQPLFVYKLEQVSEKGKAYTNYFGRCNVAEHEKLILLAQLKPEKDSDEAVTYSLGKFGQRALDFYSIHVTKESTHPVKPLAQIAGNRYASVPVGKALSDACMGTIASFLSKYQDIIIEHQKVVKGNQKRLESLRELAGKENLEYPSVTLPPQPHTKEGVDAYNEVIARVRMWVNLNLWQKLKLSRDDAKPLLRLKGFPSFPLVERQANEVDWWDMVCNVKKLINEKKEDGKVFWQNLAGYKRQEALRPYLSSEEDRKKGKKFARYQLGDLLLHLEKKHGEDWGKVYDEAWERIDKKVEGLSKHIKLEEERRSEDAQSKAALTDWLRAKASFVIEGSKEADKDEFCRCELKLQKWYGDLRGKPFAIEAENSILDISGFSKQYNCAFIWQKDGVKKLNLYLIINYFKGGKLRFKKIKPEAFEANRFYTVINKKSGEIVPMEVNFNFDDPNLIILPLAFGKRQGREFIWNDLLSLETGSLKLANGRVIEKTLYNRRTRQDEPALFVALTFERREVLDSSNIKPMSNLIGVDRGENIPAVIALTDPEGCPLSRFKDSLGNPTHILRIGESYKEKQRTIQAKKEVEQRRAGGYSRKYASKAKNLADDMVRNTARDLLYYAVTQDAMLIFENLSRGFGRQGKRTFMAERQYTRMEDWLTAKLAYEGLPSKTYLSKTLAQYTSKTCSNCGFTITSADYDRVLEKLKKTATGWMTTINGKELKVEGQITYYNRYKRQNVVKDLSVELDRLSEESVNNDISSWTKGRSGEALSLLKKRFSHRPVQEKFVCLNCGFETHADEQAALNIARSWLFLRSQEYKKYQTNKTTGNTDKRAFVETWQSFYRKKLKEVWKPAV

SEQ ID NO: 45502 - protein, 979 aa, synthetic construct
  REGION 1..979: note = engineered CasX variant
QEIKRINKIRRRLVKDSNTKKAGKTGPMKTLLVRVMTPDLRERLENLRKKPENIPQPISNTSRANLNKLLTDYTEMKKAILHVYWEEFQKDPVGLMSRVAQPASKKIDQNKLKPEMDEKGNLTTAGFACSQCGQPLFVYKLEQVSEKGKAYTNYFGRCNVAEHEKLIKLAQLKPEKDSDEAVTYSLGKFGQRALDFYSIHVTKESTHPVKPLAQIAGNRYASGPVGKALSDACMGTIASFLSKYQDIIIEHQKVVKGNQKRLESLRELAGKENLEYPSVTLPPQPHTKEGVDAYNEVIARVRMWVNLNLWQKLKLSRDDAKPLLRLKGFPSFPLVERQANEVDWWDMVCNVKKLINEKKEDGKVFWQNLAGYKRQEALRPYLSSEEDRKKGKKFARYQLGDLLLHLEKKHGEDWGKVYDEAWERIDKKVEGLSKHIKLEEERRSEDAQSKAALTDWLRAKASFVIEGSKEADKDEFCRCELKLQKWYGDLRGKPFAIEAENSILDISGFSKQYNCAFIWQKDGVKKLNLYLIINYFKGGKLRFKKIKPEAFEANRFYTVINKKSGEIVPMEVNFNFDDPNLIILPLAFGKRQGREFIWNDLLSLETGSLKLANGRVIEKTLYNRRTRQDEPALFVALTFERREVLDSSNIKPMSNLIGVDRGENIPAVIALTDPEGCPLSRFKDSLGNPTHILRIGESYKEKQRTIQAKKEVEQRRAGGYSRKYASKAKNLADDMVRNTARDLLYYAVTQDAMLIFENLSRGFGRQGKRTFMAERQYTRMEDWLTAKLAYEGLPSKTYLSKTLAQYTSKTCSNCGFTITSADYDRVLEKLKKTATGWMTTINGKELKVEGQITYYNRYKRQNVVKDLSVELDRLSEESVNNDISSWTKGRSGEALSLLKKRFSHRPVQEKFVCLNCGFETHADEQAALNIARSWLFLRSQEYKKYQTNKTTGNTDKRAFVETWQSFYRKKLKEVWKPAV

SEQ ID NO: 45503 - protein, 978 aa, synthetic construct
  REGION 1..978: note = engineered CasX variant
QEIKRINKIRRRLVKDSNTKKAGKTGPMKTLLVRVMTPDLRERLENLRKKPENIPQPISNTSRANLNKLLTDYTEMKKAILHVYWEEFQKDPVGLMSRVAQPASKKIDQNKLKPEMDEKGNLTTAGFACSQCGQPLFVYKLEQVSEKGKAYTNYFGRCNVAEHEKLILLAQLKPEKDSDEAVTYSLGKFGQRALDFYSIHVTKESTHPVKPLAQIAGNRYASPVGKALSDACMGTIASFLSKYQDIIIEHQKVVKGNQKRLESLRELAGKENLEYPSVTLPPQPHTKEGVDAYNEVIARVRMWVNLNLWQKLKLSRDDAKPLLRLKGFPSFPLVERQANEVDWWDMVCNVKKLINEKKEDGKVFWQNLAGYKRQEALRPYLSSEEDRKKGKKFARYQLGDLLLHLEKKHGEDWGKVYDEAWERIDKKVEGLSKHIKLEEERRSEDAQSKAALTDWLRAKASFVIEGSKEADKDEFCRCELKLQKWYGDLRGKPFAIEAENSILDISGFSKQYNCAFIWQKDGVKKLNLYLIINYFKGGKLRFKKIKPEAFEANRFYTVINKKSGEIVPMEVNFNFDDPNLIILPLAFGKRQGREFIWNDLLSLETGSLKLANGRVIEKTLYNRRTRQDEPALFVALTFERREVLDSSNIKPMSNLIGVDRGENIPAVIALTDPEGCPLSRFKDSLGNPTHILRIGESYKEKQRTIQAKKEVEQRRAGGYSRKYASKAKNLADDMVRNTARDLLYYAVTQDAMLIFENLSRGFGRQGKRTFMAERQYTRMEDWLTAKLAYEGLPSKTYLSKTLAQYTSKTCSNCGFTITSADYDRVLEKLKKTATGWMTTINGKELKVEGQITYYNRYKRQNVVKDLSVELDRLSEESVNNDISSWTKGRSGEALSLLKKRFSHRPVQEKFVCLNCGFETHADEQAALNIARSWLFLRSQEYKKYQTNKTTGNTDKRAFVETWQSFYRKKLKEVWKPAV

SEQ ID NO: 45504 - protein, 980 aa, synthetic construct
  REGION 1..980: note = engineered CasX variant
QEIKRINKIRRRLVKDSNTKKAGKTGPMKTLLVRVMTPDLRERLENLRKKPENIPQPISNTSRANLNKLLTDYTEMKKAILHVYWEEFQKDPVGLMSRVAQPASKKIDQNKLKPEMDEKGNLTTAGFACSQCGQPLFVYKLEQVSEKGKAYTNYFGRCNVAEHEKLILLAQLKPEKDSDEAVTYSLGKFGQRALDFYSIHVTKESTHPVKPLAQIAGNRYASYPVGKALSDACMGTIASFLSKYQDIIIEHQKVVKGNQKRLESLRELAGKENLEYPSVTLPPQPHTKEGVDAYNEVIARVRMWVNLNLWQKLKLSRDDAKPLLRLKGFPSFPLVERQANEVDWWDMVCNVKKLINEKKEDGKVFWQNLAGYKRQEALRPYLSSEEDRKKGKKFARYQLGDLLLHLEKKHGEDWGKVYDEAWERIDKKVEGLSKHIKLEEERRSEDAQSKAALTDWLRAKASFVIEGLKEADDKDEFCRCELKLQKWYGDLRGKPFAIEAENSILDISGFSKQYNCAFIWQKDGVKKLNLYLIINYFKGGKLRFKKIKPEAFEANRFYTVINKKSGEIVPMEVNFNFDDPNLIILPLAFGKRQGREFIWNDLLSLETGSLKLANGRVIEKTLYNRRTRQDEPALFVALTFERREVLDSSNIKPMSNLIGVDRGENIPAVIALTDPEGCPLSRFKDSLGNPTHILRIGESYKEKQRTIQAKKEVEQRRAGGYSRKYASKAKNLADDMVRNTARDLLYYAVTQDAMLIFENLSRGFGRQGKRTFMAERQYTRMEDWLTAKLAYEGLPSKTYLSKTLAQYTSKTCSNCGFTITSADYDRVLEKLKKTATGWMTTINGKELKVEGQITYYNRYKRQNVVKDLSVELDRLSEESVNNDISSWTKGRSGEALSLLKKRFSHRPVQEKFVCLNCGFETHADEQAALNIARSWLFLRSQEYKKYQTNKTTGNTDKRAFVETWQSFYRKKLKEVWKPAV

SEQ ID NO: 45505 - protein, 980 aa, synthetic construct
  REGION 1..980: note = engineered CasX variant
QEIKRINKIRRRLVKDSNTKKAGKTGPMKTLLVRVMTPDLRERLENLRKKPENIPQPISNTSRANLNKLLTDYTEMKKAILHVYWEEFQKDPVGLMSRVAQPASKKIDQNKLKPEMDEKGNLTTAGFACSQCGQPLFVYKLEQVSEKGKAYTNYFGRCNVAEHEKLILLAQLKPEKDSDEAVTYSLGKFGQRALDFYSIHVTKESTHPVKPLAQIAGNRYASHPVGKALSDACMGTIASFLSKYQDIIIEHQKVVKGNQKRLESLRELAGKENLEYPSVTLPPQPHTKEGVDAYNEVIARVRMWVNLNLWQKLKLSRDDAKPLLRLKGFPSFPLVERQANEVDWWDMVCNVKKLINEKKEDGKVFWQNLAGYKRQEALRPYLSSEEDRKKGKKFARYQLGDLLLHLEKKHGEDWGKVYDEAWERIDKKVEGLSKHIKLEEERRSEDAQSKAALTDWLRAKASFVIEGLKEADDKDEFCRCELKLQKWYGDLRGKPFAIEAENSILDISGFSKQYNCAFIWQKDGVKKLNLYLIINYFKGGKLRFKKIKPEAFEANRFYTVINKKSGEIVPMEVNFNFDDPNLIILPLAFGKRQGREFIWNDLLSLETGSLKLANGRVIEKTLYNRRTRQDEPALFVALTFERREVLDSSNIKPMSNLIGVDRGENIPAVIALTDPEGCPLSRFKDSLGNPTHILRIGESYKEKQRTIQAKKEVEQRRAGGYSRKYASKAKNLADDMVRNTARDLLYYAVTQDAMLIFENLSRGFGRQGKRTFMAERQYTRMEDWLTAKLAYEGLPSKTYLSKTLAQYTSKTCSNCGFTITSADYDRVLEKLKKTATGWMTTINGKELKVEGQITYYNRYKRQNVVKDLSVELDRLSEESVNNDISSWTKGRSGEALSLLKKRFSHRPVQEKFVCLNCGFETHADEQAALNIARSWLFLRSQEYKKYQTNKTTGNTDKRAFVETWQSFYRKKLKEVWKPAV

SEQ ID NO: 45506 - protein, 980 aa, synthetic construct
  REGION 1..980: note = engineered CasX variant
QEIKRINKIRRRLVKDSNTKKAGKTGPMKTLLVRVMTPDLRERLENLRKKPENIPQPISNTSRANLNKLLTDYTEMKKAILHVYWEEFQKDPVGLMSRVAQPASKKIDQNKLKPEMDEKGNLTTAGFACSQCGQPLFVYKLEQVSEKGKAYTNYFGRCNVAEHEKLILLAQLKPEKDSDEAVTYSLGKFGQRALDFYSIHVTKESTHPVKPLAQIAGNRYASSPVGKALSDACMGTIASFLSKYQDIIIEHQKVVKGNQKRLESLRELAGKENLEYPSVTLPPQPHTKEGVDAYNEVIARVRMWVNLNLWQKLKLSRDDAKPLLRLKGFPSFPLVERQANEVDWWDMVCNVKKLINEKKEDGKVFWQNLAGYKRQEALRPYLSSEEDRKKGKKFARYQLGDLLLHLEKKHGEDWGKVYDEAWERIDKKVEGLSKHIKLEEERRSEDAQSKAALTDWLRAKASFVIEGLKEADDKDEFCRCELKLQKWYGDLRGKPFAIEAENSILDISGFSKQYNCAFIWQKDGVKKLNLYLIINYFKGGKLRFKKIKPEAFEANRFYTVINKKSGEIVPMEVNFNFDDPNLIILPLAFGKRQGREFIWNDLLSLETGSLKLANGRVIEKTLYNRRTRQDEPALFVALTFERREVLDSSNIKPMSNLIGVDRGENIPAVIALTDPEGCPLSRFKDSLGNPTHILRIGESYKEKQRTIQAKKEVEQRRAGGYSRKYASKAKNLADDMVRNTARDLLYYAVTQDAMLIFENLSRGFGRQGKRTFMAERQYTRMEDWLTAKLAYEGLPSKTYLSKTLAQYTSKTCSNCGFTITSADYDRVLEKLKKTATGWMTTINGKELKVEGQITYYNRYKRQNVVKDLSVELDRLSEESVNNDISSWTKGRSGEALSLLKKRFSHRPVQEKFVCLNCGFETHADEQAALNIARSWLFLRSQEYKKYQTNKTTGNTDKRAFVETWQSFYRKKLKEVWKPAV

SEQ ID NO: 45507 - protein, 980 aa, synthetic construct
  REGION 1..980: note = engineered CasX variant
QEIKRINKIRRRLVKDSNTKKAGKTGPMKTLLVRVMTPDLRERLENLRKKPENIPQPISNTSRANLNKLLTDYTEMKKAILHVYWEEFQKDPVGLMSRVAQPASKKIDQNKLKPEMDEKGNLTTAGFACSQCGQPLFVYKLEQVSEKGKAYTNYFGRCNVAEHEKLILLAQLKPEKDSDEAVTYSLGKFGQRALDFYSIHVTKESTHPVKPLAQIAGNRYASTPVGKALSDACMGTIASFLSKYQDIIIEHQKVVKGNQKRLESLRELAGKENLEYPSVTLPPQPHTKEGVDAYNEVIARVRMWVNLNLWQKLKLSRDDAKPLLRLKGFPSFPLVERQANEVDWWDMVCNVKKLINEKKEDGKVFWQNLAGYKRQEALRPYLSSEEDRKKGKKFARYQLGDLLLHLEKKHGEDWGKVYDEAWERIDKKVEGLSKHIKLEEERRSEDAQSKAALTDWLRAKASFVIEGLKEADDKDEFCRCELKLQKWYGDLRGKPFAIEAENSILDISGFSKQYNCAFIWQKDGVKKLNLYLIINYFKGGKLRFKKIKPEAFEANRFYTVINKKSGEIVPMEVNFNFDDPNLIILPLAFGKRQGREFIWNDLLSLETGSLKLANGRVIEKTLYNRRTRQDEPALFVALTFERREVLDSSNIKPMSNLIGVDRGENIPAVIALTDPEGCPLSRFKDSLGNPTHILRIGESYKEKQRTIQAKKEVEQRRAGGYSRKYASKAKNLADDMVRNTARDLLYYAVTQDAMLIFENLSRGFGRQGKRTFMAERQYTRMEDWLTAKLAYEGLPSKTYLSKTLAQYTSKTCSNCGFTITSADYDRVLEKLKKTATGWMTTINGKELKVEGQITYYNRYKRQNVVKDLSVELDRLSEESVNNDISSWTKGRSGEALSLLKKRFSHRPVQEKFVCLNCGFETHADEQAALNIARSWLFLRSQEYKKYQTNKTTGNTDKRAFVETWQSFYRKKLKEVWKPAV

SEQ ID NO: 45508 - protein, 980 aa, synthetic construct
  REGION 1..980: note = engineered CasX variant
QEIKRINKIRRRLVKDSNTKKAGKTGPMKTLLVRVMTPDLRERLENLRKKPENIPQPISNTSRANLNKLLTDYTEMKKAILHVYWEEFQKDPVGLMSRVAQPASKKIDQNKLKPEMDEKGNLTTAGFACSQCGQPLFVYKLEQVSEKGKAYTNYFGRCNVAEHEKLILLAQLKPEKDSDEAVTYSLGKFGQRALDFYSIHVTKESTHPVKPLAQIAGNRYASAPVGKALSDACMGTIASFLSKYQDIIIEHQKVVKGNQKRLESLRELAGKENLEYPSVTLPPQPHTKEGVDAYNEVIARVRMWVNLNLWQKLKLSRDDAKPLLRLKGFPSFPLVERQANEVDWWDMVCNVKKLINEKKEDGKVFWQNLAGYKRQEALRPYLSSEEDRKKGKKFARYQLGDLLLHLEKKHGEDWGKVYDEAWERIDKKVEGLSKHIKLEEERRSEDAQSKAALTDWLRAKASFVIEGLKEADDKDEFCRCELKLQKWYGDLRGKPFAIEAENSILDISGFSKQYNCAFIWQKDGVKKLNLYLIINYFKGGKLRFKKIKPEAFEANRFYTVINKKSGEIVPMEVNFNFDDPNLIILPLAFGKRQGREFIWNDLLSLETGSLKLANGRVIEKTLYNRRTRQDEPALFVALTFERREVLDSSNIKPMSNLIGVDRGENIPAVIALTDPEGCPLSRFKDSLGNPTHILRIGESYKEKQRTIQAKKEVEQRRAGGYSRKYASKAKNLADDMVRNTARDLLYYAVTQDAMLIFENLSRGFGRQGKRTFMAERQYTRMEDWLTAKLAYEGLPSKTYLSKTLAQYTSKTCSNCGFTITSADYDRVLEKLKKTATGWMTTINGKELKVEGQITYYNRYKRQNVVKDLSVELDRLSEESVNNDISSWTKGRSGEALSLLKKRFSHRPVQEKFVCLNCGFETHADEQAALNIARSWLFLRSQEYKKYQTNKTTGNTDKRAFVETWQSFYRKKLKEVWKPAV

SEQ ID NO: 45509 - protein, 980 aa, synthetic construct
  REGION 1..980: note = engineered CasX variant
QEIKRINKIRRRLVKDSNTKKAGKTGPMKTLLVRVMTPDLRERLENLRKKPENIPQPISNTSRANLNKLLTDYTEMKKAILHVYWEEFQKDPVGLMSRVAQPASKKIDQNKLKPEMDEKGNLTTAGFACSQCGQPLFVYKLEQVSEKGKAYTNYFGRCNVAEHEKLILLAQLKPEKDSDEAVTYSLGKFGQRALDFYSIHVTKESTHPVKPLAQIAGNRYASVPVGKALSDACMGTIASFLSKYQDIIIEHQKVVKGNQKRLESLRELAGKENLEYPSVTLPPQPHTKEGVDAYNEVIARVRMWVNLNLWQKLKLSRDDAKPLLRLKGFPSFPLVERQANEVDWWDMVCNVKKLINEKKEDGKVFWQNLAGYKRQEALRPYLSSEEDRKKGKKFARYQLGDLLLHLEKKHGEDWGKVYDEAWERIDKKVEGLSKHIKLEEERRSEDAQSKAALTDWLRAKASFVIEGLKEADDKDEFCRCELKLQKWYGDLRGKPFAIEAENSILDISGFSKQYNCAFIWQKDGVKKLNLYLIINYFKGGKLRFKKIKPEAFEANRFYTVINKKSGEIVPMEVNFNFDDPNLIILPLAFGKRQGREFIWNDLLSLETGSLKLANGRVIEKTLYNRRTRQDEPALFVALTFERREVLDSSNIKPMSNLIGVDRGENIPAVIALTDPEGCPLSRFKDSLGNPTHILRIGESYKEKQRTIQAKKEVEQRRAGGYSRKYASKAKNLADDMVRNTARDLLYYAVTQDAMLIFENLSRGFGRQGKRTFMAERQYTRMEDWLTAKLAYEGLPSKTYLSKTLAQYTSKTCSNCGFTITSADYDRVLEKLKKTATGWMTTINGKELKVEGQITYYNRYKRQNVVKDLSVELDRLSEESVNNDISSWTKGRSGEALSLLKKRFSHRPVQEKFVCLNCGFETHADEQAALNIARSWLFLRSQEYKKYQTNKTTGNTDKRAFVETWQSFYRKKLKEVWKPAV

SEQ ID NO: 45510 - protein, 980 aa, synthetic construct
  REGION 1..980: note = engineered CasX variant
QEIKRINKIRRRLVKDSNTKKAGKTGPMKTLLVRVMTPDLRERLENLRKKPENIPQPISNTSRANLNKLLTDYTEMKKAILHVYWEEFQKDPVGLMSRVAQPASKKIDQNKLKPEMDEKGNLTTAGFACSQCGQPLFVYKLEQVSEKGKAYTNYFGRCNVAEHEKLIKLAQLKPEKDSDEAVTYSLGKFGQRALDFYSIHVTKESTHPVKPLAQIAGNRYASGPVGKALSDACMGTIASFLSKYQDIIIEHQKVVKGNQKRLESLRELAGKENLEYPSVTLPPQPHTKEGVDAYNEVIARVRMWVNLNLWQKLKLSRDDAKPLLRLKGFPSFPLVERQANEVDWWDMVCNVKKLINEKKEDGKVFWQNLAGYKRQEALRPYLSSEEDRKKGKKFARYQLGDLLLHLEKKHGEDWGKVYDEAWERIDKKVEGLSKHIKLEEERRSEDAQSKAALTDWLRAKASFVIEGLKEADDKDEFCRCELKLQKWYGDLRGKPFAIEAENSILDISGFSKQYNCAFIWQKDGVKKLNLYLIINYFKGGKLRFKKIKPEAFEANRFYTVINKKSGEIVPMEVNFNFDDPNLIILPLAFGKRQGREFIWNDLLSLETGSLKLANGRVIEKTLYNRRTRQDEPALFVALTFERREVLDSSNIKPMSNLIGVDRGENIPAVIALTDPEGCPLSRFKDSLGNPTHILRIGESYKEKQRTIQAKKEVEQRRAGGYSRKYASKAKNLADDMVRNTARDLLYYAVTQDAMLIFENLSRGFGRQGKRTFMAERQYTRMEDWLTAKLAYEGLPSKTYLSKTLAQYTSKTCSNCGFTITSADYDRVLEKLKKTATGWMTTINGKELKVEGQITYYNRYKRQNVVKDLSVELDRLSEESVNNDISSWTKGRSGEALSLLKKRFSHRPVQEKFVCLNCGFETHADEQAALNIARSWLFLRSQEYKKYQTNKTTGNTDKRAFVETWQSFYRKKLKEVWKPAV

SEQ ID NO: 45511 - protein, 979 aa, synthetic construct
  REGION 1..979: note = engineered CasX variant
QEIKRINKIRRRLVKDSNTKKAGKTGPMKTLLVRVMTPDLRERLENLRKKPENIPQPISNTSRANLNKLLTDYTEMKKAILHVYWEEFQKDPVGLMSRVAQPASKKIDQNKLKPEMDEKGNLTTAGFACSQCGQPLFVYKLEQVSEKGKAYTNYFGRCNVAEHEKLILLAQLKPEKDSDEAVTYSLGKFGQRALDFYSIHVTKESTHPVKPLAQIAGNRYASPVGKALSDACMGTIASFLSKYQDIIIEHQKVVKGNQKRLESLRELAGKENLEYPSVTLPPQPHTKEGVDAYNEVIARVRMWVNLNLWQKLKLSRDDAKPLLRLKGFPSFPLVERQANEVDWWDMVCNVKKLINEKKEDGKVFWQNLAGYKRQEALRPYLSSEEDRKKGKKFARYQLGDLLLHLEKKHGEDWGKVYDEAWERIDKKVEGLSKHIKLEEERRSEDAQSKAALTDWLRAKASFVIEGLKEADDKDEFCRCELKLQKWYGDLRGKPFAIEAENSILDISGFSKQYNCAFIWQKDGVKKLNLYLIINYFKGGKLRFKKIKPEAFEANRFYTVINKKSGEIVPMEVNFNFDDPNLIILPLAFGKRQGREFIWNDLLSLETGSLKLANGRVIEKTLYNRRTRQDEPALFVALTFERREVLDSSNIKPMSNLIGVDRGENIPAVIALTDPEGCPLSRFKDSLGNPTHILRIGESYKEKQRTIQAKKEVEQRRAGGYSRKYASKAKNLADDMVRNTARDLLYYAVTQDAMLIFENLSRGFGRQGKRTFMAERQYTRMEDWLTAKLAYEGLPSKTYLSKTLAQYTSKTCSNCGFTITSADYDRVLEKLKKTATGWMTTINGKELKVEGQITYYNRYKRQNVVKDLSVELDRLSEESVNNDISSWTKGRSGEALSLLKKRFSHRPVQEKFVCLNCGFETHADEQAALNIARSWLFLRSQEYKKYQTNKTTGNTDKRAFVETWQSFYRKKLKEVWKPAV

SEQ ID NO: 45512 - protein, 980 aa, synthetic construct
  REGION 1..980: note = engineered CasX variant
QEIKRINKIRRRLVKDSNTKKAGKTGPMKTLLVRVMTPDLRERLENLRKKPENIPQPISNTSRANLNKLLTDYTEMKKAILHVYWEEFQKDPVGLMSRVAQPASKKIDQNKLKPEMDEKGNLTTAGFACSQCGQPLFVYKLEQVSEKGKAYTNYFGRCNVAEHEKLILLAQLKPEKDSDEAVTYSLGKFGQRALDFYSIHVTKESTHPVKPLAQIAGNRYASYPVGKALSDACMGTIASFLSKYQDIIIEHQKVVKGNQKRLESLRELAGKENLEYPSVTLPPQPHTKEGVDAYNEVIARVRMWVNLNLWQKLKLSRDDAKPLLRLKGFPSFPLVERQANEVDWWDMVCNVKKLINEKKEDGKVFWQNLAGYKRQEALRPYLSSEEDRKKGKKFARYQLGDLLLHLEKKHGEDWGKVYDEAWERIDKKVEGLSKHIKLEEERRSEDAQSKAALTDWLRAKASFVIEGLKEADKDEFCRCELKLQKWYGDLRGKPFAIEAENSILDISGFSKQYNCAFIWQKDGVKKLNLYLIINYFKGGKLRFKKIKPEAFEANRFYTVINKKSGEIVPMEVNFNFDDPNLIILPLAFGKRQGREFIWNDLLSLETGSLKLANGRVIEKTLYNRRTRQDEPALFVALTFERREVLDSSNIKPMSNLIGVDRGENIPAVIALTDPEGCPLSRFKDSLGNPTHILRIGESYKEKQRTIQAKKEVEQRRAGGYSRKYASKAKNLADDMVRNTARDLLYYAVTQDAMLIFENLSRGFGRQGKRTFMAERQYTRMEDWLTAKLAYEGLPSKTYLSKTLAQYTSKTCSNCGFTITSADYDRVLEKLKKTATGWMTTINGKELKVEGQITYYNRYKRQNVVKDLSVELDRLSEESVNNDISSWTKGRSGNEALSLLKKRFSHRPVQEKFVCLNCGFETHADEQAALNIARSWLFLRSQEYKKYQTNKTTGNTDKRAFVETWQSFYRKKLKEVWKPAV

SEQ ID NO: 45513 - protein, 980 aa, synthetic construct
  REGION 1..980: note = engineered CasX variant
QEIKRINKIRRRLVKDSNTKKAGKTGPMKTLLVRVMTPDLRERLENLRKKPENIPQPISNTSRANLNKLLTDYTEMKKAILHVYWEEFQKDPVGLMSRVAQPASKKIDQNKLKPEMDEKGNLTTAGFACSQCGQPLFVYKLEQVSEKGKAYTNYFGRCNVAEHEKLILLAQLKPEKDSDEAVTYSLGKFGQRALDFYSIHVTKESTHPVKPLAQIAGNRYASHPVGKALSDACMGTIASFLSKYQDIIIEHQKVVKGNQKRLESLRELAGKENLEYPSVTLPPQPHTKEGVDAYNEVIARVRMWVNLNLWQKLKLSRDDAKPLLRLKGFPSFPLVERQANEVDWWDMVCNVKKLINEKKEDGKVFWQNLAGYKRQEALRPYLSSEEDRKKGKKFARYQLGDLLLHLEKKHGEDWGKVYDEAWERIDKKVEGLSKHIKLEEERRSEDAQSKAALTDWLRAKASFVIEGLKEADKDEFCRCELKLQKWYGDLRGKPFAIEAENSILDISGFSKQYNCAFIWQKDGVKKLNLYLIINYFKGGKLRFKKIKPEAFEANRFYTVINKKSGEIVPMEVNFNFDDPNLIILPLAFGKRQGREFIWNDLLSLETGSLKLANGRVIEKTLYNRRTRQDEPALFVALTFERREVLDSSNIKPMSNLIGVDRGENIPAVIALTDPEGCPLSRFKDSLGNPTHILRIGESYKEKQRTIQAKKEVEQRRAGGYSRKYASKAKNLADDMVRNTARDLLYYAVTQDAMLIFENLSRGFGRQGKRTFMAERQYTRMEDWLTAKLAYEGLPSKTYLSKTLAQYTSKTCSNCGFTITSADYDRVLEKLKKTATGWMTTINGKELKVEGQITYYNRYKRQNVVKDLSVELDRLSEESVNNDISSWTKGRSGNEALSLLKKRFSHRPVQEKFVCLNCGFETHADEQAALNIARSWLFLRSQEYKKYQTNKTTGNTDKRAFVETWQSFYRKKLKEVWKPAV

SEQ ID NO: 45514 - protein, 980 aa, synthetic construct
  REGION 1..980: note = engineered CasX variant
QEIKRINKIRRRLVKDSNTKKAGKTGPMKTLLVRVMTPDLRERLENLRKKPENIPQPISNTSRANLNKLLTDYTEMKKAILHVYWEEFQKDPVGLMSRVAQPASKKIDQNKLKPEMDEKGNLTTAGFACSQCGQPLFVYKLEQVSEKGKAYTNYFGRCNVAEHEKLILLAQLKPEKDSDEAVTYSLGKFGQRALDFYSIHVTKESTHPVKPLAQIAGNRYASSPVGKALSDACMGTIASFLSKYQDIIIEHQKVVKGNQKRLESLRELAGKENLEYPSVTLPPQPHTKEGVDAYNEVIARVRMWVNLNLWQKLKLSRDDAKPLLRLKGFPSFPLVERQANEVDWWDMVCNVKKLINEKKEDGKVFWQNLAGYKRQEALRPYLSSEEDRKKGKKFARYQLGDLLLHLEKKHGEDWGKVYDEAWERIDKKVEGLSKHIKLEEERRSEDAQSKAALTDWLRAKASFVIEGLKEADKDEFCRCELKLQKWYGDLRGKPFAIEAENSILDISGFSKQYNCAFIWQKDGVKKLNLYLIINYFKGGKLRFKKIKPEAFEANRFYTVINKKSGEIVPMEVNFNFDDPNLIILPLAFGKRQGREFIWNDLLSLETGSLKLANGRVIEKTLYNRRTRQDEPALFVALTFERREVLDSSNIKPMSNLIGVDRGENIPAVIALTDPEGCPLSRFKDSLGNPTHILRIGESYKEKQRTIQAKKEVEQRRAGGYSRKYASKAKNLADDMVRNTARDLLYYAVTQDAMLIFENLSRGFGRQGKRTFMAERQYTRMEDWLTAKLAYEGLPSKTYLSKTLAQYTSKTCSNCGFTITSADYDRVLEKLKKTATGWMTTINGKELKVEGQITYYNRYKRQNVVKDLSVELDRLSEESVNNDISSWTKGRSGNEALSLLKKRFSHRPVQEKFVCLNCGFETHADEQAALNIARSWLFLRSQEYKKYQTNKTTGNTDKRAFVETWQSFYRKKLKEVWKPAV

SEQ ID NO: 45515 - protein, 980 aa, synthetic construct
  REGION 1..980: note = engineered CasX variant
QEIKRINKIRRRLVKDSNTKKAGKTGPMKTLLVRVMTPDLRERLENLRKKPENIPQPISNTSRANLNKLLTDYTEMKKAILHVYWEEFQKDPVGLMSRVAQPASKKIDQNKLKPEMDEKGNLTTAGFACSQCGQPLFVYKLEQVSEKGKAYTNYFGRCNVAEHEKLILLAQLKPEKDSDEAVTYSLGKFGQRALDFYSIHVTKESTHPVKPLAQIAGNRYASTPVGKALSDACMGTIASFLSKYQDIIIEHQKVVKGNQKRLESLRELAGKENLEYPSVTLPPQPHTKEGVDAYNEVIARVRMWVNLNLWQKLKLSRDDAKPLLRLKGFPSFPLVERQANEVDWWDMVCNVKKLINEKKEDGKVFWQNLAGYKRQEALRPYLSSEEDRKKGKKFARYQLGDLLLHLEKKHGEDWGKVYDEAWERIDKKVEGLSKHIKLEEERRSEDAQSKAALTDWLRAKASFVIEGLKEADKDEFCRCELKLQKWYGDLRGKPFAIEAENSILDISGFSKQYNCAFIWQKDGVKKLNLYLIINYFKGGKLRFKKIKPEAFEANRFYTVINKKSGEIVPMEVNFNFDDPNLIILPLAFGKRQGREFIWNDLLSLETGSLKLANGRVIEKTLYNRRTRQDEPALFVALTFERREVLDSSNIKPMSNLIGVDRGENIPAVIALTDPEGCPLSRFKDSLGNPTHILRIGESYKEKQRTIQAKKEVEQRRAGGYSRKYASKAKNLADDMVRNTARDLLYYAVTQDAMLIFENLSRGFGRQGKRTFMAERQYTRMEDWLTAKLAYEGLPSKTYLSKTLAQYTSKTCSNCGFTITSADYDRVLEKLKKTATGWMTTINGKELKVEGQITYYNRYKRQNVVKDLSVELDRLSEESVNNDISSWTKGRSGNEALSLLKKRFSHRPVQEKFVCLNCGFETHADEQAALNIARSWLFLRSQEYKKYQTNKTTGNTDKRAFVETWQSFYRKKLKEVWKPAV

SEQ ID NO: 45516 - protein, 980 aa, synthetic construct
  REGION 1..980: note = engineered CasX variant
QEIKRINKIRRRLVKDSNTKKAGKTGPMKTLLVRVMTPDLRERLENLRKKPENIPQPISNTSRANLNKLLTDYTEMKKAILHVYWEEFQKDPVGLMSRVAQPASKKIDQNKLKPEMDEKGNLTTAGFACSQCGQPLFVYKLEQVSEKGKAYTNYFGRCNVAEHEKLILLAQLKPEKDSDEAVTYSLGKFGQRALDFYSIHVTKESTHPVKPLAQIAGNRYASAPVGKALSDACMGTIASFLSKYQDIIIEHQKVVKGNQKRLESLRELAGKENLEYPSVTLPPQPHTKEGVDAYNEVIARVRMWVNLNLWQKLKLSRDDAKPLLRLKGFPSFPLVERQANEVDWWDMVCNVKKLINEKKEDGKVFWQNLAGYKRQEALRPYLSSEEDRKKGKKFARYQLGDLLLHLEKKHGEDWGKVYDEAWERIDKKVEGLSKHIKLEEERRSEDAQSKAALTDWLRAKASFVIEGLKEADKDEFCRCELKLQKWYGDLRGKPFAIEAENSILDISGFSKQYNCAFIWQKDGVKKLNLYLIINYFKGGKLRFKKIKPEAFEANRFYTVINKKSGEIVPMEVNFNFDDPNLIILPLAFGKRQGREFIWNDLLSLETGSLKLANGRVIEKTLYNRRTRQDEPALFVALTFERREVLDSSNIKPMSNLIGVDRGENIPAVIALTDPEGCPLSRFKDSLGNPTHILRIGESYKEKQRTIQAKKEVEQRRAGGYSRKYASKAKNLADDMVRNTARDLLYYAVTQDAMLIFENLSRGFGRQGKRTFMAERQYTRMEDWLTAKLAYEGLPSKTYLSKTLAQYTSKTCSNCGFTITSADYDRVLEKLKKTATGWMTTINGKELKVEGQITYYNRYKRQNVVKDLSVELDRLSEESVNNDISSWTKGRSGNEALSLLKKRFSHRPVQEKFVCLNCGFETHADEQAALNIARSWLFLRSQEYKKYQTNKTTGNTDKRAFVETWQSFYRKKLKEVWKPAV

SEQ ID NO: 45517 - protein, 980 aa, synthetic construct
  REGION 1..980: note = engineered CasX variant
QEIKRINKIRRRLVKDSNTKKAGKTGPMKTLLVRVMTPDLRERLENLRKKPENIPQPISNTSRANLNKLLTDYTEMKKAILHVYWEEFQKDPVGLMSRVAQPASKKIDQNKLKPEMDEKGNLTTAGFACSQCGQPLFVYKLEQVSEKGKAYTNYFGRCNVAEHEKLILLAQLKPEKDSDEAVTYSLGKFGQRALDFYSIHVTKESTHPVKPLAQIAGNRYASVPVGKALSDACMGTIASFLSKYQDIIIEHQKVVKGNQKRLESLRELAGKENLEYPSVTLPPQPHTKEGVDAYNEVIARVRMWVNLNLWQKLKLSRDDAKPLLRLKGFPSFPLVERQANEVDWWDMVCNVKKLINEKKEDGKVFWQNLAGYKRQEALRPYLSSEEDRKKGKKFARYQLGDLLLHLEKKHGEDWGKVYDEAWERIDKKVEGLSKHIKLEEERRSEDAQSKAALTDWLRAKASFVIEGLKEADKDEFCRCELKLQKWYGDLRGKPFAIEAENSILDISGFSKQYNCAFIWQKDGVKKLNLYLIINYFKGGKLRFKKIKPEAFEANRFYTVINKKSGEIVPMEVNFNFDDPNLIILPLAFGKRQGREFIWNDLLSLETGSLKLANGRVIEKTLYNRRTRQDEPALFVALTFERREVLDSSNIKPMSNLIGVDRGENIPAVIALTDPEGCPLSRFKDSLGNPTHILRIGESYKEKQRTIQAKKEVEQRRAGGYSRKYASKAKNLADDMVRNTARDLLYYAVTQDAMLIFENLSRGFGRQGKRTFMAERQYTRMEDWLTAKLAYEGLPSKTYLSKTLAQYTSKTCSNCGFTITSADYDRVLEKLKKTATGWMTTINGKELKVEGQITYYNRYKRQNVVKDLSVELDRLSEESVNNDISSWTKGRSGNEALSLLKKRFSHRPVQEKFVCLNCGFETHADEQAALNIARSWLFLRSQEYKKYQTNKTTGNTDKRAFVETWQSFYRKKLKEVWKPAV

SEQ ID NO: 45518 - protein, 980 aa, synthetic construct
  REGION 1..980: note = engineered CasX variant
QEIKRINKIRRRLVKDSNTKKAGKTGPMKTLLVRVMTPDLRERLENLRKKPENIPQPISNTSRANLNKLLTDYTEMKKAILHVYWEEFQKDPVGLMSRVAQPASKKIDQNKLKPEMDEKGNLTTAGFACSQCGQPLFVYKLEQVSEKGKAYTNYFGRCNVAEHEKLIKLAQLKPEKDSDEAVTYSLGKFGQRALDFYSIHVTKESTHPVKPLAQIAGNRYASGPVGKALSDACMGTIASFLSKYQDIIIEHQKVVKGNQKRLESLRELAGKENLEYPSVTLPPQPHTKEGVDAYNEVIARVRMWVNLNLWQKLKLSRDDAKPLLRLKGFPSFPLVERQANEVDWWDMVCNVKKLINEKKEDGKVFWQNLAGYKRQEALRPYLSSEEDRKKGKKFARYQLGDLLLHLEKKHGEDWGKVYDEAWERIDKKVEGLSKHIKLEEERRSEDAQSKAALTDWLRAKASFVIEGLKEADKDEFCRCELKLQKWYGDLRGKPFAIEAENSILDISGFSKQYNCAFIWQKDGVKKLNLYLIINYFKGGKLRFKKIKPEAFEANRFYTVINKKSGEIVPMEVNFNFDDPNLIILPLAFGKRQGREFIWNDLLSLETGSLKLANGRVIEKTLYNRRTRQDEPALFVALTFERREVLDSSNIKPMSNLIGVDRGENIPAVIALTDPEGCPLSRFKDSLGNPTHILRIGESYKEKQRTIQAKKEVEQRRAGGYSRKYASKAKNLADDMVRNTARDLLYYAVTQDAMLIFENLSRGFGRQGKRTFMAERQYTRMEDWLTAKLAYEGLPSKTYLSKTLAQYTSKTCSNCGFTITSADYDRVLEKLKKTATGWMTTINGKELKVEGQITYYNRYKRQNVVKDLSVELDRLSEESVNNDISSWTKGRSGNEALSLLKKRFSHRPVQEKFVCLNCGFETHADEQAALNIARSWLFLRSQEYKKYQTNKTTGNTDKRAFVETWQSFYRKKLKEVWKPAV

SEQ ID NO: 45519 - protein, 979 aa, synthetic construct
  REGION 1..979: note = engineered CasX variant
QEIKRINKIRRRLVKDSNTKKAGKTGPMKTLLVRVMTPDLRERLENLRKKPENIPQPISNTSRANLNKLLTDYTEMKKAILHVYWEEFQKDPVGLMSRVAQPASKKIDQNKLKPEMDEKGNLTTAGFACSQCGQPLFVYKLEQVSEKGKAYTNYFGRCNVAEHEKLILLAQLKPEKDSDEAVTYSLGKFGQRALDFYSIHVTKESTHPVKPLAQIAGNRYASPVGKALSDACMGTIASFLSKYQDIIIEHQKVVKGNQKRLESLRELAGKENLEYPSVTLPPQPHTKEGVDAYNEVIARVRMWVNLNLWQKLKLSRDDAKPLLRLKGFPSFPLVERQANEVDWWDMVCNVKKLINEKKEDGKVFWQNLAGYKRQEALRPYLSSEEDRKKGKKFARYQLGDLLLHLEKKHGEDWGKVYDEAWERIDKKVEGLSKHIKLEEERRSEDAQSKAALTDWLRAKASFVIEGLKEADKDEFCRCELKLQKWYGDLRGKPFAIEAENSILDISGFSKQYNCAFIWQKDGVKKLNLYLIINYFKGGKLRFKKIKPEAFEANRFYTVINKKSGEIVPMEVNFNFDDPNLIILPLAFGKRQGREFIWNDLLSLETGSLKLANGRVIEKTLYNRRTRQDEPALFVALTFERREVLDSSNIKPMSNLIGVDRGENIPAVIALTDPEGCPLSRFKDSLGNPTHILRIGESYKEKQRTIQAKKEVEQRRAGGYSRKYASKAKNLADDMVRNTARDLLYYAVTQDAMLIFENLSRGFGRQGKRTFMAERQYTRMEDWLTAKLAYEGLPSKTYLSKTLAQYTSKTCSNCGFTITSADYDRVLEKLKKTATGWMTTINGKELKVEGQITYYNRYKRQNVVKDLSVELDRLSEESVNNDISSWTKGRSGNEALSLLKKRFSHRPVQEKFVCLNCGFETHADEQAALNIARSWLFLRSQEYKKYQTNKTTGNTDKRAFVETWQSFYRKKLKEVWKPAV

SEQ ID NO: 45520 - protein, 979 aa, synthetic construct
  REGION 1..979: note = engineered CasX variant
QEIKRINKIRRRLVKDSNTKKAGKTGPMKTLLVRVMTPDLRERLENLRKKPENIPQPISNTSRANLNKLLTDYTEMKKAILHVYWEEFQKDPVGLMSRVAQPASKKIDQNKLKPEMDEKGNLTTAGFACSQCGQPLFVYKLEQVSEKGKAYTNYFGRCNVAEHEKLILLAQLKPEKDSDEAVTYSLGKFGQRALDFYSIHVTKESTHPVKPLAQIAGNRYASYPVGKALSDACMGTIASFLSKYQDIIIEHQKVVKGNQKRLESLRELAGKENLEYPSVTLPPQPHTKEGVDAYNEVIARVRMWVNLNLWQKLKLSRDDAKPLLRLKGFPSFPLVERQANEVDWWDMVCNVKKLINEKKEDGKVFWQNLAGYKRQEALRPYLSSEEDRQKGKKFARYQLGDLLLHLEKKHGEDWGKVYDEAWERIDKKVEGLSKHIKLEEERRSEDAQSKAALTDWLRAKASFVIEGLKEADKDEFCRCELKLQKWYGDLRGKPFAIEAENSILDISGFSKQYNCAFIWQKDGVKKLNLYLIINYFKGGKLRFKKIKPEAFEANRFYTVINKKSGEIVPMEVNFNFDDPNLIILPLAFGKRQGREFIWNDLLSLETGSLKLANGRVIEKTLYNRRTRQDEPALFVALTFERREVLDSSNIKPMSNLIGVDRGENIPAVIALTDPEGCPLSRFKDSLGNPTHILRIGESYKEKQRTIQAKKEVEQRRAGGYSRKYASKAKNLADDMVRNTARDLLYYAVTQDAMLIFENLSRGFGRQGKRTFMAERQYTRMEDWLTAKLAYEGLPSKTYLSKTLAQYTSKTCSNCGFTITSADYDRVLEKLKKTATGWMTTINGKELKVEGQITYYNRYKRQNVVKDLSVELDRLSEESVNNDISSWTKGRSGEALSLLKKRFSHRPVQEKFVCLNCGFETHADEQAALNIARSWLFLRSQEYKKYQTNKTTGNTDKRAFVETWQSFYRKKLKEVWKPAV

SEQ ID NO: 45521 - protein, 979 aa, synthetic construct
  REGION 1..979: note = engineered CasX variant
QEIKRINKIRRRLVKDSNTKKAGKTGPMKTLLVRVMTPDLRERLENLRKKPENIPQPISNTSRANLNKLLTDYTEMKKAILHVYWEEFQKDPVGLMSRVAQPASKKIDQNKLKPEMDEKGNLTTAGFACSQCGQPLFVYKLEQVSEKGKAYTNYFGRCNVAEHEKLILLAQLKPEKDSDEAVTYSLGKFGQRALDFYSIHVTKESTHPVKPLAQIAGNRYASHPVGKALSDACMGTIASFLSKYQDIIIEHQKVVKGNQKRLESLRELAGKENLEYPSVTLPPQPHTKEGVDAYNEVIARVRMWVNLNLWQKLKLSRDDAKPLLRLKGFPSFPLVERQANEVDWWDMVCNVKKLINEKKEDGKVFWQNLAGYKRQEALRPYLSSEEDRQKGKKFARYQLGDLLLHLEKKHGEDWGKVYDEAWERIDKKVEGLSKHIKLEEERRSEDAQSKAALTDWLRAKASFVIEGLKEADKDEFCRCELKLQKWYGDLRGKPFAIEAENSILDISGFSKQYNCAFIWQKDGVKKLNLYLIINYFKGGKLRFKKIKPEAFEANRFYTVINKKSGEIVPMEVNFNFDDPNLIILPLAFGKRQGREFIWNDLLSLETGSLKLANGRVIEKTLYNRRTRQDEPALFVALTFERREVLDSSNIKPMSNLIGVDRGENIPAVIALTDPEGCPLSRFKDSLGNPTHILRIGESYKEKQRTIQAKKEVEQRRAGGYSRKYASKAKNLADDMVRNTARDLLYYAVTQDAMLIFENLSRGFGRQGKRTFMAERQYTRMEDWLTAKLAYEGLPSKTYLSKTLAQYTSKTCSNCGFTITSADYDRVLEKLKKTATGWMTTINGKELKVEGQITYYNRYKRQNVVKDLSVELDRLSEESVNNDISSWTKGRSGEALSLLKKRFSHRPVQEKFVCLNCGFETHADEQAALNIARSWLFLRSQEYKKYQTNKTTGNTDKRAFVETWQSFYRKKLKEVWKPAV

SEQ ID NO: 45522 - protein, 979 aa, synthetic construct
  REGION 1..979: note = engineered CasX variant
QEIKRINKIRRRLVKDSNTKKAGKTGPMKTLLVRVMTPDLRERLENLRKKPENIPQPISNTSRANLNKLLTDYTEMKKAILHVYWEEFQKDPVGLMSRVAQPASKKIDQNKLKPEMDEKGNLTTAGFACSQCGQPLFVYKLEQVSEKGKAYTNYFGRCNVAEHEKLILLAQLKPEKDSDEAVTYSLGKFGQRALDFYSIHVTKESTHPVKPLAQIAGNRYASSPVGKALSDACMGTIASFLSKYQDIIIEHQKVVKGNQKRLESLRELAGKENLEYPSVTLPPQPHTKEGVDAYNEVIARVRMWVNLNLWQKLKLSRDDAKPLLRLKGFPSFPLVERQANEVDWWDMVCNVKKLINEKKEDGKVFWQNLAGYKRQEALRPYLSSEEDRQKGKKFARYQLGDLLLHLEKKHGEDWGKVYDEAWERIDKKVEGLSKHIKLEEERRSEDAQSKAALTDWLRAKASFVIEGLKEADKDEFCRCELKLQKWYGDLRGKPFAIEAENSILDISGFSKQYNCAFIWQKDGVKKLNLYLIINYFKGGKLRFKKIKPEAFEANRFYTVINKKSGEIVPMEVNFNFDDPNLIILPLAFGKRQGREFIWNDLLSLETGSLKLANGRVIEKTLYNRRTRQDEPALFVALTFERREVLDSSNIKPMSNLIGVDRGENIPAVIALTDPEGCPLSRFKDSLGNPTHILRIGESYKEKQRTIQAKKEVEQRRAGGYSRKYASKAKNLADDMVRNTARDLLYYAVTQDAMLIFENLSRGFGRQGKRTFMAERQYTRMEDWLTAKLAYEGLPSKTYLSKTLAQYTSKTCSNCGFTITSADYDRVLEKLKKTATGWMTTINGKELKVEGQITYYNRYKRQNVVKDLSVELDRLSEESVNNDISSWTKGRSGEALSLLKKRFSHRPVQEKFVCLNCGFETHADEQAALNIARSWLFLRSQEYKKYQTNKTTGNTDKRAFVETWQSFYRKKLKEVWKPAV

SEQ ID NO: 45523 - protein, 979 aa, synthetic construct
  REGION 1..979: note = engineered CasX variant
QEIKRINKIRRRLVKDSNTKKAGKTGPMKTLLVRVMTPDLRERLENLRKKPENIPQPISNTSRANLNKLLTDYTEMKKAILHVYWEEFQKDPVGLMSRVAQPASKKIDQNKLKPEMDEKGNLTTAGFACSQCGQPLFVYKLEQVSEKGKAYTNYFGRCNVAEHEKLILLAQLKPEKDSDEAVTYSLGKFGQRALDFYSIHVTKESTHPVKPLAQIAGNRYASTPVGKALSDACMGTIASFLSKYQDIIIEHQKVVKGNQKRLESLRELAGKENLEYPSVTLPPQPHTKEGVDAYNEVIARVRMWVNLNLWQKLKLSRDDAKPLLRLKGFPSFPLVERQANEVDWWDMVCNVKKLINEKKEDGKVFWQNLAGYKRQEALRPYLSSEEDRQKGKKFARYQLGDLLLHLEKKHGEDWGKVYDEAWERIDKKVEGLSKHIKLEEERRSEDAQSKAALTDWLRAKASFVIEGLKEADKDEFCRCELKLQKWYGDLRGKPFAIEAENSILDISGFSKQYNCAFIWQKDGVKKLNLYLIINYFKGGKLRFKKIKPEAFEANRFYTVINKKSGEIVPMEVNFNFDDPNLIILPLAFGKRQGREFIWNDLLSLETGSLKLANGRVIEKTLYNRRTRQDEPALFVALTFERREVLDSSNIKPMSNLIGVDRGENIPAVIALTDPEGCPLSRFKDSLGNPTHILRIGESYKEKQRTIQAKKEVEQRRAGGYSRKYASKAKNLADDMVRNTARDLLYYAVTQDAMLIFENLSRGFGRQGKRTFMAERQYTRMEDWLTAKLAYEGLPSKTYLSKTLAQYTSKTCSNCGFTITSADYDRVLEKLKKTATGWMTTINGKELKVEGQITYYNRYKRQNVVKDLSVELDRLSEESVNNDISSWTKGRSGEALSLLKKRFSHRPVQEKFVCLNCGFETHADEQAALNIARSWLFLRSQEYKKYQTNKTTGNTDKRAFVETWQSFYRKKLKEVWKPAV

SEQ ID NO: 45524 - protein, 979 aa, synthetic construct
  REGION 1..979: note = engineered CasX variant
QEIKRINKIRRRLVKDSNTKKAGKTGPMKTLLVRVMTPDLRERLENLRKKPENIPQPISNTSRANLNKLLTDYTEMKKAILHVYWEEFQKDPVGLMSRVAQPASKKIDQNKLKPEMDEKGNLTTAGFACSQCGQPLFVYKLEQVSEKGKAYTNYFGRCNVAEHEKLILLAQLKPEKDSDEAVTYSLGKFGQRALDFYSIHVTKESTHPVKPLAQIAGNRYASAPVGKALSDACMGTIASFLSKYQDIIIEHQKVVKGNQKRLESLRELAGKENLEYPSVTLPPQPHTKEGVDAYNEVIARVRMWVNLNLWQKLKLSRDDAKPLLRLKGFPSFPLVERQANEVDWWDMVCNVKKLINEKKEDGKVFWQNLAGYKRQEALRPYLSSEEDRQKGKKFARYQLGDLLLHLEKKHGEDWGKVYDEAWERIDKKVEGLSKHIKLEEERRSEDAQSKAALTDWLRAKASFVIEGLKEADKDEFCRCELKLQKWYGDLRGKPFAIEAENSILDISGFSKQYNCAFIWQKDGVKKLNLYLIINYFKGGKLRFKKIKPEAFEANRFYTVINKKSGEIVPMEVNFNFDDPNLIILPLAFGKRQGREFIWNDLLSLETGSLKLANGRVIEKTLYNRRTRQDEPALFVALTFERREVLDSSNIKPMSNLIGVDRGENIPAVIALTDPEGCPLSRFKDSLGNPTHILRIGESYKEKQRTIQAKKEVEQRRAGGYSRKYASKAKNLADDMVRNTARDLLYYAVTQDAMLIFENLSRGFGRQGKRTFMAERQYTRMEDWLTAKLAYEGLPSKTYLSKTLAQYTSKTCSNCGFTITSADYDRVLEKLKKTATGWMTTINGKELKVEGQITYYNRYKRQNVVKDLSVELDRLSEESVNNDISSWTKGRSGEALSLLKKRFSHRPVQEKFVCLNCGFETHADEQAALNIARSWLFLRSQEYKKYQTNKTTGNTDKRAFVETWQSFYRKKLKEVWKPAV

SEQ ID NO: 45525 - protein, 979 aa, synthetic construct
  REGION 1..979: note = engineered CasX variant
QEIKRINKIRRRLVKDSNTKKAGKTGPMKTLLVRVMTPDLRERLENLRKKPENIPQPISNTSRANLNKLLTDYTEMKKAILHVYWEEFQKDPVGLMSRVAQPASKKIDQNKLKPEMDEKGNLTTAGFACSQCGQPLFVYKLEQVSEKGKAYTNYFGRCNVAEHEKLILLAQLKPEKDSDEAVTYSLGKFGQRALDFYSIHVTKESTHPVKPLAQIAGNRYASVPVGKALSDACMGTIASFLSKYQDIIIEHQKVVKGNQKRLESLRELAGKENLEYPSVTLPPQPHTKEGVDAYNEVIARVRMWVNLNLWQKLKLSRDDAKPLLRLKGFPSFPLVERQANEVDWWDMVCNVKKLINEKKEDGKVFWQNLAGYKRQEALRPYLSSEEDRQKGKKFARYQLGDLLLHLEKKHGEDWGKVYDEAWERIDKKVEGLSKHIKLEEERRSEDAQSKAALTDWLRAKASFVIEGLKEADKDEFCRCELKLQKWYGDLRGKPFAIEAENSILDISGFSKQYNCAFIWQKDGVKKLNLYLIINYFKGGKLRFKKIKPEAFEANRFYTVINKKSGEIVPMEVNFNFDDPNLIILPLAFGKRQGREFIWNDLLSLETGSLKLANGRVIEKTLYNRRTRQDEPALFVALTFERREVLDSSNIKPMSNLIGVDRGENIPAVIALTDPEGCPLSRFKDSLGNPTHILRIGESYKEKQRTIQAKKEVEQRRAGGYSRKYASKAKNLADDMVRNTARDLLYYAVTQDAMLIFENLSRGFGRQGKRTFMAERQYTRMEDWLTAKLAYEGLPSKTYLSKTLAQYTSKTCSNCGFTITSADYDRVLEKLKKTATGWMTTINGKELKVEGQITYYNRYKRQNVVKDLSVELDRLSEESVNNDISSWTKGRSGEALSLLKKRFSHRPVQEKFVCLNCGFETHADEQAALNIARSWLFLRSQEYKKYQTNKTTGNTDKRAFVETWQSFYRKKLKEVWKPAV

SEQ ID NO: 45526 - protein, 979 aa, synthetic construct
  REGION 1..979: note = engineered CasX variant
QEIKRINKIRRRLVKDSNTKKAGKTGPMKTLLVRVMTPDLRERLENLRKKPENIPQPISNTSRANLNKLLTDYTEMKKAILHVYWEEFQKDPVGLMSRVAQPASKKIDQNKLKPEMDEKGNLTTAGFACSQCGQPLFVYKLEQVSEKGKAYTNYFGRCNVAEHEKLIKLAQLKPEKDSDEAVTYSLGKFGQRALDFYSIHVTKESTHPVKPLAQIAGNRYASGPVGKALSDACMGTIASFLSKYQDIIIEHQKVVKGNQKRLESLRELAGKENLEYPSVTLPPQPHTKEGVDAYNEVIARVRMWVNLNLWQKLKLSRDDAKPLLRLKGFPSFPLVERQANEVDWWDMVCNVKKLINEKKEDGKVFWQNLAGYKRQEALRPYLSSEEDRQKGKKFARYQLGDLLLHLEKKHGEDWGKVYDEAWERIDKKVEGLSKHIKLEEERRSEDAQSKAALTDWLRAKASFVIEGLKEADKDEFCRCELKLQKWYGDLRGKPFAIEAENSILDISGFSKQYNCAFIWQKDGVKKLNLYLIINYFKGGKLRFKKIKPEAFEANRFYTVINKKSGEIVPMEVNFNFDDPNLIILPLAFGKRQGREFIWNDLLSLETGSLKLANGRVIEKTLYNRRTRQDEPALFVALTFERREVLDSSNIKPMSNLIGVDRGENIPAVIALTDPEGCPLSRFKDSLGNPTHILRIGESYKEKQRTIQAKKEVEQRRAGGYSRKYASKAKNLADDMVRNTARDLLYYAVTQDAMLIFENLSRGFGRQGKRTFMAERQYTRMEDWLTAKLAYEGLPSKTYLSKTLAQYTSKTCSNCGFTITSADYDRVLEKLKKTATGWMTTINGKELKVEGQITYYNRYKRQNVVKDLSVELDRLSEESVNNDISSWTKGRSGEALSLLKKRFSHRPVQEKFVCLNCGFETHADEQAALNIARSWLFLRSQEYKKYQTNKTTGNTDKRAFVETWQSFYRKKLKEVWKPAV

SEQ ID NO: 45527 - protein, 978 aa, synthetic construct
  REGION 1..978: note = engineered CasX variant
QEIKRINKIRRRLVKDSNTKKAGKTGPMKTLLVRVMTPDLRERLENLRKKPENIPQPISNTSRANLNKLLTDYTEMKKAILHVYWEEFQKDPVGLMSRVAQPASKKIDQNKLKPEMDEKGNLTTAGFACSQCGQPLFVYKLEQVSEKGKAYTNYFGRCNVAEHEKLILLAQLKPEKDSDEAVTYSLGKFGQRALDFYSIHVTKESTHPVKPLAQIAGNRYASPVGKALSDACMGTIASFLSKYQDIIIEHQKVVKGNQKRLESLRELAGKENLEYPSVTLPPQPHTKEGVDAYNEVIARVRMWVNLNLWQKLKLSRDDAKPLLRLKGFPSFPLVERQANEVDWWDMVCNVKKLINEKKEDGKVFWQNLAGYKRQEALRPYLSSEEDRQKGKKFARYQLGDLLLHLEKKHGEDWGKVYDEAWERIDKKVEGLSKHIKLEEERRSEDAQSKAALTDWLRAKASFVIEGLKEADKDEFCRCELKLQKWYGDLRGKPFAIEAENSILDISGFSKQYNCAFIWQKDGVKKLNLYLIINYFKGGKLRFKKIKPEAFEANRFYTVINKKSGEIVPMEVNFNFDDPNLIILPLAFGKRQGREFIWNDLLSLETGSLKLANGRVIEKTLYNRRTRQDEPALFVALTFERREVLDSSNIKPMSNLIGVDRGENIPAVIALTDPEGCPLSRFKDSLGNPTHILRIGESYKEKQRTIQAKKEVEQRRAGGYSRKYASKAKNLADDMVRNTARDLLYYAVTQDAMLIFENLSRGFGRQGKRTFMAERQYTRMEDWLTAKLAYEGLPSKTYLSKTLAQYTSKTCSNCGFTITSADYDRVLEKLKKTATGWMTTINGKELKVEGQITYYNRYKRQNVVKDLSVELDRLSEESVNNDISSWTKGRSGEALSLLKKRFSHRPVQEKFVCLNCGFETHADEQAALNIARSWLFLRSQEYKKYQTNKTTGNTDKRAFVETWQSFYRKKLKEVWKPAV

SEQ ID NO: 45528 - protein, 979 aa, synthetic construct
  REGION 1..979: note = engineered CasX variant
QEIKRINKIRRRLVKDSNTKKAGKTGPMKTLLVRVMTPDLRERLENLRKKPENIPQPISNTSRANLNKLLTDYTEMKKAILHVYWEEFQKDPVGLMSRVAQPASKKIDQNKLKPEMDEKGNLTTAGFACSQCGQPLFVYKLEQVSEKGKAYTNYFGRCNVAEHEKLILLAQLKPEKDSDEAVTYSLGKFGQRALDFYSIHVTKESTHPVKPLAQIAGNRYASYPVGKALSDACMGTIASFLSKYQDIIIEHQKVVKGNQKRLESLRELAGKENLEYPSVTLPPQPHTKEGVDAYNEVIARVRMWVNLNLWQKLKLSRDDAKPLLRLKGFPSFPLVERQANEVDWWDMVCNVKKLINEKKEDGKVFWQNLAGYKRQEALRPYLSSEEDRKKGKKFARYQLGDLLLHLEKKHGEDWGKVYDEAWERIDKKVEGLSKHIKLEEERRSEDAQSKAALTDWLRAKASFVIEGLKEADKDEFCRCELKLQKWYGDLRGKPFAIEAENSILDISGFSKQYNCAFIWQKDGVKKLNLYLIINYFKGGKLRFKKIKPEAFEANRFYTVINKKSGEIVPMEVNFNFDDPNLIILPLAFGKRQGREFIWNDLLSLETGSLKLANGRVIEKTLYNRRTRQDEPALFVALTFERREVLDSSNIKPMSNLIGVDRGENIPAVIALTDPEGCPLSRFKDSLGNPTHILRIGESYKEKQRTIQAKKEVEQRRAGGYSRKYASKAKNLADDMVRNTARDLLYYAVTQDAMLIFENLSRGFGRQGKRTFMAERQYTRMEDWLTAKLAYEGLPSQTYLSKTLAQYTSKTCSNCGFTITSADYDRVLEKLKKTATGWMTTINGKELKVEGQITYYNRYKRQNVVKDLSVELDRLSEESVNNDISSWTKGRSGEALSLLKKRFSHRPVQEKFVCLNCGFETHADEQAALNIARSWLFLRSQEYKKYQTNKTTGNTDKRAFVETWQSFYRKKLKEVWKPAV

SEQ ID NO: 45529 - protein, 979 aa, synthetic construct
  REGION 1..979: note = engineered CasX variant
QEIKRINKIRRRLVKDSNTKKAGKTGPMKTLLVRVMTPDLRERLENLRKKPENIPQPISNTSRANLNKLLTDYTEMKKAILHVYWEEFQKDPVGLMSRVAQPASKKIDQNKLKPEMDEKGNLTTAGFACSQCGQPLFVYKLEQVSEKGKAYTNYFGRCNVAEHEKLILLAQLKPEKDSDEAVTYSLGKFGQRALDFYSIHVTKESTHPVKPLAQIAGNRYASHPVGKALSDACMGTIASFLSKYQDIIIEHQKVVKGNQKRLESLRELAGKENLEYPSVTLPPQPHTKEGVDAYNEVIARVRMWVNLNLWQKLKLSRDDAKPLLRLKGFPSFPLVERQANEVDWWDMVCNVKKLINEKKEDGKVFWQNLAGYKRQEALRPYLSSEEDRKKGKKFARYQLGDLLLHLEKKHGEDWGKVYDEAWERIDKKVEGLSKHIKLEEERRSEDAQSKAALTDWLRAKASFVIEGLKEADKDEFCRCELKLQKWYGDLRGKPFAIEAENSILDISGFSKQYNCAFIWQKDGVKKLNLYLIINYFKGGKLRFKKIKPEAFEANRFYTVINKKSGEIVPMEVNFNFDDPNLIILPLAFGKRQGREFIWNDLLSLETGSLKLANGRVIEKTLYNRRTRQDEPALFVALTFERREVLDSSNIKPMSNLIGVDRGENIPAVIALTDPEGCPLSRFKDSLGNPTHILRIGESYKEKQRTIQAKKEVEQRRAGGYSRKYASKAKNLADDMVRNTARDLLYYAVTQDAMLIFENLSRGFGRQGKRTFMAERQYTRMEDWLTAKLAYEGLPSQTYLSKTLAQYTSKTCSNCGFTITSADYDRVLEKLKKTATGWMTTINGKELKVEGQITYYNRYKRQNVVKDLSVELDRLSEESVNNDISSWTKGRSGEALSLLKKRFSHRPVQEKFVCLNCGFETHADEQAALNIARSWLFLRSQEYKKYQTNKTTGNTDKRAFVETWQSFYRKKLKEVWKPAV

SEQ ID NO: 45530 - protein, 979 aa, synthetic construct
  REGION 1..979: note = engineered CasX variant
QEIKRINKIRRRLVKDSNTKKAGKTGPMKTLLVRVMTPDLRERLENLRKKPENIPQPISNTSRANLNKLLTDYTEMKKAILHVYWEEFQKDPVGLMSRVAQPASKKIDQNKLKPEMDEKGNLTTAGFACSQCGQPLFVYKLEQVSEKGKAYTNYFGRCNVAEHEKLILLAQLKPEKDSDEAVTYSLGKFGQRALDFYSIHVTKESTHPVKPLAQIAGNRYASSPVGKALSDACMGTIASFLSKYQDIIIEHQKVVKGNQKRLESLRELAGKENLEYPSVTLPPQPHTKEGVDAYNEVIARVRMWVNLNLWQKLKLSRDDAKPLLRLKGFPSFPLVERQANEVDWWDMVCNVKKLINEKKEDGKVFWQNLAGYKRQEALRPYLSSEEDRKKGKKFARYQLGDLLLHLEKKHGEDWGKVYDEAWERIDKKVEGLSKHIKLEEERRSEDAQSKAALTDWLRAKASFVIEGLKEADKDEFCRCELKLQKWYGDLRGKPFAIEAENSILDISGFSKQYNCAFIWQKDGVKKLNLYLIINYFKGGKLRFKKIKPEAFEANRFYTVINKKSGEIVPMEVNFNFDDPNLIILPLAFGKRQGREFIWNDLLSLETGSLKLANGRVIEKTLYNRRTRQDEPALFVALTFERREVLDSSNIKPMSNLIGVDRGENIPAVIALTDPEGCPLSRFKDSLGNPTHILRIGESYKEKQRTIQAKKEVEQRRAGGYSRKYASKAKNLADDMVRNTARDLLYYAVTQDAMLIFENLSRGFGRQGKRTFMAERQYTRMEDWLTAKLAYEGLPSQTYLSKTLAQYTSKTCSNCGFTITSADYDRVLEKLKKTATGWMTTINGKELKVEGQITYYNRYKRQNVVKDLSVELDRLSEESVNNDISSWTKGRSGEALSLLKKRFSHRPVQEKFVCLNCGFETHADEQAALNIARSWLFLRSQEYKKYQTNKTTGNTDKRAFVETWQSFYRKKLKEVWKPAV

SEQ ID NO: 45531 - protein, 979 aa, synthetic construct
  REGION 1..979: note = engineered CasX variant
QEIKRINKIRRRLVKDSNTKKAGKTGPMKTLLVRVMTPDLRERLENLRKKPENIPQPISNTSRANLNKLLTDYTEMKKAILHVYWEEFQKDPVGLMSRVAQPASKKIDQNKLKPEMDEKGNLTTAGFACSQCGQPLFVYKLEQVSEKGKAYTNYFGRCNVAEHEKLILLAQLKPEKDSDEAVTYSLGKFGQRALDFYSIHVTKESTHPVKPLAQIAGNRYASTPVGKALSDACMGTIASFLSKYQDIIIEHQKVVKGNQKRLESLRELAGKENLEYPSVTLPPQPHTKEGVDAYNEVIARVRMWVNLNLWQKLKLSRDDAKPLLRLKGFPSFPLVERQANEVDWWDMVCNVKKLINEKKEDGKVFWQNLAGYKRQEALRPYLSSEEDRKKGKKFARYQLGDLLLHLEKKHGEDWGKVYDEAWERIDKKVEGLSKHIKLEEERRSEDAQSKAALTDWLRAKASFVIEGLKEADKDEFCRCELKLQKWYGDLRGKPFAIEAENSILDISGFSKQYNCAFIWQKDGVKKLNLYLIINYFKGGKLRFKKIKPEAFEANRFYTVINKKSGEIVPMEVNFNFDDPNLIILPLAFGKRQGREFIWNDLLSLETGSLKLANGRVIEKTLYNRRTRQDEPALFVALTFERREVLDSSNIKPMSNLIGVDRGENIPAVIALTDPEGCPLSRFKDSLGNPTHILRIGESYKEKQRTIQAKKEVEQRRAGGYSRKYASKAKNLADDMVRNTARDLLYYAVTQDAMLIFENLSRGFGRQGKRTFMAERQYTRMEDWLTAKLAYEGLPSQTYLSKTLAQYTSKTCSNCGFTITSADYDRVLEKLKKTATGWMTTINGKELKVEGQITYYNRYKRQNVVKDLSVELDRLSEESVNNDISSWTKGRSGEALSLLKKRFSHRPVQEKFVCLNCGFETHADEQAALNIARSWLFLRSQEYKKYQTNKTTGNTDKRAFVETWQSFYRKKLKEVWKPAV

SEQ ID NO: 45532 - protein, 979 aa, synthetic construct
  REGION 1..979: note = engineered CasX variant
QEIKRINKIRRRLVKDSNTKKAGKTGPMKTLLVRVMTPDLRERLENLRKKPENIPQPISNTSRANLNKLLTDYTEMKKAILHVYWEEFQKDPVGLMSRVAQPASKKIDQNKLKPEMDEKGNLTTAGFACSQCGQPLFVYKLEQVSEKGKAYTNYFGRCNVAEHEKLILLAQLKPEKDSDEAVTYSLGKFGQRALDFYSIHVTKESTHPVKPLAQIAGNRYASAPVGKALSDACMGTIASFLSKYQDIIIEHQKVVKGNQKRLESLRELAGKENLEYPSVTLPPQPHTKEGVDAYNEVIARVRMWVNLNLWQKLKLSRDDAKPLLRLKGFPSFPLVERQANEVDWWDMVCNVKKLINEKKEDGKVFWQNLAGYKRQEALRPYLSSEEDRKKGKKFARYQLGDLLLHLEKKHGEDWGKVYDEAWERIDKKVEGLSKHIKLEEERRSEDAQSKAALTDWLRAKASFVIEGLKEADKDEFCRCELKLQKWYGDLRGKPFAIEAENSILDISGFSKQYNCAFIWQKDGVKKLNLYLIINYFKGGKLRFKKIKPEAFEANRFYTVINKKSGEIVPMEVNFNFDDPNLIILPLAFGKRQGREFIWNDLLSLETGSLKLANGRVIEKTLYNRRTRQDEPALFVALTFERREVLDSSNIKPMSNLIGVDRGENIPAVIALTDPEGCPLSRFKDSLGNPTHILRIGESYKEKQRTIQAKKEVEQRRAGGYSRKYASKAKNLADDMVRNTARDLLYYAVTQDAMLIFENLSRGFGRQGKRTFMAERQYTRMEDWLTAKLAYEGLPSQTYLSKTLAQYTSKTCSNCGFTITSADYDRVLEKLKKTATGWMTTINGKELKVEGQITYYNRYKRQNVVKDLSVELDRLSEESVNNDISSWTKGRSGEALSLLKKRFSHRPVQEKFVCLNCGFETHADEQAALNIARSWLFLRSQEYKKYQTNKTTGNTDKRAFVETWQSFYRKKLKEVWKPAV

SEQ ID NO: 45533 - protein, 979 aa, synthetic construct
  REGION 1..979: note = engineered CasX variant
QEIKRINKIRRRLVKDSNTKKAGKTGPMKTLLVRVMTPDLRERLENLRKKPENIPQPISNTSRANLNKLLTDYTEMKKAILHVYWEEFQKDPVGLMSRVAQPASKKIDQNKLKPEMDEKGNLTTAGFACSQCGQPLFVYKLEQVSEKGKAYTNYFGRCNVAEHEKLILLAQLKPEKDSDEAVTYSLGKFGQRALDFYSIHVTKESTHPVKPLAQIAGNRYASVPVGKALSDACMGTIASFLSKYQDIIIEHQKVVKGNQKRLESLRELAGKENLEYPSVTLPPQPHTKEGVDAYNEVIARVRMWVNLNLWQKLKLSRDDAKPLLRLKGFPSFPLVERQANEVDWWDMVCNVKKLINEKKEDGKVFWQNLAGYKRQEALRPYLSSEEDRKKGKKFARYQLGDLLLHLEKKHGEDWGKVYDEAWERIDKKVEGLSKHIKLEEERRSEDAQSKAALTDWLRAKASFVIEGLKEADKDEFCRCELKLQKWYGDLRGKPFAIEAENSILDISGFSKQYNCAFIWQKDGVKKLNLYLIINYFKGGKLRFKKIKPEAFEANRFYTVINKKSGEIVPMEVNFNFDDPNLIILPLAFGKRQGREFIWNDLLSLETGSLKLANGRVIEKTLYNRRTRQDEPALFVALTFERREVLDSSNIKPMSNLIGVDRGENIPAVIALTDPEGCPLSRFKDSLGNPTHILRIGESYKEKQRTIQAKKEVEQRRAGGYSRKYASKAKNLADDMVRNTARDLLYYAVTQDAMLIFENLSRGFGRQGKRTFMAERQYTRMEDWLTAKLAYEGLPSQTYLSKTLAQYTSKTCSNCGFTITSADYDRVLEKLKKTATGWMTTINGKELKVEGQITYYNRYKRQNVVKDLSVELDRLSEESVNNDISSWTKGRSGEALSLLKKRFSHRPVQEKFVCLNCGFETHADEQAALNIARSWLFLRSQEYKKYQTNKTTGNTDKRAFVETWQSFYRKKLKEVWKPAV

SEQ ID NO: 45534 - protein, 979 aa, synthetic construct
  REGION 1..979: note = engineered CasX variant
QEIKRINKIRRRLVKDSNTKKAGKTGPMKTLLVRVMTPDLRERLENLRKKPENIPQPISNTSRANLNKLLTDYTEMKKAILHVYWEEFQKDPVGLMSRVAQPASKKIDQNKLKPEMDEKGNLTTAGFACSQCGQPLFVYKLEQVSEKGKAYTNYFGRCNVAEHEKLIKLAQLKPEKDSDEAVTYSLGKFGQRALDFYSIHVTKESTHPVKPLAQIAGNRYASGPVGKALSDACMGTIASFLSKYQDIIIEHQKVVKGNQKRLESLRELAGKENLEYPSVTLPPQPHTKEGVDAYNEVIARVRMWVNLNLWQKLKLSRDDAKPLLRLKGFPSFPLVERQANEVDWWDMVCNVKKLINEKKEDGKVFWQNLAGYKRQEALRPYLSSEEDRKKGKKFARYQLGDLLLHLEKKHGEDWGKVYDEAWERIDKKVEGLSKHIKLEEERRSEDAQSKAALTDWLRAKASFVIEGLKEADKDEFCRCELKLQKWYGDLRGKPFAIEAENSILDISGFSKQYNCAFIWQKDGVKKLNLYLIINYFKGGKLRFKKIKPEAFEANRFYTVINKKSGEIVPMEVNFNFDDPNLIILPLAFGKRQGREFIWNDLLSLETGSLKLANGRVIEKTLYNRRTRQDEPALFVALTFERREVLDSSNIKPMSNLIGVDRGENIPAVIALTDPEGCPLSRFKDSLGNPTHILRIGESYKEKQRTIQAKKEVEQRRAGGYSRKYASKAKNLADDMVRNTARDLLYYAVTQDAMLIFENLSRGFGRQGKRTFMAERQYTRMEDWLTAKLAYEGLPSQTYLSKTLAQYTSKTCSNCGFTITSADYDRVLEKLKKTATGWMTTINGKELKVEGQITYYNRYKRQNVVKDLSVELDRLSEESVNNDISSWTKGRSGEALSLLKKRFSHRPVQEKFVCLNCGFETHADEQAALNIARSWLFLRSQEYKKYQTNKTTGNTDKRAFVETWQSFYRKKLKEVWKPAV

SEQ ID NO: 45535 - protein, 978 aa, synthetic construct
  REGION 1..978: note = engineered CasX variant
QEIKRINKIRRRLVKDSNTKKAGKTGPMKTLLVRVMTPDLRERLENLRKKPENIPQPISNTSRANLNKLLTDYTEMKKAILHVYWEEFQKDPVGLMSRVAQPASKKIDQNKLKPEMDEKGNLTTAGFACSQCGQPLFVYKLEQVSEKGKAYTNYFGRCNVAEHEKLILLAQLKPEKDSDEAVTYSLGKFGQRALDFYSIHVTKESTHPVKPLAQIAGNRYASPVGKALSDACMGTIASFLSKYQDIIIEHQKVVKGNQKRLESLRELAGKENLEYPSVTLPPQPHTKEGVDAYNEVIARVRMWVNLNLWQKLKLSRDDAKPLLRLKGFPSFPLVERQANEVDWWDMVCNVKKLINEKKEDGKVFWQNLAGYKRQEALRPYLSSEEDRKKGKKFARYQLGDLLLHLEKKHGEDWGKVYDEAWERIDKKVEGLSKHIKLEEERRSEDAQSKAALTDWLRAKASFVIEGLKEADKDEFCRCELKLQKWYGDLRGKPFAIEAENSILDISGFSKQYNCAFIWQKDGVKKLNLYLIINYFKGGKLRFKKIKPEAFEANRFYTVINKKSGEIVPMEVNFNFDDPNLIILPLAFGKRQGREFIWNDLLSLETGSLKLANGRVIEKTLYNRRTRQDEPALFVALTFERREVLDSSNIKPMSNLIGVDRGENIPAVIALTDPEGCPLSRFKDSLGNPTHILRIGESYKEKQRTIQAKKEVEQRRAGGYSRKYASKAKNLADDMVRNTARDLLYYAVTQDAMLIFENLSRGFGRQGKRTFMAERQYTRMEDWLTAKLAYEGLPSQTYLSKTLAQYTSKTCSNCGFTITSADYDRVLEKLKKTATGWMTTINGKELKVEGQITYYNRYKRQNVVKDLSVELDRLSEESVNNDISSWTKGRSGEALSLLKKRFSHRPVQEKFVCLNCGFETHADEQAALNIARSWLFLRSQEYKKYQTNKTTGNTDKRAFVETWQSFYRKKLKEVWKPAV

SEQ ID NO: 45536 - protein, 979 aa, synthetic construct
  REGION 1..979: note = engineered CasX variant
QEIKRINKIRRRLVKDSNTKKAGKTGPMKTLLVRVMTPDLRERLENLRKKPENIPQPISNTSRANLNKLLTDYTEMKKAILHVYWEEFQKDPVGLMSRVAQPASKKIDQNKLKPEMDEKGNLTTAGFACSQCGQPLFVYKLEQVSEKGKAYTNYFGRCNVAEHEKLILLAQLKPEKDSDEAVTYSLGKFGQRALDFYSIHVTKESTHPVKPLAQIAGNRYASYPVGKALSDACMGTIASFLSKYQDIIIEHQKVVKGNQKRLESLRELAGKENLEYPSVTLPPQPHTKEGVDAYNEVIARVRMWVNLNLWQKLKLSRDDAKPLLRLKGFPSFPLVERQANEVDWWDMVCNVKKLINEKKEDGKVFWQNLAGYKRQEALRPYLSSEEDRKKGKKFARYQLGDLLLHLEKKHGEDWGKVYDEAWERIDKKVEGLSKHIKLEEERRSEDAQSKAALTDWLRAKASFVIEGLKEADKDEFCRCELKLQKWYGDLRGKPFAIEAENSILDISGFSKQYNCAFIWQKDGVKKLNLYLIINYFKGGKLRFKKIKPEAFEANRFYTVINKKSGEIVPMEVNFNFDDPNLIILPLAFGKRQGREFIWNDLLSLETGSLKLANGRVIEKTLYNRRTRQDEPALFVALTFERREVLDSSNIKPMSNLIGVDRGENIPAVIALTDPEGCPLSRFKDSLGNPTHILRIGESYKEKQRTIQAKKEVEQRRAGGYSRKYASKAKNLADDMVRNTARDLLYYAVTQDAMLIFENLSRGFGRQGKRTFMAERQYTRMEDWLTAKLAYNGLPSKTYLSKTLAQYTSKTCSNCGFTITSADYDRVLEKLKKTATGWMTTINGKELKVEGQITYYNRYKRQNVVKDLSVELDRLSEESVNNDISSWTKGRSGEALSLLKKRFSHRPVQEKFVCLNCGFETHADEQAALNIARSWLFLRSQEYKKYQTNKTTGNTDKRAFVETWQSFYRKKLKEVWKPAV

SEQ ID NO: 45537 - protein, 979 aa, synthetic construct
  REGION 1..979: note = engineered CasX variant
QEIKRINKIRRRLVKDSNTKKAGKTGPMKTLLVRVMTPDLRERLENLRKKPENIPQPISNTSRANLNKLLTDYTEMKKAILHVYWEEFQKDPVGLMSRVAQPASKKIDQNKLKPEMDEKGNLTTAGFACSQCGQPLFVYKLEQVSEKGKAYTNYFGRCNVAEHEKLILLAQLKPEKDSDEAVTYSLGKFGQRALDFYSIHVTKESTHPVKPLAQIAGNRYASHPVGKALSDACMGTIASFLSKYQDIIIEHQKVVKGNQKRLESLRELAGKENLEYPSVTLPPQPHTKEGVDAYNEVIARVRMWVNLNLWQKLKLSRDDAKPLLRLKGFPSFPLVERQANEVDWWDMVCNVKKLINEKKEDGKVFWQNLAGYKRQEALRPYLSSEEDRKKGKKFARYQLGDLLLHLEKKHGEDWGKVYDEAWERIDKKVEGLSKHIKLEEERRSEDAQSKAALTDWLRAKASFVIEGLKEADKDEFCRCELKLQKWYGDLRGKPFAIEAENSILDISGFSKQYNCAFIWQKDGVKKLNLYLIINYFKGGKLRFKKIKPEAFEANRFYTVINKKSGEIVPMEVNFNFDDPNLIILPLAFGKRQGREFIWNDLLSLETGSLKLANGRVIEKTLYNRRTRQDEPALFVALTFERREVLDSSNIKPMSNLIGVDRGENIPAVIALTDPEGCPLSRFKDSLGNPTHILRIGESYKEKQRTIQAKKEVEQRRAGGYSRKYASKAKNLADDMVRNTARDLLYYAVTQDAMLIFENLSRGFGRQGKRTFMAERQYTRMEDWLTAKLAYNGLPSKTYLSKTLAQYTSKTCSNCGFTITSADYDRVLEKLKKTATGWMTTINGKELKVEGQITYYNRYKRQNVVKDLSVELDRLSEESVNNDISSWTKGRSGEALSLLKKRFSHRPVQEKFVCLNCGFETHADEQAALNIARSWLFLRSQEYKKYQTNKTTGNTDKRAFVETWQSFYRKKLKEVWKPAV

SEQ ID NO: 45538 - protein, 979 aa, synthetic construct
  REGION 1..979: note = engineered CasX variant
QEIKRINKIRRRLVKDSNTKKAGKTGPMKTLLVRVMTPDLRERLENLRKKPENIPQPISNTSRANLNKLLTDYTEMKKAILHVYWEEFQKDPVGLMSRVAQPASKKIDQNKLKPEMDEKGNLTTAGFACSQCGQPLFVYKLEQVSEKGKAYTNYFGRCNVAEHEKLILLAQLKPEKDSDEAVTYSLGKFGQRALDFYSIHVTKESTHPVKPLAQIAGNRYASSPVGKALSDACMGTIASFLSKYQDIIIEHQKVVKGNQKRLESLRELAGKENLEYPSVTLPPQPHTKEGVDAYNEVIARVRMWVNLNLWQKLKLSRDDAKPLLRLKGFPSFPLVERQANEVDWWDMVCNVKKLINEKKEDGKVFWQNLAGYKRQEALRPYLSSEEDRKKGKKFARYQLGDLLLHLEKKHGEDWGKVYDEAWERIDKKVEGLSKHIKLEEERRSEDAQSKAALTDWLRAKASFVIEGLKEADKDEFCRCELKLQKWYGDLRGKPFAIEAENSILDISGFSKQYNCAFIWQKDGVKKLNLYLIINYFKGGKLRFKKIKPEAFEANRFYTVINKKSGEIVPMEVNFNFDDPNLIILPLAFGKRQGREFIWNDLLSLETGSLKLANGRVIEKTLYNRRTRQDEPALFVALTFERREVLDSSNIKPMSNLIGVDRGENIPAVIALTDPEGCPLSRFKDSLGNPTHILRIGESYKEKQRTIQAKKEVEQRRAGGYSRKYASKAKNLADDMVRNTARDLLYYAVTQDAMLIFENLSRGFGRQGKRTFMAERQYTRMEDWLTAKLAYNGLPSKTYLSKTLAQYTSKTCSNCGFTITSADYDRVLEKLKKTATGWMTTINGKELKVEGQITYYNRYKRQNVVKDLSVELDRLSEESVNNDISSWTKGRSGEALSLLKKRFSHRPVQEKFVCLNCGFETHADEQAALNIARSWLFLRSQEYKKYQTNKTTGNTDKRAFVETWQSFYRKKLKEVWKPAV

SEQ ID NO: 45539 - protein, 979 aa, synthetic construct
  REGION 1..979: note = engineered CasX variant
QEIKRINKIRRRLVKDSNTKKAGKTGPMKTLLVRVMTPDLRERLENLRKKPENIPQPISNTSRANLNKLLTDYTEMKKAILHVYWEEFQKDPVGLMSRVAQPASKKIDQNKLKPEMDEKGNLTTAGFACSQCGQPLFVYKLEQVSEKGKAYTNYFGRCNVAEHEKLILLAQLKPEKDSDEAVTYSLGKFGQRALDFYSIHVTKESTHPVKPLAQIAGNRYASTPVGKALSDACMGTIASFLSKYQDIIIEHQKVVKGNQKRLESLRELAGKENLEYPSVTLPPQPHTKEGVDAYNEVIARVRMWVNLNLWQKLKLSRDDAKPLLRLKGFPSFPLVERQANEVDWWDMVCNVKKLINEKKEDGKVFWQNLAGYKRQEALRPYLSSEEDRKKGKKFARYQLGDLLLHLEKKHGEDWGKVYDEAWERIDKKVEGLSKHIKLEEERRSEDAQSKAALTDWLRAKASFVIEGLKEADKDEFCRCELKLQKWYGDLRGKPFAIEAENSILDISGFSKQYNCAFIWQKDGVKKLNLYLIINYFKGGKLRFKKIKPEAFEANRFYTVINKKSGEIVPMEVNFNFDDPNLIILPLAFGKRQGREFIWNDLLSLETGSLKLANGRVIEKTLYNRRTRQDEPALFVALTFERREVLDSSNIKPMSNLIGVDRGENIPAVIALTDPEGCPLSRFKDSLGNPTHILRIGESYKEKQRTIQAKKEVEQRRAGGYSRKYASKAKNLADDMVRNTARDLLYYAVTQDAMLIFENLSRGFGRQGKRTFMAERQYTRMEDWLTAKLAYNGLPSKTYLSKTLAQYTSKTCSNCGFTITSADYDRVLEKLKKTATGWMTTINGKELKVEGQITYYNRYKRQNVVKDLSVELDRLSEESVNNDISSWTKGRSGEALSLLKKRFSHRPVQEKFVCLNCGFETHADEQAALNIARSWLFLRSQEYKKYQTNKTTGNTDKRAFVETWQSFYRKKLKEVWKPAV

SEQ ID NO: 45540 - protein, 979 aa, synthetic construct
  REGION 1..979: note = engineered CasX variant
QEIKRINKIRRRLVKDSNTKKAGKTGPMKTLLVRVMTPDLRERLENLRKKPENIPQPISNTSRANLNKLLTDYTEMKKAILHVYWEEFQKDPVGLMSRVAQPASKKIDQNKLKPEMDEKGNLTTAGFACSQCGQPLFVYKLEQVSEKGKAYTNYFGRCNVAEHEKLILLAQLKPEKDSDEAVTYSLGKFGQRALDFYSIHVTKESTHPVKPLAQIAGNRYASAPVGKALSDACMGTIASFLSKYQDIIIEHQKVVKGNQKRLESLRELAGKENLEYPSVTLPPQPHTKEGVDAYNEVIARVRMWVNLNLWQKLKLSRDDAKPLLRLKGFPSFPLVERQANEVDWWDMVCNVKKLINEKKEDGKVFWQNLAGYKRQEALRPYLSSEEDRKKGKKFARYQLGDLLLHLEKKHGEDWGKVYDEAWERIDKKVEGLSKHIKLEEERRSEDAQSKAALTDWLRAKASFVIEGLKEADKDEFCRCELKLQKWYGDLRGKPFAIEAENSILDISGFSKQYNCAFIWQKDGVKKLNLYLIINYFKGGKLRFKKIKPEAFEANRFYTVINKKSGEIVPMEVNFNFDDPNLIILPLAFGKRQGREFIWNDLLSLETGSLKLANGRVIEKTLYNRRTRQDEPALFVALTFERREVLDSSNIKPMSNLIGVDRGENIPAVIALTDPEGCPLSRFKDSLGNPTHILRIGESYKEKQRTIQAKKEVEQRRAGGYSRKYASKAKNLADDMVRNTARDLLYYAVTQDAMLIFENLSRGFGRQGKRTFMAERQYTRMEDWLTAKLAYNGLPSKTYLSKTLAQYTSKTCSNCGFTITSADYDRVLEKLKKTATGWMTTINGKELKVEGQITYYNRYKRQNVVKDLSVELDRLSEESVNNDISSWTKGRSGEALSLLKKRFSHRPVQEKFVCLNCGFETHADEQAALNIARSWLFLRSQEYKKYQTNKTTGNTDKRAFVETWQSFYRKKLKEVWKPAV

SEQ ID NO: 45541 - protein, 979 aa, synthetic construct
  REGION 1..979: note = engineered CasX variant
QEIKRINKIRRRLVKDSNTKKAGKTGPMKTLLVRVMTPDLRERLENLRKKPENIPQPISNTSRANLNKLLTDYTEMKKAILHVYWEEFQKDPVGLMSRVAQPASKKIDQNKLKPEMDEKGNLTTAGFACSQCGQPLFVYKLEQVSEKGKAYTNYFGRCNVAEHEKLILLAQLKPEKDSDEAVTYSLGKFGQRALDFYSIHVTKESTHPVKPLAQIAGNRYASVPVGKALSDACMGTIASFLSKYQDIIIEHQKVVKGNQKRLESLRELAGKENLEYPSVTLPPQPHTKEGVDAYNEVIARVRMWVNLNLWQKLKLSRDDAKPLLRLKGFPSFPLVERQANEVDWWDMVCNVKKLINEKKEDGKVFWQNLAGYKRQEALRPYLSSEEDRKKGKKFARYQLGDLLLHLEKKHGEDWGKVYDEAWERIDKKVEGLSKHIKLEEERRSEDAQSKAALTDWLRAKASFVIEGLKEADKDEFCRCELKLQKWYGDLRGKPFAIEAENSILDISGFSKQYNCAFIWQKDGVKKLNLYLIINYFKGGKLRFKKIKPEAFEANRFYTVINKKSGEIVPMEVNFNFDDPNLIILPLAFGKRQGREFIWNDLLSLETGSLKLANGRVIEKTLYNRRTRQDEPALFVALTFERREVLDSSNIKPMSNLIGVDRGENIPAVIALTDPEGCPLSRFKDSLGNPTHILRIGESYKEKQRTIQAKKEVEQRRAGGYSRKYASKAKNLADDMVRNTARDLLYYAVTQDAMLIFENLSRGFGRQGKRTFMAERQYTRMEDWLTAKLAYNGLPSKTYLSKTLAQYTSKTCSNCGFTITSADYDRVLEKLKKTATGWMTTINGKELKVEGQITYYNRYKRQNVVKDLSVELDRLSEESVNNDISSWTKGRSGEALSLLKKRFSHRPVQEKFVCLNCGFETHADEQAALNIARSWLFLRSQEYKKYQTNKTTGNTDKRAFVETWQSFYRKKLKEVWKPAV

SEQ ID NO: 45542 - protein, 979 aa, synthetic construct
  REGION 1..979: note = engineered CasX variant
QEIKRINKIRRRLVKDSNTKKAGKTGPMKTLLVRVMTPDLRERLENLRKKPENIPQPISNTSRANLNKLLTDYTEMKKAILHVYWEEFQKDPVGLMSRVAQPASKKIDQNKLKPEMDEKGNLTTAGFACSQCGQPLFVYKLEQVSEKGKAYTNYFGRCNVAEHEKLIKLAQLKPEKDSDEAVTYSLGKFGQRALDFYSIHVTKESTHPVKPLAQIAGNRYASGPVGKALSDACMGTIASFLSKYQDIIIEHQKVVKGNQKRLESLRELAGKENLEYPSVTLPPQPHTKEGVDAYNEVIARVRMWVNLNLWQKLKLSRDDAKPLLRLKGFPSFPLVERQANEVDWWDMVCNVKKLINEKKEDGKVFWQNLAGYKRQEALRPYLSSEEDRKKGKKFARYQLGDLLLHLEKKHGEDWGKVYDEAWERIDKKVEGLSKHIKLEEERRSEDAQSKAALTDWLRAKASFVIEGLKEADKDEFCRCELKLQKWYGDLRGKPFAIEAENSILDISGFSKQYNCAFIWQKDGVKKLNLYLIINYFKGGKLRFKKIKPEAFEANRFYTVINKKSGEIVPMEVNFNFDDPNLIILPLAFGKRQGREFIWNDLLSLETGSLKLANGRVIEKTLYNRRTRQDEPALFVALTFERREVLDSSNIKPMSNLIGVDRGENIPAVIALTDPEGCPLSRFKDSLGNPTHILRIGESYKEKQRTIQAKKEVEQRRAGGYSRKYASKAKNLADDMVRNTARDLLYYAVTQDAMLIFENLSRGFGRQGKRTFMAERQYTRMEDWLTAKLAYNGLPSKTYLSKTLAQYTSKTCSNCGFTITSADYDRVLEKLKKTATGWMTTINGKELKVEGQITYYNRYKRQNVVKDLSVELDRLSEESVNNDISSWTKGRSGEALSLLKKRFSHRPVQEKFVCLNCGFETHADEQAALNIARSWLFLRSQEYKKYQTNKTTGNTDKRAFVETWQSFYRKKLKEVWKPAV

SEQ ID NO: 45543 - protein, 978 aa, synthetic construct
  REGION 1..978: note = engineered CasX variant
QEIKRINKIRRRLVKDSNTKKAGKTGPMKTLLVRVMTPDLRERLENLRKKPENIPQPISNTSRANLNKLLTDYTEMKKAILHVYWEEFQKDPVGLMSRVAQPASKKIDQNKLKPEMDEKGNLTTAGFACSQCGQPLFVYKLEQVSEKGKAYTNYFGRCNVAEHEKLILLAQLKPEKDSDEAVTYSLGKFGQRALDFYSIHVTKESTHPVKPLAQIAGNRYASPVGKALSDACMGTIASFLSKYQDIIIEHQKVVKGNQKRLESLRELAGKENLEYPSVTLPPQPHTKEGVDAYNEVIARVRMWVNLNLWQKLKLSRDDAKPLLRLKGFPSFPLVERQANEVDWWDMVCNVKKLINEKKEDGKVFWQNLAGYKRQEALRPYLSSEEDRKKGKKFARYQLGDLLLHLEKKHGEDWGKVYDEAWERIDKKVEGLSKHIKLEEERRSEDAQSKAALTDWLRAKASFVIEGLKEADKDEFCRCELKLQKWYGDLRGKPFAIEAENSILDISGFSKQYNCAFIWQKDGVKKLNLYLIINYFKGGKLRFKKIKPEAFEANRFYTVINKKSGEIVPMEVNFNFDDPNLIILPLAFGKRQGREFIWNDLLSLETGSLKLANGRVIEKTLYNRRTRQDEPALFVALTFERREVLDSSNIKPMSNLIGVDRGENIPAVIALTDPEGCPLSRFKDSLGNPTHILRIGESYKEKQRTIQAKKEVEQRRAGGYSRKYASKAKNLADDMVRNTARDLLYYAVTQDAMLIFENLSRGFGRQGKRTFMAERQYTRMEDWLTAKLAYNGLPSKTYLSKTLAQYTSKTCSNCGFTITSADYDRVLEKLKKTATGWMTTINGKELKVEGQITYYNRYKRQNVVKDLSVELDRLSEESVNNDISSWTKGRSGEALSLLKKRFSHRPVQEKFVCLNCGFETHADEQAALNIARSWLFLRSQEYKKYQTNKTTGNTDKRAFVETWQSFYRKKLKEVWKPAV

SEQ ID NO: 45544 - protein, 979 aa, synthetic construct
  REGION 1..979: note = engineered CasX variant
QEIKRINKIRRRLVKDSNTKKAGKTGPMKTLLVRVMTPDLRERLENLRKKPENIPQPISNTSRANLNKLLTDYTEMKKAILHVYWEEFQKDPVGLMSRVAQPASKKIDQNKLKPEMDEKGNLTTAGFACSQCGQPLFVYKLEQVSEKGKAYTNYFGRCNVAEHEKLIQLAQLKPEKDSDEAVTYSLGKFGQRALDFYSIHVTKESTHPVKPLAQIAGNRYASYPVGKALSDACMGTIASFLSKYQDIIIEHQKVVKGNQKRLESLRELAGKENLEYPSVTLPPQPHTKEGVDAYNEVIARVRMWVNLNLWQKLKLSRDDAKPLLRLKGFPSFPLVERQANEVDWWDMVCNVKKLINEKKEDGKVFWQNLAGYKRQEALRPYLSSEEDRKKGKKFARYQLGDLLLHLEKKHGEDWGKVYDEAWERIDKKVEGLSKHIKLEEERRSEDAQSKAALTDWLRAKASFVIEGLKEADKDEFCRCELKLQKWYGDLRGKPFAIEAENSILDISGFSKQYNCAFIWQKDGVKKLNLYLIINYFKGGKLRFKKIKPEAFEANRFYTVINKKSGEIVPMEVNFNFDDPNLIILPLAFGKRQGREFIWNDLLSLETGSLKLANGRVIEKTLYNRRTRQDEPALFVALTFERREVLDSSNIKPMSNLIGVDRGENIPAVIALTDPEGCPLSRFKDSLGNPTHILRIGESYKEKQRTIQAKKEVEQRRAGGYSRKYASKAKNLADDMVRNTARDLLYYAVTQDAMLIFENLSRGFGRQGKRTFMAERQYTRMEDWLTAKLAYEGLPSKTYLSKTLAQYTSKTCSNCGFTITSADYDRVLEKLKKTATGWMTTINGKELKVEGQITYYNRYKRQNVVKDLSVELDRLSEESVNNDISSWTKGRSGEALSLLKKRFSHRPVQEKFVCLNCGFETHADEQAALNIARSWLFLRSQEYKKYQTNKTTGNTDKRAFVETWQSFYRKKLKEVWKPAV

SEQ ID NO: 45545 - protein, 979 aa, synthetic construct
  REGION 1..979: note = engineered CasX variant
QEIKRINKIRRRLVKDSNTKKAGKTGPMKTLLVRVMTPDLRERLENLRKKPENIPQPISNTSRANLNKLLTDYTEMKKAILHVYWEEFQKDPVGLMSRVAQPASKKIDQNKLKPEMDEKGNLTTAGFACSQCGQPLFVYKLEQVSEKGKAYTNYFGRCNVAEHEKLIQLAQLKPEKDSDEAVTYSLGKFGQRALDFYSIHVTKESTHPVKPLAQIAGNRYASHPVGKALSDACMGTIASFLSKYQDIIIEHQKVVKGNQKRLESLRELAGKENLEYPSVTLPPQPHTKEGVDAYNEVIARVRMWVNLNLWQKLKLSRDDAKPLLRLKGFPSFPLVERQANEVDWWDMVCNVKKLINEKKEDGKVFWQNLAGYKRQEALRPYLSSEEDRKKGKKFARYQLGDLLLHLEKKHGEDWGKVYDEAWERIDKKVEGLSKHIKLEEERRSEDAQSKAALTDWLRAKASFVIEGLKEADKDEFCRCELKLQKWYGDLRGKPFAIEAENSILDISGFSKQYNCAFIWQKDGVKKLNLYLIINYFKGGKLRFKKIKPEAFEANRFYTVINKKSGEIVPMEVNFNFDDPNLIILPLAFGKRQGREFIWNDLLSLETGSLKLANGRVIEKTLYNRRTRQDEPALFVALTFERREVLDSSNIKPMSNLIGVDRGENIPAVIALTDPEGCPLSRFKDSLGNPTHILRIGESYKEKQRTIQAKKEVEQRRAGGYSRKYASKAKNLADDMVRNTARDLLYYAVTQDAMLIFENLSRGFGRQGKRTFMAERQYTRMEDWLTAKLAYEGLPSKTYLSKTLAQYTSKTCSNCGFTITSADYDRVLEKLKKTATGWMTTINGKELKVEGQITYYNRYKRQNVVKDLSVELDRLSEESVNNDISSWTKGRSGEALSLLKKRFSHRPVQEKFVCLNCGFETHADEQAALNIARSWLFLRSQEYKKYQTNKTTGNTDKRAFVETWQSFYRKKLKEVWKPAV

SEQ ID NO: 45546 - protein, 979 aa, synthetic construct
  REGION 1..979: note = engineered CasX variant
QEIKRINKIRRRLVKDSNTKKAGKTGPMKTLLVRVMTPDLRERLENLRKKPENIPQPISNTSRANLNKLLTDYTEMKKAILHVYWEEFQKDPVGLMSRVAQPASKKIDQNKLKPEMDEKGNLTTAGFACSQCGQPLFVYKLEQVSEKGKAYTNYFGRCNVAEHEKLIQLAQLKPEKDSDEAVTYSLGKFGQRALDFYSIHVTKESTHPVKPLAQIAGNRYASSPVGKALSDACMGTIASFLSKYQDIIIEHQKVVKGNQKRLESLRELAGKENLEYPSVTLPPQPHTKEGVDAYNEVIARVRMWVNLNLWQKLKLSRDDAKPLLRLKGFPSFPLVERQANEVDWWDMVCNVKKLINEKKEDGKVFWQNLAGYKRQEALRPYLSSEEDRKKGKKFARYQLGDLLLHLEKKHGEDWGKVYDEAWERIDKKVEGLSKHIKLEEERRSEDAQSKAALTDWLRAKASFVIEGLKEADKDEFCRCELKLQKWYGDLRGKPFAIEAENSILDISGFSKQYNCAFIWQKDGVKKLNLYLIINYFKGGKLRFKKIKPEAFEANRFYTVINKKSGEIVPMEVNFNFDDPNLIILPLAFGKRQGREFIWNDLLSLETGSLKLANGRVIEKTLYNRRTRQDEPALFVALTFERREVLDSSNIKPMSNLIGVDRGENIPAVIALTDPEGCPLSRFKDSLGNPTHILRIGESYKEKQRTIQAKKEVEQRRAGGYSRKYASKAKNLADDMVRNTARDLLYYAVTQDAMLIFENLSRGFGRQGKRTFMAERQYTRMEDWLTAKLAYEGLPSKTYLSKTLAQYTSKTCSNCGFTITSADYDRVLEKLKKTATGWMTTINGKELKVEGQITYYNRYKRQNVVKDLSVELDRLSEESVNNDISSWTKGRSGEALSLLKKRFSHRPVQEKFVCLNCGFETHADEQAALNIARSWLFLRSQEYKKYQTNKTTGNTDKRAFVETWQSFYRKKLKEVWKPAV

SEQ ID NO: 45547 - protein, 979 aa, synthetic construct
  REGION 1..979: note = engineered CasX variant
QEIKRINKIRRRLVKDSNTKKAGKTGPMKTLLVRVMTPDLRERLENLRKKPENIPQPISNTSRANLNKLLTDYTEMKKAILHVYWEEFQKDPVGLMSRVAQPASKKIDQNKLKPEMDEKGNLTTAGFACSQCGQPLFVYKLEQVSEKGKAYTNYFGRCNVAEHEKLIQLAQLKPEKDSDEAVTYSLGKFGQRALDFYSIHVTKESTHPVKPLAQIAGNRYASTPVGKALSDACMGTIASFLSKYQDIIIEHQKVVKGNQKRLESLRELAGKENLEYPSVTLPPQPHTKEGVDAYNEVIARVRMWVNLNLWQKLKLSRDDAKPLLRLKGFPSFPLVERQANEVDWWDMVCNVKKLINEKKEDGKVFWQNLAGYKRQEALRPYLSSEEDRKKGKKFARYQLGDLLLHLEKKHGEDWGKVYDEAWERIDKKVEGLSKHIKLEEERRSEDAQSKAALTDWLRAKASFVIEGLKEADKDEFCRCELKLQKWYGDLRGKPFAIEAENSILDISGFSKQYNCAFIWQKDGVKKLNLYLIINYFKGGKLRFKKIKPEAFEANRFYTVINKKSGEIVPMEVNFNFDDPNLIILPLAFGKRQGREFIWNDLLSLETGSLKLANGRVIEKTLYNRRTRQDEPALFVALTFERREVLDSSNIKPMSNLIGVDRGENIPAVIALTDPEGCPLSRFKDSLGNPTHILRIGESYKEKQRTIQAKKEVEQRRAGGYSRKYASKAKNLADDMVRNTARDLLYYAVTQDAMLIFENLSRGFGRQGKRTFMAERQYTRMEDWLTAKLAYEGLPSKTYLSKTLAQYTSKTCSNCGFTITSADYDRVLEKLKKTATGWMTTINGKELKVEGQITYYNRYKRQNVVKDLSVELDRLSEESVNNDISSWTKGRSGEALSLLKKRFSHRPVQEKFVCLNCGFETHADEQAALNIARSWLFLRSQEYKKYQTNKTTGNTDKRAFVETWQSFYRKKLKEVWKPAV

SEQ ID NO: 45548 - protein, 979 aa, synthetic construct
  REGION 1..979: note = engineered CasX variant
QEIKRINKIRRRLVKDSNTKKAGKTGPMKTLLVRVMTPDLRERLENLRKKPENIPQPISNTSRANLNKLLTDYTEMKKAILHVYWEEFQKDPVGLMSRVAQPASKKIDQNKLKPEMDEKGNLTTAGFACSQCGQPLFVYKLEQVSEKGKAYTNYFGRCNVAEHEKLIQLAQLKPEKDSDEAVTYSLGKFGQRALDFYSIHVTKESTHPVKPLAQIAGNRYASAPVGKALSDACMGTIASFLSKYQDIIIEHQKVVKGNQKRLESLRELAGKENLEYPSVTLPPQPHTKEGVDAYNEVIARVRMWVNLNLWQKLKLSRDDAKPLLRLKGFPSFPLVERQANEVDWWDMVCNVKKLINEKKEDGKVFWQNLAGYKRQEALRPYLSSEEDRKKGKKFARYQLGDLLLHLEKKHGEDWGKVYDEAWERIDKKVEGLSKHIKLEEERRSEDAQSKAALTDWLRAKASFVIEGLKEADKDEFCRCELKLQKWYGDLRGKPFAIEAENSILDISGFSKQYNCAFIWQKDGVKKLNLYLIINYFKGGKLRFKKIKPEAFEANRFYTVINKKSGEIVPMEVNFNFDDPNLIILPLAFGKRQGREFIWNDLLSLETGSLKLANGRVIEKTLYNRRTRQDEPALFVALTFERREVLDSSNIKPMSNLIGVDRGENIPAVIALTDPEGCPLSRFKDSLGNPTHILRIGESYKEKQRTIQAKKEVEQRRAGGYSRKYASKAKNLADDMVRNTARDLLYYAVTQDAMLIFENLSRGFGRQGKRTFMAERQYTRMEDWLTAKLAYEGLPSKTYLSKTLAQYTSKTCSNCGFTITSADYDRVLEKLKKTATGWMTTINGKELKVEGQITYYNRYKRQNVVKDLSVELDRLSEESVNNDISSWTKGRSGEALSLLKKRFSHRPVQEKFVCLNCGFETHADEQAALNIARSWLFLRSQEYKKYQTNKTTGNTDKRAFVETWQSFYRKKLKEVWKPAV

SEQ ID NO: 45549 - protein, 979 aa, synthetic construct
  REGION 1..979: note = engineered CasX variant
QEIKRINKIRRRLVKDSNTKKAGKTGPMKTLLVRVMTPDLRERLENLRKKPENIPQPISNTSRANLNKLLTDYTEMKKAILHVYWEEFQKDPVGLMSRVAQPASKKIDQNKLKPEMDEKGNLTTAGFACSQCGQPLFVYKLEQVSEKGKAYTNYFGRCNVAEHEKLIQLAQLKPEKDSDEAVTYSLGKFGQRALDFYSIHVTKESTHPVKPLAQIAGNRYASVPVGKALSDACMGTIASFLSKYQDIIIEHQKVVKGNQKRLESLRELAGKENLEYPSVTLPPQPHTKEGVDAYNEVIARVRMWVNLNLWQKLKLSRDDAKPLLRLKGFPSFPLVERQANEVDWWDMVCNVKKLINEKKEDGKVFWQNLAGYKRQEALRPYLSSEEDRKKGKKFARYQLGDLLLHLEKKHGEDWGKVYDEAWERIDKKVEGLSKHIKLEEERRSEDAQSKAALTDWLRAKASFVIEGLKEADKDEFCRCELKLQKWYGDLRGKPFAIEAENSILDISGFSKQYNCAFIWQKDGVKKLNLYLIINYFKGGKLRFKKIKPEAFEANRFYTVINKKSGEIVPMEVNFNFDDPNLIILPLAFGKRQGREFIWNDLLSLETGSLKLANGRVIEKTLYNRRTRQDEPALFVALTFERREVLDSSNIKPMSNLIGVDRGENIPAVIALTDPEGCPLSRFKDSLGNPTHILRIGESYKEKQRTIQAKKEVEQRRAGGYSRKYASKAKNLADDMVRNTARDLLYYAVTQDAMLIFENLSRGFGRQGKRTFMAERQYTRMEDWLTAKLAYEGLPSKTYLSKTLAQYTSKTCSNCGFTITSADYDRVLEKLKKTATGWMTTINGKELKVEGQITYYNRYKRQNVVKDLSVELDRLSEESVNNDISSWTKGRSGEALSLLKKRFSHRPVQEKFVCLNCGFETHADEQAALNIARSWLFLRSQEYKKYQTNKTTGNTDKRAFVETWQSFYRKKLKEVWKPAV

SEQ ID NO: 45550 - protein, 980 aa, synthetic construct
  REGION 1..980: note = engineered CasX variant
QEIKRINKIRRRLVKDSNTKKAGKTGPMKTLLVRVMTPDLRERLENLRKKPENIPQPISNTSRANLNKLLTDYTEMKKAILHVYWEEFQKDPVGLMSRVAQPASKKIDQNKLKPEMDEKGNLTTAGFACSQCGQPLFVYKLEQVSEKGKAYTNYFGRCNVAEHEKLIQKLAQLKPEKDSDEAVTYSLGKFGQRALDFYSIHVTKESTHPVKPLAQIAGNRYASGPVGKALSDACMGTIASFLSKYQDIIIEHQKVVKGNQKRLESLRELAGKENLEYPSVTLPPQPHTKEGVDAYNEVIARVRMWVNLNLWQKLKLSRDDAKPLLRLKGFPSFPLVERQANEVDWWDMVCNVKKLINEKKEDGKVFWQNLAGYKRQEALRPYLSSEEDRKKGKKFARYQLGDLLLHLEKKHGEDWGKVYDEAWERIDKKVEGLSKHIKLEEERRSEDAQSKAALTDWLRAKASFVIEGLKEADKDEFCRCELKLQKWYGDLRGKPFAIEAENSILDISGFSKQYNCAFIWQKDGVKKLNLYLIINYFKGGKLRFKKIKPEAFEANRFYTVINKKSGEIVPMEVNFNFDDPNLIILPLAFGKRQGREFIWNDLLSLETGSLKLANGRVIEKTLYNRRTRQDEPALFVALTFERREVLDSSNIKPMSNLIGVDRGENIPAVIALTDPEGCPLSRFKDSLGNPTHILRIGESYKEKQRTIQAKKEVEQRRAGGYSRKYASKAKNLADDMVRNTARDLLYYAVTQDAMLIFENLSRGFGRQGKRTFMAERQYTRMEDWLTAKLAYEGLPSKTYLSKTLAQYTSKTCSNCGFTITSADYDRVLEKLKKTATGWMTTINGKELKVEGQITYYNRYKRQNVVKDLSVELDRLSEESVNNDISSWTKGRSGEALSLLKKRFSHRPVQEKFVCLNCGFETHADEQAALNIARSWLFLRSQEYKKYQTNKTTGNTDKRAFVETWQSFYRKKLKEVWKPAV

SEQ ID NO: 45551 - protein, 978 aa, synthetic construct
  REGION 1..978: note = engineered CasX variant
QEIKRINKIRRRLVKDSNTKKAGKTGPMKTLLVRVMTPDLRERLENLRKKPENIPQPISNTSRANLNKLLTDYTEMKKAILHVYWEEFQKDPVGLMSRVAQPASKKIDQNKLKPEMDEKGNLTTAGFACSQCGQPLFVYKLEQVSEKGKAYTNYFGRCNVAEHEKLIQLAQLKPEKDSDEAVTYSLGKFGQRALDFYSIHVTKESTHPVKPLAQIAGNRYASPVGKALSDACMGTIASFLSKYQDIIIEHQKVVKGNQKRLESLRELAGKENLEYPSVTLPPQPHTKEGVDAYNEVIARVRMWVNLNLWQKLKLSRDDAKPLLRLKGFPSFPLVERQANEVDWWDMVCNVKKLINEKKEDGKVFWQNLAGYKRQEALRPYLSSEEDRKKGKKFARYQLGDLLLHLEKKHGEDWGKVYDEAWERIDKKVEGLSKHIKLEEERRSEDAQSKAALTDWLRAKASFVIEGLKEADKDEFCRCELKLQKWYGDLRGKPFAIEAENSILDISGFSKQYNCAFIWQKDGVKKLNLYLIINYFKGGKLRFKKIKPEAFEANRFYTVINKKSGEIVPMEVNFNFDDPNLIILPLAFGKRQGREFIWNDLLSLETGSLKLANGRVIEKTLYNRRTRQDEPALFVALTFERREVLDSSNIKPMSNLIGVDRGENIPAVIALTDPEGCPLSRFKDSLGNPTHILRIGESYKEKQRTIQAKKEVEQRRAGGYSRKYASKAKNLADDMVRNTARDLLYYAVTQDAMLIFENLSRGFGRQGKRTFMAERQYTRMEDWLTAKLAYEGLPSKTYLSKTLAQYTSKTCSNCGFTITSADYDRVLEKLKKTATGWMTTINGKELKVEGQITYYNRYKRQNVVKDLSVELDRLSEESVNNDISSWTKGRSGEALSLLKKRFSHRPVQEKFVCLNCGFETHADEQAALNIARSWLFLRSQEYKKYQTNKTTGNTDKRAFVETWQSFYRKKLKEVWKPAV

SEQ ID NO: 45552 - protein, 979 aa, synthetic construct
  REGION 1..979: note = engineered CasX variant
QEIKRINKIRRRLVKDSNTKKAGKTGPMKTLLVRVMTPDLRERLENLRKKPENIPQPISNTSRANLNKLLTDYTEMKKAILHVYWEEFQKDPVGLMSRVAQPASKKIDQNKLKPEMDEKGNLTTAGFACSQCGQPLFVYKLEQVSEKGKAYTNYFGRCNVAEHEKLILLAQLKPEKDSDEAVTYSLGKFGQRALDFYSIHVTKESTHPVKPLAQIAGNRYASYPVGKALSDACMGTIASFLSKYQDIIIEHQKVVKGNQKRLESLRELAGKENLEYPSVTLPPQPHTKEGVDAYNEVIARVRMWVNLNLWQKLKLSRDDAKPLLRLKGFPSFPLVERQANEVDWWDMVCNVKKLINEKKEDGKVFWQNLAIYKRQEALRPYLSSEEDRKKGKKFARYQLGDLLLHLEKKHGEDWGKVYDEAWERIDKKVEGLSKHIKLEEERRSEDAQSKAALTDWLRAKASFVIEGLKEADKDEFCRCELKLQKWYGDLRGKPFAIEAENSILDISGFSKQYNCAFIWQKDGVKKLNLYLIINYFKGGKLRFKKIKPEAFEANRFYTVINKKSGEIVPMEVNFNFDDPNLIILPLAFGKRQGREFIWNDLLSLETGSLKLANGRVIEKTLYNRRTRQDEPALFVALTFERREVLDSSNIKPMSNLIGVDRGENIPAVIALTDPEGCPLSRFKDSLGNPTHILRIGESYKEKQRTIQAKKEVEQRRAGGYSRKYASKAKNLADDMVRNTARDLLYYAVTQDAMLIFENLSRGFGRQGKRTFMAERQYTRMEDWLTAKLAYEGLPSKTYLSKTLAQYTSKTCSNCGFTITSADYDRVLEKLKKTATGWMTTINGKELKVEGQITYYNRYKRQNVVKDLSVELDRLSEESVNNDISSWTKGRSGEALSLLKKRFSHRPVQEKFVCLNCGFETHADEQAALNIARSWLFLRSQEYKKYQTNKTTGNTDKRAFVETWQSFYRKKLKEVWKPAV

SEQ ID NO: 45553 - protein, 979 aa, synthetic construct
  REGION 1..979: note = engineered CasX variant
QEIKRINKIRRRLVKDSNTKKAGKTGPMKTLLVRVMTPDLRERLENLRKKPENIPQPISNTSRANLNKLLTDYTEMKKAILHVYWEEFQKDPVGLMSRVAQPASKKIDQNKLKPEMDEKGNLTTAGFACSQCGQPLFVYKLEQVSEKGKAYTNYFGRCNVAEHEKLILLAQLKPEKDSDEAVTYSLGKFGQRALDFYSIHVTKESTHPVKPLAQIAGNRYASHPVGKALSDACMGTIASFLSKYQDIIIEHQKVVKGNQKRLESLRELAGKENLEYPSVTLPPQPHTKEGVDAYNEVIARVRMWVNLNLWQKLKLSRDDAKPLLRLKGFPSFPLVERQANEVDWWDMVCNVKKLINEKKEDGKVFWQNLAIYKRQEALRPYLSSEEDRKKGKKFARYQLGDLLLHLEKKHGEDWGKVYDEAWERIDKKVEGLSKHIKLEEERRSEDAQSKAALTDWLRAKASFVIEGLKEADKDEFCRCELKLQKWYGDLRGKPFAIEAENSILDISGFSKQYNCAFIWQKDGVKKLNLYLIINYFKGGKLRFKKIKPEAFEANRFYTVINKKSGEIVPMEVNFNFDDPNLIILPLAFGKRQGREFIWNDLLSLETGSLKLANGRVIEKTLYNRRTRQDEPALFVALTFERREVLDSSNIKPMSNLIGVDRGENIPAVIALTDPEGCPLSRFKDSLGNPTHILRIGESYKEKQRTIQAKKEVEQRRAGGYSRKYASKAKNLADDMVRNTARDLLYYAVTQDAMLIFENLSRGFGRQGKRTFMAERQYTRMEDWLTAKLAYEGLPSKTYLSKTLAQYTSKTCSNCGFTITSADYDRVLEKLKKTATGWMTTINGKELKVEGQITYYNRYKRQNVVKDLSVELDRLSEESVNNDISSWTKGRSGEALSLLKKRFSHRPVQEKFVCLNCGFETHADEQAALNIARSWLFLRSQEYKKYQTNKTTGNTDKRAFVETWQSFYRKKLKEVWKPAV

SEQ ID NO: 45554 - protein, 979 aa, synthetic construct
  REGION 1..979: note = engineered CasX variant
QEIKRINKIRRRLVKDSNTKKAGKTGPMKTLLVRVMTPDLRERLENLRKKPENIPQPISNTSRANLNKLLTDYTEMKKAILHVYWEEFQKDPVGLMSRVAQPASKKIDQNKLKPEMDEKGNLTTAGFACSQCGQPLFVYKLEQVSEKGKAYTNYFGRCNVAEHEKLILLAQLKPEKDSDEAVTYSLGKFGQRALDFYSIHVTKESTHPVKPLAQIAGNRYASSPVGKALSDACMGTIASFLSKYQDIIIEHQKVVKGNQKRLESLRELAGKENLEYPSVTLPPQPHTKEGVDAYNEVIARVRMWVNLNLWQKLKLSRDDAKPLLRLKGFPSFPLVERQANEVDWWDMVCNVKKLINEKKEDGKVFWQNLAIYKRQEALRPYLSSEEDRKKGKKFARYQLGDLLLHLEKKHGEDWGKVYDEAWERIDKKVEGLSKHIKLEEERRSEDAQSKAALTDWLRAKASFVIEGLKEADKDEFCRCELKLQKWYGDLRGKPFAIEAENSILDISGFSKQYNCAFIWQKDGVKKLNLYLIINYFKGGKLRFKKIKPEAFEANRFYTVINKKSGEIVPMEVNFNFDDPNLIILPLAFGKRQGREFIWNDLLSLETGSLKLANGRVIEKTLYNRRTRQDEPALFVALTFERREVLDSSNIKPMSNLIGVDRGENIPAVIALTDPEGCPLSRFKDSLGNPTHILRIGESYKEKQRTIQAKKEVEQRRAGGYSRKYASKAKNLADDMVRNTARDLLYYAVTQDAMLIFENLSRGFGRQGKRTFMAERQYTRMEDWLTAKLAYEGLPSKTYLSKTLAQYTSKTCSNCGFTITSADYDRVLEKLKKTATGWMTTINGKELKVEGQITYYNRYKRQNVVKDLSVELDRLSEESVNNDISSWTKGRSGEALSLLKKRFSHRPVQEKFVCLNCGFETHADEQAALNIARSWLFLRSQEYKKYQTNKTTGNTDKRAFVETWQSFYRKKLKEVWKPAV

SEQ ID NO: 45555 - protein, 979 aa, synthetic construct
  REGION 1..979: note = engineered CasX variant
QEIKRINKIRRRLVKDSNTKKAGKTGPMKTLLVRVMTPDLRERLENLRKKPENIPQPISNTSRANLNKLLTDYTEMKKAILHVYWEEFQKDPVGLMSRVAQPASKKIDQNKLKPEMDEKGNLTTAGFACSQCGQPLFVYKLEQVSEKGKAYTNYFGRCNVAEHEKLILLAQLKPEKDSDEAVTYSLGKFGQRALDFYSIHVTKESTHPVKPLAQIAGNRYASTPVGKALSDACMGTIASFLSKYQDIIIEHQKVVKGNQKRLESLRELAGKENLEYPSVTLPPQPHTKEGVDAYNEVIARVRMWVNLNLWQKLKLSRDDAKPLLRLKGFPSFPLVERQANEVDWWDMVCNVKKLINEKKEDGKVFWQNLAIYKRQEALRPYLSSEEDRKKGKKFARYQLGDLLLHLEKKHGEDWGKVYDEAWERIDKKVEGLSKHIKLEEERRSEDAQSKAALTDWLRAKASFVIEGLKEADKDEFCRCELKLQKWYGDLRGKPFAIEAENSILDISGFSKQYNCAFIWQKDGVKKLNLYLIINYFKGGKLRFKKIKPEAFEANRFYTVINKKSGEIVPMEVNFNFDDPNLIILPLAFGKRQGREFIWNDLLSLETGSLKLANGRVIEKTLYNRRTRQDEPALFVALTFERREVLDSSNIKPMSNLIGVDRGENIPAVIALTDPEGCPLSRFKDSLGNPTHILRIGESYKEKQRTIQAKKEVEQRRAGGYSRKYASKAKNLADDMVRNTARDLLYYAVTQDAMLIFENLSRGFGRQGKRTFMAERQYTRMEDWLTAKLAYEGLPSKTYLSKTLAQYTSKTCSNCGFTITSADYDRVLEKLKKTATGWMTTINGKELKVEGQITYYNRYKRQNVVKDLSVELDRLSEESVNNDISSWTKGRSGEALSLLKKRFSHRPVQEKFVCLNCGFETHADEQAALNIARSWLFLRSQEYKKYQTNKTTGNTDKRAFVETWQSFYRKKLKEVWKPAV

SEQ ID NO: 45556 - protein, 979 aa, synthetic construct
  REGION 1..979: note = engineered CasX variant
QEIKRINKIRRRLVKDSNTKKAGKTGPMKTLLVRVMTPDLRERLENLRKKPENIPQPISNTSRANLNKLLTDYTEMKKAILHVYWEEFQKDPVGLMSRVAQPASKKIDQNKLKPEMDEKGNLTTAGFACSQCGQPLFVYKLEQVSEKGKAYTNYFGRCNVAEHEKLILLAQLKPEKDSDEAVTYSLGKFGQRALDFYSIHVTKESTHPVKPLAQIAGNRYASAPVGKALSDACMGTIASFLSKYQDIIIEHQKVVKGNQKRLESLRELAGKENLEYPSVTLPPQPHTKEGVDAYNEVIARVRMWVNLNLWQKLKLSRDDAKPLLRLKGFPSFPLVERQANEVDWWDMVCNVKKLINEKKEDGKVFWQNLAIYKRQEALRPYLSSEEDRKKGKKFARYQLGDLLLHLEKKHGEDWGKVYDEAWERIDKKVEGLSKHIKLEEERRSEDAQSKAALTDWLRAKASFVIEGLKEADKDEFCRCELKLQKWYGDLRGKPFAIEAENSILDISGFSKQYNCAFIWQKDGVKKLNLYLIINYFKGGKLRFKKIKPEAFEANRFYTVINKKSGEIVPMEVNFNFDDPNLIILPLAFGKRQGREFIWNDLLSLETGSLKLANGRVIEKTLYNRRTRQDEPALFVALTFERREVLDSSNIKPMSNLIGVDRGENIPAVIALTDPEGCPLSRFKDSLGNPTHILRIGESYKEKQRTIQAKKEVEQRRAGGYSRKYASKAKNLADDMVRNTARDLLYYAVTQDAMLIFENLSRGFGRQGKRTFMAERQYTRMEDWLTAKLAYEGLPSKTYLSKTLAQYTSKTCSNCGFTITSADYDRVLEKLKKTATGWMTTINGKELKVEGQITYYNRYKRQNVVKDLSVELDRLSEESVNNDISSWTKGRSGEALSLLKKRFSHRPVQEKFVCLNCGFETHADEQAALNIARSWLFLRSQEYKKYQTNKTTGNTDKRAFVETWQSFYRKKLKEVWKPAV

SEQ ID NO: 45557 - protein, 979 aa, synthetic construct
  REGION 1..979: note = engineered CasX variant
QEIKRINKIRRRLVKDSNTKKAGKTGPMKTLLVRVMTPDLRERLENLRKKPENIPQPISNTSRANLNKLLTDYTEMKKAILHVYWEEFQKDPVGLMSRVAQPASKKIDQNKLKPEMDEKGNLTTAGFACSQCGQPLFVYKLEQVSEKGKAYTNYFGRCNVAEHEKLILLAQLKPEKDSDEAVTYSLGKFGQRALDFYSIHVTKESTHPVKPLAQIAGNRYASVPVGKALSDACMGTIASFLSKYQDIIIEHQKVVKGNQKRLESLRELAGKENLEYPSVTLPPQPHTKEGVDAYNEVIARVRMWVNLNLWQKLKLSRDDAKPLLRLKGFPSFPLVERQANEVDWWDMVCNVKKLINEKKEDGKVFWQNLAIYKRQEALRPYLSSEEDRKKGKKFARYQLGDLLLHLEKKHGEDWGKVYDEAWERIDKKVEGLSKHIKLEEERRSEDAQSKAALTDWLRAKASFVIEGLKEADKDEFCRCELKLQKWYGDLRGKPFAIEAENSILDISGFSKQYNCAFIWQKDGVKKLNLYLIINYFKGGKLRFKKIKPEAFEANRFYTVINKKSGEIVPMEVNFNFDDPNLIILPLAFGKRQGREFIWNDLLSLETGSLKLANGRVIEKTLYNRRTRQDEPALFVALTFERREVLDSSNIKPMSNLIGVDRGENIPAVIALTDPEGCPLSRFKDSLGNPTHILRIGESYKEKQRTIQAKKEVEQRRAGGYSRKYASKAKNLADDMVRNTARDLLYYAVTQDAMLIFENLSRGFGRQGKRTFMAERQYTRMEDWLTAKLAYEGLPSKTYLSKTLAQYTSKTCSNCGFTITSADYDRVLEKLKKTATGWMTTINGKELKVEGQITYYNRYKRQNVVKDLSVELDRLSEESVNNDISSWTKGRSGEALSLLKKRFSHRPVQEKFVCLNCGFETHADEQAALNIARSWLFLRSQEYKKYQTNKTTGNTDKRAFVETWQSFYRKKLKEVWKPAV

SEQ ID NO: 45558 - protein, 979 aa, synthetic construct
  REGION 1..979: note = engineered CasX variant
QEIKRINKIRRRLVKDSNTKKAGKTGPMKTLLVRVMTPDLRERLENLRKKPENIPQPISNTSRANLNKLLTDYTEMKKAILHVYWEEFQKDPVGLMSRVAQPASKKIDQNKLKPEMDEKGNLTTAGFACSQCGQPLFVYKLEQVSEKGKAYTNYFGRCNVAEHEKLIKLAQLKPEKDSDEAVTYSLGKFGQRALDFYSIHVTKESTHPVKPLAQIAGNRYASGPVGKALSDACMGTIASFLSKYQDIIIEHQKVVKGNQKRLESLRELAGKENLEYPSVTLPPQPHTKEGVDAYNEVIARVRMWVNLNLWQKLKLSRDDAKPLLRLKGFPSFPLVERQANEVDWWDMVCNVKKLINEKKEDGKVFWQNLAIYKRQEALRPYLSSEEDRKKGKKFARYQLGDLLLHLEKKHGEDWGKVYDEAWERIDKKVEGLSKHIKLEEERRSEDAQSKAALTDWLRAKASFVIEGLKEADKDEFCRCELKLQKWYGDLRGKPFAIEAENSILDISGFSKQYNCAFIWQKDGVKKLNLYLIINYFKGGKLRFKKIKPEAFEANRFYTVINKKSGEIVPMEVNFNFDDPNLIILPLAFGKRQGREFIWNDLLSLETGSLKLANGRVIEKTLYNRRTRQDEPALFVALTFERREVLDSSNIKPMSNLIGVDRGENIPAVIALTDPEGCPLSRFKDSLGNPTHILRIGESYKEKQRTIQAKKEVEQRRAGGYSRKYASKAKNLADDMVRNTARDLLYYAVTQDAMLIFENLSRGFGRQGKRTFMAERQYTRMEDWLTAKLAYEGLPSKTYLSKTLAQYTSKTCSNCGFTITSADYDRVLEKLKKTATGWMTTINGKELKVEGQITYYNRYKRQNVVKDLSVELDRLSEESVNNDISSWTKGRSGEALSLLKKRFSHRPVQEKFVCLNCGFETHADEQAALNIARSWLFLRSQEYKKYQTNKTTGNTDKRAFVETWQSFYRKKLKEVWKPAV

SEQ ID NO: 45559 - protein, 978 aa, synthetic construct
  REGION 1..978: note = engineered CasX variant
QEIKRINKIRRRLVKDSNTKKAGKTGPMKTLLVRVMTPDLRERLENLRKKPENIPQPISNTSRANLNKLLTDYTEMKKAILHVYWEEFQKDPVGLMSRVAQPASKKIDQNKLKPEMDEKGNLTTAGFACSQCGQPLFVYKLEQVSEKGKAYTNYFGRCNVAEHEKLILLAQLKPEKDSDEAVTYSLGKFGQRALDFYSIHVTKESTHPVKPLAQIAGNRYASPVGKALSDACMGTIASFLSKYQDIIIEHQKVVKGNQKRLESLRELAGKENLEYPSVTLPPQPHTKEGVDAYNEVIARVRMWVNLNLWQKLKLSRDDAKPLLRLKGFPSFPLVERQANEVDWWDMVCNVKKLINEKKEDGKVFWQNLAIYKRQEALRPYLSSEEDRKKGKKFARYQLGDLLLHLEKKHGEDWGKVYDEAWERIDKKVEGLSKHIKLEEERRSEDAQSKAALTDWLRAKASFVIEGLKEADKDEFCRCELKLQKWYGDLRGKPFAIEAENSILDISGFSKQYNCAFIWQKDGVKKLNLYLIINYFKGGKLRFKKIKPEAFEANRFYTVINKKSGEIVPMEVNFNFDDPNLIILPLAFGKRQGREFIWNDLLSLETGSLKLANGRVIEKTLYNRRTRQDEPALFVALTFERREVLDSSNIKPMSNLIGVDRGENIPAVIALTDPEGCPLSRFKDSLGNPTHILRIGESYKEKQRTIQAKKEVEQRRAGGYSRKYASKAKNLADDMVRNTARDLLYYAVTQDAMLIFENLSRGFGRQGKRTFMAERQYTRMEDWLTAKLAYEGLPSKTYLSKTLAQYTSKTCSNCGFTITSADYDRVLEKLKKTATGWMTTINGKELKVEGQITYYNRYKRQNVVKDLSVELDRLSEESVNNDISSWTKGRSGEALSLLKKRFSHRPVQEKFVCLNCGFETHADEQAALNIARSWLFLRSQEYKKYQTNKTTGNTDKRAFVETWQSFYRKKLKEVWKPAV

SEQ ID NO: 45560 - protein, 979 aa, synthetic construct
  REGION 1..979: note = engineered CasX variant
QEIKRINKIRRRLVKDSNTKKAGKTGPMKTLLVRVMTPDLRERLENLRKKPENIPQPISNTSRANLNKLLTDYTEMKKAILHVYWEEFQKDPVGLMSRVAQPASKKIDQNKLKPEMDEKGNLTTAGFACSQCGQPLFVYKLEQVSEKGKAYTNYFGRCNVAEHEKLILLAQLKPEKDSDEAVTYSLGKFGQRALDFYSIHVTKESTHPVKPLAQIAGNRYASYPVGKALSDACMGTIASFLSKYQDIIIEHQKVVKGNQKRLESLRELAGKENLEYPSVTLPPQPHTKEGVDAYNEVIARVRMWVNLNLWQKLKLSRDDAKPLLRLKGFPSFPLVERQANEVDWWDMVCNVKKLINEKKEDGKVFWQNLAGYKRQEALRPYLSSEEDREKGKKFARYQLGDLLLHLEKKHGEDWGKVYDEAWERIDKKVEGLSKHIKLEEERRSEDAQSKAALTDWLRAKASFVIEGLKEADKDEFCRCELKLQKWYGDLRGKPFAIEAENSILDISGFSKQYNCAFIWQKDGVKKLNLYLIINYFKGGKLRFKKIKPEAFEANRFYTVINKKSGEIVPMEVNFNFDDPNLIILPLAFGKRQGREFIWNDLLSLETGSLKLANGRVIEKTLYNRRTRQDEPALFVALTFERREVLDSSNIKPMSNLIGVDRGENIPAVIALTDPEGCPLSRFKDSLGNPTHILRIGESYKEKQRTIQAKKEVEQRRAGGYSRKYASKAKNLADDMVRNTARDLLYYAVTQDAMLIFENLSRGFGRQGKRTFMAERQYTRMEDWLTAKLAYEGLPSKTYLSKTLAQYTSKTCSNCGFTITSADYDRVLEKLKKTATGWMTTINGKELKVEGQITYYNRYKRQNVVKDLSVELDRLSEESVNNDISSWTKGRSGEALSLLKKRFSHRPVQEKFVCLNCGFETHADEQAALNIARSWLFLRSQEYKKYQTNKTTGNTDKRAFVETWQSFYRKKLKEVWKPAV

SEQ ID NO: 45561 - protein, 979 aa, synthetic construct
  REGION 1..979: note = engineered CasX variant
QEIKRINKIRRRLVKDSNTKKAGKTGPMKTLLVRVMTPDLRERLENLRKKPENIPQPISNTSRANLNKLLTDYTEMKKAILHVYWEEFQKDPVGLMSRVAQPASKKIDQNKLKPEMDEKGNLTTAGFACSQCGQPLFVYKLEQVSEKGKAYTNYFGRCNVAEHEKLILLAQLKPEKDSDEAVTYSLGKFGQRALDFYSIHVTKESTHPVKPLAQIAGNRYASHPVGKALSDACMGTIASFLSKYQDIIIEHQKVVKGNQKRLESLRELAGKENLEYPSVTLPPQPHTKEGVDAYNEVIARVRMWVNLNLWQKLKLSRDDAKPLLRLKGFPSFPLVERQANEVDWWDMVCNVKKLINEKKEDGKVFWQNLAGYKRQEALRPYLSSEEDREKGKKFARYQLGDLLLHLEKKHGEDWGKVYDEAWERIDKKVEGLSKHIKLEEERRSEDAQSKAALTDWLRAKASFVIEGLKEADKDEFCRCELKLQKWYGDLRGKPFAIEAENSILDISGFSKQYNCAFIWQKDGVKKLNLYLIINYFKGGKLRFKKIKPEAFEANRFYTVINKKSGEIVPMEVNFNFDDPNLIILPLAFGKRQGREFIWNDLLSLETGSLKLANGRVIEKTLYNRRTRQDEPALFVALTFERREVLDSSNIKPMSNLIGVDRGENIPAVIALTDPEGCPLSRFKDSLGNPTHILRIGESYKEKQRTIQAKKEVEQRRAGGYSRKYASKAKNLADDMVRNTARDLLYYAVTQDAMLIFENLSRGFGRQGKRTFMAERQYTRMEDWLTAKLAYEGLPSKTYLSKTLAQYTSKTCSNCGFTITSADYDRVLEKLKKTATGWMTTINGKELKVEGQITYYNRYKRQNVVKDLSVELDRLSEESVNNDISSWTKGRSGEALSLLKKRFSHRPVQEKFVCLNCGFETHADEQAALNIARSWLFLRSQEYKKYQTNKTTGNTDKRAFVETWQSFYRKKLKEVWKPAV

SEQ ID NO: 45562 - protein, 979 aa, synthetic construct
  REGION 1..979: note = engineered CasX variant
QEIKRINKIRRRLVKDSNTKKAGKTGPMKTLLVRVMTPDLRERLENLRKKPENIPQPISNTSRANLNKLLTDYTEMKKAILHVYWEEFQKDPVGLMSRVAQPASKKIDQNKLKPEMDEKGNLTTAGFACSQCGQPLFVYKLEQVSEKGKAYTNYFGRCNVAEHEKLILLAQLKPEKDSDEAVTYSLGKFGQRALDFYSIHVTKESTHPVKPLAQIAGNRYASSPVGKALSDACMGTIASFLSKYQDIIIEHQKVVKGNQKRLESLRELAGKENLEYPSVTLPPQPHTKEGVDAYNEVIARVRMWVNLNLWQKLKLSRDDAKPLLRLKGFPSFPLVERQANEVDWWDMVCNVKKLINEKKEDGKVFWQNLAGYKRQEALRPYLSSEEDREKGKKFARYQLGDLLLHLEKKHGEDWGKVYDEAWERIDKKVEGLSKHIKLEEERRSEDAQSKAALTDWLRAKASFVIEGLKEADKDEFCRCELKLQKWYGDLRGKPFAIEAENSILDISGFSKQYNCAFIWQKDGVKKLNLYLIINYFKGGKLRFKKIKPEAFEANRFYTVINKKSGEIVPMEVNFNFDDPNLIILPLAFGKRQGREFIWNDLLSLETGSLKLANGRVIEKTLYNRRTRQDEPALFVALTFERREVLDSSNIKPMSNLIGVDRGENIPAVIALTDPEGCPLSRFKDSLGNPTHILRIGESYKEKQRTIQAKKEVEQRRAGGYSRKYASKAKNLADDMVRNTARDLLYYAVTQDAMLIFENLSRGFGRQGKRTFMAERQYTRMEDWLTAKLAYEGLPSKTYLSKTLAQYTSKTCSNCGFTITSADYDRVLEKLKKTATGWMTTINGKELKVEGQITYYNRYKRQNVVKDLSVELDRLSEESVNNDISSWTKGRSGEALSLLKKRFSHRPVQEKFVCLNCGFETHADEQAALNIARSWLFLRSQEYKKYQTNKTTGNTDKRAFVETWQSFYRKKLKEVWKPAV

SEQ ID NO: 45563 - protein, 979 aa, synthetic construct
  REGION 1..979: note = engineered CasX variant
QEIKRINKIRRRLVKDSNTKKAGKTGPMKTLLVRVMTPDLRERLENLRKKPENIPQPISNTSRANLNKLLTDYTEMKKAILHVYWEEFQKDPVGLMSRVAQPASKKIDQNKLKPEMDEKGNLTTAGFACSQCGQPLFVYKLEQVSEKGKAYTNYFGRCNVAEHEKLILLAQLKPEKDSDEAVTYSLGKFGQRALDFYSIHVTKESTHPVKPLAQIAGNRYASTPVGKALSDACMGTIASFLSKYQDIIIEHQKVVKGNQKRLESLRELAGKENLEYPSVTLPPQPHTKEGVDAYNEVIARVRMWVNLNLWQKLKLSRDDAKPLLRLKGFPSFPLVERQANEVDWWDMVCNVKKLINEKKEDGKVFWQNLAGYKRQEALRPYLSSEEDREKGKKFARYQLGDLLLHLEKKHGEDWGKVYDEAWERIDKKVEGLSKHIKLEEERRSEDAQSKAALTDWLRAKASFVIEGLKEADKDEFCRCELKLQKWYGDLRGKPFAIEAENSILDISGFSKQYNCAFIWQKDGVKKLNLYLIINYFKGGKLRFKKIKPEAFEANRFYTVINKKSGEIVPMEVNFNFDDPNLIILPLAFGKRQGREFIWNDLLSLETGSLKLANGRVIEKTLYNRRTRQDEPALFVALTFERREVLDSSNIKPMSNLIGVDRGENIPAVIALTDPEGCPLSRFKDSLGNPTHILRIGESYKEKQRTIQAKKEVEQRRAGGYSRKYASKAKNLADDMVRNTARDLLYYAVTQDAMLIFENLSRGFGRQGKRTFMAERQYTRMEDWLTAKLAYEGLPSKTYLSKTLAQYTSKTCSNCGFTITSADYDRVLEKLKKTATGWMTTINGKELKVEGQITYYNRYKRQNVVKDLSVELDRLSEESVNNDISSWTKGRSGEALSLLKKRFSHRPVQEKFVCLNCGFETHADEQAALNIARSWLFLRSQEYKKYQTNKTTGNTDKRAFVETWQSFYRKKLKEVWKPAV

SEQ ID NO: 45564 - protein, 979 aa, synthetic construct
  REGION 1..979: note = engineered CasX variant
QEIKRINKIRRRLVKDSNTKKAGKTGPMKTLLVRVMTPDLRERLENLRKKPENIPQPISNTSRANLNKLLTDYTEMKKAILHVYWEEFQKDPVGLMSRVAQPASKKIDQNKLKPEMDEKGNLTTAGFACSQCGQPLFVYKLEQVSEKGKAYTNYFGRCNVAEHEKLILLAQLKPEKDSDEAVTYSLGKFGQRALDFYSIHVTKESTHPVKPLAQIAGNRYASAPVGKALSDACMGTIASFLSKYQDIIIEHQKVVKGNQKRLESLRELAGKENLEYPSVTLPPQPHTKEGVDAYNEVIARVRMWVNLNLWQKLKLSRDDAKPLLRLKGFPSFPLVERQANEVDWWDMVCNVKKLINEKKEDGKVFWQNLAGYKRQEALRPYLSSEEDREKGKKFARYQLGDLLLHLEKKHGEDWGKVYDEAWERIDKKVEGLSKHIKLEEERRSEDAQSKAALTDWLRAKASFVIEGLKEADKDEFCRCELKLQKWYGDLRGKPFAIEAENSILDISGFSKQYNCAFIWQKDGVKKLNLYLIINYFKGGKLRFKKIKPEAFEANRFYTVINKKSGEIVPMEVNFNFDDPNLIILPLAFGKRQGREFIWNDLLSLETGSLKLANGRVIEKTLYNRRTRQDEPALFVALTFERREVLDSSNIKPMSNLIGVDRGENIPAVIALTDPEGCPLSRFKDSLGNPTHILRIGESYKEKQRTIQAKKEVEQRRAGGYSRKYASKAKNLADDMVRNTARDLLYYAVTQDAMLIFENLSRGFGRQGKRTFMAERQYTRMEDWLTAKLAYEGLPSKTYLSKTLAQYTSKTCSNCGFTITSADYDRVLEKLKKTATGWMTTINGKELKVEGQITYYNRYKRQNVVKDLSVELDRLSEESVNNDISSWTKGRSGEALSLLKKRFSHRPVQEKFVCLNCGFETHADEQAALNIARSWLFLRSQEYKKYQTNKTTGNTDKRAFVETWQSFYRKKLKEVWKPAV

SEQ ID NO: 45565 - protein, 979 aa, synthetic construct
  REGION 1..979: note = engineered CasX variant
QEIKRINKIRRRLVKDSNTKKAGKTGPMKTLLVRVMTPDLRERLENLRKKPENIPQPISNTSRANLNKLLTDYTEMKKAILHVYWEEFQKDPVGLMSRVAQPASKKIDQNKLKPEMDEKGNLTTAGFACSQCGQPLFVYKLEQVSEKGKAYTNYFGRCNVAEHEKLILLAQLKPEKDSDEAVTYSLGKFGQRALDFYSIHVTKESTHPVKPLAQIAGNRYASVPVGKALSDACMGTIASFLSKYQDIIIEHQKVVKGNQKRLESLRELAGKENLEYPSVTLPPQPHTKEGVDAYNEVIARVRMWVNLNLWQKLKLSRDDAKPLLRLKGFPSFPLVERQANEVDWWDMVCNVKKLINEKKEDGKVFWQNLAGYKRQEALRPYLSSEEDREKGKKFARYQLGDLLLHLEKKHGEDWGKVYDEAWERIDKKVEGLSKHIKLEEERRSEDAQSKAALTDWLRAKASFVIEGLKEADKDEFCRCELKLQKWYGDLRGKPFAIEAENSILDISGFSKQYNCAFIWQKDGVKKLNLYLIINYFKGGKLRFKKIKPEAFEANRFYTVINKKSGEIVPMEVNFNFDDPNLIILPLAFGKRQGREFIWNDLLSLETGSLKLANGRVIEKTLYNRRTRQDEPALFVALTFERREVLDSSNIKPMSNLIGVDRGENIPAVIALTDPEGCPLSRFKDSLGNPTHILRIGESYKEKQRTIQAKKEVEQRRAGGYSRKYASKAKNLADDMVRNTARDLLYYAVTQDAMLIFENLSRGFGRQGKRTFMAERQYTRMEDWLTAKLAYEGLPSKTYLSKTLAQYTSKTCSNCGFTITSADYDRVLEKLKKTATGWMTTINGKELKVEGQITYYNRYKRQNVVKDLSVELDRLSEESVNNDISSWTKGRSGEALSLLKKRFSHRPVQEKFVCLNCGFETHADEQAALNIARSWLFLRSQEYKKYQTNKTTGNTDKRAFVETWQSFYRKKLKEVWKPAV

SEQ ID NO: 45566 - protein, 979 aa, synthetic construct
  REGION 1..979: note = engineered CasX variant
QEIKRINKIRRRLVKDSNTKKAGKTGPMKTLLVRVMTPDLRERLENLRKKPENIPQPISNTSRANLNKLLTDYTEMKKAILHVYWEEFQKDPVGLMSRVAQPASKKIDQNKLKPEMDEKGNLTTAGFACSQCGQPLFVYKLEQVSEKGKAYTNYFGRCNVAEHEKLIKLAQLKPEKDSDEAVTYSLGKFGQRALDFYSIHVTKESTHPVKPLAQIAGNRYASGPVGKALSDACMGTIASFLSKYQDIIIEHQKVVKGNQKRLESLRELAGKENLEYPSVTLPPQPHTKEGVDAYNEVIARVRMWVNLNLWQKLKLSRDDAKPLLRLKGFPSFPLVERQANEVDWWDMVCNVKKLINEKKEDGKVFWQNLAGYKRQEALRPYLSSEEDREKGKKFARYQLGDLLLHLEKKHGEDWGKVYDEAWERIDKKVEGLSKHIKLEEERRSEDAQSKAALTDWLRAKASFVIEGLKEADKDEFCRCELKLQKWYGDLRGKPFAIEAENSILDISGFSKQYNCAFIWQKDGVKKLNLYLIINYFKGGKLRFKKIKPEAFEANRFYTVINKKSGEIVPMEVNFNFDDPNLIILPLAFGKRQGREFIWNDLLSLETGSLKLANGRVIEKTLYNRRTRQDEPALFVALTFERREVLDSSNIKPMSNLIGVDRGENIPAVIALTDPEGCPLSRFKDSLGNPTHILRIGESYKEKQRTIQAKKEVEQRRAGGYSRKYASKAKNLADDMVRNTARDLLYYAVTQDAMLIFENLSRGFGRQGKRTFMAERQYTRMEDWLTAKLAYEGLPSKTYLSKTLAQYTSKTCSNCGFTITSADYDRVLEKLKKTATGWMTTINGKELKVEGQITYYNRYKRQNVVKDLSVELDRLSEESVNNDISSWTKGRSGEALSLLKKRFSHRPVQEKFVCLNCGFETHADEQAALNIARSWLFLRSQEYKKYQTNKTTGNTDKRAFVETWQSFYRKKLKEVWKPAV

SEQ ID NO: 45567 - protein, 978 aa, synthetic construct
  REGION 1..978: note = engineered CasX variant
QEIKRINKIRRRLVKDSNTKKAGKTGPMKTLLVRVMTPDLRERLENLRKKPENIPQPISNTSRANLNKLLTDYTEMKKAILHVYWEEFQKDPVGLMSRVAQPASKKIDQNKLKPEMDEKGNLTTAGFACSQCGQPLFVYKLEQVSEKGKAYTNYFGRCNVAEHEKLILLAQLKPEKDSDEAVTYSLGKFGQRALDFYSIHVTKESTHPVKPLAQIAGNRYASPVGKALSDACMGTIASFLSKYQDIIIEHQKVVKGNQKRLESLRELAGKENLEYPSVTLPPQPHTKEGVDAYNEVIARVRMWVNLNLWQKLKLSRDDAKPLLRLKGFPSFPLVERQANEVDWWDMVCNVKKLINEKKEDGKVFWQNLAGYKRQEALRPYLSSEEDREKGKKFARYQLGDLLLHLEKKHGEDWGKVYDEAWERIDKKVEGLSKHIKLEEERRSEDAQSKAALTDWLRAKASFVIEGLKEADKDEFCRCELKLQKWYGDLRGKPFAIEAENSILDISGFSKQYNCAFIWQKDGVKKLNLYLIINYFKGGKLRFKKIKPEAFEANRFYTVINKKSGEIVPMEVNFNFDDPNLIILPLAFGKRQGREFIWNDLLSLETGSLKLANGRVIEKTLYNRRTRQDEPALFVALTFERREVLDSSNIKPMSNLIGVDRGENIPAVIALTDPEGCPLSRFKDSLGNPTHILRIGESYKEKQRTIQAKKEVEQRRAGGYSRKYASKAKNLADDMVRNTARDLLYYAVTQDAMLIFENLSRGFGRQGKRTFMAERQYTRMEDWLTAKLAYEGLPSKTYLSKTLAQYTSKTCSNCGFTITSADYDRVLEKLKKTATGWMTTINGKELKVEGQITYYNRYKRQNVVKDLSVELDRLSEESVNNDISSWTKGRSGEALSLLKKRFSHRPVQEKFVCLNCGFETHADEQAALNIARSWLFLRSQEYKKYQTNKTTGNTDKRAFVETWQSFYRKKLKEVWKPAV

SEQ ID NO: 45568 - protein, 979 aa, synthetic construct
  REGION 1..979: note = engineered CasX variant
QEIKRINKIRRRLVKDSNTKKAGKTGPMKTLLVRVMTPDLRERLENLRKKPENIPQPISNTSRANLNKLLTDYTEMKKAILHVYWEEFQKDPVGLMSRVAQPASKKIDQNKLKPEMDEKGNLTTAGFACSQCGQPLFVYKLEQVSEKGKAYTNYFGRCNVAEHEKLILLAQLKPEKDSDEAVTYSLGKFGQRALDFYSIHVTKESTHPVKPLAQIAGNRYASYPVGKALSDACMGTIASFLSKYQDIIIEHQKVVKGNQKRLESLRELAGKENLEYPSVTLPPQPHTKEGVDAYNEVIARVRMWVNLNLWQKLKLSRDDAKPLLRLKGFPSFPLVERQANEVDWWDMVCNVKKLINEKKEDGKVFWQNLAGYKRQEALRPYLSSEEDRKKGKKFARYQLGDLLLHLEKKHGEDWGKVYDEAWERIDKKVEGLSKHIKLEEERRSEDAQSKAALTDWLRAKASFVIEGLKEADKDEFCRCELKLQKWYGDLRGKPFAIEAENSILDISGFSKQYNCAFIWQKDGVKKLNLYLIINYFKGGKLRFKKIKPEAFEANRFYTVINKKSGEIVIMEVNFNFDDPNLIILPLAFGKRQGREFIWNDLLSLETGSLKLANGRVIEKTLYNRRTRQDEPALFVALTFERREVLDSSNIKPMSNLIGVDRGENIPAVIALTDPEGCPLSRFKDSLGNPTHILRIGESYKEKQRTIQAKKEVEQRRAGGYSRKYASKAKNLADDMVRNTARDLLYYAVTQDAMLIFENLSRGFGRQGKRTFMAERQYTRMEDWLTAKLAYEGLPSKTYLSKTLAQYTSKTCSNCGFTITSADYDRVLEKLKKTATGWMTTINGKELKVEGQITYYNRYKRQNVVKDLSVELDRLSEESVNNDISSWTKGRSGEALSLLKKRFSHRPVQEKFVCLNCGFETHADEQAALNIARSWLFLRSQEYKKYQTNKTTGNTDKRAFVETWQSFYRKKLKEVWKPAV

SEQ ID NO: 45569 - protein, 979 aa, synthetic construct
  REGION 1..979: note = engineered CasX variant
QEIKRINKIRRRLVKDSNTKKAGKTGPMKTLLVRVMTPDLRERLENLRKKPENIPQPISNTSRANLNKLLTDYTEMKKAILHVYWEEFQKDPVGLMSRVAQPASKKIDQNKLKPEMDEKGNLTTAGFACSQCGQPLFVYKLEQVSEKGKAYTNYFGRCNVAEHEKLILLAQLKPEKDSDEAVTYSLGKFGQRALDFYSIHVTKESTHPVKPLAQIAGNRYASHPVGKALSDACMGTIASFLSKYQDIIIEHQKVVKGNQKRLESLRELAGKENLEYPSVTLPPQPHTKEGVDAYNEVIARVRMWVNLNLWQKLKLSRDDAKPLLRLKGFPSFPLVERQANEVDWWDMVCNVKKLINEKKEDGKVFWQNLAGYKRQEALRPYLSSEEDRKKGKKFARYQLGDLLLHLEKKHGEDWGKVYDEAWERIDKKVEGLSKHIKLEEERRSEDAQSKAALTDWLRAKASFVIEGLKEADKDEFCRCELKLQKWYGDLRGKPFAIEAENSILDISGFSKQYNCAFIWQKDGVKKLNLYLIINYFKGGKLRFKKIKPEAFEANRFYTVINKKSGEIVIMEVNFNFDDPNLIILPLAFGKRQGREFIWNDLLSLETGSLKLANGRVIEKTLYNRRTRQDEPALFVALTFERREVLDSSNIKPMSNLIGVDRGENIPAVIALTDPEGCPLSRFKDSLGNPTHILRIGESYKEKQRTIQAKKEVEQRRAGGYSRKYASKAKNLADDMVRNTARDLLYYAVTQDAMLIFENLSRGFGRQGKRTFMAERQYTRMEDWLTAKLAYEGLPSKTYLSKTLAQYTSKTCSNCGFTITSADYDRVLEKLKKTATGWMTTINGKELKVEGQITYYNRYKRQNVVKDLSVELDRLSEESVNNDISSWTKGRSGEALSLLKKRFSHRPVQEKFVCLNCGFETHADEQAALNIARSWLFLRSQEYKKYQTNKTTGNTDKRAFVETWQSFYRKKLKEVWKPAV

SEQ ID NO: 45570 - protein, 979 aa, synthetic construct
  REGION 1..979: note = engineered CasX variant
QEIKRINKIRRRLVKDSNTKKAGKTGPMKTLLVRVMTPDLRERLENLRKKPENIPQPISNTSRANLNKLLTDYTEMKKAILHVYWEEFQKDPVGLMSRVAQPASKKIDQNKLKPEMDEKGNLTTAGFACSQCGQPLFVYKLEQVSEKGKAYTNYFGRCNVAEHEKLILLAQLKPEKDSDEAVTYSLGKFGQRALDFYSIHVTKESTHPVKPLAQIAGNRYASSPVGKALSDACMGTIASFLSKYQDIIIEHQKVVKGNQKRLESLRELAGKENLEYPSVTLPPQPHTKEGVDAYNEVIARVRMWVNLNLWQKLKLSRDDAKPLLRLKGFPSFPLVERQANEVDWWDMVCNVKKLINEKKEDGKVFWQNLAGYKRQEALRPYLSSEEDRKKGKKFARYQLGDLLLHLEKKHGEDWGKVYDEAWERIDKKVEGLSKHIKLEEERRSEDAQSKAALTDWLRAKASFVIEGLKEADKDEFCRCELKLQKWYGDLRGKPFAIEAENSILDISGFSKQYNCAFIWQKDGVKKLNLYLIINYFKGGKLRFKKIKPEAFEANRFYTVINKKSGEIVIMEVNFNFDDPNLIILPLAFGKRQGREFIWNDLLSLETGSLKLANGRVIEKTLYNRRTRQDEPALFVALTFERREVLDSSNIKPMSNLIGVDRGENIPAVIALTDPEGCPLSRFKDSLGNPTHILRIGESYKEKQRTIQAKKEVEQRRAGGYSRKYASKAKNLADDMVRNTARDLLYYAVTQDAMLIFENLSRGFGRQGKRTFMAERQYTRMEDWLTAKLAYEGLPSKTYLSKTLAQYTSKTCSNCGFTITSADYDRVLEKLKKTATGWMTTINGKELKVEGQITYYNRYKRQNVVKDLSVELDRLSEESVNNDISSWTKGRSGEALSLLKKRFSHRPVQEKFVCLNCGFETHADEQAALNIARSWLFLRSQEYKKYQTNKTTGNTDKRAFVETWQSFYRKKLKEVWKPAV

SEQ ID NO: 45571 - protein, 979 aa, synthetic construct
  REGION 1..979: note = engineered CasX variant
QEIKRINKIRRRLVKDSNTKKAGKTGPMKTLLVRVMTPDLRERLENLRKKPENIPQPISNTSRANLNKLLTDYTEMKKAILHVYWEEFQKDPVGLMSRVAQPASKKIDQNKLKPEMDEKGNLTTAGFACSQCGQPLFVYKLEQVSEKGKAYTNYFGRCNVAEHEKLILLAQLKPEKDSDEAVTYSLGKFGQRALDFYSIHVTKESTHPVKPLAQIAGNRYASTPVGKALSDACMGTIASFLSKYQDIIIEHQKVVKGNQKRLESLRELAGKENLEYPSVTLPPQPHTKEGVDAYNEVIARVRMWVNLNLWQKLKLSRDDAKPLLRLKGFPSFPLVERQANEVDWWDMVCNVKKLINEKKEDGKVFWQNLAGYKRQEALRPYLSSEEDRKKGKKFARYQLGDLLLHLEKKHGEDWGKVYDEAWERIDKKVEGLSKHIKLEEERRSEDAQSKAALTDWLRAKASFVIEGLKEADKDEFCRCELKLQKWYGDLRGKPFAIEAENSILDISGFSKQYNCAFIWQKDGVKKLNLYLIINYFKGGKLRFKKIKPEAFEANRFYTVINKKSGEIVIMEVNFNFDDPNLIILPLAFGKRQGREFIWNDLLSLETGSLKLANGRVIEKTLYNRRTRQDEPALFVALTFERREVLDSSNIKPMSNLIGVDRGENIPAVIALTDPEGCPLSRFKDSLGNPTHILRIGESYKEKQRTIQAKKEVEQRRAGGYSRKYASKAKNLADDMVRNTARDLLYYAVTQDAMLIFENLSRGFGRQGKRTFMAERQYTRMEDWLTAKLAYEGLPSKTYLSKTLAQYTSKTCSNCGFTITSADYDRVLEKLKKTATGWMTTINGKELKVEGQITYYNRYKRQNVVKDLSVELDRLSEESVNNDISSWTKGRSGEALSLLKKRFSHRPVQEKFVCLNCGFETHADEQAALNIARSWLFLRSQEYKKYQTNKTTGNTDKRAFVETWQSFYRKKLKEVWKPAV

SEQ ID NO: 45572 - protein, 979 aa, synthetic construct
  REGION 1..979: note = engineered CasX variant
QEIKRINKIRRRLVKDSNTKKAGKTGPMKTLLVRVMTPDLRERLENLRKKPENIPQPISNTSRANLNKLLTDYTEMKKAILHVYWEEFQKDPVGLMSRVAQPASKKIDQNKLKPEMDEKGNLTTAGFACSQCGQPLFVYKLEQVSEKGKAYTNYFGRCNVAEHEKLILLAQLKPEKDSDEAVTYSLGKFGQRALDFYSIHVTKESTHPVKPLAQIAGNRYASAPVGKALSDACMGTIASFLSKYQDIIIEHQKVVKGNQKRLESLRELAGKENLEYPSVTLPPQPHTKEGVDAYNEVIARVRMWVNLNLWQKLKLSRDDAKPLLRLKGFPSFPLVERQANEVDWWDMVCNVKKLINEKKEDGKVFWQNLAGYKRQEALRPYLSSEEDRKKGKKFARYQLGDLLLHLEKKHGEDWGKVYDEAWERIDKKVEGLSKHIKLEEERRSEDAQSKAALTDWLRAKASFVIEGLKEADKDEFCRCELKLQKWYGDLRGKPFAIEAENSILDISGFSKQYNCAFIWQKDGVKKLNLYLIINYFKGGKLRFKKIKPEAFEANRFYTVINKKSGEIVIMEVNFNFDDPNLIILPLAFGKRQGREFIWNDLLSLETGSLKLANGRVIEKTLYNRRTRQDEPALFVALTFERREVLDSSNIKPMSNLIGVDRGENIPAVIALTDPEGCPLSRFKDSLGNPTHILRIGESYKEKQRTIQAKKEVEQRRAGGYSRKYASKAKNLADDMVRNTARDLLYYAVTQDAMLIFENLSRGFGRQGKRTFMAERQYTRMEDWLTAKLAYEGLPSKTYLSKTLAQYTSKTCSNCGFTITSADYDRVLEKLKKTATGWMTTINGKELKVEGQITYYNRYKRQNVVKDLSVELDRLSEESVNNDISSWTKGRSGEALSLLKKRFSHRPVQEKFVCLNCGFETHADEQAALNIARSWLFLRSQEYKKYQTNKTTGNTDKRAFVETWQSFYRKKLKEVWKPAV

SEQ ID NO: 45573 - protein, 979 aa, synthetic construct
  REGION 1..979: note = engineered CasX variant
QEIKRINKIRRRLVKDSNTKKAGKTGPMKTLLVRVMTPDLRERLENLRKKPENIPQPISNTSRANLNKLLTDYTEMKKAILHVYWEEFQKDPVGLMSRVAQPASKKIDQNKLKPEMDEKGNLTTAGFACSQCGQPLFVYKLEQVSEKGKAYTNYFGRCNVAEHEKLILLAQLKPEKDSDEAVTYSLGKFGQRALDFYSIHVTKESTHPVKPLAQIAGNRYASVPVGKALSDACMGTIASFLSKYQDIIIEHQKVVKGNQKRLESLRELAGKENLEYPSVTLPPQPHTKEGVDAYNEVIARVRMWVNLNLWQKLKLSRDDAKPLLRLKGFPSFPLVERQANEVDWWDMVCNVKKLINEKKEDGKVFWQNLAGYKRQEALRPYLSSEEDRKKGKKFARYQLGDLLLHLEKKHGEDWGKVYDEAWERIDKKVEGLSKHIKLEEERRSEDAQSKAALTDWLRAKASFVIEGLKEADKDEFCRCELKLQKWYGDLRGKPFAIEAENSILDISGFSKQYNCAFIWQKDGVKKLNLYLIINYFKGGKLRFKKIKPEAFEANRFYTVINKKSGEIVIMEVNFNFDDPNLIILPLAFGKRQGREFIWNDLLSLETGSLKLANGRVIEKTLYNRRTRQDEPALFVALTFERREVLDSSNIKPMSNLIGVDRGENIPAVIALTDPEGCPLSRFKDSLGNPTHILRIGESYKEKQRTIQAKKEVEQRRAGGYSRKYASKAKNLADDMVRNTARDLLYYAVTQDAMLIFENLSRGFGRQGKRTFMAERQYTRMEDWLTAKLAYEGLPSKTYLSKTLAQYTSKTCSNCGFTITSADYDRVLEKLKKTATGWMTTINGKELKVEGQITYYNRYKRQNVVKDLSVELDRLSEESVNNDISSWTKGRSGEALSLLKKRFSHRPVQEKFVCLNCGFETHADEQAALNIARSWLFLRSQEYKKYQTNKTTGNTDKRAFVETWQSFYRKKLKEVWKPAV

SEQ ID NO: 45574 - protein, 979 aa, synthetic construct
  REGION 1..979: note = engineered CasX variant
QEIKRINKIRRRLVKDSNTKKAGKTGPMKTLLVRVMTPDLRERLENLRKKPENIPQPISNTSRANLNKLLTDYTEMKKAILHVYWEEFQKDPVGLMSRVAQPASKKIDQNKLKPEMDEKGNLTTAGFACSQCGQPLFVYKLEQVSEKGKAYTNYFGRCNVAEHEKLIKLAQLKPEKDSDEAVTYSLGKFGQRALDFYSIHVTKESTHPVKPLAQIAGNRYASGPVGKALSDACMGTIASFLSKYQDIIIEHQKVVKGNQKRLESLRELAGKENLEYPSVTLPPQPHTKEGVDAYNEVIARVRMWVNLNLWQKLKLSRDDAKPLLRLKGFPSFPLVERQANEVDWWDMVCNVKKLINEKKEDGKVFWQNLAGYKRQEALRPYLSSEEDRKKGKKFARYQLGDLLLHLEKKHGEDWGKVYDEAWERIDKKVEGLSKHIKLEEERRSEDAQSKAALTDWLRAKASFVIEGLKEADKDEFCRCELKLQKWYGDLRGKPFAIEAENSILDISGFSKQYNCAFIWQKDGVKKLNLYLIINYFKGGKLRFKKIKPEAFEANRFYTVINKKSGEIVIMEVNFNFDDPNLIILPLAFGKRQGREFIWNDLLSLETGSLKLANGRVIEKTLYNRRTRQDEPALFVALTFERREVLDSSNIKPMSNLIGVDRGENIPAVIALTDPEGCPLSRFKDSLGNPTHILRIGESYKEKQRTIQAKKEVEQRRAGGYSRKYASKAKNLADDMVRNTARDLLYYAVTQDAMLIFENLSRGFGRQGKRTFMAERQYTRMEDWLTAKLAYEGLPSKTYLSKTLAQYTSKTCSNCGFTITSADYDRVLEKLKKTATGWMTTINGKELKVEGQITYYNRYKRQNVVKDLSVELDRLSEESVNNDISSWTKGRSGEALSLLKKRFSHRPVQEKFVCLNCGFETHADEQAALNIARSWLFLRSQEYKKYQTNKTTGNTDKRAFVETWQSFYRKKLKEVWKPAV

SEQ ID NO: 45575 - protein, 978 aa, synthetic construct
  REGION 1..978: note = engineered CasX variant
QEIKRINKIRRRLVKDSNTKKAGKTGPMKTLLVRVMTPDLRERLENLRKKPENIPQPISNTSRANLNKLLTDYTEMKKAILHVYWEEFQKDPVGLMSRVAQPASKKIDQNKLKPEMDEKGNLTTAGFACSQCGQPLFVYKLEQVSEKGKAYTNYFGRCNVAEHEKLILLAQLKPEKDSDEAVTYSLGKFGQRALDFYSIHVTKESTHPVKPLAQIAGNRYASPVGKALSDACMGTIASFLSKYQDIIIEHQKVVKGNQKRLESLRELAGKENLEYPSVTLPPQPHTKEGVDAYNEVIARVRMWVNLNLWQKLKLSRDDAKPLLRLKGFPSFPLVERQANEVDWWDMVCNVKKLINEKKEDGKVFWQNLAGYKRQEALRPYLSSEEDRKKGKKFARYQLGDLLLHLEKKHGEDWGKVYDEAWERIDKKVEGLSKHIKLEEERRSEDAQSKAALTDWLRAKASFVIEGLKEADKDEFCRCELKLQKWYGDLRGKPFAIEAENSILDISGFSKQYNCAFIWQKDGVKKLNLYLIINYFKGGKLRFKKIKPEAFEANRFYTVINKKSGEIVIMEVNFNFDDPNLIILPLAFGKRQGREFIWNDLLSLETGSLKLANGRVIEKTLYNRRTRQDEPALFVALTFERREVLDSSNIKPMSNLIGVDRGENIPAVIALTDPEGCPLSRFKDSLGNPTHILRIGESYKEKQRTIQAKKEVEQRRAGGYSRKYASKAKNLADDMVRNTARDLLYYAVTQDAMLIFENLSRGFGRQGKRTFMAERQYTRMEDWLTAKLAYEGLPSKTYLSKTLAQYTSKTCSNCGFTITSADYDRVLEKLKKTATGWMTTINGKELKVEGQITYYNRYKRQNVVKDLSVELDRLSEESVNNDISSWTKGRSGEALSLLKKRFSHRPVQEKFVCLNCGFETHADEQAALNIARSWLFLRSQEYKKYQTNKTTGNTDKRAFVETWQSFYRKKLKEVWKPAV

SEQ ID NO: 45576 - protein, 978 aa, synthetic construct
  REGION 1..978: note = engineered CasX variant
QEIKRINKIRRRLVKDSNTKKAGKTGPMKTLLVRVMTPDLRERLENLRKKPENIPQPISNTSRANLNKLLTDYTEMKKAILHVYWEEFQKDPVGLMSRVAQPASKKIDQNKLKPEMDEKGNLTTAGFACSQCGQPLFVYKLEQVSEKGKAYTNYFGRCNVAEHEKLILLAQLKPEKDSDEAVTYSLGKFGQRALDFYSIHVTKESTHPVKPLAQIAGNRYASYPVGKALSGACMGTIASFLSKYQDIIIEHQKVVKGNQKRLESLRELAGKENLEYPSVTLPPQPHTKEGVDAYNEVIARVRMWVNLNLWQKLKLSRDDAKPLLRLKGFPSFPLVERQANEVDWWDMVCNVKKLINEKKEDGKVFWQNLAGYKRQEALRPYLSSEEDRKKGKKFARYQLGDLLLHLEKKHGEDWGKVYDEAWERIDKKVEGLSKHIKLEEERRSEDAQSKAALTDWLRAKASFVIEGLKEADKDEFCRCELKLQKWYGDLRGKPFAIEAENSILDISGFSKQYNCAFIWQKDGVKKLNLYLIINYFKGGKLRFKKIKPEAFEANRFYTVINKKSGEIVPMEVNFNFDDPNLIILPLAFGKRQGREFIWNDLLSLETGSLKLANGRVIEKTLYNRRTRQDEPALFVALTFERREVLDSSNIKPMNLIGVDRGENIPAVIALTDPEGCPLSRFKDSLGNPTHILRIRESYKEKQRTIQAKKEVEQRRAGGYSRKYASKAKNLADDMVRNTARDLLYYAVTQDAMLIFENLSRGFGRQGKRTFMAERQYTRMEDWLTAKLAYEGLPSKTYLSKTLAQYTSKTCSNCGFTITSADYDRVLEKLKKTATGWMTTINGKELKVEGQITYYNRYKRQNVVKDLSVELDRLSEESVNNDISSWTKGRSGEALSLLKKRFSHRPVQEKFVCLNCGFETHADEQAALNIARSWLFLRSQEYKKYQTNKTTGNTDKRAFVETWQSFYRKKLKEVWKPAV

SEQ ID NO: 45577 - protein, 978 aa, synthetic construct
  REGION 1..978: note = engineered CasX variant
QEIKRINKIRRRLVKDSNTKKAGKTGPMKTLLVRVMTPDLRERLENLRKKPENIPQPISNTSRANLNKLLTDYTEMKKAILHVYWEEFQKDPVGLMSRVAQPASKKIDQNKLKPEMDEKGNLTTAGFACSQCGQPLFVYKLEQVSEKGKAYTNYFGRCNVAEHEKLILLAQLKPEKDSDEAVTYSLGKFGQRALDFYSIHVTKESTHPVKPLAQIAGNRYASHPVGKALSGACMGTIASFLSKYQDIIIEHQKVVKGNQKRLESLRELAGKENLEYPSVTLPPQPHTKEGVDAYNEVIARVRMWVNLNLWQKLKLSRDDAKPLLRLKGFPSFPLVERQANEVDWWDMVCNVKKLINEKKEDGKVFWQNLAGYKRQEALRPYLSSEEDRKKGKKFARYQLGDLLLHLEKKHGEDWGKVYDEAWERIDKKVEGLSKHIKLEEERRSEDAQSKAALTDWLRAKASFVIEGLKEADKDEFCRCELKLQKWYGDLRGKPFAIEAENSILDISGFSKQYNCAFIWQKDGVKKLNLYLIINYFKGGKLRFKKIKPEAFEANRFYTVINKKSGEIVPMEVNFNFDDPNLIILPLAFGKRQGREFIWNDLLSLETGSLKLANGRVIEKTLYNRRTRQDEPALFVALTFERREVLDSSNIKPMNLIGVDRGENIPAVIALTDPEGCPLSRFKDSLGNPTHILRIRESYKEKQRTIQAKKEVEQRRAGGYSRKYASKAKNLADDMVRNTARDLLYYAVTQDAMLIFENLSRGFGRQGKRTFMAERQYTRMEDWLTAKLAYEGLPSKTYLSKTLAQYTSKTCSNCGFTITSADYDRVLEKLKKTATGWMTTINGKELKVEGQITYYNRYKRQNVVKDLSVELDRLSEESVNNDISSWTKGRSGEALSLLKKRFSHRPVQEKFVCLNCGFETHADEQAALNIARSWLFLRSQEYKKYQTNKTTGNTDKRAFVETWQSFYRKKLKEVWKPAV

SEQ ID NO: 45578 - protein, 978 aa, synthetic construct
  REGION 1..978: note = engineered CasX variant
QEIKRINKIRRRLVKDSNTKKAGKTGPMKTLLVRVMTPDLRERLENLRKKPENIPQPISNTSRANLNKLLTDYTEMKKAILHVYWEEFQKDPVGLMSRVAQPASKKIDQNKLKPEMDEKGNLTTAGFACSQCGQPLFVYKLEQVSEKGKAYTNYFGRCNVAEHEKLILLAQLKPEKDSDEAVTYSLGKFGQRALDFYSIHVTKESTHPVKPLAQIAGNRYASSPVGKALSGACMGTIASFLSKYQDIIIEHQKVVKGNQKRLESLRELAGKENLEYPSVTLPPQPHTKEGVDAYNEVIARVRMWVNLNLWQKLKLSRDDAKPLLRLKGFPSFPLVERQANEVDWWDMVCNVKKLINEKKEDGKVFWQNLAGYKRQEALRPYLSSEEDRKKGKKFARYQLGDLLLHLEKKHGEDWGKVYDEAWERIDKKVEGLSKHIKLEEERRSEDAQSKAALTDWLRAKASFVIEGLKEADKDEFCRCELKLQKWYGDLRGKPFAIEAENSILDISGFSKQYNCAFIWQKDGVKKLNLYLIINYFKGGKLRFKKIKPEAFEANRFYTVINKKSGEIVPMEVNFNFDDPNLIILPLAFGKRQGREFIWNDLLSLETGSLKLANGRVIEKTLYNRRTRQDEPALFVALTFERREVLDSSNIKPMNLIGVDRGENIPAVIALTDPEGCPLSRFKDSLGNPTHILRIRESYKEKQRTIQAKKEVEQRRAGGYSRKYASKAKNLADDMVRNTARDLLYYAVTQDAMLIFENLSRGFGRQGKRTFMAERQYTRMEDWLTAKLAYEGLPSKTYLSKTLAQYTSKTCSNCGFTITSADYDRVLEKLKKTATGWMTTINGKELKVEGQITYYNRYKRQNVVKDLSVELDRLSEESVNNDISSWTKGRSGEALSLLKKRFSHRPVQEKFVCLNCGFETHADEQAALNIARSWLFLRSQEYKKYQTNKTTGNTDKRAFVETWQSFYRKKLKEVWKPAV

SEQ ID NO: 45579 - protein, 978 aa, synthetic construct
  REGION 1..978: note = engineered CasX variant
QEIKRINKIRRRLVKDSNTKKAGKTGPMKTLLVRVMTPDLRERLENLRKKPENIPQPISNTSRANLNKLLTDYTEMKKAILHVYWEEFQKDPVGLMSRVAQPASKKIDQNKLKPEMDEKGNLTTAGFACSQCGQPLFVYKLEQVSEKGKAYTNYFGRCNVAEHEKLILLAQLKPEKDSDEAVTYSLGKFGQRALDFYSIHVTKESTHPVKPLAQIAGNRYASTPVGKALSGACMGTIASFLSKYQDIIIEHQKVVKGNQKRLESLRELAGKENLEYPSVTLPPQPHTKEGVDAYNEVIARVRMWVNLNLWQKLKLSRDDAKPLLRLKGFPSFPLVERQANEVDWWDMVCNVKKLINEKKEDGKVFWQNLAGYKRQEALRPYLSSEEDRKKGKKFARYQLGDLLLHLEKKHGEDWGKVYDEAWERIDKKVEGLSKHIKLEEERRSEDAQSKAALTDWLRAKASFVIEGLKEADKDEFCRCELKLQKWYGDLRGKPFAIEAENSILDISGFSKQYNCAFIWQKDGVKKLNLYLIINYFKGGKLRFKKIKPEAFEANRFYTVINKKSGEIVPMEVNFNFDDPNLIILPLAFGKRQGREFIWNDLLSLETGSLKLANGRVIEKTLYNRRTRQDEPALFVALTFERREVLDSSNIKPMNLIGVDRGENIPAVIALTDPEGCPLSRFKDSLGNPTHILRIRESYKEKQRTIQAKKEVEQRRAGGYSRKYASKAKNLADDMVRNTARDLLYYAVTQDAMLIFENLSRGFGRQGKRTFMAERQYTRMEDWLTAKLAYEGLPSKTYLSKTLAQYTSKTCSNCGFTITSADYDRVLEKLKKTATGWMTTINGKELKVEGQITYYNRYKRQNVVKDLSVELDRLSEESVNNDISSWTKGRSGEALSLLKKRFSHRPVQEKFVCLNCGFETHADEQAALNIARSWLFLRSQEYKKYQTNKTTGNTDKRAFVETWQSFYRKKLKEVWKPAV

SEQ ID NO: 45580 - protein, 978 aa, synthetic construct
  REGION 1..978: note = engineered CasX variant
QEIKRINKIRRRLVKDSNTKKAGKTGPMKTLLVRVMTPDLRERLENLRKKPENIPQPISNTSRANLNKLLTDYTEMKKAILHVYWEEFQKDPVGLMSRVAQPASKKIDQNKLKPEMDEKGNLTTAGFACSQCGQPLFVYKLEQVSEKGKAYTNYFGRCNVAEHEKLILLAQLKPEKDSDEAVTYSLGKFGQRALDFYSIHVTKESTHPVKPLAQIAGNRYASAPVGKALSGACMGTIASFLSKYQDIIIEHQKVVKGNQKRLESLRELAGKENLEYPSVTLPPQPHTKEGVDAYNEVIARVRMWVNLNLWQKLKLSRDDAKPLLRLKGFPSFPLVERQANEVDWWDMVCNVKKLINEKKEDGKVFWQNLAGYKRQEALRPYLSSEEDRKKGKKFARYQLGDLLLHLEKKHGEDWGKVYDEAWERIDKKVEGLSKHIKLEEERRSEDAQSKAALTDWLRAKASFVIEGLKEADKDEFCRCELKLQKWYGDLRGKPFAIEAENSILDISGFSKQYNCAFIWQKDGVKKLNLYLIINYFKGGKLRFKKIKPEAFEANRFYTVINKKSGEIVPMEVNFNFDDPNLIILPLAFGKRQGREFIWNDLLSLETGSLKLANGRVIEKTLYNRRTRQDEPALFVALTFERREVLDSSNIKPMNLIGVDRGENIPAVIALTDPEGCPLSRFKDSLGNPTHILRIRESYKEKQRTIQAKKEVEQRRAGGYSRKYASKAKNLADDMVRNTARDLLYYAVTQDAMLIFENLSRGFGRQGKRTFMAERQYTRMEDWLTAKLAYEGLPSKTYLSKTLAQYTSKTCSNCGFTITSADYDRVLEKLKKTATGWMTTINGKELKVEGQITYYNRYKRQNVVKDLSVELDRLSEESVNNDISSWTKGRSGEALSLLKKRFSHRPVQEKFVCLNCGFETHADEQAALNIARSWLFLRSQEYKKYQTNKTTGNTDKRAFVETWQSFYRKKLKEVWKPAV

SEQ ID NO: 45581 - protein, 978 aa, synthetic construct
  REGION 1..978: note = engineered CasX variant
QEIKRINKIRRRLVKDSNTKKAGKTGPMKTLLVRVMTPDLRERLENLRKKPENIPQPISNTSRANLNKLLTDYTEMKKAILHVYWEEFQKDPVGLMSRVAQPASKKIDQNKLKPEMDEKGNLTTAGFACSQCGQPLFVYKLEQVSEKGKAYTNYFGRCNVAEHEKLILLAQLKPEKDSDEAVTYSLGKFGQRALDFYSIHVTKESTHPVKPLAQIAGNRYASVPVGKALSGACMGTIASFLSKYQDIIIEHQKVVKGNQKRLESLRELAGKENLEYPSVTLPPQPHTKEGVDAYNEVIARVRMWVNLNLWQKLKLSRDDAKPLLRLKGFPSFPLVERQANEVDWWDMVCNVKKLINEKKEDGKVFWQNLAGYKRQEALRPYLSSEEDRKKGKKFARYQLGDLLLHLEKKHGEDWGKVYDEAWERIDKKVEGLSKHIKLEEERRSEDAQSKAALTDWLRAKASFVIEGLKEADKDEFCRCELKLQKWYGDLRGKPFAIEAENSILDISGFSKQYNCAFIWQKDGVKKLNLYLIINYFKGGKLRFKKIKPEAFEANRFYTVINKKSGEIVPMEVNFNFDDPNLIILPLAFGKRQGREFIWNDLLSLETGSLKLANGRVIEKTLYNRRTRQDEPALFVALTFERREVLDSSNIKPMNLIGVDRGENIPAVIALTDPEGCPLSRFKDSLGNPTHILRIRESYKEKQRTIQAKKEVEQRRAGGYSRKYASKAKNLADDMVRNTARDLLYYAVTQDAMLIFENLSRGFGRQGKRTFMAERQYTRMEDWLTAKLAYEGLPSKTYLSKTLAQYTSKTCSNCGFTITSADYDRVLEKLKKTATGWMTTINGKELKVEGQITYYNRYKRQNVVKDLSVELDRLSEESVNNDISSWTKGRSGEALSLLKKRFSHRPVQEKFVCLNCGFETHADEQAALNIARSWLFLRSQEYKKYQTNKTTGNTDKRAFVETWQSFYRKKLKEVWKPAV

SEQ ID NO: 45582 - protein, 978 aa, synthetic construct
  REGION 1..978: note = engineered CasX variant
QEIKRINKIRRRLVKDSNTKKAGKTGPMKTLLVRVMTPDLRERLENLRKKPENIPQPISNTSRANLNKLLTDYTEMKKAILHVYWEEFQKDPVGLMSRVAQPASKKIDQNKLKPEMDEKGNLTTAGFACSQCGQPLFVYKLEQVSEKGKAYTNYFGRCNVAEHEKLIKLAQLKPEKDSDEAVTYSLGKFGQRALDFYSIHVTKESTHPVKPLAQIAGNRYASGPVGKALSGACMGTIASFLSKYQDIIIEHQKVVKGNQKRLESLRELAGKENLEYPSVTLPPQPHTKEGVDAYNEVIARVRMWVNLNLWQKLKLSRDDAKPLLRLKGFPSFPLVERQANEVDWWDMVCNVKKLINEKKEDGKVFWQNLAGYKRQEALRPYLSSEEDRKKGKKFARYQLGDLLLHLEKKHGEDWGKVYDEAWERIDKKVEGLSKHIKLEEERRSEDAQSKAALTDWLRAKASFVIEGLKEADKDEFCRCELKLQKWYGDLRGKPFAIEAENSILDISGFSKQYNCAFIWQKDGVKKLNLYLIINYFKGGKLRFKKIKPEAFEANRFYTVINKKSGEIVPMEVNFNFDDPNLIILPLAFGKRQGREFIWNDLLSLETGSLKLANGRVIEKTLYNRRTRQDEPALFVALTFERREVLDSSNIKPMNLIGVDRGENIPAVIALTDPEGCPLSRFKDSLGNPTHILRIRESYKEKQRTIQAKKEVEQRRAGGYSRKYASKAKNLADDMVRNTARDLLYYAVTQDAMLIFENLSRGFGRQGKRTFMAERQYTRMEDWLTAKLAYEGLPSKTYLSKTLAQYTSKTCSNCGFTITSADYDRVLEKLKKTATGWMTTINGKELKVEGQITYYNRYKRQNVVKDLSVELDRLSEESVNNDISSWTKGRSGEALSLLKKRFSHRPVQEKFVCLNCGFETHADEQAALNIARSWLFLRSQEYKKYQTNKTTGNTDKRAFVETWQSFYRKKLKEVWKPAV

SEQ ID NO: 45583 - protein, 977 aa, synthetic construct
  REGION 1..977: note = engineered CasX variant
QEIKRINKIRRRLVKDSNTKKAGKTGPMKTLLVRVMTPDLRERLENLRKKPENIPQPISNTSRANLNKLLTDYTEMKKAILHVYWEEFQKDPVGLMSRVAQPASKKIDQNKLKPEMDEKGNLTTAGFACSQCGQPLFVYKLEQVSEKGKAYTNYFGRCNVAEHEKLILLAQLKPEKDSDEAVTYSLGKFGQRALDFYSIHVTKESTHPVKPLAQIAGNRYASPVGKALSGACMGTIASFLSKYQDIIIEHQKVVKGNQKRLESLRELAGKENLEYPSVTLPPQPHTKEGVDAYNEVIARVRMWVNLNLWQKLKLSRDDAKPLLRLKGFPSFPLVERQANEVDWWDMVCNVKKLINEKKEDGKVFWQNLAGYKRQEALRPYLSSEEDRKKGKKFARYQLGDLLLHLEKKHGEDWGKVYDEAWERIDKKVEGLSKHIKLEEERRSEDAQSKAALTDWLRAKASFVIEGLKEADKDEFCRCELKLQKWYGDLRGKPFAIEAENSILDISGFSKQYNCAFIWQKDGVKKLNLYLIINYFKGGKLRFKKIKPEAFEANRFYTVINKKSGEIVPMEVNFNFDDPNLIILPLAFGKRQGREFIWNDLLSLETGSLKLANGRVIEKTLYNRRTRQDEPALFVALTFERREVLDSSNIKPMNLIGVDRGENIPAVIALTDPEGCPLSRFKDSLGNPTHILRIRESYKEKQRTIQAKKEVEQRRAGGYSRKYASKAKNLADDMVRNTARDLLYYAVTQDAMLIFENLSRGFGRQGKRTFMAERQYTRMEDWLTAKLAYEGLPSKTYLSKTLAQYTSKTCSNCGFTITSADYDRVLEKLKKTATGWMTTINGKELKVEGQITYYNRYKRQNVVKDLSVELDRLSEESVNNDISSWTKGRSGEALSLLKKRFSHRPVQEKFVCLNCGFETHADEQAALNIARSWLFLRSQEYKKYQTNKTTGNTDKRAFVETWQSFYRKKLKEVWKPAV

SEQ ID NO: 45584 - protein, 978 aa, synthetic construct
  REGION 1..978: note = engineered CasX variant
QEIKRINKIRRRLVKDSNTKKAGKTGPMKTLLVRVMTPDLRERLENLRKKPENIPQPISNTSRANLNKLLTDYTEMKKAILHVYWEEFQKDPVGLMSRVAQPASKKIDQNKLKPEMDEKGNLTTAGFACSQCGQPLFVYKLEQVSEKGKAYTNYFGRCNVAEHEKLILLAQLKPEKDSDEAVTYSLGKFGQRALDFYSIHVTKESTHPVKPLAQIAGNRYASYPVGKALSDACMGTIASFLSKYQDIIIEHQKVVKGNQKRLESLRELAGKENLEYPSVTLPPQPHTKEGVDAYNEVIARVRMWVNLNLWQKLKLSRDDAKPLLRLKNFPSFPLVERQANEVDWWDMVCNVKKLINEKKEDGKVFWQNLAGYKRQEALRPYLSSEEDRKKGKKFARYQLGDLLLHLEKKHGEDWGKVYDEAWERIDKKVEGLSKHIKLEEERRSEDAQSKAALTDWLRAKASFVIEGLKEADKDEFCRCELKLQKWYGDLRGKPFAIEAENSILDISGFSKQYNCAFIWQKDGVKKLNLYLIINYFKGGKLRFKKIKPEAFEANRFYTVINKKSGEIVPMEVNFNFDDPNLIILPLAFGKRQGREFIWNDLLSLETGSLKLANGRVIEKTLYNRRTRQDEPALFVALTFERREVLDSSNIKPMNLIGVDRGENIPAVIALTDPEGCPLSRFKDSLGNPTHILRIRESYKEKQRTIQAKKEVEQRRAGGYSRKYASKAKNLADDMVRNTARDLLYYAVTQDAMLIFENLSRGFGRQGKRTFMAERQYTRMEDWLTAKLAYEGLPSKTYLSKTLAQYTSKTCSNCGFTITSADYDRVLEKLKKTATGWMTTINGKELKVEGQITYYNRYKRQNVVKDLSVELDRLSEESVNNDISSWTKGRSGEALSLLKKRFSHRPVQEKFVCLNCGFETHADEQAALNIARSWLFLRSQEYKKYQTNKTTGNTDKRAFVETWQSFYRKKLKEVWKPAV

SEQ ID NO: 45585 - protein, 978 aa, synthetic construct
  REGION 1..978: note = engineered CasX variant
QEIKRINKIRRRLVKDSNTKKAGKTGPMKTLLVRVMTPDLRERLENLRKKPENIPQPISNTSRANLNKLLTDYTEMKKAILHVYWEEFQKDPVGLMSRVAQPASKKIDQNKLKPEMDEKGNLTTAGFACSQCGQPLFVYKLEQVSEKGKAYTNYFGRCNVAEHEKLILLAQLKPEKDSDEAVTYSLGKFGQRALDFYSIHVTKESTHPVKPLAQIAGNRYASHPVGKALSDACMGTIASFLSKYQDIIIEHQKVVKGNQKRLESLRELAGKENLEYPSVTLPPQPHTKEGVDAYNEVIARVRMWVNLNLWQKLKLSRDDAKPLLRLKNFPSFPLVERQANEVDWWDMVCNVKKLINEKKEDGKVFWQNLAGYKRQEALRPYLSSEEDRKKGKKFARYQLGDLLLHLEKKHGEDWGKVYDEAWERIDKKVEGLSKHIKLEEERRSEDAQSKAALTDWLRAKASFVIEGLKEADKDEFCRCELKLQKWYGDLRGKPFAIEAENSILDISGFSKQYNCAFIWQKDGVKKLNLYLIINYFKGGKLRFKKIKPEAFEANRFYTVINKKSGEIVPMEVNFNFDDPNLIILPLAFGKRQGREFIWNDLLSLETGSLKLANGRVIEKTLYNRRTRQDEPALFVALTFERREVLDSSNIKPMNLIGVDRGENIPAVIALTDPEGCPLSRFKDSLGNPTHILRIRESYKEKQRTIQAKKEVEQRRAGGYSRKYASKAKNLADDMVRNTARDLLYYAVTQDAMLIFENLSRGFGRQGKRTFMAERQYTRMEDWLTAKLAYEGLPSKTYLSKTLAQYTSKTCSNCGFTITSADYDRVLEKLKKTATGWMTTINGKELKVEGQITYYNRYKRQNVVKDLSVELDRLSEESVNNDISSWTKGRSGEALSLLKKRFSHRPVQEKFVCLNCGFETHADEQAALNIARSWLFLRSQEYKKYQTNKTTGNTDKRAFVETWQSFYRKKLKEVWKPAV

SEQ ID NO: 45586 - protein, 978 aa, synthetic construct
  REGION 1..978: note = engineered CasX variant
QEIKRINKIRRRLVKDSNTKKAGKTGPMKTLLVRVMTPDLRERLENLRKKPENIPQPISNTSRANLNKLLTDYTEMKKAILHVYWEEFQKDPVGLMSRVAQPASKKIDQNKLKPEMDEKGNLTTAGFACSQCGQPLFVYKLEQVSEKGKAYTNYFGRCNVAEHEKLILLAQLKPEKDSDEAVTYSLGKFGQRALDFYSIHVTKESTHPVKPLAQIAGNRYASSPVGKALSDACMGTIASFLSKYQDIIIEHQKVVKGNQKRLESLRELAGKENLEYPSVTLPPQPHTKEGVDAYNEVIARVRMWVNLNLWQKLKLSRDDAKPLLRLKNFPSFPLVERQANEVDWWDMVCNVKKLINEKKEDGKVFWQNLAGYKRQEALRPYLSSEEDRKKGKKFARYQLGDLLLHLEKKHGEDWGKVYDEAWERIDKKVEGLSKHIKLEEERRSEDAQSKAALTDWLRAKASFVIEGLKEADKDEFCRCELKLQKWYGDLRGKPFAIEAENSILDISGFSKQYNCAFIWQKDGVKKLNLYLIINYFKGGKLRFKKIKPEAFEANRFYTVINKKSGEIVPMEVNFNFDDPNLIILPLAFGKRQGREFIWNDLLSLETGSLKLANGRVIEKTLYNRRTRQDEPALFVALTFERREVLDSSNIKPMNLIGVDRGENIPAVIALTDPEGCPLSRFKDSLGNPTHILRIRESYKEKQRTIQAKKEVEQRRAGGYSRKYASKAKNLADDMVRNTARDLLYYAVTQDAMLIFENLSRGFGRQGKRTFMAERQYTRMEDWLTAKLAYEGLPSKTYLSKTLAQYTSKTCSNCGFTITSADYDRVLEKLKKTATGWMTTINGKELKVEGQITYYNRYKRQNVVKDLSVELDRLSEESVNNDISSWTKGRSGEALSLLKKRFSHRPVQEKFVCLNCGFETHADEQAALNIARSWLFLRSQEYKKYQTNKTTGNTDKRAFVETWQSFYRKKLKEVWKPAV

SEQ ID NO: 45587 - protein, 978 aa, synthetic construct
  REGION 1..978: note = engineered CasX variant
QEIKRINKIRRRLVKDSNTKKAGKTGPMKTLLVRVMTPDLRERLENLRKKPENIPQPISNTSRANLNKLLTDYTEMKKAILHVYWEEFQKDPVGLMSRVAQPASKKIDQNKLKPEMDEKGNLTTAGFACSQCGQPLFVYKLEQVSEKGKAYTNYFGRCNVAEHEKLILLAQLKPEKDSDEAVTYSLGKFGQRALDFYSIHVTKESTHPVKPLAQIAGNRYASTPVGKALSDACMGTIASFLSKYQDIIIEHQKVVKGNQKRLESLRELAGKENLEYPSVTLPPQPHTKEGVDAYNEVIARVRMWVNLNLWQKLKLSRDDAKPLLRLKNFPSFPLVERQANEVDWWDMVCNVKKLINEKKEDGKVFWQNLAGYKRQEALRPYLSSEEDRKKGKKFARYQLGDLLLHLEKKHGEDWGKVYDEAWERIDKKVEGLSKHIKLEEERRSEDAQSKAALTDWLRAKASFVIEGLKEADKDEFCRCELKLQKWYGDLRGKPFAIEAENSILDISGFSKQYNCAFIWQKDGVKKLNLYLIINYFKGGKLRFKKIKPEAFEANRFYTVINKKSGEIVPMEVNFNFDDPNLIILPLAFGKRQGREFIWNDLLSLETGSLKLANGRVIEKTLYNRRTRQDEPALFVALTFERREVLDSSNIKPMNLIGVDRGENIPAVIALTDPEGCPLSRFKDSLGNPTHILRIRESYKEKQRTIQAKKEVEQRRAGGYSRKYASKAKNLADDMVRNTARDLLYYAVTQDAMLIFENLSRGFGRQGKRTFMAERQYTRMEDWLTAKLAYEGLPSKTYLSKTLAQYTSKTCSNCGFTITSADYDRVLEKLKKTATGWMTTINGKELKVEGQITYYNRYKRQNVVKDLSVELDRLSEESVNNDISSWTKGRSGEALSLLKKRFSHRPVQEKFVCLNCGFETHADEQAALNIARSWLFLRSQEYKKYQTNKTTGNTDKRAFVETWQSFYRKKLKEVWKPAV

SEQ ID NO: 45588 - protein, 978 aa, synthetic construct
  REGION 1..978: note = engineered CasX variant
QEIKRINKIRRRLVKDSNTKKAGKTGPMKTLLVRVMTPDLRERLENLRKKPENIPQPISNTSRANLNKLLTDYTEMKKAILHVYWEEFQKDPVGLMSRVAQPASKKIDQNKLKPEMDEKGNLTTAGFACSQCGQPLFVYKLEQVSEKGKAYTNYFGRCNVAEHEKLILLAQLKPEKDSDEAVTYSLGKFGQRALDFYSIHVTKESTHPVKPLAQIAGNRYASAPVGKALSDACMGTIASFLSKYQDIIIEHQKVVKGNQKRLESLRELAGKENLEYPSVTLPPQPHTKEGVDAYNEVIARVRMWVNLNLWQKLKLSRDDAKPLLRLKNFPSFPLVERQANEVDWWDMVCNVKKLINEKKEDGKVFWQNLAGYKRQEALRPYLSSEEDRKKGKKFARYQLGDLLLHLEKKHGEDWGKVYDEAWERIDKKVEGLSKHIKLEEERRSEDAQSKAALTDWLRAKASFVIEGLKEADKDEFCRCELKLQKWYGDLRGKPFAIEAENSILDISGFSKQYNCAFIWQKDGVKKLNLYLIINYFKGGKLRFKKIKPEAFEANRFYTVINKKSGEIVPMEVNFNFDDPNLIILPLAFGKRQGREFIWNDLLSLETGSLKLANGRVIEKTLYNRRTRQDEPALFVALTFERREVLDSSNIKPMNLIGVDRGENIPAVIALTDPEGCPLSRFKDSLGNPTHILRIRESYKEKQRTIQAKKEVEQRRAGGYSRKYASKAKNLADDMVRNTARDLLYYAVTQDAMLIFENLSRGFGRQGKRTFMAERQYTRMEDWLTAKLAYEGLPSKTYLSKTLAQYTSKTCSNCGFTITSADYDRVLEKLKKTATGWMTTINGKELKVEGQITYYNRYKRQNVVKDLSVELDRLSEESVNNDISSWTKGRSGEALSLLKKRFSHRPVQEKFVCLNCGFETHADEQAALNIARSWLFLRSQEYKKYQTNKTTGNTDKRAFVETWQSFYRKKLKEVWKPAV

SEQ ID NO: 45589 - protein, 978 aa, synthetic construct
  REGION 1..978: note = engineered CasX variant
QEIKRINKIRRRLVKDSNTKKAGKTGPMKTLLVRVMTPDLRERLENLRKKPENIPQPISNTSRANLNKLLTDYTEMKKAILHVYWEEFQKDPVGLMSRVAQPASKKIDQNKLKPEMDEKGNLTTAGFACSQCGQPLFVYKLEQVSEKGKAYTNYFGRCNVAEHEKLILLAQLKPEKDSDEAVTYSLGKFGQRALDFYSIHVTKESTHPVKPLAQIAGNRYASVPVGKALSDACMGTIASFLSKYQDIIIEHQKVVKGNQKRLESLRELAGKENLEYPSVTLPPQPHTKEGVDAYNEVIARVRMWVNLNLWQKLKLSRDDAKPLLRLKNFPSFPLVERQANEVDWWDMVCNVKKLINEKKEDGKVFWQNLAGYKRQEALRPYLSSEEDRKKGKKFARYQLGDLLLHLEKKHGEDWGKVYDEAWERIDKKVEGLSKHIKLEEERRSEDAQSKAALTDWLRAKASFVIEGLKEADKDEFCRCELKLQKWYGDLRGKPFAIEAENSILDISGFSKQYNCAFIWQKDGVKKLNLYLIINYFKGGKLRFKKIKPEAFEANRFYTVINKKSGEIVPMEVNFNFDDPNLIILPLAFGKRQGREFIWNDLLSLETGSLKLANGRVIEKTLYNRRTRQDEPALFVALTFERREVLDSSNIKPMNLIGVDRGENIPAVIALTDPEGCPLSRFKDSLGNPTHILRIRESYKEKQRTIQAKKEVEQRRAGGYSRKYASKAKNLADDMVRNTARDLLYYAVTQDAMLIFENLSRGFGRQGKRTFMAERQYTRMEDWLTAKLAYEGLPSKTYLSKTLAQYTSKTCSNCGFTITSADYDRVLEKLKKTATGWMTTINGKELKVEGQITYYNRYKRQNVVKDLSVELDRLSEESVNNDISSWTKGRSGEALSLLKKRFSHRPVQEKFVCLNCGFETHADEQAALNIARSWLFLRSQEYKKYQTNKTTGNTDKRAFVETWQSFYRKKLKEVWKPAV

SEQ ID NO: 45590 - protein, 978 aa, synthetic construct
  REGION 1..978: note = engineered CasX variant
QEIKRINKIRRRLVKDSNTKKAGKTGPMKTLLVRVMTPDLRERLENLRKKPENIPQPISNTSRANLNKLLTDYTEMKKAILHVYWEEFQKDPVGLMSRVAQPASKKIDQNKLKPEMDEKGNLTTAGFACSQCGQPLFVYKLEQVSEKGKAYTNYFGRCNVAEHEKLIKLAQLKPEKDSDEAVTYSLGKFGQRALDFYSIHVTKESTHPVKPLAQIAGNRYASGPVGKALSDACMGTIASFLSKYQDIIIEHQKVVKGNQKRLESLRELAGKENLEYPSVTLPPQPHTKEGVDAYNEVIARVRMWVNLNLWQKLKLSRDDAKPLLRLKNFPSFPLVERQANEVDWWDMVCNVKKLINEKKEDGKVFWQNLAGYKRQEALRPYLSSEEDRKKGKKFARYQLGDLLLHLEKKHGEDWGKVYDEAWERIDKKVEGLSKHIKLEEERRSEDAQSKAALTDWLRAKASFVIEGLKEADKDEFCRCELKLQKWYGDLRGKPFAIEAENSILDISGFSKQYNCAFIWQKDGVKKLNLYLIINYFKGGKLRFKKIKPEAFEANRFYTVINKKSGEIVPMEVNFNFDDPNLIILPLAFGKRQGREFIWNDLLSLETGSLKLANGRVIEKTLYNRRTRQDEPALFVALTFERREVLDSSNIKPMNLIGVDRGENIPAVIALTDPEGCPLSRFKDSLGNPTHILRIRESYKEKQRTIQAKKEVEQRRAGGYSRKYASKAKNLADDMVRNTARDLLYYAVTQDAMLIFENLSRGFGRQGKRTFMAERQYTRMEDWLTAKLAYEGLPSKTYLSKTLAQYTSKTCSNCGFTITSADYDRVLEKLKKTATGWMTTINGKELKVEGQITYYNRYKRQNVVKDLSVELDRLSEESVNNDISSWTKGRSGEALSLLKKRFSHRPVQEKFVCLNCGFETHADEQAALNIARSWLFLRSQEYKKYQTNKTTGNTDKRAFVETWQSFYRKKLKEVWKPAV

SEQ ID NO: 45591 - protein, 977 aa, synthetic construct
  REGION 1..977: note = engineered CasX variant
QEIKRINKIRRRLVKDSNTKKAGKTGPMKTLLVRVMTPDLRERLENLRKKPENIPQPISNTSRANLNKLLTDYTEMKKAILHVYWEEFQKDPVGLMSRVAQPASKKIDQNKLKPEMDEKGNLTTAGFACSQCGQPLFVYKLEQVSEKGKAYTNYFGRCNVAEHEKLILLAQLKPEKDSDEAVTYSLGKFGQRALDFYSIHVTKESTHPVKPLAQIAGNRYASPVGKALSDACMGTIASFLSKYQDIIIEHQKVVKGNQKRLESLRELAGKENLEYPSVTLPPQPHTKEGVDAYNEVIARVRMWVNLNLWQKLKLSRDDAKPLLRLKNFPSFPLVERQANEVDWWDMVCNVKKLINEKKEDGKVFWQNLAGYKRQEALRPYLSSEEDRKKGKKFARYQLGDLLLHLEKKHGEDWGKVYDEAWERIDKKVEGLSKHIKLEEERRSEDAQSKAALTDWLRAKASFVIEGLKEADKDEFCRCELKLQKWYGDLRGKPFAIEAENSILDISGFSKQYNCAFIWQKDGVKKLNLYLIINYFKGGKLRFKKIKPEAFEANRFYTVINKKSGEIVPMEVNFNFDDPNLIILPLAFGKRQGREFIWNDLLSLETGSLKLANGRVIEKTLYNRRTRQDEPALFVALTFERREVLDSSNIKPMNLIGVDRGENIPAVIALTDPEGCPLSRFKDSLGNPTHILRIRESYKEKQRTIQAKKEVEQRRAGGYSRKYASKAKNLADDMVRNTARDLLYYAVTQDAMLIFENLSRGFGRQGKRTFMAERQYTRMEDWLTAKLAYEGLPSKTYLSKTLAQYTSKTCSNCGFTITSADYDRVLEKLKKTATGWMTTINGKELKVEGQITYYNRYKRQNVVKDLSVELDRLSEESVNNDISSWTKGRSGEALSLLKKRFSHRPVQEKFVCLNCGFETHADEQAALNIARSWLFLRSQEYKKYQTNKTTGNTDKRAFVETWQSFYRKKLKEVWKPAV

SEQ ID NO: 45592 - protein, 978 aa, synthetic construct
  REGION 1..978: note = engineered CasX variant
QEIKRINKIRRRLVKDSNTKKAGKTGPMKTLLVRVMTPDLRERLENLRKKPENIPQPISNTSRANLNKLLTDYTEMKKAILHVYWEEFQKDPVGLMSRVAQPASKKIDQNKLKPEMDEKGNLTTAGFACSQCGQPLFVYKLEQVSEKGKAYTNYFGRCNVAEHEKLILLAQLKPEKDSDEAVTYSLGKFGQRALDFYSIHVTKESTHPVKPLAQIAGNRYASYPVGKALSDACMGTIASFLSKYQDIIIEHQKVVKGNQKRLESLRELAGKENLEYPSVTLPPQPHTKEGVDAYNEVIARVRMWVNLNLWQKLKLSRDDAKPLLRLKGFPSFPLVERQANEVDWWDMVCNVKKLINEKKEDGKVFWQNLAGYKRQEALRPYLSSEEDRKKGKKFARYQLGDLLNHLEKKHGEDWGKVYDEAWERIDKKVEGLSKHIKLEEERRSEDAQSKAALTDWLRAKASFVIEGLKEADKDEFCRCELKLQKWYGDLRGKPFAIEAENSILDISGFSKQYNCAFIWQKDGVKKLNLYLIINYFKGGKLRFKKIKPEAFEANRFYTVINKKSGEIVPMEVNFNFDDPNLIILPLAFGKRQGREFIWNDLLSLETGSLKLANGRVIEKTLYNRRTRQDEPALFVALTFERREVLDSSNIKPMNLIGVDRGENIPAVIALTDPEGCPLSRFKDSLGNPTHILRIRESYKEKQRTIQAKKEVEQRRAGGYSRKYASKAKNLADDMVRNTARDLLYYAVTQDAMLIFENLSRGFGRQGKRTFMAERQYTRMEDWLTAKLAYEGLPSKTYLSKTLAQYTSKTCSNCGFTITSADYDRVLEKLKKTATGWMTTINGKELKVEGQITYYNRYKRQNVVKDLSVELDRLSEESVNNDISSWTKGRSGEALSLLKKRFSHRPVQEKFVCLNCGFETHADEQAALNIARSWLFLRSQEYKKYQTNKTTGNTDKRAFVETWQSFYRKKLKEVWKPAV

SEQ ID NO: 45593 - protein, 978 aa, synthetic construct
  REGION 1..978: note = engineered CasX variant
QEIKRINKIRRRLVKDSNTKKAGKTGPMKTLLVRVMTPDLRERLENLRKKPENIPQPISNTSRANLNKLLTDYTEMKKAILHVYWEEFQKDPVGLMSRVAQPASKKIDQNKLKPEMDEKGNLTTAGFACSQCGQPLFVYKLEQVSEKGKAYTNYFGRCNVAEHEKLILLAQLKPEKDSDEAVTYSLGKFGQRALDFYSIHVTKESTHPVKPLAQIAGNRYASHPVGKALSDACMGTIASFLSKYQDIIIEHQKVVKGNQKRLESLRELAGKENLEYPSVTLPPQPHTKEGVDAYNEVIARVRMWVNLNLWQKLKLSRDDAKPLLRLKGFPSFPLVERQANEVDWWDMVCNVKKLINEKKEDGKVFWQNLAGYKRQEALRPYLSSEEDRKKGKKFARYQLGDLLNHLEKKHGEDWGKVYDEAWERIDKKVEGLSKHIKLEEERRSEDAQSKAALTDWLRAKASFVIEGLKEADKDEFCRCELKLQKWYGDLRGKPFAIEAENSILDISGFSKQYNCAFIWQKDGVKKLNLYLIINYFKGGKLRFKKIKPEAFEANRFYTVINKKSGEIVPMEVNFNFDDPNLIILPLAFGKRQGREFIWNDLLSLETGSLKLANGRVIEKTLYNRRTRQDEPALFVALTFERREVLDSSNIKPMNLIGVDRGENIPAVIALTDPEGCPLSRFKDSLGNPTHILRIRESYKEKQRTIQAKKEVEQRRAGGYSRKYASKAKNLADDMVRNTARDLLYYAVTQDAMLIFENLSRGFGRQGKRTFMAERQYTRMEDWLTAKLAYEGLPSKTYLSKTLAQYTSKTCSNCGFTITSADYDRVLEKLKKTATGWMTTINGKELKVEGQITYYNRYKRQNVVKDLSVELDRLSEESVNNDISSWTKGRSGEALSLLKKRFSHRPVQEKFVCLNCGFETHADEQAALNIARSWLFLRSQEYKKYQTNKTTGNTDKRAFVETWQSFYRKKLKEVWKPAV

SEQ ID NO: 45594 - protein, 978 aa, synthetic construct
  REGION 1..978: note = engineered CasX variant
QEIKRINKIRRRLVKDSNTKKAGKTGPMKTLLVRVMTPDLRERLENLRKKPENIPQPISNTSRANLNKLLTDYTEMKKAILHVYWEEFQKDPVGLMSRVAQPASKKIDQNKLKPEMDEKGNLTTAGFACSQCGQPLFVYKLEQVSEKGKAYTNYFGRCNVAEHEKLILLAQLKPEKDSDEAVTYSLGKFGQRALDFYSIHVTKESTHPVKPLAQIAGNRYASSPVGKALSDACMGTIASFLSKYQDIIIEHQKVVKGNQKRLESLRELAGKENLEYPSVTLPPQPHTKEGVDAYNEVIARVRMWVNLNLWQKLKLSRDDAKPLLRLKGFPSFPLVERQANEVDWWDMVCNVKKLINEKKEDGKVFWQNLAGYKRQEALRPYLSSEEDRKKGKKFARYQLGDLLNHLEKKHGEDWGKVYDEAWERIDKKVEGLSKHIKLEEERRSEDAQSKAALTDWLRAKASFVIEGLKEADKDEFCRCELKLQKWYGDLRGKPFAIEAENSILDISGFSKQYNCAFIWQKDGVKKLNLYLIINYFKGGKLRFKKIKPEAFEANRFYTVINKKSGEIVPMEVNFNFDDPNLIILPLAFGKRQGREFIWNDLLSLETGSLKLANGRVIEKTLYNRRTRQDEPALFVALTFERREVLDSSNIKPMNLIGVDRGENIPAVIALTDPEGCPLSRFKDSLGNPTHILRIRESYKEKQRTIQAKKEVEQRRAGGYSRKYASKAKNLADDMVRNTARDLLYYAVTQDAMLIFENLSRGFGRQGKRTFMAERQYTRMEDWLTAKLAYEGLPSKTYLSKTLAQYTSKTCSNCGFTITSADYDRVLEKLKKTATGWMTTINGKELKVEGQITYYNRYKRQNVVKDLSVELDRLSEESVNNDISSWTKGRSGEALSLLKKRFSHRPVQEKFVCLNCGFETHADEQAALNIARSWLFLRSQEYKKYQTNKTTGNTDKRAFVETWQSFYRKKLKEVWKPAV

SEQ ID NO: 45595 - protein, 978 aa, synthetic construct
  REGION 1..978: note = engineered CasX variant
QEIKRINKIRRRLVKDSNTKKAGKTGPMKTLLVRVMTPDLRERLENLRKKPENIPQPISNTSRANLNKLLTDYTEMKKAILHVYWEEFQKDPVGLMSRVAQPASKKIDQNKLKPEMDEKGNLTTAGFACSQCGQPLFVYKLEQVSEKGKAYTNYFGRCNVAEHEKLILLAQLKPEKDSDEAVTYSLGKFGQRALDFYSIHVTKESTHPVKPLAQIAGNRYASTPVGKALSDACMGTIASFLSKYQDIIIEHQKVVKGNQKRLESLRELAGKENLEYPSVTLPPQPHTKEGVDAYNEVIARVRMWVNLNLWQKLKLSRDDAKPLLRLKGFPSFPLVERQANEVDWWDMVCNVKKLINEKKEDGKVFWQNLAGYKRQEALRPYLSSEEDRKKGKKFARYQLGDLLNHLEKKHGEDWGKVYDEAWERIDKKVEGLSKHIKLEEERRSEDAQSKAALTDWLRAKASFVIEGLKEADKDEFCRCELKLQKWYGDLRGKPFAIEAENSILDISGFSKQYNCAFIWQKDGVKKLNLYLIINYFKGGKLRFKKIKPEAFEANRFYTVINKKSGEIVPMEVNFNFDDPNLIILPLAFGKRQGREFIWNDLLSLETGSLKLANGRVIEKTLYNRRTRQDEPALFVALTFERREVLDSSNIKPMNLIGVDRGENIPAVIALTDPEGCPLSRFKDSLGNPTHILRIRESYKEKQRTIQAKKEVEQRRAGGYSRKYASKAKNLADDMVRNTARDLLYYAVTQDAMLIFENLSRGFGRQGKRTFMAERQYTRMEDWLTAKLAYEGLPSKTYLSKTLAQYTSKTCSNCGFTITSADYDRVLEKLKKTATGWMTTINGKELKVEGQITYYNRYKRQNVVKDLSVELDRLSEESVNNDISSWTKGRSGEALSLLKKRFSHRPVQEKFVCLNCGFETHADEQAALNIARSWLFLRSQEYKKYQTNKTTGNTDKRAFVETWQSFYRKKLKEVWKPAV

SEQ ID NO: 45596 - protein, 978 aa, synthetic construct
  REGION 1..978: note = engineered CasX variant
QEIKRINKIRRRLVKDSNTKKAGKTGPMKTLLVRVMTPDLRERLENLRKKPENIPQPISNTSRANLNKLLTDYTEMKKAILHVYWEEFQKDPVGLMSRVAQPASKKIDQNKLKPEMDEKGNLTTAGFACSQCGQPLFVYKLEQVSEKGKAYTNYFGRCNVAEHEKLILLAQLKPEKDSDEAVTYSLGKFGQRALDFYSIHVTKESTHPVKPLAQIAGNRYASAPVGKALSDACMGTIASFLSKYQDIIIEHQKVVKGNQKRLESLRELAGKENLEYPSVTLPPQPHTKEGVDAYNEVIARVRMWVNLNLWQKLKLSRDDAKPLLRLKGFPSFPLVERQANEVDWWDMVCNVKKLINEKKEDGKVFWQNLAGYKRQEALRPYLSSEEDRKKGKKFARYQLGDLLNHLEKKHGEDWGKVYDEAWERIDKKVEGLSKHIKLEEERRSEDAQSKAALTDWLRAKASFVIEGLKEADKDEFCRCELKLQKWYGDLRGKPFAIEAENSILDISGFSKQYNCAFIWQKDGVKKLNLYLIINYFKGGKLRFKKIKPEAFEANRFYTVINKKSGEIVPMEVNFNFDDPNLIILPLAFGKRQGREFIWNDLLSLETGSLKLANGRVIEKTLYNRRTRQDEPALFVALTFERREVLDSSNIKPMNLIGVDRGENIPAVIALTDPEGCPLSRFKDSLGNPTHILRIRESYKEKQRTIQAKKEVEQRRAGGYSRKYASKAKNLADDMVRNTARDLLYYAVTQDAMLIFENLSRGFGRQGKRTFMAERQYTRMEDWLTAKLAYEGLPSKTYLSKTLAQYTSKTCSNCGFTITSADYDRVLEKLKKTATGWMTTINGKELKVEGQITYYNRYKRQNVVKDLSVELDRLSEESVNNDISSWTKGRSGEALSLLKKRFSHRPVQEKFVCLNCGFETHADEQAALNIARSWLFLRSQEYKKYQTNKTTGNTDKRAFVETWQSFYRKKLKEVWKPAV

SEQ ID NO: 45597 - protein, 978 aa, synthetic construct
  REGION 1..978: note = engineered CasX variant
QEIKRINKIRRRLVKDSNTKKAGKTGPMKTLLVRVMTPDLRERLENLRKKPENIPQPISNTSRANLNKLLTDYTEMKKAILHVYWEEFQKDPVGLMSRVAQPASKKIDQNKLKPEMDEKGNLTTAGFACSQCGQPLFVYKLEQVSEKGKAYTNYFGRCNVAEHEKLILLAQLKPEKDSDEAVTYSLGKFGQRALDFYSIHVTKESTHPVKPLAQIAGNRYASVPVGKALSDACMGTIASFLSKYQDIIIEHQKVVKGNQKRLESLRELAGKENLEYPSVTLPPQPHTKEGVDAYNEVIARVRMWVNLNLWQKLKLSRDDAKPLLRLKGFPSFPLVERQANEVDWWDMVCNVKKLINEKKEDGKVFWQNLAGYKRQEALRPYLSSEEDRKKGKKFARYQLGDLLNHLEKKHGEDWGKVYDEAWERIDKKVEGLSKHIKLEEERRSEDAQSKAALTDWLRAKASFVIEGLKEADKDEFCRCELKLQKWYGDLRGKPFAIEAENSILDISGFSKQYNCAFIWQKDGVKKLNLYLIINYFKGGKLRFKKIKPEAFEANRFYTVINKKSGEIVPMEVNFNFDDPNLIILPLAFGKRQGREFIWNDLLSLETGSLKLANGRVIEKTLYNRRTRQDEPALFVALTFERREVLDSSNIKPMNLIGVDRGENIPAVIALTDPEGCPLSRFKDSLGNPTHILRIRESYKEKQRTIQAKKEVEQRRAGGYSRKYASKAKNLADDMVRNTARDLLYYAVTQDAMLIFENLSRGFGRQGKRTFMAERQYTRMEDWLTAKLAYEGLPSKTYLSKTLAQYTSKTCSNCGFTITSADYDRVLEKLKKTATGWMTTINGKELKVEGQITYYNRYKRQNVVKDLSVELDRLSEESVNNDISSWTKGRSGEALSLLKKRFSHRPVQEKFVCLNCGFETHADEQAALNIARSWLFLRSQEYKKYQTNKTTGNTDKRAFVETWQSFYRKKLKEVWKPAV

SEQ ID NO: 45598 - protein, 978 aa, synthetic construct
  REGION 1..978: note = engineered CasX variant
QEIKRINKIRRRLVKDSNTKKAGKTGPMKTLLVRVMTPDLRERLENLRKKPENIPQPISNTSRANLNKLLTDYTEMKKAILHVYWEEFQKDPVGLMSRVAQPASKKIDQNKLKPEMDEKGNLTTAGFACSQCGQPLFVYKLEQVSEKGKAYTNYFGRCNVAEHEKLIKLAQLKPEKDSDEAVTYSLGKFGQRALDFYSIHVTKESTHPVKPLAQIAGNRYASGPVGKALSDACMGTIASFLSKYQDIIIEHQKVVKGNQKRLESLRELAGKENLEYPSVTLPPQPHTKEGVDAYNEVIARVRMWVNLNLWQKLKLSRDDAKPLLRLKGFPSFPLVERQANEVDWWDMVCNVKKLINEKKEDGKVFWQNLAGYKRQEALRPYLSSEEDRKKGKKFARYQLGDLLNHLEKKHGEDWGKVYDEAWERIDKKVEGLSKHIKLEEERRSEDAQSKAALTDWLRAKASFVIEGLKEADKDEFCRCELKLQKWYGDLRGKPFAIEAENSILDISGFSKQYNCAFIWQKDGVKKLNLYLIINYFKGGKLRFKKIKPEAFEANRFYTVINKKSGEIVPMEVNFNFDDPNLIILPLAFGKRQGREFIWNDLLSLETGSLKLANGRVIEKTLYNRRTRQDEPALFVALTFERREVLDSSNIKPMNLIGVDRGENIPAVIALTDPEGCPLSRFKDSLGNPTHILRIRESYKEKQRTIQAKKEVEQRRAGGYSRKYASKAKNLADDMVRNTARDLLYYAVTQDAMLIFENLSRGFGRQGKRTFMAERQYTRMEDWLTAKLAYEGLPSKTYLSKTLAQYTSKTCSNCGFTITSADYDRVLEKLKKTATGWMTTINGKELKVEGQITYYNRYKRQNVVKDLSVELDRLSEESVNNDISSWTKGRSGEALSLLKKRFSHRPVQEKFVCLNCGFETHADEQAALNIARSWLFLRSQEYKKYQTNKTTGNTDKRAFVETWQSFYRKKLKEVWKPAV

SEQ ID NO: 45599 - protein, 977 aa, synthetic construct
  REGION 1..977: note = engineered CasX variant
QEIKRINKIRRRLVKDSNTKKAGKTGPMKTLLVRVMTPDLRERLENLRKKPENIPQPISNTSRANLNKLLTDYTEMKKAILHVYWEEFQKDPVGLMSRVAQPASKKIDQNKLKPEMDEKGNLTTAGFACSQCGQPLFVYKLEQVSEKGKAYTNYFGRCNVAEHEKLILLAQLKPEKDSDEAVTYSLGKFGQRALDFYSIHVTKESTHPVKPLAQIAGNRYASPVGKALSDACMGTIASFLSKYQDIIIEHQKVVKGNQKRLESLRELAGKENLEYPSVTLPPQPHTKEGVDAYNEVIARVRMWVNLNLWQKLKLSRDDAKPLLRLKGFPSFPLVERQANEVDWWDMVCNVKKLINEKKEDGKVFWQNLAGYKRQEALRPYLSSEEDRKKGKKFARYQLGDLLNHLEKKHGEDWGKVYDEAWERIDKKVEGLSKHIKLEEERRSEDAQSKAALTDWLRAKASFVIEGLKEADKDEFCRCELKLQKWYGDLRGKPFAIEAENSILDISGFSKQYNCAFIWQKDGVKKLNLYLIINYFKGGKLRFKKIKPEAFEANRFYTVINKKSGEIVPMEVNFNFDDPNLIILPLAFGKRQGREFIWNDLLSLETGSLKLANGRVIEKTLYNRRTRQDEPALFVALTFERREVLDSSNIKPMNLIGVDRGENIPAVIALTDPEGCPLSRFKDSLGNPTHILRIRESYKEKQRTIQAKKEVEQRRAGGYSRKYASKAKNLADDMVRNTARDLLYYAVTQDAMLIFENLSRGFGRQGKRTFMAERQYTRMEDWLTAKLAYEGLPSKTYLSKTLAQYTSKTCSNCGFTITSADYDRVLEKLKKTATGWMTTINGKELKVEGQITYYNRYKRQNVVKDLSVELDRLSEESVNNDISSWTKGRSGEALSLLKKRFSHRPVQEKFVCLNCGFETHADEQAALNIARSWLFLRSQEYKKYQTNKTTGNTDKRAFVETWQSFYRKKLKEVWKPAV

SEQ ID NO: 45600 - protein, 978 aa, synthetic construct
  REGION 1..978: note = engineered CasX variant
QEIKRINKIRRRLVKDSNTKKAGKTGPMKTLLVRVMTPDLRERLENLRKKPENIPQPISNTSRANLNKLLTDYTEMKKAILHVYWEEFQKDPVGLMSRVAQPASKKIDQNKLKPEMDEKGNLTTAGFACSQCGQPLFVYKLEQVSEKGKAYTNYFGRCNVAEHEKLILLAQLKPEKDSDEAVTYSLGKFGQRALDFYSIHVTKESTHPVKPLAQIAGNRYASYPVGKALSDACMGTIASFLSKYQDIIIEHQKVVKGNQKRLESLRELAGKENLEYPSVTLPPQPHTKEGVDAYNEVIARVRMWVNLNLWQKLKLSRDDAKPLLRLKGFPSFPLVERQANEVDWWDMVCNVKKLINEKKEDGKVFWQNLAGYKRQEALRPYLSSEEDRKKGKKFARYQLGDLLWHLEKKHGEDWGKVYDEAWERIDKKVEGLSKHIKLEEERRSEDAQSKAALTDWLRAKASFVIEGLKEADKDEFCRCELKLQKWYGDLRGKPFAIEAENSILDISGFSKQYNCAFIWQKDGVKKLNLYLIINYFKGGKLRFKKIKPEAFEANRFYTVINKKSGEIVPMEVNFNFDDPNLIILPLAFGKRQGREFIWNDLLSLETGSLKLANGRVIEKTLYNRRTRQDEPALFVALTFERREVLDSSNIKPMNLIGVDRGENIPAVIALTDPEGCPLSRFKDSLGNPTHILRIRESYKEKQRTIQAKKEVEQRRAGGYSRKYASKAKNLADDMVRNTARDLLYYAVTQDAMLIFENLSRGFGRQGKRTFMAERQYTRMEDWLTAKLAYEGLPSKTYLSKTLAQYTSKTCSNCGFTITSADYDRVLEKLKKTATGWMTTINGKELKVEGQITYYNRYKRQNVVKDLSVELDRLSEESVNNDISSWTKGRSGEALSLLKKRFSHRPVQEKFVCLNCGFETHADEQAALNIARSWLFLRSQEYKKYQTNKTTGNTDKRAFVETWQSFYRKKLKEVWKPAV

SEQ ID NO: 45601 - protein, 978 aa, synthetic construct
  REGION 1..978: note = engineered CasX variant
QEIKRINKIRRRLVKDSNTKKAGKTGPMKTLLVRVMTPDLRERLENLRKKPENIPQPISNTSRANLNKLLTDYTEMKKAILHVYWEEFQKDPVGLMSRVAQPASKKIDQNKLKPEMDEKGNLTTAGFACSQCGQPLFVYKLEQVSEKGKAYTNYFGRCNVAEHEKLILLAQLKPEKDSDEAVTYSLGKFGQRALDFYSIHVTKESTHPVKPLAQIAGNRYASHPVGKALSDACMGTIASFLSKYQDIIIEHQKVVKGNQKRLESLRELAGKENLEYPSVTLPPQPHTKEGVDAYNEVIARVRMWVNLNLWQKLKLSRDDAKPLLRLKGFPSFPLVERQANEVDWWDMVCNVKKLINEKKEDGKVFWQNLAGYKRQEALRPYLSSEEDRKKGKKFARYQLGDLLWHLEKKHGEDWGKVYDEAWERIDKKVEGLSKHIKLEEERRSEDAQSKAALTDWLRAKASFVIEGLKEADKDEFCRCELKLQKWYGDLRGKPFAIEAENSILDISGFSKQYNCAFIWQKDGVKKLNLYLIINYFKGGKLRFKKIKPEAFEANRFYTVINKKSGEIVPMEVNFNFDDPNLIILPLAFGKRQGREFIWNDLLSLETGSLKLANGRVIEKTLYNRRTRQDEPALFVALTFERREVLDSSNIKPMNLIGVDRGENIPAVIALTDPEGCPLSRFKDSLGNPTHILRIRESYKEKQRTIQAKKEVEQRRAGGYSRKYASKAKNLADDMVRNTARDLLYYAVTQDAMLIFENLSRGFGRQGKRTFMAERQYTRMEDWLTAKLAYEGLPSKTYLSKTLAQYTSKTCSNCGFTITSADYDRVLEKLKKTATGWMTTINGKELKVEGQITYYNRYKRQNVVKDLSVELDRLSEESVNNDISSWTKGRSGEALSLLKKRFSHRPVQEKFVCLNCGFETHADEQAALNIARSWLFLRSQEYKKYQTNKTTGNTDKRAFVETWQSFYRKKLKEVWKPAV

SEQ ID NO: 45602 - protein, 978 aa, synthetic construct
  REGION 1..978: note = engineered CasX variant
QEIKRINKIRRRLVKDSNTKKAGKTGPMKTLLVRVMTPDLRERLENLRKKPENIPQPISNTSRANLNKLLTDYTEMKKAILHVYWEEFQKDPVGLMSRVAQPASKKIDQNKLKPEMDEKGNLTTAGFACSQCGQPLFVYKLEQVSEKGKAYTNYFGRCNVAEHEKLILLAQLKPEKDSDEAVTYSLGKFGQRALDFYSIHVTKESTHPVKPLAQIAGNRYASSPVGKALSDACMGTIASFLSKYQDIIIEHQKVVKGNQKRLESLRELAGKENLEYPSVTLPPQPHTKEGVDAYNEVIARVRMWVNLNLWQKLKLSRDDAKPLLRLKGFPSFPLVERQANEVDWWDMVCNVKKLINEKKEDGKVFWQNLAGYKRQEALRPYLSSEEDRKKGKKFARYQLGDLLWHLEKKHGEDWGKVYDEAWERIDKKVEGLSKHIKLEEERRSEDAQSKAALTDWLRAKASFVIEGLKEADKDEFCRCELKLQKWYGDLRGKPFAIEAENSILDISGFSKQYNCAFIWQKDGVKKLNLYLIINYFKGGKLRFKKIKPEAFEANRFYTVINKKSGEIVPMEVNFNFDDPNLIILPLAFGKRQGREFIWNDLLSLETGSLKLANGRVIEKTLYNRRTRQDEPALFVALTFERREVLDSSNIKPMNLIGVDRGENIPAVIALTDPEGCPLSRFKDSLGNPTHILRIRESYKEKQRTIQAKKEVEQRRAGGYSRKYASKAKNLADDMVRNTARDLLYYAVTQDAMLIFENLSRGFGRQGKRTFMAERQYTRMEDWLTAKLAYEGLPSKTYLSKTLAQYTSKTCSNCGFTITSADYDRVLEKLKKTATGWMTTINGKELKVEGQITYYNRYKRQNVVKDLSVELDRLSEESVNNDISSWTKGRSGEALSLLKKRFSHRPVQEKFVCLNCGFETHADEQAALNIARSWLFLRSQEYKKYQTNKTTGNTDKRAFVETWQSFYRKKLKEVWKPAV

SEQ ID NO: 45603 - protein, 978 aa, synthetic construct
  REGION 1..978: note = engineered CasX variant
QEIKRINKIRRRLVKDSNTKKAGKTGPMKTLLVRVMTPDLRERLENLRKKPENIPQPISNTSRANLNKLLTDYTEMKKAILHVYWEEFQKDPVGLMSRVAQPASKKIDQNKLKPEMDEKGNLTTAGFACSQCGQPLFVYKLEQVSEKGKAYTNYFGRCNVAEHEKLILLAQLKPEKDSDEAVTYSLGKFGQRALDFYSIHVTKESTHPVKPLAQIAGNRYASTPVGKALSDACMGTIASFLSKYQDIIIEHQKVVKGNQKRLESLRELAGKENLEYPSVTLPPQPHTKEGVDAYNEVIARVRMWVNLNLWQKLKLSRDDAKPLLRLKGFPSFPLVERQANEVDWWDMVCNVKKLINEKKEDGKVFWQNLAGYKRQEALRPYLSSEEDRKKGKKFARYQLGDLLWHLEKKHGEDWGKVYDEAWERIDKKVEGLSKHIKLEEERRSEDAQSKAALTDWLRAKASFVIEGLKEADKDEFCRCELKLQKWYGDLRGKPFAIEAENSILDISGFSKQYNCAFIWQKDGVKKLNLYLIINYFKGGKLRFKKIKPEAFEANRFYTVINKKSGEIVPMEVNFNFDDPNLIILPLAFGKRQGREFIWNDLLSLETGSLKLANGRVIEKTLYNRRTRQDEPALFVALTFERREVLDSSNIKPMNLIGVDRGENIPAVIALTDPEGCPLSRFKDSLGNPTHILRIRESYKEKQRTIQAKKEVEQRRAGGYSRKYASKAKNLADDMVRNTARDLLYYAVTQDAMLIFENLSRGFGRQGKRTFMAERQYTRMEDWLTAKLAYEGLPSKTYLSKTLAQYTSKTCSNCGFTITSADYDRVLEKLKKTATGWMTTINGKELKVEGQITYYNRYKRQNVVKDLSVELDRLSEESVNNDISSWTKGRSGEALSLLKKRFSHRPVQEKFVCLNCGFETHADEQAALNIARSWLFLRSQEYKKYQTNKTTGNTDKRAFVETWQSFYRKKLKEVWKPAV

SEQ ID NO: 45604 - protein, 978 aa, synthetic construct
  REGION 1..978: note = engineered CasX variant
QEIKRINKIRRRLVKDSNTKKAGKTGPMKTLLVRVMTPDLRERLENLRKKPENIPQPISNTSRANLNKLLTDYTEMKKAILHVYWEEFQKDPVGLMSRVAQPASKKIDQNKLKPEMDEKGNLTTAGFACSQCGQPLFVYKLEQVSEKGKAYTNYFGRCNVAEHEKLILLAQLKPEKDSDEAVTYSLGKFGQRALDFYSIHVTKESTHPVKPLAQIAGNRYASAPVGKALSDACMGTIASFLSKYQDIIIEHQKVVKGNQKRLESLRELAGKENLEYPSVTLPPQPHTKEGVDAYNEVIARVRMWVNLNLWQKLKLSRDDAKPLLRLKGFPSFPLVERQANEVDWWDMVCNVKKLINEKKEDGKVFWQNLAGYKRQEALRPYLSSEEDRKKGKKFARYQLGDLLWHLEKKHGEDWGKVYDEAWERIDKKVEGLSKHIKLEEERRSEDAQSKAALTDWLRAKASFVIEGLKEADKDEFCRCELKLQKWYGDLRGKPFAIEAENSILDISGFSKQYNCAFIWQKDGVKKLNLYLIINYFKGGKLRFKKIKPEAFEANRFYTVINKKSGEIVPMEVNFNFDDPNLIILPLAFGKRQGREFIWNDLLSLETGSLKLANGRVIEKTLYNRRTRQDEPALFVALTFERREVLDSSNIKPMNLIGVDRGENIPAVIALTDPEGCPLSRFKDSLGNPTHILRIRESYKEKQRTIQAKKEVEQRRAGGYSRKYASKAKNLADDMVRNTARDLLYYAVTQDAMLIFENLSRGFGRQGKRTFMAERQYTRMEDWLTAKLAYEGLPSKTYLSKTLAQYTSKTCSNCGFTITSADYDRVLEKLKKTATGWMTTINGKELKVEGQITYYNRYKRQNVVKDLSVELDRLSEESVNNDISSWTKGRSGEALSLLKKRFSHRPVQEKFVCLNCGFETHADEQAALNIARSWLFLRSQEYKKYQTNKTTGNTDKRAFVETWQSFYRKKLKEVWKPAV

SEQ ID NO: 45605 - protein, 978 aa, synthetic construct
  REGION 1..978: note = engineered CasX variant
QEIKRINKIRRRLVKDSNTKKAGKTGPMKTLLVRVMTPDLRERLENLRKKPENIPQPISNTSRANLNKLLTDYTEMKKAILHVYWEEFQKDPVGLMSRVAQPASKKIDQNKLKPEMDEKGNLTTAGFACSQCGQPLFVYKLEQVSEKGKAYTNYFGRCNVAEHEKLILLAQLKPEKDSDEAVTYSLGKFGQRALDFYSIHVTKESTHPVKPLAQIAGNRYASVPVGKALSDACMGTIASFLSKYQDIIIEHQKVVKGNQKRLESLRELAGKENLEYPSVTLPPQPHTKEGVDAYNEVIARVRMWVNLNLWQKLKLSRDDAKPLLRLKGFPSFPLVERQANEVDWWDMVCNVKKLINEKKEDGKVFWQNLAGYKRQEALRPYLSSEEDRKKGKKFARYQLGDLLWHLEKKHGEDWGKVYDEAWERIDKKVEGLSKHIKLEEERRSEDAQSKAALTDWLRAKASFVIEGLKEADKDEFCRCELKLQKWYGDLRGKPFAIEAENSILDISGFSKQYNCAFIWQKDGVKKLNLYLIINYFKGGKLRFKKIKPEAFEANRFYTVINKKSGEIVPMEVNFNFDDPNLIILPLAFGKRQGREFIWNDLLSLETGSLKLANGRVIEKTLYNRRTRQDEPALFVALTFERREVLDSSNIKPMNLIGVDRGENIPAVIALTDPEGCPLSRFKDSLGNPTHILRIRESYKEKQRTIQAKKEVEQRRAGGYSRKYASKAKNLADDMVRNTARDLLYYAVTQDAMLIFENLSRGFGRQGKRTFMAERQYTRMEDWLTAKLAYEGLPSKTYLSKTLAQYTSKTCSNCGFTITSADYDRVLEKLKKTATGWMTTINGKELKVEGQITYYNRYKRQNVVKDLSVELDRLSEESVNNDISSWTKGRSGEALSLLKKRFSHRPVQEKFVCLNCGFETHADEQAALNIARSWLFLRSQEYKKYQTNKTTGNTDKRAFVETWQSFYRKKLKEVWKPAV

SEQ ID NO: 45606 - protein, 978 aa, synthetic construct
  REGION 1..978: note = engineered CasX variant
QEIKRINKIRRRLVKDSNTKKAGKTGPMKTLLVRVMTPDLRERLENLRKKPENIPQPISNTSRANLNKLLTDYTEMKKAILHVYWEEFQKDPVGLMSRVAQPASKKIDQNKLKPEMDEKGNLTTAGFACSQCGQPLFVYKLEQVSEKGKAYTNYFGRCNVAEHEKLIKLAQLKPEKDSDEAVTYSLGKFGQRALDFYSIHVTKESTHPVKPLAQIAGNRYASGPVGKALSDACMGTIASFLSKYQDIIIEHQKVVKGNQKRLESLRELAGKENLEYPSVTLPPQPHTKEGVDAYNEVIARVRMWVNLNLWQKLKLSRDDAKPLLRLKGFPSFPLVERQANEVDWWDMVCNVKKLINEKKEDGKVFWQNLAGYKRQEALRPYLSSEEDRKKGKKFARYQLGDLLWHLEKKHGEDWGKVYDEAWERIDKKVEGLSKHIKLEEERRSEDAQSKAALTDWLRAKASFVIEGLKEADKDEFCRCELKLQKWYGDLRGKPFAIEAENSILDISGFSKQYNCAFIWQKDGVKKLNLYLIINYFKGGKLRFKKIKPEAFEANRFYTVINKKSGEIVPMEVNFNFDDPNLIILPLAFGKRQGREFIWNDLLSLETGSLKLANGRVIEKTLYNRRTRQDEPALFVALTFERREVLDSSNIKPMNLIGVDRGENIPAVIALTDPEGCPLSRFKDSLGNPTHILRIRESYKEKQRTIQAKKEVEQRRAGGYSRKYASKAKNLADDMVRNTARDLLYYAVTQDAMLIFENLSRGFGRQGKRTFMAERQYTRMEDWLTAKLAYEGLPSKTYLSKTLAQYTSKTCSNCGFTITSADYDRVLEKLKKTATGWMTTINGKELKVEGQITYYNRYKRQNVVKDLSVELDRLSEESVNNDISSWTKGRSGEALSLLKKRFSHRPVQEKFVCLNCGFETHADEQAALNIARSWLFLRSQEYKKYQTNKTTGNTDKRAFVETWQSFYRKKLKEVWKPAV

SEQ ID NO: 45607 - protein, 977 aa, synthetic construct
  REGION 1..977: note = engineered CasX variant
QEIKRINKIRRRLVKDSNTKKAGKTGPMKTLLVRVMTPDLRERLENLRKKPENIPQPISNTSRANLNKLLTDYTEMKKAILHVYWEEFQKDPVGLMSRVAQPASKKIDQNKLKPEMDEKGNLTTAGFACSQCGQPLFVYKLEQVSEKGKAYTNYFGRCNVAEHEKLILLAQLKPEKDSDEAVTYSLGKFGQRALDFYSIHVTKESTHPVKPLAQIAGNRYASPVGKALSDACMGTIASFLSKYQDIIIEHQKVVKGNQKRLESLRELAGKENLEYPSVTLPPQPHTKEGVDAYNEVIARVRMWVNLNLWQKLKLSRDDAKPLLRLKGFPSFPLVERQANEVDWWDMVCNVKKLINEKKEDGKVFWQNLAGYKRQEALRPYLSSEEDRKKGKKFARYQLGDLLWHLEKKHGEDWGKVYDEAWERIDKKVEGLSKHIKLEEERRSEDAQSKAALTDWLRAKASFVIEGLKEADKDEFCRCELKLQKWYGDLRGKPFAIEAENSILDISGFSKQYNCAFIWQKDGVKKLNLYLIINYFKGGKLRFKKIKPEAFEANRFYTVINKKSGEIVPMEVNFNFDDPNLIILPLAFGKRQGREFIWNDLLSLETGSLKLANGRVIEKTLYNRRTRQDEPALFVALTFERREVLDSSNIKPMNLIGVDRGENIPAVIALTDPEGCPLSRFKDSLGNPTHILRIRESYKEKQRTIQAKKEVEQRRAGGYSRKYASKAKNLADDMVRNTARDLLYYAVTQDAMLIFENLSRGFGRQGKRTFMAERQYTRMEDWLTAKLAYEGLPSKTYLSKTLAQYTSKTCSNCGFTITSADYDRVLEKLKKTATGWMTTINGKELKVEGQITYYNRYKRQNVVKDLSVELDRLSEESVNNDISSWTKGRSGEALSLLKKRFSHRPVQEKFVCLNCGFETHADEQAALNIARSWLFLRSQEYKKYQTNKTTGNTDKRAFVETWQSFYRKKLKEVWKPAV

SEQ ID NO: 45608 - protein, 978 aa, synthetic construct
  REGION 1..978: note = engineered CasX variant
QEIKRINKIRRRLVKDSNTKKAGKTGPMKTLLVRVMTPDLRERLENLRKKPENIPQPISNTSRANLNKLLTDYTEMKKAILHVYWEEFQKDPVGLMSRVAQPASKKIDQNKLKPEMDEKGNLTTAGFACSQCGQPLFVYKLEQVSEKGKAYTNYFGRCNVAEHEKLILLAQLKPEKDSDEAVTYSLGKFGQRALDFYSIHVTKESTHPVKPLAQIAGNRYASYPVGKALSDACMGTIASFLSKYQDIIIEHQKVVKGNQKRLESLRELAGKENLEYPSVTLPPQPHTKEGVDAYNEVIARVRMWVNLNLWQKLKLSRDDAKPLLRLKGFPSFPLVERQANEVDWWDMVCNVKKLINEKKEDGKVFWQNLAGYKRQEALRPYLSSEEDRKKGKKFARYQLGDLLLHLYKKHGEDWGKVYDEAWERIDKKVEGLSKHIKLEEERRSEDAQSKAALTDWLRAKASFVIEGLKEADKDEFCRCELKLQKWYGDLRGKPFAIEAENSILDISGFSKQYNCAFIWQKDGVKKLNLYLIINYFKGGKLRFKKIKPEAFEANRFYTVINKKSGEIVPMEVNFNFDDPNLIILPLAFGKRQGREFIWNDLLSLETGSLKLANGRVIEKTLYNRRTRQDEPALFVALTFERREVLDSSNIKPMNLIGVDRGENIPAVIALTDPEGCPLSRFKDSLGNPTHILRIRESYKEKQRTIQAKKEVEQRRAGGYSRKYASKAKNLADDMVRNTARDLLYYAVTQDAMLIFENLSRGFGRQGKRTFMAERQYTRMEDWLTAKLAYEGLPSKTYLSKTLAQYTSKTCSNCGFTITSADYDRVLEKLKKTATGWMTTINGKELKVEGQITYYNRYKRQNVVKDLSVELDRLSEESVNNDISSWTKGRSGEALSLLKKRFSHRPVQEKFVCLNCGFETHADEQAALNIARSWLFLRSQEYKKYQTNKTTGNTDKRAFVETWQSFYRKKLKEVWKPAV

SEQ ID NO: 45609 - protein, 978 aa, synthetic construct
  REGION 1..978: note = engineered CasX variant
QEIKRINKIRRRLVKDSNTKKAGKTGPMKTLLVRVMTPDLRERLENLRKKPENIPQPISNTSRANLNKLLTDYTEMKKAILHVYWEEFQKDPVGLMSRVAQPASKKIDQNKLKPEMDEKGNLTTAGFACSQCGQPLFVYKLEQVSEKGKAYTNYFGRCNVAEHEKLILLAQLKPEKDSDEAVTYSLGKFGQRALDFYSIHVTKESTHPVKPLAQIAGNRYASHPVGKALSDACMGTIASFLSKYQDIIIEHQKVVKGNQKRLESLRELAGKENLEYPSVTLPPQPHTKEGVDAYNEVIARVRMWVNLNLWQKLKLSRDDAKPLLRLKGFPSFPLVERQANEVDWWDMVCNVKKLINEKKEDGKVFWQNLAGYKRQEALRPYLSSEEDRKKGKKFARYQLGDLLLHLYKKHGEDWGKVYDEAWERIDKKVEGLSKHIKLEEERRSEDAQSKAALTDWLRAKASFVIEGLKEADKDEFCRCELKLQKWYGDLRGKPFAIEAENSILDISGFSKQYNCAFIWQKDGVKKLNLYLIINYFKGGKLRFKKIKPEAFEANRFYTVINKKSGEIVPMEVNFNFDDPNLIILPLAFGKRQGREFIWNDLLSLETGSLKLANGRVIEKTLYNRRTRQDEPALFVALTFERREVLDSSNIKPMNLIGVDRGENIPAVIALTDPEGCPLSRFKDSLGNPTHILRIRESYKEKQRTIQAKKEVEQRRAGGYSRKYASKAKNLADDMVRNTARDLLYYAVTQDAMLIFENLSRGFGRQGKRTFMAERQYTRMEDWLTAKLAYEGLPSKTYLSKTLAQYTSKTCSNCGFTITSADYDRVLEKLKKTATGWMTTINGKELKVEGQITYYNRYKRQNVVKDLSVELDRLSEESVNNDISSWTKGRSGEALSLLKKRFSHRPVQEKFVCLNCGFETHADEQAALNIARSWLFLRSQEYKKYQTNKTTGNTDKRAFVETWQSFYRKKLKEVWKPAV

SEQ ID NO: 45610 - protein, 978 aa, synthetic construct
  REGION 1..978: note = engineered CasX variant
QEIKRINKIRRRLVKDSNTKKAGKTGPMKTLLVRVMTPDLRERLENLRKKPENIPQPISNTSRANLNKLLTDYTEMKKAILHVYWEEFQKDPVGLMSRVAQPASKKIDQNKLKPEMDEKGNLTTAGFACSQCGQPLFVYKLEQVSEKGKAYTNYFGRCNVAEHEKLILLAQLKPEKDSDEAVTYSLGKFGQRALDFYSIHVTKESTHPVKPLAQIAGNRYASSPVGKALSDACMGTIASFLSKYQDIIIEHQKVVKGNQKRLESLRELAGKENLEYPSVTLPPQPHTKEGVDAYNEVIARVRMWVNLNLWQKLKLSRDDAKPLLRLKGFPSFPLVERQANEVDWWDMVCNVKKLINEKKEDGKVFWQNLAGYKRQEALRPYLSSEEDRKKGKKFARYQLGDLLLHLYKKHGEDWGKVYDEAWERIDKKVEGLSKHIKLEEERRSEDAQSKAALTDWLRAKASFVIEGLKEADKDEFCRCELKLQKWYGDLRGKPFAIEAENSILDISGFSKQYNCAFIWQKDGVKKLNLYLIINYFKGGKLRFKKIKPEAFEANRFYTVINKKSGEIVPMEVNFNFDDPNLIILPLAFGKRQGREFIWNDLLSLETGSLKLANGRVIEKTLYNRRTRQDEPALFVALTFERREVLDSSNIKPMNLIGVDRGENIPAVIALTDPEGCPLSRFKDSLGNPTHILRIRESYKEKQRTIQAKKEVEQRRAGGYSRKYASKAKNLADDMVRNTARDLLYYAVTQDAMLIFENLSRGFGRQGKRTFMAERQYTRMEDWLTAKLAYEGLPSKTYLSKTLAQYTSKTCSNCGFTITSADYDRVLEKLKKTATGWMTTINGKELKVEGQITYYNRYKRQNVVKDLSVELDRLSEESVNNDISSWTKGRSGEALSLLKKRFSHRPVQEKFVCLNCGFETHADEQAALNIARSWLFLRSQEYKKYQTNKTTGNTDKRAFVETWQSFYRKKLKEVWKPAV

SEQ ID NO: 45611 - protein, 978 aa, synthetic construct
  REGION 1..978: note = engineered CasX variant
QEIKRINKIRRRLVKDSNTKKAGKTGPMKTLLVRVMTPDLRERLENLRKKPENIPQPISNTSRANLNKLLTDYTEMKKAILHVYWEEFQKDPVGLMSRVAQPASKKIDQNKLKPEMDEKGNLTTAGFACSQCGQPLFVYKLEQVSEKGKAYTNYFGRCNVAEHEKLILLAQLKPEKDSDEAVTYSLGKFGQRALDFYSIHVTKESTHPVKPLAQIAGNRYASTPVGKALSDACMGTIASFLSKYQDIIIEHQKVVKGNQKRLESLRELAGKENLEYPSVTLPPQPHTKEGVDAYNEVIARVRMWVNLNLWQKLKLSRDDAKPLLRLKGFPSFPLVERQANEVDWWDMVCNVKKLINEKKEDGKVFWQNLAGYKRQEALRPYLSSEEDRKKGKKFARYQLGDLLLHLYKKHGEDWGKVYDEAWERIDKKVEGLSKHIKLEEERRSEDAQSKAALTDWLRAKASFVIEGLKEADKDEFCRCELKLQKWYGDLRGKPFAIEAENSILDISGFSKQYNCAFIWQKDGVKKLNLYLIINYFKGGKLRFKKIKPEAFEANRFYTVINKKSGEIVPMEVNFNFDDPNLIILPLAFGKRQGREFIWNDLLSLETGSLKLANGRVIEKTLYNRRTRQDEPALFVALTFERREVLDSSNIKPMNLIGVDRGENIPAVIALTDPEGCPLSRFKDSLGNPTHILRIRESYKEKQRTIQAKKEVEQRRAGGYSRKYASKAKNLADDMVRNTARDLLYYAVTQDAMLIFENLSRGFGRQGKRTFMAERQYTRMEDWLTAKLAYEGLPSKTYLSKTLAQYTSKTCSNCGFTITSADYDRVLEKLKKTATGWMTTINGKELKVEGQITYYNRYKRQNVVKDLSVELDRLSEESVNNDISSWTKGRSGEALSLLKKRFSHRPVQEKFVCLNCGFETHADEQAALNIARSWLFLRSQEYKKYQTNKTTGNTDKRAFVETWQSFYRKKLKEVWKPAV

SEQ ID NO: 45612 - protein, 978 aa, synthetic construct
  REGION 1..978: note = engineered CasX variant
QEIKRINKIRRRLVKDSNTKKAGKTGPMKTLLVRVMTPDLRERLENLRKKPENIPQPISNTSRANLNKLLTDYTEMKKAILHVYWEEFQKDPVGLMSRVAQPASKKIDQNKLKPEMDEKGNLTTAGFACSQCGQPLFVYKLEQVSEKGKAYTNYFGRCNVAEHEKLILLAQLKPEKDSDEAVTYSLGKFGQRALDFYSIHVTKESTHPVKPLAQIAGNRYASAPVGKALSDACMGTIASFLSKYQDIIIEHQKVVKGNQKRLESLRELAGKENLEYPSVTLPPQPHTKEGVDAYNEVIARVRMWVNLNLWQKLKLSRDDAKPLLRLKGFPSFPLVERQANEVDWWDMVCNVKKLINEKKEDGKVFWQNLAGYKRQEALRPYLSSEEDRKKGKKFARYQLGDLLLHLYKKHGEDWGKVYDEAWERIDKKVEGLSKHIKLEEERRSEDAQSKAALTDWLRAKASFVIEGLKEADKDEFCRCELKLQKWYGDLRGKPFAIEAENSILDISGFSKQYNCAFIWQKDGVKKLNLYLIINYFKGGKLRFKKIKPEAFEANRFYTVINKKSGEIVPMEVNFNFDDPNLIILPLAFGKRQGREFIWNDLLSLETGSLKLANGRVIEKTLYNRRTRQDEPALFVALTFERREVLDSSNIKPMNLIGVDRGENIPAVIALTDPEGCPLSRFKDSLGNPTHILRIRESYKEKQRTIQAKKEVEQRRAGGYSRKYASKAKNLADDMVRNTARDLLYYAVTQDAMLIFENLSRGFGRQGKRTFMAERQYTRMEDWLTAKLAYEGLPSKTYLSKTLAQYTSKTCSNCGFTITSADYDRVLEKLKKTATGWMTTINGKELKVEGQITYYNRYKRQNVVKDLSVELDRLSEESVNNDISSWTKGRSGEALSLLKKRFSHRPVQEKFVCLNCGFETHADEQAALNIARSWLFLRSQEYKKYQTNKTTGNTDKRAFVETWQSFYRKKLKEVWKPAV

SEQ ID NO: 45613 - protein, 978 aa, synthetic construct
  REGION 1..978: note = engineered CasX variant
QEIKRINKIRRRLVKDSNTKKAGKTGPMKTLLVRVMTPDLRERLENLRKKPENIPQPISNTSRANLNKLLTDYTEMKKAILHVYWEEFQKDPVGLMSRVAQPASKKIDQNKLKPEMDEKGNLTTAGFACSQCGQPLFVYKLEQVSEKGKAYTNYFGRCNVAEHEKLILLAQLKPEKDSDEAVTYSLGKFGQRALDFYSIHVTKESTHPVKPLAQIAGNRYASVPVGKALSDACMGTIASFLSKYQDIIIEHQKVVKGNQKRLESLRELAGKENLEYPSVTLPPQPHTKEGVDAYNEVIARVRMWVNLNLWQKLKLSRDDAKPLLRLKGFPSFPLVERQANEVDWWDMVCNVKKLINEKKEDGKVFWQNLAGYKRQEALRPYLSSEEDRKKGKKFARYQLGDLLLHLYKKHGEDWGKVYDEAWERIDKKVEGLSKHIKLEEERRSEDAQSKAALTDWLRAKASFVIEGLKEADKDEFCRCELKLQKWYGDLRGKPFAIEAENSILDISGFSKQYNCAFIWQKDGVKKLNLYLIINYFKGGKLRFKKIKPEAFEANRFYTVINKKSGEIVPMEVNFNFDDPNLIILPLAFGKRQGREFIWNDLLSLETGSLKLANGRVIEKTLYNRRTRQDEPALFVALTFERREVLDSSNIKPMNLIGVDRGENIPAVIALTDPEGCPLSRFKDSLGNPTHILRIRESYKEKQRTIQAKKEVEQRRAGGYSRKYASKAKNLADDMVRNTARDLLYYAVTQDAMLIFENLSRGFGRQGKRTFMAERQYTRMEDWLTAKLAYEGLPSKTYLSKTLAQYTSKTCSNCGFTITSADYDRVLEKLKKTATGWMTTINGKELKVEGQITYYNRYKRQNVVKDLSVELDRLSEESVNNDISSWTKGRSGEALSLLKKRFSHRPVQEKFVCLNCGFETHADEQAALNIARSWLFLRSQEYKKYQTNKTTGNTDKRAFVETWQSFYRKKLKEVWKPAV

SEQ ID NO: 45614 - protein, 978 aa, synthetic construct
  REGION 1..978: note = engineered CasX variant
QEIKRINKIRRRLVKDSNTKKAGKTGPMKTLLVRVMTPDLRERLENLRKKPENIPQPISNTSRANLNKLLTDYTEMKKAILHVYWEEFQKDPVGLMSRVAQPASKKIDQNKLKPEMDEKGNLTTAGFACSQCGQPLFVYKLEQVSEKGKAYTNYFGRCNVAEHEKLIKLAQLKPEKDSDEAVTYSLGKFGQRALDFYSIHVTKESTHPVKPLAQIAGNRYASGPVGKALSDACMGTIASFLSKYQDIIIEHQKVVKGNQKRLESLRELAGKENLEYPSVTLPPQPHTKEGVDAYNEVIARVRMWVNLNLWQKLKLSRDDAKPLLRLKGFPSFPLVERQANEVDWWDMVCNVKKLINEKKEDGKVFWQNLAGYKRQEALRPYLSSEEDRKKGKKFARYQLGDLLLHLYKKHGEDWGKVYDEAWERIDKKVEGLSKHIKLEEERRSEDAQSKAALTDWLRAKASFVIEGLKEADKDEFCRCELKLQKWYGDLRGKPFAIEAENSILDISGFSKQYNCAFIWQKDGVKKLNLYLIINYFKGGKLRFKKIKPEAFEANRFYTVINKKSGEIVPMEVNFNFDDPNLIILPLAFGKRQGREFIWNDLLSLETGSLKLANGRVIEKTLYNRRTRQDEPALFVALTFERREVLDSSNIKPMNLIGVDRGENIPAVIALTDPEGCPLSRFKDSLGNPTHILRIRESYKEKQRTIQAKKEVEQRRAGGYSRKYASKAKNLADDMVRNTARDLLYYAVTQDAMLIFENLSRGFGRQGKRTFMAERQYTRMEDWLTAKLAYEGLPSKTYLSKTLAQYTSKTCSNCGFTITSADYDRVLEKLKKTATGWMTTINGKELKVEGQITYYNRYKRQNVVKDLSVELDRLSEESVNNDISSWTKGRSGEALSLLKKRFSHRPVQEKFVCLNCGFETHADEQAALNIARSWLFLRSQEYKKYQTNKTTGNTDKRAFVETWQSFYRKKLKEVWKPAV

SEQ ID NO: 45615 - protein, 977 aa, synthetic construct
  REGION 1..977: note = engineered CasX variant
QEIKRINKIRRRLVKDSNTKKAGKTGPMKTLLVRVMTPDLRERLENLRKKPENIPQPISNTSRANLNKLLTDYTEMKKAILHVYWEEFQKDPVGLMSRVAQPASKKIDQNKLKPEMDEKGNLTTAGFACSQCGQPLFVYKLEQVSEKGKAYTNYFGRCNVAEHEKLILLAQLKPEKDSDEAVTYSLGKFGQRALDFYSIHVTKESTHPVKPLAQIAGNRYASPVGKALSDACMGTIASFLSKYQDIIIEHQKVVKGNQKRLESLRELAGKENLEYPSVTLPPQPHTKEGVDAYNEVIARVRMWVNLNLWQKLKLSRDDAKPLLRLKGFPSFPLVERQANEVDWWDMVCNVKKLINEKKEDGKVFWQNLAGYKRQEALRPYLSSEEDRKKGKKFARYQLGDLLLHLYKKHGEDWGKVYDEAWERIDKKVEGLSKHIKLEEERRSEDAQSKAALTDWLRAKASFVIEGLKEADKDEFCRCELKLQKWYGDLRGKPFAIEAENSILDISGFSKQYNCAFIWQKDGVKKLNLYLIINYFKGGKLRFKKIKPEAFEANRFYTVINKKSGEIVPMEVNFNFDDPNLIILPLAFGKRQGREFIWNDLLSLETGSLKLANGRVIEKTLYNRRTRQDEPALFVALTFERREVLDSSNIKPMNLIGVDRGENIPAVIALTDPEGCPLSRFKDSLGNPTHILRIRESYKEKQRTIQAKKEVEQRRAGGYSRKYASKAKNLADDMVRNTARDLLYYAVTQDAMLIFENLSRGFGRQGKRTFMAERQYTRMEDWLTAKLAYEGLPSKTYLSKTLAQYTSKTCSNCGFTITSADYDRVLEKLKKTATGWMTTINGKELKVEGQITYYNRYKRQNVVKDLSVELDRLSEESVNNDISSWTKGRSGEALSLLKKRFSHRPVQEKFVCLNCGFETHADEQAALNIARSWLFLRSQEYKKYQTNKTTGNTDKRAFVETWQSFYRKKLKEVWKPAV

SEQ ID NO: 45616 - protein, 978 aa, synthetic construct
  REGION 1..978: note = engineered CasX variant
QEIKRINKIRRRLVKDSNTKKAGKTGPMKTLLVRVMTPDLRERLENLRKKPENIPQPISNTSRANLNKLLTDYTEMKKAILHVYWEEFQKDPVGLMSRVAQPASKKIDQNKLKPEMDEKGNLTTAGFACSQCGQPLFVYKLEQVSEKGKAYTNYFGRCNVAEHEKLILLAQLKPEKDSDEAVTYSLGKFGQRALDFYSIHVTKESTHPVKPLAQIAGNRYASYPVGKALSDACMGTIASFLSKYQDIIIEHQKVVKGNQKRLESLRELAGKENLEYPSVTLPPQPHTKEGVDAYNEVIARVRMWVNLNLWQKLKLSRDDAKPLLRLKGFPSFPLVERQANEVDWWDMVCNVKKLINEKKEDGKVFWQNLAGYKRQEALRPYLSSEEDRKKGKKFARYQLGDLLLHLEKKHPEDWGKVYDEAWERIDKKVEGLSKHIKLEEERRSEDAQSKAALTDWLRAKASFVIEGLKEADKDEFCRCELKLQKWYGDLRGKPFAIEAENSILDISGFSKQYNCAFIWQKDGVKKLNLYLIINYFKGGKLRFKKIKPEAFEANRFYTVINKKSGEIVPMEVNFNFDDPNLIILPLAFGKRQGREFIWNDLLSLETGSLKLANGRVIEKTLYNRRTRQDEPALFVALTFERREVLDSSNIKPMNLIGVDRGENIPAVIALTDPEGCPLSRFKDSLGNPTHILRIRESYKEKQRTIQAKKEVEQRRAGGYSRKYASKAKNLADDMVRNTARDLLYYAVTQDAMLIFENLSRGFGRQGKRTFMAERQYTRMEDWLTAKLAYEGLPSKTYLSKTLAQYTSKTCSNCGFTITSADYDRVLEKLKKTATGWMTTINGKELKVEGQITYYNRYKRQNVVKDLSVELDRLSEESVNNDISSWTKGRSGEALSLLKKRFSHRPVQEKFVCLNCGFETHADEQAALNIARSWLFLRSQEYKKYQTNKTTGNTDKRAFVETWQSFYRKKLKEVWKPAV

SEQ ID NO: 45617 - protein, 978 aa, synthetic construct
  REGION 1..978: note = engineered CasX variant
QEIKRINKIRRRLVKDSNTKKAGKTGPMKTLLVRVMTPDLRERLENLRKKPENIPQPISNTSRANLNKLLTDYTEMKKAILHVYWEEFQKDPVGLMSRVAQPASKKIDQNKLKPEMDEKGNLTTAGFACSQCGQPLFVYKLEQVSEKGKAYTNYFGRCNVAEHEKLILLAQLKPEKDSDEAVTYSLGKFGQRALDFYSIHVTKESTHPVKPLAQIAGNRYASHPVGKALSDACMGTIASFLSKYQDIIIEHQKVVKGNQKRLESLRELAGKENLEYPSVTLPPQPHTKEGVDAYNEVIARVRMWVNLNLWQKLKLSRDDAKPLLRLKGFPSFPLVERQANEVDWWDMVCNVKKLINEKKEDGKVFWQNLAGYKRQEALRPYLSSEEDRKKGKKFARYQLGDLLLHLEKKHPEDWGKVYDEAWERIDKKVEGLSKHIKLEEERRSEDAQSKAALTDWLRAKASFVIEGLKEADKDEFCRCELKLQKWYGDLRGKPFAIEAENSILDISGFSKQYNCAFIWQKDGVKKLNLYLIINYFKGGKLRFKKIKPEAFEANRFYTVINKKSGEIVPMEVNFNFDDPNLIILPLAFGKRQGREFIWNDLLSLETGSLKLANGRVIEKTLYNRRTRQDEPALFVALTFERREVLDSSNIKPMNLIGVDRGENIPAVIALTDPEGCPLSRFKDSLGNPTHILRIRESYKEKQRTIQAKKEVEQRRAGGYSRKYASKAKNLADDMVRNTARDLLYYAVTQDAMLIFENLSRGFGRQGKRTFMAERQYTRMEDWLTAKLAYEGLPSKTYLSKTLAQYTSKTCSNCGFTITSADYDRVLEKLKKTATGWMTTINGKELKVEGQITYYNRYKRQNVVKDLSVELDRLSEESVNNDISSWTKGRSGEALSLLKKRFSHRPVQEKFVCLNCGFETHADEQAALNIARSWLFLRSQEYKKYQTNKTTGNTDKRAFVETWQSFYRKKLKEVWKPAV

SEQ ID NO: 45618 - protein, 978 aa, synthetic construct
  REGION 1..978: note = engineered CasX variant
QEIKRINKIRRRLVKDSNTKKAGKTGPMKTLLVRVMTPDLRERLENLRKKPENIPQPISNTSRANLNKLLTDYTEMKKAILHVYWEEFQKDPVGLMSRVAQPASKKIDQNKLKPEMDEKGNLTTAGFACSQCGQPLFVYKLEQVSEKGKAYTNYFGRCNVAEHEKLILLAQLKPEKDSDEAVTYSLGKFGQRALDFYSIHVTKESTHPVKPLAQIAGNRYASSPVGKALSDACMGTIASFLSKYQDIIIEHQKVVKGNQKRLESLRELAGKENLEYPSVTLPPQPHTKEGVDAYNEVIARVRMWVNLNLWQKLKLSRDDAKPLLRLKGFPSFPLVERQANEVDWWDMVCNVKKLINEKKEDGKVFWQNLAGYKRQEALRPYLSSEEDRKKGKKFARYQLGDLLLHLEKKHPEDWGKVYDEAWERIDKKVEGLSKHIKLEEERRSEDAQSKAALTDWLRAKASFVIEGLKEADKDEFCRCELKLQKWYGDLRGKPFAIEAENSILDISGFSKQYNCAFIWQKDGVKKLNLYLIINYFKGGKLRFKKIKPEAFEANRFYTVINKKSGEIVPMEVNFNFDDPNLIILPLAFGKRQGREFIWNDLLSLETGSLKLANGRVIEKTLYNRRTRQDEPALFVALTFERREVLDSSNIKPMNLIGVDRGENIPAVIALTDPEGCPLSRFKDSLGNPTHILRIRESYKEKQRTIQAKKEVEQRRAGGYSRKYASKAKNLADDMVRNTARDLLYYAVTQDAMLIFENLSRGFGRQGKRTFMAERQYTRMEDWLTAKLAYEGLPSKTYLSKTLAQYTSKTCSNCGFTITSADYDRVLEKLKKTATGWMTTINGKELKVEGQITYYNRYKRQNVVKDLSVELDRLSEESVNNDISSWTKGRSGEALSLLKKRFSHRPVQEKFVCLNCGFETHADEQAALNIARSWLFLRSQEYKKYQTNKTTGNTDKRAFVETWQSFYRKKLKEVWKPAV

SEQ ID NO: 45619 - protein, 978 aa, synthetic construct
  REGION 1..978: note = engineered CasX variant
QEIKRINKIRRRLVKDSNTKKAGKTGPMKTLLVRVMTPDLRERLENLRKKPENIPQPISNTSRANLNKLLTDYTEMKKAILHVYWEEFQKDPVGLMSRVAQPASKKIDQNKLKPEMDEKGNLTTAGFACSQCGQPLFVYKLEQVSEKGKAYTNYFGRCNVAEHEKLILLAQLKPEKDSDEAVTYSLGKFGQRALDFYSIHVTKESTHPVKPLAQIAGNRYASTPVGKALSDACMGTIASFLSKYQDIIIEHQKVVKGNQKRLESLRELAGKENLEYPSVTLPPQPHTKEGVDAYNEVIARVRMWVNLNLWQKLKLSRDDAKPLLRLKGFPSFPLVERQANEVDWWDMVCNVKKLINEKKEDGKVFWQNLAGYKRQEALRPYLSSEEDRKKGKKFARYQLGDLLLHLEKKHPEDWGKVYDEAWERIDKKVEGLSKHIKLEEERRSEDAQSKAALTDWLRAKASFVIEGLKEADKDEFCRCELKLQKWYGDLRGKPFAIEAENSILDISGFSKQYNCAFIWQKDGVKKLNLYLIINYFKGGKLRFKKIKPEAFEANRFYTVINKKSGEIVPMEVNFNFDDPNLIILPLAFGKRQGREFIWNDLLSLETGSLKLANGRVIEKTLYNRRTRQDEPALFVALTFERREVLDSSNIKPMNLIGVDRGENIPAVIALTDPEGCPLSRFKDSLGNPTHILRIRESYKEKQRTIQAKKEVEQRRAGGYSRKYASKAKNLADDMVRNTARDLLYYAVTQDAMLIFENLSRGFGRQGKRTFMAERQYTRMEDWLTAKLAYEGLPSKTYLSKTLAQYTSKTCSNCGFTITSADYDRVLEKLKKTATGWMTTINGKELKVEGQITYYNRYKRQNVVKDLSVELDRLSEESVNNDISSWTKGRSGEALSLLKKRFSHRPVQEKFVCLNCGFETHADEQAALNIARSWLFLRSQEYKKYQTNKTTGNTDKRAFVETWQSFYRKKLKEVWKPAV

SEQ ID NO: 45620 - protein, 978 aa, synthetic construct
  REGION 1..978: note = engineered CasX variant
QEIKRINKIRRRLVKDSNTKKAGKTGPMKTLLVRVMTPDLRERLENLRKKPENIPQPISNTSRANLNKLLTDYTEMKKAILHVYWEEFQKDPVGLMSRVAQPASKKIDQNKLKPEMDEKGNLTTAGFACSQCGQPLFVYKLEQVSEKGKAYTNYFGRCNVAEHEKLILLAQLKPEKDSDEAVTYSLGKFGQRALDFYSIHVTKESTHPVKPLAQIAGNRYASAPVGKALSDACMGTIASFLSKYQDIIIEHQKVVKGNQKRLESLRELAGKENLEYPSVTLPPQPHTKEGVDAYNEVIARVRMWVNLNLWQKLKLSRDDAKPLLRLKGFPSFPLVERQANEVDWWDMVCNVKKLINEKKEDGKVFWQNLAGYKRQEALRPYLSSEEDRKKGKKFARYQLGDLLLHLEKKHPEDWGKVYDEAWERIDKKVEGLSKHIKLEEERRSEDAQSKAALTDWLRAKASFVIEGLKEADKDEFCRCELKLQKWYGDLRGKPFAIEAENSILDISGFSKQYNCAFIWQKDGVKKLNLYLIINYFKGGKLRFKKIKPEAFEANRFYTVINKKSGEIVPMEVNFNFDDPNLIILPLAFGKRQGREFIWNDLLSLETGSLKLANGRVIEKTLYNRRTRQDEPALFVALTFERREVLDSSNIKPMNLIGVDRGENIPAVIALTDPEGCPLSRFKDSLGNPTHILRIRESYKEKQRTIQAKKEVEQRRAGGYSRKYASKAKNLADDMVRNTARDLLYYAVTQDAMLIFENLSRGFGRQGKRTFMAERQYTRMEDWLTAKLAYEGLPSKTYLSKTLAQYTSKTCSNCGFTITSADYDRVLEKLKKTATGWMTTINGKELKVEGQITYYNRYKRQNVVKDLSVELDRLSEESVNNDISSWTKGRSGEALSLLKKRFSHRPVQEKFVCLNCGFETHADEQAALNIARSWLFLRSQEYKKYQTNKTTGNTDKRAFVETWQSFYRKKLKEVWKPAV

SEQ ID NO: 45621 - protein, 978 aa, synthetic construct
  REGION 1..978: note = engineered CasX variant
QEIKRINKIRRRLVKDSNTKKAGKTGPMKTLLVRVMTPDLRERLENLRKKPENIPQPISNTSRANLNKLLTDYTEMKKAILHVYWEEFQKDPVGLMSRVAQPASKKIDQNKLKPEMDEKGNLTTAGFACSQCGQPLFVYKLEQVSEKGKAYTNYFGRCNVAEHEKLILLAQLKPEKDSDEAVTYSLGKFGQRALDFYSIHVTKESTHPVKPLAQIAGNRYASVPVGKALSDACMGTIASFLSKYQDIIIEHQKVVKGNQKRLESLRELAGKENLEYPSVTLPPQPHTKEGVDAYNEVIARVRMWVNLNLWQKLKLSRDDAKPLLRLKGFPSFPLVERQANEVDWWDMVCNVKKLINEKKEDGKVFWQNLAGYKRQEALRPYLSSEEDRKKGKKFARYQLGDLLLHLEKKHPEDWGKVYDEAWERIDKKVEGLSKHIKLEEERRSEDAQSKAALTDWLRAKASFVIEGLKEADKDEFCRCELKLQKWYGDLRGKPFAIEAENSILDISGFSKQYNCAFIWQKDGVKKLNLYLIINYFKGGKLRFKKIKPEAFEANRFYTVINKKSGEIVPMEVNFNFDDPNLIILPLAFGKRQGREFIWNDLLSLETGSLKLANGRVIEKTLYNRRTRQDEPALFVALTFERREVLDSSNIKPMNLIGVDRGENIPAVIALTDPEGCPLSRFKDSLGNPTHILRIRESYKEKQRTIQAKKEVEQRRAGGYSRKYASKAKNLADDMVRNTARDLLYYAVTQDAMLIFENLSRGFGRQGKRTFMAERQYTRMEDWLTAKLAYEGLPSKTYLSKTLAQYTSKTCSNCGFTITSADYDRVLEKLKKTATGWMTTINGKELKVEGQITYYNRYKRQNVVKDLSVELDRLSEESVNNDISSWTKGRSGEALSLLKKRFSHRPVQEKFVCLNCGFETHADEQAALNIARSWLFLRSQEYKKYQTNKTTGNTDKRAFVETWQSFYRKKLKEVWKPAV

SEQ ID NO: 45622 - protein, 978 aa, synthetic construct
  REGION 1..978: note = engineered CasX variant
QEIKRINKIRRRLVKDSNTKKAGKTGPMKTLLVRVMTPDLRERLENLRKKPENIPQPISNTSRANLNKLLTDYTEMKKAILHVYWEEFQKDPVGLMSRVAQPASKKIDQNKLKPEMDEKGNLTTAGFACSQCGQPLFVYKLEQVSEKGKAYTNYFGRCNVAEHEKLIKLAQLKPEKDSDEAVTYSLGKFGQRALDFYSIHVTKESTHPVKPLAQIAGNRYASGPVGKALSDACMGTIASFLSKYQDIIIEHQKVVKGNQKRLESLRELAGKENLEYPSVTLPPQPHTKEGVDAYNEVIARVRMWVNLNLWQKLKLSRDDAKPLLRLKGFPSFPLVERQANEVDWWDMVCNVKKLINEKKEDGKVFWQNLAGYKRQEALRPYLSSEEDRKKGKKFARYQLGDLLLHLEKKHPEDWGKVYDEAWERIDKKVEGLSKHIKLEEERRSEDAQSKAALTDWLRAKASFVIEGLKEADKDEFCRCELKLQKWYGDLRGKPFAIEAENSILDISGFSKQYNCAFIWQKDGVKKLNLYLIINYFKGGKLRFKKIKPEAFEANRFYTVINKKSGEIVPMEVNFNFDDPNLIILPLAFGKRQGREFIWNDLLSLETGSLKLANGRVIEKTLYNRRTRQDEPALFVALTFERREVLDSSNIKPMNLIGVDRGENIPAVIALTDPEGCPLSRFKDSLGNPTHILRIRESYKEKQRTIQAKKEVEQRRAGGYSRKYASKAKNLADDMVRNTARDLLYYAVTQDAMLIFENLSRGFGRQGKRTFMAERQYTRMEDWLTAKLAYEGLPSKTYLSKTLAQYTSKTCSNCGFTITSADYDRVLEKLKKTATGWMTTINGKELKVEGQITYYNRYKRQNVVKDLSVELDRLSEESVNNDISSWTKGRSGEALSLLKKRFSHRPVQEKFVCLNCGFETHADEQAALNIARSWLFLRSQEYKKYQTNKTTGNTDKRAFVETWQSFYRKKLKEVWKPAV

SEQ ID NO: 45623 - protein, 977 aa, synthetic construct
  REGION 1..977: note = engineered CasX variant
QEIKRINKIRRRLVKDSNTKKAGKTGPMKTLLVRVMTPDLRERLENLRKKPENIPQPISNTSRANLNKLLTDYTEMKKAILHVYWEEFQKDPVGLMSRVAQPASKKIDQNKLKPEMDEKGNLTTAGFACSQCGQPLFVYKLEQVSEKGKAYTNYFGRCNVAEHEKLILLAQLKPEKDSDEAVTYSLGKFGQRALDFYSIHVTKESTHPVKPLAQIAGNRYASPVGKALSDACMGTIASFLSKYQDIIIEHQKVVKGNQKRLESLRELAGKENLEYPSVTLPPQPHTKEGVDAYNEVIARVRMWVNLNLWQKLKLSRDDAKPLLRLKGFPSFPLVERQANEVDWWDMVCNVKKLINEKKEDGKVFWQNLAGYKRQEALRPYLSSEEDRKKGKKFARYQLGDLLLHLEKKHPEDWGKVYDEAWERIDKKVEGLSKHIKLEEERRSEDAQSKAALTDWLRAKASFVIEGLKEADKDEFCRCELKLQKWYGDLRGKPFAIEAENSILDISGFSKQYNCAFIWQKDGVKKLNLYLIINYFKGGKLRFKKIKPEAFEANRFYTVINKKSGEIVPMEVNFNFDDPNLIILPLAFGKRQGREFIWNDLLSLETGSLKLANGRVIEKTLYNRRTRQDEPALFVALTFERREVLDSSNIKPMNLIGVDRGENIPAVIALTDPEGCPLSRFKDSLGNPTHILRIRESYKEKQRTIQAKKEVEQRRAGGYSRKYASKAKNLADDMVRNTARDLLYYAVTQDAMLIFENLSRGFGRQGKRTFMAERQYTRMEDWLTAKLAYEGLPSKTYLSKTLAQYTSKTCSNCGFTITSADYDRVLEKLKKTATGWMTTINGKELKVEGQITYYNRYKRQNVVKDLSVELDRLSEESVNNDISSWTKGRSGEALSLLKKRFSHRPVQEKFVCLNCGFETHADEQAALNIARSWLFLRSQEYKKYQTNKTTGNTDKRAFVETWQSFYRKKLKEVWKPAV

SEQ ID NO: 45624 - protein, 979 aa, synthetic construct
  REGION 1..979: note = engineered CasX variant
QEIKRINKIRRRLVKDSNTKKAGKTGPMKTLLVRVMTPDLRERLENLRKKPENIPQPISNTSRANLNKLLTDYTEMKKAILHVYWEEFQKDPVGLMSRVAQPASKKIDQNKLKPEMDEKGNLTTAGFACSQCGQPLFVYKLEQVSEKGKAYTNYFGRCNVAEHEKLILLAQLKPEKDSDEAVTYSLGKFGQRALDFYSIHVTKESTHPVKPLAQIAGNRYASYPVGKALSDACMGTIASFLSKYQDIIIEHQKVVKGNQKRLESLRELAGKENLEYPSVTLPPQPHTKEGVDAYNEVIARVRMWVNLNLWQKLKLSRDDAKPLLRLKGFPSFPLVERQANEVDWWDMVCNVKKLINEKKEDGKVFWQNLAGYKRQEALRPYLSSEEDRKKGKKFARYQLGDLLLHLEKKHGERDWGKVYDEAWERIDKKVEGLSKHIKLEEERRSEDAQSKAALTDWLRAKASFVIEGLKEADKDEFCRCELKLQKWYGDLRGKPFAIEAENSILDISGFSKQYNCAFIWQKDGVKKLNLYLIINYFKGGKLRFKKIKPEAFEANRFYTVINKKSGEIVPMEVNFNFDDPNLIILPLAFGKRQGREFIWNDLLSLETGSLKLANGRVIEKTLYNRRTRQDEPALFVALTFERREVLDSSNIKPMNLIGVDRGENIPAVIALTDPEGCPLSRFKDSLGNPTHILRIRESYKEKQRTIQAKKEVEQRRAGGYSRKYASKAKNLADDMVRNTARDLLYYAVTQDAMLIFENLSRGFGRQGKRTFMAERQYTRMEDWLTAKLAYEGLPSKTYLSKTLAQYTSKTCSNCGFTITSADYDRVLEKLKKTATGWMTTINGKELKVEGQITYYNRYKRQNVVKDLSVELDRLSEESVNNDISSWTKGRSGEALSLLKKRFSHRPVQEKFVCLNCGFETHADEQAALNIARSWLFLRSQEYKKYQTNKTTGNTDKRAFVETWQSFYRKKLKEVWKPAV

SEQ ID NO: 45625 - protein, 979 aa, synthetic construct
  REGION 1..979: note = engineered CasX variant
QEIKRINKIRRRLVKDSNTKKAGKTGPMKTLLVRVMTPDLRERLENLRKKPENIPQPISNTSRANLNKLLTDYTEMKKAILHVYWEEFQKDPVGLMSRVAQPASKKIDQNKLKPEMDEKGNLTTAGFACSQCGQPLFVYKLEQVSEKGKAYTNYFGRCNVAEHEKLILLAQLKPEKDSDEAVTYSLGKFGQRALDFYSIHVTKESTHPVKPLAQIAGNRYASHPVGKALSDACMGTIASFLSKYQDIIIEHQKVVKGNQKRLESLRELAGKENLEYPSVTLPPQPHTKEGVDAYNEVIARVRMWVNLNLWQKLKLSRDDAKPLLRLKGFPSFPLVERQANEVDWWDMVCNVKKLINEKKEDGKVFWQNLAGYKRQEALRPYLSSEEDRKKGKKFARYQLGDLLLHLEKKHGERDWGKVYDEAWERIDKKVEGLSKHIKLEEERRSEDAQSKAALTDWLRAKASFVIEGLKEADKDEFCRCELKLQKWYGDLRGKPFAIEAENSILDISGFSKQYNCAFIWQKDGVKKLNLYLIINYFKGGKLRFKKIKPEAFEANRFYTVINKKSGEIVPMEVNFNFDDPNLIILPLAFGKRQGREFIWNDLLSLETGSLKLANGRVIEKTLYNRRTRQDEPALFVALTFERREVLDSSNIKPMNLIGVDRGENIPAVIALTDPEGCPLSRFKDSLGNPTHILRIRESYKEKQRTIQAKKEVEQRRAGGYSRKYASKAKNLADDMVRNTARDLLYYAVTQDAMLIFENLSRGFGRQGKRTFMAERQYTRMEDWLTAKLAYEGLPSKTYLSKTLAQYTSKTCSNCGFTITSADYDRVLEKLKKTATGWMTTINGKELKVEGQITYYNRYKRQNVVKDLSVELDRLSEESVNNDISSWTKGRSGEALSLLKKRFSHRPVQEKFVCLNCGFETHADEQAALNIARSWLFLRSQEYKKYQTNKTTGNTDKRAFVETWQSFYRKKLKEVWKPAV

SEQ ID NO: 45626 - protein, 979 aa, synthetic construct
  REGION 1..979: note = engineered CasX variant
QEIKRINKIRRRLVKDSNTKKAGKTGPMKTLLVRVMTPDLRERLENLRKKPENIPQPISNTSRANLNKLLTDYTEMKKAILHVYWEEFQKDPVGLMSRVAQPASKKIDQNKLKPEMDEKGNLTTAGFACSQCGQPLFVYKLEQVSEKGKAYTNYFGRCNVAEHEKLILLAQLKPEKDSDEAVTYSLGKFGQRALDFYSIHVTKESTHPVKPLAQIAGNRYASSPVGKALSDACMGTIASFLSKYQDIIIEHQKVVKGNQKRLESLRELAGKENLEYPSVTLPPQPHTKEGVDAYNEVIARVRMWVNLNLWQKLKLSRDDAKPLLRLKGFPSFPLVERQANEVDWWDMVCNVKKLINEKKEDGKVFWQNLAGYKRQEALRPYLSSEEDRKKGKKFARYQLGDLLLHLEKKHGERDWGKVYDEAWERIDKKVEGLSKHIKLEEERRSEDAQSKAALTDWLRAKASFVIEGLKEADKDEFCRCELKLQKWYGDLRGKPFAIEAENSILDISGFSKQYNCAFIWQKDGVKKLNLYLIINYFKGGKLRFKKIKPEAFEANRFYTVINKKSGEIVPMEVNFNFDDPNLIILPLAFGKRQGREFIWNDLLSLETGSLKLANGRVIEKTLYNRRTRQDEPALFVALTFERREVLDSSNIKPMNLIGVDRGENIPAVIALTDPEGCPLSRFKDSLGNPTHILRIRESYKEKQRTIQAKKEVEQRRAGGYSRKYASKAKNLADDMVRNTARDLLYYAVTQDAMLIFENLSRGFGRQGKRTFMAERQYTRMEDWLTAKLAYEGLPSKTYLSKTLAQYTSKTCSNCGFTITSADYDRVLEKLKKTATGWMTTINGKELKVEGQITYYNRYKRQNVVKDLSVELDRLSEESVNNDISSWTKGRSGEALSLLKKRFSHRPVQEKFVCLNCGFETHADEQAALNIARSWLFLRSQEYKKYQTNKTTGNTDKRAFVETWQSFYRKKLKEVWKPAV

SEQ ID NO: 45627 - protein, 979 aa, synthetic construct
  REGION 1..979: note = engineered CasX variant
QEIKRINKIRRRLVKDSNTKKAGKTGPMKTLLVRVMTPDLRERLENLRKKPENIPQPISNTSRANLNKLLTDYTEMKKAILHVYWEEFQKDPVGLMSRVAQPASKKIDQNKLKPEMDEKGNLTTAGFACSQCGQPLFVYKLEQVSEKGKAYTNYFGRCNVAEHEKLILLAQLKPEKDSDEAVTYSLGKFGQRALDFYSIHVTKESTHPVKPLAQIAGNRYASTPVGKALSDACMGTIASFLSKYQDIIIEHQKVVKGNQKRLESLRELAGKENLEYPSVTLPPQPHTKEGVDAYNEVIARVRMWVNLNLWQKLKLSRDDAKPLLRLKGFPSFPLVERQANEVDWWDMVCNVKKLINEKKEDGKVFWQNLAGYKRQEALRPYLSSEEDRKKGKKFARYQLGDLLLHLEKKHGERDWGKVYDEAWERIDKKVEGLSKHIKLEEERRSEDAQSKAALTDWLRAKASFVIEGLKEADKDEFCRCELKLQKWYGDLRGKPFAIEAENSILDISGFSKQYNCAFIWQKDGVKKLNLYLIINYFKGGKLRFKKIKPEAFEANRFYTVINKKSGEIVPMEVNFNFDDPNLIILPLAFGKRQGREFIWNDLLSLETGSLKLANGRVIEKTLYNRRTRQDEPALFVALTFERREVLDSSNIKPMNLIGVDRGENIPAVIALTDPEGCPLSRFKDSLGNPTHILRIRESYKEKQRTIQAKKEVEQRRAGGYSRKYASKAKNLADDMVRNTARDLLYYAVTQDAMLIFENLSRGFGRQGKRTFMAERQYTRMEDWLTAKLAYEGLPSKTYLSKTLAQYTSKTCSNCGFTITSADYDRVLEKLKKTATGWMTTINGKELKVEGQITYYNRYKRQNVVKDLSVELDRLSEESVNNDISSWTKGRSGEALSLLKKRFSHRPVQEKFVCLNCGFETHADEQAALNIARSWLFLRSQEYKKYQTNKTTGNTDKRAFVETWQSFYRKKLKEVWKPAV

SEQ ID NO: 45628 - protein, 979 aa, synthetic construct
  REGION 1..979: note = engineered CasX variant
QEIKRINKIRRRLVKDSNTKKAGKTGPMKTLLVRVMTPDLRERLENLRKKPENIPQPISNTSRANLNKLLTDYTEMKKAILHVYWEEFQKDPVGLMSRVAQPASKKIDQNKLKPEMDEKGNLTTAGFACSQCGQPLFVYKLEQVSEKGKAYTNYFGRCNVAEHEKLILLAQLKPEKDSDEAVTYSLGKFGQRALDFYSIHVTKESTHPVKPLAQIAGNRYASAPVGKALSDACMGTIASFLSKYQDIIIEHQKVVKGNQKRLESLRELAGKENLEYPSVTLPPQPHTKEGVDAYNEVIARVRMWVNLNLWQKLKLSRDDAKPLLRLKGFPSFPLVERQANEVDWWDMVCNVKKLINEKKEDGKVFWQNLAGYKRQEALRPYLSSEEDRKKGKKFARYQLGDLLLHLEKKHGERDWGKVYDEAWERIDKKVEGLSKHIKLEEERRSEDAQSKAALTDWLRAKASFVIEGLKEADKDEFCRCELKLQKWYGDLRGKPFAIEAENSILDISGFSKQYNCAFIWQKDGVKKLNLYLIINYFKGGKLRFKKIKPEAFEANRFYTVINKKSGEIVPMEVNFNFDDPNLIILPLAFGKRQGREFIWNDLLSLETGSLKLANGRVIEKTLYNRRTRQDEPALFVALTFERREVLDSSNIKPMNLIGVDRGENIPAVIALTDPEGCPLSRFKDSLGNPTHILRIRESYKEKQRTIQAKKEVEQRRAGGYSRKYASKAKNLADDMVRNTARDLLYYAVTQDAMLIFENLSRGFGRQGKRTFMAERQYTRMEDWLTAKLAYEGLPSKTYLSKTLAQYTSKTCSNCGFTITSADYDRVLEKLKKTATGWMTTINGKELKVEGQITYYNRYKRQNVVKDLSVELDRLSEESVNNDISSWTKGRSGEALSLLKKRFSHRPVQEKFVCLNCGFETHADEQAALNIARSWLFLRSQEYKKYQTNKTTGNTDKRAFVETWQSFYRKKLKEVWKPAV

SEQ ID NO: 45629 - protein, 979 aa, synthetic construct
  REGION 1..979: note = engineered CasX variant
QEIKRINKIRRRLVKDSNTKKAGKTGPMKTLLVRVMTPDLRERLENLRKKPENIPQPISNTSRANLNKLLTDYTEMKKAILHVYWEEFQKDPVGLMSRVAQPASKKIDQNKLKPEMDEKGNLTTAGFACSQCGQPLFVYKLEQVSEKGKAYTNYFGRCNVAEHEKLILLAQLKPEKDSDEAVTYSLGKFGQRALDFYSIHVTKESTHPVKPLAQIAGNRYASVPVGKALSDACMGTIASFLSKYQDIIIEHQKVVKGNQKRLESLRELAGKENLEYPSVTLPPQPHTKEGVDAYNEVIARVRMWVNLNLWQKLKLSRDDAKPLLRLKGFPSFPLVERQANEVDWWDMVCNVKKLINEKKEDGKVFWQNLAGYKRQEALRPYLSSEEDRKKGKKFARYQLGDLLLHLEKKHGERDWGKVYDEAWERIDKKVEGLSKHIKLEEERRSEDAQSKAALTDWLRAKASFVIEGLKEADKDEFCRCELKLQKWYGDLRGKPFAIEAENSILDISGFSKQYNCAFIWQKDGVKKLNLYLIINYFKGGKLRFKKIKPEAFEANRFYTVINKKSGEIVPMEVNFNFDDPNLIILPLAFGKRQGREFIWNDLLSLETGSLKLANGRVIEKTLYNRRTRQDEPALFVALTFERREVLDSSNIKPMNLIGVDRGENIPAVIALTDPEGCPLSRFKDSLGNPTHILRIRESYKEKQRTIQAKKEVEQRRAGGYSRKYASKAKNLADDMVRNTARDLLYYAVTQDAMLIFENLSRGFGRQGKRTFMAERQYTRMEDWLTAKLAYEGLPSKTYLSKTLAQYTSKTCSNCGFTITSADYDRVLEKLKKTATGWMTTINGKELKVEGQITYYNRYKRQNVVKDLSVELDRLSEESVNNDISSWTKGRSGEALSLLKKRFSHRPVQEKFVCLNCGFETHADEQAALNIARSWLFLRSQEYKKYQTNKTTGNTDKRAFVETWQSFYRKKLKEVWKPAV

SEQ ID NO: 45630 - protein, 979 aa, synthetic construct
  REGION 1..979: note = engineered CasX variant
QEIKRINKIRRRLVKDSNTKKAGKTGPMKTLLVRVMTPDLRERLENLRKKPENIPQPISNTSRANLNKLLTDYTEMKKAILHVYWEEFQKDPVGLMSRVAQPASKKIDQNKLKPEMDEKGNLTTAGFACSQCGQPLFVYKLEQVSEKGKAYTNYFGRCNVAEHEKLIKLAQLKPEKDSDEAVTYSLGKFGQRALDFYSIHVTKESTHPVKPLAQIAGNRYASGPVGKALSDACMGTIASFLSKYQDIIIEHQKVVKGNQKRLESLRELAGKENLEYPSVTLPPQPHTKEGVDAYNEVIARVRMWVNLNLWQKLKLSRDDAKPLLRLKGFPSFPLVERQANEVDWWDMVCNVKKLINEKKEDGKVFWQNLAGYKRQEALRPYLSSEEDRKKGKKFARYQLGDLLLHLEKKHGERDWGKVYDEAWERIDKKVEGLSKHIKLEEERRSEDAQSKAALTDWLRAKASFVIEGLKEADKDEFCRCELKLQKWYGDLRGKPFAIEAENSILDISGFSKQYNCAFIWQKDGVKKLNLYLIINYFKGGKLRFKKIKPEAFEANRFYTVINKKSGEIVPMEVNFNFDDPNLIILPLAFGKRQGREFIWNDLLSLETGSLKLANGRVIEKTLYNRRTRQDEPALFVALTFERREVLDSSNIKPMNLIGVDRGENIPAVIALTDPEGCPLSRFKDSLGNPTHILRIRESYKEKQRTIQAKKEVEQRRAGGYSRKYASKAKNLADDMVRNTARDLLYYAVTQDAMLIFENLSRGFGRQGKRTFMAERQYTRMEDWLTAKLAYEGLPSKTYLSKTLAQYTSKTCSNCGFTITSADYDRVLEKLKKTATGWMTTINGKELKVEGQITYYNRYKRQNVVKDLSVELDRLSEESVNNDISSWTKGRSGEALSLLKKRFSHRPVQEKFVCLNCGFETHADEQAALNIARSWLFLRSQEYKKYQTNKTTGNTDKRAFVETWQSFYRKKLKEVWKPAV

SEQ ID NO: 45631 - protein, 978 aa, synthetic construct
  REGION 1..978: note = engineered CasX variant
QEIKRINKIRRRLVKDSNTKKAGKTGPMKTLLVRVMTPDLRERLENLRKKPENIPQPISNTSRANLNKLLTDYTEMKKAILHVYWEEFQKDPVGLMSRVAQPASKKIDQNKLKPEMDEKGNLTTAGFACSQCGQPLFVYKLEQVSEKGKAYTNYFGRCNVAEHEKLILLAQLKPEKDSDEAVTYSLGKFGQRALDFYSIHVTKESTHPVKPLAQIAGNRYASPVGKALSDACMGTIASFLSKYQDIIIEHQKVVKGNQKRLESLRELAGKENLEYPSVTLPPQPHTKEGVDAYNEVIARVRMWVNLNLWQKLKLSRDDAKPLLRLKGFPSFPLVERQANEVDWWDMVCNVKKLINEKKEDGKVFWQNLAGYKRQEALRPYLSSEEDRKKGKKFARYQLGDLLLHLEKKHGERDWGKVYDEAWERIDKKVEGLSKHIKLEEERRSEDAQSKAALTDWLRAKASFVIEGLKEADKDEFCRCELKLQKWYGDLRGKPFAIEAENSILDISGFSKQYNCAFIWQKDGVKKLNLYLIINYFKGGKLRFKKIKPEAFEANRFYTVINKKSGEIVPMEVNFNFDDPNLIILPLAFGKRQGREFIWNDLLSLETGSLKLANGRVIEKTLYNRRTRQDEPALFVALTFERREVLDSSNIKPMNLIGVDRGENIPAVIALTDPEGCPLSRFKDSLGNPTHILRIRESYKEKQRTIQAKKEVEQRRAGGYSRKYASKAKNLADDMVRNTARDLLYYAVTQDAMLIFENLSRGFGRQGKRTFMAERQYTRMEDWLTAKLAYEGLPSKTYLSKTLAQYTSKTCSNCGFTITSADYDRVLEKLKKTATGWMTTINGKELKVEGQITYYNRYKRQNVVKDLSVELDRLSEESVNNDISSWTKGRSGEALSLLKKRFSHRPVQEKFVCLNCGFETHADEQAALNIARSWLFLRSQEYKKYQTNKTTGNTDKRAFVETWQSFYRKKLKEVWKPAV

SEQ ID NO: 45632 - protein, 979 aa, synthetic construct
  REGION 1..979: note = engineered CasX variant
QEIKRINKIRRRLVKDSNTKKAGKTGPMKTLLVRVMTPDLRERLENLRKKPENIPQPISNTSRANLNKLLTDYTEMKKAILHVYWEEFQKDPVGLMSRVAQPASKKIDQNKLKPEMDEKGNLTTAGFACSQCGQPLFVYKLEQVSEKGKAYTNYFGRCNVAEHEKLILLAQLKPEKDSDEAVTYSLGKFGQRALDFYSIHVTKESTHPVKPLAQIAGNRYASYPVGKALSDACMGTIASFLSKYQDIIIEHQKVVKGNQKRLESLRELAGKENLEYPSVTLPPQPHTKEGVDAYNEVIARVRMWVNLNLWQKLKLSRDDAKPLLRLKGFPSFPLVERQANEVDWWDMVCNVKKLINEKKEDGKVFWQNLAGYKRQEALRPYLSSEEDRKKGKKFARYQLGDLLLHLEKKHGEYDWGKVYDEAWERIDKKVEGLSKHIKLEEERRSEDAQSKAALTDWLRAKASFVIEGLKEADKDEFCRCELKLQKWYGDLRGKPFAIEAENSILDISGFSKQYNCAFIWQKDGVKKLNLYLIINYFKGGKLRFKKIKPEAFEANRFYTVINKKSGEIVPMEVNFNFDDPNLIILPLAFGKRQGREFIWNDLLSLETGSLKLANGRVIEKTLYNRRTRQDEPALFVALTFERREVLDSSNIKPMNLIGVDRGENIPAVIALTDPEGCPLSRFKDSLGNPTHILRIRESYKEKQRTIQAKKEVEQRRAGGYSRKYASKAKNLADDMVRNTARDLLYYAVTQDAMLIFENLSRGFGRQGKRTFMAERQYTRMEDWLTAKLAYEGLPSKTYLSKTLAQYTSKTCSNCGFTITSADYDRVLEKLKKTATGWMTTINGKELKVEGQITYYNRYKRQNVVKDLSVELDRLSEESVNNDISSWTKGRSGEALSLLKKRFSHRPVQEKFVCLNCGFETHADEQAALNIARSWLFLRSQEYKKYQTNKTTGNTDKRAFVETWQSFYRKKLKEVWKPAV

SEQ ID NO: 45633 - protein, 979 aa, synthetic construct
  REGION 1..979: note = engineered CasX variant
QEIKRINKIRRRLVKDSNTKKAGKTGPMKTLLVRVMTPDLRERLENLRKKPENIPQPISNTSRANLNKLLTDYTEMKKAILHVYWEEFQKDPVGLMSRVAQPASKKIDQNKLKPEMDEKGNLTTAGFACSQCGQPLFVYKLEQVSEKGKAYTNYFGRCNVAEHEKLILLAQLKPEKDSDEAVTYSLGKFGQRALDFYSIHVTKESTHPVKPLAQIAGNRYASHPVGKALSDACMGTIASFLSKYQDIIIEHQKVVKGNQKRLESLRELAGKENLEYPSVTLPPQPHTKEGVDAYNEVIARVRMWVNLNLWQKLKLSRDDAKPLLRLKGFPSFPLVERQANEVDWWDMVCNVKKLINEKKEDGKVFWQNLAGYKRQEALRPYLSSEEDRKKGKKFARYQLGDLLLHLEKKHGEYDWGKVYDEAWERIDKKVEGLSKHIKLEEERRSEDAQSKAALTDWLRAKASFVIEGLKEADKDEFCRCELKLQKWYGDLRGKPFAIEAENSILDISGFSKQYNCAFIWQKDGVKKLNLYLIINYFKGGKLRFKKIKPEAFEANRFYTVINKKSGEIVPMEVNFNFDDPNLIILPLAFGKRQGREFIWNDLLSLETGSLKLANGRVIEKTLYNRRTRQDEPALFVALTFERREVLDSSNIKPMNLIGVDRGENIPAVIALTDPEGCPLSRFKDSLGNPTHILRIRESYKEKQRTIQAKKEVEQRRAGGYSRKYASKAKNLADDMVRNTARDLLYYAVTQDAMLIFENLSRGFGRQGKRTFMAERQYTRMEDWLTAKLAYEGLPSKTYLSKTLAQYTSKTCSNCGFTITSADYDRVLEKLKKTATGWMTTINGKELKVEGQITYYNRYKRQNVVKDLSVELDRLSEESVNNDISSWTKGRSGEALSLLKKRFSHRPVQEKFVCLNCGFETHADEQAALNIARSWLFLRSQEYKKYQTNKTTGNTDKRAFVETWQSFYRKKLKEVWKPAV

SEQ ID NO: 45634 - protein, 979 aa, synthetic construct
  REGION 1..979: note = engineered CasX variant
QEIKRINKIRRRLVKDSNTKKAGKTGPMKTLLVRVMTPDLRERLENLRKKPENIPQPISNTSRANLNKLLTDYTEMKKAILHVYWEEFQKDPVGLMSRVAQPASKKIDQNKLKPEMDEKGNLTTAGFACSQCGQPLFVYKLEQVSEKGKAYTNYFGRCNVAEHEKLILLAQLKPEKDSDEAVTYSLGKFGQRALDFYSIHVTKESTHPVKPLAQIAGNRYASSPVGKALSDACMGTIASFLSKYQDIIIEHQKVVKGNQKRLESLRELAGKENLEYPSVTLPPQPHTKEGVDAYNEVIARVRMWVNLNLWQKLKLSRDDAKPLLRLKGFPSFPLVERQANEVDWWDMVCNVKKLINEKKEDGKVFWQNLAGYKRQEALRPYLSSEEDRKKGKKFARYQLGDLLLHLEKKHGEYDWGKVYDEAWERIDKKVEGLSKHIKLEEERRSEDAQSKAALTDWLRAKASFVIEGLKEADKDEFCRCELKLQKWYGDLRGKPFAIEAENSILDISGFSKQYNCAFIWQKDGVKKLNLYLIINYFKGGKLRFKKIKPEAFEANRFYTVINKKSGEIVPMEVNFNFDDPNLIILPLAFGKRQGREFIWNDLLSLETGSLKLANGRVIEKTLYNRRTRQDEPALFVALTFERREVLDSSNIKPMNLIGVDRGENIPAVIALTDPEGCPLSRFKDSLGNPTHILRIRESYKEKQRTIQAKKEVEQRRAGGYSRKYASKAKNLADDMVRNTARDLLYYAVTQDAMLIFENLSRGFGRQGKRTFMAERQYTRMEDWLTAKLAYEGLPSKTYLSKTLAQYTSKTCSNCGFTITSADYDRVLEKLKKTATGWMTTINGKELKVEGQITYYNRYKRQNVVKDLSVELDRLSEESVNNDISSWTKGRSGEALSLLKKRFSHRPVQEKFVCLNCGFETHADEQAALNIARSWLFLRSQEYKKYQTNKTTGNTDKRAFVETWQSFYRKKLKEVWKPAV

SEQ ID NO: 45635 - protein, 979 aa, synthetic construct
  REGION 1..979: note = engineered CasX variant
QEIKRINKIRRRLVKDSNTKKAGKTGPMKTLLVRVMTPDLRERLENLRKKPENIPQPISNTSRANLNKLLTDYTEMKKAILHVYWEEFQKDPVGLMSRVAQPASKKIDQNKLKPEMDEKGNLTTAGFACSQCGQPLFVYKLEQVSEKGKAYTNYFGRCNVAEHEKLILLAQLKPEKDSDEAVTYSLGKFGQRALDFYSIHVTKESTHPVKPLAQIAGNRYASTPVGKALSDACMGTIASFLSKYQDIIIEHQKVVKGNQKRLESLRELAGKENLEYPSVTLPPQPHTKEGVDAYNEVIARVRMWVNLNLWQKLKLSRDDAKPLLRLKGFPSFPLVERQANEVDWWDMVCNVKKLINEKKEDGKVFWQNLAGYKRQEALRPYLSSEEDRKKGKKFARYQLGDLLLHLEKKHGEYDWGKVYDEAWERIDKKVEGLSKHIKLEEERRSEDAQSKAALTDWLRAKASFVIEGLKEADKDEFCRCELKLQKWYGDLRGKPFAIEAENSILDISGFSKQYNCAFIWQKDGVKKLNLYLIINYFKGGKLRFKKIKPEAFEANRFYTVINKKSGEIVPMEVNFNFDDPNLIILPLAFGKRQGREFIWNDLLSLETGSLKLANGRVIEKTLYNRRTRQDEPALFVALTFERREVLDSSNIKPMNLIGVDRGENIPAVIALTDPEGCPLSRFKDSLGNPTHILRIRESYKEKQRTIQAKKEVEQRRAGGYSRKYASKAKNLADDMVRNTARDLLYYAVTQDAMLIFENLSRGFGRQGKRTFMAERQYTRMEDWLTAKLAYEGLPSKTYLSKTLAQYTSKTCSNCGFTITSADYDRVLEKLKKTATGWMTTINGKELKVEGQITYYNRYKRQNVVKDLSVELDRLSEESVNNDISSWTKGRSGEALSLLKKRFSHRPVQEKFVCLNCGFETHADEQAALNIARSWLFLRSQEYKKYQTNKTTGNTDKRAFVETWQSFYRKKLKEVWKPAV

SEQ ID NO: 45636 - protein, 979 aa, synthetic construct
  REGION 1..979: note = engineered CasX variant
QEIKRINKIRRRLVKDSNTKKAGKTGPMKTLLVRVMTPDLRERLENLRKKPENIPQPISNTSRANLNKLLTDYTEMKKAILHVYWEEFQKDPVGLMSRVAQPASKKIDQNKLKPEMDEKGNLTTAGFACSQCGQPLFVYKLEQVSEKGKAYTNYFGRCNVAEHEKLILLAQLKPEKDSDEAVTYSLGKFGQRALDFYSIHVTKESTHPVKPLAQIAGNRYASAPVGKALSDACMGTIASFLSKYQDIIIEHQKVVKGNQKRLESLRELAGKENLEYPSVTLPPQPHTKEGVDAYNEVIARVRMWVNLNLWQKLKLSRDDAKPLLRLKGFPSFPLVERQANEVDWWDMVCNVKKLINEKKEDGKVFWQNLAGYKRQEALRPYLSSEEDRKKGKKFARYQLGDLLLHLEKKHGEYDWGKVYDEAWERIDKKVEGLSKHIKLEEERRSEDAQSKAALTDWLRAKASFVIEGLKEADKDEFCRCELKLQKWYGDLRGKPFAIEAENSILDISGFSKQYNCAFIWQKDGVKKLNLYLIINYFKGGKLRFKKIKPEAFEANRFYTVINKKSGEIVPMEVNFNFDDPNLIILPLAFGKRQGREFIWNDLLSLETGSLKLANGRVIEKTLYNRRTRQDEPALFVALTFERREVLDSSNIKPMNLIGVDRGENIPAVIALTDPEGCPLSRFKDSLGNPTHILRIRESYKEKQRTIQAKKEVEQRRAGGYSRKYASKAKNLADDMVRNTARDLLYYAVTQDAMLIFENLSRGFGRQGKRTFMAERQYTRMEDWLTAKLAYEGLPSKTYLSKTLAQYTSKTCSNCGFTITSADYDRVLEKLKKTATGWMTTINGKELKVEGQITYYNRYKRQNVVKDLSVELDRLSEESVNNDISSWTKGRSGEALSLLKKRFSHRPVQEKFVCLNCGFETHADEQAALNIARSWLFLRSQEYKKYQTNKTTGNTDKRAFVETWQSFYRKKLKEVWKPAV

SEQ ID NO: 45637 - protein, 979 aa, synthetic construct
  REGION 1..979: note = engineered CasX variant
QEIKRINKIRRRLVKDSNTKKAGKTGPMKTLLVRVMTPDLRERLENLRKKPENIPQPISNTSRANLNKLLTDYTEMKKAILHVYWEEFQKDPVGLMSRVAQPASKKIDQNKLKPEMDEKGNLTTAGFACSQCGQPLFVYKLEQVSEKGKAYTNYFGRCNVAEHEKLILLAQLKPEKDSDEAVTYSLGKFGQRALDFYSIHVTKESTHPVKPLAQIAGNRYASVPVGKALSDACMGTIASFLSKYQDIIIEHQKVVKGNQKRLESLRELAGKENLEYPSVTLPPQPHTKEGVDAYNEVIARVRMWVNLNLWQKLKLSRDDAKPLLRLKGFPSFPLVERQANEVDWWDMVCNVKKLINEKKEDGKVFWQNLAGYKRQEALRPYLSSEEDRKKGKKFARYQLGDLLLHLEKKHGEYDWGKVYDEAWERIDKKVEGLSKHIKLEEERRSEDAQSKAALTDWLRAKASFVIEGLKEADKDEFCRCELKLQKWYGDLRGKPFAIEAENSILDISGFSKQYNCAFIWQKDGVKKLNLYLIINYFKGGKLRFKKIKPEAFEANRFYTVINKKSGEIVPMEVNFNFDDPNLIILPLAFGKRQGREFIWNDLLSLETGSLKLANGRVIEKTLYNRRTRQDEPALFVALTFERREVLDSSNIKPMNLIGVDRGENIPAVIALTDPEGCPLSRFKDSLGNPTHILRIRESYKEKQRTIQAKKEVEQRRAGGYSRKYASKAKNLADDMVRNTARDLLYYAVTQDAMLIFENLSRGFGRQGKRTFMAERQYTRMEDWLTAKLAYEGLPSKTYLSKTLAQYTSKTCSNCGFTITSADYDRVLEKLKKTATGWMTTINGKELKVEGQITYYNRYKRQNVVKDLSVELDRLSEESVNNDISSWTKGRSGEALSLLKKRFSHRPVQEKFVCLNCGFETHADEQAALNIARSWLFLRSQEYKKYQTNKTTGNTDKRAFVETWQSFYRKKLKEVWKPAV

SEQ ID NO: 45638 - protein, 979 aa, synthetic construct
  REGION 1..979: note = engineered CasX variant
QEIKRINKIRRRLVKDSNTKKAGKTGPMKTLLVRVMTPDLRERLENLRKKPENIPQPISNTSRANLNKLLTDYTEMKKAILHVYWEEFQKDPVGLMSRVAQPASKKIDQNKLKPEMDEKGNLTTAGFACSQCGQPLFVYKLEQVSEKGKAYTNYFGRCNVAEHEKLIKLAQLKPEKDSDEAVTYSLGKFGQRALDFYSIHVTKESTHPVKPLAQIAGNRYASGPVGKALSDACMGTIASFLSKYQDIIIEHQKVVKGNQKRLESLRELAGKENLEYPSVTLPPQPHTKEGVDAYNEVIARVRMWVNLNLWQKLKLSRDDAKPLLRLKGFPSFPLVERQANEVDWWDMVCNVKKLINEKKEDGKVFWQNLAGYKRQEALRPYLSSEEDRKKGKKFARYQLGDLLLHLEKKHGEYDWGKVYDEAWERIDKKVEGLSKHIKLEEERRSEDAQSKAALTDWLRAKASFVIEGLKEADKDEFCRCELKLQKWYGDLRGKPFAIEAENSILDISGFSKQYNCAFIWQKDGVKKLNLYLIINYFKGGKLRFKKIKPEAFEANRFYTVINKKSGEIVPMEVNFNFDDPNLIILPLAFGKRQGREFIWNDLLSLETGSLKLANGRVIEKTLYNRRTRQDEPALFVALTFERREVLDSSNIKPMNLIGVDRGENIPAVIALTDPEGCPLSRFKDSLGNPTHILRIRESYKEKQRTIQAKKEVEQRRAGGYSRKYASKAKNLADDMVRNTARDLLYYAVTQDAMLIFENLSRGFGRQGKRTFMAERQYTRMEDWLTAKLAYEGLPSKTYLSKTLAQYTSKTCSNCGFTITSADYDRVLEKLKKTATGWMTTINGKELKVEGQITYYNRYKRQNVVKDLSVELDRLSEESVNNDISSWTKGRSGEALSLLKKRFSHRPVQEKFVCLNCGFETHADEQAALNIARSWLFLRSQEYKKYQTNKTTGNTDKRAFVETWQSFYRKKLKEVWKPAV

SEQ ID NO: 45639 - protein, 978 aa, synthetic construct
  REGION 1..978: note = engineered CasX variant
QEIKRINKIRRRLVKDSNTKKAGKTGPMKTLLVRVMTPDLRERLENLRKKPENIPQPISNTSRANLNKLLTDYTEMKKAILHVYWEEFQKDPVGLMSRVAQPASKKIDQNKLKPEMDEKGNLTTAGFACSQCGQPLFVYKLEQVSEKGKAYTNYFGRCNVAEHEKLILLAQLKPEKDSDEAVTYSLGKFGQRALDFYSIHVTKESTHPVKPLAQIAGNRYASPVGKALSDACMGTIASFLSKYQDIIIEHQKVVKGNQKRLESLRELAGKENLEYPSVTLPPQPHTKEGVDAYNEVIARVRMWVNLNLWQKLKLSRDDAKPLLRLKGFPSFPLVERQANEVDWWDMVCNVKKLINEKKEDGKVFWQNLAGYKRQEALRPYLSSEEDRKKGKKFARYQLGDLLLHLEKKHGEYDWGKVYDEAWERIDKKVEGLSKHIKLEEERRSEDAQSKAALTDWLRAKASFVIEGLKEADKDEFCRCELKLQKWYGDLRGKPFAIEAENSILDISGFSKQYNCAFIWQKDGVKKLNLYLIINYFKGGKLRFKKIKPEAFEANRFYTVINKKSGEIVPMEVNFNFDDPNLIILPLAFGKRQGREFIWNDLLSLETGSLKLANGRVIEKTLYNRRTRQDEPALFVALTFERREVLDSSNIKPMNLIGVDRGENIPAVIALTDPEGCPLSRFKDSLGNPTHILRIRESYKEKQRTIQAKKEVEQRRAGGYSRKYASKAKNLADDMVRNTARDLLYYAVTQDAMLIFENLSRGFGRQGKRTFMAERQYTRMEDWLTAKLAYEGLPSKTYLSKTLAQYTSKTCSNCGFTITSADYDRVLEKLKKTATGWMTTINGKELKVEGQITYYNRYKRQNVVKDLSVELDRLSEESVNNDISSWTKGRSGEALSLLKKRFSHRPVQEKFVCLNCGFETHADEQAALNIARSWLFLRSQEYKKYQTNKTTGNTDKRAFVETWQSFYRKKLKEVWKPAV

SEQ ID NO: 45640 - protein, 978 aa, synthetic construct
  REGION 1..978: note = engineered CasX variant
QEIKRINKIRRRLVKDSNTKKAGKTGPMKTLLVRVMTPDLRERLENLRKKPENIPQPISNTSRANLNKLLTDYTEMKKAILHVYWEEFQKDPVGLMSRVAQPASKKIDQNKLKPEMDEKGNLTTAGFACSQCGQPLFVYKLEQVSEKGKAYTNYFGRCNVAEHEKLILLAQLKPEKDSDEAVTYSLGKFGQRALDFYSIHVTKESTHPVKPLAQIAGNRYASYPVGKALSDACMGTIASFLSKYQDIIIEHQKVVKGNQKRLESLRELAGKENLEYPSVTLPPQPHTKEGVDAYNEVIARVRMWVNLNLWQKLKLSRDDAKPLLRLKGFPSFPLVERQANEVDWWDMVCNVKKLINEKKEDGKVFWQNLAGYKRQEALRPYLSSEEDRKKGKKFARYQLGDLLLHLEKKHGEDWGDVYDEAWERIDKKVEGLSKHIKLEEERRSEDAQSKAALTDWLRAKASFVIEGLKEADKDEFCRCELKLQKWYGDLRGKPFAIEAENSILDISGFSKQYNCAFIWQKDGVKKLNLYLIINYFKGGKLRFKKIKPEAFEANRFYTVINKKSGEIVPMEVNFNFDDPNLIILPLAFGKRQGREFIWNDLLSLETGSLKLANGRVIEKTLYNRRTRQDEPALFVALTFERREVLDSSNIKPMNLIGVDRGENIPAVIALTDPEGCPLSRFKDSLGNPTHILRIRESYKEKQRTIQAKKEVEQRRAGGYSRKYASKAKNLADDMVRNTARDLLYYAVTQDAMLIFENLSRGFGRQGKRTFMAERQYTRMEDWLTAKLAYEGLPSKTYLSKTLAQYTSKTCSNCGFTITSADYDRVLEKLKKTATGWMTTINGKELKVEGQITYYNRYKRQNVVKDLSVELDRLSEESVNNDISSWTKGRSGEALSLLKKRFSHRPVQEKFVCLNCGFETHADEQAALNIARSWLFLRSQEYKKYQTNKTTGNTDKRAFVETWQSFYRKKLKEVWKPAV

SEQ ID NO: 45641 - protein, 978 aa, synthetic construct
  REGION 1..978: note = engineered CasX variant
QEIKRINKIRRRLVKDSNTKKAGKTGPMKTLLVRVMTPDLRERLENLRKKPENIPQPISNTSRANLNKLLTDYTEMKKAILHVYWEEFQKDPVGLMSRVAQPASKKIDQNKLKPEMDEKGNLTTAGFACSQCGQPLFVYKLEQVSEKGKAYTNYFGRCNVAEHEKLILLAQLKPEKDSDEAVTYSLGKFGQRALDFYSIHVTKESTHPVKPLAQIAGNRYASHPVGKALSDACMGTIASFLSKYQDIIIEHQKVVKGNQKRLESLRELAGKENLEYPSVTLPPQPHTKEGVDAYNEVIARVRMWVNLNLWQKLKLSRDDAKPLLRLKGFPSFPLVERQANEVDWWDMVCNVKKLINEKKEDGKVFWQNLAGYKRQEALRPYLSSEEDRKKGKKFARYQLGDLLLHLEKKHGEDWGDVYDEAWERIDKKVEGLSKHIKLEEERRSEDAQSKAALTDWLRAKASFVIEGLKEADKDEFCRCELKLQKWYGDLRGKPFAIEAENSILDISGFSKQYNCAFIWQKDGVKKLNLYLIINYFKGGKLRFKKIKPEAFEANRFYTVINKKSGEIVPMEVNFNFDDPNLIILPLAFGKRQGREFIWNDLLSLETGSLKLANGRVIEKTLYNRRTRQDEPALFVALTFERREVLDSSNIKPMNLIGVDRGENIPAVIALTDPEGCPLSRFKDSLGNPTHILRIRESYKEKQRTIQAKKEVEQRRAGGYSRKYASKAKNLADDMVRNTARDLLYYAVTQDAMLIFENLSRGFGRQGKRTFMAERQYTRMEDWLTAKLAYEGLPSKTYLSKTLAQYTSKTCSNCGFTITSADYDRVLEKLKKTATGWMTTINGKELKVEGQITYYNRYKRQNVVKDLSVELDRLSEESVNNDISSWTKGRSGEALSLLKKRFSHRPVQEKFVCLNCGFETHADEQAALNIARSWLFLRSQEYKKYQTNKTTGNTDKRAFVETWQSFYRKKLKEVWKPAV

SEQ ID NO: 45642 - protein, 978 aa, synthetic construct
  REGION 1..978: note = engineered CasX variant
QEIKRINKIRRRLVKDSNTKKAGKTGPMKTLLVRVMTPDLRERLENLRKKPENIPQPISNTSRANLNKLLTDYTEMKKAILHVYWEEFQKDPVGLMSRVAQPASKKIDQNKLKPEMDEKGNLTTAGFACSQCGQPLFVYKLEQVSEKGKAYTNYFGRCNVAEHEKLILLAQLKPEKDSDEAVTYSLGKFGQRALDFYSIHVTKESTHPVKPLAQIAGNRYASSPVGKALSDACMGTIASFLSKYQDIIIEHQKVVKGNQKRLESLRELAGKENLEYPSVTLPPQPHTKEGVDAYNEVIARVRMWVNLNLWQKLKLSRDDAKPLLRLKGFPSFPLVERQANEVDWWDMVCNVKKLINEKKEDGKVFWQNLAGYKRQEALRPYLSSEEDRKKGKKFARYQLGDLLLHLEKKHGEDWGDVYDEAWERIDKKVEGLSKHIKLEEERRSEDAQSKAALTDWLRAKASFVIEGLKEADKDEFCRCELKLQKWYGDLRGKPFAIEAENSILDISGFSKQYNCAFIWQKDGVKKLNLYLIINYFKGGKLRFKKIKPEAFEANRFYTVINKKSGEIVPMEVNFNFDDPNLIILPLAFGKRQGREFIWNDLLSLETGSLKLANGRVIEKTLYNRRTRQDEPALFVALTFERREVLDSSNIKPMNLIGVDRGENIPAVIALTDPEGCPLSRFKDSLGNPTHILRIRESYKEKQRTIQAKKEVEQRRAGGYSRKYASKAKNLADDMVRNTARDLLYYAVTQDAMLIFENLSRGFGRQGKRTFMAERQYTRMEDWLTAKLAYEGLPSKTYLSKTLAQYTSKTCSNCGFTITSADYDRVLEKLKKTATGWMTTINGKELKVEGQITYYNRYKRQNVVKDLSVELDRLSEESVNNDISSWTKGRSGEALSLLKKRFSHRPVQEKFVCLNCGFETHADEQAALNIARSWLFLRSQEYKKYQTNKTTGNTDKRAFVETWQSFYRKKLKEVWKPAV

SEQ ID NO: 45643 - protein, 978 aa, synthetic construct
  REGION 1..978: note = engineered CasX variant
QEIKRINKIRRRLVKDSNTKKAGKTGPMKTLLVRVMTPDLRERLENLRKKPENIPQPISNTSRANLNKLLTDYTEMKKAILHVYWEEFQKDPVGLMSRVAQPASKKIDQNKLKPEMDEKGNLTTAGFACSQCGQPLFVYKLEQVSEKGKAYTNYFGRCNVAEHEKLILLAQLKPEKDSDEAVTYSLGKFGQRALDFYSIHVTKESTHPVKPLAQIAGNRYASTPVGKALSDACMGTIASFLSKYQDIIIEHQKVVKGNQKRLESLRELAGKENLEYPSVTLPPQPHTKEGVDAYNEVIARVRMWVNLNLWQKLKLSRDDAKPLLRLKGFPSFPLVERQANEVDWWDMVCNVKKLINEKKEDGKVFWQNLAGYKRQEALRPYLSSEEDRKKGKKFARYQLGDLLLHLEKKHGEDWGDVYDEAWERIDKKVEGLSKHIKLEEERRSEDAQSKAALTDWLRAKASFVIEGLKEADKDEFCRCELKLQKWYGDLRGKPFAIEAENSILDISGFSKQYNCAFIWQKDGVKKLNLYLIINYFKGGKLRFKKIKPEAFEANRFYTVINKKSGEIVPMEVNFNFDDPNLIILPLAFGKRQGREFIWNDLLSLETGSLKLANGRVIEKTLYNRRTRQDEPALFVALTFERREVLDSSNIKPMNLIGVDRGENIPAVIALTDPEGCPLSRFKDSLGNPTHILRIRESYKEKQRTIQAKKEVEQRRAGGYSRKYASKAKNLADDMVRNTARDLLYYAVTQDAMLIFENLSRGFGRQGKRTFMAERQYTRMEDWLTAKLAYEGLPSKTYLSKTLAQYTSKTCSNCGFTITSADYDRVLEKLKKTATGWMTTINGKELKVEGQITYYNRYKRQNVVKDLSVELDRLSEESVNNDISSWTKGRSGEALSLLKKRFSHRPVQEKFVCLNCGFETHADEQAALNIARSWLFLRSQEYKKYQTNKTTGNTDKRAFVETWQSFYRKKLKEVWKPAV

SEQ ID NO: 45644 - protein, 978 aa, synthetic construct
  REGION 1..978: note = engineered CasX variant
QEIKRINKIRRRLVKDSNTKKAGKTGPMKTLLVRVMTPDLRERLENLRKKPENIPQPISNTSRANLNKLLTDYTEMKKAILHVYWEEFQKDPVGLMSRVAQPASKKIDQNKLKPEMDEKGNLTTAGFACSQCGQPLFVYKLEQVSEKGKAYTNYFGRCNVAEHEKLILLAQLKPEKDSDEAVTYSLGKFGQRALDFYSIHVTKESTHPVKPLAQIAGNRYASAPVGKALSDACMGTIASFLSKYQDIIIEHQKVVKGNQKRLESLRELAGKENLEYPSVTLPPQPHTKEGVDAYNEVIARVRMWVNLNLWQKLKLSRDDAKPLLRLKGFPSFPLVERQANEVDWWDMVCNVKKLINEKKEDGKVFWQNLAGYKRQEALRPYLSSEEDRKKGKKFARYQLGDLLLHLEKKHGEDWGDVYDEAWERIDKKVEGLSKHIKLEEERRSEDAQSKAALTDWLRAKASFVIEGLKEADKDEFCRCELKLQKWYGDLRGKPFAIEAENSILDISGFSKQYNCAFIWQKDGVKKLNLYLIINYFKGGKLRFKKIKPEAFEANRFYTVINKKSGEIVPMEVNFNFDDPNLIILPLAFGKRQGREFIWNDLLSLETGSLKLANGRVIEKTLYNRRTRQDEPALFVALTFERREVLDSSNIKPMNLIGVDRGENIPAVIALTDPEGCPLSRFKDSLGNPTHILRIRESYKEKQRTIQAKKEVEQRRAGGYSRKYASKAKNLADDMVRNTARDLLYYAVTQDAMLIFENLSRGFGRQGKRTFMAERQYTRMEDWLTAKLAYEGLPSKTYLSKTLAQYTSKTCSNCGFTITSADYDRVLEKLKKTATGWMTTINGKELKVEGQITYYNRYKRQNVVKDLSVELDRLSEESVNNDISSWTKGRSGEALSLLKKRFSHRPVQEKFVCLNCGFETHADEQAALNIARSWLFLRSQEYKKYQTNKTTGNTDKRAFVETWQSFYRKKLKEVWKPAV

SEQ ID NO: 45645 - protein, 978 aa, synthetic construct
  REGION 1..978: note = engineered CasX variant
QEIKRINKIRRRLVKDSNTKKAGKTGPMKTLLVRVMTPDLRERLENLRKKPENIPQPISNTSRANLNKLLTDYTEMKKAILHVYWEEFQKDPVGLMSRVAQPASKKIDQNKLKPEMDEKGNLTTAGFACSQCGQPLFVYKLEQVSEKGKAYTNYFGRCNVAEHEKLILLAQLKPEKDSDEAVTYSLGKFGQRALDFYSIHVTKESTHPVKPLAQIAGNRYASVPVGKALSDACMGTIASFLSKYQDIIIEHQKVVKGNQKRLESLRELAGKENLEYPSVTLPPQPHTKEGVDAYNEVIARVRMWVNLNLWQKLKLSRDDAKPLLRLKGFPSFPLVERQANEVDWWDMVCNVKKLINEKKEDGKVFWQNLAGYKRQEALRPYLSSEEDRKKGKKFARYQLGDLLLHLEKKHGEDWGDVYDEAWERIDKKVEGLSKHIKLEEERRSEDAQSKAALTDWLRAKASFVIEGLKEADKDEFCRCELKLQKWYGDLRGKPFAIEAENSILDISGFSKQYNCAFIWQKDGVKKLNLYLIINYFKGGKLRFKKIKPEAFEANRFYTVINKKSGEIVPMEVNFNFDDPNLIILPLAFGKRQGREFIWNDLLSLETGSLKLANGRVIEKTLYNRRTRQDEPALFVALTFERREVLDSSNIKPMNLIGVDRGENIPAVIALTDPEGCPLSRFKDSLGNPTHILRIRESYKEKQRTIQAKKEVEQRRAGGYSRKYASKAKNLADDMVRNTARDLLYYAVTQDAMLIFENLSRGFGRQGKRTFMAERQYTRMEDWLTAKLAYEGLPSKTYLSKTLAQYTSKTCSNCGFTITSADYDRVLEKLKKTATGWMTTINGKELKVEGQITYYNRYKRQNVVKDLSVELDRLSEESVNNDISSWTKGRSGEALSLLKKRFSHRPVQEKFVCLNCGFETHADEQAALNIARSWLFLRSQEYKKYQTNKTTGNTDKRAFVETWQSFYRKKLKEVWKPAV

SEQ ID NO: 45646 - protein, 978 aa, synthetic construct
  REGION 1..978: note = engineered CasX variant
QEIKRINKIRRRLVKDSNTKKAGKTGPMKTLLVRVMTPDLRERLENLRKKPENIPQPISNTSRANLNKLLTDYTEMKKAILHVYWEEFQKDPVGLMSRVAQPASKKIDQNKLKPEMDEKGNLTTAGFACSQCGQPLFVYKLEQVSEKGKAYTNYFGRCNVAEHEKLIKLAQLKPEKDSDEAVTYSLGKFGQRALDFYSIHVTKESTHPVKPLAQIAGNRYASGPVGKALSDACMGTIASFLSKYQDIIIEHQKVVKGNQKRLESLRELAGKENLEYPSVTLPPQPHTKEGVDAYNEVIARVRMWVNLNLWQKLKLSRDDAKPLLRLKGFPSFPLVERQANEVDWWDMVCNVKKLINEKKEDGKVFWQNLAGYKRQEALRPYLSSEEDRKKGKKFARYQLGDLLLHLEKKHGEDWGDVYDEAWERIDKKVEGLSKHIKLEEERRSEDAQSKAALTDWLRAKASFVIEGLKEADKDEFCRCELKLQKWYGDLRGKPFAIEAENSILDISGFSKQYNCAFIWQKDGVKKLNLYLIINYFKGGKLRFKKIKPEAFEANRFYTVINKKSGEIVPMEVNFNFDDPNLIILPLAFGKRQGREFIWNDLLSLETGSLKLANGRVIEKTLYNRRTRQDEPALFVALTFERREVLDSSNIKPMNLIGVDRGENIPAVIALTDPEGCPLSRFKDSLGNPTHILRIRESYKEKQRTIQAKKEVEQRRAGGYSRKYASKAKNLADDMVRNTARDLLYYAVTQDAMLIFENLSRGFGRQGKRTFMAERQYTRMEDWLTAKLAYEGLPSKTYLSKTLAQYTSKTCSNCGFTITSADYDRVLEKLKKTATGWMTTINGKELKVEGQITYYNRYKRQNVVKDLSVELDRLSEESVNNDISSWTKGRSGEALSLLKKRFSHRPVQEKFVCLNCGFETHADEQAALNIARSWLFLRSQEYKKYQTNKTTGNTDKRAFVETWQSFYRKKLKEVWKPAV

SEQ ID NO: 45647 - protein, 977 aa, synthetic construct
  REGION 1..977: note = engineered CasX variant
QEIKRINKIRRRLVKDSNTKKAGKTGPMKTLLVRVMTPDLRERLENLRKKPENIPQPISNTSRANLNKLLTDYTEMKKAILHVYWEEFQKDPVGLMSRVAQPASKKIDQNKLKPEMDEKGNLTTAGFACSQCGQPLFVYKLEQVSEKGKAYTNYFGRCNVAEHEKLILLAQLKPEKDSDEAVTYSLGKFGQRALDFYSIHVTKESTHPVKPLAQIAGNRYASPVGKALSDACMGTIASFLSKYQDIIIEHQKVVKGNQKRLESLRELAGKENLEYPSVTLPPQPHTKEGVDAYNEVIARVRMWVNLNLWQKLKLSRDDAKPLLRLKGFPSFPLVERQANEVDWWDMVCNVKKLINEKKEDGKVFWQNLAGYKRQEALRPYLSSEEDRKKGKKFARYQLGDLLLHLEKKHGEDWGDVYDEAWERIDKKVEGLSKHIKLEEERRSEDAQSKAALTDWLRAKASFVIEGLKEADKDEFCRCELKLQKWYGDLRGKPFAIEAENSILDISGFSKQYNCAFIWQKDGVKKLNLYLIINYFKGGKLRFKKIKPEAFEANRFYTVINKKSGEIVPMEVNFNFDDPNLIILPLAFGKRQGREFIWNDLLSLETGSLKLANGRVIEKTLYNRRTRQDEPALFVALTFERREVLDSSNIKPMNLIGVDRGENIPAVIALTDPEGCPLSRFKDSLGNPTHILRIRESYKEKQRTIQAKKEVEQRRAGGYSRKYASKAKNLADDMVRNTARDLLYYAVTQDAMLIFENLSRGFGRQGKRTFMAERQYTRMEDWLTAKLAYEGLPSKTYLSKTLAQYTSKTCSNCGFTITSADYDRVLEKLKKTATGWMTTINGKELKVEGQITYYNRYKRQNVVKDLSVELDRLSEESVNNDISSWTKGRSGEALSLLKKRFSHRPVQEKFVCLNCGFETHADEQAALNIARSWLFLRSQEYKKYQTNKTTGNTDKRAFVETWQSFYRKKLKEVWKPAV

SEQ ID NO: 45648 - protein, 978 aa, synthetic construct
  REGION 1..978: note = engineered CasX variant
QEIKRINKIRRRLVKDSNTKKAGKTGPMKTLLVRVMTPDLRERLENLRKKPENIPQPISNTSRANLNKLLTDYTEMKKAILHVYWEEFQKDPVGLMSRVAQPASKKIDQNKLKPEMDEKGNLTTAGFACSQCGQPLFVYKLEQVSEKGKAYTNYFGRCNVAEHEKLILLAQLKPEKDSDEAVTYSLGKFGQRALDFYSIHVTKESTHPVKPLAQIAGNRYASYPVGKALSDACMGTIASFLSKYQDIIIEHQKVVKGNQKRLESLRELAGKENLEYPSVTLPPQPHTKEGVDAYNEVIARVRMWVNLNLWQKLKLSRDDAKPLLRLKGFPSFPLVERQANEVDWWDMVCNVKKLINEKKEDGKVFWQNLAGYKRQEALRPYLSSEEDRKKGKKFARYQLGDLLLHLEKKHGEDWGKVYGEAWERIDKKVEGLSKHIKLEEERRSEDAQSKAALTDWLRAKASFVIEGLKEADKDEFCRCELKLQKWYGDLRGKPFAIEAENSILDISGFSKQYNCAFIWQKDGVKKLNLYLIINYFKGGKLRFKKIKPEAFEANRFYTVINKKSGEIVPMEVNFNFDDPNLIILPLAFGKRQGREFIWNDLLSLETGSLKLANGRVIEKTLYNRRTRQDEPALFVALTFERREVLDSSNIKPMNLIGVDRGENIPAVIALTDPEGCPLSRFKDSLGNPTHILRIRESYKEKQRTIQAKKEVEQRRAGGYSRKYASKAKNLADDMVRNTARDLLYYAVTQDAMLIFENLSRGFGRQGKRTFMAERQYTRMEDWLTAKLAYEGLPSKTYLSKTLAQYTSKTCSNCGFTITSADYDRVLEKLKKTATGWMTTINGKELKVEGQITYYNRYKRQNVVKDLSVELDRLSEESVNNDISSWTKGRSGEALSLLKKRFSHRPVQEKFVCLNCGFETHADEQAALNIARSWLFLRSQEYKKYQTNKTTGNTDKRAFVETWQSFYRKKLKEVWKPAV

SEQ ID NO: 45649 - protein, 978 aa, synthetic construct
  REGION 1..978: note = engineered CasX variant
QEIKRINKIRRRLVKDSNTKKAGKTGPMKTLLVRVMTPDLRERLENLRKKPENIPQPISNTSRANLNKLLTDYTEMKKAILHVYWEEFQKDPVGLMSRVAQPASKKIDQNKLKPEMDEKGNLTTAGFACSQCGQPLFVYKLEQVSEKGKAYTNYFGRCNVAEHEKLILLAQLKPEKDSDEAVTYSLGKFGQRALDFYSIHVTKESTHPVKPLAQIAGNRYASHPVGKALSDACMGTIASFLSKYQDIIIEHQKVVKGNQKRLESLRELAGKENLEYPSVTLPPQPHTKEGVDAYNEVIARVRMWVNLNLWQKLKLSRDDAKPLLRLKGFPSFPLVERQANEVDWWDMVCNVKKLINEKKEDGKVFWQNLAGYKRQEALRPYLSSEEDRKKGKKFARYQLGDLLLHLEKKHGEDWGKVYGEAWERIDKKVEGLSKHIKLEEERRSEDAQSKAALTDWLRAKASFVIEGLKEADKDEFCRCELKLQKWYGDLRGKPFAIEAENSILDISGFSKQYNCAFIWQKDGVKKLNLYLIINYFKGGKLRFKKIKPEAFEANRFYTVINKKSGEIVPMEVNFNFDDPNLIILPLAFGKRQGREFIWNDLLSLETGSLKLANGRVIEKTLYNRRTRQDEPALFVALTFERREVLDSSNIKPMNLIGVDRGENIPAVIALTDPEGCPLSRFKDSLGNPTHILRIRESYKEKQRTIQAKKEVEQRRAGGYSRKYASKAKNLADDMVRNTARDLLYYAVTQDAMLIFENLSRGFGRQGKRTFMAERQYTRMEDWLTAKLAYEGLPSKTYLSKTLAQYTSKTCSNCGFTITSADYDRVLEKLKKTATGWMTTINGKELKVEGQITYYNRYKRQNVVKDLSVELDRLSEESVNNDISSWTKGRSGEALSLLKKRFSHRPVQEKFVCLNCGFETHADEQAALNIARSWLFLRSQEYKKYQTNKTTGNTDKRAFVETWQSFYRKKLKEVWKPAV

SEQ ID NO: 45650 - protein, 978 aa, synthetic construct
  REGION 1..978: note = engineered CasX variant
QEIKRINKIRRRLVKDSNTKKAGKTGPMKTLLVRVMTPDLRERLENLRKKPENIPQPISNTSRANLNKLLTDYTEMKKAILHVYWEEFQKDPVGLMSRVAQPASKKIDQNKLKPEMDEKGNLTTAGFACSQCGQPLFVYKLEQVSEKGKAYTNYFGRCNVAEHEKLILLAQLKPEKDSDEAVTYSLGKFGQRALDFYSIHVTKESTHPVKPLAQIAGNRYASSPVGKALSDACMGTIASFLSKYQDIIIEHQKVVKGNQKRLESLRELAGKENLEYPSVTLPPQPHTKEGVDAYNEVIARVRMWVNLNLWQKLKLSRDDAKPLLRLKGFPSFPLVERQANEVDWWDMVCNVKKLINEKKEDGKVFWQNLAGYKRQEALRPYLSSEEDRKKGKKFARYQLGDLLLHLEKKHGEDWGKVYGEAWERIDKKVEGLSKHIKLEEERRSEDAQSKAALTDWLRAKASFVIEGLKEADKDEFCRCELKLQKWYGDLRGKPFAIEAENSILDISGFSKQYNCAFIWQKDGVKKLNLYLIINYFKGGKLRFKKIKPEAFEANRFYTVINKKSGEIVPMEVNFNFDDPNLIILPLAFGKRQGREFIWNDLLSLETGSLKLANGRVIEKTLYNRRTRQDEPALFVALTFERREVLDSSNIKPMNLIGVDRGENIPAVIALTDPEGCPLSRFKDSLGNPTHILRIRESYKEKQRTIQAKKEVEQRRAGGYSRKYASKAKNLADDMVRNTARDLLYYAVTQDAMLIFENLSRGFGRQGKRTFMAERQYTRMEDWLTAKLAYEGLPSKTYLSKTLAQYTSKTCSNCGFTITSADYDRVLEKLKKTATGWMTTINGKELKVEGQITYYNRYKRQNVVKDLSVELDRLSEESVNNDISSWTKGRSGEALSLLKKRFSHRPVQEKFVCLNCGFETHADEQAALNIARSWLFLRSQEYKKYQTNKTTGNTDKRAFVETWQSFYRKKLKEVWKPAV

SEQ ID NO: 45651 - protein, 978 aa, synthetic construct
  REGION 1..978: note = engineered CasX variant
QEIKRINKIRRRLVKDSNTKKAGKTGPMKTLLVRVMTPDLRERLENLRKKPENIPQPISNTSRANLNKLLTDYTEMKKAILHVYWEEFQKDPVGLMSRVAQPASKKIDQNKLKPEMDEKGNLTTAGFACSQCGQPLFVYKLEQVSEKGKAYTNYFGRCNVAEHEKLILLAQLKPEKDSDEAVTYSLGKFGQRALDFYSIHVTKESTHPVKPLAQIAGNRYASTPVGKALSDACMGTIASFLSKYQDIIIEHQKVVKGNQKRLESLRELAGKENLEYPSVTLPPQPHTKEGVDAYNEVIARVRMWVNLNLWQKLKLSRDDAKPLLRLKGFPSFPLVERQANEVDWWDMVCNVKKLINEKKEDGKVFWQNLAGYKRQEALRPYLSSEEDRKKGKKFARYQLGDLLLHLEKKHGEDWGKVYGEAWERIDKKVEGLSKHIKLEEERRSEDAQSKAALTDWLRAKASFVIEGLKEADKDEFCRCELKLQKWYGDLRGKPFAIEAENSILDISGFSKQYNCAFIWQKDGVKKLNLYLIINYFKGGKLRFKKIKPEAFEANRFYTVINKKSGEIVPMEVNFNFDDPNLIILPLAFGKRQGREFIWNDLLSLETGSLKLANGRVIEKTLYNRRTRQDEPALFVALTFERREVLDSSNIKPMNLIGVDRGENIPAVIALTDPEGCPLSRFKDSLGNPTHILRIRESYKEKQRTIQAKKEVEQRRAGGYSRKYASKAKNLADDMVRNTARDLLYYAVTQDAMLIFENLSRGFGRQGKRTFMAERQYTRMEDWLTAKLAYEGLPSKTYLSKTLAQYTSKTCSNCGFTITSADYDRVLEKLKKTATGWMTTINGKELKVEGQITYYNRYKRQNVVKDLSVELDRLSEESVNNDISSWTKGRSGEALSLLKKRFSHRPVQEKFVCLNCGFETHADEQAALNIARSWLFLRSQEYKKYQTNKTTGNTDKRAFVETWQSFYRKKLKEVWKPAV

SEQ ID NO: 45652 - protein, 978 aa, synthetic construct
  REGION 1..978: note = engineered CasX variant
QEIKRINKIRRRLVKDSNTKKAGKTGPMKTLLVRVMTPDLRERLENLRKKPENIPQPISNTSRANLNKLLTDYTEMKKAILHVYWEEFQKDPVGLMSRVAQPASKKIDQNKLKPEMDEKGNLTTAGFACSQCGQPLFVYKLEQVSEKGKAYTNYFGRCNVAEHEKLILLAQLKPEKDSDEAVTYSLGKFGQRALDFYSIHVTKESTHPVKPLAQIAGNRYASAPVGKALSDACMGTIASFLSKYQDIIIEHQKVVKGNQKRLESLRELAGKENLEYPSVTLPPQPHTKEGVDAYNEVIARVRMWVNLNLWQKLKLSRDDAKPLLRLKGFPSFPLVERQANEVDWWDMVCNVKKLINEKKEDGKVFWQNLAGYKRQEALRPYLSSEEDRKKGKKFARYQLGDLLLHLEKKHGEDWGKVYGEAWERIDKKVEGLSKHIKLEEERRSEDAQSKAALTDWLRAKASFVIEGLKEADKDEFCRCELKLQKWYGDLRGKPFAIEAENSILDISGFSKQYNCAFIWQKDGVKKLNLYLIINYFKGGKLRFKKIKPEAFEANRFYTVINKKSGEIVPMEVNFNFDDPNLIILPLAFGKRQGREFIWNDLLSLETGSLKLANGRVIEKTLYNRRTRQDEPALFVALTFERREVLDSSNIKPMNLIGVDRGENIPAVIALTDPEGCPLSRFKDSLGNPTHILRIRESYKEKQRTIQAKKEVEQRRAGGYSRKYASKAKNLADDMVRNTARDLLYYAVTQDAMLIFENLSRGFGRQGKRTFMAERQYTRMEDWLTAKLAYEGLPSKTYLSKTLAQYTSKTCSNCGFTITSADYDRVLEKLKKTATGWMTTINGKELKVEGQITYYNRYKRQNVVKDLSVELDRLSEESVNNDISSWTKGRSGEALSLLKKRFSHRPVQEKFVCLNCGFETHADEQAALNIARSWLFLRSQEYKKYQTNKTTGNTDKRAFVETWQSFYRKKLKEVWKPAV

SEQ ID NO: 45653 - protein, 978 aa, synthetic construct
  REGION 1..978: note = engineered CasX variant
QEIKRINKIRRRLVKDSNTKKAGKTGPMKTLLVRVMTPDLRERLENLRKKPENIPQPISNTSRANLNKLLTDYTEMKKAILHVYWEEFQKDPVGLMSRVAQPASKKIDQNKLKPEMDEKGNLTTAGFACSQCGQPLFVYKLEQVSEKGKAYTNYFGRCNVAEHEKLILLAQLKPEKDSDEAVTYSLGKFGQRALDFYSIHVTKESTHPVKPLAQIAGNRYASVPVGKALSDACMGTIASFLSKYQDIIIEHQKVVKGNQKRLESLRELAGKENLEYPSVTLPPQPHTKEGVDAYNEVIARVRMWVNLNLWQKLKLSRDDAKPLLRLKGFPSFPLVERQANEVDWWDMVCNVKKLINEKKEDGKVFWQNLAGYKRQEALRPYLSSEEDRKKGKKFARYQLGDLLLHLEKKHGEDWGKVYGEAWERIDKKVEGLSKHIKLEEERRSEDAQSKAALTDWLRAKASFVIEGLKEADKDEFCRCELKLQKWYGDLRGKPFAIEAENSILDISGFSKQYNCAFIWQKDGVKKLNLYLIINYFKGGKLRFKKIKPEAFEANRFYTVINKKSGEIVPMEVNFNFDDPNLIILPLAFGKRQGREFIWNDLLSLETGSLKLANGRVIEKTLYNRRTRQDEPALFVALTFERREVLDSSNIKPMNLIGVDRGENIPAVIALTDPEGCPLSRFKDSLGNPTHILRIRESYKEKQRTIQAKKEVEQRRAGGYSRKYASKAKNLADDMVRNTARDLLYYAVTQDAMLIFENLSRGFGRQGKRTFMAERQYTRMEDWLTAKLAYEGLPSKTYLSKTLAQYTSKTCSNCGFTITSADYDRVLEKLKKTATGWMTTINGKELKVEGQITYYNRYKRQNVVKDLSVELDRLSEESVNNDISSWTKGRSGEALSLLKKRFSHRPVQEKFVCLNCGFETHADEQAALNIARSWLFLRSQEYKKYQTNKTTGNTDKRAFVETWQSFYRKKLKEVWKPAV

SEQ ID NO: 45654 - protein, 978 aa, synthetic construct
  REGION 1..978: note = engineered CasX variant
QEIKRINKIRRRLVKDSNTKKAGKTGPMKTLLVRVMTPDLRERLENLRKKPENIPQPISNTSRANLNKLLTDYTEMKKAILHVYWEEFQKDPVGLMSRVAQPASKKIDQNKLKPEMDEKGNLTTAGFACSQCGQPLFVYKLEQVSEKGKAYTNYFGRCNVAEHEKLIKLAQLKPEKDSDEAVTYSLGKFGQRALDFYSIHVTKESTHPVKPLAQIAGNRYASGPVGKALSDACMGTIASFLSKYQDIIIEHQKVVKGNQKRLESLRELAGKENLEYPSVTLPPQPHTKEGVDAYNEVIARVRMWVNLNLWQKLKLSRDDAKPLLRLKGFPSFPLVERQANEVDWWDMVCNVKKLINEKKEDGKVFWQNLAGYKRQEALRPYLSSEEDRKKGKKFARYQLGDLLLHLEKKHGEDWGKVYGEAWERIDKKVEGLSKHIKLEEERRSEDAQSKAALTDWLRAKASFVIEGLKEADKDEFCRCELKLQKWYGDLRGKPFAIEAENSILDISGFSKQYNCAFIWQKDGVKKLNLYLIINYFKGGKLRFKKIKPEAFEANRFYTVINKKSGEIVPMEVNFNFDDPNLIILPLAFGKRQGREFIWNDLLSLETGSLKLANGRVIEKTLYNRRTRQDEPALFVALTFERREVLDSSNIKPMNLIGVDRGENIPAVIALTDPEGCPLSRFKDSLGNPTHILRIRESYKEKQRTIQAKKEVEQRRAGGYSRKYASKAKNLADDMVRNTARDLLYYAVTQDAMLIFENLSRGFGRQGKRTFMAERQYTRMEDWLTAKLAYEGLPSKTYLSKTLAQYTSKTCSNCGFTITSADYDRVLEKLKKTATGWMTTINGKELKVEGQITYYNRYKRQNVVKDLSVELDRLSEESVNNDISSWTKGRSGEALSLLKKRFSHRPVQEKFVCLNCGFETHADEQAALNIARSWLFLRSQEYKKYQTNKTTGNTDKRAFVETWQSFYRKKLKEVWKPAV

SEQ ID NO: 45655 - protein, 977 aa, synthetic construct
  REGION 1..977: note = engineered CasX variant
QEIKRINKIRRRLVKDSNTKKAGKTGPMKTLLVRVMTPDLRERLENLRKKPENIPQPISNTSRANLNKLLTDYTEMKKAILHVYWEEFQKDPVGLMSRVAQPASKKIDQNKLKPEMDEKGNLTTAGFACSQCGQPLFVYKLEQVSEKGKAYTNYFGRCNVAEHEKLILLAQLKPEKDSDEAVTYSLGKFGQRALDFYSIHVTKESTHPVKPLAQIAGNRYASPVGKALSDACMGTIASFLSKYQDIIIEHQKVVKGNQKRLESLRELAGKENLEYPSVTLPPQPHTKEGVDAYNEVIARVRMWVNLNLWQKLKLSRDDAKPLLRLKGFPSFPLVERQANEVDWWDMVCNVKKLINEKKEDGKVFWQNLAGYKRQEALRPYLSSEEDRKKGKKFARYQLGDLLLHLEKKHGEDWGKVYGEAWERIDKKVEGLSKHIKLEEERRSEDAQSKAALTDWLRAKASFVIEGLKEADKDEFCRCELKLQKWYGDLRGKPFAIEAENSILDISGFSKQYNCAFIWQKDGVKKLNLYLIINYFKGGKLRFKKIKPEAFEANRFYTVINKKSGEIVPMEVNFNFDDPNLIILPLAFGKRQGREFIWNDLLSLETGSLKLANGRVIEKTLYNRRTRQDEPALFVALTFERREVLDSSNIKPMNLIGVDRGENIPAVIALTDPEGCPLSRFKDSLGNPTHILRIRESYKEKQRTIQAKKEVEQRRAGGYSRKYASKAKNLADDMVRNTARDLLYYAVTQDAMLIFENLSRGFGRQGKRTFMAERQYTRMEDWLTAKLAYEGLPSKTYLSKTLAQYTSKTCSNCGFTITSADYDRVLEKLKKTATGWMTTINGKELKVEGQITYYNRYKRQNVVKDLSVELDRLSEESVNNDISSWTKGRSGEALSLLKKRFSHRPVQEKFVCLNCGFETHADEQAALNIARSWLFLRSQEYKKYQTNKTTGNTDKRAFVETWQSFYRKKLKEVWKPAV

SEQ ID NO: 45656 - protein, 978 aa, synthetic construct
  REGION 1..978: note = engineered CasX variant
QEIKRINKIRRRLVKDSNTKKAGKTGPMKTLLVRVMTPDLRERLENLRKKPENIPQPISNTSRANLNKLLTDYTEMKKAILHVYWEEFQKDPVGLMSRVAQPASKKIDQNKLKPEMDEKGNLTTAGFACSQCGQPLFVYKLEQVSEKGKAYTNYFGRCNVAEHEKLILLAQLKPEKDSDEAVTYSLGKFGQRALDFYSIHVTKESTHPVKPLAQIAGNRYASYPVGKALSDACMGTIASFLSKYQDIIIEHQKVVKGNQKRLESLRELAGKENLEYPSVTLPPQPHTKEGVDAYNEVIARVRMWVNLNLWQKLKLSRDDAKPLLRLKGFPSFPLVERQANEVDWWDMVCNVKKLINEKKEDGKVFWQNLAGYKRQEALRPYLSSEEDRKKGKKFARYQLGDLLLHLEKKHGEDWGKVYDEAWERIDKKVEGLSKHIKLEEERRSEDAQSKAALTDWLRAKASFVIEGKKEADKDEFCRCELKLQKWYGDLRGKPFAIEAENSILDISGFSKQYNCAFIWQKDGVKKLNLYLIINYFKGGKLRFKKIKPEAFEANRFYTVINKKSGEIVPMEVNFNFDDPNLIILPLAFGKRQGREFIWNDLLSLETGSLKLANGRVIEKTLYNRRTRQDEPALFVALTFERREVLDSSNIKPMNLIGVDRGENIPAVIALTDPEGCPLSRFKDSLGNPTHILRIRESYKEKQRTIQAKKEVEQRRAGGYSRKYASKAKNLADDMVRNTARDLLYYAVTQDAMLIFENLSRGFGRQGKRTFMAERQYTRMEDWLTAKLAYEGLPSKTYLSKTLAQYTSKTCSNCGFTITSADYDRVLEKLKKTATGWMTTINGKELKVEGQITYYNRYKRQNVVKDLSVELDRLSEESVNNDISSWTKGRSGEALSLLKKRFSHRPVQEKFVCLNCGFETHADEQAALNIARSWLFLRSQEYKKYQTNKTTGNTDKRAFVETWQSFYRKKLKEVWKPAV

SEQ ID NO: 45657 - protein, 978 aa, synthetic construct
  REGION 1..978: note = engineered CasX variant
QEIKRINKIRRRLVKDSNTKKAGKTGPMKTLLVRVMTPDLRERLENLRKKPENIPQPISNTSRANLNKLLTDYTEMKKAILHVYWEEFQKDPVGLMSRVAQPASKKIDQNKLKPEMDEKGNLTTAGFACSQCGQPLFVYKLEQVSEKGKAYTNYFGRCNVAEHEKLILLAQLKPEKDSDEAVTYSLGKFGQRALDFYSIHVTKESTHPVKPLAQIAGNRYASHPVGKALSDACMGTIASFLSKYQDIIIEHQKVVKGNQKRLESLRELAGKENLEYPSVTLPPQPHTKEGVDAYNEVIARVRMWVNLNLWQKLKLSRDDAKPLLRLKGFPSFPLVERQANEVDWWDMVCNVKKLINEKKEDGKVFWQNLAGYKRQEALRPYLSSEEDRKKGKKFARYQLGDLLLHLEKKHGEDWGKVYDEAWERIDKKVEGLSKHIKLEEERRSEDAQSKAALTDWLRAKASFVIEGKKEADKDEFCRCELKLQKWYGDLRGKPFAIEAENSILDISGFSKQYNCAFIWQKDGVKKLNLYLIINYFKGGKLRFKKIKPEAFEANRFYTVINKKSGEIVPMEVNFNFDDPNLIILPLAFGKRQGREFIWNDLLSLETGSLKLANGRVIEKTLYNRRTRQDEPALFVALTFERREVLDSSNIKPMNLIGVDRGENIPAVIALTDPEGCPLSRFKDSLGNPTHILRIRESYKEKQRTIQAKKEVEQRRAGGYSRKYASKAKNLADDMVRNTARDLLYYAVTQDAMLIFENLSRGFGRQGKRTFMAERQYTRMEDWLTAKLAYEGLPSKTYLSKTLAQYTSKTCSNCGFTITSADYDRVLEKLKKTATGWMTTINGKELKVEGQITYYNRYKRQNVVKDLSVELDRLSEESVNNDISSWTKGRSGEALSLLKKRFSHRPVQEKFVCLNCGFETHADEQAALNIARSWLFLRSQEYKKYQTNKTTGNTDKRAFVETWQSFYRKKLKEVWKPAV

SEQ ID NO: 45658 - protein, 978 aa, synthetic construct
  REGION 1..978: note = engineered CasX variant
QEIKRINKIRRRLVKDSNTKKAGKTGPMKTLLVRVMTPDLRERLENLRKKPENIPQPISNTSRANLNKLLTDYTEMKKAILHVYWEEFQKDPVGLMSRVAQPASKKIDQNKLKPEMDEKGNLTTAGFACSQCGQPLFVYKLEQVSEKGKAYTNYFGRCNVAEHEKLILLAQLKPEKDSDEAVTYSLGKFGQRALDFYSIHVTKESTHPVKPLAQIAGNRYASSPVGKALSDACMGTIASFLSKYQDIIIEHQKVVKGNQKRLESLRELAGKENLEYPSVTLPPQPHTKEGVDAYNEVIARVRMWVNLNLWQKLKLSRDDAKPLLRLKGFPSFPLVERQANEVDWWDMVCNVKKLINEKKEDGKVFWQNLAGYKRQEALRPYLSSEEDRKKGKKFARYQLGDLLLHLEKKHGEDWGKVYDEAWERIDKKVEGLSKHIKLEEERRSEDAQSKAALTDWLRAKASFVIEGKKEADKDEFCRCELKLQKWYGDLRGKPFAIEAENSILDISGFSKQYNCAFIWQKDGVKKLNLYLIINYFKGGKLRFKKIKPEAFEANRFYTVINKKSGEIVPMEVNFNFDDPNLIILPLAFGKRQGREFIWNDLLSLETGSLKLANGRVIEKTLYNRRTRQDEPALFVALTFERREVLDSSNIKPMNLIGVDRGENIPAVIALTDPEGCPLSRFKDSLGNPTHILRIRESYKEKQRTIQAKKEVEQRRAGGYSRKYASKAKNLADDMVRNTARDLLYYAVTQDAMLIFENLSRGFGRQGKRTFMAERQYTRMEDWLTAKLAYEGLPSKTYLSKTLAQYTSKTCSNCGFTITSADYDRVLEKLKKTATGWMTTINGKELKVEGQITYYNRYKRQNVVKDLSVELDRLSEESVNNDISSWTKGRSGEALSLLKKRFSHRPVQEKFVCLNCGFETHADEQAALNIARSWLFLRSQEYKKYQTNKTTGNTDKRAFVETWQSFYRKKLKEVWKPAV

SEQ ID NO: 45659 - protein, 978 aa, synthetic construct
  REGION 1..978: note = engineered CasX variant
QEIKRINKIRRRLVKDSNTKKAGKTGPMKTLLVRVMTPDLRERLENLRKKPENIPQPISNTSRANLNKLLTDYTEMKKAILHVYWEEFQKDPVGLMSRVAQPASKKIDQNKLKPEMDEKGNLTTAGFACSQCGQPLFVYKLEQVSEKGKAYTNYFGRCNVAEHEKLILLAQLKPEKDSDEAVTYSLGKFGQRALDFYSIHVTKESTHPVKPLAQIAGNRYASTPVGKALSDACMGTIASFLSKYQDIIIEHQKVVKGNQKRLESLRELAGKENLEYPSVTLPPQPHTKEGVDAYNEVIARVRMWVNLNLWQKLKLSRDDAKPLLRLKGFPSFPLVERQANEVDWWDMVCNVKKLINEKKEDGKVFWQNLAGYKRQEALRPYLSSEEDRKKGKKFARYQLGDLLLHLEKKHGEDWGKVYDEAWERIDKKVEGLSKHIKLEEERRSEDAQSKAALTDWLRAKASFVIEGKKEADKDEFCRCELKLQKWYGDLRGKPFAIEAENSILDISGFSKQYNCAFIWQKDGVKKLNLYLIINYFKGGKLRFKKIKPEAFEANRFYTVINKKSGEIVPMEVNFNFDDPNLIILPLAFGKRQGREFIWNDLLSLETGSLKLANGRVIEKTLYNRRTRQDEPALFVALTFERREVLDSSNIKPMNLIGVDRGENIPAVIALTDPEGCPLSRFKDSLGNPTHILRIRESYKEKQRTIQAKKEVEQRRAGGYSRKYASKAKNLADDMVRNTARDLLYYAVTQDAMLIFENLSRGFGRQGKRTFMAERQYTRMEDWLTAKLAYEGLPSKTYLSKTLAQYTSKTCSNCGFTITSADYDRVLEKLKKTATGWMTTINGKELKVEGQITYYNRYKRQNVVKDLSVELDRLSEESVNNDISSWTKGRSGEALSLLKKRFSHRPVQEKFVCLNCGFETHADEQAALNIARSWLFLRSQEYKKYQTNKTTGNTDKRAFVETWQSFYRKKLKEVWKPAV

SEQ ID NO: 45660 - protein, 978 aa, synthetic construct
  REGION 1..978: note = engineered CasX variant
QEIKRINKIRRRLVKDSNTKKAGKTGPMKTLLVRVMTPDLRERLENLRKKPENIPQPISNTSRANLNKLLTDYTEMKKAILHVYWEEFQKDPVGLMSRVAQPASKKIDQNKLKPEMDEKGNLTTAGFACSQCGQPLFVYKLEQVSEKGKAYTNYFGRCNVAEHEKLILLAQLKPEKDSDEAVTYSLGKFGQRALDFYSIHVTKESTHPVKPLAQIAGNRYASAPVGKALSDACMGTIASFLSKYQDIIIEHQKVVKGNQKRLESLRELAGKENLEYPSVTLPPQPHTKEGVDAYNEVIARVRMWVNLNLWQKLKLSRDDAKPLLRLKGFPSFPLVERQANEVDWWDMVCNVKKLINEKKEDGKVFWQNLAGYKRQEALRPYLSSEEDRKKGKKFARYQLGDLLLHLEKKHGEDWGKVYDEAWERIDKKVEGLSKHIKLEEERRSEDAQSKAALTDWLRAKASFVIEGKKEADKDEFCRCELKLQKWYGDLRGKPFAIEAENSILDISGFSKQYNCAFIWQKDGVKKLNLYLIINYFKGGKLRFKKIKPEAFEANRFYTVINKKSGEIVPMEVNFNFDDPNLIILPLAFGKRQGREFIWNDLLSLETGSLKLANGRVIEKTLYNRRTRQDEPALFVALTFERREVLDSSNIKPMNLIGVDRGENIPAVIALTDPEGCPLSRFKDSLGNPTHILRIRESYKEKQRTIQAKKEVEQRRAGGYSRKYASKAKNLADDMVRNTARDLLYYAVTQDAMLIFENLSRGFGRQGKRTFMAERQYTRMEDWLTAKLAYEGLPSKTYLSKTLAQYTSKTCSNCGFTITSADYDRVLEKLKKTATGWMTTINGKELKVEGQITYYNRYKRQNVVKDLSVELDRLSEESVNNDISSWTKGRSGEALSLLKKRFSHRPVQEKFVCLNCGFETHADEQAALNIARSWLFLRSQEYKKYQTNKTTGNTDKRAFVETWQSFYRKKLKEVWKPAV

SEQ ID NO: 45661 - protein, 978 aa, synthetic construct
  REGION 1..978: note = engineered CasX variant
QEIKRINKIRRRLVKDSNTKKAGKTGPMKTLLVRVMTPDLRERLENLRKKPENIPQPISNTSRANLNKLLTDYTEMKKAILHVYWEEFQKDPVGLMSRVAQPASKKIDQNKLKPEMDEKGNLTTAGFACSQCGQPLFVYKLEQVSEKGKAYTNYFGRCNVAEHEKLILLAQLKPEKDSDEAVTYSLGKFGQRALDFYSIHVTKESTHPVKPLAQIAGNRYASVPVGKALSDACMGTIASFLSKYQDIIIEHQKVVKGNQKRLESLRELAGKENLEYPSVTLPPQPHTKEGVDAYNEVIARVRMWVNLNLWQKLKLSRDDAKPLLRLKGFPSFPLVERQANEVDWWDMVCNVKKLINEKKEDGKVFWQNLAGYKRQEALRPYLSSEEDRKKGKKFARYQLGDLLLHLEKKHGEDWGKVYDEAWERIDKKVEGLSKHIKLEEERRSEDAQSKAALTDWLRAKASFVIEGKKEADKDEFCRCELKLQKWYGDLRGKPFAIEAENSILDISGFSKQYNCAFIWQKDGVKKLNLYLIINYFKGGKLRFKKIKPEAFEANRFYTVINKKSGEIVPMEVNFNFDDPNLIILPLAFGKRQGREFIWNDLLSLETGSLKLANGRVIEKTLYNRRTRQDEPALFVALTFERREVLDSSNIKPMNLIGVDRGENIPAVIALTDPEGCPLSRFKDSLGNPTHILRIRESYKEKQRTIQAKKEVEQRRAGGYSRKYASKAKNLADDMVRNTARDLLYYAVTQDAMLIFENLSRGFGRQGKRTFMAERQYTRMEDWLTAKLAYEGLPSKTYLSKTLAQYTSKTCSNCGFTITSADYDRVLEKLKKTATGWMTTINGKELKVEGQITYYNRYKRQNVVKDLSVELDRLSEESVNNDISSWTKGRSGEALSLLKKRFSHRPVQEKFVCLNCGFETHADEQAALNIARSWLFLRSQEYKKYQTNKTTGNTDKRAFVETWQSFYRKKLKEVWKPAV

SEQ ID NO: 45662 - protein, 978 aa, synthetic construct
  REGION 1..978: note = engineered CasX variant
QEIKRINKIRRRLVKDSNTKKAGKTGPMKTLLVRVMTPDLRERLENLRKKPENIPQPISNTSRANLNKLLTDYTEMKKAILHVYWEEFQKDPVGLMSRVAQPASKKIDQNKLKPEMDEKGNLTTAGFACSQCGQPLFVYKLEQVSEKGKAYTNYFGRCNVAEHEKLIKLAQLKPEKDSDEAVTYSLGKFGQRALDFYSIHVTKESTHPVKPLAQIAGNRYASGPVGKALSDACMGTIASFLSKYQDIIIEHQKVVKGNQKRLESLRELAGKENLEYPSVTLPPQPHTKEGVDAYNEVIARVRMWVNLNLWQKLKLSRDDAKPLLRLKGFPSFPLVERQANEVDWWDMVCNVKKLINEKKEDGKVFWQNLAGYKRQEALRPYLSSEEDRKKGKKFARYQLGDLLLHLEKKHGEDWGKVYDEAWERIDKKVEGLSKHIKLEEERRSEDAQSKAALTDWLRAKASFVIEGKKEADKDEFCRCELKLQKWYGDLRGKPFAIEAENSILDISGFSKQYNCAFIWQKDGVKKLNLYLIINYFKGGKLRFKKIKPEAFEANRFYTVINKKSGEIVPMEVNFNFDDPNLIILPLAFGKRQGREFIWNDLLSLETGSLKLANGRVIEKTLYNRRTRQDEPALFVALTFERREVLDSSNIKPMNLIGVDRGENIPAVIALTDPEGCPLSRFKDSLGNPTHILRIRESYKEKQRTIQAKKEVEQRRAGGYSRKYASKAKNLADDMVRNTARDLLYYAVTQDAMLIFENLSRGFGRQGKRTFMAERQYTRMEDWLTAKLAYEGLPSKTYLSKTLAQYTSKTCSNCGFTITSADYDRVLEKLKKTATGWMTTINGKELKVEGQITYYNRYKRQNVVKDLSVELDRLSEESVNNDISSWTKGRSGEALSLLKKRFSHRPVQEKFVCLNCGFETHADEQAALNIARSWLFLRSQEYKKYQTNKTTGNTDKRAFVETWQSFYRKKLKEVWKPAV

SEQ ID NO: 45663 - protein, 977 aa, synthetic construct
  REGION 1..977: note = engineered CasX variant
QEIKRINKIRRRLVKDSNTKKAGKTGPMKTLLVRVMTPDLRERLENLRKKPENIPQPISNTSRANLNKLLTDYTEMKKAILHVYWEEFQKDPVGLMSRVAQPASKKIDQNKLKPEMDEKGNLTTAGFACSQCGQPLFVYKLEQVSEKGKAYTNYFGRCNVAEHEKLILLAQLKPEKDSDEAVTYSLGKFGQRALDFYSIHVTKESTHPVKPLAQIAGNRYASPVGKALSDACMGTIASFLSKYQDIIIEHQKVVKGNQKRLESLRELAGKENLEYPSVTLPPQPHTKEGVDAYNEVIARVRMWVNLNLWQKLKLSRDDAKPLLRLKGFPSFPLVERQANEVDWWDMVCNVKKLINEKKEDGKVFWQNLAGYKRQEALRPYLSSEEDRKKGKKFARYQLGDLLLHLEKKHGEDWGKVYDEAWERIDKKVEGLSKHIKLEEERRSEDAQSKAALTDWLRAKASFVIEGKKEADKDEFCRCELKLQKWYGDLRGKPFAIEAENSILDISGFSKQYNCAFIWQKDGVKKLNLYLIINYFKGGKLRFKKIKPEAFEANRFYTVINKKSGEIVPMEVNFNFDDPNLIILPLAFGKRQGREFIWNDLLSLETGSLKLANGRVIEKTLYNRRTRQDEPALFVALTFERREVLDSSNIKPMNLIGVDRGENIPAVIALTDPEGCPLSRFKDSLGNPTHILRIRESYKEKQRTIQAKKEVEQRRAGGYSRKYASKAKNLADDMVRNTARDLLYYAVTQDAMLIFENLSRGFGRQGKRTFMAERQYTRMEDWLTAKLAYEGLPSKTYLSKTLAQYTSKTCSNCGFTITSADYDRVLEKLKKTATGWMTTINGKELKVEGQITYYNRYKRQNVVKDLSVELDRLSEESVNNDISSWTKGRSGEALSLLKKRFSHRPVQEKFVCLNCGFETHADEQAALNIARSWLFLRSQEYKKYQTNKTTGNTDKRAFVETWQSFYRKKLKEVWKPAV

SEQ ID NO: 45664 - protein, 978 aa, synthetic construct
  REGION 1..978: note = engineered CasX variant
QEIKRINKIRRRLVKDSNTKKAGKTGPMKTLLVRVMTPDLRERLENLRKKPENIPQPISNTSRANLNKLLTDYTEMKKAILHVYWEEFQKDPVGLMSRVAQPASKKIDQNKLKPEMDEKGNLTTAGFACSQCGQPLFVYKLEQVSEKGKAYTNYFGRCNVAEHEKLILLAQLKPEKDSDEAVTYSLGKFGQRALDFYSIHVTKESTHPVKPLAQIAGNRYASYPVGKALSDACMGTIASFLSKYQDIIIEHQKVVKGNQKRLESLRELAGKENLEYPSVTLPPQPHTKEGVDAYNEVIARVRMWVNLNLWQKLKLSRDDAKPLLRLKGFPSFPLVERQANEVDWWDMVCNVKKLINEKKEDGKVFWQNLAGYKRQEALRPYLSSEEDRKKGKKFARYQLGDLLLHLEKKHGEDWGKVYDEAWERIDKKVEGLSKHIKLEEERRSEDAQSKAALTDWLRAKASFVIEGSKEADKDEFCRCELKLQKWYGDLRGKPFAIEAENSILDISGFSKQYNCAFIWQKDGVKKLNLYLIINYFKGGKLRFKKIKPEAFEANRFYTVINKKSGEIVPMEVNFNFDDPNLIILPLAFGKRQGREFIWNDLLSLETGSLKLANGRVIEKTLYNRRTRQDEPALFVALTFERREVLDSSNIKPMNLIGVDRGENIPAVIALTDPEGCPLSRFKDSLGNPTHILRIRESYKEKQRTIQAKKEVEQRRAGGYSRKYASKAKNLADDMVRNTARDLLYYAVTQDAMLIFENLSRGFGRQGKRTFMAERQYTRMEDWLTAKLAYEGLPSKTYLSKTLAQYTSKTCSNCGFTITSADYDRVLEKLKKTATGWMTTINGKELKVEGQITYYNRYKRQNVVKDLSVELDRLSEESVNNDISSWTKGRSGEALSLLKKRFSHRPVQEKFVCLNCGFETHADEQAALNIARSWLFLRSQEYKKYQTNKTTGNTDKRAFVETWQSFYRKKLKEVWKPAV

SEQ ID NO: 45665 - protein, 978 aa, synthetic construct
  REGION 1..978: note = engineered CasX variant
QEIKRINKIRRRLVKDSNTKKAGKTGPMKTLLVRVMTPDLRERLENLRKKPENIPQPISNTSRANLNKLLTDYTEMKKAILHVYWEEFQKDPVGLMSRVAQPASKKIDQNKLKPEMDEKGNLTTAGFACSQCGQPLFVYKLEQVSEKGKAYTNYFGRCNVAEHEKLILLAQLKPEKDSDEAVTYSLGKFGQRALDFYSIHVTKESTHPVKPLAQIAGNRYASHPVGKALSDACMGTIASFLSKYQDIIIEHQKVVKGNQKRLESLRELAGKENLEYPSVTLPPQPHTKEGVDAYNEVIARVRMWVNLNLWQKLKLSRDDAKPLLRLKGFPSFPLVERQANEVDWWDMVCNVKKLINEKKEDGKVFWQNLAGYKRQEALRPYLSSEEDRKKGKKFARYQLGDLLLHLEKKHGEDWGKVYDEAWERIDKKVEGLSKHIKLEEERRSEDAQSKAALTDWLRAKASFVIEGSKEADKDEFCRCELKLQKWYGDLRGKPFAIEAENSILDISGFSKQYNCAFIWQKDGVKKLNLYLIINYFKGGKLRFKKIKPEAFEANRFYTVINKKSGEIVPMEVNFNFDDPNLIILPLAFGKRQGREFIWNDLLSLETGSLKLANGRVIEKTLYNRRTRQDEPALFVALTFERREVLDSSNIKPMNLIGVDRGENIPAVIALTDPEGCPLSRFKDSLGNPTHILRIRESYKEKQRTIQAKKEVEQRRAGGYSRKYASKAKNLADDMVRNTARDLLYYAVTQDAMLIFENLSRGFGRQGKRTFMAERQYTRMEDWLTAKLAYEGLPSKTYLSKTLAQYTSKTCSNCGFTITSADYDRVLEKLKKTATGWMTTINGKELKVEGQITYYNRYKRQNVVKDLSVELDRLSEESVNNDISSWTKGRSGEALSLLKKRFSHRPVQEKFVCLNCGFETHADEQAALNIARSWLFLRSQEYKKYQTNKTTGNTDKRAFVETWQSFYRKKLKEVWKPAV

SEQ ID NO: 45666 - protein, 978 aa, synthetic construct
  REGION 1..978: note = engineered CasX variant
QEIKRINKIRRRLVKDSNTKKAGKTGPMKTLLVRVMTPDLRERLENLRKKPENIPQPISNTSRANLNKLLTDYTEMKKAILHVYWEEFQKDPVGLMSRVAQPASKKIDQNKLKPEMDEKGNLTTAGFACSQCGQPLFVYKLEQVSEKGKAYTNYFGRCNVAEHEKLILLAQLKPEKDSDEAVTYSLGKFGQRALDFYSIHVTKESTHPVKPLAQIAGNRYASSPVGKALSDACMGTIASFLSKYQDIIIEHQKVVKGNQKRLESLRELAGKENLEYPSVTLPPQPHTKEGVDAYNEVIARVRMWVNLNLWQKLKLSRDDAKPLLRLKGFPSFPLVERQANEVDWWDMVCNVKKLINEKKEDGKVFWQNLAGYKRQEALRPYLSSEEDRKKGKKFARYQLGDLLLHLEKKHGEDWGKVYDEAWERIDKKVEGLSKHIKLEEERRSEDAQSKAALTDWLRAKASFVIEGSKEADKDEFCRCELKLQKWYGDLRGKPFAIEAENSILDISGFSKQYNCAFIWQKDGVKKLNLYLIINYFKGGKLRFKKIKPEAFEANRFYTVINKKSGEIVPMEVNFNFDDPNLIILPLAFGKRQGREFIWNDLLSLETGSLKLANGRVIEKTLYNRRTRQDEPALFVALTFERREVLDSSNIKPMNLIGVDRGENIPAVIALTDPEGCPLSRFKDSLGNPTHILRIRESYKEKQRTIQAKKEVEQRRAGGYSRKYASKAKNLADDMVRNTARDLLYYAVTQDAMLIFENLSRGFGRQGKRTFMAERQYTRMEDWLTAKLAYEGLPSKTYLSKTLAQYTSKTCSNCGFTITSADYDRVLEKLKKTATGWMTTINGKELKVEGQITYYNRYKRQNVVKDLSVELDRLSEESVNNDISSWTKGRSGEALSLLKKRFSHRPVQEKFVCLNCGFETHADEQAALNIARSWLFLRSQEYKKYQTNKTTGNTDKRAFVETWQSFYRKKLKEVWKPAV

SEQ ID NO: 45667 - protein, 978 aa, synthetic construct
  REGION 1..978: note = engineered CasX variant
QEIKRINKIRRRLVKDSNTKKAGKTGPMKTLLVRVMTPDLRERLENLRKKPENIPQPISNTSRANLNKLLTDYTEMKKAILHVYWEEFQKDPVGLMSRVAQPASKKIDQNKLKPEMDEKGNLTTAGFACSQCGQPLFVYKLEQVSEKGKAYTNYFGRCNVAEHEKLILLAQLKPEKDSDEAVTYSLGKFGQRALDFYSIHVTKESTHPVKPLAQIAGNRYASTPVGKALSDACMGTIASFLSKYQDIIIEHQKVVKGNQKRLESLRELAGKENLEYPSVTLPPQPHTKEGVDAYNEVIARVRMWVNLNLWQKLKLSRDDAKPLLRLKGFPSFPLVERQANEVDWWDMVCNVKKLINEKKEDGKVFWQNLAGYKRQEALRPYLSSEEDRKKGKKFARYQLGDLLLHLEKKHGEDWGKVYDEAWERIDKKVEGLSKHIKLEEERRSEDAQSKAALTDWLRAKASFVIEGSKEADKDEFCRCELKLQKWYGDLRGKPFAIEAENSILDISGFSKQYNCAFIWQKDGVKKLNLYLIINYFKGGKLRFKKIKPEAFEANRFYTVINKKSGEIVPMEVNFNFDDPNLIILPLAFGKRQGREFIWNDLLSLETGSLKLANGRVIEKTLYNRRTRQDEPALFVALTFERREVLDSSNIKPMNLIGVDRGENIPAVIALTDPEGCPLSRFKDSLGNPTHILRIRESYKEKQRTIQAKKEVEQRRAGGYSRKYASKAKNLADDMVRNTARDLLYYAVTQDAMLIFENLSRGFGRQGKRTFMAERQYTRMEDWLTAKLAYEGLPSKTYLSKTLAQYTSKTCSNCGFTITSADYDRVLEKLKKTATGWMTTINGKELKVEGQITYYNRYKRQNVVKDLSVELDRLSEESVNNDISSWTKGRSGEALSLLKKRFSHRPVQEKFVCLNCGFETHADEQAALNIARSWLFLRSQEYKKYQTNKTTGNTDKRAFVETWQSFYRKKLKEVWKPAV

SEQ ID NO: 45668 - protein, 978 aa, synthetic construct
  REGION 1..978: note = engineered CasX variant
QEIKRINKIRRRLVKDSNTKKAGKTGPMKTLLVRVMTPDLRERLENLRKKPENIPQPISNTSRANLNKLLTDYTEMKKAILHVYWEEFQKDPVGLMSRVAQPASKKIDQNKLKPEMDEKGNLTTAGFACSQCGQPLFVYKLEQVSEKGKAYTNYFGRCNVAEHEKLILLAQLKPEKDSDEAVTYSLGKFGQRALDFYSIHVTKESTHPVKPLAQIAGNRYASAPVGKALSDACMGTIASFLSKYQDIIIEHQKVVKGNQKRLESLRELAGKENLEYPSVTLPPQPHTKEGVDAYNEVIARVRMWVNLNLWQKLKLSRDDAKPLLRLKGFPSFPLVERQANEVDWWDMVCNVKKLINEKKEDGKVFWQNLAGYKRQEALRPYLSSEEDRKKGKKFARYQLGDLLLHLEKKHGEDWGKVYDEAWERIDKKVEGLSKHIKLEEERRSEDAQSKAALTDWLRAKASFVIEGSKEADKDEFCRCELKLQKWYGDLRGKPFAIEAENSILDISGFSKQYNCAFIWQKDGVKKLNLYLIINYFKGGKLRFKKIKPEAFEANRFYTVINKKSGEIVPMEVNFNFDDPNLIILPLAFGKRQGREFIWNDLLSLETGSLKLANGRVIEKTLYNRRTRQDEPALFVALTFERREVLDSSNIKPMNLIGVDRGENIPAVIALTDPEGCPLSRFKDSLGNPTHILRIRESYKEKQRTIQAKKEVEQRRAGGYSRKYASKAKNLADDMVRNTARDLLYYAVTQDAMLIFENLSRGFGRQGKRTFMAERQYTRMEDWLTAKLAYEGLPSKTYLSKTLAQYTSKTCSNCGFTITSADYDRVLEKLKKTATGWMTTINGKELKVEGQITYYNRYKRQNVVKDLSVELDRLSEESVNNDISSWTKGRSGEALSLLKKRFSHRPVQEKFVCLNCGFETHADEQAALNIARSWLFLRSQEYKKYQTNKTTGNTDKRAFVETWQSFYRKKLKEVWKPAV

SEQ ID NO: 45669 - protein, 978 aa, synthetic construct
  REGION 1..978: note = engineered CasX variant
QEIKRINKIRRRLVKDSNTKKAGKTGPMKTLLVRVMTPDLRERLENLRKKPENIPQPISNTSRANLNKLLTDYTEMKKAILHVYWEEFQKDPVGLMSRVAQPASKKIDQNKLKPEMDEKGNLTTAGFACSQCGQPLFVYKLEQVSEKGKAYTNYFGRCNVAEHEKLILLAQLKPEKDSDEAVTYSLGKFGQRALDFYSIHVTKESTHPVKPLAQIAGNRYASVPVGKALSDACMGTIASFLSKYQDIIIEHQKVVKGNQKRLESLRELAGKENLEYPSVTLPPQPHTKEGVDAYNEVIARVRMWVNLNLWQKLKLSRDDAKPLLRLKGFPSFPLVERQANEVDWWDMVCNVKKLINEKKEDGKVFWQNLAGYKRQEALRPYLSSEEDRKKGKKFARYQLGDLLLHLEKKHGEDWGKVYDEAWERIDKKVEGLSKHIKLEEERRSEDAQSKAALTDWLRAKASFVIEGSKEADKDEFCRCELKLQKWYGDLRGKPFAIEAENSILDISGFSKQYNCAFIWQKDGVKKLNLYLIINYFKGGKLRFKKIKPEAFEANRFYTVINKKSGEIVPMEVNFNFDDPNLIILPLAFGKRQGREFIWNDLLSLETGSLKLANGRVIEKTLYNRRTRQDEPALFVALTFERREVLDSSNIKPMNLIGVDRGENIPAVIALTDPEGCPLSRFKDSLGNPTHILRIRESYKEKQRTIQAKKEVEQRRAGGYSRKYASKAKNLADDMVRNTARDLLYYAVTQDAMLIFENLSRGFGRQGKRTFMAERQYTRMEDWLTAKLAYEGLPSKTYLSKTLAQYTSKTCSNCGFTITSADYDRVLEKLKKTATGWMTTINGKELKVEGQITYYNRYKRQNVVKDLSVELDRLSEESVNNDISSWTKGRSGEALSLLKKRFSHRPVQEKFVCLNCGFETHADEQAALNIARSWLFLRSQEYKKYQTNKTTGNTDKRAFVETWQSFYRKKLKEVWKPAV

SEQ ID NO: 45670 - protein, 978 aa, synthetic construct
  REGION 1..978: note = engineered CasX variant
QEIKRINKIRRRLVKDSNTKKAGKTGPMKTLLVRVMTPDLRERLENLRKKPENIPQPISNTSRANLNKLLTDYTEMKKAILHVYWEEFQKDPVGLMSRVAQPASKKIDQNKLKPEMDEKGNLTTAGFACSQCGQPLFVYKLEQVSEKGKAYTNYFGRCNVAEHEKLIKLAQLKPEKDSDEAVTYSLGKFGQRALDFYSIHVTKESTHPVKPLAQIAGNRYASGPVGKALSDACMGTIASFLSKYQDIIIEHQKVVKGNQKRLESLRELAGKENLEYPSVTLPPQPHTKEGVDAYNEVIARVRMWVNLNLWQKLKLSRDDAKPLLRLKGFPSFPLVERQANEVDWWDMVCNVKKLINEKKEDGKVFWQNLAGYKRQEALRPYLSSEEDRKKGKKFARYQLGDLLLHLEKKHGEDWGKVYDEAWERIDKKVEGLSKHIKLEEERRSEDAQSKAALTDWLRAKASFVIEGSKEADKDEFCRCELKLQKWYGDLRGKPFAIEAENSILDISGFSKQYNCAFIWQKDGVKKLNLYLIINYFKGGKLRFKKIKPEAFEANRFYTVINKKSGEIVPMEVNFNFDDPNLIILPLAFGKRQGREFIWNDLLSLETGSLKLANGRVIEKTLYNRRTRQDEPALFVALTFERREVLDSSNIKPMNLIGVDRGENIPAVIALTDPEGCPLSRFKDSLGNPTHILRIRESYKEKQRTIQAKKEVEQRRAGGYSRKYASKAKNLADDMVRNTARDLLYYAVTQDAMLIFENLSRGFGRQGKRTFMAERQYTRMEDWLTAKLAYEGLPSKTYLSKTLAQYTSKTCSNCGFTITSADYDRVLEKLKKTATGWMTTINGKELKVEGQITYYNRYKRQNVVKDLSVELDRLSEESVNNDISSWTKGRSGEALSLLKKRFSHRPVQEKFVCLNCGFETHADEQAALNIARSWLFLRSQEYKKYQTNKTTGNTDKRAFVETWQSFYRKKLKEVWKPAV

SEQ ID NO: 45671 - protein, 977 aa, synthetic construct
  REGION 1..977: note = engineered CasX variant
QEIKRINKIRRRLVKDSNTKKAGKTGPMKTLLVRVMTPDLRERLENLRKKPENIPQPISNTSRANLNKLLTDYTEMKKAILHVYWEEFQKDPVGLMSRVAQPASKKIDQNKLKPEMDEKGNLTTAGFACSQCGQPLFVYKLEQVSEKGKAYTNYFGRCNVAEHEKLILLAQLKPEKDSDEAVTYSLGKFGQRALDFYSIHVTKESTHPVKPLAQIAGNRYASPVGKALSDACMGTIASFLSKYQDIIIEHQKVVKGNQKRLESLRELAGKENLEYPSVTLPPQPHTKEGVDAYNEVIARVRMWVNLNLWQKLKLSRDDAKPLLRLKGFPSFPLVERQANEVDWWDMVCNVKKLINEKKEDGKVFWQNLAGYKRQEALRPYLSSEEDRKKGKKFARYQLGDLLLHLEKKHGEDWGKVYDEAWERIDKKVEGLSKHIKLEEERRSEDAQSKAALTDWLRAKASFVIEGSKEADKDEFCRCELKLQKWYGDLRGKPFAIEAENSILDISGFSKQYNCAFIWQKDGVKKLNLYLIINYFKGGKLRFKKIKPEAFEANRFYTVINKKSGEIVPMEVNFNFDDPNLIILPLAFGKRQGREFIWNDLLSLETGSLKLANGRVIEKTLYNRRTRQDEPALFVALTFERREVLDSSNIKPMNLIGVDRGENIPAVIALTDPEGCPLSRFKDSLGNPTHILRIRESYKEKQRTIQAKKEVEQRRAGGYSRKYASKAKNLADDMVRNTARDLLYYAVTQDAMLIFENLSRGFGRQGKRTFMAERQYTRMEDWLTAKLAYEGLPSKTYLSKTLAQYTSKTCSNCGFTITSADYDRVLEKLKKTATGWMTTINGKELKVEGQITYYNRYKRQNVVKDLSVELDRLSEESVNNDISSWTKGRSGEALSLLKKRFSHRPVQEKFVCLNCGFETHADEQAALNIARSWLFLRSQEYKKYQTNKTTGNTDKRAFVETWQSFYRKKLKEVWKPAV

SEQ ID NO: 45672 - protein, 979 aa, synthetic construct
  REGION 1..979: note = engineered CasX variant
QEIKRINKIRRRLVKDSNTKKAGKTGPMKTLLVRVMTPDLRERLENLRKKPENIPQPISNTSRANLNKLLTDYTEMKKAILHVYWEEFQKDPVGLMSRVAQPASKKIDQNKLKPEMDEKGNLTTAGFACSQCGQPLFVYKLEQVSEKGKAYTNYFGRCNVAEHEKLILLAQLKPEKDSDEAVTYSLGKFGQRALDFYSIHVTKESTHPVKPLAQIAGNRYASYPVGKALSDACMGTIASFLSKYQDIIIEHQKVVKGNQKRLESLRELAGKENLEYPSVTLPPQPHTKEGVDAYNEVIARVRMWVNLNLWQKLKLSRDDAKPLLRLKGFPSFPLVERQANEVDWWDMVCNVKKLINEKKEDGKVFWQNLAGYKRQEALRPYLSSEEDRKKGKKFARYQLGDLLLHLEKKHGEDWGKVYDEAWERIDKKVEGLSKHIKLEEERRSEDAQSKAALTDWLRAKASFVIEGLKEADDKDEFCRCELKLQKWYGDLRGKPFAIEAENSILDISGFSKQYNCAFIWQKDGVKKLNLYLIINYFKGGKLRFKKIKPEAFEANRFYTVINKKSGEIVPMEVNFNFDDPNLIILPLAFGKRQGREFIWNDLLSLETGSLKLANGRVIEKTLYNRRTRQDEPALFVALTFERREVLDSSNIKPMNLIGVDRGENIPAVIALTDPEGCPLSRFKDSLGNPTHILRIRESYKEKQRTIQAKKEVEQRRAGGYSRKYASKAKNLADDMVRNTARDLLYYAVTQDAMLIFENLSRGFGRQGKRTFMAERQYTRMEDWLTAKLAYEGLPSKTYLSKTLAQYTSKTCSNCGFTITSADYDRVLEKLKKTATGWMTTINGKELKVEGQITYYNRYKRQNVVKDLSVELDRLSEESVNNDISSWTKGRSGEALSLLKKRFSHRPVQEKFVCLNCGFETHADEQAALNIARSWLFLRSQEYKKYQTNKTTGNTDKRAFVETWQSFYRKKLKEVWKPAV

SEQ ID NO: 45673 - protein, 979 aa, synthetic construct
  REGION 1..979: note = engineered CasX variant
QEIKRINKIRRRLVKDSNTKKAGKTGPMKTLLVRVMTPDLRERLENLRKKPENIPQPISNTSRANLNKLLTDYTEMKKAILHVYWEEFQKDPVGLMSRVAQPASKKIDQNKLKPEMDEKGNLTTAGFACSQCGQPLFVYKLEQVSEKGKAYTNYFGRCNVAEHEKLILLAQLKPEKDSDEAVTYSLGKFGQRALDFYSIHVTKESTHPVKPLAQIAGNRYASHPVGKALSDACMGTIASFLSKYQDIIIEHQKVVKGNQKRLESLRELAGKENLEYPSVTLPPQPHTKEGVDAYNEVIARVRMWVNLNLWQKLKLSRDDAKPLLRLKGFPSFPLVERQANEVDWWDMVCNVKKLINEKKEDGKVFWQNLAGYKRQEALRPYLSSEEDRKKGKKFARYQLGDLLLHLEKKHGEDWGKVYDEAWERIDKKVEGLSKHIKLEEERRSEDAQSKAALTDWLRAKASFVIEGLKEADDKDEFCRCELKLQKWYGDLRGKPFAIEAENSILDISGFSKQYNCAFIWQKDGVKKLNLYLIINYFKGGKLRFKKIKPEAFEANRFYTVINKKSGEIVPMEVNFNFDDPNLIILPLAFGKRQGREFIWNDLLSLETGSLKLANGRVIEKTLYNRRTRQDEPALFVALTFERREVLDSSNIKPMNLIGVDRGENIPAVIALTDPEGCPLSRFKDSLGNPTHILRIRESYKEKQRTIQAKKEVEQRRAGGYSRKYASKAKNLADDMVRNTARDLLYYAVTQDAMLIFENLSRGFGRQGKRTFMAERQYTRMEDWLTAKLAYEGLPSKTYLSKTLAQYTSKTCSNCGFTITSADYDRVLEKLKKTATGWMTTINGKELKVEGQITYYNRYKRQNVVKDLSVELDRLSEESVNNDISSWTKGRSGEALSLLKKRFSHRPVQEKFVCLNCGFETHADEQAALNIARSWLFLRSQEYKKYQTNKTTGNTDKRAFVETWQSFYRKKLKEVWKPAV

SEQ ID NO: 45674 - protein, 979 aa, synthetic construct
  REGION 1..979: note = engineered CasX variant
QEIKRINKIRRRLVKDSNTKKAGKTGPMKTLLVRVMTPDLRERLENLRKKPENIPQPISNTSRANLNKLLTDYTEMKKAILHVYWEEFQKDPVGLMSRVAQPASKKIDQNKLKPEMDEKGNLTTAGFACSQCGQPLFVYKLEQVSEKGKAYTNYFGRCNVAEHEKLILLAQLKPEKDSDEAVTYSLGKFGQRALDFYSIHVTKESTHPVKPLAQIAGNRYASSPVGKALSDACMGTIASFLSKYQDIIIEHQKVVKGNQKRLESLRELAGKENLEYPSVTLPPQPHTKEGVDAYNEVIARVRMWVNLNLWQKLKLSRDDAKPLLRLKGFPSFPLVERQANEVDWWDMVCNVKKLINEKKEDGKVFWQNLAGYKRQEALRPYLSSEEDRKKGKKFARYQLGDLLLHLEKKHGEDWGKVYDEAWERIDKKVEGLSKHIKLEEERRSEDAQSKAALTDWLRAKASFVIEGLKEADDKDEFCRCELKLQKWYGDLRGKPFAIEAENSILDISGFSKQYNCAFIWQKDGVKKLNLYLIINYFKGGKLRFKKIKPEAFEANRFYTVINKKSGEIVPMEVNFNFDDPNLIILPLAFGKRQGREFIWNDLLSLETGSLKLANGRVIEKTLYNRRTRQDEPALFVALTFERREVLDSSNIKPMNLIGVDRGENIPAVIALTDPEGCPLSRFKDSLGNPTHILRIRESYKEKQRTIQAKKEVEQRRAGGYSRKYASKAKNLADDMVRNTARDLLYYAVTQDAMLIFENLSRGFGRQGKRTFMAERQYTRMEDWLTAKLAYEGLPSKTYLSKTLAQYTSKTCSNCGFTITSADYDRVLEKLKKTATGWMTTINGKELKVEGQITYYNRYKRQNVVKDLSVELDRLSEESVNNDISSWTKGRSGEALSLLKKRFSHRPVQEKFVCLNCGFETHADEQAALNIARSWLFLRSQEYKKYQTNKTTGNTDKRAFVETWQSFYRKKLKEVWKPAV

SEQ ID NO: 45675 - protein, 979 aa, synthetic construct
  REGION 1..979: note = engineered CasX variant
QEIKRINKIRRRLVKDSNTKKAGKTGPMKTLLVRVMTPDLRERLENLRKKPENIPQPISNTSRANLNKLLTDYTEMKKAILHVYWEEFQKDPVGLMSRVAQPASKKIDQNKLKPEMDEKGNLTTAGFACSQCGQPLFVYKLEQVSEKGKAYTNYFGRCNVAEHEKLILLAQLKPEKDSDEAVTYSLGKFGQRALDFYSIHVTKESTHPVKPLAQIAGNRYASTPVGKALSDACMGTIASFLSKYQDIIIEHQKVVKGNQKRLESLRELAGKENLEYPSVTLPPQPHTKEGVDAYNEVIARVRMWVNLNLWQKLKLSRDDAKPLLRLKGFPSFPLVERQANEVDWWDMVCNVKKLINEKKEDGKVFWQNLAGYKRQEALRPYLSSEEDRKKGKKFARYQLGDLLLHLEKKHGEDWGKVYDEAWERIDKKVEGLSKHIKLEEERRSEDAQSKAALTDWLRAKASFVIEGLKEADDKDEFCRCELKLQKWYGDLRGKPFAIEAENSILDISGFSKQYNCAFIWQKDGVKKLNLYLIINYFKGGKLRFKKIKPEAFEANRFYTVINKKSGEIVPMEVNFNFDDPNLIILPLAFGKRQGREFIWNDLLSLETGSLKLANGRVIEKTLYNRRTRQDEPALFVALTFERREVLDSSNIKPMNLIGVDRGENIPAVIALTDPEGCPLSRFKDSLGNPTHILRIRESYKEKQRTIQAKKEVEQRRAGGYSRKYASKAKNLADDMVRNTARDLLYYAVTQDAMLIFENLSRGFGRQGKRTFMAERQYTRMEDWLTAKLAYEGLPSKTYLSKTLAQYTSKTCSNCGFTITSADYDRVLEKLKKTATGWMTTINGKELKVEGQITYYNRYKRQNVVKDLSVELDRLSEESVNNDISSWTKGRSGEALSLLKKRFSHRPVQEKFVCLNCGFETHADEQAALNIARSWLFLRSQEYKKYQTNKTTGNTDKRAFVETWQSFYRKKLKEVWKPAV

SEQ ID NO: 45676 - protein, 979 aa, synthetic construct
  REGION 1..979: note = engineered CasX variant
QEIKRINKIRRRLVKDSNTKKAGKTGPMKTLLVRVMTPDLRERLENLRKKPENIPQPISNTSRANLNKLLTDYTEMKKAILHVYWEEFQKDPVGLMSRVAQPASKKIDQNKLKPEMDEKGNLTTAGFACSQCGQPLFVYKLEQVSEKGKAYTNYFGRCNVAEHEKLILLAQLKPEKDSDEAVTYSLGKFGQRALDFYSIHVTKESTHPVKPLAQIAGNRYASAPVGKALSDACMGTIASFLSKYQDIIIEHQKVVKGNQKRLESLRELAGKENLEYPSVTLPPQPHTKEGVDAYNEVIARVRMWVNLNLWQKLKLSRDDAKPLLRLKGFPSFPLVERQANEVDWWDMVCNVKKLINEKKEDGKVFWQNLAGYKRQEALRPYLSSEEDRKKGKKFARYQLGDLLLHLEKKHGEDWGKVYDEAWERIDKKVEGLSKHIKLEEERRSEDAQSKAALTDWLRAKASFVIEGLKEADDKDEFCRCELKLQKWYGDLRGKPFAIEAENSILDISGFSKQYNCAFIWQKDGVKKLNLYLIINYFKGGKLRFKKIKPEAFEANRFYTVINKKSGEIVPMEVNFNFDDPNLIILPLAFGKRQGREFIWNDLLSLETGSLKLANGRVIEKTLYNRRTRQDEPALFVALTFERREVLDSSNIKPMNLIGVDRGENIPAVIALTDPEGCPLSRFKDSLGNPTHILRIRESYKEKQRTIQAKKEVEQRRAGGYSRKYASKAKNLADDMVRNTARDLLYYAVTQDAMLIFENLSRGFGRQGKRTFMAERQYTRMEDWLTAKLAYEGLPSKTYLSKTLAQYTSKTCSNCGFTITSADYDRVLEKLKKTATGWMTTINGKELKVEGQITYYNRYKRQNVVKDLSVELDRLSEESVNNDISSWTKGRSGEALSLLKKRFSHRPVQEKFVCLNCGFETHADEQAALNIARSWLFLRSQEYKKYQTNKTTGNTDKRAFVETWQSFYRKKLKEVWKPAV

SEQ ID NO: 45677 - protein, 979 aa, synthetic construct
  REGION 1..979: note = engineered CasX variant
QEIKRINKIRRRLVKDSNTKKAGKTGPMKTLLVRVMTPDLRERLENLRKKPENIPQPISNTSRANLNKLLTDYTEMKKAILHVYWEEFQKDPVGLMSRVAQPASKKIDQNKLKPEMDEKGNLTTAGFACSQCGQPLFVYKLEQVSEKGKAYTNYFGRCNVAEHEKLILLAQLKPEKDSDEAVTYSLGKFGQRALDFYSIHVTKESTHPVKPLAQIAGNRYASVPVGKALSDACMGTIASFLSKYQDIIIEHQKVVKGNQKRLESLRELAGKENLEYPSVTLPPQPHTKEGVDAYNEVIARVRMWVNLNLWQKLKLSRDDAKPLLRLKGFPSFPLVERQANEVDWWDMVCNVKKLINEKKEDGKVFWQNLAGYKRQEALRPYLSSEEDRKKGKKFARYQLGDLLLHLEKKHGEDWGKVYDEAWERIDKKVEGLSKHIKLEEERRSEDAQSKAALTDWLRAKASFVIEGLKEADDKDEFCRCELKLQKWYGDLRGKPFAIEAENSILDISGFSKQYNCAFIWQKDGVKKLNLYLIINYFKGGKLRFKKIKPEAFEANRFYTVINKKSGEIVPMEVNFNFDDPNLIILPLAFGKRQGREFIWNDLLSLETGSLKLANGRVIEKTLYNRRTRQDEPALFVALTFERREVLDSSNIKPMNLIGVDRGENIPAVIALTDPEGCPLSRFKDSLGNPTHILRIRESYKEKQRTIQAKKEVEQRRAGGYSRKYASKAKNLADDMVRNTARDLLYYAVTQDAMLIFENLSRGFGRQGKRTFMAERQYTRMEDWLTAKLAYEGLPSKTYLSKTLAQYTSKTCSNCGFTITSADYDRVLEKLKKTATGWMTTINGKELKVEGQITYYNRYKRQNVVKDLSVELDRLSEESVNNDISSWTKGRSGEALSLLKKRFSHRPVQEKFVCLNCGFETHADEQAALNIARSWLFLRSQEYKKYQTNKTTGNTDKRAFVETWQSFYRKKLKEVWKPAV

SEQ ID NO: 45678 - protein, 979 aa, synthetic construct
  REGION 1..979: note = engineered CasX variant
QEIKRINKIRRRLVKDSNTKKAGKTGPMKTLLVRVMTPDLRERLENLRKKPENIPQPISNTSRANLNKLLTDYTEMKKAILHVYWEEFQKDPVGLMSRVAQPASKKIDQNKLKPEMDEKGNLTTAGFACSQCGQPLFVYKLEQVSEKGKAYTNYFGRCNVAEHEKLIKLAQLKPEKDSDEAVTYSLGKFGQRALDFYSIHVTKESTHPVKPLAQIAGNRYASGPVGKALSDACMGTIASFLSKYQDIIIEHQKVVKGNQKRLESLRELAGKENLEYPSVTLPPQPHTKEGVDAYNEVIARVRMWVNLNLWQKLKLSRDDAKPLLRLKGFPSFPLVERQANEVDWWDMVCNVKKLINEKKEDGKVFWQNLAGYKRQEALRPYLSSEEDRKKGKKFARYQLGDLLLHLEKKHGEDWGKVYDEAWERIDKKVEGLSKHIKLEEERRSEDAQSKAALTDWLRAKASFVIEGLKEADDKDEFCRCELKLQKWYGDLRGKPFAIEAENSILDISGFSKQYNCAFIWQKDGVKKLNLYLIINYFKGGKLRFKKIKPEAFEANRFYTVINKKSGEIVPMEVNFNFDDPNLIILPLAFGKRQGREFIWNDLLSLETGSLKLANGRVIEKTLYNRRTRQDEPALFVALTFERREVLDSSNIKPMNLIGVDRGENIPAVIALTDPEGCPLSRFKDSLGNPTHILRIRESYKEKQRTIQAKKEVEQRRAGGYSRKYASKAKNLADDMVRNTARDLLYYAVTQDAMLIFENLSRGFGRQGKRTFMAERQYTRMEDWLTAKLAYEGLPSKTYLSKTLAQYTSKTCSNCGFTITSADYDRVLEKLKKTATGWMTTINGKELKVEGQITYYNRYKRQNVVKDLSVELDRLSEESVNNDISSWTKGRSGEALSLLKKRFSHRPVQEKFVCLNCGFETHADEQAALNIARSWLFLRSQEYKKYQTNKTTGNTDKRAFVETWQSFYRKKLKEVWKPAV

SEQ ID NO: 45679 - protein, 978 aa, synthetic construct
  REGION 1..978: note = engineered CasX variant
QEIKRINKIRRRLVKDSNTKKAGKTGPMKTLLVRVMTPDLRERLENLRKKPENIPQPISNTSRANLNKLLTDYTEMKKAILHVYWEEFQKDPVGLMSRVAQPASKKIDQNKLKPEMDEKGNLTTAGFACSQCGQPLFVYKLEQVSEKGKAYTNYFGRCNVAEHEKLILLAQLKPEKDSDEAVTYSLGKFGQRALDFYSIHVTKESTHPVKPLAQIAGNRYASPVGKALSDACMGTIASFLSKYQDIIIEHQKVVKGNQKRLESLRELAGKENLEYPSVTLPPQPHTKEGVDAYNEVIARVRMWVNLNLWQKLKLSRDDAKPLLRLKGFPSFPLVERQANEVDWWDMVCNVKKLINEKKEDGKVFWQNLAGYKRQEALRPYLSSEEDRKKGKKFARYQLGDLLLHLEKKHGEDWGKVYDEAWERIDKKVEGLSKHIKLEEERRSEDAQSKAALTDWLRAKASFVIEGLKEADDKDEFCRCELKLQKWYGDLRGKPFAIEAENSILDISGFSKQYNCAFIWQKDGVKKLNLYLIINYFKGGKLRFKKIKPEAFEANRFYTVINKKSGEIVPMEVNFNFDDPNLIILPLAFGKRQGREFIWNDLLSLETGSLKLANGRVIEKTLYNRRTRQDEPALFVALTFERREVLDSSNIKPMNLIGVDRGENIPAVIALTDPEGCPLSRFKDSLGNPTHILRIRESYKEKQRTIQAKKEVEQRRAGGYSRKYASKAKNLADDMVRNTARDLLYYAVTQDAMLIFENLSRGFGRQGKRTFMAERQYTRMEDWLTAKLAYEGLPSKTYLSKTLAQYTSKTCSNCGFTITSADYDRVLEKLKKTATGWMTTINGKELKVEGQITYYNRYKRQNVVKDLSVELDRLSEESVNNDISSWTKGRSGEALSLLKKRFSHRPVQEKFVCLNCGFETHADEQAALNIARSWLFLRSQEYKKYQTNKTTGNTDKRAFVETWQSFYRKKLKEVWKPAV

SEQ ID NO: 45680 - protein, 979 aa, synthetic construct
  REGION 1..979: note = engineered CasX variant
QEIKRINKIRRRLVKDSNTKKAGKTGPMKTLLVRVMTPDLRERLENLRKKPENIPQPISNTSRANLNKLLTDYTEMKKAILHVYWEEFQKDPVGLMSRVAQPASKKIDQNKLKPEMDEKGNLTTAGFACSQCGQPLFVYKLEQVSEKGKAYTNYFGRCNVAEHEKLILLAQLKPEKDSDEAVTYSLGKFGQRALDFYSIHVTKESTHPVKPLAQIAGNRYASYPVGKALSDACMGTIASFLSKYQDIIIEHQKVVKGNQKRLESLRELAGKENLEYPSVTLPPQPHTKEGVDAYNEVIARVRMWVNLNLWQKLKLSRDDAKPLLRLKGFPSFPLVERQANEVDWWDMVCNVKKLINEKKEDGKVFWQNLAGYKRQEALRPYLSSEEDRKKGKKFARYQLGDLLLHLEKKHGEDWGKVYDEAWERIDKKVEGLSKHIKLEEERRSEDAQSKAALTDWLRAKASFVIEGLKEADKDEFCRCELKLQKWYGDLRGKPFAIEAENSILDISGFSKQYNCAFIWQKDGVKKLNLYLIINYFKGGKLRFKKIKPEAFEANRFYTVINKKSGEIVPMEVNFNFDDPNLIILPLAFGKRQGREFIWNDLLSLETGSLKLANGRVIEKTLYNRRTRQDEPALFVALTFERREVLDSSNIKPMNLIGVDRGENIPAVIALTDPEGCPLSRFKDSLGNPTHILRIRESYKEKQRTIQAKKEVEQRRAGGYSRKYASKAKNLADDMVRNTARDLLYYAVTQDAMLIFENLSRGFGRQGKRTFMAERQYTRMEDWLTAKLAYEGLPSKTYLSKTLAQYTSKTCSNCGFTITSADYDRVLEKLKKTATGWMTTINGKELKVEGQITYYNRYKRQNVVKDLSVELDRLSEESVNNDISSWTKGRSGNEALSLLKKRFSHRPVQEKFVCLNCGFETHADEQAALNIARSWLFLRSQEYKKYQTNKTTGNTDKRAFVETWQSFYRKKLKEVWKPAV

SEQ ID NO: 45681 - protein, 979 aa, synthetic construct
  REGION 1..979: note = engineered CasX variant
QEIKRINKIRRRLVKDSNTKKAGKTGPMKTLLVRVMTPDLRERLENLRKKPENIPQPISNTSRANLNKLLTDYTEMKKAILHVYWEEFQKDPVGLMSRVAQPASKKIDQNKLKPEMDEKGNLTTAGFACSQCGQPLFVYKLEQVSEKGKAYTNYFGRCNVAEHEKLILLAQLKPEKDSDEAVTYSLGKFGQRALDFYSIHVTKESTHPVKPLAQIAGNRYASHPVGKALSDACMGTIASFLSKYQDIIIEHQKVVKGNQKRLESLRELAGKENLEYPSVTLPPQPHTKEGVDAYNEVIARVRMWVNLNLWQKLKLSRDDAKPLLRLKGFPSFPLVERQANEVDWWDMVCNVKKLINEKKEDGKVFWQNLAGYKRQEALRPYLSSEEDRKKGKKFARYQLGDLLLHLEKKHGEDWGKVYDEAWERIDKKVEGLSKHIKLEEERRSEDAQSKAALTDWLRAKASFVIEGLKEADKDEFCRCELKLQKWYGDLRGKPFAIEAENSILDISGFSKQYNCAFIWQKDGVKKLNLYLIINYFKGGKLRFKKIKPEAFEANRFYTVINKKSGEIVPMEVNFNFDDPNLIILPLAFGKRQGREFIWNDLLSLETGSLKLANGRVIEKTLYNRRTRQDEPALFVALTFERREVLDSSNIKPMNLIGVDRGENIPAVIALTDPEGCPLSRFKDSLGNPTHILRIRESYKEKQRTIQAKKEVEQRRAGGYSRKYASKAKNLADDMVRNTARDLLYYAVTQDAMLIFENLSRGFGRQGKRTFMAERQYTRMEDWLTAKLAYEGLPSKTYLSKTLAQYTSKTCSNCGFTITSADYDRVLEKLKKTATGWMTTINGKELKVEGQITYYNRYKRQNVVKDLSVELDRLSEESVNNDISSWTKGRSGNEALSLLKKRFSHRPVQEKFVCLNCGFETHADEQAALNIARSWLFLRSQEYKKYQTNKTTGNTDKRAFVETWQSFYRKKLKEVWKPAV

SEQ ID NO: 45682 - protein, 979 aa, synthetic construct
  REGION 1..979: note = engineered CasX variant
QEIKRINKIRRRLVKDSNTKKAGKTGPMKTLLVRVMTPDLRERLENLRKKPENIPQPISNTSRANLNKLLTDYTEMKKAILHVYWEEFQKDPVGLMSRVAQPASKKIDQNKLKPEMDEKGNLTTAGFACSQCGQPLFVYKLEQVSEKGKAYTNYFGRCNVAEHEKLILLAQLKPEKDSDEAVTYSLGKFGQRALDFYSIHVTKESTHPVKPLAQIAGNRYASSPVGKALSDACMGTIASFLSKYQDIIIEHQKVVKGNQKRLESLRELAGKENLEYPSVTLPPQPHTKEGVDAYNEVIARVRMWVNLNLWQKLKLSRDDAKPLLRLKGFPSFPLVERQANEVDWWDMVCNVKKLINEKKEDGKVFWQNLAGYKRQEALRPYLSSEEDRKKGKKFARYQLGDLLLHLEKKHGEDWGKVYDEAWERIDKKVEGLSKHIKLEEERRSEDAQSKAALTDWLRAKASFVIEGLKEADKDEFCRCELKLQKWYGDLRGKPFAIEAENSILDISGFSKQYNCAFIWQKDGVKKLNLYLIINYFKGGKLRFKKIKPEAFEANRFYTVINKKSGEIVPMEVNFNFDDPNLIILPLAFGKRQGREFIWNDLLSLETGSLKLANGRVIEKTLYNRRTRQDEPALFVALTFERREVLDSSNIKPMNLIGVDRGENIPAVIALTDPEGCPLSRFKDSLGNPTHILRIRESYKEKQRTIQAKKEVEQRRAGGYSRKYASKAKNLADDMVRNTARDLLYYAVTQDAMLIFENLSRGFGRQGKRTFMAERQYTRMEDWLTAKLAYEGLPSKTYLSKTLAQYTSKTCSNCGFTITSADYDRVLEKLKKTATGWMTTINGKELKVEGQITYYNRYKRQNVVKDLSVELDRLSEESVNNDISSWTKGRSGNEALSLLKKRFSHRPVQEKFVCLNCGFETHADEQAALNIARSWLFLRSQEYKKYQTNKTTGNTDKRAFVETWQSFYRKKLKEVWKPAV

SEQ ID NO: 45683 - protein, 979 aa, synthetic construct
  REGION 1..979: note = engineered CasX variant
QEIKRINKIRRRLVKDSNTKKAGKTGPMKTLLVRVMTPDLRERLENLRKKPENIPQPISNTSRANLNKLLTDYTEMKKAILHVYWEEFQKDPVGLMSRVAQPASKKIDQNKLKPEMDEKGNLTTAGFACSQCGQPLFVYKLEQVSEKGKAYTNYFGRCNVAEHEKLILLAQLKPEKDSDEAVTYSLGKFGQRALDFYSIHVTKESTHPVKPLAQIAGNRYASTPVGKALSDACMGTIASFLSKYQDIIIEHQKVVKGNQKRLESLRELAGKENLEYPSVTLPPQPHTKEGVDAYNEVIARVRMWVNLNLWQKLKLSRDDAKPLLRLKGFPSFPLVERQANEVDWWDMVCNVKKLINEKKEDGKVFWQNLAGYKRQEALRPYLSSEEDRKKGKKFARYQLGDLLLHLEKKHGEDWGKVYDEAWERIDKKVEGLSKHIKLEEERRSEDAQSKAALTDWLRAKASFVIEGLKEADKDEFCRCELKLQKWYGDLRGKPFAIEAENSILDISGFSKQYNCAFIWQKDGVKKLNLYLIINYFKGGKLRFKKIKPEAFEANRFYTVINKKSGEIVPMEVNFNFDDPNLIILPLAFGKRQGREFIWNDLLSLETGSLKLANGRVIEKTLYNRRTRQDEPALFVALTFERREVLDSSNIKPMNLIGVDRGENIPAVIALTDPEGCPLSRFKDSLGNPTHILRIRESYKEKQRTIQAKKEVEQRRAGGYSRKYASKAKNLADDMVRNTARDLLYYAVTQDAMLIFENLSRGFGRQGKRTFMAERQYTRMEDWLTAKLAYEGLPSKTYLSKTLAQYTSKTCSNCGFTITSADYDRVLEKLKKTATGWMTTINGKELKVEGQITYYNRYKRQNVVKDLSVELDRLSEESVNNDISSWTKGRSGNEALSLLKKRFSHRPVQEKFVCLNCGFETHADEQAALNIARSWLFLRSQEYKKYQTNKTTGNTDKRAFVETWQSFYRKKLKEVWKPAV

SEQ ID NO: 45684 - protein, 979 aa, synthetic construct
  REGION 1..979: note = engineered CasX variant
QEIKRINKIRRRLVKDSNTKKAGKTGPMKTLLVRVMTPDLRERLENLRKKPENIPQPISNTSRANLNKLLTDYTEMKKAILHVYWEEFQKDPVGLMSRVAQPASKKIDQNKLKPEMDEKGNLTTAGFACSQCGQPLFVYKLEQVSEKGKAYTNYFGRCNVAEHEKLILLAQLKPEKDSDEAVTYSLGKFGQRALDFYSIHVTKESTHPVKPLAQIAGNRYASAPVGKALSDACMGTIASFLSKYQDIIIEHQKVVKGNQKRLESLRELAGKENLEYPSVTLPPQPHTKEGVDAYNEVIARVRMWVNLNLWQKLKLSRDDAKPLLRLKGFPSFPLVERQANEVDWWDMVCNVKKLINEKKEDGKVFWQNLAGYKRQEALRPYLSSEEDRKKGKKFARYQLGDLLLHLEKKHGEDWGKVYDEAWERIDKKVEGLSKHIKLEEERRSEDAQSKAALTDWLRAKASFVIEGLKEADKDEFCRCELKLQKWYGDLRGKPFAIEAENSILDISGFSKQYNCAFIWQKDGVKKLNLYLIINYFKGGKLRFKKIKPEAFEANRFYTVINKKSGEIVPMEVNFNFDDPNLIILPLAFGKRQGREFIWNDLLSLETGSLKLANGRVIEKTLYNRRTRQDEPALFVALTFERREVLDSSNIKPMNLIGVDRGENIPAVIALTDPEGCPLSRFKDSLGNPTHILRIRESYKEKQRTIQAKKEVEQRRAGGYSRKYASKAKNLADDMVRNTARDLLYYAVTQDAMLIFENLSRGFGRQGKRTFMAERQYTRMEDWLTAKLAYEGLPSKTYLSKTLAQYTSKTCSNCGFTITSADYDRVLEKLKKTATGWMTTINGKELKVEGQITYYNRYKRQNVVKDLSVELDRLSEESVNNDISSWTKGRSGNEALSLLKKRFSHRPVQEKFVCLNCGFETHADEQAALNIARSWLFLRSQEYKKYQTNKTTGNTDKRAFVETWQSFYRKKLKEVWKPAV

SEQ ID NO: 45685 - protein, 979 aa, synthetic construct
  REGION 1..979: note = engineered CasX variant
QEIKRINKIRRRLVKDSNTKKAGKTGPMKTLLVRVMTPDLRERLENLRKKPENIPQPISNTSRANLNKLLTDYTEMKKAILHVYWEEFQKDPVGLMSRVAQPASKKIDQNKLKPEMDEKGNLTTAGFACSQCGQPLFVYKLEQVSEKGKAYTNYFGRCNVAEHEKLILLAQLKPEKDSDEAVTYSLGKFGQRALDFYSIHVTKESTHPVKPLAQIAGNRYASVPVGKALSDACMGTIASFLSKYQDIIIEHQKVVKGNQKRLESLRELAGKENLEYPSVTLPPQPHTKEGVDAYNEVIARVRMWVNLNLWQKLKLSRDDAKPLLRLKGFPSFPLVERQANEVDWWDMVCNVKKLINEKKEDGKVFWQNLAGYKRQEALRPYLSSEEDRKKGKKFARYQLGDLLLHLEKKHGEDWGKVYDEAWERIDKKVEGLSKHIKLEEERRSEDAQSKAALTDWLRAKASFVIEGLKEADKDEFCRCELKLQKWYGDLRGKPFAIEAENSILDISGFSKQYNCAFIWQKDGVKKLNLYLIINYFKGGKLRFKKIKPEAFEANRFYTVINKKSGEIVPMEVNFNFDDPNLIILPLAFGKRQGREFIWNDLLSLETGSLKLANGRVIEKTLYNRRTRQDEPALFVALTFERREVLDSSNIKPMNLIGVDRGENIPAVIALTDPEGCPLSRFKDSLGNPTHILRIRESYKEKQRTIQAKKEVEQRRAGGYSRKYASKAKNLADDMVRNTARDLLYYAVTQDAMLIFENLSRGFGRQGKRTFMAERQYTRMEDWLTAKLAYEGLPSKTYLSKTLAQYTSKTCSNCGFTITSADYDRVLEKLKKTATGWMTTINGKELKVEGQITYYNRYKRQNVVKDLSVELDRLSEESVNNDISSWTKGRSGNEALSLLKKRFSHRPVQEKFVCLNCGFETHADEQAALNIARSWLFLRSQEYKKYQTNKTTGNTDKRAFVETWQSFYRKKLKEVWKPAV

SEQ ID NO: 45686 - protein, 979 aa, synthetic construct
  REGION 1..979: note = engineered CasX variant
QEIKRINKIRRRLVKDSNTKKAGKTGPMKTLLVRVMTPDLRERLENLRKKPENIPQPISNTSRANLNKLLTDYTEMKKAILHVYWEEFQKDPVGLMSRVAQPASKKIDQNKLKPEMDEKGNLTTAGFACSQCGQPLFVYKLEQVSEKGKAYTNYFGRCNVAEHEKLIKLAQLKPEKDSDEAVTYSLGKFGQRALDFYSIHVTKESTHPVKPLAQIAGNRYASGPVGKALSDACMGTIASFLSKYQDIIIEHQKVVKGNQKRLESLRELAGKENLEYPSVTLPPQPHTKEGVDAYNEVIARVRMWVNLNLWQKLKLSRDDAKPLLRLKGFPSFPLVERQANEVDWWDMVCNVKKLINEKKEDGKVFWQNLAGYKRQEALRPYLSSEEDRKKGKKFARYQLGDLLLHLEKKHGEDWGKVYDEAWERIDKKVEGLSKHIKLEEERRSEDAQSKAALTDWLRAKASFVIEGLKEADKDEFCRCELKLQKWYGDLRGKPFAIEAENSILDISGFSKQYNCAFIWQKDGVKKLNLYLIINYFKGGKLRFKKIKPEAFEANRFYTVINKKSGEIVPMEVNFNFDDPNLIILPLAFGKRQGREFIWNDLLSLETGSLKLANGRVIEKTLYNRRTRQDEPALFVALTFERREVLDSSNIKPMNLIGVDRGENIPAVIALTDPEGCPLSRFKDSLGNPTHILRIRESYKEKQRTIQAKKEVEQRRAGGYSRKYASKAKNLADDMVRNTARDLLYYAVTQDAMLIFENLSRGFGRQGKRTFMAERQYTRMEDWLTAKLAYEGLPSKTYLSKTLAQYTSKTCSNCGFTITSADYDRVLEKLKKTATGWMTTINGKELKVEGQITYYNRYKRQNVVKDLSVELDRLSEESVNNDISSWTKGRSGNEALSLLKKRFSHRPVQEKFVCLNCGFETHADEQAALNIARSWLFLRSQEYKKYQTNKTTGNTDKRAFVETWQSFYRKKLKEVWKPAV

SEQ ID NO: 45687 - protein, 978 aa, synthetic construct
  REGION 1..978: note = engineered CasX variant
QEIKRINKIRRRLVKDSNTKKAGKTGPMKTLLVRVMTPDLRERLENLRKKPENIPQPISNTSRANLNKLLTDYTEMKKAILHVYWEEFQKDPVGLMSRVAQPASKKIDQNKLKPEMDEKGNLTTAGFACSQCGQPLFVYKLEQVSEKGKAYTNYFGRCNVAEHEKLILLAQLKPEKDSDEAVTYSLGKFGQRALDFYSIHVTKESTHPVKPLAQIAGNRYASPVGKALSDACMGTIASFLSKYQDIIIEHQKVVKGNQKRLESLRELAGKENLEYPSVTLPPQPHTKEGVDAYNEVIARVRMWVNLNLWQKLKLSRDDAKPLLRLKGFPSFPLVERQANEVDWWDMVCNVKKLINEKKEDGKVFWQNLAGYKRQEALRPYLSSEEDRKKGKKFARYQLGDLLLHLEKKHGEDWGKVYDEAWERIDKKVEGLSKHIKLEEERRSEDAQSKAALTDWLRAKASFVIEGLKEADKDEFCRCELKLQKWYGDLRGKPFAIEAENSILDISGFSKQYNCAFIWQKDGVKKLNLYLIINYFKGGKLRFKKIKPEAFEANRFYTVINKKSGEIVPMEVNFNFDDPNLIILPLAFGKRQGREFIWNDLLSLETGSLKLANGRVIEKTLYNRRTRQDEPALFVALTFERREVLDSSNIKPMNLIGVDRGENIPAVIALTDPEGCPLSRFKDSLGNPTHILRIRESYKEKQRTIQAKKEVEQRRAGGYSRKYASKAKNLADDMVRNTARDLLYYAVTQDAMLIFENLSRGFGRQGKRTFMAERQYTRMEDWLTAKLAYEGLPSKTYLSKTLAQYTSKTCSNCGFTITSADYDRVLEKLKKTATGWMTTINGKELKVEGQITYYNRYKRQNVVKDLSVELDRLSEESVNNDISSWTKGRSGNEALSLLKKRFSHRPVQEKFVCLNCGFETHADEQAALNIARSWLFLRSQEYKKYQTNKTTGNTDKRAFVETWQSFYRKKLKEVWKPAV

SEQ ID NO: 45688 - protein, 978 aa, synthetic construct
  REGION 1..978: note = engineered CasX variant
QEIKRINKIRRRLVKDSNTKKAGKTGPMKTLLVRVMTPDLRERLENLRKKPENIPQPISNTSRANLNKLLTDYTEMKKAILHVYWEEFQKDPVGLMSRVAQPASKKIDQNKLKPEMDEKGNLTTAGFACSQCGQPLFVYKLEQVSEKGKAYTNYFGRCNVAEHEKLILLAQLKPEKDSDEAVTYSLGKFGQRALDFYSIHVTKESTHPVKPLAQIAGNRYASYPVGKALSDACMGTIASFLSKYQDIIIEHQKVVKGNQKRLESLRELAGKENLEYPSVTLPPQPHTKEGVDAYNEVIARVRMWVNLNLWQKLKLSRDDAKPLLRLKGFPSFPLVERQANEVDWWDMVCNVKKLINEKKEDGKVFWQNLAGYKRQEALRPYLSSEEDRQKGKKFARYQLGDLLLHLEKKHGEDWGKVYDEAWERIDKKVEGLSKHIKLEEERRSEDAQSKAALTDWLRAKASFVIEGLKEADKDEFCRCELKLQKWYGDLRGKPFAIEAENSILDISGFSKQYNCAFIWQKDGVKKLNLYLIINYFKGGKLRFKKIKPEAFEANRFYTVINKKSGEIVPMEVNFNFDDPNLIILPLAFGKRQGREFIWNDLLSLETGSLKLANGRVIEKTLYNRRTRQDEPALFVALTFERREVLDSSNIKPMNLIGVDRGENIPAVIALTDPEGCPLSRFKDSLGNPTHILRIRESYKEKQRTIQAKKEVEQRRAGGYSRKYASKAKNLADDMVRNTARDLLYYAVTQDAMLIFENLSRGFGRQGKRTFMAERQYTRMEDWLTAKLAYEGLPSKTYLSKTLAQYTSKTCSNCGFTITSADYDRVLEKLKKTATGWMTTINGKELKVEGQITYYNRYKRQNVVKDLSVELDRLSEESVNNDISSWTKGRSGEALSLLKKRFSHRPVQEKFVCLNCGFETHADEQAALNIARSWLFLRSQEYKKYQTNKTTGNTDKRAFVETWQSFYRKKLKEVWKPAV

SEQ ID NO: 45689 - protein, 978 aa, synthetic construct
  REGION 1..978: note = engineered CasX variant
QEIKRINKIRRRLVKDSNTKKAGKTGPMKTLLVRVMTPDLRERLENLRKKPENIPQPISNTSRANLNKLLTDYTEMKKAILHVYWEEFQKDPVGLMSRVAQPASKKIDQNKLKPEMDEKGNLTTAGFACSQCGQPLFVYKLEQVSEKGKAYTNYFGRCNVAEHEKLILLAQLKPEKDSDEAVTYSLGKFGQRALDFYSIHVTKESTHPVKPLAQIAGNRYASHPVGKALSDACMGTIASFLSKYQDIIIEHQKVVKGNQKRLESLRELAGKENLEYPSVTLPPQPHTKEGVDAYNEVIARVRMWVNLNLWQKLKLSRDDAKPLLRLKGFPSFPLVERQANEVDWWDMVCNVKKLINEKKEDGKVFWQNLAGYKRQEALRPYLSSEEDRQKGKKFARYQLGDLLLHLEKKHGEDWGKVYDEAWERIDKKVEGLSKHIKLEEERRSEDAQSKAALTDWLRAKASFVIEGLKEADKDEFCRCELKLQKWYGDLRGKPFAIEAENSILDISGFSKQYNCAFIWQKDGVKKLNLYLIINYFKGGKLRFKKIKPEAFEANRFYTVINKKSGEIVPMEVNFNFDDPNLIILPLAFGKRQGREFIWNDLLSLETGSLKLANGRVIEKTLYNRRTRQDEPALFVALTFERREVLDSSNIKPMNLIGVDRGENIPAVIALTDPEGCPLSRFKDSLGNPTHILRIRESYKEKQRTIQAKKEVEQRRAGGYSRKYASKAKNLADDMVRNTARDLLYYAVTQDAMLIFENLSRGFGRQGKRTFMAERQYTRMEDWLTAKLAYEGLPSKTYLSKTLAQYTSKTCSNCGFTITSADYDRVLEKLKKTATGWMTTINGKELKVEGQITYYNRYKRQNVVKDLSVELDRLSEESVNNDISSWTKGRSGEALSLLKKRFSHRPVQEKFVCLNCGFETHADEQAALNIARSWLFLRSQEYKKYQTNKTTGNTDKRAFVETWQSFYRKKLKEVWKPAV

SEQ ID NO: 45690 - protein, 978 aa, synthetic construct
  REGION 1..978: note = engineered CasX variant
QEIKRINKIRRRLVKDSNTKKAGKTGPMKTLLVRVMTPDLRERLENLRKKPENIPQPISNTSRANLNKLLTDYTEMKKAILHVYWEEFQKDPVGLMSRVAQPASKKIDQNKLKPEMDEKGNLTTAGFACSQCGQPLFVYKLEQVSEKGKAYTNYFGRCNVAEHEKLILLAQLKPEKDSDEAVTYSLGKFGQRALDFYSIHVTKESTHPVKPLAQIAGNRYASSPVGKALSDACMGTIASFLSKYQDIIIEHQKVVKGNQKRLESLRELAGKENLEYPSVTLPPQPHTKEGVDAYNEVIARVRMWVNLNLWQKLKLSRDDAKPLLRLKGFPSFPLVERQANEVDWWDMVCNVKKLINEKKEDGKVFWQNLAGYKRQEALRPYLSSEEDRQKGKKFARYQLGDLLLHLEKKHGEDWGKVYDEAWERIDKKVEGLSKHIKLEEERRSEDAQSKAALTDWLRAKASFVIEGLKEADKDEFCRCELKLQKWYGDLRGKPFAIEAENSILDISGFSKQYNCAFIWQKDGVKKLNLYLIINYFKGGKLRFKKIKPEAFEANRFYTVINKKSGEIVPMEVNFNFDDPNLIILPLAFGKRQGREFIWNDLLSLETGSLKLANGRVIEKTLYNRRTRQDEPALFVALTFERREVLDSSNIKPMNLIGVDRGENIPAVIALTDPEGCPLSRFKDSLGNPTHILRIRESYKEKQRTIQAKKEVEQRRAGGYSRKYASKAKNLADDMVRNTARDLLYYAVTQDAMLIFENLSRGFGRQGKRTFMAERQYTRMEDWLTAKLAYEGLPSKTYLSKTLAQYTSKTCSNCGFTITSADYDRVLEKLKKTATGWMTTINGKELKVEGQITYYNRYKRQNVVKDLSVELDRLSEESVNNDISSWTKGRSGEALSLLKKRFSHRPVQEKFVCLNCGFETHADEQAALNIARSWLFLRSQEYKKYQTNKTTGNTDKRAFVETWQSFYRKKLKEVWKPAV

SEQ ID NO: 45691 - protein, 978 aa, synthetic construct
  REGION 1..978: note = engineered CasX variant
QEIKRINKIRRRLVKDSNTKKAGKTGPMKTLLVRVMTPDLRERLENLRKKPENIPQPISNTSRANLNKLLTDYTEMKKAILHVYWEEFQKDPVGLMSRVAQPASKKIDQNKLKPEMDEKGNLTTAGFACSQCGQPLFVYKLEQVSEKGKAYTNYFGRCNVAEHEKLILLAQLKPEKDSDEAVTYSLGKFGQRALDFYSIHVTKESTHPVKPLAQIAGNRYASTPVGKALSDACMGTIASFLSKYQDIIIEHQKVVKGNQKRLESLRELAGKENLEYPSVTLPPQPHTKEGVDAYNEVIARVRMWVNLNLWQKLKLSRDDAKPLLRLKGFPSFPLVERQANEVDWWDMVCNVKKLINEKKEDGKVFWQNLAGYKRQEALRPYLSSEEDRQKGKKFARYQLGDLLLHLEKKHGEDWGKVYDEAWERIDKKVEGLSKHIKLEEERRSEDAQSKAALTDWLRAKASFVIEGLKEADKDEFCRCELKLQKWYGDLRGKPFAIEAENSILDISGFSKQYNCAFIWQKDGVKKLNLYLIINYFKGGKLRFKKIKPEAFEANRFYTVINKKSGEIVPMEVNFNFDDPNLIILPLAFGKRQGREFIWNDLLSLETGSLKLANGRVIEKTLYNRRTRQDEPALFVALTFERREVLDSSNIKPMNLIGVDRGENIPAVIALTDPEGCPLSRFKDSLGNPTHILRIRESYKEKQRTIQAKKEVEQRRAGGYSRKYASKAKNLADDMVRNTARDLLYYAVTQDAMLIFENLSRGFGRQGKRTFMAERQYTRMEDWLTAKLAYEGLPSKTYLSKTLAQYTSKTCSNCGFTITSADYDRVLEKLKKTATGWMTTINGKELKVEGQITYYNRYKRQNVVKDLSVELDRLSEESVNNDISSWTKGRSGEALSLLKKRFSHRPVQEKFVCLNCGFETHADEQAALNIARSWLFLRSQEYKKYQTNKTTGNTDKRAFVETWQSFYRKKLKEVWKPAV

SEQ ID NO: 45692 - protein, 978 aa, synthetic construct
  REGION 1..978: note = engineered CasX variant
QEIKRINKIRRRLVKDSNTKKAGKTGPMKTLLVRVMTPDLRERLENLRKKPENIPQPISNTSRANLNKLLTDYTEMKKAILHVYWEEFQKDPVGLMSRVAQPASKKIDQNKLKPEMDEKGNLTTAGFACSQCGQPLFVYKLEQVSEKGKAYTNYFGRCNVAEHEKLILLAQLKPEKDSDEAVTYSLGKFGQRALDFYSIHVTKESTHPVKPLAQIAGNRYASAPVGKALSDACMGTIASFLSKYQDIIIEHQKVVKGNQKRLESLRELAGKENLEYPSVTLPPQPHTKEGVDAYNEVIARVRMWVNLNLWQKLKLSRDDAKPLLRLKGFPSFPLVERQANEVDWWDMVCNVKKLINEKKEDGKVFWQNLAGYKRQEALRPYLSSEEDRQKGKKFARYQLGDLLLHLEKKHGEDWGKVYDEAWERIDKKVEGLSKHIKLEEERRSEDAQSKAALTDWLRAKASFVIEGLKEADKDEFCRCELKLQKWYGDLRGKPFAIEAENSILDISGFSKQYNCAFIWQKDGVKKLNLYLIINYFKGGKLRFKKIKPEAFEANRFYTVINKKSGEIVPMEVNFNFDDPNLIILPLAFGKRQGREFIWNDLLSLETGSLKLANGRVIEKTLYNRRTRQDEPALFVALTFERREVLDSSNIKPMNLIGVDRGENIPAVIALTDPEGCPLSRFKDSLGNPTHILRIRESYKEKQRTIQAKKEVEQRRAGGYSRKYASKAKNLADDMVRNTARDLLYYAVTQDAMLIFENLSRGFGRQGKRTFMAERQYTRMEDWLTAKLAYEGLPSKTYLSKTLAQYTSKTCSNCGFTITSADYDRVLEKLKKTATGWMTTINGKELKVEGQITYYNRYKRQNVVKDLSVELDRLSEESVNNDISSWTKGRSGEALSLLKKRFSHRPVQEKFVCLNCGFETHADEQAALNIARSWLFLRSQEYKKYQTNKTTGNTDKRAFVETWQSFYRKKLKEVWKPAV

SEQ ID NO: 45693 - protein, 978 aa, synthetic construct
  REGION 1..978: note = engineered CasX variant
QEIKRINKIRRRLVKDSNTKKAGKTGPMKTLLVRVMTPDLRERLENLRKKPENIPQPISNTSRANLNKLLTDYTEMKKAILHVYWEEFQKDPVGLMSRVAQPASKKIDQNKLKPEMDEKGNLTTAGFACSQCGQPLFVYKLEQVSEKGKAYTNYFGRCNVAEHEKLILLAQLKPEKDSDEAVTYSLGKFGQRALDFYSIHVTKESTHPVKPLAQIAGNRYASVPVGKALSDACMGTIASFLSKYQDIIIEHQKVVKGNQKRLESLRELAGKENLEYPSVTLPPQPHTKEGVDAYNEVIARVRMWVNLNLWQKLKLSRDDAKPLLRLKGFPSFPLVERQANEVDWWDMVCNVKKLINEKKEDGKVFWQNLAGYKRQEALRPYLSSEEDRQKGKKFARYQLGDLLLHLEKKHGEDWGKVYDEAWERIDKKVEGLSKHIKLEEERRSEDAQSKAALTDWLRAKASFVIEGLKEADKDEFCRCELKLQKWYGDLRGKPFAIEAENSILDISGFSKQYNCAFIWQKDGVKKLNLYLIINYFKGGKLRFKKIKPEAFEANRFYTVINKKSGEIVPMEVNFNFDDPNLIILPLAFGKRQGREFIWNDLLSLETGSLKLANGRVIEKTLYNRRTRQDEPALFVALTFERREVLDSSNIKPMNLIGVDRGENIPAVIALTDPEGCPLSRFKDSLGNPTHILRIRESYKEKQRTIQAKKEVEQRRAGGYSRKYASKAKNLADDMVRNTARDLLYYAVTQDAMLIFENLSRGFGRQGKRTFMAERQYTRMEDWLTAKLAYEGLPSKTYLSKTLAQYTSKTCSNCGFTITSADYDRVLEKLKKTATGWMTTINGKELKVEGQITYYNRYKRQNVVKDLSVELDRLSEESVNNDISSWTKGRSGEALSLLKKRFSHRPVQEKFVCLNCGFETHADEQAALNIARSWLFLRSQEYKKYQTNKTTGNTDKRAFVETWQSFYRKKLKEVWKPAV

SEQ ID NO: 45694 - protein, 978 aa, synthetic construct
  REGION 1..978: note = engineered CasX variant
QEIKRINKIRRRLVKDSNTKKAGKTGPMKTLLVRVMTPDLRERLENLRKKPENIPQPISNTSRANLNKLLTDYTEMKKAILHVYWEEFQKDPVGLMSRVAQPASKKIDQNKLKPEMDEKGNLTTAGFACSQCGQPLFVYKLEQVSEKGKAYTNYFGRCNVAEHEKLIKLAQLKPEKDSDEAVTYSLGKFGQRALDFYSIHVTKESTHPVKPLAQIAGNRYASGPVGKALSDACMGTIASFLSKYQDIIIEHQKVVKGNQKRLESLRELAGKENLEYPSVTLPPQPHTKEGVDAYNEVIARVRMWVNLNLWQKLKLSRDDAKPLLRLKGFPSFPLVERQANEVDWWDMVCNVKKLINEKKEDGKVFWQNLAGYKRQEALRPYLSSEEDRQKGKKFARYQLGDLLLHLEKKHGEDWGKVYDEAWERIDKKVEGLSKHIKLEEERRSEDAQSKAALTDWLRAKASFVIEGLKEADKDEFCRCELKLQKWYGDLRGKPFAIEAENSILDISGFSKQYNCAFIWQKDGVKKLNLYLIINYFKGGKLRFKKIKPEAFEANRFYTVINKKSGEIVPMEVNFNFDDPNLIILPLAFGKRQGREFIWNDLLSLETGSLKLANGRVIEKTLYNRRTRQDEPALFVALTFERREVLDSSNIKPMNLIGVDRGENIPAVIALTDPEGCPLSRFKDSLGNPTHILRIRESYKEKQRTIQAKKEVEQRRAGGYSRKYASKAKNLADDMVRNTARDLLYYAVTQDAMLIFENLSRGFGRQGKRTFMAERQYTRMEDWLTAKLAYEGLPSKTYLSKTLAQYTSKTCSNCGFTITSADYDRVLEKLKKTATGWMTTINGKELKVEGQITYYNRYKRQNVVKDLSVELDRLSEESVNNDISSWTKGRSGEALSLLKKRFSHRPVQEKFVCLNCGFETHADEQAALNIARSWLFLRSQEYKKYQTNKTTGNTDKRAFVETWQSFYRKKLKEVWKPAV

SEQ ID NO: 45695 - protein, 977 aa, synthetic construct
  REGION 1..977: note = engineered CasX variant
QEIKRINKIRRRLVKDSNTKKAGKTGPMKTLLVRVMTPDLRERLENLRKKPENIPQPISNTSRANLNKLLTDYTEMKKAILHVYWEEFQKDPVGLMSRVAQPASKKIDQNKLKPEMDEKGNLTTAGFACSQCGQPLFVYKLEQVSEKGKAYTNYFGRCNVAEHEKLILLAQLKPEKDSDEAVTYSLGKFGQRALDFYSIHVTKESTHPVKPLAQIAGNRYASPVGKALSDACMGTIASFLSKYQDIIIEHQKVVKGNQKRLESLRELAGKENLEYPSVTLPPQPHTKEGVDAYNEVIARVRMWVNLNLWQKLKLSRDDAKPLLRLKGFPSFPLVERQANEVDWWDMVCNVKKLINEKKEDGKVFWQNLAGYKRQEALRPYLSSEEDRQKGKKFARYQLGDLLLHLEKKHGEDWGKVYDEAWERIDKKVEGLSKHIKLEEERRSEDAQSKAALTDWLRAKASFVIEGLKEADKDEFCRCELKLQKWYGDLRGKPFAIEAENSILDISGFSKQYNCAFIWQKDGVKKLNLYLIINYFKGGKLRFKKIKPEAFEANRFYTVINKKSGEIVPMEVNFNFDDPNLIILPLAFGKRQGREFIWNDLLSLETGSLKLANGRVIEKTLYNRRTRQDEPALFVALTFERREVLDSSNIKPMNLIGVDRGENIPAVIALTDPEGCPLSRFKDSLGNPTHILRIRESYKEKQRTIQAKKEVEQRRAGGYSRKYASKAKNLADDMVRNTARDLLYYAVTQDAMLIFENLSRGFGRQGKRTFMAERQYTRMEDWLTAKLAYEGLPSKTYLSKTLAQYTSKTCSNCGFTITSADYDRVLEKLKKTATGWMTTINGKELKVEGQITYYNRYKRQNVVKDLSVELDRLSEESVNNDISSWTKGRSGEALSLLKKRFSHRPVQEKFVCLNCGFETHADEQAALNIARSWLFLRSQEYKKYQTNKTTGNTDKRAFVETWQSFYRKKLKEVWKPAV

SEQ ID NO: 45696 - protein, 978 aa, synthetic construct
  REGION 1..978: note = engineered CasX variant
QEIKRINKIRRRLVKDSNTKKAGKTGPMKTLLVRVMTPDLRERLENLRKKPENIPQPISNTSRANLNKLLTDYTEMKKAILHVYWEEFQKDPVGLMSRVAQPASKKIDQNKLKPEMDEKGNLTTAGFACSQCGQPLFVYKLEQVSEKGKAYTNYFGRCNVAEHEKLILLAQLKPEKDSDEAVTYSLGKFGQRALDFYSIHVTKESTHPVKPLAQIAGNRYASYPVGKALSDACMGTIASFLSKYQDIIIEHQKVVKGNQKRLESLRELAGKENLEYPSVTLPPQPHTKEGVDAYNEVIARVRMWVNLNLWQKLKLSRDDAKPLLRLKGFPSFPLVERQANEVDWWDMVCNVKKLINEKKEDGKVFWQNLAGYKRQEALRPYLSSEEDRKKGKKFARYQLGDLLLHLEKKHGEDWGKVYDEAWERIDKKVEGLSKHIKLEEERRSEDAQSKAALTDWLRAKASFVIEGLKEADKDEFCRCELKLQKWYGDLRGKPFAIEAENSILDISGFSKQYNCAFIWQKDGVKKLNLYLIINYFKGGKLRFKKIKPEAFEANRFYTVINKKSGEIVPMEVNFNFDDPNLIILPLAFGKRQGREFIWNDLLSLETGSLKLANGRVIEKTLYNRRTRQDEPALFVALTFERREVLDSSNIKPMNLIGVDRGENIPAVIALTDPEGCPLSRFKDSLGNPTHILRIRESYKEKQRTIQAKKEVEQRRAGGYSRKYASKAKNLADDMVRNTARDLLYYAVTQDAMLIFENLSRGFGRQGKRTFMAERQYTRMEDWLTAKLAYEGLPSQTYLSKTLAQYTSKTCSNCGFTITSADYDRVLEKLKKTATGWMTTINGKELKVEGQITYYNRYKRQNVVKDLSVELDRLSEESVNNDISSWTKGRSGEALSLLKKRFSHRPVQEKFVCLNCGFETHADEQAALNIARSWLFLRSQEYKKYQTNKTTGNTDKRAFVETWQSFYRKKLKEVWKPAV

SEQ ID NO: 45697 - protein, 978 aa, synthetic construct
  REGION 1..978: note = engineered CasX variant
QEIKRINKIRRRLVKDSNTKKAGKTGPMKTLLVRVMTPDLRERLENLRKKPENIPQPISNTSRANLNKLLTDYTEMKKAILHVYWEEFQKDPVGLMSRVAQPASKKIDQNKLKPEMDEKGNLTTAGFACSQCGQPLFVYKLEQVSEKGKAYTNYFGRCNVAEHEKLILLAQLKPEKDSDEAVTYSLGKFGQRALDFYSIHVTKESTHPVKPLAQIAGNRYASHPVGKALSDACMGTIASFLSKYQDIIIEHQKVVKGNQKRLESLRELAGKENLEYPSVTLPPQPHTKEGVDAYNEVIARVRMWVNLNLWQKLKLSRDDAKPLLRLKGFPSFPLVERQANEVDWWDMVCNVKKLINEKKEDGKVFWQNLAGYKRQEALRPYLSSEEDRKKGKKFARYQLGDLLLHLEKKHGEDWGKVYDEAWERIDKKVEGLSKHIKLEEERRSEDAQSKAALTDWLRAKASFVIEGLKEADKDEFCRCELKLQKWYGDLRGKPFAIEAENSILDISGFSKQYNCAFIWQKDGVKKLNLYLIINYFKGGKLRFKKIKPEAFEANRFYTVINKKSGEIVPMEVNFNFDDPNLIILPLAFGKRQGREFIWNDLLSLETGSLKLANGRVIEKTLYNRRTRQDEPALFVALTFERREVLDSSNIKPMNLIGVDRGENIPAVIALTDPEGCPLSRFKDSLGNPTHILRIRESYKEKQRTIQAKKEVEQRRAGGYSRKYASKAKNLADDMVRNTARDLLYYAVTQDAMLIFENLSRGFGRQGKRTFMAERQYTRMEDWLTAKLAYEGLPSQTYLSKTLAQYTSKTCSNCGFTITSADYDRVLEKLKKTATGWMTTINGKELKVEGQITYYNRYKRQNVVKDLSVELDRLSEESVNNDISSWTKGRSGEALSLLKKRFSHRPVQEKFVCLNCGFETHADEQAALNIARSWLFLRSQEYKKYQTNKTTGNTDKRAFVETWQSFYRKKLKEVWKPAV

SEQ ID NO: 45698 - protein, 978 aa, synthetic construct
  REGION 1..978: note = engineered CasX variant
QEIKRINKIRRRLVKDSNTKKAGKTGPMKTLLVRVMTPDLRERLENLRKKPENIPQPISNTSRANLNKLLTDYTEMKKAILHVYWEEFQKDPVGLMSRVAQPASKKIDQNKLKPEMDEKGNLTTAGFACSQCGQPLFVYKLEQVSEKGKAYTNYFGRCNVAEHEKLILLAQLKPEKDSDEAVTYSLGKFGQRALDFYSIHVTKESTHPVKPLAQIAGNRYASSPVGKALSDACMGTIASFLSKYQDIIIEHQKVVKGNQKRLESLRELAGKENLEYPSVTLPPQPHTKEGVDAYNEVIARVRMWVNLNLWQKLKLSRDDAKPLLRLKGFPSFPLVERQANEVDWWDMVCNVKKLINEKKEDGKVFWQNLAGYKRQEALRPYLSSEEDRKKGKKFARYQLGDLLLHLEKKHGEDWGKVYDEAWERIDKKVEGLSKHIKLEEERRSEDAQSKAALTDWLRAKASFVIEGLKEADKDEFCRCELKLQKWYGDLRGKPFAIEAENSILDISGFSKQYNCAFIWQKDGVKKLNLYLIINYFKGGKLRFKKIKPEAFEANRFYTVINKKSGEIVPMEVNFNFDDPNLIILPLAFGKRQGREFIWNDLLSLETGSLKLANGRVIEKTLYNRRTRQDEPALFVALTFERREVLDSSNIKPMNLIGVDRGENIPAVIALTDPEGCPLSRFKDSLGNPTHILRIRESYKEKQRTIQAKKEVEQRRAGGYSRKYASKAKNLADDMVRNTARDLLYYAVTQDAMLIFENLSRGFGRQGKRTFMAERQYTRMEDWLTAKLAYEGLPSQTYLSKTLAQYTSKTCSNCGFTITSADYDRVLEKLKKTATGWMTTINGKELKVEGQITYYNRYKRQNVVKDLSVELDRLSEESVNNDISSWTKGRSGEALSLLKKRFSHRPVQEKFVCLNCGFETHADEQAALNIARSWLFLRSQEYKKYQTNKTTGNTDKRAFVETWQSFYRKKLKEVWKPAV

SEQ ID NO: 45699 - protein, 978 aa, synthetic construct
  REGION 1..978: note = engineered CasX variant
QEIKRINKIRRRLVKDSNTKKAGKTGPMKTLLVRVMTPDLRERLENLRKKPENIPQPISNTSRANLNKLLTDYTEMKKAILHVYWEEFQKDPVGLMSRVAQPASKKIDQNKLKPEMDEKGNLTTAGFACSQCGQPLFVYKLEQVSEKGKAYTNYFGRCNVAEHEKLILLAQLKPEKDSDEAVTYSLGKFGQRALDFYSIHVTKESTHPVKPLAQIAGNRYASTPVGKALSDACMGTIASFLSKYQDIIIEHQKVVKGNQKRLESLRELAGKENLEYPSVTLPPQPHTKEGVDAYNEVIARVRMWVNLNLWQKLKLSRDDAKPLLRLKGFPSFPLVERQANEVDWWDMVCNVKKLINEKKEDGKVFWQNLAGYKRQEALRPYLSSEEDRKKGKKFARYQLGDLLLHLEKKHGEDWGKVYDEAWERIDKKVEGLSKHIKLEEERRSEDAQSKAALTDWLRAKASFVIEGLKEADKDEFCRCELKLQKWYGDLRGKPFAIEAENSILDISGFSKQYNCAFIWQKDGVKKLNLYLIINYFKGGKLRFKKIKPEAFEANRFYTVINKKSGEIVPMEVNFNFDDPNLIILPLAFGKRQGREFIWNDLLSLETGSLKLANGRVIEKTLYNRRTRQDEPALFVALTFERREVLDSSNIKPMNLIGVDRGENIPAVIALTDPEGCPLSRFKDSLGNPTHILRIRESYKEKQRTIQAKKEVEQRRAGGYSRKYASKAKNLADDMVRNTARDLLYYAVTQDAMLIFENLSRGFGRQGKRTFMAERQYTRMEDWLTAKLAYEGLPSQTYLSKTLAQYTSKTCSNCGFTITSADYDRVLEKLKKTATGWMTTINGKELKVEGQITYYNRYKRQNVVKDLSVELDRLSEESVNNDISSWTKGRSGEALSLLKKRFSHRPVQEKFVCLNCGFETHADEQAALNIARSWLFLRSQEYKKYQTNKTTGNTDKRAFVETWQSFYRKKLKEVWKPAV

SEQ ID NO: 45700 - protein, 978 aa, synthetic construct
  REGION 1..978: note = engineered CasX variant
QEIKRINKIRRRLVKDSNTKKAGKTGPMKTLLVRVMTPDLRERLENLRKKPENIPQPISNTSRANLNKLLTDYTEMKKAILHVYWEEFQKDPVGLMSRVAQPASKKIDQNKLKPEMDEKGNLTTAGFACSQCGQPLFVYKLEQVSEKGKAYTNYFGRCNVAEHEKLILLAQLKPEKDSDEAVTYSLGKFGQRALDFYSIHVTKESTHPVKPLAQIAGNRYASAPVGKALSDACMGTIASFLSKYQDIIIEHQKVVKGNQKRLESLRELAGKENLEYPSVTLPPQPHTKEGVDAYNEVIARVRMWVNLNLWQKLKLSRDDAKPLLRLKGFPSFPLVERQANEVDWWDMVCNVKKLINEKKEDGKVFWQNLAGYKRQEALRPYLSSEEDRKKGKKFARYQLGDLLLHLEKKHGEDWGKVYDEAWERIDKKVEGLSKHIKLEEERRSEDAQSKAALTDWLRAKASFVIEGLKEADKDEFCRCELKLQKWYGDLRGKPFAIEAENSILDISGFSKQYNCAFIWQKDGVKKLNLYLIINYFKGGKLRFKKIKPEAFEANRFYTVINKKSGEIVPMEVNFNFDDPNLIILPLAFGKRQGREFIWNDLLSLETGSLKLANGRVIEKTLYNRRTRQDEPALFVALTFERREVLDSSNIKPMNLIGVDRGENIPAVIALTDPEGCPLSRFKDSLGNPTHILRIRESYKEKQRTIQAKKEVEQRRAGGYSRKYASKAKNLADDMVRNTARDLLYYAVTQDAMLIFENLSRGFGRQGKRTFMAERQYTRMEDWLTAKLAYEGLPSQTYLSKTLAQYTSKTCSNCGFTITSADYDRVLEKLKKTATGWMTTINGKELKVEGQITYYNRYKRQNVVKDLSVELDRLSEESVNNDISSWTKGRSGEALSLLKKRFSHRPVQEKFVCLNCGFETHADEQAALNIARSWLFLRSQEYKKYQTNKTTGNTDKRAFVETWQSFYRKKLKEVWKPAV

SEQ ID NO: 45701 - protein, 978 aa, synthetic construct
  REGION 1..978: note = engineered CasX variant
QEIKRINKIRRRLVKDSNTKKAGKTGPMKTLLVRVMTPDLRERLENLRKKPENIPQPISNTSRANLNKLLTDYTEMKKAILHVYWEEFQKDPVGLMSRVAQPASKKIDQNKLKPEMDEKGNLTTAGFACSQCGQPLFVYKLEQVSEKGKAYTNYFGRCNVAEHEKLILLAQLKPEKDSDEAVTYSLGKFGQRALDFYSIHVTKESTHPVKPLAQIAGNRYASVPVGKALSDACMGTIASFLSKYQDIIIEHQKVVKGNQKRLESLRELAGKENLEYPSVTLPPQPHTKEGVDAYNEVIARVRMWVNLNLWQKLKLSRDDAKPLLRLKGFPSFPLVERQANEVDWWDMVCNVKKLINEKKEDGKVFWQNLAGYKRQEALRPYLSSEEDRKKGKKFARYQLGDLLLHLEKKHGEDWGKVYDEAWERIDKKVEGLSKHIKLEEERRSEDAQSKAALTDWLRAKASFVIEGLKEADKDEFCRCELKLQKWYGDLRGKPFAIEAENSILDISGFSKQYNCAFIWQKDGVKKLNLYLIINYFKGGKLRFKKIKPEAFEANRFYTVINKKSGEIVPMEVNFNFDDPNLIILPLAFGKRQGREFIWNDLLSLETGSLKLANGRVIEKTLYNRRTRQDEPALFVALTFERREVLDSSNIKPMNLIGVDRGENIPAVIALTDPEGCPLSRFKDSLGNPTHILRIRESYKEKQRTIQAKKEVEQRRAGGYSRKYASKAKNLADDMVRNTARDLLYYAVTQDAMLIFENLSRGFGRQGKRTFMAERQYTRMEDWLTAKLAYEGLPSQTYLSKTLAQYTSKTCSNCGFTITSADYDRVLEKLKKTATGWMTTINGKELKVEGQITYYNRYKRQNVVKDLSVELDRLSEESVNNDISSWTKGRSGEALSLLKKRFSHRPVQEKFVCLNCGFETHADEQAALNIARSWLFLRSQEYKKYQTNKTTGNTDKRAFVETWQSFYRKKLKEVWKPAV

SEQ ID NO: 45702 - protein, 978 aa, synthetic construct
  REGION 1..978: note = engineered CasX variant
QEIKRINKIRRRLVKDSNTKKAGKTGPMKTLLVRVMTPDLRERLENLRKKPENIPQPISNTSRANLNKLLTDYTEMKKAILHVYWEEFQKDPVGLMSRVAQPASKKIDQNKLKPEMDEKGNLTTAGFACSQCGQPLFVYKLEQVSEKGKAYTNYFGRCNVAEHEKLIKLAQLKPEKDSDEAVTYSLGKFGQRALDFYSIHVTKESTHPVKPLAQIAGNRYASGPVGKALSDACMGTIASFLSKYQDIIIEHQKVVKGNQKRLESLRELAGKENLEYPSVTLPPQPHTKEGVDAYNEVIARVRMWVNLNLWQKLKLSRDDAKPLLRLKGFPSFPLVERQANEVDWWDMVCNVKKLINEKKEDGKVFWQNLAGYKRQEALRPYLSSEEDRKKGKKFARYQLGDLLLHLEKKHGEDWGKVYDEAWERIDKKVEGLSKHIKLEEERRSEDAQSKAALTDWLRAKASFVIEGLKEADKDEFCRCELKLQKWYGDLRGKPFAIEAENSILDISGFSKQYNCAFIWQKDGVKKLNLYLIINYFKGGKLRFKKIKPEAFEANRFYTVINKKSGEIVPMEVNFNFDDPNLIILPLAFGKRQGREFIWNDLLSLETGSLKLANGRVIEKTLYNRRTRQDEPALFVALTFERREVLDSSNIKPMNLIGVDRGENIPAVIALTDPEGCPLSRFKDSLGNPTHILRIRESYKEKQRTIQAKKEVEQRRAGGYSRKYASKAKNLADDMVRNTARDLLYYAVTQDAMLIFENLSRGFGRQGKRTFMAERQYTRMEDWLTAKLAYEGLPSQTYLSKTLAQYTSKTCSNCGFTITSADYDRVLEKLKKTATGWMTTINGKELKVEGQITYYNRYKRQNVVKDLSVELDRLSEESVNNDISSWTKGRSGEALSLLKKRFSHRPVQEKFVCLNCGFETHADEQAALNIARSWLFLRSQEYKKYQTNKTTGNTDKRAFVETWQSFYRKKLKEVWKPAV

SEQ ID NO: 45703 - protein, 977 aa, synthetic construct
  REGION 1..977: note = engineered CasX variant
QEIKRINKIRRRLVKDSNTKKAGKTGPMKTLLVRVMTPDLRERLENLRKKPENIPQPISNTSRANLNKLLTDYTEMKKAILHVYWEEFQKDPVGLMSRVAQPASKKIDQNKLKPEMDEKGNLTTAGFACSQCGQPLFVYKLEQVSEKGKAYTNYFGRCNVAEHEKLILLAQLKPEKDSDEAVTYSLGKFGQRALDFYSIHVTKESTHPVKPLAQIAGNRYASPVGKALSDACMGTIASFLSKYQDIIIEHQKVVKGNQKRLESLRELAGKENLEYPSVTLPPQPHTKEGVDAYNEVIARVRMWVNLNLWQKLKLSRDDAKPLLRLKGFPSFPLVERQANEVDWWDMVCNVKKLINEKKEDGKVFWQNLAGYKRQEALRPYLSSEEDRKKGKKFARYQLGDLLLHLEKKHGEDWGKVYDEAWERIDKKVEGLSKHIKLEEERRSEDAQSKAALTDWLRAKASFVIEGLKEADKDEFCRCELKLQKWYGDLRGKPFAIEAENSILDISGFSKQYNCAFIWQKDGVKKLNLYLIINYFKGGKLRFKKIKPEAFEANRFYTVINKKSGEIVPMEVNFNFDDPNLIILPLAFGKRQGREFIWNDLLSLETGSLKLANGRVIEKTLYNRRTRQDEPALFVALTFERREVLDSSNIKPMNLIGVDRGENIPAVIALTDPEGCPLSRFKDSLGNPTHILRIRESYKEKQRTIQAKKEVEQRRAGGYSRKYASKAKNLADDMVRNTARDLLYYAVTQDAMLIFENLSRGFGRQGKRTFMAERQYTRMEDWLTAKLAYEGLPSQTYLSKTLAQYTSKTCSNCGFTITSADYDRVLEKLKKTATGWMTTINGKELKVEGQITYYNRYKRQNVVKDLSVELDRLSEESVNNDISSWTKGRSGEALSLLKKRFSHRPVQEKFVCLNCGFETHADEQAALNIARSWLFLRSQEYKKYQTNKTTGNTDKRAFVETWQSFYRKKLKEVWKPAV

SEQ ID NO: 45704 - protein, 978 aa, synthetic construct
  REGION 1..978: note = engineered CasX variant
QEIKRINKIRRRLVKDSNTKKAGKTGPMKTLLVRVMTPDLRERLENLRKKPENIPQPISNTSRANLNKLLTDYTEMKKAILHVYWEEFQKDPVGLMSRVAQPASKKIDQNKLKPEMDEKGNLTTAGFACSQCGQPLFVYKLEQVSEKGKAYTNYFGRCNVAEHEKLILLAQLKPEKDSDEAVTYSLGKFGQRALDFYSIHVTKESTHPVKPLAQIAGNRYASYPVGKALSDACMGTIASFLSKYQDIIIEHQKVVKGNQKRLESLRELAGKENLEYPSVTLPPQPHTKEGVDAYNEVIARVRMWVNLNLWQKLKLSRDDAKPLLRLKGFPSFPLVERQANEVDWWDMVCNVKKLINEKKEDGKVFWQNLAGYKRQEALRPYLSSEEDRKKGKKFARYQLGDLLLHLEKKHGEDWGKVYDEAWERIDKKVEGLSKHIKLEEERRSEDAQSKAALTDWLRAKASFVIEGLKEADKDEFCRCELKLQKWYGDLRGKPFAIEAENSILDISGFSKQYNCAFIWQKDGVKKLNLYLIINYFKGGKLRFKKIKPEAFEANRFYTVINKKSGEIVPMEVNFNFDDPNLIILPLAFGKRQGREFIWNDLLSLETGSLKLANGRVIEKTLYNRRTRQDEPALFVALTFERREVLDSSNIKPMNLIGVDRGENIPAVIALTDPEGCPLSRFKDSLGNPTHILRIRESYKEKQRTIQAKKEVEQRRAGGYSRKYASKAKNLADDMVRNTARDLLYYAVTQDAMLIFENLSRGFGRQGKRTFMAERQYTRMEDWLTAKLAYNGLPSKTYLSKTLAQYTSKTCSNCGFTITSADYDRVLEKLKKTATGWMTTINGKELKVEGQITYYNRYKRQNVVKDLSVELDRLSEESVNNDISSWTKGRSGEALSLLKKRFSHRPVQEKFVCLNCGFETHADEQAALNIARSWLFLRSQEYKKYQTNKTTGNTDKRAFVETWQSFYRKKLKEVWKPAV

SEQ ID NO: 45705 - protein, 978 aa, synthetic construct
  REGION 1..978: note = engineered CasX variant
QEIKRINKIRRRLVKDSNTKKAGKTGPMKTLLVRVMTPDLRERLENLRKKPENIPQPISNTSRANLNKLLTDYTEMKKAILHVYWEEFQKDPVGLMSRVAQPASKKIDQNKLKPEMDEKGNLTTAGFACSQCGQPLFVYKLEQVSEKGKAYTNYFGRCNVAEHEKLILLAQLKPEKDSDEAVTYSLGKFGQRALDFYSIHVTKESTHPVKPLAQIAGNRYASHPVGKALSDACMGTIASFLSKYQDIIIEHQKVVKGNQKRLESLRELAGKENLEYPSVTLPPQPHTKEGVDAYNEVIARVRMWVNLNLWQKLKLSRDDAKPLLRLKGFPSFPLVERQANEVDWWDMVCNVKKLINEKKEDGKVFWQNLAGYKRQEALRPYLSSEEDRKKGKKFARYQLGDLLLHLEKKHGEDWGKVYDEAWERIDKKVEGLSKHIKLEEERRSEDAQSKAALTDWLRAKASFVIEGLKEADKDEFCRCELKLQKWYGDLRGKPFAIEAENSILDISGFSKQYNCAFIWQKDGVKKLNLYLIINYFKGGKLRFKKIKPEAFEANRFYTVINKKSGEIVPMEVNFNFDDPNLIILPLAFGKRQGREFIWNDLLSLETGSLKLANGRVIEKTLYNRRTRQDEPALFVALTFERREVLDSSNIKPMNLIGVDRGENIPAVIALTDPEGCPLSRFKDSLGNPTHILRIRESYKEKQRTIQAKKEVEQRRAGGYSRKYASKAKNLADDMVRNTARDLLYYAVTQDAMLIFENLSRGFGRQGKRTFMAERQYTRMEDWLTAKLAYNGLPSKTYLSKTLAQYTSKTCSNCGFTITSADYDRVLEKLKKTATGWMTTINGKELKVEGQITYYNRYKRQNVVKDLSVELDRLSEESVNNDISSWTKGRSGEALSLLKKRFSHRPVQEKFVCLNCGFETHADEQAALNIARSWLFLRSQEYKKYQTNKTTGNTDKRAFVETWQSFYRKKLKEVWKPAV

SEQ ID NO: 45706 - protein, 978 aa, synthetic construct
  REGION 1..978: note = engineered CasX variant
QEIKRINKIRRRLVKDSNTKKAGKTGPMKTLLVRVMTPDLRERLENLRKKPENIPQPISNTSRANLNKLLTDYTEMKKAILHVYWEEFQKDPVGLMSRVAQPASKKIDQNKLKPEMDEKGNLTTAGFACSQCGQPLFVYKLEQVSEKGKAYTNYFGRCNVAEHEKLILLAQLKPEKDSDEAVTYSLGKFGQRALDFYSIHVTKESTHPVKPLAQIAGNRYASSPVGKALSDACMGTIASFLSKYQDIIIEHQKVVKGNQKRLESLRELAGKENLEYPSVTLPPQPHTKEGVDAYNEVIARVRMWVNLNLWQKLKLSRDDAKPLLRLKGFPSFPLVERQANEVDWWDMVCNVKKLINEKKEDGKVFWQNLAGYKRQEALRPYLSSEEDRKKGKKFARYQLGDLLLHLEKKHGEDWGKVYDEAWERIDKKVEGLSKHIKLEEERRSEDAQSKAALTDWLRAKASFVIEGLKEADKDEFCRCELKLQKWYGDLRGKPFAIEAENSILDISGFSKQYNCAFIWQKDGVKKLNLYLIINYFKGGKLRFKKIKPEAFEANRFYTVINKKSGEIVPMEVNFNFDDPNLIILPLAFGKRQGREFIWNDLLSLETGSLKLANGRVIEKTLYNRRTRQDEPALFVALTFERREVLDSSNIKPMNLIGVDRGENIPAVIALTDPEGCPLSRFKDSLGNPTHILRIRESYKEKQRTIQAKKEVEQRRAGGYSRKYASKAKNLADDMVRNTARDLLYYAVTQDAMLIFENLSRGFGRQGKRTFMAERQYTRMEDWLTAKLAYNGLPSKTYLSKTLAQYTSKTCSNCGFTITSADYDRVLEKLKKTATGWMTTINGKELKVEGQITYYNRYKRQNVVKDLSVELDRLSEESVNNDISSWTKGRSGEALSLLKKRFSHRPVQEKFVCLNCGFETHADEQAALNIARSWLFLRSQEYKKYQTNKTTGNTDKRAFVETWQSFYRKKLKEVWKPAV

SEQ ID NO: 45707 - protein, 978 aa, synthetic construct
  REGION 1..978: note = engineered CasX variant
QEIKRINKIRRRLVKDSNTKKAGKTGPMKTLLVRVMTPDLRERLENLRKKPENIPQPISNTSRANLNKLLTDYTEMKKAILHVYWEEFQKDPVGLMSRVAQPASKKIDQNKLKPEMDEKGNLTTAGFACSQCGQPLFVYKLEQVSEKGKAYTNYFGRCNVAEHEKLILLAQLKPEKDSDEAVTYSLGKFGQRALDFYSIHVTKESTHPVKPLAQIAGNRYASTPVGKALSDACMGTIASFLSKYQDIIIEHQKVVKGNQKRLESLRELAGKENLEYPSVTLPPQPHTKEGVDAYNEVIARVRMWVNLNLWQKLKLSRDDAKPLLRLKGFPSFPLVERQANEVDWWDMVCNVKKLINEKKEDGKVFWQNLAGYKRQEALRPYLSSEEDRKKGKKFARYQLGDLLLHLEKKHGEDWGKVYDEAWERIDKKVEGLSKHIKLEEERRSEDAQSKAALTDWLRAKASFVIEGLKEADKDEFCRCELKLQKWYGDLRGKPFAIEAENSILDISGFSKQYNCAFIWQKDGVKKLNLYLIINYFKGGKLRFKKIKPEAFEANRFYTVINKKSGEIVPMEVNFNFDDPNLIILPLAFGKRQGREFIWNDLLSLETGSLKLANGRVIEKTLYNRRTRQDEPALFVALTFERREVLDSSNIKPMNLIGVDRGENIPAVIALTDPEGCPLSRFKDSLGNPTHILRIRESYKEKQRTIQAKKEVEQRRAGGYSRKYASKAKNLADDMVRNTARDLLYYAVTQDAMLIFENLSRGFGRQGKRTFMAERQYTRMEDWLTAKLAYNGLPSKTYLSKTLAQYTSKTCSNCGFTITSADYDRVLEKLKKTATGWMTTINGKELKVEGQITYYNRYKRQNVVKDLSVELDRLSEESVNNDISSWTKGRSGEALSLLKKRFSHRPVQEKFVCLNCGFETHADEQAALNIARSWLFLRSQEYKKYQTNKTTGNTDKRAFVETWQSFYRKKLKEVWKPAV

SEQ ID NO: 45708 - protein, 978 aa, synthetic construct
  REGION 1..978: note = engineered CasX variant
QEIKRINKIRRRLVKDSNTKKAGKTGPMKTLLVRVMTPDLRERLENLRKKPENIPQPISNTSRANLNKLLTDYTEMKKAILHVYWEEFQKDPVGLMSRVAQPASKKIDQNKLKPEMDEKGNLTTAGFACSQCGQPLFVYKLEQVSEKGKAYTNYFGRCNVAEHEKLILLAQLKPEKDSDEAVTYSLGKFGQRALDFYSIHVTKESTHPVKPLAQIAGNRYASAPVGKALSDACMGTIASFLSKYQDIIIEHQKVVKGNQKRLESLRELAGKENLEYPSVTLPPQPHTKEGVDAYNEVIARVRMWVNLNLWQKLKLSRDDAKPLLRLKGFPSFPLVERQANEVDWWDMVCNVKKLINEKKEDGKVFWQNLAGYKRQEALRPYLSSEEDRKKGKKFARYQLGDLLLHLEKKHGEDWGKVYDEAWERIDKKVEGLSKHIKLEEERRSEDAQSKAALTDWLRAKASFVIEGLKEADKDEFCRCELKLQKWYGDLRGKPFAIEAENSILDISGFSKQYNCAFIWQKDGVKKLNLYLIINYFKGGKLRFKKIKPEAFEANRFYTVINKKSGEIVPMEVNFNFDDPNLIILPLAFGKRQGREFIWNDLLSLETGSLKLANGRVIEKTLYNRRTRQDEPALFVALTFERREVLDSSNIKPMNLIGVDRGENIPAVIALTDPEGCPLSRFKDSLGNPTHILRIRESYKEKQRTIQAKKEVEQRRAGGYSRKYASKAKNLADDMVRNTARDLLYYAVTQDAMLIFENLSRGFGRQGKRTFMAERQYTRMEDWLTAKLAYNGLPSKTYLSKTLAQYTSKTCSNCGFTITSADYDRVLEKLKKTATGWMTTINGKELKVEGQITYYNRYKRQNVVKDLSVELDRLSEESVNNDISSWTKGRSGEALSLLKKRFSHRPVQEKFVCLNCGFETHADEQAALNIARSWLFLRSQEYKKYQTNKTTGNTDKRAFVETWQSFYRKKLKEVWKPAV

SEQ ID NO: 45709 - protein, 978 aa, synthetic construct
  REGION 1..978: note = engineered CasX variant
QEIKRINKIRRRLVKDSNTKKAGKTGPMKTLLVRVMTPDLRERLENLRKKPENIPQPISNTSRANLNKLLTDYTEMKKAILHVYWEEFQKDPVGLMSRVAQPASKKIDQNKLKPEMDEKGNLTTAGFACSQCGQPLFVYKLEQVSEKGKAYTNYFGRCNVAEHEKLILLAQLKPEKDSDEAVTYSLGKFGQRALDFYSIHVTKESTHPVKPLAQIAGNRYASVPVGKALSDACMGTIASFLSKYQDIIIEHQKVVKGNQKRLESLRELAGKENLEYPSVTLPPQPHTKEGVDAYNEVIARVRMWVNLNLWQKLKLSRDDAKPLLRLKGFPSFPLVERQANEVDWWDMVCNVKKLINEKKEDGKVFWQNLAGYKRQEALRPYLSSEEDRKKGKKFARYQLGDLLLHLEKKHGEDWGKVYDEAWERIDKKVEGLSKHIKLEEERRSEDAQSKAALTDWLRAKASFVIEGLKEADKDEFCRCELKLQKWYGDLRGKPFAIEAENSILDISGFSKQYNCAFIWQKDGVKKLNLYLIINYFKGGKLRFKKIKPEAFEANRFYTVINKKSGEIVPMEVNFNFDDPNLIILPLAFGKRQGREFIWNDLLSLETGSLKLANGRVIEKTLYNRRTRQDEPALFVALTFERREVLDSSNIKPMNLIGVDRGENIPAVIALTDPEGCPLSRFKDSLGNPTHILRIRESYKEKQRTIQAKKEVEQRRAGGYSRKYASKAKNLADDMVRNTARDLLYYAVTQDAMLIFENLSRGFGRQGKRTFMAERQYTRMEDWLTAKLAYNGLPSKTYLSKTLAQYTSKTCSNCGFTITSADYDRVLEKLKKTATGWMTTINGKELKVEGQITYYNRYKRQNVVKDLSVELDRLSEESVNNDISSWTKGRSGEALSLLKKRFSHRPVQEKFVCLNCGFETHADEQAALNIARSWLFLRSQEYKKYQTNKTTGNTDKRAFVETWQSFYRKKLKEVWKPAV

SEQ ID NO: 45710 - protein, 978 aa, synthetic construct
  REGION 1..978: note = engineered CasX variant
QEIKRINKIRRRLVKDSNTKKAGKTGPMKTLLVRVMTPDLRERLENLRKKPENIPQPISNTSRANLNKLLTDYTEMKKAILHVYWEEFQKDPVGLMSRVAQPASKKIDQNKLKPEMDEKGNLTTAGFACSQCGQPLFVYKLEQVSEKGKAYTNYFGRCNVAEHEKLIKLAQLKPEKDSDEAVTYSLGKFGQRALDFYSIHVTKESTHPVKPLAQIAGNRYASGPVGKALSDACMGTIASFLSKYQDIIIEHQKVVKGNQKRLESLRELAGKENLEYPSVTLPPQPHTKEGVDAYNEVIARVRMWVNLNLWQKLKLSRDDAKPLLRLKGFPSFPLVERQANEVDWWDMVCNVKKLINEKKEDGKVFWQNLAGYKRQEALRPYLSSEEDRKKGKKFARYQLGDLLLHLEKKHGEDWGKVYDEAWERIDKKVEGLSKHIKLEEERRSEDAQSKAALTDWLRAKASFVIEGLKEADKDEFCRCELKLQKWYGDLRGKPFAIEAENSILDISGFSKQYNCAFIWQKDGVKKLNLYLIINYFKGGKLRFKKIKPEAFEANRFYTVINKKSGEIVPMEVNFNFDDPNLIILPLAFGKRQGREFIWNDLLSLETGSLKLANGRVIEKTLYNRRTRQDEPALFVALTFERREVLDSSNIKPMNLIGVDRGENIPAVIALTDPEGCPLSRFKDSLGNPTHILRIRESYKEKQRTIQAKKEVEQRRAGGYSRKYASKAKNLADDMVRNTARDLLYYAVTQDAMLIFENLSRGFGRQGKRTFMAERQYTRMEDWLTAKLAYNGLPSKTYLSKTLAQYTSKTCSNCGFTITSADYDRVLEKLKKTATGWMTTINGKELKVEGQITYYNRYKRQNVVKDLSVELDRLSEESVNNDISSWTKGRSGEALSLLKKRFSHRPVQEKFVCLNCGFETHADEQAALNIARSWLFLRSQEYKKYQTNKTTGNTDKRAFVETWQSFYRKKLKEVWKPAV

SEQ ID NO: 45711 - protein, 977 aa, synthetic construct
  REGION 1..977: note = engineered CasX variant
QEIKRINKIRRRLVKDSNTKKAGKTGPMKTLLVRVMTPDLRERLENLRKKPENIPQPISNTSRANLNKLLTDYTEMKKAILHVYWEEFQKDPVGLMSRVAQPASKKIDQNKLKPEMDEKGNLTTAGFACSQCGQPLFVYKLEQVSEKGKAYTNYFGRCNVAEHEKLILLAQLKPEKDSDEAVTYSLGKFGQRALDFYSIHVTKESTHPVKPLAQIAGNRYASPVGKALSDACMGTIASFLSKYQDIIIEHQKVVKGNQKRLESLRELAGKENLEYPSVTLPPQPHTKEGVDAYNEVIARVRMWVNLNLWQKLKLSRDDAKPLLRLKGFPSFPLVERQANEVDWWDMVCNVKKLINEKKEDGKVFWQNLAGYKRQEALRPYLSSEEDRKKGKKFARYQLGDLLLHLEKKHGEDWGKVYDEAWERIDKKVEGLSKHIKLEEERRSEDAQSKAALTDWLRAKASFVIEGLKEADKDEFCRCELKLQKWYGDLRGKPFAIEAENSILDISGFSKQYNCAFIWQKDGVKKLNLYLIINYFKGGKLRFKKIKPEAFEANRFYTVINKKSGEIVPMEVNFNFDDPNLIILPLAFGKRQGREFIWNDLLSLETGSLKLANGRVIEKTLYNRRTRQDEPALFVALTFERREVLDSSNIKPMNLIGVDRGENIPAVIALTDPEGCPLSRFKDSLGNPTHILRIRESYKEKQRTIQAKKEVEQRRAGGYSRKYASKAKNLADDMVRNTARDLLYYAVTQDAMLIFENLSRGFGRQGKRTFMAERQYTRMEDWLTAKLAYNGLPSKTYLSKTLAQYTSKTCSNCGFTITSADYDRVLEKLKKTATGWMTTINGKELKVEGQITYYNRYKRQNVVKDLSVELDRLSEESVNNDISSWTKGRSGEALSLLKKRFSHRPVQEKFVCLNCGFETHADEQAALNIARSWLFLRSQEYKKYQTNKTTGNTDKRAFVETWQSFYRKKLKEVWKPAV

SEQ ID NO: 45712 - protein, 978 aa, synthetic construct
  REGION 1..978: note = engineered CasX variant
QEIKRINKIRRRLVKDSNTKKAGKTGPMKTLLVRVMTPDLRERLENLRKKPENIPQPISNTSRANLNKLLTDYTEMKKAILHVYWEEFQKDPVGLMSRVAQPASKKIDQNKLKPEMDEKGNLTTAGFACSQCGQPLFVYKLEQVSEKGKAYTNYFGRCNVAEHEKLIQLAQLKPEKDSDEAVTYSLGKFGQRALDFYSIHVTKESTHPVKPLAQIAGNRYASYPVGKALSDACMGTIASFLSKYQDIIIEHQKVVKGNQKRLESLRELAGKENLEYPSVTLPPQPHTKEGVDAYNEVIARVRMWVNLNLWQKLKLSRDDAKPLLRLKGFPSFPLVERQANEVDWWDMVCNVKKLINEKKEDGKVFWQNLAGYKRQEALRPYLSSEEDRKKGKKFARYQLGDLLLHLEKKHGEDWGKVYDEAWERIDKKVEGLSKHIKLEEERRSEDAQSKAALTDWLRAKASFVIEGLKEADKDEFCRCELKLQKWYGDLRGKPFAIEAENSILDISGFSKQYNCAFIWQKDGVKKLNLYLIINYFKGGKLRFKKIKPEAFEANRFYTVINKKSGEIVPMEVNFNFDDPNLIILPLAFGKRQGREFIWNDLLSLETGSLKLANGRVIEKTLYNRRTRQDEPALFVALTFERREVLDSSNIKPMNLIGVDRGENIPAVIALTDPEGCPLSRFKDSLGNPTHILRIRESYKEKQRTIQAKKEVEQRRAGGYSRKYASKAKNLADDMVRNTARDLLYYAVTQDAMLIFENLSRGFGRQGKRTFMAERQYTRMEDWLTAKLAYEGLPSKTYLSKTLAQYTSKTCSNCGFTITSADYDRVLEKLKKTATGWMTTINGKELKVEGQITYYNRYKRQNVVKDLSVELDRLSEESVNNDISSWTKGRSGEALSLLKKRFSHRPVQEKFVCLNCGFETHADEQAALNIARSWLFLRSQEYKKYQTNKTTGNTDKRAFVETWQSFYRKKLKEVWKPAV

SEQ ID NO: 45713 - protein, 978 aa, synthetic construct
  REGION 1..978: note = engineered CasX variant
QEIKRINKIRRRLVKDSNTKKAGKTGPMKTLLVRVMTPDLRERLENLRKKPENIPQPISNTSRANLNKLLTDYTEMKKAILHVYWEEFQKDPVGLMSRVAQPASKKIDQNKLKPEMDEKGNLTTAGFACSQCGQPLFVYKLEQVSEKGKAYTNYFGRCNVAEHEKLIQLAQLKPEKDSDEAVTYSLGKFGQRALDFYSIHVTKESTHPVKPLAQIAGNRYASHPVGKALSDACMGTIASFLSKYQDIIIEHQKVVKGNQKRLESLRELAGKENLEYPSVTLPPQPHTKEGVDAYNEVIARVRMWVNLNLWQKLKLSRDDAKPLLRLKGFPSFPLVERQANEVDWWDMVCNVKKLINEKKEDGKVFWQNLAGYKRQEALRPYLSSEEDRKKGKKFARYQLGDLLLHLEKKHGEDWGKVYDEAWERIDKKVEGLSKHIKLEEERRSEDAQSKAALTDWLRAKASFVIEGLKEADKDEFCRCELKLQKWYGDLRGKPFAIEAENSILDISGFSKQYNCAFIWQKDGVKKLNLYLIINYFKGGKLRFKKIKPEAFEANRFYTVINKKSGEIVPMEVNFNFDDPNLIILPLAFGKRQGREFIWNDLLSLETGSLKLANGRVIEKTLYNRRTRQDEPALFVALTFERREVLDSSNIKPMNLIGVDRGENIPAVIALTDPEGCPLSRFKDSLGNPTHILRIRESYKEKQRTIQAKKEVEQRRAGGYSRKYASKAKNLADDMVRNTARDLLYYAVTQDAMLIFENLSRGFGRQGKRTFMAERQYTRMEDWLTAKLAYEGLPSKTYLSKTLAQYTSKTCSNCGFTITSADYDRVLEKLKKTATGWMTTINGKELKVEGQITYYNRYKRQNVVKDLSVELDRLSEESVNNDISSWTKGRSGEALSLLKKRFSHRPVQEKFVCLNCGFETHADEQAALNIARSWLFLRSQEYKKYQTNKTTGNTDKRAFVETWQSFYRKKLKEVWKPAV

SEQ ID NO: 45714 - protein, 978 aa, synthetic construct
  REGION 1..978: note = engineered CasX variant
QEIKRINKIRRRLVKDSNTKKAGKTGPMKTLLVRVMTPDLRERLENLRKKPENIPQPISNTSRANLNKLLTDYTEMKKAILHVYWEEFQKDPVGLMSRVAQPASKKIDQNKLKPEMDEKGNLTTAGFACSQCGQPLFVYKLEQVSEKGKAYTNYFGRCNVAEHEKLIQLAQLKPEKDSDEAVTYSLGKFGQRALDFYSIHVTKESTHPVKPLAQIAGNRYASSPVGKALSDACMGTIASFLSKYQDIIIEHQKVVKGNQKRLESLRELAGKENLEYPSVTLPPQPHTKEGVDAYNEVIARVRMWVNLNLWQKLKLSRDDAKPLLRLKGFPSFPLVERQANEVDWWDMVCNVKKLINEKKEDGKVFWQNLAGYKRQEALRPYLSSEEDRKKGKKFARYQLGDLLLHLEKKHGEDWGKVYDEAWERIDKKVEGLSKHIKLEEERRSEDAQSKAALTDWLRAKASFVIEGLKEADKDEFCRCELKLQKWYGDLRGKPFAIEAENSILDISGFSKQYNCAFIWQKDGVKKLNLYLIINYFKGGKLRFKKIKPEAFEANRFYTVINKKSGEIVPMEVNFNFDDPNLIILPLAFGKRQGREFIWNDLLSLETGSLKLANGRVIEKTLYNRRTRQDEPALFVALTFERREVLDSSNIKPMNLIGVDRGENIPAVIALTDPEGCPLSRFKDSLGNPTHILRIRESYKEKQRTIQAKKEVEQRRAGGYSRKYASKAKNLADDMVRNTARDLLYYAVTQDAMLIFENLSRGFGRQGKRTFMAERQYTRMEDWLTAKLAYEGLPSKTYLSKTLAQYTSKTCSNCGFTITSADYDRVLEKLKKTATGWMTTINGKELKVEGQITYYNRYKRQNVVKDLSVELDRLSEESVNNDISSWTKGRSGEALSLLKKRFSHRPVQEKFVCLNCGFETHADEQAALNIARSWLFLRSQEYKKYQTNKTTGNTDKRAFVETWQSFYRKKLKEVWKPAV

SEQ ID NO: 45715 - protein, 978 aa, synthetic construct
  REGION 1..978: note = engineered CasX variant
QEIKRINKIRRRLVKDSNTKKAGKTGPMKTLLVRVMTPDLRERLENLRKKPENIPQPISNTSRANLNKLLTDYTEMKKAILHVYWEEFQKDPVGLMSRVAQPASKKIDQNKLKPEMDEKGNLTTAGFACSQCGQPLFVYKLEQVSEKGKAYTNYFGRCNVAEHEKLIQLAQLKPEKDSDEAVTYSLGKFGQRALDFYSIHVTKESTHPVKPLAQIAGNRYASTPVGKALSDACMGTIASFLSKYQDIIIEHQKVVKGNQKRLESLRELAGKENLEYPSVTLPPQPHTKEGVDAYNEVIARVRMWVNLNLWQKLKLSRDDAKPLLRLKGFPSFPLVERQANEVDWWDMVCNVKKLINEKKEDGKVFWQNLAGYKRQEALRPYLSSEEDRKKGKKFARYQLGDLLLHLEKKHGEDWGKVYDEAWERIDKKVEGLSKHIKLEEERRSEDAQSKAALTDWLRAKASFVIEGLKEADKDEFCRCELKLQKWYGDLRGKPFAIEAENSILDISGFSKQYNCAFIWQKDGVKKLNLYLIINYFKGGKLRFKKIKPEAFEANRFYTVINKKSGEIVPMEVNFNFDDPNLIILPLAFGKRQGREFIWNDLLSLETGSLKLANGRVIEKTLYNRRTRQDEPALFVALTFERREVLDSSNIKPMNLIGVDRGENIPAVIALTDPEGCPLSRFKDSLGNPTHILRIRESYKEKQRTIQAKKEVEQRRAGGYSRKYASKAKNLADDMVRNTARDLLYYAVTQDAMLIFENLSRGFGRQGKRTFMAERQYTRMEDWLTAKLAYEGLPSKTYLSKTLAQYTSKTCSNCGFTITSADYDRVLEKLKKTATGWMTTINGKELKVEGQITYYNRYKRQNVVKDLSVELDRLSEESVNNDISSWTKGRSGEALSLLKKRFSHRPVQEKFVCLNCGFETHADEQAALNIARSWLFLRSQEYKKYQTNKTTGNTDKRAFVETWQSFYRKKLKEVWKPAV

SEQ ID NO: 45716 - protein, 978 aa, synthetic construct
  REGION 1..978: note = engineered CasX variant
QEIKRINKIRRRLVKDSNTKKAGKTGPMKTLLVRVMTPDLRERLENLRKKPENIPQPISNTSRANLNKLLTDYTEMKKAILHVYWEEFQKDPVGLMSRVAQPASKKIDQNKLKPEMDEKGNLTTAGFACSQCGQPLFVYKLEQVSEKGKAYTNYFGRCNVAEHEKLIQLAQLKPEKDSDEAVTYSLGKFGQRALDFYSIHVTKESTHPVKPLAQIAGNRYASAPVGKALSDACMGTIASFLSKYQDIIIEHQKVVKGNQKRLESLRELAGKENLEYPSVTLPPQPHTKEGVDAYNEVIARVRMWVNLNLWQKLKLSRDDAKPLLRLKGFPSFPLVERQANEVDWWDMVCNVKKLINEKKEDGKVFWQNLAGYKRQEALRPYLSSEEDRKKGKKFARYQLGDLLLHLEKKHGEDWGKVYDEAWERIDKKVEGLSKHIKLEEERRSEDAQSKAALTDWLRAKASFVIEGLKEADKDEFCRCELKLQKWYGDLRGKPFAIEAENSILDISGFSKQYNCAFIWQKDGVKKLNLYLIINYFKGGKLRFKKIKPEAFEANRFYTVINKKSGEIVPMEVNFNFDDPNLIILPLAFGKRQGREFIWNDLLSLETGSLKLANGRVIEKTLYNRRTRQDEPALFVALTFERREVLDSSNIKPMNLIGVDRGENIPAVIALTDPEGCPLSRFKDSLGNPTHILRIRESYKEKQRTIQAKKEVEQRRAGGYSRKYASKAKNLADDMVRNTARDLLYYAVTQDAMLIFENLSRGFGRQGKRTFMAERQYTRMEDWLTAKLAYEGLPSKTYLSKTLAQYTSKTCSNCGFTITSADYDRVLEKLKKTATGWMTTINGKELKVEGQITYYNRYKRQNVVKDLSVELDRLSEESVNNDISSWTKGRSGEALSLLKKRFSHRPVQEKFVCLNCGFETHADEQAALNIARSWLFLRSQEYKKYQTNKTTGNTDKRAFVETWQSFYRKKLKEVWKPAV

SEQ ID NO: 45717 - protein, 978 aa, synthetic construct
  REGION 1..978: note = engineered CasX variant
QEIKRINKIRRRLVKDSNTKKAGKTGPMKTLLVRVMTPDLRERLENLRKKPENIPQPISNTSRANLNKLLTDYTEMKKAILHVYWEEFQKDPVGLMSRVAQPASKKIDQNKLKPEMDEKGNLTTAGFACSQCGQPLFVYKLEQVSEKGKAYTNYFGRCNVAEHEKLIQLAQLKPEKDSDEAVTYSLGKFGQRALDFYSIHVTKESTHPVKPLAQIAGNRYASVPVGKALSDACMGTIASFLSKYQDIIIEHQKVVKGNQKRLESLRELAGKENLEYPSVTLPPQPHTKEGVDAYNEVIARVRMWVNLNLWQKLKLSRDDAKPLLRLKGFPSFPLVERQANEVDWWDMVCNVKKLINEKKEDGKVFWQNLAGYKRQEALRPYLSSEEDRKKGKKFARYQLGDLLLHLEKKHGEDWGKVYDEAWERIDKKVEGLSKHIKLEEERRSEDAQSKAALTDWLRAKASFVIEGLKEADKDEFCRCELKLQKWYGDLRGKPFAIEAENSILDISGFSKQYNCAFIWQKDGVKKLNLYLIINYFKGGKLRFKKIKPEAFEANRFYTVINKKSGEIVPMEVNFNFDDPNLIILPLAFGKRQGREFIWNDLLSLETGSLKLANGRVIEKTLYNRRTRQDEPALFVALTFERREVLDSSNIKPMNLIGVDRGENIPAVIALTDPEGCPLSRFKDSLGNPTHILRIRESYKEKQRTIQAKKEVEQRRAGGYSRKYASKAKNLADDMVRNTARDLLYYAVTQDAMLIFENLSRGFGRQGKRTFMAERQYTRMEDWLTAKLAYEGLPSKTYLSKTLAQYTSKTCSNCGFTITSADYDRVLEKLKKTATGWMTTINGKELKVEGQITYYNRYKRQNVVKDLSVELDRLSEESVNNDISSWTKGRSGEALSLLKKRFSHRPVQEKFVCLNCGFETHADEQAALNIARSWLFLRSQEYKKYQTNKTTGNTDKRAFVETWQSFYRKKLKEVWKPAV

SEQ ID NO: 45718 - protein, 979 aa, synthetic construct
  REGION 1..979: note = engineered CasX variant
QEIKRINKIRRRLVKDSNTKKAGKTGPMKTLLVRVMTPDLRERLENLRKKPENIPQPISNTSRANLNKLLTDYTEMKKAILHVYWEEFQKDPVGLMSRVAQPASKKIDQNKLKPEMDEKGNLTTAGFACSQCGQPLFVYKLEQVSEKGKAYTNYFGRCNVAEHEKLIQKLAQLKPEKDSDEAVTYSLGKFGQRALDFYSIHVTKESTHPVKPLAQIAGNRYASGPVGKALSDACMGTIASFLSKYQDIIIEHQKVVKGNQKRLESLRELAGKENLEYPSVTLPPQPHTKEGVDAYNEVIARVRMWVNLNLWQKLKLSRDDAKPLLRLKGFPSFPLVERQANEVDWWDMVCNVKKLINEKKEDGKVFWQNLAGYKRQEALRPYLSSEEDRKKGKKFARYQLGDLLLHLEKKHGEDWGKVYDEAWERIDKKVEGLSKHIKLEEERRSEDAQSKAALTDWLRAKASFVIEGLKEADKDEFCRCELKLQKWYGDLRGKPFAIEAENSILDISGFSKQYNCAFIWQKDGVKKLNLYLIINYFKGGKLRFKKIKPEAFEANRFYTVINKKSGEIVPMEVNFNFDDPNLIILPLAFGKRQGREFIWNDLLSLETGSLKLANGRVIEKTLYNRRTRQDEPALFVALTFERREVLDSSNIKPMNLIGVDRGENIPAVIALTDPEGCPLSRFKDSLGNPTHILRIRESYKEKQRTIQAKKEVEQRRAGGYSRKYASKAKNLADDMVRNTARDLLYYAVTQDAMLIFENLSRGFGRQGKRTFMAERQYTRMEDWLTAKLAYEGLPSKTYLSKTLAQYTSKTCSNCGFTITSADYDRVLEKLKKTATGWMTTINGKELKVEGQITYYNRYKRQNVVKDLSVELDRLSEESVNNDISSWTKGRSGEALSLLKKRFSHRPVQEKFVCLNCGFETHADEQAALNIARSWLFLRSQEYKKYQTNKTTGNTDKRAFVETWQSFYRKKLKEVWKPAV

SEQ ID NO: 45719 - protein, 977 aa, synthetic construct
  REGION 1..977: note = engineered CasX variant
QEIKRINKIRRRLVKDSNTKKAGKTGPMKTLLVRVMTPDLRERLENLRKKPENIPQPISNTSRANLNKLLTDYTEMKKAILHVYWEEFQKDPVGLMSRVAQPASKKIDQNKLKPEMDEKGNLTTAGFACSQCGQPLFVYKLEQVSEKGKAYTNYFGRCNVAEHEKLIQLAQLKPEKDSDEAVTYSLGKFGQRALDFYSIHVTKESTHPVKPLAQIAGNRYASPVGKALSDACMGTIASFLSKYQDIIIEHQKVVKGNQKRLESLRELAGKENLEYPSVTLPPQPHTKEGVDAYNEVIARVRMWVNLNLWQKLKLSRDDAKPLLRLKGFPSFPLVERQANEVDWWDMVCNVKKLINEKKEDGKVFWQNLAGYKRQEALRPYLSSEEDRKKGKKFARYQLGDLLLHLEKKHGEDWGKVYDEAWERIDKKVEGLSKHIKLEEERRSEDAQSKAALTDWLRAKASFVIEGLKEADKDEFCRCELKLQKWYGDLRGKPFAIEAENSILDISGFSKQYNCAFIWQKDGVKKLNLYLIINYFKGGKLRFKKIKPEAFEANRFYTVINKKSGEIVPMEVNFNFDDPNLIILPLAFGKRQGREFIWNDLLSLETGSLKLANGRVIEKTLYNRRTRQDEPALFVALTFERREVLDSSNIKPMNLIGVDRGENIPAVIALTDPEGCPLSRFKDSLGNPTHILRIRESYKEKQRTIQAKKEVEQRRAGGYSRKYASKAKNLADDMVRNTARDLLYYAVTQDAMLIFENLSRGFGRQGKRTFMAERQYTRMEDWLTAKLAYEGLPSKTYLSKTLAQYTSKTCSNCGFTITSADYDRVLEKLKKTATGWMTTINGKELKVEGQITYYNRYKRQNVVKDLSVELDRLSEESVNNDISSWTKGRSGEALSLLKKRFSHRPVQEKFVCLNCGFETHADEQAALNIARSWLFLRSQEYKKYQTNKTTGNTDKRAFVETWQSFYRKKLKEVWKPAV

SEQ ID NO: 45720 - protein, 978 aa, synthetic construct
  REGION 1..978: note = engineered CasX variant
QEIKRINKIRRRLVKDSNTKKAGKTGPMKTLLVRVMTPDLRERLENLRKKPENIPQPISNTSRANLNKLLTDYTEMKKAILHVYWEEFQKDPVGLMSRVAQPASKKIDQNKLKPEMDEKGNLTTAGFACSQCGQPLFVYKLEQVSEKGKAYTNYFGRCNVAEHEKLILLAQLKPEKDSDEAVTYSLGKFGQRALDFYSIHVTKESTHPVKPLAQIAGNRYASYPVGKALSDACMGTIASFLSKYQDIIIEHQKVVKGNQKRLESLRELAGKENLEYPSVTLPPQPHTKEGVDAYNEVIARVRMWVNLNLWQKLKLSRDDAKPLLRLKGFPSFPLVERQANEVDWWDMVCNVKKLINEKKEDGKVFWQNLAIYKRQEALRPYLSSEEDRKKGKKFARYQLGDLLLHLEKKHGEDWGKVYDEAWERIDKKVEGLSKHIKLEEERRSEDAQSKAALTDWLRAKASFVIEGLKEADKDEFCRCELKLQKWYGDLRGKPFAIEAENSILDISGFSKQYNCAFIWQKDGVKKLNLYLIINYFKGGKLRFKKIKPEAFEANRFYTVINKKSGEIVPMEVNFNFDDPNLIILPLAFGKRQGREFIWNDLLSLETGSLKLANGRVIEKTLYNRRTRQDEPALFVALTFERREVLDSSNIKPMNLIGVDRGENIPAVIALTDPEGCPLSRFKDSLGNPTHILRIRESYKEKQRTIQAKKEVEQRRAGGYSRKYASKAKNLADDMVRNTARDLLYYAVTQDAMLIFENLSRGFGRQGKRTFMAERQYTRMEDWLTAKLAYEGLPSKTYLSKTLAQYTSKTCSNCGFTITSADYDRVLEKLKKTATGWMTTINGKELKVEGQITYYNRYKRQNVVKDLSVELDRLSEESVNNDISSWTKGRSGEALSLLKKRFSHRPVQEKFVCLNCGFETHADEQAALNIARSWLFLRSQEYKKYQTNKTTGNTDKRAFVETWQSFYRKKLKEVWKPAV

SEQ ID NO: 45721 - protein, 978 aa, synthetic construct
  REGION 1..978: note = engineered CasX variant
QEIKRINKIRRRLVKDSNTKKAGKTGPMKTLLVRVMTPDLRERLENLRKKPENIPQPISNTSRANLNKLLTDYTEMKKAILHVYWEEFQKDPVGLMSRVAQPASKKIDQNKLKPEMDEKGNLTTAGFACSQCGQPLFVYKLEQVSEKGKAYTNYFGRCNVAEHEKLILLAQLKPEKDSDEAVTYSLGKFGQRALDFYSIHVTKESTHPVKPLAQIAGNRYASHPVGKALSDACMGTIASFLSKYQDIIIEHQKVVKGNQKRLESLRELAGKENLEYPSVTLPPQPHTKEGVDAYNEVIARVRMWVNLNLWQKLKLSRDDAKPLLRLKGFPSFPLVERQANEVDWWDMVCNVKKLINEKKEDGKVFWQNLAIYKRQEALRPYLSSEEDRKKGKKFARYQLGDLLLHLEKKHGEDWGKVYDEAWERIDKKVEGLSKHIKLEEERRSEDAQSKAALTDWLRAKASFVIEGLKEADKDEFCRCELKLQKWYGDLRGKPFAIEAENSILDISGFSKQYNCAFIWQKDGVKKLNLYLIINYFKGGKLRFKKIKPEAFEANRFYTVINKKSGEIVPMEVNFNFDDPNLIILPLAFGKRQGREFIWNDLLSLETGSLKLANGRVIEKTLYNRRTRQDEPALFVALTFERREVLDSSNIKPMNLIGVDRGENIPAVIALTDPEGCPLSRFKDSLGNPTHILRIRESYKEKQRTIQAKKEVEQRRAGGYSRKYASKAKNLADDMVRNTARDLLYYAVTQDAMLIFENLSRGFGRQGKRTFMAERQYTRMEDWLTAKLAYEGLPSKTYLSKTLAQYTSKTCSNCGFTITSADYDRVLEKLKKTATGWMTTINGKELKVEGQITYYNRYKRQNVVKDLSVELDRLSEESVNNDISSWTKGRSGEALSLLKKRFSHRPVQEKFVCLNCGFETHADEQAALNIARSWLFLRSQEYKKYQTNKTTGNTDKRAFVETWQSFYRKKLKEVWKPAV

SEQ ID NO: 45722 - protein, 978 aa, synthetic construct
  REGION 1..978: note = engineered CasX variant
QEIKRINKIRRRLVKDSNTKKAGKTGPMKTLLVRVMTPDLRERLENLRKKPENIPQPISNTSRANLNKLLTDYTEMKKAILHVYWEEFQKDPVGLMSRVAQPASKKIDQNKLKPEMDEKGNLTTAGFACSQCGQPLFVYKLEQVSEKGKAYTNYFGRCNVAEHEKLILLAQLKPEKDSDEAVTYSLGKFGQRALDFYSIHVTKESTHPVKPLAQIAGNRYASSPVGKALSDACMGTIASFLSKYQDIIIEHQKVVKGNQKRLESLRELAGKENLEYPSVTLPPQPHTKEGVDAYNEVIARVRMWVNLNLWQKLKLSRDDAKPLLRLKGFPSFPLVERQANEVDWWDMVCNVKKLINEKKEDGKVFWQNLAIYKRQEALRPYLSSEEDRKKGKKFARYQLGDLLLHLEKKHGEDWGKVYDEAWERIDKKVEGLSKHIKLEEERRSEDAQSKAALTDWLRAKASFVIEGLKEADKDEFCRCELKLQKWYGDLRGKPFAIEAENSILDISGFSKQYNCAFIWQKDGVKKLNLYLIINYFKGGKLRFKKIKPEAFEANRFYTVINKKSGEIVPMEVNFNFDDPNLIILPLAFGKRQGREFIWNDLLSLETGSLKLANGRVIEKTLYNRRTRQDEPALFVALTFERREVLDSSNIKPMNLIGVDRGENIPAVIALTDPEGCPLSRFKDSLGNPTHILRIRESYKEKQRTIQAKKEVEQRRAGGYSRKYASKAKNLADDMVRNTARDLLYYAVTQDAMLIFENLSRGFGRQGKRTFMAERQYTRMEDWLTAKLAYEGLPSKTYLSKTLAQYTSKTCSNCGFTITSADYDRVLEKLKKTATGWMTTINGKELKVEGQITYYNRYKRQNVVKDLSVELDRLSEESVNNDISSWTKGRSGEALSLLKKRFSHRPVQEKFVCLNCGFETHADEQAALNIARSWLFLRSQEYKKYQTNKTTGNTDKRAFVETWQSFYRKKLKEVWKPAV

SEQ ID NO: 45723 - protein, 978 aa, synthetic construct
  REGION 1..978: note = engineered CasX variant
QEIKRINKIRRRLVKDSNTKKAGKTGPMKTLLVRVMTPDLRERLENLRKKPENIPQPISNTSRANLNKLLTDYTEMKKAILHVYWEEFQKDPVGLMSRVAQPASKKIDQNKLKPEMDEKGNLTTAGFACSQCGQPLFVYKLEQVSEKGKAYTNYFGRCNVAEHEKLILLAQLKPEKDSDEAVTYSLGKFGQRALDFYSIHVTKESTHPVKPLAQIAGNRYASTPVGKALSDACMGTIASFLSKYQDIIIEHQKVVKGNQKRLESLRELAGKENLEYPSVTLPPQPHTKEGVDAYNEVIARVRMWVNLNLWQKLKLSRDDAKPLLRLKGFPSFPLVERQANEVDWWDMVCNVKKLINEKKEDGKVFWQNLAIYKRQEALRPYLSSEEDRKKGKKFARYQLGDLLLHLEKKHGEDWGKVYDEAWERIDKKVEGLSKHIKLEEERRSEDAQSKAALTDWLRAKASFVIEGLKEADKDEFCRCELKLQKWYGDLRGKPFAIEAENSILDISGFSKQYNCAFIWQKDGVKKLNLYLIINYFKGGKLRFKKIKPEAFEANRFYTVINKKSGEIVPMEVNFNFDDPNLIILPLAFGKRQGREFIWNDLLSLETGSLKLANGRVIEKTLYNRRTRQDEPALFVALTFERREVLDSSNIKPMNLIGVDRGENIPAVIALTDPEGCPLSRFKDSLGNPTHILRIRESYKEKQRTIQAKKEVEQRRAGGYSRKYASKAKNLADDMVRNTARDLLYYAVTQDAMLIFENLSRGFGRQGKRTFMAERQYTRMEDWLTAKLAYEGLPSKTYLSKTLAQYTSKTCSNCGFTITSADYDRVLEKLKKTATGWMTTINGKELKVEGQITYYNRYKRQNVVKDLSVELDRLSEESVNNDISSWTKGRSGEALSLLKKRFSHRPVQEKFVCLNCGFETHADEQAALNIARSWLFLRSQEYKKYQTNKTTGNTDKRAFVETWQSFYRKKLKEVWKPAV

SEQ ID NO: 45724 - protein, 978 aa, synthetic construct
  REGION 1..978: note = engineered CasX variant
QEIKRINKIRRRLVKDSNTKKAGKTGPMKTLLVRVMTPDLRERLENLRKKPENIPQPISNTSRANLNKLLTDYTEMKKAILHVYWEEFQKDPVGLMSRVAQPASKKIDQNKLKPEMDEKGNLTTAGFACSQCGQPLFVYKLEQVSEKGKAYTNYFGRCNVAEHEKLILLAQLKPEKDSDEAVTYSLGKFGQRALDFYSIHVTKESTHPVKPLAQIAGNRYASAPVGKALSDACMGTIASFLSKYQDIIIEHQKVVKGNQKRLESLRELAGKENLEYPSVTLPPQPHTKEGVDAYNEVIARVRMWVNLNLWQKLKLSRDDAKPLLRLKGFPSFPLVERQANEVDWWDMVCNVKKLINEKKEDGKVFWQNLAIYKRQEALRPYLSSEEDRKKGKKFARYQLGDLLLHLEKKHGEDWGKVYDEAWERIDKKVEGLSKHIKLEEERRSEDAQSKAALTDWLRAKASFVIEGLKEADKDEFCRCELKLQKWYGDLRGKPFAIEAENSILDISGFSKQYNCAFIWQKDGVKKLNLYLIINYFKGGKLRFKKIKPEAFEANRFYTVINKKSGEIVPMEVNFNFDDPNLIILPLAFGKRQGREFIWNDLLSLETGSLKLANGRVIEKTLYNRRTRQDEPALFVALTFERREVLDSSNIKPMNLIGVDRGENIPAVIALTDPEGCPLSRFKDSLGNPTHILRIRESYKEKQRTIQAKKEVEQRRAGGYSRKYASKAKNLADDMVRNTARDLLYYAVTQDAMLIFENLSRGFGRQGKRTFMAERQYTRMEDWLTAKLAYEGLPSKTYLSKTLAQYTSKTCSNCGFTITSADYDRVLEKLKKTATGWMTTINGKELKVEGQITYYNRYKRQNVVKDLSVELDRLSEESVNNDISSWTKGRSGEALSLLKKRFSHRPVQEKFVCLNCGFETHADEQAALNIARSWLFLRSQEYKKYQTNKTTGNTDKRAFVETWQSFYRKKLKEVWKPAV

SEQ ID NO: 45725 - protein, 978 aa, synthetic construct
  REGION 1..978: note = engineered CasX variant
QEIKRINKIRRRLVKDSNTKKAGKTGPMKTLLVRVMTPDLRERLENLRKKPENIPQPISNTSRANLNKLLTDYTEMKKAILHVYWEEFQKDPVGLMSRVAQPASKKIDQNKLKPEMDEKGNLTTAGFACSQCGQPLFVYKLEQVSEKGKAYTNYFGRCNVAEHEKLILLAQLKPEKDSDEAVTYSLGKFGQRALDFYSIHVTKESTHPVKPLAQIAGNRYASVPVGKALSDACMGTIASFLSKYQDIIIEHQKVVKGNQKRLESLRELAGKENLEYPSVTLPPQPHTKEGVDAYNEVIARVRMWVNLNLWQKLKLSRDDAKPLLRLKGFPSFPLVERQANEVDWWDMVCNVKKLINEKKEDGKVFWQNLAIYKRQEALRPYLSSEEDRKKGKKFARYQLGDLLLHLEKKHGEDWGKVYDEAWERIDKKVEGLSKHIKLEEERRSEDAQSKAALTDWLRAKASFVIEGLKEADKDEFCRCELKLQKWYGDLRGKPFAIEAENSILDISGFSKQYNCAFIWQKDGVKKLNLYLIINYFKGGKLRFKKIKPEAFEANRFYTVINKKSGEIVPMEVNFNFDDPNLIILPLAFGKRQGREFIWNDLLSLETGSLKLANGRVIEKTLYNRRTRQDEPALFVALTFERREVLDSSNIKPMNLIGVDRGENIPAVIALTDPEGCPLSRFKDSLGNPTHILRIRESYKEKQRTIQAKKEVEQRRAGGYSRKYASKAKNLADDMVRNTARDLLYYAVTQDAMLIFENLSRGFGRQGKRTFMAERQYTRMEDWLTAKLAYEGLPSKTYLSKTLAQYTSKTCSNCGFTITSADYDRVLEKLKKTATGWMTTINGKELKVEGQITYYNRYKRQNVVKDLSVELDRLSEESVNNDISSWTKGRSGEALSLLKKRFSHRPVQEKFVCLNCGFETHADEQAALNIARSWLFLRSQEYKKYQTNKTTGNTDKRAFVETWQSFYRKKLKEVWKPAV

SEQ ID NO: 45726 - protein, 978 aa, synthetic construct
  REGION 1..978: note = engineered CasX variant
QEIKRINKIRRRLVKDSNTKKAGKTGPMKTLLVRVMTPDLRERLENLRKKPENIPQPISNTSRANLNKLLTDYTEMKKAILHVYWEEFQKDPVGLMSRVAQPASKKIDQNKLKPEMDEKGNLTTAGFACSQCGQPLFVYKLEQVSEKGKAYTNYFGRCNVAEHEKLIKLAQLKPEKDSDEAVTYSLGKFGQRALDFYSIHVTKESTHPVKPLAQIAGNRYASGPVGKALSDACMGTIASFLSKYQDIIIEHQKVVKGNQKRLESLRELAGKENLEYPSVTLPPQPHTKEGVDAYNEVIARVRMWVNLNLWQKLKLSRDDAKPLLRLKGFPSFPLVERQANEVDWWDMVCNVKKLINEKKEDGKVFWQNLAIYKRQEALRPYLSSEEDRKKGKKFARYQLGDLLLHLEKKHGEDWGKVYDEAWERIDKKVEGLSKHIKLEEERRSEDAQSKAALTDWLRAKASFVIEGLKEADKDEFCRCELKLQKWYGDLRGKPFAIEAENSILDISGFSKQYNCAFIWQKDGVKKLNLYLIINYFKGGKLRFKKIKPEAFEANRFYTVINKKSGEIVPMEVNFNFDDPNLIILPLAFGKRQGREFIWNDLLSLETGSLKLANGRVIEKTLYNRRTRQDEPALFVALTFERREVLDSSNIKPMNLIGVDRGENIPAVIALTDPEGCPLSRFKDSLGNPTHILRIRESYKEKQRTIQAKKEVEQRRAGGYSRKYASKAKNLADDMVRNTARDLLYYAVTQDAMLIFENLSRGFGRQGKRTFMAERQYTRMEDWLTAKLAYEGLPSKTYLSKTLAQYTSKTCSNCGFTITSADYDRVLEKLKKTATGWMTTINGKELKVEGQITYYNRYKRQNVVKDLSVELDRLSEESVNNDISSWTKGRSGEALSLLKKRFSHRPVQEKFVCLNCGFETHADEQAALNIARSWLFLRSQEYKKYQTNKTTGNTDKRAFVETWQSFYRKKLKEVWKPAV

SEQ ID NO: 45727 - protein, 977 aa, synthetic construct
  REGION 1..977: note = engineered CasX variant
QEIKRINKIRRRLVKDSNTKKAGKTGPMKTLLVRVMTPDLRERLENLRKKPENIPQPISNTSRANLNKLLTDYTEMKKAILHVYWEEFQKDPVGLMSRVAQPASKKIDQNKLKPEMDEKGNLTTAGFACSQCGQPLFVYKLEQVSEKGKAYTNYFGRCNVAEHEKLILLAQLKPEKDSDEAVTYSLGKFGQRALDFYSIHVTKESTHPVKPLAQIAGNRYASPVGKALSDACMGTIASFLSKYQDIIIEHQKVVKGNQKRLESLRELAGKENLEYPSVTLPPQPHTKEGVDAYNEVIARVRMWVNLNLWQKLKLSRDDAKPLLRLKGFPSFPLVERQANEVDWWDMVCNVKKLINEKKEDGKVFWQNLAIYKRQEALRPYLSSEEDRKKGKKFARYQLGDLLLHLEKKHGEDWGKVYDEAWERIDKKVEGLSKHIKLEEERRSEDAQSKAALTDWLRAKASFVIEGLKEADKDEFCRCELKLQKWYGDLRGKPFAIEAENSILDISGFSKQYNCAFIWQKDGVKKLNLYLIINYFKGGKLRFKKIKPEAFEANRFYTVINKKSGEIVPMEVNFNFDDPNLIILPLAFGKRQGREFIWNDLLSLETGSLKLANGRVIEKTLYNRRTRQDEPALFVALTFERREVLDSSNIKPMNLIGVDRGENIPAVIALTDPEGCPLSRFKDSLGNPTHILRIRESYKEKQRTIQAKKEVEQRRAGGYSRKYASKAKNLADDMVRNTARDLLYYAVTQDAMLIFENLSRGFGRQGKRTFMAERQYTRMEDWLTAKLAYEGLPSKTYLSKTLAQYTSKTCSNCGFTITSADYDRVLEKLKKTATGWMTTINGKELKVEGQITYYNRYKRQNVVKDLSVELDRLSEESVNNDISSWTKGRSGEALSLLKKRFSHRPVQEKFVCLNCGFETHADEQAALNIARSWLFLRSQEYKKYQTNKTTGNTDKRAFVETWQSFYRKKLKEVWKPAV

SEQ ID NO: 45728 - protein, 978 aa, synthetic construct
  REGION 1..978: note = engineered CasX variant
QEIKRINKIRRRLVKDSNTKKAGKTGPMKTLLVRVMTPDLRERLENLRKKPENIPQPISNTSRANLNKLLTDYTEMKKAILHVYWEEFQKDPVGLMSRVAQPASKKIDQNKLKPEMDEKGNLTTAGFACSQCGQPLFVYKLEQVSEKGKAYTNYFGRCNVAEHEKLILLAQLKPEKDSDEAVTYSLGKFGQRALDFYSIHVTKESTHPVKPLAQIAGNRYASYPVGKALSDACMGTIASFLSKYQDIIIEHQKVVKGNQKRLESLRELAGKENLEYPSVTLPPQPHTKEGVDAYNEVIARVRMWVNLNLWQKLKLSRDDAKPLLRLKGFPSFPLVERQANEVDWWDMVCNVKKLINEKKEDGKVFWQNLAGYKRQEALRPYLSSEEDREKGKKFARYQLGDLLLHLEKKHGEDWGKVYDEAWERIDKKVEGLSKHIKLEEERRSEDAQSKAALTDWLRAKASFVIEGLKEADKDEFCRCELKLQKWYGDLRGKPFAIEAENSILDISGFSKQYNCAFIWQKDGVKKLNLYLIINYFKGGKLRFKKIKPEAFEANRFYTVINKKSGEIVPMEVNFNFDDPNLIILPLAFGKRQGREFIWNDLLSLETGSLKLANGRVIEKTLYNRRTRQDEPALFVALTFERREVLDSSNIKPMNLIGVDRGENIPAVIALTDPEGCPLSRFKDSLGNPTHILRIRESYKEKQRTIQAKKEVEQRRAGGYSRKYASKAKNLADDMVRNTARDLLYYAVTQDAMLIFENLSRGFGRQGKRTFMAERQYTRMEDWLTAKLAYEGLPSKTYLSKTLAQYTSKTCSNCGFTITSADYDRVLEKLKKTATGWMTTINGKELKVEGQITYYNRYKRQNVVKDLSVELDRLSEESVNNDISSWTKGRSGEALSLLKKRFSHRPVQEKFVCLNCGFETHADEQAALNIARSWLFLRSQEYKKYQTNKTTGNTDKRAFVETWQSFYRKKLKEVWKPAV

SEQ ID NO: 45729 - protein, 978 aa, synthetic construct
  REGION 1..978: note = engineered CasX variant
QEIKRINKIRRRLVKDSNTKKAGKTGPMKTLLVRVMTPDLRERLENLRKKPENIPQPISNTSRANLNKLLTDYTEMKKAILHVYWEEFQKDPVGLMSRVAQPASKKIDQNKLKPEMDEKGNLTTAGFACSQCGQPLFVYKLEQVSEKGKAYTNYFGRCNVAEHEKLILLAQLKPEKDSDEAVTYSLGKFGQRALDFYSIHVTKESTHPVKPLAQIAGNRYASHPVGKALSDACMGTIASFLSKYQDIIIEHQKVVKGNQKRLESLRELAGKENLEYPSVTLPPQPHTKEGVDAYNEVIARVRMWVNLNLWQKLKLSRDDAKPLLRLKGFPSFPLVERQANEVDWWDMVCNVKKLINEKKEDGKVFWQNLAGYKRQEALRPYLSSEEDREKGKKFARYQLGDLLLHLEKKHGEDWGKVYDEAWERIDKKVEGLSKHIKLEEERRSEDAQSKAALTDWLRAKASFVIEGLKEADKDEFCRCELKLQKWYGDLRGKPFAIEAENSILDISGFSKQYNCAFIWQKDGVKKLNLYLIINYFKGGKLRFKKIKPEAFEANRFYTVINKKSGEIVPMEVNFNFDDPNLIILPLAFGKRQGREFIWNDLLSLETGSLKLANGRVIEKTLYNRRTRQDEPALFVALTFERREVLDSSNIKPMNLIGVDRGENIPAVIALTDPEGCPLSRFKDSLGNPTHILRIRESYKEKQRTIQAKKEVEQRRAGGYSRKYASKAKNLADDMVRNTARDLLYYAVTQDAMLIFENLSRGFGRQGKRTFMAERQYTRMEDWLTAKLAYEGLPSKTYLSKTLAQYTSKTCSNCGFTITSADYDRVLEKLKKTATGWMTTINGKELKVEGQITYYNRYKRQNVVKDLSVELDRLSEESVNNDISSWTKGRSGEALSLLKKRFSHRPVQEKFVCLNCGFETHADEQAALNIARSWLFLRSQEYKKYQTNKTTGNTDKRAFVETWQSFYRKKLKEVWKPAV

SEQ ID NO: 45730 - protein, 978 aa, synthetic construct
  REGION 1..978: note = engineered CasX variant
QEIKRINKIRRRLVKDSNTKKAGKTGPMKTLLVRVMTPDLRERLENLRKKPENIPQPISNTSRANLNKLLTDYTEMKKAILHVYWEEFQKDPVGLMSRVAQPASKKIDQNKLKPEMDEKGNLTTAGFACSQCGQPLFVYKLEQVSEKGKAYTNYFGRCNVAEHEKLILLAQLKPEKDSDEAVTYSLGKFGQRALDFYSIHVTKESTHPVKPLAQIAGNRYASSPVGKALSDACMGTIASFLSKYQDIIIEHQKVVKGNQKRLESLRELAGKENLEYPSVTLPPQPHTKEGVDAYNEVIARVRMWVNLNLWQKLKLSRDDAKPLLRLKGFPSFPLVERQANEVDWWDMVCNVKKLINEKKEDGKVFWQNLAGYKRQEALRPYLSSEEDREKGKKFARYQLGDLLLHLEKKHGEDWGKVYDEAWERIDKKVEGLSKHIKLEEERRSEDAQSKAALTDWLRAKASFVIEGLKEADKDEFCRCELKLQKWYGDLRGKPFAIEAENSILDISGFSKQYNCAFIWQKDGVKKLNLYLIINYFKGGKLRFKKIKPEAFEANRFYTVINKKSGEIVPMEVNFNFDDPNLIILPLAFGKRQGREFIWNDLLSLETGSLKLANGRVIEKTLYNRRTRQDEPALFVALTFERREVLDSSNIKPMNLIGVDRGENIPAVIALTDPEGCPLSRFKDSLGNPTHILRIRESYKEKQRTIQAKKEVEQRRAGGYSRKYASKAKNLADDMVRNTARDLLYYAVTQDAMLIFENLSRGFGRQGKRTFMAERQYTRMEDWLTAKLAYEGLPSKTYLSKTLAQYTSKTCSNCGFTITSADYDRVLEKLKKTATGWMTTINGKELKVEGQITYYNRYKRQNVVKDLSVELDRLSEESVNNDISSWTKGRSGEALSLLKKRFSHRPVQEKFVCLNCGFETHADEQAALNIARSWLFLRSQEYKKYQTNKTTGNTDKRAFVETWQSFYRKKLKEVWKPAV

SEQ ID NO: 45731 - protein, 978 aa, synthetic construct
  REGION 1..978: note = engineered CasX variant
QEIKRINKIRRRLVKDSNTKKAGKTGPMKTLLVRVMTPDLRERLENLRKKPENIPQPISNTSRANLNKLLTDYTEMKKAILHVYWEEFQKDPVGLMSRVAQPASKKIDQNKLKPEMDEKGNLTTAGFACSQCGQPLFVYKLEQVSEKGKAYTNYFGRCNVAEHEKLILLAQLKPEKDSDEAVTYSLGKFGQRALDFYSIHVTKESTHPVKPLAQIAGNRYASTPVGKALSDACMGTIASFLSKYQDIIIEHQKVVKGNQKRLESLRELAGKENLEYPSVTLPPQPHTKEGVDAYNEVIARVRMWVNLNLWQKLKLSRDDAKPLLRLKGFPSFPLVERQANEVDWWDMVCNVKKLINEKKEDGKVFWQNLAGYKRQEALRPYLSSEEDREKGKKFARYQLGDLLLHLEKKHGEDWGKVYDEAWERIDKKVEGLSKHIKLEEERRSEDAQSKAALTDWLRAKASFVIEGLKEADKDEFCRCELKLQKWYGDLRGKPFAIEAENSILDISGFSKQYNCAFIWQKDGVKKLNLYLIINYFKGGKLRFKKIKPEAFEANRFYTVINKKSGEIVPMEVNFNFDDPNLIILPLAFGKRQGREFIWNDLLSLETGSLKLANGRVIEKTLYNRRTRQDEPALFVALTFERREVLDSSNIKPMNLIGVDRGENIPAVIALTDPEGCPLSRFKDSLGNPTHILRIRESYKEKQRTIQAKKEVEQRRAGGYSRKYASKAKNLADDMVRNTARDLLYYAVTQDAMLIFENLSRGFGRQGKRTFMAERQYTRMEDWLTAKLAYEGLPSKTYLSKTLAQYTSKTCSNCGFTITSADYDRVLEKLKKTATGWMTTINGKELKVEGQITYYNRYKRQNVVKDLSVELDRLSEESVNNDISSWTKGRSGEALSLLKKRFSHRPVQEKFVCLNCGFETHADEQAALNIARSWLFLRSQEYKKYQTNKTTGNTDKRAFVETWQSFYRKKLKEVWKPAV

SEQ ID NO: 45732 - protein, 978 aa, synthetic construct
  REGION 1..978: note = engineered CasX variant
QEIKRINKIRRRLVKDSNTKKAGKTGPMKTLLVRVMTPDLRERLENLRKKPENIPQPISNTSRANLNKLLTDYTEMKKAILHVYWEEFQKDPVGLMSRVAQPASKKIDQNKLKPEMDEKGNLTTAGFACSQCGQPLFVYKLEQVSEKGKAYTNYFGRCNVAEHEKLILLAQLKPEKDSDEAVTYSLGKFGQRALDFYSIHVTKESTHPVKPLAQIAGNRYASAPVGKALSDACMGTIASFLSKYQDIIIEHQKVVKGNQKRLESLRELAGKENLEYPSVTLPPQPHTKEGVDAYNEVIARVRMWVNLNLWQKLKLSRDDAKPLLRLKGFPSFPLVERQANEVDWWDMVCNVKKLINEKKEDGKVFWQNLAGYKRQEALRPYLSSEEDREKGKKFARYQLGDLLLHLEKKHGEDWGKVYDEAWERIDKKVEGLSKHIKLEEERRSEDAQSKAALTDWLRAKASFVIEGLKEADKDEFCRCELKLQKWYGDLRGKPFAIEAENSILDISGFSKQYNCAFIWQKDGVKKLNLYLIINYFKGGKLRFKKIKPEAFEANRFYTVINKKSGEIVPMEVNFNFDDPNLIILPLAFGKRQGREFIWNDLLSLETGSLKLANGRVIEKTLYNRRTRQDEPALFVALTFERREVLDSSNIKPMNLIGVDRGENIPAVIALTDPEGCPLSRFKDSLGNPTHILRIRESYKEKQRTIQAKKEVEQRRAGGYSRKYASKAKNLADDMVRNTARDLLYYAVTQDAMLIFENLSRGFGRQGKRTFMAERQYTRMEDWLTAKLAYEGLPSKTYLSKTLAQYTSKTCSNCGFTITSADYDRVLEKLKKTATGWMTTINGKELKVEGQITYYNRYKRQNVVKDLSVELDRLSEESVNNDISSWTKGRSGEALSLLKKRFSHRPVQEKFVCLNCGFETHADEQAALNIARSWLFLRSQEYKKYQTNKTTGNTDKRAFVETWQSFYRKKLKEVWKPAV

SEQ ID NO: 45733 - protein, 978 aa, synthetic construct
  REGION 1..978: note = engineered CasX variant
QEIKRINKIRRRLVKDSNTKKAGKTGPMKTLLVRVMTPDLRERLENLRKKPENIPQPISNTSRANLNKLLTDYTEMKKAILHVYWEEFQKDPVGLMSRVAQPASKKIDQNKLKPEMDEKGNLTTAGFACSQCGQPLFVYKLEQVSEKGKAYTNYFGRCNVAEHEKLILLAQLKPEKDSDEAVTYSLGKFGQRALDFYSIHVTKESTHPVKPLAQIAGNRYASVPVGKALSDACMGTIASFLSKYQDIIIEHQKVVKGNQKRLESLRELAGKENLEYPSVTLPPQPHTKEGVDAYNEVIARVRMWVNLNLWQKLKLSRDDAKPLLRLKGFPSFPLVERQANEVDWWDMVCNVKKLINEKKEDGKVFWQNLAGYKRQEALRPYLSSEEDREKGKKFARYQLGDLLLHLEKKHGEDWGKVYDEAWERIDKKVEGLSKHIKLEEERRSEDAQSKAALTDWLRAKASFVIEGLKEADKDEFCRCELKLQKWYGDLRGKPFAIEAENSILDISGFSKQYNCAFIWQKDGVKKLNLYLIINYFKGGKLRFKKIKPEAFEANRFYTVINKKSGEIVPMEVNFNFDDPNLIILPLAFGKRQGREFIWNDLLSLETGSLKLANGRVIEKTLYNRRTRQDEPALFVALTFERREVLDSSNIKPMNLIGVDRGENIPAVIALTDPEGCPLSRFKDSLGNPTHILRIRESYKEKQRTIQAKKEVEQRRAGGYSRKYASKAKNLADDMVRNTARDLLYYAVTQDAMLIFENLSRGFGRQGKRTFMAERQYTRMEDWLTAKLAYEGLPSKTYLSKTLAQYTSKTCSNCGFTITSADYDRVLEKLKKTATGWMTTINGKELKVEGQITYYNRYKRQNVVKDLSVELDRLSEESVNNDISSWTKGRSGEALSLLKKRFSHRPVQEKFVCLNCGFETHADEQAALNIARSWLFLRSQEYKKYQTNKTTGNTDKRAFVETWQSFYRKKLKEVWKPAV

SEQ ID NO: 45734 - protein, 978 aa, synthetic construct
  REGION 1..978: note = engineered CasX variant
QEIKRINKIRRRLVKDSNTKKAGKTGPMKTLLVRVMTPDLRERLENLRKKPENIPQPISNTSRANLNKLLTDYTEMKKAILHVYWEEFQKDPVGLMSRVAQPASKKIDQNKLKPEMDEKGNLTTAGFACSQCGQPLFVYKLEQVSEKGKAYTNYFGRCNVAEHEKLIKLAQLKPEKDSDEAVTYSLGKFGQRALDFYSIHVTKESTHPVKPLAQIAGNRYASGPVGKALSDACMGTIASFLSKYQDIIIEHQKVVKGNQKRLESLRELAGKENLEYPSVTLPPQPHTKEGVDAYNEVIARVRMWVNLNLWQKLKLSRDDAKPLLRLKGFPSFPLVERQANEVDWWDMVCNVKKLINEKKEDGKVFWQNLAGYKRQEALRPYLSSEEDREKGKKFARYQLGDLLLHLEKKHGEDWGKVYDEAWERIDKKVEGLSKHIKLEEERRSEDAQSKAALTDWLRAKASFVIEGLKEADKDEFCRCELKLQKWYGDLRGKPFAIEAENSILDISGFSKQYNCAFIWQKDGVKKLNLYLIINYFKGGKLRFKKIKPEAFEANRFYTVINKKSGEIVPMEVNFNFDDPNLIILPLAFGKRQGREFIWNDLLSLETGSLKLANGRVIEKTLYNRRTRQDEPALFVALTFERREVLDSSNIKPMNLIGVDRGENIPAVIALTDPEGCPLSRFKDSLGNPTHILRIRESYKEKQRTIQAKKEVEQRRAGGYSRKYASKAKNLADDMVRNTARDLLYYAVTQDAMLIFENLSRGFGRQGKRTFMAERQYTRMEDWLTAKLAYEGLPSKTYLSKTLAQYTSKTCSNCGFTITSADYDRVLEKLKKTATGWMTTINGKELKVEGQITYYNRYKRQNVVKDLSVELDRLSEESVNNDISSWTKGRSGEALSLLKKRFSHRPVQEKFVCLNCGFETHADEQAALNIARSWLFLRSQEYKKYQTNKTTGNTDKRAFVETWQSFYRKKLKEVWKPAV

SEQ ID NO: 45735 - protein, 977 aa, synthetic construct
  REGION 1..977: note = engineered CasX variant
QEIKRINKIRRRLVKDSNTKKAGKTGPMKTLLVRVMTPDLRERLENLRKKPENIPQPISNTSRANLNKLLTDYTEMKKAILHVYWEEFQKDPVGLMSRVAQPASKKIDQNKLKPEMDEKGNLTTAGFACSQCGQPLFVYKLEQVSEKGKAYTNYFGRCNVAEHEKLILLAQLKPEKDSDEAVTYSLGKFGQRALDFYSIHVTKESTHPVKPLAQIAGNRYASPVGKALSDACMGTIASFLSKYQDIIIEHQKVVKGNQKRLESLRELAGKENLEYPSVTLPPQPHTKEGVDAYNEVIARVRMWVNLNLWQKLKLSRDDAKPLLRLKGFPSFPLVERQANEVDWWDMVCNVKKLINEKKEDGKVFWQNLAGYKRQEALRPYLSSEEDREKGKKFARYQLGDLLLHLEKKHGEDWGKVYDEAWERIDKKVEGLSKHIKLEEERRSEDAQSKAALTDWLRAKASFVIEGLKEADKDEFCRCELKLQKWYGDLRGKPFAIEAENSILDISGFSKQYNCAFIWQKDGVKKLNLYLIINYFKGGKLRFKKIKPEAFEANRFYTVINKKSGEIVPMEVNFNFDDPNLIILPLAFGKRQGREFIWNDLLSLETGSLKLANGRVIEKTLYNRRTRQDEPALFVALTFERREVLDSSNIKPMNLIGVDRGENIPAVIALTDPEGCPLSRFKDSLGNPTHILRIRESYKEKQRTIQAKKEVEQRRAGGYSRKYASKAKNLADDMVRNTARDLLYYAVTQDAMLIFENLSRGFGRQGKRTFMAERQYTRMEDWLTAKLAYEGLPSKTYLSKTLAQYTSKTCSNCGFTITSADYDRVLEKLKKTATGWMTTINGKELKVEGQITYYNRYKRQNVVKDLSVELDRLSEESVNNDISSWTKGRSGEALSLLKKRFSHRPVQEKFVCLNCGFETHADEQAALNIARSWLFLRSQEYKKYQTNKTTGNTDKRAFVETWQSFYRKKLKEVWKPAV

SEQ ID NO: 45736 - protein, 978 aa, synthetic construct
  REGION 1..978: note = engineered CasX variant
QEIKRINKIRRRLVKDSNTKKAGKTGPMKTLLVRVMTPDLRERLENLRKKPENIPQPISNTSRANLNKLLTDYTEMKKAILHVYWEEFQKDPVGLMSRVAQPASKKIDQNKLKPEMDEKGNLTTAGFACSQCGQPLFVYKLEQVSEKGKAYTNYFGRCNVAEHEKLILLAQLKPEKDSDEAVTYSLGKFGQRALDFYSIHVTKESTHPVKPLAQIAGNRYASYPVGKALSDACMGTIASFLSKYQDIIIEHQKVVKGNQKRLESLRELAGKENLEYPSVTLPPQPHTKEGVDAYNEVIARVRMWVNLNLWQKLKLSRDDAKPLLRLKGFPSFPLVERQANEVDWWDMVCNVKKLINEKKEDGKVFWQNLAGYKRQEALRPYLSSEEDRKKGKKFARYQLGDLLLHLEKKHGEDWGKVYDEAWERIDKKVEGLSKHIKLEEERRSEDAQSKAALTDWLRAKASFVIEGLKEADKDEFCRCELKLQKWYGDLRGKPFAIEAENSILDISGFSKQYNCAFIWQKDGVKKLNLYLIINYFKGGKLRFKKIKPEAFEANRFYTVINKKSGEIVIMEVNFNFDDPNLIILPLAFGKRQGREFIWNDLLSLETGSLKLANGRVIEKTLYNRRTRQDEPALFVALTFERREVLDSSNIKPMNLIGVDRGENIPAVIALTDPEGCPLSRFKDSLGNPTHILRIRESYKEKQRTIQAKKEVEQRRAGGYSRKYASKAKNLADDMVRNTARDLLYYAVTQDAMLIFENLSRGFGRQGKRTFMAERQYTRMEDWLTAKLAYEGLPSKTYLSKTLAQYTSKTCSNCGFTITSADYDRVLEKLKKTATGWMTTINGKELKVEGQITYYNRYKRQNVVKDLSVELDRLSEESVNNDISSWTKGRSGEALSLLKKRFSHRPVQEKFVCLNCGFETHADEQAALNIARSWLFLRSQEYKKYQTNKTTGNTDKRAFVETWQSFYRKKLKEVWKPAV

SEQ ID NO: 45737 - protein, 978 aa, synthetic construct
  REGION 1..978: note = engineered CasX variant
QEIKRINKIRRRLVKDSNTKKAGKTGPMKTLLVRVMTPDLRERLENLRKKPENIPQPISNTSRANLNKLLTDYTEMKKAILHVYWEEFQKDPVGLMSRVAQPASKKIDQNKLKPEMDEKGNLTTAGFACSQCGQPLFVYKLEQVSEKGKAYTNYFGRCNVAEHEKLILLAQLKPEKDSDEAVTYSLGKFGQRALDFYSIHVTKESTHPVKPLAQIAGNRYASHPVGKALSDACMGTIASFLSKYQDIIIEHQKVVKGNQKRLESLRELAGKENLEYPSVTLPPQPHTKEGVDAYNEVIARVRMWVNLNLWQKLKLSRDDAKPLLRLKGFPSFPLVERQANEVDWWDMVCNVKKLINEKKEDGKVFWQNLAGYKRQEALRPYLSSEEDRKKGKKFARYQLGDLLLHLEKKHGEDWGKVYDEAWERIDKKVEGLSKHIKLEEERRSEDAQSKAALTDWLRAKASFVIEGLKEADKDEFCRCELKLQKWYGDLRGKPFAIEAENSILDISGFSKQYNCAFIWQKDGVKKLNLYLIINYFKGGKLRFKKIKPEAFEANRFYTVINKKSGEIVIMEVNFNFDDPNLIILPLAFGKRQGREFIWNDLLSLETGSLKLANGRVIEKTLYNRRTRQDEPALFVALTFERREVLDSSNIKPMNLIGVDRGENIPAVIALTDPEGCPLSRFKDSLGNPTHILRIRESYKEKQRTIQAKKEVEQRRAGGYSRKYASKAKNLADDMVRNTARDLLYYAVTQDAMLIFENLSRGFGRQGKRTFMAERQYTRMEDWLTAKLAYEGLPSKTYLSKTLAQYTSKTCSNCGFTITSADYDRVLEKLKKTATGWMTTINGKELKVEGQITYYNRYKRQNVVKDLSVELDRLSEESVNNDISSWTKGRSGEALSLLKKRFSHRPVQEKFVCLNCGFETHADEQAALNIARSWLFLRSQEYKKYQTNKTTGNTDKRAFVETWQSFYRKKLKEVWKPAV

SEQ ID NO: 45738 - protein, 978 aa, synthetic construct
  REGION 1..978: note = engineered CasX variant
QEIKRINKIRRRLVKDSNTKKAGKTGPMKTLLVRVMTPDLRERLENLRKKPENIPQPISNTSRANLNKLLTDYTEMKKAILHVYWEEFQKDPVGLMSRVAQPASKKIDQNKLKPEMDEKGNLTTAGFACSQCGQPLFVYKLEQVSEKGKAYTNYFGRCNVAEHEKLILLAQLKPEKDSDEAVTYSLGKFGQRALDFYSIHVTKESTHPVKPLAQIAGNRYASSPVGKALSDACMGTIASFLSKYQDIIIEHQKVVKGNQKRLESLRELAGKENLEYPSVTLPPQPHTKEGVDAYNEVIARVRMWVNLNLWQKLKLSRDDAKPLLRLKGFPSFPLVERQANEVDWWDMVCNVKKLINEKKEDGKVFWQNLAGYKRQEALRPYLSSEEDRKKGKKFARYQLGDLLLHLEKKHGEDWGKVYDEAWERIDKKVEGLSKHIKLEEERRSEDAQSKAALTDWLRAKASFVIEGLKEADKDEFCRCELKLQKWYGDLRGKPFAIEAENSILDISGFSKQYNCAFIWQKDGVKKLNLYLIINYFKGGKLRFKKIKPEAFEANRFYTVINKKSGEIVIMEVNFNFDDPNLIILPLAFGKRQGREFIWNDLLSLETGSLKLANGRVIEKTLYNRRTRQDEPALFVALTFERREVLDSSNIKPMNLIGVDRGENIPAVIALTDPEGCPLSRFKDSLGNPTHILRIRESYKEKQRTIQAKKEVEQRRAGGYSRKYASKAKNLADDMVRNTARDLLYYAVTQDAMLIFENLSRGFGRQGKRTFMAERQYTRMEDWLTAKLAYEGLPSKTYLSKTLAQYTSKTCSNCGFTITSADYDRVLEKLKKTATGWMTTINGKELKVEGQITYYNRYKRQNVVKDLSVELDRLSEESVNNDISSWTKGRSGEALSLLKKRFSHRPVQEKFVCLNCGFETHADEQAALNIARSWLFLRSQEYKKYQTNKTTGNTDKRAFVETWQSFYRKKLKEVWKPAV

SEQ ID NO: 45739 - protein, 978 aa, synthetic construct
  REGION 1..978: note = engineered CasX variant
QEIKRINKIRRRLVKDSNTKKAGKTGPMKTLLVRVMTPDLRERLENLRKKPENIPQPISNTSRANLNKLLTDYTEMKKAILHVYWEEFQKDPVGLMSRVAQPASKKIDQNKLKPEMDEKGNLTTAGFACSQCGQPLFVYKLEQVSEKGKAYTNYFGRCNVAEHEKLILLAQLKPEKDSDEAVTYSLGKFGQRALDFYSIHVTKESTHPVKPLAQIAGNRYASTPVGKALSDACMGTIASFLSKYQDIIIEHQKVVKGNQKRLESLRELAGKENLEYPSVTLPPQPHTKEGVDAYNEVIARVRMWVNLNLWQKLKLSRDDAKPLLRLKGFPSFPLVERQANEVDWWDMVCNVKKLINEKKEDGKVFWQNLAGYKRQEALRPYLSSEEDRKKGKKFARYQLGDLLLHLEKKHGEDWGKVYDEAWERIDKKVEGLSKHIKLEEERRSEDAQSKAALTDWLRAKASFVIEGLKEADKDEFCRCELKLQKWYGDLRGKPFAIEAENSILDISGFSKQYNCAFIWQKDGVKKLNLYLIINYFKGGKLRFKKIKPEAFEANRFYTVINKKSGEIVIMEVNFNFDDPNLIILPLAFGKRQGREFIWNDLLSLETGSLKLANGRVIEKTLYNRRTRQDEPALFVALTFERREVLDSSNIKPMNLIGVDRGENIPAVIALTDPEGCPLSRFKDSLGNPTHILRIRESYKEKQRTIQAKKEVEQRRAGGYSRKYASKAKNLADDMVRNTARDLLYYAVTQDAMLIFENLSRGFGRQGKRTFMAERQYTRMEDWLTAKLAYEGLPSKTYLSKTLAQYTSKTCSNCGFTITSADYDRVLEKLKKTATGWMTTINGKELKVEGQITYYNRYKRQNVVKDLSVELDRLSEESVNNDISSWTKGRSGEALSLLKKRFSHRPVQEKFVCLNCGFETHADEQAALNIARSWLFLRSQEYKKYQTNKTTGNTDKRAFVETWQSFYRKKLKEVWKPAV

SEQ ID NO: 45740 - protein, 978 aa, synthetic construct
  REGION 1..978: note = engineered CasX variant
QEIKRINKIRRRLVKDSNTKKAGKTGPMKTLLVRVMTPDLRERLENLRKKPENIPQPISNTSRANLNKLLTDYTEMKKAILHVYWEEFQKDPVGLMSRVAQPASKKIDQNKLKPEMDEKGNLTTAGFACSQCGQPLFVYKLEQVSEKGKAYTNYFGRCNVAEHEKLILLAQLKPEKDSDEAVTYSLGKFGQRALDFYSIHVTKESTHPVKPLAQIAGNRYASAPVGKALSDACMGTIASFLSKYQDIIIEHQKVVKGNQKRLESLRELAGKENLEYPSVTLPPQPHTKEGVDAYNEVIARVRMWVNLNLWQKLKLSRDDAKPLLRLKGFPSFPLVERQANEVDWWDMVCNVKKLINEKKEDGKVFWQNLAGYKRQEALRPYLSSEEDRKKGKKFARYQLGDLLLHLEKKHGEDWGKVYDEAWERIDKKVEGLSKHIKLEEERRSEDAQSKAALTDWLRAKASFVIEGLKEADKDEFCRCELKLQKWYGDLRGKPFAIEAENSILDISGFSKQYNCAFIWQKDGVKKLNLYLIINYFKGGKLRFKKIKPEAFEANRFYTVINKKSGEIVIMEVNFNFDDPNLIILPLAFGKRQGREFIWNDLLSLETGSLKLANGRVIEKTLYNRRTRQDEPALFVALTFERREVLDSSNIKPMNLIGVDRGENIPAVIALTDPEGCPLSRFKDSLGNPTHILRIRESYKEKQRTIQAKKEVEQRRAGGYSRKYASKAKNLADDMVRNTARDLLYYAVTQDAMLIFENLSRGFGRQGKRTFMAERQYTRMEDWLTAKLAYEGLPSKTYLSKTLAQYTSKTCSNCGFTITSADYDRVLEKLKKTATGWMTTINGKELKVEGQITYYNRYKRQNVVKDLSVELDRLSEESVNNDISSWTKGRSGEALSLLKKRFSHRPVQEKFVCLNCGFETHADEQAALNIARSWLFLRSQEYKKYQTNKTTGNTDKRAFVETWQSFYRKKLKEVWKPAV

SEQ ID NO: 45741 - protein, 978 aa, synthetic construct
  REGION 1..978: note = engineered CasX variant
QEIKRINKIRRRLVKDSNTKKAGKTGPMKTLLVRVMTPDLRERLENLRKKPENIPQPISNTSRANLNKLLTDYTEMKKAILHVYWEEFQKDPVGLMSRVAQPASKKIDQNKLKPEMDEKGNLTTAGFACSQCGQPLFVYKLEQVSEKGKAYTNYFGRCNVAEHEKLILLAQLKPEKDSDEAVTYSLGKFGQRALDFYSIHVTKESTHPVKPLAQIAGNRYASVPVGKALSDACMGTIASFLSKYQDIIIEHQKVVKGNQKRLESLRELAGKENLEYPSVTLPPQPHTKEGVDAYNEVIARVRMWVNLNLWQKLKLSRDDAKPLLRLKGFPSFPLVERQANEVDWWDMVCNVKKLINEKKEDGKVFWQNLAGYKRQEALRPYLSSEEDRKKGKKFARYQLGDLLLHLEKKHGEDWGKVYDEAWERIDKKVEGLSKHIKLEEERRSEDAQSKAALTDWLRAKASFVIEGLKEADKDEFCRCELKLQKWYGDLRGKPFAIEAENSILDISGFSKQYNCAFIWQKDGVKKLNLYLIINYFKGGKLRFKKIKPEAFEANRFYTVINKKSGEIVIMEVNFNFDDPNLIILPLAFGKRQGREFIWNDLLSLETGSLKLANGRVIEKTLYNRRTRQDEPALFVALTFERREVLDSSNIKPMNLIGVDRGENIPAVIALTDPEGCPLSRFKDSLGNPTHILRIRESYKEKQRTIQAKKEVEQRRAGGYSRKYASKAKNLADDMVRNTARDLLYYAVTQDAMLIFENLSRGFGRQGKRTFMAERQYTRMEDWLTAKLAYEGLPSKTYLSKTLAQYTSKTCSNCGFTITSADYDRVLEKLKKTATGWMTTINGKELKVEGQITYYNRYKRQNVVKDLSVELDRLSEESVNNDISSWTKGRSGEALSLLKKRFSHRPVQEKFVCLNCGFETHADEQAALNIARSWLFLRSQEYKKYQTNKTTGNTDKRAFVETWQSFYRKKLKEVWKPAV

SEQ ID NO: 45742 - protein, 978 aa, synthetic construct
  REGION 1..978: note = engineered CasX variant
QEIKRINKIRRRLVKDSNTKKAGKTGPMKTLLVRVMTPDLRERLENLRKKPENIPQPISNTSRANLNKLLTDYTEMKKAILHVYWEEFQKDPVGLMSRVAQPASKKIDQNKLKPEMDEKGNLTTAGFACSQCGQPLFVYKLEQVSEKGKAYTNYFGRCNVAEHEKLIKLAQLKPEKDSDEAVTYSLGKFGQRALDFYSIHVTKESTHPVKPLAQIAGNRYASGPVGKALSDACMGTIASFLSKYQDIIIEHQKVVKGNQKRLESLRELAGKENLEYPSVTLPPQPHTKEGVDAYNEVIARVRMWVNLNLWQKLKLSRDDAKPLLRLKGFPSFPLVERQANEVDWWDMVCNVKKLINEKKEDGKVFWQNLAGYKRQEALRPYLSSEEDRKKGKKFARYQLGDLLLHLEKKHGEDWGKVYDEAWERIDKKVEGLSKHIKLEEERRSEDAQSKAALTDWLRAKASFVIEGLKEADKDEFCRCELKLQKWYGDLRGKPFAIEAENSILDISGFSKQYNCAFIWQKDGVKKLNLYLIINYFKGGKLRFKKIKPEAFEANRFYTVINKKSGEIVIMEVNFNFDDPNLIILPLAFGKRQGREFIWNDLLSLETGSLKLANGRVIEKTLYNRRTRQDEPALFVALTFERREVLDSSNIKPMNLIGVDRGENIPAVIALTDPEGCPLSRFKDSLGNPTHILRIRESYKEKQRTIQAKKEVEQRRAGGYSRKYASKAKNLADDMVRNTARDLLYYAVTQDAMLIFENLSRGFGRQGKRTFMAERQYTRMEDWLTAKLAYEGLPSKTYLSKTLAQYTSKTCSNCGFTITSADYDRVLEKLKKTATGWMTTINGKELKVEGQITYYNRYKRQNVVKDLSVELDRLSEESVNNDISSWTKGRSGEALSLLKKRFSHRPVQEKFVCLNCGFETHADEQAALNIARSWLFLRSQEYKKYQTNKTTGNTDKRAFVETWQSFYRKKLKEVWKPAV

SEQ ID NO: 45743 - protein, 977 aa, synthetic construct
  REGION 1..977: note = engineered CasX variant
QEIKRINKIRRRLVKDSNTKKAGKTGPMKTLLVRVMTPDLRERLENLRKKPENIPQPISNTSRANLNKLLTDYTEMKKAILHVYWEEFQKDPVGLMSRVAQPASKKIDQNKLKPEMDEKGNLTTAGFACSQCGQPLFVYKLEQVSEKGKAYTNYFGRCNVAEHEKLILLAQLKPEKDSDEAVTYSLGKFGQRALDFYSIHVTKESTHPVKPLAQIAGNRYASPVGKALSDACMGTIASFLSKYQDIIIEHQKVVKGNQKRLESLRELAGKENLEYPSVTLPPQPHTKEGVDAYNEVIARVRMWVNLNLWQKLKLSRDDAKPLLRLKGFPSFPLVERQANEVDWWDMVCNVKKLINEKKEDGKVFWQNLAGYKRQEALRPYLSSEEDRKKGKKFARYQLGDLLLHLEKKHGEDWGKVYDEAWERIDKKVEGLSKHIKLEEERRSEDAQSKAALTDWLRAKASFVIEGLKEADKDEFCRCELKLQKWYGDLRGKPFAIEAENSILDISGFSKQYNCAFIWQKDGVKKLNLYLIINYFKGGKLRFKKIKPEAFEANRFYTVINKKSGEIVIMEVNFNFDDPNLIILPLAFGKRQGREFIWNDLLSLETGSLKLANGRVIEKTLYNRRTRQDEPALFVALTFERREVLDSSNIKPMNLIGVDRGENIPAVIALTDPEGCPLSRFKDSLGNPTHILRIRESYKEKQRTIQAKKEVEQRRAGGYSRKYASKAKNLADDMVRNTARDLLYYAVTQDAMLIFENLSRGFGRQGKRTFMAERQYTRMEDWLTAKLAYEGLPSKTYLSKTLAQYTSKTCSNCGFTITSADYDRVLEKLKKTATGWMTTINGKELKVEGQITYYNRYKRQNVVKDLSVELDRLSEESVNNDISSWTKGRSGEALSLLKKRFSHRPVQEKFVCLNCGFETHADEQAALNIARSWLFLRSQEYKKYQTNKTTGNTDKRAFVETWQSFYRKKLKEVWKPAV

SEQ ID NO: 45744 - protein, 978 aa, synthetic construct
  REGION 1..978: note = engineered CasX variant
QEIKRINKIRRRLVKDSNTKKAGKTGPMKTLLVRVMTPDLRERLENLRKKPENIPQPISNTSRANLNKLLTDYTEMKKAILHVYWEEFQKDPVGLMSRVAQPASKKIDQNKLKPEMDEKGNLTTAGFACSQCGQPLFVYKLEQVSEKGKAYTNYFGRCNVAEHEKLILLAQLKPEKDSDEAVTYSLGKFGQRALDFYSIHVTKESTHPVKPLAQIAGNRYASYPVGKALSGACMGTIASFLSKYQDIIIEHQKVVKGNQKRLESLRELAGKENLEYPSVTLPPQPHTKEGVDAYNEVIARVRMWVNLNLWQKLKLSRDDAKPLLRLKGFPSFPLVERQANEVDWWDMVCNVKKLINEKKEDGKVFWQNLAGYKRQEALRPYLSSEEDRKKGKKFARYQLGDLLLHLEKKHGEDWGKVYDEAWERIDKKVEGLSKHIKLEEERRSEDAQSKAALTDWLRAKASFVIEGLKEADKDEFCRCELKLQKWYGDLRGKPFAIEAENSILDISGFSKQYNCAFIWQKDGVKKLNLYLIINYFKGGKLRFKKIKPEAFEANRFYTVINKKSGEIVPMEVNFNFDDPNLIILPLAFGKRQGREFIWNDLLSLETGSLKLANGRVIEKTLYNRRTRQDEPALFVALTFERREVLDSSNIKPMNLIGVDRGENIPAVIALTDPEGCPLSRFKDSLGNPTHILRIGESYKEKQRTIQAKKEVEQRRAGGYSRKYASKAKNLADDMVRNTARDLLYYAVTQDAMLIFENLSRGFGRQGKRTFSAERQYTRMEDWLTAKLAYEGLPSKTYLSKTLAQYTSKTCSNCGFTITSADYDRVLEKLKKTATGWMTTINGKELKVEGQITYYNRYKRQNVVKDLSVELDRLSEESVNNDISSWTKGRSGEALSLLKKRFSHRPVQEKFVCLNCGFETHADEQAALNIARSWLFLRSQEYKKYQTNKTTGNTDKRAFVETWQSFYRKKLKEVWKPAV

SEQ ID NO: 45745 - protein, 978 aa, synthetic construct
  REGION 1..978: note = engineered CasX variant
QEIKRINKIRRRLVKDSNTKKAGKTGPMKTLLVRVMTPDLRERLENLRKKPENIPQPISNTSRANLNKLLTDYTEMKKAILHVYWEEFQKDPVGLMSRVAQPASKKIDQNKLKPEMDEKGNLTTAGFACSQCGQPLFVYKLEQVSEKGKAYTNYFGRCNVAEHEKLILLAQLKPEKDSDEAVTYSLGKFGQRALDFYSIHVTKESTHPVKPLAQIAGNRYASHPVGKALSGACMGTIASFLSKYQDIIIEHQKVVKGNQKRLESLRELAGKENLEYPSVTLPPQPHTKEGVDAYNEVIARVRMWVNLNLWQKLKLSRDDAKPLLRLKGFPSFPLVERQANEVDWWDMVCNVKKLINEKKEDGKVFWQNLAGYKRQEALRPYLSSEEDRKKGKKFARYQLGDLLLHLEKKHGEDWGKVYDEAWERIDKKVEGLSKHIKLEEERRSEDAQSKAALTDWLRAKASFVIEGLKEADKDEFCRCELKLQKWYGDLRGKPFAIEAENSILDISGFSKQYNCAFIWQKDGVKKLNLYLIINYFKGGKLRFKKIKPEAFEANRFYTVINKKSGEIVPMEVNFNFDDPNLIILPLAFGKRQGREFIWNDLLSLETGSLKLANGRVIEKTLYNRRTRQDEPALFVALTFERREVLDSSNIKPMNLIGVDRGENIPAVIALTDPEGCPLSRFKDSLGNPTHILRIGESYKEKQRTIQAKKEVEQRRAGGYSRKYASKAKNLADDMVRNTARDLLYYAVTQDAMLIFENLSRGFGRQGKRTFSAERQYTRMEDWLTAKLAYEGLPSKTYLSKTLAQYTSKTCSNCGFTITSADYDRVLEKLKKTATGWMTTINGKELKVEGQITYYNRYKRQNVVKDLSVELDRLSEESVNNDISSWTKGRSGEALSLLKKRFSHRPVQEKFVCLNCGFETHADEQAALNIARSWLFLRSQEYKKYQTNKTTGNTDKRAFVETWQSFYRKKLKEVWKPAV

SEQ ID NO: 45746 - protein, 978 aa, synthetic construct
  REGION 1..978: note = engineered CasX variant
QEIKRINKIRRRLVKDSNTKKAGKTGPMKTLLVRVMTPDLRERLENLRKKPENIPQPISNTSRANLNKLLTDYTEMKKAILHVYWEEFQKDPVGLMSRVAQPASKKIDQNKLKPEMDEKGNLTTAGFACSQCGQPLFVYKLEQVSEKGKAYTNYFGRCNVAEHEKLILLAQLKPEKDSDEAVTYSLGKFGQRALDFYSIHVTKESTHPVKPLAQIAGNRYASSPVGKALSGACMGTIASFLSKYQDIIIEHQKVVKGNQKRLESLRELAGKENLEYPSVTLPPQPHTKEGVDAYNEVIARVRMWVNLNLWQKLKLSRDDAKPLLRLKGFPSFPLVERQANEVDWWDMVCNVKKLINEKKEDGKVFWQNLAGYKRQEALRPYLSSEEDRKKGKKFARYQLGDLLLHLEKKHGEDWGKVYDEAWERIDKKVEGLSKHIKLEEERRSEDAQSKAALTDWLRAKASFVIEGLKEADKDEFCRCELKLQKWYGDLRGKPFAIEAENSILDISGFSKQYNCAFIWQKDGVKKLNLYLIINYFKGGKLRFKKIKPEAFEANRFYTVINKKSGEIVPMEVNFNFDDPNLIILPLAFGKRQGREFIWNDLLSLETGSLKLANGRVIEKTLYNRRTRQDEPALFVALTFERREVLDSSNIKPMNLIGVDRGENIPAVIALTDPEGCPLSRFKDSLGNPTHILRIGESYKEKQRTIQAKKEVEQRRAGGYSRKYASKAKNLADDMVRNTARDLLYYAVTQDAMLIFENLSRGFGRQGKRTFSAERQYTRMEDWLTAKLAYEGLPSKTYLSKTLAQYTSKTCSNCGFTITSADYDRVLEKLKKTATGWMTTINGKELKVEGQITYYNRYKRQNVVKDLSVELDRLSEESVNNDISSWTKGRSGEALSLLKKRFSHRPVQEKFVCLNCGFETHADEQAALNIARSWLFLRSQEYKKYQTNKTTGNTDKRAFVETWQSFYRKKLKEVWKPAV

SEQ ID NO: 45747 - protein, 978 aa, synthetic construct
  REGION 1..978: note = engineered CasX variant
QEIKRINKIRRRLVKDSNTKKAGKTGPMKTLLVRVMTPDLRERLENLRKKPENIPQPISNTSRANLNKLLTDYTEMKKAILHVYWEEFQKDPVGLMSRVAQPASKKIDQNKLKPEMDEKGNLTTAGFACSQCGQPLFVYKLEQVSEKGKAYTNYFGRCNVAEHEKLILLAQLKPEKDSDEAVTYSLGKFGQRALDFYSIHVTKESTHPVKPLAQIAGNRYASTPVGKALSGACMGTIASFLSKYQDIIIEHQKVVKGNQKRLESLRELAGKENLEYPSVTLPPQPHTKEGVDAYNEVIARVRMWVNLNLWQKLKLSRDDAKPLLRLKGFPSFPLVERQANEVDWWDMVCNVKKLINEKKEDGKVFWQNLAGYKRQEALRPYLSSEEDRKKGKKFARYQLGDLLLHLEKKHGEDWGKVYDEAWERIDKKVEGLSKHIKLEEERRSEDAQSKAALTDWLRAKASFVIEGLKEADKDEFCRCELKLQKWYGDLRGKPFAIEAENSILDISGFSKQYNCAFIWQKDGVKKLNLYLIINYFKGGKLRFKKIKPEAFEANRFYTVINKKSGEIVPMEVNFNFDDPNLIILPLAFGKRQGREFIWNDLLSLETGSLKLANGRVIEKTLYNRRTRQDEPALFVALTFERREVLDSSNIKPMNLIGVDRGENIPAVIALTDPEGCPLSRFKDSLGNPTHILRIGESYKEKQRTIQAKKEVEQRRAGGYSRKYASKAKNLADDMVRNTARDLLYYAVTQDAMLIFENLSRGFGRQGKRTFSAERQYTRMEDWLTAKLAYEGLPSKTYLSKTLAQYTSKTCSNCGFTITSADYDRVLEKLKKTATGWMTTINGKELKVEGQITYYNRYKRQNVVKDLSVELDRLSEESVNNDISSWTKGRSGEALSLLKKRFSHRPVQEKFVCLNCGFETHADEQAALNIARSWLFLRSQEYKKYQTNKTTGNTDKRAFVETWQSFYRKKLKEVWKPAV

SEQ ID NO: 45748 - protein, 978 aa, synthetic construct
  REGION 1..978: note = engineered CasX variant
QEIKRINKIRRRLVKDSNTKKAGKTGPMKTLLVRVMTPDLRERLENLRKKPENIPQPISNTSRANLNKLLTDYTEMKKAILHVYWEEFQKDPVGLMSRVAQPASKKIDQNKLKPEMDEKGNLTTAGFACSQCGQPLFVYKLEQVSEKGKAYTNYFGRCNVAEHEKLILLAQLKPEKDSDEAVTYSLGKFGQRALDFYSIHVTKESTHPVKPLAQIAGNRYASAPVGKALSGACMGTIASFLSKYQDIIIEHQKVVKGNQKRLESLRELAGKENLEYPSVTLPPQPHTKEGVDAYNEVIARVRMWVNLNLWQKLKLSRDDAKPLLRLKGFPSFPLVERQANEVDWWDMVCNVKKLINEKKEDGKVFWQNLAGYKRQEALRPYLSSEEDRKKGKKFARYQLGDLLLHLEKKHGEDWGKVYDEAWERIDKKVEGLSKHIKLEEERRSEDAQSKAALTDWLRAKASFVIEGLKEADKDEFCRCELKLQKWYGDLRGKPFAIEAENSILDISGFSKQYNCAFIWQKDGVKKLNLYLIINYFKGGKLRFKKIKPEAFEANRFYTVINKKSGEIVPMEVNFNFDDPNLIILPLAFGKRQGREFIWNDLLSLETGSLKLANGRVIEKTLYNRRTRQDEPALFVALTFERREVLDSSNIKPMNLIGVDRGENIPAVIALTDPEGCPLSRFKDSLGNPTHILRIGESYKEKQRTIQAKKEVEQRRAGGYSRKYASKAKNLADDMVRNTARDLLYYAVTQDAMLIFENLSRGFGRQGKRTFSAERQYTRMEDWLTAKLAYEGLPSKTYLSKTLAQYTSKTCSNCGFTITSADYDRVLEKLKKTATGWMTTINGKELKVEGQITYYNRYKRQNVVKDLSVELDRLSEESVNNDISSWTKGRSGEALSLLKKRFSHRPVQEKFVCLNCGFETHADEQAALNIARSWLFLRSQEYKKYQTNKTTGNTDKRAFVETWQSFYRKKLKEVWKPAV

SEQ ID NO: 45749 - protein, 978 aa, synthetic construct
  REGION 1..978: note = engineered CasX variant
QEIKRINKIRRRLVKDSNTKKAGKTGPMKTLLVRVMTPDLRERLENLRKKPENIPQPISNTSRANLNKLLTDYTEMKKAILHVYWEEFQKDPVGLMSRVAQPASKKIDQNKLKPEMDEKGNLTTAGFACSQCGQPLFVYKLEQVSEKGKAYTNYFGRCNVAEHEKLILLAQLKPEKDSDEAVTYSLGKFGQRALDFYSIHVTKESTHPVKPLAQIAGNRYASVPVGKALSGACMGTIASFLSKYQDIIIEHQKVVKGNQKRLESLRELAGKENLEYPSVTLPPQPHTKEGVDAYNEVIARVRMWVNLNLWQKLKLSRDDAKPLLRLKGFPSFPLVERQANEVDWWDMVCNVKKLINEKKEDGKVFWQNLAGYKRQEALRPYLSSEEDRKKGKKFARYQLGDLLLHLEKKHGEDWGKVYDEAWERIDKKVEGLSKHIKLEEERRSEDAQSKAALTDWLRAKASFVIEGLKEADKDEFCRCELKLQKWYGDLRGKPFAIEAENSILDISGFSKQYNCAFIWQKDGVKKLNLYLIINYFKGGKLRFKKIKPEAFEANRFYTVINKKSGEIVPMEVNFNFDDPNLIILPLAFGKRQGREFIWNDLLSLETGSLKLANGRVIEKTLYNRRTRQDEPALFVALTFERREVLDSSNIKPMNLIGVDRGENIPAVIALTDPEGCPLSRFKDSLGNPTHILRIGESYKEKQRTIQAKKEVEQRRAGGYSRKYASKAKNLADDMVRNTARDLLYYAVTQDAMLIFENLSRGFGRQGKRTFSAERQYTRMEDWLTAKLAYEGLPSKTYLSKTLAQYTSKTCSNCGFTITSADYDRVLEKLKKTATGWMTTINGKELKVEGQITYYNRYKRQNVVKDLSVELDRLSEESVNNDISSWTKGRSGEALSLLKKRFSHRPVQEKFVCLNCGFETHADEQAALNIARSWLFLRSQEYKKYQTNKTTGNTDKRAFVETWQSFYRKKLKEVWKPAV

SEQ ID NO: 45750 - protein, 978 aa, synthetic construct
  REGION 1..978: note = engineered CasX variant
QEIKRINKIRRRLVKDSNTKKAGKTGPMKTLLVRVMTPDLRERLENLRKKPENIPQPISNTSRANLNKLLTDYTEMKKAILHVYWEEFQKDPVGLMSRVAQPASKKIDQNKLKPEMDEKGNLTTAGFACSQCGQPLFVYKLEQVSEKGKAYTNYFGRCNVAEHEKLIKLAQLKPEKDSDEAVTYSLGKFGQRALDFYSIHVTKESTHPVKPLAQIAGNRYASGPVGKALSGACMGTIASFLSKYQDIIIEHQKVVKGNQKRLESLRELAGKENLEYPSVTLPPQPHTKEGVDAYNEVIARVRMWVNLNLWQKLKLSRDDAKPLLRLKGFPSFPLVERQANEVDWWDMVCNVKKLINEKKEDGKVFWQNLAGYKRQEALRPYLSSEEDRKKGKKFARYQLGDLLLHLEKKHGEDWGKVYDEAWERIDKKVEGLSKHIKLEEERRSEDAQSKAALTDWLRAKASFVIEGLKEADKDEFCRCELKLQKWYGDLRGKPFAIEAENSILDISGFSKQYNCAFIWQKDGVKKLNLYLIINYFKGGKLRFKKIKPEAFEANRFYTVINKKSGEIVPMEVNFNFDDPNLIILPLAFGKRQGREFIWNDLLSLETGSLKLANGRVIEKTLYNRRTRQDEPALFVALTFERREVLDSSNIKPMNLIGVDRGENIPAVIALTDPEGCPLSRFKDSLGNPTHILRIGESYKEKQRTIQAKKEVEQRRAGGYSRKYASKAKNLADDMVRNTARDLLYYAVTQDAMLIFENLSRGFGRQGKRTFSAERQYTRMEDWLTAKLAYEGLPSKTYLSKTLAQYTSKTCSNCGFTITSADYDRVLEKLKKTATGWMTTINGKELKVEGQITYYNRYKRQNVVKDLSVELDRLSEESVNNDISSWTKGRSGEALSLLKKRFSHRPVQEKFVCLNCGFETHADEQAALNIARSWLFLRSQEYKKYQTNKTTGNTDKRAFVETWQSFYRKKLKEVWKPAV

SEQ ID NO: 45751 - protein, 977 aa, synthetic construct
  REGION 1..977: note = engineered CasX variant
QEIKRINKIRRRLVKDSNTKKAGKTGPMKTLLVRVMTPDLRERLENLRKKPENIPQPISNTSRANLNKLLTDYTEMKKAILHVYWEEFQKDPVGLMSRVAQPASKKIDQNKLKPEMDEKGNLTTAGFACSQCGQPLFVYKLEQVSEKGKAYTNYFGRCNVAEHEKLILLAQLKPEKDSDEAVTYSLGKFGQRALDFYSIHVTKESTHPVKPLAQIAGNRYASPVGKALSGACMGTIASFLSKYQDIIIEHQKVVKGNQKRLESLRELAGKENLEYPSVTLPPQPHTKEGVDAYNEVIARVRMWVNLNLWQKLKLSRDDAKPLLRLKGFPSFPLVERQANEVDWWDMVCNVKKLINEKKEDGKVFWQNLAGYKRQEALRPYLSSEEDRKKGKKFARYQLGDLLLHLEKKHGEDWGKVYDEAWERIDKKVEGLSKHIKLEEERRSEDAQSKAALTDWLRAKASFVIEGLKEADKDEFCRCELKLQKWYGDLRGKPFAIEAENSILDISGFSKQYNCAFIWQKDGVKKLNLYLIINYFKGGKLRFKKIKPEAFEANRFYTVINKKSGEIVPMEVNFNFDDPNLIILPLAFGKRQGREFIWNDLLSLETGSLKLANGRVIEKTLYNRRTRQDEPALFVALTFERREVLDSSNIKPMNLIGVDRGENIPAVIALTDPEGCPLSRFKDSLGNPTHILRIGESYKEKQRTIQAKKEVEQRRAGGYSRKYASKAKNLADDMVRNTARDLLYYAVTQDAMLIFENLSRGFGRQGKRTFSAERQYTRMEDWLTAKLAYEGLPSKTYLSKTLAQYTSKTCSNCGFTITSADYDRVLEKLKKTATGWMTTINGKELKVEGQITYYNRYKRQNVVKDLSVELDRLSEESVNNDISSWTKGRSGEALSLLKKRFSHRPVQEKFVCLNCGFETHADEQAALNIARSWLFLRSQEYKKYQTNKTTGNTDKRAFVETWQSFYRKKLKEVWKPAV

SEQ ID NO: 45752 - protein, 978 aa, synthetic construct
  REGION 1..978: note = engineered CasX variant
QEIKRINKIRRRLVKDSNTKKAGKTGPMKTLLVRVMTPDLRERLENLRKKPENIPQPISNTSRANLNKLLTDYTEMKKAILHVYWEEFQKDPVGLMSRVAQPASKKIDQNKLKPEMDEKGNLTTAGFACSQCGQPLFVYKLEQVSEKGKAYTNYFGRCNVAEHEKLILLAQLKPEKDSDEAVTYSLGKFGQRALDFYSIHVTKESTHPVKPLAQIAGNRYASYPVGKALSDACMGTIASFLSKYQDIIIEHQKVVKGNQKRLESLRELAGKENLEYPSVTLPPQPHTKEGVDAYNEVIARVRMWVNLNLWQKLKLSRDDAKPLLRLKNFPSFPLVERQANEVDWWDMVCNVKKLINEKKEDGKVFWQNLAGYKRQEALRPYLSSEEDRKKGKKFARYQLGDLLLHLEKKHGEDWGKVYDEAWERIDKKVEGLSKHIKLEEERRSEDAQSKAALTDWLRAKASFVIEGLKEADKDEFCRCELKLQKWYGDLRGKPFAIEAENSILDISGFSKQYNCAFIWQKDGVKKLNLYLIINYFKGGKLRFKKIKPEAFEANRFYTVINKKSGEIVPMEVNFNFDDPNLIILPLAFGKRQGREFIWNDLLSLETGSLKLANGRVIEKTLYNRRTRQDEPALFVALTFERREVLDSSNIKPMNLIGVDRGENIPAVIALTDPEGCPLSRFKDSLGNPTHILRIGESYKEKQRTIQAKKEVEQRRAGGYSRKYASKAKNLADDMVRNTARDLLYYAVTQDAMLIFENLSRGFGRQGKRTFSAERQYTRMEDWLTAKLAYEGLPSKTYLSKTLAQYTSKTCSNCGFTITSADYDRVLEKLKKTATGWMTTINGKELKVEGQITYYNRYKRQNVVKDLSVELDRLSEESVNNDISSWTKGRSGEALSLLKKRFSHRPVQEKFVCLNCGFETHADEQAALNIARSWLFLRSQEYKKYQTNKTTGNTDKRAFVETWQSFYRKKLKEVWKPAV

SEQ ID NO: 45753 - protein, 978 aa, synthetic construct
  REGION 1..978: note = engineered CasX variant
QEIKRINKIRRRLVKDSNTKKAGKTGPMKTLLVRVMTPDLRERLENLRKKPENIPQPISNTSRANLNKLLTDYTEMKKAILHVYWEEFQKDPVGLMSRVAQPASKKIDQNKLKPEMDEKGNLTTAGFACSQCGQPLFVYKLEQVSEKGKAYTNYFGRCNVAEHEKLILLAQLKPEKDSDEAVTYSLGKFGQRALDFYSIHVTKESTHPVKPLAQIAGNRYASHPVGKALSDACMGTIASFLSKYQDIIIEHQKVVKGNQKRLESLRELAGKENLEYPSVTLPPQPHTKEGVDAYNEVIARVRMWVNLNLWQKLKLSRDDAKPLLRLKNFPSFPLVERQANEVDWWDMVCNVKKLINEKKEDGKVFWQNLAGYKRQEALRPYLSSEEDRKKGKKFARYQLGDLLLHLEKKHGEDWGKVYDEAWERIDKKVEGLSKHIKLEEERRSEDAQSKAALTDWLRAKASFVIEGLKEADKDEFCRCELKLQKWYGDLRGKPFAIEAENSILDISGFSKQYNCAFIWQKDGVKKLNLYLIINYFKGGKLRFKKIKPEAFEANRFYTVINKKSGEIVPMEVNFNFDDPNLIILPLAFGKRQGREFIWNDLLSLETGSLKLANGRVIEKTLYNRRTRQDEPALFVALTFERREVLDSSNIKPMNLIGVDRGENIPAVIALTDPEGCPLSRFKDSLGNPTHILRIGESYKEKQRTIQAKKEVEQRRAGGYSRKYASKAKNLADDMVRNTARDLLYYAVTQDAMLIFENLSRGFGRQGKRTFSAERQYTRMEDWLTAKLAYEGLPSKTYLSKTLAQYTSKTCSNCGFTITSADYDRVLEKLKKTATGWMTTINGKELKVEGQITYYNRYKRQNVVKDLSVELDRLSEESVNNDISSWTKGRSGEALSLLKKRFSHRPVQEKFVCLNCGFETHADEQAALNIARSWLFLRSQEYKKYQTNKTTGNTDKRAFVETWQSFYRKKLKEVWKPAV

SEQ ID NO: 45754 - protein, 978 aa, synthetic construct
  REGION 1..978: note = engineered CasX variant
QEIKRINKIRRRLVKDSNTKKAGKTGPMKTLLVRVMTPDLRERLENLRKKPENIPQPISNTSRANLNKLLTDYTEMKKAILHVYWEEFQKDPVGLMSRVAQPASKKIDQNKLKPEMDEKGNLTTAGFACSQCGQPLFVYKLEQVSEKGKAYTNYFGRCNVAEHEKLILLAQLKPEKDSDEAVTYSLGKFGQRALDFYSIHVTKESTHPVKPLAQIAGNRYASSPVGKALSDACMGTIASFLSKYQDIIIEHQKVVKGNQKRLESLRELAGKENLEYPSVTLPPQPHTKEGVDAYNEVIARVRMWVNLNLWQKLKLSRDDAKPLLRLKNFPSFPLVERQANEVDWWDMVCNVKKLINEKKEDGKVFWQNLAGYKRQEALRPYLSSEEDRKKGKKFARYQLGDLLLHLEKKHGEDWGKVYDEAWERIDKKVEGLSKHIKLEEERRSEDAQSKAALTDWLRAKASFVIEGLKEADKDEFCRCELKLQKWYGDLRGKPFAIEAENSILDISGFSKQYNCAFIWQKDGVKKLNLYLIINYFKGGKLRFKKIKPEAFEANRFYTVINKKSGEIVPMEVNFNFDDPNLIILPLAFGKRQGREFIWNDLLSLETGSLKLANGRVIEKTLYNRRTRQDEPALFVALTFERREVLDSSNIKPMNLIGVDRGENIPAVIALTDPEGCPLSRFKDSLGNPTHILRIGESYKEKQRTIQAKKEVEQRRAGGYSRKYASKAKNLADDMVRNTARDLLYYAVTQDAMLIFENLSRGFGRQGKRTFSAERQYTRMEDWLTAKLAYEGLPSKTYLSKTLAQYTSKTCSNCGFTITSADYDRVLEKLKKTATGWMTTINGKELKVEGQITYYNRYKRQNVVKDLSVELDRLSEESVNNDISSWTKGRSGEALSLLKKRFSHRPVQEKFVCLNCGFETHADEQAALNIARSWLFLRSQEYKKYQTNKTTGNTDKRAFVETWQSFYRKKLKEVWKPAV

SEQ ID NO: 45755 - protein, 978 aa, synthetic construct
  REGION 1..978: note = engineered CasX variant
QEIKRINKIRRRLVKDSNTKKAGKTGPMKTLLVRVMTPDLRERLENLRKKPENIPQPISNTSRANLNKLLTDYTEMKKAILHVYWEEFQKDPVGLMSRVAQPASKKIDQNKLKPEMDEKGNLTTAGFACSQCGQPLFVYKLEQVSEKGKAYTNYFGRCNVAEHEKLILLAQLKPEKDSDEAVTYSLGKFGQRALDFYSIHVTKESTHPVKPLAQIAGNRYASTPVGKALSDACMGTIASFLSKYQDIIIEHQKVVKGNQKRLESLRELAGKENLEYPSVTLPPQPHTKEGVDAYNEVIARVRMWVNLNLWQKLKLSRDDAKPLLRLKNFPSFPLVERQANEVDWWDMVCNVKKLINEKKEDGKVFWQNLAGYKRQEALRPYLSSEEDRKKGKKFARYQLGDLLLHLEKKHGEDWGKVYDEAWERIDKKVEGLSKHIKLEEERRSEDAQSKAALTDWLRAKASFVIEGLKEADKDEFCRCELKLQKWYGDLRGKPFAIEAENSILDISGFSKQYNCAFIWQKDGVKKLNLYLIINYFKGGKLRFKKIKPEAFEANRFYTVINKKSGEIVPMEVNFNFDDPNLIILPLAFGKRQGREFIWNDLLSLETGSLKLANGRVIEKTLYNRRTRQDEPALFVALTFERREVLDSSNIKPMNLIGVDRGENIPAVIALTDPEGCPLSRFKDSLGNPTHILRIGESYKEKQRTIQAKKEVEQRRAGGYSRKYASKAKNLADDMVRNTARDLLYYAVTQDAMLIFENLSRGFGRQGKRTFSAERQYTRMEDWLTAKLAYEGLPSKTYLSKTLAQYTSKTCSNCGFTITSADYDRVLEKLKKTATGWMTTINGKELKVEGQITYYNRYKRQNVVKDLSVELDRLSEESVNNDISSWTKGRSGEALSLLKKRFSHRPVQEKFVCLNCGFETHADEQAALNIARSWLFLRSQEYKKYQTNKTTGNTDKRAFVETWQSFYRKKLKEVWKPAV

SEQ ID NO: 45756 - protein, 978 aa, synthetic construct
  REGION 1..978: note = engineered CasX variant
QEIKRINKIRRRLVKDSNTKKAGKTGPMKTLLVRVMTPDLRERLENLRKKPENIPQPISNTSRANLNKLLTDYTEMKKAILHVYWEEFQKDPVGLMSRVAQPASKKIDQNKLKPEMDEKGNLTTAGFACSQCGQPLFVYKLEQVSEKGKAYTNYFGRCNVAEHEKLILLAQLKPEKDSDEAVTYSLGKFGQRALDFYSIHVTKESTHPVKPLAQIAGNRYASAPVGKALSDACMGTIASFLSKYQDIIIEHQKVVKGNQKRLESLRELAGKENLEYPSVTLPPQPHTKEGVDAYNEVIARVRMWVNLNLWQKLKLSRDDAKPLLRLKNFPSFPLVERQANEVDWWDMVCNVKKLINEKKEDGKVFWQNLAGYKRQEALRPYLSSEEDRKKGKKFARYQLGDLLLHLEKKHGEDWGKVYDEAWERIDKKVEGLSKHIKLEEERRSEDAQSKAALTDWLRAKASFVIEGLKEADKDEFCRCELKLQKWYGDLRGKPFAIEAENSILDISGFSKQYNCAFIWQKDGVKKLNLYLIINYFKGGKLRFKKIKPEAFEANRFYTVINKKSGEIVPMEVNFNFDDPNLIILPLAFGKRQGREFIWNDLLSLETGSLKLANGRVIEKTLYNRRTRQDEPALFVALTFERREVLDSSNIKPMNLIGVDRGENIPAVIALTDPEGCPLSRFKDSLGNPTHILRIGESYKEKQRTIQAKKEVEQRRAGGYSRKYASKAKNLADDMVRNTARDLLYYAVTQDAMLIFENLSRGFGRQGKRTFSAERQYTRMEDWLTAKLAYEGLPSKTYLSKTLAQYTSKTCSNCGFTITSADYDRVLEKLKKTATGWMTTINGKELKVEGQITYYNRYKRQNVVKDLSVELDRLSEESVNNDISSWTKGRSGEALSLLKKRFSHRPVQEKFVCLNCGFETHADEQAALNIARSWLFLRSQEYKKYQTNKTTGNTDKRAFVETWQSFYRKKLKEVWKPAV

SEQ ID NO: 45757 - protein, 978 aa, synthetic construct
  REGION 1..978: note = engineered CasX variant
QEIKRINKIRRRLVKDSNTKKAGKTGPMKTLLVRVMTPDLRERLENLRKKPENIPQPISNTSRANLNKLLTDYTEMKKAILHVYWEEFQKDPVGLMSRVAQPASKKIDQNKLKPEMDEKGNLTTAGFACSQCGQPLFVYKLEQVSEKGKAYTNYFGRCNVAEHEKLILLAQLKPEKDSDEAVTYSLGKFGQRALDFYSIHVTKESTHPVKPLAQIAGNRYASVPVGKALSDACMGTIASFLSKYQDIIIEHQKVVKGNQKRLESLRELAGKENLEYPSVTLPPQPHTKEGVDAYNEVIARVRMWVNLNLWQKLKLSRDDAKPLLRLKNFPSFPLVERQANEVDWWDMVCNVKKLINEKKEDGKVFWQNLAGYKRQEALRPYLSSEEDRKKGKKFARYQLGDLLLHLEKKHGEDWGKVYDEAWERIDKKVEGLSKHIKLEEERRSEDAQSKAALTDWLRAKASFVIEGLKEADKDEFCRCELKLQKWYGDLRGKPFAIEAENSILDISGFSKQYNCAFIWQKDGVKKLNLYLIINYFKGGKLRFKKIKPEAFEANRFYTVINKKSGEIVPMEVNFNFDDPNLIILPLAFGKRQGREFIWNDLLSLETGSLKLANGRVIEKTLYNRRTRQDEPALFVALTFERREVLDSSNIKPMNLIGVDRGENIPAVIALTDPEGCPLSRFKDSLGNPTHILRIGESYKEKQRTIQAKKEVEQRRAGGYSRKYASKAKNLADDMVRNTARDLLYYAVTQDAMLIFENLSRGFGRQGKRTFSAERQYTRMEDWLTAKLAYEGLPSKTYLSKTLAQYTSKTCSNCGFTITSADYDRVLEKLKKTATGWMTTINGKELKVEGQITYYNRYKRQNVVKDLSVELDRLSEESVNNDISSWTKGRSGEALSLLKKRFSHRPVQEKFVCLNCGFETHADEQAALNIARSWLFLRSQEYKKYQTNKTTGNTDKRAFVETWQSFYRKKLKEVWKPAV

SEQ ID NO: 45758 - protein, 978 aa, synthetic construct
  REGION 1..978: note = engineered CasX variant
QEIKRINKIRRRLVKDSNTKKAGKTGPMKTLLVRVMTPDLRERLENLRKKPENIPQPISNTSRANLNKLLTDYTEMKKAILHVYWEEFQKDPVGLMSRVAQPASKKIDQNKLKPEMDEKGNLTTAGFACSQCGQPLFVYKLEQVSEKGKAYTNYFGRCNVAEHEKLIKLAQLKPEKDSDEAVTYSLGKFGQRALDFYSIHVTKESTHPVKPLAQIAGNRYASGPVGKALSDACMGTIASFLSKYQDIIIEHQKVVKGNQKRLESLRELAGKENLEYPSVTLPPQPHTKEGVDAYNEVIARVRMWVNLNLWQKLKLSRDDAKPLLRLKNFPSFPLVERQANEVDWWDMVCNVKKLINEKKEDGKVFWQNLAGYKRQEALRPYLSSEEDRKKGKKFARYQLGDLLLHLEKKHGEDWGKVYDEAWERIDKKVEGLSKHIKLEEERRSEDAQSKAALTDWLRAKASFVIEGLKEADKDEFCRCELKLQKWYGDLRGKPFAIEAENSILDISGFSKQYNCAFIWQKDGVKKLNLYLIINYFKGGKLRFKKIKPEAFEANRFYTVINKKSGEIVPMEVNFNFDDPNLIILPLAFGKRQGREFIWNDLLSLETGSLKLANGRVIEKTLYNRRTRQDEPALFVALTFERREVLDSSNIKPMNLIGVDRGENIPAVIALTDPEGCPLSRFKDSLGNPTHILRIGESYKEKQRTIQAKKEVEQRRAGGYSRKYASKAKNLADDMVRNTARDLLYYAVTQDAMLIFENLSRGFGRQGKRTFSAERQYTRMEDWLTAKLAYEGLPSKTYLSKTLAQYTSKTCSNCGFTITSADYDRVLEKLKKTATGWMTTINGKELKVEGQITYYNRYKRQNVVKDLSVELDRLSEESVNNDISSWTKGRSGEALSLLKKRFSHRPVQEKFVCLNCGFETHADEQAALNIARSWLFLRSQEYKKYQTNKTTGNTDKRAFVETWQSFYRKKLKEVWKPAV

SEQ ID NO: 45759 - protein, 977 aa, synthetic construct
  REGION 1..977: note = engineered CasX variant
QEIKRINKIRRRLVKDSNTKKAGKTGPMKTLLVRVMTPDLRERLENLRKKPENIPQPISNTSRANLNKLLTDYTEMKKAILHVYWEEFQKDPVGLMSRVAQPASKKIDQNKLKPEMDEKGNLTTAGFACSQCGQPLFVYKLEQVSEKGKAYTNYFGRCNVAEHEKLILLAQLKPEKDSDEAVTYSLGKFGQRALDFYSIHVTKESTHPVKPLAQIAGNRYASPVGKALSDACMGTIASFLSKYQDIIIEHQKVVKGNQKRLESLRELAGKENLEYPSVTLPPQPHTKEGVDAYNEVIARVRMWVNLNLWQKLKLSRDDAKPLLRLKNFPSFPLVERQANEVDWWDMVCNVKKLINEKKEDGKVFWQNLAGYKRQEALRPYLSSEEDRKKGKKFARYQLGDLLLHLEKKHGEDWGKVYDEAWERIDKKVEGLSKHIKLEEERRSEDAQSKAALTDWLRAKASFVIEGLKEADKDEFCRCELKLQKWYGDLRGKPFAIEAENSILDISGFSKQYNCAFIWQKDGVKKLNLYLIINYFKGGKLRFKKIKPEAFEANRFYTVINKKSGEIVPMEVNFNFDDPNLIILPLAFGKRQGREFIWNDLLSLETGSLKLANGRVIEKTLYNRRTRQDEPALFVALTFERREVLDSSNIKPMNLIGVDRGENIPAVIALTDPEGCPLSRFKDSLGNPTHILRIGESYKEKQRTIQAKKEVEQRRAGGYSRKYASKAKNLADDMVRNTARDLLYYAVTQDAMLIFENLSRGFGRQGKRTFSAERQYTRMEDWLTAKLAYEGLPSKTYLSKTLAQYTSKTCSNCGFTITSADYDRVLEKLKKTATGWMTTINGKELKVEGQITYYNRYKRQNVVKDLSVELDRLSEESVNNDISSWTKGRSGEALSLLKKRFSHRPVQEKFVCLNCGFETHADEQAALNIARSWLFLRSQEYKKYQTNKTTGNTDKRAFVETWQSFYRKKLKEVWKPAV

SEQ ID NO: 45760 - protein, 978 aa, synthetic construct
  REGION 1..978: note = engineered CasX variant
QEIKRINKIRRRLVKDSNTKKAGKTGPMKTLLVRVMTPDLRERLENLRKKPENIPQPISNTSRANLNKLLTDYTEMKKAILHVYWEEFQKDPVGLMSRVAQPASKKIDQNKLKPEMDEKGNLTTAGFACSQCGQPLFVYKLEQVSEKGKAYTNYFGRCNVAEHEKLILLAQLKPEKDSDEAVTYSLGKFGQRALDFYSIHVTKESTHPVKPLAQIAGNRYASYPVGKALSDACMGTIASFLSKYQDIIIEHQKVVKGNQKRLESLRELAGKENLEYPSVTLPPQPHTKEGVDAYNEVIARVRMWVNLNLWQKLKLSRDDAKPLLRLKGFPSFPLVERQANEVDWWDMVCNVKKLINEKKEDGKVFWQNLAGYKRQEALRPYLSSEEDRKKGKKFARYQLGDLLNHLEKKHGEDWGKVYDEAWERIDKKVEGLSKHIKLEEERRSEDAQSKAALTDWLRAKASFVIEGLKEADKDEFCRCELKLQKWYGDLRGKPFAIEAENSILDISGFSKQYNCAFIWQKDGVKKLNLYLIINYFKGGKLRFKKIKPEAFEANRFYTVINKKSGEIVPMEVNFNFDDPNLIILPLAFGKRQGREFIWNDLLSLETGSLKLANGRVIEKTLYNRRTRQDEPALFVALTFERREVLDSSNIKPMNLIGVDRGENIPAVIALTDPEGCPLSRFKDSLGNPTHILRIGESYKEKQRTIQAKKEVEQRRAGGYSRKYASKAKNLADDMVRNTARDLLYYAVTQDAMLIFENLSRGFGRQGKRTFSAERQYTRMEDWLTAKLAYEGLPSKTYLSKTLAQYTSKTCSNCGFTITSADYDRVLEKLKKTATGWMTTINGKELKVEGQITYYNRYKRQNVVKDLSVELDRLSEESVNNDISSWTKGRSGEALSLLKKRFSHRPVQEKFVCLNCGFETHADEQAALNIARSWLFLRSQEYKKYQTNKTTGNTDKRAFVETWQSFYRKKLKEVWKPAV

SEQ ID NO: 45761 - protein, 978 aa, synthetic construct
  REGION 1..978: note = engineered CasX variant
QEIKRINKIRRRLVKDSNTKKAGKTGPMKTLLVRVMTPDLRERLENLRKKPENIPQPISNTSRANLNKLLTDYTEMKKAILHVYWEEFQKDPVGLMSRVAQPASKKIDQNKLKPEMDEKGNLTTAGFACSQCGQPLFVYKLEQVSEKGKAYTNYFGRCNVAEHEKLILLAQLKPEKDSDEAVTYSLGKFGQRALDFYSIHVTKESTHPVKPLAQIAGNRYASHPVGKALSDACMGTIASFLSKYQDIIIEHQKVVKGNQKRLESLRELAGKENLEYPSVTLPPQPHTKEGVDAYNEVIARVRMWVNLNLWQKLKLSRDDAKPLLRLKGFPSFPLVERQANEVDWWDMVCNVKKLINEKKEDGKVFWQNLAGYKRQEALRPYLSSEEDRKKGKKFARYQLGDLLNHLEKKHGEDWGKVYDEAWERIDKKVEGLSKHIKLEEERRSEDAQSKAALTDWLRAKASFVIEGLKEADKDEFCRCELKLQKWYGDLRGKPFAIEAENSILDISGFSKQYNCAFIWQKDGVKKLNLYLIINYFKGGKLRFKKIKPEAFEANRFYTVINKKSGEIVPMEVNFNFDDPNLIILPLAFGKRQGREFIWNDLLSLETGSLKLANGRVIEKTLYNRRTRQDEPALFVALTFERREVLDSSNIKPMNLIGVDRGENIPAVIALTDPEGCPLSRFKDSLGNPTHILRIGESYKEKQRTIQAKKEVEQRRAGGYSRKYASKAKNLADDMVRNTARDLLYYAVTQDAMLIFENLSRGFGRQGKRTFSAERQYTRMEDWLTAKLAYEGLPSKTYLSKTLAQYTSKTCSNCGFTITSADYDRVLEKLKKTATGWMTTINGKELKVEGQITYYNRYKRQNVVKDLSVELDRLSEESVNNDISSWTKGRSGEALSLLKKRFSHRPVQEKFVCLNCGFETHADEQAALNIARSWLFLRSQEYKKYQTNKTTGNTDKRAFVETWQSFYRKKLKEVWKPAV

SEQ ID NO: 45762 - protein, 978 aa, synthetic construct
  REGION 1..978: note = engineered CasX variant
QEIKRINKIRRRLVKDSNTKKAGKTGPMKTLLVRVMTPDLRERLENLRKKPENIPQPISNTSRANLNKLLTDYTEMKKAILHVYWEEFQKDPVGLMSRVAQPASKKIDQNKLKPEMDEKGNLTTAGFACSQCGQPLFVYKLEQVSEKGKAYTNYFGRCNVAEHEKLILLAQLKPEKDSDEAVTYSLGKFGQRALDFYSIHVTKESTHPVKPLAQIAGNRYASSPVGKALSDACMGTIASFLSKYQDIIIEHQKVVKGNQKRLESLRELAGKENLEYPSVTLPPQPHTKEGVDAYNEVIARVRMWVNLNLWQKLKLSRDDAKPLLRLKGFPSFPLVERQANEVDWWDMVCNVKKLINEKKEDGKVFWQNLAGYKRQEALRPYLSSEEDRKKGKKFARYQLGDLLNHLEKKHGEDWGKVYDEAWERIDKKVEGLSKHIKLEEERRSEDAQSKAALTDWLRAKASFVIEGLKEADKDEFCRCELKLQKWYGDLRGKPFAIEAENSILDISGFSKQYNCAFIWQKDGVKKLNLYLIINYFKGGKLRFKKIKPEAFEANRFYTVINKKSGEIVPMEVNFNFDDPNLIILPLAFGKRQGREFIWNDLLSLETGSLKLANGRVIEKTLYNRRTRQDEPALFVALTFERREVLDSSNIKPMNLIGVDRGENIPAVIALTDPEGCPLSRFKDSLGNPTHILRIGESYKEKQRTIQAKKEVEQRRAGGYSRKYASKAKNLADDMVRNTARDLLYYAVTQDAMLIFENLSRGFGRQGKRTFSAERQYTRMEDWLTAKLAYEGLPSKTYLSKTLAQYTSKTCSNCGFTITSADYDRVLEKLKKTATGWMTTINGKELKVEGQITYYNRYKRQNVVKDLSVELDRLSEESVNNDISSWTKGRSGEALSLLKKRFSHRPVQEKFVCLNCGFETHADEQAALNIARSWLFLRSQEYKKYQTNKTTGNTDKRAFVETWQSFYRKKLKEVWKPAV

SEQ ID NO: 45763 - protein, 978 aa, synthetic construct
  REGION 1..978: note = engineered CasX variant
QEIKRINKIRRRLVKDSNTKKAGKTGPMKTLLVRVMTPDLRERLENLRKKPENIPQPISNTSRANLNKLLTDYTEMKKAILHVYWEEFQKDPVGLMSRVAQPASKKIDQNKLKPEMDEKGNLTTAGFACSQCGQPLFVYKLEQVSEKGKAYTNYFGRCNVAEHEKLILLAQLKPEKDSDEAVTYSLGKFGQRALDFYSIHVTKESTHPVKPLAQIAGNRYASTPVGKALSDACMGTIASFLSKYQDIIIEHQKVVKGNQKRLESLRELAGKENLEYPSVTLPPQPHTKEGVDAYNEVIARVRMWVNLNLWQKLKLSRDDAKPLLRLKGFPSFPLVERQANEVDWWDMVCNVKKLINEKKEDGKVFWQNLAGYKRQEALRPYLSSEEDRKKGKKFARYQLGDLLNHLEKKHGEDWGKVYDEAWERIDKKVEGLSKHIKLEEERRSEDAQSKAALTDWLRAKASFVIEGLKEADKDEFCRCELKLQKWYGDLRGKPFAIEAENSILDISGFSKQYNCAFIWQKDGVKKLNLYLIINYFKGGKLRFKKIKPEAFEANRFYTVINKKSGEIVPMEVNFNFDDPNLIILPLAFGKRQGREFIWNDLLSLETGSLKLANGRVIEKTLYNRRTRQDEPALFVALTFERREVLDSSNIKPMNLIGVDRGENIPAVIALTDPEGCPLSRFKDSLGNPTHILRIGESYKEKQRTIQAKKEVEQRRAGGYSRKYASKAKNLADDMVRNTARDLLYYAVTQDAMLIFENLSRGFGRQGKRTFSAERQYTRMEDWLTAKLAYEGLPSKTYLSKTLAQYTSKTCSNCGFTITSADYDRVLEKLKKTATGWMTTINGKELKVEGQITYYNRYKRQNVVKDLSVELDRLSEESVNNDISSWTKGRSGEALSLLKKRFSHRPVQEKFVCLNCGFETHADEQAALNIARSWLFLRSQEYKKYQTNKTTGNTDKRAFVETWQSFYRKKLKEVWKPAV

SEQ ID NO: 45764 - protein, 978 aa, synthetic construct
  REGION 1..978: note = engineered CasX variant
QEIKRINKIRRRLVKDSNTKKAGKTGPMKTLLVRVMTPDLRERLENLRKKPENIPQPISNTSRANLNKLLTDYTEMKKAILHVYWEEFQKDPVGLMSRVAQPASKKIDQNKLKPEMDEKGNLTTAGFACSQCGQPLFVYKLEQVSEKGKAYTNYFGRCNVAEHEKLILLAQLKPEKDSDEAVTYSLGKFGQRALDFYSIHVTKESTHPVKPLAQIAGNRYASAPVGKALSDACMGTIASFLSKYQDIIIEHQKVVKGNQKRLESLRELAGKENLEYPSVTLPPQPHTKEGVDAYNEVIARVRMWVNLNLWQKLKLSRDDAKPLLRLKGFPSFPLVERQANEVDWWDMVCNVKKLINEKKEDGKVFWQNLAGYKRQEALRPYLSSEEDRKKGKKFARYQLGDLLNHLEKKHGEDWGKVYDEAWERIDKKVEGLSKHIKLEEERRSEDAQSKAALTDWLRAKASFVIEGLKEADKDEFCRCELKLQKWYGDLRGKPFAIEAENSILDISGFSKQYNCAFIWQKDGVKKLNLYLIINYFKGGKLRFKKIKPEAFEANRFYTVINKKSGEIVPMEVNFNFDDPNLIILPLAFGKRQGREFIWNDLLSLETGSLKLANGRVIEKTLYNRRTRQDEPALFVALTFERREVLDSSNIKPMNLIGVDRGENIPAVIALTDPEGCPLSRFKDSLGNPTHILRIGESYKEKQRTIQAKKEVEQRRAGGYSRKYASKAKNLADDMVRNTARDLLYYAVTQDAMLIFENLSRGFGRQGKRTFSAERQYTRMEDWLTAKLAYEGLPSKTYLSKTLAQYTSKTCSNCGFTITSADYDRVLEKLKKTATGWMTTINGKELKVEGQITYYNRYKRQNVVKDLSVELDRLSEESVNNDISSWTKGRSGEALSLLKKRFSHRPVQEKFVCLNCGFETHADEQAALNIARSWLFLRSQEYKKYQTNKTTGNTDKRAFVETWQSFYRKKLKEVWKPAV

SEQ ID NO: 45765 - protein, 978 aa, synthetic construct
  REGION 1..978: note = engineered CasX variant
QEIKRINKIRRRLVKDSNTKKAGKTGPMKTLLVRVMTPDLRERLENLRKKPENIPQPISNTSRANLNKLLTDYTEMKKAILHVYWEEFQKDPVGLMSRVAQPASKKIDQNKLKPEMDEKGNLTTAGFACSQCGQPLFVYKLEQVSEKGKAYTNYFGRCNVAEHEKLILLAQLKPEKDSDEAVTYSLGKFGQRALDFYSIHVTKESTHPVKPLAQIAGNRYASVPVGKALSDACMGTIASFLSKYQDIIIEHQKVVKGNQKRLESLRELAGKENLEYPSVTLPPQPHTKEGVDAYNEVIARVRMWVNLNLWQKLKLSRDDAKPLLRLKGFPSFPLVERQANEVDWWDMVCNVKKLINEKKEDGKVFWQNLAGYKRQEALRPYLSSEEDRKKGKKFARYQLGDLLNHLEKKHGEDWGKVYDEAWERIDKKVEGLSKHIKLEEERRSEDAQSKAALTDWLRAKASFVIEGLKEADKDEFCRCELKLQKWYGDLRGKPFAIEAENSILDISGFSKQYNCAFIWQKDGVKKLNLYLIINYFKGGKLRFKKIKPEAFEANRFYTVINKKSGEIVPMEVNFNFDDPNLIILPLAFGKRQGREFIWNDLLSLETGSLKLANGRVIEKTLYNRRTRQDEPALFVALTFERREVLDSSNIKPMNLIGVDRGENIPAVIALTDPEGCPLSRFKDSLGNPTHILRIGESYKEKQRTIQAKKEVEQRRAGGYSRKYASKAKNLADDMVRNTARDLLYYAVTQDAMLIFENLSRGFGRQGKRTFSAERQYTRMEDWLTAKLAYEGLPSKTYLSKTLAQYTSKTCSNCGFTITSADYDRVLEKLKKTATGWMTTINGKELKVEGQITYYNRYKRQNVVKDLSVELDRLSEESVNNDISSWTKGRSGEALSLLKKRFSHRPVQEKFVCLNCGFETHADEQAALNIARSWLFLRSQEYKKYQTNKTTGNTDKRAFVETWQSFYRKKLKEVWKPAV

SEQ ID NO: 45766 - protein, 978 aa, synthetic construct
  REGION 1..978: note = engineered CasX variant
QEIKRINKIRRRLVKDSNTKKAGKTGPMKTLLVRVMTPDLRERLENLRKKPENIPQPISNTSRANLNKLLTDYTEMKKAILHVYWEEFQKDPVGLMSRVAQPASKKIDQNKLKPEMDEKGNLTTAGFACSQCGQPLFVYKLEQVSEKGKAYTNYFGRCNVAEHEKLIKLAQLKPEKDSDEAVTYSLGKFGQRALDFYSIHVTKESTHPVKPLAQIAGNRYASGPVGKALSDACMGTIASFLSKYQDIIIEHQKVVKGNQKRLESLRELAGKENLEYPSVTLPPQPHTKEGVDAYNEVIARVRMWVNLNLWQKLKLSRDDAKPLLRLKGFPSFPLVERQANEVDWWDMVCNVKKLINEKKEDGKVFWQNLAGYKRQEALRPYLSSEEDRKKGKKFARYQLGDLLNHLEKKHGEDWGKVYDEAWERIDKKVEGLSKHIKLEEERRSEDAQSKAALTDWLRAKASFVIEGLKEADKDEFCRCELKLQKWYGDLRGKPFAIEAENSILDISGFSKQYNCAFIWQKDGVKKLNLYLIINYFKGGKLRFKKIKPEAFEANRFYTVINKKSGEIVPMEVNFNFDDPNLIILPLAFGKRQGREFIWNDLLSLETGSLKLANGRVIEKTLYNRRTRQDEPALFVALTFERREVLDSSNIKPMNLIGVDRGENIPAVIALTDPEGCPLSRFKDSLGNPTHILRIGESYKEKQRTIQAKKEVEQRRAGGYSRKYASKAKNLADDMVRNTARDLLYYAVTQDAMLIFENLSRGFGRQGKRTFSAERQYTRMEDWLTAKLAYEGLPSKTYLSKTLAQYTSKTCSNCGFTITSADYDRVLEKLKKTATGWMTTINGKELKVEGQITYYNRYKRQNVVKDLSVELDRLSEESVNNDISSWTKGRSGEALSLLKKRFSHRPVQEKFVCLNCGFETHADEQAALNIARSWLFLRSQEYKKYQTNKTTGNTDKRAFVETWQSFYRKKLKEVWKPAV

SEQ ID NO: 45767 - protein, 977 aa, synthetic construct
  REGION 1..977: note = engineered CasX variant
QEIKRINKIRRRLVKDSNTKKAGKTGPMKTLLVRVMTPDLRERLENLRKKPENIPQPISNTSRANLNKLLTDYTEMKKAILHVYWEEFQKDPVGLMSRVAQPASKKIDQNKLKPEMDEKGNLTTAGFACSQCGQPLFVYKLEQVSEKGKAYTNYFGRCNVAEHEKLILLAQLKPEKDSDEAVTYSLGKFGQRALDFYSIHVTKESTHPVKPLAQIAGNRYASPVGKALSDACMGTIASFLSKYQDIIIEHQKVVKGNQKRLESLRELAGKENLEYPSVTLPPQPHTKEGVDAYNEVIARVRMWVNLNLWQKLKLSRDDAKPLLRLKGFPSFPLVERQANEVDWWDMVCNVKKLINEKKEDGKVFWQNLAGYKRQEALRPYLSSEEDRKKGKKFARYQLGDLLNHLEKKHGEDWGKVYDEAWERIDKKVEGLSKHIKLEEERRSEDAQSKAALTDWLRAKASFVIEGLKEADKDEFCRCELKLQKWYGDLRGKPFAIEAENSILDISGFSKQYNCAFIWQKDGVKKLNLYLIINYFKGGKLRFKKIKPEAFEANRFYTVINKKSGEIVPMEVNFNFDDPNLIILPLAFGKRQGREFIWNDLLSLETGSLKLANGRVIEKTLYNRRTRQDEPALFVALTFERREVLDSSNIKPMNLIGVDRGENIPAVIALTDPEGCPLSRFKDSLGNPTHILRIGESYKEKQRTIQAKKEVEQRRAGGYSRKYASKAKNLADDMVRNTARDLLYYAVTQDAMLIFENLSRGFGRQGKRTFSAERQYTRMEDWLTAKLAYEGLPSKTYLSKTLAQYTSKTCSNCGFTITSADYDRVLEKLKKTATGWMTTINGKELKVEGQITYYNRYKRQNVVKDLSVELDRLSEESVNNDISSWTKGRSGEALSLLKKRFSHRPVQEKFVCLNCGFETHADEQAALNIARSWLFLRSQEYKKYQTNKTTGNTDKRAFVETWQSFYRKKLKEVWKPAV

SEQ ID NO: 45768 - protein, 978 aa, synthetic construct
  REGION 1..978: note = engineered CasX variant
QEIKRINKIRRRLVKDSNTKKAGKTGPMKTLLVRVMTPDLRERLENLRKKPENIPQPISNTSRANLNKLLTDYTEMKKAILHVYWEEFQKDPVGLMSRVAQPASKKIDQNKLKPEMDEKGNLTTAGFACSQCGQPLFVYKLEQVSEKGKAYTNYFGRCNVAEHEKLILLAQLKPEKDSDEAVTYSLGKFGQRALDFYSIHVTKESTHPVKPLAQIAGNRYASYPVGKALSDACMGTIASFLSKYQDIIIEHQKVVKGNQKRLESLRELAGKENLEYPSVTLPPQPHTKEGVDAYNEVIARVRMWVNLNLWQKLKLSRDDAKPLLRLKGFPSFPLVERQANEVDWWDMVCNVKKLINEKKEDGKVFWQNLAGYKRQEALRPYLSSEEDRKKGKKFARYQLGDLLWHLEKKHGEDWGKVYDEAWERIDKKVEGLSKHIKLEEERRSEDAQSKAALTDWLRAKASFVIEGLKEADKDEFCRCELKLQKWYGDLRGKPFAIEAENSILDISGFSKQYNCAFIWQKDGVKKLNLYLIINYFKGGKLRFKKIKPEAFEANRFYTVINKKSGEIVPMEVNFNFDDPNLIILPLAFGKRQGREFIWNDLLSLETGSLKLANGRVIEKTLYNRRTRQDEPALFVALTFERREVLDSSNIKPMNLIGVDRGENIPAVIALTDPEGCPLSRFKDSLGNPTHILRIGESYKEKQRTIQAKKEVEQRRAGGYSRKYASKAKNLADDMVRNTARDLLYYAVTQDAMLIFENLSRGFGRQGKRTFSAERQYTRMEDWLTAKLAYEGLPSKTYLSKTLAQYTSKTCSNCGFTITSADYDRVLEKLKKTATGWMTTINGKELKVEGQITYYNRYKRQNVVKDLSVELDRLSEESVNNDISSWTKGRSGEALSLLKKRFSHRPVQEKFVCLNCGFETHADEQAALNIARSWLFLRSQEYKKYQTNKTTGNTDKRAFVETWQSFYRKKLKEVWKPAV

SEQ ID NO: 45769 - protein, 978 aa, synthetic construct
  REGION 1..978: note = engineered CasX variant
QEIKRINKIRRRLVKDSNTKKAGKTGPMKTLLVRVMTPDLRERLENLRKKPENIPQPISNTSRANLNKLLTDYTEMKKAILHVYWEEFQKDPVGLMSRVAQPASKKIDQNKLKPEMDEKGNLTTAGFACSQCGQPLFVYKLEQVSEKGKAYTNYFGRCNVAEHEKLILLAQLKPEKDSDEAVTYSLGKFGQRALDFYSIHVTKESTHPVKPLAQIAGNRYASHPVGKALSDACMGTIASFLSKYQDIIIEHQKVVKGNQKRLESLRELAGKENLEYPSVTLPPQPHTKEGVDAYNEVIARVRMWVNLNLWQKLKLSRDDAKPLLRLKGFPSFPLVERQANEVDWWDMVCNVKKLINEKKEDGKVFWQNLAGYKRQEALRPYLSSEEDRKKGKKFARYQLGDLLWHLEKKHGEDWGKVYDEAWERIDKKVEGLSKHIKLEEERRSEDAQSKAALTDWLRAKASFVIEGLKEADKDEFCRCELKLQKWYGDLRGKPFAIEAENSILDISGFSKQYNCAFIWQKDGVKKLNLYLIINYFKGGKLRFKKIKPEAFEANRFYTVINKKSGEIVPMEVNFNFDDPNLIILPLAFGKRQGREFIWNDLLSLETGSLKLANGRVIEKTLYNRRTRQDEPALFVALTFERREVLDSSNIKPMNLIGVDRGENIPAVIALTDPEGCPLSRFKDSLGNPTHILRIGESYKEKQRTIQAKKEVEQRRAGGYSRKYASKAKNLADDMVRNTARDLLYYAVTQDAMLIFENLSRGFGRQGKRTFSAERQYTRMEDWLTAKLAYEGLPSKTYLSKTLAQYTSKTCSNCGFTITSADYDRVLEKLKKTATGWMTTINGKELKVEGQITYYNRYKRQNVVKDLSVELDRLSEESVNNDISSWTKGRSGEALSLLKKRFSHRPVQEKFVCLNCGFETHADEQAALNIARSWLFLRSQEYKKYQTNKTTGNTDKRAFVETWQSFYRKKLKEVWKPAV

SEQ ID NO: 45770 - protein, 978 aa, synthetic construct
  REGION 1..978: note = engineered CasX variant
QEIKRINKIRRRLVKDSNTKKAGKTGPMKTLLVRVMTPDLRERLENLRKKPENIPQPISNTSRANLNKLLTDYTEMKKAILHVYWEEFQKDPVGLMSRVAQPASKKIDQNKLKPEMDEKGNLTTAGFACSQCGQPLFVYKLEQVSEKGKAYTNYFGRCNVAEHEKLILLAQLKPEKDSDEAVTYSLGKFGQRALDFYSIHVTKESTHPVKPLAQIAGNRYASSPVGKALSDACMGTIASFLSKYQDIIIEHQKVVKGNQKRLESLRELAGKENLEYPSVTLPPQPHTKEGVDAYNEVIARVRMWVNLNLWQKLKLSRDDAKPLLRLKGFPSFPLVERQANEVDWWDMVCNVKKLINEKKEDGKVFWQNLAGYKRQEALRPYLSSEEDRKKGKKFARYQLGDLLWHLEKKHGEDWGKVYDEAWERIDKKVEGLSKHIKLEEERRSEDAQSKAALTDWLRAKASFVIEGLKEADKDEFCRCELKLQKWYGDLRGKPFAIEAENSILDISGFSKQYNCAFIWQKDGVKKLNLYLIINYFKGGKLRFKKIKPEAFEANRFYTVINKKSGEIVPMEVNFNFDDPNLIILPLAFGKRQGREFIWNDLLSLETGSLKLANGRVIEKTLYNRRTRQDEPALFVALTFERREVLDSSNIKPMNLIGVDRGENIPAVIALTDPEGCPLSRFKDSLGNPTHILRIGESYKEKQRTIQAKKEVEQRRAGGYSRKYASKAKNLADDMVRNTARDLLYYAVTQDAMLIFENLSRGFGRQGKRTFSAERQYTRMEDWLTAKLAYEGLPSKTYLSKTLAQYTSKTCSNCGFTITSADYDRVLEKLKKTATGWMTTINGKELKVEGQITYYNRYKRQNVVKDLSVELDRLSEESVNNDISSWTKGRSGEALSLLKKRFSHRPVQEKFVCLNCGFETHADEQAALNIARSWLFLRSQEYKKYQTNKTTGNTDKRAFVETWQSFYRKKLKEVWKPAV

SEQ ID NO: 45771 - protein, 978 aa, synthetic construct
  REGION 1..978: note = engineered CasX variant
QEIKRINKIRRRLVKDSNTKKAGKTGPMKTLLVRVMTPDLRERLENLRKKPENIPQPISNTSRANLNKLLTDYTEMKKAILHVYWEEFQKDPVGLMSRVAQPASKKIDQNKLKPEMDEKGNLTTAGFACSQCGQPLFVYKLEQVSEKGKAYTNYFGRCNVAEHEKLILLAQLKPEKDSDEAVTYSLGKFGQRALDFYSIHVTKESTHPVKPLAQIAGNRYASTPVGKALSDACMGTIASFLSKYQDIIIEHQKVVKGNQKRLESLRELAGKENLEYPSVTLPPQPHTKEGVDAYNEVIARVRMWVNLNLWQKLKLSRDDAKPLLRLKGFPSFPLVERQANEVDWWDMVCNVKKLINEKKEDGKVFWQNLAGYKRQEALRPYLSSEEDRKKGKKFARYQLGDLLWHLEKKHGEDWGKVYDEAWERIDKKVEGLSKHIKLEEERRSEDAQSKAALTDWLRAKASFVIEGLKEADKDEFCRCELKLQKWYGDLRGKPFAIEAENSILDISGFSKQYNCAFIWQKDGVKKLNLYLIINYFKGGKLRFKKIKPEAFEANRFYTVINKKSGEIVPMEVNFNFDDPNLIILPLAFGKRQGREFIWNDLLSLETGSLKLANGRVIEKTLYNRRTRQDEPALFVALTFERREVLDSSNIKPMNLIGVDRGENIPAVIALTDPEGCPLSRFKDSLGNPTHILRIGESYKEKQRTIQAKKEVEQRRAGGYSRKYASKAKNLADDMVRNTARDLLYYAVTQDAMLIFENLSRGFGRQGKRTFSAERQYTRMEDWLTAKLAYEGLPSKTYLSKTLAQYTSKTCSNCGFTITSADYDRVLEKLKKTATGWMTTINGKELKVEGQITYYNRYKRQNVVKDLSVELDRLSEESVNNDISSWTKGRSGEALSLLKKRFSHRPVQEKFVCLNCGFETHADEQAALNIARSWLFLRSQEYKKYQTNKTTGNTDKRAFVETWQSFYRKKLKEVWKPAV

SEQ ID NO: 45772 - protein, 978 aa, synthetic construct
  REGION 1..978: note = engineered CasX variant
QEIKRINKIRRRLVKDSNTKKAGKTGPMKTLLVRVMTPDLRERLENLRKKPENIPQPISNTSRANLNKLLTDYTEMKKAILHVYWEEFQKDPVGLMSRVAQPASKKIDQNKLKPEMDEKGNLTTAGFACSQCGQPLFVYKLEQVSEKGKAYTNYFGRCNVAEHEKLILLAQLKPEKDSDEAVTYSLGKFGQRALDFYSIHVTKESTHPVKPLAQIAGNRYASAPVGKALSDACMGTIASFLSKYQDIIIEHQKVVKGNQKRLESLRELAGKENLEYPSVTLPPQPHTKEGVDAYNEVIARVRMWVNLNLWQKLKLSRDDAKPLLRLKGFPSFPLVERQANEVDWWDMVCNVKKLINEKKEDGKVFWQNLAGYKRQEALRPYLSSEEDRKKGKKFARYQLGDLLWHLEKKHGEDWGKVYDEAWERIDKKVEGLSKHIKLEEERRSEDAQSKAALTDWLRAKASFVIEGLKEADKDEFCRCELKLQKWYGDLRGKPFAIEAENSILDISGFSKQYNCAFIWQKDGVKKLNLYLIINYFKGGKLRFKKIKPEAFEANRFYTVINKKSGEIVPMEVNFNFDDPNLIILPLAFGKRQGREFIWNDLLSLETGSLKLANGRVIEKTLYNRRTRQDEPALFVALTFERREVLDSSNIKPMNLIGVDRGENIPAVIALTDPEGCPLSRFKDSLGNPTHILRIGESYKEKQRTIQAKKEVEQRRAGGYSRKYASKAKNLADDMVRNTARDLLYYAVTQDAMLIFENLSRGFGRQGKRTFSAERQYTRMEDWLTAKLAYEGLPSKTYLSKTLAQYTSKTCSNCGFTITSADYDRVLEKLKKTATGWMTTINGKELKVEGQITYYNRYKRQNVVKDLSVELDRLSEESVNNDISSWTKGRSGEALSLLKKRFSHRPVQEKFVCLNCGFETHADEQAALNIARSWLFLRSQEYKKYQTNKTTGNTDKRAFVETWQSFYRKKLKEVWKPAV

SEQ ID NO: 45773 - protein, 978 aa, synthetic construct
  REGION 1..978: note = engineered CasX variant
QEIKRINKIRRRLVKDSNTKKAGKTGPMKTLLVRVMTPDLRERLENLRKKPENIPQPISNTSRANLNKLLTDYTEMKKAILHVYWEEFQKDPVGLMSRVAQPASKKIDQNKLKPEMDEKGNLTTAGFACSQCGQPLFVYKLEQVSEKGKAYTNYFGRCNVAEHEKLILLAQLKPEKDSDEAVTYSLGKFGQRALDFYSIHVTKESTHPVKPLAQIAGNRYASVPVGKALSDACMGTIASFLSKYQDIIIEHQKVVKGNQKRLESLRELAGKENLEYPSVTLPPQPHTKEGVDAYNEVIARVRMWVNLNLWQKLKLSRDDAKPLLRLKGFPSFPLVERQANEVDWWDMVCNVKKLINEKKEDGKVFWQNLAGYKRQEALRPYLSSEEDRKKGKKFARYQLGDLLWHLEKKHGEDWGKVYDEAWERIDKKVEGLSKHIKLEEERRSEDAQSKAALTDWLRAKASFVIEGLKEADKDEFCRCELKLQKWYGDLRGKPFAIEAENSILDISGFSKQYNCAFIWQKDGVKKLNLYLIINYFKGGKLRFKKIKPEAFEANRFYTVINKKSGEIVPMEVNFNFDDPNLIILPLAFGKRQGREFIWNDLLSLETGSLKLANGRVIEKTLYNRRTRQDEPALFVALTFERREVLDSSNIKPMNLIGVDRGENIPAVIALTDPEGCPLSRFKDSLGNPTHILRIGESYKEKQRTIQAKKEVEQRRAGGYSRKYASKAKNLADDMVRNTARDLLYYAVTQDAMLIFENLSRGFGRQGKRTFSAERQYTRMEDWLTAKLAYEGLPSKTYLSKTLAQYTSKTCSNCGFTITSADYDRVLEKLKKTATGWMTTINGKELKVEGQITYYNRYKRQNVVKDLSVELDRLSEESVNNDISSWTKGRSGEALSLLKKRFSHRPVQEKFVCLNCGFETHADEQAALNIARSWLFLRSQEYKKYQTNKTTGNTDKRAFVETWQSFYRKKLKEVWKPAV

SEQ ID NO: 45774 - protein, 978 aa, synthetic construct
  REGION 1..978: note = engineered CasX variant
QEIKRINKIRRRLVKDSNTKKAGKTGPMKTLLVRVMTPDLRERLENLRKKPENIPQPISNTSRANLNKLLTDYTEMKKAILHVYWEEFQKDPVGLMSRVAQPASKKIDQNKLKPEMDEKGNLTTAGFACSQCGQPLFVYKLEQVSEKGKAYTNYFGRCNVAEHEKLIKLAQLKPEKDSDEAVTYSLGKFGQRALDFYSIHVTKESTHPVKPLAQIAGNRYASGPVGKALSDACMGTIASFLSKYQDIIIEHQKVVKGNQKRLESLRELAGKENLEYPSVTLPPQPHTKEGVDAYNEVIARVRMWVNLNLWQKLKLSRDDAKPLLRLKGFPSFPLVERQANEVDWWDMVCNVKKLINEKKEDGKVFWQNLAGYKRQEALRPYLSSEEDRKKGKKFARYQLGDLLWHLEKKHGEDWGKVYDEAWERIDKKVEGLSKHIKLEEERRSEDAQSKAALTDWLRAKASFVIEGLKEADKDEFCRCELKLQKWYGDLRGKPFAIEAENSILDISGFSKQYNCAFIWQKDGVKKLNLYLIINYFKGGKLRFKKIKPEAFEANRFYTVINKKSGEIVPMEVNFNFDDPNLIILPLAFGKRQGREFIWNDLLSLETGSLKLANGRVIEKTLYNRRTRQDEPALFVALTFERREVLDSSNIKPMNLIGVDRGENIPAVIALTDPEGCPLSRFKDSLGNPTHILRIGESYKEKQRTIQAKKEVEQRRAGGYSRKYASKAKNLADDMVRNTARDLLYYAVTQDAMLIFENLSRGFGRQGKRTFSAERQYTRMEDWLTAKLAYEGLPSKTYLSKTLAQYTSKTCSNCGFTITSADYDRVLEKLKKTATGWMTTINGKELKVEGQITYYNRYKRQNVVKDLSVELDRLSEESVNNDISSWTKGRSGEALSLLKKRFSHRPVQEKFVCLNCGFETHADEQAALNIARSWLFLRSQEYKKYQTNKTTGNTDKRAFVETWQSFYRKKLKEVWKPAV

SEQ ID NO: 45775 - protein, 977 aa, synthetic construct
  REGION 1..977: note = engineered CasX variant
QEIKRINKIRRRLVKDSNTKKAGKTGPMKTLLVRVMTPDLRERLENLRKKPENIPQPISNTSRANLNKLLTDYTEMKKAILHVYWEEFQKDPVGLMSRVAQPASKKIDQNKLKPEMDEKGNLTTAGFACSQCGQPLFVYKLEQVSEKGKAYTNYFGRCNVAEHEKLILLAQLKPEKDSDEAVTYSLGKFGQRALDFYSIHVTKESTHPVKPLAQIAGNRYASPVGKALSDACMGTIASFLSKYQDIIIEHQKVVKGNQKRLESLRELAGKENLEYPSVTLPPQPHTKEGVDAYNEVIARVRMWVNLNLWQKLKLSRDDAKPLLRLKGFPSFPLVERQANEVDWWDMVCNVKKLINEKKEDGKVFWQNLAGYKRQEALRPYLSSEEDRKKGKKFARYQLGDLLWHLEKKHGEDWGKVYDEAWERIDKKVEGLSKHIKLEEERRSEDAQSKAALTDWLRAKASFVIEGLKEADKDEFCRCELKLQKWYGDLRGKPFAIEAENSILDISGFSKQYNCAFIWQKDGVKKLNLYLIINYFKGGKLRFKKIKPEAFEANRFYTVINKKSGEIVPMEVNFNFDDPNLIILPLAFGKRQGREFIWNDLLSLETGSLKLANGRVIEKTLYNRRTRQDEPALFVALTFERREVLDSSNIKPMNLIGVDRGENIPAVIALTDPEGCPLSRFKDSLGNPTHILRIGESYKEKQRTIQAKKEVEQRRAGGYSRKYASKAKNLADDMVRNTARDLLYYAVTQDAMLIFENLSRGFGRQGKRTFSAERQYTRMEDWLTAKLAYEGLPSKTYLSKTLAQYTSKTCSNCGFTITSADYDRVLEKLKKTATGWMTTINGKELKVEGQITYYNRYKRQNVVKDLSVELDRLSEESVNNDISSWTKGRSGEALSLLKKRFSHRPVQEKFVCLNCGFETHADEQAALNIARSWLFLRSQEYKKYQTNKTTGNTDKRAFVETWQSFYRKKLKEVWKPAV

SEQ ID NO: 45776 - protein, 978 aa, synthetic construct
  REGION 1..978: note = engineered CasX variant
QEIKRINKIRRRLVKDSNTKKAGKTGPMKTLLVRVMTPDLRERLENLRKKPENIPQPISNTSRANLNKLLTDYTEMKKAILHVYWEEFQKDPVGLMSRVAQPASKKIDQNKLKPEMDEKGNLTTAGFACSQCGQPLFVYKLEQVSEKGKAYTNYFGRCNVAEHEKLILLAQLKPEKDSDEAVTYSLGKFGQRALDFYSIHVTKESTHPVKPLAQIAGNRYASYPVGKALSDACMGTIASFLSKYQDIIIEHQKVVKGNQKRLESLRELAGKENLEYPSVTLPPQPHTKEGVDAYNEVIARVRMWVNLNLWQKLKLSRDDAKPLLRLKGFPSFPLVERQANEVDWWDMVCNVKKLINEKKEDGKVFWQNLAGYKRQEALRPYLSSEEDRKKGKKFARYQLGDLLLHLYKKHGEDWGKVYDEAWERIDKKVEGLSKHIKLEEERRSEDAQSKAALTDWLRAKASFVIEGLKEADKDEFCRCELKLQKWYGDLRGKPFAIEAENSILDISGFSKQYNCAFIWQKDGVKKLNLYLIINYFKGGKLRFKKIKPEAFEANRFYTVINKKSGEIVPMEVNFNFDDPNLIILPLAFGKRQGREFIWNDLLSLETGSLKLANGRVIEKTLYNRRTRQDEPALFVALTFERREVLDSSNIKPMNLIGVDRGENIPAVIALTDPEGCPLSRFKDSLGNPTHILRIGESYKEKQRTIQAKKEVEQRRAGGYSRKYASKAKNLADDMVRNTARDLLYYAVTQDAMLIFENLSRGFGRQGKRTFSAERQYTRMEDWLTAKLAYEGLPSKTYLSKTLAQYTSKTCSNCGFTITSADYDRVLEKLKKTATGWMTTINGKELKVEGQITYYNRYKRQNVVKDLSVELDRLSEESVNNDISSWTKGRSGEALSLLKKRFSHRPVQEKFVCLNCGFETHADEQAALNIARSWLFLRSQEYKKYQTNKTTGNTDKRAFVETWQSFYRKKLKEVWKPAV

SEQ ID NO: 45777 - protein, 978 aa, synthetic construct
  REGION 1..978: note = engineered CasX variant
QEIKRINKIRRRLVKDSNTKKAGKTGPMKTLLVRVMTPDLRERLENLRKKPENIPQPISNTSRANLNKLLTDYTEMKKAILHVYWEEFQKDPVGLMSRVAQPASKKIDQNKLKPEMDEKGNLTTAGFACSQCGQPLFVYKLEQVSEKGKAYTNYFGRCNVAEHEKLILLAQLKPEKDSDEAVTYSLGKFGQRALDFYSIHVTKESTHPVKPLAQIAGNRYASHPVGKALSDACMGTIASFLSKYQDIIIEHQKVVKGNQKRLESLRELAGKENLEYPSVTLPPQPHTKEGVDAYNEVIARVRMWVNLNLWQKLKLSRDDAKPLLRLKGFPSFPLVERQANEVDWWDMVCNVKKLINEKKEDGKVFWQNLAGYKRQEALRPYLSSEEDRKKGKKFARYQLGDLLLHLYKKHGEDWGKVYDEAWERIDKKVEGLSKHIKLEEERRSEDAQSKAALTDWLRAKASFVIEGLKEADKDEFCRCELKLQKWYGDLRGKPFAIEAENSILDISGFSKQYNCAFIWQKDGVKKLNLYLIINYFKGGKLRFKKIKPEAFEANRFYTVINKKSGEIVPMEVNFNFDDPNLIILPLAFGKRQGREFIWNDLLSLETGSLKLANGRVIEKTLYNRRTRQDEPALFVALTFERREVLDSSNIKPMNLIGVDRGENIPAVIALTDPEGCPLSRFKDSLGNPTHILRIGESYKEKQRTIQAKKEVEQRRAGGYSRKYASKAKNLADDMVRNTARDLLYYAVTQDAMLIFENLSRGFGRQGKRTFSAERQYTRMEDWLTAKLAYEGLPSKTYLSKTLAQYTSKTCSNCGFTITSADYDRVLEKLKKTATGWMTTINGKELKVEGQITYYNRYKRQNVVKDLSVELDRLSEESVNNDISSWTKGRSGEALSLLKKRFSHRPVQEKFVCLNCGFETHADEQAALNIARSWLFLRSQEYKKYQTNKTTGNTDKRAFVETWQSFYRKKLKEVWKPAV

SEQ ID NO: 45778 - protein, 978 aa, synthetic construct
  REGION 1..978: note = engineered CasX variant
QEIKRINKIRRRLVKDSNTKKAGKTGPMKTLLVRVMTPDLRERLENLRKKPENIPQPISNTSRANLNKLLTDYTEMKKAILHVYWEEFQKDPVGLMSRVAQPASKKIDQNKLKPEMDEKGNLTTAGFACSQCGQPLFVYKLEQVSEKGKAYTNYFGRCNVAEHEKLILLAQLKPEKDSDEAVTYSLGKFGQRALDFYSIHVTKESTHPVKPLAQIAGNRYASSPVGKALSDACMGTIASFLSKYQDIIIEHQKVVKGNQKRLESLRELAGKENLEYPSVTLPPQPHTKEGVDAYNEVIARVRMWVNLNLWQKLKLSRDDAKPLLRLKGFPSFPLVERQANEVDWWDMVCNVKKLINEKKEDGKVFWQNLAGYKRQEALRPYLSSEEDRKKGKKFARYQLGDLLLHLYKKHGEDWGKVYDEAWERIDKKVEGLSKHIKLEEERRSEDAQSKAALTDWLRAKASFVIEGLKEADKDEFCRCELKLQKWYGDLRGKPFAIEAENSILDISGFSKQYNCAFIWQKDGVKKLNLYLIINYFKGGKLRFKKIKPEAFEANRFYTVINKKSGEIVPMEVNFNFDDPNLIILPLAFGKRQGREFIWNDLLSLETGSLKLANGRVIEKTLYNRRTRQDEPALFVALTFERREVLDSSNIKPMNLIGVDRGENIPAVIALTDPEGCPLSRFKDSLGNPTHILRIGESYKEKQRTIQAKKEVEQRRAGGYSRKYASKAKNLADDMVRNTARDLLYYAVTQDAMLIFENLSRGFGRQGKRTFSAERQYTRMEDWLTAKLAYEGLPSKTYLSKTLAQYTSKTCSNCGFTITSADYDRVLEKLKKTATGWMTTINGKELKVEGQITYYNRYKRQNVVKDLSVELDRLSEESVNNDISSWTKGRSGEALSLLKKRFSHRPVQEKFVCLNCGFETHADEQAALNIARSWLFLRSQEYKKYQTNKTTGNTDKRAFVETWQSFYRKKLKEVWKPAV

SEQ ID NO: 45779 - protein, 978 aa, synthetic construct
  REGION 1..978: note = engineered CasX variant
QEIKRINKIRRRLVKDSNTKKAGKTGPMKTLLVRVMTPDLRERLENLRKKPENIPQPISNTSRANLNKLLTDYTEMKKAILHVYWEEFQKDPVGLMSRVAQPASKKIDQNKLKPEMDEKGNLTTAGFACSQCGQPLFVYKLEQVSEKGKAYTNYFGRCNVAEHEKLILLAQLKPEKDSDEAVTYSLGKFGQRALDFYSIHVTKESTHPVKPLAQIAGNRYASTPVGKALSDACMGTIASFLSKYQDIIIEHQKVVKGNQKRLESLRELAGKENLEYPSVTLPPQPHTKEGVDAYNEVIARVRMWVNLNLWQKLKLSRDDAKPLLRLKGFPSFPLVERQANEVDWWDMVCNVKKLINEKKEDGKVFWQNLAGYKRQEALRPYLSSEEDRKKGKKFARYQLGDLLLHLYKKHGEDWGKVYDEAWERIDKKVEGLSKHIKLEEERRSEDAQSKAALTDWLRAKASFVIEGLKEADKDEFCRCELKLQKWYGDLRGKPFAIEAENSILDISGFSKQYNCAFIWQKDGVKKLNLYLIINYFKGGKLRFKKIKPEAFEANRFYTVINKKSGEIVPMEVNFNFDDPNLIILPLAFGKRQGREFIWNDLLSLETGSLKLANGRVIEKTLYNRRTRQDEPALFVALTFERREVLDSSNIKPMNLIGVDRGENIPAVIALTDPEGCPLSRFKDSLGNPTHILRIGESYKEKQRTIQAKKEVEQRRAGGYSRKYASKAKNLADDMVRNTARDLLYYAVTQDAMLIFENLSRGFGRQGKRTFSAERQYTRMEDWLTAKLAYEGLPSKTYLSKTLAQYTSKTCSNCGFTITSADYDRVLEKLKKTATGWMTTINGKELKVEGQITYYNRYKRQNVVKDLSVELDRLSEESVNNDISSWTKGRSGEALSLLKKRFSHRPVQEKFVCLNCGFETHADEQAALNIARSWLFLRSQEYKKYQTNKTTGNTDKRAFVETWQSFYRKKLKEVWKPAV

SEQ ID NO: 45780 - protein, 978 aa, synthetic construct
  REGION 1..978: note = engineered CasX variant
QEIKRINKIRRRLVKDSNTKKAGKTGPMKTLLVRVMTPDLRERLENLRKKPENIPQPISNTSRANLNKLLTDYTEMKKAILHVYWEEFQKDPVGLMSRVAQPASKKIDQNKLKPEMDEKGNLTTAGFACSQCGQPLFVYKLEQVSEKGKAYTNYFGRCNVAEHEKLILLAQLKPEKDSDEAVTYSLGKFGQRALDFYSIHVTKESTHPVKPLAQIAGNRYASAPVGKALSDACMGTIASFLSKYQDIIIEHQKVVKGNQKRLESLRELAGKENLEYPSVTLPPQPHTKEGVDAYNEVIARVRMWVNLNLWQKLKLSRDDAKPLLRLKGFPSFPLVERQANEVDWWDMVCNVKKLINEKKEDGKVFWQNLAGYKRQEALRPYLSSEEDRKKGKKFARYQLGDLLLHLYKKHGEDWGKVYDEAWERIDKKVEGLSKHIKLEEERRSEDAQSKAALTDWLRAKASFVIEGLKEADKDEFCRCELKLQKWYGDLRGKPFAIEAENSILDISGFSKQYNCAFIWQKDGVKKLNLYLIINYFKGGKLRFKKIKPEAFEANRFYTVINKKSGEIVPMEVNFNFDDPNLIILPLAFGKRQGREFIWNDLLSLETGSLKLANGRVIEKTLYNRRTRQDEPALFVALTFERREVLDSSNIKPMNLIGVDRGENIPAVIALTDPEGCPLSRFKDSLGNPTHILRIGESYKEKQRTIQAKKEVEQRRAGGYSRKYASKAKNLADDMVRNTARDLLYYAVTQDAMLIFENLSRGFGRQGKRTFSAERQYTRMEDWLTAKLAYEGLPSKTYLSKTLAQYTSKTCSNCGFTITSADYDRVLEKLKKTATGWMTTINGKELKVEGQITYYNRYKRQNVVKDLSVELDRLSEESVNNDISSWTKGRSGEALSLLKKRFSHRPVQEKFVCLNCGFETHADEQAALNIARSWLFLRSQEYKKYQTNKTTGNTDKRAFVETWQSFYRKKLKEVWKPAV

SEQ ID NO: 45781 - protein, 978 aa, synthetic construct
  REGION 1..978: note = engineered CasX variant
QEIKRINKIRRRLVKDSNTKKAGKTGPMKTLLVRVMTPDLRERLENLRKKPENIPQPISNTSRANLNKLLTDYTEMKKAILHVYWEEFQKDPVGLMSRVAQPASKKIDQNKLKPEMDEKGNLTTAGFACSQCGQPLFVYKLEQVSEKGKAYTNYFGRCNVAEHEKLILLAQLKPEKDSDEAVTYSLGKFGQRALDFYSIHVTKESTHPVKPLAQIAGNRYASVPVGKALSDACMGTIASFLSKYQDIIIEHQKVVKGNQKRLESLRELAGKENLEYPSVTLPPQPHTKEGVDAYNEVIARVRMWVNLNLWQKLKLSRDDAKPLLRLKGFPSFPLVERQANEVDWWDMVCNVKKLINEKKEDGKVFWQNLAGYKRQEALRPYLSSEEDRKKGKKFARYQLGDLLLHLYKKHGEDWGKVYDEAWERIDKKVEGLSKHIKLEEERRSEDAQSKAALTDWLRAKASFVIEGLKEADKDEFCRCELKLQKWYGDLRGKPFAIEAENSILDISGFSKQYNCAFIWQKDGVKKLNLYLIINYFKGGKLRFKKIKPEAFEANRFYTVINKKSGEIVPMEVNFNFDDPNLIILPLAFGKRQGREFIWNDLLSLETGSLKLANGRVIEKTLYNRRTRQDEPALFVALTFERREVLDSSNIKPMNLIGVDRGENIPAVIALTDPEGCPLSRFKDSLGNPTHILRIGESYKEKQRTIQAKKEVEQRRAGGYSRKYASKAKNLADDMVRNTARDLLYYAVTQDAMLIFENLSRGFGRQGKRTFSAERQYTRMEDWLTAKLAYEGLPSKTYLSKTLAQYTSKTCSNCGFTITSADYDRVLEKLKKTATGWMTTINGKELKVEGQITYYNRYKRQNVVKDLSVELDRLSEESVNNDISSWTKGRSGEALSLLKKRFSHRPVQEKFVCLNCGFETHADEQAALNIARSWLFLRSQEYKKYQTNKTTGNTDKRAFVETWQSFYRKKLKEVWKPAV

SEQ ID NO: 45782 - protein, 978 aa, synthetic construct
  REGION 1..978: note = engineered CasX variant
QEIKRINKIRRRLVKDSNTKKAGKTGPMKTLLVRVMTPDLRERLENLRKKPENIPQPISNTSRANLNKLLTDYTEMKKAILHVYWEEFQKDPVGLMSRVAQPASKKIDQNKLKPEMDEKGNLTTAGFACSQCGQPLFVYKLEQVSEKGKAYTNYFGRCNVAEHEKLIKLAQLKPEKDSDEAVTYSLGKFGQRALDFYSIHVTKESTHPVKPLAQIAGNRYASGPVGKALSDACMGTIASFLSKYQDIIIEHQKVVKGNQKRLESLRELAGKENLEYPSVTLPPQPHTKEGVDAYNEVIARVRMWVNLNLWQKLKLSRDDAKPLLRLKGFPSFPLVERQANEVDWWDMVCNVKKLINEKKEDGKVFWQNLAGYKRQEALRPYLSSEEDRKKGKKFARYQLGDLLLHLYKKHGEDWGKVYDEAWERIDKKVEGLSKHIKLEEERRSEDAQSKAALTDWLRAKASFVIEGLKEADKDEFCRCELKLQKWYGDLRGKPFAIEAENSILDISGFSKQYNCAFIWQKDGVKKLNLYLIINYFKGGKLRFKKIKPEAFEANRFYTVINKKSGEIVPMEVNFNFDDPNLIILPLAFGKRQGREFIWNDLLSLETGSLKLANGRVIEKTLYNRRTRQDEPALFVALTFERREVLDSSNIKPMNLIGVDRGENIPAVIALTDPEGCPLSRFKDSLGNPTHILRIGESYKEKQRTIQAKKEVEQRRAGGYSRKYASKAKNLADDMVRNTARDLLYYAVTQDAMLIFENLSRGFGRQGKRTFSAERQYTRMEDWLTAKLAYEGLPSKTYLSKTLAQYTSKTCSNCGFTITSADYDRVLEKLKKTATGWMTTINGKELKVEGQITYYNRYKRQNVVKDLSVELDRLSEESVNNDISSWTKGRSGEALSLLKKRFSHRPVQEKFVCLNCGFETHADEQAALNIARSWLFLRSQEYKKYQTNKTTGNTDKRAFVETWQSFYRKKLKEVWKPAV

SEQ ID NO: 45783 - protein, 977 aa, synthetic construct
  REGION 1..977: note = engineered CasX variant
QEIKRINKIRRRLVKDSNTKKAGKTGPMKTLLVRVMTPDLRERLENLRKKPENIPQPISNTSRANLNKLLTDYTEMKKAILHVYWEEFQKDPVGLMSRVAQPASKKIDQNKLKPEMDEKGNLTTAGFACSQCGQPLFVYKLEQVSEKGKAYTNYFGRCNVAEHEKLILLAQLKPEKDSDEAVTYSLGKFGQRALDFYSIHVTKESTHPVKPLAQIAGNRYASPVGKALSDACMGTIASFLSKYQDIIIEHQKVVKGNQKRLESLRELAGKENLEYPSVTLPPQPHTKEGVDAYNEVIARVRMWVNLNLWQKLKLSRDDAKPLLRLKGFPSFPLVERQANEVDWWDMVCNVKKLINEKKEDGKVFWQNLAGYKRQEALRPYLSSEEDRKKGKKFARYQLGDLLLHLYKKHGEDWGKVYDEAWERIDKKVEGLSKHIKLEEERRSEDAQSKAALTDWLRAKASFVIEGLKEADKDEFCRCELKLQKWYGDLRGKPFAIEAENSILDISGFSKQYNCAFIWQKDGVKKLNLYLIINYFKGGKLRFKKIKPEAFEANRFYTVINKKSGEIVPMEVNFNFDDPNLIILPLAFGKRQGREFIWNDLLSLETGSLKLANGRVIEKTLYNRRTRQDEPALFVALTFERREVLDSSNIKPMNLIGVDRGENIPAVIALTDPEGCPLSRFKDSLGNPTHILRIGESYKEKQRTIQAKKEVEQRRAGGYSRKYASKAKNLADDMVRNTARDLLYYAVTQDAMLIFENLSRGFGRQGKRTFSAERQYTRMEDWLTAKLAYEGLPSKTYLSKTLAQYTSKTCSNCGFTITSADYDRVLEKLKKTATGWMTTINGKELKVEGQITYYNRYKRQNVVKDLSVELDRLSEESVNNDISSWTKGRSGEALSLLKKRFSHRPVQEKFVCLNCGFETHADEQAALNIARSWLFLRSQEYKKYQTNKTTGNTDKRAFVETWQSFYRKKLKEVWKPAV

SEQ ID NO: 45784 - protein, 978 aa, synthetic construct
  REGION 1..978: note = engineered CasX variant
QEIKRINKIRRRLVKDSNTKKAGKTGPMKTLLVRVMTPDLRERLENLRKKPENIPQPISNTSRANLNKLLTDYTEMKKAILHVYWEEFQKDPVGLMSRVAQPASKKIDQNKLKPEMDEKGNLTTAGFACSQCGQPLFVYKLEQVSEKGKAYTNYFGRCNVAEHEKLILLAQLKPEKDSDEAVTYSLGKFGQRALDFYSIHVTKESTHPVKPLAQIAGNRYASYPVGKALSDACMGTIASFLSKYQDIIIEHQKVVKGNQKRLESLRELAGKENLEYPSVTLPPQPHTKEGVDAYNEVIARVRMWVNLNLWQKLKLSRDDAKPLLRLKGFPSFPLVERQANEVDWWDMVCNVKKLINEKKEDGKVFWQNLAGYKRQEALRPYLSSEEDRKKGKKFARYQLGDLLLHLEKKHPEDWGKVYDEAWERIDKKVEGLSKHIKLEEERRSEDAQSKAALTDWLRAKASFVIEGLKEADKDEFCRCELKLQKWYGDLRGKPFAIEAENSILDISGFSKQYNCAFIWQKDGVKKLNLYLIINYFKGGKLRFKKIKPEAFEANRFYTVINKKSGEIVPMEVNFNFDDPNLIILPLAFGKRQGREFIWNDLLSLETGSLKLANGRVIEKTLYNRRTRQDEPALFVALTFERREVLDSSNIKPMNLIGVDRGENIPAVIALTDPEGCPLSRFKDSLGNPTHILRIGESYKEKQRTIQAKKEVEQRRAGGYSRKYASKAKNLADDMVRNTARDLLYYAVTQDAMLIFENLSRGFGRQGKRTFSAERQYTRMEDWLTAKLAYEGLPSKTYLSKTLAQYTSKTCSNCGFTITSADYDRVLEKLKKTATGWMTTINGKELKVEGQITYYNRYKRQNVVKDLSVELDRLSEESVNNDISSWTKGRSGEALSLLKKRFSHRPVQEKFVCLNCGFETHADEQAALNIARSWLFLRSQEYKKYQTNKTTGNTDKRAFVETWQSFYRKKLKEVWKPAV

SEQ ID NO: 45785 - protein, 978 aa, synthetic construct
  REGION 1..978: note = engineered CasX variant
QEIKRINKIRRRLVKDSNTKKAGKTGPMKTLLVRVMTPDLRERLENLRKKPENIPQPISNTSRANLNKLLTDYTEMKKAILHVYWEEFQKDPVGLMSRVAQPASKKIDQNKLKPEMDEKGNLTTAGFACSQCGQPLFVYKLEQVSEKGKAYTNYFGRCNVAEHEKLILLAQLKPEKDSDEAVTYSLGKFGQRALDFYSIHVTKESTHPVKPLAQIAGNRYASHPVGKALSDACMGTIASFLSKYQDIIIEHQKVVKGNQKRLESLRELAGKENLEYPSVTLPPQPHTKEGVDAYNEVIARVRMWVNLNLWQKLKLSRDDAKPLLRLKGFPSFPLVERQANEVDWWDMVCNVKKLINEKKEDGKVFWQNLAGYKRQEALRPYLSSEEDRKKGKKFARYQLGDLLLHLEKKHPEDWGKVYDEAWERIDKKVEGLSKHIKLEEERRSEDAQSKAALTDWLRAKASFVIEGLKEADKDEFCRCELKLQKWYGDLRGKPFAIEAENSILDISGFSKQYNCAFIWQKDGVKKLNLYLIINYFKGGKLRFKKIKPEAFEANRFYTVINKKSGEIVPMEVNFNFDDPNLIILPLAFGKRQGREFIWNDLLSLETGSLKLANGRVIEKTLYNRRTRQDEPALFVALTFERREVLDSSNIKPMNLIGVDRGENIPAVIALTDPEGCPLSRFKDSLGNPTHILRIGESYKEKQRTIQAKKEVEQRRAGGYSRKYASKAKNLADDMVRNTARDLLYYAVTQDAMLIFENLSRGFGRQGKRTFSAERQYTRMEDWLTAKLAYEGLPSKTYLSKTLAQYTSKTCSNCGFTITSADYDRVLEKLKKTATGWMTTINGKELKVEGQITYYNRYKRQNVVKDLSVELDRLSEESVNNDISSWTKGRSGEALSLLKKRFSHRPVQEKFVCLNCGFETHADEQAALNIARSWLFLRSQEYKKYQTNKTTGNTDKRAFVETWQSFYRKKLKEVWKPAV

SEQ ID NO: 45786 - protein, 978 aa, synthetic construct
  REGION 1..978: note = engineered CasX variant
QEIKRINKIRRRLVKDSNTKKAGKTGPMKTLLVRVMTPDLRERLENLRKKPENIPQPISNTSRANLNKLLTDYTEMKKAILHVYWEEFQKDPVGLMSRVAQPASKKIDQNKLKPEMDEKGNLTTAGFACSQCGQPLFVYKLEQVSEKGKAYTNYFGRCNVAEHEKLILLAQLKPEKDSDEAVTYSLGKFGQRALDFYSIHVTKESTHPVKPLAQIAGNRYASSPVGKALSDACMGTIASFLSKYQDIIIEHQKVVKGNQKRLESLRELAGKENLEYPSVTLPPQPHTKEGVDAYNEVIARVRMWVNLNLWQKLKLSRDDAKPLLRLKGFPSFPLVERQANEVDWWDMVCNVKKLINEKKEDGKVFWQNLAGYKRQEALRPYLSSEEDRKKGKKFARYQLGDLLLHLEKKHPEDWGKVYDEAWERIDKKVEGLSKHIKLEEERRSEDAQSKAALTDWLRAKASFVIEGLKEADKDEFCRCELKLQKWYGDLRGKPFAIEAENSILDISGFSKQYNCAFIWQKDGVKKLNLYLIINYFKGGKLRFKKIKPEAFEANRFYTVINKKSGEIVPMEVNFNFDDPNLIILPLAFGKRQGREFIWNDLLSLETGSLKLANGRVIEKTLYNRRTRQDEPALFVALTFERREVLDSSNIKPMNLIGVDRGENIPAVIALTDPEGCPLSRFKDSLGNPTHILRIGESYKEKQRTIQAKKEVEQRRAGGYSRKYASKAKNLADDMVRNTARDLLYYAVTQDAMLIFENLSRGFGRQGKRTFSAERQYTRMEDWLTAKLAYEGLPSKTYLSKTLAQYTSKTCSNCGFTITSADYDRVLEKLKKTATGWMTTINGKELKVEGQITYYNRYKRQNVVKDLSVELDRLSEESVNNDISSWTKGRSGEALSLLKKRFSHRPVQEKFVCLNCGFETHADEQAALNIARSWLFLRSQEYKKYQTNKTTGNTDKRAFVETWQSFYRKKLKEVWKPAV

SEQ ID NO: 45787 - protein, 978 aa, synthetic construct
  REGION 1..978: note = engineered CasX variant
QEIKRINKIRRRLVKDSNTKKAGKTGPMKTLLVRVMTPDLRERLENLRKKPENIPQPISNTSRANLNKLLTDYTEMKKAILHVYWEEFQKDPVGLMSRVAQPASKKIDQNKLKPEMDEKGNLTTAGFACSQCGQPLFVYKLEQVSEKGKAYTNYFGRCNVAEHEKLILLAQLKPEKDSDEAVTYSLGKFGQRALDFYSIHVTKESTHPVKPLAQIAGNRYASTPVGKALSDACMGTIASFLSKYQDIIIEHQKVVKGNQKRLESLRELAGKENLEYPSVTLPPQPHTKEGVDAYNEVIARVRMWVNLNLWQKLKLSRDDAKPLLRLKGFPSFPLVERQANEVDWWDMVCNVKKLINEKKEDGKVFWQNLAGYKRQEALRPYLSSEEDRKKGKKFARYQLGDLLLHLEKKHPEDWGKVYDEAWERIDKKVEGLSKHIKLEEERRSEDAQSKAALTDWLRAKASFVIEGLKEADKDEFCRCELKLQKWYGDLRGKPFAIEAENSILDISGFSKQYNCAFIWQKDGVKKLNLYLIINYFKGGKLRFKKIKPEAFEANRFYTVINKKSGEIVPMEVNFNFDDPNLIILPLAFGKRQGREFIWNDLLSLETGSLKLANGRVIEKTLYNRRTRQDEPALFVALTFERREVLDSSNIKPMNLIGVDRGENIPAVIALTDPEGCPLSRFKDSLGNPTHILRIGESYKEKQRTIQAKKEVEQRRAGGYSRKYASKAKNLADDMVRNTARDLLYYAVTQDAMLIFENLSRGFGRQGKRTFSAERQYTRMEDWLTAKLAYEGLPSKTYLSKTLAQYTSKTCSNCGFTITSADYDRVLEKLKKTATGWMTTINGKELKVEGQITYYNRYKRQNVVKDLSVELDRLSEESVNNDISSWTKGRSGEALSLLKKRFSHRPVQEKFVCLNCGFETHADEQAALNIARSWLFLRSQEYKKYQTNKTTGNTDKRAFVETWQSFYRKKLKEVWKPAV

SEQ ID NO: 45788 - protein, 978 aa, synthetic construct
  REGION 1..978: note = engineered CasX variant
QEIKRINKIRRRLVKDSNTKKAGKTGPMKTLLVRVMTPDLRERLENLRKKPENIPQPISNTSRANLNKLLTDYTEMKKAILHVYWEEFQKDPVGLMSRVAQPASKKIDQNKLKPEMDEKGNLTTAGFACSQCGQPLFVYKLEQVSEKGKAYTNYFGRCNVAEHEKLILLAQLKPEKDSDEAVTYSLGKFGQRALDFYSIHVTKESTHPVKPLAQIAGNRYASAPVGKALSDACMGTIASFLSKYQDIIIEHQKVVKGNQKRLESLRELAGKENLEYPSVTLPPQPHTKEGVDAYNEVIARVRMWVNLNLWQKLKLSRDDAKPLLRLKGFPSFPLVERQANEVDWWDMVCNVKKLINEKKEDGKVFWQNLAGYKRQEALRPYLSSEEDRKKGKKFARYQLGDLLLHLEKKHPEDWGKVYDEAWERIDKKVEGLSKHIKLEEERRSEDAQSKAALTDWLRAKASFVIEGLKEADKDEFCRCELKLQKWYGDLRGKPFAIEAENSILDISGFSKQYNCAFIWQKDGVKKLNLYLIINYFKGGKLRFKKIKPEAFEANRFYTVINKKSGEIVPMEVNFNFDDPNLIILPLAFGKRQGREFIWNDLLSLETGSLKLANGRVIEKTLYNRRTRQDEPALFVALTFERREVLDSSNIKPMNLIGVDRGENIPAVIALTDPEGCPLSRFKDSLGNPTHILRIGESYKEKQRTIQAKKEVEQRRAGGYSRKYASKAKNLADDMVRNTARDLLYYAVTQDAMLIFENLSRGFGRQGKRTFSAERQYTRMEDWLTAKLAYEGLPSKTYLSKTLAQYTSKTCSNCGFTITSADYDRVLEKLKKTATGWMTTINGKELKVEGQITYYNRYKRQNVVKDLSVELDRLSEESVNNDISSWTKGRSGEALSLLKKRFSHRPVQEKFVCLNCGFETHADEQAALNIARSWLFLRSQEYKKYQTNKTTGNTDKRAFVETWQSFYRKKLKEVWKPAV

SEQ ID NO: 45789 - protein, 978 aa, synthetic construct
  REGION 1..978: note = engineered CasX variant
QEIKRINKIRRRLVKDSNTKKAGKTGPMKTLLVRVMTPDLRERLENLRKKPENIPQPISNTSRANLNKLLTDYTEMKKAILHVYWEEFQKDPVGLMSRVAQPASKKIDQNKLKPEMDEKGNLTTAGFACSQCGQPLFVYKLEQVSEKGKAYTNYFGRCNVAEHEKLILLAQLKPEKDSDEAVTYSLGKFGQRALDFYSIHVTKESTHPVKPLAQIAGNRYASVPVGKALSDACMGTIASFLSKYQDIIIEHQKVVKGNQKRLESLRELAGKENLEYPSVTLPPQPHTKEGVDAYNEVIARVRMWVNLNLWQKLKLSRDDAKPLLRLKGFPSFPLVERQANEVDWWDMVCNVKKLINEKKEDGKVFWQNLAGYKRQEALRPYLSSEEDRKKGKKFARYQLGDLLLHLEKKHPEDWGKVYDEAWERIDKKVEGLSKHIKLEEERRSEDAQSKAALTDWLRAKASFVIEGLKEADKDEFCRCELKLQKWYGDLRGKPFAIEAENSILDISGFSKQYNCAFIWQKDGVKKLNLYLIINYFKGGKLRFKKIKPEAFEANRFYTVINKKSGEIVPMEVNFNFDDPNLIILPLAFGKRQGREFIWNDLLSLETGSLKLANGRVIEKTLYNRRTRQDEPALFVALTFERREVLDSSNIKPMNLIGVDRGENIPAVIALTDPEGCPLSRFKDSLGNPTHILRIGESYKEKQRTIQAKKEVEQRRAGGYSRKYASKAKNLADDMVRNTARDLLYYAVTQDAMLIFENLSRGFGRQGKRTFSAERQYTRMEDWLTAKLAYEGLPSKTYLSKTLAQYTSKTCSNCGFTITSADYDRVLEKLKKTATGWMTTINGKELKVEGQITYYNRYKRQNVVKDLSVELDRLSEESVNNDISSWTKGRSGEALSLLKKRFSHRPVQEKFVCLNCGFETHADEQAALNIARSWLFLRSQEYKKYQTNKTTGNTDKRAFVETWQSFYRKKLKEVWKPAV

SEQ ID NO: 45790 - protein, 978 aa, synthetic construct
  REGION 1..978: note = engineered CasX variant
QEIKRINKIRRRLVKDSNTKKAGKTGPMKTLLVRVMTPDLRERLENLRKKPENIPQPISNTSRANLNKLLTDYTEMKKAILHVYWEEFQKDPVGLMSRVAQPASKKIDQNKLKPEMDEKGNLTTAGFACSQCGQPLFVYKLEQVSEKGKAYTNYFGRCNVAEHEKLIKLAQLKPEKDSDEAVTYSLGKFGQRALDFYSIHVTKESTHPVKPLAQIAGNRYASGPVGKALSDACMGTIASFLSKYQDIIIEHQKVVKGNQKRLESLRELAGKENLEYPSVTLPPQPHTKEGVDAYNEVIARVRMWVNLNLWQKLKLSRDDAKPLLRLKGFPSFPLVERQANEVDWWDMVCNVKKLINEKKEDGKVFWQNLAGYKRQEALRPYLSSEEDRKKGKKFARYQLGDLLLHLEKKHPEDWGKVYDEAWERIDKKVEGLSKHIKLEEERRSEDAQSKAALTDWLRAKASFVIEGLKEADKDEFCRCELKLQKWYGDLRGKPFAIEAENSILDISGFSKQYNCAFIWQKDGVKKLNLYLIINYFKGGKLRFKKIKPEAFEANRFYTVINKKSGEIVPMEVNFNFDDPNLIILPLAFGKRQGREFIWNDLLSLETGSLKLANGRVIEKTLYNRRTRQDEPALFVALTFERREVLDSSNIKPMNLIGVDRGENIPAVIALTDPEGCPLSRFKDSLGNPTHILRIGESYKEKQRTIQAKKEVEQRRAGGYSRKYASKAKNLADDMVRNTARDLLYYAVTQDAMLIFENLSRGFGRQGKRTFSAERQYTRMEDWLTAKLAYEGLPSKTYLSKTLAQYTSKTCSNCGFTITSADYDRVLEKLKKTATGWMTTINGKELKVEGQITYYNRYKRQNVVKDLSVELDRLSEESVNNDISSWTKGRSGEALSLLKKRFSHRPVQEKFVCLNCGFETHADEQAALNIARSWLFLRSQEYKKYQTNKTTGNTDKRAFVETWQSFYRKKLKEVWKPAV

SEQ ID NO: 45791 - protein, 977 aa, synthetic construct
  REGION 1..977: note = engineered CasX variant
QEIKRINKIRRRLVKDSNTKKAGKTGPMKTLLVRVMTPDLRERLENLRKKPENIPQPISNTSRANLNKLLTDYTEMKKAILHVYWEEFQKDPVGLMSRVAQPASKKIDQNKLKPEMDEKGNLTTAGFACSQCGQPLFVYKLEQVSEKGKAYTNYFGRCNVAEHEKLILLAQLKPEKDSDEAVTYSLGKFGQRALDFYSIHVTKESTHPVKPLAQIAGNRYASPVGKALSDACMGTIASFLSKYQDIIIEHQKVVKGNQKRLESLRELAGKENLEYPSVTLPPQPHTKEGVDAYNEVIARVRMWVNLNLWQKLKLSRDDAKPLLRLKGFPSFPLVERQANEVDWWDMVCNVKKLINEKKEDGKVFWQNLAGYKRQEALRPYLSSEEDRKKGKKFARYQLGDLLLHLEKKHPEDWGKVYDEAWERIDKKVEGLSKHIKLEEERRSEDAQSKAALTDWLRAKASFVIEGLKEADKDEFCRCELKLQKWYGDLRGKPFAIEAENSILDISGFSKQYNCAFIWQKDGVKKLNLYLIINYFKGGKLRFKKIKPEAFEANRFYTVINKKSGEIVPMEVNFNFDDPNLIILPLAFGKRQGREFIWNDLLSLETGSLKLANGRVIEKTLYNRRTRQDEPALFVALTFERREVLDSSNIKPMNLIGVDRGENIPAVIALTDPEGCPLSRFKDSLGNPTHILRIGESYKEKQRTIQAKKEVEQRRAGGYSRKYASKAKNLADDMVRNTARDLLYYAVTQDAMLIFENLSRGFGRQGKRTFSAERQYTRMEDWLTAKLAYEGLPSKTYLSKTLAQYTSKTCSNCGFTITSADYDRVLEKLKKTATGWMTTINGKELKVEGQITYYNRYKRQNVVKDLSVELDRLSEESVNNDISSWTKGRSGEALSLLKKRFSHRPVQEKFVCLNCGFETHADEQAALNIARSWLFLRSQEYKKYQTNKTTGNTDKRAFVETWQSFYRKKLKEVWKPAV

SEQ ID NO: 45792 - protein, 979 aa, synthetic construct
  REGION 1..979: note = engineered CasX variant
QEIKRINKIRRRLVKDSNTKKAGKTGPMKTLLVRVMTPDLRERLENLRKKPENIPQPISNTSRANLNKLLTDYTEMKKAILHVYWEEFQKDPVGLMSRVAQPASKKIDQNKLKPEMDEKGNLTTAGFACSQCGQPLFVYKLEQVSEKGKAYTNYFGRCNVAEHEKLILLAQLKPEKDSDEAVTYSLGKFGQRALDFYSIHVTKESTHPVKPLAQIAGNRYASYPVGKALSDACMGTIASFLSKYQDIIIEHQKVVKGNQKRLESLRELAGKENLEYPSVTLPPQPHTKEGVDAYNEVIARVRMWVNLNLWQKLKLSRDDAKPLLRLKGFPSFPLVERQANEVDWWDMVCNVKKLINEKKEDGKVFWQNLAGYKRQEALRPYLSSEEDRKKGKKFARYQLGDLLLHLEKKHGERDWGKVYDEAWERIDKKVEGLSKHIKLEEERRSEDAQSKAALTDWLRAKASFVIEGLKEADKDEFCRCELKLQKWYGDLRGKPFAIEAENSILDISGFSKQYNCAFIWQKDGVKKLNLYLIINYFKGGKLRFKKIKPEAFEANRFYTVINKKSGEIVPMEVNFNFDDPNLIILPLAFGKRQGREFIWNDLLSLETGSLKLANGRVIEKTLYNRRTRQDEPALFVALTFERREVLDSSNIKPMNLIGVDRGENIPAVIALTDPEGCPLSRFKDSLGNPTHILRIGESYKEKQRTIQAKKEVEQRRAGGYSRKYASKAKNLADDMVRNTARDLLYYAVTQDAMLIFENLSRGFGRQGKRTFSAERQYTRMEDWLTAKLAYEGLPSKTYLSKTLAQYTSKTCSNCGFTITSADYDRVLEKLKKTATGWMTTINGKELKVEGQITYYNRYKRQNVVKDLSVELDRLSEESVNNDISSWTKGRSGEALSLLKKRFSHRPVQEKFVCLNCGFETHADEQAALNIARSWLFLRSQEYKKYQTNKTTGNTDKRAFVETWQSFYRKKLKEVWKPAV

SEQ ID NO: 45793 - protein, 979 aa, synthetic construct
  REGION 1..979: note = engineered CasX variant
QEIKRINKIRRRLVKDSNTKKAGKTGPMKTLLVRVMTPDLRERLENLRKKPENIPQPISNTSRANLNKLLTDYTEMKKAILHVYWEEFQKDPVGLMSRVAQPASKKIDQNKLKPEMDEKGNLTTAGFACSQCGQPLFVYKLEQVSEKGKAYTNYFGRCNVAEHEKLILLAQLKPEKDSDEAVTYSLGKFGQRALDFYSIHVTKESTHPVKPLAQIAGNRYASHPVGKALSDACMGTIASFLSKYQDIIIEHQKVVKGNQKRLESLRELAGKENLEYPSVTLPPQPHTKEGVDAYNEVIARVRMWVNLNLWQKLKLSRDDAKPLLRLKGFPSFPLVERQANEVDWWDMVCNVKKLINEKKEDGKVFWQNLAGYKRQEALRPYLSSEEDRKKGKKFARYQLGDLLLHLEKKHGERDWGKVYDEAWERIDKKVEGLSKHIKLEEERRSEDAQSKAALTDWLRAKASFVIEGLKEADKDEFCRCELKLQKWYGDLRGKPFAIEAENSILDISGFSKQYNCAFIWQKDGVKKLNLYLIINYFKGGKLRFKKIKPEAFEANRFYTVINKKSGEIVPMEVNFNFDDPNLIILPLAFGKRQGREFIWNDLLSLETGSLKLANGRVIEKTLYNRRTRQDEPALFVALTFERREVLDSSNIKPMNLIGVDRGENIPAVIALTDPEGCPLSRFKDSLGNPTHILRIGESYKEKQRTIQAKKEVEQRRAGGYSRKYASKAKNLADDMVRNTARDLLYYAVTQDAMLIFENLSRGFGRQGKRTFSAERQYTRMEDWLTAKLAYEGLPSKTYLSKTLAQYTSKTCSNCGFTITSADYDRVLEKLKKTATGWMTTINGKELKVEGQITYYNRYKRQNVVKDLSVELDRLSEESVNNDISSWTKGRSGEALSLLKKRFSHRPVQEKFVCLNCGFETHADEQAALNIARSWLFLRSQEYKKYQTNKTTGNTDKRAFVETWQSFYRKKLKEVWKPAV

SEQ ID NO: 45794 - protein, 979 aa, synthetic construct
  REGION 1..979: note = engineered CasX variant
QEIKRINKIRRRLVKDSNTKKAGKTGPMKTLLVRVMTPDLRERLENLRKKPENIPQPISNTSRANLNKLLTDYTEMKKAILHVYWEEFQKDPVGLMSRVAQPASKKIDQNKLKPEMDEKGNLTTAGFACSQCGQPLFVYKLEQVSEKGKAYTNYFGRCNVAEHEKLILLAQLKPEKDSDEAVTYSLGKFGQRALDFYSIHVTKESTHPVKPLAQIAGNRYASSPVGKALSDACMGTIASFLSKYQDIIIEHQKVVKGNQKRLESLRELAGKENLEYPSVTLPPQPHTKEGVDAYNEVIARVRMWVNLNLWQKLKLSRDDAKPLLRLKGFPSFPLVERQANEVDWWDMVCNVKKLINEKKEDGKVFWQNLAGYKRQEALRPYLSSEEDRKKGKKFARYQLGDLLLHLEKKHGERDWGKVYDEAWERIDKKVEGLSKHIKLEEERRSEDAQSKAALTDWLRAKASFVIEGLKEADKDEFCRCELKLQKWYGDLRGKPFAIEAENSILDISGFSKQYNCAFIWQKDGVKKLNLYLIINYFKGGKLRFKKIKPEAFEANRFYTVINKKSGEIVPMEVNFNFDDPNLIILPLAFGKRQGREFIWNDLLSLETGSLKLANGRVIEKTLYNRRTRQDEPALFVALTFERREVLDSSNIKPMNLIGVDRGENIPAVIALTDPEGCPLSRFKDSLGNPTHILRIGESYKEKQRTIQAKKEVEQRRAGGYSRKYASKAKNLADDMVRNTARDLLYYAVTQDAMLIFENLSRGFGRQGKRTFSAERQYTRMEDWLTAKLAYEGLPSKTYLSKTLAQYTSKTCSNCGFTITSADYDRVLEKLKKTATGWMTTINGKELKVEGQITYYNRYKRQNVVKDLSVELDRLSEESVNNDISSWTKGRSGEALSLLKKRFSHRPVQEKFVCLNCGFETHADEQAALNIARSWLFLRSQEYKKYQTNKTTGNTDKRAFVETWQSFYRKKLKEVWKPAV

SEQ ID NO: 45795 - protein, 979 aa, synthetic construct
  REGION 1..979: note = engineered CasX variant
QEIKRINKIRRRLVKDSNTKKAGKTGPMKTLLVRVMTPDLRERLENLRKKPENIPQPISNTSRANLNKLLTDYTEMKKAILHVYWEEFQKDPVGLMSRVAQPASKKIDQNKLKPEMDEKGNLTTAGFACSQCGQPLFVYKLEQVSEKGKAYTNYFGRCNVAEHEKLILLAQLKPEKDSDEAVTYSLGKFGQRALDFYSIHVTKESTHPVKPLAQIAGNRYASTPVGKALSDACMGTIASFLSKYQDIIIEHQKVVKGNQKRLESLRELAGKENLEYPSVTLPPQPHTKEGVDAYNEVIARVRMWVNLNLWQKLKLSRDDAKPLLRLKGFPSFPLVERQANEVDWWDMVCNVKKLINEKKEDGKVFWQNLAGYKRQEALRPYLSSEEDRKKGKKFARYQLGDLLLHLEKKHGERDWGKVYDEAWERIDKKVEGLSKHIKLEEERRSEDAQSKAALTDWLRAKASFVIEGLKEADKDEFCRCELKLQKWYGDLRGKPFAIEAENSILDISGFSKQYNCAFIWQKDGVKKLNLYLIINYFKGGKLRFKKIKPEAFEANRFYTVINKKSGEIVPMEVNFNFDDPNLIILPLAFGKRQGREFIWNDLLSLETGSLKLANGRVIEKTLYNRRTRQDEPALFVALTFERREVLDSSNIKPMNLIGVDRGENIPAVIALTDPEGCPLSRFKDSLGNPTHILRIGESYKEKQRTIQAKKEVEQRRAGGYSRKYASKAKNLADDMVRNTARDLLYYAVTQDAMLIFENLSRGFGRQGKRTFSAERQYTRMEDWLTAKLAYEGLPSKTYLSKTLAQYTSKTCSNCGFTITSADYDRVLEKLKKTATGWMTTINGKELKVEGQITYYNRYKRQNVVKDLSVELDRLSEESVNNDISSWTKGRSGEALSLLKKRFSHRPVQEKFVCLNCGFETHADEQAALNIARSWLFLRSQEYKKYQTNKTTGNTDKRAFVETWQSFYRKKLKEVWKPAV

SEQ ID NO: 45796 - protein, 979 aa, synthetic construct
  REGION 1..979: note = engineered CasX variant
QEIKRINKIRRRLVKDSNTKKAGKTGPMKTLLVRVMTPDLRERLENLRKKPENIPQPISNTSRANLNKLLTDYTEMKKAILHVYWEEFQKDPVGLMSRVAQPASKKIDQNKLKPEMDEKGNLTTAGFACSQCGQPLFVYKLEQVSEKGKAYTNYFGRCNVAEHEKLILLAQLKPEKDSDEAVTYSLGKFGQRALDFYSIHVTKESTHPVKPLAQIAGNRYASAPVGKALSDACMGTIASFLSKYQDIIIEHQKVVKGNQKRLESLRELAGKENLEYPSVTLPPQPHTKEGVDAYNEVIARVRMWVNLNLWQKLKLSRDDAKPLLRLKGFPSFPLVERQANEVDWWDMVCNVKKLINEKKEDGKVFWQNLAGYKRQEALRPYLSSEEDRKKGKKFARYQLGDLLLHLEKKHGERDWGKVYDEAWERIDKKVEGLSKHIKLEEERRSEDAQSKAALTDWLRAKASFVIEGLKEADKDEFCRCELKLQKWYGDLRGKPFAIEAENSILDISGFSKQYNCAFIWQKDGVKKLNLYLIINYFKGGKLRFKKIKPEAFEANRFYTVINKKSGEIVPMEVNFNFDDPNLIILPLAFGKRQGREFIWNDLLSLETGSLKLANGRVIEKTLYNRRTRQDEPALFVALTFERREVLDSSNIKPMNLIGVDRGENIPAVIALTDPEGCPLSRFKDSLGNPTHILRIGESYKEKQRTIQAKKEVEQRRAGGYSRKYASKAKNLADDMVRNTARDLLYYAVTQDAMLIFENLSRGFGRQGKRTFSAERQYTRMEDWLTAKLAYEGLPSKTYLSKTLAQYTSKTCSNCGFTITSADYDRVLEKLKKTATGWMTTINGKELKVEGQITYYNRYKRQNVVKDLSVELDRLSEESVNNDISSWTKGRSGEALSLLKKRFSHRPVQEKFVCLNCGFETHADEQAALNIARSWLFLRSQEYKKYQTNKTTGNTDKRAFVETWQSFYRKKLKEVWKPAV

SEQ ID NO: 45797 - protein, 979 aa, synthetic construct
  REGION 1..979: note = engineered CasX variant
QEIKRINKIRRRLVKDSNTKKAGKTGPMKTLLVRVMTPDLRERLENLRKKPENIPQPISNTSRANLNKLLTDYTEMKKAILHVYWEEFQKDPVGLMSRVAQPASKKIDQNKLKPEMDEKGNLTTAGFACSQCGQPLFVYKLEQVSEKGKAYTNYFGRCNVAEHEKLILLAQLKPEKDSDEAVTYSLGKFGQRALDFYSIHVTKESTHPVKPLAQIAGNRYASVPVGKALSDACMGTIASFLSKYQDIIIEHQKVVKGNQKRLESLRELAGKENLEYPSVTLPPQPHTKEGVDAYNEVIARVRMWVNLNLWQKLKLSRDDAKPLLRLKGFPSFPLVERQANEVDWWDMVCNVKKLINEKKEDGKVFWQNLAGYKRQEALRPYLSSEEDRKKGKKFARYQLGDLLLHLEKKHGERDWGKVYDEAWERIDKKVEGLSKHIKLEEERRSEDAQSKAALTDWLRAKASFVIEGLKEADKDEFCRCELKLQKWYGDLRGKPFAIEAENSILDISGFSKQYNCAFIWQKDGVKKLNLYLIINYFKGGKLRFKKIKPEAFEANRFYTVINKKSGEIVPMEVNFNFDDPNLIILPLAFGKRQGREFIWNDLLSLETGSLKLANGRVIEKTLYNRRTRQDEPALFVALTFERREVLDSSNIKPMNLIGVDRGENIPAVIALTDPEGCPLSRFKDSLGNPTHILRIGESYKEKQRTIQAKKEVEQRRAGGYSRKYASKAKNLADDMVRNTARDLLYYAVTQDAMLIFENLSRGFGRQGKRTFSAERQYTRMEDWLTAKLAYEGLPSKTYLSKTLAQYTSKTCSNCGFTITSADYDRVLEKLKKTATGWMTTINGKELKVEGQITYYNRYKRQNVVKDLSVELDRLSEESVNNDISSWTKGRSGEALSLLKKRFSHRPVQEKFVCLNCGFETHADEQAALNIARSWLFLRSQEYKKYQTNKTTGNTDKRAFVETWQSFYRKKLKEVWKPAV

SEQ ID NO: 45798 - protein, 979 aa, synthetic construct
  REGION 1..979: note = engineered CasX variant
QEIKRINKIRRRLVKDSNTKKAGKTGPMKTLLVRVMTPDLRERLENLRKKPENIPQPISNTSRANLNKLLTDYTEMKKAILHVYWEEFQKDPVGLMSRVAQPASKKIDQNKLKPEMDEKGNLTTAGFACSQCGQPLFVYKLEQVSEKGKAYTNYFGRCNVAEHEKLIKLAQLKPEKDSDEAVTYSLGKFGQRALDFYSIHVTKESTHPVKPLAQIAGNRYASGPVGKALSDACMGTIASFLSKYQDIIIEHQKVVKGNQKRLESLRELAGKENLEYPSVTLPPQPHTKEGVDAYNEVIARVRMWVNLNLWQKLKLSRDDAKPLLRLKGFPSFPLVERQANEVDWWDMVCNVKKLINEKKEDGKVFWQNLAGYKRQEALRPYLSSEEDRKKGKKFARYQLGDLLLHLEKKHGERDWGKVYDEAWERIDKKVEGLSKHIKLEEERRSEDAQSKAALTDWLRAKASFVIEGLKEADKDEFCRCELKLQKWYGDLRGKPFAIEAENSILDISGFSKQYNCAFIWQKDGVKKLNLYLIINYFKGGKLRFKKIKPEAFEANRFYTVINKKSGEIVPMEVNFNFDDPNLIILPLAFGKRQGREFIWNDLLSLETGSLKLANGRVIEKTLYNRRTRQDEPALFVALTFERREVLDSSNIKPMNLIGVDRGENIPAVIALTDPEGCPLSRFKDSLGNPTHILRIGESYKEKQRTIQAKKEVEQRRAGGYSRKYASKAKNLADDMVRNTARDLLYYAVTQDAMLIFENLSRGFGRQGKRTFSAERQYTRMEDWLTAKLAYEGLPSKTYLSKTLAQYTSKTCSNCGFTITSADYDRVLEKLKKTATGWMTTINGKELKVEGQITYYNRYKRQNVVKDLSVELDRLSEESVNNDISSWTKGRSGEALSLLKKRFSHRPVQEKFVCLNCGFETHADEQAALNIARSWLFLRSQEYKKYQTNKTTGNTDKRAFVETWQSFYRKKLKEVWKPAV

SEQ ID NO: 45799 - protein, 978 aa, synthetic construct
  REGION 1..978: note = engineered CasX variant
QEIKRINKIRRRLVKDSNTKKAGKTGPMKTLLVRVMTPDLRERLENLRKKPENIPQPISNTSRANLNKLLTDYTEMKKAILHVYWEEFQKDPVGLMSRVAQPASKKIDQNKLKPEMDEKGNLTTAGFACSQCGQPLFVYKLEQVSEKGKAYTNYFGRCNVAEHEKLILLAQLKPEKDSDEAVTYSLGKFGQRALDFYSIHVTKESTHPVKPLAQIAGNRYASPVGKALSDACMGTIASFLSKYQDIIIEHQKVVKGNQKRLESLRELAGKENLEYPSVTLPPQPHTKEGVDAYNEVIARVRMWVNLNLWQKLKLSRDDAKPLLRLKGFPSFPLVERQANEVDWWDMVCNVKKLINEKKEDGKVFWQNLAGYKRQEALRPYLSSEEDRKKGKKFARYQLGDLLLHLEKKHGERDWGKVYDEAWERIDKKVEGLSKHIKLEEERRSEDAQSKAALTDWLRAKASFVIEGLKEADKDEFCRCELKLQKWYGDLRGKPFAIEAENSILDISGFSKQYNCAFIWQKDGVKKLNLYLIINYFKGGKLRFKKIKPEAFEANRFYTVINKKSGEIVPMEVNFNFDDPNLIILPLAFGKRQGREFIWNDLLSLETGSLKLANGRVIEKTLYNRRTRQDEPALFVALTFERREVLDSSNIKPMNLIGVDRGENIPAVIALTDPEGCPLSRFKDSLGNPTHILRIGESYKEKQRTIQAKKEVEQRRAGGYSRKYASKAKNLADDMVRNTARDLLYYAVTQDAMLIFENLSRGFGRQGKRTFSAERQYTRMEDWLTAKLAYEGLPSKTYLSKTLAQYTSKTCSNCGFTITSADYDRVLEKLKKTATGWMTTINGKELKVEGQITYYNRYKRQNVVKDLSVELDRLSEESVNNDISSWTKGRSGEALSLLKKRFSHRPVQEKFVCLNCGFETHADEQAALNIARSWLFLRSQEYKKYQTNKTTGNTDKRAFVETWQSFYRKKLKEVWKPAV

SEQ ID NO: 45800 - protein, 979 aa, synthetic construct
  REGION 1..979: note = engineered CasX variant
QEIKRINKIRRRLVKDSNTKKAGKTGPMKTLLVRVMTPDLRERLENLRKKPENIPQPISNTSRANLNKLLTDYTEMKKAILHVYWEEFQKDPVGLMSRVAQPASKKIDQNKLKPEMDEKGNLTTAGFACSQCGQPLFVYKLEQVSEKGKAYTNYFGRCNVAEHEKLILLAQLKPEKDSDEAVTYSLGKFGQRALDFYSIHVTKESTHPVKPLAQIAGNRYASYPVGKALSDACMGTIASFLSKYQDIIIEHQKVVKGNQKRLESLRELAGKENLEYPSVTLPPQPHTKEGVDAYNEVIARVRMWVNLNLWQKLKLSRDDAKPLLRLKGFPSFPLVERQANEVDWWDMVCNVKKLINEKKEDGKVFWQNLAGYKRQEALRPYLSSEEDRKKGKKFARYQLGDLLLHLEKKHGEYDWGKVYDEAWERIDKKVEGLSKHIKLEEERRSEDAQSKAALTDWLRAKASFVIEGLKEADKDEFCRCELKLQKWYGDLRGKPFAIEAENSILDISGFSKQYNCAFIWQKDGVKKLNLYLIINYFKGGKLRFKKIKPEAFEANRFYTVINKKSGEIVPMEVNFNFDDPNLIILPLAFGKRQGREFIWNDLLSLETGSLKLANGRVIEKTLYNRRTRQDEPALFVALTFERREVLDSSNIKPMNLIGVDRGENIPAVIALTDPEGCPLSRFKDSLGNPTHILRIGESYKEKQRTIQAKKEVEQRRAGGYSRKYASKAKNLADDMVRNTARDLLYYAVTQDAMLIFENLSRGFGRQGKRTFSAERQYTRMEDWLTAKLAYEGLPSKTYLSKTLAQYTSKTCSNCGFTITSADYDRVLEKLKKTATGWMTTINGKELKVEGQITYYNRYKRQNVVKDLSVELDRLSEESVNNDISSWTKGRSGEALSLLKKRFSHRPVQEKFVCLNCGFETHADEQAALNIARSWLFLRSQEYKKYQTNKTTGNTDKRAFVETWQSFYRKKLKEVWKPAV

SEQ ID NO: 45801 - protein, 979 aa, synthetic construct
  REGION 1..979: note = engineered CasX variant
QEIKRINKIRRRLVKDSNTKKAGKTGPMKTLLVRVMTPDLRERLENLRKKPENIPQPISNTSRANLNKLLTDYTEMKKAILHVYWEEFQKDPVGLMSRVAQPASKKIDQNKLKPEMDEKGNLTTAGFACSQCGQPLFVYKLEQVSEKGKAYTNYFGRCNVAEHEKLILLAQLKPEKDSDEAVTYSLGKFGQRALDFYSIHVTKESTHPVKPLAQIAGNRYASHPVGKALSDACMGTIASFLSKYQDIIIEHQKVVKGNQKRLESLRELAGKENLEYPSVTLPPQPHTKEGVDAYNEVIARVRMWVNLNLWQKLKLSRDDAKPLLRLKGFPSFPLVERQANEVDWWDMVCNVKKLINEKKEDGKVFWQNLAGYKRQEALRPYLSSEEDRKKGKKFARYQLGDLLLHLEKKHGEYDWGKVYDEAWERIDKKVEGLSKHIKLEEERRSEDAQSKAALTDWLRAKASFVIEGLKEADKDEFCRCELKLQKWYGDLRGKPFAIEAENSILDISGFSKQYNCAFIWQKDGVKKLNLYLIINYFKGGKLRFKKIKPEAFEANRFYTVINKKSGEIVPMEVNFNFDDPNLIILPLAFGKRQGREFIWNDLLSLETGSLKLANGRVIEKTLYNRRTRQDEPALFVALTFERREVLDSSNIKPMNLIGVDRGENIPAVIALTDPEGCPLSRFKDSLGNPTHILRIGESYKEKQRTIQAKKEVEQRRAGGYSRKYASKAKNLADDMVRNTARDLLYYAVTQDAMLIFENLSRGFGRQGKRTFSAERQYTRMEDWLTAKLAYEGLPSKTYLSKTLAQYTSKTCSNCGFTITSADYDRVLEKLKKTATGWMTTINGKELKVEGQITYYNRYKRQNVVKDLSVELDRLSEESVNNDISSWTKGRSGEALSLLKKRFSHRPVQEKFVCLNCGFETHADEQAALNIARSWLFLRSQEYKKYQTNKTTGNTDKRAFVETWQSFYRKKLKEVWKPAV

SEQ ID NO: 45802 - protein, 979 aa, synthetic construct
  REGION 1..979: note = engineered CasX variant
QEIKRINKIRRRLVKDSNTKKAGKTGPMKTLLVRVMTPDLRERLENLRKKPENIPQPISNTSRANLNKLLTDYTEMKKAILHVYWEEFQKDPVGLMSRVAQPASKKIDQNKLKPEMDEKGNLTTAGFACSQCGQPLFVYKLEQVSEKGKAYTNYFGRCNVAEHEKLILLAQLKPEKDSDEAVTYSLGKFGQRALDFYSIHVTKESTHPVKPLAQIAGNRYASSPVGKALSDACMGTIASFLSKYQDIIIEHQKVVKGNQKRLESLRELAGKENLEYPSVTLPPQPHTKEGVDAYNEVIARVRMWVNLNLWQKLKLSRDDAKPLLRLKGFPSFPLVERQANEVDWWDMVCNVKKLINEKKEDGKVFWQNLAGYKRQEALRPYLSSEEDRKKGKKFARYQLGDLLLHLEKKHGEYDWGKVYDEAWERIDKKVEGLSKHIKLEEERRSEDAQSKAALTDWLRAKASFVIEGLKEADKDEFCRCELKLQKWYGDLRGKPFAIEAENSILDISGFSKQYNCAFIWQKDGVKKLNLYLIINYFKGGKLRFKKIKPEAFEANRFYTVINKKSGEIVPMEVNFNFDDPNLIILPLAFGKRQGREFIWNDLLSLETGSLKLANGRVIEKTLYNRRTRQDEPALFVALTFERREVLDSSNIKPMNLIGVDRGENIPAVIALTDPEGCPLSRFKDSLGNPTHILRIGESYKEKQRTIQAKKEVEQRRAGGYSRKYASKAKNLADDMVRNTARDLLYYAVTQDAMLIFENLSRGFGRQGKRTFSAERQYTRMEDWLTAKLAYEGLPSKTYLSKTLAQYTSKTCSNCGFTITSADYDRVLEKLKKTATGWMTTINGKELKVEGQITYYNRYKRQNVVKDLSVELDRLSEESVNNDISSWTKGRSGEALSLLKKRFSHRPVQEKFVCLNCGFETHADEQAALNIARSWLFLRSQEYKKYQTNKTTGNTDKRAFVETWQSFYRKKLKEVWKPAV

SEQ ID NO: 45803 - protein, 979 aa, synthetic construct
  REGION 1..979: note = engineered CasX variant
QEIKRINKIRRRLVKDSNTKKAGKTGPMKTLLVRVMTPDLRERLENLRKKPENIPQPISNTSRANLNKLLTDYTEMKKAILHVYWEEFQKDPVGLMSRVAQPASKKIDQNKLKPEMDEKGNLTTAGFACSQCGQPLFVYKLEQVSEKGKAYTNYFGRCNVAEHEKLILLAQLKPEKDSDEAVTYSLGKFGQRALDFYSIHVTKESTHPVKPLAQIAGNRYASTPVGKALSDACMGTIASFLSKYQDIIIEHQKVVKGNQKRLESLRELAGKENLEYPSVTLPPQPHTKEGVDAYNEVIARVRMWVNLNLWQKLKLSRDDAKPLLRLKGFPSFPLVERQANEVDWWDMVCNVKKLINEKKEDGKVFWQNLAGYKRQEALRPYLSSEEDRKKGKKFARYQLGDLLLHLEKKHGEYDWGKVYDEAWERIDKKVEGLSKHIKLEEERRSEDAQSKAALTDWLRAKASFVIEGLKEADKDEFCRCELKLQKWYGDLRGKPFAIEAENSILDISGFSKQYNCAFIWQKDGVKKLNLYLIINYFKGGKLRFKKIKPEAFEANRFYTVINKKSGEIVPMEVNFNFDDPNLIILPLAFGKRQGREFIWNDLLSLETGSLKLANGRVIEKTLYNRRTRQDEPALFVALTFERREVLDSSNIKPMNLIGVDRGENIPAVIALTDPEGCPLSRFKDSLGNPTHILRIGESYKEKQRTIQAKKEVEQRRAGGYSRKYASKAKNLADDMVRNTARDLLYYAVTQDAMLIFENLSRGFGRQGKRTFSAERQYTRMEDWLTAKLAYEGLPSKTYLSKTLAQYTSKTCSNCGFTITSADYDRVLEKLKKTATGWMTTINGKELKVEGQITYYNRYKRQNVVKDLSVELDRLSEESVNNDISSWTKGRSGEALSLLKKRFSHRPVQEKFVCLNCGFETHADEQAALNIARSWLFLRSQEYKKYQTNKTTGNTDKRAFVETWQSFYRKKLKEVWKPAV

SEQ ID NO: 45804 - protein, 979 aa, synthetic construct
  REGION 1..979: note = engineered CasX variant
QEIKRINKIRRRLVKDSNTKKAGKTGPMKTLLVRVMTPDLRERLENLRKKPENIPQPISNTSRANLNKLLTDYTEMKKAILHVYWEEFQKDPVGLMSRVAQPASKKIDQNKLKPEMDEKGNLTTAGFACSQCGQPLFVYKLEQVSEKGKAYTNYFGRCNVAEHEKLILLAQLKPEKDSDEAVTYSLGKFGQRALDFYSIHVTKESTHPVKPLAQIAGNRYASAPVGKALSDACMGTIASFLSKYQDIIIEHQKVVKGNQKRLESLRELAGKENLEYPSVTLPPQPHTKEGVDAYNEVIARVRMWVNLNLWQKLKLSRDDAKPLLRLKGFPSFPLVERQANEVDWWDMVCNVKKLINEKKEDGKVFWQNLAGYKRQEALRPYLSSEEDRKKGKKFARYQLGDLLLHLEKKHGEYDWGKVYDEAWERIDKKVEGLSKHIKLEEERRSEDAQSKAALTDWLRAKASFVIEGLKEADKDEFCRCELKLQKWYGDLRGKPFAIEAENSILDISGFSKQYNCAFIWQKDGVKKLNLYLIINYFKGGKLRFKKIKPEAFEANRFYTVINKKSGEIVPMEVNFNFDDPNLIILPLAFGKRQGREFIWNDLLSLETGSLKLANGRVIEKTLYNRRTRQDEPALFVALTFERREVLDSSNIKPMNLIGVDRGENIPAVIALTDPEGCPLSRFKDSLGNPTHILRIGESYKEKQRTIQAKKEVEQRRAGGYSRKYASKAKNLADDMVRNTARDLLYYAVTQDAMLIFENLSRGFGRQGKRTFSAERQYTRMEDWLTAKLAYEGLPSKTYLSKTLAQYTSKTCSNCGFTITSADYDRVLEKLKKTATGWMTTINGKELKVEGQITYYNRYKRQNVVKDLSVELDRLSEESVNNDISSWTKGRSGEALSLLKKRFSHRPVQEKFVCLNCGFETHADEQAALNIARSWLFLRSQEYKKYQTNKTTGNTDKRAFVETWQSFYRKKLKEVWKPAV

SEQ ID NO: 45805 - protein, 979 aa, synthetic construct
  REGION 1..979: note = engineered CasX variant
QEIKRINKIRRRLVKDSNTKKAGKTGPMKTLLVRVMTPDLRERLENLRKKPENIPQPISNTSRANLNKLLTDYTEMKKAILHVYWEEFQKDPVGLMSRVAQPASKKIDQNKLKPEMDEKGNLTTAGFACSQCGQPLFVYKLEQVSEKGKAYTNYFGRCNVAEHEKLILLAQLKPEKDSDEAVTYSLGKFGQRALDFYSIHVTKESTHPVKPLAQIAGNRYASVPVGKALSDACMGTIASFLSKYQDIIIEHQKVVKGNQKRLESLRELAGKENLEYPSVTLPPQPHTKEGVDAYNEVIARVRMWVNLNLWQKLKLSRDDAKPLLRLKGFPSFPLVERQANEVDWWDMVCNVKKLINEKKEDGKVFWQNLAGYKRQEALRPYLSSEEDRKKGKKFARYQLGDLLLHLEKKHGEYDWGKVYDEAWERIDKKVEGLSKHIKLEEERRSEDAQSKAALTDWLRAKASFVIEGLKEADKDEFCRCELKLQKWYGDLRGKPFAIEAENSILDISGFSKQYNCAFIWQKDGVKKLNLYLIINYFKGGKLRFKKIKPEAFEANRFYTVINKKSGEIVPMEVNFNFDDPNLIILPLAFGKRQGREFIWNDLLSLETGSLKLANGRVIEKTLYNRRTRQDEPALFVALTFERREVLDSSNIKPMNLIGVDRGENIPAVIALTDPEGCPLSRFKDSLGNPTHILRIGESYKEKQRTIQAKKEVEQRRAGGYSRKYASKAKNLADDMVRNTARDLLYYAVTQDAMLIFENLSRGFGRQGKRTFSAERQYTRMEDWLTAKLAYEGLPSKTYLSKTLAQYTSKTCSNCGFTITSADYDRVLEKLKKTATGWMTTINGKELKVEGQITYYNRYKRQNVVKDLSVELDRLSEESVNNDISSWTKGRSGEALSLLKKRFSHRPVQEKFVCLNCGFETHADEQAALNIARSWLFLRSQEYKKYQTNKTTGNTDKRAFVETWQSFYRKKLKEVWKPAV

SEQ ID NO: 45806 - protein, 979 aa, synthetic construct
  REGION 1..979: note = engineered CasX variant
QEIKRINKIRRRLVKDSNTKKAGKTGPMKTLLVRVMTPDLRERLENLRKKPENIPQPISNTSRANLNKLLTDYTEMKKAILHVYWEEFQKDPVGLMSRVAQPASKKIDQNKLKPEMDEKGNLTTAGFACSQCGQPLFVYKLEQVSEKGKAYTNYFGRCNVAEHEKLIKLAQLKPEKDSDEAVTYSLGKFGQRALDFYSIHVTKESTHPVKPLAQIAGNRYASGPVGKALSDACMGTIASFLSKYQDIIIEHQKVVKGNQKRLESLRELAGKENLEYPSVTLPPQPHTKEGVDAYNEVIARVRMWVNLNLWQKLKLSRDDAKPLLRLKGFPSFPLVERQANEVDWWDMVCNVKKLINEKKEDGKVFWQNLAGYKRQEALRPYLSSEEDRKKGKKFARYQLGDLLLHLEKKHGEYDWGKVYDEAWERIDKKVEGLSKHIKLEEERRSEDAQSKAALTDWLRAKASFVIEGLKEADKDEFCRCELKLQKWYGDLRGKPFAIEAENSILDISGFSKQYNCAFIWQKDGVKKLNLYLIINYFKGGKLRFKKIKPEAFEANRFYTVINKKSGEIVPMEVNFNFDDPNLIILPLAFGKRQGREFIWNDLLSLETGSLKLANGRVIEKTLYNRRTRQDEPALFVALTFERREVLDSSNIKPMNLIGVDRGENIPAVIALTDPEGCPLSRFKDSLGNPTHILRIGESYKEKQRTIQAKKEVEQRRAGGYSRKYASKAKNLADDMVRNTARDLLYYAVTQDAMLIFENLSRGFGRQGKRTFSAERQYTRMEDWLTAKLAYEGLPSKTYLSKTLAQYTSKTCSNCGFTITSADYDRVLEKLKKTATGWMTTINGKELKVEGQITYYNRYKRQNVVKDLSVELDRLSEESVNNDISSWTKGRSGEALSLLKKRFSHRPVQEKFVCLNCGFETHADEQAALNIARSWLFLRSQEYKKYQTNKTTGNTDKRAFVETWQSFYRKKLKEVWKPAV

SEQ ID NO: 45807 - protein, 978 aa, synthetic construct
  REGION 1..978: note = engineered CasX variant
QEIKRINKIRRRLVKDSNTKKAGKTGPMKTLLVRVMTPDLRERLENLRKKPENIPQPISNTSRANLNKLLTDYTEMKKAILHVYWEEFQKDPVGLMSRVAQPASKKIDQNKLKPEMDEKGNLTTAGFACSQCGQPLFVYKLEQVSEKGKAYTNYFGRCNVAEHEKLILLAQLKPEKDSDEAVTYSLGKFGQRALDFYSIHVTKESTHPVKPLAQIAGNRYASPVGKALSDACMGTIASFLSKYQDIIIEHQKVVKGNQKRLESLRELAGKENLEYPSVTLPPQPHTKEGVDAYNEVIARVRMWVNLNLWQKLKLSRDDAKPLLRLKGFPSFPLVERQANEVDWWDMVCNVKKLINEKKEDGKVFWQNLAGYKRQEALRPYLSSEEDRKKGKKFARYQLGDLLLHLEKKHGEYDWGKVYDEAWERIDKKVEGLSKHIKLEEERRSEDAQSKAALTDWLRAKASFVIEGLKEADKDEFCRCELKLQKWYGDLRGKPFAIEAENSILDISGFSKQYNCAFIWQKDGVKKLNLYLIINYFKGGKLRFKKIKPEAFEANRFYTVINKKSGEIVPMEVNFNFDDPNLIILPLAFGKRQGREFIWNDLLSLETGSLKLANGRVIEKTLYNRRTRQDEPALFVALTFERREVLDSSNIKPMNLIGVDRGENIPAVIALTDPEGCPLSRFKDSLGNPTHILRIGESYKEKQRTIQAKKEVEQRRAGGYSRKYASKAKNLADDMVRNTARDLLYYAVTQDAMLIFENLSRGFGRQGKRTFSAERQYTRMEDWLTAKLAYEGLPSKTYLSKTLAQYTSKTCSNCGFTITSADYDRVLEKLKKTATGWMTTINGKELKVEGQITYYNRYKRQNVVKDLSVELDRLSEESVNNDISSWTKGRSGEALSLLKKRFSHRPVQEKFVCLNCGFETHADEQAALNIARSWLFLRSQEYKKYQTNKTTGNTDKRAFVETWQSFYRKKLKEVWKPAV

SEQ ID NO: 45808 - protein, 978 aa, synthetic construct
  REGION 1..978: note = engineered CasX variant
QEIKRINKIRRRLVKDSNTKKAGKTGPMKTLLVRVMTPDLRERLENLRKKPENIPQPISNTSRANLNKLLTDYTEMKKAILHVYWEEFQKDPVGLMSRVAQPASKKIDQNKLKPEMDEKGNLTTAGFACSQCGQPLFVYKLEQVSEKGKAYTNYFGRCNVAEHEKLILLAQLKPEKDSDEAVTYSLGKFGQRALDFYSIHVTKESTHPVKPLAQIAGNRYASYPVGKALSDACMGTIASFLSKYQDIIIEHQKVVKGNQKRLESLRELAGKENLEYPSVTLPPQPHTKEGVDAYNEVIARVRMWVNLNLWQKLKLSRDDAKPLLRLKGFPSFPLVERQANEVDWWDMVCNVKKLINEKKEDGKVFWQNLAGYKRQEALRPYLSSEEDRKKGKKFARYQLGDLLLHLEKKHGEDWGDVYDEAWERIDKKVEGLSKHIKLEEERRSEDAQSKAALTDWLRAKASFVIEGLKEADKDEFCRCELKLQKWYGDLRGKPFAIEAENSILDISGFSKQYNCAFIWQKDGVKKLNLYLIINYFKGGKLRFKKIKPEAFEANRFYTVINKKSGEIVPMEVNFNFDDPNLIILPLAFGKRQGREFIWNDLLSLETGSLKLANGRVIEKTLYNRRTRQDEPALFVALTFERREVLDSSNIKPMNLIGVDRGENIPAVIALTDPEGCPLSRFKDSLGNPTHILRIGESYKEKQRTIQAKKEVEQRRAGGYSRKYASKAKNLADDMVRNTARDLLYYAVTQDAMLIFENLSRGFGRQGKRTFSAERQYTRMEDWLTAKLAYEGLPSKTYLSKTLAQYTSKTCSNCGFTITSADYDRVLEKLKKTATGWMTTINGKELKVEGQITYYNRYKRQNVVKDLSVELDRLSEESVNNDISSWTKGRSGEALSLLKKRFSHRPVQEKFVCLNCGFETHADEQAALNIARSWLFLRSQEYKKYQTNKTTGNTDKRAFVETWQSFYRKKLKEVWKPAV

SEQ ID NO: 45809 - protein, 978 aa, synthetic construct
  REGION 1..978: note = engineered CasX variant
QEIKRINKIRRRLVKDSNTKKAGKTGPMKTLLVRVMTPDLRERLENLRKKPENIPQPISNTSRANLNKLLTDYTEMKKAILHVYWEEFQKDPVGLMSRVAQPASKKIDQNKLKPEMDEKGNLTTAGFACSQCGQPLFVYKLEQVSEKGKAYTNYFGRCNVAEHEKLILLAQLKPEKDSDEAVTYSLGKFGQRALDFYSIHVTKESTHPVKPLAQIAGNRYASHPVGKALSDACMGTIASFLSKYQDIIIEHQKVVKGNQKRLESLRELAGKENLEYPSVTLPPQPHTKEGVDAYNEVIARVRMWVNLNLWQKLKLSRDDAKPLLRLKGFPSFPLVERQANEVDWWDMVCNVKKLINEKKEDGKVFWQNLAGYKRQEALRPYLSSEEDRKKGKKFARYQLGDLLLHLEKKHGEDWGDVYDEAWERIDKKVEGLSKHIKLEEERRSEDAQSKAALTDWLRAKASFVIEGLKEADKDEFCRCELKLQKWYGDLRGKPFAIEAENSILDISGFSKQYNCAFIWQKDGVKKLNLYLIINYFKGGKLRFKKIKPEAFEANRFYTVINKKSGEIVPMEVNFNFDDPNLIILPLAFGKRQGREFIWNDLLSLETGSLKLANGRVIEKTLYNRRTRQDEPALFVALTFERREVLDSSNIKPMNLIGVDRGENIPAVIALTDPEGCPLSRFKDSLGNPTHILRIGESYKEKQRTIQAKKEVEQRRAGGYSRKYASKAKNLADDMVRNTARDLLYYAVTQDAMLIFENLSRGFGRQGKRTFSAERQYTRMEDWLTAKLAYEGLPSKTYLSKTLAQYTSKTCSNCGFTITSADYDRVLEKLKKTATGWMTTINGKELKVEGQITYYNRYKRQNVVKDLSVELDRLSEESVNNDISSWTKGRSGEALSLLKKRFSHRPVQEKFVCLNCGFETHADEQAALNIARSWLFLRSQEYKKYQTNKTTGNTDKRAFVETWQSFYRKKLKEVWKPAV

SEQ ID NO: 45810 - protein, 978 aa, synthetic construct
  REGION 1..978: note = engineered CasX variant
QEIKRINKIRRRLVKDSNTKKAGKTGPMKTLLVRVMTPDLRERLENLRKKPENIPQPISNTSRANLNKLLTDYTEMKKAILHVYWEEFQKDPVGLMSRVAQPASKKIDQNKLKPEMDEKGNLTTAGFACSQCGQPLFVYKLEQVSEKGKAYTNYFGRCNVAEHEKLILLAQLKPEKDSDEAVTYSLGKFGQRALDFYSIHVTKESTHPVKPLAQIAGNRYASSPVGKALSDACMGTIASFLSKYQDIIIEHQKVVKGNQKRLESLRELAGKENLEYPSVTLPPQPHTKEGVDAYNEVIARVRMWVNLNLWQKLKLSRDDAKPLLRLKGFPSFPLVERQANEVDWWDMVCNVKKLINEKKEDGKVFWQNLAGYKRQEALRPYLSSEEDRKKGKKFARYQLGDLLLHLEKKHGEDWGDVYDEAWERIDKKVEGLSKHIKLEEERRSEDAQSKAALTDWLRAKASFVIEGLKEADKDEFCRCELKLQKWYGDLRGKPFAIEAENSILDISGFSKQYNCAFIWQKDGVKKLNLYLIINYFKGGKLRFKKIKPEAFEANRFYTVINKKSGEIVPMEVNFNFDDPNLIILPLAFGKRQGREFIWNDLLSLETGSLKLANGRVIEKTLYNRRTRQDEPALFVALTFERREVLDSSNIKPMNLIGVDRGENIPAVIALTDPEGCPLSRFKDSLGNPTHILRIGESYKEKQRTIQAKKEVEQRRAGGYSRKYASKAKNLADDMVRNTARDLLYYAVTQDAMLIFENLSRGFGRQGKRTFSAERQYTRMEDWLTAKLAYEGLPSKTYLSKTLAQYTSKTCSNCGFTITSADYDRVLEKLKKTATGWMTTINGKELKVEGQITYYNRYKRQNVVKDLSVELDRLSEESVNNDISSWTKGRSGEALSLLKKRFSHRPVQEKFVCLNCGFETHADEQAALNIARSWLFLRSQEYKKYQTNKTTGNTDKRAFVETWQSFYRKKLKEVWKPAV

SEQ ID NO: 45811 - protein, 978 aa, synthetic construct
  REGION 1..978: note = engineered CasX variant
QEIKRINKIRRRLVKDSNTKKAGKTGPMKTLLVRVMTPDLRERLENLRKKPENIPQPISNTSRANLNKLLTDYTEMKKAILHVYWEEFQKDPVGLMSRVAQPASKKIDQNKLKPEMDEKGNLTTAGFACSQCGQPLFVYKLEQVSEKGKAYTNYFGRCNVAEHEKLILLAQLKPEKDSDEAVTYSLGKFGQRALDFYSIHVTKESTHPVKPLAQIAGNRYASTPVGKALSDACMGTIASFLSKYQDIIIEHQKVVKGNQKRLESLRELAGKENLEYPSVTLPPQPHTKEGVDAYNEVIARVRMWVNLNLWQKLKLSRDDAKPLLRLKGFPSFPLVERQANEVDWWDMVCNVKKLINEKKEDGKVFWQNLAGYKRQEALRPYLSSEEDRKKGKKFARYQLGDLLLHLEKKHGEDWGDVYDEAWERIDKKVEGLSKHIKLEEERRSEDAQSKAALTDWLRAKASFVIEGLKEADKDEFCRCELKLQKWYGDLRGKPFAIEAENSILDISGFSKQYNCAFIWQKDGVKKLNLYLIINYFKGGKLRFKKIKPEAFEANRFYTVINKKSGEIVPMEVNFNFDDPNLIILPLAFGKRQGREFIWNDLLSLETGSLKLANGRVIEKTLYNRRTRQDEPALFVALTFERREVLDSSNIKPMNLIGVDRGENIPAVIALTDPEGCPLSRFKDSLGNPTHILRIGESYKEKQRTIQAKKEVEQRRAGGYSRKYASKAKNLADDMVRNTARDLLYYAVTQDAMLIFENLSRGFGRQGKRTFSAERQYTRMEDWLTAKLAYEGLPSKTYLSKTLAQYTSKTCSNCGFTITSADYDRVLEKLKKTATGWMTTINGKELKVEGQITYYNRYKRQNVVKDLSVELDRLSEESVNNDISSWTKGRSGEALSLLKKRFSHRPVQEKFVCLNCGFETHADEQAALNIARSWLFLRSQEYKKYQTNKTTGNTDKRAFVETWQSFYRKKLKEVWKPAV

SEQ ID NO: 45812 - protein, 978 aa, synthetic construct
  REGION 1..978: note = engineered CasX variant
QEIKRINKIRRRLVKDSNTKKAGKTGPMKTLLVRVMTPDLRERLENLRKKPENIPQPISNTSRANLNKLLTDYTEMKKAILHVYWEEFQKDPVGLMSRVAQPASKKIDQNKLKPEMDEKGNLTTAGFACSQCGQPLFVYKLEQVSEKGKAYTNYFGRCNVAEHEKLILLAQLKPEKDSDEAVTYSLGKFGQRALDFYSIHVTKESTHPVKPLAQIAGNRYASAPVGKALSDACMGTIASFLSKYQDIIIEHQKVVKGNQKRLESLRELAGKENLEYPSVTLPPQPHTKEGVDAYNEVIARVRMWVNLNLWQKLKLSRDDAKPLLRLKGFPSFPLVERQANEVDWWDMVCNVKKLINEKKEDGKVFWQNLAGYKRQEALRPYLSSEEDRKKGKKFARYQLGDLLLHLEKKHGEDWGDVYDEAWERIDKKVEGLSKHIKLEEERRSEDAQSKAALTDWLRAKASFVIEGLKEADKDEFCRCELKLQKWYGDLRGKPFAIEAENSILDISGFSKQYNCAFIWQKDGVKKLNLYLIINYFKGGKLRFKKIKPEAFEANRFYTVINKKSGEIVPMEVNFNFDDPNLIILPLAFGKRQGREFIWNDLLSLETGSLKLANGRVIEKTLYNRRTRQDEPALFVALTFERREVLDSSNIKPMNLIGVDRGENIPAVIALTDPEGCPLSRFKDSLGNPTHILRIGESYKEKQRTIQAKKEVEQRRAGGYSRKYASKAKNLADDMVRNTARDLLYYAVTQDAMLIFENLSRGFGRQGKRTFSAERQYTRMEDWLTAKLAYEGLPSKTYLSKTLAQYTSKTCSNCGFTITSADYDRVLEKLKKTATGWMTTINGKELKVEGQITYYNRYKRQNVVKDLSVELDRLSEESVNNDISSWTKGRSGEALSLLKKRFSHRPVQEKFVCLNCGFETHADEQAALNIARSWLFLRSQEYKKYQTNKTTGNTDKRAFVETWQSFYRKKLKEVWKPAV

SEQ ID NO: 45813 - protein, 978 aa, synthetic construct
  REGION 1..978: note = engineered CasX variant
QEIKRINKIRRRLVKDSNTKKAGKTGPMKTLLVRVMTPDLRERLENLRKKPENIPQPISNTSRANLNKLLTDYTEMKKAILHVYWEEFQKDPVGLMSRVAQPASKKIDQNKLKPEMDEKGNLTTAGFACSQCGQPLFVYKLEQVSEKGKAYTNYFGRCNVAEHEKLILLAQLKPEKDSDEAVTYSLGKFGQRALDFYSIHVTKESTHPVKPLAQIAGNRYASVPVGKALSDACMGTIASFLSKYQDIIIEHQKVVKGNQKRLESLRELAGKENLEYPSVTLPPQPHTKEGVDAYNEVIARVRMWVNLNLWQKLKLSRDDAKPLLRLKGFPSFPLVERQANEVDWWDMVCNVKKLINEKKEDGKVFWQNLAGYKRQEALRPYLSSEEDRKKGKKFARYQLGDLLLHLEKKHGEDWGDVYDEAWERIDKKVEGLSKHIKLEEERRSEDAQSKAALTDWLRAKASFVIEGLKEADKDEFCRCELKLQKWYGDLRGKPFAIEAENSILDISGFSKQYNCAFIWQKDGVKKLNLYLIINYFKGGKLRFKKIKPEAFEANRFYTVINKKSGEIVPMEVNFNFDDPNLIILPLAFGKRQGREFIWNDLLSLETGSLKLANGRVIEKTLYNRRTRQDEPALFVALTFERREVLDSSNIKPMNLIGVDRGENIPAVIALTDPEGCPLSRFKDSLGNPTHILRIGESYKEKQRTIQAKKEVEQRRAGGYSRKYASKAKNLADDMVRNTARDLLYYAVTQDAMLIFENLSRGFGRQGKRTFSAERQYTRMEDWLTAKLAYEGLPSKTYLSKTLAQYTSKTCSNCGFTITSADYDRVLEKLKKTATGWMTTINGKELKVEGQITYYNRYKRQNVVKDLSVELDRLSEESVNNDISSWTKGRSGEALSLLKKRFSHRPVQEKFVCLNCGFETHADEQAALNIARSWLFLRSQEYKKYQTNKTTGNTDKRAFVETWQSFYRKKLKEVWKPAV

SEQ ID NO: 45814 - protein, 978 aa, synthetic construct
  REGION 1..978: note = engineered CasX variant
QEIKRINKIRRRLVKDSNTKKAGKTGPMKTLLVRVMTPDLRERLENLRKKPENIPQPISNTSRANLNKLLTDYTEMKKAILHVYWEEFQKDPVGLMSRVAQPASKKIDQNKLKPEMDEKGNLTTAGFACSQCGQPLFVYKLEQVSEKGKAYTNYFGRCNVAEHEKLIKLAQLKPEKDSDEAVTYSLGKFGQRALDFYSIHVTKESTHPVKPLAQIAGNRYASGPVGKALSDACMGTIASFLSKYQDIIIEHQKVVKGNQKRLESLRELAGKENLEYPSVTLPPQPHTKEGVDAYNEVIARVRMWVNLNLWQKLKLSRDDAKPLLRLKGFPSFPLVERQANEVDWWDMVCNVKKLINEKKEDGKVFWQNLAGYKRQEALRPYLSSEEDRKKGKKFARYQLGDLLLHLEKKHGEDWGDVYDEAWERIDKKVEGLSKHIKLEEERRSEDAQSKAALTDWLRAKASFVIEGLKEADKDEFCRCELKLQKWYGDLRGKPFAIEAENSILDISGFSKQYNCAFIWQKDGVKKLNLYLIINYFKGGKLRFKKIKPEAFEANRFYTVINKKSGEIVPMEVNFNFDDPNLIILPLAFGKRQGREFIWNDLLSLETGSLKLANGRVIEKTLYNRRTRQDEPALFVALTFERREVLDSSNIKPMNLIGVDRGENIPAVIALTDPEGCPLSRFKDSLGNPTHILRIGESYKEKQRTIQAKKEVEQRRAGGYSRKYASKAKNLADDMVRNTARDLLYYAVTQDAMLIFENLSRGFGRQGKRTFSAERQYTRMEDWLTAKLAYEGLPSKTYLSKTLAQYTSKTCSNCGFTITSADYDRVLEKLKKTATGWMTTINGKELKVEGQITYYNRYKRQNVVKDLSVELDRLSEESVNNDISSWTKGRSGEALSLLKKRFSHRPVQEKFVCLNCGFETHADEQAALNIARSWLFLRSQEYKKYQTNKTTGNTDKRAFVETWQSFYRKKLKEVWKPAV

SEQ ID NO: 45815 - protein, 977 aa, synthetic construct
  REGION 1..977: note = engineered CasX variant
QEIKRINKIRRRLVKDSNTKKAGKTGPMKTLLVRVMTPDLRERLENLRKKPENIPQPISNTSRANLNKLLTDYTEMKKAILHVYWEEFQKDPVGLMSRVAQPASKKIDQNKLKPEMDEKGNLTTAGFACSQCGQPLFVYKLEQVSEKGKAYTNYFGRCNVAEHEKLILLAQLKPEKDSDEAVTYSLGKFGQRALDFYSIHVTKESTHPVKPLAQIAGNRYASPVGKALSDACMGTIASFLSKYQDIIIEHQKVVKGNQKRLESLRELAGKENLEYPSVTLPPQPHTKEGVDAYNEVIARVRMWVNLNLWQKLKLSRDDAKPLLRLKGFPSFPLVERQANEVDWWDMVCNVKKLINEKKEDGKVFWQNLAGYKRQEALRPYLSSEEDRKKGKKFARYQLGDLLLHLEKKHGEDWGDVYDEAWERIDKKVEGLSKHIKLEEERRSEDAQSKAALTDWLRAKASFVIEGLKEADKDEFCRCELKLQKWYGDLRGKPFAIEAENSILDISGFSKQYNCAFIWQKDGVKKLNLYLIINYFKGGKLRFKKIKPEAFEANRFYTVINKKSGEIVPMEVNFNFDDPNLIILPLAFGKRQGREFIWNDLLSLETGSLKLANGRVIEKTLYNRRTRQDEPALFVALTFERREVLDSSNIKPMNLIGVDRGENIPAVIALTDPEGCPLSRFKDSLGNPTHILRIGESYKEKQRTIQAKKEVEQRRAGGYSRKYASKAKNLADDMVRNTARDLLYYAVTQDAMLIFENLSRGFGRQGKRTFSAERQYTRMEDWLTAKLAYEGLPSKTYLSKTLAQYTSKTCSNCGFTITSADYDRVLEKLKKTATGWMTTINGKELKVEGQITYYNRYKRQNVVKDLSVELDRLSEESVNNDISSWTKGRSGEALSLLKKRFSHRPVQEKFVCLNCGFETHADEQAALNIARSWLFLRSQEYKKYQTNKTTGNTDKRAFVETWQSFYRKKLKEVWKPAV

SEQ ID NO: 45816 - protein, 978 aa, synthetic construct
  REGION 1..978: note = engineered CasX variant
QEIKRINKIRRRLVKDSNTKKAGKTGPMKTLLVRVMTPDLRERLENLRKKPENIPQPISNTSRANLNKLLTDYTEMKKAILHVYWEEFQKDPVGLMSRVAQPASKKIDQNKLKPEMDEKGNLTTAGFACSQCGQPLFVYKLEQVSEKGKAYTNYFGRCNVAEHEKLILLAQLKPEKDSDEAVTYSLGKFGQRALDFYSIHVTKESTHPVKPLAQIAGNRYASYPVGKALSDACMGTIASFLSKYQDIIIEHQKVVKGNQKRLESLRELAGKENLEYPSVTLPPQPHTKEGVDAYNEVIARVRMWVNLNLWQKLKLSRDDAKPLLRLKGFPSFPLVERQANEVDWWDMVCNVKKLINEKKEDGKVFWQNLAGYKRQEALRPYLSSEEDRKKGKKFARYQLGDLLLHLEKKHGEDWGKVYGEAWERIDKKVEGLSKHIKLEEERRSEDAQSKAALTDWLRAKASFVIEGLKEADKDEFCRCELKLQKWYGDLRGKPFAIEAENSILDISGFSKQYNCAFIWQKDGVKKLNLYLIINYFKGGKLRFKKIKPEAFEANRFYTVINKKSGEIVPMEVNFNFDDPNLIILPLAFGKRQGREFIWNDLLSLETGSLKLANGRVIEKTLYNRRTRQDEPALFVALTFERREVLDSSNIKPMNLIGVDRGENIPAVIALTDPEGCPLSRFKDSLGNPTHILRIGESYKEKQRTIQAKKEVEQRRAGGYSRKYASKAKNLADDMVRNTARDLLYYAVTQDAMLIFENLSRGFGRQGKRTFSAERQYTRMEDWLTAKLAYEGLPSKTYLSKTLAQYTSKTCSNCGFTITSADYDRVLEKLKKTATGWMTTINGKELKVEGQITYYNRYKRQNVVKDLSVELDRLSEESVNNDISSWTKGRSGEALSLLKKRFSHRPVQEKFVCLNCGFETHADEQAALNIARSWLFLRSQEYKKYQTNKTTGNTDKRAFVETWQSFYRKKLKEVWKPAV

SEQ ID NO: 45817 - protein, 978 aa, synthetic construct
  REGION 1..978: note = engineered CasX variant
QEIKRINKIRRRLVKDSNTKKAGKTGPMKTLLVRVMTPDLRERLENLRKKPENIPQPISNTSRANLNKLLTDYTEMKKAILHVYWEEFQKDPVGLMSRVAQPASKKIDQNKLKPEMDEKGNLTTAGFACSQCGQPLFVYKLEQVSEKGKAYTNYFGRCNVAEHEKLILLAQLKPEKDSDEAVTYSLGKFGQRALDFYSIHVTKESTHPVKPLAQIAGNRYASHPVGKALSDACMGTIASFLSKYQDIIIEHQKVVKGNQKRLESLRELAGKENLEYPSVTLPPQPHTKEGVDAYNEVIARVRMWVNLNLWQKLKLSRDDAKPLLRLKGFPSFPLVERQANEVDWWDMVCNVKKLINEKKEDGKVFWQNLAGYKRQEALRPYLSSEEDRKKGKKFARYQLGDLLLHLEKKHGEDWGKVYGEAWERIDKKVEGLSKHIKLEEERRSEDAQSKAALTDWLRAKASFVIEGLKEADKDEFCRCELKLQKWYGDLRGKPFAIEAENSILDISGFSKQYNCAFIWQKDGVKKLNLYLIINYFKGGKLRFKKIKPEAFEANRFYTVINKKSGEIVPMEVNFNFDDPNLIILPLAFGKRQGREFIWNDLLSLETGSLKLANGRVIEKTLYNRRTRQDEPALFVALTFERREVLDSSNIKPMNLIGVDRGENIPAVIALTDPEGCPLSRFKDSLGNPTHILRIGESYKEKQRTIQAKKEVEQRRAGGYSRKYASKAKNLADDMVRNTARDLLYYAVTQDAMLIFENLSRGFGRQGKRTFSAERQYTRMEDWLTAKLAYEGLPSKTYLSKTLAQYTSKTCSNCGFTITSADYDRVLEKLKKTATGWMTTINGKELKVEGQITYYNRYKRQNVVKDLSVELDRLSEESVNNDISSWTKGRSGEALSLLKKRFSHRPVQEKFVCLNCGFETHADEQAALNIARSWLFLRSQEYKKYQTNKTTGNTDKRAFVETWQSFYRKKLKEVWKPAV

SEQ ID NO: 45818 - protein, 978 aa, synthetic construct
  REGION 1..978: note = engineered CasX variant
QEIKRINKIRRRLVKDSNTKKAGKTGPMKTLLVRVMTPDLRERLENLRKKPENIPQPISNTSRANLNKLLTDYTEMKKAILHVYWEEFQKDPVGLMSRVAQPASKKIDQNKLKPEMDEKGNLTTAGFACSQCGQPLFVYKLEQVSEKGKAYTNYFGRCNVAEHEKLILLAQLKPEKDSDEAVTYSLGKFGQRALDFYSIHVTKESTHPVKPLAQIAGNRYASSPVGKALSDACMGTIASFLSKYQDIIIEHQKVVKGNQKRLESLRELAGKENLEYPSVTLPPQPHTKEGVDAYNEVIARVRMWVNLNLWQKLKLSRDDAKPLLRLKGFPSFPLVERQANEVDWWDMVCNVKKLINEKKEDGKVFWQNLAGYKRQEALRPYLSSEEDRKKGKKFARYQLGDLLLHLEKKHGEDWGKVYGEAWERIDKKVEGLSKHIKLEEERRSEDAQSKAALTDWLRAKASFVIEGLKEADKDEFCRCELKLQKWYGDLRGKPFAIEAENSILDISGFSKQYNCAFIWQKDGVKKLNLYLIINYFKGGKLRFKKIKPEAFEANRFYTVINKKSGEIVPMEVNFNFDDPNLIILPLAFGKRQGREFIWNDLLSLETGSLKLANGRVIEKTLYNRRTRQDEPALFVALTFERREVLDSSNIKPMNLIGVDRGENIPAVIALTDPEGCPLSRFKDSLGNPTHILRIGESYKEKQRTIQAKKEVEQRRAGGYSRKYASKAKNLADDMVRNTARDLLYYAVTQDAMLIFENLSRGFGRQGKRTFSAERQYTRMEDWLTAKLAYEGLPSKTYLSKTLAQYTSKTCSNCGFTITSADYDRVLEKLKKTATGWMTTINGKELKVEGQITYYNRYKRQNVVKDLSVELDRLSEESVNNDISSWTKGRSGEALSLLKKRFSHRPVQEKFVCLNCGFETHADEQAALNIARSWLFLRSQEYKKYQTNKTTGNTDKRAFVETWQSFYRKKLKEVWKPAV

SEQ ID NO: 45819 - protein, 978 aa, synthetic construct
  REGION 1..978: note = engineered CasX variant
QEIKRINKIRRRLVKDSNTKKAGKTGPMKTLLVRVMTPDLRERLENLRKKPENIPQPISNTSRANLNKLLTDYTEMKKAILHVYWEEFQKDPVGLMSRVAQPASKKIDQNKLKPEMDEKGNLTTAGFACSQCGQPLFVYKLEQVSEKGKAYTNYFGRCNVAEHEKLILLAQLKPEKDSDEAVTYSLGKFGQRALDFYSIHVTKESTHPVKPLAQIAGNRYASTPVGKALSDACMGTIASFLSKYQDIIIEHQKVVKGNQKRLESLRELAGKENLEYPSVTLPPQPHTKEGVDAYNEVIARVRMWVNLNLWQKLKLSRDDAKPLLRLKGFPSFPLVERQANEVDWWDMVCNVKKLINEKKEDGKVFWQNLAGYKRQEALRPYLSSEEDRKKGKKFARYQLGDLLLHLEKKHGEDWGKVYGEAWERIDKKVEGLSKHIKLEEERRSEDAQSKAALTDWLRAKASFVIEGLKEADKDEFCRCELKLQKWYGDLRGKPFAIEAENSILDISGFSKQYNCAFIWQKDGVKKLNLYLIINYFKGGKLRFKKIKPEAFEANRFYTVINKKSGEIVPMEVNFNFDDPNLIILPLAFGKRQGREFIWNDLLSLETGSLKLANGRVIEKTLYNRRTRQDEPALFVALTFERREVLDSSNIKPMNLIGVDRGENIPAVIALTDPEGCPLSRFKDSLGNPTHILRIGESYKEKQRTIQAKKEVEQRRAGGYSRKYASKAKNLADDMVRNTARDLLYYAVTQDAMLIFENLSRGFGRQGKRTFSAERQYTRMEDWLTAKLAYEGLPSKTYLSKTLAQYTSKTCSNCGFTITSADYDRVLEKLKKTATGWMTTINGKELKVEGQITYYNRYKRQNVVKDLSVELDRLSEESVNNDISSWTKGRSGEALSLLKKRFSHRPVQEKFVCLNCGFETHADEQAALNIARSWLFLRSQEYKKYQTNKTTGNTDKRAFVETWQSFYRKKLKEVWKPAV

SEQ ID NO: 45820 - protein, 978 aa, synthetic construct
  REGION 1..978: note = engineered CasX variant
QEIKRINKIRRRLVKDSNTKKAGKTGPMKTLLVRVMTPDLRERLENLRKKPENIPQPISNTSRANLNKLLTDYTEMKKAILHVYWEEFQKDPVGLMSRVAQPASKKIDQNKLKPEMDEKGNLTTAGFACSQCGQPLFVYKLEQVSEKGKAYTNYFGRCNVAEHEKLILLAQLKPEKDSDEAVTYSLGKFGQRALDFYSIHVTKESTHPVKPLAQIAGNRYASAPVGKALSDACMGTIASFLSKYQDIIIEHQKVVKGNQKRLESLRELAGKENLEYPSVTLPPQPHTKEGVDAYNEVIARVRMWVNLNLWQKLKLSRDDAKPLLRLKGFPSFPLVERQANEVDWWDMVCNVKKLINEKKEDGKVFWQNLAGYKRQEALRPYLSSEEDRKKGKKFARYQLGDLLLHLEKKHGEDWGKVYGEAWERIDKKVEGLSKHIKLEEERRSEDAQSKAALTDWLRAKASFVIEGLKEADKDEFCRCELKLQKWYGDLRGKPFAIEAENSILDISGFSKQYNCAFIWQKDGVKKLNLYLIINYFKGGKLRFKKIKPEAFEANRFYTVINKKSGEIVPMEVNFNFDDPNLIILPLAFGKRQGREFIWNDLLSLETGSLKLANGRVIEKTLYNRRTRQDEPALFVALTFERREVLDSSNIKPMNLIGVDRGENIPAVIALTDPEGCPLSRFKDSLGNPTHILRIGESYKEKQRTIQAKKEVEQRRAGGYSRKYASKAKNLADDMVRNTARDLLYYAVTQDAMLIFENLSRGFGRQGKRTFSAERQYTRMEDWLTAKLAYEGLPSKTYLSKTLAQYTSKTCSNCGFTITSADYDRVLEKLKKTATGWMTTINGKELKVEGQITYYNRYKRQNVVKDLSVELDRLSEESVNNDISSWTKGRSGEALSLLKKRFSHRPVQEKFVCLNCGFETHADEQAALNIARSWLFLRSQEYKKYQTNKTTGNTDKRAFVETWQSFYRKKLKEVWKPAV

SEQ ID NO: 45821 - protein, 978 aa, synthetic construct
  REGION 1..978: note = engineered CasX variant
QEIKRINKIRRRLVKDSNTKKAGKTGPMKTLLVRVMTPDLRERLENLRKKPENIPQPISNTSRANLNKLLTDYTEMKKAILHVYWEEFQKDPVGLMSRVAQPASKKIDQNKLKPEMDEKGNLTTAGFACSQCGQPLFVYKLEQVSEKGKAYTNYFGRCNVAEHEKLILLAQLKPEKDSDEAVTYSLGKFGQRALDFYSIHVTKESTHPVKPLAQIAGNRYASVPVGKALSDACMGTIASFLSKYQDIIIEHQKVVKGNQKRLESLRELAGKENLEYPSVTLPPQPHTKEGVDAYNEVIARVRMWVNLNLWQKLKLSRDDAKPLLRLKGFPSFPLVERQANEVDWWDMVCNVKKLINEKKEDGKVFWQNLAGYKRQEALRPYLSSEEDRKKGKKFARYQLGDLLLHLEKKHGEDWGKVYGEAWERIDKKVEGLSKHIKLEEERRSEDAQSKAALTDWLRAKASFVIEGLKEADKDEFCRCELKLQKWYGDLRGKPFAIEAENSILDISGFSKQYNCAFIWQKDGVKKLNLYLIINYFKGGKLRFKKIKPEAFEANRFYTVINKKSGEIVPMEVNFNFDDPNLIILPLAFGKRQGREFIWNDLLSLETGSLKLANGRVIEKTLYNRRTRQDEPALFVALTFERREVLDSSNIKPMNLIGVDRGENIPAVIALTDPEGCPLSRFKDSLGNPTHILRIGESYKEKQRTIQAKKEVEQRRAGGYSRKYASKAKNLADDMVRNTARDLLYYAVTQDAMLIFENLSRGFGRQGKRTFSAERQYTRMEDWLTAKLAYEGLPSKTYLSKTLAQYTSKTCSNCGFTITSADYDRVLEKLKKTATGWMTTINGKELKVEGQITYYNRYKRQNVVKDLSVELDRLSEESVNNDISSWTKGRSGEALSLLKKRFSHRPVQEKFVCLNCGFETHADEQAALNIARSWLFLRSQEYKKYQTNKTTGNTDKRAFVETWQSFYRKKLKEVWKPAV

SEQ ID NO: 45822 - protein, 978 aa, synthetic construct
  REGION 1..978: note = engineered CasX variant
QEIKRINKIRRRLVKDSNTKKAGKTGPMKTLLVRVMTPDLRERLENLRKKPENIPQPISNTSRANLNKLLTDYTEMKKAILHVYWEEFQKDPVGLMSRVAQPASKKIDQNKLKPEMDEKGNLTTAGFACSQCGQPLFVYKLEQVSEKGKAYTNYFGRCNVAEHEKLIKLAQLKPEKDSDEAVTYSLGKFGQRALDFYSIHVTKESTHPVKPLAQIAGNRYASGPVGKALSDACMGTIASFLSKYQDIIIEHQKVVKGNQKRLESLRELAGKENLEYPSVTLPPQPHTKEGVDAYNEVIARVRMWVNLNLWQKLKLSRDDAKPLLRLKGFPSFPLVERQANEVDWWDMVCNVKKLINEKKEDGKVFWQNLAGYKRQEALRPYLSSEEDRKKGKKFARYQLGDLLLHLEKKHGEDWGKVYGEAWERIDKKVEGLSKHIKLEEERRSEDAQSKAALTDWLRAKASFVIEGLKEADKDEFCRCELKLQKWYGDLRGKPFAIEAENSILDISGFSKQYNCAFIWQKDGVKKLNLYLIINYFKGGKLRFKKIKPEAFEANRFYTVINKKSGEIVPMEVNFNFDDPNLIILPLAFGKRQGREFIWNDLLSLETGSLKLANGRVIEKTLYNRRTRQDEPALFVALTFERREVLDSSNIKPMNLIGVDRGENIPAVIALTDPEGCPLSRFKDSLGNPTHILRIGESYKEKQRTIQAKKEVEQRRAGGYSRKYASKAKNLADDMVRNTARDLLYYAVTQDAMLIFENLSRGFGRQGKRTFSAERQYTRMEDWLTAKLAYEGLPSKTYLSKTLAQYTSKTCSNCGFTITSADYDRVLEKLKKTATGWMTTINGKELKVEGQITYYNRYKRQNVVKDLSVELDRLSEESVNNDISSWTKGRSGEALSLLKKRFSHRPVQEKFVCLNCGFETHADEQAALNIARSWLFLRSQEYKKYQTNKTTGNTDKRAFVETWQSFYRKKLKEVWKPAV

SEQ ID NO: 45823 - protein, 977 aa, synthetic construct
  REGION 1..977: note = engineered CasX variant
QEIKRINKIRRRLVKDSNTKKAGKTGPMKTLLVRVMTPDLRERLENLRKKPENIPQPISNTSRANLNKLLTDYTEMKKAILHVYWEEFQKDPVGLMSRVAQPASKKIDQNKLKPEMDEKGNLTTAGFACSQCGQPLFVYKLEQVSEKGKAYTNYFGRCNVAEHEKLILLAQLKPEKDSDEAVTYSLGKFGQRALDFYSIHVTKESTHPVKPLAQIAGNRYASPVGKALSDACMGTIASFLSKYQDIIIEHQKVVKGNQKRLESLRELAGKENLEYPSVTLPPQPHTKEGVDAYNEVIARVRMWVNLNLWQKLKLSRDDAKPLLRLKGFPSFPLVERQANEVDWWDMVCNVKKLINEKKEDGKVFWQNLAGYKRQEALRPYLSSEEDRKKGKKFARYQLGDLLLHLEKKHGEDWGKVYGEAWERIDKKVEGLSKHIKLEEERRSEDAQSKAALTDWLRAKASFVIEGLKEADKDEFCRCELKLQKWYGDLRGKPFAIEAENSILDISGFSKQYNCAFIWQKDGVKKLNLYLIINYFKGGKLRFKKIKPEAFEANRFYTVINKKSGEIVPMEVNFNFDDPNLIILPLAFGKRQGREFIWNDLLSLETGSLKLANGRVIEKTLYNRRTRQDEPALFVALTFERREVLDSSNIKPMNLIGVDRGENIPAVIALTDPEGCPLSRFKDSLGNPTHILRIGESYKEKQRTIQAKKEVEQRRAGGYSRKYASKAKNLADDMVRNTARDLLYYAVTQDAMLIFENLSRGFGRQGKRTFSAERQYTRMEDWLTAKLAYEGLPSKTYLSKTLAQYTSKTCSNCGFTITSADYDRVLEKLKKTATGWMTTINGKELKVEGQITYYNRYKRQNVVKDLSVELDRLSEESVNNDISSWTKGRSGEALSLLKKRFSHRPVQEKFVCLNCGFETHADEQAALNIARSWLFLRSQEYKKYQTNKTTGNTDKRAFVETWQSFYRKKLKEVWKPAV

SEQ ID NO: 45824 - protein, 978 aa, synthetic construct
  REGION 1..978: note = engineered CasX variant
QEIKRINKIRRRLVKDSNTKKAGKTGPMKTLLVRVMTPDLRERLENLRKKPENIPQPISNTSRANLNKLLTDYTEMKKAILHVYWEEFQKDPVGLMSRVAQPASKKIDQNKLKPEMDEKGNLTTAGFACSQCGQPLFVYKLEQVSEKGKAYTNYFGRCNVAEHEKLILLAQLKPEKDSDEAVTYSLGKFGQRALDFYSIHVTKESTHPVKPLAQIAGNRYASYPVGKALSDACMGTIASFLSKYQDIIIEHQKVVKGNQKRLESLRELAGKENLEYPSVTLPPQPHTKEGVDAYNEVIARVRMWVNLNLWQKLKLSRDDAKPLLRLKGFPSFPLVERQANEVDWWDMVCNVKKLINEKKEDGKVFWQNLAGYKRQEALRPYLSSEEDRKKGKKFARYQLGDLLLHLEKKHGEDWGKVYDEAWERIDKKVEGLSKHIKLEEERRSEDAQSKAALTDWLRAKASFVIEGKKEADKDEFCRCELKLQKWYGDLRGKPFAIEAENSILDISGFSKQYNCAFIWQKDGVKKLNLYLIINYFKGGKLRFKKIKPEAFEANRFYTVINKKSGEIVPMEVNFNFDDPNLIILPLAFGKRQGREFIWNDLLSLETGSLKLANGRVIEKTLYNRRTRQDEPALFVALTFERREVLDSSNIKPMNLIGVDRGENIPAVIALTDPEGCPLSRFKDSLGNPTHILRIGESYKEKQRTIQAKKEVEQRRAGGYSRKYASKAKNLADDMVRNTARDLLYYAVTQDAMLIFENLSRGFGRQGKRTFSAERQYTRMEDWLTAKLAYEGLPSKTYLSKTLAQYTSKTCSNCGFTITSADYDRVLEKLKKTATGWMTTINGKELKVEGQITYYNRYKRQNVVKDLSVELDRLSEESVNNDISSWTKGRSGEALSLLKKRFSHRPVQEKFVCLNCGFETHADEQAALNIARSWLFLRSQEYKKYQTNKTTGNTDKRAFVETWQSFYRKKLKEVWKPAV

SEQ ID NO: 45825 - protein, 978 aa, synthetic construct
  REGION 1..978: note = engineered CasX variant
QEIKRINKIRRRLVKDSNTKKAGKTGPMKTLLVRVMTPDLRERLENLRKKPENIPQPISNTSRANLNKLLTDYTEMKKAILHVYWEEFQKDPVGLMSRVAQPASKKIDQNKLKPEMDEKGNLTTAGFACSQCGQPLFVYKLEQVSEKGKAYTNYFGRCNVAEHEKLILLAQLKPEKDSDEAVTYSLGKFGQRALDFYSIHVTKESTHPVKPLAQIAGNRYASHPVGKALSDACMGTIASFLSKYQDIIIEHQKVVKGNQKRLESLRELAGKENLEYPSVTLPPQPHTKEGVDAYNEVIARVRMWVNLNLWQKLKLSRDDAKPLLRLKGFPSFPLVERQANEVDWWDMVCNVKKLINEKKEDGKVFWQNLAGYKRQEALRPYLSSEEDRKKGKKFARYQLGDLLLHLEKKHGEDWGKVYDEAWERIDKKVEGLSKHIKLEEERRSEDAQSKAALTDWLRAKASFVIEGKKEADKDEFCRCELKLQKWYGDLRGKPFAIEAENSILDISGFSKQYNCAFIWQKDGVKKLNLYLIINYFKGGKLRFKKIKPEAFEANRFYTVINKKSGEIVPMEVNFNFDDPNLIILPLAFGKRQGREFIWNDLLSLETGSLKLANGRVIEKTLYNRRTRQDEPALFVALTFERREVLDSSNIKPMNLIGVDRGENIPAVIALTDPEGCPLSRFKDSLGNPTHILRIGESYKEKQRTIQAKKEVEQRRAGGYSRKYASKAKNLADDMVRNTARDLLYYAVTQDAMLIFENLSRGFGRQGKRTFSAERQYTRMEDWLTAKLAYEGLPSKTYLSKTLAQYTSKTCSNCGFTITSADYDRVLEKLKKTATGWMTTINGKELKVEGQITYYNRYKRQNVVKDLSVELDRLSEESVNNDISSWTKGRSGEALSLLKKRFSHRPVQEKFVCLNCGFETHADEQAALNIARSWLFLRSQEYKKYQTNKTTGNTDKRAFVETWQSFYRKKLKEVWKPAV

SEQ ID NO: 45826 - protein, 978 aa, synthetic construct
  REGION 1..978: note = engineered CasX variant
QEIKRINKIRRRLVKDSNTKKAGKTGPMKTLLVRVMTPDLRERLENLRKKPENIPQPISNTSRANLNKLLTDYTEMKKAILHVYWEEFQKDPVGLMSRVAQPASKKIDQNKLKPEMDEKGNLTTAGFACSQCGQPLFVYKLEQVSEKGKAYTNYFGRCNVAEHEKLILLAQLKPEKDSDEAVTYSLGKFGQRALDFYSIHVTKESTHPVKPLAQIAGNRYASSPVGKALSDACMGTIASFLSKYQDIIIEHQKVVKGNQKRLESLRELAGKENLEYPSVTLPPQPHTKEGVDAYNEVIARVRMWVNLNLWQKLKLSRDDAKPLLRLKGFPSFPLVERQANEVDWWDMVCNVKKLINEKKEDGKVFWQNLAGYKRQEALRPYLSSEEDRKKGKKFARYQLGDLLLHLEKKHGEDWGKVYDEAWERIDKKVEGLSKHIKLEEERRSEDAQSKAALTDWLRAKASFVIEGKKEADKDEFCRCELKLQKWYGDLRGKPFAIEAENSILDISGFSKQYNCAFIWQKDGVKKLNLYLIINYFKGGKLRFKKIKPEAFEANRFYTVINKKSGEIVPMEVNFNFDDPNLIILPLAFGKRQGREFIWNDLLSLETGSLKLANGRVIEKTLYNRRTRQDEPALFVALTFERREVLDSSNIKPMNLIGVDRGENIPAVIALTDPEGCPLSRFKDSLGNPTHILRIGESYKEKQRTIQAKKEVEQRRAGGYSRKYASKAKNLADDMVRNTARDLLYYAVTQDAMLIFENLSRGFGRQGKRTFSAERQYTRMEDWLTAKLAYEGLPSKTYLSKTLAQYTSKTCSNCGFTITSADYDRVLEKLKKTATGWMTTINGKELKVEGQITYYNRYKRQNVVKDLSVELDRLSEESVNNDISSWTKGRSGEALSLLKKRFSHRPVQEKFVCLNCGFETHADEQAALNIARSWLFLRSQEYKKYQTNKTTGNTDKRAFVETWQSFYRKKLKEVWKPAV

SEQ ID NO: 45827 - protein, 978 aa, synthetic construct
  REGION 1..978: note = engineered CasX variant
QEIKRINKIRRRLVKDSNTKKAGKTGPMKTLLVRVMTPDLRERLENLRKKPENIPQPISNTSRANLNKLLTDYTEMKKAILHVYWEEFQKDPVGLMSRVAQPASKKIDQNKLKPEMDEKGNLTTAGFACSQCGQPLFVYKLEQVSEKGKAYTNYFGRCNVAEHEKLILLAQLKPEKDSDEAVTYSLGKFGQRALDFYSIHVTKESTHPVKPLAQIAGNRYASTPVGKALSDACMGTIASFLSKYQDIIIEHQKVVKGNQKRLESLRELAGKENLEYPSVTLPPQPHTKEGVDAYNEVIARVRMWVNLNLWQKLKLSRDDAKPLLRLKGFPSFPLVERQANEVDWWDMVCNVKKLINEKKEDGKVFWQNLAGYKRQEALRPYLSSEEDRKKGKKFARYQLGDLLLHLEKKHGEDWGKVYDEAWERIDKKVEGLSKHIKLEEERRSEDAQSKAALTDWLRAKASFVIEGKKEADKDEFCRCELKLQKWYGDLRGKPFAIEAENSILDISGFSKQYNCAFIWQKDGVKKLNLYLIINYFKGGKLRFKKIKPEAFEANRFYTVINKKSGEIVPMEVNFNFDDPNLIILPLAFGKRQGREFIWNDLLSLETGSLKLANGRVIEKTLYNRRTRQDEPALFVALTFERREVLDSSNIKPMNLIGVDRGENIPAVIALTDPEGCPLSRFKDSLGNPTHILRIGESYKEKQRTIQAKKEVEQRRAGGYSRKYASKAKNLADDMVRNTARDLLYYAVTQDAMLIFENLSRGFGRQGKRTFSAERQYTRMEDWLTAKLAYEGLPSKTYLSKTLAQYTSKTCSNCGFTITSADYDRVLEKLKKTATGWMTTINGKELKVEGQITYYNRYKRQNVVKDLSVELDRLSEESVNNDISSWTKGRSGEALSLLKKRFSHRPVQEKFVCLNCGFETHADEQAALNIARSWLFLRSQEYKKYQTNKTTGNTDKRAFVETWQSFYRKKLKEVWKPAV

SEQ ID NO: 45828 - protein, 978 aa, synthetic construct
  REGION 1..978: note = engineered CasX variant
QEIKRINKIRRRLVKDSNTKKAGKTGPMKTLLVRVMTPDLRERLENLRKKPENIPQPISNTSRANLNKLLTDYTEMKKAILHVYWEEFQKDPVGLMSRVAQPASKKIDQNKLKPEMDEKGNLTTAGFACSQCGQPLFVYKLEQVSEKGKAYTNYFGRCNVAEHEKLILLAQLKPEKDSDEAVTYSLGKFGQRALDFYSIHVTKESTHPVKPLAQIAGNRYASAPVGKALSDACMGTIASFLSKYQDIIIEHQKVVKGNQKRLESLRELAGKENLEYPSVTLPPQPHTKEGVDAYNEVIARVRMWVNLNLWQKLKLSRDDAKPLLRLKGFPSFPLVERQANEVDWWDMVCNVKKLINEKKEDGKVFWQNLAGYKRQEALRPYLSSEEDRKKGKKFARYQLGDLLLHLEKKHGEDWGKVYDEAWERIDKKVEGLSKHIKLEEERRSEDAQSKAALTDWLRAKASFVIEGKKEADKDEFCRCELKLQKWYGDLRGKPFAIEAENSILDISGFSKQYNCAFIWQKDGVKKLNLYLIINYFKGGKLRFKKIKPEAFEANRFYTVINKKSGEIVPMEVNFNFDDPNLIILPLAFGKRQGREFIWNDLLSLETGSLKLANGRVIEKTLYNRRTRQDEPALFVALTFERREVLDSSNIKPMNLIGVDRGENIPAVIALTDPEGCPLSRFKDSLGNPTHILRIGESYKEKQRTIQAKKEVEQRRAGGYSRKYASKAKNLADDMVRNTARDLLYYAVTQDAMLIFENLSRGFGRQGKRTFSAERQYTRMEDWLTAKLAYEGLPSKTYLSKTLAQYTSKTCSNCGFTITSADYDRVLEKLKKTATGWMTTINGKELKVEGQITYYNRYKRQNVVKDLSVELDRLSEESVNNDISSWTKGRSGEALSLLKKRFSHRPVQEKFVCLNCGFETHADEQAALNIARSWLFLRSQEYKKYQTNKTTGNTDKRAFVETWQSFYRKKLKEVWKPAV

SEQ ID NO: 45829 - protein, 978 aa, synthetic construct
  REGION 1..978: note = engineered CasX variant
QEIKRINKIRRRLVKDSNTKKAGKTGPMKTLLVRVMTPDLRERLENLRKKPENIPQPISNTSRANLNKLLTDYTEMKKAILHVYWEEFQKDPVGLMSRVAQPASKKIDQNKLKPEMDEKGNLTTAGFACSQCGQPLFVYKLEQVSEKGKAYTNYFGRCNVAEHEKLILLAQLKPEKDSDEAVTYSLGKFGQRALDFYSIHVTKESTHPVKPLAQIAGNRYASVPVGKALSDACMGTIASFLSKYQDIIIEHQKVVKGNQKRLESLRELAGKENLEYPSVTLPPQPHTKEGVDAYNEVIARVRMWVNLNLWQKLKLSRDDAKPLLRLKGFPSFPLVERQANEVDWWDMVCNVKKLINEKKEDGKVFWQNLAGYKRQEALRPYLSSEEDRKKGKKFARYQLGDLLLHLEKKHGEDWGKVYDEAWERIDKKVEGLSKHIKLEEERRSEDAQSKAALTDWLRAKASFVIEGKKEADKDEFCRCELKLQKWYGDLRGKPFAIEAENSILDISGFSKQYNCAFIWQKDGVKKLNLYLIINYFKGGKLRFKKIKPEAFEANRFYTVINKKSGEIVPMEVNFNFDDPNLIILPLAFGKRQGREFIWNDLLSLETGSLKLANGRVIEKTLYNRRTRQDEPALFVALTFERREVLDSSNIKPMNLIGVDRGENIPAVIALTDPEGCPLSRFKDSLGNPTHILRIGESYKEKQRTIQAKKEVEQRRAGGYSRKYASKAKNLADDMVRNTARDLLYYAVTQDAMLIFENLSRGFGRQGKRTFSAERQYTRMEDWLTAKLAYEGLPSKTYLSKTLAQYTSKTCSNCGFTITSADYDRVLEKLKKTATGWMTTINGKELKVEGQITYYNRYKRQNVVKDLSVELDRLSEESVNNDISSWTKGRSGEALSLLKKRFSHRPVQEKFVCLNCGFETHADEQAALNIARSWLFLRSQEYKKYQTNKTTGNTDKRAFVETWQSFYRKKLKEVWKPAV

SEQ ID NO: 45830 - protein, 978 aa, synthetic construct
  REGION 1..978: note = engineered CasX variant
QEIKRINKIRRRLVKDSNTKKAGKTGPMKTLLVRVMTPDLRERLENLRKKPENIPQPISNTSRANLNKLLTDYTEMKKAILHVYWEEFQKDPVGLMSRVAQPASKKIDQNKLKPEMDEKGNLTTAGFACSQCGQPLFVYKLEQVSEKGKAYTNYFGRCNVAEHEKLIKLAQLKPEKDSDEAVTYSLGKFGQRALDFYSIHVTKESTHPVKPLAQIAGNRYASGPVGKALSDACMGTIASFLSKYQDIIIEHQKVVKGNQKRLESLRELAGKENLEYPSVTLPPQPHTKEGVDAYNEVIARVRMWVNLNLWQKLKLSRDDAKPLLRLKGFPSFPLVERQANEVDWWDMVCNVKKLINEKKEDGKVFWQNLAGYKRQEALRPYLSSEEDRKKGKKFARYQLGDLLLHLEKKHGEDWGKVYDEAWERIDKKVEGLSKHIKLEEERRSEDAQSKAALTDWLRAKASFVIEGKKEADKDEFCRCELKLQKWYGDLRGKPFAIEAENSILDISGFSKQYNCAFIWQKDGVKKLNLYLIINYFKGGKLRFKKIKPEAFEANRFYTVINKKSGEIVPMEVNFNFDDPNLIILPLAFGKRQGREFIWNDLLSLETGSLKLANGRVIEKTLYNRRTRQDEPALFVALTFERREVLDSSNIKPMNLIGVDRGENIPAVIALTDPEGCPLSRFKDSLGNPTHILRIGESYKEKQRTIQAKKEVEQRRAGGYSRKYASKAKNLADDMVRNTARDLLYYAVTQDAMLIFENLSRGFGRQGKRTFSAERQYTRMEDWLTAKLAYEGLPSKTYLSKTLAQYTSKTCSNCGFTITSADYDRVLEKLKKTATGWMTTINGKELKVEGQITYYNRYKRQNVVKDLSVELDRLSEESVNNDISSWTKGRSGEALSLLKKRFSHRPVQEKFVCLNCGFETHADEQAALNIARSWLFLRSQEYKKYQTNKTTGNTDKRAFVETWQSFYRKKLKEVWKPAV

SEQ ID NO: 45831 - protein, 977 aa, synthetic construct
  REGION 1..977: note = engineered CasX variant
QEIKRINKIRRRLVKDSNTKKAGKTGPMKTLLVRVMTPDLRERLENLRKKPENIPQPISNTSRANLNKLLTDYTEMKKAILHVYWEEFQKDPVGLMSRVAQPASKKIDQNKLKPEMDEKGNLTTAGFACSQCGQPLFVYKLEQVSEKGKAYTNYFGRCNVAEHEKLILLAQLKPEKDSDEAVTYSLGKFGQRALDFYSIHVTKESTHPVKPLAQIAGNRYASPVGKALSDACMGTIASFLSKYQDIIIEHQKVVKGNQKRLESLRELAGKENLEYPSVTLPPQPHTKEGVDAYNEVIARVRMWVNLNLWQKLKLSRDDAKPLLRLKGFPSFPLVERQANEVDWWDMVCNVKKLINEKKEDGKVFWQNLAGYKRQEALRPYLSSEEDRKKGKKFARYQLGDLLLHLEKKHGEDWGKVYDEAWERIDKKVEGLSKHIKLEEERRSEDAQSKAALTDWLRAKASFVIEGKKEADKDEFCRCELKLQKWYGDLRGKPFAIEAENSILDISGFSKQYNCAFIWQKDGVKKLNLYLIINYFKGGKLRFKKIKPEAFEANRFYTVINKKSGEIVPMEVNFNFDDPNLIILPLAFGKRQGREFIWNDLLSLETGSLKLANGRVIEKTLYNRRTRQDEPALFVALTFERREVLDSSNIKPMNLIGVDRGENIPAVIALTDPEGCPLSRFKDSLGNPTHILRIGESYKEKQRTIQAKKEVEQRRAGGYSRKYASKAKNLADDMVRNTARDLLYYAVTQDAMLIFENLSRGFGRQGKRTFSAERQYTRMEDWLTAKLAYEGLPSKTYLSKTLAQYTSKTCSNCGFTITSADYDRVLEKLKKTATGWMTTINGKELKVEGQITYYNRYKRQNVVKDLSVELDRLSEESVNNDISSWTKGRSGEALSLLKKRFSHRPVQEKFVCLNCGFETHADEQAALNIARSWLFLRSQEYKKYQTNKTTGNTDKRAFVETWQSFYRKKLKEVWKPAV

SEQ ID NO: 45832 - protein, 978 aa, synthetic construct
  REGION 1..978: note = engineered CasX variant
QEIKRINKIRRRLVKDSNTKKAGKTGPMKTLLVRVMTPDLRERLENLRKKPENIPQPISNTSRANLNKLLTDYTEMKKAILHVYWEEFQKDPVGLMSRVAQPASKKIDQNKLKPEMDEKGNLTTAGFACSQCGQPLFVYKLEQVSEKGKAYTNYFGRCNVAEHEKLILLAQLKPEKDSDEAVTYSLGKFGQRALDFYSIHVTKESTHPVKPLAQIAGNRYASYPVGKALSDACMGTIASFLSKYQDIIIEHQKVVKGNQKRLESLRELAGKENLEYPSVTLPPQPHTKEGVDAYNEVIARVRMWVNLNLWQKLKLSRDDAKPLLRLKGFPSFPLVERQANEVDWWDMVCNVKKLINEKKEDGKVFWQNLAGYKRQEALRPYLSSEEDRKKGKKFARYQLGDLLLHLEKKHGEDWGKVYDEAWERIDKKVEGLSKHIKLEEERRSEDAQSKAALTDWLRAKASFVIEGSKEADKDEFCRCELKLQKWYGDLRGKPFAIEAENSILDISGFSKQYNCAFIWQKDGVKKLNLYLIINYFKGGKLRFKKIKPEAFEANRFYTVINKKSGEIVPMEVNFNFDDPNLIILPLAFGKRQGREFIWNDLLSLETGSLKLANGRVIEKTLYNRRTRQDEPALFVALTFERREVLDSSNIKPMNLIGVDRGENIPAVIALTDPEGCPLSRFKDSLGNPTHILRIGESYKEKQRTIQAKKEVEQRRAGGYSRKYASKAKNLADDMVRNTARDLLYYAVTQDAMLIFENLSRGFGRQGKRTFSAERQYTRMEDWLTAKLAYEGLPSKTYLSKTLAQYTSKTCSNCGFTITSADYDRVLEKLKKTATGWMTTINGKELKVEGQITYYNRYKRQNVVKDLSVELDRLSEESVNNDISSWTKGRSGEALSLLKKRFSHRPVQEKFVCLNCGFETHADEQAALNIARSWLFLRSQEYKKYQTNKTTGNTDKRAFVETWQSFYRKKLKEVWKPAV

SEQ ID NO: 45833 - protein, 978 aa, synthetic construct
  REGION 1..978: note = engineered CasX variant
QEIKRINKIRRRLVKDSNTKKAGKTGPMKTLLVRVMTPDLRERLENLRKKPENIPQPISNTSRANLNKLLTDYTEMKKAILHVYWEEFQKDPVGLMSRVAQPASKKIDQNKLKPEMDEKGNLTTAGFACSQCGQPLFVYKLEQVSEKGKAYTNYFGRCNVAEHEKLILLAQLKPEKDSDEAVTYSLGKFGQRALDFYSIHVTKESTHPVKPLAQIAGNRYASHPVGKALSDACMGTIASFLSKYQDIIIEHQKVVKGNQKRLESLRELAGKENLEYPSVTLPPQPHTKEGVDAYNEVIARVRMWVNLNLWQKLKLSRDDAKPLLRLKGFPSFPLVERQANEVDWWDMVCNVKKLINEKKEDGKVFWQNLAGYKRQEALRPYLSSEEDRKKGKKFARYQLGDLLLHLEKKHGEDWGKVYDEAWERIDKKVEGLSKHIKLEEERRSEDAQSKAALTDWLRAKASFVIEGSKEADKDEFCRCELKLQKWYGDLRGKPFAIEAENSILDISGFSKQYNCAFIWQKDGVKKLNLYLIINYFKGGKLRFKKIKPEAFEANRFYTVINKKSGEIVPMEVNFNFDDPNLIILPLAFGKRQGREFIWNDLLSLETGSLKLANGRVIEKTLYNRRTRQDEPALFVALTFERREVLDSSNIKPMNLIGVDRGENIPAVIALTDPEGCPLSRFKDSLGNPTHILRIGESYKEKQRTIQAKKEVEQRRAGGYSRKYASKAKNLADDMVRNTARDLLYYAVTQDAMLIFENLSRGFGRQGKRTFSAERQYTRMEDWLTAKLAYEGLPSKTYLSKTLAQYTSKTCSNCGFTITSADYDRVLEKLKKTATGWMTTINGKELKVEGQITYYNRYKRQNVVKDLSVELDRLSEESVNNDISSWTKGRSGEALSLLKKRFSHRPVQEKFVCLNCGFETHADEQAALNIARSWLFLRSQEYKKYQTNKTTGNTDKRAFVETWQSFYRKKLKEVWKPAV

SEQ ID NO: 45834 - protein, 978 aa, synthetic construct
  REGION 1..978: note = engineered CasX variant
QEIKRINKIRRRLVKDSNTKKAGKTGPMKTLLVRVMTPDLRERLENLRKKPENIPQPISNTSRANLNKLLTDYTEMKKAILHVYWEEFQKDPVGLMSRVAQPASKKIDQNKLKPEMDEKGNLTTAGFACSQCGQPLFVYKLEQVSEKGKAYTNYFGRCNVAEHEKLILLAQLKPEKDSDEAVTYSLGKFGQRALDFYSIHVTKESTHPVKPLAQIAGNRYASSPVGKALSDACMGTIASFLSKYQDIIIEHQKVVKGNQKRLESLRELAGKENLEYPSVTLPPQPHTKEGVDAYNEVIARVRMWVNLNLWQKLKLSRDDAKPLLRLKGFPSFPLVERQANEVDWWDMVCNVKKLINEKKEDGKVFWQNLAGYKRQEALRPYLSSEEDRKKGKKFARYQLGDLLLHLEKKHGEDWGKVYDEAWERIDKKVEGLSKHIKLEEERRSEDAQSKAALTDWLRAKASFVIEGSKEADKDEFCRCELKLQKWYGDLRGKPFAIEAENSILDISGFSKQYNCAFIWQKDGVKKLNLYLIINYFKGGKLRFKKIKPEAFEANRFYTVINKKSGEIVPMEVNFNFDDPNLIILPLAFGKRQGREFIWNDLLSLETGSLKLANGRVIEKTLYNRRTRQDEPALFVALTFERREVLDSSNIKPMNLIGVDRGENIPAVIALTDPEGCPLSRFKDSLGNPTHILRIGESYKEKQRTIQAKKEVEQRRAGGYSRKYASKAKNLADDMVRNTARDLLYYAVTQDAMLIFENLSRGFGRQGKRTFSAERQYTRMEDWLTAKLAYEGLPSKTYLSKTLAQYTSKTCSNCGFTITSADYDRVLEKLKKTATGWMTTINGKELKVEGQITYYNRYKRQNVVKDLSVELDRLSEESVNNDISSWTKGRSGEALSLLKKRFSHRPVQEKFVCLNCGFETHADEQAALNIARSWLFLRSQEYKKYQTNKTTGNTDKRAFVETWQSFYRKKLKEVWKPAV

SEQ ID NO: 45835 - protein, 978 aa, synthetic construct
  REGION 1..978: note = engineered CasX variant
QEIKRINKIRRRLVKDSNTKKAGKTGPMKTLLVRVMTPDLRERLENLRKKPENIPQPISNTSRANLNKLLTDYTEMKKAILHVYWEEFQKDPVGLMSRVAQPASKKIDQNKLKPEMDEKGNLTTAGFACSQCGQPLFVYKLEQVSEKGKAYTNYFGRCNVAEHEKLILLAQLKPEKDSDEAVTYSLGKFGQRALDFYSIHVTKESTHPVKPLAQIAGNRYASTPVGKALSDACMGTIASFLSKYQDIIIEHQKVVKGNQKRLESLRELAGKENLEYPSVTLPPQPHTKEGVDAYNEVIARVRMWVNLNLWQKLKLSRDDAKPLLRLKGFPSFPLVERQANEVDWWDMVCNVKKLINEKKEDGKVFWQNLAGYKRQEALRPYLSSEEDRKKGKKFARYQLGDLLLHLEKKHGEDWGKVYDEAWERIDKKVEGLSKHIKLEEERRSEDAQSKAALTDWLRAKASFVIEGSKEADKDEFCRCELKLQKWYGDLRGKPFAIEAENSILDISGFSKQYNCAFIWQKDGVKKLNLYLIINYFKGGKLRFKKIKPEAFEANRFYTVINKKSGEIVPMEVNFNFDDPNLIILPLAFGKRQGREFIWNDLLSLETGSLKLANGRVIEKTLYNRRTRQDEPALFVALTFERREVLDSSNIKPMNLIGVDRGENIPAVIALTDPEGCPLSRFKDSLGNPTHILRIGESYKEKQRTIQAKKEVEQRRAGGYSRKYASKAKNLADDMVRNTARDLLYYAVTQDAMLIFENLSRGFGRQGKRTFSAERQYTRMEDWLTAKLAYEGLPSKTYLSKTLAQYTSKTCSNCGFTITSADYDRVLEKLKKTATGWMTTINGKELKVEGQITYYNRYKRQNVVKDLSVELDRLSEESVNNDISSWTKGRSGEALSLLKKRFSHRPVQEKFVCLNCGFETHADEQAALNIARSWLFLRSQEYKKYQTNKTTGNTDKRAFVETWQSFYRKKLKEVWKPAV

SEQ ID NO: 45836 - protein, 978 aa, synthetic construct
  REGION 1..978: note = engineered CasX variant
QEIKRINKIRRRLVKDSNTKKAGKTGPMKTLLVRVMTPDLRERLENLRKKPENIPQPISNTSRANLNKLLTDYTEMKKAILHVYWEEFQKDPVGLMSRVAQPASKKIDQNKLKPEMDEKGNLTTAGFACSQCGQPLFVYKLEQVSEKGKAYTNYFGRCNVAEHEKLILLAQLKPEKDSDEAVTYSLGKFGQRALDFYSIHVTKESTHPVKPLAQIAGNRYASAPVGKALSDACMGTIASFLSKYQDIIIEHQKVVKGNQKRLESLRELAGKENLEYPSVTLPPQPHTKEGVDAYNEVIARVRMWVNLNLWQKLKLSRDDAKPLLRLKGFPSFPLVERQANEVDWWDMVCNVKKLINEKKEDGKVFWQNLAGYKRQEALRPYLSSEEDRKKGKKFARYQLGDLLLHLEKKHGEDWGKVYDEAWERIDKKVEGLSKHIKLEEERRSEDAQSKAALTDWLRAKASFVIEGSKEADKDEFCRCELKLQKWYGDLRGKPFAIEAENSILDISGFSKQYNCAFIWQKDGVKKLNLYLIINYFKGGKLRFKKIKPEAFEANRFYTVINKKSGEIVPMEVNFNFDDPNLIILPLAFGKRQGREFIWNDLLSLETGSLKLANGRVIEKTLYNRRTRQDEPALFVALTFERREVLDSSNIKPMNLIGVDRGENIPAVIALTDPEGCPLSRFKDSLGNPTHILRIGESYKEKQRTIQAKKEVEQRRAGGYSRKYASKAKNLADDMVRNTARDLLYYAVTQDAMLIFENLSRGFGRQGKRTFSAERQYTRMEDWLTAKLAYEGLPSKTYLSKTLAQYTSKTCSNCGFTITSADYDRVLEKLKKTATGWMTTINGKELKVEGQITYYNRYKRQNVVKDLSVELDRLSEESVNNDISSWTKGRSGEALSLLKKRFSHRPVQEKFVCLNCGFETHADEQAALNIARSWLFLRSQEYKKYQTNKTTGNTDKRAFVETWQSFYRKKLKEVWKPAV

SEQ ID NO: 45837 - protein, 978 aa, synthetic construct
  REGION 1..978: note = engineered CasX variant
QEIKRINKIRRRLVKDSNTKKAGKTGPMKTLLVRVMTPDLRERLENLRKKPENIPQPISNTSRANLNKLLTDYTEMKKAILHVYWEEFQKDPVGLMSRVAQPASKKIDQNKLKPEMDEKGNLTTAGFACSQCGQPLFVYKLEQVSEKGKAYTNYFGRCNVAEHEKLILLAQLKPEKDSDEAVTYSLGKFGQRALDFYSIHVTKESTHPVKPLAQIAGNRYASVPVGKALSDACMGTIASFLSKYQDIIIEHQKVVKGNQKRLESLRELAGKENLEYPSVTLPPQPHTKEGVDAYNEVIARVRMWVNLNLWQKLKLSRDDAKPLLRLKGFPSFPLVERQANEVDWWDMVCNVKKLINEKKEDGKVFWQNLAGYKRQEALRPYLSSEEDRKKGKKFARYQLGDLLLHLEKKHGEDWGKVYDEAWERIDKKVEGLSKHIKLEEERRSEDAQSKAALTDWLRAKASFVIEGSKEADKDEFCRCELKLQKWYGDLRGKPFAIEAENSILDISGFSKQYNCAFIWQKDGVKKLNLYLIINYFKGGKLRFKKIKPEAFEANRFYTVINKKSGEIVPMEVNFNFDDPNLIILPLAFGKRQGREFIWNDLLSLETGSLKLANGRVIEKTLYNRRTRQDEPALFVALTFERREVLDSSNIKPMNLIGVDRGENIPAVIALTDPEGCPLSRFKDSLGNPTHILRIGESYKEKQRTIQAKKEVEQRRAGGYSRKYASKAKNLADDMVRNTARDLLYYAVTQDAMLIFENLSRGFGRQGKRTFSAERQYTRMEDWLTAKLAYEGLPSKTYLSKTLAQYTSKTCSNCGFTITSADYDRVLEKLKKTATGWMTTINGKELKVEGQITYYNRYKRQNVVKDLSVELDRLSEESVNNDISSWTKGRSGEALSLLKKRFSHRPVQEKFVCLNCGFETHADEQAALNIARSWLFLRSQEYKKYQTNKTTGNTDKRAFVETWQSFYRKKLKEVWKPAV

SEQ ID NO: 45838 - protein, 978 aa, synthetic construct
  REGION 1..978: note = engineered CasX variant
QEIKRINKIRRRLVKDSNTKKAGKTGPMKTLLVRVMTPDLRERLENLRKKPENIPQPISNTSRANLNKLLTDYTEMKKAILHVYWEEFQKDPVGLMSRVAQPASKKIDQNKLKPEMDEKGNLTTAGFACSQCGQPLFVYKLEQVSEKGKAYTNYFGRCNVAEHEKLIKLAQLKPEKDSDEAVTYSLGKFGQRALDFYSIHVTKESTHPVKPLAQIAGNRYASGPVGKALSDACMGTIASFLSKYQDIIIEHQKVVKGNQKRLESLRELAGKENLEYPSVTLPPQPHTKEGVDAYNEVIARVRMWVNLNLWQKLKLSRDDAKPLLRLKGFPSFPLVERQANEVDWWDMVCNVKKLINEKKEDGKVFWQNLAGYKRQEALRPYLSSEEDRKKGKKFARYQLGDLLLHLEKKHGEDWGKVYDEAWERIDKKVEGLSKHIKLEEERRSEDAQSKAALTDWLRAKASFVIEGSKEADKDEFCRCELKLQKWYGDLRGKPFAIEAENSILDISGFSKQYNCAFIWQKDGVKKLNLYLIINYFKGGKLRFKKIKPEAFEANRFYTVINKKSGEIVPMEVNFNFDDPNLIILPLAFGKRQGREFIWNDLLSLETGSLKLANGRVIEKTLYNRRTRQDEPALFVALTFERREVLDSSNIKPMNLIGVDRGENIPAVIALTDPEGCPLSRFKDSLGNPTHILRIGESYKEKQRTIQAKKEVEQRRAGGYSRKYASKAKNLADDMVRNTARDLLYYAVTQDAMLIFENLSRGFGRQGKRTFSAERQYTRMEDWLTAKLAYEGLPSKTYLSKTLAQYTSKTCSNCGFTITSADYDRVLEKLKKTATGWMTTINGKELKVEGQITYYNRYKRQNVVKDLSVELDRLSEESVNNDISSWTKGRSGEALSLLKKRFSHRPVQEKFVCLNCGFETHADEQAALNIARSWLFLRSQEYKKYQTNKTTGNTDKRAFVETWQSFYRKKLKEVWKPAV

SEQ ID NO: 45839 - protein, 977 aa, synthetic construct
  REGION 1..977: note = engineered CasX variant
QEIKRINKIRRRLVKDSNTKKAGKTGPMKTLLVRVMTPDLRERLENLRKKPENIPQPISNTSRANLNKLLTDYTEMKKAILHVYWEEFQKDPVGLMSRVAQPASKKIDQNKLKPEMDEKGNLTTAGFACSQCGQPLFVYKLEQVSEKGKAYTNYFGRCNVAEHEKLILLAQLKPEKDSDEAVTYSLGKFGQRALDFYSIHVTKESTHPVKPLAQIAGNRYASPVGKALSDACMGTIASFLSKYQDIIIEHQKVVKGNQKRLESLRELAGKENLEYPSVTLPPQPHTKEGVDAYNEVIARVRMWVNLNLWQKLKLSRDDAKPLLRLKGFPSFPLVERQANEVDWWDMVCNVKKLINEKKEDGKVFWQNLAGYKRQEALRPYLSSEEDRKKGKKFARYQLGDLLLHLEKKHGEDWGKVYDEAWERIDKKVEGLSKHIKLEEERRSEDAQSKAALTDWLRAKASFVIEGSKEADKDEFCRCELKLQKWYGDLRGKPFAIEAENSILDISGFSKQYNCAFIWQKDGVKKLNLYLIINYFKGGKLRFKKIKPEAFEANRFYTVINKKSGEIVPMEVNFNFDDPNLIILPLAFGKRQGREFIWNDLLSLETGSLKLANGRVIEKTLYNRRTRQDEPALFVALTFERREVLDSSNIKPMNLIGVDRGENIPAVIALTDPEGCPLSRFKDSLGNPTHILRIGESYKEKQRTIQAKKEVEQRRAGGYSRKYASKAKNLADDMVRNTARDLLYYAVTQDAMLIFENLSRGFGRQGKRTFSAERQYTRMEDWLTAKLAYEGLPSKTYLSKTLAQYTSKTCSNCGFTITSADYDRVLEKLKKTATGWMTTINGKELKVEGQITYYNRYKRQNVVKDLSVELDRLSEESVNNDISSWTKGRSGEALSLLKKRFSHRPVQEKFVCLNCGFETHADEQAALNIARSWLFLRSQEYKKYQTNKTTGNTDKRAFVETWQSFYRKKLKEVWKPAV

SEQ ID NO: 45840 - protein, 979 aa, synthetic construct
  REGION 1..979: note = engineered CasX variant
QEIKRINKIRRRLVKDSNTKKAGKTGPMKTLLVRVMTPDLRERLENLRKKPENIPQPISNTSRANLNKLLTDYTEMKKAILHVYWEEFQKDPVGLMSRVAQPASKKIDQNKLKPEMDEKGNLTTAGFACSQCGQPLFVYKLEQVSEKGKAYTNYFGRCNVAEHEKLILLAQLKPEKDSDEAVTYSLGKFGQRALDFYSIHVTKESTHPVKPLAQIAGNRYASYPVGKALSDACMGTIASFLSKYQDIIIEHQKVVKGNQKRLESLRELAGKENLEYPSVTLPPQPHTKEGVDAYNEVIARVRMWVNLNLWQKLKLSRDDAKPLLRLKGFPSFPLVERQANEVDWWDMVCNVKKLINEKKEDGKVFWQNLAGYKRQEALRPYLSSEEDRKKGKKFARYQLGDLLLHLEKKHGEDWGKVYDEAWERIDKKVEGLSKHIKLEEERRSEDAQSKAALTDWLRAKASFVIEGLKEADDKDEFCRCELKLQKWYGDLRGKPFAIEAENSILDISGFSKQYNCAFIWQKDGVKKLNLYLIINYFKGGKLRFKKIKPEAFEANRFYTVINKKSGEIVPMEVNFNFDDPNLIILPLAFGKRQGREFIWNDLLSLETGSLKLANGRVIEKTLYNRRTRQDEPALFVALTFERREVLDSSNIKPMNLIGVDRGENIPAVIALTDPEGCPLSRFKDSLGNPTHILRIGESYKEKQRTIQAKKEVEQRRAGGYSRKYASKAKNLADDMVRNTARDLLYYAVTQDAMLIFENLSRGFGRQGKRTFSAERQYTRMEDWLTAKLAYEGLPSKTYLSKTLAQYTSKTCSNCGFTITSADYDRVLEKLKKTATGWMTTINGKELKVEGQITYYNRYKRQNVVKDLSVELDRLSEESVNNDISSWTKGRSGEALSLLKKRFSHRPVQEKFVCLNCGFETHADEQAALNIARSWLFLRSQEYKKYQTNKTTGNTDKRAFVETWQSFYRKKLKEVWKPAV

SEQ ID NO: 45841 - protein, 979 aa, synthetic construct
  REGION 1..979: note = engineered CasX variant
QEIKRINKIRRRLVKDSNTKKAGKTGPMKTLLVRVMTPDLRERLENLRKKPENIPQPISNTSRANLNKLLTDYTEMKKAILHVYWEEFQKDPVGLMSRVAQPASKKIDQNKLKPEMDEKGNLTTAGFACSQCGQPLFVYKLEQVSEKGKAYTNYFGRCNVAEHEKLILLAQLKPEKDSDEAVTYSLGKFGQRALDFYSIHVTKESTHPVKPLAQIAGNRYASHPVGKALSDACMGTIASFLSKYQDIIIEHQKVVKGNQKRLESLRELAGKENLEYPSVTLPPQPHTKEGVDAYNEVIARVRMWVNLNLWQKLKLSRDDAKPLLRLKGFPSFPLVERQANEVDWWDMVCNVKKLINEKKEDGKVFWQNLAGYKRQEALRPYLSSEEDRKKGKKFARYQLGDLLLHLEKKHGEDWGKVYDEAWERIDKKVEGLSKHIKLEEERRSEDAQSKAALTDWLRAKASFVIEGLKEADDKDEFCRCELKLQKWYGDLRGKPFAIEAENSILDISGFSKQYNCAFIWQKDGVKKLNLYLIINYFKGGKLRFKKIKPEAFEANRFYTVINKKSGEIVPMEVNFNFDDPNLIILPLAFGKRQGREFIWNDLLSLETGSLKLANGRVIEKTLYNRRTRQDEPALFVALTFERREVLDSSNIKPMNLIGVDRGENIPAVIALTDPEGCPLSRFKDSLGNPTHILRIGESYKEKQRTIQAKKEVEQRRAGGYSRKYASKAKNLADDMVRNTARDLLYYAVTQDAMLIFENLSRGFGRQGKRTFSAERQYTRMEDWLTAKLAYEGLPSKTYLSKTLAQYTSKTCSNCGFTITSADYDRVLEKLKKTATGWMTTINGKELKVEGQITYYNRYKRQNVVKDLSVELDRLSEESVNNDISSWTKGRSGEALSLLKKRFSHRPVQEKFVCLNCGFETHADEQAALNIARSWLFLRSQEYKKYQTNKTTGNTDKRAFVETWQSFYRKKLKEVWKPAV

SEQ ID NO: 45842 - protein, 979 aa, synthetic construct
  REGION 1..979: note = engineered CasX variant
QEIKRINKIRRRLVKDSNTKKAGKTGPMKTLLVRVMTPDLRERLENLRKKPENIPQPISNTSRANLNKLLTDYTEMKKAILHVYWEEFQKDPVGLMSRVAQPASKKIDQNKLKPEMDEKGNLTTAGFACSQCGQPLFVYKLEQVSEKGKAYTNYFGRCNVAEHEKLILLAQLKPEKDSDEAVTYSLGKFGQRALDFYSIHVTKESTHPVKPLAQIAGNRYASSPVGKALSDACMGTIASFLSKYQDIIIEHQKVVKGNQKRLESLRELAGKENLEYPSVTLPPQPHTKEGVDAYNEVIARVRMWVNLNLWQKLKLSRDDAKPLLRLKGFPSFPLVERQANEVDWWDMVCNVKKLINEKKEDGKVFWQNLAGYKRQEALRPYLSSEEDRKKGKKFARYQLGDLLLHLEKKHGEDWGKVYDEAWERIDKKVEGLSKHIKLEEERRSEDAQSKAALTDWLRAKASFVIEGLKEADDKDEFCRCELKLQKWYGDLRGKPFAIEAENSILDISGFSKQYNCAFIWQKDGVKKLNLYLIINYFKGGKLRFKKIKPEAFEANRFYTVINKKSGEIVPMEVNFNFDDPNLIILPLAFGKRQGREFIWNDLLSLETGSLKLANGRVIEKTLYNRRTRQDEPALFVALTFERREVLDSSNIKPMNLIGVDRGENIPAVIALTDPEGCPLSRFKDSLGNPTHILRIGESYKEKQRTIQAKKEVEQRRAGGYSRKYASKAKNLADDMVRNTARDLLYYAVTQDAMLIFENLSRGFGRQGKRTFSAERQYTRMEDWLTAKLAYEGLPSKTYLSKTLAQYTSKTCSNCGFTITSADYDRVLEKLKKTATGWMTTINGKELKVEGQITYYNRYKRQNVVKDLSVELDRLSEESVNNDISSWTKGRSGEALSLLKKRFSHRPVQEKFVCLNCGFETHADEQAALNIARSWLFLRSQEYKKYQTNKTTGNTDKRAFVETWQSFYRKKLKEVWKPAV

SEQ ID NO: 45843 - protein, 979 aa, synthetic construct
  REGION 1..979: note = engineered CasX variant
QEIKRINKIRRRLVKDSNTKKAGKTGPMKTLLVRVMTPDLRERLENLRKKPENIPQPISNTSRANLNKLLTDYTEMKKAILHVYWEEFQKDPVGLMSRVAQPASKKIDQNKLKPEMDEKGNLTTAGFACSQCGQPLFVYKLEQVSEKGKAYTNYFGRCNVAEHEKLILLAQLKPEKDSDEAVTYSLGKFGQRALDFYSIHVTKESTHPVKPLAQIAGNRYASTPVGKALSDACMGTIASFLSKYQDIIIEHQKVVKGNQKRLESLRELAGKENLEYPSVTLPPQPHTKEGVDAYNEVIARVRMWVNLNLWQKLKLSRDDAKPLLRLKGFPSFPLVERQANEVDWWDMVCNVKKLINEKKEDGKVFWQNLAGYKRQEALRPYLSSEEDRKKGKKFARYQLGDLLLHLEKKHGEDWGKVYDEAWERIDKKVEGLSKHIKLEEERRSEDAQSKAALTDWLRAKASFVIEGLKEADDKDEFCRCELKLQKWYGDLRGKPFAIEAENSILDISGFSKQYNCAFIWQKDGVKKLNLYLIINYFKGGKLRFKKIKPEAFEANRFYTVINKKSGEIVPMEVNFNFDDPNLIILPLAFGKRQGREFIWNDLLSLETGSLKLANGRVIEKTLYNRRTRQDEPALFVALTFERREVLDSSNIKPMNLIGVDRGENIPAVIALTDPEGCPLSRFKDSLGNPTHILRIGESYKEKQRTIQAKKEVEQRRAGGYSRKYASKAKNLADDMVRNTARDLLYYAVTQDAMLIFENLSRGFGRQGKRTFSAERQYTRMEDWLTAKLAYEGLPSKTYLSKTLAQYTSKTCSNCGFTITSADYDRVLEKLKKTATGWMTTINGKELKVEGQITYYNRYKRQNVVKDLSVELDRLSEESVNNDISSWTKGRSGEALSLLKKRFSHRPVQEKFVCLNCGFETHADEQAALNIARSWLFLRSQEYKKYQTNKTTGNTDKRAFVETWQSFYRKKLKEVWKPAV

SEQ ID NO: 45844 - protein, 979 aa, synthetic construct
  REGION 1..979: note = engineered CasX variant
QEIKRINKIRRRLVKDSNTKKAGKTGPMKTLLVRVMTPDLRERLENLRKKPENIPQPISNTSRANLNKLLTDYTEMKKAILHVYWEEFQKDPVGLMSRVAQPASKKIDQNKLKPEMDEKGNLTTAGFACSQCGQPLFVYKLEQVSEKGKAYTNYFGRCNVAEHEKLILLAQLKPEKDSDEAVTYSLGKFGQRALDFYSIHVTKESTHPVKPLAQIAGNRYASAPVGKALSDACMGTIASFLSKYQDIIIEHQKVVKGNQKRLESLRELAGKENLEYPSVTLPPQPHTKEGVDAYNEVIARVRMWVNLNLWQKLKLSRDDAKPLLRLKGFPSFPLVERQANEVDWWDMVCNVKKLINEKKEDGKVFWQNLAGYKRQEALRPYLSSEEDRKKGKKFARYQLGDLLLHLEKKHGEDWGKVYDEAWERIDKKVEGLSKHIKLEEERRSEDAQSKAALTDWLRAKASFVIEGLKEADDKDEFCRCELKLQKWYGDLRGKPFAIEAENSILDISGFSKQYNCAFIWQKDGVKKLNLYLIINYFKGGKLRFKKIKPEAFEANRFYTVINKKSGEIVPMEVNFNFDDPNLIILPLAFGKRQGREFIWNDLLSLETGSLKLANGRVIEKTLYNRRTRQDEPALFVALTFERREVLDSSNIKPMNLIGVDRGENIPAVIALTDPEGCPLSRFKDSLGNPTHILRIGESYKEKQRTIQAKKEVEQRRAGGYSRKYASKAKNLADDMVRNTARDLLYYAVTQDAMLIFENLSRGFGRQGKRTFSAERQYTRMEDWLTAKLAYEGLPSKTYLSKTLAQYTSKTCSNCGFTITSADYDRVLEKLKKTATGWMTTINGKELKVEGQITYYNRYKRQNVVKDLSVELDRLSEESVNNDISSWTKGRSGEALSLLKKRFSHRPVQEKFVCLNCGFETHADEQAALNIARSWLFLRSQEYKKYQTNKTTGNTDKRAFVETWQSFYRKKLKEVWKPAV

SEQ ID NO: 45845 - protein, 979 aa, synthetic construct
  REGION 1..979: note = engineered CasX variant
QEIKRINKIRRRLVKDSNTKKAGKTGPMKTLLVRVMTPDLRERLENLRKKPENIPQPISNTSRANLNKLLTDYTEMKKAILHVYWEEFQKDPVGLMSRVAQPASKKIDQNKLKPEMDEKGNLTTAGFACSQCGQPLFVYKLEQVSEKGKAYTNYFGRCNVAEHEKLILLAQLKPEKDSDEAVTYSLGKFGQRALDFYSIHVTKESTHPVKPLAQIAGNRYASVPVGKALSDACMGTIASFLSKYQDIIIEHQKVVKGNQKRLESLRELAGKENLEYPSVTLPPQPHTKEGVDAYNEVIARVRMWVNLNLWQKLKLSRDDAKPLLRLKGFPSFPLVERQANEVDWWDMVCNVKKLINEKKEDGKVFWQNLAGYKRQEALRPYLSSEEDRKKGKKFARYQLGDLLLHLEKKHGEDWGKVYDEAWERIDKKVEGLSKHIKLEEERRSEDAQSKAALTDWLRAKASFVIEGLKEADDKDEFCRCELKLQKWYGDLRGKPFAIEAENSILDISGFSKQYNCAFIWQKDGVKKLNLYLIINYFKGGKLRFKKIKPEAFEANRFYTVINKKSGEIVPMEVNFNFDDPNLIILPLAFGKRQGREFIWNDLLSLETGSLKLANGRVIEKTLYNRRTRQDEPALFVALTFERREVLDSSNIKPMNLIGVDRGENIPAVIALTDPEGCPLSRFKDSLGNPTHILRIGESYKEKQRTIQAKKEVEQRRAGGYSRKYASKAKNLADDMVRNTARDLLYYAVTQDAMLIFENLSRGFGRQGKRTFSAERQYTRMEDWLTAKLAYEGLPSKTYLSKTLAQYTSKTCSNCGFTITSADYDRVLEKLKKTATGWMTTINGKELKVEGQITYYNRYKRQNVVKDLSVELDRLSEESVNNDISSWTKGRSGEALSLLKKRFSHRPVQEKFVCLNCGFETHADEQAALNIARSWLFLRSQEYKKYQTNKTTGNTDKRAFVETWQSFYRKKLKEVWKPAV

SEQ ID NO: 45846 - protein, 979 aa, synthetic construct
  REGION 1..979: note = engineered CasX variant
QEIKRINKIRRRLVKDSNTKKAGKTGPMKTLLVRVMTPDLRERLENLRKKPENIPQPISNTSRANLNKLLTDYTEMKKAILHVYWEEFQKDPVGLMSRVAQPASKKIDQNKLKPEMDEKGNLTTAGFACSQCGQPLFVYKLEQVSEKGKAYTNYFGRCNVAEHEKLIKLAQLKPEKDSDEAVTYSLGKFGQRALDFYSIHVTKESTHPVKPLAQIAGNRYASGPVGKALSDACMGTIASFLSKYQDIIIEHQKVVKGNQKRLESLRELAGKENLEYPSVTLPPQPHTKEGVDAYNEVIARVRMWVNLNLWQKLKLSRDDAKPLLRLKGFPSFPLVERQANEVDWWDMVCNVKKLINEKKEDGKVFWQNLAGYKRQEALRPYLSSEEDRKKGKKFARYQLGDLLLHLEKKHGEDWGKVYDEAWERIDKKVEGLSKHIKLEEERRSEDAQSKAALTDWLRAKASFVIEGLKEADDKDEFCRCELKLQKWYGDLRGKPFAIEAENSILDISGFSKQYNCAFIWQKDGVKKLNLYLIINYFKGGKLRFKKIKPEAFEANRFYTVINKKSGEIVPMEVNFNFDDPNLIILPLAFGKRQGREFIWNDLLSLETGSLKLANGRVIEKTLYNRRTRQDEPALFVALTFERREVLDSSNIKPMNLIGVDRGENIPAVIALTDPEGCPLSRFKDSLGNPTHILRIGESYKEKQRTIQAKKEVEQRRAGGYSRKYASKAKNLADDMVRNTARDLLYYAVTQDAMLIFENLSRGFGRQGKRTFSAERQYTRMEDWLTAKLAYEGLPSKTYLSKTLAQYTSKTCSNCGFTITSADYDRVLEKLKKTATGWMTTINGKELKVEGQITYYNRYKRQNVVKDLSVELDRLSEESVNNDISSWTKGRSGEALSLLKKRFSHRPVQEKFVCLNCGFETHADEQAALNIARSWLFLRSQEYKKYQTNKTTGNTDKRAFVETWQSFYRKKLKEVWKPAV

SEQ ID NO: 45847 - protein, 978 aa, synthetic construct
  REGION 1..978: note = engineered CasX variant
QEIKRINKIRRRLVKDSNTKKAGKTGPMKTLLVRVMTPDLRERLENLRKKPENIPQPISNTSRANLNKLLTDYTEMKKAILHVYWEEFQKDPVGLMSRVAQPASKKIDQNKLKPEMDEKGNLTTAGFACSQCGQPLFVYKLEQVSEKGKAYTNYFGRCNVAEHEKLILLAQLKPEKDSDEAVTYSLGKFGQRALDFYSIHVTKESTHPVKPLAQIAGNRYASPVGKALSDACMGTIASFLSKYQDIIIEHQKVVKGNQKRLESLRELAGKENLEYPSVTLPPQPHTKEGVDAYNEVIARVRMWVNLNLWQKLKLSRDDAKPLLRLKGFPSFPLVERQANEVDWWDMVCNVKKLINEKKEDGKVFWQNLAGYKRQEALRPYLSSEEDRKKGKKFARYQLGDLLLHLEKKHGEDWGKVYDEAWERIDKKVEGLSKHIKLEEERRSEDAQSKAALTDWLRAKASFVIEGLKEADDKDEFCRCELKLQKWYGDLRGKPFAIEAENSILDISGFSKQYNCAFIWQKDGVKKLNLYLIINYFKGGKLRFKKIKPEAFEANRFYTVINKKSGEIVPMEVNFNFDDPNLIILPLAFGKRQGREFIWNDLLSLETGSLKLANGRVIEKTLYNRRTRQDEPALFVALTFERREVLDSSNIKPMNLIGVDRGENIPAVIALTDPEGCPLSRFKDSLGNPTHILRIGESYKEKQRTIQAKKEVEQRRAGGYSRKYASKAKNLADDMVRNTARDLLYYAVTQDAMLIFENLSRGFGRQGKRTFSAERQYTRMEDWLTAKLAYEGLPSKTYLSKTLAQYTSKTCSNCGFTITSADYDRVLEKLKKTATGWMTTINGKELKVEGQITYYNRYKRQNVVKDLSVELDRLSEESVNNDISSWTKGRSGEALSLLKKRFSHRPVQEKFVCLNCGFETHADEQAALNIARSWLFLRSQEYKKYQTNKTTGNTDKRAFVETWQSFYRKKLKEVWKPAV

SEQ ID NO: 45848 - protein, 979 aa, synthetic construct
  REGION 1..979: note = engineered CasX variant
QEIKRINKIRRRLVKDSNTKKAGKTGPMKTLLVRVMTPDLRERLENLRKKPENIPQPISNTSRANLNKLLTDYTEMKKAILHVYWEEFQKDPVGLMSRVAQPASKKIDQNKLKPEMDEKGNLTTAGFACSQCGQPLFVYKLEQVSEKGKAYTNYFGRCNVAEHEKLILLAQLKPEKDSDEAVTYSLGKFGQRALDFYSIHVTKESTHPVKPLAQIAGNRYASYPVGKALSDACMGTIASFLSKYQDIIIEHQKVVKGNQKRLESLRELAGKENLEYPSVTLPPQPHTKEGVDAYNEVIARVRMWVNLNLWQKLKLSRDDAKPLLRLKGFPSFPLVERQANEVDWWDMVCNVKKLINEKKEDGKVFWQNLAGYKRQEALRPYLSSEEDRKKGKKFARYQLGDLLLHLEKKHGEDWGKVYDEAWERIDKKVEGLSKHIKLEEERRSEDAQSKAALTDWLRAKASFVIEGLKEADKDEFCRCELKLQKWYGDLRGKPFAIEAENSILDISGFSKQYNCAFIWQKDGVKKLNLYLIINYFKGGKLRFKKIKPEAFEANRFYTVINKKSGEIVPMEVNFNFDDPNLIILPLAFGKRQGREFIWNDLLSLETGSLKLANGRVIEKTLYNRRTRQDEPALFVALTFERREVLDSSNIKPMNLIGVDRGENIPAVIALTDPEGCPLSRFKDSLGNPTHILRIGESYKEKQRTIQAKKEVEQRRAGGYSRKYASKAKNLADDMVRNTARDLLYYAVTQDAMLIFENLSRGFGRQGKRTFSAERQYTRMEDWLTAKLAYEGLPSKTYLSKTLAQYTSKTCSNCGFTITSADYDRVLEKLKKTATGWMTTINGKELKVEGQITYYNRYKRQNVVKDLSVELDRLSEESVNNDISSWTKGRSGNEALSLLKKRFSHRPVQEKFVCLNCGFETHADEQAALNIARSWLFLRSQEYKKYQTNKTTGNTDKRAFVETWQSFYRKKLKEVWKPAV

SEQ ID NO: 45849 - protein, 979 aa, synthetic construct
  REGION 1..979: note = engineered CasX variant
QEIKRINKIRRRLVKDSNTKKAGKTGPMKTLLVRVMTPDLRERLENLRKKPENIPQPISNTSRANLNKLLTDYTEMKKAILHVYWEEFQKDPVGLMSRVAQPASKKIDQNKLKPEMDEKGNLTTAGFACSQCGQPLFVYKLEQVSEKGKAYTNYFGRCNVAEHEKLILLAQLKPEKDSDEAVTYSLGKFGQRALDFYSIHVTKESTHPVKPLAQIAGNRYASHPVGKALSDACMGTIASFLSKYQDIIIEHQKVVKGNQKRLESLRELAGKENLEYPSVTLPPQPHTKEGVDAYNEVIARVRMWVNLNLWQKLKLSRDDAKPLLRLKGFPSFPLVERQANEVDWWDMVCNVKKLINEKKEDGKVFWQNLAGYKRQEALRPYLSSEEDRKKGKKFARYQLGDLLLHLEKKHGEDWGKVYDEAWERIDKKVEGLSKHIKLEEERRSEDAQSKAALTDWLRAKASFVIEGLKEADKDEFCRCELKLQKWYGDLRGKPFAIEAENSILDISGFSKQYNCAFIWQKDGVKKLNLYLIINYFKGGKLRFKKIKPEAFEANRFYTVINKKSGEIVPMEVNFNFDDPNLIILPLAFGKRQGREFIWNDLLSLETGSLKLANGRVIEKTLYNRRTRQDEPALFVALTFERREVLDSSNIKPMNLIGVDRGENIPAVIALTDPEGCPLSRFKDSLGNPTHILRIGESYKEKQRTIQAKKEVEQRRAGGYSRKYASKAKNLADDMVRNTARDLLYYAVTQDAMLIFENLSRGFGRQGKRTFSAERQYTRMEDWLTAKLAYEGLPSKTYLSKTLAQYTSKTCSNCGFTITSADYDRVLEKLKKTATGWMTTINGKELKVEGQITYYNRYKRQNVVKDLSVELDRLSEESVNNDISSWTKGRSGNEALSLLKKRFSHRPVQEKFVCLNCGFETHADEQAALNIARSWLFLRSQEYKKYQTNKTTGNTDKRAFVETWQSFYRKKLKEVWKPAV

SEQ ID NO: 45850 - protein, 979 aa, synthetic construct
  REGION 1..979: note = engineered CasX variant
QEIKRINKIRRRLVKDSNTKKAGKTGPMKTLLVRVMTPDLRERLENLRKKPENIPQPISNTSRANLNKLLTDYTEMKKAILHVYWEEFQKDPVGLMSRVAQPASKKIDQNKLKPEMDEKGNLTTAGFACSQCGQPLFVYKLEQVSEKGKAYTNYFGRCNVAEHEKLILLAQLKPEKDSDEAVTYSLGKFGQRALDFYSIHVTKESTHPVKPLAQIAGNRYASSPVGKALSDACMGTIASFLSKYQDIIIEHQKVVKGNQKRLESLRELAGKENLEYPSVTLPPQPHTKEGVDAYNEVIARVRMWVNLNLWQKLKLSRDDAKPLLRLKGFPSFPLVERQANEVDWWDMVCNVKKLINEKKEDGKVFWQNLAGYKRQEALRPYLSSEEDRKKGKKFARYQLGDLLLHLEKKHGEDWGKVYDEAWERIDKKVEGLSKHIKLEEERRSEDAQSKAALTDWLRAKASFVIEGLKEADKDEFCRCELKLQKWYGDLRGKPFAIEAENSILDISGFSKQYNCAFIWQKDGVKKLNLYLIINYFKGGKLRFKKIKPEAFEANRFYTVINKKSGEIVPMEVNFNFDDPNLIILPLAFGKRQGREFIWNDLLSLETGSLKLANGRVIEKTLYNRRTRQDEPALFVALTFERREVLDSSNIKPMNLIGVDRGENIPAVIALTDPEGCPLSRFKDSLGNPTHILRIGESYKEKQRTIQAKKEVEQRRAGGYSRKYASKAKNLADDMVRNTARDLLYYAVTQDAMLIFENLSRGFGRQGKRTFSAERQYTRMEDWLTAKLAYEGLPSKTYLSKTLAQYTSKTCSNCGFTITSADYDRVLEKLKKTATGWMTTINGKELKVEGQITYYNRYKRQNVVKDLSVELDRLSEESVNNDISSWTKGRSGNEALSLLKKRFSHRPVQEKFVCLNCGFETHADEQAALNIARSWLFLRSQEYKKYQTNKTTGNTDKRAFVETWQSFYRKKLKEVWKPAV

SEQ ID NO: 45851 - protein, 979 aa, synthetic construct
  REGION 1..979: note = engineered CasX variant
QEIKRINKIRRRLVKDSNTKKAGKTGPMKTLLVRVMTPDLRERLENLRKKPENIPQPISNTSRANLNKLLTDYTEMKKAILHVYWEEFQKDPVGLMSRVAQPASKKIDQNKLKPEMDEKGNLTTAGFACSQCGQPLFVYKLEQVSEKGKAYTNYFGRCNVAEHEKLILLAQLKPEKDSDEAVTYSLGKFGQRALDFYSIHVTKESTHPVKPLAQIAGNRYASTPVGKALSDACMGTIASFLSKYQDIIIEHQKVVKGNQKRLESLRELAGKENLEYPSVTLPPQPHTKEGVDAYNEVIARVRMWVNLNLWQKLKLSRDDAKPLLRLKGFPSFPLVERQANEVDWWDMVCNVKKLINEKKEDGKVFWQNLAGYKRQEALRPYLSSEEDRKKGKKFARYQLGDLLLHLEKKHGEDWGKVYDEAWERIDKKVEGLSKHIKLEEERRSEDAQSKAALTDWLRAKASFVIEGLKEADKDEFCRCELKLQKWYGDLRGKPFAIEAENSILDISGFSKQYNCAFIWQKDGVKKLNLYLIINYFKGGKLRFKKIKPEAFEANRFYTVINKKSGEIVPMEVNFNFDDPNLIILPLAFGKRQGREFIWNDLLSLETGSLKLANGRVIEKTLYNRRTRQDEPALFVALTFERREVLDSSNIKPMNLIGVDRGENIPAVIALTDPEGCPLSRFKDSLGNPTHILRIGESYKEKQRTIQAKKEVEQRRAGGYSRKYASKAKNLADDMVRNTARDLLYYAVTQDAMLIFENLSRGFGRQGKRTFSAERQYTRMEDWLTAKLAYEGLPSKTYLSKTLAQYTSKTCSNCGFTITSADYDRVLEKLKKTATGWMTTINGKELKVEGQITYYNRYKRQNVVKDLSVELDRLSEESVNNDISSWTKGRSGNEALSLLKKRFSHRPVQEKFVCLNCGFETHADEQAALNIARSWLFLRSQEYKKYQTNKTTGNTDKRAFVETWQSFYRKKLKEVWKPAV

SEQ ID NO: 45852 - protein, 979 aa, synthetic construct
  REGION 1..979: note = engineered CasX variant
QEIKRINKIRRRLVKDSNTKKAGKTGPMKTLLVRVMTPDLRERLENLRKKPENIPQPISNTSRANLNKLLTDYTEMKKAILHVYWEEFQKDPVGLMSRVAQPASKKIDQNKLKPEMDEKGNLTTAGFACSQCGQPLFVYKLEQVSEKGKAYTNYFGRCNVAEHEKLILLAQLKPEKDSDEAVTYSLGKFGQRALDFYSIHVTKESTHPVKPLAQIAGNRYASAPVGKALSDACMGTIASFLSKYQDIIIEHQKVVKGNQKRLESLRELAGKENLEYPSVTLPPQPHTKEGVDAYNEVIARVRMWVNLNLWQKLKLSRDDAKPLLRLKGFPSFPLVERQANEVDWWDMVCNVKKLINEKKEDGKVFWQNLAGYKRQEALRPYLSSEEDRKKGKKFARYQLGDLLLHLEKKHGEDWGKVYDEAWERIDKKVEGLSKHIKLEEERRSEDAQSKAALTDWLRAKASFVIEGLKEADKDEFCRCELKLQKWYGDLRGKPFAIEAENSILDISGFSKQYNCAFIWQKDGVKKLNLYLIINYFKGGKLRFKKIKPEAFEANRFYTVINKKSGEIVPMEVNFNFDDPNLIILPLAFGKRQGREFIWNDLLSLETGSLKLANGRVIEKTLYNRRTRQDEPALFVALTFERREVLDSSNIKPMNLIGVDRGENIPAVIALTDPEGCPLSRFKDSLGNPTHILRIGESYKEKQRTIQAKKEVEQRRAGGYSRKYASKAKNLADDMVRNTARDLLYYAVTQDAMLIFENLSRGFGRQGKRTFSAERQYTRMEDWLTAKLAYEGLPSKTYLSKTLAQYTSKTCSNCGFTITSADYDRVLEKLKKTATGWMTTINGKELKVEGQITYYNRYKRQNVVKDLSVELDRLSEESVNNDISSWTKGRSGNEALSLLKKRFSHRPVQEKFVCLNCGFETHADEQAALNIARSWLFLRSQEYKKYQTNKTTGNTDKRAFVETWQSFYRKKLKEVWKPAV

SEQ ID NO: 45853 - protein, 979 aa, synthetic construct
  REGION 1..979: note = engineered CasX variant
QEIKRINKIRRRLVKDSNTKKAGKTGPMKTLLVRVMTPDLRERLENLRKKPENIPQPISNTSRANLNKLLTDYTEMKKAILHVYWEEFQKDPVGLMSRVAQPASKKIDQNKLKPEMDEKGNLTTAGFACSQCGQPLFVYKLEQVSEKGKAYTNYFGRCNVAEHEKLILLAQLKPEKDSDEAVTYSLGKFGQRALDFYSIHVTKESTHPVKPLAQIAGNRYASVPVGKALSDACMGTIASFLSKYQDIIIEHQKVVKGNQKRLESLRELAGKENLEYPSVTLPPQPHTKEGVDAYNEVIARVRMWVNLNLWQKLKLSRDDAKPLLRLKGFPSFPLVERQANEVDWWDMVCNVKKLINEKKEDGKVFWQNLAGYKRQEALRPYLSSEEDRKKGKKFARYQLGDLLLHLEKKHGEDWGKVYDEAWERIDKKVEGLSKHIKLEEERRSEDAQSKAALTDWLRAKASFVIEGLKEADKDEFCRCELKLQKWYGDLRGKPFAIEAENSILDISGFSKQYNCAFIWQKDGVKKLNLYLIINYFKGGKLRFKKIKPEAFEANRFYTVINKKSGEIVPMEVNFNFDDPNLIILPLAFGKRQGREFIWNDLLSLETGSLKLANGRVIEKTLYNRRTRQDEPALFVALTFERREVLDSSNIKPMNLIGVDRGENIPAVIALTDPEGCPLSRFKDSLGNPTHILRIGESYKEKQRTIQAKKEVEQRRAGGYSRKYASKAKNLADDMVRNTARDLLYYAVTQDAMLIFENLSRGFGRQGKRTFSAERQYTRMEDWLTAKLAYEGLPSKTYLSKTLAQYTSKTCSNCGFTITSADYDRVLEKLKKTATGWMTTINGKELKVEGQITYYNRYKRQNVVKDLSVELDRLSEESVNNDISSWTKGRSGNEALSLLKKRFSHRPVQEKFVCLNCGFETHADEQAALNIARSWLFLRSQEYKKYQTNKTTGNTDKRAFVETWQSFYRKKLKEVWKPAV

SEQ ID NO: 45854 - protein, 979 aa, synthetic construct
  REGION 1..979: note = engineered CasX variant
QEIKRINKIRRRLVKDSNTKKAGKTGPMKTLLVRVMTPDLRERLENLRKKPENIPQPISNTSRANLNKLLTDYTEMKKAILHVYWEEFQKDPVGLMSRVAQPASKKIDQNKLKPEMDEKGNLTTAGFACSQCGQPLFVYKLEQVSEKGKAYTNYFGRCNVAEHEKLIKLAQLKPEKDSDEAVTYSLGKFGQRALDFYSIHVTKESTHPVKPLAQIAGNRYASGPVGKALSDACMGTIASFLSKYQDIIIEHQKVVKGNQKRLESLRELAGKENLEYPSVTLPPQPHTKEGVDAYNEVIARVRMWVNLNLWQKLKLSRDDAKPLLRLKGFPSFPLVERQANEVDWWDMVCNVKKLINEKKEDGKVFWQNLAGYKRQEALRPYLSSEEDRKKGKKFARYQLGDLLLHLEKKHGEDWGKVYDEAWERIDKKVEGLSKHIKLEEERRSEDAQSKAALTDWLRAKASFVIEGLKEADKDEFCRCELKLQKWYGDLRGKPFAIEAENSILDISGFSKQYNCAFIWQKDGVKKLNLYLIINYFKGGKLRFKKIKPEAFEANRFYTVINKKSGEIVPMEVNFNFDDPNLIILPLAFGKRQGREFIWNDLLSLETGSLKLANGRVIEKTLYNRRTRQDEPALFVALTFERREVLDSSNIKPMNLIGVDRGENIPAVIALTDPEGCPLSRFKDSLGNPTHILRIGESYKEKQRTIQAKKEVEQRRAGGYSRKYASKAKNLADDMVRNTARDLLYYAVTQDAMLIFENLSRGFGRQGKRTFSAERQYTRMEDWLTAKLAYEGLPSKTYLSKTLAQYTSKTCSNCGFTITSADYDRVLEKLKKTATGWMTTINGKELKVEGQITYYNRYKRQNVVKDLSVELDRLSEESVNNDISSWTKGRSGNEALSLLKKRFSHRPVQEKFVCLNCGFETHADEQAALNIARSWLFLRSQEYKKYQTNKTTGNTDKRAFVETWQSFYRKKLKEVWKPAV

SEQ ID NO: 45855 - protein, 978 aa, synthetic construct
  REGION 1..978: note = engineered CasX variant
QEIKRINKIRRRLVKDSNTKKAGKTGPMKTLLVRVMTPDLRERLENLRKKPENIPQPISNTSRANLNKLLTDYTEMKKAILHVYWEEFQKDPVGLMSRVAQPASKKIDQNKLKPEMDEKGNLTTAGFACSQCGQPLFVYKLEQVSEKGKAYTNYFGRCNVAEHEKLILLAQLKPEKDSDEAVTYSLGKFGQRALDFYSIHVTKESTHPVKPLAQIAGNRYASPVGKALSDACMGTIASFLSKYQDIIIEHQKVVKGNQKRLESLRELAGKENLEYPSVTLPPQPHTKEGVDAYNEVIARVRMWVNLNLWQKLKLSRDDAKPLLRLKGFPSFPLVERQANEVDWWDMVCNVKKLINEKKEDGKVFWQNLAGYKRQEALRPYLSSEEDRKKGKKFARYQLGDLLLHLEKKHGEDWGKVYDEAWERIDKKVEGLSKHIKLEEERRSEDAQSKAALTDWLRAKASFVIEGLKEADKDEFCRCELKLQKWYGDLRGKPFAIEAENSILDISGFSKQYNCAFIWQKDGVKKLNLYLIINYFKGGKLRFKKIKPEAFEANRFYTVINKKSGEIVPMEVNFNFDDPNLIILPLAFGKRQGREFIWNDLLSLETGSLKLANGRVIEKTLYNRRTRQDEPALFVALTFERREVLDSSNIKPMNLIGVDRGENIPAVIALTDPEGCPLSRFKDSLGNPTHILRIGESYKEKQRTIQAKKEVEQRRAGGYSRKYASKAKNLADDMVRNTARDLLYYAVTQDAMLIFENLSRGFGRQGKRTFSAERQYTRMEDWLTAKLAYEGLPSKTYLSKTLAQYTSKTCSNCGFTITSADYDRVLEKLKKTATGWMTTINGKELKVEGQITYYNRYKRQNVVKDLSVELDRLSEESVNNDISSWTKGRSGNEALSLLKKRFSHRPVQEKFVCLNCGFETHADEQAALNIARSWLFLRSQEYKKYQTNKTTGNTDKRAFVETWQSFYRKKLKEVWKPAV

SEQ ID NO: 45856 - protein, 978 aa, synthetic construct
  REGION 1..978: note = engineered CasX variant
QEIKRINKIRRRLVKDSNTKKAGKTGPMKTLLVRVMTPDLRERLENLRKKPENIPQPISNTSRANLNKLLTDYTEMKKAILHVYWEEFQKDPVGLMSRVAQPASKKIDQNKLKPEMDEKGNLTTAGFACSQCGQPLFVYKLEQVSEKGKAYTNYFGRCNVAEHEKLILLAQLKPEKDSDEAVTYSLGKFGQRALDFYSIHVTKESTHPVKPLAQIAGNRYASYPVGKALSDACMGTIASFLSKYQDIIIEHQKVVKGNQKRLESLRELAGKENLEYPSVTLPPQPHTKEGVDAYNEVIARVRMWVNLNLWQKLKLSRDDAKPLLRLKGFPSFPLVERQANEVDWWDMVCNVKKLINEKKEDGKVFWQNLAGYKRQEALRPYLSSEEDRQKGKKFARYQLGDLLLHLEKKHGEDWGKVYDEAWERIDKKVEGLSKHIKLEEERRSEDAQSKAALTDWLRAKASFVIEGLKEADKDEFCRCELKLQKWYGDLRGKPFAIEAENSILDISGFSKQYNCAFIWQKDGVKKLNLYLIINYFKGGKLRFKKIKPEAFEANRFYTVINKKSGEIVPMEVNFNFDDPNLIILPLAFGKRQGREFIWNDLLSLETGSLKLANGRVIEKTLYNRRTRQDEPALFVALTFERREVLDSSNIKPMNLIGVDRGENIPAVIALTDPEGCPLSRFKDSLGNPTHILRIGESYKEKQRTIQAKKEVEQRRAGGYSRKYASKAKNLADDMVRNTARDLLYYAVTQDAMLIFENLSRGFGRQGKRTFSAERQYTRMEDWLTAKLAYEGLPSKTYLSKTLAQYTSKTCSNCGFTITSADYDRVLEKLKKTATGWMTTINGKELKVEGQITYYNRYKRQNVVKDLSVELDRLSEESVNNDISSWTKGRSGEALSLLKKRFSHRPVQEKFVCLNCGFETHADEQAALNIARSWLFLRSQEYKKYQTNKTTGNTDKRAFVETWQSFYRKKLKEVWKPAV

SEQ ID NO: 45857 - protein, 978 aa, synthetic construct
  REGION 1..978: note = engineered CasX variant
QEIKRINKIRRRLVKDSNTKKAGKTGPMKTLLVRVMTPDLRERLENLRKKPENIPQPISNTSRANLNKLLTDYTEMKKAILHVYWEEFQKDPVGLMSRVAQPASKKIDQNKLKPEMDEKGNLTTAGFACSQCGQPLFVYKLEQVSEKGKAYTNYFGRCNVAEHEKLILLAQLKPEKDSDEAVTYSLGKFGQRALDFYSIHVTKESTHPVKPLAQIAGNRYASHPVGKALSDACMGTIASFLSKYQDIIIEHQKVVKGNQKRLESLRELAGKENLEYPSVTLPPQPHTKEGVDAYNEVIARVRMWVNLNLWQKLKLSRDDAKPLLRLKGFPSFPLVERQANEVDWWDMVCNVKKLINEKKEDGKVFWQNLAGYKRQEALRPYLSSEEDRQKGKKFARYQLGDLLLHLEKKHGEDWGKVYDEAWERIDKKVEGLSKHIKLEEERRSEDAQSKAALTDWLRAKASFVIEGLKEADKDEFCRCELKLQKWYGDLRGKPFAIEAENSILDISGFSKQYNCAFIWQKDGVKKLNLYLIINYFKGGKLRFKKIKPEAFEANRFYTVINKKSGEIVPMEVNFNFDDPNLIILPLAFGKRQGREFIWNDLLSLETGSLKLANGRVIEKTLYNRRTRQDEPALFVALTFERREVLDSSNIKPMNLIGVDRGENIPAVIALTDPEGCPLSRFKDSLGNPTHILRIGESYKEKQRTIQAKKEVEQRRAGGYSRKYASKAKNLADDMVRNTARDLLYYAVTQDAMLIFENLSRGFGRQGKRTFSAERQYTRMEDWLTAKLAYEGLPSKTYLSKTLAQYTSKTCSNCGFTITSADYDRVLEKLKKTATGWMTTINGKELKVEGQITYYNRYKRQNVVKDLSVELDRLSEESVNNDISSWTKGRSGEALSLLKKRFSHRPVQEKFVCLNCGFETHADEQAALNIARSWLFLRSQEYKKYQTNKTTGNTDKRAFVETWQSFYRKKLKEVWKPAV

SEQ ID NO: 45858 - protein, 978 aa, synthetic construct
  REGION 1..978: note = engineered CasX variant
QEIKRINKIRRRLVKDSNTKKAGKTGPMKTLLVRVMTPDLRERLENLRKKPENIPQPISNTSRANLNKLLTDYTEMKKAILHVYWEEFQKDPVGLMSRVAQPASKKIDQNKLKPEMDEKGNLTTAGFACSQCGQPLFVYKLEQVSEKGKAYTNYFGRCNVAEHEKLILLAQLKPEKDSDEAVTYSLGKFGQRALDFYSIHVTKESTHPVKPLAQIAGNRYASSPVGKALSDACMGTIASFLSKYQDIIIEHQKVVKGNQKRLESLRELAGKENLEYPSVTLPPQPHTKEGVDAYNEVIARVRMWVNLNLWQKLKLSRDDAKPLLRLKGFPSFPLVERQANEVDWWDMVCNVKKLINEKKEDGKVFWQNLAGYKRQEALRPYLSSEEDRQKGKKFARYQLGDLLLHLEKKHGEDWGKVYDEAWERIDKKVEGLSKHIKLEEERRSEDAQSKAALTDWLRAKASFVIEGLKEADKDEFCRCELKLQKWYGDLRGKPFAIEAENSILDISGFSKQYNCAFIWQKDGVKKLNLYLIINYFKGGKLRFKKIKPEAFEANRFYTVINKKSGEIVPMEVNFNFDDPNLIILPLAFGKRQGREFIWNDLLSLETGSLKLANGRVIEKTLYNRRTRQDEPALFVALTFERREVLDSSNIKPMNLIGVDRGENIPAVIALTDPEGCPLSRFKDSLGNPTHILRIGESYKEKQRTIQAKKEVEQRRAGGYSRKYASKAKNLADDMVRNTARDLLYYAVTQDAMLIFENLSRGFGRQGKRTFSAERQYTRMEDWLTAKLAYEGLPSKTYLSKTLAQYTSKTCSNCGFTITSADYDRVLEKLKKTATGWMTTINGKELKVEGQITYYNRYKRQNVVKDLSVELDRLSEESVNNDISSWTKGRSGEALSLLKKRFSHRPVQEKFVCLNCGFETHADEQAALNIARSWLFLRSQEYKKYQTNKTTGNTDKRAFVETWQSFYRKKLKEVWKPAV

SEQ ID NO: 45859 - protein, 978 aa, synthetic construct
  REGION 1..978: note = engineered CasX variant
QEIKRINKIRRRLVKDSNTKKAGKTGPMKTLLVRVMTPDLRERLENLRKKPENIPQPISNTSRANLNKLLTDYTEMKKAILHVYWEEFQKDPVGLMSRVAQPASKKIDQNKLKPEMDEKGNLTTAGFACSQCGQPLFVYKLEQVSEKGKAYTNYFGRCNVAEHEKLILLAQLKPEKDSDEAVTYSLGKFGQRALDFYSIHVTKESTHPVKPLAQIAGNRYASTPVGKALSDACMGTIASFLSKYQDIIIEHQKVVKGNQKRLESLRELAGKENLEYPSVTLPPQPHTKEGVDAYNEVIARVRMWVNLNLWQKLKLSRDDAKPLLRLKGFPSFPLVERQANEVDWWDMVCNVKKLINEKKEDGKVFWQNLAGYKRQEALRPYLSSEEDRQKGKKFARYQLGDLLLHLEKKHGEDWGKVYDEAWERIDKKVEGLSKHIKLEEERRSEDAQSKAALTDWLRAKASFVIEGLKEADKDEFCRCELKLQKWYGDLRGKPFAIEAENSILDISGFSKQYNCAFIWQKDGVKKLNLYLIINYFKGGKLRFKKIKPEAFEANRFYTVINKKSGEIVPMEVNFNFDDPNLIILPLAFGKRQGREFIWNDLLSLETGSLKLANGRVIEKTLYNRRTRQDEPALFVALTFERREVLDSSNIKPMNLIGVDRGENIPAVIALTDPEGCPLSRFKDSLGNPTHILRIGESYKEKQRTIQAKKEVEQRRAGGYSRKYASKAKNLADDMVRNTARDLLYYAVTQDAMLIFENLSRGFGRQGKRTFSAERQYTRMEDWLTAKLAYEGLPSKTYLSKTLAQYTSKTCSNCGFTITSADYDRVLEKLKKTATGWMTTINGKELKVEGQITYYNRYKRQNVVKDLSVELDRLSEESVNNDISSWTKGRSGEALSLLKKRFSHRPVQEKFVCLNCGFETHADEQAALNIARSWLFLRSQEYKKYQTNKTTGNTDKRAFVETWQSFYRKKLKEVWKPAV

SEQ ID NO: 45860 - protein, 978 aa, synthetic construct
  REGION 1..978: note = engineered CasX variant
QEIKRINKIRRRLVKDSNTKKAGKTGPMKTLLVRVMTPDLRERLENLRKKPENIPQPISNTSRANLNKLLTDYTEMKKAILHVYWEEFQKDPVGLMSRVAQPASKKIDQNKLKPEMDEKGNLTTAGFACSQCGQPLFVYKLEQVSEKGKAYTNYFGRCNVAEHEKLILLAQLKPEKDSDEAVTYSLGKFGQRALDFYSIHVTKESTHPVKPLAQIAGNRYASAPVGKALSDACMGTIASFLSKYQDIIIEHQKVVKGNQKRLESLRELAGKENLEYPSVTLPPQPHTKEGVDAYNEVIARVRMWVNLNLWQKLKLSRDDAKPLLRLKGFPSFPLVERQANEVDWWDMVCNVKKLINEKKEDGKVFWQNLAGYKRQEALRPYLSSEEDRQKGKKFARYQLGDLLLHLEKKHGEDWGKVYDEAWERIDKKVEGLSKHIKLEEERRSEDAQSKAALTDWLRAKASFVIEGLKEADKDEFCRCELKLQKWYGDLRGKPFAIEAENSILDISGFSKQYNCAFIWQKDGVKKLNLYLIINYFKGGKLRFKKIKPEAFEANRFYTVINKKSGEIVPMEVNFNFDDPNLIILPLAFGKRQGREFIWNDLLSLETGSLKLANGRVIEKTLYNRRTRQDEPALFVALTFERREVLDSSNIKPMNLIGVDRGENIPAVIALTDPEGCPLSRFKDSLGNPTHILRIGESYKEKQRTIQAKKEVEQRRAGGYSRKYASKAKNLADDMVRNTARDLLYYAVTQDAMLIFENLSRGFGRQGKRTFSAERQYTRMEDWLTAKLAYEGLPSKTYLSKTLAQYTSKTCSNCGFTITSADYDRVLEKLKKTATGWMTTINGKELKVEGQITYYNRYKRQNVVKDLSVELDRLSEESVNNDISSWTKGRSGEALSLLKKRFSHRPVQEKFVCLNCGFETHADEQAALNIARSWLFLRSQEYKKYQTNKTTGNTDKRAFVETWQSFYRKKLKEVWKPAV

SEQ ID NO: 45861 - protein, 978 aa, synthetic construct
  REGION 1..978: note = engineered CasX variant
QEIKRINKIRRRLVKDSNTKKAGKTGPMKTLLVRVMTPDLRERLENLRKKPENIPQPISNTSRANLNKLLTDYTEMKKAILHVYWEEFQKDPVGLMSRVAQPASKKIDQNKLKPEMDEKGNLTTAGFACSQCGQPLFVYKLEQVSEKGKAYTNYFGRCNVAEHEKLILLAQLKPEKDSDEAVTYSLGKFGQRALDFYSIHVTKESTHPVKPLAQIAGNRYASVPVGKALSDACMGTIASFLSKYQDIIIEHQKVVKGNQKRLESLRELAGKENLEYPSVTLPPQPHTKEGVDAYNEVIARVRMWVNLNLWQKLKLSRDDAKPLLRLKGFPSFPLVERQANEVDWWDMVCNVKKLINEKKEDGKVFWQNLAGYKRQEALRPYLSSEEDRQKGKKFARYQLGDLLLHLEKKHGEDWGKVYDEAWERIDKKVEGLSKHIKLEEERRSEDAQSKAALTDWLRAKASFVIEGLKEADKDEFCRCELKLQKWYGDLRGKPFAIEAENSILDISGFSKQYNCAFIWQKDGVKKLNLYLIINYFKGGKLRFKKIKPEAFEANRFYTVINKKSGEIVPMEVNFNFDDPNLIILPLAFGKRQGREFIWNDLLSLETGSLKLANGRVIEKTLYNRRTRQDEPALFVALTFERREVLDSSNIKPMNLIGVDRGENIPAVIALTDPEGCPLSRFKDSLGNPTHILRIGESYKEKQRTIQAKKEVEQRRAGGYSRKYASKAKNLADDMVRNTARDLLYYAVTQDAMLIFENLSRGFGRQGKRTFSAERQYTRMEDWLTAKLAYEGLPSKTYLSKTLAQYTSKTCSNCGFTITSADYDRVLEKLKKTATGWMTTINGKELKVEGQITYYNRYKRQNVVKDLSVELDRLSEESVNNDISSWTKGRSGEALSLLKKRFSHRPVQEKFVCLNCGFETHADEQAALNIARSWLFLRSQEYKKYQTNKTTGNTDKRAFVETWQSFYRKKLKEVWKPAV

SEQ ID NO: 45862 - protein, 978 aa, synthetic construct
  REGION 1..978: note = engineered CasX variant
QEIKRINKIRRRLVKDSNTKKAGKTGPMKTLLVRVMTPDLRERLENLRKKPENIPQPISNTSRANLNKLLTDYTEMKKAILHVYWEEFQKDPVGLMSRVAQPASKKIDQNKLKPEMDEKGNLTTAGFACSQCGQPLFVYKLEQVSEKGKAYTNYFGRCNVAEHEKLIKLAQLKPEKDSDEAVTYSLGKFGQRALDFYSIHVTKESTHPVKPLAQIAGNRYASGPVGKALSDACMGTIASFLSKYQDIIIEHQKVVKGNQKRLESLRELAGKENLEYPSVTLPPQPHTKEGVDAYNEVIARVRMWVNLNLWQKLKLSRDDAKPLLRLKGFPSFPLVERQANEVDWWDMVCNVKKLINEKKEDGKVFWQNLAGYKRQEALRPYLSSEEDRQKGKKFARYQLGDLLLHLEKKHGEDWGKVYDEAWERIDKKVEGLSKHIKLEEERRSEDAQSKAALTDWLRAKASFVIEGLKEADKDEFCRCELKLQKWYGDLRGKPFAIEAENSILDISGFSKQYNCAFIWQKDGVKKLNLYLIINYFKGGKLRFKKIKPEAFEANRFYTVINKKSGEIVPMEVNFNFDDPNLIILPLAFGKRQGREFIWNDLLSLETGSLKLANGRVIEKTLYNRRTRQDEPALFVALTFERREVLDSSNIKPMNLIGVDRGENIPAVIALTDPEGCPLSRFKDSLGNPTHILRIGESYKEKQRTIQAKKEVEQRRAGGYSRKYASKAKNLADDMVRNTARDLLYYAVTQDAMLIFENLSRGFGRQGKRTFSAERQYTRMEDWLTAKLAYEGLPSKTYLSKTLAQYTSKTCSNCGFTITSADYDRVLEKLKKTATGWMTTINGKELKVEGQITYYNRYKRQNVVKDLSVELDRLSEESVNNDISSWTKGRSGEALSLLKKRFSHRPVQEKFVCLNCGFETHADEQAALNIARSWLFLRSQEYKKYQTNKTTGNTDKRAFVETWQSFYRKKLKEVWKPAV

SEQ ID NO: 45863 - protein, 977 aa, synthetic construct
  REGION 1..977: note = engineered CasX variant
QEIKRINKIRRRLVKDSNTKKAGKTGPMKTLLVRVMTPDLRERLENLRKKPENIPQPISNTSRANLNKLLTDYTEMKKAILHVYWEEFQKDPVGLMSRVAQPASKKIDQNKLKPEMDEKGNLTTAGFACSQCGQPLFVYKLEQVSEKGKAYTNYFGRCNVAEHEKLILLAQLKPEKDSDEAVTYSLGKFGQRALDFYSIHVTKESTHPVKPLAQIAGNRYASPVGKALSDACMGTIASFLSKYQDIIIEHQKVVKGNQKRLESLRELAGKENLEYPSVTLPPQPHTKEGVDAYNEVIARVRMWVNLNLWQKLKLSRDDAKPLLRLKGFPSFPLVERQANEVDWWDMVCNVKKLINEKKEDGKVFWQNLAGYKRQEALRPYLSSEEDRQKGKKFARYQLGDLLLHLEKKHGEDWGKVYDEAWERIDKKVEGLSKHIKLEEERRSEDAQSKAALTDWLRAKASFVIEGLKEADKDEFCRCELKLQKWYGDLRGKPFAIEAENSILDISGFSKQYNCAFIWQKDGVKKLNLYLIINYFKGGKLRFKKIKPEAFEANRFYTVINKKSGEIVPMEVNFNFDDPNLIILPLAFGKRQGREFIWNDLLSLETGSLKLANGRVIEKTLYNRRTRQDEPALFVALTFERREVLDSSNIKPMNLIGVDRGENIPAVIALTDPEGCPLSRFKDSLGNPTHILRIGESYKEKQRTIQAKKEVEQRRAGGYSRKYASKAKNLADDMVRNTARDLLYYAVTQDAMLIFENLSRGFGRQGKRTFSAERQYTRMEDWLTAKLAYEGLPSKTYLSKTLAQYTSKTCSNCGFTITSADYDRVLEKLKKTATGWMTTINGKELKVEGQITYYNRYKRQNVVKDLSVELDRLSEESVNNDISSWTKGRSGEALSLLKKRFSHRPVQEKFVCLNCGFETHADEQAALNIARSWLFLRSQEYKKYQTNKTTGNTDKRAFVETWQSFYRKKLKEVWKPAV

SEQ ID NO: 45864 - protein, 978 aa, synthetic construct
  REGION 1..978: note = engineered CasX variant
QEIKRINKIRRRLVKDSNTKKAGKTGPMKTLLVRVMTPDLRERLENLRKKPENIPQPISNTSRANLNKLLTDYTEMKKAILHVYWEEFQKDPVGLMSRVAQPASKKIDQNKLKPEMDEKGNLTTAGFACSQCGQPLFVYKLEQVSEKGKAYTNYFGRCNVAEHEKLILLAQLKPEKDSDEAVTYSLGKFGQRALDFYSIHVTKESTHPVKPLAQIAGNRYASYPVGKALSDACMGTIASFLSKYQDIIIEHQKVVKGNQKRLESLRELAGKENLEYPSVTLPPQPHTKEGVDAYNEVIARVRMWVNLNLWQKLKLSRDDAKPLLRLKGFPSFPLVERQANEVDWWDMVCNVKKLINEKKEDGKVFWQNLAGYKRQEALRPYLSSEEDRKKGKKFARYQLGDLLLHLEKKHGEDWGKVYDEAWERIDKKVEGLSKHIKLEEERRSEDAQSKAALTDWLRAKASFVIEGLKEADKDEFCRCELKLQKWYGDLRGKPFAIEAENSILDISGFSKQYNCAFIWQKDGVKKLNLYLIINYFKGGKLRFKKIKPEAFEANRFYTVINKKSGEIVPMEVNFNFDDPNLIILPLAFGKRQGREFIWNDLLSLETGSLKLANGRVIEKTLYNRRTRQDEPALFVALTFERREVLDSSNIKPMNLIGVDRGENIPAVIALTDPEGCPLSRFKDSLGNPTHILRIGESYKEKQRTIQAKKEVEQRRAGGYSRKYASKAKNLADDMVRNTARDLLYYAVTQDAMLIFENLSRGFGRQGKRTFSAERQYTRMEDWLTAKLAYEGLPSQTYLSKTLAQYTSKTCSNCGFTITSADYDRVLEKLKKTATGWMTTINGKELKVEGQITYYNRYKRQNVVKDLSVELDRLSEESVNNDISSWTKGRSGEALSLLKKRFSHRPVQEKFVCLNCGFETHADEQAALNIARSWLFLRSQEYKKYQTNKTTGNTDKRAFVETWQSFYRKKLKEVWKPAV

SEQ ID NO: 45865 - protein, 978 aa, synthetic construct
  REGION 1..978: note = engineered CasX variant
QEIKRINKIRRRLVKDSNTKKAGKTGPMKTLLVRVMTPDLRERLENLRKKPENIPQPISNTSRANLNKLLTDYTEMKKAILHVYWEEFQKDPVGLMSRVAQPASKKIDQNKLKPEMDEKGNLTTAGFACSQCGQPLFVYKLEQVSEKGKAYTNYFGRCNVAEHEKLILLAQLKPEKDSDEAVTYSLGKFGQRALDFYSIHVTKESTHPVKPLAQIAGNRYASHPVGKALSDACMGTIASFLSKYQDIIIEHQKVVKGNQKRLESLRELAGKENLEYPSVTLPPQPHTKEGVDAYNEVIARVRMWVNLNLWQKLKLSRDDAKPLLRLKGFPSFPLVERQANEVDWWDMVCNVKKLINEKKEDGKVFWQNLAGYKRQEALRPYLSSEEDRKKGKKFARYQLGDLLLHLEKKHGEDWGKVYDEAWERIDKKVEGLSKHIKLEEERRSEDAQSKAALTDWLRAKASFVIEGLKEADKDEFCRCELKLQKWYGDLRGKPFAIEAENSILDISGFSKQYNCAFIWQKDGVKKLNLYLIINYFKGGKLRFKKIKPEAFEANRFYTVINKKSGEIVPMEVNFNFDDPNLIILPLAFGKRQGREFIWNDLLSLETGSLKLANGRVIEKTLYNRRTRQDEPALFVALTFERREVLDSSNIKPMNLIGVDRGENIPAVIALTDPEGCPLSRFKDSLGNPTHILRIGESYKEKQRTIQAKKEVEQRRAGGYSRKYASKAKNLADDMVRNTARDLLYYAVTQDAMLIFENLSRGFGRQGKRTFSAERQYTRMEDWLTAKLAYEGLPSQTYLSKTLAQYTSKTCSNCGFTITSADYDRVLEKLKKTATGWMTTINGKELKVEGQITYYNRYKRQNVVKDLSVELDRLSEESVNNDISSWTKGRSGEALSLLKKRFSHRPVQEKFVCLNCGFETHADEQAALNIARSWLFLRSQEYKKYQTNKTTGNTDKRAFVETWQSFYRKKLKEVWKPAV

SEQ ID NO: 45866 - protein, 978 aa, synthetic construct
  REGION 1..978: note = engineered CasX variant
QEIKRINKIRRRLVKDSNTKKAGKTGPMKTLLVRVMTPDLRERLENLRKKPENIPQPISNTSRANLNKLLTDYTEMKKAILHVYWEEFQKDPVGLMSRVAQPASKKIDQNKLKPEMDEKGNLTTAGFACSQCGQPLFVYKLEQVSEKGKAYTNYFGRCNVAEHEKLILLAQLKPEKDSDEAVTYSLGKFGQRALDFYSIHVTKESTHPVKPLAQIAGNRYASSPVGKALSDACMGTIASFLSKYQDIIIEHQKVVKGNQKRLESLRELAGKENLEYPSVTLPPQPHTKEGVDAYNEVIARVRMWVNLNLWQKLKLSRDDAKPLLRLKGFPSFPLVERQANEVDWWDMVCNVKKLINEKKEDGKVFWQNLAGYKRQEALRPYLSSEEDRKKGKKFARYQLGDLLLHLEKKHGEDWGKVYDEAWERIDKKVEGLSKHIKLEEERRSEDAQSKAALTDWLRAKASFVIEGLKEADKDEFCRCELKLQKWYGDLRGKPFAIEAENSILDISGFSKQYNCAFIWQKDGVKKLNLYLIINYFKGGKLRFKKIKPEAFEANRFYTVINKKSGEIVPMEVNFNFDDPNLIILPLAFGKRQGREFIWNDLLSLETGSLKLANGRVIEKTLYNRRTRQDEPALFVALTFERREVLDSSNIKPMNLIGVDRGENIPAVIALTDPEGCPLSRFKDSLGNPTHILRIGESYKEKQRTIQAKKEVEQRRAGGYSRKYASKAKNLADDMVRNTARDLLYYAVTQDAMLIFENLSRGFGRQGKRTFSAERQYTRMEDWLTAKLAYEGLPSQTYLSKTLAQYTSKTCSNCGFTITSADYDRVLEKLKKTATGWMTTINGKELKVEGQITYYNRYKRQNVVKDLSVELDRLSEESVNNDISSWTKGRSGEALSLLKKRFSHRPVQEKFVCLNCGFETHADEQAALNIARSWLFLRSQEYKKYQTNKTTGNTDKRAFVETWQSFYRKKLKEVWKPAV

SEQ ID NO: 45867 - protein, 978 aa, synthetic construct
  REGION 1..978: note = engineered CasX variant
QEIKRINKIRRRLVKDSNTKKAGKTGPMKTLLVRVMTPDLRERLENLRKKPENIPQPISNTSRANLNKLLTDYTEMKKAILHVYWEEFQKDPVGLMSRVAQPASKKIDQNKLKPEMDEKGNLTTAGFACSQCGQPLFVYKLEQVSEKGKAYTNYFGRCNVAEHEKLILLAQLKPEKDSDEAVTYSLGKFGQRALDFYSIHVTKESTHPVKPLAQIAGNRYASTPVGKALSDACMGTIASFLSKYQDIIIEHQKVVKGNQKRLESLRELAGKENLEYPSVTLPPQPHTKEGVDAYNEVIARVRMWVNLNLWQKLKLSRDDAKPLLRLKGFPSFPLVERQANEVDWWDMVCNVKKLINEKKEDGKVFWQNLAGYKRQEALRPYLSSEEDRKKGKKFARYQLGDLLLHLEKKHGEDWGKVYDEAWERIDKKVEGLSKHIKLEEERRSEDAQSKAALTDWLRAKASFVIEGLKEADKDEFCRCELKLQKWYGDLRGKPFAIEAENSILDISGFSKQYNCAFIWQKDGVKKLNLYLIINYFKGGKLRFKKIKPEAFEANRFYTVINKKSGEIVPMEVNFNFDDPNLIILPLAFGKRQGREFIWNDLLSLETGSLKLANGRVIEKTLYNRRTRQDEPALFVALTFERREVLDSSNIKPMNLIGVDRGENIPAVIALTDPEGCPLSRFKDSLGNPTHILRIGESYKEKQRTIQAKKEVEQRRAGGYSRKYASKAKNLADDMVRNTARDLLYYAVTQDAMLIFENLSRGFGRQGKRTFSAERQYTRMEDWLTAKLAYEGLPSQTYLSKTLAQYTSKTCSNCGFTITSADYDRVLEKLKKTATGWMTTINGKELKVEGQITYYNRYKRQNVVKDLSVELDRLSEESVNNDISSWTKGRSGEALSLLKKRFSHRPVQEKFVCLNCGFETHADEQAALNIARSWLFLRSQEYKKYQTNKTTGNTDKRAFVETWQSFYRKKLKEVWKPAV

SEQ ID NO: 45868 - protein, 978 aa, synthetic construct
  REGION 1..978: note = engineered CasX variant
QEIKRINKIRRRLVKDSNTKKAGKTGPMKTLLVRVMTPDLRERLENLRKKPENIPQPISNTSRANLNKLLTDYTEMKKAILHVYWEEFQKDPVGLMSRVAQPASKKIDQNKLKPEMDEKGNLTTAGFACSQCGQPLFVYKLEQVSEKGKAYTNYFGRCNVAEHEKLILLAQLKPEKDSDEAVTYSLGKFGQRALDFYSIHVTKESTHPVKPLAQIAGNRYASAPVGKALSDACMGTIASFLSKYQDIIIEHQKVVKGNQKRLESLRELAGKENLEYPSVTLPPQPHTKEGVDAYNEVIARVRMWVNLNLWQKLKLSRDDAKPLLRLKGFPSFPLVERQANEVDWWDMVCNVKKLINEKKEDGKVFWQNLAGYKRQEALRPYLSSEEDRKKGKKFARYQLGDLLLHLEKKHGEDWGKVYDEAWERIDKKVEGLSKHIKLEEERRSEDAQSKAALTDWLRAKASFVIEGLKEADKDEFCRCELKLQKWYGDLRGKPFAIEAENSILDISGFSKQYNCAFIWQKDGVKKLNLYLIINYFKGGKLRFKKIKPEAFEANRFYTVINKKSGEIVPMEVNFNFDDPNLIILPLAFGKRQGREFIWNDLLSLETGSLKLANGRVIEKTLYNRRTRQDEPALFVALTFERREVLDSSNIKPMNLIGVDRGENIPAVIALTDPEGCPLSRFKDSLGNPTHILRIGESYKEKQRTIQAKKEVEQRRAGGYSRKYASKAKNLADDMVRNTARDLLYYAVTQDAMLIFENLSRGFGRQGKRTFSAERQYTRMEDWLTAKLAYEGLPSQTYLSKTLAQYTSKTCSNCGFTITSADYDRVLEKLKKTATGWMTTINGKELKVEGQITYYNRYKRQNVVKDLSVELDRLSEESVNNDISSWTKGRSGEALSLLKKRFSHRPVQEKFVCLNCGFETHADEQAALNIARSWLFLRSQEYKKYQTNKTTGNTDKRAFVETWQSFYRKKLKEVWKPAV

SEQ ID NO: 45869 - protein, 978 aa, synthetic construct
  REGION 1..978: note = engineered CasX variant
QEIKRINKIRRRLVKDSNTKKAGKTGPMKTLLVRVMTPDLRERLENLRKKPENIPQPISNTSRANLNKLLTDYTEMKKAILHVYWEEFQKDPVGLMSRVAQPASKKIDQNKLKPEMDEKGNLTTAGFACSQCGQPLFVYKLEQVSEKGKAYTNYFGRCNVAEHEKLILLAQLKPEKDSDEAVTYSLGKFGQRALDFYSIHVTKESTHPVKPLAQIAGNRYASVPVGKALSDACMGTIASFLSKYQDIIIEHQKVVKGNQKRLESLRELAGKENLEYPSVTLPPQPHTKEGVDAYNEVIARVRMWVNLNLWQKLKLSRDDAKPLLRLKGFPSFPLVERQANEVDWWDMVCNVKKLINEKKEDGKVFWQNLAGYKRQEALRPYLSSEEDRKKGKKFARYQLGDLLLHLEKKHGEDWGKVYDEAWERIDKKVEGLSKHIKLEEERRSEDAQSKAALTDWLRAKASFVIEGLKEADKDEFCRCELKLQKWYGDLRGKPFAIEAENSILDISGFSKQYNCAFIWQKDGVKKLNLYLIINYFKGGKLRFKKIKPEAFEANRFYTVINKKSGEIVPMEVNFNFDDPNLIILPLAFGKRQGREFIWNDLLSLETGSLKLANGRVIEKTLYNRRTRQDEPALFVALTFERREVLDSSNIKPMNLIGVDRGENIPAVIALTDPEGCPLSRFKDSLGNPTHILRIGESYKEKQRTIQAKKEVEQRRAGGYSRKYASKAKNLADDMVRNTARDLLYYAVTQDAMLIFENLSRGFGRQGKRTFSAERQYTRMEDWLTAKLAYEGLPSQTYLSKTLAQYTSKTCSNCGFTITSADYDRVLEKLKKTATGWMTTINGKELKVEGQITYYNRYKRQNVVKDLSVELDRLSEESVNNDISSWTKGRSGEALSLLKKRFSHRPVQEKFVCLNCGFETHADEQAALNIARSWLFLRSQEYKKYQTNKTTGNTDKRAFVETWQSFYRKKLKEVWKPAV

SEQ ID NO: 45870 - protein, 978 aa, synthetic construct
  REGION 1..978: note = engineered CasX variant
QEIKRINKIRRRLVKDSNTKKAGKTGPMKTLLVRVMTPDLRERLENLRKKPENIPQPISNTSRANLNKLLTDYTEMKKAILHVYWEEFQKDPVGLMSRVAQPASKKIDQNKLKPEMDEKGNLTTAGFACSQCGQPLFVYKLEQVSEKGKAYTNYFGRCNVAEHEKLIKLAQLKPEKDSDEAVTYSLGKFGQRALDFYSIHVTKESTHPVKPLAQIAGNRYASGPVGKALSDACMGTIASFLSKYQDIIIEHQKVVKGNQKRLESLRELAGKENLEYPSVTLPPQPHTKEGVDAYNEVIARVRMWVNLNLWQKLKLSRDDAKPLLRLKGFPSFPLVERQANEVDWWDMVCNVKKLINEKKEDGKVFWQNLAGYKRQEALRPYLSSEEDRKKGKKFARYQLGDLLLHLEKKHGEDWGKVYDEAWERIDKKVEGLSKHIKLEEERRSEDAQSKAALTDWLRAKASFVIEGLKEADKDEFCRCELKLQKWYGDLRGKPFAIEAENSILDISGFSKQYNCAFIWQKDGVKKLNLYLIINYFKGGKLRFKKIKPEAFEANRFYTVINKKSGEIVPMEVNFNFDDPNLIILPLAFGKRQGREFIWNDLLSLETGSLKLANGRVIEKTLYNRRTRQDEPALFVALTFERREVLDSSNIKPMNLIGVDRGENIPAVIALTDPEGCPLSRFKDSLGNPTHILRIGESYKEKQRTIQAKKEVEQRRAGGYSRKYASKAKNLADDMVRNTARDLLYYAVTQDAMLIFENLSRGFGRQGKRTFSAERQYTRMEDWLTAKLAYEGLPSQTYLSKTLAQYTSKTCSNCGFTITSADYDRVLEKLKKTATGWMTTINGKELKVEGQITYYNRYKRQNVVKDLSVELDRLSEESVNNDISSWTKGRSGEALSLLKKRFSHRPVQEKFVCLNCGFETHADEQAALNIARSWLFLRSQEYKKYQTNKTTGNTDKRAFVETWQSFYRKKLKEVWKPAV

SEQ ID NO: 45871 - protein, 977 aa, synthetic construct
  REGION 1..977: note = engineered CasX variant
QEIKRINKIRRRLVKDSNTKKAGKTGPMKTLLVRVMTPDLRERLENLRKKPENIPQPISNTSRANLNKLLTDYTEMKKAILHVYWEEFQKDPVGLMSRVAQPASKKIDQNKLKPEMDEKGNLTTAGFACSQCGQPLFVYKLEQVSEKGKAYTNYFGRCNVAEHEKLILLAQLKPEKDSDEAVTYSLGKFGQRALDFYSIHVTKESTHPVKPLAQIAGNRYASPVGKALSDACMGTIASFLSKYQDIIIEHQKVVKGNQKRLESLRELAGKENLEYPSVTLPPQPHTKEGVDAYNEVIARVRMWVNLNLWQKLKLSRDDAKPLLRLKGFPSFPLVERQANEVDWWDMVCNVKKLINEKKEDGKVFWQNLAGYKRQEALRPYLSSEEDRKKGKKFARYQLGDLLLHLEKKHGEDWGKVYDEAWERIDKKVEGLSKHIKLEEERRSEDAQSKAALTDWLRAKASFVIEGLKEADKDEFCRCELKLQKWYGDLRGKPFAIEAENSILDISGFSKQYNCAFIWQKDGVKKLNLYLIINYFKGGKLRFKKIKPEAFEANRFYTVINKKSGEIVPMEVNFNFDDPNLIILPLAFGKRQGREFIWNDLLSLETGSLKLANGRVIEKTLYNRRTRQDEPALFVALTFERREVLDSSNIKPMNLIGVDRGENIPAVIALTDPEGCPLSRFKDSLGNPTHILRIGESYKEKQRTIQAKKEVEQRRAGGYSRKYASKAKNLADDMVRNTARDLLYYAVTQDAMLIFENLSRGFGRQGKRTFSAERQYTRMEDWLTAKLAYEGLPSQTYLSKTLAQYTSKTCSNCGFTITSADYDRVLEKLKKTATGWMTTINGKELKVEGQITYYNRYKRQNVVKDLSVELDRLSEESVNNDISSWTKGRSGEALSLLKKRFSHRPVQEKFVCLNCGFETHADEQAALNIARSWLFLRSQEYKKYQTNKTTGNTDKRAFVETWQSFYRKKLKEVWKPAV

SEQ ID NO: 45872 - protein, 978 aa, synthetic construct
  REGION 1..978: note = engineered CasX variant
QEIKRINKIRRRLVKDSNTKKAGKTGPMKTLLVRVMTPDLRERLENLRKKPENIPQPISNTSRANLNKLLTDYTEMKKAILHVYWEEFQKDPVGLMSRVAQPASKKIDQNKLKPEMDEKGNLTTAGFACSQCGQPLFVYKLEQVSEKGKAYTNYFGRCNVAEHEKLILLAQLKPEKDSDEAVTYSLGKFGQRALDFYSIHVTKESTHPVKPLAQIAGNRYASYPVGKALSDACMGTIASFLSKYQDIIIEHQKVVKGNQKRLESLRELAGKENLEYPSVTLPPQPHTKEGVDAYNEVIARVRMWVNLNLWQKLKLSRDDAKPLLRLKGFPSFPLVERQANEVDWWDMVCNVKKLINEKKEDGKVFWQNLAGYKRQEALRPYLSSEEDRKKGKKFARYQLGDLLLHLEKKHGEDWGKVYDEAWERIDKKVEGLSKHIKLEEERRSEDAQSKAALTDWLRAKASFVIEGLKEADKDEFCRCELKLQKWYGDLRGKPFAIEAENSILDISGFSKQYNCAFIWQKDGVKKLNLYLIINYFKGGKLRFKKIKPEAFEANRFYTVINKKSGEIVPMEVNFNFDDPNLIILPLAFGKRQGREFIWNDLLSLETGSLKLANGRVIEKTLYNRRTRQDEPALFVALTFERREVLDSSNIKPMNLIGVDRGENIPAVIALTDPEGCPLSRFKDSLGNPTHILRIGESYKEKQRTIQAKKEVEQRRAGGYSRKYASKAKNLADDMVRNTARDLLYYAVTQDAMLIFENLSRGFGRQGKRTFSAERQYTRMEDWLTAKLAYNGLPSKTYLSKTLAQYTSKTCSNCGFTITSADYDRVLEKLKKTATGWMTTINGKELKVEGQITYYNRYKRQNVVKDLSVELDRLSEESVNNDISSWTKGRSGEALSLLKKRFSHRPVQEKFVCLNCGFETHADEQAALNIARSWLFLRSQEYKKYQTNKTTGNTDKRAFVETWQSFYRKKLKEVWKPAV

SEQ ID NO: 45873 - protein, 978 aa, synthetic construct
  REGION 1..978: note = engineered CasX variant
QEIKRINKIRRRLVKDSNTKKAGKTGPMKTLLVRVMTPDLRERLENLRKKPENIPQPISNTSRANLNKLLTDYTEMKKAILHVYWEEFQKDPVGLMSRVAQPASKKIDQNKLKPEMDEKGNLTTAGFACSQCGQPLFVYKLEQVSEKGKAYTNYFGRCNVAEHEKLILLAQLKPEKDSDEAVTYSLGKFGQRALDFYSIHVTKESTHPVKPLAQIAGNRYASHPVGKALSDACMGTIASFLSKYQDIIIEHQKVVKGNQKRLESLRELAGKENLEYPSVTLPPQPHTKEGVDAYNEVIARVRMWVNLNLWQKLKLSRDDAKPLLRLKGFPSFPLVERQANEVDWWDMVCNVKKLINEKKEDGKVFWQNLAGYKRQEALRPYLSSEEDRKKGKKFARYQLGDLLLHLEKKHGEDWGKVYDEAWERIDKKVEGLSKHIKLEEERRSEDAQSKAALTDWLRAKASFVIEGLKEADKDEFCRCELKLQKWYGDLRGKPFAIEAENSILDISGFSKQYNCAFIWQKDGVKKLNLYLIINYFKGGKLRFKKIKPEAFEANRFYTVINKKSGEIVPMEVNFNFDDPNLIILPLAFGKRQGREFIWNDLLSLETGSLKLANGRVIEKTLYNRRTRQDEPALFVALTFERREVLDSSNIKPMNLIGVDRGENIPAVIALTDPEGCPLSRFKDSLGNPTHILRIGESYKEKQRTIQAKKEVEQRRAGGYSRKYASKAKNLADDMVRNTARDLLYYAVTQDAMLIFENLSRGFGRQGKRTFSAERQYTRMEDWLTAKLAYNGLPSKTYLSKTLAQYTSKTCSNCGFTITSADYDRVLEKLKKTATGWMTTINGKELKVEGQITYYNRYKRQNVVKDLSVELDRLSEESVNNDISSWTKGRSGEALSLLKKRFSHRPVQEKFVCLNCGFETHADEQAALNIARSWLFLRSQEYKKYQTNKTTGNTDKRAFVETWQSFYRKKLKEVWKPAV

SEQ ID NO: 45874 - protein, 978 aa, synthetic construct
  REGION 1..978: note = engineered CasX variant
QEIKRINKIRRRLVKDSNTKKAGKTGPMKTLLVRVMTPDLRERLENLRKKPENIPQPISNTSRANLNKLLTDYTEMKKAILHVYWEEFQKDPVGLMSRVAQPASKKIDQNKLKPEMDEKGNLTTAGFACSQCGQPLFVYKLEQVSEKGKAYTNYFGRCNVAEHEKLILLAQLKPEKDSDEAVTYSLGKFGQRALDFYSIHVTKESTHPVKPLAQIAGNRYASSPVGKALSDACMGTIASFLSKYQDIIIEHQKVVKGNQKRLESLRELAGKENLEYPSVTLPPQPHTKEGVDAYNEVIARVRMWVNLNLWQKLKLSRDDAKPLLRLKGFPSFPLVERQANEVDWWDMVCNVKKLINEKKEDGKVFWQNLAGYKRQEALRPYLSSEEDRKKGKKFARYQLGDLLLHLEKKHGEDWGKVYDEAWERIDKKVEGLSKHIKLEEERRSEDAQSKAALTDWLRAKASFVIEGLKEADKDEFCRCELKLQKWYGDLRGKPFAIEAENSILDISGFSKQYNCAFIWQKDGVKKLNLYLIINYFKGGKLRFKKIKPEAFEANRFYTVINKKSGEIVPMEVNFNFDDPNLIILPLAFGKRQGREFIWNDLLSLETGSLKLANGRVIEKTLYNRRTRQDEPALFVALTFERREVLDSSNIKPMNLIGVDRGENIPAVIALTDPEGCPLSRFKDSLGNPTHILRIGESYKEKQRTIQAKKEVEQRRAGGYSRKYASKAKNLADDMVRNTARDLLYYAVTQDAMLIFENLSRGFGRQGKRTFSAERQYTRMEDWLTAKLAYNGLPSKTYLSKTLAQYTSKTCSNCGFTITSADYDRVLEKLKKTATGWMTTINGKELKVEGQITYYNRYKRQNVVKDLSVELDRLSEESVNNDISSWTKGRSGEALSLLKKRFSHRPVQEKFVCLNCGFETHADEQAALNIARSWLFLRSQEYKKYQTNKTTGNTDKRAFVETWQSFYRKKLKEVWKPAV

SEQ ID NO: 45875 - protein, 978 aa, synthetic construct
  REGION 1..978: note = engineered CasX variant
QEIKRINKIRRRLVKDSNTKKAGKTGPMKTLLVRVMTPDLRERLENLRKKPENIPQPISNTSRANLNKLLTDYTEMKKAILHVYWEEFQKDPVGLMSRVAQPASKKIDQNKLKPEMDEKGNLTTAGFACSQCGQPLFVYKLEQVSEKGKAYTNYFGRCNVAEHEKLILLAQLKPEKDSDEAVTYSLGKFGQRALDFYSIHVTKESTHPVKPLAQIAGNRYASTPVGKALSDACMGTIASFLSKYQDIIIEHQKVVKGNQKRLESLRELAGKENLEYPSVTLPPQPHTKEGVDAYNEVIARVRMWVNLNLWQKLKLSRDDAKPLLRLKGFPSFPLVERQANEVDWWDMVCNVKKLINEKKEDGKVFWQNLAGYKRQEALRPYLSSEEDRKKGKKFARYQLGDLLLHLEKKHGEDWGKVYDEAWERIDKKVEGLSKHIKLEEERRSEDAQSKAALTDWLRAKASFVIEGLKEADKDEFCRCELKLQKWYGDLRGKPFAIEAENSILDISGFSKQYNCAFIWQKDGVKKLNLYLIINYFKGGKLRFKKIKPEAFEANRFYTVINKKSGEIVPMEVNFNFDDPNLIILPLAFGKRQGREFIWNDLLSLETGSLKLANGRVIEKTLYNRRTRQDEPALFVALTFERREVLDSSNIKPMNLIGVDRGENIPAVIALTDPEGCPLSRFKDSLGNPTHILRIGESYKEKQRTIQAKKEVEQRRAGGYSRKYASKAKNLADDMVRNTARDLLYYAVTQDAMLIFENLSRGFGRQGKRTFSAERQYTRMEDWLTAKLAYNGLPSKTYLSKTLAQYTSKTCSNCGFTITSADYDRVLEKLKKTATGWMTTINGKELKVEGQITYYNRYKRQNVVKDLSVELDRLSEESVNNDISSWTKGRSGEALSLLKKRFSHRPVQEKFVCLNCGFETHADEQAALNIARSWLFLRSQEYKKYQTNKTTGNTDKRAFVETWQSFYRKKLKEVWKPAV

SEQ ID NO: 45876 - protein, 978 aa, synthetic construct
  REGION 1..978: note = engineered CasX variant
QEIKRINKIRRRLVKDSNTKKAGKTGPMKTLLVRVMTPDLRERLENLRKKPENIPQPISNTSRANLNKLLTDYTEMKKAILHVYWEEFQKDPVGLMSRVAQPASKKIDQNKLKPEMDEKGNLTTAGFACSQCGQPLFVYKLEQVSEKGKAYTNYFGRCNVAEHEKLILLAQLKPEKDSDEAVTYSLGKFGQRALDFYSIHVTKESTHPVKPLAQIAGNRYASAPVGKALSDACMGTIASFLSKYQDIIIEHQKVVKGNQKRLESLRELAGKENLEYPSVTLPPQPHTKEGVDAYNEVIARVRMWVNLNLWQKLKLSRDDAKPLLRLKGFPSFPLVERQANEVDWWDMVCNVKKLINEKKEDGKVFWQNLAGYKRQEALRPYLSSEEDRKKGKKFARYQLGDLLLHLEKKHGEDWGKVYDEAWERIDKKVEGLSKHIKLEEERRSEDAQSKAALTDWLRAKASFVIEGLKEADKDEFCRCELKLQKWYGDLRGKPFAIEAENSILDISGFSKQYNCAFIWQKDGVKKLNLYLIINYFKGGKLRFKKIKPEAFEANRFYTVINKKSGEIVPMEVNFNFDDPNLIILPLAFGKRQGREFIWNDLLSLETGSLKLANGRVIEKTLYNRRTRQDEPALFVALTFERREVLDSSNIKPMNLIGVDRGENIPAVIALTDPEGCPLSRFKDSLGNPTHILRIGESYKEKQRTIQAKKEVEQRRAGGYSRKYASKAKNLADDMVRNTARDLLYYAVTQDAMLIFENLSRGFGRQGKRTFSAERQYTRMEDWLTAKLAYNGLPSKTYLSKTLAQYTSKTCSNCGFTITSADYDRVLEKLKKTATGWMTTINGKELKVEGQITYYNRYKRQNVVKDLSVELDRLSEESVNNDISSWTKGRSGEALSLLKKRFSHRPVQEKFVCLNCGFETHADEQAALNIARSWLFLRSQEYKKYQTNKTTGNTDKRAFVETWQSFYRKKLKEVWKPAV

SEQ ID NO: 45877 - protein, 978 aa, synthetic construct
  REGION 1..978: note = engineered CasX variant
QEIKRINKIRRRLVKDSNTKKAGKTGPMKTLLVRVMTPDLRERLENLRKKPENIPQPISNTSRANLNKLLTDYTEMKKAILHVYWEEFQKDPVGLMSRVAQPASKKIDQNKLKPEMDEKGNLTTAGFACSQCGQPLFVYKLEQVSEKGKAYTNYFGRCNVAEHEKLILLAQLKPEKDSDEAVTYSLGKFGQRALDFYSIHVTKESTHPVKPLAQIAGNRYASVPVGKALSDACMGTIASFLSKYQDIIIEHQKVVKGNQKRLESLRELAGKENLEYPSVTLPPQPHTKEGVDAYNEVIARVRMWVNLNLWQKLKLSRDDAKPLLRLKGFPSFPLVERQANEVDWWDMVCNVKKLINEKKEDGKVFWQNLAGYKRQEALRPYLSSEEDRKKGKKFARYQLGDLLLHLEKKHGEDWGKVYDEAWERIDKKVEGLSKHIKLEEERRSEDAQSKAALTDWLRAKASFVIEGLKEADKDEFCRCELKLQKWYGDLRGKPFAIEAENSILDISGFSKQYNCAFIWQKDGVKKLNLYLIINYFKGGKLRFKKIKPEAFEANRFYTVINKKSGEIVPMEVNFNFDDPNLIILPLAFGKRQGREFIWNDLLSLETGSLKLANGRVIEKTLYNRRTRQDEPALFVALTFERREVLDSSNIKPMNLIGVDRGENIPAVIALTDPEGCPLSRFKDSLGNPTHILRIGESYKEKQRTIQAKKEVEQRRAGGYSRKYASKAKNLADDMVRNTARDLLYYAVTQDAMLIFENLSRGFGRQGKRTFSAERQYTRMEDWLTAKLAYNGLPSKTYLSKTLAQYTSKTCSNCGFTITSADYDRVLEKLKKTATGWMTTINGKELKVEGQITYYNRYKRQNVVKDLSVELDRLSEESVNNDISSWTKGRSGEALSLLKKRFSHRPVQEKFVCLNCGFETHADEQAALNIARSWLFLRSQEYKKYQTNKTTGNTDKRAFVETWQSFYRKKLKEVWKPAV

SEQ ID NO: 45878 - protein, 978 aa, synthetic construct
  REGION 1..978: note = engineered CasX variant
QEIKRINKIRRRLVKDSNTKKAGKTGPMKTLLVRVMTPDLRERLENLRKKPENIPQPISNTSRANLNKLLTDYTEMKKAILHVYWEEFQKDPVGLMSRVAQPASKKIDQNKLKPEMDEKGNLTTAGFACSQCGQPLFVYKLEQVSEKGKAYTNYFGRCNVAEHEKLIKLAQLKPEKDSDEAVTYSLGKFGQRALDFYSIHVTKESTHPVKPLAQIAGNRYASGPVGKALSDACMGTIASFLSKYQDIIIEHQKVVKGNQKRLESLRELAGKENLEYPSVTLPPQPHTKEGVDAYNEVIARVRMWVNLNLWQKLKLSRDDAKPLLRLKGFPSFPLVERQANEVDWWDMVCNVKKLINEKKEDGKVFWQNLAGYKRQEALRPYLSSEEDRKKGKKFARYQLGDLLLHLEKKHGEDWGKVYDEAWERIDKKVEGLSKHIKLEEERRSEDAQSKAALTDWLRAKASFVIEGLKEADKDEFCRCELKLQKWYGDLRGKPFAIEAENSILDISGFSKQYNCAFIWQKDGVKKLNLYLIINYFKGGKLRFKKIKPEAFEANRFYTVINKKSGEIVPMEVNFNFDDPNLIILPLAFGKRQGREFIWNDLLSLETGSLKLANGRVIEKTLYNRRTRQDEPALFVALTFERREVLDSSNIKPMNLIGVDRGENIPAVIALTDPEGCPLSRFKDSLGNPTHILRIGESYKEKQRTIQAKKEVEQRRAGGYSRKYASKAKNLADDMVRNTARDLLYYAVTQDAMLIFENLSRGFGRQGKRTFSAERQYTRMEDWLTAKLAYNGLPSKTYLSKTLAQYTSKTCSNCGFTITSADYDRVLEKLKKTATGWMTTINGKELKVEGQITYYNRYKRQNVVKDLSVELDRLSEESVNNDISSWTKGRSGEALSLLKKRFSHRPVQEKFVCLNCGFETHADEQAALNIARSWLFLRSQEYKKYQTNKTTGNTDKRAFVETWQSFYRKKLKEVWKPAV

SEQ ID NO: 45879 - protein, 977 aa, synthetic construct
  REGION 1..977: note = engineered CasX variant
QEIKRINKIRRRLVKDSNTKKAGKTGPMKTLLVRVMTPDLRERLENLRKKPENIPQPISNTSRANLNKLLTDYTEMKKAILHVYWEEFQKDPVGLMSRVAQPASKKIDQNKLKPEMDEKGNLTTAGFACSQCGQPLFVYKLEQVSEKGKAYTNYFGRCNVAEHEKLILLAQLKPEKDSDEAVTYSLGKFGQRALDFYSIHVTKESTHPVKPLAQIAGNRYASPVGKALSDACMGTIASFLSKYQDIIIEHQKVVKGNQKRLESLRELAGKENLEYPSVTLPPQPHTKEGVDAYNEVIARVRMWVNLNLWQKLKLSRDDAKPLLRLKGFPSFPLVERQANEVDWWDMVCNVKKLINEKKEDGKVFWQNLAGYKRQEALRPYLSSEEDRKKGKKFARYQLGDLLLHLEKKHGEDWGKVYDEAWERIDKKVEGLSKHIKLEEERRSEDAQSKAALTDWLRAKASFVIEGLKEADKDEFCRCELKLQKWYGDLRGKPFAIEAENSILDISGFSKQYNCAFIWQKDGVKKLNLYLIINYFKGGKLRFKKIKPEAFEANRFYTVINKKSGEIVPMEVNFNFDDPNLIILPLAFGKRQGREFIWNDLLSLETGSLKLANGRVIEKTLYNRRTRQDEPALFVALTFERREVLDSSNIKPMNLIGVDRGENIPAVIALTDPEGCPLSRFKDSLGNPTHILRIGESYKEKQRTIQAKKEVEQRRAGGYSRKYASKAKNLADDMVRNTARDLLYYAVTQDAMLIFENLSRGFGRQGKRTFSAERQYTRMEDWLTAKLAYNGLPSKTYLSKTLAQYTSKTCSNCGFTITSADYDRVLEKLKKTATGWMTTINGKELKVEGQITYYNRYKRQNVVKDLSVELDRLSEESVNNDISSWTKGRSGEALSLLKKRFSHRPVQEKFVCLNCGFETHADEQAALNIARSWLFLRSQEYKKYQTNKTTGNTDKRAFVETWQSFYRKKLKEVWKPAV

SEQ ID NO: 45880 - protein, 978 aa, synthetic construct
  REGION 1..978: note = engineered CasX variant
QEIKRINKIRRRLVKDSNTKKAGKTGPMKTLLVRVMTPDLRERLENLRKKPENIPQPISNTSRANLNKLLTDYTEMKKAILHVYWEEFQKDPVGLMSRVAQPASKKIDQNKLKPEMDEKGNLTTAGFACSQCGQPLFVYKLEQVSEKGKAYTNYFGRCNVAEHEKLIQLAQLKPEKDSDEAVTYSLGKFGQRALDFYSIHVTKESTHPVKPLAQIAGNRYASYPVGKALSDACMGTIASFLSKYQDIIIEHQKVVKGNQKRLESLRELAGKENLEYPSVTLPPQPHTKEGVDAYNEVIARVRMWVNLNLWQKLKLSRDDAKPLLRLKGFPSFPLVERQANEVDWWDMVCNVKKLINEKKEDGKVFWQNLAGYKRQEALRPYLSSEEDRKKGKKFARYQLGDLLLHLEKKHGEDWGKVYDEAWERIDKKVEGLSKHIKLEEERRSEDAQSKAALTDWLRAKASFVIEGLKEADKDEFCRCELKLQKWYGDLRGKPFAIEAENSILDISGFSKQYNCAFIWQKDGVKKLNLYLIINYFKGGKLRFKKIKPEAFEANRFYTVINKKSGEIVPMEVNFNFDDPNLIILPLAFGKRQGREFIWNDLLSLETGSLKLANGRVIEKTLYNRRTRQDEPALFVALTFERREVLDSSNIKPMNLIGVDRGENIPAVIALTDPEGCPLSRFKDSLGNPTHILRIGESYKEKQRTIQAKKEVEQRRAGGYSRKYASKAKNLADDMVRNTARDLLYYAVTQDAMLIFENLSRGFGRQGKRTFSAERQYTRMEDWLTAKLAYEGLPSKTYLSKTLAQYTSKTCSNCGFTITSADYDRVLEKLKKTATGWMTTINGKELKVEGQITYYNRYKRQNVVKDLSVELDRLSEESVNNDISSWTKGRSGEALSLLKKRFSHRPVQEKFVCLNCGFETHADEQAALNIARSWLFLRSQEYKKYQTNKTTGNTDKRAFVETWQSFYRKKLKEVWKPAV

SEQ ID NO: 45881 - protein, 978 aa, synthetic construct
  REGION 1..978: note = engineered CasX variant
QEIKRINKIRRRLVKDSNTKKAGKTGPMKTLLVRVMTPDLRERLENLRKKPENIPQPISNTSRANLNKLLTDYTEMKKAILHVYWEEFQKDPVGLMSRVAQPASKKIDQNKLKPEMDEKGNLTTAGFACSQCGQPLFVYKLEQVSEKGKAYTNYFGRCNVAEHEKLIQLAQLKPEKDSDEAVTYSLGKFGQRALDFYSIHVTKESTHPVKPLAQIAGNRYASHPVGKALSDACMGTIASFLSKYQDIIIEHQKVVKGNQKRLESLRELAGKENLEYPSVTLPPQPHTKEGVDAYNEVIARVRMWVNLNLWQKLKLSRDDAKPLLRLKGFPSFPLVERQANEVDWWDMVCNVKKLINEKKEDGKVFWQNLAGYKRQEALRPYLSSEEDRKKGKKFARYQLGDLLLHLEKKHGEDWGKVYDEAWERIDKKVEGLSKHIKLEEERRSEDAQSKAALTDWLRAKASFVIEGLKEADKDEFCRCELKLQKWYGDLRGKPFAIEAENSILDISGFSKQYNCAFIWQKDGVKKLNLYLIINYFKGGKLRFKKIKPEAFEANRFYTVINKKSGEIVPMEVNFNFDDPNLIILPLAFGKRQGREFIWNDLLSLETGSLKLANGRVIEKTLYNRRTRQDEPALFVALTFERREVLDSSNIKPMNLIGVDRGENIPAVIALTDPEGCPLSRFKDSLGNPTHILRIGESYKEKQRTIQAKKEVEQRRAGGYSRKYASKAKNLADDMVRNTARDLLYYAVTQDAMLIFENLSRGFGRQGKRTFSAERQYTRMEDWLTAKLAYEGLPSKTYLSKTLAQYTSKTCSNCGFTITSADYDRVLEKLKKTATGWMTTINGKELKVEGQITYYNRYKRQNVVKDLSVELDRLSEESVNNDISSWTKGRSGEALSLLKKRFSHRPVQEKFVCLNCGFETHADEQAALNIARSWLFLRSQEYKKYQTNKTTGNTDKRAFVETWQSFYRKKLKEVWKPAV

SEQ ID NO: 45882 - protein, 978 aa, synthetic construct
  REGION 1..978: note = engineered CasX variant
QEIKRINKIRRRLVKDSNTKKAGKTGPMKTLLVRVMTPDLRERLENLRKKPENIPQPISNTSRANLNKLLTDYTEMKKAILHVYWEEFQKDPVGLMSRVAQPASKKIDQNKLKPEMDEKGNLTTAGFACSQCGQPLFVYKLEQVSEKGKAYTNYFGRCNVAEHEKLIQLAQLKPEKDSDEAVTYSLGKFGQRALDFYSIHVTKESTHPVKPLAQIAGNRYASSPVGKALSDACMGTIASFLSKYQDIIIEHQKVVKGNQKRLESLRELAGKENLEYPSVTLPPQPHTKEGVDAYNEVIARVRMWVNLNLWQKLKLSRDDAKPLLRLKGFPSFPLVERQANEVDWWDMVCNVKKLINEKKEDGKVFWQNLAGYKRQEALRPYLSSEEDRKKGKKFARYQLGDLLLHLEKKHGEDWGKVYDEAWERIDKKVEGLSKHIKLEEERRSEDAQSKAALTDWLRAKASFVIEGLKEADKDEFCRCELKLQKWYGDLRGKPFAIEAENSILDISGFSKQYNCAFIWQKDGVKKLNLYLIINYFKGGKLRFKKIKPEAFEANRFYTVINKKSGEIVPMEVNFNFDDPNLIILPLAFGKRQGREFIWNDLLSLETGSLKLANGRVIEKTLYNRRTRQDEPALFVALTFERREVLDSSNIKPMNLIGVDRGENIPAVIALTDPEGCPLSRFKDSLGNPTHILRIGESYKEKQRTIQAKKEVEQRRAGGYSRKYASKAKNLADDMVRNTARDLLYYAVTQDAMLIFENLSRGFGRQGKRTFSAERQYTRMEDWLTAKLAYEGLPSKTYLSKTLAQYTSKTCSNCGFTITSADYDRVLEKLKKTATGWMTTINGKELKVEGQITYYNRYKRQNVVKDLSVELDRLSEESVNNDISSWTKGRSGEALSLLKKRFSHRPVQEKFVCLNCGFETHADEQAALNIARSWLFLRSQEYKKYQTNKTTGNTDKRAFVETWQSFYRKKLKEVWKPAV

SEQ ID NO: 45883 - protein, 978 aa, synthetic construct
  REGION 1..978: note = engineered CasX variant
QEIKRINKIRRRLVKDSNTKKAGKTGPMKTLLVRVMTPDLRERLENLRKKPENIPQPISNTSRANLNKLLTDYTEMKKAILHVYWEEFQKDPVGLMSRVAQPASKKIDQNKLKPEMDEKGNLTTAGFACSQCGQPLFVYKLEQVSEKGKAYTNYFGRCNVAEHEKLIQLAQLKPEKDSDEAVTYSLGKFGQRALDFYSIHVTKESTHPVKPLAQIAGNRYASTPVGKALSDACMGTIASFLSKYQDIIIEHQKVVKGNQKRLESLRELAGKENLEYPSVTLPPQPHTKEGVDAYNEVIARVRMWVNLNLWQKLKLSRDDAKPLLRLKGFPSFPLVERQANEVDWWDMVCNVKKLINEKKEDGKVFWQNLAGYKRQEALRPYLSSEEDRKKGKKFARYQLGDLLLHLEKKHGEDWGKVYDEAWERIDKKVEGLSKHIKLEEERRSEDAQSKAALTDWLRAKASFVIEGLKEADKDEFCRCELKLQKWYGDLRGKPFAIEAENSILDISGFSKQYNCAFIWQKDGVKKLNLYLIINYFKGGKLRFKKIKPEAFEANRFYTVINKKSGEIVPMEVNFNFDDPNLIILPLAFGKRQGREFIWNDLLSLETGSLKLANGRVIEKTLYNRRTRQDEPALFVALTFERREVLDSSNIKPMNLIGVDRGENIPAVIALTDPEGCPLSRFKDSLGNPTHILRIGESYKEKQRTIQAKKEVEQRRAGGYSRKYASKAKNLADDMVRNTARDLLYYAVTQDAMLIFENLSRGFGRQGKRTFSAERQYTRMEDWLTAKLAYEGLPSKTYLSKTLAQYTSKTCSNCGFTITSADYDRVLEKLKKTATGWMTTINGKELKVEGQITYYNRYKRQNVVKDLSVELDRLSEESVNNDISSWTKGRSGEALSLLKKRFSHRPVQEKFVCLNCGFETHADEQAALNIARSWLFLRSQEYKKYQTNKTTGNTDKRAFVETWQSFYRKKLKEVWKPAV

SEQ ID NO: 45884 - protein, 978 aa, synthetic construct
  REGION 1..978: note = engineered CasX variant
QEIKRINKIRRRLVKDSNTKKAGKTGPMKTLLVRVMTPDLRERLENLRKKPENIPQPISNTSRANLNKLLTDYTEMKKAILHVYWEEFQKDPVGLMSRVAQPASKKIDQNKLKPEMDEKGNLTTAGFACSQCGQPLFVYKLEQVSEKGKAYTNYFGRCNVAEHEKLIQLAQLKPEKDSDEAVTYSLGKFGQRALDFYSIHVTKESTHPVKPLAQIAGNRYASAPVGKALSDACMGTIASFLSKYQDIIIEHQKVVKGNQKRLESLRELAGKENLEYPSVTLPPQPHTKEGVDAYNEVIARVRMWVNLNLWQKLKLSRDDAKPLLRLKGFPSFPLVERQANEVDWWDMVCNVKKLINEKKEDGKVFWQNLAGYKRQEALRPYLSSEEDRKKGKKFARYQLGDLLLHLEKKHGEDWGKVYDEAWERIDKKVEGLSKHIKLEEERRSEDAQSKAALTDWLRAKASFVIEGLKEADKDEFCRCELKLQKWYGDLRGKPFAIEAENSILDISGFSKQYNCAFIWQKDGVKKLNLYLIINYFKGGKLRFKKIKPEAFEANRFYTVINKKSGEIVPMEVNFNFDDPNLIILPLAFGKRQGREFIWNDLLSLETGSLKLANGRVIEKTLYNRRTRQDEPALFVALTFERREVLDSSNIKPMNLIGVDRGENIPAVIALTDPEGCPLSRFKDSLGNPTHILRIGESYKEKQRTIQAKKEVEQRRAGGYSRKYASKAKNLADDMVRNTARDLLYYAVTQDAMLIFENLSRGFGRQGKRTFSAERQYTRMEDWLTAKLAYEGLPSKTYLSKTLAQYTSKTCSNCGFTITSADYDRVLEKLKKTATGWMTTINGKELKVEGQITYYNRYKRQNVVKDLSVELDRLSEESVNNDISSWTKGRSGEALSLLKKRFSHRPVQEKFVCLNCGFETHADEQAALNIARSWLFLRSQEYKKYQTNKTTGNTDKRAFVETWQSFYRKKLKEVWKPAV

SEQ ID NO: 45885 - protein, 978 aa, synthetic construct
  REGION 1..978: note = engineered CasX variant
QEIKRINKIRRRLVKDSNTKKAGKTGPMKTLLVRVMTPDLRERLENLRKKPENIPQPISNTSRANLNKLLTDYTEMKKAILHVYWEEFQKDPVGLMSRVAQPASKKIDQNKLKPEMDEKGNLTTAGFACSQCGQPLFVYKLEQVSEKGKAYTNYFGRCNVAEHEKLIQLAQLKPEKDSDEAVTYSLGKFGQRALDFYSIHVTKESTHPVKPLAQIAGNRYASVPVGKALSDACMGTIASFLSKYQDIIIEHQKVVKGNQKRLESLRELAGKENLEYPSVTLPPQPHTKEGVDAYNEVIARVRMWVNLNLWQKLKLSRDDAKPLLRLKGFPSFPLVERQANEVDWWDMVCNVKKLINEKKEDGKVFWQNLAGYKRQEALRPYLSSEEDRKKGKKFARYQLGDLLLHLEKKHGEDWGKVYDEAWERIDKKVEGLSKHIKLEEERRSEDAQSKAALTDWLRAKASFVIEGLKEADKDEFCRCELKLQKWYGDLRGKPFAIEAENSILDISGFSKQYNCAFIWQKDGVKKLNLYLIINYFKGGKLRFKKIKPEAFEANRFYTVINKKSGEIVPMEVNFNFDDPNLIILPLAFGKRQGREFIWNDLLSLETGSLKLANGRVIEKTLYNRRTRQDEPALFVALTFERREVLDSSNIKPMNLIGVDRGENIPAVIALTDPEGCPLSRFKDSLGNPTHILRIGESYKEKQRTIQAKKEVEQRRAGGYSRKYASKAKNLADDMVRNTARDLLYYAVTQDAMLIFENLSRGFGRQGKRTFSAERQYTRMEDWLTAKLAYEGLPSKTYLSKTLAQYTSKTCSNCGFTITSADYDRVLEKLKKTATGWMTTINGKELKVEGQITYYNRYKRQNVVKDLSVELDRLSEESVNNDISSWTKGRSGEALSLLKKRFSHRPVQEKFVCLNCGFETHADEQAALNIARSWLFLRSQEYKKYQTNKTTGNTDKRAFVETWQSFYRKKLKEVWKPAV

SEQ ID NO: 45886 - protein, 979 aa, synthetic construct
  REGION 1..979: note = engineered CasX variant
QEIKRINKIRRRLVKDSNTKKAGKTGPMKTLLVRVMTPDLRERLENLRKKPENIPQPISNTSRANLNKLLTDYTEMKKAILHVYWEEFQKDPVGLMSRVAQPASKKIDQNKLKPEMDEKGNLTTAGFACSQCGQPLFVYKLEQVSEKGKAYTNYFGRCNVAEHEKLIQKLAQLKPEKDSDEAVTYSLGKFGQRALDFYSIHVTKESTHPVKPLAQIAGNRYASGPVGKALSDACMGTIASFLSKYQDIIIEHQKVVKGNQKRLESLRELAGKENLEYPSVTLPPQPHTKEGVDAYNEVIARVRMWVNLNLWQKLKLSRDDAKPLLRLKGFPSFPLVERQANEVDWWDMVCNVKKLINEKKEDGKVFWQNLAGYKRQEALRPYLSSEEDRKKGKKFARYQLGDLLLHLEKKHGEDWGKVYDEAWERIDKKVEGLSKHIKLEEERRSEDAQSKAALTDWLRAKASFVIEGLKEADKDEFCRCELKLQKWYGDLRGKPFAIEAENSILDISGFSKQYNCAFIWQKDGVKKLNLYLIINYFKGGKLRFKKIKPEAFEANRFYTVINKKSGEIVPMEVNFNFDDPNLIILPLAFGKRQGREFIWNDLLSLETGSLKLANGRVIEKTLYNRRTRQDEPALFVALTFERREVLDSSNIKPMNLIGVDRGENIPAVIALTDPEGCPLSRFKDSLGNPTHILRIGESYKEKQRTIQAKKEVEQRRAGGYSRKYASKAKNLADDMVRNTARDLLYYAVTQDAMLIFENLSRGFGRQGKRTFSAERQYTRMEDWLTAKLAYEGLPSKTYLSKTLAQYTSKTCSNCGFTITSADYDRVLEKLKKTATGWMTTINGKELKVEGQITYYNRYKRQNVVKDLSVELDRLSEESVNNDISSWTKGRSGEALSLLKKRFSHRPVQEKFVCLNCGFETHADEQAALNIARSWLFLRSQEYKKYQTNKTTGNTDKRAFVETWQSFYRKKLKEVWKPAV

SEQ ID NO: 45887 - protein, 977 aa, synthetic construct
  REGION 1..977: note = engineered CasX variant
QEIKRINKIRRRLVKDSNTKKAGKTGPMKTLLVRVMTPDLRERLENLRKKPENIPQPISNTSRANLNKLLTDYTEMKKAILHVYWEEFQKDPVGLMSRVAQPASKKIDQNKLKPEMDEKGNLTTAGFACSQCGQPLFVYKLEQVSEKGKAYTNYFGRCNVAEHEKLIQLAQLKPEKDSDEAVTYSLGKFGQRALDFYSIHVTKESTHPVKPLAQIAGNRYASPVGKALSDACMGTIASFLSKYQDIIIEHQKVVKGNQKRLESLRELAGKENLEYPSVTLPPQPHTKEGVDAYNEVIARVRMWVNLNLWQKLKLSRDDAKPLLRLKGFPSFPLVERQANEVDWWDMVCNVKKLINEKKEDGKVFWQNLAGYKRQEALRPYLSSEEDRKKGKKFARYQLGDLLLHLEKKHGEDWGKVYDEAWERIDKKVEGLSKHIKLEEERRSEDAQSKAALTDWLRAKASFVIEGLKEADKDEFCRCELKLQKWYGDLRGKPFAIEAENSILDISGFSKQYNCAFIWQKDGVKKLNLYLIINYFKGGKLRFKKIKPEAFEANRFYTVINKKSGEIVPMEVNFNFDDPNLIILPLAFGKRQGREFIWNDLLSLETGSLKLANGRVIEKTLYNRRTRQDEPALFVALTFERREVLDSSNIKPMNLIGVDRGENIPAVIALTDPEGCPLSRFKDSLGNPTHILRIGESYKEKQRTIQAKKEVEQRRAGGYSRKYASKAKNLADDMVRNTARDLLYYAVTQDAMLIFENLSRGFGRQGKRTFSAERQYTRMEDWLTAKLAYEGLPSKTYLSKTLAQYTSKTCSNCGFTITSADYDRVLEKLKKTATGWMTTINGKELKVEGQITYYNRYKRQNVVKDLSVELDRLSEESVNNDISSWTKGRSGEALSLLKKRFSHRPVQEKFVCLNCGFETHADEQAALNIARSWLFLRSQEYKKYQTNKTTGNTDKRAFVETWQSFYRKKLKEVWKPAV

SEQ ID NO: 45888 - protein, 978 aa, synthetic construct
  REGION 1..978: note = engineered CasX variant
QEIKRINKIRRRLVKDSNTKKAGKTGPMKTLLVRVMTPDLRERLENLRKKPENIPQPISNTSRANLNKLLTDYTEMKKAILHVYWEEFQKDPVGLMSRVAQPASKKIDQNKLKPEMDEKGNLTTAGFACSQCGQPLFVYKLEQVSEKGKAYTNYFGRCNVAEHEKLILLAQLKPEKDSDEAVTYSLGKFGQRALDFYSIHVTKESTHPVKPLAQIAGNRYASYPVGKALSDACMGTIASFLSKYQDIIIEHQKVVKGNQKRLESLRELAGKENLEYPSVTLPPQPHTKEGVDAYNEVIARVRMWVNLNLWQKLKLSRDDAKPLLRLKGFPSFPLVERQANEVDWWDMVCNVKKLINEKKEDGKVFWQNLAIYKRQEALRPYLSSEEDRKKGKKFARYQLGDLLLHLEKKHGEDWGKVYDEAWERIDKKVEGLSKHIKLEEERRSEDAQSKAALTDWLRAKASFVIEGLKEADKDEFCRCELKLQKWYGDLRGKPFAIEAENSILDISGFSKQYNCAFIWQKDGVKKLNLYLIINYFKGGKLRFKKIKPEAFEANRFYTVINKKSGEIVPMEVNFNFDDPNLIILPLAFGKRQGREFIWNDLLSLETGSLKLANGRVIEKTLYNRRTRQDEPALFVALTFERREVLDSSNIKPMNLIGVDRGENIPAVIALTDPEGCPLSRFKDSLGNPTHILRIGESYKEKQRTIQAKKEVEQRRAGGYSRKYASKAKNLADDMVRNTARDLLYYAVTQDAMLIFENLSRGFGRQGKRTFSAERQYTRMEDWLTAKLAYEGLPSKTYLSKTLAQYTSKTCSNCGFTITSADYDRVLEKLKKTATGWMTTINGKELKVEGQITYYNRYKRQNVVKDLSVELDRLSEESVNNDISSWTKGRSGEALSLLKKRFSHRPVQEKFVCLNCGFETHADEQAALNIARSWLFLRSQEYKKYQTNKTTGNTDKRAFVETWQSFYRKKLKEVWKPAV

SEQ ID NO: 45889 - protein, 978 aa, synthetic construct
  REGION 1..978: note = engineered CasX variant
QEIKRINKIRRRLVKDSNTKKAGKTGPMKTLLVRVMTPDLRERLENLRKKPENIPQPISNTSRANLNKLLTDYTEMKKAILHVYWEEFQKDPVGLMSRVAQPASKKIDQNKLKPEMDEKGNLTTAGFACSQCGQPLFVYKLEQVSEKGKAYTNYFGRCNVAEHEKLILLAQLKPEKDSDEAVTYSLGKFGQRALDFYSIHVTKESTHPVKPLAQIAGNRYASHPVGKALSDACMGTIASFLSKYQDIIIEHQKVVKGNQKRLESLRELAGKENLEYPSVTLPPQPHTKEGVDAYNEVIARVRMWVNLNLWQKLKLSRDDAKPLLRLKGFPSFPLVERQANEVDWWDMVCNVKKLINEKKEDGKVFWQNLAIYKRQEALRPYLSSEEDRKKGKKFARYQLGDLLLHLEKKHGEDWGKVYDEAWERIDKKVEGLSKHIKLEEERRSEDAQSKAALTDWLRAKASFVIEGLKEADKDEFCRCELKLQKWYGDLRGKPFAIEAENSILDISGFSKQYNCAFIWQKDGVKKLNLYLIINYFKGGKLRFKKIKPEAFEANRFYTVINKKSGEIVPMEVNFNFDDPNLIILPLAFGKRQGREFIWNDLLSLETGSLKLANGRVIEKTLYNRRTRQDEPALFVALTFERREVLDSSNIKPMNLIGVDRGENIPAVIALTDPEGCPLSRFKDSLGNPTHILRIGESYKEKQRTIQAKKEVEQRRAGGYSRKYASKAKNLADDMVRNTARDLLYYAVTQDAMLIFENLSRGFGRQGKRTFSAERQYTRMEDWLTAKLAYEGLPSKTYLSKTLAQYTSKTCSNCGFTITSADYDRVLEKLKKTATGWMTTINGKELKVEGQITYYNRYKRQNVVKDLSVELDRLSEESVNNDISSWTKGRSGEALSLLKKRFSHRPVQEKFVCLNCGFETHADEQAALNIARSWLFLRSQEYKKYQTNKTTGNTDKRAFVETWQSFYRKKLKEVWKPAV

SEQ ID NO: 45890 - protein, 978 aa, synthetic construct
  REGION 1..978: note = engineered CasX variant
QEIKRINKIRRRLVKDSNTKKAGKTGPMKTLLVRVMTPDLRERLENLRKKPENIPQPISNTSRANLNKLLTDYTEMKKAILHVYWEEFQKDPVGLMSRVAQPASKKIDQNKLKPEMDEKGNLTTAGFACSQCGQPLFVYKLEQVSEKGKAYTNYFGRCNVAEHEKLILLAQLKPEKDSDEAVTYSLGKFGQRALDFYSIHVTKESTHPVKPLAQIAGNRYASSPVGKALSDACMGTIASFLSKYQDIIIEHQKVVKGNQKRLESLRELAGKENLEYPSVTLPPQPHTKEGVDAYNEVIARVRMWVNLNLWQKLKLSRDDAKPLLRLKGFPSFPLVERQANEVDWWDMVCNVKKLINEKKEDGKVFWQNLAIYKRQEALRPYLSSEEDRKKGKKFARYQLGDLLLHLEKKHGEDWGKVYDEAWERIDKKVEGLSKHIKLEEERRSEDAQSKAALTDWLRAKASFVIEGLKEADKDEFCRCELKLQKWYGDLRGKPFAIEAENSILDISGFSKQYNCAFIWQKDGVKKLNLYLIINYFKGGKLRFKKIKPEAFEANRFYTVINKKSGEIVPMEVNFNFDDPNLIILPLAFGKRQGREFIWNDLLSLETGSLKLANGRVIEKTLYNRRTRQDEPALFVALTFERREVLDSSNIKPMNLIGVDRGENIPAVIALTDPEGCPLSRFKDSLGNPTHILRIGESYKEKQRTIQAKKEVEQRRAGGYSRKYASKAKNLADDMVRNTARDLLYYAVTQDAMLIFENLSRGFGRQGKRTFSAERQYTRMEDWLTAKLAYEGLPSKTYLSKTLAQYTSKTCSNCGFTITSADYDRVLEKLKKTATGWMTTINGKELKVEGQITYYNRYKRQNVVKDLSVELDRLSEESVNNDISSWTKGRSGEALSLLKKRFSHRPVQEKFVCLNCGFETHADEQAALNIARSWLFLRSQEYKKYQTNKTTGNTDKRAFVETWQSFYRKKLKEVWKPAV

SEQ ID NO: 45891 - protein, 978 aa, synthetic construct
  REGION 1..978: note = engineered CasX variant
QEIKRINKIRRRLVKDSNTKKAGKTGPMKTLLVRVMTPDLRERLENLRKKPENIPQPISNTSRANLNKLLTDYTEMKKAILHVYWEEFQKDPVGLMSRVAQPASKKIDQNKLKPEMDEKGNLTTAGFACSQCGQPLFVYKLEQVSEKGKAYTNYFGRCNVAEHEKLILLAQLKPEKDSDEAVTYSLGKFGQRALDFYSIHVTKESTHPVKPLAQIAGNRYASTPVGKALSDACMGTIASFLSKYQDIIIEHQKVVKGNQKRLESLRELAGKENLEYPSVTLPPQPHTKEGVDAYNEVIARVRMWVNLNLWQKLKLSRDDAKPLLRLKGFPSFPLVERQANEVDWWDMVCNVKKLINEKKEDGKVFWQNLAIYKRQEALRPYLSSEEDRKKGKKFARYQLGDLLLHLEKKHGEDWGKVYDEAWERIDKKVEGLSKHIKLEEERRSEDAQSKAALTDWLRAKASFVIEGLKEADKDEFCRCELKLQKWYGDLRGKPFAIEAENSILDISGFSKQYNCAFIWQKDGVKKLNLYLIINYFKGGKLRFKKIKPEAFEANRFYTVINKKSGEIVPMEVNFNFDDPNLIILPLAFGKRQGREFIWNDLLSLETGSLKLANGRVIEKTLYNRRTRQDEPALFVALTFERREVLDSSNIKPMNLIGVDRGENIPAVIALTDPEGCPLSRFKDSLGNPTHILRIGESYKEKQRTIQAKKEVEQRRAGGYSRKYASKAKNLADDMVRNTARDLLYYAVTQDAMLIFENLSRGFGRQGKRTFSAERQYTRMEDWLTAKLAYEGLPSKTYLSKTLAQYTSKTCSNCGFTITSADYDRVLEKLKKTATGWMTTINGKELKVEGQITYYNRYKRQNVVKDLSVELDRLSEESVNNDISSWTKGRSGEALSLLKKRFSHRPVQEKFVCLNCGFETHADEQAALNIARSWLFLRSQEYKKYQTNKTTGNTDKRAFVETWQSFYRKKLKEVWKPAV

SEQ ID NO: 45892 - protein, 978 aa, synthetic construct
  REGION 1..978: note = engineered CasX variant
QEIKRINKIRRRLVKDSNTKKAGKTGPMKTLLVRVMTPDLRERLENLRKKPENIPQPISNTSRANLNKLLTDYTEMKKAILHVYWEEFQKDPVGLMSRVAQPASKKIDQNKLKPEMDEKGNLTTAGFACSQCGQPLFVYKLEQVSEKGKAYTNYFGRCNVAEHEKLILLAQLKPEKDSDEAVTYSLGKFGQRALDFYSIHVTKESTHPVKPLAQIAGNRYASAPVGKALSDACMGTIASFLSKYQDIIIEHQKVVKGNQKRLESLRELAGKENLEYPSVTLPPQPHTKEGVDAYNEVIARVRMWVNLNLWQKLKLSRDDAKPLLRLKGFPSFPLVERQANEVDWWDMVCNVKKLINEKKEDGKVFWQNLAIYKRQEALRPYLSSEEDRKKGKKFARYQLGDLLLHLEKKHGEDWGKVYDEAWERIDKKVEGLSKHIKLEEERRSEDAQSKAALTDWLRAKASFVIEGLKEADKDEFCRCELKLQKWYGDLRGKPFAIEAENSILDISGFSKQYNCAFIWQKDGVKKLNLYLIINYFKGGKLRFKKIKPEAFEANRFYTVINKKSGEIVPMEVNFNFDDPNLIILPLAFGKRQGREFIWNDLLSLETGSLKLANGRVIEKTLYNRRTRQDEPALFVALTFERREVLDSSNIKPMNLIGVDRGENIPAVIALTDPEGCPLSRFKDSLGNPTHILRIGESYKEKQRTIQAKKEVEQRRAGGYSRKYASKAKNLADDMVRNTARDLLYYAVTQDAMLIFENLSRGFGRQGKRTFSAERQYTRMEDWLTAKLAYEGLPSKTYLSKTLAQYTSKTCSNCGFTITSADYDRVLEKLKKTATGWMTTINGKELKVEGQITYYNRYKRQNVVKDLSVELDRLSEESVNNDISSWTKGRSGEALSLLKKRFSHRPVQEKFVCLNCGFETHADEQAALNIARSWLFLRSQEYKKYQTNKTTGNTDKRAFVETWQSFYRKKLKEVWKPAV

SEQ ID NO: 45893 - protein, 978 aa, synthetic construct
  REGION 1..978: note = engineered CasX variant
QEIKRINKIRRRLVKDSNTKKAGKTGPMKTLLVRVMTPDLRERLENLRKKPENIPQPISNTSRANLNKLLTDYTEMKKAILHVYWEEFQKDPVGLMSRVAQPASKKIDQNKLKPEMDEKGNLTTAGFACSQCGQPLFVYKLEQVSEKGKAYTNYFGRCNVAEHEKLILLAQLKPEKDSDEAVTYSLGKFGQRALDFYSIHVTKESTHPVKPLAQIAGNRYASVPVGKALSDACMGTIASFLSKYQDIIIEHQKVVKGNQKRLESLRELAGKENLEYPSVTLPPQPHTKEGVDAYNEVIARVRMWVNLNLWQKLKLSRDDAKPLLRLKGFPSFPLVERQANEVDWWDMVCNVKKLINEKKEDGKVFWQNLAIYKRQEALRPYLSSEEDRKKGKKFARYQLGDLLLHLEKKHGEDWGKVYDEAWERIDKKVEGLSKHIKLEEERRSEDAQSKAALTDWLRAKASFVIEGLKEADKDEFCRCELKLQKWYGDLRGKPFAIEAENSILDISGFSKQYNCAFIWQKDGVKKLNLYLIINYFKGGKLRFKKIKPEAFEANRFYTVINKKSGEIVPMEVNFNFDDPNLIILPLAFGKRQGREFIWNDLLSLETGSLKLANGRVIEKTLYNRRTRQDEPALFVALTFERREVLDSSNIKPMNLIGVDRGENIPAVIALTDPEGCPLSRFKDSLGNPTHILRIGESYKEKQRTIQAKKEVEQRRAGGYSRKYASKAKNLADDMVRNTARDLLYYAVTQDAMLIFENLSRGFGRQGKRTFSAERQYTRMEDWLTAKLAYEGLPSKTYLSKTLAQYTSKTCSNCGFTITSADYDRVLEKLKKTATGWMTTINGKELKVEGQITYYNRYKRQNVVKDLSVELDRLSEESVNNDISSWTKGRSGEALSLLKKRFSHRPVQEKFVCLNCGFETHADEQAALNIARSWLFLRSQEYKKYQTNKTTGNTDKRAFVETWQSFYRKKLKEVWKPAV

SEQ ID NO: 45894 - protein, 978 aa, synthetic construct
  REGION 1..978: note = engineered CasX variant
QEIKRINKIRRRLVKDSNTKKAGKTGPMKTLLVRVMTPDLRERLENLRKKPENIPQPISNTSRANLNKLLTDYTEMKKAILHVYWEEFQKDPVGLMSRVAQPASKKIDQNKLKPEMDEKGNLTTAGFACSQCGQPLFVYKLEQVSEKGKAYTNYFGRCNVAEHEKLIKLAQLKPEKDSDEAVTYSLGKFGQRALDFYSIHVTKESTHPVKPLAQIAGNRYASGPVGKALSDACMGTIASFLSKYQDIIIEHQKVVKGNQKRLESLRELAGKENLEYPSVTLPPQPHTKEGVDAYNEVIARVRMWVNLNLWQKLKLSRDDAKPLLRLKGFPSFPLVERQANEVDWWDMVCNVKKLINEKKEDGKVFWQNLAIYKRQEALRPYLSSEEDRKKGKKFARYQLGDLLLHLEKKHGEDWGKVYDEAWERIDKKVEGLSKHIKLEEERRSEDAQSKAALTDWLRAKASFVIEGLKEADKDEFCRCELKLQKWYGDLRGKPFAIEAENSILDISGFSKQYNCAFIWQKDGVKKLNLYLIINYFKGGKLRFKKIKPEAFEANRFYTVINKKSGEIVPMEVNFNFDDPNLIILPLAFGKRQGREFIWNDLLSLETGSLKLANGRVIEKTLYNRRTRQDEPALFVALTFERREVLDSSNIKPMNLIGVDRGENIPAVIALTDPEGCPLSRFKDSLGNPTHILRIGESYKEKQRTIQAKKEVEQRRAGGYSRKYASKAKNLADDMVRNTARDLLYYAVTQDAMLIFENLSRGFGRQGKRTFSAERQYTRMEDWLTAKLAYEGLPSKTYLSKTLAQYTSKTCSNCGFTITSADYDRVLEKLKKTATGWMTTINGKELKVEGQITYYNRYKRQNVVKDLSVELDRLSEESVNNDISSWTKGRSGEALSLLKKRFSHRPVQEKFVCLNCGFETHADEQAALNIARSWLFLRSQEYKKYQTNKTTGNTDKRAFVETWQSFYRKKLKEVWKPAV

SEQ ID NO: 45895 - protein, 977 aa, synthetic construct
  REGION 1..977: note = engineered CasX variant
QEIKRINKIRRRLVKDSNTKKAGKTGPMKTLLVRVMTPDLRERLENLRKKPENIPQPISNTSRANLNKLLTDYTEMKKAILHVYWEEFQKDPVGLMSRVAQPASKKIDQNKLKPEMDEKGNLTTAGFACSQCGQPLFVYKLEQVSEKGKAYTNYFGRCNVAEHEKLILLAQLKPEKDSDEAVTYSLGKFGQRALDFYSIHVTKESTHPVKPLAQIAGNRYASPVGKALSDACMGTIASFLSKYQDIIIEHQKVVKGNQKRLESLRELAGKENLEYPSVTLPPQPHTKEGVDAYNEVIARVRMWVNLNLWQKLKLSRDDAKPLLRLKGFPSFPLVERQANEVDWWDMVCNVKKLINEKKEDGKVFWQNLAIYKRQEALRPYLSSEEDRKKGKKFARYQLGDLLLHLEKKHGEDWGKVYDEAWERIDKKVEGLSKHIKLEEERRSEDAQSKAALTDWLRAKASFVIEGLKEADKDEFCRCELKLQKWYGDLRGKPFAIEAENSILDISGFSKQYNCAFIWQKDGVKKLNLYLIINYFKGGKLRFKKIKPEAFEANRFYTVINKKSGEIVPMEVNFNFDDPNLIILPLAFGKRQGREFIWNDLLSLETGSLKLANGRVIEKTLYNRRTRQDEPALFVALTFERREVLDSSNIKPMNLIGVDRGENIPAVIALTDPEGCPLSRFKDSLGNPTHILRIGESYKEKQRTIQAKKEVEQRRAGGYSRKYASKAKNLADDMVRNTARDLLYYAVTQDAMLIFENLSRGFGRQGKRTFSAERQYTRMEDWLTAKLAYEGLPSKTYLSKTLAQYTSKTCSNCGFTITSADYDRVLEKLKKTATGWMTTINGKELKVEGQITYYNRYKRQNVVKDLSVELDRLSEESVNNDISSWTKGRSGEALSLLKKRFSHRPVQEKFVCLNCGFETHADEQAALNIARSWLFLRSQEYKKYQTNKTTGNTDKRAFVETWQSFYRKKLKEVWKPAV

SEQ ID NO: 45896 - protein, 978 aa, synthetic construct
  REGION 1..978: note = engineered CasX variant
QEIKRINKIRRRLVKDSNTKKAGKTGPMKTLLVRVMTPDLRERLENLRKKPENIPQPISNTSRANLNKLLTDYTEMKKAILHVYWEEFQKDPVGLMSRVAQPASKKIDQNKLKPEMDEKGNLTTAGFACSQCGQPLFVYKLEQVSEKGKAYTNYFGRCNVAEHEKLILLAQLKPEKDSDEAVTYSLGKFGQRALDFYSIHVTKESTHPVKPLAQIAGNRYASYPVGKALSDACMGTIASFLSKYQDIIIEHQKVVKGNQKRLESLRELAGKENLEYPSVTLPPQPHTKEGVDAYNEVIARVRMWVNLNLWQKLKLSRDDAKPLLRLKGFPSFPLVERQANEVDWWDMVCNVKKLINEKKEDGKVFWQNLAGYKRQEALRPYLSSEEDREKGKKFARYQLGDLLLHLEKKHGEDWGKVYDEAWERIDKKVEGLSKHIKLEEERRSEDAQSKAALTDWLRAKASFVIEGLKEADKDEFCRCELKLQKWYGDLRGKPFAIEAENSILDISGFSKQYNCAFIWQKDGVKKLNLYLIINYFKGGKLRFKKIKPEAFEANRFYTVINKKSGEIVPMEVNFNFDDPNLIILPLAFGKRQGREFIWNDLLSLETGSLKLANGRVIEKTLYNRRTRQDEPALFVALTFERREVLDSSNIKPMNLIGVDRGENIPAVIALTDPEGCPLSRFKDSLGNPTHILRIGESYKEKQRTIQAKKEVEQRRAGGYSRKYASKAKNLADDMVRNTARDLLYYAVTQDAMLIFENLSRGFGRQGKRTFSAERQYTRMEDWLTAKLAYEGLPSKTYLSKTLAQYTSKTCSNCGFTITSADYDRVLEKLKKTATGWMTTINGKELKVEGQITYYNRYKRQNVVKDLSVELDRLSEESVNNDISSWTKGRSGEALSLLKKRFSHRPVQEKFVCLNCGFETHADEQAALNIARSWLFLRSQEYKKYQTNKTTGNTDKRAFVETWQSFYRKKLKEVWKPAV

SEQ ID NO: 45897 - protein, 978 aa, synthetic construct
  REGION 1..978: note = engineered CasX variant
QEIKRINKIRRRLVKDSNTKKAGKTGPMKTLLVRVMTPDLRERLENLRKKPENIPQPISNTSRANLNKLLTDYTEMKKAILHVYWEEFQKDPVGLMSRVAQPASKKIDQNKLKPEMDEKGNLTTAGFACSQCGQPLFVYKLEQVSEKGKAYTNYFGRCNVAEHEKLILLAQLKPEKDSDEAVTYSLGKFGQRALDFYSIHVTKESTHPVKPLAQIAGNRYASHPVGKALSDACMGTIASFLSKYQDIIIEHQKVVKGNQKRLESLRELAGKENLEYPSVTLPPQPHTKEGVDAYNEVIARVRMWVNLNLWQKLKLSRDDAKPLLRLKGFPSFPLVERQANEVDWWDMVCNVKKLINEKKEDGKVFWQNLAGYKRQEALRPYLSSEEDREKGKKFARYQLGDLLLHLEKKHGEDWGKVYDEAWERIDKKVEGLSKHIKLEEERRSEDAQSKAALTDWLRAKASFVIEGLKEADKDEFCRCELKLQKWYGDLRGKPFAIEAENSILDISGFSKQYNCAFIWQKDGVKKLNLYLIINYFKGGKLRFKKIKPEAFEANRFYTVINKKSGEIVPMEVNFNFDDPNLIILPLAFGKRQGREFIWNDLLSLETGSLKLANGRVIEKTLYNRRTRQDEPALFVALTFERREVLDSSNIKPMNLIGVDRGENIPAVIALTDPEGCPLSRFKDSLGNPTHILRIGESYKEKQRTIQAKKEVEQRRAGGYSRKYASKAKNLADDMVRNTARDLLYYAVTQDAMLIFENLSRGFGRQGKRTFSAERQYTRMEDWLTAKLAYEGLPSKTYLSKTLAQYTSKTCSNCGFTITSADYDRVLEKLKKTATGWMTTINGKELKVEGQITYYNRYKRQNVVKDLSVELDRLSEESVNNDISSWTKGRSGEALSLLKKRFSHRPVQEKFVCLNCGFETHADEQAALNIARSWLFLRSQEYKKYQTNKTTGNTDKRAFVETWQSFYRKKLKEVWKPAV

SEQ ID NO: 45898 - protein, 978 aa, synthetic construct
  REGION 1..978: note = engineered CasX variant
QEIKRINKIRRRLVKDSNTKKAGKTGPMKTLLVRVMTPDLRERLENLRKKPENIPQPISNTSRANLNKLLTDYTEMKKAILHVYWEEFQKDPVGLMSRVAQPASKKIDQNKLKPEMDEKGNLTTAGFACSQCGQPLFVYKLEQVSEKGKAYTNYFGRCNVAEHEKLILLAQLKPEKDSDEAVTYSLGKFGQRALDFYSIHVTKESTHPVKPLAQIAGNRYASSPVGKALSDACMGTIASFLSKYQDIIIEHQKVVKGNQKRLESLRELAGKENLEYPSVTLPPQPHTKEGVDAYNEVIARVRMWVNLNLWQKLKLSRDDAKPLLRLKGFPSFPLVERQANEVDWWDMVCNVKKLINEKKEDGKVFWQNLAGYKRQEALRPYLSSEEDREKGKKFARYQLGDLLLHLEKKHGEDWGKVYDEAWERIDKKVEGLSKHIKLEEERRSEDAQSKAALTDWLRAKASFVIEGLKEADKDEFCRCELKLQKWYGDLRGKPFAIEAENSILDISGFSKQYNCAFIWQKDGVKKLNLYLIINYFKGGKLRFKKIKPEAFEANRFYTVINKKSGEIVPMEVNFNFDDPNLIILPLAFGKRQGREFIWNDLLSLETGSLKLANGRVIEKTLYNRRTRQDEPALFVALTFERREVLDSSNIKPMNLIGVDRGENIPAVIALTDPEGCPLSRFKDSLGNPTHILRIGESYKEKQRTIQAKKEVEQRRAGGYSRKYASKAKNLADDMVRNTARDLLYYAVTQDAMLIFENLSRGFGRQGKRTFSAERQYTRMEDWLTAKLAYEGLPSKTYLSKTLAQYTSKTCSNCGFTITSADYDRVLEKLKKTATGWMTTINGKELKVEGQITYYNRYKRQNVVKDLSVELDRLSEESVNNDISSWTKGRSGEALSLLKKRFSHRPVQEKFVCLNCGFETHADEQAALNIARSWLFLRSQEYKKYQTNKTTGNTDKRAFVETWQSFYRKKLKEVWKPAV

SEQ ID NO: 45899 - protein, 978 aa, synthetic construct
  REGION 1..978: note = engineered CasX variant
QEIKRINKIRRRLVKDSNTKKAGKTGPMKTLLVRVMTPDLRERLENLRKKPENIPQPISNTSRANLNKLLTDYTEMKKAILHVYWEEFQKDPVGLMSRVAQPASKKIDQNKLKPEMDEKGNLTTAGFACSQCGQPLFVYKLEQVSEKGKAYTNYFGRCNVAEHEKLILLAQLKPEKDSDEAVTYSLGKFGQRALDFYSIHVTKESTHPVKPLAQIAGNRYASTPVGKALSDACMGTIASFLSKYQDIIIEHQKVVKGNQKRLESLRELAGKENLEYPSVTLPPQPHTKEGVDAYNEVIARVRMWVNLNLWQKLKLSRDDAKPLLRLKGFPSFPLVERQANEVDWWDMVCNVKKLINEKKEDGKVFWQNLAGYKRQEALRPYLSSEEDREKGKKFARYQLGDLLLHLEKKHGEDWGKVYDEAWERIDKKVEGLSKHIKLEEERRSEDAQSKAALTDWLRAKASFVIEGLKEADKDEFCRCELKLQKWYGDLRGKPFAIEAENSILDISGFSKQYNCAFIWQKDGVKKLNLYLIINYFKGGKLRFKKIKPEAFEANRFYTVINKKSGEIVPMEVNFNFDDPNLIILPLAFGKRQGREFIWNDLLSLETGSLKLANGRVIEKTLYNRRTRQDEPALFVALTFERREVLDSSNIKPMNLIGVDRGENIPAVIALTDPEGCPLSRFKDSLGNPTHILRIGESYKEKQRTIQAKKEVEQRRAGGYSRKYASKAKNLADDMVRNTARDLLYYAVTQDAMLIFENLSRGFGRQGKRTFSAERQYTRMEDWLTAKLAYEGLPSKTYLSKTLAQYTSKTCSNCGFTITSADYDRVLEKLKKTATGWMTTINGKELKVEGQITYYNRYKRQNVVKDLSVELDRLSEESVNNDISSWTKGRSGEALSLLKKRFSHRPVQEKFVCLNCGFETHADEQAALNIARSWLFLRSQEYKKYQTNKTTGNTDKRAFVETWQSFYRKKLKEVWKPAV

SEQ ID NO: 45900 - protein, 978 aa, synthetic construct
  REGION 1..978: note = engineered CasX variant
QEIKRINKIRRRLVKDSNTKKAGKTGPMKTLLVRVMTPDLRERLENLRKKPENIPQPISNTSRANLNKLLTDYTEMKKAILHVYWEEFQKDPVGLMSRVAQPASKKIDQNKLKPEMDEKGNLTTAGFACSQCGQPLFVYKLEQVSEKGKAYTNYFGRCNVAEHEKLILLAQLKPEKDSDEAVTYSLGKFGQRALDFYSIHVTKESTHPVKPLAQIAGNRYASAPVGKALSDACMGTIASFLSKYQDIIIEHQKVVKGNQKRLESLRELAGKENLEYPSVTLPPQPHTKEGVDAYNEVIARVRMWVNLNLWQKLKLSRDDAKPLLRLKGFPSFPLVERQANEVDWWDMVCNVKKLINEKKEDGKVFWQNLAGYKRQEALRPYLSSEEDREKGKKFARYQLGDLLLHLEKKHGEDWGKVYDEAWERIDKKVEGLSKHIKLEEERRSEDAQSKAALTDWLRAKASFVIEGLKEADKDEFCRCELKLQKWYGDLRGKPFAIEAENSILDISGFSKQYNCAFIWQKDGVKKLNLYLIINYFKGGKLRFKKIKPEAFEANRFYTVINKKSGEIVPMEVNFNFDDPNLIILPLAFGKRQGREFIWNDLLSLETGSLKLANGRVIEKTLYNRRTRQDEPALFVALTFERREVLDSSNIKPMNLIGVDRGENIPAVIALTDPEGCPLSRFKDSLGNPTHILRIGESYKEKQRTIQAKKEVEQRRAGGYSRKYASKAKNLADDMVRNTARDLLYYAVTQDAMLIFENLSRGFGRQGKRTFSAERQYTRMEDWLTAKLAYEGLPSKTYLSKTLAQYTSKTCSNCGFTITSADYDRVLEKLKKTATGWMTTINGKELKVEGQITYYNRYKRQNVVKDLSVELDRLSEESVNNDISSWTKGRSGEALSLLKKRFSHRPVQEKFVCLNCGFETHADEQAALNIARSWLFLRSQEYKKYQTNKTTGNTDKRAFVETWQSFYRKKLKEVWKPAV

SEQ ID NO: 45901 - protein, 978 aa, synthetic construct
  REGION 1..978: note = engineered CasX variant
QEIKRINKIRRRLVKDSNTKKAGKTGPMKTLLVRVMTPDLRERLENLRKKPENIPQPISNTSRANLNKLLTDYTEMKKAILHVYWEEFQKDPVGLMSRVAQPASKKIDQNKLKPEMDEKGNLTTAGFACSQCGQPLFVYKLEQVSEKGKAYTNYFGRCNVAEHEKLILLAQLKPEKDSDEAVTYSLGKFGQRALDFYSIHVTKESTHPVKPLAQIAGNRYASVPVGKALSDACMGTIASFLSKYQDIIIEHQKVVKGNQKRLESLRELAGKENLEYPSVTLPPQPHTKEGVDAYNEVIARVRMWVNLNLWQKLKLSRDDAKPLLRLKGFPSFPLVERQANEVDWWDMVCNVKKLINEKKEDGKVFWQNLAGYKRQEALRPYLSSEEDREKGKKFARYQLGDLLLHLEKKHGEDWGKVYDEAWERIDKKVEGLSKHIKLEEERRSEDAQSKAALTDWLRAKASFVIEGLKEADKDEFCRCELKLQKWYGDLRGKPFAIEAENSILDISGFSKQYNCAFIWQKDGVKKLNLYLIINYFKGGKLRFKKIKPEAFEANRFYTVINKKSGEIVPMEVNFNFDDPNLIILPLAFGKRQGREFIWNDLLSLETGSLKLANGRVIEKTLYNRRTRQDEPALFVALTFERREVLDSSNIKPMNLIGVDRGENIPAVIALTDPEGCPLSRFKDSLGNPTHILRIGESYKEKQRTIQAKKEVEQRRAGGYSRKYASKAKNLADDMVRNTARDLLYYAVTQDAMLIFENLSRGFGRQGKRTFSAERQYTRMEDWLTAKLAYEGLPSKTYLSKTLAQYTSKTCSNCGFTITSADYDRVLEKLKKTATGWMTTINGKELKVEGQITYYNRYKRQNVVKDLSVELDRLSEESVNNDISSWTKGRSGEALSLLKKRFSHRPVQEKFVCLNCGFETHADEQAALNIARSWLFLRSQEYKKYQTNKTTGNTDKRAFVETWQSFYRKKLKEVWKPAV

SEQ ID NO: 45902 - protein, 978 aa, synthetic construct
  REGION 1..978: note = engineered CasX variant
QEIKRINKIRRRLVKDSNTKKAGKTGPMKTLLVRVMTPDLRERLENLRKKPENIPQPISNTSRANLNKLLTDYTEMKKAILHVYWEEFQKDPVGLMSRVAQPASKKIDQNKLKPEMDEKGNLTTAGFACSQCGQPLFVYKLEQVSEKGKAYTNYFGRCNVAEHEKLIKLAQLKPEKDSDEAVTYSLGKFGQRALDFYSIHVTKESTHPVKPLAQIAGNRYASGPVGKALSDACMGTIASFLSKYQDIIIEHQKVVKGNQKRLESLRELAGKENLEYPSVTLPPQPHTKEGVDAYNEVIARVRMWVNLNLWQKLKLSRDDAKPLLRLKGFPSFPLVERQANEVDWWDMVCNVKKLINEKKEDGKVFWQNLAGYKRQEALRPYLSSEEDREKGKKFARYQLGDLLLHLEKKHGEDWGKVYDEAWERIDKKVEGLSKHIKLEEERRSEDAQSKAALTDWLRAKASFVIEGLKEADKDEFCRCELKLQKWYGDLRGKPFAIEAENSILDISGFSKQYNCAFIWQKDGVKKLNLYLIINYFKGGKLRFKKIKPEAFEANRFYTVINKKSGEIVPMEVNFNFDDPNLIILPLAFGKRQGREFIWNDLLSLETGSLKLANGRVIEKTLYNRRTRQDEPALFVALTFERREVLDSSNIKPMNLIGVDRGENIPAVIALTDPEGCPLSRFKDSLGNPTHILRIGESYKEKQRTIQAKKEVEQRRAGGYSRKYASKAKNLADDMVRNTARDLLYYAVTQDAMLIFENLSRGFGRQGKRTFSAERQYTRMEDWLTAKLAYEGLPSKTYLSKTLAQYTSKTCSNCGFTITSADYDRVLEKLKKTATGWMTTINGKELKVEGQITYYNRYKRQNVVKDLSVELDRLSEESVNNDISSWTKGRSGEALSLLKKRFSHRPVQEKFVCLNCGFETHADEQAALNIARSWLFLRSQEYKKYQTNKTTGNTDKRAFVETWQSFYRKKLKEVWKPAV

SEQ ID NO: 45903 - protein, 977 aa, synthetic construct
  REGION 1..977: note = engineered CasX variant
QEIKRINKIRRRLVKDSNTKKAGKTGPMKTLLVRVMTPDLRERLENLRKKPENIPQPISNTSRANLNKLLTDYTEMKKAILHVYWEEFQKDPVGLMSRVAQPASKKIDQNKLKPEMDEKGNLTTAGFACSQCGQPLFVYKLEQVSEKGKAYTNYFGRCNVAEHEKLILLAQLKPEKDSDEAVTYSLGKFGQRALDFYSIHVTKESTHPVKPLAQIAGNRYASPVGKALSDACMGTIASFLSKYQDIIIEHQKVVKGNQKRLESLRELAGKENLEYPSVTLPPQPHTKEGVDAYNEVIARVRMWVNLNLWQKLKLSRDDAKPLLRLKGFPSFPLVERQANEVDWWDMVCNVKKLINEKKEDGKVFWQNLAGYKRQEALRPYLSSEEDREKGKKFARYQLGDLLLHLEKKHGEDWGKVYDEAWERIDKKVEGLSKHIKLEEERRSEDAQSKAALTDWLRAKASFVIEGLKEADKDEFCRCELKLQKWYGDLRGKPFAIEAENSILDISGFSKQYNCAFIWQKDGVKKLNLYLIINYFKGGKLRFKKIKPEAFEANRFYTVINKKSGEIVPMEVNFNFDDPNLIILPLAFGKRQGREFIWNDLLSLETGSLKLANGRVIEKTLYNRRTRQDEPALFVALTFERREVLDSSNIKPMNLIGVDRGENIPAVIALTDPEGCPLSRFKDSLGNPTHILRIGESYKEKQRTIQAKKEVEQRRAGGYSRKYASKAKNLADDMVRNTARDLLYYAVTQDAMLIFENLSRGFGRQGKRTFSAERQYTRMEDWLTAKLAYEGLPSKTYLSKTLAQYTSKTCSNCGFTITSADYDRVLEKLKKTATGWMTTINGKELKVEGQITYYNRYKRQNVVKDLSVELDRLSEESVNNDISSWTKGRSGEALSLLKKRFSHRPVQEKFVCLNCGFETHADEQAALNIARSWLFLRSQEYKKYQTNKTTGNTDKRAFVETWQSFYRKKLKEVWKPAV

SEQ ID NO: 45904 - protein, 978 aa, synthetic construct
  REGION 1..978: note = engineered CasX variant
QEIKRINKIRRRLVKDSNTKKAGKTGPMKTLLVRVMTPDLRERLENLRKKPENIPQPISNTSRANLNKLLTDYTEMKKAILHVYWEEFQKDPVGLMSRVAQPASKKIDQNKLKPEMDEKGNLTTAGFACSQCGQPLFVYKLEQVSEKGKAYTNYFGRCNVAEHEKLILLAQLKPEKDSDEAVTYSLGKFGQRALDFYSIHVTKESTHPVKPLAQIAGNRYASYPVGKALSDACMGTIASFLSKYQDIIIEHQKVVKGNQKRLESLRELAGKENLEYPSVTLPPQPHTKEGVDAYNEVIARVRMWVNLNLWQKLKLSRDDAKPLLRLKGFPSFPLVERQANEVDWWDMVCNVKKLINEKKEDGKVFWQNLAGYKRQEALRPYLSSEEDRKKGKKFARYQLGDLLLHLEKKHGEDWGKVYDEAWERIDKKVEGLSKHIKLEEERRSEDAQSKAALTDWLRAKASFVIEGLKEADKDEFCRCELKLQKWYGDLRGKPFAIEAENSILDISGFSKQYNCAFIWQKDGVKKLNLYLIINYFKGGKLRFKKIKPEAFEANRFYTVINKKSGEIVIMEVNFNFDDPNLIILPLAFGKRQGREFIWNDLLSLETGSLKLANGRVIEKTLYNRRTRQDEPALFVALTFERREVLDSSNIKPMNLIGVDRGENIPAVIALTDPEGCPLSRFKDSLGNPTHILRIGESYKEKQRTIQAKKEVEQRRAGGYSRKYASKAKNLADDMVRNTARDLLYYAVTQDAMLIFENLSRGFGRQGKRTFSAERQYTRMEDWLTAKLAYEGLPSKTYLSKTLAQYTSKTCSNCGFTITSADYDRVLEKLKKTATGWMTTINGKELKVEGQITYYNRYKRQNVVKDLSVELDRLSEESVNNDISSWTKGRSGEALSLLKKRFSHRPVQEKFVCLNCGFETHADEQAALNIARSWLFLRSQEYKKYQTNKTTGNTDKRAFVETWQSFYRKKLKEVWKPAV

SEQ ID NO: 45905 - protein, 978 aa, synthetic construct
  REGION 1..978: note = engineered CasX variant
QEIKRINKIRRRLVKDSNTKKAGKTGPMKTLLVRVMTPDLRERLENLRKKPENIPQPISNTSRANLNKLLTDYTEMKKAILHVYWEEFQKDPVGLMSRVAQPASKKIDQNKLKPEMDEKGNLTTAGFACSQCGQPLFVYKLEQVSEKGKAYTNYFGRCNVAEHEKLILLAQLKPEKDSDEAVTYSLGKFGQRALDFYSIHVTKESTHPVKPLAQIAGNRYASHPVGKALSDACMGTIASFLSKYQDIIIEHQKVVKGNQKRLESLRELAGKENLEYPSVTLPPQPHTKEGVDAYNEVIARVRMWVNLNLWQKLKLSRDDAKPLLRLKGFPSFPLVERQANEVDWWDMVCNVKKLINEKKEDGKVFWQNLAGYKRQEALRPYLSSEEDRKKGKKFARYQLGDLLLHLEKKHGEDWGKVYDEAWERIDKKVEGLSKHIKLEEERRSEDAQSKAALTDWLRAKASFVIEGLKEADKDEFCRCELKLQKWYGDLRGKPFAIEAENSILDISGFSKQYNCAFIWQKDGVKKLNLYLIINYFKGGKLRFKKIKPEAFEANRFYTVINKKSGEIVIMEVNFNFDDPNLIILPLAFGKRQGREFIWNDLLSLETGSLKLANGRVIEKTLYNRRTRQDEPALFVALTFERREVLDSSNIKPMNLIGVDRGENIPAVIALTDPEGCPLSRFKDSLGNPTHILRIGESYKEKQRTIQAKKEVEQRRAGGYSRKYASKAKNLADDMVRNTARDLLYYAVTQDAMLIFENLSRGFGRQGKRTFSAERQYTRMEDWLTAKLAYEGLPSKTYLSKTLAQYTSKTCSNCGFTITSADYDRVLEKLKKTATGWMTTINGKELKVEGQITYYNRYKRQNVVKDLSVELDRLSEESVNNDISSWTKGRSGEALSLLKKRFSHRPVQEKFVCLNCGFETHADEQAALNIARSWLFLRSQEYKKYQTNKTTGNTDKRAFVETWQSFYRKKLKEVWKPAV

SEQ ID NO: 45906 - protein, 978 aa, synthetic construct
  REGION 1..978: note = engineered CasX variant
QEIKRINKIRRRLVKDSNTKKAGKTGPMKTLLVRVMTPDLRERLENLRKKPENIPQPISNTSRANLNKLLTDYTEMKKAILHVYWEEFQKDPVGLMSRVAQPASKKIDQNKLKPEMDEKGNLTTAGFACSQCGQPLFVYKLEQVSEKGKAYTNYFGRCNVAEHEKLILLAQLKPEKDSDEAVTYSLGKFGQRALDFYSIHVTKESTHPVKPLAQIAGNRYASSPVGKALSDACMGTIASFLSKYQDIIIEHQKVVKGNQKRLESLRELAGKENLEYPSVTLPPQPHTKEGVDAYNEVIARVRMWVNLNLWQKLKLSRDDAKPLLRLKGFPSFPLVERQANEVDWWDMVCNVKKLINEKKEDGKVFWQNLAGYKRQEALRPYLSSEEDRKKGKKFARYQLGDLLLHLEKKHGEDWGKVYDEAWERIDKKVEGLSKHIKLEEERRSEDAQSKAALTDWLRAKASFVIEGLKEADKDEFCRCELKLQKWYGDLRGKPFAIEAENSILDISGFSKQYNCAFIWQKDGVKKLNLYLIINYFKGGKLRFKKIKPEAFEANRFYTVINKKSGEIVIMEVNFNFDDPNLIILPLAFGKRQGREFIWNDLLSLETGSLKLANGRVIEKTLYNRRTRQDEPALFVALTFERREVLDSSNIKPMNLIGVDRGENIPAVIALTDPEGCPLSRFKDSLGNPTHILRIGESYKEKQRTIQAKKEVEQRRAGGYSRKYASKAKNLADDMVRNTARDLLYYAVTQDAMLIFENLSRGFGRQGKRTFSAERQYTRMEDWLTAKLAYEGLPSKTYLSKTLAQYTSKTCSNCGFTITSADYDRVLEKLKKTATGWMTTINGKELKVEGQITYYNRYKRQNVVKDLSVELDRLSEESVNNDISSWTKGRSGEALSLLKKRFSHRPVQEKFVCLNCGFETHADEQAALNIARSWLFLRSQEYKKYQTNKTTGNTDKRAFVETWQSFYRKKLKEVWKPAV

SEQ ID NO: 45907 - protein, 978 aa, synthetic construct
  REGION 1..978: note = engineered CasX variant
QEIKRINKIRRRLVKDSNTKKAGKTGPMKTLLVRVMTPDLRERLENLRKKPENIPQPISNTSRANLNKLLTDYTEMKKAILHVYWEEFQKDPVGLMSRVAQPASKKIDQNKLKPEMDEKGNLTTAGFACSQCGQPLFVYKLEQVSEKGKAYTNYFGRCNVAEHEKLILLAQLKPEKDSDEAVTYSLGKFGQRALDFYSIHVTKESTHPVKPLAQIAGNRYASTPVGKALSDACMGTIASFLSKYQDIIIEHQKVVKGNQKRLESLRELAGKENLEYPSVTLPPQPHTKEGVDAYNEVIARVRMWVNLNLWQKLKLSRDDAKPLLRLKGFPSFPLVERQANEVDWWDMVCNVKKLINEKKEDGKVFWQNLAGYKRQEALRPYLSSEEDRKKGKKFARYQLGDLLLHLEKKHGEDWGKVYDEAWERIDKKVEGLSKHIKLEEERRSEDAQSKAALTDWLRAKASFVIEGLKEADKDEFCRCELKLQKWYGDLRGKPFAIEAENSILDISGFSKQYNCAFIWQKDGVKKLNLYLIINYFKGGKLRFKKIKPEAFEANRFYTVINKKSGEIVIMEVNFNFDDPNLIILPLAFGKRQGREFIWNDLLSLETGSLKLANGRVIEKTLYNRRTRQDEPALFVALTFERREVLDSSNIKPMNLIGVDRGENIPAVIALTDPEGCPLSRFKDSLGNPTHILRIGESYKEKQRTIQAKKEVEQRRAGGYSRKYASKAKNLADDMVRNTARDLLYYAVTQDAMLIFENLSRGFGRQGKRTFSAERQYTRMEDWLTAKLAYEGLPSKTYLSKTLAQYTSKTCSNCGFTITSADYDRVLEKLKKTATGWMTTINGKELKVEGQITYYNRYKRQNVVKDLSVELDRLSEESVNNDISSWTKGRSGEALSLLKKRFSHRPVQEKFVCLNCGFETHADEQAALNIARSWLFLRSQEYKKYQTNKTTGNTDKRAFVETWQSFYRKKLKEVWKPAV

SEQ ID NO: 45908 - protein, 978 aa, synthetic construct
  REGION 1..978: note = engineered CasX variant
QEIKRINKIRRRLVKDSNTKKAGKTGPMKTLLVRVMTPDLRERLENLRKKPENIPQPISNTSRANLNKLLTDYTEMKKAILHVYWEEFQKDPVGLMSRVAQPASKKIDQNKLKPEMDEKGNLTTAGFACSQCGQPLFVYKLEQVSEKGKAYTNYFGRCNVAEHEKLILLAQLKPEKDSDEAVTYSLGKFGQRALDFYSIHVTKESTHPVKPLAQIAGNRYASAPVGKALSDACMGTIASFLSKYQDIIIEHQKVVKGNQKRLESLRELAGKENLEYPSVTLPPQPHTKEGVDAYNEVIARVRMWVNLNLWQKLKLSRDDAKPLLRLKGFPSFPLVERQANEVDWWDMVCNVKKLINEKKEDGKVFWQNLAGYKRQEALRPYLSSEEDRKKGKKFARYQLGDLLLHLEKKHGEDWGKVYDEAWERIDKKVEGLSKHIKLEEERRSEDAQSKAALTDWLRAKASFVIEGLKEADKDEFCRCELKLQKWYGDLRGKPFAIEAENSILDISGFSKQYNCAFIWQKDGVKKLNLYLIINYFKGGKLRFKKIKPEAFEANRFYTVINKKSGEIVIMEVNFNFDDPNLIILPLAFGKRQGREFIWNDLLSLETGSLKLANGRVIEKTLYNRRTRQDEPALFVALTFERREVLDSSNIKPMNLIGVDRGENIPAVIALTDPEGCPLSRFKDSLGNPTHILRIGESYKEKQRTIQAKKEVEQRRAGGYSRKYASKAKNLADDMVRNTARDLLYYAVTQDAMLIFENLSRGFGRQGKRTFSAERQYTRMEDWLTAKLAYEGLPSKTYLSKTLAQYTSKTCSNCGFTITSADYDRVLEKLKKTATGWMTTINGKELKVEGQITYYNRYKRQNVVKDLSVELDRLSEESVNNDISSWTKGRSGEALSLLKKRFSHRPVQEKFVCLNCGFETHADEQAALNIARSWLFLRSQEYKKYQTNKTTGNTDKRAFVETWQSFYRKKLKEVWKPAV

SEQ ID NO: 45909 - protein, 978 aa, synthetic construct
  REGION 1..978: note = engineered CasX variant
QEIKRINKIRRRLVKDSNTKKAGKTGPMKTLLVRVMTPDLRERLENLRKKPENIPQPISNTSRANLNKLLTDYTEMKKAILHVYWEEFQKDPVGLMSRVAQPASKKIDQNKLKPEMDEKGNLTTAGFACSQCGQPLFVYKLEQVSEKGKAYTNYFGRCNVAEHEKLILLAQLKPEKDSDEAVTYSLGKFGQRALDFYSIHVTKESTHPVKPLAQIAGNRYASVPVGKALSDACMGTIASFLSKYQDIIIEHQKVVKGNQKRLESLRELAGKENLEYPSVTLPPQPHTKEGVDAYNEVIARVRMWVNLNLWQKLKLSRDDAKPLLRLKGFPSFPLVERQANEVDWWDMVCNVKKLINEKKEDGKVFWQNLAGYKRQEALRPYLSSEEDRKKGKKFARYQLGDLLLHLEKKHGEDWGKVYDEAWERIDKKVEGLSKHIKLEEERRSEDAQSKAALTDWLRAKASFVIEGLKEADKDEFCRCELKLQKWYGDLRGKPFAIEAENSILDISGFSKQYNCAFIWQKDGVKKLNLYLIINYFKGGKLRFKKIKPEAFEANRFYTVINKKSGEIVIMEVNFNFDDPNLIILPLAFGKRQGREFIWNDLLSLETGSLKLANGRVIEKTLYNRRTRQDEPALFVALTFERREVLDSSNIKPMNLIGVDRGENIPAVIALTDPEGCPLSRFKDSLGNPTHILRIGESYKEKQRTIQAKKEVEQRRAGGYSRKYASKAKNLADDMVRNTARDLLYYAVTQDAMLIFENLSRGFGRQGKRTFSAERQYTRMEDWLTAKLAYEGLPSKTYLSKTLAQYTSKTCSNCGFTITSADYDRVLEKLKKTATGWMTTINGKELKVEGQITYYNRYKRQNVVKDLSVELDRLSEESVNNDISSWTKGRSGEALSLLKKRFSHRPVQEKFVCLNCGFETHADEQAALNIARSWLFLRSQEYKKYQTNKTTGNTDKRAFVETWQSFYRKKLKEVWKPAV

SEQ ID NO: 45910 - protein, 978 aa, synthetic construct
  REGION 1..978: note = engineered CasX variant
QEIKRINKIRRRLVKDSNTKKAGKTGPMKTLLVRVMTPDLRERLENLRKKPENIPQPISNTSRANLNKLLTDYTEMKKAILHVYWEEFQKDPVGLMSRVAQPASKKIDQNKLKPEMDEKGNLTTAGFACSQCGQPLFVYKLEQVSEKGKAYTNYFGRCNVAEHEKLIKLAQLKPEKDSDEAVTYSLGKFGQRALDFYSIHVTKESTHPVKPLAQIAGNRYASGPVGKALSDACMGTIASFLSKYQDIIIEHQKVVKGNQKRLESLRELAGKENLEYPSVTLPPQPHTKEGVDAYNEVIARVRMWVNLNLWQKLKLSRDDAKPLLRLKGFPSFPLVERQANEVDWWDMVCNVKKLINEKKEDGKVFWQNLAGYKRQEALRPYLSSEEDRKKGKKFARYQLGDLLLHLEKKHGEDWGKVYDEAWERIDKKVEGLSKHIKLEEERRSEDAQSKAALTDWLRAKASFVIEGLKEADKDEFCRCELKLQKWYGDLRGKPFAIEAENSILDISGFSKQYNCAFIWQKDGVKKLNLYLIINYFKGGKLRFKKIKPEAFEANRFYTVINKKSGEIVIMEVNFNFDDPNLIILPLAFGKRQGREFIWNDLLSLETGSLKLANGRVIEKTLYNRRTRQDEPALFVALTFERREVLDSSNIKPMNLIGVDRGENIPAVIALTDPEGCPLSRFKDSLGNPTHILRIGESYKEKQRTIQAKKEVEQRRAGGYSRKYASKAKNLADDMVRNTARDLLYYAVTQDAMLIFENLSRGFGRQGKRTFSAERQYTRMEDWLTAKLAYEGLPSKTYLSKTLAQYTSKTCSNCGFTITSADYDRVLEKLKKTATGWMTTINGKELKVEGQITYYNRYKRQNVVKDLSVELDRLSEESVNNDISSWTKGRSGEALSLLKKRFSHRPVQEKFVCLNCGFETHADEQAALNIARSWLFLRSQEYKKYQTNKTTGNTDKRAFVETWQSFYRKKLKEVWKPAV

SEQ ID NO: 45911 - protein, 977 aa, synthetic construct
  REGION 1..977: note = engineered CasX variant
QEIKRINKIRRRLVKDSNTKKAGKTGPMKTLLVRVMTPDLRERLENLRKKPENIPQPISNTSRANLNKLLTDYTEMKKAILHVYWEEFQKDPVGLMSRVAQPASKKIDQNKLKPEMDEKGNLTTAGFACSQCGQPLFVYKLEQVSEKGKAYTNYFGRCNVAEHEKLILLAQLKPEKDSDEAVTYSLGKFGQRALDFYSIHVTKESTHPVKPLAQIAGNRYASPVGKALSDACMGTIASFLSKYQDIIIEHQKVVKGNQKRLESLRELAGKENLEYPSVTLPPQPHTKEGVDAYNEVIARVRMWVNLNLWQKLKLSRDDAKPLLRLKGFPSFPLVERQANEVDWWDMVCNVKKLINEKKEDGKVFWQNLAGYKRQEALRPYLSSEEDRKKGKKFARYQLGDLLLHLEKKHGEDWGKVYDEAWERIDKKVEGLSKHIKLEEERRSEDAQSKAALTDWLRAKASFVIEGLKEADKDEFCRCELKLQKWYGDLRGKPFAIEAENSILDISGFSKQYNCAFIWQKDGVKKLNLYLIINYFKGGKLRFKKIKPEAFEANRFYTVINKKSGEIVIMEVNFNFDDPNLIILPLAFGKRQGREFIWNDLLSLETGSLKLANGRVIEKTLYNRRTRQDEPALFVALTFERREVLDSSNIKPMNLIGVDRGENIPAVIALTDPEGCPLSRFKDSLGNPTHILRIGESYKEKQRTIQAKKEVEQRRAGGYSRKYASKAKNLADDMVRNTARDLLYYAVTQDAMLIFENLSRGFGRQGKRTFSAERQYTRMEDWLTAKLAYEGLPSKTYLSKTLAQYTSKTCSNCGFTITSADYDRVLEKLKKTATGWMTTINGKELKVEGQITYYNRYKRQNVVKDLSVELDRLSEESVNNDISSWTKGRSGEALSLLKKRFSHRPVQEKFVCLNCGFETHADEQAALNIARSWLFLRSQEYKKYQTNKTTGNTDKRAFVETWQSFYRKKLKEVWKPAV

SEQ ID NO: 45912 - protein, 978 aa, synthetic construct
  REGION 1..978: note = engineered CasX variant
QEIKRINKIRRRLVKDSNTKKAGKTGPMKTLLVRVMTPDLRERLENLRKKPENIPQPISNTSRANLNKLLTDYTEMKKAILHVYWEEFQKDPVGLMSRVAQPASKKIDQNKLKPEMDEKGNLTTAGFACSQCGQPLFVYKLEQVSEKGKAYTNYFGRCNVAEHEKLILLAQLKPEKDSDEAVTYSLGKFGQRALDFYSIHVTKESTHPVKPLAQIAGNRYASYPVGKALSGACMGTIASFLSKYQDIIIEHQKVVKGNQKRLESLRELAGKENLEYPSVTLPPQPHTKEGVDAYNEVIARVRMWVNLNLWQKLKLSRDDAKPLLRLKGFPSFPLVERQANEVDWWDMVCNVKKLINEKKEDGKVFWQNLAGYKRQEALRPYLSSEEDRKKGKKFARYQLGDLLLHLEKKHGEDWGKVYDEAWERIDKKVEGLSKHIKLEEERRSEDAQSKAALTDWLRAKASFVIEGLKEADKDEFCRCELKLQKWYGDLRGKPFAIEAENSILDISGFSKQYNCAFIWQKDGVKKLNLYLIINYFKGGKLRFKKIKPEAFEANRFYTVINKKSGEIVPMEVNFNFDDPNLIILPLAFGKRQGREFIWNDLLSLETGSLKLANGRVIEKTLYNRRTRQDEPALFVALTFERREVLDSSNIKPMNLIGVDRGENIPAVIALTDPEGCPLSRFKDSLGNPTHILRIGESYKEKQRTIQAKKEVEQRRAGGYSRKYASKAKNLADDMVRNTARDLLYYAVTQDAMLIFENLSRGFGRQGKRTFMAERQYTRMEDWLTAKLAYEGLPSKTYLSKTLAQYTSKTCSNCGFTITSADYDRVLEKLKKTATGWMTTINGKELKVEGQITYYNRYKRQNVVKDLSVELDRLSEESVNNDISSWDKGRSGEALSLLKKRFSHRPVQEKFVCLNCGFETHADEQAALNIARSWLFLRSQEYKKYQTNKTTGNTDKRAFVETWQSFYRKKLKEVWKPAV

SEQ ID NO: 45913 - protein, 978 aa, synthetic construct
  REGION 1..978: note = engineered CasX variant
QEIKRINKIRRRLVKDSNTKKAGKTGPMKTLLVRVMTPDLRERLENLRKKPENIPQPISNTSRANLNKLLTDYTEMKKAILHVYWEEFQKDPVGLMSRVAQPASKKIDQNKLKPEMDEKGNLTTAGFACSQCGQPLFVYKLEQVSEKGKAYTNYFGRCNVAEHEKLILLAQLKPEKDSDEAVTYSLGKFGQRALDFYSIHVTKESTHPVKPLAQIAGNRYASHPVGKALSGACMGTIASFLSKYQDIIIEHQKVVKGNQKRLESLRELAGKENLEYPSVTLPPQPHTKEGVDAYNEVIARVRMWVNLNLWQKLKLSRDDAKPLLRLKGFPSFPLVERQANEVDWWDMVCNVKKLINEKKEDGKVFWQNLAGYKRQEALRPYLSSEEDRKKGKKFARYQLGDLLLHLEKKHGEDWGKVYDEAWERIDKKVEGLSKHIKLEEERRSEDAQSKAALTDWLRAKASFVIEGLKEADKDEFCRCELKLQKWYGDLRGKPFAIEAENSILDISGFSKQYNCAFIWQKDGVKKLNLYLIINYFKGGKLRFKKIKPEAFEANRFYTVINKKSGEIVPMEVNFNFDDPNLIILPLAFGKRQGREFIWNDLLSLETGSLKLANGRVIEKTLYNRRTRQDEPALFVALTFERREVLDSSNIKPMNLIGVDRGENIPAVIALTDPEGCPLSRFKDSLGNPTHILRIGESYKEKQRTIQAKKEVEQRRAGGYSRKYASKAKNLADDMVRNTARDLLYYAVTQDAMLIFENLSRGFGRQGKRTFMAERQYTRMEDWLTAKLAYEGLPSKTYLSKTLAQYTSKTCSNCGFTITSADYDRVLEKLKKTATGWMTTINGKELKVEGQITYYNRYKRQNVVKDLSVELDRLSEESVNNDISSWDKGRSGEALSLLKKRFSHRPVQEKFVCLNCGFETHADEQAALNIARSWLFLRSQEYKKYQTNKTTGNTDKRAFVETWQSFYRKKLKEVWKPAV

SEQ ID NO: 45914 - protein, 978 aa, synthetic construct
  REGION 1..978: note = engineered CasX variant
QEIKRINKIRRRLVKDSNTKKAGKTGPMKTLLVRVMTPDLRERLENLRKKPENIPQPISNTSRANLNKLLTDYTEMKKAILHVYWEEFQKDPVGLMSRVAQPASKKIDQNKLKPEMDEKGNLTTAGFACSQCGQPLFVYKLEQVSEKGKAYTNYFGRCNVAEHEKLILLAQLKPEKDSDEAVTYSLGKFGQRALDFYSIHVTKESTHPVKPLAQIAGNRYASSPVGKALSGACMGTIASFLSKYQDIIIEHQKVVKGNQKRLESLRELAGKENLEYPSVTLPPQPHTKEGVDAYNEVIARVRMWVNLNLWQKLKLSRDDAKPLLRLKGFPSFPLVERQANEVDWWDMVCNVKKLINEKKEDGKVFWQNLAGYKRQEALRPYLSSEEDRKKGKKFARYQLGDLLLHLEKKHGEDWGKVYDEAWERIDKKVEGLSKHIKLEEERRSEDAQSKAALTDWLRAKASFVIEGLKEADKDEFCRCELKLQKWYGDLRGKPFAIEAENSILDISGFSKQYNCAFIWQKDGVKKLNLYLIINYFKGGKLRFKKIKPEAFEANRFYTVINKKSGEIVPMEVNFNFDDPNLIILPLAFGKRQGREFIWNDLLSLETGSLKLANGRVIEKTLYNRRTRQDEPALFVALTFERREVLDSSNIKPMNLIGVDRGENIPAVIALTDPEGCPLSRFKDSLGNPTHILRIGESYKEKQRTIQAKKEVEQRRAGGYSRKYASKAKNLADDMVRNTARDLLYYAVTQDAMLIFENLSRGFGRQGKRTFMAERQYTRMEDWLTAKLAYEGLPSKTYLSKTLAQYTSKTCSNCGFTITSADYDRVLEKLKKTATGWMTTINGKELKVEGQITYYNRYKRQNVVKDLSVELDRLSEESVNNDISSWDKGRSGEALSLLKKRFSHRPVQEKFVCLNCGFETHADEQAALNIARSWLFLRSQEYKKYQTNKTTGNTDKRAFVETWQSFYRKKLKEVWKPAV

SEQ ID NO: 45915 - protein, 978 aa, synthetic construct
  REGION 1..978: note = engineered CasX variant
QEIKRINKIRRRLVKDSNTKKAGKTGPMKTLLVRVMTPDLRERLENLRKKPENIPQPISNTSRANLNKLLTDYTEMKKAILHVYWEEFQKDPVGLMSRVAQPASKKIDQNKLKPEMDEKGNLTTAGFACSQCGQPLFVYKLEQVSEKGKAYTNYFGRCNVAEHEKLILLAQLKPEKDSDEAVTYSLGKFGQRALDFYSIHVTKESTHPVKPLAQIAGNRYASTPVGKALSGACMGTIASFLSKYQDIIIEHQKVVKGNQKRLESLRELAGKENLEYPSVTLPPQPHTKEGVDAYNEVIARVRMWVNLNLWQKLKLSRDDAKPLLRLKGFPSFPLVERQANEVDWWDMVCNVKKLINEKKEDGKVFWQNLAGYKRQEALRPYLSSEEDRKKGKKFARYQLGDLLLHLEKKHGEDWGKVYDEAWERIDKKVEGLSKHIKLEEERRSEDAQSKAALTDWLRAKASFVIEGLKEADKDEFCRCELKLQKWYGDLRGKPFAIEAENSILDISGFSKQYNCAFIWQKDGVKKLNLYLIINYFKGGKLRFKKIKPEAFEANRFYTVINKKSGEIVPMEVNFNFDDPNLIILPLAFGKRQGREFIWNDLLSLETGSLKLANGRVIEKTLYNRRTRQDEPALFVALTFERREVLDSSNIKPMNLIGVDRGENIPAVIALTDPEGCPLSRFKDSLGNPTHILRIGESYKEKQRTIQAKKEVEQRRAGGYSRKYASKAKNLADDMVRNTARDLLYYAVTQDAMLIFENLSRGFGRQGKRTFMAERQYTRMEDWLTAKLAYEGLPSKTYLSKTLAQYTSKTCSNCGFTITSADYDRVLEKLKKTATGWMTTINGKELKVEGQITYYNRYKRQNVVKDLSVELDRLSEESVNNDISSWDKGRSGEALSLLKKRFSHRPVQEKFVCLNCGFETHADEQAALNIARSWLFLRSQEYKKYQTNKTTGNTDKRAFVETWQSFYRKKLKEVWKPAV

SEQ ID NO: 45916 - protein, 978 aa, synthetic construct
  REGION 1..978: note = engineered CasX variant
QEIKRINKIRRRLVKDSNTKKAGKTGPMKTLLVRVMTPDLRERLENLRKKPENIPQPISNTSRANLNKLLTDYTEMKKAILHVYWEEFQKDPVGLMSRVAQPASKKIDQNKLKPEMDEKGNLTTAGFACSQCGQPLFVYKLEQVSEKGKAYTNYFGRCNVAEHEKLILLAQLKPEKDSDEAVTYSLGKFGQRALDFYSIHVTKESTHPVKPLAQIAGNRYASAPVGKALSGACMGTIASFLSKYQDIIIEHQKVVKGNQKRLESLRELAGKENLEYPSVTLPPQPHTKEGVDAYNEVIARVRMWVNLNLWQKLKLSRDDAKPLLRLKGFPSFPLVERQANEVDWWDMVCNVKKLINEKKEDGKVFWQNLAGYKRQEALRPYLSSEEDRKKGKKFARYQLGDLLLHLEKKHGEDWGKVYDEAWERIDKKVEGLSKHIKLEEERRSEDAQSKAALTDWLRAKASFVIEGLKEADKDEFCRCELKLQKWYGDLRGKPFAIEAENSILDISGFSKQYNCAFIWQKDGVKKLNLYLIINYFKGGKLRFKKIKPEAFEANRFYTVINKKSGEIVPMEVNFNFDDPNLIILPLAFGKRQGREFIWNDLLSLETGSLKLANGRVIEKTLYNRRTRQDEPALFVALTFERREVLDSSNIKPMNLIGVDRGENIPAVIALTDPEGCPLSRFKDSLGNPTHILRIGESYKEKQRTIQAKKEVEQRRAGGYSRKYASKAKNLADDMVRNTARDLLYYAVTQDAMLIFENLSRGFGRQGKRTFMAERQYTRMEDWLTAKLAYEGLPSKTYLSKTLAQYTSKTCSNCGFTITSADYDRVLEKLKKTATGWMTTINGKELKVEGQITYYNRYKRQNVVKDLSVELDRLSEESVNNDISSWDKGRSGEALSLLKKRFSHRPVQEKFVCLNCGFETHADEQAALNIARSWLFLRSQEYKKYQTNKTTGNTDKRAFVETWQSFYRKKLKEVWKPAV

SEQ ID NO: 45917 - protein, 978 aa, synthetic construct
  REGION 1..978: note = engineered CasX variant
QEIKRINKIRRRLVKDSNTKKAGKTGPMKTLLVRVMTPDLRERLENLRKKPENIPQPISNTSRANLNKLLTDYTEMKKAILHVYWEEFQKDPVGLMSRVAQPASKKIDQNKLKPEMDEKGNLTTAGFACSQCGQPLFVYKLEQVSEKGKAYTNYFGRCNVAEHEKLILLAQLKPEKDSDEAVTYSLGKFGQRALDFYSIHVTKESTHPVKPLAQIAGNRYASVPVGKALSGACMGTIASFLSKYQDIIIEHQKVVKGNQKRLESLRELAGKENLEYPSVTLPPQPHTKEGVDAYNEVIARVRMWVNLNLWQKLKLSRDDAKPLLRLKGFPSFPLVERQANEVDWWDMVCNVKKLINEKKEDGKVFWQNLAGYKRQEALRPYLSSEEDRKKGKKFARYQLGDLLLHLEKKHGEDWGKVYDEAWERIDKKVEGLSKHIKLEEERRSEDAQSKAALTDWLRAKASFVIEGLKEADKDEFCRCELKLQKWYGDLRGKPFAIEAENSILDISGFSKQYNCAFIWQKDGVKKLNLYLIINYFKGGKLRFKKIKPEAFEANRFYTVINKKSGEIVPMEVNFNFDDPNLIILPLAFGKRQGREFIWNDLLSLETGSLKLANGRVIEKTLYNRRTRQDEPALFVALTFERREVLDSSNIKPMNLIGVDRGENIPAVIALTDPEGCPLSRFKDSLGNPTHILRIGESYKEKQRTIQAKKEVEQRRAGGYSRKYASKAKNLADDMVRNTARDLLYYAVTQDAMLIFENLSRGFGRQGKRTFMAERQYTRMEDWLTAKLAYEGLPSKTYLSKTLAQYTSKTCSNCGFTITSADYDRVLEKLKKTATGWMTTINGKELKVEGQITYYNRYKRQNVVKDLSVELDRLSEESVNNDISSWDKGRSGEALSLLKKRFSHRPVQEKFVCLNCGFETHADEQAALNIARSWLFLRSQEYKKYQTNKTTGNTDKRAFVETWQSFYRKKLKEVWKPAV

SEQ ID NO: 45918 - protein, 978 aa, synthetic construct
  REGION 1..978: note = engineered CasX variant
QEIKRINKIRRRLVKDSNTKKAGKTGPMKTLLVRVMTPDLRERLENLRKKPENIPQPISNTSRANLNKLLTDYTEMKKAILHVYWEEFQKDPVGLMSRVAQPASKKIDQNKLKPEMDEKGNLTTAGFACSQCGQPLFVYKLEQVSEKGKAYTNYFGRCNVAEHEKLIKLAQLKPEKDSDEAVTYSLGKFGQRALDFYSIHVTKESTHPVKPLAQIAGNRYASGPVGKALSGACMGTIASFLSKYQDIIIEHQKVVKGNQKRLESLRELAGKENLEYPSVTLPPQPHTKEGVDAYNEVIARVRMWVNLNLWQKLKLSRDDAKPLLRLKGFPSFPLVERQANEVDWWDMVCNVKKLINEKKEDGKVFWQNLAGYKRQEALRPYLSSEEDRKKGKKFARYQLGDLLLHLEKKHGEDWGKVYDEAWERIDKKVEGLSKHIKLEEERRSEDAQSKAALTDWLRAKASFVIEGLKEADKDEFCRCELKLQKWYGDLRGKPFAIEAENSILDISGFSKQYNCAFIWQKDGVKKLNLYLIINYFKGGKLRFKKIKPEAFEANRFYTVINKKSGEIVPMEVNFNFDDPNLIILPLAFGKRQGREFIWNDLLSLETGSLKLANGRVIEKTLYNRRTRQDEPALFVALTFERREVLDSSNIKPMNLIGVDRGENIPAVIALTDPEGCPLSRFKDSLGNPTHILRIGESYKEKQRTIQAKKEVEQRRAGGYSRKYASKAKNLADDMVRNTARDLLYYAVTQDAMLIFENLSRGFGRQGKRTFMAERQYTRMEDWLTAKLAYEGLPSKTYLSKTLAQYTSKTCSNCGFTITSADYDRVLEKLKKTATGWMTTINGKELKVEGQITYYNRYKRQNVVKDLSVELDRLSEESVNNDISSWDKGRSGEALSLLKKRFSHRPVQEKFVCLNCGFETHADEQAALNIARSWLFLRSQEYKKYQTNKTTGNTDKRAFVETWQSFYRKKLKEVWKPAV

SEQ ID NO: 45919 - protein, 977 aa, synthetic construct
  REGION 1..977: note = engineered CasX variant
QEIKRINKIRRRLVKDSNTKKAGKTGPMKTLLVRVMTPDLRERLENLRKKPENIPQPISNTSRANLNKLLTDYTEMKKAILHVYWEEFQKDPVGLMSRVAQPASKKIDQNKLKPEMDEKGNLTTAGFACSQCGQPLFVYKLEQVSEKGKAYTNYFGRCNVAEHEKLILLAQLKPEKDSDEAVTYSLGKFGQRALDFYSIHVTKESTHPVKPLAQIAGNRYASPVGKALSGACMGTIASFLSKYQDIIIEHQKVVKGNQKRLESLRELAGKENLEYPSVTLPPQPHTKEGVDAYNEVIARVRMWVNLNLWQKLKLSRDDAKPLLRLKGFPSFPLVERQANEVDWWDMVCNVKKLINEKKEDGKVFWQNLAGYKRQEALRPYLSSEEDRKKGKKFARYQLGDLLLHLEKKHGEDWGKVYDEAWERIDKKVEGLSKHIKLEEERRSEDAQSKAALTDWLRAKASFVIEGLKEADKDEFCRCELKLQKWYGDLRGKPFAIEAENSILDISGFSKQYNCAFIWQKDGVKKLNLYLIINYFKGGKLRFKKIKPEAFEANRFYTVINKKSGEIVPMEVNFNFDDPNLIILPLAFGKRQGREFIWNDLLSLETGSLKLANGRVIEKTLYNRRTRQDEPALFVALTFERREVLDSSNIKPMNLIGVDRGENIPAVIALTDPEGCPLSRFKDSLGNPTHILRIGESYKEKQRTIQAKKEVEQRRAGGYSRKYASKAKNLADDMVRNTARDLLYYAVTQDAMLIFENLSRGFGRQGKRTFMAERQYTRMEDWLTAKLAYEGLPSKTYLSKTLAQYTSKTCSNCGFTITSADYDRVLEKLKKTATGWMTTINGKELKVEGQITYYNRYKRQNVVKDLSVELDRLSEESVNNDISSWDKGRSGEALSLLKKRFSHRPVQEKFVCLNCGFETHADEQAALNIARSWLFLRSQEYKKYQTNKTTGNTDKRAFVETWQSFYRKKLKEVWKPAV

SEQ ID NO: 45920 - protein, 978 aa, synthetic construct
  REGION 1..978: note = engineered CasX variant
QEIKRINKIRRRLVKDSNTKKAGKTGPMKTLLVRVMTPDLRERLENLRKKPENIPQPISNTSRANLNKLLTDYTEMKKAILHVYWEEFQKDPVGLMSRVAQPASKKIDQNKLKPEMDEKGNLTTAGFACSQCGQPLFVYKLEQVSEKGKAYTNYFGRCNVAEHEKLILLAQLKPEKDSDEAVTYSLGKFGQRALDFYSIHVTKESTHPVKPLAQIAGNRYASYPVGKALSDACMGTIASFLSKYQDIIIEHQKVVKGNQKRLESLRELAGKENLEYPSVTLPPQPHTKEGVDAYNEVIARVRMWVNLNLWQKLKLSRDDAKPLLRLKNFPSFPLVERQANEVDWWDMVCNVKKLINEKKEDGKVFWQNLAGYKRQEALRPYLSSEEDRKKGKKFARYQLGDLLLHLEKKHGEDWGKVYDEAWERIDKKVEGLSKHIKLEEERRSEDAQSKAALTDWLRAKASFVIEGLKEADKDEFCRCELKLQKWYGDLRGKPFAIEAENSILDISGFSKQYNCAFIWQKDGVKKLNLYLIINYFKGGKLRFKKIKPEAFEANRFYTVINKKSGEIVPMEVNFNFDDPNLIILPLAFGKRQGREFIWNDLLSLETGSLKLANGRVIEKTLYNRRTRQDEPALFVALTFERREVLDSSNIKPMNLIGVDRGENIPAVIALTDPEGCPLSRFKDSLGNPTHILRIGESYKEKQRTIQAKKEVEQRRAGGYSRKYASKAKNLADDMVRNTARDLLYYAVTQDAMLIFENLSRGFGRQGKRTFMAERQYTRMEDWLTAKLAYEGLPSKTYLSKTLAQYTSKTCSNCGFTITSADYDRVLEKLKKTATGWMTTINGKELKVEGQITYYNRYKRQNVVKDLSVELDRLSEESVNNDISSWDKGRSGEALSLLKKRFSHRPVQEKFVCLNCGFETHADEQAALNIARSWLFLRSQEYKKYQTNKTTGNTDKRAFVETWQSFYRKKLKEVWKPAV

SEQ ID NO: 45921 - protein, 978 aa, synthetic construct
  REGION 1..978: note = engineered CasX variant
QEIKRINKIRRRLVKDSNTKKAGKTGPMKTLLVRVMTPDLRERLENLRKKPENIPQPISNTSRANLNKLLTDYTEMKKAILHVYWEEFQKDPVGLMSRVAQPASKKIDQNKLKPEMDEKGNLTTAGFACSQCGQPLFVYKLEQVSEKGKAYTNYFGRCNVAEHEKLILLAQLKPEKDSDEAVTYSLGKFGQRALDFYSIHVTKESTHPVKPLAQIAGNRYASHPVGKALSDACMGTIASFLSKYQDIIIEHQKVVKGNQKRLESLRELAGKENLEYPSVTLPPQPHTKEGVDAYNEVIARVRMWVNLNLWQKLKLSRDDAKPLLRLKNFPSFPLVERQANEVDWWDMVCNVKKLINEKKEDGKVFWQNLAGYKRQEALRPYLSSEEDRKKGKKFARYQLGDLLLHLEKKHGEDWGKVYDEAWERIDKKVEGLSKHIKLEEERRSEDAQSKAALTDWLRAKASFVIEGLKEADKDEFCRCELKLQKWYGDLRGKPFAIEAENSILDISGFSKQYNCAFIWQKDGVKKLNLYLIINYFKGGKLRFKKIKPEAFEANRFYTVINKKSGEIVPMEVNFNFDDPNLIILPLAFGKRQGREFIWNDLLSLETGSLKLANGRVIEKTLYNRRTRQDEPALFVALTFERREVLDSSNIKPMNLIGVDRGENIPAVIALTDPEGCPLSRFKDSLGNPTHILRIGESYKEKQRTIQAKKEVEQRRAGGYSRKYASKAKNLADDMVRNTARDLLYYAVTQDAMLIFENLSRGFGRQGKRTFMAERQYTRMEDWLTAKLAYEGLPSKTYLSKTLAQYTSKTCSNCGFTITSADYDRVLEKLKKTATGWMTTINGKELKVEGQITYYNRYKRQNVVKDLSVELDRLSEESVNNDISSWDKGRSGEALSLLKKRFSHRPVQEKFVCLNCGFETHADEQAALNIARSWLFLRSQEYKKYQTNKTTGNTDKRAFVETWQSFYRKKLKEVWKPAV

SEQ ID NO: 45922 - protein, 978 aa, synthetic construct
  REGION 1..978: note = engineered CasX variant
QEIKRINKIRRRLVKDSNTKKAGKTGPMKTLLVRVMTPDLRERLENLRKKPENIPQPISNTSRANLNKLLTDYTEMKKAILHVYWEEFQKDPVGLMSRVAQPASKKIDQNKLKPEMDEKGNLTTAGFACSQCGQPLFVYKLEQVSEKGKAYTNYFGRCNVAEHEKLILLAQLKPEKDSDEAVTYSLGKFGQRALDFYSIHVTKESTHPVKPLAQIAGNRYASSPVGKALSDACMGTIASFLSKYQDIIIEHQKVVKGNQKRLESLRELAGKENLEYPSVTLPPQPHTKEGVDAYNEVIARVRMWVNLNLWQKLKLSRDDAKPLLRLKNFPSFPLVERQANEVDWWDMVCNVKKLINEKKEDGKVFWQNLAGYKRQEALRPYLSSEEDRKKGKKFARYQLGDLLLHLEKKHGEDWGKVYDEAWERIDKKVEGLSKHIKLEEERRSEDAQSKAALTDWLRAKASFVIEGLKEADKDEFCRCELKLQKWYGDLRGKPFAIEAENSILDISGFSKQYNCAFIWQKDGVKKLNLYLIINYFKGGKLRFKKIKPEAFEANRFYTVINKKSGEIVPMEVNFNFDDPNLIILPLAFGKRQGREFIWNDLLSLETGSLKLANGRVIEKTLYNRRTRQDEPALFVALTFERREVLDSSNIKPMNLIGVDRGENIPAVIALTDPEGCPLSRFKDSLGNPTHILRIGESYKEKQRTIQAKKEVEQRRAGGYSRKYASKAKNLADDMVRNTARDLLYYAVTQDAMLIFENLSRGFGRQGKRTFMAERQYTRMEDWLTAKLAYEGLPSKTYLSKTLAQYTSKTCSNCGFTITSADYDRVLEKLKKTATGWMTTINGKELKVEGQITYYNRYKRQNVVKDLSVELDRLSEESVNNDISSWDKGRSGEALSLLKKRFSHRPVQEKFVCLNCGFETHADEQAALNIARSWLFLRSQEYKKYQTNKTTGNTDKRAFVETWQSFYRKKLKEVWKPAV

SEQ ID NO: 45923 - protein, 978 aa, synthetic construct
  REGION 1..978: note = engineered CasX variant
QEIKRINKIRRRLVKDSNTKKAGKTGPMKTLLVRVMTPDLRERLENLRKKPENIPQPISNTSRANLNKLLTDYTEMKKAILHVYWEEFQKDPVGLMSRVAQPASKKIDQNKLKPEMDEKGNLTTAGFACSQCGQPLFVYKLEQVSEKGKAYTNYFGRCNVAEHEKLILLAQLKPEKDSDEAVTYSLGKFGQRALDFYSIHVTKESTHPVKPLAQIAGNRYASTPVGKALSDACMGTIASFLSKYQDIIIEHQKVVKGNQKRLESLRELAGKENLEYPSVTLPPQPHTKEGVDAYNEVIARVRMWVNLNLWQKLKLSRDDAKPLLRLKNFPSFPLVERQANEVDWWDMVCNVKKLINEKKEDGKVFWQNLAGYKRQEALRPYLSSEEDRKKGKKFARYQLGDLLLHLEKKHGEDWGKVYDEAWERIDKKVEGLSKHIKLEEERRSEDAQSKAALTDWLRAKASFVIEGLKEADKDEFCRCELKLQKWYGDLRGKPFAIEAENSILDISGFSKQYNCAFIWQKDGVKKLNLYLIINYFKGGKLRFKKIKPEAFEANRFYTVINKKSGEIVPMEVNFNFDDPNLIILPLAFGKRQGREFIWNDLLSLETGSLKLANGRVIEKTLYNRRTRQDEPALFVALTFERREVLDSSNIKPMNLIGVDRGENIPAVIALTDPEGCPLSRFKDSLGNPTHILRIGESYKEKQRTIQAKKEVEQRRAGGYSRKYASKAKNLADDMVRNTARDLLYYAVTQDAMLIFENLSRGFGRQGKRTFMAERQYTRMEDWLTAKLAYEGLPSKTYLSKTLAQYTSKTCSNCGFTITSADYDRVLEKLKKTATGWMTTINGKELKVEGQITYYNRYKRQNVVKDLSVELDRLSEESVNNDISSWDKGRSGEALSLLKKRFSHRPVQEKFVCLNCGFETHADEQAALNIARSWLFLRSQEYKKYQTNKTTGNTDKRAFVETWQSFYRKKLKEVWKPAV

SEQ ID NO: 45924 - protein, 978 aa, synthetic construct
  REGION 1..978: note = engineered CasX variant
QEIKRINKIRRRLVKDSNTKKAGKTGPMKTLLVRVMTPDLRERLENLRKKPENIPQPISNTSRANLNKLLTDYTEMKKAILHVYWEEFQKDPVGLMSRVAQPASKKIDQNKLKPEMDEKGNLTTAGFACSQCGQPLFVYKLEQVSEKGKAYTNYFGRCNVAEHEKLILLAQLKPEKDSDEAVTYSLGKFGQRALDFYSIHVTKESTHPVKPLAQIAGNRYASAPVGKALSDACMGTIASFLSKYQDIIIEHQKVVKGNQKRLESLRELAGKENLEYPSVTLPPQPHTKEGVDAYNEVIARVRMWVNLNLWQKLKLSRDDAKPLLRLKNFPSFPLVERQANEVDWWDMVCNVKKLINEKKEDGKVFWQNLAGYKRQEALRPYLSSEEDRKKGKKFARYQLGDLLLHLEKKHGEDWGKVYDEAWERIDKKVEGLSKHIKLEEERRSEDAQSKAALTDWLRAKASFVIEGLKEADKDEFCRCELKLQKWYGDLRGKPFAIEAENSILDISGFSKQYNCAFIWQKDGVKKLNLYLIINYFKGGKLRFKKIKPEAFEANRFYTVINKKSGEIVPMEVNFNFDDPNLIILPLAFGKRQGREFIWNDLLSLETGSLKLANGRVIEKTLYNRRTRQDEPALFVALTFERREVLDSSNIKPMNLIGVDRGENIPAVIALTDPEGCPLSRFKDSLGNPTHILRIGESYKEKQRTIQAKKEVEQRRAGGYSRKYASKAKNLADDMVRNTARDLLYYAVTQDAMLIFENLSRGFGRQGKRTFMAERQYTRMEDWLTAKLAYEGLPSKTYLSKTLAQYTSKTCSNCGFTITSADYDRVLEKLKKTATGWMTTINGKELKVEGQITYYNRYKRQNVVKDLSVELDRLSEESVNNDISSWDKGRSGEALSLLKKRFSHRPVQEKFVCLNCGFETHADEQAALNIARSWLFLRSQEYKKYQTNKTTGNTDKRAFVETWQSFYRKKLKEVWKPAV

SEQ ID NO: 45925 - protein, 978 aa, synthetic construct
  REGION 1..978: note = engineered CasX variant
QEIKRINKIRRRLVKDSNTKKAGKTGPMKTLLVRVMTPDLRERLENLRKKPENIPQPISNTSRANLNKLLTDYTEMKKAILHVYWEEFQKDPVGLMSRVAQPASKKIDQNKLKPEMDEKGNLTTAGFACSQCGQPLFVYKLEQVSEKGKAYTNYFGRCNVAEHEKLILLAQLKPEKDSDEAVTYSLGKFGQRALDFYSIHVTKESTHPVKPLAQIAGNRYASVPVGKALSDACMGTIASFLSKYQDIIIEHQKVVKGNQKRLESLRELAGKENLEYPSVTLPPQPHTKEGVDAYNEVIARVRMWVNLNLWQKLKLSRDDAKPLLRLKNFPSFPLVERQANEVDWWDMVCNVKKLINEKKEDGKVFWQNLAGYKRQEALRPYLSSEEDRKKGKKFARYQLGDLLLHLEKKHGEDWGKVYDEAWERIDKKVEGLSKHIKLEEERRSEDAQSKAALTDWLRAKASFVIEGLKEADKDEFCRCELKLQKWYGDLRGKPFAIEAENSILDISGFSKQYNCAFIWQKDGVKKLNLYLIINYFKGGKLRFKKIKPEAFEANRFYTVINKKSGEIVPMEVNFNFDDPNLIILPLAFGKRQGREFIWNDLLSLETGSLKLANGRVIEKTLYNRRTRQDEPALFVALTFERREVLDSSNIKPMNLIGVDRGENIPAVIALTDPEGCPLSRFKDSLGNPTHILRIGESYKEKQRTIQAKKEVEQRRAGGYSRKYASKAKNLADDMVRNTARDLLYYAVTQDAMLIFENLSRGFGRQGKRTFMAERQYTRMEDWLTAKLAYEGLPSKTYLSKTLAQYTSKTCSNCGFTITSADYDRVLEKLKKTATGWMTTINGKELKVEGQITYYNRYKRQNVVKDLSVELDRLSEESVNNDISSWDKGRSGEALSLLKKRFSHRPVQEKFVCLNCGFETHADEQAALNIARSWLFLRSQEYKKYQTNKTTGNTDKRAFVETWQSFYRKKLKEVWKPAV

SEQ ID NO: 45926 - protein, 978 aa, synthetic construct
  REGION 1..978: note = engineered CasX variant
QEIKRINKIRRRLVKDSNTKKAGKTGPMKTLLVRVMTPDLRERLENLRKKPENIPQPISNTSRANLNKLLTDYTEMKKAILHVYWEEFQKDPVGLMSRVAQPASKKIDQNKLKPEMDEKGNLTTAGFACSQCGQPLFVYKLEQVSEKGKAYTNYFGRCNVAEHEKLIKLAQLKPEKDSDEAVTYSLGKFGQRALDFYSIHVTKESTHPVKPLAQIAGNRYASGPVGKALSDACMGTIASFLSKYQDIIIEHQKVVKGNQKRLESLRELAGKENLEYPSVTLPPQPHTKEGVDAYNEVIARVRMWVNLNLWQKLKLSRDDAKPLLRLKNFPSFPLVERQANEVDWWDMVCNVKKLINEKKEDGKVFWQNLAGYKRQEALRPYLSSEEDRKKGKKFARYQLGDLLLHLEKKHGEDWGKVYDEAWERIDKKVEGLSKHIKLEEERRSEDAQSKAALTDWLRAKASFVIEGLKEADKDEFCRCELKLQKWYGDLRGKPFAIEAENSILDISGFSKQYNCAFIWQKDGVKKLNLYLIINYFKGGKLRFKKIKPEAFEANRFYTVINKKSGEIVPMEVNFNFDDPNLIILPLAFGKRQGREFIWNDLLSLETGSLKLANGRVIEKTLYNRRTRQDEPALFVALTFERREVLDSSNIKPMNLIGVDRGENIPAVIALTDPEGCPLSRFKDSLGNPTHILRIGESYKEKQRTIQAKKEVEQRRAGGYSRKYASKAKNLADDMVRNTARDLLYYAVTQDAMLIFENLSRGFGRQGKRTFMAERQYTRMEDWLTAKLAYEGLPSKTYLSKTLAQYTSKTCSNCGFTITSADYDRVLEKLKKTATGWMTTINGKELKVEGQITYYNRYKRQNVVKDLSVELDRLSEESVNNDISSWDKGRSGEALSLLKKRFSHRPVQEKFVCLNCGFETHADEQAALNIARSWLFLRSQEYKKYQTNKTTGNTDKRAFVETWQSFYRKKLKEVWKPAV

SEQ ID NO: 45927 - protein, 977 aa, synthetic construct
  REGION 1..977: note = engineered CasX variant
QEIKRINKIRRRLVKDSNTKKAGKTGPMKTLLVRVMTPDLRERLENLRKKPENIPQPISNTSRANLNKLLTDYTEMKKAILHVYWEEFQKDPVGLMSRVAQPASKKIDQNKLKPEMDEKGNLTTAGFACSQCGQPLFVYKLEQVSEKGKAYTNYFGRCNVAEHEKLILLAQLKPEKDSDEAVTYSLGKFGQRALDFYSIHVTKESTHPVKPLAQIAGNRYASPVGKALSDACMGTIASFLSKYQDIIIEHQKVVKGNQKRLESLRELAGKENLEYPSVTLPPQPHTKEGVDAYNEVIARVRMWVNLNLWQKLKLSRDDAKPLLRLKNFPSFPLVERQANEVDWWDMVCNVKKLINEKKEDGKVFWQNLAGYKRQEALRPYLSSEEDRKKGKKFARYQLGDLLLHLEKKHGEDWGKVYDEAWERIDKKVEGLSKHIKLEEERRSEDAQSKAALTDWLRAKASFVIEGLKEADKDEFCRCELKLQKWYGDLRGKPFAIEAENSILDISGFSKQYNCAFIWQKDGVKKLNLYLIINYFKGGKLRFKKIKPEAFEANRFYTVINKKSGEIVPMEVNFNFDDPNLIILPLAFGKRQGREFIWNDLLSLETGSLKLANGRVIEKTLYNRRTRQDEPALFVALTFERREVLDSSNIKPMNLIGVDRGENIPAVIALTDPEGCPLSRFKDSLGNPTHILRIGESYKEKQRTIQAKKEVEQRRAGGYSRKYASKAKNLADDMVRNTARDLLYYAVTQDAMLIFENLSRGFGRQGKRTFMAERQYTRMEDWLTAKLAYEGLPSKTYLSKTLAQYTSKTCSNCGFTITSADYDRVLEKLKKTATGWMTTINGKELKVEGQITYYNRYKRQNVVKDLSVELDRLSEESVNNDISSWDKGRSGEALSLLKKRFSHRPVQEKFVCLNCGFETHADEQAALNIARSWLFLRSQEYKKYQTNKTTGNTDKRAFVETWQSFYRKKLKEVWKPAV

SEQ ID NO: 45928 - protein, 978 aa, synthetic construct
  REGION 1..978: note = engineered CasX variant
QEIKRINKIRRRLVKDSNTKKAGKTGPMKTLLVRVMTPDLRERLENLRKKPENIPQPISNTSRANLNKLLTDYTEMKKAILHVYWEEFQKDPVGLMSRVAQPASKKIDQNKLKPEMDEKGNLTTAGFACSQCGQPLFVYKLEQVSEKGKAYTNYFGRCNVAEHEKLILLAQLKPEKDSDEAVTYSLGKFGQRALDFYSIHVTKESTHPVKPLAQIAGNRYASYPVGKALSDACMGTIASFLSKYQDIIIEHQKVVKGNQKRLESLRELAGKENLEYPSVTLPPQPHTKEGVDAYNEVIARVRMWVNLNLWQKLKLSRDDAKPLLRLKGFPSFPLVERQANEVDWWDMVCNVKKLINEKKEDGKVFWQNLAGYKRQEALRPYLSSEEDRKKGKKFARYQLGDLLNHLEKKHGEDWGKVYDEAWERIDKKVEGLSKHIKLEEERRSEDAQSKAALTDWLRAKASFVIEGLKEADKDEFCRCELKLQKWYGDLRGKPFAIEAENSILDISGFSKQYNCAFIWQKDGVKKLNLYLIINYFKGGKLRFKKIKPEAFEANRFYTVINKKSGEIVPMEVNFNFDDPNLIILPLAFGKRQGREFIWNDLLSLETGSLKLANGRVIEKTLYNRRTRQDEPALFVALTFERREVLDSSNIKPMNLIGVDRGENIPAVIALTDPEGCPLSRFKDSLGNPTHILRIGESYKEKQRTIQAKKEVEQRRAGGYSRKYASKAKNLADDMVRNTARDLLYYAVTQDAMLIFENLSRGFGRQGKRTFMAERQYTRMEDWLTAKLAYEGLPSKTYLSKTLAQYTSKTCSNCGFTITSADYDRVLEKLKKTATGWMTTINGKELKVEGQITYYNRYKRQNVVKDLSVELDRLSEESVNNDISSWDKGRSGEALSLLKKRFSHRPVQEKFVCLNCGFETHADEQAALNIARSWLFLRSQEYKKYQTNKTTGNTDKRAFVETWQSFYRKKLKEVWKPAV

SEQ ID NO: 45929 - protein, 978 aa, synthetic construct
  REGION 1..978: note = engineered CasX variant
QEIKRINKIRRRLVKDSNTKKAGKTGPMKTLLVRVMTPDLRERLENLRKKPENIPQPISNTSRANLNKLLTDYTEMKKAILHVYWEEFQKDPVGLMSRVAQPASKKIDQNKLKPEMDEKGNLTTAGFACSQCGQPLFVYKLEQVSEKGKAYTNYFGRCNVAEHEKLILLAQLKPEKDSDEAVTYSLGKFGQRALDFYSIHVTKESTHPVKPLAQIAGNRYASHPVGKALSDACMGTIASFLSKYQDIIIEHQKVVKGNQKRLESLRELAGKENLEYPSVTLPPQPHTKEGVDAYNEVIARVRMWVNLNLWQKLKLSRDDAKPLLRLKGFPSFPLVERQANEVDWWDMVCNVKKLINEKKEDGKVFWQNLAGYKRQEALRPYLSSEEDRKKGKKFARYQLGDLLNHLEKKHGEDWGKVYDEAWERIDKKVEGLSKHIKLEEERRSEDAQSKAALTDWLRAKASFVIEGLKEADKDEFCRCELKLQKWYGDLRGKPFAIEAENSILDISGFSKQYNCAFIWQKDGVKKLNLYLIINYFKGGKLRFKKIKPEAFEANRFYTVINKKSGEIVPMEVNFNFDDPNLIILPLAFGKRQGREFIWNDLLSLETGSLKLANGRVIEKTLYNRRTRQDEPALFVALTFERREVLDSSNIKPMNLIGVDRGENIPAVIALTDPEGCPLSRFKDSLGNPTHILRIGESYKEKQRTIQAKKEVEQRRAGGYSRKYASKAKNLADDMVRNTARDLLYYAVTQDAMLIFENLSRGFGRQGKRTFMAERQYTRMEDWLTAKLAYEGLPSKTYLSKTLAQYTSKTCSNCGFTITSADYDRVLEKLKKTATGWMTTINGKELKVEGQITYYNRYKRQNVVKDLSVELDRLSEESVNNDISSWDKGRSGEALSLLKKRFSHRPVQEKFVCLNCGFETHADEQAALNIARSWLFLRSQEYKKYQTNKTTGNTDKRAFVETWQSFYRKKLKEVWKPAV

SEQ ID NO: 45930 - protein, 978 aa, synthetic construct
  REGION 1..978: note = engineered CasX variant
QEIKRINKIRRRLVKDSNTKKAGKTGPMKTLLVRVMTPDLRERLENLRKKPENIPQPISNTSRANLNKLLTDYTEMKKAILHVYWEEFQKDPVGLMSRVAQPASKKIDQNKLKPEMDEKGNLTTAGFACSQCGQPLFVYKLEQVSEKGKAYTNYFGRCNVAEHEKLILLAQLKPEKDSDEAVTYSLGKFGQRALDFYSIHVTKESTHPVKPLAQIAGNRYASSPVGKALSDACMGTIASFLSKYQDIIIEHQKVVKGNQKRLESLRELAGKENLEYPSVTLPPQPHTKEGVDAYNEVIARVRMWVNLNLWQKLKLSRDDAKPLLRLKGFPSFPLVERQANEVDWWDMVCNVKKLINEKKEDGKVFWQNLAGYKRQEALRPYLSSEEDRKKGKKFARYQLGDLLNHLEKKHGEDWGKVYDEAWERIDKKVEGLSKHIKLEEERRSEDAQSKAALTDWLRAKASFVIEGLKEADKDEFCRCELKLQKWYGDLRGKPFAIEAENSILDISGFSKQYNCAFIWQKDGVKKLNLYLIINYFKGGKLRFKKIKPEAFEANRFYTVINKKSGEIVPMEVNFNFDDPNLIILPLAFGKRQGREFIWNDLLSLETGSLKLANGRVIEKTLYNRRTRQDEPALFVALTFERREVLDSSNIKPMNLIGVDRGENIPAVIALTDPEGCPLSRFKDSLGNPTHILRIGESYKEKQRTIQAKKEVEQRRAGGYSRKYASKAKNLADDMVRNTARDLLYYAVTQDAMLIFENLSRGFGRQGKRTFMAERQYTRMEDWLTAKLAYEGLPSKTYLSKTLAQYTSKTCSNCGFTITSADYDRVLEKLKKTATGWMTTINGKELKVEGQITYYNRYKRQNVVKDLSVELDRLSEESVNNDISSWDKGRSGEALSLLKKRFSHRPVQEKFVCLNCGFETHADEQAALNIARSWLFLRSQEYKKYQTNKTTGNTDKRAFVETWQSFYRKKLKEVWKPAV

SEQ ID NO: 45931 - protein, 978 aa, synthetic construct
  REGION 1..978: note = engineered CasX variant
QEIKRINKIRRRLVKDSNTKKAGKTGPMKTLLVRVMTPDLRERLENLRKKPENIPQPISNTSRANLNKLLTDYTEMKKAILHVYWEEFQKDPVGLMSRVAQPASKKIDQNKLKPEMDEKGNLTTAGFACSQCGQPLFVYKLEQVSEKGKAYTNYFGRCNVAEHEKLILLAQLKPEKDSDEAVTYSLGKFGQRALDFYSIHVTKESTHPVKPLAQIAGNRYASTPVGKALSDACMGTIASFLSKYQDIIIEHQKVVKGNQKRLESLRELAGKENLEYPSVTLPPQPHTKEGVDAYNEVIARVRMWVNLNLWQKLKLSRDDAKPLLRLKGFPSFPLVERQANEVDWWDMVCNVKKLINEKKEDGKVFWQNLAGYKRQEALRPYLSSEEDRKKGKKFARYQLGDLLNHLEKKHGEDWGKVYDEAWERIDKKVEGLSKHIKLEEERRSEDAQSKAALTDWLRAKASFVIEGLKEADKDEFCRCELKLQKWYGDLRGKPFAIEAENSILDISGFSKQYNCAFIWQKDGVKKLNLYLIINYFKGGKLRFKKIKPEAFEANRFYTVINKKSGEIVPMEVNFNFDDPNLIILPLAFGKRQGREFIWNDLLSLETGSLKLANGRVIEKTLYNRRTRQDEPALFVALTFERREVLDSSNIKPMNLIGVDRGENIPAVIALTDPEGCPLSRFKDSLGNPTHILRIGESYKEKQRTIQAKKEVEQRRAGGYSRKYASKAKNLADDMVRNTARDLLYYAVTQDAMLIFENLSRGFGRQGKRTFMAERQYTRMEDWLTAKLAYEGLPSKTYLSKTLAQYTSKTCSNCGFTITSADYDRVLEKLKKTATGWMTTINGKELKVEGQITYYNRYKRQNVVKDLSVELDRLSEESVNNDISSWDKGRSGEALSLLKKRFSHRPVQEKFVCLNCGFETHADEQAALNIARSWLFLRSQEYKKYQTNKTTGNTDKRAFVETWQSFYRKKLKEVWKPAV

SEQ ID NO: 45932 - protein, 978 aa, synthetic construct
  REGION 1..978: note = engineered CasX variant
QEIKRINKIRRRLVKDSNTKKAGKTGPMKTLLVRVMTPDLRERLENLRKKPENIPQPISNTSRANLNKLLTDYTEMKKAILHVYWEEFQKDPVGLMSRVAQPASKKIDQNKLKPEMDEKGNLTTAGFACSQCGQPLFVYKLEQVSEKGKAYTNYFGRCNVAEHEKLILLAQLKPEKDSDEAVTYSLGKFGQRALDFYSIHVTKESTHPVKPLAQIAGNRYASAPVGKALSDACMGTIASFLSKYQDIIIEHQKVVKGNQKRLESLRELAGKENLEYPSVTLPPQPHTKEGVDAYNEVIARVRMWVNLNLWQKLKLSRDDAKPLLRLKGFPSFPLVERQANEVDWWDMVCNVKKLINEKKEDGKVFWQNLAGYKRQEALRPYLSSEEDRKKGKKFARYQLGDLLNHLEKKHGEDWGKVYDEAWERIDKKVEGLSKHIKLEEERRSEDAQSKAALTDWLRAKASFVIEGLKEADKDEFCRCELKLQKWYGDLRGKPFAIEAENSILDISGFSKQYNCAFIWQKDGVKKLNLYLIINYFKGGKLRFKKIKPEAFEANRFYTVINKKSGEIVPMEVNFNFDDPNLIILPLAFGKRQGREFIWNDLLSLETGSLKLANGRVIEKTLYNRRTRQDEPALFVALTFERREVLDSSNIKPMNLIGVDRGENIPAVIALTDPEGCPLSRFKDSLGNPTHILRIGESYKEKQRTIQAKKEVEQRRAGGYSRKYASKAKNLADDMVRNTARDLLYYAVTQDAMLIFENLSRGFGRQGKRTFMAERQYTRMEDWLTAKLAYEGLPSKTYLSKTLAQYTSKTCSNCGFTITSADYDRVLEKLKKTATGWMTTINGKELKVEGQITYYNRYKRQNVVKDLSVELDRLSEESVNNDISSWDKGRSGEALSLLKKRFSHRPVQEKFVCLNCGFETHADEQAALNIARSWLFLRSQEYKKYQTNKTTGNTDKRAFVETWQSFYRKKLKEVWKPAV

SEQ ID NO: 45933 - protein, 978 aa, synthetic construct
  REGION 1..978: note = engineered CasX variant
QEIKRINKIRRRLVKDSNTKKAGKTGPMKTLLVRVMTPDLRERLENLRKKPENIPQPISNTSRANLNKLLTDYTEMKKAILHVYWEEFQKDPVGLMSRVAQPASKKIDQNKLKPEMDEKGNLTTAGFACSQCGQPLFVYKLEQVSEKGKAYTNYFGRCNVAEHEKLILLAQLKPEKDSDEAVTYSLGKFGQRALDFYSIHVTKESTHPVKPLAQIAGNRYASVPVGKALSDACMGTIASFLSKYQDIIIEHQKVVKGNQKRLESLRELAGKENLEYPSVTLPPQPHTKEGVDAYNEVIARVRMWVNLNLWQKLKLSRDDAKPLLRLKGFPSFPLVERQANEVDWWDMVCNVKKLINEKKEDGKVFWQNLAGYKRQEALRPYLSSEEDRKKGKKFARYQLGDLLNHLEKKHGEDWGKVYDEAWERIDKKVEGLSKHIKLEEERRSEDAQSKAALTDWLRAKASFVIEGLKEADKDEFCRCELKLQKWYGDLRGKPFAIEAENSILDISGFSKQYNCAFIWQKDGVKKLNLYLIINYFKGGKLRFKKIKPEAFEANRFYTVINKKSGEIVPMEVNFNFDDPNLIILPLAFGKRQGREFIWNDLLSLETGSLKLANGRVIEKTLYNRRTRQDEPALFVALTFERREVLDSSNIKPMNLIGVDRGENIPAVIALTDPEGCPLSRFKDSLGNPTHILRIGESYKEKQRTIQAKKEVEQRRAGGYSRKYASKAKNLADDMVRNTARDLLYYAVTQDAMLIFENLSRGFGRQGKRTFMAERQYTRMEDWLTAKLAYEGLPSKTYLSKTLAQYTSKTCSNCGFTITSADYDRVLEKLKKTATGWMTTINGKELKVEGQITYYNRYKRQNVVKDLSVELDRLSEESVNNDISSWDKGRSGEALSLLKKRFSHRPVQEKFVCLNCGFETHADEQAALNIARSWLFLRSQEYKKYQTNKTTGNTDKRAFVETWQSFYRKKLKEVWKPAV

SEQ ID NO: 45934 - protein, 978 aa, synthetic construct
  REGION 1..978: note = engineered CasX variant
QEIKRINKIRRRLVKDSNTKKAGKTGPMKTLLVRVMTPDLRERLENLRKKPENIPQPISNTSRANLNKLLTDYTEMKKAILHVYWEEFQKDPVGLMSRVAQPASKKIDQNKLKPEMDEKGNLTTAGFACSQCGQPLFVYKLEQVSEKGKAYTNYFGRCNVAEHEKLIKLAQLKPEKDSDEAVTYSLGKFGQRALDFYSIHVTKESTHPVKPLAQIAGNRYASGPVGKALSDACMGTIASFLSKYQDIIIEHQKVVKGNQKRLESLRELAGKENLEYPSVTLPPQPHTKEGVDAYNEVIARVRMWVNLNLWQKLKLSRDDAKPLLRLKGFPSFPLVERQANEVDWWDMVCNVKKLINEKKEDGKVFWQNLAGYKRQEALRPYLSSEEDRKKGKKFARYQLGDLLNHLEKKHGEDWGKVYDEAWERIDKKVEGLSKHIKLEEERRSEDAQSKAALTDWLRAKASFVIEGLKEADKDEFCRCELKLQKWYGDLRGKPFAIEAENSILDISGFSKQYNCAFIWQKDGVKKLNLYLIINYFKGGKLRFKKIKPEAFEANRFYTVINKKSGEIVPMEVNFNFDDPNLIILPLAFGKRQGREFIWNDLLSLETGSLKLANGRVIEKTLYNRRTRQDEPALFVALTFERREVLDSSNIKPMNLIGVDRGENIPAVIALTDPEGCPLSRFKDSLGNPTHILRIGESYKEKQRTIQAKKEVEQRRAGGYSRKYASKAKNLADDMVRNTARDLLYYAVTQDAMLIFENLSRGFGRQGKRTFMAERQYTRMEDWLTAKLAYEGLPSKTYLSKTLAQYTSKTCSNCGFTITSADYDRVLEKLKKTATGWMTTINGKELKVEGQITYYNRYKRQNVVKDLSVELDRLSEESVNNDISSWDKGRSGEALSLLKKRFSHRPVQEKFVCLNCGFETHADEQAALNIARSWLFLRSQEYKKYQTNKTTGNTDKRAFVETWQSFYRKKLKEVWKPAV

SEQ ID NO: 45935 - protein, 977 aa, synthetic construct
  REGION 1..977: note = engineered CasX variant
QEIKRINKIRRRLVKDSNTKKAGKTGPMKTLLVRVMTPDLRERLENLRKKPENIPQPISNTSRANLNKLLTDYTEMKKAILHVYWEEFQKDPVGLMSRVAQPASKKIDQNKLKPEMDEKGNLTTAGFACSQCGQPLFVYKLEQVSEKGKAYTNYFGRCNVAEHEKLILLAQLKPEKDSDEAVTYSLGKFGQRALDFYSIHVTKESTHPVKPLAQIAGNRYASPVGKALSDACMGTIASFLSKYQDIIIEHQKVVKGNQKRLESLRELAGKENLEYPSVTLPPQPHTKEGVDAYNEVIARVRMWVNLNLWQKLKLSRDDAKPLLRLKGFPSFPLVERQANEVDWWDMVCNVKKLINEKKEDGKVFWQNLAGYKRQEALRPYLSSEEDRKKGKKFARYQLGDLLNHLEKKHGEDWGKVYDEAWERIDKKVEGLSKHIKLEEERRSEDAQSKAALTDWLRAKASFVIEGLKEADKDEFCRCELKLQKWYGDLRGKPFAIEAENSILDISGFSKQYNCAFIWQKDGVKKLNLYLIINYFKGGKLRFKKIKPEAFEANRFYTVINKKSGEIVPMEVNFNFDDPNLIILPLAFGKRQGREFIWNDLLSLETGSLKLANGRVIEKTLYNRRTRQDEPALFVALTFERREVLDSSNIKPMNLIGVDRGENIPAVIALTDPEGCPLSRFKDSLGNPTHILRIGESYKEKQRTIQAKKEVEQRRAGGYSRKYASKAKNLADDMVRNTARDLLYYAVTQDAMLIFENLSRGFGRQGKRTFMAERQYTRMEDWLTAKLAYEGLPSKTYLSKTLAQYTSKTCSNCGFTITSADYDRVLEKLKKTATGWMTTINGKELKVEGQITYYNRYKRQNVVKDLSVELDRLSEESVNNDISSWDKGRSGEALSLLKKRFSHRPVQEKFVCLNCGFETHADEQAALNIARSWLFLRSQEYKKYQTNKTTGNTDKRAFVETWQSFYRKKLKEVWKPAV

SEQ ID NO: 45936 - protein, 978 aa, synthetic construct
  REGION 1..978: note = engineered CasX variant
QEIKRINKIRRRLVKDSNTKKAGKTGPMKTLLVRVMTPDLRERLENLRKKPENIPQPISNTSRANLNKLLTDYTEMKKAILHVYWEEFQKDPVGLMSRVAQPASKKIDQNKLKPEMDEKGNLTTAGFACSQCGQPLFVYKLEQVSEKGKAYTNYFGRCNVAEHEKLILLAQLKPEKDSDEAVTYSLGKFGQRALDFYSIHVTKESTHPVKPLAQIAGNRYASYPVGKALSDACMGTIASFLSKYQDIIIEHQKVVKGNQKRLESLRELAGKENLEYPSVTLPPQPHTKEGVDAYNEVIARVRMWVNLNLWQKLKLSRDDAKPLLRLKGFPSFPLVERQANEVDWWDMVCNVKKLINEKKEDGKVFWQNLAGYKRQEALRPYLSSEEDRKKGKKFARYQLGDLLWHLEKKHGEDWGKVYDEAWERIDKKVEGLSKHIKLEEERRSEDAQSKAALTDWLRAKASFVIEGLKEADKDEFCRCELKLQKWYGDLRGKPFAIEAENSILDISGFSKQYNCAFIWQKDGVKKLNLYLIINYFKGGKLRFKKIKPEAFEANRFYTVINKKSGEIVPMEVNFNFDDPNLIILPLAFGKRQGREFIWNDLLSLETGSLKLANGRVIEKTLYNRRTRQDEPALFVALTFERREVLDSSNIKPMNLIGVDRGENIPAVIALTDPEGCPLSRFKDSLGNPTHILRIGESYKEKQRTIQAKKEVEQRRAGGYSRKYASKAKNLADDMVRNTARDLLYYAVTQDAMLIFENLSRGFGRQGKRTFMAERQYTRMEDWLTAKLAYEGLPSKTYLSKTLAQYTSKTCSNCGFTITSADYDRVLEKLKKTATGWMTTINGKELKVEGQITYYNRYKRQNVVKDLSVELDRLSEESVNNDISSWDKGRSGEALSLLKKRFSHRPVQEKFVCLNCGFETHADEQAALNIARSWLFLRSQEYKKYQTNKTTGNTDKRAFVETWQSFYRKKLKEVWKPAV

SEQ ID NO: 45937 - protein, 978 aa, synthetic construct
  REGION 1..978: note = engineered CasX variant
QEIKRINKIRRRLVKDSNTKKAGKTGPMKTLLVRVMTPDLRERLENLRKKPENIPQPISNTSRANLNKLLTDYTEMKKAILHVYWEEFQKDPVGLMSRVAQPASKKIDQNKLKPEMDEKGNLTTAGFACSQCGQPLFVYKLEQVSEKGKAYTNYFGRCNVAEHEKLILLAQLKPEKDSDEAVTYSLGKFGQRALDFYSIHVTKESTHPVKPLAQIAGNRYASHPVGKALSDACMGTIASFLSKYQDIIIEHQKVVKGNQKRLESLRELAGKENLEYPSVTLPPQPHTKEGVDAYNEVIARVRMWVNLNLWQKLKLSRDDAKPLLRLKGFPSFPLVERQANEVDWWDMVCNVKKLINEKKEDGKVFWQNLAGYKRQEALRPYLSSEEDRKKGKKFARYQLGDLLWHLEKKHGEDWGKVYDEAWERIDKKVEGLSKHIKLEEERRSEDAQSKAALTDWLRAKASFVIEGLKEADKDEFCRCELKLQKWYGDLRGKPFAIEAENSILDISGFSKQYNCAFIWQKDGVKKLNLYLIINYFKGGKLRFKKIKPEAFEANRFYTVINKKSGEIVPMEVNFNFDDPNLIILPLAFGKRQGREFIWNDLLSLETGSLKLANGRVIEKTLYNRRTRQDEPALFVALTFERREVLDSSNIKPMNLIGVDRGENIPAVIALTDPEGCPLSRFKDSLGNPTHILRIGESYKEKQRTIQAKKEVEQRRAGGYSRKYASKAKNLADDMVRNTARDLLYYAVTQDAMLIFENLSRGFGRQGKRTFMAERQYTRMEDWLTAKLAYEGLPSKTYLSKTLAQYTSKTCSNCGFTITSADYDRVLEKLKKTATGWMTTINGKELKVEGQITYYNRYKRQNVVKDLSVELDRLSEESVNNDISSWDKGRSGEALSLLKKRFSHRPVQEKFVCLNCGFETHADEQAALNIARSWLFLRSQEYKKYQTNKTTGNTDKRAFVETWQSFYRKKLKEVWKPAV

SEQ ID NO: 45938 - protein, 978 aa, synthetic construct
  REGION 1..978: note = engineered CasX variant
QEIKRINKIRRRLVKDSNTKKAGKTGPMKTLLVRVMTPDLRERLENLRKKPENIPQPISNTSRANLNKLLTDYTEMKKAILHVYWEEFQKDPVGLMSRVAQPASKKIDQNKLKPEMDEKGNLTTAGFACSQCGQPLFVYKLEQVSEKGKAYTNYFGRCNVAEHEKLILLAQLKPEKDSDEAVTYSLGKFGQRALDFYSIHVTKESTHPVKPLAQIAGNRYASSPVGKALSDACMGTIASFLSKYQDIIIEHQKVVKGNQKRLESLRELAGKENLEYPSVTLPPQPHTKEGVDAYNEVIARVRMWVNLNLWQKLKLSRDDAKPLLRLKGFPSFPLVERQANEVDWWDMVCNVKKLINEKKEDGKVFWQNLAGYKRQEALRPYLSSEEDRKKGKKFARYQLGDLLWHLEKKHGEDWGKVYDEAWERIDKKVEGLSKHIKLEEERRSEDAQSKAALTDWLRAKASFVIEGLKEADKDEFCRCELKLQKWYGDLRGKPFAIEAENSILDISGFSKQYNCAFIWQKDGVKKLNLYLIINYFKGGKLRFKKIKPEAFEANRFYTVINKKSGEIVPMEVNFNFDDPNLIILPLAFGKRQGREFIWNDLLSLETGSLKLANGRVIEKTLYNRRTRQDEPALFVALTFERREVLDSSNIKPMNLIGVDRGENIPAVIALTDPEGCPLSRFKDSLGNPTHILRIGESYKEKQRTIQAKKEVEQRRAGGYSRKYASKAKNLADDMVRNTARDLLYYAVTQDAMLIFENLSRGFGRQGKRTFMAERQYTRMEDWLTAKLAYEGLPSKTYLSKTLAQYTSKTCSNCGFTITSADYDRVLEKLKKTATGWMTTINGKELKVEGQITYYNRYKRQNVVKDLSVELDRLSEESVNNDISSWDKGRSGEALSLLKKRFSHRPVQEKFVCLNCGFETHADEQAALNIARSWLFLRSQEYKKYQTNKTTGNTDKRAFVETWQSFYRKKLKEVWKPAV

SEQ ID NO: 45939 - protein, 978 aa, synthetic construct
  REGION 1..978: note = engineered CasX variant
QEIKRINKIRRRLVKDSNTKKAGKTGPMKTLLVRVMTPDLRERLENLRKKPENIPQPISNTSRANLNKLLTDYTEMKKAILHVYWEEFQKDPVGLMSRVAQPASKKIDQNKLKPEMDEKGNLTTAGFACSQCGQPLFVYKLEQVSEKGKAYTNYFGRCNVAEHEKLILLAQLKPEKDSDEAVTYSLGKFGQRALDFYSIHVTKESTHPVKPLAQIAGNRYASTPVGKALSDACMGTIASFLSKYQDIIIEHQKVVKGNQKRLESLRELAGKENLEYPSVTLPPQPHTKEGVDAYNEVIARVRMWVNLNLWQKLKLSRDDAKPLLRLKGFPSFPLVERQANEVDWWDMVCNVKKLINEKKEDGKVFWQNLAGYKRQEALRPYLSSEEDRKKGKKFARYQLGDLLWHLEKKHGEDWGKVYDEAWERIDKKVEGLSKHIKLEEERRSEDAQSKAALTDWLRAKASFVIEGLKEADKDEFCRCELKLQKWYGDLRGKPFAIEAENSILDISGFSKQYNCAFIWQKDGVKKLNLYLIINYFKGGKLRFKKIKPEAFEANRFYTVINKKSGEIVPMEVNFNFDDPNLIILPLAFGKRQGREFIWNDLLSLETGSLKLANGRVIEKTLYNRRTRQDEPALFVALTFERREVLDSSNIKPMNLIGVDRGENIPAVIALTDPEGCPLSRFKDSLGNPTHILRIGESYKEKQRTIQAKKEVEQRRAGGYSRKYASKAKNLADDMVRNTARDLLYYAVTQDAMLIFENLSRGFGRQGKRTFMAERQYTRMEDWLTAKLAYEGLPSKTYLSKTLAQYTSKTCSNCGFTITSADYDRVLEKLKKTATGWMTTINGKELKVEGQITYYNRYKRQNVVKDLSVELDRLSEESVNNDISSWDKGRSGEALSLLKKRFSHRPVQEKFVCLNCGFETHADEQAALNIARSWLFLRSQEYKKYQTNKTTGNTDKRAFVETWQSFYRKKLKEVWKPAV

SEQ ID NO: 45940 - protein, 978 aa, synthetic construct
  REGION 1..978: note = engineered CasX variant
QEIKRINKIRRRLVKDSNTKKAGKTGPMKTLLVRVMTPDLRERLENLRKKPENIPQPISNTSRANLNKLLTDYTEMKKAILHVYWEEFQKDPVGLMSRVAQPASKKIDQNKLKPEMDEKGNLTTAGFACSQCGQPLFVYKLEQVSEKGKAYTNYFGRCNVAEHEKLILLAQLKPEKDSDEAVTYSLGKFGQRALDFYSIHVTKESTHPVKPLAQIAGNRYASAPVGKALSDACMGTIASFLSKYQDIIIEHQKVVKGNQKRLESLRELAGKENLEYPSVTLPPQPHTKEGVDAYNEVIARVRMWVNLNLWQKLKLSRDDAKPLLRLKGFPSFPLVERQANEVDWWDMVCNVKKLINEKKEDGKVFWQNLAGYKRQEALRPYLSSEEDRKKGKKFARYQLGDLLWHLEKKHGEDWGKVYDEAWERIDKKVEGLSKHIKLEEERRSEDAQSKAALTDWLRAKASFVIEGLKEADKDEFCRCELKLQKWYGDLRGKPFAIEAENSILDISGFSKQYNCAFIWQKDGVKKLNLYLIINYFKGGKLRFKKIKPEAFEANRFYTVINKKSGEIVPMEVNFNFDDPNLIILPLAFGKRQGREFIWNDLLSLETGSLKLANGRVIEKTLYNRRTRQDEPALFVALTFERREVLDSSNIKPMNLIGVDRGENIPAVIALTDPEGCPLSRFKDSLGNPTHILRIGESYKEKQRTIQAKKEVEQRRAGGYSRKYASKAKNLADDMVRNTARDLLYYAVTQDAMLIFENLSRGFGRQGKRTFMAERQYTRMEDWLTAKLAYEGLPSKTYLSKTLAQYTSKTCSNCGFTITSADYDRVLEKLKKTATGWMTTINGKELKVEGQITYYNRYKRQNVVKDLSVELDRLSEESVNNDISSWDKGRSGEALSLLKKRFSHRPVQEKFVCLNCGFETHADEQAALNIARSWLFLRSQEYKKYQTNKTTGNTDKRAFVETWQSFYRKKLKEVWKPAV

SEQ ID NO: 45941 - protein, 978 aa, synthetic construct
  REGION 1..978: note = engineered CasX variant
QEIKRINKIRRRLVKDSNTKKAGKTGPMKTLLVRVMTPDLRERLENLRKKPENIPQPISNTSRANLNKLLTDYTEMKKAILHVYWEEFQKDPVGLMSRVAQPASKKIDQNKLKPEMDEKGNLTTAGFACSQCGQPLFVYKLEQVSEKGKAYTNYFGRCNVAEHEKLILLAQLKPEKDSDEAVTYSLGKFGQRALDFYSIHVTKESTHPVKPLAQIAGNRYASVPVGKALSDACMGTIASFLSKYQDIIIEHQKVVKGNQKRLESLRELAGKENLEYPSVTLPPQPHTKEGVDAYNEVIARVRMWVNLNLWQKLKLSRDDAKPLLRLKGFPSFPLVERQANEVDWWDMVCNVKKLINEKKEDGKVFWQNLAGYKRQEALRPYLSSEEDRKKGKKFARYQLGDLLWHLEKKHGEDWGKVYDEAWERIDKKVEGLSKHIKLEEERRSEDAQSKAALTDWLRAKASFVIEGLKEADKDEFCRCELKLQKWYGDLRGKPFAIEAENSILDISGFSKQYNCAFIWQKDGVKKLNLYLIINYFKGGKLRFKKIKPEAFEANRFYTVINKKSGEIVPMEVNFNFDDPNLIILPLAFGKRQGREFIWNDLLSLETGSLKLANGRVIEKTLYNRRTRQDEPALFVALTFERREVLDSSNIKPMNLIGVDRGENIPAVIALTDPEGCPLSRFKDSLGNPTHILRIGESYKEKQRTIQAKKEVEQRRAGGYSRKYASKAKNLADDMVRNTARDLLYYAVTQDAMLIFENLSRGFGRQGKRTFMAERQYTRMEDWLTAKLAYEGLPSKTYLSKTLAQYTSKTCSNCGFTITSADYDRVLEKLKKTATGWMTTINGKELKVEGQITYYNRYKRQNVVKDLSVELDRLSEESVNNDISSWDKGRSGEALSLLKKRFSHRPVQEKFVCLNCGFETHADEQAALNIARSWLFLRSQEYKKYQTNKTTGNTDKRAFVETWQSFYRKKLKEVWKPAV

SEQ ID NO: 45942 - protein, 978 aa, synthetic construct
  REGION 1..978: note = engineered CasX variant
QEIKRINKIRRRLVKDSNTKKAGKTGPMKTLLVRVMTPDLRERLENLRKKPENIPQPISNTSRANLNKLLTDYTEMKKAILHVYWEEFQKDPVGLMSRVAQPASKKIDQNKLKPEMDEKGNLTTAGFACSQCGQPLFVYKLEQVSEKGKAYTNYFGRCNVAEHEKLIKLAQLKPEKDSDEAVTYSLGKFGQRALDFYSIHVTKESTHPVKPLAQIAGNRYASGPVGKALSDACMGTIASFLSKYQDIIIEHQKVVKGNQKRLESLRELAGKENLEYPSVTLPPQPHTKEGVDAYNEVIARVRMWVNLNLWQKLKLSRDDAKPLLRLKGFPSFPLVERQANEVDWWDMVCNVKKLINEKKEDGKVFWQNLAGYKRQEALRPYLSSEEDRKKGKKFARYQLGDLLWHLEKKHGEDWGKVYDEAWERIDKKVEGLSKHIKLEEERRSEDAQSKAALTDWLRAKASFVIEGLKEADKDEFCRCELKLQKWYGDLRGKPFAIEAENSILDISGFSKQYNCAFIWQKDGVKKLNLYLIINYFKGGKLRFKKIKPEAFEANRFYTVINKKSGEIVPMEVNFNFDDPNLIILPLAFGKRQGREFIWNDLLSLETGSLKLANGRVIEKTLYNRRTRQDEPALFVALTFERREVLDSSNIKPMNLIGVDRGENIPAVIALTDPEGCPLSRFKDSLGNPTHILRIGESYKEKQRTIQAKKEVEQRRAGGYSRKYASKAKNLADDMVRNTARDLLYYAVTQDAMLIFENLSRGFGRQGKRTFMAERQYTRMEDWLTAKLAYEGLPSKTYLSKTLAQYTSKTCSNCGFTITSADYDRVLEKLKKTATGWMTTINGKELKVEGQITYYNRYKRQNVVKDLSVELDRLSEESVNNDISSWDKGRSGEALSLLKKRFSHRPVQEKFVCLNCGFETHADEQAALNIARSWLFLRSQEYKKYQTNKTTGNTDKRAFVETWQSFYRKKLKEVWKPAV

SEQ ID NO: 45943 - protein, 977 aa, synthetic construct
  REGION 1..977: note = engineered CasX variant
QEIKRINKIRRRLVKDSNTKKAGKTGPMKTLLVRVMTPDLRERLENLRKKPENIPQPISNTSRANLNKLLTDYTEMKKAILHVYWEEFQKDPVGLMSRVAQPASKKIDQNKLKPEMDEKGNLTTAGFACSQCGQPLFVYKLEQVSEKGKAYTNYFGRCNVAEHEKLILLAQLKPEKDSDEAVTYSLGKFGQRALDFYSIHVTKESTHPVKPLAQIAGNRYASPVGKALSDACMGTIASFLSKYQDIIIEHQKVVKGNQKRLESLRELAGKENLEYPSVTLPPQPHTKEGVDAYNEVIARVRMWVNLNLWQKLKLSRDDAKPLLRLKGFPSFPLVERQANEVDWWDMVCNVKKLINEKKEDGKVFWQNLAGYKRQEALRPYLSSEEDRKKGKKFARYQLGDLLWHLEKKHGEDWGKVYDEAWERIDKKVEGLSKHIKLEEERRSEDAQSKAALTDWLRAKASFVIEGLKEADKDEFCRCELKLQKWYGDLRGKPFAIEAENSILDISGFSKQYNCAFIWQKDGVKKLNLYLIINYFKGGKLRFKKIKPEAFEANRFYTVINKKSGEIVPMEVNFNFDDPNLIILPLAFGKRQGREFIWNDLLSLETGSLKLANGRVIEKTLYNRRTRQDEPALFVALTFERREVLDSSNIKPMNLIGVDRGENIPAVIALTDPEGCPLSRFKDSLGNPTHILRIGESYKEKQRTIQAKKEVEQRRAGGYSRKYASKAKNLADDMVRNTARDLLYYAVTQDAMLIFENLSRGFGRQGKRTFMAERQYTRMEDWLTAKLAYEGLPSKTYLSKTLAQYTSKTCSNCGFTITSADYDRVLEKLKKTATGWMTTINGKELKVEGQITYYNRYKRQNVVKDLSVELDRLSEESVNNDISSWDKGRSGEALSLLKKRFSHRPVQEKFVCLNCGFETHADEQAALNIARSWLFLRSQEYKKYQTNKTTGNTDKRAFVETWQSFYRKKLKEVWKPAV

SEQ ID NO: 45944 - protein, 978 aa, synthetic construct
  REGION 1..978: note = engineered CasX variant
QEIKRINKIRRRLVKDSNTKKAGKTGPMKTLLVRVMTPDLRERLENLRKKPENIPQPISNTSRANLNKLLTDYTEMKKAILHVYWEEFQKDPVGLMSRVAQPASKKIDQNKLKPEMDEKGNLTTAGFACSQCGQPLFVYKLEQVSEKGKAYTNYFGRCNVAEHEKLILLAQLKPEKDSDEAVTYSLGKFGQRALDFYSIHVTKESTHPVKPLAQIAGNRYASYPVGKALSDACMGTIASFLSKYQDIIIEHQKVVKGNQKRLESLRELAGKENLEYPSVTLPPQPHTKEGVDAYNEVIARVRMWVNLNLWQKLKLSRDDAKPLLRLKGFPSFPLVERQANEVDWWDMVCNVKKLINEKKEDGKVFWQNLAGYKRQEALRPYLSSEEDRKKGKKFARYQLGDLLLHLYKKHGEDWGKVYDEAWERIDKKVEGLSKHIKLEEERRSEDAQSKAALTDWLRAKASFVIEGLKEADKDEFCRCELKLQKWYGDLRGKPFAIEAENSILDISGFSKQYNCAFIWQKDGVKKLNLYLIINYFKGGKLRFKKIKPEAFEANRFYTVINKKSGEIVPMEVNFNFDDPNLIILPLAFGKRQGREFIWNDLLSLETGSLKLANGRVIEKTLYNRRTRQDEPALFVALTFERREVLDSSNIKPMNLIGVDRGENIPAVIALTDPEGCPLSRFKDSLGNPTHILRIGESYKEKQRTIQAKKEVEQRRAGGYSRKYASKAKNLADDMVRNTARDLLYYAVTQDAMLIFENLSRGFGRQGKRTFMAERQYTRMEDWLTAKLAYEGLPSKTYLSKTLAQYTSKTCSNCGFTITSADYDRVLEKLKKTATGWMTTINGKELKVEGQITYYNRYKRQNVVKDLSVELDRLSEESVNNDISSWDKGRSGEALSLLKKRFSHRPVQEKFVCLNCGFETHADEQAALNIARSWLFLRSQEYKKYQTNKTTGNTDKRAFVETWQSFYRKKLKEVWKPAV

SEQ ID NO: 45945 - protein, 978 aa, synthetic construct
  REGION 1..978: note = engineered CasX variant
QEIKRINKIRRRLVKDSNTKKAGKTGPMKTLLVRVMTPDLRERLENLRKKPENIPQPISNTSRANLNKLLTDYTEMKKAILHVYWEEFQKDPVGLMSRVAQPASKKIDQNKLKPEMDEKGNLTTAGFACSQCGQPLFVYKLEQVSEKGKAYTNYFGRCNVAEHEKLILLAQLKPEKDSDEAVTYSLGKFGQRALDFYSIHVTKESTHPVKPLAQIAGNRYASHPVGKALSDACMGTIASFLSKYQDIIIEHQKVVKGNQKRLESLRELAGKENLEYPSVTLPPQPHTKEGVDAYNEVIARVRMWVNLNLWQKLKLSRDDAKPLLRLKGFPSFPLVERQANEVDWWDMVCNVKKLINEKKEDGKVFWQNLAGYKRQEALRPYLSSEEDRKKGKKFARYQLGDLLLHLYKKHGEDWGKVYDEAWERIDKKVEGLSKHIKLEEERRSEDAQSKAALTDWLRAKASFVIEGLKEADKDEFCRCELKLQKWYGDLRGKPFAIEAENSILDISGFSKQYNCAFIWQKDGVKKLNLYLIINYFKGGKLRFKKIKPEAFEANRFYTVINKKSGEIVPMEVNFNFDDPNLIILPLAFGKRQGREFIWNDLLSLETGSLKLANGRVIEKTLYNRRTRQDEPALFVALTFERREVLDSSNIKPMNLIGVDRGENIPAVIALTDPEGCPLSRFKDSLGNPTHILRIGESYKEKQRTIQAKKEVEQRRAGGYSRKYASKAKNLADDMVRNTARDLLYYAVTQDAMLIFENLSRGFGRQGKRTFMAERQYTRMEDWLTAKLAYEGLPSKTYLSKTLAQYTSKTCSNCGFTITSADYDRVLEKLKKTATGWMTTINGKELKVEGQITYYNRYKRQNVVKDLSVELDRLSEESVNNDISSWDKGRSGEALSLLKKRFSHRPVQEKFVCLNCGFETHADEQAALNIARSWLFLRSQEYKKYQTNKTTGNTDKRAFVETWQSFYRKKLKEVWKPAV

SEQ ID NO: 45946 - protein, 978 aa, synthetic construct
  REGION 1..978: note = engineered CasX variant
QEIKRINKIRRRLVKDSNTKKAGKTGPMKTLLVRVMTPDLRERLENLRKKPENIPQPISNTSRANLNKLLTDYTEMKKAILHVYWEEFQKDPVGLMSRVAQPASKKIDQNKLKPEMDEKGNLTTAGFACSQCGQPLFVYKLEQVSEKGKAYTNYFGRCNVAEHEKLILLAQLKPEKDSDEAVTYSLGKFGQRALDFYSIHVTKESTHPVKPLAQIAGNRYASSPVGKALSDACMGTIASFLSKYQDIIIEHQKVVKGNQKRLESLRELAGKENLEYPSVTLPPQPHTKEGVDAYNEVIARVRMWVNLNLWQKLKLSRDDAKPLLRLKGFPSFPLVERQANEVDWWDMVCNVKKLINEKKEDGKVFWQNLAGYKRQEALRPYLSSEEDRKKGKKFARYQLGDLLLHLYKKHGEDWGKVYDEAWERIDKKVEGLSKHIKLEEERRSEDAQSKAALTDWLRAKASFVIEGLKEADKDEFCRCELKLQKWYGDLRGKPFAIEAENSILDISGFSKQYNCAFIWQKDGVKKLNLYLIINYFKGGKLRFKKIKPEAFEANRFYTVINKKSGEIVPMEVNFNFDDPNLIILPLAFGKRQGREFIWNDLLSLETGSLKLANGRVIEKTLYNRRTRQDEPALFVALTFERREVLDSSNIKPMNLIGVDRGENIPAVIALTDPEGCPLSRFKDSLGNPTHILRIGESYKEKQRTIQAKKEVEQRRAGGYSRKYASKAKNLADDMVRNTARDLLYYAVTQDAMLIFENLSRGFGRQGKRTFMAERQYTRMEDWLTAKLAYEGLPSKTYLSKTLAQYTSKTCSNCGFTITSADYDRVLEKLKKTATGWMTTINGKELKVEGQITYYNRYKRQNVVKDLSVELDRLSEESVNNDISSWDKGRSGEALSLLKKRFSHRPVQEKFVCLNCGFETHADEQAALNIARSWLFLRSQEYKKYQTNKTTGNTDKRAFVETWQSFYRKKLKEVWKPAV

SEQ ID NO: 45947 - protein, 978 aa, synthetic construct
  REGION 1..978: note = engineered CasX variant
QEIKRINKIRRRLVKDSNTKKAGKTGPMKTLLVRVMTPDLRERLENLRKKPENIPQPISNTSRANLNKLLTDYTEMKKAILHVYWEEFQKDPVGLMSRVAQPASKKIDQNKLKPEMDEKGNLTTAGFACSQCGQPLFVYKLEQVSEKGKAYTNYFGRCNVAEHEKLILLAQLKPEKDSDEAVTYSLGKFGQRALDFYSIHVTKESTHPVKPLAQIAGNRYASTPVGKALSDACMGTIASFLSKYQDIIIEHQKVVKGNQKRLESLRELAGKENLEYPSVTLPPQPHTKEGVDAYNEVIARVRMWVNLNLWQKLKLSRDDAKPLLRLKGFPSFPLVERQANEVDWWDMVCNVKKLINEKKEDGKVFWQNLAGYKRQEALRPYLSSEEDRKKGKKFARYQLGDLLLHLYKKHGEDWGKVYDEAWERIDKKVEGLSKHIKLEEERRSEDAQSKAALTDWLRAKASFVIEGLKEADKDEFCRCELKLQKWYGDLRGKPFAIEAENSILDISGFSKQYNCAFIWQKDGVKKLNLYLIINYFKGGKLRFKKIKPEAFEANRFYTVINKKSGEIVPMEVNFNFDDPNLIILPLAFGKRQGREFIWNDLLSLETGSLKLANGRVIEKTLYNRRTRQDEPALFVALTFERREVLDSSNIKPMNLIGVDRGENIPAVIALTDPEGCPLSRFKDSLGNPTHILRIGESYKEKQRTIQAKKEVEQRRAGGYSRKYASKAKNLADDMVRNTARDLLYYAVTQDAMLIFENLSRGFGRQGKRTFMAERQYTRMEDWLTAKLAYEGLPSKTYLSKTLAQYTSKTCSNCGFTITSADYDRVLEKLKKTATGWMTTINGKELKVEGQITYYNRYKRQNVVKDLSVELDRLSEESVNNDISSWDKGRSGEALSLLKKRFSHRPVQEKFVCLNCGFETHADEQAALNIARSWLFLRSQEYKKYQTNKTTGNTDKRAFVETWQSFYRKKLKEVWKPAV

SEQ ID NO: 45948 - protein, 978 aa, synthetic construct
  REGION 1..978: note = engineered CasX variant
QEIKRINKIRRRLVKDSNTKKAGKTGPMKTLLVRVMTPDLRERLENLRKKPENIPQPISNTSRANLNKLLTDYTEMKKAILHVYWEEFQKDPVGLMSRVAQPASKKIDQNKLKPEMDEKGNLTTAGFACSQCGQPLFVYKLEQVSEKGKAYTNYFGRCNVAEHEKLILLAQLKPEKDSDEAVTYSLGKFGQRALDFYSIHVTKESTHPVKPLAQIAGNRYASAPVGKALSDACMGTIASFLSKYQDIIIEHQKVVKGNQKRLESLRELAGKENLEYPSVTLPPQPHTKEGVDAYNEVIARVRMWVNLNLWQKLKLSRDDAKPLLRLKGFPSFPLVERQANEVDWWDMVCNVKKLINEKKEDGKVFWQNLAGYKRQEALRPYLSSEEDRKKGKKFARYQLGDLLLHLYKKHGEDWGKVYDEAWERIDKKVEGLSKHIKLEEERRSEDAQSKAALTDWLRAKASFVIEGLKEADKDEFCRCELKLQKWYGDLRGKPFAIEAENSILDISGFSKQYNCAFIWQKDGVKKLNLYLIINYFKGGKLRFKKIKPEAFEANRFYTVINKKSGEIVPMEVNFNFDDPNLIILPLAFGKRQGREFIWNDLLSLETGSLKLANGRVIEKTLYNRRTRQDEPALFVALTFERREVLDSSNIKPMNLIGVDRGENIPAVIALTDPEGCPLSRFKDSLGNPTHILRIGESYKEKQRTIQAKKEVEQRRAGGYSRKYASKAKNLADDMVRNTARDLLYYAVTQDAMLIFENLSRGFGRQGKRTFMAERQYTRMEDWLTAKLAYEGLPSKTYLSKTLAQYTSKTCSNCGFTITSADYDRVLEKLKKTATGWMTTINGKELKVEGQITYYNRYKRQNVVKDLSVELDRLSEESVNNDISSWDKGRSGEALSLLKKRFSHRPVQEKFVCLNCGFETHADEQAALNIARSWLFLRSQEYKKYQTNKTTGNTDKRAFVETWQSFYRKKLKEVWKPAV

SEQ ID NO: 45949 - protein, 978 aa, synthetic construct
  REGION 1..978: note = engineered CasX variant
QEIKRINKIRRRLVKDSNTKKAGKTGPMKTLLVRVMTPDLRERLENLRKKPENIPQPISNTSRANLNKLLTDYTEMKKAILHVYWEEFQKDPVGLMSRVAQPASKKIDQNKLKPEMDEKGNLTTAGFACSQCGQPLFVYKLEQVSEKGKAYTNYFGRCNVAEHEKLILLAQLKPEKDSDEAVTYSLGKFGQRALDFYSIHVTKESTHPVKPLAQIAGNRYASVPVGKALSDACMGTIASFLSKYQDIIIEHQKVVKGNQKRLESLRELAGKENLEYPSVTLPPQPHTKEGVDAYNEVIARVRMWVNLNLWQKLKLSRDDAKPLLRLKGFPSFPLVERQANEVDWWDMVCNVKKLINEKKEDGKVFWQNLAGYKRQEALRPYLSSEEDRKKGKKFARYQLGDLLLHLYKKHGEDWGKVYDEAWERIDKKVEGLSKHIKLEEERRSEDAQSKAALTDWLRAKASFVIEGLKEADKDEFCRCELKLQKWYGDLRGKPFAIEAENSILDISGFSKQYNCAFIWQKDGVKKLNLYLIINYFKGGKLRFKKIKPEAFEANRFYTVINKKSGEIVPMEVNFNFDDPNLIILPLAFGKRQGREFIWNDLLSLETGSLKLANGRVIEKTLYNRRTRQDEPALFVALTFERREVLDSSNIKPMNLIGVDRGENIPAVIALTDPEGCPLSRFKDSLGNPTHILRIGESYKEKQRTIQAKKEVEQRRAGGYSRKYASKAKNLADDMVRNTARDLLYYAVTQDAMLIFENLSRGFGRQGKRTFMAERQYTRMEDWLTAKLAYEGLPSKTYLSKTLAQYTSKTCSNCGFTITSADYDRVLEKLKKTATGWMTTINGKELKVEGQITYYNRYKRQNVVKDLSVELDRLSEESVNNDISSWDKGRSGEALSLLKKRFSHRPVQEKFVCLNCGFETHADEQAALNIARSWLFLRSQEYKKYQTNKTTGNTDKRAFVETWQSFYRKKLKEVWKPAV

SEQ ID NO: 45950 - protein, 978 aa, synthetic construct
  REGION 1..978: note = engineered CasX variant
QEIKRINKIRRRLVKDSNTKKAGKTGPMKTLLVRVMTPDLRERLENLRKKPENIPQPISNTSRANLNKLLTDYTEMKKAILHVYWEEFQKDPVGLMSRVAQPASKKIDQNKLKPEMDEKGNLTTAGFACSQCGQPLFVYKLEQVSEKGKAYTNYFGRCNVAEHEKLIKLAQLKPEKDSDEAVTYSLGKFGQRALDFYSIHVTKESTHPVKPLAQIAGNRYASGPVGKALSDACMGTIASFLSKYQDIIIEHQKVVKGNQKRLESLRELAGKENLEYPSVTLPPQPHTKEGVDAYNEVIARVRMWVNLNLWQKLKLSRDDAKPLLRLKGFPSFPLVERQANEVDWWDMVCNVKKLINEKKEDGKVFWQNLAGYKRQEALRPYLSSEEDRKKGKKFARYQLGDLLLHLYKKHGEDWGKVYDEAWERIDKKVEGLSKHIKLEEERRSEDAQSKAALTDWLRAKASFVIEGLKEADKDEFCRCELKLQKWYGDLRGKPFAIEAENSILDISGFSKQYNCAFIWQKDGVKKLNLYLIINYFKGGKLRFKKIKPEAFEANRFYTVINKKSGEIVPMEVNFNFDDPNLIILPLAFGKRQGREFIWNDLLSLETGSLKLANGRVIEKTLYNRRTRQDEPALFVALTFERREVLDSSNIKPMNLIGVDRGENIPAVIALTDPEGCPLSRFKDSLGNPTHILRIGESYKEKQRTIQAKKEVEQRRAGGYSRKYASKAKNLADDMVRNTARDLLYYAVTQDAMLIFENLSRGFGRQGKRTFMAERQYTRMEDWLTAKLAYEGLPSKTYLSKTLAQYTSKTCSNCGFTITSADYDRVLEKLKKTATGWMTTINGKELKVEGQITYYNRYKRQNVVKDLSVELDRLSEESVNNDISSWDKGRSGEALSLLKKRFSHRPVQEKFVCLNCGFETHADEQAALNIARSWLFLRSQEYKKYQTNKTTGNTDKRAFVETWQSFYRKKLKEVWKPAV

SEQ ID NO: 45951 - protein, 977 aa, synthetic construct
  REGION 1..977: note = engineered CasX variant
QEIKRINKIRRRLVKDSNTKKAGKTGPMKTLLVRVMTPDLRERLENLRKKPENIPQPISNTSRANLNKLLTDYTEMKKAILHVYWEEFQKDPVGLMSRVAQPASKKIDQNKLKPEMDEKGNLTTAGFACSQCGQPLFVYKLEQVSEKGKAYTNYFGRCNVAEHEKLILLAQLKPEKDSDEAVTYSLGKFGQRALDFYSIHVTKESTHPVKPLAQIAGNRYASPVGKALSDACMGTIASFLSKYQDIIIEHQKVVKGNQKRLESLRELAGKENLEYPSVTLPPQPHTKEGVDAYNEVIARVRMWVNLNLWQKLKLSRDDAKPLLRLKGFPSFPLVERQANEVDWWDMVCNVKKLINEKKEDGKVFWQNLAGYKRQEALRPYLSSEEDRKKGKKFARYQLGDLLLHLYKKHGEDWGKVYDEAWERIDKKVEGLSKHIKLEEERRSEDAQSKAALTDWLRAKASFVIEGLKEADKDEFCRCELKLQKWYGDLRGKPFAIEAENSILDISGFSKQYNCAFIWQKDGVKKLNLYLIINYFKGGKLRFKKIKPEAFEANRFYTVINKKSGEIVPMEVNFNFDDPNLIILPLAFGKRQGREFIWNDLLSLETGSLKLANGRVIEKTLYNRRTRQDEPALFVALTFERREVLDSSNIKPMNLIGVDRGENIPAVIALTDPEGCPLSRFKDSLGNPTHILRIGESYKEKQRTIQAKKEVEQRRAGGYSRKYASKAKNLADDMVRNTARDLLYYAVTQDAMLIFENLSRGFGRQGKRTFMAERQYTRMEDWLTAKLAYEGLPSKTYLSKTLAQYTSKTCSNCGFTITSADYDRVLEKLKKTATGWMTTINGKELKVEGQITYYNRYKRQNVVKDLSVELDRLSEESVNNDISSWDKGRSGEALSLLKKRFSHRPVQEKFVCLNCGFETHADEQAALNIARSWLFLRSQEYKKYQTNKTTGNTDKRAFVETWQSFYRKKLKEVWKPAV

SEQ ID NO: 45952 - protein, 978 aa, synthetic construct
  REGION 1..978: note = engineered CasX variant
QEIKRINKIRRRLVKDSNTKKAGKTGPMKTLLVRVMTPDLRERLENLRKKPENIPQPISNTSRANLNKLLTDYTEMKKAILHVYWEEFQKDPVGLMSRVAQPASKKIDQNKLKPEMDEKGNLTTAGFACSQCGQPLFVYKLEQVSEKGKAYTNYFGRCNVAEHEKLILLAQLKPEKDSDEAVTYSLGKFGQRALDFYSIHVTKESTHPVKPLAQIAGNRYASYPVGKALSDACMGTIASFLSKYQDIIIEHQKVVKGNQKRLESLRELAGKENLEYPSVTLPPQPHTKEGVDAYNEVIARVRMWVNLNLWQKLKLSRDDAKPLLRLKGFPSFPLVERQANEVDWWDMVCNVKKLINEKKEDGKVFWQNLAGYKRQEALRPYLSSEEDRKKGKKFARYQLGDLLLHLEKKHPEDWGKVYDEAWERIDKKVEGLSKHIKLEEERRSEDAQSKAALTDWLRAKASFVIEGLKEADKDEFCRCELKLQKWYGDLRGKPFAIEAENSILDISGFSKQYNCAFIWQKDGVKKLNLYLIINYFKGGKLRFKKIKPEAFEANRFYTVINKKSGEIVPMEVNFNFDDPNLIILPLAFGKRQGREFIWNDLLSLETGSLKLANGRVIEKTLYNRRTRQDEPALFVALTFERREVLDSSNIKPMNLIGVDRGENIPAVIALTDPEGCPLSRFKDSLGNPTHILRIGESYKEKQRTIQAKKEVEQRRAGGYSRKYASKAKNLADDMVRNTARDLLYYAVTQDAMLIFENLSRGFGRQGKRTFMAERQYTRMEDWLTAKLAYEGLPSKTYLSKTLAQYTSKTCSNCGFTITSADYDRVLEKLKKTATGWMTTINGKELKVEGQITYYNRYKRQNVVKDLSVELDRLSEESVNNDISSWDKGRSGEALSLLKKRFSHRPVQEKFVCLNCGFETHADEQAALNIARSWLFLRSQEYKKYQTNKTTGNTDKRAFVETWQSFYRKKLKEVWKPAV

SEQ ID NO: 45953 - protein, 978 aa, synthetic construct
  REGION 1..978: note = engineered CasX variant
QEIKRINKIRRRLVKDSNTKKAGKTGPMKTLLVRVMTPDLRERLENLRKKPENIPQPISNTSRANLNKLLTDYTEMKKAILHVYWEEFQKDPVGLMSRVAQPASKKIDQNKLKPEMDEKGNLTTAGFACSQCGQPLFVYKLEQVSEKGKAYTNYFGRCNVAEHEKLILLAQLKPEKDSDEAVTYSLGKFGQRALDFYSIHVTKESTHPVKPLAQIAGNRYASHPVGKALSDACMGTIASFLSKYQDIIIEHQKVVKGNQKRLESLRELAGKENLEYPSVTLPPQPHTKEGVDAYNEVIARVRMWVNLNLWQKLKLSRDDAKPLLRLKGFPSFPLVERQANEVDWWDMVCNVKKLINEKKEDGKVFWQNLAGYKRQEALRPYLSSEEDRKKGKKFARYQLGDLLLHLEKKHPEDWGKVYDEAWERIDKKVEGLSKHIKLEEERRSEDAQSKAALTDWLRAKASFVIEGLKEADKDEFCRCELKLQKWYGDLRGKPFAIEAENSILDISGFSKQYNCAFIWQKDGVKKLNLYLIINYFKGGKLRFKKIKPEAFEANRFYTVINKKSGEIVPMEVNFNFDDPNLIILPLAFGKRQGREFIWNDLLSLETGSLKLANGRVIEKTLYNRRTRQDEPALFVALTFERREVLDSSNIKPMNLIGVDRGENIPAVIALTDPEGCPLSRFKDSLGNPTHILRIGESYKEKQRTIQAKKEVEQRRAGGYSRKYASKAKNLADDMVRNTARDLLYYAVTQDAMLIFENLSRGFGRQGKRTFMAERQYTRMEDWLTAKLAYEGLPSKTYLSKTLAQYTSKTCSNCGFTITSADYDRVLEKLKKTATGWMTTINGKELKVEGQITYYNRYKRQNVVKDLSVELDRLSEESVNNDISSWDKGRSGEALSLLKKRFSHRPVQEKFVCLNCGFETHADEQAALNIARSWLFLRSQEYKKYQTNKTTGNTDKRAFVETWQSFYRKKLKEVWKPAV

SEQ ID NO: 45954 - protein, 978 aa, synthetic construct
  REGION 1..978: note = engineered CasX variant
QEIKRINKIRRRLVKDSNTKKAGKTGPMKTLLVRVMTPDLRERLENLRKKPENIPQPISNTSRANLNKLLTDYTEMKKAILHVYWEEFQKDPVGLMSRVAQPASKKIDQNKLKPEMDEKGNLTTAGFACSQCGQPLFVYKLEQVSEKGKAYTNYFGRCNVAEHEKLILLAQLKPEKDSDEAVTYSLGKFGQRALDFYSIHVTKESTHPVKPLAQIAGNRYASSPVGKALSDACMGTIASFLSKYQDIIIEHQKVVKGNQKRLESLRELAGKENLEYPSVTLPPQPHTKEGVDAYNEVIARVRMWVNLNLWQKLKLSRDDAKPLLRLKGFPSFPLVERQANEVDWWDMVCNVKKLINEKKEDGKVFWQNLAGYKRQEALRPYLSSEEDRKKGKKFARYQLGDLLLHLEKKHPEDWGKVYDEAWERIDKKVEGLSKHIKLEEERRSEDAQSKAALTDWLRAKASFVIEGLKEADKDEFCRCELKLQKWYGDLRGKPFAIEAENSILDISGFSKQYNCAFIWQKDGVKKLNLYLIINYFKGGKLRFKKIKPEAFEANRFYTVINKKSGEIVPMEVNFNFDDPNLIILPLAFGKRQGREFIWNDLLSLETGSLKLANGRVIEKTLYNRRTRQDEPALFVALTFERREVLDSSNIKPMNLIGVDRGENIPAVIALTDPEGCPLSRFKDSLGNPTHILRIGESYKEKQRTIQAKKEVEQRRAGGYSRKYASKAKNLADDMVRNTARDLLYYAVTQDAMLIFENLSRGFGRQGKRTFMAERQYTRMEDWLTAKLAYEGLPSKTYLSKTLAQYTSKTCSNCGFTITSADYDRVLEKLKKTATGWMTTINGKELKVEGQITYYNRYKRQNVVKDLSVELDRLSEESVNNDISSWDKGRSGEALSLLKKRFSHRPVQEKFVCLNCGFETHADEQAALNIARSWLFLRSQEYKKYQTNKTTGNTDKRAFVETWQSFYRKKLKEVWKPAV

SEQ ID NO: 45955 - protein, 978 aa, synthetic construct
  REGION 1..978: note = engineered CasX variant
QEIKRINKIRRRLVKDSNTKKAGKTGPMKTLLVRVMTPDLRERLENLRKKPENIPQPISNTSRANLNKLLTDYTEMKKAILHVYWEEFQKDPVGLMSRVAQPASKKIDQNKLKPEMDEKGNLTTAGFACSQCGQPLFVYKLEQVSEKGKAYTNYFGRCNVAEHEKLILLAQLKPEKDSDEAVTYSLGKFGQRALDFYSIHVTKESTHPVKPLAQIAGNRYASTPVGKALSDACMGTIASFLSKYQDIIIEHQKVVKGNQKRLESLRELAGKENLEYPSVTLPPQPHTKEGVDAYNEVIARVRMWVNLNLWQKLKLSRDDAKPLLRLKGFPSFPLVERQANEVDWWDMVCNVKKLINEKKEDGKVFWQNLAGYKRQEALRPYLSSEEDRKKGKKFARYQLGDLLLHLEKKHPEDWGKVYDEAWERIDKKVEGLSKHIKLEEERRSEDAQSKAALTDWLRAKASFVIEGLKEADKDEFCRCELKLQKWYGDLRGKPFAIEAENSILDISGFSKQYNCAFIWQKDGVKKLNLYLIINYFKGGKLRFKKIKPEAFEANRFYTVINKKSGEIVPMEVNFNFDDPNLIILPLAFGKRQGREFIWNDLLSLETGSLKLANGRVIEKTLYNRRTRQDEPALFVALTFERREVLDSSNIKPMNLIGVDRGENIPAVIALTDPEGCPLSRFKDSLGNPTHILRIGESYKEKQRTIQAKKEVEQRRAGGYSRKYASKAKNLADDMVRNTARDLLYYAVTQDAMLIFENLSRGFGRQGKRTFMAERQYTRMEDWLTAKLAYEGLPSKTYLSKTLAQYTSKTCSNCGFTITSADYDRVLEKLKKTATGWMTTINGKELKVEGQITYYNRYKRQNVVKDLSVELDRLSEESVNNDISSWDKGRSGEALSLLKKRFSHRPVQEKFVCLNCGFETHADEQAALNIARSWLFLRSQEYKKYQTNKTTGNTDKRAFVETWQSFYRKKLKEVWKPAV

SEQ ID NO: 45956 - protein, 978 aa, synthetic construct
  REGION 1..978: note = engineered CasX variant
QEIKRINKIRRRLVKDSNTKKAGKTGPMKTLLVRVMTPDLRERLENLRKKPENIPQPISNTSRANLNKLLTDYTEMKKAILHVYWEEFQKDPVGLMSRVAQPASKKIDQNKLKPEMDEKGNLTTAGFACSQCGQPLFVYKLEQVSEKGKAYTNYFGRCNVAEHEKLILLAQLKPEKDSDEAVTYSLGKFGQRALDFYSIHVTKESTHPVKPLAQIAGNRYASAPVGKALSDACMGTIASFLSKYQDIIIEHQKVVKGNQKRLESLRELAGKENLEYPSVTLPPQPHTKEGVDAYNEVIARVRMWVNLNLWQKLKLSRDDAKPLLRLKGFPSFPLVERQANEVDWWDMVCNVKKLINEKKEDGKVFWQNLAGYKRQEALRPYLSSEEDRKKGKKFARYQLGDLLLHLEKKHPEDWGKVYDEAWERIDKKVEGLSKHIKLEEERRSEDAQSKAALTDWLRAKASFVIEGLKEADKDEFCRCELKLQKWYGDLRGKPFAIEAENSILDISGFSKQYNCAFIWQKDGVKKLNLYLIINYFKGGKLRFKKIKPEAFEANRFYTVINKKSGEIVPMEVNFNFDDPNLIILPLAFGKRQGREFIWNDLLSLETGSLKLANGRVIEKTLYNRRTRQDEPALFVALTFERREVLDSSNIKPMNLIGVDRGENIPAVIALTDPEGCPLSRFKDSLGNPTHILRIGESYKEKQRTIQAKKEVEQRRAGGYSRKYASKAKNLADDMVRNTARDLLYYAVTQDAMLIFENLSRGFGRQGKRTFMAERQYTRMEDWLTAKLAYEGLPSKTYLSKTLAQYTSKTCSNCGFTITSADYDRVLEKLKKTATGWMTTINGKELKVEGQITYYNRYKRQNVVKDLSVELDRLSEESVNNDISSWDKGRSGEALSLLKKRFSHRPVQEKFVCLNCGFETHADEQAALNIARSWLFLRSQEYKKYQTNKTTGNTDKRAFVETWQSFYRKKLKEVWKPAV

SEQ ID NO: 45957 - protein, 978 aa, synthetic construct
  REGION 1..978: note = engineered CasX variant
QEIKRINKIRRRLVKDSNTKKAGKTGPMKTLLVRVMTPDLRERLENLRKKPENIPQPISNTSRANLNKLLTDYTEMKKAILHVYWEEFQKDPVGLMSRVAQPASKKIDQNKLKPEMDEKGNLTTAGFACSQCGQPLFVYKLEQVSEKGKAYTNYFGRCNVAEHEKLILLAQLKPEKDSDEAVTYSLGKFGQRALDFYSIHVTKESTHPVKPLAQIAGNRYASVPVGKALSDACMGTIASFLSKYQDIIIEHQKVVKGNQKRLESLRELAGKENLEYPSVTLPPQPHTKEGVDAYNEVIARVRMWVNLNLWQKLKLSRDDAKPLLRLKGFPSFPLVERQANEVDWWDMVCNVKKLINEKKEDGKVFWQNLAGYKRQEALRPYLSSEEDRKKGKKFARYQLGDLLLHLEKKHPEDWGKVYDEAWERIDKKVEGLSKHIKLEEERRSEDAQSKAALTDWLRAKASFVIEGLKEADKDEFCRCELKLQKWYGDLRGKPFAIEAENSILDISGFSKQYNCAFIWQKDGVKKLNLYLIINYFKGGKLRFKKIKPEAFEANRFYTVINKKSGEIVPMEVNFNFDDPNLIILPLAFGKRQGREFIWNDLLSLETGSLKLANGRVIEKTLYNRRTRQDEPALFVALTFERREVLDSSNIKPMNLIGVDRGENIPAVIALTDPEGCPLSRFKDSLGNPTHILRIGESYKEKQRTIQAKKEVEQRRAGGYSRKYASKAKNLADDMVRNTARDLLYYAVTQDAMLIFENLSRGFGRQGKRTFMAERQYTRMEDWLTAKLAYEGLPSKTYLSKTLAQYTSKTCSNCGFTITSADYDRVLEKLKKTATGWMTTINGKELKVEGQITYYNRYKRQNVVKDLSVELDRLSEESVNNDISSWDKGRSGEALSLLKKRFSHRPVQEKFVCLNCGFETHADEQAALNIARSWLFLRSQEYKKYQTNKTTGNTDKRAFVETWQSFYRKKLKEVWKPAV

SEQ ID NO: 45958 - protein, 978 aa, synthetic construct
  REGION 1..978: note = engineered CasX variant
QEIKRINKIRRRLVKDSNTKKAGKTGPMKTLLVRVMTPDLRERLENLRKKPENIPQPISNTSRANLNKLLTDYTEMKKAILHVYWEEFQKDPVGLMSRVAQPASKKIDQNKLKPEMDEKGNLTTAGFACSQCGQPLFVYKLEQVSEKGKAYTNYFGRCNVAEHEKLIKLAQLKPEKDSDEAVTYSLGKFGQRALDFYSIHVTKESTHPVKPLAQIAGNRYASGPVGKALSDACMGTIASFLSKYQDIIIEHQKVVKGNQKRLESLRELAGKENLEYPSVTLPPQPHTKEGVDAYNEVIARVRMWVNLNLWQKLKLSRDDAKPLLRLKGFPSFPLVERQANEVDWWDMVCNVKKLINEKKEDGKVFWQNLAGYKRQEALRPYLSSEEDRKKGKKFARYQLGDLLLHLEKKHPEDWGKVYDEAWERIDKKVEGLSKHIKLEEERRSEDAQSKAALTDWLRAKASFVIEGLKEADKDEFCRCELKLQKWYGDLRGKPFAIEAENSILDISGFSKQYNCAFIWQKDGVKKLNLYLIINYFKGGKLRFKKIKPEAFEANRFYTVINKKSGEIVPMEVNFNFDDPNLIILPLAFGKRQGREFIWNDLLSLETGSLKLANGRVIEKTLYNRRTRQDEPALFVALTFERREVLDSSNIKPMNLIGVDRGENIPAVIALTDPEGCPLSRFKDSLGNPTHILRIGESYKEKQRTIQAKKEVEQRRAGGYSRKYASKAKNLADDMVRNTARDLLYYAVTQDAMLIFENLSRGFGRQGKRTFMAERQYTRMEDWLTAKLAYEGLPSKTYLSKTLAQYTSKTCSNCGFTITSADYDRVLEKLKKTATGWMTTINGKELKVEGQITYYNRYKRQNVVKDLSVELDRLSEESVNNDISSWDKGRSGEALSLLKKRFSHRPVQEKFVCLNCGFETHADEQAALNIARSWLFLRSQEYKKYQTNKTTGNTDKRAFVETWQSFYRKKLKEVWKPAV

SEQ ID NO: 45959 - protein, 977 aa, synthetic construct
  REGION 1..977: note = engineered CasX variant
QEIKRINKIRRRLVKDSNTKKAGKTGPMKTLLVRVMTPDLRERLENLRKKPENIPQPISNTSRANLNKLLTDYTEMKKAILHVYWEEFQKDPVGLMSRVAQPASKKIDQNKLKPEMDEKGNLTTAGFACSQCGQPLFVYKLEQVSEKGKAYTNYFGRCNVAEHEKLILLAQLKPEKDSDEAVTYSLGKFGQRALDFYSIHVTKESTHPVKPLAQIAGNRYASPVGKALSDACMGTIASFLSKYQDIIIEHQKVVKGNQKRLESLRELAGKENLEYPSVTLPPQPHTKEGVDAYNEVIARVRMWVNLNLWQKLKLSRDDAKPLLRLKGFPSFPLVERQANEVDWWDMVCNVKKLINEKKEDGKVFWQNLAGYKRQEALRPYLSSEEDRKKGKKFARYQLGDLLLHLEKKHPEDWGKVYDEAWERIDKKVEGLSKHIKLEEERRSEDAQSKAALTDWLRAKASFVIEGLKEADKDEFCRCELKLQKWYGDLRGKPFAIEAENSILDISGFSKQYNCAFIWQKDGVKKLNLYLIINYFKGGKLRFKKIKPEAFEANRFYTVINKKSGEIVPMEVNFNFDDPNLIILPLAFGKRQGREFIWNDLLSLETGSLKLANGRVIEKTLYNRRTRQDEPALFVALTFERREVLDSSNIKPMNLIGVDRGENIPAVIALTDPEGCPLSRFKDSLGNPTHILRIGESYKEKQRTIQAKKEVEQRRAGGYSRKYASKAKNLADDMVRNTARDLLYYAVTQDAMLIFENLSRGFGRQGKRTFMAERQYTRMEDWLTAKLAYEGLPSKTYLSKTLAQYTSKTCSNCGFTITSADYDRVLEKLKKTATGWMTTINGKELKVEGQITYYNRYKRQNVVKDLSVELDRLSEESVNNDISSWDKGRSGEALSLLKKRFSHRPVQEKFVCLNCGFETHADEQAALNIARSWLFLRSQEYKKYQTNKTTGNTDKRAFVETWQSFYRKKLKEVWKPAV

SEQ ID NO: 45960 - protein, 979 aa, synthetic construct
  REGION 1..979: note = engineered CasX variant
QEIKRINKIRRRLVKDSNTKKAGKTGPMKTLLVRVMTPDLRERLENLRKKPENIPQPISNTSRANLNKLLTDYTEMKKAILHVYWEEFQKDPVGLMSRVAQPASKKIDQNKLKPEMDEKGNLTTAGFACSQCGQPLFVYKLEQVSEKGKAYTNYFGRCNVAEHEKLILLAQLKPEKDSDEAVTYSLGKFGQRALDFYSIHVTKESTHPVKPLAQIAGNRYASYPVGKALSDACMGTIASFLSKYQDIIIEHQKVVKGNQKRLESLRELAGKENLEYPSVTLPPQPHTKEGVDAYNEVIARVRMWVNLNLWQKLKLSRDDAKPLLRLKGFPSFPLVERQANEVDWWDMVCNVKKLINEKKEDGKVFWQNLAGYKRQEALRPYLSSEEDRKKGKKFARYQLGDLLLHLEKKHGERDWGKVYDEAWERIDKKVEGLSKHIKLEEERRSEDAQSKAALTDWLRAKASFVIEGLKEADKDEFCRCELKLQKWYGDLRGKPFAIEAENSILDISGFSKQYNCAFIWQKDGVKKLNLYLIINYFKGGKLRFKKIKPEAFEANRFYTVINKKSGEIVPMEVNFNFDDPNLIILPLAFGKRQGREFIWNDLLSLETGSLKLANGRVIEKTLYNRRTRQDEPALFVALTFERREVLDSSNIKPMNLIGVDRGENIPAVIALTDPEGCPLSRFKDSLGNPTHILRIGESYKEKQRTIQAKKEVEQRRAGGYSRKYASKAKNLADDMVRNTARDLLYYAVTQDAMLIFENLSRGFGRQGKRTFMAERQYTRMEDWLTAKLAYEGLPSKTYLSKTLAQYTSKTCSNCGFTITSADYDRVLEKLKKTATGWMTTINGKELKVEGQITYYNRYKRQNVVKDLSVELDRLSEESVNNDISSWDKGRSGEALSLLKKRFSHRPVQEKFVCLNCGFETHADEQAALNIARSWLFLRSQEYKKYQTNKTTGNTDKRAFVETWQSFYRKKLKEVWKPAV

SEQ ID NO: 45961 - protein, 979 aa, synthetic construct
  REGION 1..979: note = engineered CasX variant
QEIKRINKIRRRLVKDSNTKKAGKTGPMKTLLVRVMTPDLRERLENLRKKPENIPQPISNTSRANLNKLLTDYTEMKKAILHVYWEEFQKDPVGLMSRVAQPASKKIDQNKLKPEMDEKGNLTTAGFACSQCGQPLFVYKLEQVSEKGKAYTNYFGRCNVAEHEKLILLAQLKPEKDSDEAVTYSLGKFGQRALDFYSIHVTKESTHPVKPLAQIAGNRYASHPVGKALSDACMGTIASFLSKYQDIIIEHQKVVKGNQKRLESLRELAGKENLEYPSVTLPPQPHTKEGVDAYNEVIARVRMWVNLNLWQKLKLSRDDAKPLLRLKGFPSFPLVERQANEVDWWDMVCNVKKLINEKKEDGKVFWQNLAGYKRQEALRPYLSSEEDRKKGKKFARYQLGDLLLHLEKKHGERDWGKVYDEAWERIDKKVEGLSKHIKLEEERRSEDAQSKAALTDWLRAKASFVIEGLKEADKDEFCRCELKLQKWYGDLRGKPFAIEAENSILDISGFSKQYNCAFIWQKDGVKKLNLYLIINYFKGGKLRFKKIKPEAFEANRFYTVINKKSGEIVPMEVNFNFDDPNLIILPLAFGKRQGREFIWNDLLSLETGSLKLANGRVIEKTLYNRRTRQDEPALFVALTFERREVLDSSNIKPMNLIGVDRGENIPAVIALTDPEGCPLSRFKDSLGNPTHILRIGESYKEKQRTIQAKKEVEQRRAGGYSRKYASKAKNLADDMVRNTARDLLYYAVTQDAMLIFENLSRGFGRQGKRTFMAERQYTRMEDWLTAKLAYEGLPSKTYLSKTLAQYTSKTCSNCGFTITSADYDRVLEKLKKTATGWMTTINGKELKVEGQITYYNRYKRQNVVKDLSVELDRLSEESVNNDISSWDKGRSGEALSLLKKRFSHRPVQEKFVCLNCGFETHADEQAALNIARSWLFLRSQEYKKYQTNKTTGNTDKRAFVETWQSFYRKKLKEVWKPAV

SEQ ID NO: 45962 - protein, 979 aa, synthetic construct
  REGION 1..979: note = engineered CasX variant
QEIKRINKIRRRLVKDSNTKKAGKTGPMKTLLVRVMTPDLRERLENLRKKPENIPQPISNTSRANLNKLLTDYTEMKKAILHVYWEEFQKDPVGLMSRVAQPASKKIDQNKLKPEMDEKGNLTTAGFACSQCGQPLFVYKLEQVSEKGKAYTNYFGRCNVAEHEKLILLAQLKPEKDSDEAVTYSLGKFGQRALDFYSIHVTKESTHPVKPLAQIAGNRYASSPVGKALSDACMGTIASFLSKYQDIIIEHQKVVKGNQKRLESLRELAGKENLEYPSVTLPPQPHTKEGVDAYNEVIARVRMWVNLNLWQKLKLSRDDAKPLLRLKGFPSFPLVERQANEVDWWDMVCNVKKLINEKKEDGKVFWQNLAGYKRQEALRPYLSSEEDRKKGKKFARYQLGDLLLHLEKKHGERDWGKVYDEAWERIDKKVEGLSKHIKLEEERRSEDAQSKAALTDWLRAKASFVIEGLKEADKDEFCRCELKLQKWYGDLRGKPFAIEAENSILDISGFSKQYNCAFIWQKDGVKKLNLYLIINYFKGGKLRFKKIKPEAFEANRFYTVINKKSGEIVPMEVNFNFDDPNLIILPLAFGKRQGREFIWNDLLSLETGSLKLANGRVIEKTLYNRRTRQDEPALFVALTFERREVLDSSNIKPMNLIGVDRGENIPAVIALTDPEGCPLSRFKDSLGNPTHILRIGESYKEKQRTIQAKKEVEQRRAGGYSRKYASKAKNLADDMVRNTARDLLYYAVTQDAMLIFENLSRGFGRQGKRTFMAERQYTRMEDWLTAKLAYEGLPSKTYLSKTLAQYTSKTCSNCGFTITSADYDRVLEKLKKTATGWMTTINGKELKVEGQITYYNRYKRQNVVKDLSVELDRLSEESVNNDISSWDKGRSGEALSLLKKRFSHRPVQEKFVCLNCGFETHADEQAALNIARSWLFLRSQEYKKYQTNKTTGNTDKRAFVETWQSFYRKKLKEVWKPAV

SEQ ID NO: 45963 - protein, 979 aa, synthetic construct
  REGION 1..979: note = engineered CasX variant
QEIKRINKIRRRLVKDSNTKKAGKTGPMKTLLVRVMTPDLRERLENLRKKPENIPQPISNTSRANLNKLLTDYTEMKKAILHVYWEEFQKDPVGLMSRVAQPASKKIDQNKLKPEMDEKGNLTTAGFACSQCGQPLFVYKLEQVSEKGKAYTNYFGRCNVAEHEKLILLAQLKPEKDSDEAVTYSLGKFGQRALDFYSIHVTKESTHPVKPLAQIAGNRYASTPVGKALSDACMGTIASFLSKYQDIIIEHQKVVKGNQKRLESLRELAGKENLEYPSVTLPPQPHTKEGVDAYNEVIARVRMWVNLNLWQKLKLSRDDAKPLLRLKGFPSFPLVERQANEVDWWDMVCNVKKLINEKKEDGKVFWQNLAGYKRQEALRPYLSSEEDRKKGKKFARYQLGDLLLHLEKKHGERDWGKVYDEAWERIDKKVEGLSKHIKLEEERRSEDAQSKAALTDWLRAKASFVIEGLKEADKDEFCRCELKLQKWYGDLRGKPFAIEAENSILDISGFSKQYNCAFIWQKDGVKKLNLYLIINYFKGGKLRFKKIKPEAFEANRFYTVINKKSGEIVPMEVNFNFDDPNLIILPLAFGKRQGREFIWNDLLSLETGSLKLANGRVIEKTLYNRRTRQDEPALFVALTFERREVLDSSNIKPMNLIGVDRGENIPAVIALTDPEGCPLSRFKDSLGNPTHILRIGESYKEKQRTIQAKKEVEQRRAGGYSRKYASKAKNLADDMVRNTARDLLYYAVTQDAMLIFENLSRGFGRQGKRTFMAERQYTRMEDWLTAKLAYEGLPSKTYLSKTLAQYTSKTCSNCGFTITSADYDRVLEKLKKTATGWMTTINGKELKVEGQITYYNRYKRQNVVKDLSVELDRLSEESVNNDISSWDKGRSGEALSLLKKRFSHRPVQEKFVCLNCGFETHADEQAALNIARSWLFLRSQEYKKYQTNKTTGNTDKRAFVETWQSFYRKKLKEVWKPAV

SEQ ID NO: 45964 - protein, 979 aa, synthetic construct
  REGION 1..979: note = engineered CasX variant
QEIKRINKIRRRLVKDSNTKKAGKTGPMKTLLVRVMTPDLRERLENLRKKPENIPQPISNTSRANLNKLLTDYTEMKKAILHVYWEEFQKDPVGLMSRVAQPASKKIDQNKLKPEMDEKGNLTTAGFACSQCGQPLFVYKLEQVSEKGKAYTNYFGRCNVAEHEKLILLAQLKPEKDSDEAVTYSLGKFGQRALDFYSIHVTKESTHPVKPLAQIAGNRYASAPVGKALSDACMGTIASFLSKYQDIIIEHQKVVKGNQKRLESLRELAGKENLEYPSVTLPPQPHTKEGVDAYNEVIARVRMWVNLNLWQKLKLSRDDAKPLLRLKGFPSFPLVERQANEVDWWDMVCNVKKLINEKKEDGKVFWQNLAGYKRQEALRPYLSSEEDRKKGKKFARYQLGDLLLHLEKKHGERDWGKVYDEAWERIDKKVEGLSKHIKLEEERRSEDAQSKAALTDWLRAKASFVIEGLKEADKDEFCRCELKLQKWYGDLRGKPFAIEAENSILDISGFSKQYNCAFIWQKDGVKKLNLYLIINYFKGGKLRFKKIKPEAFEANRFYTVINKKSGEIVPMEVNFNFDDPNLIILPLAFGKRQGREFIWNDLLSLETGSLKLANGRVIEKTLYNRRTRQDEPALFVALTFERREVLDSSNIKPMNLIGVDRGENIPAVIALTDPEGCPLSRFKDSLGNPTHILRIGESYKEKQRTIQAKKEVEQRRAGGYSRKYASKAKNLADDMVRNTARDLLYYAVTQDAMLIFENLSRGFGRQGKRTFMAERQYTRMEDWLTAKLAYEGLPSKTYLSKTLAQYTSKTCSNCGFTITSADYDRVLEKLKKTATGWMTTINGKELKVEGQITYYNRYKRQNVVKDLSVELDRLSEESVNNDISSWDKGRSGEALSLLKKRFSHRPVQEKFVCLNCGFETHADEQAALNIARSWLFLRSQEYKKYQTNKTTGNTDKRAFVETWQSFYRKKLKEVWKPAV

SEQ ID NO: 45965 - protein, 979 aa, synthetic construct
  REGION 1..979: note = engineered CasX variant
QEIKRINKIRRRLVKDSNTKKAGKTGPMKTLLVRVMTPDLRERLENLRKKPENIPQPISNTSRANLNKLLTDYTEMKKAILHVYWEEFQKDPVGLMSRVAQPASKKIDQNKLKPEMDEKGNLTTAGFACSQCGQPLFVYKLEQVSEKGKAYTNYFGRCNVAEHEKLILLAQLKPEKDSDEAVTYSLGKFGQRALDFYSIHVTKESTHPVKPLAQIAGNRYASVPVGKALSDACMGTIASFLSKYQDIIIEHQKVVKGNQKRLESLRELAGKENLEYPSVTLPPQPHTKEGVDAYNEVIARVRMWVNLNLWQKLKLSRDDAKPLLRLKGFPSFPLVERQANEVDWWDMVCNVKKLINEKKEDGKVFWQNLAGYKRQEALRPYLSSEEDRKKGKKFARYQLGDLLLHLEKKHGERDWGKVYDEAWERIDKKVEGLSKHIKLEEERRSEDAQSKAALTDWLRAKASFVIEGLKEADKDEFCRCELKLQKWYGDLRGKPFAIEAENSILDISGFSKQYNCAFIWQKDGVKKLNLYLIINYFKGGKLRFKKIKPEAFEANRFYTVINKKSGEIVPMEVNFNFDDPNLIILPLAFGKRQGREFIWNDLLSLETGSLKLANGRVIEKTLYNRRTRQDEPALFVALTFERREVLDSSNIKPMNLIGVDRGENIPAVIALTDPEGCPLSRFKDSLGNPTHILRIGESYKEKQRTIQAKKEVEQRRAGGYSRKYASKAKNLADDMVRNTARDLLYYAVTQDAMLIFENLSRGFGRQGKRTFMAERQYTRMEDWLTAKLAYEGLPSKTYLSKTLAQYTSKTCSNCGFTITSADYDRVLEKLKKTATGWMTTINGKELKVEGQITYYNRYKRQNVVKDLSVELDRLSEESVNNDISSWDKGRSGEALSLLKKRFSHRPVQEKFVCLNCGFETHADEQAALNIARSWLFLRSQEYKKYQTNKTTGNTDKRAFVETWQSFYRKKLKEVWKPAV

SEQ ID NO: 45966 - protein, 979 aa, synthetic construct
  REGION 1..979: note = engineered CasX variant
QEIKRINKIRRRLVKDSNTKKAGKTGPMKTLLVRVMTPDLRERLENLRKKPENIPQPISNTSRANLNKLLTDYTEMKKAILHVYWEEFQKDPVGLMSRVAQPASKKIDQNKLKPEMDEKGNLTTAGFACSQCGQPLFVYKLEQVSEKGKAYTNYFGRCNVAEHEKLIKLAQLKPEKDSDEAVTYSLGKFGQRALDFYSIHVTKESTHPVKPLAQIAGNRYASGPVGKALSDACMGTIASFLSKYQDIIIEHQKVVKGNQKRLESLRELAGKENLEYPSVTLPPQPHTKEGVDAYNEVIARVRMWVNLNLWQKLKLSRDDAKPLLRLKGFPSFPLVERQANEVDWWDMVCNVKKLINEKKEDGKVFWQNLAGYKRQEALRPYLSSEEDRKKGKKFARYQLGDLLLHLEKKHGERDWGKVYDEAWERIDKKVEGLSKHIKLEEERRSEDAQSKAALTDWLRAKASFVIEGLKEADKDEFCRCELKLQKWYGDLRGKPFAIEAENSILDISGFSKQYNCAFIWQKDGVKKLNLYLIINYFKGGKLRFKKIKPEAFEANRFYTVINKKSGEIVPMEVNFNFDDPNLIILPLAFGKRQGREFIWNDLLSLETGSLKLANGRVIEKTLYNRRTRQDEPALFVALTFERREVLDSSNIKPMNLIGVDRGENIPAVIALTDPEGCPLSRFKDSLGNPTHILRIGESYKEKQRTIQAKKEVEQRRAGGYSRKYASKAKNLADDMVRNTARDLLYYAVTQDAMLIFENLSRGFGRQGKRTFMAERQYTRMEDWLTAKLAYEGLPSKTYLSKTLAQYTSKTCSNCGFTITSADYDRVLEKLKKTATGWMTTINGKELKVEGQITYYNRYKRQNVVKDLSVELDRLSEESVNNDISSWDKGRSGEALSLLKKRFSHRPVQEKFVCLNCGFETHADEQAALNIARSWLFLRSQEYKKYQTNKTTGNTDKRAFVETWQSFYRKKLKEVWKPAV

SEQ ID NO: 45967 - protein, 978 aa, synthetic construct
  REGION 1..978: note = engineered CasX variant
QEIKRINKIRRRLVKDSNTKKAGKTGPMKTLLVRVMTPDLRERLENLRKKPENIPQPISNTSRANLNKLLTDYTEMKKAILHVYWEEFQKDPVGLMSRVAQPASKKIDQNKLKPEMDEKGNLTTAGFACSQCGQPLFVYKLEQVSEKGKAYTNYFGRCNVAEHEKLILLAQLKPEKDSDEAVTYSLGKFGQRALDFYSIHVTKESTHPVKPLAQIAGNRYASPVGKALSDACMGTIASFLSKYQDIIIEHQKVVKGNQKRLESLRELAGKENLEYPSVTLPPQPHTKEGVDAYNEVIARVRMWVNLNLWQKLKLSRDDAKPLLRLKGFPSFPLVERQANEVDWWDMVCNVKKLINEKKEDGKVFWQNLAGYKRQEALRPYLSSEEDRKKGKKFARYQLGDLLLHLEKKHGERDWGKVYDEAWERIDKKVEGLSKHIKLEEERRSEDAQSKAALTDWLRAKASFVIEGLKEADKDEFCRCELKLQKWYGDLRGKPFAIEAENSILDISGFSKQYNCAFIWQKDGVKKLNLYLIINYFKGGKLRFKKIKPEAFEANRFYTVINKKSGEIVPMEVNFNFDDPNLIILPLAFGKRQGREFIWNDLLSLETGSLKLANGRVIEKTLYNRRTRQDEPALFVALTFERREVLDSSNIKPMNLIGVDRGENIPAVIALTDPEGCPLSRFKDSLGNPTHILRIGESYKEKQRTIQAKKEVEQRRAGGYSRKYASKAKNLADDMVRNTARDLLYYAVTQDAMLIFENLSRGFGRQGKRTFMAERQYTRMEDWLTAKLAYEGLPSKTYLSKTLAQYTSKTCSNCGFTITSADYDRVLEKLKKTATGWMTTINGKELKVEGQITYYNRYKRQNVVKDLSVELDRLSEESVNNDISSWDKGRSGEALSLLKKRFSHRPVQEKFVCLNCGFETHADEQAALNIARSWLFLRSQEYKKYQTNKTTGNTDKRAFVETWQSFYRKKLKEVWKPAV

SEQ ID NO: 45968 - protein, 979 aa, synthetic construct
  REGION 1..979: note = engineered CasX variant
QEIKRINKIRRRLVKDSNTKKAGKTGPMKTLLVRVMTPDLRERLENLRKKPENIPQPISNTSRANLNKLLTDYTEMKKAILHVYWEEFQKDPVGLMSRVAQPASKKIDQNKLKPEMDEKGNLTTAGFACSQCGQPLFVYKLEQVSEKGKAYTNYFGRCNVAEHEKLILLAQLKPEKDSDEAVTYSLGKFGQRALDFYSIHVTKESTHPVKPLAQIAGNRYASYPVGKALSDACMGTIASFLSKYQDIIIEHQKVVKGNQKRLESLRELAGKENLEYPSVTLPPQPHTKEGVDAYNEVIARVRMWVNLNLWQKLKLSRDDAKPLLRLKGFPSFPLVERQANEVDWWDMVCNVKKLINEKKEDGKVFWQNLAGYKRQEALRPYLSSEEDRKKGKKFARYQLGDLLLHLEKKHGEYDWGKVYDEAWERIDKKVEGLSKHIKLEEERRSEDAQSKAALTDWLRAKASFVIEGLKEADKDEFCRCELKLQKWYGDLRGKPFAIEAENSILDISGFSKQYNCAFIWQKDGVKKLNLYLIINYFKGGKLRFKKIKPEAFEANRFYTVINKKSGEIVPMEVNFNFDDPNLIILPLAFGKRQGREFIWNDLLSLETGSLKLANGRVIEKTLYNRRTRQDEPALFVALTFERREVLDSSNIKPMNLIGVDRGENIPAVIALTDPEGCPLSRFKDSLGNPTHILRIGESYKEKQRTIQAKKEVEQRRAGGYSRKYASKAKNLADDMVRNTARDLLYYAVTQDAMLIFENLSRGFGRQGKRTFMAERQYTRMEDWLTAKLAYEGLPSKTYLSKTLAQYTSKTCSNCGFTITSADYDRVLEKLKKTATGWMTTINGKELKVEGQITYYNRYKRQNVVKDLSVELDRLSEESVNNDISSWDKGRSGEALSLLKKRFSHRPVQEKFVCLNCGFETHADEQAALNIARSWLFLRSQEYKKYQTNKTTGNTDKRAFVETWQSFYRKKLKEVWKPAV

SEQ ID NO: 45969 - protein, 979 aa, synthetic construct
  REGION 1..979: note = engineered CasX variant
QEIKRINKIRRRLVKDSNTKKAGKTGPMKTLLVRVMTPDLRERLENLRKKPENIPQPISNTSRANLNKLLTDYTEMKKAILHVYWEEFQKDPVGLMSRVAQPASKKIDQNKLKPEMDEKGNLTTAGFACSQCGQPLFVYKLEQVSEKGKAYTNYFGRCNVAEHEKLILLAQLKPEKDSDEAVTYSLGKFGQRALDFYSIHVTKESTHPVKPLAQIAGNRYASHPVGKALSDACMGTIASFLSKYQDIIIEHQKVVKGNQKRLESLRELAGKENLEYPSVTLPPQPHTKEGVDAYNEVIARVRMWVNLNLWQKLKLSRDDAKPLLRLKGFPSFPLVERQANEVDWWDMVCNVKKLINEKKEDGKVFWQNLAGYKRQEALRPYLSSEEDRKKGKKFARYQLGDLLLHLEKKHGEYDWGKVYDEAWERIDKKVEGLSKHIKLEEERRSEDAQSKAALTDWLRAKASFVIEGLKEADKDEFCRCELKLQKWYGDLRGKPFAIEAENSILDISGFSKQYNCAFIWQKDGVKKLNLYLIINYFKGGKLRFKKIKPEAFEANRFYTVINKKSGEIVPMEVNFNFDDPNLIILPLAFGKRQGREFIWNDLLSLETGSLKLANGRVIEKTLYNRRTRQDEPALFVALTFERREVLDSSNIKPMNLIGVDRGENIPAVIALTDPEGCPLSRFKDSLGNPTHILRIGESYKEKQRTIQAKKEVEQRRAGGYSRKYASKAKNLADDMVRNTARDLLYYAVTQDAMLIFENLSRGFGRQGKRTFMAERQYTRMEDWLTAKLAYEGLPSKTYLSKTLAQYTSKTCSNCGFTITSADYDRVLEKLKKTATGWMTTINGKELKVEGQITYYNRYKRQNVVKDLSVELDRLSEESVNNDISSWDKGRSGEALSLLKKRFSHRPVQEKFVCLNCGFETHADEQAALNIARSWLFLRSQEYKKYQTNKTTGNTDKRAFVETWQSFYRKKLKEVWKPAV

SEQ ID NO: 45970 - protein, 979 aa, synthetic construct
  REGION 1..979: note = engineered CasX variant
QEIKRINKIRRRLVKDSNTKKAGKTGPMKTLLVRVMTPDLRERLENLRKKPENIPQPISNTSRANLNKLLTDYTEMKKAILHVYWEEFQKDPVGLMSRVAQPASKKIDQNKLKPEMDEKGNLTTAGFACSQCGQPLFVYKLEQVSEKGKAYTNYFGRCNVAEHEKLILLAQLKPEKDSDEAVTYSLGKFGQRALDFYSIHVTKESTHPVKPLAQIAGNRYASSPVGKALSDACMGTIASFLSKYQDIIIEHQKVVKGNQKRLESLRELAGKENLEYPSVTLPPQPHTKEGVDAYNEVIARVRMWVNLNLWQKLKLSRDDAKPLLRLKGFPSFPLVERQANEVDWWDMVCNVKKLINEKKEDGKVFWQNLAGYKRQEALRPYLSSEEDRKKGKKFARYQLGDLLLHLEKKHGEYDWGKVYDEAWERIDKKVEGLSKHIKLEEERRSEDAQSKAALTDWLRAKASFVIEGLKEADKDEFCRCELKLQKWYGDLRGKPFAIEAENSILDISGFSKQYNCAFIWQKDGVKKLNLYLIINYFKGGKLRFKKIKPEAFEANRFYTVINKKSGEIVPMEVNFNFDDPNLIILPLAFGKRQGREFIWNDLLSLETGSLKLANGRVIEKTLYNRRTRQDEPALFVALTFERREVLDSSNIKPMNLIGVDRGENIPAVIALTDPEGCPLSRFKDSLGNPTHILRIGESYKEKQRTIQAKKEVEQRRAGGYSRKYASKAKNLADDMVRNTARDLLYYAVTQDAMLIFENLSRGFGRQGKRTFMAERQYTRMEDWLTAKLAYEGLPSKTYLSKTLAQYTSKTCSNCGFTITSADYDRVLEKLKKTATGWMTTINGKELKVEGQITYYNRYKRQNVVKDLSVELDRLSEESVNNDISSWDKGRSGEALSLLKKRFSHRPVQEKFVCLNCGFETHADEQAALNIARSWLFLRSQEYKKYQTNKTTGNTDKRAFVETWQSFYRKKLKEVWKPAV

SEQ ID NO: 45971 - protein, 979 aa, synthetic construct
  REGION 1..979: note = engineered CasX variant
QEIKRINKIRRRLVKDSNTKKAGKTGPMKTLLVRVMTPDLRERLENLRKKPENIPQPISNTSRANLNKLLTDYTEMKKAILHVYWEEFQKDPVGLMSRVAQPASKKIDQNKLKPEMDEKGNLTTAGFACSQCGQPLFVYKLEQVSEKGKAYTNYFGRCNVAEHEKLILLAQLKPEKDSDEAVTYSLGKFGQRALDFYSIHVTKESTHPVKPLAQIAGNRYASTPVGKALSDACMGTIASFLSKYQDIIIEHQKVVKGNQKRLESLRELAGKENLEYPSVTLPPQPHTKEGVDAYNEVIARVRMWVNLNLWQKLKLSRDDAKPLLRLKGFPSFPLVERQANEVDWWDMVCNVKKLINEKKEDGKVFWQNLAGYKRQEALRPYLSSEEDRKKGKKFARYQLGDLLLHLEKKHGEYDWGKVYDEAWERIDKKVEGLSKHIKLEEERRSEDAQSKAALTDWLRAKASFVIEGLKEADKDEFCRCELKLQKWYGDLRGKPFAIEAENSILDISGFSKQYNCAFIWQKDGVKKLNLYLIINYFKGGKLRFKKIKPEAFEANRFYTVINKKSGEIVPMEVNFNFDDPNLIILPLAFGKRQGREFIWNDLLSLETGSLKLANGRVIEKTLYNRRTRQDEPALFVALTFERREVLDSSNIKPMNLIGVDRGENIPAVIALTDPEGCPLSRFKDSLGNPTHILRIGESYKEKQRTIQAKKEVEQRRAGGYSRKYASKAKNLADDMVRNTARDLLYYAVTQDAMLIFENLSRGFGRQGKRTFMAERQYTRMEDWLTAKLAYEGLPSKTYLSKTLAQYTSKTCSNCGFTITSADYDRVLEKLKKTATGWMTTINGKELKVEGQITYYNRYKRQNVVKDLSVELDRLSEESVNNDISSWDKGRSGEALSLLKKRFSHRPVQEKFVCLNCGFETHADEQAALNIARSWLFLRSQEYKKYQTNKTTGNTDKRAFVETWQSFYRKKLKEVWKPAV

SEQ ID NO: 45972 - protein, 979 aa, synthetic construct
  REGION 1..979: note = engineered CasX variant
QEIKRINKIRRRLVKDSNTKKAGKTGPMKTLLVRVMTPDLRERLENLRKKPENIPQPISNTSRANLNKLLTDYTEMKKAILHVYWEEFQKDPVGLMSRVAQPASKKIDQNKLKPEMDEKGNLTTAGFACSQCGQPLFVYKLEQVSEKGKAYTNYFGRCNVAEHEKLILLAQLKPEKDSDEAVTYSLGKFGQRALDFYSIHVTKESTHPVKPLAQIAGNRYASAPVGKALSDACMGTIASFLSKYQDIIIEHQKVVKGNQKRLESLRELAGKENLEYPSVTLPPQPHTKEGVDAYNEVIARVRMWVNLNLWQKLKLSRDDAKPLLRLKGFPSFPLVERQANEVDWWDMVCNVKKLINEKKEDGKVFWQNLAGYKRQEALRPYLSSEEDRKKGKKFARYQLGDLLLHLEKKHGEYDWGKVYDEAWERIDKKVEGLSKHIKLEEERRSEDAQSKAALTDWLRAKASFVIEGLKEADKDEFCRCELKLQKWYGDLRGKPFAIEAENSILDISGFSKQYNCAFIWQKDGVKKLNLYLIINYFKGGKLRFKKIKPEAFEANRFYTVINKKSGEIVPMEVNFNFDDPNLIILPLAFGKRQGREFIWNDLLSLETGSLKLANGRVIEKTLYNRRTRQDEPALFVALTFERREVLDSSNIKPMNLIGVDRGENIPAVIALTDPEGCPLSRFKDSLGNPTHILRIGESYKEKQRTIQAKKEVEQRRAGGYSRKYASKAKNLADDMVRNTARDLLYYAVTQDAMLIFENLSRGFGRQGKRTFMAERQYTRMEDWLTAKLAYEGLPSKTYLSKTLAQYTSKTCSNCGFTITSADYDRVLEKLKKTATGWMTTINGKELKVEGQITYYNRYKRQNVVKDLSVELDRLSEESVNNDISSWDKGRSGEALSLLKKRFSHRPVQEKFVCLNCGFETHADEQAALNIARSWLFLRSQEYKKYQTNKTTGNTDKRAFVETWQSFYRKKLKEVWKPAV

SEQ ID NO: 45973 - protein, 979 aa, synthetic construct
  REGION 1..979: note = engineered CasX variant
QEIKRINKIRRRLVKDSNTKKAGKTGPMKTLLVRVMTPDLRERLENLRKKPENIPQPISNTSRANLNKLLTDYTEMKKAILHVYWEEFQKDPVGLMSRVAQPASKKIDQNKLKPEMDEKGNLTTAGFACSQCGQPLFVYKLEQVSEKGKAYTNYFGRCNVAEHEKLILLAQLKPEKDSDEAVTYSLGKFGQRALDFYSIHVTKESTHPVKPLAQIAGNRYASVPVGKALSDACMGTIASFLSKYQDIIIEHQKVVKGNQKRLESLRELAGKENLEYPSVTLPPQPHTKEGVDAYNEVIARVRMWVNLNLWQKLKLSRDDAKPLLRLKGFPSFPLVERQANEVDWWDMVCNVKKLINEKKEDGKVFWQNLAGYKRQEALRPYLSSEEDRKKGKKFARYQLGDLLLHLEKKHGEYDWGKVYDEAWERIDKKVEGLSKHIKLEEERRSEDAQSKAALTDWLRAKASFVIEGLKEADKDEFCRCELKLQKWYGDLRGKPFAIEAENSILDISGFSKQYNCAFIWQKDGVKKLNLYLIINYFKGGKLRFKKIKPEAFEANRFYTVINKKSGEIVPMEVNFNFDDPNLIILPLAFGKRQGREFIWNDLLSLETGSLKLANGRVIEKTLYNRRTRQDEPALFVALTFERREVLDSSNIKPMNLIGVDRGENIPAVIALTDPEGCPLSRFKDSLGNPTHILRIGESYKEKQRTIQAKKEVEQRRAGGYSRKYASKAKNLADDMVRNTARDLLYYAVTQDAMLIFENLSRGFGRQGKRTFMAERQYTRMEDWLTAKLAYEGLPSKTYLSKTLAQYTSKTCSNCGFTITSADYDRVLEKLKKTATGWMTTINGKELKVEGQITYYNRYKRQNVVKDLSVELDRLSEESVNNDISSWDKGRSGEALSLLKKRFSHRPVQEKFVCLNCGFETHADEQAALNIARSWLFLRSQEYKKYQTNKTTGNTDKRAFVETWQSFYRKKLKEVWKPAV

SEQ ID NO: 45974 - protein, 979 aa, synthetic construct
  REGION 1..979: note = engineered CasX variant
QEIKRINKIRRRLVKDSNTKKAGKTGPMKTLLVRVMTPDLRERLENLRKKPENIPQPISNTSRANLNKLLTDYTEMKKAILHVYWEEFQKDPVGLMSRVAQPASKKIDQNKLKPEMDEKGNLTTAGFACSQCGQPLFVYKLEQVSEKGKAYTNYFGRCNVAEHEKLIKLAQLKPEKDSDEAVTYSLGKFGQRALDFYSIHVTKESTHPVKPLAQIAGNRYASGPVGKALSDACMGTIASFLSKYQDIIIEHQKVVKGNQKRLESLRELAGKENLEYPSVTLPPQPHTKEGVDAYNEVIARVRMWVNLNLWQKLKLSRDDAKPLLRLKGFPSFPLVERQANEVDWWDMVCNVKKLINEKKEDGKVFWQNLAGYKRQEALRPYLSSEEDRKKGKKFARYQLGDLLLHLEKKHGEYDWGKVYDEAWERIDKKVEGLSKHIKLEEERRSEDAQSKAALTDWLRAKASFVIEGLKEADKDEFCRCELKLQKWYGDLRGKPFAIEAENSILDISGFSKQYNCAFIWQKDGVKKLNLYLIINYFKGGKLRFKKIKPEAFEANRFYTVINKKSGEIVPMEVNFNFDDPNLIILPLAFGKRQGREFIWNDLLSLETGSLKLANGRVIEKTLYNRRTRQDEPALFVALTFERREVLDSSNIKPMNLIGVDRGENIPAVIALTDPEGCPLSRFKDSLGNPTHILRIGESYKEKQRTIQAKKEVEQRRAGGYSRKYASKAKNLADDMVRNTARDLLYYAVTQDAMLIFENLSRGFGRQGKRTFMAERQYTRMEDWLTAKLAYEGLPSKTYLSKTLAQYTSKTCSNCGFTITSADYDRVLEKLKKTATGWMTTINGKELKVEGQITYYNRYKRQNVVKDLSVELDRLSEESVNNDISSWDKGRSGEALSLLKKRFSHRPVQEKFVCLNCGFETHADEQAALNIARSWLFLRSQEYKKYQTNKTTGNTDKRAFVETWQSFYRKKLKEVWKPAV

SEQ ID NO: 45975 - protein, 978 aa, synthetic construct
  REGION 1..978: note = engineered CasX variant
QEIKRINKIRRRLVKDSNTKKAGKTGPMKTLLVRVMTPDLRERLENLRKKPENIPQPISNTSRANLNKLLTDYTEMKKAILHVYWEEFQKDPVGLMSRVAQPASKKIDQNKLKPEMDEKGNLTTAGFACSQCGQPLFVYKLEQVSEKGKAYTNYFGRCNVAEHEKLILLAQLKPEKDSDEAVTYSLGKFGQRALDFYSIHVTKESTHPVKPLAQIAGNRYASPVGKALSDACMGTIASFLSKYQDIIIEHQKVVKGNQKRLESLRELAGKENLEYPSVTLPPQPHTKEGVDAYNEVIARVRMWVNLNLWQKLKLSRDDAKPLLRLKGFPSFPLVERQANEVDWWDMVCNVKKLINEKKEDGKVFWQNLAGYKRQEALRPYLSSEEDRKKGKKFARYQLGDLLLHLEKKHGEYDWGKVYDEAWERIDKKVEGLSKHIKLEEERRSEDAQSKAALTDWLRAKASFVIEGLKEADKDEFCRCELKLQKWYGDLRGKPFAIEAENSILDISGFSKQYNCAFIWQKDGVKKLNLYLIINYFKGGKLRFKKIKPEAFEANRFYTVINKKSGEIVPMEVNFNFDDPNLIILPLAFGKRQGREFIWNDLLSLETGSLKLANGRVIEKTLYNRRTRQDEPALFVALTFERREVLDSSNIKPMNLIGVDRGENIPAVIALTDPEGCPLSRFKDSLGNPTHILRIGESYKEKQRTIQAKKEVEQRRAGGYSRKYASKAKNLADDMVRNTARDLLYYAVTQDAMLIFENLSRGFGRQGKRTFMAERQYTRMEDWLTAKLAYEGLPSKTYLSKTLAQYTSKTCSNCGFTITSADYDRVLEKLKKTATGWMTTINGKELKVEGQITYYNRYKRQNVVKDLSVELDRLSEESVNNDISSWDKGRSGEALSLLKKRFSHRPVQEKFVCLNCGFETHADEQAALNIARSWLFLRSQEYKKYQTNKTTGNTDKRAFVETWQSFYRKKLKEVWKPAV

SEQ ID NO: 45976 - protein, 978 aa, synthetic construct
  REGION 1..978: note = engineered CasX variant
QEIKRINKIRRRLVKDSNTKKAGKTGPMKTLLVRVMTPDLRERLENLRKKPENIPQPISNTSRANLNKLLTDYTEMKKAILHVYWEEFQKDPVGLMSRVAQPASKKIDQNKLKPEMDEKGNLTTAGFACSQCGQPLFVYKLEQVSEKGKAYTNYFGRCNVAEHEKLILLAQLKPEKDSDEAVTYSLGKFGQRALDFYSIHVTKESTHPVKPLAQIAGNRYASYPVGKALSDACMGTIASFLSKYQDIIIEHQKVVKGNQKRLESLRELAGKENLEYPSVTLPPQPHTKEGVDAYNEVIARVRMWVNLNLWQKLKLSRDDAKPLLRLKGFPSFPLVERQANEVDWWDMVCNVKKLINEKKEDGKVFWQNLAGYKRQEALRPYLSSEEDRKKGKKFARYQLGDLLLHLEKKHGEDWGDVYDEAWERIDKKVEGLSKHIKLEEERRSEDAQSKAALTDWLRAKASFVIEGLKEADKDEFCRCELKLQKWYGDLRGKPFAIEAENSILDISGFSKQYNCAFIWQKDGVKKLNLYLIINYFKGGKLRFKKIKPEAFEANRFYTVINKKSGEIVPMEVNFNFDDPNLIILPLAFGKRQGREFIWNDLLSLETGSLKLANGRVIEKTLYNRRTRQDEPALFVALTFERREVLDSSNIKPMNLIGVDRGENIPAVIALTDPEGCPLSRFKDSLGNPTHILRIGESYKEKQRTIQAKKEVEQRRAGGYSRKYASKAKNLADDMVRNTARDLLYYAVTQDAMLIFENLSRGFGRQGKRTFMAERQYTRMEDWLTAKLAYEGLPSKTYLSKTLAQYTSKTCSNCGFTITSADYDRVLEKLKKTATGWMTTINGKELKVEGQITYYNRYKRQNVVKDLSVELDRLSEESVNNDISSWDKGRSGEALSLLKKRFSHRPVQEKFVCLNCGFETHADEQAALNIARSWLFLRSQEYKKYQTNKTTGNTDKRAFVETWQSFYRKKLKEVWKPAV

SEQ ID NO: 45977 - protein, 978 aa, synthetic construct
  REGION 1..978: note = engineered CasX variant
QEIKRINKIRRRLVKDSNTKKAGKTGPMKTLLVRVMTPDLRERLENLRKKPENIPQPISNTSRANLNKLLTDYTEMKKAILHVYWEEFQKDPVGLMSRVAQPASKKIDQNKLKPEMDEKGNLTTAGFACSQCGQPLFVYKLEQVSEKGKAYTNYFGRCNVAEHEKLILLAQLKPEKDSDEAVTYSLGKFGQRALDFYSIHVTKESTHPVKPLAQIAGNRYASHPVGKALSDACMGTIASFLSKYQDIIIEHQKVVKGNQKRLESLRELAGKENLEYPSVTLPPQPHTKEGVDAYNEVIARVRMWVNLNLWQKLKLSRDDAKPLLRLKGFPSFPLVERQANEVDWWDMVCNVKKLINEKKEDGKVFWQNLAGYKRQEALRPYLSSEEDRKKGKKFARYQLGDLLLHLEKKHGEDWGDVYDEAWERIDKKVEGLSKHIKLEEERRSEDAQSKAALTDWLRAKASFVIEGLKEADKDEFCRCELKLQKWYGDLRGKPFAIEAENSILDISGFSKQYNCAFIWQKDGVKKLNLYLIINYFKGGKLRFKKIKPEAFEANRFYTVINKKSGEIVPMEVNFNFDDPNLIILPLAFGKRQGREFIWNDLLSLETGSLKLANGRVIEKTLYNRRTRQDEPALFVALTFERREVLDSSNIKPMNLIGVDRGENIPAVIALTDPEGCPLSRFKDSLGNPTHILRIGESYKEKQRTIQAKKEVEQRRAGGYSRKYASKAKNLADDMVRNTARDLLYYAVTQDAMLIFENLSRGFGRQGKRTFMAERQYTRMEDWLTAKLAYEGLPSKTYLSKTLAQYTSKTCSNCGFTITSADYDRVLEKLKKTATGWMTTINGKELKVEGQITYYNRYKRQNVVKDLSVELDRLSEESVNNDISSWDKGRSGEALSLLKKRFSHRPVQEKFVCLNCGFETHADEQAALNIARSWLFLRSQEYKKYQTNKTTGNTDKRAFVETWQSFYRKKLKEVWKPAV

SEQ ID NO: 45978 - protein, 978 aa, synthetic construct
  REGION 1..978: note = engineered CasX variant
QEIKRINKIRRRLVKDSNTKKAGKTGPMKTLLVRVMTPDLRERLENLRKKPENIPQPISNTSRANLNKLLTDYTEMKKAILHVYWEEFQKDPVGLMSRVAQPASKKIDQNKLKPEMDEKGNLTTAGFACSQCGQPLFVYKLEQVSEKGKAYTNYFGRCNVAEHEKLILLAQLKPEKDSDEAVTYSLGKFGQRALDFYSIHVTKESTHPVKPLAQIAGNRYASSPVGKALSDACMGTIASFLSKYQDIIIEHQKVVKGNQKRLESLRELAGKENLEYPSVTLPPQPHTKEGVDAYNEVIARVRMWVNLNLWQKLKLSRDDAKPLLRLKGFPSFPLVERQANEVDWWDMVCNVKKLINEKKEDGKVFWQNLAGYKRQEALRPYLSSEEDRKKGKKFARYQLGDLLLHLEKKHGEDWGDVYDEAWERIDKKVEGLSKHIKLEEERRSEDAQSKAALTDWLRAKASFVIEGLKEADKDEFCRCELKLQKWYGDLRGKPFAIEAENSILDISGFSKQYNCAFIWQKDGVKKLNLYLIINYFKGGKLRFKKIKPEAFEANRFYTVINKKSGEIVPMEVNFNFDDPNLIILPLAFGKRQGREFIWNDLLSLETGSLKLANGRVIEKTLYNRRTRQDEPALFVALTFERREVLDSSNIKPMNLIGVDRGENIPAVIALTDPEGCPLSRFKDSLGNPTHILRIGESYKEKQRTIQAKKEVEQRRAGGYSRKYASKAKNLADDMVRNTARDLLYYAVTQDAMLIFENLSRGFGRQGKRTFMAERQYTRMEDWLTAKLAYEGLPSKTYLSKTLAQYTSKTCSNCGFTITSADYDRVLEKLKKTATGWMTTINGKELKVEGQITYYNRYKRQNVVKDLSVELDRLSEESVNNDISSWDKGRSGEALSLLKKRFSHRPVQEKFVCLNCGFETHADEQAALNIARSWLFLRSQEYKKYQTNKTTGNTDKRAFVETWQSFYRKKLKEVWKPAV

SEQ ID NO: 45979 - protein, 978 aa, synthetic construct
  REGION 1..978: note = engineered CasX variant
QEIKRINKIRRRLVKDSNTKKAGKTGPMKTLLVRVMTPDLRERLENLRKKPENIPQPISNTSRANLNKLLTDYTEMKKAILHVYWEEFQKDPVGLMSRVAQPASKKIDQNKLKPEMDEKGNLTTAGFACSQCGQPLFVYKLEQVSEKGKAYTNYFGRCNVAEHEKLILLAQLKPEKDSDEAVTYSLGKFGQRALDFYSIHVTKESTHPVKPLAQIAGNRYASTPVGKALSDACMGTIASFLSKYQDIIIEHQKVVKGNQKRLESLRELAGKENLEYPSVTLPPQPHTKEGVDAYNEVIARVRMWVNLNLWQKLKLSRDDAKPLLRLKGFPSFPLVERQANEVDWWDMVCNVKKLINEKKEDGKVFWQNLAGYKRQEALRPYLSSEEDRKKGKKFARYQLGDLLLHLEKKHGEDWGDVYDEAWERIDKKVEGLSKHIKLEEERRSEDAQSKAALTDWLRAKASFVIEGLKEADKDEFCRCELKLQKWYGDLRGKPFAIEAENSILDISGFSKQYNCAFIWQKDGVKKLNLYLIINYFKGGKLRFKKIKPEAFEANRFYTVINKKSGEIVPMEVNFNFDDPNLIILPLAFGKRQGREFIWNDLLSLETGSLKLANGRVIEKTLYNRRTRQDEPALFVALTFERREVLDSSNIKPMNLIGVDRGENIPAVIALTDPEGCPLSRFKDSLGNPTHILRIGESYKEKQRTIQAKKEVEQRRAGGYSRKYASKAKNLADDMVRNTARDLLYYAVTQDAMLIFENLSRGFGRQGKRTFMAERQYTRMEDWLTAKLAYEGLPSKTYLSKTLAQYTSKTCSNCGFTITSADYDRVLEKLKKTATGWMTTINGKELKVEGQITYYNRYKRQNVVKDLSVELDRLSEESVNNDISSWDKGRSGEALSLLKKRFSHRPVQEKFVCLNCGFETHADEQAALNIARSWLFLRSQEYKKYQTNKTTGNTDKRAFVETWQSFYRKKLKEVWKPAV

SEQ ID NO: 45980 - protein, 978 aa, synthetic construct
  REGION 1..978: note = engineered CasX variant
QEIKRINKIRRRLVKDSNTKKAGKTGPMKTLLVRVMTPDLRERLENLRKKPENIPQPISNTSRANLNKLLTDYTEMKKAILHVYWEEFQKDPVGLMSRVAQPASKKIDQNKLKPEMDEKGNLTTAGFACSQCGQPLFVYKLEQVSEKGKAYTNYFGRCNVAEHEKLILLAQLKPEKDSDEAVTYSLGKFGQRALDFYSIHVTKESTHPVKPLAQIAGNRYASAPVGKALSDACMGTIASFLSKYQDIIIEHQKVVKGNQKRLESLRELAGKENLEYPSVTLPPQPHTKEGVDAYNEVIARVRMWVNLNLWQKLKLSRDDAKPLLRLKGFPSFPLVERQANEVDWWDMVCNVKKLINEKKEDGKVFWQNLAGYKRQEALRPYLSSEEDRKKGKKFARYQLGDLLLHLEKKHGEDWGDVYDEAWERIDKKVEGLSKHIKLEEERRSEDAQSKAALTDWLRAKASFVIEGLKEADKDEFCRCELKLQKWYGDLRGKPFAIEAENSILDISGFSKQYNCAFIWQKDGVKKLNLYLIINYFKGGKLRFKKIKPEAFEANRFYTVINKKSGEIVPMEVNFNFDDPNLIILPLAFGKRQGREFIWNDLLSLETGSLKLANGRVIEKTLYNRRTRQDEPALFVALTFERREVLDSSNIKPMNLIGVDRGENIPAVIALTDPEGCPLSRFKDSLGNPTHILRIGESYKEKQRTIQAKKEVEQRRAGGYSRKYASKAKNLADDMVRNTARDLLYYAVTQDAMLIFENLSRGFGRQGKRTFMAERQYTRMEDWLTAKLAYEGLPSKTYLSKTLAQYTSKTCSNCGFTITSADYDRVLEKLKKTATGWMTTINGKELKVEGQITYYNRYKRQNVVKDLSVELDRLSEESVNNDISSWDKGRSGEALSLLKKRFSHRPVQEKFVCLNCGFETHADEQAALNIARSWLFLRSQEYKKYQTNKTTGNTDKRAFVETWQSFYRKKLKEVWKPAV

SEQ ID NO: 45981 - protein, 978 aa, synthetic construct
  REGION 1..978: note = engineered CasX variant
QEIKRINKIRRRLVKDSNTKKAGKTGPMKTLLVRVMTPDLRERLENLRKKPENIPQPISNTSRANLNKLLTDYTEMKKAILHVYWEEFQKDPVGLMSRVAQPASKKIDQNKLKPEMDEKGNLTTAGFACSQCGQPLFVYKLEQVSEKGKAYTNYFGRCNVAEHEKLILLAQLKPEKDSDEAVTYSLGKFGQRALDFYSIHVTKESTHPVKPLAQIAGNRYASVPVGKALSDACMGTIASFLSKYQDIIIEHQKVVKGNQKRLESLRELAGKENLEYPSVTLPPQPHTKEGVDAYNEVIARVRMWVNLNLWQKLKLSRDDAKPLLRLKGFPSFPLVERQANEVDWWDMVCNVKKLINEKKEDGKVFWQNLAGYKRQEALRPYLSSEEDRKKGKKFARYQLGDLLLHLEKKHGEDWGDVYDEAWERIDKKVEGLSKHIKLEEERRSEDAQSKAALTDWLRAKASFVIEGLKEADKDEFCRCELKLQKWYGDLRGKPFAIEAENSILDISGFSKQYNCAFIWQKDGVKKLNLYLIINYFKGGKLRFKKIKPEAFEANRFYTVINKKSGEIVPMEVNFNFDDPNLIILPLAFGKRQGREFIWNDLLSLETGSLKLANGRVIEKTLYNRRTRQDEPALFVALTFERREVLDSSNIKPMNLIGVDRGENIPAVIALTDPEGCPLSRFKDSLGNPTHILRIGESYKEKQRTIQAKKEVEQRRAGGYSRKYASKAKNLADDMVRNTARDLLYYAVTQDAMLIFENLSRGFGRQGKRTFMAERQYTRMEDWLTAKLAYEGLPSKTYLSKTLAQYTSKTCSNCGFTITSADYDRVLEKLKKTATGWMTTINGKELKVEGQITYYNRYKRQNVVKDLSVELDRLSEESVNNDISSWDKGRSGEALSLLKKRFSHRPVQEKFVCLNCGFETHADEQAALNIARSWLFLRSQEYKKYQTNKTTGNTDKRAFVETWQSFYRKKLKEVWKPAV

SEQ ID NO: 45982 - protein, 978 aa, synthetic construct
  REGION 1..978: note = engineered CasX variant
QEIKRINKIRRRLVKDSNTKKAGKTGPMKTLLVRVMTPDLRERLENLRKKPENIPQPISNTSRANLNKLLTDYTEMKKAILHVYWEEFQKDPVGLMSRVAQPASKKIDQNKLKPEMDEKGNLTTAGFACSQCGQPLFVYKLEQVSEKGKAYTNYFGRCNVAEHEKLIKLAQLKPEKDSDEAVTYSLGKFGQRALDFYSIHVTKESTHPVKPLAQIAGNRYASGPVGKALSDACMGTIASFLSKYQDIIIEHQKVVKGNQKRLESLRELAGKENLEYPSVTLPPQPHTKEGVDAYNEVIARVRMWVNLNLWQKLKLSRDDAKPLLRLKGFPSFPLVERQANEVDWWDMVCNVKKLINEKKEDGKVFWQNLAGYKRQEALRPYLSSEEDRKKGKKFARYQLGDLLLHLEKKHGEDWGDVYDEAWERIDKKVEGLSKHIKLEEERRSEDAQSKAALTDWLRAKASFVIEGLKEADKDEFCRCELKLQKWYGDLRGKPFAIEAENSILDISGFSKQYNCAFIWQKDGVKKLNLYLIINYFKGGKLRFKKIKPEAFEANRFYTVINKKSGEIVPMEVNFNFDDPNLIILPLAFGKRQGREFIWNDLLSLETGSLKLANGRVIEKTLYNRRTRQDEPALFVALTFERREVLDSSNIKPMNLIGVDRGENIPAVIALTDPEGCPLSRFKDSLGNPTHILRIGESYKEKQRTIQAKKEVEQRRAGGYSRKYASKAKNLADDMVRNTARDLLYYAVTQDAMLIFENLSRGFGRQGKRTFMAERQYTRMEDWLTAKLAYEGLPSKTYLSKTLAQYTSKTCSNCGFTITSADYDRVLEKLKKTATGWMTTINGKELKVEGQITYYNRYKRQNVVKDLSVELDRLSEESVNNDISSWDKGRSGEALSLLKKRFSHRPVQEKFVCLNCGFETHADEQAALNIARSWLFLRSQEYKKYQTNKTTGNTDKRAFVETWQSFYRKKLKEVWKPAV

SEQ ID NO: 45983 - protein, 977 aa, synthetic construct
  REGION 1..977: note = engineered CasX variant
QEIKRINKIRRRLVKDSNTKKAGKTGPMKTLLVRVMTPDLRERLENLRKKPENIPQPISNTSRANLNKLLTDYTEMKKAILHVYWEEFQKDPVGLMSRVAQPASKKIDQNKLKPEMDEKGNLTTAGFACSQCGQPLFVYKLEQVSEKGKAYTNYFGRCNVAEHEKLILLAQLKPEKDSDEAVTYSLGKFGQRALDFYSIHVTKESTHPVKPLAQIAGNRYASPVGKALSDACMGTIASFLSKYQDIIIEHQKVVKGNQKRLESLRELAGKENLEYPSVTLPPQPHTKEGVDAYNEVIARVRMWVNLNLWQKLKLSRDDAKPLLRLKGFPSFPLVERQANEVDWWDMVCNVKKLINEKKEDGKVFWQNLAGYKRQEALRPYLSSEEDRKKGKKFARYQLGDLLLHLEKKHGEDWGDVYDEAWERIDKKVEGLSKHIKLEEERRSEDAQSKAALTDWLRAKASFVIEGLKEADKDEFCRCELKLQKWYGDLRGKPFAIEAENSILDISGFSKQYNCAFIWQKDGVKKLNLYLIINYFKGGKLRFKKIKPEAFEANRFYTVINKKSGEIVPMEVNFNFDDPNLIILPLAFGKRQGREFIWNDLLSLETGSLKLANGRVIEKTLYNRRTRQDEPALFVALTFERREVLDSSNIKPMNLIGVDRGENIPAVIALTDPEGCPLSRFKDSLGNPTHILRIGESYKEKQRTIQAKKEVEQRRAGGYSRKYASKAKNLADDMVRNTARDLLYYAVTQDAMLIFENLSRGFGRQGKRTFMAERQYTRMEDWLTAKLAYEGLPSKTYLSKTLAQYTSKTCSNCGFTITSADYDRVLEKLKKTATGWMTTINGKELKVEGQITYYNRYKRQNVVKDLSVELDRLSEESVNNDISSWDKGRSGEALSLLKKRFSHRPVQEKFVCLNCGFETHADEQAALNIARSWLFLRSQEYKKYQTNKTTGNTDKRAFVETWQSFYRKKLKEVWKPAV

SEQ ID NO: 45984 - protein, 978 aa, synthetic construct
  REGION 1..978: note = engineered CasX variant
QEIKRINKIRRRLVKDSNTKKAGKTGPMKTLLVRVMTPDLRERLENLRKKPENIPQPISNTSRANLNKLLTDYTEMKKAILHVYWEEFQKDPVGLMSRVAQPASKKIDQNKLKPEMDEKGNLTTAGFACSQCGQPLFVYKLEQVSEKGKAYTNYFGRCNVAEHEKLILLAQLKPEKDSDEAVTYSLGKFGQRALDFYSIHVTKESTHPVKPLAQIAGNRYASYPVGKALSDACMGTIASFLSKYQDIIIEHQKVVKGNQKRLESLRELAGKENLEYPSVTLPPQPHTKEGVDAYNEVIARVRMWVNLNLWQKLKLSRDDAKPLLRLKGFPSFPLVERQANEVDWWDMVCNVKKLINEKKEDGKVFWQNLAGYKRQEALRPYLSSEEDRKKGKKFARYQLGDLLLHLEKKHGEDWGKVYGEAWERIDKKVEGLSKHIKLEEERRSEDAQSKAALTDWLRAKASFVIEGLKEADKDEFCRCELKLQKWYGDLRGKPFAIEAENSILDISGFSKQYNCAFIWQKDGVKKLNLYLIINYFKGGKLRFKKIKPEAFEANRFYTVINKKSGEIVPMEVNFNFDDPNLIILPLAFGKRQGREFIWNDLLSLETGSLKLANGRVIEKTLYNRRTRQDEPALFVALTFERREVLDSSNIKPMNLIGVDRGENIPAVIALTDPEGCPLSRFKDSLGNPTHILRIGESYKEKQRTIQAKKEVEQRRAGGYSRKYASKAKNLADDMVRNTARDLLYYAVTQDAMLIFENLSRGFGRQGKRTFMAERQYTRMEDWLTAKLAYEGLPSKTYLSKTLAQYTSKTCSNCGFTITSADYDRVLEKLKKTATGWMTTINGKELKVEGQITYYNRYKRQNVVKDLSVELDRLSEESVNNDISSWDKGRSGEALSLLKKRFSHRPVQEKFVCLNCGFETHADEQAALNIARSWLFLRSQEYKKYQTNKTTGNTDKRAFVETWQSFYRKKLKEVWKPAV

SEQ ID NO: 45985 - protein, 978 aa, synthetic construct
  REGION 1..978: note = engineered CasX variant
QEIKRINKIRRRLVKDSNTKKAGKTGPMKTLLVRVMTPDLRERLENLRKKPENIPQPISNTSRANLNKLLTDYTEMKKAILHVYWEEFQKDPVGLMSRVAQPASKKIDQNKLKPEMDEKGNLTTAGFACSQCGQPLFVYKLEQVSEKGKAYTNYFGRCNVAEHEKLILLAQLKPEKDSDEAVTYSLGKFGQRALDFYSIHVTKESTHPVKPLAQIAGNRYASHPVGKALSDACMGTIASFLSKYQDIIIEHQKVVKGNQKRLESLRELAGKENLEYPSVTLPPQPHTKEGVDAYNEVIARVRMWVNLNLWQKLKLSRDDAKPLLRLKGFPSFPLVERQANEVDWWDMVCNVKKLINEKKEDGKVFWQNLAGYKRQEALRPYLSSEEDRKKGKKFARYQLGDLLLHLEKKHGEDWGKVYGEAWERIDKKVEGLSKHIKLEEERRSEDAQSKAALTDWLRAKASFVIEGLKEADKDEFCRCELKLQKWYGDLRGKPFAIEAENSILDISGFSKQYNCAFIWQKDGVKKLNLYLIINYFKGGKLRFKKIKPEAFEANRFYTVINKKSGEIVPMEVNFNFDDPNLIILPLAFGKRQGREFIWNDLLSLETGSLKLANGRVIEKTLYNRRTRQDEPALFVALTFERREVLDSSNIKPMNLIGVDRGENIPAVIALTDPEGCPLSRFKDSLGNPTHILRIGESYKEKQRTIQAKKEVEQRRAGGYSRKYASKAKNLADDMVRNTARDLLYYAVTQDAMLIFENLSRGFGRQGKRTFMAERQYTRMEDWLTAKLAYEGLPSKTYLSKTLAQYTSKTCSNCGFTITSADYDRVLEKLKKTATGWMTTINGKELKVEGQITYYNRYKRQNVVKDLSVELDRLSEESVNNDISSWDKGRSGEALSLLKKRFSHRPVQEKFVCLNCGFETHADEQAALNIARSWLFLRSQEYKKYQTNKTTGNTDKRAFVETWQSFYRKKLKEVWKPAV

SEQ ID NO: 45986 - protein, 978 aa, synthetic construct
  REGION 1..978: note = engineered CasX variant
QEIKRINKIRRRLVKDSNTKKAGKTGPMKTLLVRVMTPDLRERLENLRKKPENIPQPISNTSRANLNKLLTDYTEMKKAILHVYWEEFQKDPVGLMSRVAQPASKKIDQNKLKPEMDEKGNLTTAGFACSQCGQPLFVYKLEQVSEKGKAYTNYFGRCNVAEHEKLILLAQLKPEKDSDEAVTYSLGKFGQRALDFYSIHVTKESTHPVKPLAQIAGNRYASSPVGKALSDACMGTIASFLSKYQDIIIEHQKVVKGNQKRLESLRELAGKENLEYPSVTLPPQPHTKEGVDAYNEVIARVRMWVNLNLWQKLKLSRDDAKPLLRLKGFPSFPLVERQANEVDWWDMVCNVKKLINEKKEDGKVFWQNLAGYKRQEALRPYLSSEEDRKKGKKFARYQLGDLLLHLEKKHGEDWGKVYGEAWERIDKKVEGLSKHIKLEEERRSEDAQSKAALTDWLRAKASFVIEGLKEADKDEFCRCELKLQKWYGDLRGKPFAIEAENSILDISGFSKQYNCAFIWQKDGVKKLNLYLIINYFKGGKLRFKKIKPEAFEANRFYTVINKKSGEIVPMEVNFNFDDPNLIILPLAFGKRQGREFIWNDLLSLETGSLKLANGRVIEKTLYNRRTRQDEPALFVALTFERREVLDSSNIKPMNLIGVDRGENIPAVIALTDPEGCPLSRFKDSLGNPTHILRIGESYKEKQRTIQAKKEVEQRRAGGYSRKYASKAKNLADDMVRNTARDLLYYAVTQDAMLIFENLSRGFGRQGKRTFMAERQYTRMEDWLTAKLAYEGLPSKTYLSKTLAQYTSKTCSNCGFTITSADYDRVLEKLKKTATGWMTTINGKELKVEGQITYYNRYKRQNVVKDLSVELDRLSEESVNNDISSWDKGRSGEALSLLKKRFSHRPVQEKFVCLNCGFETHADEQAALNIARSWLFLRSQEYKKYQTNKTTGNTDKRAFVETWQSFYRKKLKEVWKPAV

SEQ ID NO: 45987 - protein, 978 aa, synthetic construct
  REGION 1..978: note = engineered CasX variant
QEIKRINKIRRRLVKDSNTKKAGKTGPMKTLLVRVMTPDLRERLENLRKKPENIPQPISNTSRANLNKLLTDYTEMKKAILHVYWEEFQKDPVGLMSRVAQPASKKIDQNKLKPEMDEKGNLTTAGFACSQCGQPLFVYKLEQVSEKGKAYTNYFGRCNVAEHEKLILLAQLKPEKDSDEAVTYSLGKFGQRALDFYSIHVTKESTHPVKPLAQIAGNRYASTPVGKALSDACMGTIASFLSKYQDIIIEHQKVVKGNQKRLESLRELAGKENLEYPSVTLPPQPHTKEGVDAYNEVIARVRMWVNLNLWQKLKLSRDDAKPLLRLKGFPSFPLVERQANEVDWWDMVCNVKKLINEKKEDGKVFWQNLAGYKRQEALRPYLSSEEDRKKGKKFARYQLGDLLLHLEKKHGEDWGKVYGEAWERIDKKVEGLSKHIKLEEERRSEDAQSKAALTDWLRAKASFVIEGLKEADKDEFCRCELKLQKWYGDLRGKPFAIEAENSILDISGFSKQYNCAFIWQKDGVKKLNLYLIINYFKGGKLRFKKIKPEAFEANRFYTVINKKSGEIVPMEVNFNFDDPNLIILPLAFGKRQGREFIWNDLLSLETGSLKLANGRVIEKTLYNRRTRQDEPALFVALTFERREVLDSSNIKPMNLIGVDRGENIPAVIALTDPEGCPLSRFKDSLGNPTHILRIGESYKEKQRTIQAKKEVEQRRAGGYSRKYASKAKNLADDMVRNTARDLLYYAVTQDAMLIFENLSRGFGRQGKRTFMAERQYTRMEDWLTAKLAYEGLPSKTYLSKTLAQYTSKTCSNCGFTITSADYDRVLEKLKKTATGWMTTINGKELKVEGQITYYNRYKRQNVVKDLSVELDRLSEESVNNDISSWDKGRSGEALSLLKKRFSHRPVQEKFVCLNCGFETHADEQAALNIARSWLFLRSQEYKKYQTNKTTGNTDKRAFVETWQSFYRKKLKEVWKPAV

SEQ ID NO: 45988 - protein, 978 aa, synthetic construct
  REGION 1..978: note = engineered CasX variant
QEIKRINKIRRRLVKDSNTKKAGKTGPMKTLLVRVMTPDLRERLENLRKKPENIPQPISNTSRANLNKLLTDYTEMKKAILHVYWEEFQKDPVGLMSRVAQPASKKIDQNKLKPEMDEKGNLTTAGFACSQCGQPLFVYKLEQVSEKGKAYTNYFGRCNVAEHEKLILLAQLKPEKDSDEAVTYSLGKFGQRALDFYSIHVTKESTHPVKPLAQIAGNRYASAPVGKALSDACMGTIASFLSKYQDIIIEHQKVVKGNQKRLESLRELAGKENLEYPSVTLPPQPHTKEGVDAYNEVIARVRMWVNLNLWQKLKLSRDDAKPLLRLKGFPSFPLVERQANEVDWWDMVCNVKKLINEKKEDGKVFWQNLAGYKRQEALRPYLSSEEDRKKGKKFARYQLGDLLLHLEKKHGEDWGKVYGEAWERIDKKVEGLSKHIKLEEERRSEDAQSKAALTDWLRAKASFVIEGLKEADKDEFCRCELKLQKWYGDLRGKPFAIEAENSILDISGFSKQYNCAFIWQKDGVKKLNLYLIINYFKGGKLRFKKIKPEAFEANRFYTVINKKSGEIVPMEVNFNFDDPNLIILPLAFGKRQGREFIWNDLLSLETGSLKLANGRVIEKTLYNRRTRQDEPALFVALTFERREVLDSSNIKPMNLIGVDRGENIPAVIALTDPEGCPLSRFKDSLGNPTHILRIGESYKEKQRTIQAKKEVEQRRAGGYSRKYASKAKNLADDMVRNTARDLLYYAVTQDAMLIFENLSRGFGRQGKRTFMAERQYTRMEDWLTAKLAYEGLPSKTYLSKTLAQYTSKTCSNCGFTITSADYDRVLEKLKKTATGWMTTINGKELKVEGQITYYNRYKRQNVVKDLSVELDRLSEESVNNDISSWDKGRSGEALSLLKKRFSHRPVQEKFVCLNCGFETHADEQAALNIARSWLFLRSQEYKKYQTNKTTGNTDKRAFVETWQSFYRKKLKEVWKPAV

SEQ ID NO: 45989 - protein, 978 aa, synthetic construct
  REGION 1..978: note = engineered CasX variant
QEIKRINKIRRRLVKDSNTKKAGKTGPMKTLLVRVMTPDLRERLENLRKKPENIPQPISNTSRANLNKLLTDYTEMKKAILHVYWEEFQKDPVGLMSRVAQPASKKIDQNKLKPEMDEKGNLTTAGFACSQCGQPLFVYKLEQVSEKGKAYTNYFGRCNVAEHEKLILLAQLKPEKDSDEAVTYSLGKFGQRALDFYSIHVTKESTHPVKPLAQIAGNRYASVPVGKALSDACMGTIASFLSKYQDIIIEHQKVVKGNQKRLESLRELAGKENLEYPSVTLPPQPHTKEGVDAYNEVIARVRMWVNLNLWQKLKLSRDDAKPLLRLKGFPSFPLVERQANEVDWWDMVCNVKKLINEKKEDGKVFWQNLAGYKRQEALRPYLSSEEDRKKGKKFARYQLGDLLLHLEKKHGEDWGKVYGEAWERIDKKVEGLSKHIKLEEERRSEDAQSKAALTDWLRAKASFVIEGLKEADKDEFCRCELKLQKWYGDLRGKPFAIEAENSILDISGFSKQYNCAFIWQKDGVKKLNLYLIINYFKGGKLRFKKIKPEAFEANRFYTVINKKSGEIVPMEVNFNFDDPNLIILPLAFGKRQGREFIWNDLLSLETGSLKLANGRVIEKTLYNRRTRQDEPALFVALTFERREVLDSSNIKPMNLIGVDRGENIPAVIALTDPEGCPLSRFKDSLGNPTHILRIGESYKEKQRTIQAKKEVEQRRAGGYSRKYASKAKNLADDMVRNTARDLLYYAVTQDAMLIFENLSRGFGRQGKRTFMAERQYTRMEDWLTAKLAYEGLPSKTYLSKTLAQYTSKTCSNCGFTITSADYDRVLEKLKKTATGWMTTINGKELKVEGQITYYNRYKRQNVVKDLSVELDRLSEESVNNDISSWDKGRSGEALSLLKKRFSHRPVQEKFVCLNCGFETHADEQAALNIARSWLFLRSQEYKKYQTNKTTGNTDKRAFVETWQSFYRKKLKEVWKPAV

SEQ ID NO: 45990 - protein, 978 aa, synthetic construct
  REGION 1..978: note = engineered CasX variant
QEIKRINKIRRRLVKDSNTKKAGKTGPMKTLLVRVMTPDLRERLENLRKKPENIPQPISNTSRANLNKLLTDYTEMKKAILHVYWEEFQKDPVGLMSRVAQPASKKIDQNKLKPEMDEKGNLTTAGFACSQCGQPLFVYKLEQVSEKGKAYTNYFGRCNVAEHEKLIKLAQLKPEKDSDEAVTYSLGKFGQRALDFYSIHVTKESTHPVKPLAQIAGNRYASGPVGKALSDACMGTIASFLSKYQDIIIEHQKVVKGNQKRLESLRELAGKENLEYPSVTLPPQPHTKEGVDAYNEVIARVRMWVNLNLWQKLKLSRDDAKPLLRLKGFPSFPLVERQANEVDWWDMVCNVKKLINEKKEDGKVFWQNLAGYKRQEALRPYLSSEEDRKKGKKFARYQLGDLLLHLEKKHGEDWGKVYGEAWERIDKKVEGLSKHIKLEEERRSEDAQSKAALTDWLRAKASFVIEGLKEADKDEFCRCELKLQKWYGDLRGKPFAIEAENSILDISGFSKQYNCAFIWQKDGVKKLNLYLIINYFKGGKLRFKKIKPEAFEANRFYTVINKKSGEIVPMEVNFNFDDPNLIILPLAFGKRQGREFIWNDLLSLETGSLKLANGRVIEKTLYNRRTRQDEPALFVALTFERREVLDSSNIKPMNLIGVDRGENIPAVIALTDPEGCPLSRFKDSLGNPTHILRIGESYKEKQRTIQAKKEVEQRRAGGYSRKYASKAKNLADDMVRNTARDLLYYAVTQDAMLIFENLSRGFGRQGKRTFMAERQYTRMEDWLTAKLAYEGLPSKTYLSKTLAQYTSKTCSNCGFTITSADYDRVLEKLKKTATGWMTTINGKELKVEGQITYYNRYKRQNVVKDLSVELDRLSEESVNNDISSWDKGRSGEALSLLKKRFSHRPVQEKFVCLNCGFETHADEQAALNIARSWLFLRSQEYKKYQTNKTTGNTDKRAFVETWQSFYRKKLKEVWKPAV

SEQ ID NO: 45991 - protein, 977 aa, synthetic construct
  REGION 1..977: note = engineered CasX variant
QEIKRINKIRRRLVKDSNTKKAGKTGPMKTLLVRVMTPDLRERLENLRKKPENIPQPISNTSRANLNKLLTDYTEMKKAILHVYWEEFQKDPVGLMSRVAQPASKKIDQNKLKPEMDEKGNLTTAGFACSQCGQPLFVYKLEQVSEKGKAYTNYFGRCNVAEHEKLILLAQLKPEKDSDEAVTYSLGKFGQRALDFYSIHVTKESTHPVKPLAQIAGNRYASPVGKALSDACMGTIASFLSKYQDIIIEHQKVVKGNQKRLESLRELAGKENLEYPSVTLPPQPHTKEGVDAYNEVIARVRMWVNLNLWQKLKLSRDDAKPLLRLKGFPSFPLVERQANEVDWWDMVCNVKKLINEKKEDGKVFWQNLAGYKRQEALRPYLSSEEDRKKGKKFARYQLGDLLLHLEKKHGEDWGKVYGEAWERIDKKVEGLSKHIKLEEERRSEDAQSKAALTDWLRAKASFVIEGLKEADKDEFCRCELKLQKWYGDLRGKPFAIEAENSILDISGFSKQYNCAFIWQKDGVKKLNLYLIINYFKGGKLRFKKIKPEAFEANRFYTVINKKSGEIVPMEVNFNFDDPNLIILPLAFGKRQGREFIWNDLLSLETGSLKLANGRVIEKTLYNRRTRQDEPALFVALTFERREVLDSSNIKPMNLIGVDRGENIPAVIALTDPEGCPLSRFKDSLGNPTHILRIGESYKEKQRTIQAKKEVEQRRAGGYSRKYASKAKNLADDMVRNTARDLLYYAVTQDAMLIFENLSRGFGRQGKRTFMAERQYTRMEDWLTAKLAYEGLPSKTYLSKTLAQYTSKTCSNCGFTITSADYDRVLEKLKKTATGWMTTINGKELKVEGQITYYNRYKRQNVVKDLSVELDRLSEESVNNDISSWDKGRSGEALSLLKKRFSHRPVQEKFVCLNCGFETHADEQAALNIARSWLFLRSQEYKKYQTNKTTGNTDKRAFVETWQSFYRKKLKEVWKPAV

SEQ ID NO: 45992 - protein, 978 aa, synthetic construct
  REGION 1..978: note = engineered CasX variant
QEIKRINKIRRRLVKDSNTKKAGKTGPMKTLLVRVMTPDLRERLENLRKKPENIPQPISNTSRANLNKLLTDYTEMKKAILHVYWEEFQKDPVGLMSRVAQPASKKIDQNKLKPEMDEKGNLTTAGFACSQCGQPLFVYKLEQVSEKGKAYTNYFGRCNVAEHEKLILLAQLKPEKDSDEAVTYSLGKFGQRALDFYSIHVTKESTHPVKPLAQIAGNRYASYPVGKALSDACMGTIASFLSKYQDIIIEHQKVVKGNQKRLESLRELAGKENLEYPSVTLPPQPHTKEGVDAYNEVIARVRMWVNLNLWQKLKLSRDDAKPLLRLKGFPSFPLVERQANEVDWWDMVCNVKKLINEKKEDGKVFWQNLAGYKRQEALRPYLSSEEDRKKGKKFARYQLGDLLLHLEKKHGEDWGKVYDEAWERIDKKVEGLSKHIKLEEERRSEDAQSKAALTDWLRAKASFVIEGKKEADKDEFCRCELKLQKWYGDLRGKPFAIEAENSILDISGFSKQYNCAFIWQKDGVKKLNLYLIINYFKGGKLRFKKIKPEAFEANRFYTVINKKSGEIVPMEVNFNFDDPNLIILPLAFGKRQGREFIWNDLLSLETGSLKLANGRVIEKTLYNRRTRQDEPALFVALTFERREVLDSSNIKPMNLIGVDRGENIPAVIALTDPEGCPLSRFKDSLGNPTHILRIGESYKEKQRTIQAKKEVEQRRAGGYSRKYASKAKNLADDMVRNTARDLLYYAVTQDAMLIFENLSRGFGRQGKRTFMAERQYTRMEDWLTAKLAYEGLPSKTYLSKTLAQYTSKTCSNCGFTITSADYDRVLEKLKKTATGWMTTINGKELKVEGQITYYNRYKRQNVVKDLSVELDRLSEESVNNDISSWDKGRSGEALSLLKKRFSHRPVQEKFVCLNCGFETHADEQAALNIARSWLFLRSQEYKKYQTNKTTGNTDKRAFVETWQSFYRKKLKEVWKPAV

SEQ ID NO: 45993 - protein, 978 aa, synthetic construct
  REGION 1..978: note = engineered CasX variant
QEIKRINKIRRRLVKDSNTKKAGKTGPMKTLLVRVMTPDLRERLENLRKKPENIPQPISNTSRANLNKLLTDYTEMKKAILHVYWEEFQKDPVGLMSRVAQPASKKIDQNKLKPEMDEKGNLTTAGFACSQCGQPLFVYKLEQVSEKGKAYTNYFGRCNVAEHEKLILLAQLKPEKDSDEAVTYSLGKFGQRALDFYSIHVTKESTHPVKPLAQIAGNRYASHPVGKALSDACMGTIASFLSKYQDIIIEHQKVVKGNQKRLESLRELAGKENLEYPSVTLPPQPHTKEGVDAYNEVIARVRMWVNLNLWQKLKLSRDDAKPLLRLKGFPSFPLVERQANEVDWWDMVCNVKKLINEKKEDGKVFWQNLAGYKRQEALRPYLSSEEDRKKGKKFARYQLGDLLLHLEKKHGEDWGKVYDEAWERIDKKVEGLSKHIKLEEERRSEDAQSKAALTDWLRAKASFVIEGKKEADKDEFCRCELKLQKWYGDLRGKPFAIEAENSILDISGFSKQYNCAFIWQKDGVKKLNLYLIINYFKGGKLRFKKIKPEAFEANRFYTVINKKSGEIVPMEVNFNFDDPNLIILPLAFGKRQGREFIWNDLLSLETGSLKLANGRVIEKTLYNRRTRQDEPALFVALTFERREVLDSSNIKPMNLIGVDRGENIPAVIALTDPEGCPLSRFKDSLGNPTHILRIGESYKEKQRTIQAKKEVEQRRAGGYSRKYASKAKNLADDMVRNTARDLLYYAVTQDAMLIFENLSRGFGRQGKRTFMAERQYTRMEDWLTAKLAYEGLPSKTYLSKTLAQYTSKTCSNCGFTITSADYDRVLEKLKKTATGWMTTINGKELKVEGQITYYNRYKRQNVVKDLSVELDRLSEESVNNDISSWDKGRSGEALSLLKKRFSHRPVQEKFVCLNCGFETHADEQAALNIARSWLFLRSQEYKKYQTNKTTGNTDKRAFVETWQSFYRKKLKEVWKPAV

SEQ ID NO: 45994 - protein, 978 aa, synthetic construct
  REGION 1..978: note = engineered CasX variant
QEIKRINKIRRRLVKDSNTKKAGKTGPMKTLLVRVMTPDLRERLENLRKKPENIPQPISNTSRANLNKLLTDYTEMKKAILHVYWEEFQKDPVGLMSRVAQPASKKIDQNKLKPEMDEKGNLTTAGFACSQCGQPLFVYKLEQVSEKGKAYTNYFGRCNVAEHEKLILLAQLKPEKDSDEAVTYSLGKFGQRALDFYSIHVTKESTHPVKPLAQIAGNRYASSPVGKALSDACMGTIASFLSKYQDIIIEHQKVVKGNQKRLESLRELAGKENLEYPSVTLPPQPHTKEGVDAYNEVIARVRMWVNLNLWQKLKLSRDDAKPLLRLKGFPSFPLVERQANEVDWWDMVCNVKKLINEKKEDGKVFWQNLAGYKRQEALRPYLSSEEDRKKGKKFARYQLGDLLLHLEKKHGEDWGKVYDEAWERIDKKVEGLSKHIKLEEERRSEDAQSKAALTDWLRAKASFVIEGKKEADKDEFCRCELKLQKWYGDLRGKPFAIEAENSILDISGFSKQYNCAFIWQKDGVKKLNLYLIINYFKGGKLRFKKIKPEAFEANRFYTVINKKSGEIVPMEVNFNFDDPNLIILPLAFGKRQGREFIWNDLLSLETGSLKLANGRVIEKTLYNRRTRQDEPALFVALTFERREVLDSSNIKPMNLIGVDRGENIPAVIALTDPEGCPLSRFKDSLGNPTHILRIGESYKEKQRTIQAKKEVEQRRAGGYSRKYASKAKNLADDMVRNTARDLLYYAVTQDAMLIFENLSRGFGRQGKRTFMAERQYTRMEDWLTAKLAYEGLPSKTYLSKTLAQYTSKTCSNCGFTITSADYDRVLEKLKKTATGWMTTINGKELKVEGQITYYNRYKRQNVVKDLSVELDRLSEESVNNDISSWDKGRSGEALSLLKKRFSHRPVQEKFVCLNCGFETHADEQAALNIARSWLFLRSQEYKKYQTNKTTGNTDKRAFVETWQSFYRKKLKEVWKPAV

SEQ ID NO: 45995 - protein, 978 aa, synthetic construct
  REGION 1..978: note = engineered CasX variant
QEIKRINKIRRRLVKDSNTKKAGKTGPMKTLLVRVMTPDLRERLENLRKKPENIPQPISNTSRANLNKLLTDYTEMKKAILHVYWEEFQKDPVGLMSRVAQPASKKIDQNKLKPEMDEKGNLTTAGFACSQCGQPLFVYKLEQVSEKGKAYTNYFGRCNVAEHEKLILLAQLKPEKDSDEAVTYSLGKFGQRALDFYSIHVTKESTHPVKPLAQIAGNRYASTPVGKALSDACMGTIASFLSKYQDIIIEHQKVVKGNQKRLESLRELAGKENLEYPSVTLPPQPHTKEGVDAYNEVIARVRMWVNLNLWQKLKLSRDDAKPLLRLKGFPSFPLVERQANEVDWWDMVCNVKKLINEKKEDGKVFWQNLAGYKRQEALRPYLSSEEDRKKGKKFARYQLGDLLLHLEKKHGEDWGKVYDEAWERIDKKVEGLSKHIKLEEERRSEDAQSKAALTDWLRAKASFVIEGKKEADKDEFCRCELKLQKWYGDLRGKPFAIEAENSILDISGFSKQYNCAFIWQKDGVKKLNLYLIINYFKGGKLRFKKIKPEAFEANRFYTVINKKSGEIVPMEVNFNFDDPNLIILPLAFGKRQGREFIWNDLLSLETGSLKLANGRVIEKTLYNRRTRQDEPALFVALTFERREVLDSSNIKPMNLIGVDRGENIPAVIALTDPEGCPLSRFKDSLGNPTHILRIGESYKEKQRTIQAKKEVEQRRAGGYSRKYASKAKNLADDMVRNTARDLLYYAVTQDAMLIFENLSRGFGRQGKRTFMAERQYTRMEDWLTAKLAYEGLPSKTYLSKTLAQYTSKTCSNCGFTITSADYDRVLEKLKKTATGWMTTINGKELKVEGQITYYNRYKRQNVVKDLSVELDRLSEESVNNDISSWDKGRSGEALSLLKKRFSHRPVQEKFVCLNCGFETHADEQAALNIARSWLFLRSQEYKKYQTNKTTGNTDKRAFVETWQSFYRKKLKEVWKPAV

SEQ ID NO: 45996 - protein, 978 aa, synthetic construct
  REGION 1..978: note = engineered CasX variant
QEIKRINKIRRRLVKDSNTKKAGKTGPMKTLLVRVMTPDLRERLENLRKKPENIPQPISNTSRANLNKLLTDYTEMKKAILHVYWEEFQKDPVGLMSRVAQPASKKIDQNKLKPEMDEKGNLTTAGFACSQCGQPLFVYKLEQVSEKGKAYTNYFGRCNVAEHEKLILLAQLKPEKDSDEAVTYSLGKFGQRALDFYSIHVTKESTHPVKPLAQIAGNRYASAPVGKALSDACMGTIASFLSKYQDIIIEHQKVVKGNQKRLESLRELAGKENLEYPSVTLPPQPHTKEGVDAYNEVIARVRMWVNLNLWQKLKLSRDDAKPLLRLKGFPSFPLVERQANEVDWWDMVCNVKKLINEKKEDGKVFWQNLAGYKRQEALRPYLSSEEDRKKGKKFARYQLGDLLLHLEKKHGEDWGKVYDEAWERIDKKVEGLSKHIKLEEERRSEDAQSKAALTDWLRAKASFVIEGKKEADKDEFCRCELKLQKWYGDLRGKPFAIEAENSILDISGFSKQYNCAFIWQKDGVKKLNLYLIINYFKGGKLRFKKIKPEAFEANRFYTVINKKSGEIVPMEVNFNFDDPNLIILPLAFGKRQGREFIWNDLLSLETGSLKLANGRVIEKTLYNRRTRQDEPALFVALTFERREVLDSSNIKPMNLIGVDRGENIPAVIALTDPEGCPLSRFKDSLGNPTHILRIGESYKEKQRTIQAKKEVEQRRAGGYSRKYASKAKNLADDMVRNTARDLLYYAVTQDAMLIFENLSRGFGRQGKRTFMAERQYTRMEDWLTAKLAYEGLPSKTYLSKTLAQYTSKTCSNCGFTITSADYDRVLEKLKKTATGWMTTINGKELKVEGQITYYNRYKRQNVVKDLSVELDRLSEESVNNDISSWDKGRSGEALSLLKKRFSHRPVQEKFVCLNCGFETHADEQAALNIARSWLFLRSQEYKKYQTNKTTGNTDKRAFVETWQSFYRKKLKEVWKPAV

SEQ ID NO: 45997 - protein, 978 aa, synthetic construct
  REGION 1..978: note = engineered CasX variant
QEIKRINKIRRRLVKDSNTKKAGKTGPMKTLLVRVMTPDLRERLENLRKKPENIPQPISNTSRANLNKLLTDYTEMKKAILHVYWEEFQKDPVGLMSRVAQPASKKIDQNKLKPEMDEKGNLTTAGFACSQCGQPLFVYKLEQVSEKGKAYTNYFGRCNVAEHEKLILLAQLKPEKDSDEAVTYSLGKFGQRALDFYSIHVTKESTHPVKPLAQIAGNRYASVPVGKALSDACMGTIASFLSKYQDIIIEHQKVVKGNQKRLESLRELAGKENLEYPSVTLPPQPHTKEGVDAYNEVIARVRMWVNLNLWQKLKLSRDDAKPLLRLKGFPSFPLVERQANEVDWWDMVCNVKKLINEKKEDGKVFWQNLAGYKRQEALRPYLSSEEDRKKGKKFARYQLGDLLLHLEKKHGEDWGKVYDEAWERIDKKVEGLSKHIKLEEERRSEDAQSKAALTDWLRAKASFVIEGKKEADKDEFCRCELKLQKWYGDLRGKPFAIEAENSILDISGFSKQYNCAFIWQKDGVKKLNLYLIINYFKGGKLRFKKIKPEAFEANRFYTVINKKSGEIVPMEVNFNFDDPNLIILPLAFGKRQGREFIWNDLLSLETGSLKLANGRVIEKTLYNRRTRQDEPALFVALTFERREVLDSSNIKPMNLIGVDRGENIPAVIALTDPEGCPLSRFKDSLGNPTHILRIGESYKEKQRTIQAKKEVEQRRAGGYSRKYASKAKNLADDMVRNTARDLLYYAVTQDAMLIFENLSRGFGRQGKRTFMAERQYTRMEDWLTAKLAYEGLPSKTYLSKTLAQYTSKTCSNCGFTITSADYDRVLEKLKKTATGWMTTINGKELKVEGQITYYNRYKRQNVVKDLSVELDRLSEESVNNDISSWDKGRSGEALSLLKKRFSHRPVQEKFVCLNCGFETHADEQAALNIARSWLFLRSQEYKKYQTNKTTGNTDKRAFVETWQSFYRKKLKEVWKPAV

SEQ ID NO: 45998 - protein, 978 aa, synthetic construct
  REGION 1..978: note = engineered CasX variant
QEIKRINKIRRRLVKDSNTKKAGKTGPMKTLLVRVMTPDLRERLENLRKKPENIPQPISNTSRANLNKLLTDYTEMKKAILHVYWEEFQKDPVGLMSRVAQPASKKIDQNKLKPEMDEKGNLTTAGFACSQCGQPLFVYKLEQVSEKGKAYTNYFGRCNVAEHEKLIKLAQLKPEKDSDEAVTYSLGKFGQRALDFYSIHVTKESTHPVKPLAQIAGNRYASGPVGKALSDACMGTIASFLSKYQDIIIEHQKVVKGNQKRLESLRELAGKENLEYPSVTLPPQPHTKEGVDAYNEVIARVRMWVNLNLWQKLKLSRDDAKPLLRLKGFPSFPLVERQANEVDWWDMVCNVKKLINEKKEDGKVFWQNLAGYKRQEALRPYLSSEEDRKKGKKFARYQLGDLLLHLEKKHGEDWGKVYDEAWERIDKKVEGLSKHIKLEEERRSEDAQSKAALTDWLRAKASFVIEGKKEADKDEFCRCELKLQKWYGDLRGKPFAIEAENSILDISGFSKQYNCAFIWQKDGVKKLNLYLIINYFKGGKLRFKKIKPEAFEANRFYTVINKKSGEIVPMEVNFNFDDPNLIILPLAFGKRQGREFIWNDLLSLETGSLKLANGRVIEKTLYNRRTRQDEPALFVALTFERREVLDSSNIKPMNLIGVDRGENIPAVIALTDPEGCPLSRFKDSLGNPTHILRIGESYKEKQRTIQAKKEVEQRRAGGYSRKYASKAKNLADDMVRNTARDLLYYAVTQDAMLIFENLSRGFGRQGKRTFMAERQYTRMEDWLTAKLAYEGLPSKTYLSKTLAQYTSKTCSNCGFTITSADYDRVLEKLKKTATGWMTTINGKELKVEGQITYYNRYKRQNVVKDLSVELDRLSEESVNNDISSWDKGRSGEALSLLKKRFSHRPVQEKFVCLNCGFETHADEQAALNIARSWLFLRSQEYKKYQTNKTTGNTDKRAFVETWQSFYRKKLKEVWKPAV

SEQ ID NO: 45999 - protein, 977 aa, synthetic construct
  REGION 1..977: note = engineered CasX variant
QEIKRINKIRRRLVKDSNTKKAGKTGPMKTLLVRVMTPDLRERLENLRKKPENIPQPISNTSRANLNKLLTDYTEMKKAILHVYWEEFQKDPVGLMSRVAQPASKKIDQNKLKPEMDEKGNLTTAGFACSQCGQPLFVYKLEQVSEKGKAYTNYFGRCNVAEHEKLILLAQLKPEKDSDEAVTYSLGKFGQRALDFYSIHVTKESTHPVKPLAQIAGNRYASPVGKALSDACMGTIASFLSKYQDIIIEHQKVVKGNQKRLESLRELAGKENLEYPSVTLPPQPHTKEGVDAYNEVIARVRMWVNLNLWQKLKLSRDDAKPLLRLKGFPSFPLVERQANEVDWWDMVCNVKKLINEKKEDGKVFWQNLAGYKRQEALRPYLSSEEDRKKGKKFARYQLGDLLLHLEKKHGEDWGKVYDEAWERIDKKVEGLSKHIKLEEERRSEDAQSKAALTDWLRAKASFVIEGKKEADKDEFCRCELKLQKWYGDLRGKPFAIEAENSILDISGFSKQYNCAFIWQKDGVKKLNLYLIINYFKGGKLRFKKIKPEAFEANRFYTVINKKSGEIVPMEVNFNFDDPNLIILPLAFGKRQGREFIWNDLLSLETGSLKLANGRVIEKTLYNRRTRQDEPALFVALTFERREVLDSSNIKPMNLIGVDRGENIPAVIALTDPEGCPLSRFKDSLGNPTHILRIGESYKEKQRTIQAKKEVEQRRAGGYSRKYASKAKNLADDMVRNTARDLLYYAVTQDAMLIFENLSRGFGRQGKRTFMAERQYTRMEDWLTAKLAYEGLPSKTYLSKTLAQYTSKTCSNCGFTITSADYDRVLEKLKKTATGWMTTINGKELKVEGQITYYNRYKRQNVVKDLSVELDRLSEESVNNDISSWDKGRSGEALSLLKKRFSHRPVQEKFVCLNCGFETHADEQAALNIARSWLFLRSQEYKKYQTNKTTGNTDKRAFVETWQSFYRKKLKEVWKPAV

SEQ ID NO: 46000 - protein, 978 aa, synthetic construct
  REGION 1..978: note = engineered CasX variant
QEIKRINKIRRRLVKDSNTKKAGKTGPMKTLLVRVMTPDLRERLENLRKKPENIPQPISNTSRANLNKLLTDYTEMKKAILHVYWEEFQKDPVGLMSRVAQPASKKIDQNKLKPEMDEKGNLTTAGFACSQCGQPLFVYKLEQVSEKGKAYTNYFGRCNVAEHEKLILLAQLKPEKDSDEAVTYSLGKFGQRALDFYSIHVTKESTHPVKPLAQIAGNRYASYPVGKALSDACMGTIASFLSKYQDIIIEHQKVVKGNQKRLESLRELAGKENLEYPSVTLPPQPHTKEGVDAYNEVIARVRMWVNLNLWQKLKLSRDDAKPLLRLKGFPSFPLVERQANEVDWWDMVCNVKKLINEKKEDGKVFWQNLAGYKRQEALRPYLSSEEDRKKGKKFARYQLGDLLLHLEKKHGEDWGKVYDEAWERIDKKVEGLSKHIKLEEERRSEDAQSKAALTDWLRAKASFVIEGSKEADKDEFCRCELKLQKWYGDLRGKPFAIEAENSILDISGFSKQYNCAFIWQKDGVKKLNLYLIINYFKGGKLRFKKIKPEAFEANRFYTVINKKSGEIVPMEVNFNFDDPNLIILPLAFGKRQGREFIWNDLLSLETGSLKLANGRVIEKTLYNRRTRQDEPALFVALTFERREVLDSSNIKPMNLIGVDRGENIPAVIALTDPEGCPLSRFKDSLGNPTHILRIGESYKEKQRTIQAKKEVEQRRAGGYSRKYASKAKNLADDMVRNTARDLLYYAVTQDAMLIFENLSRGFGRQGKRTFMAERQYTRMEDWLTAKLAYEGLPSKTYLSKTLAQYTSKTCSNCGFTITSADYDRVLEKLKKTATGWMTTINGKELKVEGQITYYNRYKRQNVVKDLSVELDRLSEESVNNDISSWDKGRSGEALSLLKKRFSHRPVQEKFVCLNCGFETHADEQAALNIARSWLFLRSQEYKKYQTNKTTGNTDKRAFVETWQSFYRKKLKEVWKPAV

SEQ ID NO: 46001 - protein, 978 aa, synthetic construct
  REGION 1..978: note = engineered CasX variant
QEIKRINKIRRRLVKDSNTKKAGKTGPMKTLLVRVMTPDLRERLENLRKKPENIPQPISNTSRANLNKLLTDYTEMKKAILHVYWEEFQKDPVGLMSRVAQPASKKIDQNKLKPEMDEKGNLTTAGFACSQCGQPLFVYKLEQVSEKGKAYTNYFGRCNVAEHEKLILLAQLKPEKDSDEAVTYSLGKFGQRALDFYSIHVTKESTHPVKPLAQIAGNRYASHPVGKALSDACMGTIASFLSKYQDIIIEHQKVVKGNQKRLESLRELAGKENLEYPSVTLPPQPHTKEGVDAYNEVIARVRMWVNLNLWQKLKLSRDDAKPLLRLKGFPSFPLVERQANEVDWWDMVCNVKKLINEKKEDGKVFWQNLAGYKRQEALRPYLSSEEDRKKGKKFARYQLGDLLLHLEKKHGEDWGKVYDEAWERIDKKVEGLSKHIKLEEERRSEDAQSKAALTDWLRAKASFVIEGSKEADKDEFCRCELKLQKWYGDLRGKPFAIEAENSILDISGFSKQYNCAFIWQKDGVKKLNLYLIINYFKGGKLRFKKIKPEAFEANRFYTVINKKSGEIVPMEVNFNFDDPNLIILPLAFGKRQGREFIWNDLLSLETGSLKLANGRVIEKTLYNRRTRQDEPALFVALTFERREVLDSSNIKPMNLIGVDRGENIPAVIALTDPEGCPLSRFKDSLGNPTHILRIGESYKEKQRTIQAKKEVEQRRAGGYSRKYASKAKNLADDMVRNTARDLLYYAVTQDAMLIFENLSRGFGRQGKRTFMAERQYTRMEDWLTAKLAYEGLPSKTYLSKTLAQYTSKTCSNCGFTITSADYDRVLEKLKKTATGWMTTINGKELKVEGQITYYNRYKRQNVVKDLSVELDRLSEESVNNDISSWDKGRSGEALSLLKKRFSHRPVQEKFVCLNCGFETHADEQAALNIARSWLFLRSQEYKKYQTNKTTGNTDKRAFVETWQSFYRKKLKEVWKPAV

SEQ ID NO: 46002 - protein, 978 aa, synthetic construct
  REGION 1..978: note = engineered CasX variant
QEIKRINKIRRRLVKDSNTKKAGKTGPMKTLLVRVMTPDLRERLENLRKKPENIPQPISNTSRANLNKLLTDYTEMKKAILHVYWEEFQKDPVGLMSRVAQPASKKIDQNKLKPEMDEKGNLTTAGFACSQCGQPLFVYKLEQVSEKGKAYTNYFGRCNVAEHEKLILLAQLKPEKDSDEAVTYSLGKFGQRALDFYSIHVTKESTHPVKPLAQIAGNRYASSPVGKALSDACMGTIASFLSKYQDIIIEHQKVVKGNQKRLESLRELAGKENLEYPSVTLPPQPHTKEGVDAYNEVIARVRMWVNLNLWQKLKLSRDDAKPLLRLKGFPSFPLVERQANEVDWWDMVCNVKKLINEKKEDGKVFWQNLAGYKRQEALRPYLSSEEDRKKGKKFARYQLGDLLLHLEKKHGEDWGKVYDEAWERIDKKVEGLSKHIKLEEERRSEDAQSKAALTDWLRAKASFVIEGSKEADKDEFCRCELKLQKWYGDLRGKPFAIEAENSILDISGFSKQYNCAFIWQKDGVKKLNLYLIINYFKGGKLRFKKIKPEAFEANRFYTVINKKSGEIVPMEVNFNFDDPNLIILPLAFGKRQGREFIWNDLLSLETGSLKLANGRVIEKTLYNRRTRQDEPALFVALTFERREVLDSSNIKPMNLIGVDRGENIPAVIALTDPEGCPLSRFKDSLGNPTHILRIGESYKEKQRTIQAKKEVEQRRAGGYSRKYASKAKNLADDMVRNTARDLLYYAVTQDAMLIFENLSRGFGRQGKRTFMAERQYTRMEDWLTAKLAYEGLPSKTYLSKTLAQYTSKTCSNCGFTITSADYDRVLEKLKKTATGWMTTINGKELKVEGQITYYNRYKRQNVVKDLSVELDRLSEESVNNDISSWDKGRSGEALSLLKKRFSHRPVQEKFVCLNCGFETHADEQAALNIARSWLFLRSQEYKKYQTNKTTGNTDKRAFVETWQSFYRKKLKEVWKPAV

SEQ ID NO: 46003 - protein, 978 aa, synthetic construct
  REGION 1..978: note = engineered CasX variant
QEIKRINKIRRRLVKDSNTKKAGKTGPMKTLLVRVMTPDLRERLENLRKKPENIPQPISNTSRANLNKLLTDYTEMKKAILHVYWEEFQKDPVGLMSRVAQPASKKIDQNKLKPEMDEKGNLTTAGFACSQCGQPLFVYKLEQVSEKGKAYTNYFGRCNVAEHEKLILLAQLKPEKDSDEAVTYSLGKFGQRALDFYSIHVTKESTHPVKPLAQIAGNRYASTPVGKALSDACMGTIASFLSKYQDIIIEHQKVVKGNQKRLESLRELAGKENLEYPSVTLPPQPHTKEGVDAYNEVIARVRMWVNLNLWQKLKLSRDDAKPLLRLKGFPSFPLVERQANEVDWWDMVCNVKKLINEKKEDGKVFWQNLAGYKRQEALRPYLSSEEDRKKGKKFARYQLGDLLLHLEKKHGEDWGKVYDEAWERIDKKVEGLSKHIKLEEERRSEDAQSKAALTDWLRAKASFVIEGSKEADKDEFCRCELKLQKWYGDLRGKPFAIEAENSILDISGFSKQYNCAFIWQKDGVKKLNLYLIINYFKGGKLRFKKIKPEAFEANRFYTVINKKSGEIVPMEVNFNFDDPNLIILPLAFGKRQGREFIWNDLLSLETGSLKLANGRVIEKTLYNRRTRQDEPALFVALTFERREVLDSSNIKPMNLIGVDRGENIPAVIALTDPEGCPLSRFKDSLGNPTHILRIGESYKEKQRTIQAKKEVEQRRAGGYSRKYASKAKNLADDMVRNTARDLLYYAVTQDAMLIFENLSRGFGRQGKRTFMAERQYTRMEDWLTAKLAYEGLPSKTYLSKTLAQYTSKTCSNCGFTITSADYDRVLEKLKKTATGWMTTINGKELKVEGQITYYNRYKRQNVVKDLSVELDRLSEESVNNDISSWDKGRSGEALSLLKKRFSHRPVQEKFVCLNCGFETHADEQAALNIARSWLFLRSQEYKKYQTNKTTGNTDKRAFVETWQSFYRKKLKEVWKPAV

SEQ ID NO: 46004 - protein, 978 aa, synthetic construct
  REGION 1..978: note = engineered CasX variant
QEIKRINKIRRRLVKDSNTKKAGKTGPMKTLLVRVMTPDLRERLENLRKKPENIPQPISNTSRANLNKLLTDYTEMKKAILHVYWEEFQKDPVGLMSRVAQPASKKIDQNKLKPEMDEKGNLTTAGFACSQCGQPLFVYKLEQVSEKGKAYTNYFGRCNVAEHEKLILLAQLKPEKDSDEAVTYSLGKFGQRALDFYSIHVTKESTHPVKPLAQIAGNRYASAPVGKALSDACMGTIASFLSKYQDIIIEHQKVVKGNQKRLESLRELAGKENLEYPSVTLPPQPHTKEGVDAYNEVIARVRMWVNLNLWQKLKLSRDDAKPLLRLKGFPSFPLVERQANEVDWWDMVCNVKKLINEKKEDGKVFWQNLAGYKRQEALRPYLSSEEDRKKGKKFARYQLGDLLLHLEKKHGEDWGKVYDEAWERIDKKVEGLSKHIKLEEERRSEDAQSKAALTDWLRAKASFVIEGSKEADKDEFCRCELKLQKWYGDLRGKPFAIEAENSILDISGFSKQYNCAFIWQKDGVKKLNLYLIINYFKGGKLRFKKIKPEAFEANRFYTVINKKSGEIVPMEVNFNFDDPNLIILPLAFGKRQGREFIWNDLLSLETGSLKLANGRVIEKTLYNRRTRQDEPALFVALTFERREVLDSSNIKPMNLIGVDRGENIPAVIALTDPEGCPLSRFKDSLGNPTHILRIGESYKEKQRTIQAKKEVEQRRAGGYSRKYASKAKNLADDMVRNTARDLLYYAVTQDAMLIFENLSRGFGRQGKRTFMAERQYTRMEDWLTAKLAYEGLPSKTYLSKTLAQYTSKTCSNCGFTITSADYDRVLEKLKKTATGWMTTINGKELKVEGQITYYNRYKRQNVVKDLSVELDRLSEESVNNDISSWDKGRSGEALSLLKKRFSHRPVQEKFVCLNCGFETHADEQAALNIARSWLFLRSQEYKKYQTNKTTGNTDKRAFVETWQSFYRKKLKEVWKPAV

SEQ ID NO: 46005 - protein, 978 aa, synthetic construct
  REGION 1..978: note = engineered CasX variant
QEIKRINKIRRRLVKDSNTKKAGKTGPMKTLLVRVMTPDLRERLENLRKKPENIPQPISNTSRANLNKLLTDYTEMKKAILHVYWEEFQKDPVGLMSRVAQPASKKIDQNKLKPEMDEKGNLTTAGFACSQCGQPLFVYKLEQVSEKGKAYTNYFGRCNVAEHEKLILLAQLKPEKDSDEAVTYSLGKFGQRALDFYSIHVTKESTHPVKPLAQIAGNRYASVPVGKALSDACMGTIASFLSKYQDIIIEHQKVVKGNQKRLESLRELAGKENLEYPSVTLPPQPHTKEGVDAYNEVIARVRMWVNLNLWQKLKLSRDDAKPLLRLKGFPSFPLVERQANEVDWWDMVCNVKKLINEKKEDGKVFWQNLAGYKRQEALRPYLSSEEDRKKGKKFARYQLGDLLLHLEKKHGEDWGKVYDEAWERIDKKVEGLSKHIKLEEERRSEDAQSKAALTDWLRAKASFVIEGSKEADKDEFCRCELKLQKWYGDLRGKPFAIEAENSILDISGFSKQYNCAFIWQKDGVKKLNLYLIINYFKGGKLRFKKIKPEAFEANRFYTVINKKSGEIVPMEVNFNFDDPNLIILPLAFGKRQGREFIWNDLLSLETGSLKLANGRVIEKTLYNRRTRQDEPALFVALTFERREVLDSSNIKPMNLIGVDRGENIPAVIALTDPEGCPLSRFKDSLGNPTHILRIGESYKEKQRTIQAKKEVEQRRAGGYSRKYASKAKNLADDMVRNTARDLLYYAVTQDAMLIFENLSRGFGRQGKRTFMAERQYTRMEDWLTAKLAYEGLPSKTYLSKTLAQYTSKTCSNCGFTITSADYDRVLEKLKKTATGWMTTINGKELKVEGQITYYNRYKRQNVVKDLSVELDRLSEESVNNDISSWDKGRSGEALSLLKKRFSHRPVQEKFVCLNCGFETHADEQAALNIARSWLFLRSQEYKKYQTNKTTGNTDKRAFVETWQSFYRKKLKEVWKPAV

SEQ ID NO: 46006 - protein, 978 aa, synthetic construct
  REGION 1..978: note = engineered CasX variant
QEIKRINKIRRRLVKDSNTKKAGKTGPMKTLLVRVMTPDLRERLENLRKKPENIPQPISNTSRANLNKLLTDYTEMKKAILHVYWEEFQKDPVGLMSRVAQPASKKIDQNKLKPEMDEKGNLTTAGFACSQCGQPLFVYKLEQVSEKGKAYTNYFGRCNVAEHEKLIKLAQLKPEKDSDEAVTYSLGKFGQRALDFYSIHVTKESTHPVKPLAQIAGNRYASGPVGKALSDACMGTIASFLSKYQDIIIEHQKVVKGNQKRLESLRELAGKENLEYPSVTLPPQPHTKEGVDAYNEVIARVRMWVNLNLWQKLKLSRDDAKPLLRLKGFPSFPLVERQANEVDWWDMVCNVKKLINEKKEDGKVFWQNLAGYKRQEALRPYLSSEEDRKKGKKFARYQLGDLLLHLEKKHGEDWGKVYDEAWERIDKKVEGLSKHIKLEEERRSEDAQSKAALTDWLRAKASFVIEGSKEADKDEFCRCELKLQKWYGDLRGKPFAIEAENSILDISGFSKQYNCAFIWQKDGVKKLNLYLIINYFKGGKLRFKKIKPEAFEANRFYTVINKKSGEIVPMEVNFNFDDPNLIILPLAFGKRQGREFIWNDLLSLETGSLKLANGRVIEKTLYNRRTRQDEPALFVALTFERREVLDSSNIKPMNLIGVDRGENIPAVIALTDPEGCPLSRFKDSLGNPTHILRIGESYKEKQRTIQAKKEVEQRRAGGYSRKYASKAKNLADDMVRNTARDLLYYAVTQDAMLIFENLSRGFGRQGKRTFMAERQYTRMEDWLTAKLAYEGLPSKTYLSKTLAQYTSKTCSNCGFTITSADYDRVLEKLKKTATGWMTTINGKELKVEGQITYYNRYKRQNVVKDLSVELDRLSEESVNNDISSWDKGRSGEALSLLKKRFSHRPVQEKFVCLNCGFETHADEQAALNIARSWLFLRSQEYKKYQTNKTTGNTDKRAFVETWQSFYRKKLKEVWKPAV

SEQ ID NO: 46007 - protein, 977 aa, synthetic construct
  REGION 1..977: note = engineered CasX variant
QEIKRINKIRRRLVKDSNTKKAGKTGPMKTLLVRVMTPDLRERLENLRKKPENIPQPISNTSRANLNKLLTDYTEMKKAILHVYWEEFQKDPVGLMSRVAQPASKKIDQNKLKPEMDEKGNLTTAGFACSQCGQPLFVYKLEQVSEKGKAYTNYFGRCNVAEHEKLILLAQLKPEKDSDEAVTYSLGKFGQRALDFYSIHVTKESTHPVKPLAQIAGNRYASPVGKALSDACMGTIASFLSKYQDIIIEHQKVVKGNQKRLESLRELAGKENLEYPSVTLPPQPHTKEGVDAYNEVIARVRMWVNLNLWQKLKLSRDDAKPLLRLKGFPSFPLVERQANEVDWWDMVCNVKKLINEKKEDGKVFWQNLAGYKRQEALRPYLSSEEDRKKGKKFARYQLGDLLLHLEKKHGEDWGKVYDEAWERIDKKVEGLSKHIKLEEERRSEDAQSKAALTDWLRAKASFVIEGSKEADKDEFCRCELKLQKWYGDLRGKPFAIEAENSILDISGFSKQYNCAFIWQKDGVKKLNLYLIINYFKGGKLRFKKIKPEAFEANRFYTVINKKSGEIVPMEVNFNFDDPNLIILPLAFGKRQGREFIWNDLLSLETGSLKLANGRVIEKTLYNRRTRQDEPALFVALTFERREVLDSSNIKPMNLIGVDRGENIPAVIALTDPEGCPLSRFKDSLGNPTHILRIGESYKEKQRTIQAKKEVEQRRAGGYSRKYASKAKNLADDMVRNTARDLLYYAVTQDAMLIFENLSRGFGRQGKRTFMAERQYTRMEDWLTAKLAYEGLPSKTYLSKTLAQYTSKTCSNCGFTITSADYDRVLEKLKKTATGWMTTINGKELKVEGQITYYNRYKRQNVVKDLSVELDRLSEESVNNDISSWDKGRSGEALSLLKKRFSHRPVQEKFVCLNCGFETHADEQAALNIARSWLFLRSQEYKKYQTNKTTGNTDKRAFVETWQSFYRKKLKEVWKPAV

SEQ ID NO: 46008 - protein, 979 aa, synthetic construct
  REGION 1..979: note = engineered CasX variant
QEIKRINKIRRRLVKDSNTKKAGKTGPMKTLLVRVMTPDLRERLENLRKKPENIPQPISNTSRANLNKLLTDYTEMKKAILHVYWEEFQKDPVGLMSRVAQPASKKIDQNKLKPEMDEKGNLTTAGFACSQCGQPLFVYKLEQVSEKGKAYTNYFGRCNVAEHEKLILLAQLKPEKDSDEAVTYSLGKFGQRALDFYSIHVTKESTHPVKPLAQIAGNRYASYPVGKALSDACMGTIASFLSKYQDIIIEHQKVVKGNQKRLESLRELAGKENLEYPSVTLPPQPHTKEGVDAYNEVIARVRMWVNLNLWQKLKLSRDDAKPLLRLKGFPSFPLVERQANEVDWWDMVCNVKKLINEKKEDGKVFWQNLAGYKRQEALRPYLSSEEDRKKGKKFARYQLGDLLLHLEKKHGEDWGKVYDEAWERIDKKVEGLSKHIKLEEERRSEDAQSKAALTDWLRAKASFVIEGLKEADDKDEFCRCELKLQKWYGDLRGKPFAIEAENSILDISGFSKQYNCAFIWQKDGVKKLNLYLIINYFKGGKLRFKKIKPEAFEANRFYTVINKKSGEIVPMEVNFNFDDPNLIILPLAFGKRQGREFIWNDLLSLETGSLKLANGRVIEKTLYNRRTRQDEPALFVALTFERREVLDSSNIKPMNLIGVDRGENIPAVIALTDPEGCPLSRFKDSLGNPTHILRIGESYKEKQRTIQAKKEVEQRRAGGYSRKYASKAKNLADDMVRNTARDLLYYAVTQDAMLIFENLSRGFGRQGKRTFMAERQYTRMEDWLTAKLAYEGLPSKTYLSKTLAQYTSKTCSNCGFTITSADYDRVLEKLKKTATGWMTTINGKELKVEGQITYYNRYKRQNVVKDLSVELDRLSEESVNNDISSWDKGRSGEALSLLKKRFSHRPVQEKFVCLNCGFETHADEQAALNIARSWLFLRSQEYKKYQTNKTTGNTDKRAFVETWQSFYRKKLKEVWKPAV

SEQ ID NO: 46009 - protein, 979 aa, synthetic construct
  REGION 1..979: note = engineered CasX variant
QEIKRINKIRRRLVKDSNTKKAGKTGPMKTLLVRVMTPDLRERLENLRKKPENIPQPISNTSRANLNKLLTDYTEMKKAILHVYWEEFQKDPVGLMSRVAQPASKKIDQNKLKPEMDEKGNLTTAGFACSQCGQPLFVYKLEQVSEKGKAYTNYFGRCNVAEHEKLILLAQLKPEKDSDEAVTYSLGKFGQRALDFYSIHVTKESTHPVKPLAQIAGNRYASHPVGKALSDACMGTIASFLSKYQDIIIEHQKVVKGNQKRLESLRELAGKENLEYPSVTLPPQPHTKEGVDAYNEVIARVRMWVNLNLWQKLKLSRDDAKPLLRLKGFPSFPLVERQANEVDWWDMVCNVKKLINEKKEDGKVFWQNLAGYKRQEALRPYLSSEEDRKKGKKFARYQLGDLLLHLEKKHGEDWGKVYDEAWERIDKKVEGLSKHIKLEEERRSEDAQSKAALTDWLRAKASFVIEGLKEADDKDEFCRCELKLQKWYGDLRGKPFAIEAENSILDISGFSKQYNCAFIWQKDGVKKLNLYLIINYFKGGKLRFKKIKPEAFEANRFYTVINKKSGEIVPMEVNFNFDDPNLIILPLAFGKRQGREFIWNDLLSLETGSLKLANGRVIEKTLYNRRTRQDEPALFVALTFERREVLDSSNIKPMNLIGVDRGENIPAVIALTDPEGCPLSRFKDSLGNPTHILRIGESYKEKQRTIQAKKEVEQRRAGGYSRKYASKAKNLADDMVRNTARDLLYYAVTQDAMLIFENLSRGFGRQGKRTFMAERQYTRMEDWLTAKLAYEGLPSKTYLSKTLAQYTSKTCSNCGFTITSADYDRVLEKLKKTATGWMTTINGKELKVEGQITYYNRYKRQNVVKDLSVELDRLSEESVNNDISSWDKGRSGEALSLLKKRFSHRPVQEKFVCLNCGFETHADEQAALNIARSWLFLRSQEYKKYQTNKTTGNTDKRAFVETWQSFYRKKLKEVWKPAV

SEQ ID NO: 46010 - protein, 979 aa, synthetic construct
  REGION 1..979: note = engineered CasX variant
QEIKRINKIRRRLVKDSNTKKAGKTGPMKTLLVRVMTPDLRERLENLRKKPENIPQPISNTSRANLNKLLTDYTEMKKAILHVYWEEFQKDPVGLMSRVAQPASKKIDQNKLKPEMDEKGNLTTAGFACSQCGQPLFVYKLEQVSEKGKAYTNYFGRCNVAEHEKLILLAQLKPEKDSDEAVTYSLGKFGQRALDFYSIHVTKESTHPVKPLAQIAGNRYASSPVGKALSDACMGTIASFLSKYQDIIIEHQKVVKGNQKRLESLRELAGKENLEYPSVTLPPQPHTKEGVDAYNEVIARVRMWVNLNLWQKLKLSRDDAKPLLRLKGFPSFPLVERQANEVDWWDMVCNVKKLINEKKEDGKVFWQNLAGYKRQEALRPYLSSEEDRKKGKKFARYQLGDLLLHLEKKHGEDWGKVYDEAWERIDKKVEGLSKHIKLEEERRSEDAQSKAALTDWLRAKASFVIEGLKEADDKDEFCRCELKLQKWYGDLRGKPFAIEAENSILDISGFSKQYNCAFIWQKDGVKKLNLYLIINYFKGGKLRFKKIKPEAFEANRFYTVINKKSGEIVPMEVNFNFDDPNLIILPLAFGKRQGREFIWNDLLSLETGSLKLANGRVIEKTLYNRRTRQDEPALFVALTFERREVLDSSNIKPMNLIGVDRGENIPAVIALTDPEGCPLSRFKDSLGNPTHILRIGESYKEKQRTIQAKKEVEQRRAGGYSRKYASKAKNLADDMVRNTARDLLYYAVTQDAMLIFENLSRGFGRQGKRTFMAERQYTRMEDWLTAKLAYEGLPSKTYLSKTLAQYTSKTCSNCGFTITSADYDRVLEKLKKTATGWMTTINGKELKVEGQITYYNRYKRQNVVKDLSVELDRLSEESVNNDISSWDKGRSGEALSLLKKRFSHRPVQEKFVCLNCGFETHADEQAALNIARSWLFLRSQEYKKYQTNKTTGNTDKRAFVETWQSFYRKKLKEVWKPAV

SEQ ID NO: 46011 - protein, 979 aa, synthetic construct
  REGION 1..979: note = engineered CasX variant
QEIKRINKIRRRLVKDSNTKKAGKTGPMKTLLVRVMTPDLRERLENLRKKPENIPQPISNTSRANLNKLLTDYTEMKKAILHVYWEEFQKDPVGLMSRVAQPASKKIDQNKLKPEMDEKGNLTTAGFACSQCGQPLFVYKLEQVSEKGKAYTNYFGRCNVAEHEKLILLAQLKPEKDSDEAVTYSLGKFGQRALDFYSIHVTKESTHPVKPLAQIAGNRYASTPVGKALSDACMGTIASFLSKYQDIIIEHQKVVKGNQKRLESLRELAGKENLEYPSVTLPPQPHTKEGVDAYNEVIARVRMWVNLNLWQKLKLSRDDAKPLLRLKGFPSFPLVERQANEVDWWDMVCNVKKLINEKKEDGKVFWQNLAGYKRQEALRPYLSSEEDRKKGKKFARYQLGDLLLHLEKKHGEDWGKVYDEAWERIDKKVEGLSKHIKLEEERRSEDAQSKAALTDWLRAKASFVIEGLKEADDKDEFCRCELKLQKWYGDLRGKPFAIEAENSILDISGFSKQYNCAFIWQKDGVKKLNLYLIINYFKGGKLRFKKIKPEAFEANRFYTVINKKSGEIVPMEVNFNFDDPNLIILPLAFGKRQGREFIWNDLLSLETGSLKLANGRVIEKTLYNRRTRQDEPALFVALTFERREVLDSSNIKPMNLIGVDRGENIPAVIALTDPEGCPLSRFKDSLGNPTHILRIGESYKEKQRTIQAKKEVEQRRAGGYSRKYASKAKNLADDMVRNTARDLLYYAVTQDAMLIFENLSRGFGRQGKRTFMAERQYTRMEDWLTAKLAYEGLPSKTYLSKTLAQYTSKTCSNCGFTITSADYDRVLEKLKKTATGWMTTINGKELKVEGQITYYNRYKRQNVVKDLSVELDRLSEESVNNDISSWDKGRSGEALSLLKKRFSHRPVQEKFVCLNCGFETHADEQAALNIARSWLFLRSQEYKKYQTNKTTGNTDKRAFVETWQSFYRKKLKEVWKPAV

SEQ ID NO: 46012 - protein, 979 aa, synthetic construct
  REGION 1..979: note = engineered CasX variant
QEIKRINKIRRRLVKDSNTKKAGKTGPMKTLLVRVMTPDLRERLENLRKKPENIPQPISNTSRANLNKLLTDYTEMKKAILHVYWEEFQKDPVGLMSRVAQPASKKIDQNKLKPEMDEKGNLTTAGFACSQCGQPLFVYKLEQVSEKGKAYTNYFGRCNVAEHEKLILLAQLKPEKDSDEAVTYSLGKFGQRALDFYSIHVTKESTHPVKPLAQIAGNRYASAPVGKALSDACMGTIASFLSKYQDIIIEHQKVVKGNQKRLESLRELAGKENLEYPSVTLPPQPHTKEGVDAYNEVIARVRMWVNLNLWQKLKLSRDDAKPLLRLKGFPSFPLVERQANEVDWWDMVCNVKKLINEKKEDGKVFWQNLAGYKRQEALRPYLSSEEDRKKGKKFARYQLGDLLLHLEKKHGEDWGKVYDEAWERIDKKVEGLSKHIKLEEERRSEDAQSKAALTDWLRAKASFVIEGLKEADDKDEFCRCELKLQKWYGDLRGKPFAIEAENSILDISGFSKQYNCAFIWQKDGVKKLNLYLIINYFKGGKLRFKKIKPEAFEANRFYTVINKKSGEIVPMEVNFNFDDPNLIILPLAFGKRQGREFIWNDLLSLETGSLKLANGRVIEKTLYNRRTRQDEPALFVALTFERREVLDSSNIKPMNLIGVDRGENIPAVIALTDPEGCPLSRFKDSLGNPTHILRIGESYKEKQRTIQAKKEVEQRRAGGYSRKYASKAKNLADDMVRNTARDLLYYAVTQDAMLIFENLSRGFGRQGKRTFMAERQYTRMEDWLTAKLAYEGLPSKTYLSKTLAQYTSKTCSNCGFTITSADYDRVLEKLKKTATGWMTTINGKELKVEGQITYYNRYKRQNVVKDLSVELDRLSEESVNNDISSWDKGRSGEALSLLKKRFSHRPVQEKFVCLNCGFETHADEQAALNIARSWLFLRSQEYKKYQTNKTTGNTDKRAFVETWQSFYRKKLKEVWKPAV

SEQ ID NO: 46013 - protein, 979 aa, synthetic construct
  REGION 1..979: note = engineered CasX variant
QEIKRINKIRRRLVKDSNTKKAGKTGPMKTLLVRVMTPDLRERLENLRKKPENIPQPISNTSRANLNKLLTDYTEMKKAILHVYWEEFQKDPVGLMSRVAQPASKKIDQNKLKPEMDEKGNLTTAGFACSQCGQPLFVYKLEQVSEKGKAYTNYFGRCNVAEHEKLILLAQLKPEKDSDEAVTYSLGKFGQRALDFYSIHVTKESTHPVKPLAQIAGNRYASVPVGKALSDACMGTIASFLSKYQDIIIEHQKVVKGNQKRLESLRELAGKENLEYPSVTLPPQPHTKEGVDAYNEVIARVRMWVNLNLWQKLKLSRDDAKPLLRLKGFPSFPLVERQANEVDWWDMVCNVKKLINEKKEDGKVFWQNLAGYKRQEALRPYLSSEEDRKKGKKFARYQLGDLLLHLEKKHGEDWGKVYDEAWERIDKKVEGLSKHIKLEEERRSEDAQSKAALTDWLRAKASFVIEGLKEADDKDEFCRCELKLQKWYGDLRGKPFAIEAENSILDISGFSKQYNCAFIWQKDGVKKLNLYLIINYFKGGKLRFKKIKPEAFEANRFYTVINKKSGEIVPMEVNFNFDDPNLIILPLAFGKRQGREFIWNDLLSLETGSLKLANGRVIEKTLYNRRTRQDEPALFVALTFERREVLDSSNIKPMNLIGVDRGENIPAVIALTDPEGCPLSRFKDSLGNPTHILRIGESYKEKQRTIQAKKEVEQRRAGGYSRKYASKAKNLADDMVRNTARDLLYYAVTQDAMLIFENLSRGFGRQGKRTFMAERQYTRMEDWLTAKLAYEGLPSKTYLSKTLAQYTSKTCSNCGFTITSADYDRVLEKLKKTATGWMTTINGKELKVEGQITYYNRYKRQNVVKDLSVELDRLSEESVNNDISSWDKGRSGEALSLLKKRFSHRPVQEKFVCLNCGFETHADEQAALNIARSWLFLRSQEYKKYQTNKTTGNTDKRAFVETWQSFYRKKLKEVWKPAV

SEQ ID NO: 46014 - protein, 979 aa, synthetic construct
  REGION 1..979: note = engineered CasX variant
QEIKRINKIRRRLVKDSNTKKAGKTGPMKTLLVRVMTPDLRERLENLRKKPENIPQPISNTSRANLNKLLTDYTEMKKAILHVYWEEFQKDPVGLMSRVAQPASKKIDQNKLKPEMDEKGNLTTAGFACSQCGQPLFVYKLEQVSEKGKAYTNYFGRCNVAEHEKLIKLAQLKPEKDSDEAVTYSLGKFGQRALDFYSIHVTKESTHPVKPLAQIAGNRYASGPVGKALSDACMGTIASFLSKYQDIIIEHQKVVKGNQKRLESLRELAGKENLEYPSVTLPPQPHTKEGVDAYNEVIARVRMWVNLNLWQKLKLSRDDAKPLLRLKGFPSFPLVERQANEVDWWDMVCNVKKLINEKKEDGKVFWQNLAGYKRQEALRPYLSSEEDRKKGKKFARYQLGDLLLHLEKKHGEDWGKVYDEAWERIDKKVEGLSKHIKLEEERRSEDAQSKAALTDWLRAKASFVIEGLKEADDKDEFCRCELKLQKWYGDLRGKPFAIEAENSILDISGFSKQYNCAFIWQKDGVKKLNLYLIINYFKGGKLRFKKIKPEAFEANRFYTVINKKSGEIVPMEVNFNFDDPNLIILPLAFGKRQGREFIWNDLLSLETGSLKLANGRVIEKTLYNRRTRQDEPALFVALTFERREVLDSSNIKPMNLIGVDRGENIPAVIALTDPEGCPLSRFKDSLGNPTHILRIGESYKEKQRTIQAKKEVEQRRAGGYSRKYASKAKNLADDMVRNTARDLLYYAVTQDAMLIFENLSRGFGRQGKRTFMAERQYTRMEDWLTAKLAYEGLPSKTYLSKTLAQYTSKTCSNCGFTITSADYDRVLEKLKKTATGWMTTINGKELKVEGQITYYNRYKRQNVVKDLSVELDRLSEESVNNDISSWDKGRSGEALSLLKKRFSHRPVQEKFVCLNCGFETHADEQAALNIARSWLFLRSQEYKKYQTNKTTGNTDKRAFVETWQSFYRKKLKEVWKPAV

SEQ ID NO: 46015 - protein, 978 aa, synthetic construct
  REGION 1..978: note = engineered CasX variant
QEIKRINKIRRRLVKDSNTKKAGKTGPMKTLLVRVMTPDLRERLENLRKKPENIPQPISNTSRANLNKLLTDYTEMKKAILHVYWEEFQKDPVGLMSRVAQPASKKIDQNKLKPEMDEKGNLTTAGFACSQCGQPLFVYKLEQVSEKGKAYTNYFGRCNVAEHEKLILLAQLKPEKDSDEAVTYSLGKFGQRALDFYSIHVTKESTHPVKPLAQIAGNRYASPVGKALSDACMGTIASFLSKYQDIIIEHQKVVKGNQKRLESLRELAGKENLEYPSVTLPPQPHTKEGVDAYNEVIARVRMWVNLNLWQKLKLSRDDAKPLLRLKGFPSFPLVERQANEVDWWDMVCNVKKLINEKKEDGKVFWQNLAGYKRQEALRPYLSSEEDRKKGKKFARYQLGDLLLHLEKKHGEDWGKVYDEAWERIDKKVEGLSKHIKLEEERRSEDAQSKAALTDWLRAKASFVIEGLKEADDKDEFCRCELKLQKWYGDLRGKPFAIEAENSILDISGFSKQYNCAFIWQKDGVKKLNLYLIINYFKGGKLRFKKIKPEAFEANRFYTVINKKSGEIVPMEVNFNFDDPNLIILPLAFGKRQGREFIWNDLLSLETGSLKLANGRVIEKTLYNRRTRQDEPALFVALTFERREVLDSSNIKPMNLIGVDRGENIPAVIALTDPEGCPLSRFKDSLGNPTHILRIGESYKEKQRTIQAKKEVEQRRAGGYSRKYASKAKNLADDMVRNTARDLLYYAVTQDAMLIFENLSRGFGRQGKRTFMAERQYTRMEDWLTAKLAYEGLPSKTYLSKTLAQYTSKTCSNCGFTITSADYDRVLEKLKKTATGWMTTINGKELKVEGQITYYNRYKRQNVVKDLSVELDRLSEESVNNDISSWDKGRSGEALSLLKKRFSHRPVQEKFVCLNCGFETHADEQAALNIARSWLFLRSQEYKKYQTNKTTGNTDKRAFVETWQSFYRKKLKEVWKPAV

SEQ ID NO: 46016 - protein, 979 aa, synthetic construct
  REGION 1..979: note = engineered CasX variant
QEIKRINKIRRRLVKDSNTKKAGKTGPMKTLLVRVMTPDLRERLENLRKKPENIPQPISNTSRANLNKLLTDYTEMKKAILHVYWEEFQKDPVGLMSRVAQPASKKIDQNKLKPEMDEKGNLTTAGFACSQCGQPLFVYKLEQVSEKGKAYTNYFGRCNVAEHEKLILLAQLKPEKDSDEAVTYSLGKFGQRALDFYSIHVTKESTHPVKPLAQIAGNRYASYPVGKALSDACMGTIASFLSKYQDIIIEHQKVVKGNQKRLESLRELAGKENLEYPSVTLPPQPHTKEGVDAYNEVIARVRMWVNLNLWQKLKLSRDDAKPLLRLKGFPSFPLVERQANEVDWWDMVCNVKKLINEKKEDGKVFWQNLAGYKRQEALRPYLSSEEDRKKGKKFARYQLGDLLLHLEKKHGEDWGKVYDEAWERIDKKVEGLSKHIKLEEERRSEDAQSKAALTDWLRAKASFVIEGLKEADKDEFCRCELKLQKWYGDLRGKPFAIEAENSILDISGFSKQYNCAFIWQKDGVKKLNLYLIINYFKGGKLRFKKIKPEAFEANRFYTVINKKSGEIVPMEVNFNFDDPNLIILPLAFGKRQGREFIWNDLLSLETGSLKLANGRVIEKTLYNRRTRQDEPALFVALTFERREVLDSSNIKPMNLIGVDRGENIPAVIALTDPEGCPLSRFKDSLGNPTHILRIGESYKEKQRTIQAKKEVEQRRAGGYSRKYASKAKNLADDMVRNTARDLLYYAVTQDAMLIFENLSRGFGRQGKRTFMAERQYTRMEDWLTAKLAYEGLPSKTYLSKTLAQYTSKTCSNCGFTITSADYDRVLEKLKKTATGWMTTINGKELKVEGQITYYNRYKRQNVVKDLSVELDRLSEESVNNDISSWDKGRSGNEALSLLKKRFSHRPVQEKFVCLNCGFETHADEQAALNIARSWLFLRSQEYKKYQTNKTTGNTDKRAFVETWQSFYRKKLKEVWKPAV

SEQ ID NO: 46017 - protein, 979 aa, synthetic construct
  REGION 1..979: note = engineered CasX variant
QEIKRINKIRRRLVKDSNTKKAGKTGPMKTLLVRVMTPDLRERLENLRKKPENIPQPISNTSRANLNKLLTDYTEMKKAILHVYWEEFQKDPVGLMSRVAQPASKKIDQNKLKPEMDEKGNLTTAGFACSQCGQPLFVYKLEQVSEKGKAYTNYFGRCNVAEHEKLILLAQLKPEKDSDEAVTYSLGKFGQRALDFYSIHVTKESTHPVKPLAQIAGNRYASHPVGKALSDACMGTIASFLSKYQDIIIEHQKVVKGNQKRLESLRELAGKENLEYPSVTLPPQPHTKEGVDAYNEVIARVRMWVNLNLWQKLKLSRDDAKPLLRLKGFPSFPLVERQANEVDWWDMVCNVKKLINEKKEDGKVFWQNLAGYKRQEALRPYLSSEEDRKKGKKFARYQLGDLLLHLEKKHGEDWGKVYDEAWERIDKKVEGLSKHIKLEEERRSEDAQSKAALTDWLRAKASFVIEGLKEADKDEFCRCELKLQKWYGDLRGKPFAIEAENSILDISGFSKQYNCAFIWQKDGVKKLNLYLIINYFKGGKLRFKKIKPEAFEANRFYTVINKKSGEIVPMEVNFNFDDPNLIILPLAFGKRQGREFIWNDLLSLETGSLKLANGRVIEKTLYNRRTRQDEPALFVALTFERREVLDSSNIKPMNLIGVDRGENIPAVIALTDPEGCPLSRFKDSLGNPTHILRIGESYKEKQRTIQAKKEVEQRRAGGYSRKYASKAKNLADDMVRNTARDLLYYAVTQDAMLIFENLSRGFGRQGKRTFMAERQYTRMEDWLTAKLAYEGLPSKTYLSKTLAQYTSKTCSNCGFTITSADYDRVLEKLKKTATGWMTTINGKELKVEGQITYYNRYKRQNVVKDLSVELDRLSEESVNNDISSWDKGRSGNEALSLLKKRFSHRPVQEKFVCLNCGFETHADEQAALNIARSWLFLRSQEYKKYQTNKTTGNTDKRAFVETWQSFYRKKLKEVWKPAV

SEQ ID NO: 46018 - protein, 979 aa, synthetic construct
  REGION 1..979: note = engineered CasX variant
QEIKRINKIRRRLVKDSNTKKAGKTGPMKTLLVRVMTPDLRERLENLRKKPENIPQPISNTSRANLNKLLTDYTEMKKAILHVYWEEFQKDPVGLMSRVAQPASKKIDQNKLKPEMDEKGNLTTAGFACSQCGQPLFVYKLEQVSEKGKAYTNYFGRCNVAEHEKLILLAQLKPEKDSDEAVTYSLGKFGQRALDFYSIHVTKESTHPVKPLAQIAGNRYASSPVGKALSDACMGTIASFLSKYQDIIIEHQKVVKGNQKRLESLRELAGKENLEYPSVTLPPQPHTKEGVDAYNEVIARVRMWVNLNLWQKLKLSRDDAKPLLRLKGFPSFPLVERQANEVDWWDMVCNVKKLINEKKEDGKVFWQNLAGYKRQEALRPYLSSEEDRKKGKKFARYQLGDLLLHLEKKHGEDWGKVYDEAWERIDKKVEGLSKHIKLEEERRSEDAQSKAALTDWLRAKASFVIEGLKEADKDEFCRCELKLQKWYGDLRGKPFAIEAENSILDISGFSKQYNCAFIWQKDGVKKLNLYLIINYFKGGKLRFKKIKPEAFEANRFYTVINKKSGEIVPMEVNFNFDDPNLIILPLAFGKRQGREFIWNDLLSLETGSLKLANGRVIEKTLYNRRTRQDEPALFVALTFERREVLDSSNIKPMNLIGVDRGENIPAVIALTDPEGCPLSRFKDSLGNPTHILRIGESYKEKQRTIQAKKEVEQRRAGGYSRKYASKAKNLADDMVRNTARDLLYYAVTQDAMLIFENLSRGFGRQGKRTFMAERQYTRMEDWLTAKLAYEGLPSKTYLSKTLAQYTSKTCSNCGFTITSADYDRVLEKLKKTATGWMTTINGKELKVEGQITYYNRYKRQNVVKDLSVELDRLSEESVNNDISSWDKGRSGNEALSLLKKRFSHRPVQEKFVCLNCGFETHADEQAALNIARSWLFLRSQEYKKYQTNKTTGNTDKRAFVETWQSFYRKKLKEVWKPAV

SEQ ID NO: 46019 - protein, 979 aa, synthetic construct
  REGION 1..979: note = engineered CasX variant
QEIKRINKIRRRLVKDSNTKKAGKTGPMKTLLVRVMTPDLRERLENLRKKPENIPQPISNTSRANLNKLLTDYTEMKKAILHVYWEEFQKDPVGLMSRVAQPASKKIDQNKLKPEMDEKGNLTTAGFACSQCGQPLFVYKLEQVSEKGKAYTNYFGRCNVAEHEKLILLAQLKPEKDSDEAVTYSLGKFGQRALDFYSIHVTKESTHPVKPLAQIAGNRYASTPVGKALSDACMGTIASFLSKYQDIIIEHQKVVKGNQKRLESLRELAGKENLEYPSVTLPPQPHTKEGVDAYNEVIARVRMWVNLNLWQKLKLSRDDAKPLLRLKGFPSFPLVERQANEVDWWDMVCNVKKLINEKKEDGKVFWQNLAGYKRQEALRPYLSSEEDRKKGKKFARYQLGDLLLHLEKKHGEDWGKVYDEAWERIDKKVEGLSKHIKLEEERRSEDAQSKAALTDWLRAKASFVIEGLKEADKDEFCRCELKLQKWYGDLRGKPFAIEAENSILDISGFSKQYNCAFIWQKDGVKKLNLYLIINYFKGGKLRFKKIKPEAFEANRFYTVINKKSGEIVPMEVNFNFDDPNLIILPLAFGKRQGREFIWNDLLSLETGSLKLANGRVIEKTLYNRRTRQDEPALFVALTFERREVLDSSNIKPMNLIGVDRGENIPAVIALTDPEGCPLSRFKDSLGNPTHILRIGESYKEKQRTIQAKKEVEQRRAGGYSRKYASKAKNLADDMVRNTARDLLYYAVTQDAMLIFENLSRGFGRQGKRTFMAERQYTRMEDWLTAKLAYEGLPSKTYLSKTLAQYTSKTCSNCGFTITSADYDRVLEKLKKTATGWMTTINGKELKVEGQITYYNRYKRQNVVKDLSVELDRLSEESVNNDISSWDKGRSGNEALSLLKKRFSHRPVQEKFVCLNCGFETHADEQAALNIARSWLFLRSQEYKKYQTNKTTGNTDKRAFVETWQSFYRKKLKEVWKPAV

SEQ ID NO: 46020 - protein, 979 aa, synthetic construct
  REGION 1..979: note = engineered CasX variant
QEIKRINKIRRRLVKDSNTKKAGKTGPMKTLLVRVMTPDLRERLENLRKKPENIPQPISNTSRANLNKLLTDYTEMKKAILHVYWEEFQKDPVGLMSRVAQPASKKIDQNKLKPEMDEKGNLTTAGFACSQCGQPLFVYKLEQVSEKGKAYTNYFGRCNVAEHEKLILLAQLKPEKDSDEAVTYSLGKFGQRALDFYSIHVTKESTHPVKPLAQIAGNRYASAPVGKALSDACMGTIASFLSKYQDIIIEHQKVVKGNQKRLESLRELAGKENLEYPSVTLPPQPHTKEGVDAYNEVIARVRMWVNLNLWQKLKLSRDDAKPLLRLKGFPSFPLVERQANEVDWWDMVCNVKKLINEKKEDGKVFWQNLAGYKRQEALRPYLSSEEDRKKGKKFARYQLGDLLLHLEKKHGEDWGKVYDEAWERIDKKVEGLSKHIKLEEERRSEDAQSKAALTDWLRAKASFVIEGLKEADKDEFCRCELKLQKWYGDLRGKPFAIEAENSILDISGFSKQYNCAFIWQKDGVKKLNLYLIINYFKGGKLRFKKIKPEAFEANRFYTVINKKSGEIVPMEVNFNFDDPNLIILPLAFGKRQGREFIWNDLLSLETGSLKLANGRVIEKTLYNRRTRQDEPALFVALTFERREVLDSSNIKPMNLIGVDRGENIPAVIALTDPEGCPLSRFKDSLGNPTHILRIGESYKEKQRTIQAKKEVEQRRAGGYSRKYASKAKNLADDMVRNTARDLLYYAVTQDAMLIFENLSRGFGRQGKRTFMAERQYTRMEDWLTAKLAYEGLPSKTYLSKTLAQYTSKTCSNCGFTITSADYDRVLEKLKKTATGWMTTINGKELKVEGQITYYNRYKRQNVVKDLSVELDRLSEESVNNDISSWDKGRSGNEALSLLKKRFSHRPVQEKFVCLNCGFETHADEQAALNIARSWLFLRSQEYKKYQTNKTTGNTDKRAFVETWQSFYRKKLKEVWKPAV

SEQ ID NO: 46021 - protein, 979 aa, synthetic construct
  REGION 1..979: note = engineered CasX variant
QEIKRINKIRRRLVKDSNTKKAGKTGPMKTLLVRVMTPDLRERLENLRKKPENIPQPISNTSRANLNKLLTDYTEMKKAILHVYWEEFQKDPVGLMSRVAQPASKKIDQNKLKPEMDEKGNLTTAGFACSQCGQPLFVYKLEQVSEKGKAYTNYFGRCNVAEHEKLILLAQLKPEKDSDEAVTYSLGKFGQRALDFYSIHVTKESTHPVKPLAQIAGNRYASVPVGKALSDACMGTIASFLSKYQDIIIEHQKVVKGNQKRLESLRELAGKENLEYPSVTLPPQPHTKEGVDAYNEVIARVRMWVNLNLWQKLKLSRDDAKPLLRLKGFPSFPLVERQANEVDWWDMVCNVKKLINEKKEDGKVFWQNLAGYKRQEALRPYLSSEEDRKKGKKFARYQLGDLLLHLEKKHGEDWGKVYDEAWERIDKKVEGLSKHIKLEEERRSEDAQSKAALTDWLRAKASFVIEGLKEADKDEFCRCELKLQKWYGDLRGKPFAIEAENSILDISGFSKQYNCAFIWQKDGVKKLNLYLIINYFKGGKLRFKKIKPEAFEANRFYTVINKKSGEIVPMEVNFNFDDPNLIILPLAFGKRQGREFIWNDLLSLETGSLKLANGRVIEKTLYNRRTRQDEPALFVALTFERREVLDSSNIKPMNLIGVDRGENIPAVIALTDPEGCPLSRFKDSLGNPTHILRIGESYKEKQRTIQAKKEVEQRRAGGYSRKYASKAKNLADDMVRNTARDLLYYAVTQDAMLIFENLSRGFGRQGKRTFMAERQYTRMEDWLTAKLAYEGLPSKTYLSKTLAQYTSKTCSNCGFTITSADYDRVLEKLKKTATGWMTTINGKELKVEGQITYYNRYKRQNVVKDLSVELDRLSEESVNNDISSWDKGRSGNEALSLLKKRFSHRPVQEKFVCLNCGFETHADEQAALNIARSWLFLRSQEYKKYQTNKTTGNTDKRAFVETWQSFYRKKLKEVWKPAV

SEQ ID NO: 46022 - protein, 979 aa, synthetic construct
  REGION 1..979: note = engineered CasX variant
QEIKRINKIRRRLVKDSNTKKAGKTGPMKTLLVRVMTPDLRERLENLRKKPENIPQPISNTSRANLNKLLTDYTEMKKAILHVYWEEFQKDPVGLMSRVAQPASKKIDQNKLKPEMDEKGNLTTAGFACSQCGQPLFVYKLEQVSEKGKAYTNYFGRCNVAEHEKLIKLAQLKPEKDSDEAVTYSLGKFGQRALDFYSIHVTKESTHPVKPLAQIAGNRYASGPVGKALSDACMGTIASFLSKYQDIIIEHQKVVKGNQKRLESLRELAGKENLEYPSVTLPPQPHTKEGVDAYNEVIARVRMWVNLNLWQKLKLSRDDAKPLLRLKGFPSFPLVERQANEVDWWDMVCNVKKLINEKKEDGKVFWQNLAGYKRQEALRPYLSSEEDRKKGKKFARYQLGDLLLHLEKKHGEDWGKVYDEAWERIDKKVEGLSKHIKLEEERRSEDAQSKAALTDWLRAKASFVIEGLKEADKDEFCRCELKLQKWYGDLRGKPFAIEAENSILDISGFSKQYNCAFIWQKDGVKKLNLYLIINYFKGGKLRFKKIKPEAFEANRFYTVINKKSGEIVPMEVNFNFDDPNLIILPLAFGKRQGREFIWNDLLSLETGSLKLANGRVIEKTLYNRRTRQDEPALFVALTFERREVLDSSNIKPMNLIGVDRGENIPAVIALTDPEGCPLSRFKDSLGNPTHILRIGESYKEKQRTIQAKKEVEQRRAGGYSRKYASKAKNLADDMVRNTARDLLYYAVTQDAMLIFENLSRGFGRQGKRTFMAERQYTRMEDWLTAKLAYEGLPSKTYLSKTLAQYTSKTCSNCGFTITSADYDRVLEKLKKTATGWMTTINGKELKVEGQITYYNRYKRQNVVKDLSVELDRLSEESVNNDISSWDKGRSGNEALSLLKKRFSHRPVQEKFVCLNCGFETHADEQAALNIARSWLFLRSQEYKKYQTNKTTGNTDKRAFVETWQSFYRKKLKEVWKPAV

SEQ ID NO: 46023 - protein, 978 aa, synthetic construct
  REGION 1..978: note = engineered CasX variant
QEIKRINKIRRRLVKDSNTKKAGKTGPMKTLLVRVMTPDLRERLENLRKKPENIPQPISNTSRANLNKLLTDYTEMKKAILHVYWEEFQKDPVGLMSRVAQPASKKIDQNKLKPEMDEKGNLTTAGFACSQCGQPLFVYKLEQVSEKGKAYTNYFGRCNVAEHEKLILLAQLKPEKDSDEAVTYSLGKFGQRALDFYSIHVTKESTHPVKPLAQIAGNRYASPVGKALSDACMGTIASFLSKYQDIIIEHQKVVKGNQKRLESLRELAGKENLEYPSVTLPPQPHTKEGVDAYNEVIARVRMWVNLNLWQKLKLSRDDAKPLLRLKGFPSFPLVERQANEVDWWDMVCNVKKLINEKKEDGKVFWQNLAGYKRQEALRPYLSSEEDRKKGKKFARYQLGDLLLHLEKKHGEDWGKVYDEAWERIDKKVEGLSKHIKLEEERRSEDAQSKAALTDWLRAKASFVIEGLKEADKDEFCRCELKLQKWYGDLRGKPFAIEAENSILDISGFSKQYNCAFIWQKDGVKKLNLYLIINYFKGGKLRFKKIKPEAFEANRFYTVINKKSGEIVPMEVNFNFDDPNLIILPLAFGKRQGREFIWNDLLSLETGSLKLANGRVIEKTLYNRRTRQDEPALFVALTFERREVLDSSNIKPMNLIGVDRGENIPAVIALTDPEGCPLSRFKDSLGNPTHILRIGESYKEKQRTIQAKKEVEQRRAGGYSRKYASKAKNLADDMVRNTARDLLYYAVTQDAMLIFENLSRGFGRQGKRTFMAERQYTRMEDWLTAKLAYEGLPSKTYLSKTLAQYTSKTCSNCGFTITSADYDRVLEKLKKTATGWMTTINGKELKVEGQITYYNRYKRQNVVKDLSVELDRLSEESVNNDISSWDKGRSGNEALSLLKKRFSHRPVQEKFVCLNCGFETHADEQAALNIARSWLFLRSQEYKKYQTNKTTGNTDKRAFVETWQSFYRKKLKEVWKPAV

SEQ ID NO: 46024 - protein, 978 aa, synthetic construct
  REGION 1..978: note = engineered CasX variant
QEIKRINKIRRRLVKDSNTKKAGKTGPMKTLLVRVMTPDLRERLENLRKKPENIPQPISNTSRANLNKLLTDYTEMKKAILHVYWEEFQKDPVGLMSRVAQPASKKIDQNKLKPEMDEKGNLTTAGFACSQCGQPLFVYKLEQVSEKGKAYTNYFGRCNVAEHEKLILLAQLKPEKDSDEAVTYSLGKFGQRALDFYSIHVTKESTHPVKPLAQIAGNRYASYPVGKALSDACMGTIASFLSKYQDIIIEHQKVVKGNQKRLESLRELAGKENLEYPSVTLPPQPHTKEGVDAYNEVIARVRMWVNLNLWQKLKLSRDDAKPLLRLKGFPSFPLVERQANEVDWWDMVCNVKKLINEKKEDGKVFWQNLAGYKRQEALRPYLSSEEDRQKGKKFARYQLGDLLLHLEKKHGEDWGKVYDEAWERIDKKVEGLSKHIKLEEERRSEDAQSKAALTDWLRAKASFVIEGLKEADKDEFCRCELKLQKWYGDLRGKPFAIEAENSILDISGFSKQYNCAFIWQKDGVKKLNLYLIINYFKGGKLRFKKIKPEAFEANRFYTVINKKSGEIVPMEVNFNFDDPNLIILPLAFGKRQGREFIWNDLLSLETGSLKLANGRVIEKTLYNRRTRQDEPALFVALTFERREVLDSSNIKPMNLIGVDRGENIPAVIALTDPEGCPLSRFKDSLGNPTHILRIGESYKEKQRTIQAKKEVEQRRAGGYSRKYASKAKNLADDMVRNTARDLLYYAVTQDAMLIFENLSRGFGRQGKRTFMAERQYTRMEDWLTAKLAYEGLPSKTYLSKTLAQYTSKTCSNCGFTITSADYDRVLEKLKKTATGWMTTINGKELKVEGQITYYNRYKRQNVVKDLSVELDRLSEESVNNDISSWDKGRSGEALSLLKKRFSHRPVQEKFVCLNCGFETHADEQAALNIARSWLFLRSQEYKKYQTNKTTGNTDKRAFVETWQSFYRKKLKEVWKPAV

SEQ ID NO: 46025 - protein, 978 aa, synthetic construct
  REGION 1..978: note = engineered CasX variant
QEIKRINKIRRRLVKDSNTKKAGKTGPMKTLLVRVMTPDLRERLENLRKKPENIPQPISNTSRANLNKLLTDYTEMKKAILHVYWEEFQKDPVGLMSRVAQPASKKIDQNKLKPEMDEKGNLTTAGFACSQCGQPLFVYKLEQVSEKGKAYTNYFGRCNVAEHEKLILLAQLKPEKDSDEAVTYSLGKFGQRALDFYSIHVTKESTHPVKPLAQIAGNRYASHPVGKALSDACMGTIASFLSKYQDIIIEHQKVVKGNQKRLESLRELAGKENLEYPSVTLPPQPHTKEGVDAYNEVIARVRMWVNLNLWQKLKLSRDDAKPLLRLKGFPSFPLVERQANEVDWWDMVCNVKKLINEKKEDGKVFWQNLAGYKRQEALRPYLSSEEDRQKGKKFARYQLGDLLLHLEKKHGEDWGKVYDEAWERIDKKVEGLSKHIKLEEERRSEDAQSKAALTDWLRAKASFVIEGLKEADKDEFCRCELKLQKWYGDLRGKPFAIEAENSILDISGFSKQYNCAFIWQKDGVKKLNLYLIINYFKGGKLRFKKIKPEAFEANRFYTVINKKSGEIVPMEVNFNFDDPNLIILPLAFGKRQGREFIWNDLLSLETGSLKLANGRVIEKTLYNRRTRQDEPALFVALTFERREVLDSSNIKPMNLIGVDRGENIPAVIALTDPEGCPLSRFKDSLGNPTHILRIGESYKEKQRTIQAKKEVEQRRAGGYSRKYASKAKNLADDMVRNTARDLLYYAVTQDAMLIFENLSRGFGRQGKRTFMAERQYTRMEDWLTAKLAYEGLPSKTYLSKTLAQYTSKTCSNCGFTITSADYDRVLEKLKKTATGWMTTINGKELKVEGQITYYNRYKRQNVVKDLSVELDRLSEESVNNDISSWDKGRSGEALSLLKKRFSHRPVQEKFVCLNCGFETHADEQAALNIARSWLFLRSQEYKKYQTNKTTGNTDKRAFVETWQSFYRKKLKEVWKPAV

SEQ ID NO: 46026 - protein, 978 aa, synthetic construct
  REGION 1..978: note = engineered CasX variant
QEIKRINKIRRRLVKDSNTKKAGKTGPMKTLLVRVMTPDLRERLENLRKKPENIPQPISNTSRANLNKLLTDYTEMKKAILHVYWEEFQKDPVGLMSRVAQPASKKIDQNKLKPEMDEKGNLTTAGFACSQCGQPLFVYKLEQVSEKGKAYTNYFGRCNVAEHEKLILLAQLKPEKDSDEAVTYSLGKFGQRALDFYSIHVTKESTHPVKPLAQIAGNRYASSPVGKALSDACMGTIASFLSKYQDIIIEHQKVVKGNQKRLESLRELAGKENLEYPSVTLPPQPHTKEGVDAYNEVIARVRMWVNLNLWQKLKLSRDDAKPLLRLKGFPSFPLVERQANEVDWWDMVCNVKKLINEKKEDGKVFWQNLAGYKRQEALRPYLSSEEDRQKGKKFARYQLGDLLLHLEKKHGEDWGKVYDEAWERIDKKVEGLSKHIKLEEERRSEDAQSKAALTDWLRAKASFVIEGLKEADKDEFCRCELKLQKWYGDLRGKPFAIEAENSILDISGFSKQYNCAFIWQKDGVKKLNLYLIINYFKGGKLRFKKIKPEAFEANRFYTVINKKSGEIVPMEVNFNFDDPNLIILPLAFGKRQGREFIWNDLLSLETGSLKLANGRVIEKTLYNRRTRQDEPALFVALTFERREVLDSSNIKPMNLIGVDRGENIPAVIALTDPEGCPLSRFKDSLGNPTHILRIGESYKEKQRTIQAKKEVEQRRAGGYSRKYASKAKNLADDMVRNTARDLLYYAVTQDAMLIFENLSRGFGRQGKRTFMAERQYTRMEDWLTAKLAYEGLPSKTYLSKTLAQYTSKTCSNCGFTITSADYDRVLEKLKKTATGWMTTINGKELKVEGQITYYNRYKRQNVVKDLSVELDRLSEESVNNDISSWDKGRSGEALSLLKKRFSHRPVQEKFVCLNCGFETHADEQAALNIARSWLFLRSQEYKKYQTNKTTGNTDKRAFVETWQSFYRKKLKEVWKPAV

SEQ ID NO: 46027 - protein, 978 aa, synthetic construct
  REGION 1..978: note = engineered CasX variant
QEIKRINKIRRRLVKDSNTKKAGKTGPMKTLLVRVMTPDLRERLENLRKKPENIPQPISNTSRANLNKLLTDYTEMKKAILHVYWEEFQKDPVGLMSRVAQPASKKIDQNKLKPEMDEKGNLTTAGFACSQCGQPLFVYKLEQVSEKGKAYTNYFGRCNVAEHEKLILLAQLKPEKDSDEAVTYSLGKFGQRALDFYSIHVTKESTHPVKPLAQIAGNRYASTPVGKALSDACMGTIASFLSKYQDIIIEHQKVVKGNQKRLESLRELAGKENLEYPSVTLPPQPHTKEGVDAYNEVIARVRMWVNLNLWQKLKLSRDDAKPLLRLKGFPSFPLVERQANEVDWWDMVCNVKKLINEKKEDGKVFWQNLAGYKRQEALRPYLSSEEDRQKGKKFARYQLGDLLLHLEKKHGEDWGKVYDEAWERIDKKVEGLSKHIKLEEERRSEDAQSKAALTDWLRAKASFVIEGLKEADKDEFCRCELKLQKWYGDLRGKPFAIEAENSILDISGFSKQYNCAFIWQKDGVKKLNLYLIINYFKGGKLRFKKIKPEAFEANRFYTVINKKSGEIVPMEVNFNFDDPNLIILPLAFGKRQGREFIWNDLLSLETGSLKLANGRVIEKTLYNRRTRQDEPALFVALTFERREVLDSSNIKPMNLIGVDRGENIPAVIALTDPEGCPLSRFKDSLGNPTHILRIGESYKEKQRTIQAKKEVEQRRAGGYSRKYASKAKNLADDMVRNTARDLLYYAVTQDAMLIFENLSRGFGRQGKRTFMAERQYTRMEDWLTAKLAYEGLPSKTYLSKTLAQYTSKTCSNCGFTITSADYDRVLEKLKKTATGWMTTINGKELKVEGQITYYNRYKRQNVVKDLSVELDRLSEESVNNDISSWDKGRSGEALSLLKKRFSHRPVQEKFVCLNCGFETHADEQAALNIARSWLFLRSQEYKKYQTNKTTGNTDKRAFVETWQSFYRKKLKEVWKPAV

SEQ ID NO: 46028 - protein, 978 aa, synthetic construct
  REGION 1..978: note = engineered CasX variant
QEIKRINKIRRRLVKDSNTKKAGKTGPMKTLLVRVMTPDLRERLENLRKKPENIPQPISNTSRANLNKLLTDYTEMKKAILHVYWEEFQKDPVGLMSRVAQPASKKIDQNKLKPEMDEKGNLTTAGFACSQCGQPLFVYKLEQVSEKGKAYTNYFGRCNVAEHEKLILLAQLKPEKDSDEAVTYSLGKFGQRALDFYSIHVTKESTHPVKPLAQIAGNRYASAPVGKALSDACMGTIASFLSKYQDIIIEHQKVVKGNQKRLESLRELAGKENLEYPSVTLPPQPHTKEGVDAYNEVIARVRMWVNLNLWQKLKLSRDDAKPLLRLKGFPSFPLVERQANEVDWWDMVCNVKKLINEKKEDGKVFWQNLAGYKRQEALRPYLSSEEDRQKGKKFARYQLGDLLLHLEKKHGEDWGKVYDEAWERIDKKVEGLSKHIKLEEERRSEDAQSKAALTDWLRAKASFVIEGLKEADKDEFCRCELKLQKWYGDLRGKPFAIEAENSILDISGFSKQYNCAFIWQKDGVKKLNLYLIINYFKGGKLRFKKIKPEAFEANRFYTVINKKSGEIVPMEVNFNFDDPNLIILPLAFGKRQGREFIWNDLLSLETGSLKLANGRVIEKTLYNRRTRQDEPALFVALTFERREVLDSSNIKPMNLIGVDRGENIPAVIALTDPEGCPLSRFKDSLGNPTHILRIGESYKEKQRTIQAKKEVEQRRAGGYSRKYASKAKNLADDMVRNTARDLLYYAVTQDAMLIFENLSRGFGRQGKRTFMAERQYTRMEDWLTAKLAYEGLPSKTYLSKTLAQYTSKTCSNCGFTITSADYDRVLEKLKKTATGWMTTINGKELKVEGQITYYNRYKRQNVVKDLSVELDRLSEESVNNDISSWDKGRSGEALSLLKKRFSHRPVQEKFVCLNCGFETHADEQAALNIARSWLFLRSQEYKKYQTNKTTGNTDKRAFVETWQSFYRKKLKEVWKPAV

SEQ ID NO: 46029 - protein, 978 aa, synthetic construct
  REGION 1..978: note = engineered CasX variant
QEIKRINKIRRRLVKDSNTKKAGKTGPMKTLLVRVMTPDLRERLENLRKKPENIPQPISNTSRANLNKLLTDYTEMKKAILHVYWEEFQKDPVGLMSRVAQPASKKIDQNKLKPEMDEKGNLTTAGFACSQCGQPLFVYKLEQVSEKGKAYTNYFGRCNVAEHEKLILLAQLKPEKDSDEAVTYSLGKFGQRALDFYSIHVTKESTHPVKPLAQIAGNRYASVPVGKALSDACMGTIASFLSKYQDIIIEHQKVVKGNQKRLESLRELAGKENLEYPSVTLPPQPHTKEGVDAYNEVIARVRMWVNLNLWQKLKLSRDDAKPLLRLKGFPSFPLVERQANEVDWWDMVCNVKKLINEKKEDGKVFWQNLAGYKRQEALRPYLSSEEDRQKGKKFARYQLGDLLLHLEKKHGEDWGKVYDEAWERIDKKVEGLSKHIKLEEERRSEDAQSKAALTDWLRAKASFVIEGLKEADKDEFCRCELKLQKWYGDLRGKPFAIEAENSILDISGFSKQYNCAFIWQKDGVKKLNLYLIINYFKGGKLRFKKIKPEAFEANRFYTVINKKSGEIVPMEVNFNFDDPNLIILPLAFGKRQGREFIWNDLLSLETGSLKLANGRVIEKTLYNRRTRQDEPALFVALTFERREVLDSSNIKPMNLIGVDRGENIPAVIALTDPEGCPLSRFKDSLGNPTHILRIGESYKEKQRTIQAKKEVEQRRAGGYSRKYASKAKNLADDMVRNTARDLLYYAVTQDAMLIFENLSRGFGRQGKRTFMAERQYTRMEDWLTAKLAYEGLPSKTYLSKTLAQYTSKTCSNCGFTITSADYDRVLEKLKKTATGWMTTINGKELKVEGQITYYNRYKRQNVVKDLSVELDRLSEESVNNDISSWDKGRSGEALSLLKKRFSHRPVQEKFVCLNCGFETHADEQAALNIARSWLFLRSQEYKKYQTNKTTGNTDKRAFVETWQSFYRKKLKEVWKPAV

SEQ ID NO: 46030 - protein, 978 aa, synthetic construct
  REGION 1..978: note = engineered CasX variant
QEIKRINKIRRRLVKDSNTKKAGKTGPMKTLLVRVMTPDLRERLENLRKKPENIPQPISNTSRANLNKLLTDYTEMKKAILHVYWEEFQKDPVGLMSRVAQPASKKIDQNKLKPEMDEKGNLTTAGFACSQCGQPLFVYKLEQVSEKGKAYTNYFGRCNVAEHEKLIKLAQLKPEKDSDEAVTYSLGKFGQRALDFYSIHVTKESTHPVKPLAQIAGNRYASGPVGKALSDACMGTIASFLSKYQDIIIEHQKVVKGNQKRLESLRELAGKENLEYPSVTLPPQPHTKEGVDAYNEVIARVRMWVNLNLWQKLKLSRDDAKPLLRLKGFPSFPLVERQANEVDWWDMVCNVKKLINEKKEDGKVFWQNLAGYKRQEALRPYLSSEEDRQKGKKFARYQLGDLLLHLEKKHGEDWGKVYDEAWERIDKKVEGLSKHIKLEEERRSEDAQSKAALTDWLRAKASFVIEGLKEADKDEFCRCELKLQKWYGDLRGKPFAIEAENSILDISGFSKQYNCAFIWQKDGVKKLNLYLIINYFKGGKLRFKKIKPEAFEANRFYTVINKKSGEIVPMEVNFNFDDPNLIILPLAFGKRQGREFIWNDLLSLETGSLKLANGRVIEKTLYNRRTRQDEPALFVALTFERREVLDSSNIKPMNLIGVDRGENIPAVIALTDPEGCPLSRFKDSLGNPTHILRIGESYKEKQRTIQAKKEVEQRRAGGYSRKYASKAKNLADDMVRNTARDLLYYAVTQDAMLIFENLSRGFGRQGKRTFMAERQYTRMEDWLTAKLAYEGLPSKTYLSKTLAQYTSKTCSNCGFTITSADYDRVLEKLKKTATGWMTTINGKELKVEGQITYYNRYKRQNVVKDLSVELDRLSEESVNNDISSWDKGRSGEALSLLKKRFSHRPVQEKFVCLNCGFETHADEQAALNIARSWLFLRSQEYKKYQTNKTTGNTDKRAFVETWQSFYRKKLKEVWKPAV

SEQ ID NO: 46031 - protein, 977 aa, synthetic construct
  REGION 1..977: note = engineered CasX variant
QEIKRINKIRRRLVKDSNTKKAGKTGPMKTLLVRVMTPDLRERLENLRKKPENIPQPISNTSRANLNKLLTDYTEMKKAILHVYWEEFQKDPVGLMSRVAQPASKKIDQNKLKPEMDEKGNLTTAGFACSQCGQPLFVYKLEQVSEKGKAYTNYFGRCNVAEHEKLILLAQLKPEKDSDEAVTYSLGKFGQRALDFYSIHVTKESTHPVKPLAQIAGNRYASPVGKALSDACMGTIASFLSKYQDIIIEHQKVVKGNQKRLESLRELAGKENLEYPSVTLPPQPHTKEGVDAYNEVIARVRMWVNLNLWQKLKLSRDDAKPLLRLKGFPSFPLVERQANEVDWWDMVCNVKKLINEKKEDGKVFWQNLAGYKRQEALRPYLSSEEDRQKGKKFARYQLGDLLLHLEKKHGEDWGKVYDEAWERIDKKVEGLSKHIKLEEERRSEDAQSKAALTDWLRAKASFVIEGLKEADKDEFCRCELKLQKWYGDLRGKPFAIEAENSILDISGFSKQYNCAFIWQKDGVKKLNLYLIINYFKGGKLRFKKIKPEAFEANRFYTVINKKSGEIVPMEVNFNFDDPNLIILPLAFGKRQGREFIWNDLLSLETGSLKLANGRVIEKTLYNRRTRQDEPALFVALTFERREVLDSSNIKPMNLIGVDRGENIPAVIALTDPEGCPLSRFKDSLGNPTHILRIGESYKEKQRTIQAKKEVEQRRAGGYSRKYASKAKNLADDMVRNTARDLLYYAVTQDAMLIFENLSRGFGRQGKRTFMAERQYTRMEDWLTAKLAYEGLPSKTYLSKTLAQYTSKTCSNCGFTITSADYDRVLEKLKKTATGWMTTINGKELKVEGQITYYNRYKRQNVVKDLSVELDRLSEESVNNDISSWDKGRSGEALSLLKKRFSHRPVQEKFVCLNCGFETHADEQAALNIARSWLFLRSQEYKKYQTNKTTGNTDKRAFVETWQSFYRKKLKEVWKPAV

SEQ ID NO: 46032 - protein, 978 aa, synthetic construct
  REGION 1..978: note = engineered CasX variant
QEIKRINKIRRRLVKDSNTKKAGKTGPMKTLLVRVMTPDLRERLENLRKKPENIPQPISNTSRANLNKLLTDYTEMKKAILHVYWEEFQKDPVGLMSRVAQPASKKIDQNKLKPEMDEKGNLTTAGFACSQCGQPLFVYKLEQVSEKGKAYTNYFGRCNVAEHEKLILLAQLKPEKDSDEAVTYSLGKFGQRALDFYSIHVTKESTHPVKPLAQIAGNRYASYPVGKALSDACMGTIASFLSKYQDIIIEHQKVVKGNQKRLESLRELAGKENLEYPSVTLPPQPHTKEGVDAYNEVIARVRMWVNLNLWQKLKLSRDDAKPLLRLKGFPSFPLVERQANEVDWWDMVCNVKKLINEKKEDGKVFWQNLAGYKRQEALRPYLSSEEDRKKGKKFARYQLGDLLLHLEKKHGEDWGKVYDEAWERIDKKVEGLSKHIKLEEERRSEDAQSKAALTDWLRAKASFVIEGLKEADKDEFCRCELKLQKWYGDLRGKPFAIEAENSILDISGFSKQYNCAFIWQKDGVKKLNLYLIINYFKGGKLRFKKIKPEAFEANRFYTVINKKSGEIVPMEVNFNFDDPNLIILPLAFGKRQGREFIWNDLLSLETGSLKLANGRVIEKTLYNRRTRQDEPALFVALTFERREVLDSSNIKPMNLIGVDRGENIPAVIALTDPEGCPLSRFKDSLGNPTHILRIGESYKEKQRTIQAKKEVEQRRAGGYSRKYASKAKNLADDMVRNTARDLLYYAVTQDAMLIFENLSRGFGRQGKRTFMAERQYTRMEDWLTAKLAYEGLPSQTYLSKTLAQYTSKTCSNCGFTITSADYDRVLEKLKKTATGWMTTINGKELKVEGQITYYNRYKRQNVVKDLSVELDRLSEESVNNDISSWDKGRSGEALSLLKKRFSHRPVQEKFVCLNCGFETHADEQAALNIARSWLFLRSQEYKKYQTNKTTGNTDKRAFVETWQSFYRKKLKEVWKPAV

SEQ ID NO: 46033 - protein, 978 aa, synthetic construct
  REGION 1..978: note = engineered CasX variant
QEIKRINKIRRRLVKDSNTKKAGKTGPMKTLLVRVMTPDLRERLENLRKKPENIPQPISNTSRANLNKLLTDYTEMKKAILHVYWEEFQKDPVGLMSRVAQPASKKIDQNKLKPEMDEKGNLTTAGFACSQCGQPLFVYKLEQVSEKGKAYTNYFGRCNVAEHEKLILLAQLKPEKDSDEAVTYSLGKFGQRALDFYSIHVTKESTHPVKPLAQIAGNRYASHPVGKALSDACMGTIASFLSKYQDIIIEHQKVVKGNQKRLESLRELAGKENLEYPSVTLPPQPHTKEGVDAYNEVIARVRMWVNLNLWQKLKLSRDDAKPLLRLKGFPSFPLVERQANEVDWWDMVCNVKKLINEKKEDGKVFWQNLAGYKRQEALRPYLSSEEDRKKGKKFARYQLGDLLLHLEKKHGEDWGKVYDEAWERIDKKVEGLSKHIKLEEERRSEDAQSKAALTDWLRAKASFVIEGLKEADKDEFCRCELKLQKWYGDLRGKPFAIEAENSILDISGFSKQYNCAFIWQKDGVKKLNLYLIINYFKGGKLRFKKIKPEAFEANRFYTVINKKSGEIVPMEVNFNFDDPNLIILPLAFGKRQGREFIWNDLLSLETGSLKLANGRVIEKTLYNRRTRQDEPALFVALTFERREVLDSSNIKPMNLIGVDRGENIPAVIALTDPEGCPLSRFKDSLGNPTHILRIGESYKEKQRTIQAKKEVEQRRAGGYSRKYASKAKNLADDMVRNTARDLLYYAVTQDAMLIFENLSRGFGRQGKRTFMAERQYTRMEDWLTAKLAYEGLPSQTYLSKTLAQYTSKTCSNCGFTITSADYDRVLEKLKKTATGWMTTINGKELKVEGQITYYNRYKRQNVVKDLSVELDRLSEESVNNDISSWDKGRSGEALSLLKKRFSHRPVQEKFVCLNCGFETHADEQAALNIARSWLFLRSQEYKKYQTNKTTGNTDKRAFVETWQSFYRKKLKEVWKPAV

SEQ ID NO: 46034 - protein, 978 aa, synthetic construct
  REGION 1..978: note = engineered CasX variant
QEIKRINKIRRRLVKDSNTKKAGKTGPMKTLLVRVMTPDLRERLENLRKKPENIPQPISNTSRANLNKLLTDYTEMKKAILHVYWEEFQKDPVGLMSRVAQPASKKIDQNKLKPEMDEKGNLTTAGFACSQCGQPLFVYKLEQVSEKGKAYTNYFGRCNVAEHEKLILLAQLKPEKDSDEAVTYSLGKFGQRALDFYSIHVTKESTHPVKPLAQIAGNRYASSPVGKALSDACMGTIASFLSKYQDIIIEHQKVVKGNQKRLESLRELAGKENLEYPSVTLPPQPHTKEGVDAYNEVIARVRMWVNLNLWQKLKLSRDDAKPLLRLKGFPSFPLVERQANEVDWWDMVCNVKKLINEKKEDGKVFWQNLAGYKRQEALRPYLSSEEDRKKGKKFARYQLGDLLLHLEKKHGEDWGKVYDEAWERIDKKVEGLSKHIKLEEERRSEDAQSKAALTDWLRAKASFVIEGLKEADKDEFCRCELKLQKWYGDLRGKPFAIEAENSILDISGFSKQYNCAFIWQKDGVKKLNLYLIINYFKGGKLRFKKIKPEAFEANRFYTVINKKSGEIVPMEVNFNFDDPNLIILPLAFGKRQGREFIWNDLLSLETGSLKLANGRVIEKTLYNRRTRQDEPALFVALTFERREVLDSSNIKPMNLIGVDRGENIPAVIALTDPEGCPLSRFKDSLGNPTHILRIGESYKEKQRTIQAKKEVEQRRAGGYSRKYASKAKNLADDMVRNTARDLLYYAVTQDAMLIFENLSRGFGRQGKRTFMAERQYTRMEDWLTAKLAYEGLPSQTYLSKTLAQYTSKTCSNCGFTITSADYDRVLEKLKKTATGWMTTINGKELKVEGQITYYNRYKRQNVVKDLSVELDRLSEESVNNDISSWDKGRSGEALSLLKKRFSHRPVQEKFVCLNCGFETHADEQAALNIARSWLFLRSQEYKKYQTNKTTGNTDKRAFVETWQSFYRKKLKEVWKPAV

SEQ ID NO: 46035 - protein, 978 aa, synthetic construct
  REGION 1..978: note = engineered CasX variant
QEIKRINKIRRRLVKDSNTKKAGKTGPMKTLLVRVMTPDLRERLENLRKKPENIPQPISNTSRANLNKLLTDYTEMKKAILHVYWEEFQKDPVGLMSRVAQPASKKIDQNKLKPEMDEKGNLTTAGFACSQCGQPLFVYKLEQVSEKGKAYTNYFGRCNVAEHEKLILLAQLKPEKDSDEAVTYSLGKFGQRALDFYSIHVTKESTHPVKPLAQIAGNRYASTPVGKALSDACMGTIASFLSKYQDIIIEHQKVVKGNQKRLESLRELAGKENLEYPSVTLPPQPHTKEGVDAYNEVIARVRMWVNLNLWQKLKLSRDDAKPLLRLKGFPSFPLVERQANEVDWWDMVCNVKKLINEKKEDGKVFWQNLAGYKRQEALRPYLSSEEDRKKGKKFARYQLGDLLLHLEKKHGEDWGKVYDEAWERIDKKVEGLSKHIKLEEERRSEDAQSKAALTDWLRAKASFVIEGLKEADKDEFCRCELKLQKWYGDLRGKPFAIEAENSILDISGFSKQYNCAFIWQKDGVKKLNLYLIINYFKGGKLRFKKIKPEAFEANRFYTVINKKSGEIVPMEVNFNFDDPNLIILPLAFGKRQGREFIWNDLLSLETGSLKLANGRVIEKTLYNRRTRQDEPALFVALTFERREVLDSSNIKPMNLIGVDRGENIPAVIALTDPEGCPLSRFKDSLGNPTHILRIGESYKEKQRTIQAKKEVEQRRAGGYSRKYASKAKNLADDMVRNTARDLLYYAVTQDAMLIFENLSRGFGRQGKRTFMAERQYTRMEDWLTAKLAYEGLPSQTYLSKTLAQYTSKTCSNCGFTITSADYDRVLEKLKKTATGWMTTINGKELKVEGQITYYNRYKRQNVVKDLSVELDRLSEESVNNDISSWDKGRSGEALSLLKKRFSHRPVQEKFVCLNCGFETHADEQAALNIARSWLFLRSQEYKKYQTNKTTGNTDKRAFVETWQSFYRKKLKEVWKPAV

SEQ ID NO: 46036 - protein, 978 aa, synthetic construct
  REGION 1..978: note = engineered CasX variant
QEIKRINKIRRRLVKDSNTKKAGKTGPMKTLLVRVMTPDLRERLENLRKKPENIPQPISNTSRANLNKLLTDYTEMKKAILHVYWEEFQKDPVGLMSRVAQPASKKIDQNKLKPEMDEKGNLTTAGFACSQCGQPLFVYKLEQVSEKGKAYTNYFGRCNVAEHEKLILLAQLKPEKDSDEAVTYSLGKFGQRALDFYSIHVTKESTHPVKPLAQIAGNRYASAPVGKALSDACMGTIASFLSKYQDIIIEHQKVVKGNQKRLESLRELAGKENLEYPSVTLPPQPHTKEGVDAYNEVIARVRMWVNLNLWQKLKLSRDDAKPLLRLKGFPSFPLVERQANEVDWWDMVCNVKKLINEKKEDGKVFWQNLAGYKRQEALRPYLSSEEDRKKGKKFARYQLGDLLLHLEKKHGEDWGKVYDEAWERIDKKVEGLSKHIKLEEERRSEDAQSKAALTDWLRAKASFVIEGLKEADKDEFCRCELKLQKWYGDLRGKPFAIEAENSILDISGFSKQYNCAFIWQKDGVKKLNLYLIINYFKGGKLRFKKIKPEAFEANRFYTVINKKSGEIVPMEVNFNFDDPNLIILPLAFGKRQGREFIWNDLLSLETGSLKLANGRVIEKTLYNRRTRQDEPALFVALTFERREVLDSSNIKPMNLIGVDRGENIPAVIALTDPEGCPLSRFKDSLGNPTHILRIGESYKEKQRTIQAKKEVEQRRAGGYSRKYASKAKNLADDMVRNTARDLLYYAVTQDAMLIFENLSRGFGRQGKRTFMAERQYTRMEDWLTAKLAYEGLPSQTYLSKTLAQYTSKTCSNCGFTITSADYDRVLEKLKKTATGWMTTINGKELKVEGQITYYNRYKRQNVVKDLSVELDRLSEESVNNDISSWDKGRSGEALSLLKKRFSHRPVQEKFVCLNCGFETHADEQAALNIARSWLFLRSQEYKKYQTNKTTGNTDKRAFVETWQSFYRKKLKEVWKPAV

SEQ ID NO: 46037 - protein, 978 aa, synthetic construct
  REGION 1..978: note = engineered CasX variant
QEIKRINKIRRRLVKDSNTKKAGKTGPMKTLLVRVMTPDLRERLENLRKKPENIPQPISNTSRANLNKLLTDYTEMKKAILHVYWEEFQKDPVGLMSRVAQPASKKIDQNKLKPEMDEKGNLTTAGFACSQCGQPLFVYKLEQVSEKGKAYTNYFGRCNVAEHEKLILLAQLKPEKDSDEAVTYSLGKFGQRALDFYSIHVTKESTHPVKPLAQIAGNRYASVPVGKALSDACMGTIASFLSKYQDIIIEHQKVVKGNQKRLESLRELAGKENLEYPSVTLPPQPHTKEGVDAYNEVIARVRMWVNLNLWQKLKLSRDDAKPLLRLKGFPSFPLVERQANEVDWWDMVCNVKKLINEKKEDGKVFWQNLAGYKRQEALRPYLSSEEDRKKGKKFARYQLGDLLLHLEKKHGEDWGKVYDEAWERIDKKVEGLSKHIKLEEERRSEDAQSKAALTDWLRAKASFVIEGLKEADKDEFCRCELKLQKWYGDLRGKPFAIEAENSILDISGFSKQYNCAFIWQKDGVKKLNLYLIINYFKGGKLRFKKIKPEAFEANRFYTVINKKSGEIVPMEVNFNFDDPNLIILPLAFGKRQGREFIWNDLLSLETGSLKLANGRVIEKTLYNRRTRQDEPALFVALTFERREVLDSSNIKPMNLIGVDRGENIPAVIALTDPEGCPLSRFKDSLGNPTHILRIGESYKEKQRTIQAKKEVEQRRAGGYSRKYASKAKNLADDMVRNTARDLLYYAVTQDAMLIFENLSRGFGRQGKRTFMAERQYTRMEDWLTAKLAYEGLPSQTYLSKTLAQYTSKTCSNCGFTITSADYDRVLEKLKKTATGWMTTINGKELKVEGQITYYNRYKRQNVVKDLSVELDRLSEESVNNDISSWDKGRSGEALSLLKKRFSHRPVQEKFVCLNCGFETHADEQAALNIARSWLFLRSQEYKKYQTNKTTGNTDKRAFVETWQSFYRKKLKEVWKPAV

SEQ ID NO: 46038 - protein, 978 aa, synthetic construct
  REGION 1..978: note = engineered CasX variant
QEIKRINKIRRRLVKDSNTKKAGKTGPMKTLLVRVMTPDLRERLENLRKKPENIPQPISNTSRANLNKLLTDYTEMKKAILHVYWEEFQKDPVGLMSRVAQPASKKIDQNKLKPEMDEKGNLTTAGFACSQCGQPLFVYKLEQVSEKGKAYTNYFGRCNVAEHEKLIKLAQLKPEKDSDEAVTYSLGKFGQRALDFYSIHVTKESTHPVKPLAQIAGNRYASGPVGKALSDACMGTIASFLSKYQDIIIEHQKVVKGNQKRLESLRELAGKENLEYPSVTLPPQPHTKEGVDAYNEVIARVRMWVNLNLWQKLKLSRDDAKPLLRLKGFPSFPLVERQANEVDWWDMVCNVKKLINEKKEDGKVFWQNLAGYKRQEALRPYLSSEEDRKKGKKFARYQLGDLLLHLEKKHGEDWGKVYDEAWERIDKKVEGLSKHIKLEEERRSEDAQSKAALTDWLRAKASFVIEGLKEADKDEFCRCELKLQKWYGDLRGKPFAIEAENSILDISGFSKQYNCAFIWQKDGVKKLNLYLIINYFKGGKLRFKKIKPEAFEANRFYTVINKKSGEIVPMEVNFNFDDPNLIILPLAFGKRQGREFIWNDLLSLETGSLKLANGRVIEKTLYNRRTRQDEPALFVALTFERREVLDSSNIKPMNLIGVDRGENIPAVIALTDPEGCPLSRFKDSLGNPTHILRIGESYKEKQRTIQAKKEVEQRRAGGYSRKYASKAKNLADDMVRNTARDLLYYAVTQDAMLIFENLSRGFGRQGKRTFMAERQYTRMEDWLTAKLAYEGLPSQTYLSKTLAQYTSKTCSNCGFTITSADYDRVLEKLKKTATGWMTTINGKELKVEGQITYYNRYKRQNVVKDLSVELDRLSEESVNNDISSWDKGRSGEALSLLKKRFSHRPVQEKFVCLNCGFETHADEQAALNIARSWLFLRSQEYKKYQTNKTTGNTDKRAFVETWQSFYRKKLKEVWKPAV

SEQ ID NO: 46039 - protein, 977 aa, synthetic construct
  REGION 1..977: note = engineered CasX variant
QEIKRINKIRRRLVKDSNTKKAGKTGPMKTLLVRVMTPDLRERLENLRKKPENIPQPISNTSRANLNKLLTDYTEMKKAILHVYWEEFQKDPVGLMSRVAQPASKKIDQNKLKPEMDEKGNLTTAGFACSQCGQPLFVYKLEQVSEKGKAYTNYFGRCNVAEHEKLILLAQLKPEKDSDEAVTYSLGKFGQRALDFYSIHVTKESTHPVKPLAQIAGNRYASPVGKALSDACMGTIASFLSKYQDIIIEHQKVVKGNQKRLESLRELAGKENLEYPSVTLPPQPHTKEGVDAYNEVIARVRMWVNLNLWQKLKLSRDDAKPLLRLKGFPSFPLVERQANEVDWWDMVCNVKKLINEKKEDGKVFWQNLAGYKRQEALRPYLSSEEDRKKGKKFARYQLGDLLLHLEKKHGEDWGKVYDEAWERIDKKVEGLSKHIKLEEERRSEDAQSKAALTDWLRAKASFVIEGLKEADKDEFCRCELKLQKWYGDLRGKPFAIEAENSILDISGFSKQYNCAFIWQKDGVKKLNLYLIINYFKGGKLRFKKIKPEAFEANRFYTVINKKSGEIVPMEVNFNFDDPNLIILPLAFGKRQGREFIWNDLLSLETGSLKLANGRVIEKTLYNRRTRQDEPALFVALTFERREVLDSSNIKPMNLIGVDRGENIPAVIALTDPEGCPLSRFKDSLGNPTHILRIGESYKEKQRTIQAKKEVEQRRAGGYSRKYASKAKNLADDMVRNTARDLLYYAVTQDAMLIFENLSRGFGRQGKRTFMAERQYTRMEDWLTAKLAYEGLPSQTYLSKTLAQYTSKTCSNCGFTITSADYDRVLEKLKKTATGWMTTINGKELKVEGQITYYNRYKRQNVVKDLSVELDRLSEESVNNDISSWDKGRSGEALSLLKKRFSHRPVQEKFVCLNCGFETHADEQAALNIARSWLFLRSQEYKKYQTNKTTGNTDKRAFVETWQSFYRKKLKEVWKPAV

SEQ ID NO: 46040 - protein, 978 aa, synthetic construct
  REGION 1..978: note = engineered CasX variant
QEIKRINKIRRRLVKDSNTKKAGKTGPMKTLLVRVMTPDLRERLENLRKKPENIPQPISNTSRANLNKLLTDYTEMKKAILHVYWEEFQKDPVGLMSRVAQPASKKIDQNKLKPEMDEKGNLTTAGFACSQCGQPLFVYKLEQVSEKGKAYTNYFGRCNVAEHEKLILLAQLKPEKDSDEAVTYSLGKFGQRALDFYSIHVTKESTHPVKPLAQIAGNRYASYPVGKALSDACMGTIASFLSKYQDIIIEHQKVVKGNQKRLESLRELAGKENLEYPSVTLPPQPHTKEGVDAYNEVIARVRMWVNLNLWQKLKLSRDDAKPLLRLKGFPSFPLVERQANEVDWWDMVCNVKKLINEKKEDGKVFWQNLAGYKRQEALRPYLSSEEDRKKGKKFARYQLGDLLLHLEKKHGEDWGKVYDEAWERIDKKVEGLSKHIKLEEERRSEDAQSKAALTDWLRAKASFVIEGLKEADKDEFCRCELKLQKWYGDLRGKPFAIEAENSILDISGFSKQYNCAFIWQKDGVKKLNLYLIINYFKGGKLRFKKIKPEAFEANRFYTVINKKSGEIVPMEVNFNFDDPNLIILPLAFGKRQGREFIWNDLLSLETGSLKLANGRVIEKTLYNRRTRQDEPALFVALTFERREVLDSSNIKPMNLIGVDRGENIPAVIALTDPEGCPLSRFKDSLGNPTHILRIGESYKEKQRTIQAKKEVEQRRAGGYSRKYASKAKNLADDMVRNTARDLLYYAVTQDAMLIFENLSRGFGRQGKRTFMAERQYTRMEDWLTAKLAYNGLPSKTYLSKTLAQYTSKTCSNCGFTITSADYDRVLEKLKKTATGWMTTINGKELKVEGQITYYNRYKRQNVVKDLSVELDRLSEESVNNDISSWDKGRSGEALSLLKKRFSHRPVQEKFVCLNCGFETHADEQAALNIARSWLFLRSQEYKKYQTNKTTGNTDKRAFVETWQSFYRKKLKEVWKPAV

SEQ ID NO: 46041 - protein, 978 aa, synthetic construct
  REGION 1..978: note = engineered CasX variant
QEIKRINKIRRRLVKDSNTKKAGKTGPMKTLLVRVMTPDLRERLENLRKKPENIPQPISNTSRANLNKLLTDYTEMKKAILHVYWEEFQKDPVGLMSRVAQPASKKIDQNKLKPEMDEKGNLTTAGFACSQCGQPLFVYKLEQVSEKGKAYTNYFGRCNVAEHEKLILLAQLKPEKDSDEAVTYSLGKFGQRALDFYSIHVTKESTHPVKPLAQIAGNRYASHPVGKALSDACMGTIASFLSKYQDIIIEHQKVVKGNQKRLESLRELAGKENLEYPSVTLPPQPHTKEGVDAYNEVIARVRMWVNLNLWQKLKLSRDDAKPLLRLKGFPSFPLVERQANEVDWWDMVCNVKKLINEKKEDGKVFWQNLAGYKRQEALRPYLSSEEDRKKGKKFARYQLGDLLLHLEKKHGEDWGKVYDEAWERIDKKVEGLSKHIKLEEERRSEDAQSKAALTDWLRAKASFVIEGLKEADKDEFCRCELKLQKWYGDLRGKPFAIEAENSILDISGFSKQYNCAFIWQKDGVKKLNLYLIINYFKGGKLRFKKIKPEAFEANRFYTVINKKSGEIVPMEVNFNFDDPNLIILPLAFGKRQGREFIWNDLLSLETGSLKLANGRVIEKTLYNRRTRQDEPALFVALTFERREVLDSSNIKPMNLIGVDRGENIPAVIALTDPEGCPLSRFKDSLGNPTHILRIGESYKEKQRTIQAKKEVEQRRAGGYSRKYASKAKNLADDMVRNTARDLLYYAVTQDAMLIFENLSRGFGRQGKRTFMAERQYTRMEDWLTAKLAYNGLPSKTYLSKTLAQYTSKTCSNCGFTITSADYDRVLEKLKKTATGWMTTINGKELKVEGQITYYNRYKRQNVVKDLSVELDRLSEESVNNDISSWDKGRSGEALSLLKKRFSHRPVQEKFVCLNCGFETHADEQAALNIARSWLFLRSQEYKKYQTNKTTGNTDKRAFVETWQSFYRKKLKEVWKPAV

SEQ ID NO: 46042 - protein, 978 aa, synthetic construct
  REGION 1..978: note = engineered CasX variant
QEIKRINKIRRRLVKDSNTKKAGKTGPMKTLLVRVMTPDLRERLENLRKKPENIPQPISNTSRANLNKLLTDYTEMKKAILHVYWEEFQKDPVGLMSRVAQPASKKIDQNKLKPEMDEKGNLTTAGFACSQCGQPLFVYKLEQVSEKGKAYTNYFGRCNVAEHEKLILLAQLKPEKDSDEAVTYSLGKFGQRALDFYSIHVTKESTHPVKPLAQIAGNRYASSPVGKALSDACMGTIASFLSKYQDIIIEHQKVVKGNQKRLESLRELAGKENLEYPSVTLPPQPHTKEGVDAYNEVIARVRMWVNLNLWQKLKLSRDDAKPLLRLKGFPSFPLVERQANEVDWWDMVCNVKKLINEKKEDGKVFWQNLAGYKRQEALRPYLSSEEDRKKGKKFARYQLGDLLLHLEKKHGEDWGKVYDEAWERIDKKVEGLSKHIKLEEERRSEDAQSKAALTDWLRAKASFVIEGLKEADKDEFCRCELKLQKWYGDLRGKPFAIEAENSILDISGFSKQYNCAFIWQKDGVKKLNLYLIINYFKGGKLRFKKIKPEAFEANRFYTVINKKSGEIVPMEVNFNFDDPNLIILPLAFGKRQGREFIWNDLLSLETGSLKLANGRVIEKTLYNRRTRQDEPALFVALTFERREVLDSSNIKPMNLIGVDRGENIPAVIALTDPEGCPLSRFKDSLGNPTHILRIGESYKEKQRTIQAKKEVEQRRAGGYSRKYASKAKNLADDMVRNTARDLLYYAVTQDAMLIFENLSRGFGRQGKRTFMAERQYTRMEDWLTAKLAYNGLPSKTYLSKTLAQYTSKTCSNCGFTITSADYDRVLEKLKKTATGWMTTINGKELKVEGQITYYNRYKRQNVVKDLSVELDRLSEESVNNDISSWDKGRSGEALSLLKKRFSHRPVQEKFVCLNCGFETHADEQAALNIARSWLFLRSQEYKKYQTNKTTGNTDKRAFVETWQSFYRKKLKEVWKPAV

SEQ ID NO: 46043 - protein, 978 aa, synthetic construct
  REGION 1..978: note = engineered CasX variant
QEIKRINKIRRRLVKDSNTKKAGKTGPMKTLLVRVMTPDLRERLENLRKKPENIPQPISNTSRANLNKLLTDYTEMKKAILHVYWEEFQKDPVGLMSRVAQPASKKIDQNKLKPEMDEKGNLTTAGFACSQCGQPLFVYKLEQVSEKGKAYTNYFGRCNVAEHEKLILLAQLKPEKDSDEAVTYSLGKFGQRALDFYSIHVTKESTHPVKPLAQIAGNRYASTPVGKALSDACMGTIASFLSKYQDIIIEHQKVVKGNQKRLESLRELAGKENLEYPSVTLPPQPHTKEGVDAYNEVIARVRMWVNLNLWQKLKLSRDDAKPLLRLKGFPSFPLVERQANEVDWWDMVCNVKKLINEKKEDGKVFWQNLAGYKRQEALRPYLSSEEDRKKGKKFARYQLGDLLLHLEKKHGEDWGKVYDEAWERIDKKVEGLSKHIKLEEERRSEDAQSKAALTDWLRAKASFVIEGLKEADKDEFCRCELKLQKWYGDLRGKPFAIEAENSILDISGFSKQYNCAFIWQKDGVKKLNLYLIINYFKGGKLRFKKIKPEAFEANRFYTVINKKSGEIVPMEVNFNFDDPNLIILPLAFGKRQGREFIWNDLLSLETGSLKLANGRVIEKTLYNRRTRQDEPALFVALTFERREVLDSSNIKPMNLIGVDRGENIPAVIALTDPEGCPLSRFKDSLGNPTHILRIGESYKEKQRTIQAKKEVEQRRAGGYSRKYASKAKNLADDMVRNTARDLLYYAVTQDAMLIFENLSRGFGRQGKRTFMAERQYTRMEDWLTAKLAYNGLPSKTYLSKTLAQYTSKTCSNCGFTITSADYDRVLEKLKKTATGWMTTINGKELKVEGQITYYNRYKRQNVVKDLSVELDRLSEESVNNDISSWDKGRSGEALSLLKKRFSHRPVQEKFVCLNCGFETHADEQAALNIARSWLFLRSQEYKKYQTNKTTGNTDKRAFVETWQSFYRKKLKEVWKPAV

SEQ ID NO: 46044 - protein, 978 aa, synthetic construct
  REGION 1..978: note = engineered CasX variant
QEIKRINKIRRRLVKDSNTKKAGKTGPMKTLLVRVMTPDLRERLENLRKKPENIPQPISNTSRANLNKLLTDYTEMKKAILHVYWEEFQKDPVGLMSRVAQPASKKIDQNKLKPEMDEKGNLTTAGFACSQCGQPLFVYKLEQVSEKGKAYTNYFGRCNVAEHEKLILLAQLKPEKDSDEAVTYSLGKFGQRALDFYSIHVTKESTHPVKPLAQIAGNRYASAPVGKALSDACMGTIASFLSKYQDIIIEHQKVVKGNQKRLESLRELAGKENLEYPSVTLPPQPHTKEGVDAYNEVIARVRMWVNLNLWQKLKLSRDDAKPLLRLKGFPSFPLVERQANEVDWWDMVCNVKKLINEKKEDGKVFWQNLAGYKRQEALRPYLSSEEDRKKGKKFARYQLGDLLLHLEKKHGEDWGKVYDEAWERIDKKVEGLSKHIKLEEERRSEDAQSKAALTDWLRAKASFVIEGLKEADKDEFCRCELKLQKWYGDLRGKPFAIEAENSILDISGFSKQYNCAFIWQKDGVKKLNLYLIINYFKGGKLRFKKIKPEAFEANRFYTVINKKSGEIVPMEVNFNFDDPNLIILPLAFGKRQGREFIWNDLLSLETGSLKLANGRVIEKTLYNRRTRQDEPALFVALTFERREVLDSSNIKPMNLIGVDRGENIPAVIALTDPEGCPLSRFKDSLGNPTHILRIGESYKEKQRTIQAKKEVEQRRAGGYSRKYASKAKNLADDMVRNTARDLLYYAVTQDAMLIFENLSRGFGRQGKRTFMAERQYTRMEDWLTAKLAYNGLPSKTYLSKTLAQYTSKTCSNCGFTITSADYDRVLEKLKKTATGWMTTINGKELKVEGQITYYNRYKRQNVVKDLSVELDRLSEESVNNDISSWDKGRSGEALSLLKKRFSHRPVQEKFVCLNCGFETHADEQAALNIARSWLFLRSQEYKKYQTNKTTGNTDKRAFVETWQSFYRKKLKEVWKPAV

SEQ ID NO: 46045 - protein, 978 aa, synthetic construct
  REGION 1..978: note = engineered CasX variant
QEIKRINKIRRRLVKDSNTKKAGKTGPMKTLLVRVMTPDLRERLENLRKKPENIPQPISNTSRANLNKLLTDYTEMKKAILHVYWEEFQKDPVGLMSRVAQPASKKIDQNKLKPEMDEKGNLTTAGFACSQCGQPLFVYKLEQVSEKGKAYTNYFGRCNVAEHEKLILLAQLKPEKDSDEAVTYSLGKFGQRALDFYSIHVTKESTHPVKPLAQIAGNRYASVPVGKALSDACMGTIASFLSKYQDIIIEHQKVVKGNQKRLESLRELAGKENLEYPSVTLPPQPHTKEGVDAYNEVIARVRMWVNLNLWQKLKLSRDDAKPLLRLKGFPSFPLVERQANEVDWWDMVCNVKKLINEKKEDGKVFWQNLAGYKRQEALRPYLSSEEDRKKGKKFARYQLGDLLLHLEKKHGEDWGKVYDEAWERIDKKVEGLSKHIKLEEERRSEDAQSKAALTDWLRAKASFVIEGLKEADKDEFCRCELKLQKWYGDLRGKPFAIEAENSILDISGFSKQYNCAFIWQKDGVKKLNLYLIINYFKGGKLRFKKIKPEAFEANRFYTVINKKSGEIVPMEVNFNFDDPNLIILPLAFGKRQGREFIWNDLLSLETGSLKLANGRVIEKTLYNRRTRQDEPALFVALTFERREVLDSSNIKPMNLIGVDRGENIPAVIALTDPEGCPLSRFKDSLGNPTHILRIGESYKEKQRTIQAKKEVEQRRAGGYSRKYASKAKNLADDMVRNTARDLLYYAVTQDAMLIFENLSRGFGRQGKRTFMAERQYTRMEDWLTAKLAYNGLPSKTYLSKTLAQYTSKTCSNCGFTITSADYDRVLEKLKKTATGWMTTINGKELKVEGQITYYNRYKRQNVVKDLSVELDRLSEESVNNDISSWDKGRSGEALSLLKKRFSHRPVQEKFVCLNCGFETHADEQAALNIARSWLFLRSQEYKKYQTNKTTGNTDKRAFVETWQSFYRKKLKEVWKPAV

SEQ ID NO: 46046 - protein, 978 aa, synthetic construct
  REGION 1..978: note = engineered CasX variant
QEIKRINKIRRRLVKDSNTKKAGKTGPMKTLLVRVMTPDLRERLENLRKKPENIPQPISNTSRANLNKLLTDYTEMKKAILHVYWEEFQKDPVGLMSRVAQPASKKIDQNKLKPEMDEKGNLTTAGFACSQCGQPLFVYKLEQVSEKGKAYTNYFGRCNVAEHEKLIKLAQLKPEKDSDEAVTYSLGKFGQRALDFYSIHVTKESTHPVKPLAQIAGNRYASGPVGKALSDACMGTIASFLSKYQDIIIEHQKVVKGNQKRLESLRELAGKENLEYPSVTLPPQPHTKEGVDAYNEVIARVRMWVNLNLWQKLKLSRDDAKPLLRLKGFPSFPLVERQANEVDWWDMVCNVKKLINEKKEDGKVFWQNLAGYKRQEALRPYLSSEEDRKKGKKFARYQLGDLLLHLEKKHGEDWGKVYDEAWERIDKKVEGLSKHIKLEEERRSEDAQSKAALTDWLRAKASFVIEGLKEADKDEFCRCELKLQKWYGDLRGKPFAIEAENSILDISGFSKQYNCAFIWQKDGVKKLNLYLIINYFKGGKLRFKKIKPEAFEANRFYTVINKKSGEIVPMEVNFNFDDPNLIILPLAFGKRQGREFIWNDLLSLETGSLKLANGRVIEKTLYNRRTRQDEPALFVALTFERREVLDSSNIKPMNLIGVDRGENIPAVIALTDPEGCPLSRFKDSLGNPTHILRIGESYKEKQRTIQAKKEVEQRRAGGYSRKYASKAKNLADDMVRNTARDLLYYAVTQDAMLIFENLSRGFGRQGKRTFMAERQYTRMEDWLTAKLAYNGLPSKTYLSKTLAQYTSKTCSNCGFTITSADYDRVLEKLKKTATGWMTTINGKELKVEGQITYYNRYKRQNVVKDLSVELDRLSEESVNNDISSWDKGRSGEALSLLKKRFSHRPVQEKFVCLNCGFETHADEQAALNIARSWLFLRSQEYKKYQTNKTTGNTDKRAFVETWQSFYRKKLKEVWKPAV

SEQ ID NO: 46047 - protein, 977 aa, synthetic construct
  REGION 1..977: note = engineered CasX variant
QEIKRINKIRRRLVKDSNTKKAGKTGPMKTLLVRVMTPDLRERLENLRKKPENIPQPISNTSRANLNKLLTDYTEMKKAILHVYWEEFQKDPVGLMSRVAQPASKKIDQNKLKPEMDEKGNLTTAGFACSQCGQPLFVYKLEQVSEKGKAYTNYFGRCNVAEHEKLILLAQLKPEKDSDEAVTYSLGKFGQRALDFYSIHVTKESTHPVKPLAQIAGNRYASPVGKALSDACMGTIASFLSKYQDIIIEHQKVVKGNQKRLESLRELAGKENLEYPSVTLPPQPHTKEGVDAYNEVIARVRMWVNLNLWQKLKLSRDDAKPLLRLKGFPSFPLVERQANEVDWWDMVCNVKKLINEKKEDGKVFWQNLAGYKRQEALRPYLSSEEDRKKGKKFARYQLGDLLLHLEKKHGEDWGKVYDEAWERIDKKVEGLSKHIKLEEERRSEDAQSKAALTDWLRAKASFVIEGLKEADKDEFCRCELKLQKWYGDLRGKPFAIEAENSILDISGFSKQYNCAFIWQKDGVKKLNLYLIINYFKGGKLRFKKIKPEAFEANRFYTVINKKSGEIVPMEVNFNFDDPNLIILPLAFGKRQGREFIWNDLLSLETGSLKLANGRVIEKTLYNRRTRQDEPALFVALTFERREVLDSSNIKPMNLIGVDRGENIPAVIALTDPEGCPLSRFKDSLGNPTHILRIGESYKEKQRTIQAKKEVEQRRAGGYSRKYASKAKNLADDMVRNTARDLLYYAVTQDAMLIFENLSRGFGRQGKRTFMAERQYTRMEDWLTAKLAYNGLPSKTYLSKTLAQYTSKTCSNCGFTITSADYDRVLEKLKKTATGWMTTINGKELKVEGQITYYNRYKRQNVVKDLSVELDRLSEESVNNDISSWDKGRSGEALSLLKKRFSHRPVQEKFVCLNCGFETHADEQAALNIARSWLFLRSQEYKKYQTNKTTGNTDKRAFVETWQSFYRKKLKEVWKPAV

SEQ ID NO: 46048 - protein, 978 aa, synthetic construct
  REGION 1..978: note = engineered CasX variant
QEIKRINKIRRRLVKDSNTKKAGKTGPMKTLLVRVMTPDLRERLENLRKKPENIPQPISNTSRANLNKLLTDYTEMKKAILHVYWEEFQKDPVGLMSRVAQPASKKIDQNKLKPEMDEKGNLTTAGFACSQCGQPLFVYKLEQVSEKGKAYTNYFGRCNVAEHEKLIQLAQLKPEKDSDEAVTYSLGKFGQRALDFYSIHVTKESTHPVKPLAQIAGNRYASYPVGKALSDACMGTIASFLSKYQDIIIEHQKVVKGNQKRLESLRELAGKENLEYPSVTLPPQPHTKEGVDAYNEVIARVRMWVNLNLWQKLKLSRDDAKPLLRLKGFPSFPLVERQANEVDWWDMVCNVKKLINEKKEDGKVFWQNLAGYKRQEALRPYLSSEEDRKKGKKFARYQLGDLLLHLEKKHGEDWGKVYDEAWERIDKKVEGLSKHIKLEEERRSEDAQSKAALTDWLRAKASFVIEGLKEADKDEFCRCELKLQKWYGDLRGKPFAIEAENSILDISGFSKQYNCAFIWQKDGVKKLNLYLIINYFKGGKLRFKKIKPEAFEANRFYTVINKKSGEIVPMEVNFNFDDPNLIILPLAFGKRQGREFIWNDLLSLETGSLKLANGRVIEKTLYNRRTRQDEPALFVALTFERREVLDSSNIKPMNLIGVDRGENIPAVIALTDPEGCPLSRFKDSLGNPTHILRIGESYKEKQRTIQAKKEVEQRRAGGYSRKYASKAKNLADDMVRNTARDLLYYAVTQDAMLIFENLSRGFGRQGKRTFMAERQYTRMEDWLTAKLAYEGLPSKTYLSKTLAQYTSKTCSNCGFTITSADYDRVLEKLKKTATGWMTTINGKELKVEGQITYYNRYKRQNVVKDLSVELDRLSEESVNNDISSWDKGRSGEALSLLKKRFSHRPVQEKFVCLNCGFETHADEQAALNIARSWLFLRSQEYKKYQTNKTTGNTDKRAFVETWQSFYRKKLKEVWKPAV

SEQ ID NO: 46049 - protein, 978 aa, synthetic construct
  REGION 1..978: note = engineered CasX variant
QEIKRINKIRRRLVKDSNTKKAGKTGPMKTLLVRVMTPDLRERLENLRKKPENIPQPISNTSRANLNKLLTDYTEMKKAILHVYWEEFQKDPVGLMSRVAQPASKKIDQNKLKPEMDEKGNLTTAGFACSQCGQPLFVYKLEQVSEKGKAYTNYFGRCNVAEHEKLIQLAQLKPEKDSDEAVTYSLGKFGQRALDFYSIHVTKESTHPVKPLAQIAGNRYASHPVGKALSDACMGTIASFLSKYQDIIIEHQKVVKGNQKRLESLRELAGKENLEYPSVTLPPQPHTKEGVDAYNEVIARVRMWVNLNLWQKLKLSRDDAKPLLRLKGFPSFPLVERQANEVDWWDMVCNVKKLINEKKEDGKVFWQNLAGYKRQEALRPYLSSEEDRKKGKKFARYQLGDLLLHLEKKHGEDWGKVYDEAWERIDKKVEGLSKHIKLEEERRSEDAQSKAALTDWLRAKASFVIEGLKEADKDEFCRCELKLQKWYGDLRGKPFAIEAENSILDISGFSKQYNCAFIWQKDGVKKLNLYLIINYFKGGKLRFKKIKPEAFEANRFYTVINKKSGEIVPMEVNFNFDDPNLIILPLAFGKRQGREFIWNDLLSLETGSLKLANGRVIEKTLYNRRTRQDEPALFVALTFERREVLDSSNIKPMNLIGVDRGENIPAVIALTDPEGCPLSRFKDSLGNPTHILRIGESYKEKQRTIQAKKEVEQRRAGGYSRKYASKAKNLADDMVRNTARDLLYYAVTQDAMLIFENLSRGFGRQGKRTFMAERQYTRMEDWLTAKLAYEGLPSKTYLSKTLAQYTSKTCSNCGFTITSADYDRVLEKLKKTATGWMTTINGKELKVEGQITYYNRYKRQNVVKDLSVELDRLSEESVNNDISSWDKGRSGEALSLLKKRFSHRPVQEKFVCLNCGFETHADEQAALNIARSWLFLRSQEYKKYQTNKTTGNTDKRAFVETWQSFYRKKLKEVWKPAV

SEQ ID NO: 46050 - protein, 978 aa, synthetic construct
  REGION 1..978: note = engineered CasX variant
QEIKRINKIRRRLVKDSNTKKAGKTGPMKTLLVRVMTPDLRERLENLRKKPENIPQPISNTSRANLNKLLTDYTEMKKAILHVYWEEFQKDPVGLMSRVAQPASKKIDQNKLKPEMDEKGNLTTAGFACSQCGQPLFVYKLEQVSEKGKAYTNYFGRCNVAEHEKLIQLAQLKPEKDSDEAVTYSLGKFGQRALDFYSIHVTKESTHPVKPLAQIAGNRYASSPVGKALSDACMGTIASFLSKYQDIIIEHQKVVKGNQKRLESLRELAGKENLEYPSVTLPPQPHTKEGVDAYNEVIARVRMWVNLNLWQKLKLSRDDAKPLLRLKGFPSFPLVERQANEVDWWDMVCNVKKLINEKKEDGKVFWQNLAGYKRQEALRPYLSSEEDRKKGKKFARYQLGDLLLHLEKKHGEDWGKVYDEAWERIDKKVEGLSKHIKLEEERRSEDAQSKAALTDWLRAKASFVIEGLKEADKDEFCRCELKLQKWYGDLRGKPFAIEAENSILDISGFSKQYNCAFIWQKDGVKKLNLYLIINYFKGGKLRFKKIKPEAFEANRFYTVINKKSGEIVPMEVNFNFDDPNLIILPLAFGKRQGREFIWNDLLSLETGSLKLANGRVIEKTLYNRRTRQDEPALFVALTFERREVLDSSNIKPMNLIGVDRGENIPAVIALTDPEGCPLSRFKDSLGNPTHILRIGESYKEKQRTIQAKKEVEQRRAGGYSRKYASKAKNLADDMVRNTARDLLYYAVTQDAMLIFENLSRGFGRQGKRTFMAERQYTRMEDWLTAKLAYEGLPSKTYLSKTLAQYTSKTCSNCGFTITSADYDRVLEKLKKTATGWMTTINGKELKVEGQITYYNRYKRQNVVKDLSVELDRLSEESVNNDISSWDKGRSGEALSLLKKRFSHRPVQEKFVCLNCGFETHADEQAALNIARSWLFLRSQEYKKYQTNKTTGNTDKRAFVETWQSFYRKKLKEVWKPAV

SEQ ID NO: 46051 - protein, 978 aa, synthetic construct
  REGION 1..978: note = engineered CasX variant
QEIKRINKIRRRLVKDSNTKKAGKTGPMKTLLVRVMTPDLRERLENLRKKPENIPQPISNTSRANLNKLLTDYTEMKKAILHVYWEEFQKDPVGLMSRVAQPASKKIDQNKLKPEMDEKGNLTTAGFACSQCGQPLFVYKLEQVSEKGKAYTNYFGRCNVAEHEKLIQLAQLKPEKDSDEAVTYSLGKFGQRALDFYSIHVTKESTHPVKPLAQIAGNRYASTPVGKALSDACMGTIASFLSKYQDIIIEHQKVVKGNQKRLESLRELAGKENLEYPSVTLPPQPHTKEGVDAYNEVIARVRMWVNLNLWQKLKLSRDDAKPLLRLKGFPSFPLVERQANEVDWWDMVCNVKKLINEKKEDGKVFWQNLAGYKRQEALRPYLSSEEDRKKGKKFARYQLGDLLLHLEKKHGEDWGKVYDEAWERIDKKVEGLSKHIKLEEERRSEDAQSKAALTDWLRAKASFVIEGLKEADKDEFCRCELKLQKWYGDLRGKPFAIEAENSILDISGFSKQYNCAFIWQKDGVKKLNLYLIINYFKGGKLRFKKIKPEAFEANRFYTVINKKSGEIVPMEVNFNFDDPNLIILPLAFGKRQGREFIWNDLLSLETGSLKLANGRVIEKTLYNRRTRQDEPALFVALTFERREVLDSSNIKPMNLIGVDRGENIPAVIALTDPEGCPLSRFKDSLGNPTHILRIGESYKEKQRTIQAKKEVEQRRAGGYSRKYASKAKNLADDMVRNTARDLLYYAVTQDAMLIFENLSRGFGRQGKRTFMAERQYTRMEDWLTAKLAYEGLPSKTYLSKTLAQYTSKTCSNCGFTITSADYDRVLEKLKKTATGWMTTINGKELKVEGQITYYNRYKRQNVVKDLSVELDRLSEESVNNDISSWDKGRSGEALSLLKKRFSHRPVQEKFVCLNCGFETHADEQAALNIARSWLFLRSQEYKKYQTNKTTGNTDKRAFVETWQSFYRKKLKEVWKPAV

SEQ ID NO: 46052 - protein, 978 aa, synthetic construct
  REGION 1..978: note = engineered CasX variant
QEIKRINKIRRRLVKDSNTKKAGKTGPMKTLLVRVMTPDLRERLENLRKKPENIPQPISNTSRANLNKLLTDYTEMKKAILHVYWEEFQKDPVGLMSRVAQPASKKIDQNKLKPEMDEKGNLTTAGFACSQCGQPLFVYKLEQVSEKGKAYTNYFGRCNVAEHEKLIQLAQLKPEKDSDEAVTYSLGKFGQRALDFYSIHVTKESTHPVKPLAQIAGNRYASAPVGKALSDACMGTIASFLSKYQDIIIEHQKVVKGNQKRLESLRELAGKENLEYPSVTLPPQPHTKEGVDAYNEVIARVRMWVNLNLWQKLKLSRDDAKPLLRLKGFPSFPLVERQANEVDWWDMVCNVKKLINEKKEDGKVFWQNLAGYKRQEALRPYLSSEEDRKKGKKFARYQLGDLLLHLEKKHGEDWGKVYDEAWERIDKKVEGLSKHIKLEEERRSEDAQSKAALTDWLRAKASFVIEGLKEADKDEFCRCELKLQKWYGDLRGKPFAIEAENSILDISGFSKQYNCAFIWQKDGVKKLNLYLIINYFKGGKLRFKKIKPEAFEANRFYTVINKKSGEIVPMEVNFNFDDPNLIILPLAFGKRQGREFIWNDLLSLETGSLKLANGRVIEKTLYNRRTRQDEPALFVALTFERREVLDSSNIKPMNLIGVDRGENIPAVIALTDPEGCPLSRFKDSLGNPTHILRIGESYKEKQRTIQAKKEVEQRRAGGYSRKYASKAKNLADDMVRNTARDLLYYAVTQDAMLIFENLSRGFGRQGKRTFMAERQYTRMEDWLTAKLAYEGLPSKTYLSKTLAQYTSKTCSNCGFTITSADYDRVLEKLKKTATGWMTTINGKELKVEGQITYYNRYKRQNVVKDLSVELDRLSEESVNNDISSWDKGRSGEALSLLKKRFSHRPVQEKFVCLNCGFETHADEQAALNIARSWLFLRSQEYKKYQTNKTTGNTDKRAFVETWQSFYRKKLKEVWKPAV

SEQ ID NO: 46053 - protein, 978 aa, synthetic construct
  REGION 1..978: note = engineered CasX variant
QEIKRINKIRRRLVKDSNTKKAGKTGPMKTLLVRVMTPDLRERLENLRKKPENIPQPISNTSRANLNKLLTDYTEMKKAILHVYWEEFQKDPVGLMSRVAQPASKKIDQNKLKPEMDEKGNLTTAGFACSQCGQPLFVYKLEQVSEKGKAYTNYFGRCNVAEHEKLIQLAQLKPEKDSDEAVTYSLGKFGQRALDFYSIHVTKESTHPVKPLAQIAGNRYASVPVGKALSDACMGTIASFLSKYQDIIIEHQKVVKGNQKRLESLRELAGKENLEYPSVTLPPQPHTKEGVDAYNEVIARVRMWVNLNLWQKLKLSRDDAKPLLRLKGFPSFPLVERQANEVDWWDMVCNVKKLINEKKEDGKVFWQNLAGYKRQEALRPYLSSEEDRKKGKKFARYQLGDLLLHLEKKHGEDWGKVYDEAWERIDKKVEGLSKHIKLEEERRSEDAQSKAALTDWLRAKASFVIEGLKEADKDEFCRCELKLQKWYGDLRGKPFAIEAENSILDISGFSKQYNCAFIWQKDGVKKLNLYLIINYFKGGKLRFKKIKPEAFEANRFYTVINKKSGEIVPMEVNFNFDDPNLIILPLAFGKRQGREFIWNDLLSLETGSLKLANGRVIEKTLYNRRTRQDEPALFVALTFERREVLDSSNIKPMNLIGVDRGENIPAVIALTDPEGCPLSRFKDSLGNPTHILRIGESYKEKQRTIQAKKEVEQRRAGGYSRKYASKAKNLADDMVRNTARDLLYYAVTQDAMLIFENLSRGFGRQGKRTFMAERQYTRMEDWLTAKLAYEGLPSKTYLSKTLAQYTSKTCSNCGFTITSADYDRVLEKLKKTATGWMTTINGKELKVEGQITYYNRYKRQNVVKDLSVELDRLSEESVNNDISSWDKGRSGEALSLLKKRFSHRPVQEKFVCLNCGFETHADEQAALNIARSWLFLRSQEYKKYQTNKTTGNTDKRAFVETWQSFYRKKLKEVWKPAV

SEQ ID NO: 46054 - protein, 979 aa, synthetic construct
  REGION 1..979: note = engineered CasX variant
QEIKRINKIRRRLVKDSNTKKAGKTGPMKTLLVRVMTPDLRERLENLRKKPENIPQPISNTSRANLNKLLTDYTEMKKAILHVYWEEFQKDPVGLMSRVAQPASKKIDQNKLKPEMDEKGNLTTAGFACSQCGQPLFVYKLEQVSEKGKAYTNYFGRCNVAEHEKLIQKLAQLKPEKDSDEAVTYSLGKFGQRALDFYSIHVTKESTHPVKPLAQIAGNRYASGPVGKALSDACMGTIASFLSKYQDIIIEHQKVVKGNQKRLESLRELAGKENLEYPSVTLPPQPHTKEGVDAYNEVIARVRMWVNLNLWQKLKLSRDDAKPLLRLKGFPSFPLVERQANEVDWWDMVCNVKKLINEKKEDGKVFWQNLAGYKRQEALRPYLSSEEDRKKGKKFARYQLGDLLLHLEKKHGEDWGKVYDEAWERIDKKVEGLSKHIKLEEERRSEDAQSKAALTDWLRAKASFVIEGLKEADKDEFCRCELKLQKWYGDLRGKPFAIEAENSILDISGFSKQYNCAFIWQKDGVKKLNLYLIINYFKGGKLRFKKIKPEAFEANRFYTVINKKSGEIVPMEVNFNFDDPNLIILPLAFGKRQGREFIWNDLLSLETGSLKLANGRVIEKTLYNRRTRQDEPALFVALTFERREVLDSSNIKPMNLIGVDRGENIPAVIALTDPEGCPLSRFKDSLGNPTHILRIGESYKEKQRTIQAKKEVEQRRAGGYSRKYASKAKNLADDMVRNTARDLLYYAVTQDAMLIFENLSRGFGRQGKRTFMAERQYTRMEDWLTAKLAYEGLPSKTYLSKTLAQYTSKTCSNCGFTITSADYDRVLEKLKKTATGWMTTINGKELKVEGQITYYNRYKRQNVVKDLSVELDRLSEESVNNDISSWDKGRSGEALSLLKKRFSHRPVQEKFVCLNCGFETHADEQAALNIARSWLFLRSQEYKKYQTNKTTGNTDKRAFVETWQSFYRKKLKEVWKPAV

SEQ ID NO: 46055 - protein, 977 aa, synthetic construct
  REGION 1..977: note = engineered CasX variant
QEIKRINKIRRRLVKDSNTKKAGKTGPMKTLLVRVMTPDLRERLENLRKKPENIPQPISNTSRANLNKLLTDYTEMKKAILHVYWEEFQKDPVGLMSRVAQPASKKIDQNKLKPEMDEKGNLTTAGFACSQCGQPLFVYKLEQVSEKGKAYTNYFGRCNVAEHEKLIQLAQLKPEKDSDEAVTYSLGKFGQRALDFYSIHVTKESTHPVKPLAQIAGNRYASPVGKALSDACMGTIASFLSKYQDIIIEHQKVVKGNQKRLESLRELAGKENLEYPSVTLPPQPHTKEGVDAYNEVIARVRMWVNLNLWQKLKLSRDDAKPLLRLKGFPSFPLVERQANEVDWWDMVCNVKKLINEKKEDGKVFWQNLAGYKRQEALRPYLSSEEDRKKGKKFARYQLGDLLLHLEKKHGEDWGKVYDEAWERIDKKVEGLSKHIKLEEERRSEDAQSKAALTDWLRAKASFVIEGLKEADKDEFCRCELKLQKWYGDLRGKPFAIEAENSILDISGFSKQYNCAFIWQKDGVKKLNLYLIINYFKGGKLRFKKIKPEAFEANRFYTVINKKSGEIVPMEVNFNFDDPNLIILPLAFGKRQGREFIWNDLLSLETGSLKLANGRVIEKTLYNRRTRQDEPALFVALTFERREVLDSSNIKPMNLIGVDRGENIPAVIALTDPEGCPLSRFKDSLGNPTHILRIGESYKEKQRTIQAKKEVEQRRAGGYSRKYASKAKNLADDMVRNTARDLLYYAVTQDAMLIFENLSRGFGRQGKRTFMAERQYTRMEDWLTAKLAYEGLPSKTYLSKTLAQYTSKTCSNCGFTITSADYDRVLEKLKKTATGWMTTINGKELKVEGQITYYNRYKRQNVVKDLSVELDRLSEESVNNDISSWDKGRSGEALSLLKKRFSHRPVQEKFVCLNCGFETHADEQAALNIARSWLFLRSQEYKKYQTNKTTGNTDKRAFVETWQSFYRKKLKEVWKPAV

SEQ ID NO: 46056 - protein, 978 aa, synthetic construct
  REGION 1..978: note = engineered CasX variant
QEIKRINKIRRRLVKDSNTKKAGKTGPMKTLLVRVMTPDLRERLENLRKKPENIPQPISNTSRANLNKLLTDYTEMKKAILHVYWEEFQKDPVGLMSRVAQPASKKIDQNKLKPEMDEKGNLTTAGFACSQCGQPLFVYKLEQVSEKGKAYTNYFGRCNVAEHEKLILLAQLKPEKDSDEAVTYSLGKFGQRALDFYSIHVTKESTHPVKPLAQIAGNRYASYPVGKALSDACMGTIASFLSKYQDIIIEHQKVVKGNQKRLESLRELAGKENLEYPSVTLPPQPHTKEGVDAYNEVIARVRMWVNLNLWQKLKLSRDDAKPLLRLKGFPSFPLVERQANEVDWWDMVCNVKKLINEKKEDGKVFWQNLAIYKRQEALRPYLSSEEDRKKGKKFARYQLGDLLLHLEKKHGEDWGKVYDEAWERIDKKVEGLSKHIKLEEERRSEDAQSKAALTDWLRAKASFVIEGLKEADKDEFCRCELKLQKWYGDLRGKPFAIEAENSILDISGFSKQYNCAFIWQKDGVKKLNLYLIINYFKGGKLRFKKIKPEAFEANRFYTVINKKSGEIVPMEVNFNFDDPNLIILPLAFGKRQGREFIWNDLLSLETGSLKLANGRVIEKTLYNRRTRQDEPALFVALTFERREVLDSSNIKPMNLIGVDRGENIPAVIALTDPEGCPLSRFKDSLGNPTHILRIGESYKEKQRTIQAKKEVEQRRAGGYSRKYASKAKNLADDMVRNTARDLLYYAVTQDAMLIFENLSRGFGRQGKRTFMAERQYTRMEDWLTAKLAYEGLPSKTYLSKTLAQYTSKTCSNCGFTITSADYDRVLEKLKKTATGWMTTINGKELKVEGQITYYNRYKRQNVVKDLSVELDRLSEESVNNDISSWDKGRSGEALSLLKKRFSHRPVQEKFVCLNCGFETHADEQAALNIARSWLFLRSQEYKKYQTNKTTGNTDKRAFVETWQSFYRKKLKEVWKPAV

SEQ ID NO: 46057 - protein, 978 aa, synthetic construct
  REGION 1..978: note = engineered CasX variant
QEIKRINKIRRRLVKDSNTKKAGKTGPMKTLLVRVMTPDLRERLENLRKKPENIPQPISNTSRANLNKLLTDYTEMKKAILHVYWEEFQKDPVGLMSRVAQPASKKIDQNKLKPEMDEKGNLTTAGFACSQCGQPLFVYKLEQVSEKGKAYTNYFGRCNVAEHEKLILLAQLKPEKDSDEAVTYSLGKFGQRALDFYSIHVTKESTHPVKPLAQIAGNRYASHPVGKALSDACMGTIASFLSKYQDIIIEHQKVVKGNQKRLESLRELAGKENLEYPSVTLPPQPHTKEGVDAYNEVIARVRMWVNLNLWQKLKLSRDDAKPLLRLKGFPSFPLVERQANEVDWWDMVCNVKKLINEKKEDGKVFWQNLAIYKRQEALRPYLSSEEDRKKGKKFARYQLGDLLLHLEKKHGEDWGKVYDEAWERIDKKVEGLSKHIKLEEERRSEDAQSKAALTDWLRAKASFVIEGLKEADKDEFCRCELKLQKWYGDLRGKPFAIEAENSILDISGFSKQYNCAFIWQKDGVKKLNLYLIINYFKGGKLRFKKIKPEAFEANRFYTVINKKSGEIVPMEVNFNFDDPNLIILPLAFGKRQGREFIWNDLLSLETGSLKLANGRVIEKTLYNRRTRQDEPALFVALTFERREVLDSSNIKPMNLIGVDRGENIPAVIALTDPEGCPLSRFKDSLGNPTHILRIGESYKEKQRTIQAKKEVEQRRAGGYSRKYASKAKNLADDMVRNTARDLLYYAVTQDAMLIFENLSRGFGRQGKRTFMAERQYTRMEDWLTAKLAYEGLPSKTYLSKTLAQYTSKTCSNCGFTITSADYDRVLEKLKKTATGWMTTINGKELKVEGQITYYNRYKRQNVVKDLSVELDRLSEESVNNDISSWDKGRSGEALSLLKKRFSHRPVQEKFVCLNCGFETHADEQAALNIARSWLFLRSQEYKKYQTNKTTGNTDKRAFVETWQSFYRKKLKEVWKPAV

SEQ ID NO: 46058 - protein, 978 aa, synthetic construct
  REGION 1..978: note = engineered CasX variant
QEIKRINKIRRRLVKDSNTKKAGKTGPMKTLLVRVMTPDLRERLENLRKKPENIPQPISNTSRANLNKLLTDYTEMKKAILHVYWEEFQKDPVGLMSRVAQPASKKIDQNKLKPEMDEKGNLTTAGFACSQCGQPLFVYKLEQVSEKGKAYTNYFGRCNVAEHEKLILLAQLKPEKDSDEAVTYSLGKFGQRALDFYSIHVTKESTHPVKPLAQIAGNRYASSPVGKALSDACMGTIASFLSKYQDIIIEHQKVVKGNQKRLESLRELAGKENLEYPSVTLPPQPHTKEGVDAYNEVIARVRMWVNLNLWQKLKLSRDDAKPLLRLKGFPSFPLVERQANEVDWWDMVCNVKKLINEKKEDGKVFWQNLAIYKRQEALRPYLSSEEDRKKGKKFARYQLGDLLLHLEKKHGEDWGKVYDEAWERIDKKVEGLSKHIKLEEERRSEDAQSKAALTDWLRAKASFVIEGLKEADKDEFCRCELKLQKWYGDLRGKPFAIEAENSILDISGFSKQYNCAFIWQKDGVKKLNLYLIINYFKGGKLRFKKIKPEAFEANRFYTVINKKSGEIVPMEVNFNFDDPNLIILPLAFGKRQGREFIWNDLLSLETGSLKLANGRVIEKTLYNRRTRQDEPALFVALTFERREVLDSSNIKPMNLIGVDRGENIPAVIALTDPEGCPLSRFKDSLGNPTHILRIGESYKEKQRTIQAKKEVEQRRAGGYSRKYASKAKNLADDMVRNTARDLLYYAVTQDAMLIFENLSRGFGRQGKRTFMAERQYTRMEDWLTAKLAYEGLPSKTYLSKTLAQYTSKTCSNCGFTITSADYDRVLEKLKKTATGWMTTINGKELKVEGQITYYNRYKRQNVVKDLSVELDRLSEESVNNDISSWDKGRSGEALSLLKKRFSHRPVQEKFVCLNCGFETHADEQAALNIARSWLFLRSQEYKKYQTNKTTGNTDKRAFVETWQSFYRKKLKEVWKPAV

SEQ ID NO: 46059 - protein, 978 aa, synthetic construct
  REGION 1..978: note = engineered CasX variant
QEIKRINKIRRRLVKDSNTKKAGKTGPMKTLLVRVMTPDLRERLENLRKKPENIPQPISNTSRANLNKLLTDYTEMKKAILHVYWEEFQKDPVGLMSRVAQPASKKIDQNKLKPEMDEKGNLTTAGFACSQCGQPLFVYKLEQVSEKGKAYTNYFGRCNVAEHEKLILLAQLKPEKDSDEAVTYSLGKFGQRALDFYSIHVTKESTHPVKPLAQIAGNRYASTPVGKALSDACMGTIASFLSKYQDIIIEHQKVVKGNQKRLESLRELAGKENLEYPSVTLPPQPHTKEGVDAYNEVIARVRMWVNLNLWQKLKLSRDDAKPLLRLKGFPSFPLVERQANEVDWWDMVCNVKKLINEKKEDGKVFWQNLAIYKRQEALRPYLSSEEDRKKGKKFARYQLGDLLLHLEKKHGEDWGKVYDEAWERIDKKVEGLSKHIKLEEERRSEDAQSKAALTDWLRAKASFVIEGLKEADKDEFCRCELKLQKWYGDLRGKPFAIEAENSILDISGFSKQYNCAFIWQKDGVKKLNLYLIINYFKGGKLRFKKIKPEAFEANRFYTVINKKSGEIVPMEVNFNFDDPNLIILPLAFGKRQGREFIWNDLLSLETGSLKLANGRVIEKTLYNRRTRQDEPALFVALTFERREVLDSSNIKPMNLIGVDRGENIPAVIALTDPEGCPLSRFKDSLGNPTHILRIGESYKEKQRTIQAKKEVEQRRAGGYSRKYASKAKNLADDMVRNTARDLLYYAVTQDAMLIFENLSRGFGRQGKRTFMAERQYTRMEDWLTAKLAYEGLPSKTYLSKTLAQYTSKTCSNCGFTITSADYDRVLEKLKKTATGWMTTINGKELKVEGQITYYNRYKRQNVVKDLSVELDRLSEESVNNDISSWDKGRSGEALSLLKKRFSHRPVQEKFVCLNCGFETHADEQAALNIARSWLFLRSQEYKKYQTNKTTGNTDKRAFVETWQSFYRKKLKEVWKPAV

SEQ ID NO: 46060 - protein, 978 aa, synthetic construct
  REGION 1..978: note = engineered CasX variant
QEIKRINKIRRRLVKDSNTKKAGKTGPMKTLLVRVMTPDLRERLENLRKKPENIPQPISNTSRANLNKLLTDYTEMKKAILHVYWEEFQKDPVGLMSRVAQPASKKIDQNKLKPEMDEKGNLTTAGFACSQCGQPLFVYKLEQVSEKGKAYTNYFGRCNVAEHEKLILLAQLKPEKDSDEAVTYSLGKFGQRALDFYSIHVTKESTHPVKPLAQIAGNRYASAPVGKALSDACMGTIASFLSKYQDIIIEHQKVVKGNQKRLESLRELAGKENLEYPSVTLPPQPHTKEGVDAYNEVIARVRMWVNLNLWQKLKLSRDDAKPLLRLKGFPSFPLVERQANEVDWWDMVCNVKKLINEKKEDGKVFWQNLAIYKRQEALRPYLSSEEDRKKGKKFARYQLGDLLLHLEKKHGEDWGKVYDEAWERIDKKVEGLSKHIKLEEERRSEDAQSKAALTDWLRAKASFVIEGLKEADKDEFCRCELKLQKWYGDLRGKPFAIEAENSILDISGFSKQYNCAFIWQKDGVKKLNLYLIINYFKGGKLRFKKIKPEAFEANRFYTVINKKSGEIVPMEVNFNFDDPNLIILPLAFGKRQGREFIWNDLLSLETGSLKLANGRVIEKTLYNRRTRQDEPALFVALTFERREVLDSSNIKPMNLIGVDRGENIPAVIALTDPEGCPLSRFKDSLGNPTHILRIGESYKEKQRTIQAKKEVEQRRAGGYSRKYASKAKNLADDMVRNTARDLLYYAVTQDAMLIFENLSRGFGRQGKRTFMAERQYTRMEDWLTAKLAYEGLPSKTYLSKTLAQYTSKTCSNCGFTITSADYDRVLEKLKKTATGWMTTINGKELKVEGQITYYNRYKRQNVVKDLSVELDRLSEESVNNDISSWDKGRSGEALSLLKKRFSHRPVQEKFVCLNCGFETHADEQAALNIARSWLFLRSQEYKKYQTNKTTGNTDKRAFVETWQSFYRKKLKEVWKPAV

SEQ ID NO: 46061 - protein, 978 aa, synthetic construct
  REGION 1..978: note = engineered CasX variant
QEIKRINKIRRRLVKDSNTKKAGKTGPMKTLLVRVMTPDLRERLENLRKKPENIPQPISNTSRANLNKLLTDYTEMKKAILHVYWEEFQKDPVGLMSRVAQPASKKIDQNKLKPEMDEKGNLTTAGFACSQCGQPLFVYKLEQVSEKGKAYTNYFGRCNVAEHEKLILLAQLKPEKDSDEAVTYSLGKFGQRALDFYSIHVTKESTHPVKPLAQIAGNRYASVPVGKALSDACMGTIASFLSKYQDIIIEHQKVVKGNQKRLESLRELAGKENLEYPSVTLPPQPHTKEGVDAYNEVIARVRMWVNLNLWQKLKLSRDDAKPLLRLKGFPSFPLVERQANEVDWWDMVCNVKKLINEKKEDGKVFWQNLAIYKRQEALRPYLSSEEDRKKGKKFARYQLGDLLLHLEKKHGEDWGKVYDEAWERIDKKVEGLSKHIKLEEERRSEDAQSKAALTDWLRAKASFVIEGLKEADKDEFCRCELKLQKWYGDLRGKPFAIEAENSILDISGFSKQYNCAFIWQKDGVKKLNLYLIINYFKGGKLRFKKIKPEAFEANRFYTVINKKSGEIVPMEVNFNFDDPNLIILPLAFGKRQGREFIWNDLLSLETGSLKLANGRVIEKTLYNRRTRQDEPALFVALTFERREVLDSSNIKPMNLIGVDRGENIPAVIALTDPEGCPLSRFKDSLGNPTHILRIGESYKEKQRTIQAKKEVEQRRAGGYSRKYASKAKNLADDMVRNTARDLLYYAVTQDAMLIFENLSRGFGRQGKRTFMAERQYTRMEDWLTAKLAYEGLPSKTYLSKTLAQYTSKTCSNCGFTITSADYDRVLEKLKKTATGWMTTINGKELKVEGQITYYNRYKRQNVVKDLSVELDRLSEESVNNDISSWDKGRSGEALSLLKKRFSHRPVQEKFVCLNCGFETHADEQAALNIARSWLFLRSQEYKKYQTNKTTGNTDKRAFVETWQSFYRKKLKEVWKPAV

SEQ ID NO: 46062 - protein, 978 aa, synthetic construct
  REGION 1..978: note = engineered CasX variant
QEIKRINKIRRRLVKDSNTKKAGKTGPMKTLLVRVMTPDLRERLENLRKKPENIPQPISNTSRANLNKLLTDYTEMKKAILHVYWEEFQKDPVGLMSRVAQPASKKIDQNKLKPEMDEKGNLTTAGFACSQCGQPLFVYKLEQVSEKGKAYTNYFGRCNVAEHEKLIKLAQLKPEKDSDEAVTYSLGKFGQRALDFYSIHVTKESTHPVKPLAQIAGNRYASGPVGKALSDACMGTIASFLSKYQDIIIEHQKVVKGNQKRLESLRELAGKENLEYPSVTLPPQPHTKEGVDAYNEVIARVRMWVNLNLWQKLKLSRDDAKPLLRLKGFPSFPLVERQANEVDWWDMVCNVKKLINEKKEDGKVFWQNLAIYKRQEALRPYLSSEEDRKKGKKFARYQLGDLLLHLEKKHGEDWGKVYDEAWERIDKKVEGLSKHIKLEEERRSEDAQSKAALTDWLRAKASFVIEGLKEADKDEFCRCELKLQKWYGDLRGKPFAIEAENSILDISGFSKQYNCAFIWQKDGVKKLNLYLIINYFKGGKLRFKKIKPEAFEANRFYTVINKKSGEIVPMEVNFNFDDPNLIILPLAFGKRQGREFIWNDLLSLETGSLKLANGRVIEKTLYNRRTRQDEPALFVALTFERREVLDSSNIKPMNLIGVDRGENIPAVIALTDPEGCPLSRFKDSLGNPTHILRIGESYKEKQRTIQAKKEVEQRRAGGYSRKYASKAKNLADDMVRNTARDLLYYAVTQDAMLIFENLSRGFGRQGKRTFMAERQYTRMEDWLTAKLAYEGLPSKTYLSKTLAQYTSKTCSNCGFTITSADYDRVLEKLKKTATGWMTTINGKELKVEGQITYYNRYKRQNVVKDLSVELDRLSEESVNNDISSWDKGRSGEALSLLKKRFSHRPVQEKFVCLNCGFETHADEQAALNIARSWLFLRSQEYKKYQTNKTTGNTDKRAFVETWQSFYRKKLKEVWKPAV

SEQ ID NO: 46063 - protein, 977 aa, synthetic construct
  REGION 1..977: note = engineered CasX variant
QEIKRINKIRRRLVKDSNTKKAGKTGPMKTLLVRVMTPDLRERLENLRKKPENIPQPISNTSRANLNKLLTDYTEMKKAILHVYWEEFQKDPVGLMSRVAQPASKKIDQNKLKPEMDEKGNLTTAGFACSQCGQPLFVYKLEQVSEKGKAYTNYFGRCNVAEHEKLILLAQLKPEKDSDEAVTYSLGKFGQRALDFYSIHVTKESTHPVKPLAQIAGNRYASPVGKALSDACMGTIASFLSKYQDIIIEHQKVVKGNQKRLESLRELAGKENLEYPSVTLPPQPHTKEGVDAYNEVIARVRMWVNLNLWQKLKLSRDDAKPLLRLKGFPSFPLVERQANEVDWWDMVCNVKKLINEKKEDGKVFWQNLAIYKRQEALRPYLSSEEDRKKGKKFARYQLGDLLLHLEKKHGEDWGKVYDEAWERIDKKVEGLSKHIKLEEERRSEDAQSKAALTDWLRAKASFVIEGLKEADKDEFCRCELKLQKWYGDLRGKPFAIEAENSILDISGFSKQYNCAFIWQKDGVKKLNLYLIINYFKGGKLRFKKIKPEAFEANRFYTVINKKSGEIVPMEVNFNFDDPNLIILPLAFGKRQGREFIWNDLLSLETGSLKLANGRVIEKTLYNRRTRQDEPALFVALTFERREVLDSSNIKPMNLIGVDRGENIPAVIALTDPEGCPLSRFKDSLGNPTHILRIGESYKEKQRTIQAKKEVEQRRAGGYSRKYASKAKNLADDMVRNTARDLLYYAVTQDAMLIFENLSRGFGRQGKRTFMAERQYTRMEDWLTAKLAYEGLPSKTYLSKTLAQYTSKTCSNCGFTITSADYDRVLEKLKKTATGWMTTINGKELKVEGQITYYNRYKRQNVVKDLSVELDRLSEESVNNDISSWDKGRSGEALSLLKKRFSHRPVQEKFVCLNCGFETHADEQAALNIARSWLFLRSQEYKKYQTNKTTGNTDKRAFVETWQSFYRKKLKEVWKPAV

SEQ ID NO: 46064 - protein, 978 aa, synthetic construct
  REGION 1..978: note = engineered CasX variant
QEIKRINKIRRRLVKDSNTKKAGKTGPMKTLLVRVMTPDLRERLENLRKKPENIPQPISNTSRANLNKLLTDYTEMKKAILHVYWEEFQKDPVGLMSRVAQPASKKIDQNKLKPEMDEKGNLTTAGFACSQCGQPLFVYKLEQVSEKGKAYTNYFGRCNVAEHEKLILLAQLKPEKDSDEAVTYSLGKFGQRALDFYSIHVTKESTHPVKPLAQIAGNRYASYPVGKALSDACMGTIASFLSKYQDIIIEHQKVVKGNQKRLESLRELAGKENLEYPSVTLPPQPHTKEGVDAYNEVIARVRMWVNLNLWQKLKLSRDDAKPLLRLKGFPSFPLVERQANEVDWWDMVCNVKKLINEKKEDGKVFWQNLAGYKRQEALRPYLSSEEDREKGKKFARYQLGDLLLHLEKKHGEDWGKVYDEAWERIDKKVEGLSKHIKLEEERRSEDAQSKAALTDWLRAKASFVIEGLKEADKDEFCRCELKLQKWYGDLRGKPFAIEAENSILDISGFSKQYNCAFIWQKDGVKKLNLYLIINYFKGGKLRFKKIKPEAFEANRFYTVINKKSGEIVPMEVNFNFDDPNLIILPLAFGKRQGREFIWNDLLSLETGSLKLANGRVIEKTLYNRRTRQDEPALFVALTFERREVLDSSNIKPMNLIGVDRGENIPAVIALTDPEGCPLSRFKDSLGNPTHILRIGESYKEKQRTIQAKKEVEQRRAGGYSRKYASKAKNLADDMVRNTARDLLYYAVTQDAMLIFENLSRGFGRQGKRTFMAERQYTRMEDWLTAKLAYEGLPSKTYLSKTLAQYTSKTCSNCGFTITSADYDRVLEKLKKTATGWMTTINGKELKVEGQITYYNRYKRQNVVKDLSVELDRLSEESVNNDISSWDKGRSGEALSLLKKRFSHRPVQEKFVCLNCGFETHADEQAALNIARSWLFLRSQEYKKYQTNKTTGNTDKRAFVETWQSFYRKKLKEVWKPAV

SEQ ID NO: 46065 - protein, 978 aa, synthetic construct
  REGION 1..978: note = engineered CasX variant
QEIKRINKIRRRLVKDSNTKKAGKTGPMKTLLVRVMTPDLRERLENLRKKPENIPQPISNTSRANLNKLLTDYTEMKKAILHVYWEEFQKDPVGLMSRVAQPASKKIDQNKLKPEMDEKGNLTTAGFACSQCGQPLFVYKLEQVSEKGKAYTNYFGRCNVAEHEKLILLAQLKPEKDSDEAVTYSLGKFGQRALDFYSIHVTKESTHPVKPLAQIAGNRYASHPVGKALSDACMGTIASFLSKYQDIIIEHQKVVKGNQKRLESLRELAGKENLEYPSVTLPPQPHTKEGVDAYNEVIARVRMWVNLNLWQKLKLSRDDAKPLLRLKGFPSFPLVERQANEVDWWDMVCNVKKLINEKKEDGKVFWQNLAGYKRQEALRPYLSSEEDREKGKKFARYQLGDLLLHLEKKHGEDWGKVYDEAWERIDKKVEGLSKHIKLEEERRSEDAQSKAALTDWLRAKASFVIEGLKEADKDEFCRCELKLQKWYGDLRGKPFAIEAENSILDISGFSKQYNCAFIWQKDGVKKLNLYLIINYFKGGKLRFKKIKPEAFEANRFYTVINKKSGEIVPMEVNFNFDDPNLIILPLAFGKRQGREFIWNDLLSLETGSLKLANGRVIEKTLYNRRTRQDEPALFVALTFERREVLDSSNIKPMNLIGVDRGENIPAVIALTDPEGCPLSRFKDSLGNPTHILRIGESYKEKQRTIQAKKEVEQRRAGGYSRKYASKAKNLADDMVRNTARDLLYYAVTQDAMLIFENLSRGFGRQGKRTFMAERQYTRMEDWLTAKLAYEGLPSKTYLSKTLAQYTSKTCSNCGFTITSADYDRVLEKLKKTATGWMTTINGKELKVEGQITYYNRYKRQNVVKDLSVELDRLSEESVNNDISSWDKGRSGEALSLLKKRFSHRPVQEKFVCLNCGFETHADEQAALNIARSWLFLRSQEYKKYQTNKTTGNTDKRAFVETWQSFYRKKLKEVWKPAV

SEQ ID NO: 46066 - protein, 978 aa, synthetic construct
  REGION 1..978: note = engineered CasX variant
QEIKRINKIRRRLVKDSNTKKAGKTGPMKTLLVRVMTPDLRERLENLRKKPENIPQPISNTSRANLNKLLTDYTEMKKAILHVYWEEFQKDPVGLMSRVAQPASKKIDQNKLKPEMDEKGNLTTAGFACSQCGQPLFVYKLEQVSEKGKAYTNYFGRCNVAEHEKLILLAQLKPEKDSDEAVTYSLGKFGQRALDFYSIHVTKESTHPVKPLAQIAGNRYASSPVGKALSDACMGTIASFLSKYQDIIIEHQKVVKGNQKRLESLRELAGKENLEYPSVTLPPQPHTKEGVDAYNEVIARVRMWVNLNLWQKLKLSRDDAKPLLRLKGFPSFPLVERQANEVDWWDMVCNVKKLINEKKEDGKVFWQNLAGYKRQEALRPYLSSEEDREKGKKFARYQLGDLLLHLEKKHGEDWGKVYDEAWERIDKKVEGLSKHIKLEEERRSEDAQSKAALTDWLRAKASFVIEGLKEADKDEFCRCELKLQKWYGDLRGKPFAIEAENSILDISGFSKQYNCAFIWQKDGVKKLNLYLIINYFKGGKLRFKKIKPEAFEANRFYTVINKKSGEIVPMEVNFNFDDPNLIILPLAFGKRQGREFIWNDLLSLETGSLKLANGRVIEKTLYNRRTRQDEPALFVALTFERREVLDSSNIKPMNLIGVDRGENIPAVIALTDPEGCPLSRFKDSLGNPTHILRIGESYKEKQRTIQAKKEVEQRRAGGYSRKYASKAKNLADDMVRNTARDLLYYAVTQDAMLIFENLSRGFGRQGKRTFMAERQYTRMEDWLTAKLAYEGLPSKTYLSKTLAQYTSKTCSNCGFTITSADYDRVLEKLKKTATGWMTTINGKELKVEGQITYYNRYKRQNVVKDLSVELDRLSEESVNNDISSWDKGRSGEALSLLKKRFSHRPVQEKFVCLNCGFETHADEQAALNIARSWLFLRSQEYKKYQTNKTTGNTDKRAFVETWQSFYRKKLKEVWKPAV

SEQ ID NO: 46067 - protein, 978 aa, synthetic construct
  REGION 1..978: note = engineered CasX variant
QEIKRINKIRRRLVKDSNTKKAGKTGPMKTLLVRVMTPDLRERLENLRKKPENIPQPISNTSRANLNKLLTDYTEMKKAILHVYWEEFQKDPVGLMSRVAQPASKKIDQNKLKPEMDEKGNLTTAGFACSQCGQPLFVYKLEQVSEKGKAYTNYFGRCNVAEHEKLILLAQLKPEKDSDEAVTYSLGKFGQRALDFYSIHVTKESTHPVKPLAQIAGNRYASTPVGKALSDACMGTIASFLSKYQDIIIEHQKVVKGNQKRLESLRELAGKENLEYPSVTLPPQPHTKEGVDAYNEVIARVRMWVNLNLWQKLKLSRDDAKPLLRLKGFPSFPLVERQANEVDWWDMVCNVKKLINEKKEDGKVFWQNLAGYKRQEALRPYLSSEEDREKGKKFARYQLGDLLLHLEKKHGEDWGKVYDEAWERIDKKVEGLSKHIKLEEERRSEDAQSKAALTDWLRAKASFVIEGLKEADKDEFCRCELKLQKWYGDLRGKPFAIEAENSILDISGFSKQYNCAFIWQKDGVKKLNLYLIINYFKGGKLRFKKIKPEAFEANRFYTVINKKSGEIVPMEVNFNFDDPNLIILPLAFGKRQGREFIWNDLLSLETGSLKLANGRVIEKTLYNRRTRQDEPALFVALTFERREVLDSSNIKPMNLIGVDRGENIPAVIALTDPEGCPLSRFKDSLGNPTHILRIGESYKEKQRTIQAKKEVEQRRAGGYSRKYASKAKNLADDMVRNTARDLLYYAVTQDAMLIFENLSRGFGRQGKRTFMAERQYTRMEDWLTAKLAYEGLPSKTYLSKTLAQYTSKTCSNCGFTITSADYDRVLEKLKKTATGWMTTINGKELKVEGQITYYNRYKRQNVVKDLSVELDRLSEESVNNDISSWDKGRSGEALSLLKKRFSHRPVQEKFVCLNCGFETHADEQAALNIARSWLFLRSQEYKKYQTNKTTGNTDKRAFVETWQSFYRKKLKEVWKPAV

SEQ ID NO: 46068 - protein, 978 aa, synthetic construct
  REGION 1..978: note = engineered CasX variant
QEIKRINKIRRRLVKDSNTKKAGKTGPMKTLLVRVMTPDLRERLENLRKKPENIPQPISNTSRANLNKLLTDYTEMKKAILHVYWEEFQKDPVGLMSRVAQPASKKIDQNKLKPEMDEKGNLTTAGFACSQCGQPLFVYKLEQVSEKGKAYTNYFGRCNVAEHEKLILLAQLKPEKDSDEAVTYSLGKFGQRALDFYSIHVTKESTHPVKPLAQIAGNRYASAPVGKALSDACMGTIASFLSKYQDIIIEHQKVVKGNQKRLESLRELAGKENLEYPSVTLPPQPHTKEGVDAYNEVIARVRMWVNLNLWQKLKLSRDDAKPLLRLKGFPSFPLVERQANEVDWWDMVCNVKKLINEKKEDGKVFWQNLAGYKRQEALRPYLSSEEDREKGKKFARYQLGDLLLHLEKKHGEDWGKVYDEAWERIDKKVEGLSKHIKLEEERRSEDAQSKAALTDWLRAKASFVIEGLKEADKDEFCRCELKLQKWYGDLRGKPFAIEAENSILDISGFSKQYNCAFIWQKDGVKKLNLYLIINYFKGGKLRFKKIKPEAFEANRFYTVINKKSGEIVPMEVNFNFDDPNLIILPLAFGKRQGREFIWNDLLSLETGSLKLANGRVIEKTLYNRRTRQDEPALFVALTFERREVLDSSNIKPMNLIGVDRGENIPAVIALTDPEGCPLSRFKDSLGNPTHILRIGESYKEKQRTIQAKKEVEQRRAGGYSRKYASKAKNLADDMVRNTARDLLYYAVTQDAMLIFENLSRGFGRQGKRTFMAERQYTRMEDWLTAKLAYEGLPSKTYLSKTLAQYTSKTCSNCGFTITSADYDRVLEKLKKTATGWMTTINGKELKVEGQITYYNRYKRQNVVKDLSVELDRLSEESVNNDISSWDKGRSGEALSLLKKRFSHRPVQEKFVCLNCGFETHADEQAALNIARSWLFLRSQEYKKYQTNKTTGNTDKRAFVETWQSFYRKKLKEVWKPAV

SEQ ID NO: 46069 - protein, 978 aa, synthetic construct
  REGION 1..978: note = engineered CasX variant
QEIKRINKIRRRLVKDSNTKKAGKTGPMKTLLVRVMTPDLRERLENLRKKPENIPQPISNTSRANLNKLLTDYTEMKKAILHVYWEEFQKDPVGLMSRVAQPASKKIDQNKLKPEMDEKGNLTTAGFACSQCGQPLFVYKLEQVSEKGKAYTNYFGRCNVAEHEKLILLAQLKPEKDSDEAVTYSLGKFGQRALDFYSIHVTKESTHPVKPLAQIAGNRYASVPVGKALSDACMGTIASFLSKYQDIIIEHQKVVKGNQKRLESLRELAGKENLEYPSVTLPPQPHTKEGVDAYNEVIARVRMWVNLNLWQKLKLSRDDAKPLLRLKGFPSFPLVERQANEVDWWDMVCNVKKLINEKKEDGKVFWQNLAGYKRQEALRPYLSSEEDREKGKKFARYQLGDLLLHLEKKHGEDWGKVYDEAWERIDKKVEGLSKHIKLEEERRSEDAQSKAALTDWLRAKASFVIEGLKEADKDEFCRCELKLQKWYGDLRGKPFAIEAENSILDISGFSKQYNCAFIWQKDGVKKLNLYLIINYFKGGKLRFKKIKPEAFEANRFYTVINKKSGEIVPMEVNFNFDDPNLIILPLAFGKRQGREFIWNDLLSLETGSLKLANGRVIEKTLYNRRTRQDEPALFVALTFERREVLDSSNIKPMNLIGVDRGENIPAVIALTDPEGCPLSRFKDSLGNPTHILRIGESYKEKQRTIQAKKEVEQRRAGGYSRKYASKAKNLADDMVRNTARDLLYYAVTQDAMLIFENLSRGFGRQGKRTFMAERQYTRMEDWLTAKLAYEGLPSKTYLSKTLAQYTSKTCSNCGFTITSADYDRVLEKLKKTATGWMTTINGKELKVEGQITYYNRYKRQNVVKDLSVELDRLSEESVNNDISSWDKGRSGEALSLLKKRFSHRPVQEKFVCLNCGFETHADEQAALNIARSWLFLRSQEYKKYQTNKTTGNTDKRAFVETWQSFYRKKLKEVWKPAV

SEQ ID NO: 46070 - protein, 978 aa, synthetic construct
  REGION 1..978: note = engineered CasX variant
QEIKRINKIRRRLVKDSNTKKAGKTGPMKTLLVRVMTPDLRERLENLRKKPENIPQPISNTSRANLNKLLTDYTEMKKAILHVYWEEFQKDPVGLMSRVAQPASKKIDQNKLKPEMDEKGNLTTAGFACSQCGQPLFVYKLEQVSEKGKAYTNYFGRCNVAEHEKLIKLAQLKPEKDSDEAVTYSLGKFGQRALDFYSIHVTKESTHPVKPLAQIAGNRYASGPVGKALSDACMGTIASFLSKYQDIIIEHQKVVKGNQKRLESLRELAGKENLEYPSVTLPPQPHTKEGVDAYNEVIARVRMWVNLNLWQKLKLSRDDAKPLLRLKGFPSFPLVERQANEVDWWDMVCNVKKLINEKKEDGKVFWQNLAGYKRQEALRPYLSSEEDREKGKKFARYQLGDLLLHLEKKHGEDWGKVYDEAWERIDKKVEGLSKHIKLEEERRSEDAQSKAALTDWLRAKASFVIEGLKEADKDEFCRCELKLQKWYGDLRGKPFAIEAENSILDISGFSKQYNCAFIWQKDGVKKLNLYLIINYFKGGKLRFKKIKPEAFEANRFYTVINKKSGEIVPMEVNFNFDDPNLIILPLAFGKRQGREFIWNDLLSLETGSLKLANGRVIEKTLYNRRTRQDEPALFVALTFERREVLDSSNIKPMNLIGVDRGENIPAVIALTDPEGCPLSRFKDSLGNPTHILRIGESYKEKQRTIQAKKEVEQRRAGGYSRKYASKAKNLADDMVRNTARDLLYYAVTQDAMLIFENLSRGFGRQGKRTFMAERQYTRMEDWLTAKLAYEGLPSKTYLSKTLAQYTSKTCSNCGFTITSADYDRVLEKLKKTATGWMTTINGKELKVEGQITYYNRYKRQNVVKDLSVELDRLSEESVNNDISSWDKGRSGEALSLLKKRFSHRPVQEKFVCLNCGFETHADEQAALNIARSWLFLRSQEYKKYQTNKTTGNTDKRAFVETWQSFYRKKLKEVWKPAV

SEQ ID NO: 46071 - protein, 977 aa, synthetic construct
  REGION 1..977: note = engineered CasX variant
QEIKRINKIRRRLVKDSNTKKAGKTGPMKTLLVRVMTPDLRERLENLRKKPENIPQPISNTSRANLNKLLTDYTEMKKAILHVYWEEFQKDPVGLMSRVAQPASKKIDQNKLKPEMDEKGNLTTAGFACSQCGQPLFVYKLEQVSEKGKAYTNYFGRCNVAEHEKLILLAQLKPEKDSDEAVTYSLGKFGQRALDFYSIHVTKESTHPVKPLAQIAGNRYASPVGKALSDACMGTIASFLSKYQDIIIEHQKVVKGNQKRLESLRELAGKENLEYPSVTLPPQPHTKEGVDAYNEVIARVRMWVNLNLWQKLKLSRDDAKPLLRLKGFPSFPLVERQANEVDWWDMVCNVKKLINEKKEDGKVFWQNLAGYKRQEALRPYLSSEEDREKGKKFARYQLGDLLLHLEKKHGEDWGKVYDEAWERIDKKVEGLSKHIKLEEERRSEDAQSKAALTDWLRAKASFVIEGLKEADKDEFCRCELKLQKWYGDLRGKPFAIEAENSILDISGFSKQYNCAFIWQKDGVKKLNLYLIINYFKGGKLRFKKIKPEAFEANRFYTVINKKSGEIVPMEVNFNFDDPNLIILPLAFGKRQGREFIWNDLLSLETGSLKLANGRVIEKTLYNRRTRQDEPALFVALTFERREVLDSSNIKPMNLIGVDRGENIPAVIALTDPEGCPLSRFKDSLGNPTHILRIGESYKEKQRTIQAKKEVEQRRAGGYSRKYASKAKNLADDMVRNTARDLLYYAVTQDAMLIFENLSRGFGRQGKRTFMAERQYTRMEDWLTAKLAYEGLPSKTYLSKTLAQYTSKTCSNCGFTITSADYDRVLEKLKKTATGWMTTINGKELKVEGQITYYNRYKRQNVVKDLSVELDRLSEESVNNDISSWDKGRSGEALSLLKKRFSHRPVQEKFVCLNCGFETHADEQAALNIARSWLFLRSQEYKKYQTNKTTGNTDKRAFVETWQSFYRKKLKEVWKPAV

SEQ ID NO: 46072 - protein, 978 aa, synthetic construct
  REGION 1..978: note = engineered CasX variant
QEIKRINKIRRRLVKDSNTKKAGKTGPMKTLLVRVMTPDLRERLENLRKKPENIPQPISNTSRANLNKLLTDYTEMKKAILHVYWEEFQKDPVGLMSRVAQPASKKIDQNKLKPEMDEKGNLTTAGFACSQCGQPLFVYKLEQVSEKGKAYTNYFGRCNVAEHEKLILLAQLKPEKDSDEAVTYSLGKFGQRALDFYSIHVTKESTHPVKPLAQIAGNRYASYPVGKALSDACMGTIASFLSKYQDIIIEHQKVVKGNQKRLESLRELAGKENLEYPSVTLPPQPHTKEGVDAYNEVIARVRMWVNLNLWQKLKLSRDDAKPLLRLKGFPSFPLVERQANEVDWWDMVCNVKKLINEKKEDGKVFWQNLAGYKRQEALRPYLSSEEDRKKGKKFARYQLGDLLLHLEKKHGEDWGKVYDEAWERIDKKVEGLSKHIKLEEERRSEDAQSKAALTDWLRAKASFVIEGLKEADKDEFCRCELKLQKWYGDLRGKPFAIEAENSILDISGFSKQYNCAFIWQKDGVKKLNLYLIINYFKGGKLRFKKIKPEAFEANRFYTVINKKSGEIVIMEVNFNFDDPNLIILPLAFGKRQGREFIWNDLLSLETGSLKLANGRVIEKTLYNRRTRQDEPALFVALTFERREVLDSSNIKPMNLIGVDRGENIPAVIALTDPEGCPLSRFKDSLGNPTHILRIGESYKEKQRTIQAKKEVEQRRAGGYSRKYASKAKNLADDMVRNTARDLLYYAVTQDAMLIFENLSRGFGRQGKRTFMAERQYTRMEDWLTAKLAYEGLPSKTYLSKTLAQYTSKTCSNCGFTITSADYDRVLEKLKKTATGWMTTINGKELKVEGQITYYNRYKRQNVVKDLSVELDRLSEESVNNDISSWDKGRSGEALSLLKKRFSHRPVQEKFVCLNCGFETHADEQAALNIARSWLFLRSQEYKKYQTNKTTGNTDKRAFVETWQSFYRKKLKEVWKPAV

SEQ ID NO: 46073 - protein, 978 aa, synthetic construct
  REGION 1..978: note = engineered CasX variant
QEIKRINKIRRRLVKDSNTKKAGKTGPMKTLLVRVMTPDLRERLENLRKKPENIPQPISNTSRANLNKLLTDYTEMKKAILHVYWEEFQKDPVGLMSRVAQPASKKIDQNKLKPEMDEKGNLTTAGFACSQCGQPLFVYKLEQVSEKGKAYTNYFGRCNVAEHEKLILLAQLKPEKDSDEAVTYSLGKFGQRALDFYSIHVTKESTHPVKPLAQIAGNRYASHPVGKALSDACMGTIASFLSKYQDIIIEHQKVVKGNQKRLESLRELAGKENLEYPSVTLPPQPHTKEGVDAYNEVIARVRMWVNLNLWQKLKLSRDDAKPLLRLKGFPSFPLVERQANEVDWWDMVCNVKKLINEKKEDGKVFWQNLAGYKRQEALRPYLSSEEDRKKGKKFARYQLGDLLLHLEKKHGEDWGKVYDEAWERIDKKVEGLSKHIKLEEERRSEDAQSKAALTDWLRAKASFVIEGLKEADKDEFCRCELKLQKWYGDLRGKPFAIEAENSILDISGFSKQYNCAFIWQKDGVKKLNLYLIINYFKGGKLRFKKIKPEAFEANRFYTVINKKSGEIVIMEVNFNFDDPNLIILPLAFGKRQGREFIWNDLLSLETGSLKLANGRVIEKTLYNRRTRQDEPALFVALTFERREVLDSSNIKPMNLIGVDRGENIPAVIALTDPEGCPLSRFKDSLGNPTHILRIGESYKEKQRTIQAKKEVEQRRAGGYSRKYASKAKNLADDMVRNTARDLLYYAVTQDAMLIFENLSRGFGRQGKRTFMAERQYTRMEDWLTAKLAYEGLPSKTYLSKTLAQYTSKTCSNCGFTITSADYDRVLEKLKKTATGWMTTINGKELKVEGQITYYNRYKRQNVVKDLSVELDRLSEESVNNDISSWDKGRSGEALSLLKKRFSHRPVQEKFVCLNCGFETHADEQAALNIARSWLFLRSQEYKKYQTNKTTGNTDKRAFVETWQSFYRKKLKEVWKPAV

SEQ ID NO: 46074 - protein, 978 aa, synthetic construct
  REGION 1..978: note = engineered CasX variant
QEIKRINKIRRRLVKDSNTKKAGKTGPMKTLLVRVMTPDLRERLENLRKKPENIPQPISNTSRANLNKLLTDYTEMKKAILHVYWEEFQKDPVGLMSRVAQPASKKIDQNKLKPEMDEKGNLTTAGFACSQCGQPLFVYKLEQVSEKGKAYTNYFGRCNVAEHEKLILLAQLKPEKDSDEAVTYSLGKFGQRALDFYSIHVTKESTHPVKPLAQIAGNRYASSPVGKALSDACMGTIASFLSKYQDIIIEHQKVVKGNQKRLESLRELAGKENLEYPSVTLPPQPHTKEGVDAYNEVIARVRMWVNLNLWQKLKLSRDDAKPLLRLKGFPSFPLVERQANEVDWWDMVCNVKKLINEKKEDGKVFWQNLAGYKRQEALRPYLSSEEDRKKGKKFARYQLGDLLLHLEKKHGEDWGKVYDEAWERIDKKVEGLSKHIKLEEERRSEDAQSKAALTDWLRAKASFVIEGLKEADKDEFCRCELKLQKWYGDLRGKPFAIEAENSILDISGFSKQYNCAFIWQKDGVKKLNLYLIINYFKGGKLRFKKIKPEAFEANRFYTVINKKSGEIVIMEVNFNFDDPNLIILPLAFGKRQGREFIWNDLLSLETGSLKLANGRVIEKTLYNRRTRQDEPALFVALTFERREVLDSSNIKPMNLIGVDRGENIPAVIALTDPEGCPLSRFKDSLGNPTHILRIGESYKEKQRTIQAKKEVEQRRAGGYSRKYASKAKNLADDMVRNTARDLLYYAVTQDAMLIFENLSRGFGRQGKRTFMAERQYTRMEDWLTAKLAYEGLPSKTYLSKTLAQYTSKTCSNCGFTITSADYDRVLEKLKKTATGWMTTINGKELKVEGQITYYNRYKRQNVVKDLSVELDRLSEESVNNDISSWDKGRSGEALSLLKKRFSHRPVQEKFVCLNCGFETHADEQAALNIARSWLFLRSQEYKKYQTNKTTGNTDKRAFVETWQSFYRKKLKEVWKPAV

SEQ ID NO: 46075 - protein, 978 aa, synthetic construct
  REGION 1..978: note = engineered CasX variant
QEIKRINKIRRRLVKDSNTKKAGKTGPMKTLLVRVMTPDLRERLENLRKKPENIPQPISNTSRANLNKLLTDYTEMKKAILHVYWEEFQKDPVGLMSRVAQPASKKIDQNKLKPEMDEKGNLTTAGFACSQCGQPLFVYKLEQVSEKGKAYTNYFGRCNVAEHEKLILLAQLKPEKDSDEAVTYSLGKFGQRALDFYSIHVTKESTHPVKPLAQIAGNRYASTPVGKALSDACMGTIASFLSKYQDIIIEHQKVVKGNQKRLESLRELAGKENLEYPSVTLPPQPHTKEGVDAYNEVIARVRMWVNLNLWQKLKLSRDDAKPLLRLKGFPSFPLVERQANEVDWWDMVCNVKKLINEKKEDGKVFWQNLAGYKRQEALRPYLSSEEDRKKGKKFARYQLGDLLLHLEKKHGEDWGKVYDEAWERIDKKVEGLSKHIKLEEERRSEDAQSKAALTDWLRAKASFVIEGLKEADKDEFCRCELKLQKWYGDLRGKPFAIEAENSILDISGFSKQYNCAFIWQKDGVKKLNLYLIINYFKGGKLRFKKIKPEAFEANRFYTVINKKSGEIVIMEVNFNFDDPNLIILPLAFGKRQGREFIWNDLLSLETGSLKLANGRVIEKTLYNRRTRQDEPALFVALTFERREVLDSSNIKPMNLIGVDRGENIPAVIALTDPEGCPLSRFKDSLGNPTHILRIGESYKEKQRTIQAKKEVEQRRAGGYSRKYASKAKNLADDMVRNTARDLLYYAVTQDAMLIFENLSRGFGRQGKRTFMAERQYTRMEDWLTAKLAYEGLPSKTYLSKTLAQYTSKTCSNCGFTITSADYDRVLEKLKKTATGWMTTINGKELKVEGQITYYNRYKRQNVVKDLSVELDRLSEESVNNDISSWDKGRSGEALSLLKKRFSHRPVQEKFVCLNCGFETHADEQAALNIARSWLFLRSQEYKKYQTNKTTGNTDKRAFVETWQSFYRKKLKEVWKPAV

SEQ ID NO: 46076 - protein, 978 aa, synthetic construct
  REGION 1..978: note = engineered CasX variant
QEIKRINKIRRRLVKDSNTKKAGKTGPMKTLLVRVMTPDLRERLENLRKKPENIPQPISNTSRANLNKLLTDYTEMKKAILHVYWEEFQKDPVGLMSRVAQPASKKIDQNKLKPEMDEKGNLTTAGFACSQCGQPLFVYKLEQVSEKGKAYTNYFGRCNVAEHEKLILLAQLKPEKDSDEAVTYSLGKFGQRALDFYSIHVTKESTHPVKPLAQIAGNRYASAPVGKALSDACMGTIASFLSKYQDIIIEHQKVVKGNQKRLESLRELAGKENLEYPSVTLPPQPHTKEGVDAYNEVIARVRMWVNLNLWQKLKLSRDDAKPLLRLKGFPSFPLVERQANEVDWWDMVCNVKKLINEKKEDGKVFWQNLAGYKRQEALRPYLSSEEDRKKGKKFARYQLGDLLLHLEKKHGEDWGKVYDEAWERIDKKVEGLSKHIKLEEERRSEDAQSKAALTDWLRAKASFVIEGLKEADKDEFCRCELKLQKWYGDLRGKPFAIEAENSILDISGFSKQYNCAFIWQKDGVKKLNLYLIINYFKGGKLRFKKIKPEAFEANRFYTVINKKSGEIVIMEVNFNFDDPNLIILPLAFGKRQGREFIWNDLLSLETGSLKLANGRVIEKTLYNRRTRQDEPALFVALTFERREVLDSSNIKPMNLIGVDRGENIPAVIALTDPEGCPLSRFKDSLGNPTHILRIGESYKEKQRTIQAKKEVEQRRAGGYSRKYASKAKNLADDMVRNTARDLLYYAVTQDAMLIFENLSRGFGRQGKRTFMAERQYTRMEDWLTAKLAYEGLPSKTYLSKTLAQYTSKTCSNCGFTITSADYDRVLEKLKKTATGWMTTINGKELKVEGQITYYNRYKRQNVVKDLSVELDRLSEESVNNDISSWDKGRSGEALSLLKKRFSHRPVQEKFVCLNCGFETHADEQAALNIARSWLFLRSQEYKKYQTNKTTGNTDKRAFVETWQSFYRKKLKEVWKPAV

SEQ ID NO: 46077 - protein, 978 aa, synthetic construct
  REGION 1..978: note = engineered CasX variant
QEIKRINKIRRRLVKDSNTKKAGKTGPMKTLLVRVMTPDLRERLENLRKKPENIPQPISNTSRANLNKLLTDYTEMKKAILHVYWEEFQKDPVGLMSRVAQPASKKIDQNKLKPEMDEKGNLTTAGFACSQCGQPLFVYKLEQVSEKGKAYTNYFGRCNVAEHEKLILLAQLKPEKDSDEAVTYSLGKFGQRALDFYSIHVTKESTHPVKPLAQIAGNRYASVPVGKALSDACMGTIASFLSKYQDIIIEHQKVVKGNQKRLESLRELAGKENLEYPSVTLPPQPHTKEGVDAYNEVIARVRMWVNLNLWQKLKLSRDDAKPLLRLKGFPSFPLVERQANEVDWWDMVCNVKKLINEKKEDGKVFWQNLAGYKRQEALRPYLSSEEDRKKGKKFARYQLGDLLLHLEKKHGEDWGKVYDEAWERIDKKVEGLSKHIKLEEERRSEDAQSKAALTDWLRAKASFVIEGLKEADKDEFCRCELKLQKWYGDLRGKPFAIEAENSILDISGFSKQYNCAFIWQKDGVKKLNLYLIINYFKGGKLRFKKIKPEAFEANRFYTVINKKSGEIVIMEVNFNFDDPNLIILPLAFGKRQGREFIWNDLLSLETGSLKLANGRVIEKTLYNRRTRQDEPALFVALTFERREVLDSSNIKPMNLIGVDRGENIPAVIALTDPEGCPLSRFKDSLGNPTHILRIGESYKEKQRTIQAKKEVEQRRAGGYSRKYASKAKNLADDMVRNTARDLLYYAVTQDAMLIFENLSRGFGRQGKRTFMAERQYTRMEDWLTAKLAYEGLPSKTYLSKTLAQYTSKTCSNCGFTITSADYDRVLEKLKKTATGWMTTINGKELKVEGQITYYNRYKRQNVVKDLSVELDRLSEESVNNDISSWDKGRSGEALSLLKKRFSHRPVQEKFVCLNCGFETHADEQAALNIARSWLFLRSQEYKKYQTNKTTGNTDKRAFVETWQSFYRKKLKEVWKPAV

SEQ ID NO: 46078 - protein, 978 aa, synthetic construct
  REGION 1..978: note = engineered CasX variant
QEIKRINKIRRRLVKDSNTKKAGKTGPMKTLLVRVMTPDLRERLENLRKKPENIPQPISNTSRANLNKLLTDYTEMKKAILHVYWEEFQKDPVGLMSRVAQPASKKIDQNKLKPEMDEKGNLTTAGFACSQCGQPLFVYKLEQVSEKGKAYTNYFGRCNVAEHEKLIKLAQLKPEKDSDEAVTYSLGKFGQRALDFYSIHVTKESTHPVKPLAQIAGNRYASGPVGKALSDACMGTIASFLSKYQDIIIEHQKVVKGNQKRLESLRELAGKENLEYPSVTLPPQPHTKEGVDAYNEVIARVRMWVNLNLWQKLKLSRDDAKPLLRLKGFPSFPLVERQANEVDWWDMVCNVKKLINEKKEDGKVFWQNLAGYKRQEALRPYLSSEEDRKKGKKFARYQLGDLLLHLEKKHGEDWGKVYDEAWERIDKKVEGLSKHIKLEEERRSEDAQSKAALTDWLRAKASFVIEGLKEADKDEFCRCELKLQKWYGDLRGKPFAIEAENSILDISGFSKQYNCAFIWQKDGVKKLNLYLIINYFKGGKLRFKKIKPEAFEANRFYTVINKKSGEIVIMEVNFNFDDPNLIILPLAFGKRQGREFIWNDLLSLETGSLKLANGRVIEKTLYNRRTRQDEPALFVALTFERREVLDSSNIKPMNLIGVDRGENIPAVIALTDPEGCPLSRFKDSLGNPTHILRIGESYKEKQRTIQAKKEVEQRRAGGYSRKYASKAKNLADDMVRNTARDLLYYAVTQDAMLIFENLSRGFGRQGKRTFMAERQYTRMEDWLTAKLAYEGLPSKTYLSKTLAQYTSKTCSNCGFTITSADYDRVLEKLKKTATGWMTTINGKELKVEGQITYYNRYKRQNVVKDLSVELDRLSEESVNNDISSWDKGRSGEALSLLKKRFSHRPVQEKFVCLNCGFETHADEQAALNIARSWLFLRSQEYKKYQTNKTTGNTDKRAFVETWQSFYRKKLKEVWKPAV

SEQ ID NO: 46079 - protein, 977 aa, synthetic construct
  REGION 1..977: note = engineered CasX variant
QEIKRINKIRRRLVKDSNTKKAGKTGPMKTLLVRVMTPDLRERLENLRKKPENIPQPISNTSRANLNKLLTDYTEMKKAILHVYWEEFQKDPVGLMSRVAQPASKKIDQNKLKPEMDEKGNLTTAGFACSQCGQPLFVYKLEQVSEKGKAYTNYFGRCNVAEHEKLILLAQLKPEKDSDEAVTYSLGKFGQRALDFYSIHVTKESTHPVKPLAQIAGNRYASPVGKALSDACMGTIASFLSKYQDIIIEHQKVVKGNQKRLESLRELAGKENLEYPSVTLPPQPHTKEGVDAYNEVIARVRMWVNLNLWQKLKLSRDDAKPLLRLKGFPSFPLVERQANEVDWWDMVCNVKKLINEKKEDGKVFWQNLAGYKRQEALRPYLSSEEDRKKGKKFARYQLGDLLLHLEKKHGEDWGKVYDEAWERIDKKVEGLSKHIKLEEERRSEDAQSKAALTDWLRAKASFVIEGLKEADKDEFCRCELKLQKWYGDLRGKPFAIEAENSILDISGFSKQYNCAFIWQKDGVKKLNLYLIINYFKGGKLRFKKIKPEAFEANRFYTVINKKSGEIVIMEVNFNFDDPNLIILPLAFGKRQGREFIWNDLLSLETGSLKLANGRVIEKTLYNRRTRQDEPALFVALTFERREVLDSSNIKPMNLIGVDRGENIPAVIALTDPEGCPLSRFKDSLGNPTHILRIGESYKEKQRTIQAKKEVEQRRAGGYSRKYASKAKNLADDMVRNTARDLLYYAVTQDAMLIFENLSRGFGRQGKRTFMAERQYTRMEDWLTAKLAYEGLPSKTYLSKTLAQYTSKTCSNCGFTITSADYDRVLEKLKKTATGWMTTINGKELKVEGQITYYNRYKRQNVVKDLSVELDRLSEESVNNDISSWDKGRSGEALSLLKKRFSHRPVQEKFVCLNCGFETHADEQAALNIARSWLFLRSQEYKKYQTNKTTGNTDKRAFVETWQSFYRKKLKEVWKPAV

SEQ ID NO: 46080 - protein, 978 aa, synthetic construct
  REGION 1..978: note = engineered CasX variant
QEIKRINKIRRRLVKDSNTKKAGKTGPMKTLLVRVMTPDLRERLENLRKKPENIPQPISNTSRANLNKLLTDYTEMKKAILHVYWEEFQVDPVGLMSRVAQPASKKIDQNKLKPEMDEKGNLTTAGFACSQCGQPLFVYKLEQVSEKGKAYTNYFGRCNVAEHEKLILLAQLKPEKDSDEAVTYSLGKFGQRALDFYSIHVTKESTHPVKPLAQIAGNRYASYPVGKALSGACMGTIASFLSKYQDIIIEHQKVVKGNQKRLESLRELAGKENLEYPSVTLPPQPHTKEGVDAYNEVIARVRMWVNLNLWQKLKLSRDDAKPLLRLKGFPSFPLVERQANEVDWWDMVCNVKKLINEKKEDGKVFWQNLAGYKRQEALRPYLSSEEDRKKGKKFARYQLGDLLLHLEKKHGEDWGKVYDEAWERIDKKVEGLSKHIKLEEERRSEDAQSKAALTDWLRAKASFVIEGLKEADKDEFCRCELKLQKWYGDLRGKPFAIEAENSILDISGFSKQYNCAFIWQKDGVKKLNLYLIINYFKGGKLRFKKIKPEAFEANRFYTVINKKSGEIVPMEVNFNFDDPNLIILPLAFGKRQGREFIWNDLLSLETGSLKLANGRVIEKTLYNRRTRQDEPALFVALTFERREVLDSSNIKPMNLIGVDRGENIPAVIALTDPEGCPLSRFKDSLGNPTHILRIGESYKEKQRTIQAKKEVEQRRAGGYSRKYASKAKNLADDMVRNTARDLLYYAVTQDAMLIFENLSRGFGRQGKRTFMAERQYTRMEDWLTAKLAYEGLPSKTYLSKTLAQYTSKTCSNCGFTITSADYDRVLEKLKKTATGWMTTINGKELKVEGQITYYNRYKRQNVVKDLSVELDRLSEESVNNDISSWTKGRSGEALSLLKKRFSHRPVQEKFVCLNCGFETHADEQAALNIARSWLFLRSQEYKKYQTNKTTGNTDKRAFVETWQSFYRKKLKEVWKPAV

SEQ ID NO: 46081 - protein, 978 aa, synthetic construct
  REGION 1..978: note = engineered CasX variant
QEIKRINKIRRRLVKDSNTKKAGKTGPMKTLLVRVMTPDLRERLENLRKKPENIPQPISNTSRANLNKLLTDYTEMKKAILHVYWEEFQVDPVGLMSRVAQPASKKIDQNKLKPEMDEKGNLTTAGFACSQCGQPLFVYKLEQVSEKGKAYTNYFGRCNVAEHEKLILLAQLKPEKDSDEAVTYSLGKFGQRALDFYSIHVTKESTHPVKPLAQIAGNRYASHPVGKALSGACMGTIASFLSKYQDIIIEHQKVVKGNQKRLESLRELAGKENLEYPSVTLPPQPHTKEGVDAYNEVIARVRMWVNLNLWQKLKLSRDDAKPLLRLKGFPSFPLVERQANEVDWWDMVCNVKKLINEKKEDGKVFWQNLAGYKRQEALRPYLSSEEDRKKGKKFARYQLGDLLLHLEKKHGEDWGKVYDEAWERIDKKVEGLSKHIKLEEERRSEDAQSKAALTDWLRAKASFVIEGLKEADKDEFCRCELKLQKWYGDLRGKPFAIEAENSILDISGFSKQYNCAFIWQKDGVKKLNLYLIINYFKGGKLRFKKIKPEAFEANRFYTVINKKSGEIVPMEVNFNFDDPNLIILPLAFGKRQGREFIWNDLLSLETGSLKLANGRVIEKTLYNRRTRQDEPALFVALTFERREVLDSSNIKPMNLIGVDRGENIPAVIALTDPEGCPLSRFKDSLGNPTHILRIGESYKEKQRTIQAKKEVEQRRAGGYSRKYASKAKNLADDMVRNTARDLLYYAVTQDAMLIFENLSRGFGRQGKRTFMAERQYTRMEDWLTAKLAYEGLPSKTYLSKTLAQYTSKTCSNCGFTITSADYDRVLEKLKKTATGWMTTINGKELKVEGQITYYNRYKRQNVVKDLSVELDRLSEESVNNDISSWTKGRSGEALSLLKKRFSHRPVQEKFVCLNCGFETHADEQAALNIARSWLFLRSQEYKKYQTNKTTGNTDKRAFVETWQSFYRKKLKEVWKPAV

SEQ ID NO: 46082 - protein, 978 aa, synthetic construct
  REGION 1..978: note = engineered CasX variant
QEIKRINKIRRRLVKDSNTKKAGKTGPMKTLLVRVMTPDLRERLENLRKKPENIPQPISNTSRANLNKLLTDYTEMKKAILHVYWEEFQVDPVGLMSRVAQPASKKIDQNKLKPEMDEKGNLTTAGFACSQCGQPLFVYKLEQVSEKGKAYTNYFGRCNVAEHEKLILLAQLKPEKDSDEAVTYSLGKFGQRALDFYSIHVTKESTHPVKPLAQIAGNRYASSPVGKALSGACMGTIASFLSKYQDIIIEHQKVVKGNQKRLESLRELAGKENLEYPSVTLPPQPHTKEGVDAYNEVIARVRMWVNLNLWQKLKLSRDDAKPLLRLKGFPSFPLVERQANEVDWWDMVCNVKKLINEKKEDGKVFWQNLAGYKRQEALRPYLSSEEDRKKGKKFARYQLGDLLLHLEKKHGEDWGKVYDEAWERIDKKVEGLSKHIKLEEERRSEDAQSKAALTDWLRAKASFVIEGLKEADKDEFCRCELKLQKWYGDLRGKPFAIEAENSILDISGFSKQYNCAFIWQKDGVKKLNLYLIINYFKGGKLRFKKIKPEAFEANRFYTVINKKSGEIVPMEVNFNFDDPNLIILPLAFGKRQGREFIWNDLLSLETGSLKLANGRVIEKTLYNRRTRQDEPALFVALTFERREVLDSSNIKPMNLIGVDRGENIPAVIALTDPEGCPLSRFKDSLGNPTHILRIGESYKEKQRTIQAKKEVEQRRAGGYSRKYASKAKNLADDMVRNTARDLLYYAVTQDAMLIFENLSRGFGRQGKRTFMAERQYTRMEDWLTAKLAYEGLPSKTYLSKTLAQYTSKTCSNCGFTITSADYDRVLEKLKKTATGWMTTINGKELKVEGQITYYNRYKRQNVVKDLSVELDRLSEESVNNDISSWTKGRSGEALSLLKKRFSHRPVQEKFVCLNCGFETHADEQAALNIARSWLFLRSQEYKKYQTNKTTGNTDKRAFVETWQSFYRKKLKEVWKPAV

SEQ ID NO: 46083 - protein, 978 aa, synthetic construct
  REGION 1..978: note = engineered CasX variant
QEIKRINKIRRRLVKDSNTKKAGKTGPMKTLLVRVMTPDLRERLENLRKKPENIPQPISNTSRANLNKLLTDYTEMKKAILHVYWEEFQVDPVGLMSRVAQPASKKIDQNKLKPEMDEKGNLTTAGFACSQCGQPLFVYKLEQVSEKGKAYTNYFGRCNVAEHEKLILLAQLKPEKDSDEAVTYSLGKFGQRALDFYSIHVTKESTHPVKPLAQIAGNRYASTPVGKALSGACMGTIASFLSKYQDIIIEHQKVVKGNQKRLESLRELAGKENLEYPSVTLPPQPHTKEGVDAYNEVIARVRMWVNLNLWQKLKLSRDDAKPLLRLKGFPSFPLVERQANEVDWWDMVCNVKKLINEKKEDGKVFWQNLAGYKRQEALRPYLSSEEDRKKGKKFARYQLGDLLLHLEKKHGEDWGKVYDEAWERIDKKVEGLSKHIKLEEERRSEDAQSKAALTDWLRAKASFVIEGLKEADKDEFCRCELKLQKWYGDLRGKPFAIEAENSILDISGFSKQYNCAFIWQKDGVKKLNLYLIINYFKGGKLRFKKIKPEAFEANRFYTVINKKSGEIVPMEVNFNFDDPNLIILPLAFGKRQGREFIWNDLLSLETGSLKLANGRVIEKTLYNRRTRQDEPALFVALTFERREVLDSSNIKPMNLIGVDRGENIPAVIALTDPEGCPLSRFKDSLGNPTHILRIGESYKEKQRTIQAKKEVEQRRAGGYSRKYASKAKNLADDMVRNTARDLLYYAVTQDAMLIFENLSRGFGRQGKRTFMAERQYTRMEDWLTAKLAYEGLPSKTYLSKTLAQYTSKTCSNCGFTITSADYDRVLEKLKKTATGWMTTINGKELKVEGQITYYNRYKRQNVVKDLSVELDRLSEESVNNDISSWTKGRSGEALSLLKKRFSHRPVQEKFVCLNCGFETHADEQAALNIARSWLFLRSQEYKKYQTNKTTGNTDKRAFVETWQSFYRKKLKEVWKPAV

SEQ ID NO: 46084 - protein, 978 aa, synthetic construct
  REGION 1..978: note = engineered CasX variant
QEIKRINKIRRRLVKDSNTKKAGKTGPMKTLLVRVMTPDLRERLENLRKKPENIPQPISNTSRANLNKLLTDYTEMKKAILHVYWEEFQVDPVGLMSRVAQPASKKIDQNKLKPEMDEKGNLTTAGFACSQCGQPLFVYKLEQVSEKGKAYTNYFGRCNVAEHEKLILLAQLKPEKDSDEAVTYSLGKFGQRALDFYSIHVTKESTHPVKPLAQIAGNRYASAPVGKALSGACMGTIASFLSKYQDIIIEHQKVVKGNQKRLESLRELAGKENLEYPSVTLPPQPHTKEGVDAYNEVIARVRMWVNLNLWQKLKLSRDDAKPLLRLKGFPSFPLVERQANEVDWWDMVCNVKKLINEKKEDGKVFWQNLAGYKRQEALRPYLSSEEDRKKGKKFARYQLGDLLLHLEKKHGEDWGKVYDEAWERIDKKVEGLSKHIKLEEERRSEDAQSKAALTDWLRAKASFVIEGLKEADKDEFCRCELKLQKWYGDLRGKPFAIEAENSILDISGFSKQYNCAFIWQKDGVKKLNLYLIINYFKGGKLRFKKIKPEAFEANRFYTVINKKSGEIVPMEVNFNFDDPNLIILPLAFGKRQGREFIWNDLLSLETGSLKLANGRVIEKTLYNRRTRQDEPALFVALTFERREVLDSSNIKPMNLIGVDRGENIPAVIALTDPEGCPLSRFKDSLGNPTHILRIGESYKEKQRTIQAKKEVEQRRAGGYSRKYASKAKNLADDMVRNTARDLLYYAVTQDAMLIFENLSRGFGRQGKRTFMAERQYTRMEDWLTAKLAYEGLPSKTYLSKTLAQYTSKTCSNCGFTITSADYDRVLEKLKKTATGWMTTINGKELKVEGQITYYNRYKRQNVVKDLSVELDRLSEESVNNDISSWTKGRSGEALSLLKKRFSHRPVQEKFVCLNCGFETHADEQAALNIARSWLFLRSQEYKKYQTNKTTGNTDKRAFVETWQSFYRKKLKEVWKPAV

SEQ ID NO: 46085 - protein, 978 aa, synthetic construct
  REGION 1..978: note = engineered CasX variant
QEIKRINKIRRRLVKDSNTKKAGKTGPMKTLLVRVMTPDLRERLENLRKKPENIPQPISNTSRANLNKLLTDYTEMKKAILHVYWEEFQVDPVGLMSRVAQPASKKIDQNKLKPEMDEKGNLTTAGFACSQCGQPLFVYKLEQVSEKGKAYTNYFGRCNVAEHEKLILLAQLKPEKDSDEAVTYSLGKFGQRALDFYSIHVTKESTHPVKPLAQIAGNRYASVPVGKALSGACMGTIASFLSKYQDIIIEHQKVVKGNQKRLESLRELAGKENLEYPSVTLPPQPHTKEGVDAYNEVIARVRMWVNLNLWQKLKLSRDDAKPLLRLKGFPSFPLVERQANEVDWWDMVCNVKKLINEKKEDGKVFWQNLAGYKRQEALRPYLSSEEDRKKGKKFARYQLGDLLLHLEKKHGEDWGKVYDEAWERIDKKVEGLSKHIKLEEERRSEDAQSKAALTDWLRAKASFVIEGLKEADKDEFCRCELKLQKWYGDLRGKPFAIEAENSILDISGFSKQYNCAFIWQKDGVKKLNLYLIINYFKGGKLRFKKIKPEAFEANRFYTVINKKSGEIVPMEVNFNFDDPNLIILPLAFGKRQGREFIWNDLLSLETGSLKLANGRVIEKTLYNRRTRQDEPALFVALTFERREVLDSSNIKPMNLIGVDRGENIPAVIALTDPEGCPLSRFKDSLGNPTHILRIGESYKEKQRTIQAKKEVEQRRAGGYSRKYASKAKNLADDMVRNTARDLLYYAVTQDAMLIFENLSRGFGRQGKRTFMAERQYTRMEDWLTAKLAYEGLPSKTYLSKTLAQYTSKTCSNCGFTITSADYDRVLEKLKKTATGWMTTINGKELKVEGQITYYNRYKRQNVVKDLSVELDRLSEESVNNDISSWTKGRSGEALSLLKKRFSHRPVQEKFVCLNCGFETHADEQAALNIARSWLFLRSQEYKKYQTNKTTGNTDKRAFVETWQSFYRKKLKEVWKPAV

SEQ ID NO: 46086 - protein, 978 aa, synthetic construct
  REGION 1..978: note = engineered CasX variant
QEIKRINKIRRRLVKDSNTKKAGKTGPMKTLLVRVMTPDLRERLENLRKKPENIPQPISNTSRANLNKLLTDYTEMKKAILHVYWEEFQVDPVGLMSRVAQPASKKIDQNKLKPEMDEKGNLTTAGFACSQCGQPLFVYKLEQVSEKGKAYTNYFGRCNVAEHEKLIKLAQLKPEKDSDEAVTYSLGKFGQRALDFYSIHVTKESTHPVKPLAQIAGNRYASGPVGKALSGACMGTIASFLSKYQDIIIEHQKVVKGNQKRLESLRELAGKENLEYPSVTLPPQPHTKEGVDAYNEVIARVRMWVNLNLWQKLKLSRDDAKPLLRLKGFPSFPLVERQANEVDWWDMVCNVKKLINEKKEDGKVFWQNLAGYKRQEALRPYLSSEEDRKKGKKFARYQLGDLLLHLEKKHGEDWGKVYDEAWERIDKKVEGLSKHIKLEEERRSEDAQSKAALTDWLRAKASFVIEGLKEADKDEFCRCELKLQKWYGDLRGKPFAIEAENSILDISGFSKQYNCAFIWQKDGVKKLNLYLIINYFKGGKLRFKKIKPEAFEANRFYTVINKKSGEIVPMEVNFNFDDPNLIILPLAFGKRQGREFIWNDLLSLETGSLKLANGRVIEKTLYNRRTRQDEPALFVALTFERREVLDSSNIKPMNLIGVDRGENIPAVIALTDPEGCPLSRFKDSLGNPTHILRIGESYKEKQRTIQAKKEVEQRRAGGYSRKYASKAKNLADDMVRNTARDLLYYAVTQDAMLIFENLSRGFGRQGKRTFMAERQYTRMEDWLTAKLAYEGLPSKTYLSKTLAQYTSKTCSNCGFTITSADYDRVLEKLKKTATGWMTTINGKELKVEGQITYYNRYKRQNVVKDLSVELDRLSEESVNNDISSWTKGRSGEALSLLKKRFSHRPVQEKFVCLNCGFETHADEQAALNIARSWLFLRSQEYKKYQTNKTTGNTDKRAFVETWQSFYRKKLKEVWKPAV

SEQ ID NO: 46087 - protein, 977 aa, synthetic construct
  REGION 1..977: note = engineered CasX variant
QEIKRINKIRRRLVKDSNTKKAGKTGPMKTLLVRVMTPDLRERLENLRKKPENIPQPISNTSRANLNKLLTDYTEMKKAILHVYWEEFQVDPVGLMSRVAQPASKKIDQNKLKPEMDEKGNLTTAGFACSQCGQPLFVYKLEQVSEKGKAYTNYFGRCNVAEHEKLILLAQLKPEKDSDEAVTYSLGKFGQRALDFYSIHVTKESTHPVKPLAQIAGNRYASPVGKALSGACMGTIASFLSKYQDIIIEHQKVVKGNQKRLESLRELAGKENLEYPSVTLPPQPHTKEGVDAYNEVIARVRMWVNLNLWQKLKLSRDDAKPLLRLKGFPSFPLVERQANEVDWWDMVCNVKKLINEKKEDGKVFWQNLAGYKRQEALRPYLSSEEDRKKGKKFARYQLGDLLLHLEKKHGEDWGKVYDEAWERIDKKVEGLSKHIKLEEERRSEDAQSKAALTDWLRAKASFVIEGLKEADKDEFCRCELKLQKWYGDLRGKPFAIEAENSILDISGFSKQYNCAFIWQKDGVKKLNLYLIINYFKGGKLRFKKIKPEAFEANRFYTVINKKSGEIVPMEVNFNFDDPNLIILPLAFGKRQGREFIWNDLLSLETGSLKLANGRVIEKTLYNRRTRQDEPALFVALTFERREVLDSSNIKPMNLIGVDRGENIPAVIALTDPEGCPLSRFKDSLGNPTHILRIGESYKEKQRTIQAKKEVEQRRAGGYSRKYASKAKNLADDMVRNTARDLLYYAVTQDAMLIFENLSRGFGRQGKRTFMAERQYTRMEDWLTAKLAYEGLPSKTYLSKTLAQYTSKTCSNCGFTITSADYDRVLEKLKKTATGWMTTINGKELKVEGQITYYNRYKRQNVVKDLSVELDRLSEESVNNDISSWTKGRSGEALSLLKKRFSHRPVQEKFVCLNCGFETHADEQAALNIARSWLFLRSQEYKKYQTNKTTGNTDKRAFVETWQSFYRKKLKEVWKPAV

SEQ ID NO: 46088 - protein, 978 aa, synthetic construct
  REGION 1..978: note = engineered CasX variant
QEIKRINKIRRRLVKDSNTKKAGKTGPMKTLLVRVMTPDLRERLENLRKKPENIPQPISNTSRANLNKLLTDYTEMKKAILHVYWEEFQVDPVGLMSRVAQPASKKIDQNKLKPEMDEKGNLTTAGFACSQCGQPLFVYKLEQVSEKGKAYTNYFGRCNVAEHEKLILLAQLKPEKDSDEAVTYSLGKFGQRALDFYSIHVTKESTHPVKPLAQIAGNRYASYPVGKALSDACMGTIASFLSKYQDIIIEHQKVVKGNQKRLESLRELAGKENLEYPSVTLPPQPHTKEGVDAYNEVIARVRMWVNLNLWQKLKLSRDDAKPLLRLKNFPSFPLVERQANEVDWWDMVCNVKKLINEKKEDGKVFWQNLAGYKRQEALRPYLSSEEDRKKGKKFARYQLGDLLLHLEKKHGEDWGKVYDEAWERIDKKVEGLSKHIKLEEERRSEDAQSKAALTDWLRAKASFVIEGLKEADKDEFCRCELKLQKWYGDLRGKPFAIEAENSILDISGFSKQYNCAFIWQKDGVKKLNLYLIINYFKGGKLRFKKIKPEAFEANRFYTVINKKSGEIVPMEVNFNFDDPNLIILPLAFGKRQGREFIWNDLLSLETGSLKLANGRVIEKTLYNRRTRQDEPALFVALTFERREVLDSSNIKPMNLIGVDRGENIPAVIALTDPEGCPLSRFKDSLGNPTHILRIGESYKEKQRTIQAKKEVEQRRAGGYSRKYASKAKNLADDMVRNTARDLLYYAVTQDAMLIFENLSRGFGRQGKRTFMAERQYTRMEDWLTAKLAYEGLPSKTYLSKTLAQYTSKTCSNCGFTITSADYDRVLEKLKKTATGWMTTINGKELKVEGQITYYNRYKRQNVVKDLSVELDRLSEESVNNDISSWTKGRSGEALSLLKKRFSHRPVQEKFVCLNCGFETHADEQAALNIARSWLFLRSQEYKKYQTNKTTGNTDKRAFVETWQSFYRKKLKEVWKPAV

SEQ ID NO: 46089 - protein, 978 aa, synthetic construct
  REGION 1..978: note = engineered CasX variant
QEIKRINKIRRRLVKDSNTKKAGKTGPMKTLLVRVMTPDLRERLENLRKKPENIPQPISNTSRANLNKLLTDYTEMKKAILHVYWEEFQVDPVGLMSRVAQPASKKIDQNKLKPEMDEKGNLTTAGFACSQCGQPLFVYKLEQVSEKGKAYTNYFGRCNVAEHEKLILLAQLKPEKDSDEAVTYSLGKFGQRALDFYSIHVTKESTHPVKPLAQIAGNRYASHPVGKALSDACMGTIASFLSKYQDIIIEHQKVVKGNQKRLESLRELAGKENLEYPSVTLPPQPHTKEGVDAYNEVIARVRMWVNLNLWQKLKLSRDDAKPLLRLKNFPSFPLVERQANEVDWWDMVCNVKKLINEKKEDGKVFWQNLAGYKRQEALRPYLSSEEDRKKGKKFARYQLGDLLLHLEKKHGEDWGKVYDEAWERIDKKVEGLSKHIKLEEERRSEDAQSKAALTDWLRAKASFVIEGLKEADKDEFCRCELKLQKWYGDLRGKPFAIEAENSILDISGFSKQYNCAFIWQKDGVKKLNLYLIINYFKGGKLRFKKIKPEAFEANRFYTVINKKSGEIVPMEVNFNFDDPNLIILPLAFGKRQGREFIWNDLLSLETGSLKLANGRVIEKTLYNRRTRQDEPALFVALTFERREVLDSSNIKPMNLIGVDRGENIPAVIALTDPEGCPLSRFKDSLGNPTHILRIGESYKEKQRTIQAKKEVEQRRAGGYSRKYASKAKNLADDMVRNTARDLLYYAVTQDAMLIFENLSRGFGRQGKRTFMAERQYTRMEDWLTAKLAYEGLPSKTYLSKTLAQYTSKTCSNCGFTITSADYDRVLEKLKKTATGWMTTINGKELKVEGQITYYNRYKRQNVVKDLSVELDRLSEESVNNDISSWTKGRSGEALSLLKKRFSHRPVQEKFVCLNCGFETHADEQAALNIARSWLFLRSQEYKKYQTNKTTGNTDKRAFVETWQSFYRKKLKEVWKPAV

SEQ ID NO: 46090 - protein, 978 aa, synthetic construct
  REGION 1..978: note = engineered CasX variant
QEIKRINKIRRRLVKDSNTKKAGKTGPMKTLLVRVMTPDLRERLENLRKKPENIPQPISNTSRANLNKLLTDYTEMKKAILHVYWEEFQVDPVGLMSRVAQPASKKIDQNKLKPEMDEKGNLTTAGFACSQCGQPLFVYKLEQVSEKGKAYTNYFGRCNVAEHEKLILLAQLKPEKDSDEAVTYSLGKFGQRALDFYSIHVTKESTHPVKPLAQIAGNRYASSPVGKALSDACMGTIASFLSKYQDIIIEHQKVVKGNQKRLESLRELAGKENLEYPSVTLPPQPHTKEGVDAYNEVIARVRMWVNLNLWQKLKLSRDDAKPLLRLKNFPSFPLVERQANEVDWWDMVCNVKKLINEKKEDGKVFWQNLAGYKRQEALRPYLSSEEDRKKGKKFARYQLGDLLLHLEKKHGEDWGKVYDEAWERIDKKVEGLSKHIKLEEERRSEDAQSKAALTDWLRAKASFVIEGLKEADKDEFCRCELKLQKWYGDLRGKPFAIEAENSILDISGFSKQYNCAFIWQKDGVKKLNLYLIINYFKGGKLRFKKIKPEAFEANRFYTVINKKSGEIVPMEVNFNFDDPNLIILPLAFGKRQGREFIWNDLLSLETGSLKLANGRVIEKTLYNRRTRQDEPALFVALTFERREVLDSSNIKPMNLIGVDRGENIPAVIALTDPEGCPLSRFKDSLGNPTHILRIGESYKEKQRTIQAKKEVEQRRAGGYSRKYASKAKNLADDMVRNTARDLLYYAVTQDAMLIFENLSRGFGRQGKRTFMAERQYTRMEDWLTAKLAYEGLPSKTYLSKTLAQYTSKTCSNCGFTITSADYDRVLEKLKKTATGWMTTINGKELKVEGQITYYNRYKRQNVVKDLSVELDRLSEESVNNDISSWTKGRSGEALSLLKKRFSHRPVQEKFVCLNCGFETHADEQAALNIARSWLFLRSQEYKKYQTNKTTGNTDKRAFVETWQSFYRKKLKEVWKPAV

SEQ ID NO: 46091 - protein, 978 aa, synthetic construct
  REGION 1..978: note = engineered CasX variant
QEIKRINKIRRRLVKDSNTKKAGKTGPMKTLLVRVMTPDLRERLENLRKKPENIPQPISNTSRANLNKLLTDYTEMKKAILHVYWEEFQVDPVGLMSRVAQPASKKIDQNKLKPEMDEKGNLTTAGFACSQCGQPLFVYKLEQVSEKGKAYTNYFGRCNVAEHEKLILLAQLKPEKDSDEAVTYSLGKFGQRALDFYSIHVTKESTHPVKPLAQIAGNRYASTPVGKALSDACMGTIASFLSKYQDIIIEHQKVVKGNQKRLESLRELAGKENLEYPSVTLPPQPHTKEGVDAYNEVIARVRMWVNLNLWQKLKLSRDDAKPLLRLKNFPSFPLVERQANEVDWWDMVCNVKKLINEKKEDGKVFWQNLAGYKRQEALRPYLSSEEDRKKGKKFARYQLGDLLLHLEKKHGEDWGKVYDEAWERIDKKVEGLSKHIKLEEERRSEDAQSKAALTDWLRAKASFVIEGLKEADKDEFCRCELKLQKWYGDLRGKPFAIEAENSILDISGFSKQYNCAFIWQKDGVKKLNLYLIINYFKGGKLRFKKIKPEAFEANRFYTVINKKSGEIVPMEVNFNFDDPNLIILPLAFGKRQGREFIWNDLLSLETGSLKLANGRVIEKTLYNRRTRQDEPALFVALTFERREVLDSSNIKPMNLIGVDRGENIPAVIALTDPEGCPLSRFKDSLGNPTHILRIGESYKEKQRTIQAKKEVEQRRAGGYSRKYASKAKNLADDMVRNTARDLLYYAVTQDAMLIFENLSRGFGRQGKRTFMAERQYTRMEDWLTAKLAYEGLPSKTYLSKTLAQYTSKTCSNCGFTITSADYDRVLEKLKKTATGWMTTINGKELKVEGQITYYNRYKRQNVVKDLSVELDRLSEESVNNDISSWTKGRSGEALSLLKKRFSHRPVQEKFVCLNCGFETHADEQAALNIARSWLFLRSQEYKKYQTNKTTGNTDKRAFVETWQSFYRKKLKEVWKPAV

SEQ ID NO: 46092 - protein, 978 aa, synthetic construct
  REGION 1..978: note = engineered CasX variant
QEIKRINKIRRRLVKDSNTKKAGKTGPMKTLLVRVMTPDLRERLENLRKKPENIPQPISNTSRANLNKLLTDYTEMKKAILHVYWEEFQVDPVGLMSRVAQPASKKIDQNKLKPEMDEKGNLTTAGFACSQCGQPLFVYKLEQVSEKGKAYTNYFGRCNVAEHEKLILLAQLKPEKDSDEAVTYSLGKFGQRALDFYSIHVTKESTHPVKPLAQIAGNRYASAPVGKALSDACMGTIASFLSKYQDIIIEHQKVVKGNQKRLESLRELAGKENLEYPSVTLPPQPHTKEGVDAYNEVIARVRMWVNLNLWQKLKLSRDDAKPLLRLKNFPSFPLVERQANEVDWWDMVCNVKKLINEKKEDGKVFWQNLAGYKRQEALRPYLSSEEDRKKGKKFARYQLGDLLLHLEKKHGEDWGKVYDEAWERIDKKVEGLSKHIKLEEERRSEDAQSKAALTDWLRAKASFVIEGLKEADKDEFCRCELKLQKWYGDLRGKPFAIEAENSILDISGFSKQYNCAFIWQKDGVKKLNLYLIINYFKGGKLRFKKIKPEAFEANRFYTVINKKSGEIVPMEVNFNFDDPNLIILPLAFGKRQGREFIWNDLLSLETGSLKLANGRVIEKTLYNRRTRQDEPALFVALTFERREVLDSSNIKPMNLIGVDRGENIPAVIALTDPEGCPLSRFKDSLGNPTHILRIGESYKEKQRTIQAKKEVEQRRAGGYSRKYASKAKNLADDMVRNTARDLLYYAVTQDAMLIFENLSRGFGRQGKRTFMAERQYTRMEDWLTAKLAYEGLPSKTYLSKTLAQYTSKTCSNCGFTITSADYDRVLEKLKKTATGWMTTINGKELKVEGQITYYNRYKRQNVVKDLSVELDRLSEESVNNDISSWTKGRSGEALSLLKKRFSHRPVQEKFVCLNCGFETHADEQAALNIARSWLFLRSQEYKKYQTNKTTGNTDKRAFVETWQSFYRKKLKEVWKPAV

SEQ ID NO: 46093 - protein, 978 aa, synthetic construct
  REGION 1..978: note = engineered CasX variant
QEIKRINKIRRRLVKDSNTKKAGKTGPMKTLLVRVMTPDLRERLENLRKKPENIPQPISNTSRANLNKLLTDYTEMKKAILHVYWEEFQVDPVGLMSRVAQPASKKIDQNKLKPEMDEKGNLTTAGFACSQCGQPLFVYKLEQVSEKGKAYTNYFGRCNVAEHEKLILLAQLKPEKDSDEAVTYSLGKFGQRALDFYSIHVTKESTHPVKPLAQIAGNRYASVPVGKALSDACMGTIASFLSKYQDIIIEHQKVVKGNQKRLESLRELAGKENLEYPSVTLPPQPHTKEGVDAYNEVIARVRMWVNLNLWQKLKLSRDDAKPLLRLKNFPSFPLVERQANEVDWWDMVCNVKKLINEKKEDGKVFWQNLAGYKRQEALRPYLSSEEDRKKGKKFARYQLGDLLLHLEKKHGEDWGKVYDEAWERIDKKVEGLSKHIKLEEERRSEDAQSKAALTDWLRAKASFVIEGLKEADKDEFCRCELKLQKWYGDLRGKPFAIEAENSILDISGFSKQYNCAFIWQKDGVKKLNLYLIINYFKGGKLRFKKIKPEAFEANRFYTVINKKSGEIVPMEVNFNFDDPNLIILPLAFGKRQGREFIWNDLLSLETGSLKLANGRVIEKTLYNRRTRQDEPALFVALTFERREVLDSSNIKPMNLIGVDRGENIPAVIALTDPEGCPLSRFKDSLGNPTHILRIGESYKEKQRTIQAKKEVEQRRAGGYSRKYASKAKNLADDMVRNTARDLLYYAVTQDAMLIFENLSRGFGRQGKRTFMAERQYTRMEDWLTAKLAYEGLPSKTYLSKTLAQYTSKTCSNCGFTITSADYDRVLEKLKKTATGWMTTINGKELKVEGQITYYNRYKRQNVVKDLSVELDRLSEESVNNDISSWTKGRSGEALSLLKKRFSHRPVQEKFVCLNCGFETHADEQAALNIARSWLFLRSQEYKKYQTNKTTGNTDKRAFVETWQSFYRKKLKEVWKPAV

SEQ ID NO: 46094 - protein, 978 aa, synthetic construct
  REGION 1..978: note = engineered CasX variant
QEIKRINKIRRRLVKDSNTKKAGKTGPMKTLLVRVMTPDLRERLENLRKKPENIPQPISNTSRANLNKLLTDYTEMKKAILHVYWEEFQVDPVGLMSRVAQPASKKIDQNKLKPEMDEKGNLTTAGFACSQCGQPLFVYKLEQVSEKGKAYTNYFGRCNVAEHEKLIKLAQLKPEKDSDEAVTYSLGKFGQRALDFYSIHVTKESTHPVKPLAQIAGNRYASGPVGKALSDACMGTIASFLSKYQDIIIEHQKVVKGNQKRLESLRELAGKENLEYPSVTLPPQPHTKEGVDAYNEVIARVRMWVNLNLWQKLKLSRDDAKPLLRLKNFPSFPLVERQANEVDWWDMVCNVKKLINEKKEDGKVFWQNLAGYKRQEALRPYLSSEEDRKKGKKFARYQLGDLLLHLEKKHGEDWGKVYDEAWERIDKKVEGLSKHIKLEEERRSEDAQSKAALTDWLRAKASFVIEGLKEADKDEFCRCELKLQKWYGDLRGKPFAIEAENSILDISGFSKQYNCAFIWQKDGVKKLNLYLIINYFKGGKLRFKKIKPEAFEANRFYTVINKKSGEIVPMEVNFNFDDPNLIILPLAFGKRQGREFIWNDLLSLETGSLKLANGRVIEKTLYNRRTRQDEPALFVALTFERREVLDSSNIKPMNLIGVDRGENIPAVIALTDPEGCPLSRFKDSLGNPTHILRIGESYKEKQRTIQAKKEVEQRRAGGYSRKYASKAKNLADDMVRNTARDLLYYAVTQDAMLIFENLSRGFGRQGKRTFMAERQYTRMEDWLTAKLAYEGLPSKTYLSKTLAQYTSKTCSNCGFTITSADYDRVLEKLKKTATGWMTTINGKELKVEGQITYYNRYKRQNVVKDLSVELDRLSEESVNNDISSWTKGRSGEALSLLKKRFSHRPVQEKFVCLNCGFETHADEQAALNIARSWLFLRSQEYKKYQTNKTTGNTDKRAFVETWQSFYRKKLKEVWKPAV

SEQ ID NO: 46095 - protein, 977 aa, synthetic construct
  REGION 1..977: note = engineered CasX variant
QEIKRINKIRRRLVKDSNTKKAGKTGPMKTLLVRVMTPDLRERLENLRKKPENIPQPISNTSRANLNKLLTDYTEMKKAILHVYWEEFQVDPVGLMSRVAQPASKKIDQNKLKPEMDEKGNLTTAGFACSQCGQPLFVYKLEQVSEKGKAYTNYFGRCNVAEHEKLILLAQLKPEKDSDEAVTYSLGKFGQRALDFYSIHVTKESTHPVKPLAQIAGNRYASPVGKALSDACMGTIASFLSKYQDIIIEHQKVVKGNQKRLESLRELAGKENLEYPSVTLPPQPHTKEGVDAYNEVIARVRMWVNLNLWQKLKLSRDDAKPLLRLKNFPSFPLVERQANEVDWWDMVCNVKKLINEKKEDGKVFWQNLAGYKRQEALRPYLSSEEDRKKGKKFARYQLGDLLLHLEKKHGEDWGKVYDEAWERIDKKVEGLSKHIKLEEERRSEDAQSKAALTDWLRAKASFVIEGLKEADKDEFCRCELKLQKWYGDLRGKPFAIEAENSILDISGFSKQYNCAFIWQKDGVKKLNLYLIINYFKGGKLRFKKIKPEAFEANRFYTVINKKSGEIVPMEVNFNFDDPNLIILPLAFGKRQGREFIWNDLLSLETGSLKLANGRVIEKTLYNRRTRQDEPALFVALTFERREVLDSSNIKPMNLIGVDRGENIPAVIALTDPEGCPLSRFKDSLGNPTHILRIGESYKEKQRTIQAKKEVEQRRAGGYSRKYASKAKNLADDMVRNTARDLLYYAVTQDAMLIFENLSRGFGRQGKRTFMAERQYTRMEDWLTAKLAYEGLPSKTYLSKTLAQYTSKTCSNCGFTITSADYDRVLEKLKKTATGWMTTINGKELKVEGQITYYNRYKRQNVVKDLSVELDRLSEESVNNDISSWTKGRSGEALSLLKKRFSHRPVQEKFVCLNCGFETHADEQAALNIARSWLFLRSQEYKKYQTNKTTGNTDKRAFVETWQSFYRKKLKEVWKPAV

SEQ ID NO: 46096 - protein, 978 aa, synthetic construct
  REGION 1..978: note = engineered CasX variant
QEIKRINKIRRRLVKDSNTKKAGKTGPMKTLLVRVMTPDLRERLENLRKKPENIPQPISNTSRANLNKLLTDYTEMKKAILHVYWEEFQVDPVGLMSRVAQPASKKIDQNKLKPEMDEKGNLTTAGFACSQCGQPLFVYKLEQVSEKGKAYTNYFGRCNVAEHEKLILLAQLKPEKDSDEAVTYSLGKFGQRALDFYSIHVTKESTHPVKPLAQIAGNRYASYPVGKALSDACMGTIASFLSKYQDIIIEHQKVVKGNQKRLESLRELAGKENLEYPSVTLPPQPHTKEGVDAYNEVIARVRMWVNLNLWQKLKLSRDDAKPLLRLKGFPSFPLVERQANEVDWWDMVCNVKKLINEKKEDGKVFWQNLAGYKRQEALRPYLSSEEDRKKGKKFARYQLGDLLNHLEKKHGEDWGKVYDEAWERIDKKVEGLSKHIKLEEERRSEDAQSKAALTDWLRAKASFVIEGLKEADKDEFCRCELKLQKWYGDLRGKPFAIEAENSILDISGFSKQYNCAFIWQKDGVKKLNLYLIINYFKGGKLRFKKIKPEAFEANRFYTVINKKSGEIVPMEVNFNFDDPNLIILPLAFGKRQGREFIWNDLLSLETGSLKLANGRVIEKTLYNRRTRQDEPALFVALTFERREVLDSSNIKPMNLIGVDRGENIPAVIALTDPEGCPLSRFKDSLGNPTHILRIGESYKEKQRTIQAKKEVEQRRAGGYSRKYASKAKNLADDMVRNTARDLLYYAVTQDAMLIFENLSRGFGRQGKRTFMAERQYTRMEDWLTAKLAYEGLPSKTYLSKTLAQYTSKTCSNCGFTITSADYDRVLEKLKKTATGWMTTINGKELKVEGQITYYNRYKRQNVVKDLSVELDRLSEESVNNDISSWTKGRSGEALSLLKKRFSHRPVQEKFVCLNCGFETHADEQAALNIARSWLFLRSQEYKKYQTNKTTGNTDKRAFVETWQSFYRKKLKEVWKPAV

SEQ ID NO: 46097 - protein, 978 aa, synthetic construct
  REGION 1..978: note = engineered CasX variant
QEIKRINKIRRRLVKDSNTKKAGKTGPMKTLLVRVMTPDLRERLENLRKKPENIPQPISNTSRANLNKLLTDYTEMKKAILHVYWEEFQVDPVGLMSRVAQPASKKIDQNKLKPEMDEKGNLTTAGFACSQCGQPLFVYKLEQVSEKGKAYTNYFGRCNVAEHEKLILLAQLKPEKDSDEAVTYSLGKFGQRALDFYSIHVTKESTHPVKPLAQIAGNRYASHPVGKALSDACMGTIASFLSKYQDIIIEHQKVVKGNQKRLESLRELAGKENLEYPSVTLPPQPHTKEGVDAYNEVIARVRMWVNLNLWQKLKLSRDDAKPLLRLKGFPSFPLVERQANEVDWWDMVCNVKKLINEKKEDGKVFWQNLAGYKRQEALRPYLSSEEDRKKGKKFARYQLGDLLNHLEKKHGEDWGKVYDEAWERIDKKVEGLSKHIKLEEERRSEDAQSKAALTDWLRAKASFVIEGLKEADKDEFCRCELKLQKWYGDLRGKPFAIEAENSILDISGFSKQYNCAFIWQKDGVKKLNLYLIINYFKGGKLRFKKIKPEAFEANRFYTVINKKSGEIVPMEVNFNFDDPNLIILPLAFGKRQGREFIWNDLLSLETGSLKLANGRVIEKTLYNRRTRQDEPALFVALTFERREVLDSSNIKPMNLIGVDRGENIPAVIALTDPEGCPLSRFKDSLGNPTHILRIGESYKEKQRTIQAKKEVEQRRAGGYSRKYASKAKNLADDMVRNTARDLLYYAVTQDAMLIFENLSRGFGRQGKRTFMAERQYTRMEDWLTAKLAYEGLPSKTYLSKTLAQYTSKTCSNCGFTITSADYDRVLEKLKKTATGWMTTINGKELKVEGQITYYNRYKRQNVVKDLSVELDRLSEESVNNDISSWTKGRSGEALSLLKKRFSHRPVQEKFVCLNCGFETHADEQAALNIARSWLFLRSQEYKKYQTNKTTGNTDKRAFVETWQSFYRKKLKEVWKPAV

SEQ ID NO: 46098 - protein, 978 aa, synthetic construct
  REGION 1..978: note = engineered CasX variant
QEIKRINKIRRRLVKDSNTKKAGKTGPMKTLLVRVMTPDLRERLENLRKKPENIPQPISNTSRANLNKLLTDYTEMKKAILHVYWEEFQVDPVGLMSRVAQPASKKIDQNKLKPEMDEKGNLTTAGFACSQCGQPLFVYKLEQVSEKGKAYTNYFGRCNVAEHEKLILLAQLKPEKDSDEAVTYSLGKFGQRALDFYSIHVTKESTHPVKPLAQIAGNRYASSPVGKALSDACMGTIASFLSKYQDIIIEHQKVVKGNQKRLESLRELAGKENLEYPSVTLPPQPHTKEGVDAYNEVIARVRMWVNLNLWQKLKLSRDDAKPLLRLKGFPSFPLVERQANEVDWWDMVCNVKKLINEKKEDGKVFWQNLAGYKRQEALRPYLSSEEDRKKGKKFARYQLGDLLNHLEKKHGEDWGKVYDEAWERIDKKVEGLSKHIKLEEERRSEDAQSKAALTDWLRAKASFVIEGLKEADKDEFCRCELKLQKWYGDLRGKPFAIEAENSILDISGFSKQYNCAFIWQKDGVKKLNLYLIINYFKGGKLRFKKIKPEAFEANRFYTVINKKSGEIVPMEVNFNFDDPNLIILPLAFGKRQGREFIWNDLLSLETGSLKLANGRVIEKTLYNRRTRQDEPALFVALTFERREVLDSSNIKPMNLIGVDRGENIPAVIALTDPEGCPLSRFKDSLGNPTHILRIGESYKEKQRTIQAKKEVEQRRAGGYSRKYASKAKNLADDMVRNTARDLLYYAVTQDAMLIFENLSRGFGRQGKRTFMAERQYTRMEDWLTAKLAYEGLPSKTYLSKTLAQYTSKTCSNCGFTITSADYDRVLEKLKKTATGWMTTINGKELKVEGQITYYNRYKRQNVVKDLSVELDRLSEESVNNDISSWTKGRSGEALSLLKKRFSHRPVQEKFVCLNCGFETHADEQAALNIARSWLFLRSQEYKKYQTNKTTGNTDKRAFVETWQSFYRKKLKEVWKPAV

SEQ ID NO: 46099 - protein, 978 aa, synthetic construct
  REGION 1..978: note = engineered CasX variant
QEIKRINKIRRRLVKDSNTKKAGKTGPMKTLLVRVMTPDLRERLENLRKKPENIPQPISNTSRANLNKLLTDYTEMKKAILHVYWEEFQVDPVGLMSRVAQPASKKIDQNKLKPEMDEKGNLTTAGFACSQCGQPLFVYKLEQVSEKGKAYTNYFGRCNVAEHEKLILLAQLKPEKDSDEAVTYSLGKFGQRALDFYSIHVTKESTHPVKPLAQIAGNRYASTPVGKALSDACMGTIASFLSKYQDIIIEHQKVVKGNQKRLESLRELAGKENLEYPSVTLPPQPHTKEGVDAYNEVIARVRMWVNLNLWQKLKLSRDDAKPLLRLKGFPSFPLVERQANEVDWWDMVCNVKKLINEKKEDGKVFWQNLAGYKRQEALRPYLSSEEDRKKGKKFARYQLGDLLNHLEKKHGEDWGKVYDEAWERIDKKVEGLSKHIKLEEERRSEDAQSKAALTDWLRAKASFVIEGLKEADKDEFCRCELKLQKWYGDLRGKPFAIEAENSILDISGFSKQYNCAFIWQKDGVKKLNLYLIINYFKGGKLRFKKIKPEAFEANRFYTVINKKSGEIVPMEVNFNFDDPNLIILPLAFGKRQGREFIWNDLLSLETGSLKLANGRVIEKTLYNRRTRQDEPALFVALTFERREVLDSSNIKPMNLIGVDRGENIPAVIALTDPEGCPLSRFKDSLGNPTHILRIGESYKEKQRTIQAKKEVEQRRAGGYSRKYASKAKNLADDMVRNTARDLLYYAVTQDAMLIFENLSRGFGRQGKRTFMAERQYTRMEDWLTAKLAYEGLPSKTYLSKTLAQYTSKTCSNCGFTITSADYDRVLEKLKKTATGWMTTINGKELKVEGQITYYNRYKRQNVVKDLSVELDRLSEESVNNDISSWTKGRSGEALSLLKKRFSHRPVQEKFVCLNCGFETHADEQAALNIARSWLFLRSQEYKKYQTNKTTGNTDKRAFVETWQSFYRKKLKEVWKPAV

SEQ ID NO: 46100 - protein, 978 aa, synthetic construct
  REGION 1..978: note = engineered CasX variant
QEIKRINKIRRRLVKDSNTKKAGKTGPMKTLLVRVMTPDLRERLENLRKKPENIPQPISNTSRANLNKLLTDYTEMKKAILHVYWEEFQVDPVGLMSRVAQPASKKIDQNKLKPEMDEKGNLTTAGFACSQCGQPLFVYKLEQVSEKGKAYTNYFGRCNVAEHEKLILLAQLKPEKDSDEAVTYSLGKFGQRALDFYSIHVTKESTHPVKPLAQIAGNRYASAPVGKALSDACMGTIASFLSKYQDIIIEHQKVVKGNQKRLESLRELAGKENLEYPSVTLPPQPHTKEGVDAYNEVIARVRMWVNLNLWQKLKLSRDDAKPLLRLKGFPSFPLVERQANEVDWWDMVCNVKKLINEKKEDGKVFWQNLAGYKRQEALRPYLSSEEDRKKGKKFARYQLGDLLNHLEKKHGEDWGKVYDEAWERIDKKVEGLSKHIKLEEERRSEDAQSKAALTDWLRAKASFVIEGLKEADKDEFCRCELKLQKWYGDLRGKPFAIEAENSILDISGFSKQYNCAFIWQKDGVKKLNLYLIINYFKGGKLRFKKIKPEAFEANRFYTVINKKSGEIVPMEVNFNFDDPNLIILPLAFGKRQGREFIWNDLLSLETGSLKLANGRVIEKTLYNRRTRQDEPALFVALTFERREVLDSSNIKPMNLIGVDRGENIPAVIALTDPEGCPLSRFKDSLGNPTHILRIGESYKEKQRTIQAKKEVEQRRAGGYSRKYASKAKNLADDMVRNTARDLLYYAVTQDAMLIFENLSRGFGRQGKRTFMAERQYTRMEDWLTAKLAYEGLPSKTYLSKTLAQYTSKTCSNCGFTITSADYDRVLEKLKKTATGWMTTINGKELKVEGQITYYNRYKRQNVVKDLSVELDRLSEESVNNDISSWTKGRSGEALSLLKKRFSHRPVQEKFVCLNCGFETHADEQAALNIARSWLFLRSQEYKKYQTNKTTGNTDKRAFVETWQSFYRKKLKEVWKPAV

SEQ ID NO: 46101 - protein, 978 aa, synthetic construct
  REGION 1..978: note = engineered CasX variant
QEIKRINKIRRRLVKDSNTKKAGKTGPMKTLLVRVMTPDLRERLENLRKKPENIPQPISNTSRANLNKLLTDYTEMKKAILHVYWEEFQVDPVGLMSRVAQPASKKIDQNKLKPEMDEKGNLTTAGFACSQCGQPLFVYKLEQVSEKGKAYTNYFGRCNVAEHEKLILLAQLKPEKDSDEAVTYSLGKFGQRALDFYSIHVTKESTHPVKPLAQIAGNRYASVPVGKALSDACMGTIASFLSKYQDIIIEHQKVVKGNQKRLESLRELAGKENLEYPSVTLPPQPHTKEGVDAYNEVIARVRMWVNLNLWQKLKLSRDDAKPLLRLKGFPSFPLVERQANEVDWWDMVCNVKKLINEKKEDGKVFWQNLAGYKRQEALRPYLSSEEDRKKGKKFARYQLGDLLNHLEKKHGEDWGKVYDEAWERIDKKVEGLSKHIKLEEERRSEDAQSKAALTDWLRAKASFVIEGLKEADKDEFCRCELKLQKWYGDLRGKPFAIEAENSILDISGFSKQYNCAFIWQKDGVKKLNLYLIINYFKGGKLRFKKIKPEAFEANRFYTVINKKSGEIVPMEVNFNFDDPNLIILPLAFGKRQGREFIWNDLLSLETGSLKLANGRVIEKTLYNRRTRQDEPALFVALTFERREVLDSSNIKPMNLIGVDRGENIPAVIALTDPEGCPLSRFKDSLGNPTHILRIGESYKEKQRTIQAKKEVEQRRAGGYSRKYASKAKNLADDMVRNTARDLLYYAVTQDAMLIFENLSRGFGRQGKRTFMAERQYTRMEDWLTAKLAYEGLPSKTYLSKTLAQYTSKTCSNCGFTITSADYDRVLEKLKKTATGWMTTINGKELKVEGQITYYNRYKRQNVVKDLSVELDRLSEESVNNDISSWTKGRSGEALSLLKKRFSHRPVQEKFVCLNCGFETHADEQAALNIARSWLFLRSQEYKKYQTNKTTGNTDKRAFVETWQSFYRKKLKEVWKPAV

SEQ ID NO: 46102 - protein, 978 aa, synthetic construct
  REGION 1..978: note = engineered CasX variant
QEIKRINKIRRRLVKDSNTKKAGKTGPMKTLLVRVMTPDLRERLENLRKKPENIPQPISNTSRANLNKLLTDYTEMKKAILHVYWEEFQVDPVGLMSRVAQPASKKIDQNKLKPEMDEKGNLTTAGFACSQCGQPLFVYKLEQVSEKGKAYTNYFGRCNVAEHEKLIKLAQLKPEKDSDEAVTYSLGKFGQRALDFYSIHVTKESTHPVKPLAQIAGNRYASGPVGKALSDACMGTIASFLSKYQDIIIEHQKVVKGNQKRLESLRELAGKENLEYPSVTLPPQPHTKEGVDAYNEVIARVRMWVNLNLWQKLKLSRDDAKPLLRLKGFPSFPLVERQANEVDWWDMVCNVKKLINEKKEDGKVFWQNLAGYKRQEALRPYLSSEEDRKKGKKFARYQLGDLLNHLEKKHGEDWGKVYDEAWERIDKKVEGLSKHIKLEEERRSEDAQSKAALTDWLRAKASFVIEGLKEADKDEFCRCELKLQKWYGDLRGKPFAIEAENSILDISGFSKQYNCAFIWQKDGVKKLNLYLIINYFKGGKLRFKKIKPEAFEANRFYTVINKKSGEIVPMEVNFNFDDPNLIILPLAFGKRQGREFIWNDLLSLETGSLKLANGRVIEKTLYNRRTRQDEPALFVALTFERREVLDSSNIKPMNLIGVDRGENIPAVIALTDPEGCPLSRFKDSLGNPTHILRIGESYKEKQRTIQAKKEVEQRRAGGYSRKYASKAKNLADDMVRNTARDLLYYAVTQDAMLIFENLSRGFGRQGKRTFMAERQYTRMEDWLTAKLAYEGLPSKTYLSKTLAQYTSKTCSNCGFTITSADYDRVLEKLKKTATGWMTTINGKELKVEGQITYYNRYKRQNVVKDLSVELDRLSEESVNNDISSWTKGRSGEALSLLKKRFSHRPVQEKFVCLNCGFETHADEQAALNIARSWLFLRSQEYKKYQTNKTTGNTDKRAFVETWQSFYRKKLKEVWKPAV

SEQ ID NO: 46103 - protein, 977 aa, synthetic construct
  REGION 1..977: note = engineered CasX variant
QEIKRINKIRRRLVKDSNTKKAGKTGPMKTLLVRVMTPDLRERLENLRKKPENIPQPISNTSRANLNKLLTDYTEMKKAILHVYWEEFQVDPVGLMSRVAQPASKKIDQNKLKPEMDEKGNLTTAGFACSQCGQPLFVYKLEQVSEKGKAYTNYFGRCNVAEHEKLILLAQLKPEKDSDEAVTYSLGKFGQRALDFYSIHVTKESTHPVKPLAQIAGNRYASPVGKALSDACMGTIASFLSKYQDIIIEHQKVVKGNQKRLESLRELAGKENLEYPSVTLPPQPHTKEGVDAYNEVIARVRMWVNLNLWQKLKLSRDDAKPLLRLKGFPSFPLVERQANEVDWWDMVCNVKKLINEKKEDGKVFWQNLAGYKRQEALRPYLSSEEDRKKGKKFARYQLGDLLNHLEKKHGEDWGKVYDEAWERIDKKVEGLSKHIKLEEERRSEDAQSKAALTDWLRAKASFVIEGLKEADKDEFCRCELKLQKWYGDLRGKPFAIEAENSILDISGFSKQYNCAFIWQKDGVKKLNLYLIINYFKGGKLRFKKIKPEAFEANRFYTVINKKSGEIVPMEVNFNFDDPNLIILPLAFGKRQGREFIWNDLLSLETGSLKLANGRVIEKTLYNRRTRQDEPALFVALTFERREVLDSSNIKPMNLIGVDRGENIPAVIALTDPEGCPLSRFKDSLGNPTHILRIGESYKEKQRTIQAKKEVEQRRAGGYSRKYASKAKNLADDMVRNTARDLLYYAVTQDAMLIFENLSRGFGRQGKRTFMAERQYTRMEDWLTAKLAYEGLPSKTYLSKTLAQYTSKTCSNCGFTITSADYDRVLEKLKKTATGWMTTINGKELKVEGQITYYNRYKRQNVVKDLSVELDRLSEESVNNDISSWTKGRSGEALSLLKKRFSHRPVQEKFVCLNCGFETHADEQAALNIARSWLFLRSQEYKKYQTNKTTGNTDKRAFVETWQSFYRKKLKEVWKPAV

SEQ ID NO: 46104 - protein, 978 aa, synthetic construct
  REGION 1..978: note = engineered CasX variant
QEIKRINKIRRRLVKDSNTKKAGKTGPMKTLLVRVMTPDLRERLENLRKKPENIPQPISNTSRANLNKLLTDYTEMKKAILHVYWEEFQVDPVGLMSRVAQPASKKIDQNKLKPEMDEKGNLTTAGFACSQCGQPLFVYKLEQVSEKGKAYTNYFGRCNVAEHEKLILLAQLKPEKDSDEAVTYSLGKFGQRALDFYSIHVTKESTHPVKPLAQIAGNRYASYPVGKALSDACMGTIASFLSKYQDIIIEHQKVVKGNQKRLESLRELAGKENLEYPSVTLPPQPHTKEGVDAYNEVIARVRMWVNLNLWQKLKLSRDDAKPLLRLKGFPSFPLVERQANEVDWWDMVCNVKKLINEKKEDGKVFWQNLAGYKRQEALRPYLSSEEDRKKGKKFARYQLGDLLWHLEKKHGEDWGKVYDEAWERIDKKVEGLSKHIKLEEERRSEDAQSKAALTDWLRAKASFVIEGLKEADKDEFCRCELKLQKWYGDLRGKPFAIEAENSILDISGFSKQYNCAFIWQKDGVKKLNLYLIINYFKGGKLRFKKIKPEAFEANRFYTVINKKSGEIVPMEVNFNFDDPNLIILPLAFGKRQGREFIWNDLLSLETGSLKLANGRVIEKTLYNRRTRQDEPALFVALTFERREVLDSSNIKPMNLIGVDRGENIPAVIALTDPEGCPLSRFKDSLGNPTHILRIGESYKEKQRTIQAKKEVEQRRAGGYSRKYASKAKNLADDMVRNTARDLLYYAVTQDAMLIFENLSRGFGRQGKRTFMAERQYTRMEDWLTAKLAYEGLPSKTYLSKTLAQYTSKTCSNCGFTITSADYDRVLEKLKKTATGWMTTINGKELKVEGQITYYNRYKRQNVVKDLSVELDRLSEESVNNDISSWTKGRSGEALSLLKKRFSHRPVQEKFVCLNCGFETHADEQAALNIARSWLFLRSQEYKKYQTNKTTGNTDKRAFVETWQSFYRKKLKEVWKPAV

SEQ ID NO: 46105 - protein, 978 aa, synthetic construct
  REGION 1..978: note = engineered CasX variant
QEIKRINKIRRRLVKDSNTKKAGKTGPMKTLLVRVMTPDLRERLENLRKKPENIPQPISNTSRANLNKLLTDYTEMKKAILHVYWEEFQVDPVGLMSRVAQPASKKIDQNKLKPEMDEKGNLTTAGFACSQCGQPLFVYKLEQVSEKGKAYTNYFGRCNVAEHEKLILLAQLKPEKDSDEAVTYSLGKFGQRALDFYSIHVTKESTHPVKPLAQIAGNRYASHPVGKALSDACMGTIASFLSKYQDIIIEHQKVVKGNQKRLESLRELAGKENLEYPSVTLPPQPHTKEGVDAYNEVIARVRMWVNLNLWQKLKLSRDDAKPLLRLKGFPSFPLVERQANEVDWWDMVCNVKKLINEKKEDGKVFWQNLAGYKRQEALRPYLSSEEDRKKGKKFARYQLGDLLWHLEKKHGEDWGKVYDEAWERIDKKVEGLSKHIKLEEERRSEDAQSKAALTDWLRAKASFVIEGLKEADKDEFCRCELKLQKWYGDLRGKPFAIEAENSILDISGFSKQYNCAFIWQKDGVKKLNLYLIINYFKGGKLRFKKIKPEAFEANRFYTVINKKSGEIVPMEVNFNFDDPNLIILPLAFGKRQGREFIWNDLLSLETGSLKLANGRVIEKTLYNRRTRQDEPALFVALTFERREVLDSSNIKPMNLIGVDRGENIPAVIALTDPEGCPLSRFKDSLGNPTHILRIGESYKEKQRTIQAKKEVEQRRAGGYSRKYASKAKNLADDMVRNTARDLLYYAVTQDAMLIFENLSRGFGRQGKRTFMAERQYTRMEDWLTAKLAYEGLPSKTYLSKTLAQYTSKTCSNCGFTITSADYDRVLEKLKKTATGWMTTINGKELKVEGQITYYNRYKRQNVVKDLSVELDRLSEESVNNDISSWTKGRSGEALSLLKKRFSHRPVQEKFVCLNCGFETHADEQAALNIARSWLFLRSQEYKKYQTNKTTGNTDKRAFVETWQSFYRKKLKEVWKPAV

SEQ ID NO: 46106 - protein, 978 aa, synthetic construct
  REGION 1..978: note = engineered CasX variant
QEIKRINKIRRRLVKDSNTKKAGKTGPMKTLLVRVMTPDLRERLENLRKKPENIPQPISNTSRANLNKLLTDYTEMKKAILHVYWEEFQVDPVGLMSRVAQPASKKIDQNKLKPEMDEKGNLTTAGFACSQCGQPLFVYKLEQVSEKGKAYTNYFGRCNVAEHEKLILLAQLKPEKDSDEAVTYSLGKFGQRALDFYSIHVTKESTHPVKPLAQIAGNRYASSPVGKALSDACMGTIASFLSKYQDIIIEHQKVVKGNQKRLESLRELAGKENLEYPSVTLPPQPHTKEGVDAYNEVIARVRMWVNLNLWQKLKLSRDDAKPLLRLKGFPSFPLVERQANEVDWWDMVCNVKKLINEKKEDGKVFWQNLAGYKRQEALRPYLSSEEDRKKGKKFARYQLGDLLWHLEKKHGEDWGKVYDEAWERIDKKVEGLSKHIKLEEERRSEDAQSKAALTDWLRAKASFVIEGLKEADKDEFCRCELKLQKWYGDLRGKPFAIEAENSILDISGFSKQYNCAFIWQKDGVKKLNLYLIINYFKGGKLRFKKIKPEAFEANRFYTVINKKSGEIVPMEVNFNFDDPNLIILPLAFGKRQGREFIWNDLLSLETGSLKLANGRVIEKTLYNRRTRQDEPALFVALTFERREVLDSSNIKPMNLIGVDRGENIPAVIALTDPEGCPLSRFKDSLGNPTHILRIGESYKEKQRTIQAKKEVEQRRAGGYSRKYASKAKNLADDMVRNTARDLLYYAVTQDAMLIFENLSRGFGRQGKRTFMAERQYTRMEDWLTAKLAYEGLPSKTYLSKTLAQYTSKTCSNCGFTITSADYDRVLEKLKKTATGWMTTINGKELKVEGQITYYNRYKRQNVVKDLSVELDRLSEESVNNDISSWTKGRSGEALSLLKKRFSHRPVQEKFVCLNCGFETHADEQAALNIARSWLFLRSQEYKKYQTNKTTGNTDKRAFVETWQSFYRKKLKEVWKPAV

SEQ ID NO: 46107 - protein, 978 aa, synthetic construct
  REGION 1..978: note = engineered CasX variant
QEIKRINKIRRRLVKDSNTKKAGKTGPMKTLLVRVMTPDLRERLENLRKKPENIPQPISNTSRANLNKLLTDYTEMKKAILHVYWEEFQVDPVGLMSRVAQPASKKIDQNKLKPEMDEKGNLTTAGFACSQCGQPLFVYKLEQVSEKGKAYTNYFGRCNVAEHEKLILLAQLKPEKDSDEAVTYSLGKFGQRALDFYSIHVTKESTHPVKPLAQIAGNRYASTPVGKALSDACMGTIASFLSKYQDIIIEHQKVVKGNQKRLESLRELAGKENLEYPSVTLPPQPHTKEGVDAYNEVIARVRMWVNLNLWQKLKLSRDDAKPLLRLKGFPSFPLVERQANEVDWWDMVCNVKKLINEKKEDGKVFWQNLAGYKRQEALRPYLSSEEDRKKGKKFARYQLGDLLWHLEKKHGEDWGKVYDEAWERIDKKVEGLSKHIKLEEERRSEDAQSKAALTDWLRAKASFVIEGLKEADKDEFCRCELKLQKWYGDLRGKPFAIEAENSILDISGFSKQYNCAFIWQKDGVKKLNLYLIINYFKGGKLRFKKIKPEAFEANRFYTVINKKSGEIVPMEVNFNFDDPNLIILPLAFGKRQGREFIWNDLLSLETGSLKLANGRVIEKTLYNRRTRQDEPALFVALTFERREVLDSSNIKPMNLIGVDRGENIPAVIALTDPEGCPLSRFKDSLGNPTHILRIGESYKEKQRTIQAKKEVEQRRAGGYSRKYASKAKNLADDMVRNTARDLLYYAVTQDAMLIFENLSRGFGRQGKRTFMAERQYTRMEDWLTAKLAYEGLPSKTYLSKTLAQYTSKTCSNCGFTITSADYDRVLEKLKKTATGWMTTINGKELKVEGQITYYNRYKRQNVVKDLSVELDRLSEESVNNDISSWTKGRSGEALSLLKKRFSHRPVQEKFVCLNCGFETHADEQAALNIARSWLFLRSQEYKKYQTNKTTGNTDKRAFVETWQSFYRKKLKEVWKPAV

SEQ ID NO: 46108 - protein, 978 aa, synthetic construct
  REGION 1..978: note = engineered CasX variant
QEIKRINKIRRRLVKDSNTKKAGKTGPMKTLLVRVMTPDLRERLENLRKKPENIPQPISNTSRANLNKLLTDYTEMKKAILHVYWEEFQVDPVGLMSRVAQPASKKIDQNKLKPEMDEKGNLTTAGFACSQCGQPLFVYKLEQVSEKGKAYTNYFGRCNVAEHEKLILLAQLKPEKDSDEAVTYSLGKFGQRALDFYSIHVTKESTHPVKPLAQIAGNRYASAPVGKALSDACMGTIASFLSKYQDIIIEHQKVVKGNQKRLESLRELAGKENLEYPSVTLPPQPHTKEGVDAYNEVIARVRMWVNLNLWQKLKLSRDDAKPLLRLKGFPSFPLVERQANEVDWWDMVCNVKKLINEKKEDGKVFWQNLAGYKRQEALRPYLSSEEDRKKGKKFARYQLGDLLWHLEKKHGEDWGKVYDEAWERIDKKVEGLSKHIKLEEERRSEDAQSKAALTDWLRAKASFVIEGLKEADKDEFCRCELKLQKWYGDLRGKPFAIEAENSILDISGFSKQYNCAFIWQKDGVKKLNLYLIINYFKGGKLRFKKIKPEAFEANRFYTVINKKSGEIVPMEVNFNFDDPNLIILPLAFGKRQGREFIWNDLLSLETGSLKLANGRVIEKTLYNRRTRQDEPALFVALTFERREVLDSSNIKPMNLIGVDRGENIPAVIALTDPEGCPLSRFKDSLGNPTHILRIGESYKEKQRTIQAKKEVEQRRAGGYSRKYASKAKNLADDMVRNTARDLLYYAVTQDAMLIFENLSRGFGRQGKRTFMAERQYTRMEDWLTAKLAYEGLPSKTYLSKTLAQYTSKTCSNCGFTITSADYDRVLEKLKKTATGWMTTINGKELKVEGQITYYNRYKRQNVVKDLSVELDRLSEESVNNDISSWTKGRSGEALSLLKKRFSHRPVQEKFVCLNCGFETHADEQAALNIARSWLFLRSQEYKKYQTNKTTGNTDKRAFVETWQSFYRKKLKEVWKPAV

SEQ ID NO: 46109 - protein, 978 aa, synthetic construct
  REGION 1..978: note = engineered CasX variant
QEIKRINKIRRRLVKDSNTKKAGKTGPMKTLLVRVMTPDLRERLENLRKKPENIPQPISNTSRANLNKLLTDYTEMKKAILHVYWEEFQVDPVGLMSRVAQPASKKIDQNKLKPEMDEKGNLTTAGFACSQCGQPLFVYKLEQVSEKGKAYTNYFGRCNVAEHEKLILLAQLKPEKDSDEAVTYSLGKFGQRALDFYSIHVTKESTHPVKPLAQIAGNRYASVPVGKALSDACMGTIASFLSKYQDIIIEHQKVVKGNQKRLESLRELAGKENLEYPSVTLPPQPHTKEGVDAYNEVIARVRMWVNLNLWQKLKLSRDDAKPLLRLKGFPSFPLVERQANEVDWWDMVCNVKKLINEKKEDGKVFWQNLAGYKRQEALRPYLSSEEDRKKGKKFARYQLGDLLWHLEKKHGEDWGKVYDEAWERIDKKVEGLSKHIKLEEERRSEDAQSKAALTDWLRAKASFVIEGLKEADKDEFCRCELKLQKWYGDLRGKPFAIEAENSILDISGFSKQYNCAFIWQKDGVKKLNLYLIINYFKGGKLRFKKIKPEAFEANRFYTVINKKSGEIVPMEVNFNFDDPNLIILPLAFGKRQGREFIWNDLLSLETGSLKLANGRVIEKTLYNRRTRQDEPALFVALTFERREVLDSSNIKPMNLIGVDRGENIPAVIALTDPEGCPLSRFKDSLGNPTHILRIGESYKEKQRTIQAKKEVEQRRAGGYSRKYASKAKNLADDMVRNTARDLLYYAVTQDAMLIFENLSRGFGRQGKRTFMAERQYTRMEDWLTAKLAYEGLPSKTYLSKTLAQYTSKTCSNCGFTITSADYDRVLEKLKKTATGWMTTINGKELKVEGQITYYNRYKRQNVVKDLSVELDRLSEESVNNDISSWTKGRSGEALSLLKKRFSHRPVQEKFVCLNCGFETHADEQAALNIARSWLFLRSQEYKKYQTNKTTGNTDKRAFVETWQSFYRKKLKEVWKPAV

SEQ ID NO: 46110 - protein, 978 aa, synthetic construct
  REGION 1..978: note = engineered CasX variant
QEIKRINKIRRRLVKDSNTKKAGKTGPMKTLLVRVMTPDLRERLENLRKKPENIPQPISNTSRANLNKLLTDYTEMKKAILHVYWEEFQVDPVGLMSRVAQPASKKIDQNKLKPEMDEKGNLTTAGFACSQCGQPLFVYKLEQVSEKGKAYTNYFGRCNVAEHEKLIKLAQLKPEKDSDEAVTYSLGKFGQRALDFYSIHVTKESTHPVKPLAQIAGNRYASGPVGKALSDACMGTIASFLSKYQDIIIEHQKVVKGNQKRLESLRELAGKENLEYPSVTLPPQPHTKEGVDAYNEVIARVRMWVNLNLWQKLKLSRDDAKPLLRLKGFPSFPLVERQANEVDWWDMVCNVKKLINEKKEDGKVFWQNLAGYKRQEALRPYLSSEEDRKKGKKFARYQLGDLLWHLEKKHGEDWGKVYDEAWERIDKKVEGLSKHIKLEEERRSEDAQSKAALTDWLRAKASFVIEGLKEADKDEFCRCELKLQKWYGDLRGKPFAIEAENSILDISGFSKQYNCAFIWQKDGVKKLNLYLIINYFKGGKLRFKKIKPEAFEANRFYTVINKKSGEIVPMEVNFNFDDPNLIILPLAFGKRQGREFIWNDLLSLETGSLKLANGRVIEKTLYNRRTRQDEPALFVALTFERREVLDSSNIKPMNLIGVDRGENIPAVIALTDPEGCPLSRFKDSLGNPTHILRIGESYKEKQRTIQAKKEVEQRRAGGYSRKYASKAKNLADDMVRNTARDLLYYAVTQDAMLIFENLSRGFGRQGKRTFMAERQYTRMEDWLTAKLAYEGLPSKTYLSKTLAQYTSKTCSNCGFTITSADYDRVLEKLKKTATGWMTTINGKELKVEGQITYYNRYKRQNVVKDLSVELDRLSEESVNNDISSWTKGRSGEALSLLKKRFSHRPVQEKFVCLNCGFETHADEQAALNIARSWLFLRSQEYKKYQTNKTTGNTDKRAFVETWQSFYRKKLKEVWKPAV

SEQ ID NO: 46111 - protein, 977 aa, synthetic construct
  REGION 1..977: note = engineered CasX variant
QEIKRINKIRRRLVKDSNTKKAGKTGPMKTLLVRVMTPDLRERLENLRKKPENIPQPISNTSRANLNKLLTDYTEMKKAILHVYWEEFQVDPVGLMSRVAQPASKKIDQNKLKPEMDEKGNLTTAGFACSQCGQPLFVYKLEQVSEKGKAYTNYFGRCNVAEHEKLILLAQLKPEKDSDEAVTYSLGKFGQRALDFYSIHVTKESTHPVKPLAQIAGNRYASPVGKALSDACMGTIASFLSKYQDIIIEHQKVVKGNQKRLESLRELAGKENLEYPSVTLPPQPHTKEGVDAYNEVIARVRMWVNLNLWQKLKLSRDDAKPLLRLKGFPSFPLVERQANEVDWWDMVCNVKKLINEKKEDGKVFWQNLAGYKRQEALRPYLSSEEDRKKGKKFARYQLGDLLWHLEKKHGEDWGKVYDEAWERIDKKVEGLSKHIKLEEERRSEDAQSKAALTDWLRAKASFVIEGLKEADKDEFCRCELKLQKWYGDLRGKPFAIEAENSILDISGFSKQYNCAFIWQKDGVKKLNLYLIINYFKGGKLRFKKIKPEAFEANRFYTVINKKSGEIVPMEVNFNFDDPNLIILPLAFGKRQGREFIWNDLLSLETGSLKLANGRVIEKTLYNRRTRQDEPALFVALTFERREVLDSSNIKPMNLIGVDRGENIPAVIALTDPEGCPLSRFKDSLGNPTHILRIGESYKEKQRTIQAKKEVEQRRAGGYSRKYASKAKNLADDMVRNTARDLLYYAVTQDAMLIFENLSRGFGRQGKRTFMAERQYTRMEDWLTAKLAYEGLPSKTYLSKTLAQYTSKTCSNCGFTITSADYDRVLEKLKKTATGWMTTINGKELKVEGQITYYNRYKRQNVVKDLSVELDRLSEESVNNDISSWTKGRSGEALSLLKKRFSHRPVQEKFVCLNCGFETHADEQAALNIARSWLFLRSQEYKKYQTNKTTGNTDKRAFVETWQSFYRKKLKEVWKPAV

SEQ ID NO: 46112 - protein, 978 aa, synthetic construct
  REGION 1..978: note = engineered CasX variant
QEIKRINKIRRRLVKDSNTKKAGKTGPMKTLLVRVMTPDLRERLENLRKKPENIPQPISNTSRANLNKLLTDYTEMKKAILHVYWEEFQVDPVGLMSRVAQPASKKIDQNKLKPEMDEKGNLTTAGFACSQCGQPLFVYKLEQVSEKGKAYTNYFGRCNVAEHEKLILLAQLKPEKDSDEAVTYSLGKFGQRALDFYSIHVTKESTHPVKPLAQIAGNRYASYPVGKALSDACMGTIASFLSKYQDIIIEHQKVVKGNQKRLESLRELAGKENLEYPSVTLPPQPHTKEGVDAYNEVIARVRMWVNLNLWQKLKLSRDDAKPLLRLKGFPSFPLVERQANEVDWWDMVCNVKKLINEKKEDGKVFWQNLAGYKRQEALRPYLSSEEDRKKGKKFARYQLGDLLLHLYKKHGEDWGKVYDEAWERIDKKVEGLSKHIKLEEERRSEDAQSKAALTDWLRAKASFVIEGLKEADKDEFCRCELKLQKWYGDLRGKPFAIEAENSILDISGFSKQYNCAFIWQKDGVKKLNLYLIINYFKGGKLRFKKIKPEAFEANRFYTVINKKSGEIVPMEVNFNFDDPNLIILPLAFGKRQGREFIWNDLLSLETGSLKLANGRVIEKTLYNRRTRQDEPALFVALTFERREVLDSSNIKPMNLIGVDRGENIPAVIALTDPEGCPLSRFKDSLGNPTHILRIGESYKEKQRTIQAKKEVEQRRAGGYSRKYASKAKNLADDMVRNTARDLLYYAVTQDAMLIFENLSRGFGRQGKRTFMAERQYTRMEDWLTAKLAYEGLPSKTYLSKTLAQYTSKTCSNCGFTITSADYDRVLEKLKKTATGWMTTINGKELKVEGQITYYNRYKRQNVVKDLSVELDRLSEESVNNDISSWTKGRSGEALSLLKKRFSHRPVQEKFVCLNCGFETHADEQAALNIARSWLFLRSQEYKKYQTNKTTGNTDKRAFVETWQSFYRKKLKEVWKPAV

SEQ ID NO: 46113 - protein, 978 aa, synthetic construct
  REGION 1..978: note = engineered CasX variant
QEIKRINKIRRRLVKDSNTKKAGKTGPMKTLLVRVMTPDLRERLENLRKKPENIPQPISNTSRANLNKLLTDYTEMKKAILHVYWEEFQVDPVGLMSRVAQPASKKIDQNKLKPEMDEKGNLTTAGFACSQCGQPLFVYKLEQVSEKGKAYTNYFGRCNVAEHEKLILLAQLKPEKDSDEAVTYSLGKFGQRALDFYSIHVTKESTHPVKPLAQIAGNRYASHPVGKALSDACMGTIASFLSKYQDIIIEHQKVVKGNQKRLESLRELAGKENLEYPSVTLPPQPHTKEGVDAYNEVIARVRMWVNLNLWQKLKLSRDDAKPLLRLKGFPSFPLVERQANEVDWWDMVCNVKKLINEKKEDGKVFWQNLAGYKRQEALRPYLSSEEDRKKGKKFARYQLGDLLLHLYKKHGEDWGKVYDEAWERIDKKVEGLSKHIKLEEERRSEDAQSKAALTDWLRAKASFVIEGLKEADKDEFCRCELKLQKWYGDLRGKPFAIEAENSILDISGFSKQYNCAFIWQKDGVKKLNLYLIINYFKGGKLRFKKIKPEAFEANRFYTVINKKSGEIVPMEVNFNFDDPNLIILPLAFGKRQGREFIWNDLLSLETGSLKLANGRVIEKTLYNRRTRQDEPALFVALTFERREVLDSSNIKPMNLIGVDRGENIPAVIALTDPEGCPLSRFKDSLGNPTHILRIGESYKEKQRTIQAKKEVEQRRAGGYSRKYASKAKNLADDMVRNTARDLLYYAVTQDAMLIFENLSRGFGRQGKRTFMAERQYTRMEDWLTAKLAYEGLPSKTYLSKTLAQYTSKTCSNCGFTITSADYDRVLEKLKKTATGWMTTINGKELKVEGQITYYNRYKRQNVVKDLSVELDRLSEESVNNDISSWTKGRSGEALSLLKKRFSHRPVQEKFVCLNCGFETHADEQAALNIARSWLFLRSQEYKKYQTNKTTGNTDKRAFVETWQSFYRKKLKEVWKPAV

SEQ ID NO: 46114 - protein, 978 aa, synthetic construct
  REGION 1..978: note = engineered CasX variant
QEIKRINKIRRRLVKDSNTKKAGKTGPMKTLLVRVMTPDLRERLENLRKKPENIPQPISNTSRANLNKLLTDYTEMKKAILHVYWEEFQVDPVGLMSRVAQPASKKIDQNKLKPEMDEKGNLTTAGFACSQCGQPLFVYKLEQVSEKGKAYTNYFGRCNVAEHEKLILLAQLKPEKDSDEAVTYSLGKFGQRALDFYSIHVTKESTHPVKPLAQIAGNRYASSPVGKALSDACMGTIASFLSKYQDIIIEHQKVVKGNQKRLESLRELAGKENLEYPSVTLPPQPHTKEGVDAYNEVIARVRMWVNLNLWQKLKLSRDDAKPLLRLKGFPSFPLVERQANEVDWWDMVCNVKKLINEKKEDGKVFWQNLAGYKRQEALRPYLSSEEDRKKGKKFARYQLGDLLLHLYKKHGEDWGKVYDEAWERIDKKVEGLSKHIKLEEERRSEDAQSKAALTDWLRAKASFVIEGLKEADKDEFCRCELKLQKWYGDLRGKPFAIEAENSILDISGFSKQYNCAFIWQKDGVKKLNLYLIINYFKGGKLRFKKIKPEAFEANRFYTVINKKSGEIVPMEVNFNFDDPNLIILPLAFGKRQGREFIWNDLLSLETGSLKLANGRVIEKTLYNRRTRQDEPALFVALTFERREVLDSSNIKPMNLIGVDRGENIPAVIALTDPEGCPLSRFKDSLGNPTHILRIGESYKEKQRTIQAKKEVEQRRAGGYSRKYASKAKNLADDMVRNTARDLLYYAVTQDAMLIFENLSRGFGRQGKRTFMAERQYTRMEDWLTAKLAYEGLPSKTYLSKTLAQYTSKTCSNCGFTITSADYDRVLEKLKKTATGWMTTINGKELKVEGQITYYNRYKRQNVVKDLSVELDRLSEESVNNDISSWTKGRSGEALSLLKKRFSHRPVQEKFVCLNCGFETHADEQAALNIARSWLFLRSQEYKKYQTNKTTGNTDKRAFVETWQSFYRKKLKEVWKPAV

SEQ ID NO: 46115 - protein, 978 aa, synthetic construct
  REGION 1..978: note = engineered CasX variant
QEIKRINKIRRRLVKDSNTKKAGKTGPMKTLLVRVMTPDLRERLENLRKKPENIPQPISNTSRANLNKLLTDYTEMKKAILHVYWEEFQVDPVGLMSRVAQPASKKIDQNKLKPEMDEKGNLTTAGFACSQCGQPLFVYKLEQVSEKGKAYTNYFGRCNVAEHEKLILLAQLKPEKDSDEAVTYSLGKFGQRALDFYSIHVTKESTHPVKPLAQIAGNRYASTPVGKALSDACMGTIASFLSKYQDIIIEHQKVVKGNQKRLESLRELAGKENLEYPSVTLPPQPHTKEGVDAYNEVIARVRMWVNLNLWQKLKLSRDDAKPLLRLKGFPSFPLVERQANEVDWWDMVCNVKKLINEKKEDGKVFWQNLAGYKRQEALRPYLSSEEDRKKGKKFARYQLGDLLLHLYKKHGEDWGKVYDEAWERIDKKVEGLSKHIKLEEERRSEDAQSKAALTDWLRAKASFVIEGLKEADKDEFCRCELKLQKWYGDLRGKPFAIEAENSILDISGFSKQYNCAFIWQKDGVKKLNLYLIINYFKGGKLRFKKIKPEAFEANRFYTVINKKSGEIVPMEVNFNFDDPNLIILPLAFGKRQGREFIWNDLLSLETGSLKLANGRVIEKTLYNRRTRQDEPALFVALTFERREVLDSSNIKPMNLIGVDRGENIPAVIALTDPEGCPLSRFKDSLGNPTHILRIGESYKEKQRTIQAKKEVEQRRAGGYSRKYASKAKNLADDMVRNTARDLLYYAVTQDAMLIFENLSRGFGRQGKRTFMAERQYTRMEDWLTAKLAYEGLPSKTYLSKTLAQYTSKTCSNCGFTITSADYDRVLEKLKKTATGWMTTINGKELKVEGQITYYNRYKRQNVVKDLSVELDRLSEESVNNDISSWTKGRSGEALSLLKKRFSHRPVQEKFVCLNCGFETHADEQAALNIARSWLFLRSQEYKKYQTNKTTGNTDKRAFVETWQSFYRKKLKEVWKPAV

SEQ ID NO: 46116 - protein, 978 aa, synthetic construct
  REGION 1..978: note = engineered CasX variant
QEIKRINKIRRRLVKDSNTKKAGKTGPMKTLLVRVMTPDLRERLENLRKKPENIPQPISNTSRANLNKLLTDYTEMKKAILHVYWEEFQVDPVGLMSRVAQPASKKIDQNKLKPEMDEKGNLTTAGFACSQCGQPLFVYKLEQVSEKGKAYTNYFGRCNVAEHEKLILLAQLKPEKDSDEAVTYSLGKFGQRALDFYSIHVTKESTHPVKPLAQIAGNRYASAPVGKALSDACMGTIASFLSKYQDIIIEHQKVVKGNQKRLESLRELAGKENLEYPSVTLPPQPHTKEGVDAYNEVIARVRMWVNLNLWQKLKLSRDDAKPLLRLKGFPSFPLVERQANEVDWWDMVCNVKKLINEKKEDGKVFWQNLAGYKRQEALRPYLSSEEDRKKGKKFARYQLGDLLLHLYKKHGEDWGKVYDEAWERIDKKVEGLSKHIKLEEERRSEDAQSKAALTDWLRAKASFVIEGLKEADKDEFCRCELKLQKWYGDLRGKPFAIEAENSILDISGFSKQYNCAFIWQKDGVKKLNLYLIINYFKGGKLRFKKIKPEAFEANRFYTVINKKSGEIVPMEVNFNFDDPNLIILPLAFGKRQGREFIWNDLLSLETGSLKLANGRVIEKTLYNRRTRQDEPALFVALTFERREVLDSSNIKPMNLIGVDRGENIPAVIALTDPEGCPLSRFKDSLGNPTHILRIGESYKEKQRTIQAKKEVEQRRAGGYSRKYASKAKNLADDMVRNTARDLLYYAVTQDAMLIFENLSRGFGRQGKRTFMAERQYTRMEDWLTAKLAYEGLPSKTYLSKTLAQYTSKTCSNCGFTITSADYDRVLEKLKKTATGWMTTINGKELKVEGQITYYNRYKRQNVVKDLSVELDRLSEESVNNDISSWTKGRSGEALSLLKKRFSHRPVQEKFVCLNCGFETHADEQAALNIARSWLFLRSQEYKKYQTNKTTGNTDKRAFVETWQSFYRKKLKEVWKPAV

SEQ ID NO: 46117 - protein, 978 aa, synthetic construct
  REGION 1..978: note = engineered CasX variant
QEIKRINKIRRRLVKDSNTKKAGKTGPMKTLLVRVMTPDLRERLENLRKKPENIPQPISNTSRANLNKLLTDYTEMKKAILHVYWEEFQVDPVGLMSRVAQPASKKIDQNKLKPEMDEKGNLTTAGFACSQCGQPLFVYKLEQVSEKGKAYTNYFGRCNVAEHEKLILLAQLKPEKDSDEAVTYSLGKFGQRALDFYSIHVTKESTHPVKPLAQIAGNRYASVPVGKALSDACMGTIASFLSKYQDIIIEHQKVVKGNQKRLESLRELAGKENLEYPSVTLPPQPHTKEGVDAYNEVIARVRMWVNLNLWQKLKLSRDDAKPLLRLKGFPSFPLVERQANEVDWWDMVCNVKKLINEKKEDGKVFWQNLAGYKRQEALRPYLSSEEDRKKGKKFARYQLGDLLLHLYKKHGEDWGKVYDEAWERIDKKVEGLSKHIKLEEERRSEDAQSKAALTDWLRAKASFVIEGLKEADKDEFCRCELKLQKWYGDLRGKPFAIEAENSILDISGFSKQYNCAFIWQKDGVKKLNLYLIINYFKGGKLRFKKIKPEAFEANRFYTVINKKSGEIVPMEVNFNFDDPNLIILPLAFGKRQGREFIWNDLLSLETGSLKLANGRVIEKTLYNRRTRQDEPALFVALTFERREVLDSSNIKPMNLIGVDRGENIPAVIALTDPEGCPLSRFKDSLGNPTHILRIGESYKEKQRTIQAKKEVEQRRAGGYSRKYASKAKNLADDMVRNTARDLLYYAVTQDAMLIFENLSRGFGRQGKRTFMAERQYTRMEDWLTAKLAYEGLPSKTYLSKTLAQYTSKTCSNCGFTITSADYDRVLEKLKKTATGWMTTINGKELKVEGQITYYNRYKRQNVVKDLSVELDRLSEESVNNDISSWTKGRSGEALSLLKKRFSHRPVQEKFVCLNCGFETHADEQAALNIARSWLFLRSQEYKKYQTNKTTGNTDKRAFVETWQSFYRKKLKEVWKPAV

SEQ ID NO: 46118 - protein, 978 aa, synthetic construct
  REGION 1..978: note = engineered CasX variant
QEIKRINKIRRRLVKDSNTKKAGKTGPMKTLLVRVMTPDLRERLENLRKKPENIPQPISNTSRANLNKLLTDYTEMKKAILHVYWEEFQVDPVGLMSRVAQPASKKIDQNKLKPEMDEKGNLTTAGFACSQCGQPLFVYKLEQVSEKGKAYTNYFGRCNVAEHEKLIKLAQLKPEKDSDEAVTYSLGKFGQRALDFYSIHVTKESTHPVKPLAQIAGNRYASGPVGKALSDACMGTIASFLSKYQDIIIEHQKVVKGNQKRLESLRELAGKENLEYPSVTLPPQPHTKEGVDAYNEVIARVRMWVNLNLWQKLKLSRDDAKPLLRLKGFPSFPLVERQANEVDWWDMVCNVKKLINEKKEDGKVFWQNLAGYKRQEALRPYLSSEEDRKKGKKFARYQLGDLLLHLYKKHGEDWGKVYDEAWERIDKKVEGLSKHIKLEEERRSEDAQSKAALTDWLRAKASFVIEGLKEADKDEFCRCELKLQKWYGDLRGKPFAIEAENSILDISGFSKQYNCAFIWQKDGVKKLNLYLIINYFKGGKLRFKKIKPEAFEANRFYTVINKKSGEIVPMEVNFNFDDPNLIILPLAFGKRQGREFIWNDLLSLETGSLKLANGRVIEKTLYNRRTRQDEPALFVALTFERREVLDSSNIKPMNLIGVDRGENIPAVIALTDPEGCPLSRFKDSLGNPTHILRIGESYKEKQRTIQAKKEVEQRRAGGYSRKYASKAKNLADDMVRNTARDLLYYAVTQDAMLIFENLSRGFGRQGKRTFMAERQYTRMEDWLTAKLAYEGLPSKTYLSKTLAQYTSKTCSNCGFTITSADYDRVLEKLKKTATGWMTTINGKELKVEGQITYYNRYKRQNVVKDLSVELDRLSEESVNNDISSWTKGRSGEALSLLKKRFSHRPVQEKFVCLNCGFETHADEQAALNIARSWLFLRSQEYKKYQTNKTTGNTDKRAFVETWQSFYRKKLKEVWKPAV

SEQ ID NO: 46119 - protein, 977 aa, synthetic construct
  REGION 1..977: note = engineered CasX variant
QEIKRINKIRRRLVKDSNTKKAGKTGPMKTLLVRVMTPDLRERLENLRKKPENIPQPISNTSRANLNKLLTDYTEMKKAILHVYWEEFQVDPVGLMSRVAQPASKKIDQNKLKPEMDEKGNLTTAGFACSQCGQPLFVYKLEQVSEKGKAYTNYFGRCNVAEHEKLILLAQLKPEKDSDEAVTYSLGKFGQRALDFYSIHVTKESTHPVKPLAQIAGNRYASPVGKALSDACMGTIASFLSKYQDIIIEHQKVVKGNQKRLESLRELAGKENLEYPSVTLPPQPHTKEGVDAYNEVIARVRMWVNLNLWQKLKLSRDDAKPLLRLKGFPSFPLVERQANEVDWWDMVCNVKKLINEKKEDGKVFWQNLAGYKRQEALRPYLSSEEDRKKGKKFARYQLGDLLLHLYKKHGEDWGKVYDEAWERIDKKVEGLSKHIKLEEERRSEDAQSKAALTDWLRAKASFVIEGLKEADKDEFCRCELKLQKWYGDLRGKPFAIEAENSILDISGFSKQYNCAFIWQKDGVKKLNLYLIINYFKGGKLRFKKIKPEAFEANRFYTVINKKSGEIVPMEVNFNFDDPNLIILPLAFGKRQGREFIWNDLLSLETGSLKLANGRVIEKTLYNRRTRQDEPALFVALTFERREVLDSSNIKPMNLIGVDRGENIPAVIALTDPEGCPLSRFKDSLGNPTHILRIGESYKEKQRTIQAKKEVEQRRAGGYSRKYASKAKNLADDMVRNTARDLLYYAVTQDAMLIFENLSRGFGRQGKRTFMAERQYTRMEDWLTAKLAYEGLPSKTYLSKTLAQYTSKTCSNCGFTITSADYDRVLEKLKKTATGWMTTINGKELKVEGQITYYNRYKRQNVVKDLSVELDRLSEESVNNDISSWTKGRSGEALSLLKKRFSHRPVQEKFVCLNCGFETHADEQAALNIARSWLFLRSQEYKKYQTNKTTGNTDKRAFVETWQSFYRKKLKEVWKPAV

SEQ ID NO: 46120 - protein, 978 aa, synthetic construct
  REGION 1..978: note = engineered CasX variant
QEIKRINKIRRRLVKDSNTKKAGKTGPMKTLLVRVMTPDLRERLENLRKKPENIPQPISNTSRANLNKLLTDYTEMKKAILHVYWEEFQVDPVGLMSRVAQPASKKIDQNKLKPEMDEKGNLTTAGFACSQCGQPLFVYKLEQVSEKGKAYTNYFGRCNVAEHEKLILLAQLKPEKDSDEAVTYSLGKFGQRALDFYSIHVTKESTHPVKPLAQIAGNRYASYPVGKALSDACMGTIASFLSKYQDIIIEHQKVVKGNQKRLESLRELAGKENLEYPSVTLPPQPHTKEGVDAYNEVIARVRMWVNLNLWQKLKLSRDDAKPLLRLKGFPSFPLVERQANEVDWWDMVCNVKKLINEKKEDGKVFWQNLAGYKRQEALRPYLSSEEDRKKGKKFARYQLGDLLLHLEKKHPEDWGKVYDEAWERIDKKVEGLSKHIKLEEERRSEDAQSKAALTDWLRAKASFVIEGLKEADKDEFCRCELKLQKWYGDLRGKPFAIEAENSILDISGFSKQYNCAFIWQKDGVKKLNLYLIINYFKGGKLRFKKIKPEAFEANRFYTVINKKSGEIVPMEVNFNFDDPNLIILPLAFGKRQGREFIWNDLLSLETGSLKLANGRVIEKTLYNRRTRQDEPALFVALTFERREVLDSSNIKPMNLIGVDRGENIPAVIALTDPEGCPLSRFKDSLGNPTHILRIGESYKEKQRTIQAKKEVEQRRAGGYSRKYASKAKNLADDMVRNTARDLLYYAVTQDAMLIFENLSRGFGRQGKRTFMAERQYTRMEDWLTAKLAYEGLPSKTYLSKTLAQYTSKTCSNCGFTITSADYDRVLEKLKKTATGWMTTINGKELKVEGQITYYNRYKRQNVVKDLSVELDRLSEESVNNDISSWTKGRSGEALSLLKKRFSHRPVQEKFVCLNCGFETHADEQAALNIARSWLFLRSQEYKKYQTNKTTGNTDKRAFVETWQSFYRKKLKEVWKPAV

SEQ ID NO: 46121 - protein, 978 aa, synthetic construct
  REGION 1..978: note = engineered CasX variant
QEIKRINKIRRRLVKDSNTKKAGKTGPMKTLLVRVMTPDLRERLENLRKKPENIPQPISNTSRANLNKLLTDYTEMKKAILHVYWEEFQVDPVGLMSRVAQPASKKIDQNKLKPEMDEKGNLTTAGFACSQCGQPLFVYKLEQVSEKGKAYTNYFGRCNVAEHEKLILLAQLKPEKDSDEAVTYSLGKFGQRALDFYSIHVTKESTHPVKPLAQIAGNRYASHPVGKALSDACMGTIASFLSKYQDIIIEHQKVVKGNQKRLESLRELAGKENLEYPSVTLPPQPHTKEGVDAYNEVIARVRMWVNLNLWQKLKLSRDDAKPLLRLKGFPSFPLVERQANEVDWWDMVCNVKKLINEKKEDGKVFWQNLAGYKRQEALRPYLSSEEDRKKGKKFARYQLGDLLLHLEKKHPEDWGKVYDEAWERIDKKVEGLSKHIKLEEERRSEDAQSKAALTDWLRAKASFVIEGLKEADKDEFCRCELKLQKWYGDLRGKPFAIEAENSILDISGFSKQYNCAFIWQKDGVKKLNLYLIINYFKGGKLRFKKIKPEAFEANRFYTVINKKSGEIVPMEVNFNFDDPNLIILPLAFGKRQGREFIWNDLLSLETGSLKLANGRVIEKTLYNRRTRQDEPALFVALTFERREVLDSSNIKPMNLIGVDRGENIPAVIALTDPEGCPLSRFKDSLGNPTHILRIGESYKEKQRTIQAKKEVEQRRAGGYSRKYASKAKNLADDMVRNTARDLLYYAVTQDAMLIFENLSRGFGRQGKRTFMAERQYTRMEDWLTAKLAYEGLPSKTYLSKTLAQYTSKTCSNCGFTITSADYDRVLEKLKKTATGWMTTINGKELKVEGQITYYNRYKRQNVVKDLSVELDRLSEESVNNDISSWTKGRSGEALSLLKKRFSHRPVQEKFVCLNCGFETHADEQAALNIARSWLFLRSQEYKKYQTNKTTGNTDKRAFVETWQSFYRKKLKEVWKPAV

SEQ ID NO: 46122 - protein, 978 aa, synthetic construct
  REGION 1..978: note = engineered CasX variant
QEIKRINKIRRRLVKDSNTKKAGKTGPMKTLLVRVMTPDLRERLENLRKKPENIPQPISNTSRANLNKLLTDYTEMKKAILHVYWEEFQVDPVGLMSRVAQPASKKIDQNKLKPEMDEKGNLTTAGFACSQCGQPLFVYKLEQVSEKGKAYTNYFGRCNVAEHEKLILLAQLKPEKDSDEAVTYSLGKFGQRALDFYSIHVTKESTHPVKPLAQIAGNRYASSPVGKALSDACMGTIASFLSKYQDIIIEHQKVVKGNQKRLESLRELAGKENLEYPSVTLPPQPHTKEGVDAYNEVIARVRMWVNLNLWQKLKLSRDDAKPLLRLKGFPSFPLVERQANEVDWWDMVCNVKKLINEKKEDGKVFWQNLAGYKRQEALRPYLSSEEDRKKGKKFARYQLGDLLLHLEKKHPEDWGKVYDEAWERIDKKVEGLSKHIKLEEERRSEDAQSKAALTDWLRAKASFVIEGLKEADKDEFCRCELKLQKWYGDLRGKPFAIEAENSILDISGFSKQYNCAFIWQKDGVKKLNLYLIINYFKGGKLRFKKIKPEAFEANRFYTVINKKSGEIVPMEVNFNFDDPNLIILPLAFGKRQGREFIWNDLLSLETGSLKLANGRVIEKTLYNRRTRQDEPALFVALTFERREVLDSSNIKPMNLIGVDRGENIPAVIALTDPEGCPLSRFKDSLGNPTHILRIGESYKEKQRTIQAKKEVEQRRAGGYSRKYASKAKNLADDMVRNTARDLLYYAVTQDAMLIFENLSRGFGRQGKRTFMAERQYTRMEDWLTAKLAYEGLPSKTYLSKTLAQYTSKTCSNCGFTITSADYDRVLEKLKKTATGWMTTINGKELKVEGQITYYNRYKRQNVVKDLSVELDRLSEESVNNDISSWTKGRSGEALSLLKKRFSHRPVQEKFVCLNCGFETHADEQAALNIARSWLFLRSQEYKKYQTNKTTGNTDKRAFVETWQSFYRKKLKEVWKPAV

SEQ ID NO: 46123 - protein, 978 aa, synthetic construct
  REGION 1..978: note = engineered CasX variant
QEIKRINKIRRRLVKDSNTKKAGKTGPMKTLLVRVMTPDLRERLENLRKKPENIPQPISNTSRANLNKLLTDYTEMKKAILHVYWEEFQVDPVGLMSRVAQPASKKIDQNKLKPEMDEKGNLTTAGFACSQCGQPLFVYKLEQVSEKGKAYTNYFGRCNVAEHEKLILLAQLKPEKDSDEAVTYSLGKFGQRALDFYSIHVTKESTHPVKPLAQIAGNRYASTPVGKALSDACMGTIASFLSKYQDIIIEHQKVVKGNQKRLESLRELAGKENLEYPSVTLPPQPHTKEGVDAYNEVIARVRMWVNLNLWQKLKLSRDDAKPLLRLKGFPSFPLVERQANEVDWWDMVCNVKKLINEKKEDGKVFWQNLAGYKRQEALRPYLSSEEDRKKGKKFARYQLGDLLLHLEKKHPEDWGKVYDEAWERIDKKVEGLSKHIKLEEERRSEDAQSKAALTDWLRAKASFVIEGLKEADKDEFCRCELKLQKWYGDLRGKPFAIEAENSILDISGFSKQYNCAFIWQKDGVKKLNLYLIINYFKGGKLRFKKIKPEAFEANRFYTVINKKSGEIVPMEVNFNFDDPNLIILPLAFGKRQGREFIWNDLLSLETGSLKLANGRVIEKTLYNRRTRQDEPALFVALTFERREVLDSSNIKPMNLIGVDRGENIPAVIALTDPEGCPLSRFKDSLGNPTHILRIGESYKEKQRTIQAKKEVEQRRAGGYSRKYASKAKNLADDMVRNTARDLLYYAVTQDAMLIFENLSRGFGRQGKRTFMAERQYTRMEDWLTAKLAYEGLPSKTYLSKTLAQYTSKTCSNCGFTITSADYDRVLEKLKKTATGWMTTINGKELKVEGQITYYNRYKRQNVVKDLSVELDRLSEESVNNDISSWTKGRSGEALSLLKKRFSHRPVQEKFVCLNCGFETHADEQAALNIARSWLFLRSQEYKKYQTNKTTGNTDKRAFVETWQSFYRKKLKEVWKPAV

SEQ ID NO: 46124 - protein, 978 aa, synthetic construct
  REGION 1..978: note = engineered CasX variant
QEIKRINKIRRRLVKDSNTKKAGKTGPMKTLLVRVMTPDLRERLENLRKKPENIPQPISNTSRANLNKLLTDYTEMKKAILHVYWEEFQVDPVGLMSRVAQPASKKIDQNKLKPEMDEKGNLTTAGFACSQCGQPLFVYKLEQVSEKGKAYTNYFGRCNVAEHEKLILLAQLKPEKDSDEAVTYSLGKFGQRALDFYSIHVTKESTHPVKPLAQIAGNRYASAPVGKALSDACMGTIASFLSKYQDIIIEHQKVVKGNQKRLESLRELAGKENLEYPSVTLPPQPHTKEGVDAYNEVIARVRMWVNLNLWQKLKLSRDDAKPLLRLKGFPSFPLVERQANEVDWWDMVCNVKKLINEKKEDGKVFWQNLAGYKRQEALRPYLSSEEDRKKGKKFARYQLGDLLLHLEKKHPEDWGKVYDEAWERIDKKVEGLSKHIKLEEERRSEDAQSKAALTDWLRAKASFVIEGLKEADKDEFCRCELKLQKWYGDLRGKPFAIEAENSILDISGFSKQYNCAFIWQKDGVKKLNLYLIINYFKGGKLRFKKIKPEAFEANRFYTVINKKSGEIVPMEVNFNFDDPNLIILPLAFGKRQGREFIWNDLLSLETGSLKLANGRVIEKTLYNRRTRQDEPALFVALTFERREVLDSSNIKPMNLIGVDRGENIPAVIALTDPEGCPLSRFKDSLGNPTHILRIGESYKEKQRTIQAKKEVEQRRAGGYSRKYASKAKNLADDMVRNTARDLLYYAVTQDAMLIFENLSRGFGRQGKRTFMAERQYTRMEDWLTAKLAYEGLPSKTYLSKTLAQYTSKTCSNCGFTITSADYDRVLEKLKKTATGWMTTINGKELKVEGQITYYNRYKRQNVVKDLSVELDRLSEESVNNDISSWTKGRSGEALSLLKKRFSHRPVQEKFVCLNCGFETHADEQAALNIARSWLFLRSQEYKKYQTNKTTGNTDKRAFVETWQSFYRKKLKEVWKPAV

SEQ ID NO: 46125 - protein, 978 aa, synthetic construct
  REGION 1..978: note = engineered CasX variant
QEIKRINKIRRRLVKDSNTKKAGKTGPMKTLLVRVMTPDLRERLENLRKKPENIPQPISNTSRANLNKLLTDYTEMKKAILHVYWEEFQVDPVGLMSRVAQPASKKIDQNKLKPEMDEKGNLTTAGFACSQCGQPLFVYKLEQVSEKGKAYTNYFGRCNVAEHEKLILLAQLKPEKDSDEAVTYSLGKFGQRALDFYSIHVTKESTHPVKPLAQIAGNRYASVPVGKALSDACMGTIASFLSKYQDIIIEHQKVVKGNQKRLESLRELAGKENLEYPSVTLPPQPHTKEGVDAYNEVIARVRMWVNLNLWQKLKLSRDDAKPLLRLKGFPSFPLVERQANEVDWWDMVCNVKKLINEKKEDGKVFWQNLAGYKRQEALRPYLSSEEDRKKGKKFARYQLGDLLLHLEKKHPEDWGKVYDEAWERIDKKVEGLSKHIKLEEERRSEDAQSKAALTDWLRAKASFVIEGLKEADKDEFCRCELKLQKWYGDLRGKPFAIEAENSILDISGFSKQYNCAFIWQKDGVKKLNLYLIINYFKGGKLRFKKIKPEAFEANRFYTVINKKSGEIVPMEVNFNFDDPNLIILPLAFGKRQGREFIWNDLLSLETGSLKLANGRVIEKTLYNRRTRQDEPALFVALTFERREVLDSSNIKPMNLIGVDRGENIPAVIALTDPEGCPLSRFKDSLGNPTHILRIGESYKEKQRTIQAKKEVEQRRAGGYSRKYASKAKNLADDMVRNTARDLLYYAVTQDAMLIFENLSRGFGRQGKRTFMAERQYTRMEDWLTAKLAYEGLPSKTYLSKTLAQYTSKTCSNCGFTITSADYDRVLEKLKKTATGWMTTINGKELKVEGQITYYNRYKRQNVVKDLSVELDRLSEESVNNDISSWTKGRSGEALSLLKKRFSHRPVQEKFVCLNCGFETHADEQAALNIARSWLFLRSQEYKKYQTNKTTGNTDKRAFVETWQSFYRKKLKEVWKPAV

SEQ ID NO: 46126 - protein, 978 aa, synthetic construct
  REGION 1..978: note = engineered CasX variant
QEIKRINKIRRRLVKDSNTKKAGKTGPMKTLLVRVMTPDLRERLENLRKKPENIPQPISNTSRANLNKLLTDYTEMKKAILHVYWEEFQVDPVGLMSRVAQPASKKIDQNKLKPEMDEKGNLTTAGFACSQCGQPLFVYKLEQVSEKGKAYTNYFGRCNVAEHEKLIKLAQLKPEKDSDEAVTYSLGKFGQRALDFYSIHVTKESTHPVKPLAQIAGNRYASGPVGKALSDACMGTIASFLSKYQDIIIEHQKVVKGNQKRLESLRELAGKENLEYPSVTLPPQPHTKEGVDAYNEVIARVRMWVNLNLWQKLKLSRDDAKPLLRLKGFPSFPLVERQANEVDWWDMVCNVKKLINEKKEDGKVFWQNLAGYKRQEALRPYLSSEEDRKKGKKFARYQLGDLLLHLEKKHPEDWGKVYDEAWERIDKKVEGLSKHIKLEEERRSEDAQSKAALTDWLRAKASFVIEGLKEADKDEFCRCELKLQKWYGDLRGKPFAIEAENSILDISGFSKQYNCAFIWQKDGVKKLNLYLIINYFKGGKLRFKKIKPEAFEANRFYTVINKKSGEIVPMEVNFNFDDPNLIILPLAFGKRQGREFIWNDLLSLETGSLKLANGRVIEKTLYNRRTRQDEPALFVALTFERREVLDSSNIKPMNLIGVDRGENIPAVIALTDPEGCPLSRFKDSLGNPTHILRIGESYKEKQRTIQAKKEVEQRRAGGYSRKYASKAKNLADDMVRNTARDLLYYAVTQDAMLIFENLSRGFGRQGKRTFMAERQYTRMEDWLTAKLAYEGLPSKTYLSKTLAQYTSKTCSNCGFTITSADYDRVLEKLKKTATGWMTTINGKELKVEGQITYYNRYKRQNVVKDLSVELDRLSEESVNNDISSWTKGRSGEALSLLKKRFSHRPVQEKFVCLNCGFETHADEQAALNIARSWLFLRSQEYKKYQTNKTTGNTDKRAFVETWQSFYRKKLKEVWKPAV

SEQ ID NO: 46127 - protein, 977 aa, synthetic construct
  REGION 1..977: note = engineered CasX variant
QEIKRINKIRRRLVKDSNTKKAGKTGPMKTLLVRVMTPDLRERLENLRKKPENIPQPISNTSRANLNKLLTDYTEMKKAILHVYWEEFQVDPVGLMSRVAQPASKKIDQNKLKPEMDEKGNLTTAGFACSQCGQPLFVYKLEQVSEKGKAYTNYFGRCNVAEHEKLILLAQLKPEKDSDEAVTYSLGKFGQRALDFYSIHVTKESTHPVKPLAQIAGNRYASPVGKALSDACMGTIASFLSKYQDIIIEHQKVVKGNQKRLESLRELAGKENLEYPSVTLPPQPHTKEGVDAYNEVIARVRMWVNLNLWQKLKLSRDDAKPLLRLKGFPSFPLVERQANEVDWWDMVCNVKKLINEKKEDGKVFWQNLAGYKRQEALRPYLSSEEDRKKGKKFARYQLGDLLLHLEKKHPEDWGKVYDEAWERIDKKVEGLSKHIKLEEERRSEDAQSKAALTDWLRAKASFVIEGLKEADKDEFCRCELKLQKWYGDLRGKPFAIEAENSILDISGFSKQYNCAFIWQKDGVKKLNLYLIINYFKGGKLRFKKIKPEAFEANRFYTVINKKSGEIVPMEVNFNFDDPNLIILPLAFGKRQGREFIWNDLLSLETGSLKLANGRVIEKTLYNRRTRQDEPALFVALTFERREVLDSSNIKPMNLIGVDRGENIPAVIALTDPEGCPLSRFKDSLGNPTHILRIGESYKEKQRTIQAKKEVEQRRAGGYSRKYASKAKNLADDMVRNTARDLLYYAVTQDAMLIFENLSRGFGRQGKRTFMAERQYTRMEDWLTAKLAYEGLPSKTYLSKTLAQYTSKTCSNCGFTITSADYDRVLEKLKKTATGWMTTINGKELKVEGQITYYNRYKRQNVVKDLSVELDRLSEESVNNDISSWTKGRSGEALSLLKKRFSHRPVQEKFVCLNCGFETHADEQAALNIARSWLFLRSQEYKKYQTNKTTGNTDKRAFVETWQSFYRKKLKEVWKPAV

SEQ ID NO: 46128 - protein, 979 aa, synthetic construct
  REGION 1..979: note = engineered CasX variant
QEIKRINKIRRRLVKDSNTKKAGKTGPMKTLLVRVMTPDLRERLENLRKKPENIPQPISNTSRANLNKLLTDYTEMKKAILHVYWEEFQVDPVGLMSRVAQPASKKIDQNKLKPEMDEKGNLTTAGFACSQCGQPLFVYKLEQVSEKGKAYTNYFGRCNVAEHEKLILLAQLKPEKDSDEAVTYSLGKFGQRALDFYSIHVTKESTHPVKPLAQIAGNRYASYPVGKALSDACMGTIASFLSKYQDIIIEHQKVVKGNQKRLESLRELAGKENLEYPSVTLPPQPHTKEGVDAYNEVIARVRMWVNLNLWQKLKLSRDDAKPLLRLKGFPSFPLVERQANEVDWWDMVCNVKKLINEKKEDGKVFWQNLAGYKRQEALRPYLSSEEDRKKGKKFARYQLGDLLLHLEKKHGERDWGKVYDEAWERIDKKVEGLSKHIKLEEERRSEDAQSKAALTDWLRAKASFVIEGLKEADKDEFCRCELKLQKWYGDLRGKPFAIEAENSILDISGFSKQYNCAFIWQKDGVKKLNLYLIINYFKGGKLRFKKIKPEAFEANRFYTVINKKSGEIVPMEVNFNFDDPNLIILPLAFGKRQGREFIWNDLLSLETGSLKLANGRVIEKTLYNRRTRQDEPALFVALTFERREVLDSSNIKPMNLIGVDRGENIPAVIALTDPEGCPLSRFKDSLGNPTHILRIGESYKEKQRTIQAKKEVEQRRAGGYSRKYASKAKNLADDMVRNTARDLLYYAVTQDAMLIFENLSRGFGRQGKRTFMAERQYTRMEDWLTAKLAYEGLPSKTYLSKTLAQYTSKTCSNCGFTITSADYDRVLEKLKKTATGWMTTINGKELKVEGQITYYNRYKRQNVVKDLSVELDRLSEESVNNDISSWTKGRSGEALSLLKKRFSHRPVQEKFVCLNCGFETHADEQAALNIARSWLFLRSQEYKKYQTNKTTGNTDKRAFVETWQSFYRKKLKEVWKPAV

SEQ ID NO: 46129 - protein, 979 aa, synthetic construct
  REGION 1..979: note = engineered CasX variant
QEIKRINKIRRRLVKDSNTKKAGKTGPMKTLLVRVMTPDLRERLENLRKKPENIPQPISNTSRANLNKLLTDYTEMKKAILHVYWEEFQVDPVGLMSRVAQPASKKIDQNKLKPEMDEKGNLTTAGFACSQCGQPLFVYKLEQVSEKGKAYTNYFGRCNVAEHEKLILLAQLKPEKDSDEAVTYSLGKFGQRALDFYSIHVTKESTHPVKPLAQIAGNRYASHPVGKALSDACMGTIASFLSKYQDIIIEHQKVVKGNQKRLESLRELAGKENLEYPSVTLPPQPHTKEGVDAYNEVIARVRMWVNLNLWQKLKLSRDDAKPLLRLKGFPSFPLVERQANEVDWWDMVCNVKKLINEKKEDGKVFWQNLAGYKRQEALRPYLSSEEDRKKGKKFARYQLGDLLLHLEKKHGERDWGKVYDEAWERIDKKVEGLSKHIKLEEERRSEDAQSKAALTDWLRAKASFVIEGLKEADKDEFCRCELKLQKWYGDLRGKPFAIEAENSILDISGFSKQYNCAFIWQKDGVKKLNLYLIINYFKGGKLRFKKIKPEAFEANRFYTVINKKSGEIVPMEVNFNFDDPNLIILPLAFGKRQGREFIWNDLLSLETGSLKLANGRVIEKTLYNRRTRQDEPALFVALTFERREVLDSSNIKPMNLIGVDRGENIPAVIALTDPEGCPLSRFKDSLGNPTHILRIGESYKEKQRTIQAKKEVEQRRAGGYSRKYASKAKNLADDMVRNTARDLLYYAVTQDAMLIFENLSRGFGRQGKRTFMAERQYTRMEDWLTAKLAYEGLPSKTYLSKTLAQYTSKTCSNCGFTITSADYDRVLEKLKKTATGWMTTINGKELKVEGQITYYNRYKRQNVVKDLSVELDRLSEESVNNDISSWTKGRSGEALSLLKKRFSHRPVQEKFVCLNCGFETHADEQAALNIARSWLFLRSQEYKKYQTNKTTGNTDKRAFVETWQSFYRKKLKEVWKPAV

SEQ ID NO: 46130 - protein, 979 aa, synthetic construct
  REGION 1..979: note = engineered CasX variant
QEIKRINKIRRRLVKDSNTKKAGKTGPMKTLLVRVMTPDLRERLENLRKKPENIPQPISNTSRANLNKLLTDYTEMKKAILHVYWEEFQVDPVGLMSRVAQPASKKIDQNKLKPEMDEKGNLTTAGFACSQCGQPLFVYKLEQVSEKGKAYTNYFGRCNVAEHEKLILLAQLKPEKDSDEAVTYSLGKFGQRALDFYSIHVTKESTHPVKPLAQIAGNRYASSPVGKALSDACMGTIASFLSKYQDIIIEHQKVVKGNQKRLESLRELAGKENLEYPSVTLPPQPHTKEGVDAYNEVIARVRMWVNLNLWQKLKLSRDDAKPLLRLKGFPSFPLVERQANEVDWWDMVCNVKKLINEKKEDGKVFWQNLAGYKRQEALRPYLSSEEDRKKGKKFARYQLGDLLLHLEKKHGERDWGKVYDEAWERIDKKVEGLSKHIKLEEERRSEDAQSKAALTDWLRAKASFVIEGLKEADKDEFCRCELKLQKWYGDLRGKPFAIEAENSILDISGFSKQYNCAFIWQKDGVKKLNLYLIINYFKGGKLRFKKIKPEAFEANRFYTVINKKSGEIVPMEVNFNFDDPNLIILPLAFGKRQGREFIWNDLLSLETGSLKLANGRVIEKTLYNRRTRQDEPALFVALTFERREVLDSSNIKPMNLIGVDRGENIPAVIALTDPEGCPLSRFKDSLGNPTHILRIGESYKEKQRTIQAKKEVEQRRAGGYSRKYASKAKNLADDMVRNTARDLLYYAVTQDAMLIFENLSRGFGRQGKRTFMAERQYTRMEDWLTAKLAYEGLPSKTYLSKTLAQYTSKTCSNCGFTITSADYDRVLEKLKKTATGWMTTINGKELKVEGQITYYNRYKRQNVVKDLSVELDRLSEESVNNDISSWTKGRSGEALSLLKKRFSHRPVQEKFVCLNCGFETHADEQAALNIARSWLFLRSQEYKKYQTNKTTGNTDKRAFVETWQSFYRKKLKEVWKPAV

SEQ ID NO: 46131 - protein, 979 aa, synthetic construct
  REGION 1..979: note = engineered CasX variant
QEIKRINKIRRRLVKDSNTKKAGKTGPMKTLLVRVMTPDLRERLENLRKKPENIPQPISNTSRANLNKLLTDYTEMKKAILHVYWEEFQVDPVGLMSRVAQPASKKIDQNKLKPEMDEKGNLTTAGFACSQCGQPLFVYKLEQVSEKGKAYTNYFGRCNVAEHEKLILLAQLKPEKDSDEAVTYSLGKFGQRALDFYSIHVTKESTHPVKPLAQIAGNRYASTPVGKALSDACMGTIASFLSKYQDIIIEHQKVVKGNQKRLESLRELAGKENLEYPSVTLPPQPHTKEGVDAYNEVIARVRMWVNLNLWQKLKLSRDDAKPLLRLKGFPSFPLVERQANEVDWWDMVCNVKKLINEKKEDGKVFWQNLAGYKRQEALRPYLSSEEDRKKGKKFARYQLGDLLLHLEKKHGERDWGKVYDEAWERIDKKVEGLSKHIKLEEERRSEDAQSKAALTDWLRAKASFVIEGLKEADKDEFCRCELKLQKWYGDLRGKPFAIEAENSILDISGFSKQYNCAFIWQKDGVKKLNLYLIINYFKGGKLRFKKIKPEAFEANRFYTVINKKSGEIVPMEVNFNFDDPNLIILPLAFGKRQGREFIWNDLLSLETGSLKLANGRVIEKTLYNRRTRQDEPALFVALTFERREVLDSSNIKPMNLIGVDRGENIPAVIALTDPEGCPLSRFKDSLGNPTHILRIGESYKEKQRTIQAKKEVEQRRAGGYSRKYASKAKNLADDMVRNTARDLLYYAVTQDAMLIFENLSRGFGRQGKRTFMAERQYTRMEDWLTAKLAYEGLPSKTYLSKTLAQYTSKTCSNCGFTITSADYDRVLEKLKKTATGWMTTINGKELKVEGQITYYNRYKRQNVVKDLSVELDRLSEESVNNDISSWTKGRSGEALSLLKKRFSHRPVQEKFVCLNCGFETHADEQAALNIARSWLFLRSQEYKKYQTNKTTGNTDKRAFVETWQSFYRKKLKEVWKPAV

SEQ ID NO: 46132 - protein, 979 aa, synthetic construct
  REGION 1..979: note = engineered CasX variant
QEIKRINKIRRRLVKDSNTKKAGKTGPMKTLLVRVMTPDLRERLENLRKKPENIPQPISNTSRANLNKLLTDYTEMKKAILHVYWEEFQVDPVGLMSRVAQPASKKIDQNKLKPEMDEKGNLTTAGFACSQCGQPLFVYKLEQVSEKGKAYTNYFGRCNVAEHEKLILLAQLKPEKDSDEAVTYSLGKFGQRALDFYSIHVTKESTHPVKPLAQIAGNRYASAPVGKALSDACMGTIASFLSKYQDIIIEHQKVVKGNQKRLESLRELAGKENLEYPSVTLPPQPHTKEGVDAYNEVIARVRMWVNLNLWQKLKLSRDDAKPLLRLKGFPSFPLVERQANEVDWWDMVCNVKKLINEKKEDGKVFWQNLAGYKRQEALRPYLSSEEDRKKGKKFARYQLGDLLLHLEKKHGERDWGKVYDEAWERIDKKVEGLSKHIKLEEERRSEDAQSKAALTDWLRAKASFVIEGLKEADKDEFCRCELKLQKWYGDLRGKPFAIEAENSILDISGFSKQYNCAFIWQKDGVKKLNLYLIINYFKGGKLRFKKIKPEAFEANRFYTVINKKSGEIVPMEVNFNFDDPNLIILPLAFGKRQGREFIWNDLLSLETGSLKLANGRVIEKTLYNRRTRQDEPALFVALTFERREVLDSSNIKPMNLIGVDRGENIPAVIALTDPEGCPLSRFKDSLGNPTHILRIGESYKEKQRTIQAKKEVEQRRAGGYSRKYASKAKNLADDMVRNTARDLLYYAVTQDAMLIFENLSRGFGRQGKRTFMAERQYTRMEDWLTAKLAYEGLPSKTYLSKTLAQYTSKTCSNCGFTITSADYDRVLEKLKKTATGWMTTINGKELKVEGQITYYNRYKRQNVVKDLSVELDRLSEESVNNDISSWTKGRSGEALSLLKKRFSHRPVQEKFVCLNCGFETHADEQAALNIARSWLFLRSQEYKKYQTNKTTGNTDKRAFVETWQSFYRKKLKEVWKPAV

SEQ ID NO: 46133 - protein, 979 aa, synthetic construct
  REGION 1..979: note = engineered CasX variant
QEIKRINKIRRRLVKDSNTKKAGKTGPMKTLLVRVMTPDLRERLENLRKKPENIPQPISNTSRANLNKLLTDYTEMKKAILHVYWEEFQVDPVGLMSRVAQPASKKIDQNKLKPEMDEKGNLTTAGFACSQCGQPLFVYKLEQVSEKGKAYTNYFGRCNVAEHEKLILLAQLKPEKDSDEAVTYSLGKFGQRALDFYSIHVTKESTHPVKPLAQIAGNRYASVPVGKALSDACMGTIASFLSKYQDIIIEHQKVVKGNQKRLESLRELAGKENLEYPSVTLPPQPHTKEGVDAYNEVIARVRMWVNLNLWQKLKLSRDDAKPLLRLKGFPSFPLVERQANEVDWWDMVCNVKKLINEKKEDGKVFWQNLAGYKRQEALRPYLSSEEDRKKGKKFARYQLGDLLLHLEKKHGERDWGKVYDEAWERIDKKVEGLSKHIKLEEERRSEDAQSKAALTDWLRAKASFVIEGLKEADKDEFCRCELKLQKWYGDLRGKPFAIEAENSILDISGFSKQYNCAFIWQKDGVKKLNLYLIINYFKGGKLRFKKIKPEAFEANRFYTVINKKSGEIVPMEVNFNFDDPNLIILPLAFGKRQGREFIWNDLLSLETGSLKLANGRVIEKTLYNRRTRQDEPALFVALTFERREVLDSSNIKPMNLIGVDRGENIPAVIALTDPEGCPLSRFKDSLGNPTHILRIGESYKEKQRTIQAKKEVEQRRAGGYSRKYASKAKNLADDMVRNTARDLLYYAVTQDAMLIFENLSRGFGRQGKRTFMAERQYTRMEDWLTAKLAYEGLPSKTYLSKTLAQYTSKTCSNCGFTITSADYDRVLEKLKKTATGWMTTINGKELKVEGQITYYNRYKRQNVVKDLSVELDRLSEESVNNDISSWTKGRSGEALSLLKKRFSHRPVQEKFVCLNCGFETHADEQAALNIARSWLFLRSQEYKKYQTNKTTGNTDKRAFVETWQSFYRKKLKEVWKPAV

SEQ ID NO: 46134 - protein, 979 aa, synthetic construct
  REGION 1..979: note = engineered CasX variant
QEIKRINKIRRRLVKDSNTKKAGKTGPMKTLLVRVMTPDLRERLENLRKKPENIPQPISNTSRANLNKLLTDYTEMKKAILHVYWEEFQVDPVGLMSRVAQPASKKIDQNKLKPEMDEKGNLTTAGFACSQCGQPLFVYKLEQVSEKGKAYTNYFGRCNVAEHEKLIKLAQLKPEKDSDEAVTYSLGKFGQRALDFYSIHVTKESTHPVKPLAQIAGNRYASGPVGKALSDACMGTIASFLSKYQDIIIEHQKVVKGNQKRLESLRELAGKENLEYPSVTLPPQPHTKEGVDAYNEVIARVRMWVNLNLWQKLKLSRDDAKPLLRLKGFPSFPLVERQANEVDWWDMVCNVKKLINEKKEDGKVFWQNLAGYKRQEALRPYLSSEEDRKKGKKFARYQLGDLLLHLEKKHGERDWGKVYDEAWERIDKKVEGLSKHIKLEEERRSEDAQSKAALTDWLRAKASFVIEGLKEADKDEFCRCELKLQKWYGDLRGKPFAIEAENSILDISGFSKQYNCAFIWQKDGVKKLNLYLIINYFKGGKLRFKKIKPEAFEANRFYTVINKKSGEIVPMEVNFNFDDPNLIILPLAFGKRQGREFIWNDLLSLETGSLKLANGRVIEKTLYNRRTRQDEPALFVALTFERREVLDSSNIKPMNLIGVDRGENIPAVIALTDPEGCPLSRFKDSLGNPTHILRIGESYKEKQRTIQAKKEVEQRRAGGYSRKYASKAKNLADDMVRNTARDLLYYAVTQDAMLIFENLSRGFGRQGKRTFMAERQYTRMEDWLTAKLAYEGLPSKTYLSKTLAQYTSKTCSNCGFTITSADYDRVLEKLKKTATGWMTTINGKELKVEGQITYYNRYKRQNVVKDLSVELDRLSEESVNNDISSWTKGRSGEALSLLKKRFSHRPVQEKFVCLNCGFETHADEQAALNIARSWLFLRSQEYKKYQTNKTTGNTDKRAFVETWQSFYRKKLKEVWKPAV

SEQ ID NO: 46135 - protein, 978 aa, synthetic construct
  REGION 1..978: note = engineered CasX variant
QEIKRINKIRRRLVKDSNTKKAGKTGPMKTLLVRVMTPDLRERLENLRKKPENIPQPISNTSRANLNKLLTDYTEMKKAILHVYWEEFQVDPVGLMSRVAQPASKKIDQNKLKPEMDEKGNLTTAGFACSQCGQPLFVYKLEQVSEKGKAYTNYFGRCNVAEHEKLILLAQLKPEKDSDEAVTYSLGKFGQRALDFYSIHVTKESTHPVKPLAQIAGNRYASPVGKALSDACMGTIASFLSKYQDIIIEHQKVVKGNQKRLESLRELAGKENLEYPSVTLPPQPHTKEGVDAYNEVIARVRMWVNLNLWQKLKLSRDDAKPLLRLKGFPSFPLVERQANEVDWWDMVCNVKKLINEKKEDGKVFWQNLAGYKRQEALRPYLSSEEDRKKGKKFARYQLGDLLLHLEKKHGERDWGKVYDEAWERIDKKVEGLSKHIKLEEERRSEDAQSKAALTDWLRAKASFVIEGLKEADKDEFCRCELKLQKWYGDLRGKPFAIEAENSILDISGFSKQYNCAFIWQKDGVKKLNLYLIINYFKGGKLRFKKIKPEAFEANRFYTVINKKSGEIVPMEVNFNFDDPNLIILPLAFGKRQGREFIWNDLLSLETGSLKLANGRVIEKTLYNRRTRQDEPALFVALTFERREVLDSSNIKPMNLIGVDRGENIPAVIALTDPEGCPLSRFKDSLGNPTHILRIGESYKEKQRTIQAKKEVEQRRAGGYSRKYASKAKNLADDMVRNTARDLLYYAVTQDAMLIFENLSRGFGRQGKRTFMAERQYTRMEDWLTAKLAYEGLPSKTYLSKTLAQYTSKTCSNCGFTITSADYDRVLEKLKKTATGWMTTINGKELKVEGQITYYNRYKRQNVVKDLSVELDRLSEESVNNDISSWTKGRSGEALSLLKKRFSHRPVQEKFVCLNCGFETHADEQAALNIARSWLFLRSQEYKKYQTNKTTGNTDKRAFVETWQSFYRKKLKEVWKPAV

SEQ ID NO: 46136 - protein, 979 aa, synthetic construct
  REGION 1..979: note = engineered CasX variant
QEIKRINKIRRRLVKDSNTKKAGKTGPMKTLLVRVMTPDLRERLENLRKKPENIPQPISNTSRANLNKLLTDYTEMKKAILHVYWEEFQVDPVGLMSRVAQPASKKIDQNKLKPEMDEKGNLTTAGFACSQCGQPLFVYKLEQVSEKGKAYTNYFGRCNVAEHEKLILLAQLKPEKDSDEAVTYSLGKFGQRALDFYSIHVTKESTHPVKPLAQIAGNRYASYPVGKALSDACMGTIASFLSKYQDIIIEHQKVVKGNQKRLESLRELAGKENLEYPSVTLPPQPHTKEGVDAYNEVIARVRMWVNLNLWQKLKLSRDDAKPLLRLKGFPSFPLVERQANEVDWWDMVCNVKKLINEKKEDGKVFWQNLAGYKRQEALRPYLSSEEDRKKGKKFARYQLGDLLLHLEKKHGEYDWGKVYDEAWERIDKKVEGLSKHIKLEEERRSEDAQSKAALTDWLRAKASFVIEGLKEADKDEFCRCELKLQKWYGDLRGKPFAIEAENSILDISGFSKQYNCAFIWQKDGVKKLNLYLIINYFKGGKLRFKKIKPEAFEANRFYTVINKKSGEIVPMEVNFNFDDPNLIILPLAFGKRQGREFIWNDLLSLETGSLKLANGRVIEKTLYNRRTRQDEPALFVALTFERREVLDSSNIKPMNLIGVDRGENIPAVIALTDPEGCPLSRFKDSLGNPTHILRIGESYKEKQRTIQAKKEVEQRRAGGYSRKYASKAKNLADDMVRNTARDLLYYAVTQDAMLIFENLSRGFGRQGKRTFMAERQYTRMEDWLTAKLAYEGLPSKTYLSKTLAQYTSKTCSNCGFTITSADYDRVLEKLKKTATGWMTTINGKELKVEGQITYYNRYKRQNVVKDLSVELDRLSEESVNNDISSWTKGRSGEALSLLKKRFSHRPVQEKFVCLNCGFETHADEQAALNIARSWLFLRSQEYKKYQTNKTTGNTDKRAFVETWQSFYRKKLKEVWKPAV

SEQ ID NO: 46137 - protein, 979 aa, synthetic construct
  REGION 1..979: note = engineered CasX variant
QEIKRINKIRRRLVKDSNTKKAGKTGPMKTLLVRVMTPDLRERLENLRKKPENIPQPISNTSRANLNKLLTDYTEMKKAILHVYWEEFQVDPVGLMSRVAQPASKKIDQNKLKPEMDEKGNLTTAGFACSQCGQPLFVYKLEQVSEKGKAYTNYFGRCNVAEHEKLILLAQLKPEKDSDEAVTYSLGKFGQRALDFYSIHVTKESTHPVKPLAQIAGNRYASHPVGKALSDACMGTIASFLSKYQDIIIEHQKVVKGNQKRLESLRELAGKENLEYPSVTLPPQPHTKEGVDAYNEVIARVRMWVNLNLWQKLKLSRDDAKPLLRLKGFPSFPLVERQANEVDWWDMVCNVKKLINEKKEDGKVFWQNLAGYKRQEALRPYLSSEEDRKKGKKFARYQLGDLLLHLEKKHGEYDWGKVYDEAWERIDKKVEGLSKHIKLEEERRSEDAQSKAALTDWLRAKASFVIEGLKEADKDEFCRCELKLQKWYGDLRGKPFAIEAENSILDISGFSKQYNCAFIWQKDGVKKLNLYLIINYFKGGKLRFKKIKPEAFEANRFYTVINKKSGEIVPMEVNFNFDDPNLIILPLAFGKRQGREFIWNDLLSLETGSLKLANGRVIEKTLYNRRTRQDEPALFVALTFERREVLDSSNIKPMNLIGVDRGENIPAVIALTDPEGCPLSRFKDSLGNPTHILRIGESYKEKQRTIQAKKEVEQRRAGGYSRKYASKAKNLADDMVRNTARDLLYYAVTQDAMLIFENLSRGFGRQGKRTFMAERQYTRMEDWLTAKLAYEGLPSKTYLSKTLAQYTSKTCSNCGFTITSADYDRVLEKLKKTATGWMTTINGKELKVEGQITYYNRYKRQNVVKDLSVELDRLSEESVNNDISSWTKGRSGEALSLLKKRFSHRPVQEKFVCLNCGFETHADEQAALNIARSWLFLRSQEYKKYQTNKTTGNTDKRAFVETWQSFYRKKLKEVWKPAV

SEQ ID NO: 46138 - protein, 979 aa, synthetic construct
  REGION 1..979: note = engineered CasX variant
QEIKRINKIRRRLVKDSNTKKAGKTGPMKTLLVRVMTPDLRERLENLRKKPENIPQPISNTSRANLNKLLTDYTEMKKAILHVYWEEFQVDPVGLMSRVAQPASKKIDQNKLKPEMDEKGNLTTAGFACSQCGQPLFVYKLEQVSEKGKAYTNYFGRCNVAEHEKLILLAQLKPEKDSDEAVTYSLGKFGQRALDFYSIHVTKESTHPVKPLAQIAGNRYASSPVGKALSDACMGTIASFLSKYQDIIIEHQKVVKGNQKRLESLRELAGKENLEYPSVTLPPQPHTKEGVDAYNEVIARVRMWVNLNLWQKLKLSRDDAKPLLRLKGFPSFPLVERQANEVDWWDMVCNVKKLINEKKEDGKVFWQNLAGYKRQEALRPYLSSEEDRKKGKKFARYQLGDLLLHLEKKHGEYDWGKVYDEAWERIDKKVEGLSKHIKLEEERRSEDAQSKAALTDWLRAKASFVIEGLKEADKDEFCRCELKLQKWYGDLRGKPFAIEAENSILDISGFSKQYNCAFIWQKDGVKKLNLYLIINYFKGGKLRFKKIKPEAFEANRFYTVINKKSGEIVPMEVNFNFDDPNLIILPLAFGKRQGREFIWNDLLSLETGSLKLANGRVIEKTLYNRRTRQDEPALFVALTFERREVLDSSNIKPMNLIGVDRGENIPAVIALTDPEGCPLSRFKDSLGNPTHILRIGESYKEKQRTIQAKKEVEQRRAGGYSRKYASKAKNLADDMVRNTARDLLYYAVTQDAMLIFENLSRGFGRQGKRTFMAERQYTRMEDWLTAKLAYEGLPSKTYLSKTLAQYTSKTCSNCGFTITSADYDRVLEKLKKTATGWMTTINGKELKVEGQITYYNRYKRQNVVKDLSVELDRLSEESVNNDISSWTKGRSGEALSLLKKRFSHRPVQEKFVCLNCGFETHADEQAALNIARSWLFLRSQEYKKYQTNKTTGNTDKRAFVETWQSFYRKKLKEVWKPAV

SEQ ID NO: 46139 - protein, 979 aa, synthetic construct
  REGION 1..979: note = engineered CasX variant
QEIKRINKIRRRLVKDSNTKKAGKTGPMKTLLVRVMTPDLRERLENLRKKPENIPQPISNTSRANLNKLLTDYTEMKKAILHVYWEEFQVDPVGLMSRVAQPASKKIDQNKLKPEMDEKGNLTTAGFACSQCGQPLFVYKLEQVSEKGKAYTNYFGRCNVAEHEKLILLAQLKPEKDSDEAVTYSLGKFGQRALDFYSIHVTKESTHPVKPLAQIAGNRYASTPVGKALSDACMGTIASFLSKYQDIIIEHQKVVKGNQKRLESLRELAGKENLEYPSVTLPPQPHTKEGVDAYNEVIARVRMWVNLNLWQKLKLSRDDAKPLLRLKGFPSFPLVERQANEVDWWDMVCNVKKLINEKKEDGKVFWQNLAGYKRQEALRPYLSSEEDRKKGKKFARYQLGDLLLHLEKKHGEYDWGKVYDEAWERIDKKVEGLSKHIKLEEERRSEDAQSKAALTDWLRAKASFVIEGLKEADKDEFCRCELKLQKWYGDLRGKPFAIEAENSILDISGFSKQYNCAFIWQKDGVKKLNLYLIINYFKGGKLRFKKIKPEAFEANRFYTVINKKSGEIVPMEVNFNFDDPNLIILPLAFGKRQGREFIWNDLLSLETGSLKLANGRVIEKTLYNRRTRQDEPALFVALTFERREVLDSSNIKPMNLIGVDRGENIPAVIALTDPEGCPLSRFKDSLGNPTHILRIGESYKEKQRTIQAKKEVEQRRAGGYSRKYASKAKNLADDMVRNTARDLLYYAVTQDAMLIFENLSRGFGRQGKRTFMAERQYTRMEDWLTAKLAYEGLPSKTYLSKTLAQYTSKTCSNCGFTITSADYDRVLEKLKKTATGWMTTINGKELKVEGQITYYNRYKRQNVVKDLSVELDRLSEESVNNDISSWTKGRSGEALSLLKKRFSHRPVQEKFVCLNCGFETHADEQAALNIARSWLFLRSQEYKKYQTNKTTGNTDKRAFVETWQSFYRKKLKEVWKPAV

SEQ ID NO: 46140 - protein, 979 aa, synthetic construct
  REGION 1..979: note = engineered CasX variant
QEIKRINKIRRRLVKDSNTKKAGKTGPMKTLLVRVMTPDLRERLENLRKKPENIPQPISNTSRANLNKLLTDYTEMKKAILHVYWEEFQVDPVGLMSRVAQPASKKIDQNKLKPEMDEKGNLTTAGFACSQCGQPLFVYKLEQVSEKGKAYTNYFGRCNVAEHEKLILLAQLKPEKDSDEAVTYSLGKFGQRALDFYSIHVTKESTHPVKPLAQIAGNRYASAPVGKALSDACMGTIASFLSKYQDIIIEHQKVVKGNQKRLESLRELAGKENLEYPSVTLPPQPHTKEGVDAYNEVIARVRMWVNLNLWQKLKLSRDDAKPLLRLKGFPSFPLVERQANEVDWWDMVCNVKKLINEKKEDGKVFWQNLAGYKRQEALRPYLSSEEDRKKGKKFARYQLGDLLLHLEKKHGEYDWGKVYDEAWERIDKKVEGLSKHIKLEEERRSEDAQSKAALTDWLRAKASFVIEGLKEADKDEFCRCELKLQKWYGDLRGKPFAIEAENSILDISGFSKQYNCAFIWQKDGVKKLNLYLIINYFKGGKLRFKKIKPEAFEANRFYTVINKKSGEIVPMEVNFNFDDPNLIILPLAFGKRQGREFIWNDLLSLETGSLKLANGRVIEKTLYNRRTRQDEPALFVALTFERREVLDSSNIKPMNLIGVDRGENIPAVIALTDPEGCPLSRFKDSLGNPTHILRIGESYKEKQRTIQAKKEVEQRRAGGYSRKYASKAKNLADDMVRNTARDLLYYAVTQDAMLIFENLSRGFGRQGKRTFMAERQYTRMEDWLTAKLAYEGLPSKTYLSKTLAQYTSKTCSNCGFTITSADYDRVLEKLKKTATGWMTTINGKELKVEGQITYYNRYKRQNVVKDLSVELDRLSEESVNNDISSWTKGRSGEALSLLKKRFSHRPVQEKFVCLNCGFETHADEQAALNIARSWLFLRSQEYKKYQTNKTTGNTDKRAFVETWQSFYRKKLKEVWKPAV

SEQ ID NO: 46141 - protein, 979 aa, synthetic construct
  REGION 1..979: note = engineered CasX variant
QEIKRINKIRRRLVKDSNTKKAGKTGPMKTLLVRVMTPDLRERLENLRKKPENIPQPISNTSRANLNKLLTDYTEMKKAILHVYWEEFQVDPVGLMSRVAQPASKKIDQNKLKPEMDEKGNLTTAGFACSQCGQPLFVYKLEQVSEKGKAYTNYFGRCNVAEHEKLILLAQLKPEKDSDEAVTYSLGKFGQRALDFYSIHVTKESTHPVKPLAQIAGNRYASVPVGKALSDACMGTIASFLSKYQDIIIEHQKVVKGNQKRLESLRELAGKENLEYPSVTLPPQPHTKEGVDAYNEVIARVRMWVNLNLWQKLKLSRDDAKPLLRLKGFPSFPLVERQANEVDWWDMVCNVKKLINEKKEDGKVFWQNLAGYKRQEALRPYLSSEEDRKKGKKFARYQLGDLLLHLEKKHGEYDWGKVYDEAWERIDKKVEGLSKHIKLEEERRSEDAQSKAALTDWLRAKASFVIEGLKEADKDEFCRCELKLQKWYGDLRGKPFAIEAENSILDISGFSKQYNCAFIWQKDGVKKLNLYLIINYFKGGKLRFKKIKPEAFEANRFYTVINKKSGEIVPMEVNFNFDDPNLIILPLAFGKRQGREFIWNDLLSLETGSLKLANGRVIEKTLYNRRTRQDEPALFVALTFERREVLDSSNIKPMNLIGVDRGENIPAVIALTDPEGCPLSRFKDSLGNPTHILRIGESYKEKQRTIQAKKEVEQRRAGGYSRKYASKAKNLADDMVRNTARDLLYYAVTQDAMLIFENLSRGFGRQGKRTFMAERQYTRMEDWLTAKLAYEGLPSKTYLSKTLAQYTSKTCSNCGFTITSADYDRVLEKLKKTATGWMTTINGKELKVEGQITYYNRYKRQNVVKDLSVELDRLSEESVNNDISSWTKGRSGEALSLLKKRFSHRPVQEKFVCLNCGFETHADEQAALNIARSWLFLRSQEYKKYQTNKTTGNTDKRAFVETWQSFYRKKLKEVWKPAV

SEQ ID NO: 46142 - protein, 979 aa, synthetic construct
  REGION 1..979: note = engineered CasX variant
QEIKRINKIRRRLVKDSNTKKAGKTGPMKTLLVRVMTPDLRERLENLRKKPENIPQPISNTSRANLNKLLTDYTEMKKAILHVYWEEFQVDPVGLMSRVAQPASKKIDQNKLKPEMDEKGNLTTAGFACSQCGQPLFVYKLEQVSEKGKAYTNYFGRCNVAEHEKLIKLAQLKPEKDSDEAVTYSLGKFGQRALDFYSIHVTKESTHPVKPLAQIAGNRYASGPVGKALSDACMGTIASFLSKYQDIIIEHQKVVKGNQKRLESLRELAGKENLEYPSVTLPPQPHTKEGVDAYNEVIARVRMWVNLNLWQKLKLSRDDAKPLLRLKGFPSFPLVERQANEVDWWDMVCNVKKLINEKKEDGKVFWQNLAGYKRQEALRPYLSSEEDRKKGKKFARYQLGDLLLHLEKKHGEYDWGKVYDEAWERIDKKVEGLSKHIKLEEERRSEDAQSKAALTDWLRAKASFVIEGLKEADKDEFCRCELKLQKWYGDLRGKPFAIEAENSILDISGFSKQYNCAFIWQKDGVKKLNLYLIINYFKGGKLRFKKIKPEAFEANRFYTVINKKSGEIVPMEVNFNFDDPNLIILPLAFGKRQGREFIWNDLLSLETGSLKLANGRVIEKTLYNRRTRQDEPALFVALTFERREVLDSSNIKPMNLIGVDRGENIPAVIALTDPEGCPLSRFKDSLGNPTHILRIGESYKEKQRTIQAKKEVEQRRAGGYSRKYASKAKNLADDMVRNTARDLLYYAVTQDAMLIFENLSRGFGRQGKRTFMAERQYTRMEDWLTAKLAYEGLPSKTYLSKTLAQYTSKTCSNCGFTITSADYDRVLEKLKKTATGWMTTINGKELKVEGQITYYNRYKRQNVVKDLSVELDRLSEESVNNDISSWTKGRSGEALSLLKKRFSHRPVQEKFVCLNCGFETHADEQAALNIARSWLFLRSQEYKKYQTNKTTGNTDKRAFVETWQSFYRKKLKEVWKPAV

SEQ ID NO: 46143 - protein, 978 aa, synthetic construct
  REGION 1..978: note = engineered CasX variant
QEIKRINKIRRRLVKDSNTKKAGKTGPMKTLLVRVMTPDLRERLENLRKKPENIPQPISNTSRANLNKLLTDYTEMKKAILHVYWEEFQVDPVGLMSRVAQPASKKIDQNKLKPEMDEKGNLTTAGFACSQCGQPLFVYKLEQVSEKGKAYTNYFGRCNVAEHEKLILLAQLKPEKDSDEAVTYSLGKFGQRALDFYSIHVTKESTHPVKPLAQIAGNRYASPVGKALSDACMGTIASFLSKYQDIIIEHQKVVKGNQKRLESLRELAGKENLEYPSVTLPPQPHTKEGVDAYNEVIARVRMWVNLNLWQKLKLSRDDAKPLLRLKGFPSFPLVERQANEVDWWDMVCNVKKLINEKKEDGKVFWQNLAGYKRQEALRPYLSSEEDRKKGKKFARYQLGDLLLHLEKKHGEYDWGKVYDEAWERIDKKVEGLSKHIKLEEERRSEDAQSKAALTDWLRAKASFVIEGLKEADKDEFCRCELKLQKWYGDLRGKPFAIEAENSILDISGFSKQYNCAFIWQKDGVKKLNLYLIINYFKGGKLRFKKIKPEAFEANRFYTVINKKSGEIVPMEVNFNFDDPNLIILPLAFGKRQGREFIWNDLLSLETGSLKLANGRVIEKTLYNRRTRQDEPALFVALTFERREVLDSSNIKPMNLIGVDRGENIPAVIALTDPEGCPLSRFKDSLGNPTHILRIGESYKEKQRTIQAKKEVEQRRAGGYSRKYASKAKNLADDMVRNTARDLLYYAVTQDAMLIFENLSRGFGRQGKRTFMAERQYTRMEDWLTAKLAYEGLPSKTYLSKTLAQYTSKTCSNCGFTITSADYDRVLEKLKKTATGWMTTINGKELKVEGQITYYNRYKRQNVVKDLSVELDRLSEESVNNDISSWTKGRSGEALSLLKKRFSHRPVQEKFVCLNCGFETHADEQAALNIARSWLFLRSQEYKKYQTNKTTGNTDKRAFVETWQSFYRKKLKEVWKPAV

SEQ ID NO: 46144 - protein, 978 aa, synthetic construct
  REGION 1..978: note = engineered CasX variant
QEIKRINKIRRRLVKDSNTKKAGKTGPMKTLLVRVMTPDLRERLENLRKKPENIPQPISNTSRANLNKLLTDYTEMKKAILHVYWEEFQVDPVGLMSRVAQPASKKIDQNKLKPEMDEKGNLTTAGFACSQCGQPLFVYKLEQVSEKGKAYTNYFGRCNVAEHEKLILLAQLKPEKDSDEAVTYSLGKFGQRALDFYSIHVTKESTHPVKPLAQIAGNRYASYPVGKALSDACMGTIASFLSKYQDIIIEHQKVVKGNQKRLESLRELAGKENLEYPSVTLPPQPHTKEGVDAYNEVIARVRMWVNLNLWQKLKLSRDDAKPLLRLKGFPSFPLVERQANEVDWWDMVCNVKKLINEKKEDGKVFWQNLAGYKRQEALRPYLSSEEDRKKGKKFARYQLGDLLLHLEKKHGEDWGDVYDEAWERIDKKVEGLSKHIKLEEERRSEDAQSKAALTDWLRAKASFVIEGLKEADKDEFCRCELKLQKWYGDLRGKPFAIEAENSILDISGFSKQYNCAFIWQKDGVKKLNLYLIINYFKGGKLRFKKIKPEAFEANRFYTVINKKSGEIVPMEVNFNFDDPNLIILPLAFGKRQGREFIWNDLLSLETGSLKLANGRVIEKTLYNRRTRQDEPALFVALTFERREVLDSSNIKPMNLIGVDRGENIPAVIALTDPEGCPLSRFKDSLGNPTHILRIGESYKEKQRTIQAKKEVEQRRAGGYSRKYASKAKNLADDMVRNTARDLLYYAVTQDAMLIFENLSRGFGRQGKRTFMAERQYTRMEDWLTAKLAYEGLPSKTYLSKTLAQYTSKTCSNCGFTITSADYDRVLEKLKKTATGWMTTINGKELKVEGQITYYNRYKRQNVVKDLSVELDRLSEESVNNDISSWTKGRSGEALSLLKKRFSHRPVQEKFVCLNCGFETHADEQAALNIARSWLFLRSQEYKKYQTNKTTGNTDKRAFVETWQSFYRKKLKEVWKPAV

SEQ ID NO: 46145 - protein, 978 aa, synthetic construct
  REGION 1..978: note = engineered CasX variant
QEIKRINKIRRRLVKDSNTKKAGKTGPMKTLLVRVMTPDLRERLENLRKKPENIPQPISNTSRANLNKLLTDYTEMKKAILHVYWEEFQVDPVGLMSRVAQPASKKIDQNKLKPEMDEKGNLTTAGFACSQCGQPLFVYKLEQVSEKGKAYTNYFGRCNVAEHEKLILLAQLKPEKDSDEAVTYSLGKFGQRALDFYSIHVTKESTHPVKPLAQIAGNRYASHPVGKALSDACMGTIASFLSKYQDIIIEHQKVVKGNQKRLESLRELAGKENLEYPSVTLPPQPHTKEGVDAYNEVIARVRMWVNLNLWQKLKLSRDDAKPLLRLKGFPSFPLVERQANEVDWWDMVCNVKKLINEKKEDGKVFWQNLAGYKRQEALRPYLSSEEDRKKGKKFARYQLGDLLLHLEKKHGEDWGDVYDEAWERIDKKVEGLSKHIKLEEERRSEDAQSKAALTDWLRAKASFVIEGLKEADKDEFCRCELKLQKWYGDLRGKPFAIEAENSILDISGFSKQYNCAFIWQKDGVKKLNLYLIINYFKGGKLRFKKIKPEAFEANRFYTVINKKSGEIVPMEVNFNFDDPNLIILPLAFGKRQGREFIWNDLLSLETGSLKLANGRVIEKTLYNRRTRQDEPALFVALTFERREVLDSSNIKPMNLIGVDRGENIPAVIALTDPEGCPLSRFKDSLGNPTHILRIGESYKEKQRTIQAKKEVEQRRAGGYSRKYASKAKNLADDMVRNTARDLLYYAVTQDAMLIFENLSRGFGRQGKRTFMAERQYTRMEDWLTAKLAYEGLPSKTYLSKTLAQYTSKTCSNCGFTITSADYDRVLEKLKKTATGWMTTINGKELKVEGQITYYNRYKRQNVVKDLSVELDRLSEESVNNDISSWTKGRSGEALSLLKKRFSHRPVQEKFVCLNCGFETHADEQAALNIARSWLFLRSQEYKKYQTNKTTGNTDKRAFVETWQSFYRKKLKEVWKPAV

SEQ ID NO: 46146 - protein, 978 aa, synthetic construct
  REGION 1..978: note = engineered CasX variant
QEIKRINKIRRRLVKDSNTKKAGKTGPMKTLLVRVMTPDLRERLENLRKKPENIPQPISNTSRANLNKLLTDYTEMKKAILHVYWEEFQVDPVGLMSRVAQPASKKIDQNKLKPEMDEKGNLTTAGFACSQCGQPLFVYKLEQVSEKGKAYTNYFGRCNVAEHEKLILLAQLKPEKDSDEAVTYSLGKFGQRALDFYSIHVTKESTHPVKPLAQIAGNRYASSPVGKALSDACMGTIASFLSKYQDIIIEHQKVVKGNQKRLESLRELAGKENLEYPSVTLPPQPHTKEGVDAYNEVIARVRMWVNLNLWQKLKLSRDDAKPLLRLKGFPSFPLVERQANEVDWWDMVCNVKKLINEKKEDGKVFWQNLAGYKRQEALRPYLSSEEDRKKGKKFARYQLGDLLLHLEKKHGEDWGDVYDEAWERIDKKVEGLSKHIKLEEERRSEDAQSKAALTDWLRAKASFVIEGLKEADKDEFCRCELKLQKWYGDLRGKPFAIEAENSILDISGFSKQYNCAFIWQKDGVKKLNLYLIINYFKGGKLRFKKIKPEAFEANRFYTVINKKSGEIVPMEVNFNFDDPNLIILPLAFGKRQGREFIWNDLLSLETGSLKLANGRVIEKTLYNRRTRQDEPALFVALTFERREVLDSSNIKPMNLIGVDRGENIPAVIALTDPEGCPLSRFKDSLGNPTHILRIGESYKEKQRTIQAKKEVEQRRAGGYSRKYASKAKNLADDMVRNTARDLLYYAVTQDAMLIFENLSRGFGRQGKRTFMAERQYTRMEDWLTAKLAYEGLPSKTYLSKTLAQYTSKTCSNCGFTITSADYDRVLEKLKKTATGWMTTINGKELKVEGQITYYNRYKRQNVVKDLSVELDRLSEESVNNDISSWTKGRSGEALSLLKKRFSHRPVQEKFVCLNCGFETHADEQAALNIARSWLFLRSQEYKKYQTNKTTGNTDKRAFVETWQSFYRKKLKEVWKPAV

SEQ ID NO: 46147 - protein, 978 aa, synthetic construct
  REGION 1..978: note = engineered CasX variant
QEIKRINKIRRRLVKDSNTKKAGKTGPMKTLLVRVMTPDLRERLENLRKKPENIPQPISNTSRANLNKLLTDYTEMKKAILHVYWEEFQVDPVGLMSRVAQPASKKIDQNKLKPEMDEKGNLTTAGFACSQCGQPLFVYKLEQVSEKGKAYTNYFGRCNVAEHEKLILLAQLKPEKDSDEAVTYSLGKFGQRALDFYSIHVTKESTHPVKPLAQIAGNRYASTPVGKALSDACMGTIASFLSKYQDIIIEHQKVVKGNQKRLESLRELAGKENLEYPSVTLPPQPHTKEGVDAYNEVIARVRMWVNLNLWQKLKLSRDDAKPLLRLKGFPSFPLVERQANEVDWWDMVCNVKKLINEKKEDGKVFWQNLAGYKRQEALRPYLSSEEDRKKGKKFARYQLGDLLLHLEKKHGEDWGDVYDEAWERIDKKVEGLSKHIKLEEERRSEDAQSKAALTDWLRAKASFVIEGLKEADKDEFCRCELKLQKWYGDLRGKPFAIEAENSILDISGFSKQYNCAFIWQKDGVKKLNLYLIINYFKGGKLRFKKIKPEAFEANRFYTVINKKSGEIVPMEVNFNFDDPNLIILPLAFGKRQGREFIWNDLLSLETGSLKLANGRVIEKTLYNRRTRQDEPALFVALTFERREVLDSSNIKPMNLIGVDRGENIPAVIALTDPEGCPLSRFKDSLGNPTHILRIGESYKEKQRTIQAKKEVEQRRAGGYSRKYASKAKNLADDMVRNTARDLLYYAVTQDAMLIFENLSRGFGRQGKRTFMAERQYTRMEDWLTAKLAYEGLPSKTYLSKTLAQYTSKTCSNCGFTITSADYDRVLEKLKKTATGWMTTINGKELKVEGQITYYNRYKRQNVVKDLSVELDRLSEESVNNDISSWTKGRSGEALSLLKKRFSHRPVQEKFVCLNCGFETHADEQAALNIARSWLFLRSQEYKKYQTNKTTGNTDKRAFVETWQSFYRKKLKEVWKPAV

SEQ ID NO: 46148 - protein, 978 aa, synthetic construct
  REGION 1..978: note = engineered CasX variant
QEIKRINKIRRRLVKDSNTKKAGKTGPMKTLLVRVMTPDLRERLENLRKKPENIPQPISNTSRANLNKLLTDYTEMKKAILHVYWEEFQVDPVGLMSRVAQPASKKIDQNKLKPEMDEKGNLTTAGFACSQCGQPLFVYKLEQVSEKGKAYTNYFGRCNVAEHEKLILLAQLKPEKDSDEAVTYSLGKFGQRALDFYSIHVTKESTHPVKPLAQIAGNRYASAPVGKALSDACMGTIASFLSKYQDIIIEHQKVVKGNQKRLESLRELAGKENLEYPSVTLPPQPHTKEGVDAYNEVIARVRMWVNLNLWQKLKLSRDDAKPLLRLKGFPSFPLVERQANEVDWWDMVCNVKKLINEKKEDGKVFWQNLAGYKRQEALRPYLSSEEDRKKGKKFARYQLGDLLLHLEKKHGEDWGDVYDEAWERIDKKVEGLSKHIKLEEERRSEDAQSKAALTDWLRAKASFVIEGLKEADKDEFCRCELKLQKWYGDLRGKPFAIEAENSILDISGFSKQYNCAFIWQKDGVKKLNLYLIINYFKGGKLRFKKIKPEAFEANRFYTVINKKSGEIVPMEVNFNFDDPNLIILPLAFGKRQGREFIWNDLLSLETGSLKLANGRVIEKTLYNRRTRQDEPALFVALTFERREVLDSSNIKPMNLIGVDRGENIPAVIALTDPEGCPLSRFKDSLGNPTHILRIGESYKEKQRTIQAKKEVEQRRAGGYSRKYASKAKNLADDMVRNTARDLLYYAVTQDAMLIFENLSRGFGRQGKRTFMAERQYTRMEDWLTAKLAYEGLPSKTYLSKTLAQYTSKTCSNCGFTITSADYDRVLEKLKKTATGWMTTINGKELKVEGQITYYNRYKRQNVVKDLSVELDRLSEESVNNDISSWTKGRSGEALSLLKKRFSHRPVQEKFVCLNCGFETHADEQAALNIARSWLFLRSQEYKKYQTNKTTGNTDKRAFVETWQSFYRKKLKEVWKPAV

SEQ ID NO: 46149 - protein, 978 aa, synthetic construct
  REGION 1..978: note = engineered CasX variant
QEIKRINKIRRRLVKDSNTKKAGKTGPMKTLLVRVMTPDLRERLENLRKKPENIPQPISNTSRANLNKLLTDYTEMKKAILHVYWEEFQVDPVGLMSRVAQPASKKIDQNKLKPEMDEKGNLTTAGFACSQCGQPLFVYKLEQVSEKGKAYTNYFGRCNVAEHEKLILLAQLKPEKDSDEAVTYSLGKFGQRALDFYSIHVTKESTHPVKPLAQIAGNRYASVPVGKALSDACMGTIASFLSKYQDIIIEHQKVVKGNQKRLESLRELAGKENLEYPSVTLPPQPHTKEGVDAYNEVIARVRMWVNLNLWQKLKLSRDDAKPLLRLKGFPSFPLVERQANEVDWWDMVCNVKKLINEKKEDGKVFWQNLAGYKRQEALRPYLSSEEDRKKGKKFARYQLGDLLLHLEKKHGEDWGDVYDEAWERIDKKVEGLSKHIKLEEERRSEDAQSKAALTDWLRAKASFVIEGLKEADKDEFCRCELKLQKWYGDLRGKPFAIEAENSILDISGFSKQYNCAFIWQKDGVKKLNLYLIINYFKGGKLRFKKIKPEAFEANRFYTVINKKSGEIVPMEVNFNFDDPNLIILPLAFGKRQGREFIWNDLLSLETGSLKLANGRVIEKTLYNRRTRQDEPALFVALTFERREVLDSSNIKPMNLIGVDRGENIPAVIALTDPEGCPLSRFKDSLGNPTHILRIGESYKEKQRTIQAKKEVEQRRAGGYSRKYASKAKNLADDMVRNTARDLLYYAVTQDAMLIFENLSRGFGRQGKRTFMAERQYTRMEDWLTAKLAYEGLPSKTYLSKTLAQYTSKTCSNCGFTITSADYDRVLEKLKKTATGWMTTINGKELKVEGQITYYNRYKRQNVVKDLSVELDRLSEESVNNDISSWTKGRSGEALSLLKKRFSHRPVQEKFVCLNCGFETHADEQAALNIARSWLFLRSQEYKKYQTNKTTGNTDKRAFVETWQSFYRKKLKEVWKPAV

SEQ ID NO: 46150 - protein, 978 aa, synthetic construct
  REGION 1..978: note = engineered CasX variant
QEIKRINKIRRRLVKDSNTKKAGKTGPMKTLLVRVMTPDLRERLENLRKKPENIPQPISNTSRANLNKLLTDYTEMKKAILHVYWEEFQVDPVGLMSRVAQPASKKIDQNKLKPEMDEKGNLTTAGFACSQCGQPLFVYKLEQVSEKGKAYTNYFGRCNVAEHEKLIKLAQLKPEKDSDEAVTYSLGKFGQRALDFYSIHVTKESTHPVKPLAQIAGNRYASGPVGKALSDACMGTIASFLSKYQDIIIEHQKVVKGNQKRLESLRELAGKENLEYPSVTLPPQPHTKEGVDAYNEVIARVRMWVNLNLWQKLKLSRDDAKPLLRLKGFPSFPLVERQANEVDWWDMVCNVKKLINEKKEDGKVFWQNLAGYKRQEALRPYLSSEEDRKKGKKFARYQLGDLLLHLEKKHGEDWGDVYDEAWERIDKKVEGLSKHIKLEEERRSEDAQSKAALTDWLRAKASFVIEGLKEADKDEFCRCELKLQKWYGDLRGKPFAIEAENSILDISGFSKQYNCAFIWQKDGVKKLNLYLIINYFKGGKLRFKKIKPEAFEANRFYTVINKKSGEIVPMEVNFNFDDPNLIILPLAFGKRQGREFIWNDLLSLETGSLKLANGRVIEKTLYNRRTRQDEPALFVALTFERREVLDSSNIKPMNLIGVDRGENIPAVIALTDPEGCPLSRFKDSLGNPTHILRIGESYKEKQRTIQAKKEVEQRRAGGYSRKYASKAKNLADDMVRNTARDLLYYAVTQDAMLIFENLSRGFGRQGKRTFMAERQYTRMEDWLTAKLAYEGLPSKTYLSKTLAQYTSKTCSNCGFTITSADYDRVLEKLKKTATGWMTTINGKELKVEGQITYYNRYKRQNVVKDLSVELDRLSEESVNNDISSWTKGRSGEALSLLKKRFSHRPVQEKFVCLNCGFETHADEQAALNIARSWLFLRSQEYKKYQTNKTTGNTDKRAFVETWQSFYRKKLKEVWKPAV

SEQ ID NO: 46151 - protein, 977 aa, synthetic construct
  REGION 1..977: note = engineered CasX variant
QEIKRINKIRRRLVKDSNTKKAGKTGPMKTLLVRVMTPDLRERLENLRKKPENIPQPISNTSRANLNKLLTDYTEMKKAILHVYWEEFQVDPVGLMSRVAQPASKKIDQNKLKPEMDEKGNLTTAGFACSQCGQPLFVYKLEQVSEKGKAYTNYFGRCNVAEHEKLILLAQLKPEKDSDEAVTYSLGKFGQRALDFYSIHVTKESTHPVKPLAQIAGNRYASPVGKALSDACMGTIASFLSKYQDIIIEHQKVVKGNQKRLESLRELAGKENLEYPSVTLPPQPHTKEGVDAYNEVIARVRMWVNLNLWQKLKLSRDDAKPLLRLKGFPSFPLVERQANEVDWWDMVCNVKKLINEKKEDGKVFWQNLAGYKRQEALRPYLSSEEDRKKGKKFARYQLGDLLLHLEKKHGEDWGDVYDEAWERIDKKVEGLSKHIKLEEERRSEDAQSKAALTDWLRAKASFVIEGLKEADKDEFCRCELKLQKWYGDLRGKPFAIEAENSILDISGFSKQYNCAFIWQKDGVKKLNLYLIINYFKGGKLRFKKIKPEAFEANRFYTVINKKSGEIVPMEVNFNFDDPNLIILPLAFGKRQGREFIWNDLLSLETGSLKLANGRVIEKTLYNRRTRQDEPALFVALTFERREVLDSSNIKPMNLIGVDRGENIPAVIALTDPEGCPLSRFKDSLGNPTHILRIGESYKEKQRTIQAKKEVEQRRAGGYSRKYASKAKNLADDMVRNTARDLLYYAVTQDAMLIFENLSRGFGRQGKRTFMAERQYTRMEDWLTAKLAYEGLPSKTYLSKTLAQYTSKTCSNCGFTITSADYDRVLEKLKKTATGWMTTINGKELKVEGQITYYNRYKRQNVVKDLSVELDRLSEESVNNDISSWTKGRSGEALSLLKKRFSHRPVQEKFVCLNCGFETHADEQAALNIARSWLFLRSQEYKKYQTNKTTGNTDKRAFVETWQSFYRKKLKEVWKPAV

SEQ ID NO: 46152 - protein, 978 aa, synthetic construct
  REGION 1..978: note = engineered CasX variant
QEIKRINKIRRRLVKDSNTKKAGKTGPMKTLLVRVMTPDLRERLENLRKKPENIPQPISNTSRANLNKLLTDYTEMKKAILHVYWEEFQVDPVGLMSRVAQPASKKIDQNKLKPEMDEKGNLTTAGFACSQCGQPLFVYKLEQVSEKGKAYTNYFGRCNVAEHEKLILLAQLKPEKDSDEAVTYSLGKFGQRALDFYSIHVTKESTHPVKPLAQIAGNRYASYPVGKALSDACMGTIASFLSKYQDIIIEHQKVVKGNQKRLESLRELAGKENLEYPSVTLPPQPHTKEGVDAYNEVIARVRMWVNLNLWQKLKLSRDDAKPLLRLKGFPSFPLVERQANEVDWWDMVCNVKKLINEKKEDGKVFWQNLAGYKRQEALRPYLSSEEDRKKGKKFARYQLGDLLLHLEKKHGEDWGKVYGEAWERIDKKVEGLSKHIKLEEERRSEDAQSKAALTDWLRAKASFVIEGLKEADKDEFCRCELKLQKWYGDLRGKPFAIEAENSILDISGFSKQYNCAFIWQKDGVKKLNLYLIINYFKGGKLRFKKIKPEAFEANRFYTVINKKSGEIVPMEVNFNFDDPNLIILPLAFGKRQGREFIWNDLLSLETGSLKLANGRVIEKTLYNRRTRQDEPALFVALTFERREVLDSSNIKPMNLIGVDRGENIPAVIALTDPEGCPLSRFKDSLGNPTHILRIGESYKEKQRTIQAKKEVEQRRAGGYSRKYASKAKNLADDMVRNTARDLLYYAVTQDAMLIFENLSRGFGRQGKRTFMAERQYTRMEDWLTAKLAYEGLPSKTYLSKTLAQYTSKTCSNCGFTITSADYDRVLEKLKKTATGWMTTINGKELKVEGQITYYNRYKRQNVVKDLSVELDRLSEESVNNDISSWTKGRSGEALSLLKKRFSHRPVQEKFVCLNCGFETHADEQAALNIARSWLFLRSQEYKKYQTNKTTGNTDKRAFVETWQSFYRKKLKEVWKPAV

SEQ ID NO: 46153 - protein, 978 aa, synthetic construct
  REGION 1..978: note = engineered CasX variant
QEIKRINKIRRRLVKDSNTKKAGKTGPMKTLLVRVMTPDLRERLENLRKKPENIPQPISNTSRANLNKLLTDYTEMKKAILHVYWEEFQVDPVGLMSRVAQPASKKIDQNKLKPEMDEKGNLTTAGFACSQCGQPLFVYKLEQVSEKGKAYTNYFGRCNVAEHEKLILLAQLKPEKDSDEAVTYSLGKFGQRALDFYSIHVTKESTHPVKPLAQIAGNRYASHPVGKALSDACMGTIASFLSKYQDIIIEHQKVVKGNQKRLESLRELAGKENLEYPSVTLPPQPHTKEGVDAYNEVIARVRMWVNLNLWQKLKLSRDDAKPLLRLKGFPSFPLVERQANEVDWWDMVCNVKKLINEKKEDGKVFWQNLAGYKRQEALRPYLSSEEDRKKGKKFARYQLGDLLLHLEKKHGEDWGKVYGEAWERIDKKVEGLSKHIKLEEERRSEDAQSKAALTDWLRAKASFVIEGLKEADKDEFCRCELKLQKWYGDLRGKPFAIEAENSILDISGFSKQYNCAFIWQKDGVKKLNLYLIINYFKGGKLRFKKIKPEAFEANRFYTVINKKSGEIVPMEVNFNFDDPNLIILPLAFGKRQGREFIWNDLLSLETGSLKLANGRVIEKTLYNRRTRQDEPALFVALTFERREVLDSSNIKPMNLIGVDRGENIPAVIALTDPEGCPLSRFKDSLGNPTHILRIGESYKEKQRTIQAKKEVEQRRAGGYSRKYASKAKNLADDMVRNTARDLLYYAVTQDAMLIFENLSRGFGRQGKRTFMAERQYTRMEDWLTAKLAYEGLPSKTYLSKTLAQYTSKTCSNCGFTITSADYDRVLEKLKKTATGWMTTINGKELKVEGQITYYNRYKRQNVVKDLSVELDRLSEESVNNDISSWTKGRSGEALSLLKKRFSHRPVQEKFVCLNCGFETHADEQAALNIARSWLFLRSQEYKKYQTNKTTGNTDKRAFVETWQSFYRKKLKEVWKPAV

SEQ ID NO: 46154 - protein, 978 aa, synthetic construct
  REGION 1..978: note = engineered CasX variant
QEIKRINKIRRRLVKDSNTKKAGKTGPMKTLLVRVMTPDLRERLENLRKKPENIPQPISNTSRANLNKLLTDYTEMKKAILHVYWEEFQVDPVGLMSRVAQPASKKIDQNKLKPEMDEKGNLTTAGFACSQCGQPLFVYKLEQVSEKGKAYTNYFGRCNVAEHEKLILLAQLKPEKDSDEAVTYSLGKFGQRALDFYSIHVTKESTHPVKPLAQIAGNRYASSPVGKALSDACMGTIASFLSKYQDIIIEHQKVVKGNQKRLESLRELAGKENLEYPSVTLPPQPHTKEGVDAYNEVIARVRMWVNLNLWQKLKLSRDDAKPLLRLKGFPSFPLVERQANEVDWWDMVCNVKKLINEKKEDGKVFWQNLAGYKRQEALRPYLSSEEDRKKGKKFARYQLGDLLLHLEKKHGEDWGKVYGEAWERIDKKVEGLSKHIKLEEERRSEDAQSKAALTDWLRAKASFVIEGLKEADKDEFCRCELKLQKWYGDLRGKPFAIEAENSILDISGFSKQYNCAFIWQKDGVKKLNLYLIINYFKGGKLRFKKIKPEAFEANRFYTVINKKSGEIVPMEVNFNFDDPNLIILPLAFGKRQGREFIWNDLLSLETGSLKLANGRVIEKTLYNRRTRQDEPALFVALTFERREVLDSSNIKPMNLIGVDRGENIPAVIALTDPEGCPLSRFKDSLGNPTHILRIGESYKEKQRTIQAKKEVEQRRAGGYSRKYASKAKNLADDMVRNTARDLLYYAVTQDAMLIFENLSRGFGRQGKRTFMAERQYTRMEDWLTAKLAYEGLPSKTYLSKTLAQYTSKTCSNCGFTITSADYDRVLEKLKKTATGWMTTINGKELKVEGQITYYNRYKRQNVVKDLSVELDRLSEESVNNDISSWTKGRSGEALSLLKKRFSHRPVQEKFVCLNCGFETHADEQAALNIARSWLFLRSQEYKKYQTNKTTGNTDKRAFVETWQSFYRKKLKEVWKPAV

SEQ ID NO: 46155 - protein, 978 aa, synthetic construct
  REGION 1..978: note = engineered CasX variant
QEIKRINKIRRRLVKDSNTKKAGKTGPMKTLLVRVMTPDLRERLENLRKKPENIPQPISNTSRANLNKLLTDYTEMKKAILHVYWEEFQVDPVGLMSRVAQPASKKIDQNKLKPEMDEKGNLTTAGFACSQCGQPLFVYKLEQVSEKGKAYTNYFGRCNVAEHEKLILLAQLKPEKDSDEAVTYSLGKFGQRALDFYSIHVTKESTHPVKPLAQIAGNRYASTPVGKALSDACMGTIASFLSKYQDIIIEHQKVVKGNQKRLESLRELAGKENLEYPSVTLPPQPHTKEGVDAYNEVIARVRMWVNLNLWQKLKLSRDDAKPLLRLKGFPSFPLVERQANEVDWWDMVCNVKKLINEKKEDGKVFWQNLAGYKRQEALRPYLSSEEDRKKGKKFARYQLGDLLLHLEKKHGEDWGKVYGEAWERIDKKVEGLSKHIKLEEERRSEDAQSKAALTDWLRAKASFVIEGLKEADKDEFCRCELKLQKWYGDLRGKPFAIEAENSILDISGFSKQYNCAFIWQKDGVKKLNLYLIINYFKGGKLRFKKIKPEAFEANRFYTVINKKSGEIVPMEVNFNFDDPNLIILPLAFGKRQGREFIWNDLLSLETGSLKLANGRVIEKTLYNRRTRQDEPALFVALTFERREVLDSSNIKPMNLIGVDRGENIPAVIALTDPEGCPLSRFKDSLGNPTHILRIGESYKEKQRTIQAKKEVEQRRAGGYSRKYASKAKNLADDMVRNTARDLLYYAVTQDAMLIFENLSRGFGRQGKRTFMAERQYTRMEDWLTAKLAYEGLPSKTYLSKTLAQYTSKTCSNCGFTITSADYDRVLEKLKKTATGWMTTINGKELKVEGQITYYNRYKRQNVVKDLSVELDRLSEESVNNDISSWTKGRSGEALSLLKKRFSHRPVQEKFVCLNCGFETHADEQAALNIARSWLFLRSQEYKKYQTNKTTGNTDKRAFVETWQSFYRKKLKEVWKPAV

SEQ ID NO: 46156 - protein, 978 aa, synthetic construct
  REGION 1..978: note = engineered CasX variant
QEIKRINKIRRRLVKDSNTKKAGKTGPMKTLLVRVMTPDLRERLENLRKKPENIPQPISNTSRANLNKLLTDYTEMKKAILHVYWEEFQVDPVGLMSRVAQPASKKIDQNKLKPEMDEKGNLTTAGFACSQCGQPLFVYKLEQVSEKGKAYTNYFGRCNVAEHEKLILLAQLKPEKDSDEAVTYSLGKFGQRALDFYSIHVTKESTHPVKPLAQIAGNRYASAPVGKALSDACMGTIASFLSKYQDIIIEHQKVVKGNQKRLESLRELAGKENLEYPSVTLPPQPHTKEGVDAYNEVIARVRMWVNLNLWQKLKLSRDDAKPLLRLKGFPSFPLVERQANEVDWWDMVCNVKKLINEKKEDGKVFWQNLAGYKRQEALRPYLSSEEDRKKGKKFARYQLGDLLLHLEKKHGEDWGKVYGEAWERIDKKVEGLSKHIKLEEERRSEDAQSKAALTDWLRAKASFVIEGLKEADKDEFCRCELKLQKWYGDLRGKPFAIEAENSILDISGFSKQYNCAFIWQKDGVKKLNLYLIINYFKGGKLRFKKIKPEAFEANRFYTVINKKSGEIVPMEVNFNFDDPNLIILPLAFGKRQGREFIWNDLLSLETGSLKLANGRVIEKTLYNRRTRQDEPALFVALTFERREVLDSSNIKPMNLIGVDRGENIPAVIALTDPEGCPLSRFKDSLGNPTHILRIGESYKEKQRTIQAKKEVEQRRAGGYSRKYASKAKNLADDMVRNTARDLLYYAVTQDAMLIFENLSRGFGRQGKRTFMAERQYTRMEDWLTAKLAYEGLPSKTYLSKTLAQYTSKTCSNCGFTITSADYDRVLEKLKKTATGWMTTINGKELKVEGQITYYNRYKRQNVVKDLSVELDRLSEESVNNDISSWTKGRSGEALSLLKKRFSHRPVQEKFVCLNCGFETHADEQAALNIARSWLFLRSQEYKKYQTNKTTGNTDKRAFVETWQSFYRKKLKEVWKPAV

SEQ ID NO: 46157 - protein, 978 aa, synthetic construct
  REGION 1..978: note = engineered CasX variant
QEIKRINKIRRRLVKDSNTKKAGKTGPMKTLLVRVMTPDLRERLENLRKKPENIPQPISNTSRANLNKLLTDYTEMKKAILHVYWEEFQVDPVGLMSRVAQPASKKIDQNKLKPEMDEKGNLTTAGFACSQCGQPLFVYKLEQVSEKGKAYTNYFGRCNVAEHEKLILLAQLKPEKDSDEAVTYSLGKFGQRALDFYSIHVTKESTHPVKPLAQIAGNRYASVPVGKALSDACMGTIASFLSKYQDIIIEHQKVVKGNQKRLESLRELAGKENLEYPSVTLPPQPHTKEGVDAYNEVIARVRMWVNLNLWQKLKLSRDDAKPLLRLKGFPSFPLVERQANEVDWWDMVCNVKKLINEKKEDGKVFWQNLAGYKRQEALRPYLSSEEDRKKGKKFARYQLGDLLLHLEKKHGEDWGKVYGEAWERIDKKVEGLSKHIKLEEERRSEDAQSKAALTDWLRAKASFVIEGLKEADKDEFCRCELKLQKWYGDLRGKPFAIEAENSILDISGFSKQYNCAFIWQKDGVKKLNLYLIINYFKGGKLRFKKIKPEAFEANRFYTVINKKSGEIVPMEVNFNFDDPNLIILPLAFGKRQGREFIWNDLLSLETGSLKLANGRVIEKTLYNRRTRQDEPALFVALTFERREVLDSSNIKPMNLIGVDRGENIPAVIALTDPEGCPLSRFKDSLGNPTHILRIGESYKEKQRTIQAKKEVEQRRAGGYSRKYASKAKNLADDMVRNTARDLLYYAVTQDAMLIFENLSRGFGRQGKRTFMAERQYTRMEDWLTAKLAYEGLPSKTYLSKTLAQYTSKTCSNCGFTITSADYDRVLEKLKKTATGWMTTINGKELKVEGQITYYNRYKRQNVVKDLSVELDRLSEESVNNDISSWTKGRSGEALSLLKKRFSHRPVQEKFVCLNCGFETHADEQAALNIARSWLFLRSQEYKKYQTNKTTGNTDKRAFVETWQSFYRKKLKEVWKPAV

SEQ ID NO: 46158 - protein, 978 aa, synthetic construct
  REGION 1..978: note = engineered CasX variant
QEIKRINKIRRRLVKDSNTKKAGKTGPMKTLLVRVMTPDLRERLENLRKKPENIPQPISNTSRANLNKLLTDYTEMKKAILHVYWEEFQVDPVGLMSRVAQPASKKIDQNKLKPEMDEKGNLTTAGFACSQCGQPLFVYKLEQVSEKGKAYTNYFGRCNVAEHEKLIKLAQLKPEKDSDEAVTYSLGKFGQRALDFYSIHVTKESTHPVKPLAQIAGNRYASGPVGKALSDACMGTIASFLSKYQDIIIEHQKVVKGNQKRLESLRELAGKENLEYPSVTLPPQPHTKEGVDAYNEVIARVRMWVNLNLWQKLKLSRDDAKPLLRLKGFPSFPLVERQANEVDWWDMVCNVKKLINEKKEDGKVFWQNLAGYKRQEALRPYLSSEEDRKKGKKFARYQLGDLLLHLEKKHGEDWGKVYGEAWERIDKKVEGLSKHIKLEEERRSEDAQSKAALTDWLRAKASFVIEGLKEADKDEFCRCELKLQKWYGDLRGKPFAIEAENSILDISGFSKQYNCAFIWQKDGVKKLNLYLIINYFKGGKLRFKKIKPEAFEANRFYTVINKKSGEIVPMEVNFNFDDPNLIILPLAFGKRQGREFIWNDLLSLETGSLKLANGRVIEKTLYNRRTRQDEPALFVALTFERREVLDSSNIKPMNLIGVDRGENIPAVIALTDPEGCPLSRFKDSLGNPTHILRIGESYKEKQRTIQAKKEVEQRRAGGYSRKYASKAKNLADDMVRNTARDLLYYAVTQDAMLIFENLSRGFGRQGKRTFMAERQYTRMEDWLTAKLAYEGLPSKTYLSKTLAQYTSKTCSNCGFTITSADYDRVLEKLKKTATGWMTTINGKELKVEGQITYYNRYKRQNVVKDLSVELDRLSEESVNNDISSWTKGRSGEALSLLKKRFSHRPVQEKFVCLNCGFETHADEQAALNIARSWLFLRSQEYKKYQTNKTTGNTDKRAFVETWQSFYRKKLKEVWKPAV

SEQ ID NO: 46159 - protein, 977 aa, synthetic construct
  REGION 1..977: note = engineered CasX variant
QEIKRINKIRRRLVKDSNTKKAGKTGPMKTLLVRVMTPDLRERLENLRKKPENIPQPISNTSRANLNKLLTDYTEMKKAILHVYWEEFQVDPVGLMSRVAQPASKKIDQNKLKPEMDEKGNLTTAGFACSQCGQPLFVYKLEQVSEKGKAYTNYFGRCNVAEHEKLILLAQLKPEKDSDEAVTYSLGKFGQRALDFYSIHVTKESTHPVKPLAQIAGNRYASPVGKALSDACMGTIASFLSKYQDIIIEHQKVVKGNQKRLESLRELAGKENLEYPSVTLPPQPHTKEGVDAYNEVIARVRMWVNLNLWQKLKLSRDDAKPLLRLKGFPSFPLVERQANEVDWWDMVCNVKKLINEKKEDGKVFWQNLAGYKRQEALRPYLSSEEDRKKGKKFARYQLGDLLLHLEKKHGEDWGKVYGEAWERIDKKVEGLSKHIKLEEERRSEDAQSKAALTDWLRAKASFVIEGLKEADKDEFCRCELKLQKWYGDLRGKPFAIEAENSILDISGFSKQYNCAFIWQKDGVKKLNLYLIINYFKGGKLRFKKIKPEAFEANRFYTVINKKSGEIVPMEVNFNFDDPNLIILPLAFGKRQGREFIWNDLLSLETGSLKLANGRVIEKTLYNRRTRQDEPALFVALTFERREVLDSSNIKPMNLIGVDRGENIPAVIALTDPEGCPLSRFKDSLGNPTHILRIGESYKEKQRTIQAKKEVEQRRAGGYSRKYASKAKNLADDMVRNTARDLLYYAVTQDAMLIFENLSRGFGRQGKRTFMAERQYTRMEDWLTAKLAYEGLPSKTYLSKTLAQYTSKTCSNCGFTITSADYDRVLEKLKKTATGWMTTINGKELKVEGQITYYNRYKRQNVVKDLSVELDRLSEESVNNDISSWTKGRSGEALSLLKKRFSHRPVQEKFVCLNCGFETHADEQAALNIARSWLFLRSQEYKKYQTNKTTGNTDKRAFVETWQSFYRKKLKEVWKPAV

SEQ ID NO: 46160 - protein, 978 aa, synthetic construct
  REGION 1..978: note = engineered CasX variant
QEIKRINKIRRRLVKDSNTKKAGKTGPMKTLLVRVMTPDLRERLENLRKKPENIPQPISNTSRANLNKLLTDYTEMKKAILHVYWEEFQVDPVGLMSRVAQPASKKIDQNKLKPEMDEKGNLTTAGFACSQCGQPLFVYKLEQVSEKGKAYTNYFGRCNVAEHEKLILLAQLKPEKDSDEAVTYSLGKFGQRALDFYSIHVTKESTHPVKPLAQIAGNRYASYPVGKALSDACMGTIASFLSKYQDIIIEHQKVVKGNQKRLESLRELAGKENLEYPSVTLPPQPHTKEGVDAYNEVIARVRMWVNLNLWQKLKLSRDDAKPLLRLKGFPSFPLVERQANEVDWWDMVCNVKKLINEKKEDGKVFWQNLAGYKRQEALRPYLSSEEDRKKGKKFARYQLGDLLLHLEKKHGEDWGKVYDEAWERIDKKVEGLSKHIKLEEERRSEDAQSKAALTDWLRAKASFVIEGKKEADKDEFCRCELKLQKWYGDLRGKPFAIEAENSILDISGFSKQYNCAFIWQKDGVKKLNLYLIINYFKGGKLRFKKIKPEAFEANRFYTVINKKSGEIVPMEVNFNFDDPNLIILPLAFGKRQGREFIWNDLLSLETGSLKLANGRVIEKTLYNRRTRQDEPALFVALTFERREVLDSSNIKPMNLIGVDRGENIPAVIALTDPEGCPLSRFKDSLGNPTHILRIGESYKEKQRTIQAKKEVEQRRAGGYSRKYASKAKNLADDMVRNTARDLLYYAVTQDAMLIFENLSRGFGRQGKRTFMAERQYTRMEDWLTAKLAYEGLPSKTYLSKTLAQYTSKTCSNCGFTITSADYDRVLEKLKKTATGWMTTINGKELKVEGQITYYNRYKRQNVVKDLSVELDRLSEESVNNDISSWTKGRSGEALSLLKKRFSHRPVQEKFVCLNCGFETHADEQAALNIARSWLFLRSQEYKKYQTNKTTGNTDKRAFVETWQSFYRKKLKEVWKPAV

SEQ ID NO: 46161 - protein, 978 aa, synthetic construct
  REGION 1..978: note = engineered CasX variant
QEIKRINKIRRRLVKDSNTKKAGKTGPMKTLLVRVMTPDLRERLENLRKKPENIPQPISNTSRANLNKLLTDYTEMKKAILHVYWEEFQVDPVGLMSRVAQPASKKIDQNKLKPEMDEKGNLTTAGFACSQCGQPLFVYKLEQVSEKGKAYTNYFGRCNVAEHEKLILLAQLKPEKDSDEAVTYSLGKFGQRALDFYSIHVTKESTHPVKPLAQIAGNRYASHPVGKALSDACMGTIASFLSKYQDIIIEHQKVVKGNQKRLESLRELAGKENLEYPSVTLPPQPHTKEGVDAYNEVIARVRMWVNLNLWQKLKLSRDDAKPLLRLKGFPSFPLVERQANEVDWWDMVCNVKKLINEKKEDGKVFWQNLAGYKRQEALRPYLSSEEDRKKGKKFARYQLGDLLLHLEKKHGEDWGKVYDEAWERIDKKVEGLSKHIKLEEERRSEDAQSKAALTDWLRAKASFVIEGKKEADKDEFCRCELKLQKWYGDLRGKPFAIEAENSILDISGFSKQYNCAFIWQKDGVKKLNLYLIINYFKGGKLRFKKIKPEAFEANRFYTVINKKSGEIVPMEVNFNFDDPNLIILPLAFGKRQGREFIWNDLLSLETGSLKLANGRVIEKTLYNRRTRQDEPALFVALTFERREVLDSSNIKPMNLIGVDRGENIPAVIALTDPEGCPLSRFKDSLGNPTHILRIGESYKEKQRTIQAKKEVEQRRAGGYSRKYASKAKNLADDMVRNTARDLLYYAVTQDAMLIFENLSRGFGRQGKRTFMAERQYTRMEDWLTAKLAYEGLPSKTYLSKTLAQYTSKTCSNCGFTITSADYDRVLEKLKKTATGWMTTINGKELKVEGQITYYNRYKRQNVVKDLSVELDRLSEESVNNDISSWTKGRSGEALSLLKKRFSHRPVQEKFVCLNCGFETHADEQAALNIARSWLFLRSQEYKKYQTNKTTGNTDKRAFVETWQSFYRKKLKEVWKPAV

SEQ ID NO: 46162 - protein, 978 aa, synthetic construct
  REGION 1..978: note = engineered CasX variant
QEIKRINKIRRRLVKDSNTKKAGKTGPMKTLLVRVMTPDLRERLENLRKKPENIPQPISNTSRANLNKLLTDYTEMKKAILHVYWEEFQVDPVGLMSRVAQPASKKIDQNKLKPEMDEKGNLTTAGFACSQCGQPLFVYKLEQVSEKGKAYTNYFGRCNVAEHEKLILLAQLKPEKDSDEAVTYSLGKFGQRALDFYSIHVTKESTHPVKPLAQIAGNRYASSPVGKALSDACMGTIASFLSKYQDIIIEHQKVVKGNQKRLESLRELAGKENLEYPSVTLPPQPHTKEGVDAYNEVIARVRMWVNLNLWQKLKLSRDDAKPLLRLKGFPSFPLVERQANEVDWWDMVCNVKKLINEKKEDGKVFWQNLAGYKRQEALRPYLSSEEDRKKGKKFARYQLGDLLLHLEKKHGEDWGKVYDEAWERIDKKVEGLSKHIKLEEERRSEDAQSKAALTDWLRAKASFVIEGKKEADKDEFCRCELKLQKWYGDLRGKPFAIEAENSILDISGFSKQYNCAFIWQKDGVKKLNLYLIINYFKGGKLRFKKIKPEAFEANRFYTVINKKSGEIVPMEVNFNFDDPNLIILPLAFGKRQGREFIWNDLLSLETGSLKLANGRVIEKTLYNRRTRQDEPALFVALTFERREVLDSSNIKPMNLIGVDRGENIPAVIALTDPEGCPLSRFKDSLGNPTHILRIGESYKEKQRTIQAKKEVEQRRAGGYSRKYASKAKNLADDMVRNTARDLLYYAVTQDAMLIFENLSRGFGRQGKRTFMAERQYTRMEDWLTAKLAYEGLPSKTYLSKTLAQYTSKTCSNCGFTITSADYDRVLEKLKKTATGWMTTINGKELKVEGQITYYNRYKRQNVVKDLSVELDRLSEESVNNDISSWTKGRSGEALSLLKKRFSHRPVQEKFVCLNCGFETHADEQAALNIARSWLFLRSQEYKKYQTNKTTGNTDKRAFVETWQSFYRKKLKEVWKPAV

SEQ ID NO: 46163 - protein, 978 aa, synthetic construct
  REGION 1..978: note = engineered CasX variant
QEIKRINKIRRRLVKDSNTKKAGKTGPMKTLLVRVMTPDLRERLENLRKKPENIPQPISNTSRANLNKLLTDYTEMKKAILHVYWEEFQVDPVGLMSRVAQPASKKIDQNKLKPEMDEKGNLTTAGFACSQCGQPLFVYKLEQVSEKGKAYTNYFGRCNVAEHEKLILLAQLKPEKDSDEAVTYSLGKFGQRALDFYSIHVTKESTHPVKPLAQIAGNRYASTPVGKALSDACMGTIASFLSKYQDIIIEHQKVVKGNQKRLESLRELAGKENLEYPSVTLPPQPHTKEGVDAYNEVIARVRMWVNLNLWQKLKLSRDDAKPLLRLKGFPSFPLVERQANEVDWWDMVCNVKKLINEKKEDGKVFWQNLAGYKRQEALRPYLSSEEDRKKGKKFARYQLGDLLLHLEKKHGEDWGKVYDEAWERIDKKVEGLSKHIKLEEERRSEDAQSKAALTDWLRAKASFVIEGKKEADKDEFCRCELKLQKWYGDLRGKPFAIEAENSILDISGFSKQYNCAFIWQKDGVKKLNLYLIINYFKGGKLRFKKIKPEAFEANRFYTVINKKSGEIVPMEVNFNFDDPNLIILPLAFGKRQGREFIWNDLLSLETGSLKLANGRVIEKTLYNRRTRQDEPALFVALTFERREVLDSSNIKPMNLIGVDRGENIPAVIALTDPEGCPLSRFKDSLGNPTHILRIGESYKEKQRTIQAKKEVEQRRAGGYSRKYASKAKNLADDMVRNTARDLLYYAVTQDAMLIFENLSRGFGRQGKRTFMAERQYTRMEDWLTAKLAYEGLPSKTYLSKTLAQYTSKTCSNCGFTITSADYDRVLEKLKKTATGWMTTINGKELKVEGQITYYNRYKRQNVVKDLSVELDRLSEESVNNDISSWTKGRSGEALSLLKKRFSHRPVQEKFVCLNCGFETHADEQAALNIARSWLFLRSQEYKKYQTNKTTGNTDKRAFVETWQSFYRKKLKEVWKPAV

SEQ ID NO: 46164 - protein, 978 aa, synthetic construct
  REGION 1..978: note = engineered CasX variant
QEIKRINKIRRRLVKDSNTKKAGKTGPMKTLLVRVMTPDLRERLENLRKKPENIPQPISNTSRANLNKLLTDYTEMKKAILHVYWEEFQVDPVGLMSRVAQPASKKIDQNKLKPEMDEKGNLTTAGFACSQCGQPLFVYKLEQVSEKGKAYTNYFGRCNVAEHEKLILLAQLKPEKDSDEAVTYSLGKFGQRALDFYSIHVTKESTHPVKPLAQIAGNRYASAPVGKALSDACMGTIASFLSKYQDIIIEHQKVVKGNQKRLESLRELAGKENLEYPSVTLPPQPHTKEGVDAYNEVIARVRMWVNLNLWQKLKLSRDDAKPLLRLKGFPSFPLVERQANEVDWWDMVCNVKKLINEKKEDGKVFWQNLAGYKRQEALRPYLSSEEDRKKGKKFARYQLGDLLLHLEKKHGEDWGKVYDEAWERIDKKVEGLSKHIKLEEERRSEDAQSKAALTDWLRAKASFVIEGKKEADKDEFCRCELKLQKWYGDLRGKPFAIEAENSILDISGFSKQYNCAFIWQKDGVKKLNLYLIINYFKGGKLRFKKIKPEAFEANRFYTVINKKSGEIVPMEVNFNFDDPNLIILPLAFGKRQGREFIWNDLLSLETGSLKLANGRVIEKTLYNRRTRQDEPALFVALTFERREVLDSSNIKPMNLIGVDRGENIPAVIALTDPEGCPLSRFKDSLGNPTHILRIGESYKEKQRTIQAKKEVEQRRAGGYSRKYASKAKNLADDMVRNTARDLLYYAVTQDAMLIFENLSRGFGRQGKRTFMAERQYTRMEDWLTAKLAYEGLPSKTYLSKTLAQYTSKTCSNCGFTITSADYDRVLEKLKKTATGWMTTINGKELKVEGQITYYNRYKRQNVVKDLSVELDRLSEESVNNDISSWTKGRSGEALSLLKKRFSHRPVQEKFVCLNCGFETHADEQAALNIARSWLFLRSQEYKKYQTNKTTGNTDKRAFVETWQSFYRKKLKEVWKPAV

SEQ ID NO: 46165 - protein, 978 aa, synthetic construct
  REGION 1..978: note = engineered CasX variant
QEIKRINKIRRRLVKDSNTKKAGKTGPMKTLLVRVMTPDLRERLENLRKKPENIPQPISNTSRANLNKLLTDYTEMKKAILHVYWEEFQVDPVGLMSRVAQPASKKIDQNKLKPEMDEKGNLTTAGFACSQCGQPLFVYKLEQVSEKGKAYTNYFGRCNVAEHEKLILLAQLKPEKDSDEAVTYSLGKFGQRALDFYSIHVTKESTHPVKPLAQIAGNRYASVPVGKALSDACMGTIASFLSKYQDIIIEHQKVVKGNQKRLESLRELAGKENLEYPSVTLPPQPHTKEGVDAYNEVIARVRMWVNLNLWQKLKLSRDDAKPLLRLKGFPSFPLVERQANEVDWWDMVCNVKKLINEKKEDGKVFWQNLAGYKRQEALRPYLSSEEDRKKGKKFARYQLGDLLLHLEKKHGEDWGKVYDEAWERIDKKVEGLSKHIKLEEERRSEDAQSKAALTDWLRAKASFVIEGKKEADKDEFCRCELKLQKWYGDLRGKPFAIEAENSILDISGFSKQYNCAFIWQKDGVKKLNLYLIINYFKGGKLRFKKIKPEAFEANRFYTVINKKSGEIVPMEVNFNFDDPNLIILPLAFGKRQGREFIWNDLLSLETGSLKLANGRVIEKTLYNRRTRQDEPALFVALTFERREVLDSSNIKPMNLIGVDRGENIPAVIALTDPEGCPLSRFKDSLGNPTHILRIGESYKEKQRTIQAKKEVEQRRAGGYSRKYASKAKNLADDMVRNTARDLLYYAVTQDAMLIFENLSRGFGRQGKRTFMAERQYTRMEDWLTAKLAYEGLPSKTYLSKTLAQYTSKTCSNCGFTITSADYDRVLEKLKKTATGWMTTINGKELKVEGQITYYNRYKRQNVVKDLSVELDRLSEESVNNDISSWTKGRSGEALSLLKKRFSHRPVQEKFVCLNCGFETHADEQAALNIARSWLFLRSQEYKKYQTNKTTGNTDKRAFVETWQSFYRKKLKEVWKPAV

SEQ ID NO: 46166 - protein, 978 aa, synthetic construct
  REGION 1..978: note = engineered CasX variant
QEIKRINKIRRRLVKDSNTKKAGKTGPMKTLLVRVMTPDLRERLENLRKKPENIPQPISNTSRANLNKLLTDYTEMKKAILHVYWEEFQVDPVGLMSRVAQPASKKIDQNKLKPEMDEKGNLTTAGFACSQCGQPLFVYKLEQVSEKGKAYTNYFGRCNVAEHEKLIKLAQLKPEKDSDEAVTYSLGKFGQRALDFYSIHVTKESTHPVKPLAQIAGNRYASGPVGKALSDACMGTIASFLSKYQDIIIEHQKVVKGNQKRLESLRELAGKENLEYPSVTLPPQPHTKEGVDAYNEVIARVRMWVNLNLWQKLKLSRDDAKPLLRLKGFPSFPLVERQANEVDWWDMVCNVKKLINEKKEDGKVFWQNLAGYKRQEALRPYLSSEEDRKKGKKFARYQLGDLLLHLEKKHGEDWGKVYDEAWERIDKKVEGLSKHIKLEEERRSEDAQSKAALTDWLRAKASFVIEGKKEADKDEFCRCELKLQKWYGDLRGKPFAIEAENSILDISGFSKQYNCAFIWQKDGVKKLNLYLIINYFKGGKLRFKKIKPEAFEANRFYTVINKKSGEIVPMEVNFNFDDPNLIILPLAFGKRQGREFIWNDLLSLETGSLKLANGRVIEKTLYNRRTRQDEPALFVALTFERREVLDSSNIKPMNLIGVDRGENIPAVIALTDPEGCPLSRFKDSLGNPTHILRIGESYKEKQRTIQAKKEVEQRRAGGYSRKYASKAKNLADDMVRNTARDLLYYAVTQDAMLIFENLSRGFGRQGKRTFMAERQYTRMEDWLTAKLAYEGLPSKTYLSKTLAQYTSKTCSNCGFTITSADYDRVLEKLKKTATGWMTTINGKELKVEGQITYYNRYKRQNVVKDLSVELDRLSEESVNNDISSWTKGRSGEALSLLKKRFSHRPVQEKFVCLNCGFETHADEQAALNIARSWLFLRSQEYKKYQTNKTTGNTDKRAFVETWQSFYRKKLKEVWKPAV

SEQ ID NO: 46167 - protein, 977 aa, synthetic construct
  REGION 1..977: note = engineered CasX variant
QEIKRINKIRRRLVKDSNTKKAGKTGPMKTLLVRVMTPDLRERLENLRKKPENIPQPISNTSRANLNKLLTDYTEMKKAILHVYWEEFQVDPVGLMSRVAQPASKKIDQNKLKPEMDEKGNLTTAGFACSQCGQPLFVYKLEQVSEKGKAYTNYFGRCNVAEHEKLILLAQLKPEKDSDEAVTYSLGKFGQRALDFYSIHVTKESTHPVKPLAQIAGNRYASPVGKALSDACMGTIASFLSKYQDIIIEHQKVVKGNQKRLESLRELAGKENLEYPSVTLPPQPHTKEGVDAYNEVIARVRMWVNLNLWQKLKLSRDDAKPLLRLKGFPSFPLVERQANEVDWWDMVCNVKKLINEKKEDGKVFWQNLAGYKRQEALRPYLSSEEDRKKGKKFARYQLGDLLLHLEKKHGEDWGKVYDEAWERIDKKVEGLSKHIKLEEERRSEDAQSKAALTDWLRAKASFVIEGKKEADKDEFCRCELKLQKWYGDLRGKPFAIEAENSILDISGFSKQYNCAFIWQKDGVKKLNLYLIINYFKGGKLRFKKIKPEAFEANRFYTVINKKSGEIVPMEVNFNFDDPNLIILPLAFGKRQGREFIWNDLLSLETGSLKLANGRVIEKTLYNRRTRQDEPALFVALTFERREVLDSSNIKPMNLIGVDRGENIPAVIALTDPEGCPLSRFKDSLGNPTHILRIGESYKEKQRTIQAKKEVEQRRAGGYSRKYASKAKNLADDMVRNTARDLLYYAVTQDAMLIFENLSRGFGRQGKRTFMAERQYTRMEDWLTAKLAYEGLPSKTYLSKTLAQYTSKTCSNCGFTITSADYDRVLEKLKKTATGWMTTINGKELKVEGQITYYNRYKRQNVVKDLSVELDRLSEESVNNDISSWTKGRSGEALSLLKKRFSHRPVQEKFVCLNCGFETHADEQAALNIARSWLFLRSQEYKKYQTNKTTGNTDKRAFVETWQSFYRKKLKEVWKPAV

SEQ ID NO: 46168 - protein, 978 aa, synthetic construct
  REGION 1..978: note = engineered CasX variant
QEIKRINKIRRRLVKDSNTKKAGKTGPMKTLLVRVMTPDLRERLENLRKKPENIPQPISNTSRANLNKLLTDYTEMKKAILHVYWEEFQVDPVGLMSRVAQPASKKIDQNKLKPEMDEKGNLTTAGFACSQCGQPLFVYKLEQVSEKGKAYTNYFGRCNVAEHEKLILLAQLKPEKDSDEAVTYSLGKFGQRALDFYSIHVTKESTHPVKPLAQIAGNRYASYPVGKALSDACMGTIASFLSKYQDIIIEHQKVVKGNQKRLESLRELAGKENLEYPSVTLPPQPHTKEGVDAYNEVIARVRMWVNLNLWQKLKLSRDDAKPLLRLKGFPSFPLVERQANEVDWWDMVCNVKKLINEKKEDGKVFWQNLAGYKRQEALRPYLSSEEDRKKGKKFARYQLGDLLLHLEKKHGEDWGKVYDEAWERIDKKVEGLSKHIKLEEERRSEDAQSKAALTDWLRAKASFVIEGSKEADKDEFCRCELKLQKWYGDLRGKPFAIEAENSILDISGFSKQYNCAFIWQKDGVKKLNLYLIINYFKGGKLRFKKIKPEAFEANRFYTVINKKSGEIVPMEVNFNFDDPNLIILPLAFGKRQGREFIWNDLLSLETGSLKLANGRVIEKTLYNRRTRQDEPALFVALTFERREVLDSSNIKPMNLIGVDRGENIPAVIALTDPEGCPLSRFKDSLGNPTHILRIGESYKEKQRTIQAKKEVEQRRAGGYSRKYASKAKNLADDMVRNTARDLLYYAVTQDAMLIFENLSRGFGRQGKRTFMAERQYTRMEDWLTAKLAYEGLPSKTYLSKTLAQYTSKTCSNCGFTITSADYDRVLEKLKKTATGWMTTINGKELKVEGQITYYNRYKRQNVVKDLSVELDRLSEESVNNDISSWTKGRSGEALSLLKKRFSHRPVQEKFVCLNCGFETHADEQAALNIARSWLFLRSQEYKKYQTNKTTGNTDKRAFVETWQSFYRKKLKEVWKPAV

SEQ ID NO: 46169 - protein, 978 aa, synthetic construct
  REGION 1..978: note = engineered CasX variant
QEIKRINKIRRRLVKDSNTKKAGKTGPMKTLLVRVMTPDLRERLENLRKKPENIPQPISNTSRANLNKLLTDYTEMKKAILHVYWEEFQVDPVGLMSRVAQPASKKIDQNKLKPEMDEKGNLTTAGFACSQCGQPLFVYKLEQVSEKGKAYTNYFGRCNVAEHEKLILLAQLKPEKDSDEAVTYSLGKFGQRALDFYSIHVTKESTHPVKPLAQIAGNRYASHPVGKALSDACMGTIASFLSKYQDIIIEHQKVVKGNQKRLESLRELAGKENLEYPSVTLPPQPHTKEGVDAYNEVIARVRMWVNLNLWQKLKLSRDDAKPLLRLKGFPSFPLVERQANEVDWWDMVCNVKKLINEKKEDGKVFWQNLAGYKRQEALRPYLSSEEDRKKGKKFARYQLGDLLLHLEKKHGEDWGKVYDEAWERIDKKVEGLSKHIKLEEERRSEDAQSKAALTDWLRAKASFVIEGSKEADKDEFCRCELKLQKWYGDLRGKPFAIEAENSILDISGFSKQYNCAFIWQKDGVKKLNLYLIINYFKGGKLRFKKIKPEAFEANRFYTVINKKSGEIVPMEVNFNFDDPNLIILPLAFGKRQGREFIWNDLLSLETGSLKLANGRVIEKTLYNRRTRQDEPALFVALTFERREVLDSSNIKPMNLIGVDRGENIPAVIALTDPEGCPLSRFKDSLGNPTHILRIGESYKEKQRTIQAKKEVEQRRAGGYSRKYASKAKNLADDMVRNTARDLLYYAVTQDAMLIFENLSRGFGRQGKRTFMAERQYTRMEDWLTAKLAYEGLPSKTYLSKTLAQYTSKTCSNCGFTITSADYDRVLEKLKKTATGWMTTINGKELKVEGQITYYNRYKRQNVVKDLSVELDRLSEESVNNDISSWTKGRSGEALSLLKKRFSHRPVQEKFVCLNCGFETHADEQAALNIARSWLFLRSQEYKKYQTNKTTGNTDKRAFVETWQSFYRKKLKEVWKPAV

SEQ ID NO: 46170 - protein, 978 aa, synthetic construct
  REGION 1..978: note = engineered CasX variant
QEIKRINKIRRRLVKDSNTKKAGKTGPMKTLLVRVMTPDLRERLENLRKKPENIPQPISNTSRANLNKLLTDYTEMKKAILHVYWEEFQVDPVGLMSRVAQPASKKIDQNKLKPEMDEKGNLTTAGFACSQCGQPLFVYKLEQVSEKGKAYTNYFGRCNVAEHEKLILLAQLKPEKDSDEAVTYSLGKFGQRALDFYSIHVTKESTHPVKPLAQIAGNRYASSPVGKALSDACMGTIASFLSKYQDIIIEHQKVVKGNQKRLESLRELAGKENLEYPSVTLPPQPHTKEGVDAYNEVIARVRMWVNLNLWQKLKLSRDDAKPLLRLKGFPSFPLVERQANEVDWWDMVCNVKKLINEKKEDGKVFWQNLAGYKRQEALRPYLSSEEDRKKGKKFARYQLGDLLLHLEKKHGEDWGKVYDEAWERIDKKVEGLSKHIKLEEERRSEDAQSKAALTDWLRAKASFVIEGSKEADKDEFCRCELKLQKWYGDLRGKPFAIEAENSILDISGFSKQYNCAFIWQKDGVKKLNLYLIINYFKGGKLRFKKIKPEAFEANRFYTVINKKSGEIVPMEVNFNFDDPNLIILPLAFGKRQGREFIWNDLLSLETGSLKLANGRVIEKTLYNRRTRQDEPALFVALTFERREVLDSSNIKPMNLIGVDRGENIPAVIALTDPEGCPLSRFKDSLGNPTHILRIGESYKEKQRTIQAKKEVEQRRAGGYSRKYASKAKNLADDMVRNTARDLLYYAVTQDAMLIFENLSRGFGRQGKRTFMAERQYTRMEDWLTAKLAYEGLPSKTYLSKTLAQYTSKTCSNCGFTITSADYDRVLEKLKKTATGWMTTINGKELKVEGQITYYNRYKRQNVVKDLSVELDRLSEESVNNDISSWTKGRSGEALSLLKKRFSHRPVQEKFVCLNCGFETHADEQAALNIARSWLFLRSQEYKKYQTNKTTGNTDKRAFVETWQSFYRKKLKEVWKPAV

SEQ ID NO: 46171 - protein, 978 aa, synthetic construct
  REGION 1..978: note = engineered CasX variant
QEIKRINKIRRRLVKDSNTKKAGKTGPMKTLLVRVMTPDLRERLENLRKKPENIPQPISNTSRANLNKLLTDYTEMKKAILHVYWEEFQVDPVGLMSRVAQPASKKIDQNKLKPEMDEKGNLTTAGFACSQCGQPLFVYKLEQVSEKGKAYTNYFGRCNVAEHEKLILLAQLKPEKDSDEAVTYSLGKFGQRALDFYSIHVTKESTHPVKPLAQIAGNRYASTPVGKALSDACMGTIASFLSKYQDIIIEHQKVVKGNQKRLESLRELAGKENLEYPSVTLPPQPHTKEGVDAYNEVIARVRMWVNLNLWQKLKLSRDDAKPLLRLKGFPSFPLVERQANEVDWWDMVCNVKKLINEKKEDGKVFWQNLAGYKRQEALRPYLSSEEDRKKGKKFARYQLGDLLLHLEKKHGEDWGKVYDEAWERIDKKVEGLSKHIKLEEERRSEDAQSKAALTDWLRAKASFVIEGSKEADKDEFCRCELKLQKWYGDLRGKPFAIEAENSILDISGFSKQYNCAFIWQKDGVKKLNLYLIINYFKGGKLRFKKIKPEAFEANRFYTVINKKSGEIVPMEVNFNFDDPNLIILPLAFGKRQGREFIWNDLLSLETGSLKLANGRVIEKTLYNRRTRQDEPALFVALTFERREVLDSSNIKPMNLIGVDRGENIPAVIALTDPEGCPLSRFKDSLGNPTHILRIGESYKEKQRTIQAKKEVEQRRAGGYSRKYASKAKNLADDMVRNTARDLLYYAVTQDAMLIFENLSRGFGRQGKRTFMAERQYTRMEDWLTAKLAYEGLPSKTYLSKTLAQYTSKTCSNCGFTITSADYDRVLEKLKKTATGWMTTINGKELKVEGQITYYNRYKRQNVVKDLSVELDRLSEESVNNDISSWTKGRSGEALSLLKKRFSHRPVQEKFVCLNCGFETHADEQAALNIARSWLFLRSQEYKKYQTNKTTGNTDKRAFVETWQSFYRKKLKEVWKPAV

SEQ ID NO: 46172 - protein, 978 aa, synthetic construct
  REGION 1..978: note = engineered CasX variant
QEIKRINKIRRRLVKDSNTKKAGKTGPMKTLLVRVMTPDLRERLENLRKKPENIPQPISNTSRANLNKLLTDYTEMKKAILHVYWEEFQVDPVGLMSRVAQPASKKIDQNKLKPEMDEKGNLTTAGFACSQCGQPLFVYKLEQVSEKGKAYTNYFGRCNVAEHEKLILLAQLKPEKDSDEAVTYSLGKFGQRALDFYSIHVTKESTHPVKPLAQIAGNRYASAPVGKALSDACMGTIASFLSKYQDIIIEHQKVVKGNQKRLESLRELAGKENLEYPSVTLPPQPHTKEGVDAYNEVIARVRMWVNLNLWQKLKLSRDDAKPLLRLKGFPSFPLVERQANEVDWWDMVCNVKKLINEKKEDGKVFWQNLAGYKRQEALRPYLSSEEDRKKGKKFARYQLGDLLLHLEKKHGEDWGKVYDEAWERIDKKVEGLSKHIKLEEERRSEDAQSKAALTDWLRAKASFVIEGSKEADKDEFCRCELKLQKWYGDLRGKPFAIEAENSILDISGFSKQYNCAFIWQKDGVKKLNLYLIINYFKGGKLRFKKIKPEAFEANRFYTVINKKSGEIVPMEVNFNFDDPNLIILPLAFGKRQGREFIWNDLLSLETGSLKLANGRVIEKTLYNRRTRQDEPALFVALTFERREVLDSSNIKPMNLIGVDRGENIPAVIALTDPEGCPLSRFKDSLGNPTHILRIGESYKEKQRTIQAKKEVEQRRAGGYSRKYASKAKNLADDMVRNTARDLLYYAVTQDAMLIFENLSRGFGRQGKRTFMAERQYTRMEDWLTAKLAYEGLPSKTYLSKTLAQYTSKTCSNCGFTITSADYDRVLEKLKKTATGWMTTINGKELKVEGQITYYNRYKRQNVVKDLSVELDRLSEESVNNDISSWTKGRSGEALSLLKKRFSHRPVQEKFVCLNCGFETHADEQAALNIARSWLFLRSQEYKKYQTNKTTGNTDKRAFVETWQSFYRKKLKEVWKPAV

SEQ ID NO: 46173 - protein, 978 aa, synthetic construct
  REGION 1..978: note = engineered CasX variant
QEIKRINKIRRRLVKDSNTKKAGKTGPMKTLLVRVMTPDLRERLENLRKKPENIPQPISNTSRANLNKLLTDYTEMKKAILHVYWEEFQVDPVGLMSRVAQPASKKIDQNKLKPEMDEKGNLTTAGFACSQCGQPLFVYKLEQVSEKGKAYTNYFGRCNVAEHEKLILLAQLKPEKDSDEAVTYSLGKFGQRALDFYSIHVTKESTHPVKPLAQIAGNRYASVPVGKALSDACMGTIASFLSKYQDIIIEHQKVVKGNQKRLESLRELAGKENLEYPSVTLPPQPHTKEGVDAYNEVIARVRMWVNLNLWQKLKLSRDDAKPLLRLKGFPSFPLVERQANEVDWWDMVCNVKKLINEKKEDGKVFWQNLAGYKRQEALRPYLSSEEDRKKGKKFARYQLGDLLLHLEKKHGEDWGKVYDEAWERIDKKVEGLSKHIKLEEERRSEDAQSKAALTDWLRAKASFVIEGSKEADKDEFCRCELKLQKWYGDLRGKPFAIEAENSILDISGFSKQYNCAFIWQKDGVKKLNLYLIINYFKGGKLRFKKIKPEAFEANRFYTVINKKSGEIVPMEVNFNFDDPNLIILPLAFGKRQGREFIWNDLLSLETGSLKLANGRVIEKTLYNRRTRQDEPALFVALTFERREVLDSSNIKPMNLIGVDRGENIPAVIALTDPEGCPLSRFKDSLGNPTHILRIGESYKEKQRTIQAKKEVEQRRAGGYSRKYASKAKNLADDMVRNTARDLLYYAVTQDAMLIFENLSRGFGRQGKRTFMAERQYTRMEDWLTAKLAYEGLPSKTYLSKTLAQYTSKTCSNCGFTITSADYDRVLEKLKKTATGWMTTINGKELKVEGQITYYNRYKRQNVVKDLSVELDRLSEESVNNDISSWTKGRSGEALSLLKKRFSHRPVQEKFVCLNCGFETHADEQAALNIARSWLFLRSQEYKKYQTNKTTGNTDKRAFVETWQSFYRKKLKEVWKPAV

SEQ ID NO: 46174 - protein, 978 aa, synthetic construct
  REGION 1..978: note = engineered CasX variant
QEIKRINKIRRRLVKDSNTKKAGKTGPMKTLLVRVMTPDLRERLENLRKKPENIPQPISNTSRANLNKLLTDYTEMKKAILHVYWEEFQVDPVGLMSRVAQPASKKIDQNKLKPEMDEKGNLTTAGFACSQCGQPLFVYKLEQVSEKGKAYTNYFGRCNVAEHEKLIKLAQLKPEKDSDEAVTYSLGKFGQRALDFYSIHVTKESTHPVKPLAQIAGNRYASGPVGKALSDACMGTIASFLSKYQDIIIEHQKVVKGNQKRLESLRELAGKENLEYPSVTLPPQPHTKEGVDAYNEVIARVRMWVNLNLWQKLKLSRDDAKPLLRLKGFPSFPLVERQANEVDWWDMVCNVKKLINEKKEDGKVFWQNLAGYKRQEALRPYLSSEEDRKKGKKFARYQLGDLLLHLEKKHGEDWGKVYDEAWERIDKKVEGLSKHIKLEEERRSEDAQSKAALTDWLRAKASFVIEGSKEADKDEFCRCELKLQKWYGDLRGKPFAIEAENSILDISGFSKQYNCAFIWQKDGVKKLNLYLIINYFKGGKLRFKKIKPEAFEANRFYTVINKKSGEIVPMEVNFNFDDPNLIILPLAFGKRQGREFIWNDLLSLETGSLKLANGRVIEKTLYNRRTRQDEPALFVALTFERREVLDSSNIKPMNLIGVDRGENIPAVIALTDPEGCPLSRFKDSLGNPTHILRIGESYKEKQRTIQAKKEVEQRRAGGYSRKYASKAKNLADDMVRNTARDLLYYAVTQDAMLIFENLSRGFGRQGKRTFMAERQYTRMEDWLTAKLAYEGLPSKTYLSKTLAQYTSKTCSNCGFTITSADYDRVLEKLKKTATGWMTTINGKELKVEGQITYYNRYKRQNVVKDLSVELDRLSEESVNNDISSWTKGRSGEALSLLKKRFSHRPVQEKFVCLNCGFETHADEQAALNIARSWLFLRSQEYKKYQTNKTTGNTDKRAFVETWQSFYRKKLKEVWKPAV

SEQ ID NO: 46175 - protein, 977 aa, synthetic construct
  REGION 1..977: note = engineered CasX variant
QEIKRINKIRRRLVKDSNTKKAGKTGPMKTLLVRVMTPDLRERLENLRKKPENIPQPISNTSRANLNKLLTDYTEMKKAILHVYWEEFQVDPVGLMSRVAQPASKKIDQNKLKPEMDEKGNLTTAGFACSQCGQPLFVYKLEQVSEKGKAYTNYFGRCNVAEHEKLILLAQLKPEKDSDEAVTYSLGKFGQRALDFYSIHVTKESTHPVKPLAQIAGNRYASPVGKALSDACMGTIASFLSKYQDIIIEHQKVVKGNQKRLESLRELAGKENLEYPSVTLPPQPHTKEGVDAYNEVIARVRMWVNLNLWQKLKLSRDDAKPLLRLKGFPSFPLVERQANEVDWWDMVCNVKKLINEKKEDGKVFWQNLAGYKRQEALRPYLSSEEDRKKGKKFARYQLGDLLLHLEKKHGEDWGKVYDEAWERIDKKVEGLSKHIKLEEERRSEDAQSKAALTDWLRAKASFVIEGSKEADKDEFCRCELKLQKWYGDLRGKPFAIEAENSILDISGFSKQYNCAFIWQKDGVKKLNLYLIINYFKGGKLRFKKIKPEAFEANRFYTVINKKSGEIVPMEVNFNFDDPNLIILPLAFGKRQGREFIWNDLLSLETGSLKLANGRVIEKTLYNRRTRQDEPALFVALTFERREVLDSSNIKPMNLIGVDRGENIPAVIALTDPEGCPLSRFKDSLGNPTHILRIGESYKEKQRTIQAKKEVEQRRAGGYSRKYASKAKNLADDMVRNTARDLLYYAVTQDAMLIFENLSRGFGRQGKRTFMAERQYTRMEDWLTAKLAYEGLPSKTYLSKTLAQYTSKTCSNCGFTITSADYDRVLEKLKKTATGWMTTINGKELKVEGQITYYNRYKRQNVVKDLSVELDRLSEESVNNDISSWTKGRSGEALSLLKKRFSHRPVQEKFVCLNCGFETHADEQAALNIARSWLFLRSQEYKKYQTNKTTGNTDKRAFVETWQSFYRKKLKEVWKPAV

SEQ ID NO: 46176 - protein, 979 aa, synthetic construct
  REGION 1..979: note = engineered CasX variant
QEIKRINKIRRRLVKDSNTKKAGKTGPMKTLLVRVMTPDLRERLENLRKKPENIPQPISNTSRANLNKLLTDYTEMKKAILHVYWEEFQVDPVGLMSRVAQPASKKIDQNKLKPEMDEKGNLTTAGFACSQCGQPLFVYKLEQVSEKGKAYTNYFGRCNVAEHEKLILLAQLKPEKDSDEAVTYSLGKFGQRALDFYSIHVTKESTHPVKPLAQIAGNRYASYPVGKALSDACMGTIASFLSKYQDIIIEHQKVVKGNQKRLESLRELAGKENLEYPSVTLPPQPHTKEGVDAYNEVIARVRMWVNLNLWQKLKLSRDDAKPLLRLKGFPSFPLVERQANEVDWWDMVCNVKKLINEKKEDGKVFWQNLAGYKRQEALRPYLSSEEDRKKGKKFARYQLGDLLLHLEKKHGEDWGKVYDEAWERIDKKVEGLSKHIKLEEERRSEDAQSKAALTDWLRAKASFVIEGLKEADDKDEFCRCELKLQKWYGDLRGKPFAIEAENSILDISGFSKQYNCAFIWQKDGVKKLNLYLIINYFKGGKLRFKKIKPEAFEANRFYTVINKKSGEIVPMEVNFNFDDPNLIILPLAFGKRQGREFIWNDLLSLETGSLKLANGRVIEKTLYNRRTRQDEPALFVALTFERREVLDSSNIKPMNLIGVDRGENIPAVIALTDPEGCPLSRFKDSLGNPTHILRIGESYKEKQRTIQAKKEVEQRRAGGYSRKYASKAKNLADDMVRNTARDLLYYAVTQDAMLIFENLSRGFGRQGKRTFMAERQYTRMEDWLTAKLAYEGLPSKTYLSKTLAQYTSKTCSNCGFTITSADYDRVLEKLKKTATGWMTTINGKELKVEGQITYYNRYKRQNVVKDLSVELDRLSEESVNNDISSWTKGRSGEALSLLKKRFSHRPVQEKFVCLNCGFETHADEQAALNIARSWLFLRSQEYKKYQTNKTTGNTDKRAFVETWQSFYRKKLKEVWKPAV

SEQ ID NO: 46177 - protein, 979 aa, synthetic construct
  REGION 1..979: note = engineered CasX variant
QEIKRINKIRRRLVKDSNTKKAGKTGPMKTLLVRVMTPDLRERLENLRKKPENIPQPISNTSRANLNKLLTDYTEMKKAILHVYWEEFQVDPVGLMSRVAQPASKKIDQNKLKPEMDEKGNLTTAGFACSQCGQPLFVYKLEQVSEKGKAYTNYFGRCNVAEHEKLILLAQLKPEKDSDEAVTYSLGKFGQRALDFYSIHVTKESTHPVKPLAQIAGNRYASHPVGKALSDACMGTIASFLSKYQDIIIEHQKVVKGNQKRLESLRELAGKENLEYPSVTLPPQPHTKEGVDAYNEVIARVRMWVNLNLWQKLKLSRDDAKPLLRLKGFPSFPLVERQANEVDWWDMVCNVKKLINEKKEDGKVFWQNLAGYKRQEALRPYLSSEEDRKKGKKFARYQLGDLLLHLEKKHGEDWGKVYDEAWERIDKKVEGLSKHIKLEEERRSEDAQSKAALTDWLRAKASFVIEGLKEADDKDEFCRCELKLQKWYGDLRGKPFAIEAENSILDISGFSKQYNCAFIWQKDGVKKLNLYLIINYFKGGKLRFKKIKPEAFEANRFYTVINKKSGEIVPMEVNFNFDDPNLIILPLAFGKRQGREFIWNDLLSLETGSLKLANGRVIEKTLYNRRTRQDEPALFVALTFERREVLDSSNIKPMNLIGVDRGENIPAVIALTDPEGCPLSRFKDSLGNPTHILRIGESYKEKQRTIQAKKEVEQRRAGGYSRKYASKAKNLADDMVRNTARDLLYYAVTQDAMLIFENLSRGFGRQGKRTFMAERQYTRMEDWLTAKLAYEGLPSKTYLSKTLAQYTSKTCSNCGFTITSADYDRVLEKLKKTATGWMTTINGKELKVEGQITYYNRYKRQNVVKDLSVELDRLSEESVNNDISSWTKGRSGEALSLLKKRFSHRPVQEKFVCLNCGFETHADEQAALNIARSWLFLRSQEYKKYQTNKTTGNTDKRAFVETWQSFYRKKLKEVWKPAV

SEQ ID NO: 46178 - protein, 979 aa, synthetic construct
  REGION 1..979: note = engineered CasX variant
QEIKRINKIRRRLVKDSNTKKAGKTGPMKTLLVRVMTPDLRERLENLRKKPENIPQPISNTSRANLNKLLTDYTEMKKAILHVYWEEFQVDPVGLMSRVAQPASKKIDQNKLKPEMDEKGNLTTAGFACSQCGQPLFVYKLEQVSEKGKAYTNYFGRCNVAEHEKLILLAQLKPEKDSDEAVTYSLGKFGQRALDFYSIHVTKESTHPVKPLAQIAGNRYASSPVGKALSDACMGTIASFLSKYQDIIIEHQKVVKGNQKRLESLRELAGKENLEYPSVTLPPQPHTKEGVDAYNEVIARVRMWVNLNLWQKLKLSRDDAKPLLRLKGFPSFPLVERQANEVDWWDMVCNVKKLINEKKEDGKVFWQNLAGYKRQEALRPYLSSEEDRKKGKKFARYQLGDLLLHLEKKHGEDWGKVYDEAWERIDKKVEGLSKHIKLEEERRSEDAQSKAALTDWLRAKASFVIEGLKEADDKDEFCRCELKLQKWYGDLRGKPFAIEAENSILDISGFSKQYNCAFIWQKDGVKKLNLYLIINYFKGGKLRFKKIKPEAFEANRFYTVINKKSGEIVPMEVNFNFDDPNLIILPLAFGKRQGREFIWNDLLSLETGSLKLANGRVIEKTLYNRRTRQDEPALFVALTFERREVLDSSNIKPMNLIGVDRGENIPAVIALTDPEGCPLSRFKDSLGNPTHILRIGESYKEKQRTIQAKKEVEQRRAGGYSRKYASKAKNLADDMVRNTARDLLYYAVTQDAMLIFENLSRGFGRQGKRTFMAERQYTRMEDWLTAKLAYEGLPSKTYLSKTLAQYTSKTCSNCGFTITSADYDRVLEKLKKTATGWMTTINGKELKVEGQITYYNRYKRQNVVKDLSVELDRLSEESVNNDISSWTKGRSGEALSLLKKRFSHRPVQEKFVCLNCGFETHADEQAALNIARSWLFLRSQEYKKYQTNKTTGNTDKRAFVETWQSFYRKKLKEVWKPAV

SEQ ID NO: 46179 - protein, 979 aa, synthetic construct
  REGION 1..979: note = engineered CasX variant
QEIKRINKIRRRLVKDSNTKKAGKTGPMKTLLVRVMTPDLRERLENLRKKPENIPQPISNTSRANLNKLLTDYTEMKKAILHVYWEEFQVDPVGLMSRVAQPASKKIDQNKLKPEMDEKGNLTTAGFACSQCGQPLFVYKLEQVSEKGKAYTNYFGRCNVAEHEKLILLAQLKPEKDSDEAVTYSLGKFGQRALDFYSIHVTKESTHPVKPLAQIAGNRYASTPVGKALSDACMGTIASFLSKYQDIIIEHQKVVKGNQKRLESLRELAGKENLEYPSVTLPPQPHTKEGVDAYNEVIARVRMWVNLNLWQKLKLSRDDAKPLLRLKGFPSFPLVERQANEVDWWDMVCNVKKLINEKKEDGKVFWQNLAGYKRQEALRPYLSSEEDRKKGKKFARYQLGDLLLHLEKKHGEDWGKVYDEAWERIDKKVEGLSKHIKLEEERRSEDAQSKAALTDWLRAKASFVIEGLKEADDKDEFCRCELKLQKWYGDLRGKPFAIEAENSILDISGFSKQYNCAFIWQKDGVKKLNLYLIINYFKGGKLRFKKIKPEAFEANRFYTVINKKSGEIVPMEVNFNFDDPNLIILPLAFGKRQGREFIWNDLLSLETGSLKLANGRVIEKTLYNRRTRQDEPALFVALTFERREVLDSSNIKPMNLIGVDRGENIPAVIALTDPEGCPLSRFKDSLGNPTHILRIGESYKEKQRTIQAKKEVEQRRAGGYSRKYASKAKNLADDMVRNTARDLLYYAVTQDAMLIFENLSRGFGRQGKRTFMAERQYTRMEDWLTAKLAYEGLPSKTYLSKTLAQYTSKTCSNCGFTITSADYDRVLEKLKKTATGWMTTINGKELKVEGQITYYNRYKRQNVVKDLSVELDRLSEESVNNDISSWTKGRSGEALSLLKKRFSHRPVQEKFVCLNCGFETHADEQAALNIARSWLFLRSQEYKKYQTNKTTGNTDKRAFVETWQSFYRKKLKEVWKPAV

SEQ ID NO: 46180 - protein, 979 aa, synthetic construct
  REGION 1..979: note = engineered CasX variant
QEIKRINKIRRRLVKDSNTKKAGKTGPMKTLLVRVMTPDLRERLENLRKKPENIPQPISNTSRANLNKLLTDYTEMKKAILHVYWEEFQVDPVGLMSRVAQPASKKIDQNKLKPEMDEKGNLTTAGFACSQCGQPLFVYKLEQVSEKGKAYTNYFGRCNVAEHEKLILLAQLKPEKDSDEAVTYSLGKFGQRALDFYSIHVTKESTHPVKPLAQIAGNRYASAPVGKALSDACMGTIASFLSKYQDIIIEHQKVVKGNQKRLESLRELAGKENLEYPSVTLPPQPHTKEGVDAYNEVIARVRMWVNLNLWQKLKLSRDDAKPLLRLKGFPSFPLVERQANEVDWWDMVCNVKKLINEKKEDGKVFWQNLAGYKRQEALRPYLSSEEDRKKGKKFARYQLGDLLLHLEKKHGEDWGKVYDEAWERIDKKVEGLSKHIKLEEERRSEDAQSKAALTDWLRAKASFVIEGLKEADDKDEFCRCELKLQKWYGDLRGKPFAIEAENSILDISGFSKQYNCAFIWQKDGVKKLNLYLIINYFKGGKLRFKKIKPEAFEANRFYTVINKKSGEIVPMEVNFNFDDPNLIILPLAFGKRQGREFIWNDLLSLETGSLKLANGRVIEKTLYNRRTRQDEPALFVALTFERREVLDSSNIKPMNLIGVDRGENIPAVIALTDPEGCPLSRFKDSLGNPTHILRIGESYKEKQRTIQAKKEVEQRRAGGYSRKYASKAKNLADDMVRNTARDLLYYAVTQDAMLIFENLSRGFGRQGKRTFMAERQYTRMEDWLTAKLAYEGLPSKTYLSKTLAQYTSKTCSNCGFTITSADYDRVLEKLKKTATGWMTTINGKELKVEGQITYYNRYKRQNVVKDLSVELDRLSEESVNNDISSWTKGRSGEALSLLKKRFSHRPVQEKFVCLNCGFETHADEQAALNIARSWLFLRSQEYKKYQTNKTTGNTDKRAFVETWQSFYRKKLKEVWKPAV

SEQ ID NO: 46181 - protein, 979 aa, synthetic construct
  REGION 1..979: note = engineered CasX variant
QEIKRINKIRRRLVKDSNTKKAGKTGPMKTLLVRVMTPDLRERLENLRKKPENIPQPISNTSRANLNKLLTDYTEMKKAILHVYWEEFQVDPVGLMSRVAQPASKKIDQNKLKPEMDEKGNLTTAGFACSQCGQPLFVYKLEQVSEKGKAYTNYFGRCNVAEHEKLILLAQLKPEKDSDEAVTYSLGKFGQRALDFYSIHVTKESTHPVKPLAQIAGNRYASVPVGKALSDACMGTIASFLSKYQDIIIEHQKVVKGNQKRLESLRELAGKENLEYPSVTLPPQPHTKEGVDAYNEVIARVRMWVNLNLWQKLKLSRDDAKPLLRLKGFPSFPLVERQANEVDWWDMVCNVKKLINEKKEDGKVFWQNLAGYKRQEALRPYLSSEEDRKKGKKFARYQLGDLLLHLEKKHGEDWGKVYDEAWERIDKKVEGLSKHIKLEEERRSEDAQSKAALTDWLRAKASFVIEGLKEADDKDEFCRCELKLQKWYGDLRGKPFAIEAENSILDISGFSKQYNCAFIWQKDGVKKLNLYLIINYFKGGKLRFKKIKPEAFEANRFYTVINKKSGEIVPMEVNFNFDDPNLIILPLAFGKRQGREFIWNDLLSLETGSLKLANGRVIEKTLYNRRTRQDEPALFVALTFERREVLDSSNIKPMNLIGVDRGENIPAVIALTDPEGCPLSRFKDSLGNPTHILRIGESYKEKQRTIQAKKEVEQRRAGGYSRKYASKAKNLADDMVRNTARDLLYYAVTQDAMLIFENLSRGFGRQGKRTFMAERQYTRMEDWLTAKLAYEGLPSKTYLSKTLAQYTSKTCSNCGFTITSADYDRVLEKLKKTATGWMTTINGKELKVEGQITYYNRYKRQNVVKDLSVELDRLSEESVNNDISSWTKGRSGEALSLLKKRFSHRPVQEKFVCLNCGFETHADEQAALNIARSWLFLRSQEYKKYQTNKTTGNTDKRAFVETWQSFYRKKLKEVWKPAV

SEQ ID NO: 46182 - protein, 979 aa, synthetic construct
  REGION 1..979: note = engineered CasX variant
QEIKRINKIRRRLVKDSNTKKAGKTGPMKTLLVRVMTPDLRERLENLRKKPENIPQPISNTSRANLNKLLTDYTEMKKAILHVYWEEFQVDPVGLMSRVAQPASKKIDQNKLKPEMDEKGNLTTAGFACSQCGQPLFVYKLEQVSEKGKAYTNYFGRCNVAEHEKLIKLAQLKPEKDSDEAVTYSLGKFGQRALDFYSIHVTKESTHPVKPLAQIAGNRYASGPVGKALSDACMGTIASFLSKYQDIIIEHQKVVKGNQKRLESLRELAGKENLEYPSVTLPPQPHTKEGVDAYNEVIARVRMWVNLNLWQKLKLSRDDAKPLLRLKGFPSFPLVERQANEVDWWDMVCNVKKLINEKKEDGKVFWQNLAGYKRQEALRPYLSSEEDRKKGKKFARYQLGDLLLHLEKKHGEDWGKVYDEAWERIDKKVEGLSKHIKLEEERRSEDAQSKAALTDWLRAKASFVIEGLKEADDKDEFCRCELKLQKWYGDLRGKPFAIEAENSILDISGFSKQYNCAFIWQKDGVKKLNLYLIINYFKGGKLRFKKIKPEAFEANRFYTVINKKSGEIVPMEVNFNFDDPNLIILPLAFGKRQGREFIWNDLLSLETGSLKLANGRVIEKTLYNRRTRQDEPALFVALTFERREVLDSSNIKPMNLIGVDRGENIPAVIALTDPEGCPLSRFKDSLGNPTHILRIGESYKEKQRTIQAKKEVEQRRAGGYSRKYASKAKNLADDMVRNTARDLLYYAVTQDAMLIFENLSRGFGRQGKRTFMAERQYTRMEDWLTAKLAYEGLPSKTYLSKTLAQYTSKTCSNCGFTITSADYDRVLEKLKKTATGWMTTINGKELKVEGQITYYNRYKRQNVVKDLSVELDRLSEESVNNDISSWTKGRSGEALSLLKKRFSHRPVQEKFVCLNCGFETHADEQAALNIARSWLFLRSQEYKKYQTNKTTGNTDKRAFVETWQSFYRKKLKEVWKPAV

SEQ ID NO: 46183 - protein, 978 aa, synthetic construct
  REGION 1..978: note = engineered CasX variant
QEIKRINKIRRRLVKDSNTKKAGKTGPMKTLLVRVMTPDLRERLENLRKKPENIPQPISNTSRANLNKLLTDYTEMKKAILHVYWEEFQVDPVGLMSRVAQPASKKIDQNKLKPEMDEKGNLTTAGFACSQCGQPLFVYKLEQVSEKGKAYTNYFGRCNVAEHEKLILLAQLKPEKDSDEAVTYSLGKFGQRALDFYSIHVTKESTHPVKPLAQIAGNRYASPVGKALSDACMGTIASFLSKYQDIIIEHQKVVKGNQKRLESLRELAGKENLEYPSVTLPPQPHTKEGVDAYNEVIARVRMWVNLNLWQKLKLSRDDAKPLLRLKGFPSFPLVERQANEVDWWDMVCNVKKLINEKKEDGKVFWQNLAGYKRQEALRPYLSSEEDRKKGKKFARYQLGDLLLHLEKKHGEDWGKVYDEAWERIDKKVEGLSKHIKLEEERRSEDAQSKAALTDWLRAKASFVIEGLKEADDKDEFCRCELKLQKWYGDLRGKPFAIEAENSILDISGFSKQYNCAFIWQKDGVKKLNLYLIINYFKGGKLRFKKIKPEAFEANRFYTVINKKSGEIVPMEVNFNFDDPNLIILPLAFGKRQGREFIWNDLLSLETGSLKLANGRVIEKTLYNRRTRQDEPALFVALTFERREVLDSSNIKPMNLIGVDRGENIPAVIALTDPEGCPLSRFKDSLGNPTHILRIGESYKEKQRTIQAKKEVEQRRAGGYSRKYASKAKNLADDMVRNTARDLLYYAVTQDAMLIFENLSRGFGRQGKRTFMAERQYTRMEDWLTAKLAYEGLPSKTYLSKTLAQYTSKTCSNCGFTITSADYDRVLEKLKKTATGWMTTINGKELKVEGQITYYNRYKRQNVVKDLSVELDRLSEESVNNDISSWTKGRSGEALSLLKKRFSHRPVQEKFVCLNCGFETHADEQAALNIARSWLFLRSQEYKKYQTNKTTGNTDKRAFVETWQSFYRKKLKEVWKPAV

SEQ ID NO: 46184 - protein, 979 aa, synthetic construct
  REGION 1..979: note = engineered CasX variant
QEIKRINKIRRRLVKDSNTKKAGKTGPMKTLLVRVMTPDLRERLENLRKKPENIPQPISNTSRANLNKLLTDYTEMKKAILHVYWEEFQVDPVGLMSRVAQPASKKIDQNKLKPEMDEKGNLTTAGFACSQCGQPLFVYKLEQVSEKGKAYTNYFGRCNVAEHEKLILLAQLKPEKDSDEAVTYSLGKFGQRALDFYSIHVTKESTHPVKPLAQIAGNRYASYPVGKALSDACMGTIASFLSKYQDIIIEHQKVVKGNQKRLESLRELAGKENLEYPSVTLPPQPHTKEGVDAYNEVIARVRMWVNLNLWQKLKLSRDDAKPLLRLKGFPSFPLVERQANEVDWWDMVCNVKKLINEKKEDGKVFWQNLAGYKRQEALRPYLSSEEDRKKGKKFARYQLGDLLLHLEKKHGEDWGKVYDEAWERIDKKVEGLSKHIKLEEERRSEDAQSKAALTDWLRAKASFVIEGLKEADKDEFCRCELKLQKWYGDLRGKPFAIEAENSILDISGFSKQYNCAFIWQKDGVKKLNLYLIINYFKGGKLRFKKIKPEAFEANRFYTVINKKSGEIVPMEVNFNFDDPNLIILPLAFGKRQGREFIWNDLLSLETGSLKLANGRVIEKTLYNRRTRQDEPALFVALTFERREVLDSSNIKPMNLIGVDRGENIPAVIALTDPEGCPLSRFKDSLGNPTHILRIGESYKEKQRTIQAKKEVEQRRAGGYSRKYASKAKNLADDMVRNTARDLLYYAVTQDAMLIFENLSRGFGRQGKRTFMAERQYTRMEDWLTAKLAYEGLPSKTYLSKTLAQYTSKTCSNCGFTITSADYDRVLEKLKKTATGWMTTINGKELKVEGQITYYNRYKRQNVVKDLSVELDRLSEESVNNDISSWTKGRSGNEALSLLKKRFSHRPVQEKFVCLNCGFETHADEQAALNIARSWLFLRSQEYKKYQTNKTTGNTDKRAFVETWQSFYRKKLKEVWKPAV

SEQ ID NO: 46185 - protein, 979 aa, synthetic construct
  REGION 1..979: note = engineered CasX variant
QEIKRINKIRRRLVKDSNTKKAGKTGPMKTLLVRVMTPDLRERLENLRKKPENIPQPISNTSRANLNKLLTDYTEMKKAILHVYWEEFQVDPVGLMSRVAQPASKKIDQNKLKPEMDEKGNLTTAGFACSQCGQPLFVYKLEQVSEKGKAYTNYFGRCNVAEHEKLILLAQLKPEKDSDEAVTYSLGKFGQRALDFYSIHVTKESTHPVKPLAQIAGNRYASHPVGKALSDACMGTIASFLSKYQDIIIEHQKVVKGNQKRLESLRELAGKENLEYPSVTLPPQPHTKEGVDAYNEVIARVRMWVNLNLWQKLKLSRDDAKPLLRLKGFPSFPLVERQANEVDWWDMVCNVKKLINEKKEDGKVFWQNLAGYKRQEALRPYLSSEEDRKKGKKFARYQLGDLLLHLEKKHGEDWGKVYDEAWERIDKKVEGLSKHIKLEEERRSEDAQSKAALTDWLRAKASFVIEGLKEADKDEFCRCELKLQKWYGDLRGKPFAIEAENSILDISGFSKQYNCAFIWQKDGVKKLNLYLIINYFKGGKLRFKKIKPEAFEANRFYTVINKKSGEIVPMEVNFNFDDPNLIILPLAFGKRQGREFIWNDLLSLETGSLKLANGRVIEKTLYNRRTRQDEPALFVALTFERREVLDSSNIKPMNLIGVDRGENIPAVIALTDPEGCPLSRFKDSLGNPTHILRIGESYKEKQRTIQAKKEVEQRRAGGYSRKYASKAKNLADDMVRNTARDLLYYAVTQDAMLIFENLSRGFGRQGKRTFMAERQYTRMEDWLTAKLAYEGLPSKTYLSKTLAQYTSKTCSNCGFTITSADYDRVLEKLKKTATGWMTTINGKELKVEGQITYYNRYKRQNVVKDLSVELDRLSEESVNNDISSWTKGRSGNEALSLLKKRFSHRPVQEKFVCLNCGFETHADEQAALNIARSWLFLRSQEYKKYQTNKTTGNTDKRAFVETWQSFYRKKLKEVWKPAV

SEQ ID NO: 46186 - protein, 979 aa, synthetic construct
  REGION 1..979: note = engineered CasX variant
QEIKRINKIRRRLVKDSNTKKAGKTGPMKTLLVRVMTPDLRERLENLRKKPENIPQPISNTSRANLNKLLTDYTEMKKAILHVYWEEFQVDPVGLMSRVAQPASKKIDQNKLKPEMDEKGNLTTAGFACSQCGQPLFVYKLEQVSEKGKAYTNYFGRCNVAEHEKLILLAQLKPEKDSDEAVTYSLGKFGQRALDFYSIHVTKESTHPVKPLAQIAGNRYASSPVGKALSDACMGTIASFLSKYQDIIIEHQKVVKGNQKRLESLRELAGKENLEYPSVTLPPQPHTKEGVDAYNEVIARVRMWVNLNLWQKLKLSRDDAKPLLRLKGFPSFPLVERQANEVDWWDMVCNVKKLINEKKEDGKVFWQNLAGYKRQEALRPYLSSEEDRKKGKKFARYQLGDLLLHLEKKHGEDWGKVYDEAWERIDKKVEGLSKHIKLEEERRSEDAQSKAALTDWLRAKASFVIEGLKEADKDEFCRCELKLQKWYGDLRGKPFAIEAENSILDISGFSKQYNCAFIWQKDGVKKLNLYLIINYFKGGKLRFKKIKPEAFEANRFYTVINKKSGEIVPMEVNFNFDDPNLIILPLAFGKRQGREFIWNDLLSLETGSLKLANGRVIEKTLYNRRTRQDEPALFVALTFERREVLDSSNIKPMNLIGVDRGENIPAVIALTDPEGCPLSRFKDSLGNPTHILRIGESYKEKQRTIQAKKEVEQRRAGGYSRKYASKAKNLADDMVRNTARDLLYYAVTQDAMLIFENLSRGFGRQGKRTFMAERQYTRMEDWLTAKLAYEGLPSKTYLSKTLAQYTSKTCSNCGFTITSADYDRVLEKLKKTATGWMTTINGKELKVEGQITYYNRYKRQNVVKDLSVELDRLSEESVNNDISSWTKGRSGNEALSLLKKRFSHRPVQEKFVCLNCGFETHADEQAALNIARSWLFLRSQEYKKYQTNKTTGNTDKRAFVETWQSFYRKKLKEVWKPAV

SEQ ID NO: 46187 - protein, 979 aa, synthetic construct
  REGION 1..979: note = engineered CasX variant
QEIKRINKIRRRLVKDSNTKKAGKTGPMKTLLVRVMTPDLRERLENLRKKPENIPQPISNTSRANLNKLLTDYTEMKKAILHVYWEEFQVDPVGLMSRVAQPASKKIDQNKLKPEMDEKGNLTTAGFACSQCGQPLFVYKLEQVSEKGKAYTNYFGRCNVAEHEKLILLAQLKPEKDSDEAVTYSLGKFGQRALDFYSIHVTKESTHPVKPLAQIAGNRYASTPVGKALSDACMGTIASFLSKYQDIIIEHQKVVKGNQKRLESLRELAGKENLEYPSVTLPPQPHTKEGVDAYNEVIARVRMWVNLNLWQKLKLSRDDAKPLLRLKGFPSFPLVERQANEVDWWDMVCNVKKLINEKKEDGKVFWQNLAGYKRQEALRPYLSSEEDRKKGKKFARYQLGDLLLHLEKKHGEDWGKVYDEAWERIDKKVEGLSKHIKLEEERRSEDAQSKAALTDWLRAKASFVIEGLKEADKDEFCRCELKLQKWYGDLRGKPFAIEAENSILDISGFSKQYNCAFIWQKDGVKKLNLYLIINYFKGGKLRFKKIKPEAFEANRFYTVINKKSGEIVPMEVNFNFDDPNLIILPLAFGKRQGREFIWNDLLSLETGSLKLANGRVIEKTLYNRRTRQDEPALFVALTFERREVLDSSNIKPMNLIGVDRGENIPAVIALTDPEGCPLSRFKDSLGNPTHILRIGESYKEKQRTIQAKKEVEQRRAGGYSRKYASKAKNLADDMVRNTARDLLYYAVTQDAMLIFENLSRGFGRQGKRTFMAERQYTRMEDWLTAKLAYEGLPSKTYLSKTLAQYTSKTCSNCGFTITSADYDRVLEKLKKTATGWMTTINGKELKVEGQITYYNRYKRQNVVKDLSVELDRLSEESVNNDISSWTKGRSGNEALSLLKKRFSHRPVQEKFVCLNCGFETHADEQAALNIARSWLFLRSQEYKKYQTNKTTGNTDKRAFVETWQSFYRKKLKEVWKPAV

SEQ ID NO: 46188 - protein, 979 aa, synthetic construct
  REGION 1..979: note = engineered CasX variant
QEIKRINKIRRRLVKDSNTKKAGKTGPMKTLLVRVMTPDLRERLENLRKKPENIPQPISNTSRANLNKLLTDYTEMKKAILHVYWEEFQVDPVGLMSRVAQPASKKIDQNKLKPEMDEKGNLTTAGFACSQCGQPLFVYKLEQVSEKGKAYTNYFGRCNVAEHEKLILLAQLKPEKDSDEAVTYSLGKFGQRALDFYSIHVTKESTHPVKPLAQIAGNRYASAPVGKALSDACMGTIASFLSKYQDIIIEHQKVVKGNQKRLESLRELAGKENLEYPSVTLPPQPHTKEGVDAYNEVIARVRMWVNLNLWQKLKLSRDDAKPLLRLKGFPSFPLVERQANEVDWWDMVCNVKKLINEKKEDGKVFWQNLAGYKRQEALRPYLSSEEDRKKGKKFARYQLGDLLLHLEKKHGEDWGKVYDEAWERIDKKVEGLSKHIKLEEERRSEDAQSKAALTDWLRAKASFVIEGLKEADKDEFCRCELKLQKWYGDLRGKPFAIEAENSILDISGFSKQYNCAFIWQKDGVKKLNLYLIINYFKGGKLRFKKIKPEAFEANRFYTVINKKSGEIVPMEVNFNFDDPNLIILPLAFGKRQGREFIWNDLLSLETGSLKLANGRVIEKTLYNRRTRQDEPALFVALTFERREVLDSSNIKPMNLIGVDRGENIPAVIALTDPEGCPLSRFKDSLGNPTHILRIGESYKEKQRTIQAKKEVEQRRAGGYSRKYASKAKNLADDMVRNTARDLLYYAVTQDAMLIFENLSRGFGRQGKRTFMAERQYTRMEDWLTAKLAYEGLPSKTYLSKTLAQYTSKTCSNCGFTITSADYDRVLEKLKKTATGWMTTINGKELKVEGQITYYNRYKRQNVVKDLSVELDRLSEESVNNDISSWTKGRSGNEALSLLKKRFSHRPVQEKFVCLNCGFETHADEQAALNIARSWLFLRSQEYKKYQTNKTTGNTDKRAFVETWQSFYRKKLKEVWKPAV

SEQ ID NO: 46189 - protein, 979 aa, synthetic construct
  REGION 1..979: note = engineered CasX variant
QEIKRINKIRRRLVKDSNTKKAGKTGPMKTLLVRVMTPDLRERLENLRKKPENIPQPISNTSRANLNKLLTDYTEMKKAILHVYWEEFQVDPVGLMSRVAQPASKKIDQNKLKPEMDEKGNLTTAGFACSQCGQPLFVYKLEQVSEKGKAYTNYFGRCNVAEHEKLILLAQLKPEKDSDEAVTYSLGKFGQRALDFYSIHVTKESTHPVKPLAQIAGNRYASVPVGKALSDACMGTIASFLSKYQDIIIEHQKVVKGNQKRLESLRELAGKENLEYPSVTLPPQPHTKEGVDAYNEVIARVRMWVNLNLWQKLKLSRDDAKPLLRLKGFPSFPLVERQANEVDWWDMVCNVKKLINEKKEDGKVFWQNLAGYKRQEALRPYLSSEEDRKKGKKFARYQLGDLLLHLEKKHGEDWGKVYDEAWERIDKKVEGLSKHIKLEEERRSEDAQSKAALTDWLRAKASFVIEGLKEADKDEFCRCELKLQKWYGDLRGKPFAIEAENSILDISGFSKQYNCAFIWQKDGVKKLNLYLIINYFKGGKLRFKKIKPEAFEANRFYTVINKKSGEIVPMEVNFNFDDPNLIILPLAFGKRQGREFIWNDLLSLETGSLKLANGRVIEKTLYNRRTRQDEPALFVALTFERREVLDSSNIKPMNLIGVDRGENIPAVIALTDPEGCPLSRFKDSLGNPTHILRIGESYKEKQRTIQAKKEVEQRRAGGYSRKYASKAKNLADDMVRNTARDLLYYAVTQDAMLIFENLSRGFGRQGKRTFMAERQYTRMEDWLTAKLAYEGLPSKTYLSKTLAQYTSKTCSNCGFTITSADYDRVLEKLKKTATGWMTTINGKELKVEGQITYYNRYKRQNVVKDLSVELDRLSEESVNNDISSWTKGRSGNEALSLLKKRFSHRPVQEKFVCLNCGFETHADEQAALNIARSWLFLRSQEYKKYQTNKTTGNTDKRAFVETWQSFYRKKLKEVWKPAV

SEQ ID NO: 46190 - protein, 979 aa, synthetic construct
  REGION 1..979: note = engineered CasX variant
QEIKRINKIRRRLVKDSNTKKAGKTGPMKTLLVRVMTPDLRERLENLRKKPENIPQPISNTSRANLNKLLTDYTEMKKAILHVYWEEFQVDPVGLMSRVAQPASKKIDQNKLKPEMDEKGNLTTAGFACSQCGQPLFVYKLEQVSEKGKAYTNYFGRCNVAEHEKLIKLAQLKPEKDSDEAVTYSLGKFGQRALDFYSIHVTKESTHPVKPLAQIAGNRYASGPVGKALSDACMGTIASFLSKYQDIIIEHQKVVKGNQKRLESLRELAGKENLEYPSVTLPPQPHTKEGVDAYNEVIARVRMWVNLNLWQKLKLSRDDAKPLLRLKGFPSFPLVERQANEVDWWDMVCNVKKLINEKKEDGKVFWQNLAGYKRQEALRPYLSSEEDRKKGKKFARYQLGDLLLHLEKKHGEDWGKVYDEAWERIDKKVEGLSKHIKLEEERRSEDAQSKAALTDWLRAKASFVIEGLKEADKDEFCRCELKLQKWYGDLRGKPFAIEAENSILDISGFSKQYNCAFIWQKDGVKKLNLYLIINYFKGGKLRFKKIKPEAFEANRFYTVINKKSGEIVPMEVNFNFDDPNLIILPLAFGKRQGREFIWNDLLSLETGSLKLANGRVIEKTLYNRRTRQDEPALFVALTFERREVLDSSNIKPMNLIGVDRGENIPAVIALTDPEGCPLSRFKDSLGNPTHILRIGESYKEKQRTIQAKKEVEQRRAGGYSRKYASKAKNLADDMVRNTARDLLYYAVTQDAMLIFENLSRGFGRQGKRTFMAERQYTRMEDWLTAKLAYEGLPSKTYLSKTLAQYTSKTCSNCGFTITSADYDRVLEKLKKTATGWMTTINGKELKVEGQITYYNRYKRQNVVKDLSVELDRLSEESVNNDISSWTKGRSGNEALSLLKKRFSHRPVQEKFVCLNCGFETHADEQAALNIARSWLFLRSQEYKKYQTNKTTGNTDKRAFVETWQSFYRKKLKEVWKPAV

SEQ ID NO: 46191 - protein, 978 aa, synthetic construct
  REGION 1..978: note = engineered CasX variant
QEIKRINKIRRRLVKDSNTKKAGKTGPMKTLLVRVMTPDLRERLENLRKKPENIPQPISNTSRANLNKLLTDYTEMKKAILHVYWEEFQVDPVGLMSRVAQPASKKIDQNKLKPEMDEKGNLTTAGFACSQCGQPLFVYKLEQVSEKGKAYTNYFGRCNVAEHEKLILLAQLKPEKDSDEAVTYSLGKFGQRALDFYSIHVTKESTHPVKPLAQIAGNRYASPVGKALSDACMGTIASFLSKYQDIIIEHQKVVKGNQKRLESLRELAGKENLEYPSVTLPPQPHTKEGVDAYNEVIARVRMWVNLNLWQKLKLSRDDAKPLLRLKGFPSFPLVERQANEVDWWDMVCNVKKLINEKKEDGKVFWQNLAGYKRQEALRPYLSSEEDRKKGKKFARYQLGDLLLHLEKKHGEDWGKVYDEAWERIDKKVEGLSKHIKLEEERRSEDAQSKAALTDWLRAKASFVIEGLKEADKDEFCRCELKLQKWYGDLRGKPFAIEAENSILDISGFSKQYNCAFIWQKDGVKKLNLYLIINYFKGGKLRFKKIKPEAFEANRFYTVINKKSGEIVPMEVNFNFDDPNLIILPLAFGKRQGREFIWNDLLSLETGSLKLANGRVIEKTLYNRRTRQDEPALFVALTFERREVLDSSNIKPMNLIGVDRGENIPAVIALTDPEGCPLSRFKDSLGNPTHILRIGESYKEKQRTIQAKKEVEQRRAGGYSRKYASKAKNLADDMVRNTARDLLYYAVTQDAMLIFENLSRGFGRQGKRTFMAERQYTRMEDWLTAKLAYEGLPSKTYLSKTLAQYTSKTCSNCGFTITSADYDRVLEKLKKTATGWMTTINGKELKVEGQITYYNRYKRQNVVKDLSVELDRLSEESVNNDISSWTKGRSGNEALSLLKKRFSHRPVQEKFVCLNCGFETHADEQAALNIARSWLFLRSQEYKKYQTNKTTGNTDKRAFVETWQSFYRKKLKEVWKPAV

SEQ ID NO: 46192 - protein, 978 aa, synthetic construct
  REGION 1..978: note = engineered CasX variant
QEIKRINKIRRRLVKDSNTKKAGKTGPMKTLLVRVMTPDLRERLENLRKKPENIPQPISNTSRANLNKLLTDYTEMKKAILHVYWEEFQVDPVGLMSRVAQPASKKIDQNKLKPEMDEKGNLTTAGFACSQCGQPLFVYKLEQVSEKGKAYTNYFGRCNVAEHEKLILLAQLKPEKDSDEAVTYSLGKFGQRALDFYSIHVTKESTHPVKPLAQIAGNRYASYPVGKALSDACMGTIASFLSKYQDIIIEHQKVVKGNQKRLESLRELAGKENLEYPSVTLPPQPHTKEGVDAYNEVIARVRMWVNLNLWQKLKLSRDDAKPLLRLKGFPSFPLVERQANEVDWWDMVCNVKKLINEKKEDGKVFWQNLAGYKRQEALRPYLSSEEDRQKGKKFARYQLGDLLLHLEKKHGEDWGKVYDEAWERIDKKVEGLSKHIKLEEERRSEDAQSKAALTDWLRAKASFVIEGLKEADKDEFCRCELKLQKWYGDLRGKPFAIEAENSILDISGFSKQYNCAFIWQKDGVKKLNLYLIINYFKGGKLRFKKIKPEAFEANRFYTVINKKSGEIVPMEVNFNFDDPNLIILPLAFGKRQGREFIWNDLLSLETGSLKLANGRVIEKTLYNRRTRQDEPALFVALTFERREVLDSSNIKPMNLIGVDRGENIPAVIALTDPEGCPLSRFKDSLGNPTHILRIGESYKEKQRTIQAKKEVEQRRAGGYSRKYASKAKNLADDMVRNTARDLLYYAVTQDAMLIFENLSRGFGRQGKRTFMAERQYTRMEDWLTAKLAYEGLPSKTYLSKTLAQYTSKTCSNCGFTITSADYDRVLEKLKKTATGWMTTINGKELKVEGQITYYNRYKRQNVVKDLSVELDRLSEESVNNDISSWTKGRSGEALSLLKKRFSHRPVQEKFVCLNCGFETHADEQAALNIARSWLFLRSQEYKKYQTNKTTGNTDKRAFVETWQSFYRKKLKEVWKPAV

SEQ ID NO: 46193 - protein, 978 aa, synthetic construct
  REGION 1..978: note = engineered CasX variant
QEIKRINKIRRRLVKDSNTKKAGKTGPMKTLLVRVMTPDLRERLENLRKKPENIPQPISNTSRANLNKLLTDYTEMKKAILHVYWEEFQVDPVGLMSRVAQPASKKIDQNKLKPEMDEKGNLTTAGFACSQCGQPLFVYKLEQVSEKGKAYTNYFGRCNVAEHEKLILLAQLKPEKDSDEAVTYSLGKFGQRALDFYSIHVTKESTHPVKPLAQIAGNRYASHPVGKALSDACMGTIASFLSKYQDIIIEHQKVVKGNQKRLESLRELAGKENLEYPSVTLPPQPHTKEGVDAYNEVIARVRMWVNLNLWQKLKLSRDDAKPLLRLKGFPSFPLVERQANEVDWWDMVCNVKKLINEKKEDGKVFWQNLAGYKRQEALRPYLSSEEDRQKGKKFARYQLGDLLLHLEKKHGEDWGKVYDEAWERIDKKVEGLSKHIKLEEERRSEDAQSKAALTDWLRAKASFVIEGLKEADKDEFCRCELKLQKWYGDLRGKPFAIEAENSILDISGFSKQYNCAFIWQKDGVKKLNLYLIINYFKGGKLRFKKIKPEAFEANRFYTVINKKSGEIVPMEVNFNFDDPNLIILPLAFGKRQGREFIWNDLLSLETGSLKLANGRVIEKTLYNRRTRQDEPALFVALTFERREVLDSSNIKPMNLIGVDRGENIPAVIALTDPEGCPLSRFKDSLGNPTHILRIGESYKEKQRTIQAKKEVEQRRAGGYSRKYASKAKNLADDMVRNTARDLLYYAVTQDAMLIFENLSRGFGRQGKRTFMAERQYTRMEDWLTAKLAYEGLPSKTYLSKTLAQYTSKTCSNCGFTITSADYDRVLEKLKKTATGWMTTINGKELKVEGQITYYNRYKRQNVVKDLSVELDRLSEESVNNDISSWTKGRSGEALSLLKKRFSHRPVQEKFVCLNCGFETHADEQAALNIARSWLFLRSQEYKKYQTNKTTGNTDKRAFVETWQSFYRKKLKEVWKPAV

SEQ ID NO: 46194 - protein, 978 aa, synthetic construct
  REGION 1..978: note = engineered CasX variant
QEIKRINKIRRRLVKDSNTKKAGKTGPMKTLLVRVMTPDLRERLENLRKKPENIPQPISNTSRANLNKLLTDYTEMKKAILHVYWEEFQVDPVGLMSRVAQPASKKIDQNKLKPEMDEKGNLTTAGFACSQCGQPLFVYKLEQVSEKGKAYTNYFGRCNVAEHEKLILLAQLKPEKDSDEAVTYSLGKFGQRALDFYSIHVTKESTHPVKPLAQIAGNRYASSPVGKALSDACMGTIASFLSKYQDIIIEHQKVVKGNQKRLESLRELAGKENLEYPSVTLPPQPHTKEGVDAYNEVIARVRMWVNLNLWQKLKLSRDDAKPLLRLKGFPSFPLVERQANEVDWWDMVCNVKKLINEKKEDGKVFWQNLAGYKRQEALRPYLSSEEDRQKGKKFARYQLGDLLLHLEKKHGEDWGKVYDEAWERIDKKVEGLSKHIKLEEERRSEDAQSKAALTDWLRAKASFVIEGLKEADKDEFCRCELKLQKWYGDLRGKPFAIEAENSILDISGFSKQYNCAFIWQKDGVKKLNLYLIINYFKGGKLRFKKIKPEAFEANRFYTVINKKSGEIVPMEVNFNFDDPNLIILPLAFGKRQGREFIWNDLLSLETGSLKLANGRVIEKTLYNRRTRQDEPALFVALTFERREVLDSSNIKPMNLIGVDRGENIPAVIALTDPEGCPLSRFKDSLGNPTHILRIGESYKEKQRTIQAKKEVEQRRAGGYSRKYASKAKNLADDMVRNTARDLLYYAVTQDAMLIFENLSRGFGRQGKRTFMAERQYTRMEDWLTAKLAYEGLPSKTYLSKTLAQYTSKTCSNCGFTITSADYDRVLEKLKKTATGWMTTINGKELKVEGQITYYNRYKRQNVVKDLSVELDRLSEESVNNDISSWTKGRSGEALSLLKKRFSHRPVQEKFVCLNCGFETHADEQAALNIARSWLFLRSQEYKKYQTNKTTGNTDKRAFVETWQSFYRKKLKEVWKPAV

SEQ ID NO: 46195 - protein, 978 aa, synthetic construct
  REGION 1..978: note = engineered CasX variant
QEIKRINKIRRRLVKDSNTKKAGKTGPMKTLLVRVMTPDLRERLENLRKKPENIPQPISNTSRANLNKLLTDYTEMKKAILHVYWEEFQVDPVGLMSRVAQPASKKIDQNKLKPEMDEKGNLTTAGFACSQCGQPLFVYKLEQVSEKGKAYTNYFGRCNVAEHEKLILLAQLKPEKDSDEAVTYSLGKFGQRALDFYSIHVTKESTHPVKPLAQIAGNRYASTPVGKALSDACMGTIASFLSKYQDIIIEHQKVVKGNQKRLESLRELAGKENLEYPSVTLPPQPHTKEGVDAYNEVIARVRMWVNLNLWQKLKLSRDDAKPLLRLKGFPSFPLVERQANEVDWWDMVCNVKKLINEKKEDGKVFWQNLAGYKRQEALRPYLSSEEDRQKGKKFARYQLGDLLLHLEKKHGEDWGKVYDEAWERIDKKVEGLSKHIKLEEERRSEDAQSKAALTDWLRAKASFVIEGLKEADKDEFCRCELKLQKWYGDLRGKPFAIEAENSILDISGFSKQYNCAFIWQKDGVKKLNLYLIINYFKGGKLRFKKIKPEAFEANRFYTVINKKSGEIVPMEVNFNFDDPNLIILPLAFGKRQGREFIWNDLLSLETGSLKLANGRVIEKTLYNRRTRQDEPALFVALTFERREVLDSSNIKPMNLIGVDRGENIPAVIALTDPEGCPLSRFKDSLGNPTHILRIGESYKEKQRTIQAKKEVEQRRAGGYSRKYASKAKNLADDMVRNTARDLLYYAVTQDAMLIFENLSRGFGRQGKRTFMAERQYTRMEDWLTAKLAYEGLPSKTYLSKTLAQYTSKTCSNCGFTITSADYDRVLEKLKKTATGWMTTINGKELKVEGQITYYNRYKRQNVVKDLSVELDRLSEESVNNDISSWTKGRSGEALSLLKKRFSHRPVQEKFVCLNCGFETHADEQAALNIARSWLFLRSQEYKKYQTNKTTGNTDKRAFVETWQSFYRKKLKEVWKPAV

SEQ ID NO: 46196 - protein, 978 aa, synthetic construct
  REGION 1..978: note = engineered CasX variant
QEIKRINKIRRRLVKDSNTKKAGKTGPMKTLLVRVMTPDLRERLENLRKKPENIPQPISNTSRANLNKLLTDYTEMKKAILHVYWEEFQVDPVGLMSRVAQPASKKIDQNKLKPEMDEKGNLTTAGFACSQCGQPLFVYKLEQVSEKGKAYTNYFGRCNVAEHEKLILLAQLKPEKDSDEAVTYSLGKFGQRALDFYSIHVTKESTHPVKPLAQIAGNRYASAPVGKALSDACMGTIASFLSKYQDIIIEHQKVVKGNQKRLESLRELAGKENLEYPSVTLPPQPHTKEGVDAYNEVIARVRMWVNLNLWQKLKLSRDDAKPLLRLKGFPSFPLVERQANEVDWWDMVCNVKKLINEKKEDGKVFWQNLAGYKRQEALRPYLSSEEDRQKGKKFARYQLGDLLLHLEKKHGEDWGKVYDEAWERIDKKVEGLSKHIKLEEERRSEDAQSKAALTDWLRAKASFVIEGLKEADKDEFCRCELKLQKWYGDLRGKPFAIEAENSILDISGFSKQYNCAFIWQKDGVKKLNLYLIINYFKGGKLRFKKIKPEAFEANRFYTVINKKSGEIVPMEVNFNFDDPNLIILPLAFGKRQGREFIWNDLLSLETGSLKLANGRVIEKTLYNRRTRQDEPALFVALTFERREVLDSSNIKPMNLIGVDRGENIPAVIALTDPEGCPLSRFKDSLGNPTHILRIGESYKEKQRTIQAKKEVEQRRAGGYSRKYASKAKNLADDMVRNTARDLLYYAVTQDAMLIFENLSRGFGRQGKRTFMAERQYTRMEDWLTAKLAYEGLPSKTYLSKTLAQYTSKTCSNCGFTITSADYDRVLEKLKKTATGWMTTINGKELKVEGQITYYNRYKRQNVVKDLSVELDRLSEESVNNDISSWTKGRSGEALSLLKKRFSHRPVQEKFVCLNCGFETHADEQAALNIARSWLFLRSQEYKKYQTNKTTGNTDKRAFVETWQSFYRKKLKEVWKPAV

SEQ ID NO: 46197 - protein, 978 aa, synthetic construct
  REGION 1..978: note = engineered CasX variant
QEIKRINKIRRRLVKDSNTKKAGKTGPMKTLLVRVMTPDLRERLENLRKKPENIPQPISNTSRANLNKLLTDYTEMKKAILHVYWEEFQVDPVGLMSRVAQPASKKIDQNKLKPEMDEKGNLTTAGFACSQCGQPLFVYKLEQVSEKGKAYTNYFGRCNVAEHEKLILLAQLKPEKDSDEAVTYSLGKFGQRALDFYSIHVTKESTHPVKPLAQIAGNRYASVPVGKALSDACMGTIASFLSKYQDIIIEHQKVVKGNQKRLESLRELAGKENLEYPSVTLPPQPHTKEGVDAYNEVIARVRMWVNLNLWQKLKLSRDDAKPLLRLKGFPSFPLVERQANEVDWWDMVCNVKKLINEKKEDGKVFWQNLAGYKRQEALRPYLSSEEDRQKGKKFARYQLGDLLLHLEKKHGEDWGKVYDEAWERIDKKVEGLSKHIKLEEERRSEDAQSKAALTDWLRAKASFVIEGLKEADKDEFCRCELKLQKWYGDLRGKPFAIEAENSILDISGFSKQYNCAFIWQKDGVKKLNLYLIINYFKGGKLRFKKIKPEAFEANRFYTVINKKSGEIVPMEVNFNFDDPNLIILPLAFGKRQGREFIWNDLLSLETGSLKLANGRVIEKTLYNRRTRQDEPALFVALTFERREVLDSSNIKPMNLIGVDRGENIPAVIALTDPEGCPLSRFKDSLGNPTHILRIGESYKEKQRTIQAKKEVEQRRAGGYSRKYASKAKNLADDMVRNTARDLLYYAVTQDAMLIFENLSRGFGRQGKRTFMAERQYTRMEDWLTAKLAYEGLPSKTYLSKTLAQYTSKTCSNCGFTITSADYDRVLEKLKKTATGWMTTINGKELKVEGQITYYNRYKRQNVVKDLSVELDRLSEESVNNDISSWTKGRSGEALSLLKKRFSHRPVQEKFVCLNCGFETHADEQAALNIARSWLFLRSQEYKKYQTNKTTGNTDKRAFVETWQSFYRKKLKEVWKPAV

SEQ ID NO: 46198 - protein, 978 aa, synthetic construct
  REGION 1..978: note = engineered CasX variant
QEIKRINKIRRRLVKDSNTKKAGKTGPMKTLLVRVMTPDLRERLENLRKKPENIPQPISNTSRANLNKLLTDYTEMKKAILHVYWEEFQVDPVGLMSRVAQPASKKIDQNKLKPEMDEKGNLTTAGFACSQCGQPLFVYKLEQVSEKGKAYTNYFGRCNVAEHEKLIKLAQLKPEKDSDEAVTYSLGKFGQRALDFYSIHVTKESTHPVKPLAQIAGNRYASGPVGKALSDACMGTIASFLSKYQDIIIEHQKVVKGNQKRLESLRELAGKENLEYPSVTLPPQPHTKEGVDAYNEVIARVRMWVNLNLWQKLKLSRDDAKPLLRLKGFPSFPLVERQANEVDWWDMVCNVKKLINEKKEDGKVFWQNLAGYKRQEALRPYLSSEEDRQKGKKFARYQLGDLLLHLEKKHGEDWGKVYDEAWERIDKKVEGLSKHIKLEEERRSEDAQSKAALTDWLRAKASFVIEGLKEADKDEFCRCELKLQKWYGDLRGKPFAIEAENSILDISGFSKQYNCAFIWQKDGVKKLNLYLIINYFKGGKLRFKKIKPEAFEANRFYTVINKKSGEIVPMEVNFNFDDPNLIILPLAFGKRQGREFIWNDLLSLETGSLKLANGRVIEKTLYNRRTRQDEPALFVALTFERREVLDSSNIKPMNLIGVDRGENIPAVIALTDPEGCPLSRFKDSLGNPTHILRIGESYKEKQRTIQAKKEVEQRRAGGYSRKYASKAKNLADDMVRNTARDLLYYAVTQDAMLIFENLSRGFGRQGKRTFMAERQYTRMEDWLTAKLAYEGLPSKTYLSKTLAQYTSKTCSNCGFTITSADYDRVLEKLKKTATGWMTTINGKELKVEGQITYYNRYKRQNVVKDLSVELDRLSEESVNNDISSWTKGRSGEALSLLKKRFSHRPVQEKFVCLNCGFETHADEQAALNIARSWLFLRSQEYKKYQTNKTTGNTDKRAFVETWQSFYRKKLKEVWKPAV

SEQ ID NO: 46199 - protein, 977 aa, synthetic construct
  REGION 1..977: note = engineered CasX variant
QEIKRINKIRRRLVKDSNTKKAGKTGPMKTLLVRVMTPDLRERLENLRKKPENIPQPISNTSRANLNKLLTDYTEMKKAILHVYWEEFQVDPVGLMSRVAQPASKKIDQNKLKPEMDEKGNLTTAGFACSQCGQPLFVYKLEQVSEKGKAYTNYFGRCNVAEHEKLILLAQLKPEKDSDEAVTYSLGKFGQRALDFYSIHVTKESTHPVKPLAQIAGNRYASPVGKALSDACMGTIASFLSKYQDIIIEHQKVVKGNQKRLESLRELAGKENLEYPSVTLPPQPHTKEGVDAYNEVIARVRMWVNLNLWQKLKLSRDDAKPLLRLKGFPSFPLVERQANEVDWWDMVCNVKKLINEKKEDGKVFWQNLAGYKRQEALRPYLSSEEDRQKGKKFARYQLGDLLLHLEKKHGEDWGKVYDEAWERIDKKVEGLSKHIKLEEERRSEDAQSKAALTDWLRAKASFVIEGLKEADKDEFCRCELKLQKWYGDLRGKPFAIEAENSILDISGFSKQYNCAFIWQKDGVKKLNLYLIINYFKGGKLRFKKIKPEAFEANRFYTVINKKSGEIVPMEVNFNFDDPNLIILPLAFGKRQGREFIWNDLLSLETGSLKLANGRVIEKTLYNRRTRQDEPALFVALTFERREVLDSSNIKPMNLIGVDRGENIPAVIALTDPEGCPLSRFKDSLGNPTHILRIGESYKEKQRTIQAKKEVEQRRAGGYSRKYASKAKNLADDMVRNTARDLLYYAVTQDAMLIFENLSRGFGRQGKRTFMAERQYTRMEDWLTAKLAYEGLPSKTYLSKTLAQYTSKTCSNCGFTITSADYDRVLEKLKKTATGWMTTINGKELKVEGQITYYNRYKRQNVVKDLSVELDRLSEESVNNDISSWTKGRSGEALSLLKKRFSHRPVQEKFVCLNCGFETHADEQAALNIARSWLFLRSQEYKKYQTNKTTGNTDKRAFVETWQSFYRKKLKEVWKPAV

SEQ ID NO: 46200 - protein, 978 aa, synthetic construct
  REGION 1..978: note = engineered CasX variant
QEIKRINKIRRRLVKDSNTKKAGKTGPMKTLLVRVMTPDLRERLENLRKKPENIPQPISNTSRANLNKLLTDYTEMKKAILHVYWEEFQVDPVGLMSRVAQPASKKIDQNKLKPEMDEKGNLTTAGFACSQCGQPLFVYKLEQVSEKGKAYTNYFGRCNVAEHEKLILLAQLKPEKDSDEAVTYSLGKFGQRALDFYSIHVTKESTHPVKPLAQIAGNRYASYPVGKALSDACMGTIASFLSKYQDIIIEHQKVVKGNQKRLESLRELAGKENLEYPSVTLPPQPHTKEGVDAYNEVIARVRMWVNLNLWQKLKLSRDDAKPLLRLKGFPSFPLVERQANEVDWWDMVCNVKKLINEKKEDGKVFWQNLAGYKRQEALRPYLSSEEDRKKGKKFARYQLGDLLLHLEKKHGEDWGKVYDEAWERIDKKVEGLSKHIKLEEERRSEDAQSKAALTDWLRAKASFVIEGLKEADKDEFCRCELKLQKWYGDLRGKPFAIEAENSILDISGFSKQYNCAFIWQKDGVKKLNLYLIINYFKGGKLRFKKIKPEAFEANRFYTVINKKSGEIVPMEVNFNFDDPNLIILPLAFGKRQGREFIWNDLLSLETGSLKLANGRVIEKTLYNRRTRQDEPALFVALTFERREVLDSSNIKPMNLIGVDRGENIPAVIALTDPEGCPLSRFKDSLGNPTHILRIGESYKEKQRTIQAKKEVEQRRAGGYSRKYASKAKNLADDMVRNTARDLLYYAVTQDAMLIFENLSRGFGRQGKRTFMAERQYTRMEDWLTAKLAYEGLPSQTYLSKTLAQYTSKTCSNCGFTITSADYDRVLEKLKKTATGWMTTINGKELKVEGQITYYNRYKRQNVVKDLSVELDRLSEESVNNDISSWTKGRSGEALSLLKKRFSHRPVQEKFVCLNCGFETHADEQAALNIARSWLFLRSQEYKKYQTNKTTGNTDKRAFVETWQSFYRKKLKEVWKPAV

SEQ ID NO: 46201 - protein, 978 aa, synthetic construct
  REGION 1..978: note = engineered CasX variant
QEIKRINKIRRRLVKDSNTKKAGKTGPMKTLLVRVMTPDLRERLENLRKKPENIPQPISNTSRANLNKLLTDYTEMKKAILHVYWEEFQVDPVGLMSRVAQPASKKIDQNKLKPEMDEKGNLTTAGFACSQCGQPLFVYKLEQVSEKGKAYTNYFGRCNVAEHEKLILLAQLKPEKDSDEAVTYSLGKFGQRALDFYSIHVTKESTHPVKPLAQIAGNRYASHPVGKALSDACMGTIASFLSKYQDIIIEHQKVVKGNQKRLESLRELAGKENLEYPSVTLPPQPHTKEGVDAYNEVIARVRMWVNLNLWQKLKLSRDDAKPLLRLKGFPSFPLVERQANEVDWWDMVCNVKKLINEKKEDGKVFWQNLAGYKRQEALRPYLSSEEDRKKGKKFARYQLGDLLLHLEKKHGEDWGKVYDEAWERIDKKVEGLSKHIKLEEERRSEDAQSKAALTDWLRAKASFVIEGLKEADKDEFCRCELKLQKWYGDLRGKPFAIEAENSILDISGFSKQYNCAFIWQKDGVKKLNLYLIINYFKGGKLRFKKIKPEAFEANRFYTVINKKSGEIVPMEVNFNFDDPNLIILPLAFGKRQGREFIWNDLLSLETGSLKLANGRVIEKTLYNRRTRQDEPALFVALTFERREVLDSSNIKPMNLIGVDRGENIPAVIALTDPEGCPLSRFKDSLGNPTHILRIGESYKEKQRTIQAKKEVEQRRAGGYSRKYASKAKNLADDMVRNTARDLLYYAVTQDAMLIFENLSRGFGRQGKRTFMAERQYTRMEDWLTAKLAYEGLPSQTYLSKTLAQYTSKTCSNCGFTITSADYDRVLEKLKKTATGWMTTINGKELKVEGQITYYNRYKRQNVVKDLSVELDRLSEESVNNDISSWTKGRSGEALSLLKKRFSHRPVQEKFVCLNCGFETHADEQAALNIARSWLFLRSQEYKKYQTNKTTGNTDKRAFVETWQSFYRKKLKEVWKPAV

SEQ ID NO: 46202 - protein, 978 aa, synthetic construct
  REGION 1..978: note = engineered CasX variant
QEIKRINKIRRRLVKDSNTKKAGKTGPMKTLLVRVMTPDLRERLENLRKKPENIPQPISNTSRANLNKLLTDYTEMKKAILHVYWEEFQVDPVGLMSRVAQPASKKIDQNKLKPEMDEKGNLTTAGFACSQCGQPLFVYKLEQVSEKGKAYTNYFGRCNVAEHEKLILLAQLKPEKDSDEAVTYSLGKFGQRALDFYSIHVTKESTHPVKPLAQIAGNRYASSPVGKALSDACMGTIASFLSKYQDIIIEHQKVVKGNQKRLESLRELAGKENLEYPSVTLPPQPHTKEGVDAYNEVIARVRMWVNLNLWQKLKLSRDDAKPLLRLKGFPSFPLVERQANEVDWWDMVCNVKKLINEKKEDGKVFWQNLAGYKRQEALRPYLSSEEDRKKGKKFARYQLGDLLLHLEKKHGEDWGKVYDEAWERIDKKVEGLSKHIKLEEERRSEDAQSKAALTDWLRAKASFVIEGLKEADKDEFCRCELKLQKWYGDLRGKPFAIEAENSILDISGFSKQYNCAFIWQKDGVKKLNLYLIINYFKGGKLRFKKIKPEAFEANRFYTVINKKSGEIVPMEVNFNFDDPNLIILPLAFGKRQGREFIWNDLLSLETGSLKLANGRVIEKTLYNRRTRQDEPALFVALTFERREVLDSSNIKPMNLIGVDRGENIPAVIALTDPEGCPLSRFKDSLGNPTHILRIGESYKEKQRTIQAKKEVEQRRAGGYSRKYASKAKNLADDMVRNTARDLLYYAVTQDAMLIFENLSRGFGRQGKRTFMAERQYTRMEDWLTAKLAYEGLPSQTYLSKTLAQYTSKTCSNCGFTITSADYDRVLEKLKKTATGWMTTINGKELKVEGQITYYNRYKRQNVVKDLSVELDRLSEESVNNDISSWTKGRSGEALSLLKKRFSHRPVQEKFVCLNCGFETHADEQAALNIARSWLFLRSQEYKKYQTNKTTGNTDKRAFVETWQSFYRKKLKEVWKPAV

SEQ ID NO: 46203 - protein, 978 aa, synthetic construct
  REGION 1..978: note = engineered CasX variant
QEIKRINKIRRRLVKDSNTKKAGKTGPMKTLLVRVMTPDLRERLENLRKKPENIPQPISNTSRANLNKLLTDYTEMKKAILHVYWEEFQVDPVGLMSRVAQPASKKIDQNKLKPEMDEKGNLTTAGFACSQCGQPLFVYKLEQVSEKGKAYTNYFGRCNVAEHEKLILLAQLKPEKDSDEAVTYSLGKFGQRALDFYSIHVTKESTHPVKPLAQIAGNRYASTPVGKALSDACMGTIASFLSKYQDIIIEHQKVVKGNQKRLESLRELAGKENLEYPSVTLPPQPHTKEGVDAYNEVIARVRMWVNLNLWQKLKLSRDDAKPLLRLKGFPSFPLVERQANEVDWWDMVCNVKKLINEKKEDGKVFWQNLAGYKRQEALRPYLSSEEDRKKGKKFARYQLGDLLLHLEKKHGEDWGKVYDEAWERIDKKVEGLSKHIKLEEERRSEDAQSKAALTDWLRAKASFVIEGLKEADKDEFCRCELKLQKWYGDLRGKPFAIEAENSILDISGFSKQYNCAFIWQKDGVKKLNLYLIINYFKGGKLRFKKIKPEAFEANRFYTVINKKSGEIVPMEVNFNFDDPNLIILPLAFGKRQGREFIWNDLLSLETGSLKLANGRVIEKTLYNRRTRQDEPALFVALTFERREVLDSSNIKPMNLIGVDRGENIPAVIALTDPEGCPLSRFKDSLGNPTHILRIGESYKEKQRTIQAKKEVEQRRAGGYSRKYASKAKNLADDMVRNTARDLLYYAVTQDAMLIFENLSRGFGRQGKRTFMAERQYTRMEDWLTAKLAYEGLPSQTYLSKTLAQYTSKTCSNCGFTITSADYDRVLEKLKKTATGWMTTINGKELKVEGQITYYNRYKRQNVVKDLSVELDRLSEESVNNDISSWTKGRSGEALSLLKKRFSHRPVQEKFVCLNCGFETHADEQAALNIARSWLFLRSQEYKKYQTNKTTGNTDKRAFVETWQSFYRKKLKEVWKPAV

SEQ ID NO: 46204 - protein, 978 aa, synthetic construct
  REGION 1..978: note = engineered CasX variant
QEIKRINKIRRRLVKDSNTKKAGKTGPMKTLLVRVMTPDLRERLENLRKKPENIPQPISNTSRANLNKLLTDYTEMKKAILHVYWEEFQVDPVGLMSRVAQPASKKIDQNKLKPEMDEKGNLTTAGFACSQCGQPLFVYKLEQVSEKGKAYTNYFGRCNVAEHEKLILLAQLKPEKDSDEAVTYSLGKFGQRALDFYSIHVTKESTHPVKPLAQIAGNRYASAPVGKALSDACMGTIASFLSKYQDIIIEHQKVVKGNQKRLESLRELAGKENLEYPSVTLPPQPHTKEGVDAYNEVIARVRMWVNLNLWQKLKLSRDDAKPLLRLKGFPSFPLVERQANEVDWWDMVCNVKKLINEKKEDGKVFWQNLAGYKRQEALRPYLSSEEDRKKGKKFARYQLGDLLLHLEKKHGEDWGKVYDEAWERIDKKVEGLSKHIKLEEERRSEDAQSKAALTDWLRAKASFVIEGLKEADKDEFCRCELKLQKWYGDLRGKPFAIEAENSILDISGFSKQYNCAFIWQKDGVKKLNLYLIINYFKGGKLRFKKIKPEAFEANRFYTVINKKSGEIVPMEVNFNFDDPNLIILPLAFGKRQGREFIWNDLLSLETGSLKLANGRVIEKTLYNRRTRQDEPALFVALTFERREVLDSSNIKPMNLIGVDRGENIPAVIALTDPEGCPLSRFKDSLGNPTHILRIGESYKEKQRTIQAKKEVEQRRAGGYSRKYASKAKNLADDMVRNTARDLLYYAVTQDAMLIFENLSRGFGRQGKRTFMAERQYTRMEDWLTAKLAYEGLPSQTYLSKTLAQYTSKTCSNCGFTITSADYDRVLEKLKKTATGWMTTINGKELKVEGQITYYNRYKRQNVVKDLSVELDRLSEESVNNDISSWTKGRSGEALSLLKKRFSHRPVQEKFVCLNCGFETHADEQAALNIARSWLFLRSQEYKKYQTNKTTGNTDKRAFVETWQSFYRKKLKEVWKPAV

SEQ ID NO: 46205 - protein, 978 aa, synthetic construct
  REGION 1..978: note = engineered CasX variant
QEIKRINKIRRRLVKDSNTKKAGKTGPMKTLLVRVMTPDLRERLENLRKKPENIPQPISNTSRANLNKLLTDYTEMKKAILHVYWEEFQVDPVGLMSRVAQPASKKIDQNKLKPEMDEKGNLTTAGFACSQCGQPLFVYKLEQVSEKGKAYTNYFGRCNVAEHEKLILLAQLKPEKDSDEAVTYSLGKFGQRALDFYSIHVTKESTHPVKPLAQIAGNRYASVPVGKALSDACMGTIASFLSKYQDIIIEHQKVVKGNQKRLESLRELAGKENLEYPSVTLPPQPHTKEGVDAYNEVIARVRMWVNLNLWQKLKLSRDDAKPLLRLKGFPSFPLVERQANEVDWWDMVCNVKKLINEKKEDGKVFWQNLAGYKRQEALRPYLSSEEDRKKGKKFARYQLGDLLLHLEKKHGEDWGKVYDEAWERIDKKVEGLSKHIKLEEERRSEDAQSKAALTDWLRAKASFVIEGLKEADKDEFCRCELKLQKWYGDLRGKPFAIEAENSILDISGFSKQYNCAFIWQKDGVKKLNLYLIINYFKGGKLRFKKIKPEAFEANRFYTVINKKSGEIVPMEVNFNFDDPNLIILPLAFGKRQGREFIWNDLLSLETGSLKLANGRVIEKTLYNRRTRQDEPALFVALTFERREVLDSSNIKPMNLIGVDRGENIPAVIALTDPEGCPLSRFKDSLGNPTHILRIGESYKEKQRTIQAKKEVEQRRAGGYSRKYASKAKNLADDMVRNTARDLLYYAVTQDAMLIFENLSRGFGRQGKRTFMAERQYTRMEDWLTAKLAYEGLPSQTYLSKTLAQYTSKTCSNCGFTITSADYDRVLEKLKKTATGWMTTINGKELKVEGQITYYNRYKRQNVVKDLSVELDRLSEESVNNDISSWTKGRSGEALSLLKKRFSHRPVQEKFVCLNCGFETHADEQAALNIARSWLFLRSQEYKKYQTNKTTGNTDKRAFVETWQSFYRKKLKEVWKPAV

SEQ ID NO: 46206 - protein, 978 aa, synthetic construct
  REGION 1..978: note = engineered CasX variant
QEIKRINKIRRRLVKDSNTKKAGKTGPMKTLLVRVMTPDLRERLENLRKKPENIPQPISNTSRANLNKLLTDYTEMKKAILHVYWEEFQVDPVGLMSRVAQPASKKIDQNKLKPEMDEKGNLTTAGFACSQCGQPLFVYKLEQVSEKGKAYTNYFGRCNVAEHEKLIKLAQLKPEKDSDEAVTYSLGKFGQRALDFYSIHVTKESTHPVKPLAQIAGNRYASGPVGKALSDACMGTIASFLSKYQDIIIEHQKVVKGNQKRLESLRELAGKENLEYPSVTLPPQPHTKEGVDAYNEVIARVRMWVNLNLWQKLKLSRDDAKPLLRLKGFPSFPLVERQANEVDWWDMVCNVKKLINEKKEDGKVFWQNLAGYKRQEALRPYLSSEEDRKKGKKFARYQLGDLLLHLEKKHGEDWGKVYDEAWERIDKKVEGLSKHIKLEEERRSEDAQSKAALTDWLRAKASFVIEGLKEADKDEFCRCELKLQKWYGDLRGKPFAIEAENSILDISGFSKQYNCAFIWQKDGVKKLNLYLIINYFKGGKLRFKKIKPEAFEANRFYTVINKKSGEIVPMEVNFNFDDPNLIILPLAFGKRQGREFIWNDLLSLETGSLKLANGRVIEKTLYNRRTRQDEPALFVALTFERREVLDSSNIKPMNLIGVDRGENIPAVIALTDPEGCPLSRFKDSLGNPTHILRIGESYKEKQRTIQAKKEVEQRRAGGYSRKYASKAKNLADDMVRNTARDLLYYAVTQDAMLIFENLSRGFGRQGKRTFMAERQYTRMEDWLTAKLAYEGLPSQTYLSKTLAQYTSKTCSNCGFTITSADYDRVLEKLKKTATGWMTTINGKELKVEGQITYYNRYKRQNVVKDLSVELDRLSEESVNNDISSWTKGRSGEALSLLKKRFSHRPVQEKFVCLNCGFETHADEQAALNIARSWLFLRSQEYKKYQTNKTTGNTDKRAFVETWQSFYRKKLKEVWKPAV

SEQ ID NO: 46207 - protein, 977 aa, synthetic construct
  REGION 1..977: note = engineered CasX variant
QEIKRINKIRRRLVKDSNTKKAGKTGPMKTLLVRVMTPDLRERLENLRKKPENIPQPISNTSRANLNKLLTDYTEMKKAILHVYWEEFQVDPVGLMSRVAQPASKKIDQNKLKPEMDEKGNLTTAGFACSQCGQPLFVYKLEQVSEKGKAYTNYFGRCNVAEHEKLILLAQLKPEKDSDEAVTYSLGKFGQRALDFYSIHVTKESTHPVKPLAQIAGNRYASPVGKALSDACMGTIASFLSKYQDIIIEHQKVVKGNQKRLESLRELAGKENLEYPSVTLPPQPHTKEGVDAYNEVIARVRMWVNLNLWQKLKLSRDDAKPLLRLKGFPSFPLVERQANEVDWWDMVCNVKKLINEKKEDGKVFWQNLAGYKRQEALRPYLSSEEDRKKGKKFARYQLGDLLLHLEKKHGEDWGKVYDEAWERIDKKVEGLSKHIKLEEERRSEDAQSKAALTDWLRAKASFVIEGLKEADKDEFCRCELKLQKWYGDLRGKPFAIEAENSILDISGFSKQYNCAFIWQKDGVKKLNLYLIINYFKGGKLRFKKIKPEAFEANRFYTVINKKSGEIVPMEVNFNFDDPNLIILPLAFGKRQGREFIWNDLLSLETGSLKLANGRVIEKTLYNRRTRQDEPALFVALTFERREVLDSSNIKPMNLIGVDRGENIPAVIALTDPEGCPLSRFKDSLGNPTHILRIGESYKEKQRTIQAKKEVEQRRAGGYSRKYASKAKNLADDMVRNTARDLLYYAVTQDAMLIFENLSRGFGRQGKRTFMAERQYTRMEDWLTAKLAYEGLPSQTYLSKTLAQYTSKTCSNCGFTITSADYDRVLEKLKKTATGWMTTINGKELKVEGQITYYNRYKRQNVVKDLSVELDRLSEESVNNDISSWTKGRSGEALSLLKKRFSHRPVQEKFVCLNCGFETHADEQAALNIARSWLFLRSQEYKKYQTNKTTGNTDKRAFVETWQSFYRKKLKEVWKPAV

SEQ ID NO: 46208 - protein, 978 aa, synthetic construct
  REGION 1..978: note = engineered CasX variant
QEIKRINKIRRRLVKDSNTKKAGKTGPMKTLLVRVMTPDLRERLENLRKKPENIPQPISNTSRANLNKLLTDYTEMKKAILHVYWEEFQVDPVGLMSRVAQPASKKIDQNKLKPEMDEKGNLTTAGFACSQCGQPLFVYKLEQVSEKGKAYTNYFGRCNVAEHEKLILLAQLKPEKDSDEAVTYSLGKFGQRALDFYSIHVTKESTHPVKPLAQIAGNRYASYPVGKALSDACMGTIASFLSKYQDIIIEHQKVVKGNQKRLESLRELAGKENLEYPSVTLPPQPHTKEGVDAYNEVIARVRMWVNLNLWQKLKLSRDDAKPLLRLKGFPSFPLVERQANEVDWWDMVCNVKKLINEKKEDGKVFWQNLAGYKRQEALRPYLSSEEDRKKGKKFARYQLGDLLLHLEKKHGEDWGKVYDEAWERIDKKVEGLSKHIKLEEERRSEDAQSKAALTDWLRAKASFVIEGLKEADKDEFCRCELKLQKWYGDLRGKPFAIEAENSILDISGFSKQYNCAFIWQKDGVKKLNLYLIINYFKGGKLRFKKIKPEAFEANRFYTVINKKSGEIVPMEVNFNFDDPNLIILPLAFGKRQGREFIWNDLLSLETGSLKLANGRVIEKTLYNRRTRQDEPALFVALTFERREVLDSSNIKPMNLIGVDRGENIPAVIALTDPEGCPLSRFKDSLGNPTHILRIGESYKEKQRTIQAKKEVEQRRAGGYSRKYASKAKNLADDMVRNTARDLLYYAVTQDAMLIFENLSRGFGRQGKRTFMAERQYTRMEDWLTAKLAYNGLPSKTYLSKTLAQYTSKTCSNCGFTITSADYDRVLEKLKKTATGWMTTINGKELKVEGQITYYNRYKRQNVVKDLSVELDRLSEESVNNDISSWTKGRSGEALSLLKKRFSHRPVQEKFVCLNCGFETHADEQAALNIARSWLFLRSQEYKKYQTNKTTGNTDKRAFVETWQSFYRKKLKEVWKPAV

SEQ ID NO: 46209 - protein, 978 aa, synthetic construct
  REGION 1..978: note = engineered CasX variant
QEIKRINKIRRRLVKDSNTKKAGKTGPMKTLLVRVMTPDLRERLENLRKKPENIPQPISNTSRANLNKLLTDYTEMKKAILHVYWEEFQVDPVGLMSRVAQPASKKIDQNKLKPEMDEKGNLTTAGFACSQCGQPLFVYKLEQVSEKGKAYTNYFGRCNVAEHEKLILLAQLKPEKDSDEAVTYSLGKFGQRALDFYSIHVTKESTHPVKPLAQIAGNRYASHPVGKALSDACMGTIASFLSKYQDIIIEHQKVVKGNQKRLESLRELAGKENLEYPSVTLPPQPHTKEGVDAYNEVIARVRMWVNLNLWQKLKLSRDDAKPLLRLKGFPSFPLVERQANEVDWWDMVCNVKKLINEKKEDGKVFWQNLAGYKRQEALRPYLSSEEDRKKGKKFARYQLGDLLLHLEKKHGEDWGKVYDEAWERIDKKVEGLSKHIKLEEERRSEDAQSKAALTDWLRAKASFVIEGLKEADKDEFCRCELKLQKWYGDLRGKPFAIEAENSILDISGFSKQYNCAFIWQKDGVKKLNLYLIINYFKGGKLRFKKIKPEAFEANRFYTVINKKSGEIVPMEVNFNFDDPNLIILPLAFGKRQGREFIWNDLLSLETGSLKLANGRVIEKTLYNRRTRQDEPALFVALTFERREVLDSSNIKPMNLIGVDRGENIPAVIALTDPEGCPLSRFKDSLGNPTHILRIGESYKEKQRTIQAKKEVEQRRAGGYSRKYASKAKNLADDMVRNTARDLLYYAVTQDAMLIFENLSRGFGRQGKRTFMAERQYTRMEDWLTAKLAYNGLPSKTYLSKTLAQYTSKTCSNCGFTITSADYDRVLEKLKKTATGWMTTINGKELKVEGQITYYNRYKRQNVVKDLSVELDRLSEESVNNDISSWTKGRSGEALSLLKKRFSHRPVQEKFVCLNCGFETHADEQAALNIARSWLFLRSQEYKKYQTNKTTGNTDKRAFVETWQSFYRKKLKEVWKPAV

SEQ ID NO: 46210 - protein, 978 aa, synthetic construct
  REGION 1..978: note = engineered CasX variant
QEIKRINKIRRRLVKDSNTKKAGKTGPMKTLLVRVMTPDLRERLENLRKKPENIPQPISNTSRANLNKLLTDYTEMKKAILHVYWEEFQVDPVGLMSRVAQPASKKIDQNKLKPEMDEKGNLTTAGFACSQCGQPLFVYKLEQVSEKGKAYTNYFGRCNVAEHEKLILLAQLKPEKDSDEAVTYSLGKFGQRALDFYSIHVTKESTHPVKPLAQIAGNRYASSPVGKALSDACMGTIASFLSKYQDIIIEHQKVVKGNQKRLESLRELAGKENLEYPSVTLPPQPHTKEGVDAYNEVIARVRMWVNLNLWQKLKLSRDDAKPLLRLKGFPSFPLVERQANEVDWWDMVCNVKKLINEKKEDGKVFWQNLAGYKRQEALRPYLSSEEDRKKGKKFARYQLGDLLLHLEKKHGEDWGKVYDEAWERIDKKVEGLSKHIKLEEERRSEDAQSKAALTDWLRAKASFVIEGLKEADKDEFCRCELKLQKWYGDLRGKPFAIEAENSILDISGFSKQYNCAFIWQKDGVKKLNLYLIINYFKGGKLRFKKIKPEAFEANRFYTVINKKSGEIVPMEVNFNFDDPNLIILPLAFGKRQGREFIWNDLLSLETGSLKLANGRVIEKTLYNRRTRQDEPALFVALTFERREVLDSSNIKPMNLIGVDRGENIPAVIALTDPEGCPLSRFKDSLGNPTHILRIGESYKEKQRTIQAKKEVEQRRAGGYSRKYASKAKNLADDMVRNTARDLLYYAVTQDAMLIFENLSRGFGRQGKRTFMAERQYTRMEDWLTAKLAYNGLPSKTYLSKTLAQYTSKTCSNCGFTITSADYDRVLEKLKKTATGWMTTINGKELKVEGQITYYNRYKRQNVVKDLSVELDRLSEESVNNDISSWTKGRSGEALSLLKKRFSHRPVQEKFVCLNCGFETHADEQAALNIARSWLFLRSQEYKKYQTNKTTGNTDKRAFVETWQSFYRKKLKEVWKPAV

SEQ ID NO: 46211 - protein, 978 aa, synthetic construct
  REGION 1..978: note = engineered CasX variant
QEIKRINKIRRRLVKDSNTKKAGKTGPMKTLLVRVMTPDLRERLENLRKKPENIPQPISNTSRANLNKLLTDYTEMKKAILHVYWEEFQVDPVGLMSRVAQPASKKIDQNKLKPEMDEKGNLTTAGFACSQCGQPLFVYKLEQVSEKGKAYTNYFGRCNVAEHEKLILLAQLKPEKDSDEAVTYSLGKFGQRALDFYSIHVTKESTHPVKPLAQIAGNRYASTPVGKALSDACMGTIASFLSKYQDIIIEHQKVVKGNQKRLESLRELAGKENLEYPSVTLPPQPHTKEGVDAYNEVIARVRMWVNLNLWQKLKLSRDDAKPLLRLKGFPSFPLVERQANEVDWWDMVCNVKKLINEKKEDGKVFWQNLAGYKRQEALRPYLSSEEDRKKGKKFARYQLGDLLLHLEKKHGEDWGKVYDEAWERIDKKVEGLSKHIKLEEERRSEDAQSKAALTDWLRAKASFVIEGLKEADKDEFCRCELKLQKWYGDLRGKPFAIEAENSILDISGFSKQYNCAFIWQKDGVKKLNLYLIINYFKGGKLRFKKIKPEAFEANRFYTVINKKSGEIVPMEVNFNFDDPNLIILPLAFGKRQGREFIWNDLLSLETGSLKLANGRVIEKTLYNRRTRQDEPALFVALTFERREVLDSSNIKPMNLIGVDRGENIPAVIALTDPEGCPLSRFKDSLGNPTHILRIGESYKEKQRTIQAKKEVEQRRAGGYSRKYASKAKNLADDMVRNTARDLLYYAVTQDAMLIFENLSRGFGRQGKRTFMAERQYTRMEDWLTAKLAYNGLPSKTYLSKTLAQYTSKTCSNCGFTITSADYDRVLEKLKKTATGWMTTINGKELKVEGQITYYNRYKRQNVVKDLSVELDRLSEESVNNDISSWTKGRSGEALSLLKKRFSHRPVQEKFVCLNCGFETHADEQAALNIARSWLFLRSQEYKKYQTNKTTGNTDKRAFVETWQSFYRKKLKEVWKPAV

SEQ ID NO: 46212 - protein, 978 aa, synthetic construct
  REGION 1..978: note = engineered CasX variant
QEIKRINKIRRRLVKDSNTKKAGKTGPMKTLLVRVMTPDLRERLENLRKKPENIPQPISNTSRANLNKLLTDYTEMKKAILHVYWEEFQVDPVGLMSRVAQPASKKIDQNKLKPEMDEKGNLTTAGFACSQCGQPLFVYKLEQVSEKGKAYTNYFGRCNVAEHEKLILLAQLKPEKDSDEAVTYSLGKFGQRALDFYSIHVTKESTHPVKPLAQIAGNRYASAPVGKALSDACMGTIASFLSKYQDIIIEHQKVVKGNQKRLESLRELAGKENLEYPSVTLPPQPHTKEGVDAYNEVIARVRMWVNLNLWQKLKLSRDDAKPLLRLKGFPSFPLVERQANEVDWWDMVCNVKKLINEKKEDGKVFWQNLAGYKRQEALRPYLSSEEDRKKGKKFARYQLGDLLLHLEKKHGEDWGKVYDEAWERIDKKVEGLSKHIKLEEERRSEDAQSKAALTDWLRAKASFVIEGLKEADKDEFCRCELKLQKWYGDLRGKPFAIEAENSILDISGFSKQYNCAFIWQKDGVKKLNLYLIINYFKGGKLRFKKIKPEAFEANRFYTVINKKSGEIVPMEVNFNFDDPNLIILPLAFGKRQGREFIWNDLLSLETGSLKLANGRVIEKTLYNRRTRQDEPALFVALTFERREVLDSSNIKPMNLIGVDRGENIPAVIALTDPEGCPLSRFKDSLGNPTHILRIGESYKEKQRTIQAKKEVEQRRAGGYSRKYASKAKNLADDMVRNTARDLLYYAVTQDAMLIFENLSRGFGRQGKRTFMAERQYTRMEDWLTAKLAYNGLPSKTYLSKTLAQYTSKTCSNCGFTITSADYDRVLEKLKKTATGWMTTINGKELKVEGQITYYNRYKRQNVVKDLSVELDRLSEESVNNDISSWTKGRSGEALSLLKKRFSHRPVQEKFVCLNCGFETHADEQAALNIARSWLFLRSQEYKKYQTNKTTGNTDKRAFVETWQSFYRKKLKEVWKPAV

SEQ ID NO: 46213 - protein, 978 aa, synthetic construct
  REGION 1..978: note = engineered CasX variant
QEIKRINKIRRRLVKDSNTKKAGKTGPMKTLLVRVMTPDLRERLENLRKKPENIPQPISNTSRANLNKLLTDYTEMKKAILHVYWEEFQVDPVGLMSRVAQPASKKIDQNKLKPEMDEKGNLTTAGFACSQCGQPLFVYKLEQVSEKGKAYTNYFGRCNVAEHEKLILLAQLKPEKDSDEAVTYSLGKFGQRALDFYSIHVTKESTHPVKPLAQIAGNRYASVPVGKALSDACMGTIASFLSKYQDIIIEHQKVVKGNQKRLESLRELAGKENLEYPSVTLPPQPHTKEGVDAYNEVIARVRMWVNLNLWQKLKLSRDDAKPLLRLKGFPSFPLVERQANEVDWWDMVCNVKKLINEKKEDGKVFWQNLAGYKRQEALRPYLSSEEDRKKGKKFARYQLGDLLLHLEKKHGEDWGKVYDEAWERIDKKVEGLSKHIKLEEERRSEDAQSKAALTDWLRAKASFVIEGLKEADKDEFCRCELKLQKWYGDLRGKPFAIEAENSILDISGFSKQYNCAFIWQKDGVKKLNLYLIINYFKGGKLRFKKIKPEAFEANRFYTVINKKSGEIVPMEVNFNFDDPNLIILPLAFGKRQGREFIWNDLLSLETGSLKLANGRVIEKTLYNRRTRQDEPALFVALTFERREVLDSSNIKPMNLIGVDRGENIPAVIALTDPEGCPLSRFKDSLGNPTHILRIGESYKEKQRTIQAKKEVEQRRAGGYSRKYASKAKNLADDMVRNTARDLLYYAVTQDAMLIFENLSRGFGRQGKRTFMAERQYTRMEDWLTAKLAYNGLPSKTYLSKTLAQYTSKTCSNCGFTITSADYDRVLEKLKKTATGWMTTINGKELKVEGQITYYNRYKRQNVVKDLSVELDRLSEESVNNDISSWTKGRSGEALSLLKKRFSHRPVQEKFVCLNCGFETHADEQAALNIARSWLFLRSQEYKKYQTNKTTGNTDKRAFVETWQSFYRKKLKEVWKPAV

SEQ ID NO: 46214 - protein, 978 aa, synthetic construct
  REGION 1..978: note = engineered CasX variant
QEIKRINKIRRRLVKDSNTKKAGKTGPMKTLLVRVMTPDLRERLENLRKKPENIPQPISNTSRANLNKLLTDYTEMKKAILHVYWEEFQVDPVGLMSRVAQPASKKIDQNKLKPEMDEKGNLTTAGFACSQCGQPLFVYKLEQVSEKGKAYTNYFGRCNVAEHEKLIKLAQLKPEKDSDEAVTYSLGKFGQRALDFYSIHVTKESTHPVKPLAQIAGNRYASGPVGKALSDACMGTIASFLSKYQDIIIEHQKVVKGNQKRLESLRELAGKENLEYPSVTLPPQPHTKEGVDAYNEVIARVRMWVNLNLWQKLKLSRDDAKPLLRLKGFPSFPLVERQANEVDWWDMVCNVKKLINEKKEDGKVFWQNLAGYKRQEALRPYLSSEEDRKKGKKFARYQLGDLLLHLEKKHGEDWGKVYDEAWERIDKKVEGLSKHIKLEEERRSEDAQSKAALTDWLRAKASFVIEGLKEADKDEFCRCELKLQKWYGDLRGKPFAIEAENSILDISGFSKQYNCAFIWQKDGVKKLNLYLIINYFKGGKLRFKKIKPEAFEANRFYTVINKKSGEIVPMEVNFNFDDPNLIILPLAFGKRQGREFIWNDLLSLETGSLKLANGRVIEKTLYNRRTRQDEPALFVALTFERREVLDSSNIKPMNLIGVDRGENIPAVIALTDPEGCPLSRFKDSLGNPTHILRIGESYKEKQRTIQAKKEVEQRRAGGYSRKYASKAKNLADDMVRNTARDLLYYAVTQDAMLIFENLSRGFGRQGKRTFMAERQYTRMEDWLTAKLAYNGLPSKTYLSKTLAQYTSKTCSNCGFTITSADYDRVLEKLKKTATGWMTTINGKELKVEGQITYYNRYKRQNVVKDLSVELDRLSEESVNNDISSWTKGRSGEALSLLKKRFSHRPVQEKFVCLNCGFETHADEQAALNIARSWLFLRSQEYKKYQTNKTTGNTDKRAFVETWQSFYRKKLKEVWKPAV

SEQ ID NO: 46215 - protein, 977 aa, synthetic construct
  REGION 1..977: note = engineered CasX variant
QEIKRINKIRRRLVKDSNTKKAGKTGPMKTLLVRVMTPDLRERLENLRKKPENIPQPISNTSRANLNKLLTDYTEMKKAILHVYWEEFQVDPVGLMSRVAQPASKKIDQNKLKPEMDEKGNLTTAGFACSQCGQPLFVYKLEQVSEKGKAYTNYFGRCNVAEHEKLILLAQLKPEKDSDEAVTYSLGKFGQRALDFYSIHVTKESTHPVKPLAQIAGNRYASPVGKALSDACMGTIASFLSKYQDIIIEHQKVVKGNQKRLESLRELAGKENLEYPSVTLPPQPHTKEGVDAYNEVIARVRMWVNLNLWQKLKLSRDDAKPLLRLKGFPSFPLVERQANEVDWWDMVCNVKKLINEKKEDGKVFWQNLAGYKRQEALRPYLSSEEDRKKGKKFARYQLGDLLLHLEKKHGEDWGKVYDEAWERIDKKVEGLSKHIKLEEERRSEDAQSKAALTDWLRAKASFVIEGLKEADKDEFCRCELKLQKWYGDLRGKPFAIEAENSILDISGFSKQYNCAFIWQKDGVKKLNLYLIINYFKGGKLRFKKIKPEAFEANRFYTVINKKSGEIVPMEVNFNFDDPNLIILPLAFGKRQGREFIWNDLLSLETGSLKLANGRVIEKTLYNRRTRQDEPALFVALTFERREVLDSSNIKPMNLIGVDRGENIPAVIALTDPEGCPLSRFKDSLGNPTHILRIGESYKEKQRTIQAKKEVEQRRAGGYSRKYASKAKNLADDMVRNTARDLLYYAVTQDAMLIFENLSRGFGRQGKRTFMAERQYTRMEDWLTAKLAYNGLPSKTYLSKTLAQYTSKTCSNCGFTITSADYDRVLEKLKKTATGWMTTINGKELKVEGQITYYNRYKRQNVVKDLSVELDRLSEESVNNDISSWTKGRSGEALSLLKKRFSHRPVQEKFVCLNCGFETHADEQAALNIARSWLFLRSQEYKKYQTNKTTGNTDKRAFVETWQSFYRKKLKEVWKPAV

SEQ ID NO: 46216 - protein, 978 aa, synthetic construct
  REGION 1..978: note = engineered CasX variant
QEIKRINKIRRRLVKDSNTKKAGKTGPMKTLLVRVMTPDLRERLENLRKKPENIPQPISNTSRANLNKLLTDYTEMKKAILHVYWEEFQVDPVGLMSRVAQPASKKIDQNKLKPEMDEKGNLTTAGFACSQCGQPLFVYKLEQVSEKGKAYTNYFGRCNVAEHEKLIQLAQLKPEKDSDEAVTYSLGKFGQRALDFYSIHVTKESTHPVKPLAQIAGNRYASYPVGKALSDACMGTIASFLSKYQDIIIEHQKVVKGNQKRLESLRELAGKENLEYPSVTLPPQPHTKEGVDAYNEVIARVRMWVNLNLWQKLKLSRDDAKPLLRLKGFPSFPLVERQANEVDWWDMVCNVKKLINEKKEDGKVFWQNLAGYKRQEALRPYLSSEEDRKKGKKFARYQLGDLLLHLEKKHGEDWGKVYDEAWERIDKKVEGLSKHIKLEEERRSEDAQSKAALTDWLRAKASFVIEGLKEADKDEFCRCELKLQKWYGDLRGKPFAIEAENSILDISGFSKQYNCAFIWQKDGVKKLNLYLIINYFKGGKLRFKKIKPEAFEANRFYTVINKKSGEIVPMEVNFNFDDPNLIILPLAFGKRQGREFIWNDLLSLETGSLKLANGRVIEKTLYNRRTRQDEPALFVALTFERREVLDSSNIKPMNLIGVDRGENIPAVIALTDPEGCPLSRFKDSLGNPTHILRIGESYKEKQRTIQAKKEVEQRRAGGYSRKYASKAKNLADDMVRNTARDLLYYAVTQDAMLIFENLSRGFGRQGKRTFMAERQYTRMEDWLTAKLAYEGLPSKTYLSKTLAQYTSKTCSNCGFTITSADYDRVLEKLKKTATGWMTTINGKELKVEGQITYYNRYKRQNVVKDLSVELDRLSEESVNNDISSWTKGRSGEALSLLKKRFSHRPVQEKFVCLNCGFETHADEQAALNIARSWLFLRSQEYKKYQTNKTTGNTDKRAFVETWQSFYRKKLKEVWKPAV

SEQ ID NO: 46217 - protein, 978 aa, synthetic construct
  REGION 1..978: note = engineered CasX variant
QEIKRINKIRRRLVKDSNTKKAGKTGPMKTLLVRVMTPDLRERLENLRKKPENIPQPISNTSRANLNKLLTDYTEMKKAILHVYWEEFQVDPVGLMSRVAQPASKKIDQNKLKPEMDEKGNLTTAGFACSQCGQPLFVYKLEQVSEKGKAYTNYFGRCNVAEHEKLIQLAQLKPEKDSDEAVTYSLGKFGQRALDFYSIHVTKESTHPVKPLAQIAGNRYASHPVGKALSDACMGTIASFLSKYQDIIIEHQKVVKGNQKRLESLRELAGKENLEYPSVTLPPQPHTKEGVDAYNEVIARVRMWVNLNLWQKLKLSRDDAKPLLRLKGFPSFPLVERQANEVDWWDMVCNVKKLINEKKEDGKVFWQNLAGYKRQEALRPYLSSEEDRKKGKKFARYQLGDLLLHLEKKHGEDWGKVYDEAWERIDKKVEGLSKHIKLEEERRSEDAQSKAALTDWLRAKASFVIEGLKEADKDEFCRCELKLQKWYGDLRGKPFAIEAENSILDISGFSKQYNCAFIWQKDGVKKLNLYLIINYFKGGKLRFKKIKPEAFEANRFYTVINKKSGEIVPMEVNFNFDDPNLIILPLAFGKRQGREFIWNDLLSLETGSLKLANGRVIEKTLYNRRTRQDEPALFVALTFERREVLDSSNIKPMNLIGVDRGENIPAVIALTDPEGCPLSRFKDSLGNPTHILRIGESYKEKQRTIQAKKEVEQRRAGGYSRKYASKAKNLADDMVRNTARDLLYYAVTQDAMLIFENLSRGFGRQGKRTFMAERQYTRMEDWLTAKLAYEGLPSKTYLSKTLAQYTSKTCSNCGFTITSADYDRVLEKLKKTATGWMTTINGKELKVEGQITYYNRYKRQNVVKDLSVELDRLSEESVNNDISSWTKGRSGEALSLLKKRFSHRPVQEKFVCLNCGFETHADEQAALNIARSWLFLRSQEYKKYQTNKTTGNTDKRAFVETWQSFYRKKLKEVWKPAV

SEQ ID NO: 46218 - protein, 978 aa, synthetic construct
  REGION 1..978: note = engineered CasX variant
QEIKRINKIRRRLVKDSNTKKAGKTGPMKTLLVRVMTPDLRERLENLRKKPENIPQPISNTSRANLNKLLTDYTEMKKAILHVYWEEFQVDPVGLMSRVAQPASKKIDQNKLKPEMDEKGNLTTAGFACSQCGQPLFVYKLEQVSEKGKAYTNYFGRCNVAEHEKLIQLAQLKPEKDSDEAVTYSLGKFGQRALDFYSIHVTKESTHPVKPLAQIAGNRYASSPVGKALSDACMGTIASFLSKYQDIIIEHQKVVKGNQKRLESLRELAGKENLEYPSVTLPPQPHTKEGVDAYNEVIARVRMWVNLNLWQKLKLSRDDAKPLLRLKGFPSFPLVERQANEVDWWDMVCNVKKLINEKKEDGKVFWQNLAGYKRQEALRPYLSSEEDRKKGKKFARYQLGDLLLHLEKKHGEDWGKVYDEAWERIDKKVEGLSKHIKLEEERRSEDAQSKAALTDWLRAKASFVIEGLKEADKDEFCRCELKLQKWYGDLRGKPFAIEAENSILDISGFSKQYNCAFIWQKDGVKKLNLYLIINYFKGGKLRFKKIKPEAFEANRFYTVINKKSGEIVPMEVNFNFDDPNLIILPLAFGKRQGREFIWNDLLSLETGSLKLANGRVIEKTLYNRRTRQDEPALFVALTFERREVLDSSNIKPMNLIGVDRGENIPAVIALTDPEGCPLSRFKDSLGNPTHILRIGESYKEKQRTIQAKKEVEQRRAGGYSRKYASKAKNLADDMVRNTARDLLYYAVTQDAMLIFENLSRGFGRQGKRTFMAERQYTRMEDWLTAKLAYEGLPSKTYLSKTLAQYTSKTCSNCGFTITSADYDRVLEKLKKTATGWMTTINGKELKVEGQITYYNRYKRQNVVKDLSVELDRLSEESVNNDISSWTKGRSGEALSLLKKRFSHRPVQEKFVCLNCGFETHADEQAALNIARSWLFLRSQEYKKYQTNKTTGNTDKRAFVETWQSFYRKKLKEVWKPAV

SEQ ID NO: 46219 - protein, 978 aa, synthetic construct
  REGION 1..978: note = engineered CasX variant
QEIKRINKIRRRLVKDSNTKKAGKTGPMKTLLVRVMTPDLRERLENLRKKPENIPQPISNTSRANLNKLLTDYTEMKKAILHVYWEEFQVDPVGLMSRVAQPASKKIDQNKLKPEMDEKGNLTTAGFACSQCGQPLFVYKLEQVSEKGKAYTNYFGRCNVAEHEKLIQLAQLKPEKDSDEAVTYSLGKFGQRALDFYSIHVTKESTHPVKPLAQIAGNRYASTPVGKALSDACMGTIASFLSKYQDIIIEHQKVVKGNQKRLESLRELAGKENLEYPSVTLPPQPHTKEGVDAYNEVIARVRMWVNLNLWQKLKLSRDDAKPLLRLKGFPSFPLVERQANEVDWWDMVCNVKKLINEKKEDGKVFWQNLAGYKRQEALRPYLSSEEDRKKGKKFARYQLGDLLLHLEKKHGEDWGKVYDEAWERIDKKVEGLSKHIKLEEERRSEDAQSKAALTDWLRAKASFVIEGLKEADKDEFCRCELKLQKWYGDLRGKPFAIEAENSILDISGFSKQYNCAFIWQKDGVKKLNLYLIINYFKGGKLRFKKIKPEAFEANRFYTVINKKSGEIVPMEVNFNFDDPNLIILPLAFGKRQGREFIWNDLLSLETGSLKLANGRVIEKTLYNRRTRQDEPALFVALTFERREVLDSSNIKPMNLIGVDRGENIPAVIALTDPEGCPLSRFKDSLGNPTHILRIGESYKEKQRTIQAKKEVEQRRAGGYSRKYASKAKNLADDMVRNTARDLLYYAVTQDAMLIFENLSRGFGRQGKRTFMAERQYTRMEDWLTAKLAYEGLPSKTYLSKTLAQYTSKTCSNCGFTITSADYDRVLEKLKKTATGWMTTINGKELKVEGQITYYNRYKRQNVVKDLSVELDRLSEESVNNDISSWTKGRSGEALSLLKKRFSHRPVQEKFVCLNCGFETHADEQAALNIARSWLFLRSQEYKKYQTNKTTGNTDKRAFVETWQSFYRKKLKEVWKPAV

SEQ ID NO: 46220 - protein, 978 aa, synthetic construct
  REGION 1..978: note = engineered CasX variant
QEIKRINKIRRRLVKDSNTKKAGKTGPMKTLLVRVMTPDLRERLENLRKKPENIPQPISNTSRANLNKLLTDYTEMKKAILHVYWEEFQVDPVGLMSRVAQPASKKIDQNKLKPEMDEKGNLTTAGFACSQCGQPLFVYKLEQVSEKGKAYTNYFGRCNVAEHEKLIQLAQLKPEKDSDEAVTYSLGKFGQRALDFYSIHVTKESTHPVKPLAQIAGNRYASAPVGKALSDACMGTIASFLSKYQDIIIEHQKVVKGNQKRLESLRELAGKENLEYPSVTLPPQPHTKEGVDAYNEVIARVRMWVNLNLWQKLKLSRDDAKPLLRLKGFPSFPLVERQANEVDWWDMVCNVKKLINEKKEDGKVFWQNLAGYKRQEALRPYLSSEEDRKKGKKFARYQLGDLLLHLEKKHGEDWGKVYDEAWERIDKKVEGLSKHIKLEEERRSEDAQSKAALTDWLRAKASFVIEGLKEADKDEFCRCELKLQKWYGDLRGKPFAIEAENSILDISGFSKQYNCAFIWQKDGVKKLNLYLIINYFKGGKLRFKKIKPEAFEANRFYTVINKKSGEIVPMEVNFNFDDPNLIILPLAFGKRQGREFIWNDLLSLETGSLKLANGRVIEKTLYNRRTRQDEPALFVALTFERREVLDSSNIKPMNLIGVDRGENIPAVIALTDPEGCPLSRFKDSLGNPTHILRIGESYKEKQRTIQAKKEVEQRRAGGYSRKYASKAKNLADDMVRNTARDLLYYAVTQDAMLIFENLSRGFGRQGKRTFMAERQYTRMEDWLTAKLAYEGLPSKTYLSKTLAQYTSKTCSNCGFTITSADYDRVLEKLKKTATGWMTTINGKELKVEGQITYYNRYKRQNVVKDLSVELDRLSEESVNNDISSWTKGRSGEALSLLKKRFSHRPVQEKFVCLNCGFETHADEQAALNIARSWLFLRSQEYKKYQTNKTTGNTDKRAFVETWQSFYRKKLKEVWKPAV

SEQ ID NO: 46221 - protein, 978 aa, synthetic construct
  REGION 1..978: note = engineered CasX variant
QEIKRINKIRRRLVKDSNTKKAGKTGPMKTLLVRVMTPDLRERLENLRKKPENIPQPISNTSRANLNKLLTDYTEMKKAILHVYWEEFQVDPVGLMSRVAQPASKKIDQNKLKPEMDEKGNLTTAGFACSQCGQPLFVYKLEQVSEKGKAYTNYFGRCNVAEHEKLIQLAQLKPEKDSDEAVTYSLGKFGQRALDFYSIHVTKESTHPVKPLAQIAGNRYASVPVGKALSDACMGTIASFLSKYQDIIIEHQKVVKGNQKRLESLRELAGKENLEYPSVTLPPQPHTKEGVDAYNEVIARVRMWVNLNLWQKLKLSRDDAKPLLRLKGFPSFPLVERQANEVDWWDMVCNVKKLINEKKEDGKVFWQNLAGYKRQEALRPYLSSEEDRKKGKKFARYQLGDLLLHLEKKHGEDWGKVYDEAWERIDKKVEGLSKHIKLEEERRSEDAQSKAALTDWLRAKASFVIEGLKEADKDEFCRCELKLQKWYGDLRGKPFAIEAENSILDISGFSKQYNCAFIWQKDGVKKLNLYLIINYFKGGKLRFKKIKPEAFEANRFYTVINKKSGEIVPMEVNFNFDDPNLIILPLAFGKRQGREFIWNDLLSLETGSLKLANGRVIEKTLYNRRTRQDEPALFVALTFERREVLDSSNIKPMNLIGVDRGENIPAVIALTDPEGCPLSRFKDSLGNPTHILRIGESYKEKQRTIQAKKEVEQRRAGGYSRKYASKAKNLADDMVRNTARDLLYYAVTQDAMLIFENLSRGFGRQGKRTFMAERQYTRMEDWLTAKLAYEGLPSKTYLSKTLAQYTSKTCSNCGFTITSADYDRVLEKLKKTATGWMTTINGKELKVEGQITYYNRYKRQNVVKDLSVELDRLSEESVNNDISSWTKGRSGEALSLLKKRFSHRPVQEKFVCLNCGFETHADEQAALNIARSWLFLRSQEYKKYQTNKTTGNTDKRAFVETWQSFYRKKLKEVWKPAV

SEQ ID NO: 46222 - protein, 979 aa, synthetic construct
  REGION 1..979: note = engineered CasX variant
QEIKRINKIRRRLVKDSNTKKAGKTGPMKTLLVRVMTPDLRERLENLRKKPENIPQPISNTSRANLNKLLTDYTEMKKAILHVYWEEFQVDPVGLMSRVAQPASKKIDQNKLKPEMDEKGNLTTAGFACSQCGQPLFVYKLEQVSEKGKAYTNYFGRCNVAEHEKLIQKLAQLKPEKDSDEAVTYSLGKFGQRALDFYSIHVTKESTHPVKPLAQIAGNRYASGPVGKALSDACMGTIASFLSKYQDIIIEHQKVVKGNQKRLESLRELAGKENLEYPSVTLPPQPHTKEGVDAYNEVIARVRMWVNLNLWQKLKLSRDDAKPLLRLKGFPSFPLVERQANEVDWWDMVCNVKKLINEKKEDGKVFWQNLAGYKRQEALRPYLSSEEDRKKGKKFARYQLGDLLLHLEKKHGEDWGKVYDEAWERIDKKVEGLSKHIKLEEERRSEDAQSKAALTDWLRAKASFVIEGLKEADKDEFCRCELKLQKWYGDLRGKPFAIEAENSILDISGFSKQYNCAFIWQKDGVKKLNLYLIINYFKGGKLRFKKIKPEAFEANRFYTVINKKSGEIVPMEVNFNFDDPNLIILPLAFGKRQGREFIWNDLLSLETGSLKLANGRVIEKTLYNRRTRQDEPALFVALTFERREVLDSSNIKPMNLIGVDRGENIPAVIALTDPEGCPLSRFKDSLGNPTHILRIGESYKEKQRTIQAKKEVEQRRAGGYSRKYASKAKNLADDMVRNTARDLLYYAVTQDAMLIFENLSRGFGRQGKRTFMAERQYTRMEDWLTAKLAYEGLPSKTYLSKTLAQYTSKTCSNCGFTITSADYDRVLEKLKKTATGWMTTINGKELKVEGQITYYNRYKRQNVVKDLSVELDRLSEESVNNDISSWTKGRSGEALSLLKKRFSHRPVQEKFVCLNCGFETHADEQAALNIARSWLFLRSQEYKKYQTNKTTGNTDKRAFVETWQSFYRKKLKEVWKPAV

SEQ ID NO: 46223 - protein, 977 aa, synthetic construct
  REGION 1..977: note = engineered CasX variant
QEIKRINKIRRRLVKDSNTKKAGKTGPMKTLLVRVMTPDLRERLENLRKKPENIPQPISNTSRANLNKLLTDYTEMKKAILHVYWEEFQVDPVGLMSRVAQPASKKIDQNKLKPEMDEKGNLTTAGFACSQCGQPLFVYKLEQVSEKGKAYTNYFGRCNVAEHEKLIQLAQLKPEKDSDEAVTYSLGKFGQRALDFYSIHVTKESTHPVKPLAQIAGNRYASPVGKALSDACMGTIASFLSKYQDIIIEHQKVVKGNQKRLESLRELAGKENLEYPSVTLPPQPHTKEGVDAYNEVIARVRMWVNLNLWQKLKLSRDDAKPLLRLKGFPSFPLVERQANEVDWWDMVCNVKKLINEKKEDGKVFWQNLAGYKRQEALRPYLSSEEDRKKGKKFARYQLGDLLLHLEKKHGEDWGKVYDEAWERIDKKVEGLSKHIKLEEERRSEDAQSKAALTDWLRAKASFVIEGLKEADKDEFCRCELKLQKWYGDLRGKPFAIEAENSILDISGFSKQYNCAFIWQKDGVKKLNLYLIINYFKGGKLRFKKIKPEAFEANRFYTVINKKSGEIVPMEVNFNFDDPNLIILPLAFGKRQGREFIWNDLLSLETGSLKLANGRVIEKTLYNRRTRQDEPALFVALTFERREVLDSSNIKPMNLIGVDRGENIPAVIALTDPEGCPLSRFKDSLGNPTHILRIGESYKEKQRTIQAKKEVEQRRAGGYSRKYASKAKNLADDMVRNTARDLLYYAVTQDAMLIFENLSRGFGRQGKRTFMAERQYTRMEDWLTAKLAYEGLPSKTYLSKTLAQYTSKTCSNCGFTITSADYDRVLEKLKKTATGWMTTINGKELKVEGQITYYNRYKRQNVVKDLSVELDRLSEESVNNDISSWTKGRSGEALSLLKKRFSHRPVQEKFVCLNCGFETHADEQAALNIARSWLFLRSQEYKKYQTNKTTGNTDKRAFVETWQSFYRKKLKEVWKPAV

SEQ ID NO: 46224 - protein, 978 aa, synthetic construct
  REGION 1..978: note = engineered CasX variant
QEIKRINKIRRRLVKDSNTKKAGKTGPMKTLLVRVMTPDLRERLENLRKKPENIPQPISNTSRANLNKLLTDYTEMKKAILHVYWEEFQVDPVGLMSRVAQPASKKIDQNKLKPEMDEKGNLTTAGFACSQCGQPLFVYKLEQVSEKGKAYTNYFGRCNVAEHEKLILLAQLKPEKDSDEAVTYSLGKFGQRALDFYSIHVTKESTHPVKPLAQIAGNRYASYPVGKALSDACMGTIASFLSKYQDIIIEHQKVVKGNQKRLESLRELAGKENLEYPSVTLPPQPHTKEGVDAYNEVIARVRMWVNLNLWQKLKLSRDDAKPLLRLKGFPSFPLVERQANEVDWWDMVCNVKKLINEKKEDGKVFWQNLAIYKRQEALRPYLSSEEDRKKGKKFARYQLGDLLLHLEKKHGEDWGKVYDEAWERIDKKVEGLSKHIKLEEERRSEDAQSKAALTDWLRAKASFVIEGLKEADKDEFCRCELKLQKWYGDLRGKPFAIEAENSILDISGFSKQYNCAFIWQKDGVKKLNLYLIINYFKGGKLRFKKIKPEAFEANRFYTVINKKSGEIVPMEVNFNFDDPNLIILPLAFGKRQGREFIWNDLLSLETGSLKLANGRVIEKTLYNRRTRQDEPALFVALTFERREVLDSSNIKPMNLIGVDRGENIPAVIALTDPEGCPLSRFKDSLGNPTHILRIGESYKEKQRTIQAKKEVEQRRAGGYSRKYASKAKNLADDMVRNTARDLLYYAVTQDAMLIFENLSRGFGRQGKRTFMAERQYTRMEDWLTAKLAYEGLPSKTYLSKTLAQYTSKTCSNCGFTITSADYDRVLEKLKKTATGWMTTINGKELKVEGQITYYNRYKRQNVVKDLSVELDRLSEESVNNDISSWTKGRSGEALSLLKKRFSHRPVQEKFVCLNCGFETHADEQAALNIARSWLFLRSQEYKKYQTNKTTGNTDKRAFVETWQSFYRKKLKEVWKPAV

SEQ ID NO: 46225 - protein, 978 aa, synthetic construct
  REGION 1..978: note = engineered CasX variant
QEIKRINKIRRRLVKDSNTKKAGKTGPMKTLLVRVMTPDLRERLENLRKKPENIPQPISNTSRANLNKLLTDYTEMKKAILHVYWEEFQVDPVGLMSRVAQPASKKIDQNKLKPEMDEKGNLTTAGFACSQCGQPLFVYKLEQVSEKGKAYTNYFGRCNVAEHEKLILLAQLKPEKDSDEAVTYSLGKFGQRALDFYSIHVTKESTHPVKPLAQIAGNRYASHPVGKALSDACMGTIASFLSKYQDIIIEHQKVVKGNQKRLESLRELAGKENLEYPSVTLPPQPHTKEGVDAYNEVIARVRMWVNLNLWQKLKLSRDDAKPLLRLKGFPSFPLVERQANEVDWWDMVCNVKKLINEKKEDGKVFWQNLAIYKRQEALRPYLSSEEDRKKGKKFARYQLGDLLLHLEKKHGEDWGKVYDEAWERIDKKVEGLSKHIKLEEERRSEDAQSKAALTDWLRAKASFVIEGLKEADKDEFCRCELKLQKWYGDLRGKPFAIEAENSILDISGFSKQYNCAFIWQKDGVKKLNLYLIINYFKGGKLRFKKIKPEAFEANRFYTVINKKSGEIVPMEVNFNFDDPNLIILPLAFGKRQGREFIWNDLLSLETGSLKLANGRVIEKTLYNRRTRQDEPALFVALTFERREVLDSSNIKPMNLIGVDRGENIPAVIALTDPEGCPLSRFKDSLGNPTHILRIGESYKEKQRTIQAKKEVEQRRAGGYSRKYASKAKNLADDMVRNTARDLLYYAVTQDAMLIFENLSRGFGRQGKRTFMAERQYTRMEDWLTAKLAYEGLPSKTYLSKTLAQYTSKTCSNCGFTITSADYDRVLEKLKKTATGWMTTINGKELKVEGQITYYNRYKRQNVVKDLSVELDRLSEESVNNDISSWTKGRSGEALSLLKKRFSHRPVQEKFVCLNCGFETHADEQAALNIARSWLFLRSQEYKKYQTNKTTGNTDKRAFVETWQSFYRKKLKEVWKPAV

SEQ ID NO: 46226 - protein, 978 aa, synthetic construct
  REGION 1..978: note = engineered CasX variant
QEIKRINKIRRRLVKDSNTKKAGKTGPMKTLLVRVMTPDLRERLENLRKKPENIPQPISNTSRANLNKLLTDYTEMKKAILHVYWEEFQVDPVGLMSRVAQPASKKIDQNKLKPEMDEKGNLTTAGFACSQCGQPLFVYKLEQVSEKGKAYTNYFGRCNVAEHEKLILLAQLKPEKDSDEAVTYSLGKFGQRALDFYSIHVTKESTHPVKPLAQIAGNRYASSPVGKALSDACMGTIASFLSKYQDIIIEHQKVVKGNQKRLESLRELAGKENLEYPSVTLPPQPHTKEGVDAYNEVIARVRMWVNLNLWQKLKLSRDDAKPLLRLKGFPSFPLVERQANEVDWWDMVCNVKKLINEKKEDGKVFWQNLAIYKRQEALRPYLSSEEDRKKGKKFARYQLGDLLLHLEKKHGEDWGKVYDEAWERIDKKVEGLSKHIKLEEERRSEDAQSKAALTDWLRAKASFVIEGLKEADKDEFCRCELKLQKWYGDLRGKPFAIEAENSILDISGFSKQYNCAFIWQKDGVKKLNLYLIINYFKGGKLRFKKIKPEAFEANRFYTVINKKSGEIVPMEVNFNFDDPNLIILPLAFGKRQGREFIWNDLLSLETGSLKLANGRVIEKTLYNRRTRQDEPALFVALTFERREVLDSSNIKPMNLIGVDRGENIPAVIALTDPEGCPLSRFKDSLGNPTHILRIGESYKEKQRTIQAKKEVEQRRAGGYSRKYASKAKNLADDMVRNTARDLLYYAVTQDAMLIFENLSRGFGRQGKRTFMAERQYTRMEDWLTAKLAYEGLPSKTYLSKTLAQYTSKTCSNCGFTITSADYDRVLEKLKKTATGWMTTINGKELKVEGQITYYNRYKRQNVVKDLSVELDRLSEESVNNDISSWTKGRSGEALSLLKKRFSHRPVQEKFVCLNCGFETHADEQAALNIARSWLFLRSQEYKKYQTNKTTGNTDKRAFVETWQSFYRKKLKEVWKPAV

SEQ ID NO: 46227 - protein, 978 aa, synthetic construct
  REGION 1..978: note = engineered CasX variant
QEIKRINKIRRRLVKDSNTKKAGKTGPMKTLLVRVMTPDLRERLENLRKKPENIPQPISNTSRANLNKLLTDYTEMKKAILHVYWEEFQVDPVGLMSRVAQPASKKIDQNKLKPEMDEKGNLTTAGFACSQCGQPLFVYKLEQVSEKGKAYTNYFGRCNVAEHEKLILLAQLKPEKDSDEAVTYSLGKFGQRALDFYSIHVTKESTHPVKPLAQIAGNRYASTPVGKALSDACMGTIASFLSKYQDIIIEHQKVVKGNQKRLESLRELAGKENLEYPSVTLPPQPHTKEGVDAYNEVIARVRMWVNLNLWQKLKLSRDDAKPLLRLKGFPSFPLVERQANEVDWWDMVCNVKKLINEKKEDGKVFWQNLAIYKRQEALRPYLSSEEDRKKGKKFARYQLGDLLLHLEKKHGEDWGKVYDEAWERIDKKVEGLSKHIKLEEERRSEDAQSKAALTDWLRAKASFVIEGLKEADKDEFCRCELKLQKWYGDLRGKPFAIEAENSILDISGFSKQYNCAFIWQKDGVKKLNLYLIINYFKGGKLRFKKIKPEAFEANRFYTVINKKSGEIVPMEVNFNFDDPNLIILPLAFGKRQGREFIWNDLLSLETGSLKLANGRVIEKTLYNRRTRQDEPALFVALTFERREVLDSSNIKPMNLIGVDRGENIPAVIALTDPEGCPLSRFKDSLGNPTHILRIGESYKEKQRTIQAKKEVEQRRAGGYSRKYASKAKNLADDMVRNTARDLLYYAVTQDAMLIFENLSRGFGRQGKRTFMAERQYTRMEDWLTAKLAYEGLPSKTYLSKTLAQYTSKTCSNCGFTITSADYDRVLEKLKKTATGWMTTINGKELKVEGQITYYNRYKRQNVVKDLSVELDRLSEESVNNDISSWTKGRSGEALSLLKKRFSHRPVQEKFVCLNCGFETHADEQAALNIARSWLFLRSQEYKKYQTNKTTGNTDKRAFVETWQSFYRKKLKEVWKPAV

SEQ ID NO: 46228 - protein, 978 aa, synthetic construct
  REGION 1..978: note = engineered CasX variant
QEIKRINKIRRRLVKDSNTKKAGKTGPMKTLLVRVMTPDLRERLENLRKKPENIPQPISNTSRANLNKLLTDYTEMKKAILHVYWEEFQVDPVGLMSRVAQPASKKIDQNKLKPEMDEKGNLTTAGFACSQCGQPLFVYKLEQVSEKGKAYTNYFGRCNVAEHEKLILLAQLKPEKDSDEAVTYSLGKFGQRALDFYSIHVTKESTHPVKPLAQIAGNRYASAPVGKALSDACMGTIASFLSKYQDIIIEHQKVVKGNQKRLESLRELAGKENLEYPSVTLPPQPHTKEGVDAYNEVIARVRMWVNLNLWQKLKLSRDDAKPLLRLKGFPSFPLVERQANEVDWWDMVCNVKKLINEKKEDGKVFWQNLAIYKRQEALRPYLSSEEDRKKGKKFARYQLGDLLLHLEKKHGEDWGKVYDEAWERIDKKVEGLSKHIKLEEERRSEDAQSKAALTDWLRAKASFVIEGLKEADKDEFCRCELKLQKWYGDLRGKPFAIEAENSILDISGFSKQYNCAFIWQKDGVKKLNLYLIINYFKGGKLRFKKIKPEAFEANRFYTVINKKSGEIVPMEVNFNFDDPNLIILPLAFGKRQGREFIWNDLLSLETGSLKLANGRVIEKTLYNRRTRQDEPALFVALTFERREVLDSSNIKPMNLIGVDRGENIPAVIALTDPEGCPLSRFKDSLGNPTHILRIGESYKEKQRTIQAKKEVEQRRAGGYSRKYASKAKNLADDMVRNTARDLLYYAVTQDAMLIFENLSRGFGRQGKRTFMAERQYTRMEDWLTAKLAYEGLPSKTYLSKTLAQYTSKTCSNCGFTITSADYDRVLEKLKKTATGWMTTINGKELKVEGQITYYNRYKRQNVVKDLSVELDRLSEESVNNDISSWTKGRSGEALSLLKKRFSHRPVQEKFVCLNCGFETHADEQAALNIARSWLFLRSQEYKKYQTNKTTGNTDKRAFVETWQSFYRKKLKEVWKPAV

SEQ ID NO: 46229 - protein, 978 aa, synthetic construct
  REGION 1..978: note = engineered CasX variant
QEIKRINKIRRRLVKDSNTKKAGKTGPMKTLLVRVMTPDLRERLENLRKKPENIPQPISNTSRANLNKLLTDYTEMKKAILHVYWEEFQVDPVGLMSRVAQPASKKIDQNKLKPEMDEKGNLTTAGFACSQCGQPLFVYKLEQVSEKGKAYTNYFGRCNVAEHEKLILLAQLKPEKDSDEAVTYSLGKFGQRALDFYSIHVTKESTHPVKPLAQIAGNRYASVPVGKALSDACMGTIASFLSKYQDIIIEHQKVVKGNQKRLESLRELAGKENLEYPSVTLPPQPHTKEGVDAYNEVIARVRMWVNLNLWQKLKLSRDDAKPLLRLKGFPSFPLVERQANEVDWWDMVCNVKKLINEKKEDGKVFWQNLAIYKRQEALRPYLSSEEDRKKGKKFARYQLGDLLLHLEKKHGEDWGKVYDEAWERIDKKVEGLSKHIKLEEERRSEDAQSKAALTDWLRAKASFVIEGLKEADKDEFCRCELKLQKWYGDLRGKPFAIEAENSILDISGFSKQYNCAFIWQKDGVKKLNLYLIINYFKGGKLRFKKIKPEAFEANRFYTVINKKSGEIVPMEVNFNFDDPNLIILPLAFGKRQGREFIWNDLLSLETGSLKLANGRVIEKTLYNRRTRQDEPALFVALTFERREVLDSSNIKPMNLIGVDRGENIPAVIALTDPEGCPLSRFKDSLGNPTHILRIGESYKEKQRTIQAKKEVEQRRAGGYSRKYASKAKNLADDMVRNTARDLLYYAVTQDAMLIFENLSRGFGRQGKRTFMAERQYTRMEDWLTAKLAYEGLPSKTYLSKTLAQYTSKTCSNCGFTITSADYDRVLEKLKKTATGWMTTINGKELKVEGQITYYNRYKRQNVVKDLSVELDRLSEESVNNDISSWTKGRSGEALSLLKKRFSHRPVQEKFVCLNCGFETHADEQAALNIARSWLFLRSQEYKKYQTNKTTGNTDKRAFVETWQSFYRKKLKEVWKPAV

SEQ ID NO: 46230 - protein, 978 aa, synthetic construct
  REGION 1..978: note = engineered CasX variant
QEIKRINKIRRRLVKDSNTKKAGKTGPMKTLLVRVMTPDLRERLENLRKKPENIPQPISNTSRANLNKLLTDYTEMKKAILHVYWEEFQVDPVGLMSRVAQPASKKIDQNKLKPEMDEKGNLTTAGFACSQCGQPLFVYKLEQVSEKGKAYTNYFGRCNVAEHEKLIKLAQLKPEKDSDEAVTYSLGKFGQRALDFYSIHVTKESTHPVKPLAQIAGNRYASGPVGKALSDACMGTIASFLSKYQDIIIEHQKVVKGNQKRLESLRELAGKENLEYPSVTLPPQPHTKEGVDAYNEVIARVRMWVNLNLWQKLKLSRDDAKPLLRLKGFPSFPLVERQANEVDWWDMVCNVKKLINEKKEDGKVFWQNLAIYKRQEALRPYLSSEEDRKKGKKFARYQLGDLLLHLEKKHGEDWGKVYDEAWERIDKKVEGLSKHIKLEEERRSEDAQSKAALTDWLRAKASFVIEGLKEADKDEFCRCELKLQKWYGDLRGKPFAIEAENSILDISGFSKQYNCAFIWQKDGVKKLNLYLIINYFKGGKLRFKKIKPEAFEANRFYTVINKKSGEIVPMEVNFNFDDPNLIILPLAFGKRQGREFIWNDLLSLETGSLKLANGRVIEKTLYNRRTRQDEPALFVALTFERREVLDSSNIKPMNLIGVDRGENIPAVIALTDPEGCPLSRFKDSLGNPTHILRIGESYKEKQRTIQAKKEVEQRRAGGYSRKYASKAKNLADDMVRNTARDLLYYAVTQDAMLIFENLSRGFGRQGKRTFMAERQYTRMEDWLTAKLAYEGLPSKTYLSKTLAQYTSKTCSNCGFTITSADYDRVLEKLKKTATGWMTTINGKELKVEGQITYYNRYKRQNVVKDLSVELDRLSEESVNNDISSWTKGRSGEALSLLKKRFSHRPVQEKFVCLNCGFETHADEQAALNIARSWLFLRSQEYKKYQTNKTTGNTDKRAFVETWQSFYRKKLKEVWKPAV

SEQ ID NO: 46231 - protein, 977 aa, synthetic construct
  REGION 1..977: note = engineered CasX variant
QEIKRINKIRRRLVKDSNTKKAGKTGPMKTLLVRVMTPDLRERLENLRKKPENIPQPISNTSRANLNKLLTDYTEMKKAILHVYWEEFQVDPVGLMSRVAQPASKKIDQNKLKPEMDEKGNLTTAGFACSQCGQPLFVYKLEQVSEKGKAYTNYFGRCNVAEHEKLILLAQLKPEKDSDEAVTYSLGKFGQRALDFYSIHVTKESTHPVKPLAQIAGNRYASPVGKALSDACMGTIASFLSKYQDIIIEHQKVVKGNQKRLESLRELAGKENLEYPSVTLPPQPHTKEGVDAYNEVIARVRMWVNLNLWQKLKLSRDDAKPLLRLKGFPSFPLVERQANEVDWWDMVCNVKKLINEKKEDGKVFWQNLAIYKRQEALRPYLSSEEDRKKGKKFARYQLGDLLLHLEKKHGEDWGKVYDEAWERIDKKVEGLSKHIKLEEERRSEDAQSKAALTDWLRAKASFVIEGLKEADKDEFCRCELKLQKWYGDLRGKPFAIEAENSILDISGFSKQYNCAFIWQKDGVKKLNLYLIINYFKGGKLRFKKIKPEAFEANRFYTVINKKSGEIVPMEVNFNFDDPNLIILPLAFGKRQGREFIWNDLLSLETGSLKLANGRVIEKTLYNRRTRQDEPALFVALTFERREVLDSSNIKPMNLIGVDRGENIPAVIALTDPEGCPLSRFKDSLGNPTHILRIGESYKEKQRTIQAKKEVEQRRAGGYSRKYASKAKNLADDMVRNTARDLLYYAVTQDAMLIFENLSRGFGRQGKRTFMAERQYTRMEDWLTAKLAYEGLPSKTYLSKTLAQYTSKTCSNCGFTITSADYDRVLEKLKKTATGWMTTINGKELKVEGQITYYNRYKRQNVVKDLSVELDRLSEESVNNDISSWTKGRSGEALSLLKKRFSHRPVQEKFVCLNCGFETHADEQAALNIARSWLFLRSQEYKKYQTNKTTGNTDKRAFVETWQSFYRKKLKEVWKPAV

SEQ ID NO: 46232 - protein, 978 aa, synthetic construct
  REGION 1..978: note = engineered CasX variant
QEIKRINKIRRRLVKDSNTKKAGKTGPMKTLLVRVMTPDLRERLENLRKKPENIPQPISNTSRANLNKLLTDYTEMKKAILHVYWEEFQVDPVGLMSRVAQPASKKIDQNKLKPEMDEKGNLTTAGFACSQCGQPLFVYKLEQVSEKGKAYTNYFGRCNVAEHEKLILLAQLKPEKDSDEAVTYSLGKFGQRALDFYSIHVTKESTHPVKPLAQIAGNRYASYPVGKALSDACMGTIASFLSKYQDIIIEHQKVVKGNQKRLESLRELAGKENLEYPSVTLPPQPHTKEGVDAYNEVIARVRMWVNLNLWQKLKLSRDDAKPLLRLKGFPSFPLVERQANEVDWWDMVCNVKKLINEKKEDGKVFWQNLAGYKRQEALRPYLSSEEDREKGKKFARYQLGDLLLHLEKKHGEDWGKVYDEAWERIDKKVEGLSKHIKLEEERRSEDAQSKAALTDWLRAKASFVIEGLKEADKDEFCRCELKLQKWYGDLRGKPFAIEAENSILDISGFSKQYNCAFIWQKDGVKKLNLYLIINYFKGGKLRFKKIKPEAFEANRFYTVINKKSGEIVPMEVNFNFDDPNLIILPLAFGKRQGREFIWNDLLSLETGSLKLANGRVIEKTLYNRRTRQDEPALFVALTFERREVLDSSNIKPMNLIGVDRGENIPAVIALTDPEGCPLSRFKDSLGNPTHILRIGESYKEKQRTIQAKKEVEQRRAGGYSRKYASKAKNLADDMVRNTARDLLYYAVTQDAMLIFENLSRGFGRQGKRTFMAERQYTRMEDWLTAKLAYEGLPSKTYLSKTLAQYTSKTCSNCGFTITSADYDRVLEKLKKTATGWMTTINGKELKVEGQITYYNRYKRQNVVKDLSVELDRLSEESVNNDISSWTKGRSGEALSLLKKRFSHRPVQEKFVCLNCGFETHADEQAALNIARSWLFLRSQEYKKYQTNKTTGNTDKRAFVETWQSFYRKKLKEVWKPAV

SEQ ID NO: 46233 - protein, 978 aa, synthetic construct
  REGION 1..978: note = engineered CasX variant
QEIKRINKIRRRLVKDSNTKKAGKTGPMKTLLVRVMTPDLRERLENLRKKPENIPQPISNTSRANLNKLLTDYTEMKKAILHVYWEEFQVDPVGLMSRVAQPASKKIDQNKLKPEMDEKGNLTTAGFACSQCGQPLFVYKLEQVSEKGKAYTNYFGRCNVAEHEKLILLAQLKPEKDSDEAVTYSLGKFGQRALDFYSIHVTKESTHPVKPLAQIAGNRYASHPVGKALSDACMGTIASFLSKYQDIIIEHQKVVKGNQKRLESLRELAGKENLEYPSVTLPPQPHTKEGVDAYNEVIARVRMWVNLNLWQKLKLSRDDAKPLLRLKGFPSFPLVERQANEVDWWDMVCNVKKLINEKKEDGKVFWQNLAGYKRQEALRPYLSSEEDREKGKKFARYQLGDLLLHLEKKHGEDWGKVYDEAWERIDKKVEGLSKHIKLEEERRSEDAQSKAALTDWLRAKASFVIEGLKEADKDEFCRCELKLQKWYGDLRGKPFAIEAENSILDISGFSKQYNCAFIWQKDGVKKLNLYLIINYFKGGKLRFKKIKPEAFEANRFYTVINKKSGEIVPMEVNFNFDDPNLIILPLAFGKRQGREFIWNDLLSLETGSLKLANGRVIEKTLYNRRTRQDEPALFVALTFERREVLDSSNIKPMNLIGVDRGENIPAVIALTDPEGCPLSRFKDSLGNPTHILRIGESYKEKQRTIQAKKEVEQRRAGGYSRKYASKAKNLADDMVRNTARDLLYYAVTQDAMLIFENLSRGFGRQGKRTFMAERQYTRMEDWLTAKLAYEGLPSKTYLSKTLAQYTSKTCSNCGFTITSADYDRVLEKLKKTATGWMTTINGKELKVEGQITYYNRYKRQNVVKDLSVELDRLSEESVNNDISSWTKGRSGEALSLLKKRFSHRPVQEKFVCLNCGFETHADEQAALNIARSWLFLRSQEYKKYQTNKTTGNTDKRAFVETWQSFYRKKLKEVWKPAV

SEQ ID NO: 46234 - protein, 978 aa, synthetic construct
  REGION 1..978: note = engineered CasX variant
QEIKRINKIRRRLVKDSNTKKAGKTGPMKTLLVRVMTPDLRERLENLRKKPENIPQPISNTSRANLNKLLTDYTEMKKAILHVYWEEFQVDPVGLMSRVAQPASKKIDQNKLKPEMDEKGNLTTAGFACSQCGQPLFVYKLEQVSEKGKAYTNYFGRCNVAEHEKLILLAQLKPEKDSDEAVTYSLGKFGQRALDFYSIHVTKESTHPVKPLAQIAGNRYASSPVGKALSDACMGTIASFLSKYQDIIIEHQKVVKGNQKRLESLRELAGKENLEYPSVTLPPQPHTKEGVDAYNEVIARVRMWVNLNLWQKLKLSRDDAKPLLRLKGFPSFPLVERQANEVDWWDMVCNVKKLINEKKEDGKVFWQNLAGYKRQEALRPYLSSEEDREKGKKFARYQLGDLLLHLEKKHGEDWGKVYDEAWERIDKKVEGLSKHIKLEEERRSEDAQSKAALTDWLRAKASFVIEGLKEADKDEFCRCELKLQKWYGDLRGKPFAIEAENSILDISGFSKQYNCAFIWQKDGVKKLNLYLIINYFKGGKLRFKKIKPEAFEANRFYTVINKKSGEIVPMEVNFNFDDPNLIILPLAFGKRQGREFIWNDLLSLETGSLKLANGRVIEKTLYNRRTRQDEPALFVALTFERREVLDSSNIKPMNLIGVDRGENIPAVIALTDPEGCPLSRFKDSLGNPTHILRIGESYKEKQRTIQAKKEVEQRRAGGYSRKYASKAKNLADDMVRNTARDLLYYAVTQDAMLIFENLSRGFGRQGKRTFMAERQYTRMEDWLTAKLAYEGLPSKTYLSKTLAQYTSKTCSNCGFTITSADYDRVLEKLKKTATGWMTTINGKELKVEGQITYYNRYKRQNVVKDLSVELDRLSEESVNNDISSWTKGRSGEALSLLKKRFSHRPVQEKFVCLNCGFETHADEQAALNIARSWLFLRSQEYKKYQTNKTTGNTDKRAFVETWQSFYRKKLKEVWKPAV

SEQ ID NO: 46235 - protein, 978 aa, synthetic construct
  REGION 1..978: note = engineered CasX variant
QEIKRINKIRRRLVKDSNTKKAGKTGPMKTLLVRVMTPDLRERLENLRKKPENIPQPISNTSRANLNKLLTDYTEMKKAILHVYWEEFQVDPVGLMSRVAQPASKKIDQNKLKPEMDEKGNLTTAGFACSQCGQPLFVYKLEQVSEKGKAYTNYFGRCNVAEHEKLILLAQLKPEKDSDEAVTYSLGKFGQRALDFYSIHVTKESTHPVKPLAQIAGNRYASTPVGKALSDACMGTIASFLSKYQDIIIEHQKVVKGNQKRLESLRELAGKENLEYPSVTLPPQPHTKEGVDAYNEVIARVRMWVNLNLWQKLKLSRDDAKPLLRLKGFPSFPLVERQANEVDWWDMVCNVKKLINEKKEDGKVFWQNLAGYKRQEALRPYLSSEEDREKGKKFARYQLGDLLLHLEKKHGEDWGKVYDEAWERIDKKVEGLSKHIKLEEERRSEDAQSKAALTDWLRAKASFVIEGLKEADKDEFCRCELKLQKWYGDLRGKPFAIEAENSILDISGFSKQYNCAFIWQKDGVKKLNLYLIINYFKGGKLRFKKIKPEAFEANRFYTVINKKSGEIVPMEVNFNFDDPNLIILPLAFGKRQGREFIWNDLLSLETGSLKLANGRVIEKTLYNRRTRQDEPALFVALTFERREVLDSSNIKPMNLIGVDRGENIPAVIALTDPEGCPLSRFKDSLGNPTHILRIGESYKEKQRTIQAKKEVEQRRAGGYSRKYASKAKNLADDMVRNTARDLLYYAVTQDAMLIFENLSRGFGRQGKRTFMAERQYTRMEDWLTAKLAYEGLPSKTYLSKTLAQYTSKTCSNCGFTITSADYDRVLEKLKKTATGWMTTINGKELKVEGQITYYNRYKRQNVVKDLSVELDRLSEESVNNDISSWTKGRSGEALSLLKKRFSHRPVQEKFVCLNCGFETHADEQAALNIARSWLFLRSQEYKKYQTNKTTGNTDKRAFVETWQSFYRKKLKEVWKPAV

SEQ ID NO: 46236 - protein, 978 aa, synthetic construct
  REGION 1..978: note = engineered CasX variant
QEIKRINKIRRRLVKDSNTKKAGKTGPMKTLLVRVMTPDLRERLENLRKKPENIPQPISNTSRANLNKLLTDYTEMKKAILHVYWEEFQVDPVGLMSRVAQPASKKIDQNKLKPEMDEKGNLTTAGFACSQCGQPLFVYKLEQVSEKGKAYTNYFGRCNVAEHEKLILLAQLKPEKDSDEAVTYSLGKFGQRALDFYSIHVTKESTHPVKPLAQIAGNRYASAPVGKALSDACMGTIASFLSKYQDIIIEHQKVVKGNQKRLESLRELAGKENLEYPSVTLPPQPHTKEGVDAYNEVIARVRMWVNLNLWQKLKLSRDDAKPLLRLKGFPSFPLVERQANEVDWWDMVCNVKKLINEKKEDGKVFWQNLAGYKRQEALRPYLSSEEDREKGKKFARYQLGDLLLHLEKKHGEDWGKVYDEAWERIDKKVEGLSKHIKLEEERRSEDAQSKAALTDWLRAKASFVIEGLKEADKDEFCRCELKLQKWYGDLRGKPFAIEAENSILDISGFSKQYNCAFIWQKDGVKKLNLYLIINYFKGGKLRFKKIKPEAFEANRFYTVINKKSGEIVPMEVNFNFDDPNLIILPLAFGKRQGREFIWNDLLSLETGSLKLANGRVIEKTLYNRRTRQDEPALFVALTFERREVLDSSNIKPMNLIGVDRGENIPAVIALTDPEGCPLSRFKDSLGNPTHILRIGESYKEKQRTIQAKKEVEQRRAGGYSRKYASKAKNLADDMVRNTARDLLYYAVTQDAMLIFENLSRGFGRQGKRTFMAERQYTRMEDWLTAKLAYEGLPSKTYLSKTLAQYTSKTCSNCGFTITSADYDRVLEKLKKTATGWMTTINGKELKVEGQITYYNRYKRQNVVKDLSVELDRLSEESVNNDISSWTKGRSGEALSLLKKRFSHRPVQEKFVCLNCGFETHADEQAALNIARSWLFLRSQEYKKYQTNKTTGNTDKRAFVETWQSFYRKKLKEVWKPAV

SEQ ID NO: 46237 - protein, 978 aa, synthetic construct
  REGION 1..978: note = engineered CasX variant
QEIKRINKIRRRLVKDSNTKKAGKTGPMKTLLVRVMTPDLRERLENLRKKPENIPQPISNTSRANLNKLLTDYTEMKKAILHVYWEEFQVDPVGLMSRVAQPASKKIDQNKLKPEMDEKGNLTTAGFACSQCGQPLFVYKLEQVSEKGKAYTNYFGRCNVAEHEKLILLAQLKPEKDSDEAVTYSLGKFGQRALDFYSIHVTKESTHPVKPLAQIAGNRYASVPVGKALSDACMGTIASFLSKYQDIIIEHQKVVKGNQKRLESLRELAGKENLEYPSVTLPPQPHTKEGVDAYNEVIARVRMWVNLNLWQKLKLSRDDAKPLLRLKGFPSFPLVERQANEVDWWDMVCNVKKLINEKKEDGKVFWQNLAGYKRQEALRPYLSSEEDREKGKKFARYQLGDLLLHLEKKHGEDWGKVYDEAWERIDKKVEGLSKHIKLEEERRSEDAQSKAALTDWLRAKASFVIEGLKEADKDEFCRCELKLQKWYGDLRGKPFAIEAENSILDISGFSKQYNCAFIWQKDGVKKLNLYLIINYFKGGKLRFKKIKPEAFEANRFYTVINKKSGEIVPMEVNFNFDDPNLIILPLAFGKRQGREFIWNDLLSLETGSLKLANGRVIEKTLYNRRTRQDEPALFVALTFERREVLDSSNIKPMNLIGVDRGENIPAVIALTDPEGCPLSRFKDSLGNPTHILRIGESYKEKQRTIQAKKEVEQRRAGGYSRKYASKAKNLADDMVRNTARDLLYYAVTQDAMLIFENLSRGFGRQGKRTFMAERQYTRMEDWLTAKLAYEGLPSKTYLSKTLAQYTSKTCSNCGFTITSADYDRVLEKLKKTATGWMTTINGKELKVEGQITYYNRYKRQNVVKDLSVELDRLSEESVNNDISSWTKGRSGEALSLLKKRFSHRPVQEKFVCLNCGFETHADEQAALNIARSWLFLRSQEYKKYQTNKTTGNTDKRAFVETWQSFYRKKLKEVWKPAV

SEQ ID NO: 46238 - protein, 978 aa, synthetic construct
  REGION 1..978: note = engineered CasX variant
QEIKRINKIRRRLVKDSNTKKAGKTGPMKTLLVRVMTPDLRERLENLRKKPENIPQPISNTSRANLNKLLTDYTEMKKAILHVYWEEFQVDPVGLMSRVAQPASKKIDQNKLKPEMDEKGNLTTAGFACSQCGQPLFVYKLEQVSEKGKAYTNYFGRCNVAEHEKLIKLAQLKPEKDSDEAVTYSLGKFGQRALDFYSIHVTKESTHPVKPLAQIAGNRYASGPVGKALSDACMGTIASFLSKYQDIIIEHQKVVKGNQKRLESLRELAGKENLEYPSVTLPPQPHTKEGVDAYNEVIARVRMWVNLNLWQKLKLSRDDAKPLLRLKGFPSFPLVERQANEVDWWDMVCNVKKLINEKKEDGKVFWQNLAGYKRQEALRPYLSSEEDREKGKKFARYQLGDLLLHLEKKHGEDWGKVYDEAWERIDKKVEGLSKHIKLEEERRSEDAQSKAALTDWLRAKASFVIEGLKEADKDEFCRCELKLQKWYGDLRGKPFAIEAENSILDISGFSKQYNCAFIWQKDGVKKLNLYLIINYFKGGKLRFKKIKPEAFEANRFYTVINKKSGEIVPMEVNFNFDDPNLIILPLAFGKRQGREFIWNDLLSLETGSLKLANGRVIEKTLYNRRTRQDEPALFVALTFERREVLDSSNIKPMNLIGVDRGENIPAVIALTDPEGCPLSRFKDSLGNPTHILRIGESYKEKQRTIQAKKEVEQRRAGGYSRKYASKAKNLADDMVRNTARDLLYYAVTQDAMLIFENLSRGFGRQGKRTFMAERQYTRMEDWLTAKLAYEGLPSKTYLSKTLAQYTSKTCSNCGFTITSADYDRVLEKLKKTATGWMTTINGKELKVEGQITYYNRYKRQNVVKDLSVELDRLSEESVNNDISSWTKGRSGEALSLLKKRFSHRPVQEKFVCLNCGFETHADEQAALNIARSWLFLRSQEYKKYQTNKTTGNTDKRAFVETWQSFYRKKLKEVWKPAV

SEQ ID NO: 46239 - protein, 977 aa, synthetic construct
  REGION 1..977: note = engineered CasX variant
QEIKRINKIRRRLVKDSNTKKAGKTGPMKTLLVRVMTPDLRERLENLRKKPENIPQPISNTSRANLNKLLTDYTEMKKAILHVYWEEFQVDPVGLMSRVAQPASKKIDQNKLKPEMDEKGNLTTAGFACSQCGQPLFVYKLEQVSEKGKAYTNYFGRCNVAEHEKLILLAQLKPEKDSDEAVTYSLGKFGQRALDFYSIHVTKESTHPVKPLAQIAGNRYASPVGKALSDACMGTIASFLSKYQDIIIEHQKVVKGNQKRLESLRELAGKENLEYPSVTLPPQPHTKEGVDAYNEVIARVRMWVNLNLWQKLKLSRDDAKPLLRLKGFPSFPLVERQANEVDWWDMVCNVKKLINEKKEDGKVFWQNLAGYKRQEALRPYLSSEEDREKGKKFARYQLGDLLLHLEKKHGEDWGKVYDEAWERIDKKVEGLSKHIKLEEERRSEDAQSKAALTDWLRAKASFVIEGLKEADKDEFCRCELKLQKWYGDLRGKPFAIEAENSILDISGFSKQYNCAFIWQKDGVKKLNLYLIINYFKGGKLRFKKIKPEAFEANRFYTVINKKSGEIVPMEVNFNFDDPNLIILPLAFGKRQGREFIWNDLLSLETGSLKLANGRVIEKTLYNRRTRQDEPALFVALTFERREVLDSSNIKPMNLIGVDRGENIPAVIALTDPEGCPLSRFKDSLGNPTHILRIGESYKEKQRTIQAKKEVEQRRAGGYSRKYASKAKNLADDMVRNTARDLLYYAVTQDAMLIFENLSRGFGRQGKRTFMAERQYTRMEDWLTAKLAYEGLPSKTYLSKTLAQYTSKTCSNCGFTITSADYDRVLEKLKKTATGWMTTINGKELKVEGQITYYNRYKRQNVVKDLSVELDRLSEESVNNDISSWTKGRSGEALSLLKKRFSHRPVQEKFVCLNCGFETHADEQAALNIARSWLFLRSQEYKKYQTNKTTGNTDKRAFVETWQSFYRKKLKEVWKPAV

SEQ ID NO: 46240 - protein, 978 aa, synthetic construct
  REGION 1..978: note = engineered CasX variant
QEIKRINKIRRRLVKDSNTKKAGKTGPMKTLLVRVMTPDLRERLENLRKKPENIPQPISNTSRANLNKLLTDYTEMKKAILHVYWEEFQVDPVGLMSRVAQPASKKIDQNKLKPEMDEKGNLTTAGFACSQCGQPLFVYKLEQVSEKGKAYTNYFGRCNVAEHEKLILLAQLKPEKDSDEAVTYSLGKFGQRALDFYSIHVTKESTHPVKPLAQIAGNRYASYPVGKALSDACMGTIASFLSKYQDIIIEHQKVVKGNQKRLESLRELAGKENLEYPSVTLPPQPHTKEGVDAYNEVIARVRMWVNLNLWQKLKLSRDDAKPLLRLKGFPSFPLVERQANEVDWWDMVCNVKKLINEKKEDGKVFWQNLAGYKRQEALRPYLSSEEDRKKGKKFARYQLGDLLLHLEKKHGEDWGKVYDEAWERIDKKVEGLSKHIKLEEERRSEDAQSKAALTDWLRAKASFVIEGLKEADKDEFCRCELKLQKWYGDLRGKPFAIEAENSILDISGFSKQYNCAFIWQKDGVKKLNLYLIINYFKGGKLRFKKIKPEAFEANRFYTVINKKSGEIVIMEVNFNFDDPNLIILPLAFGKRQGREFIWNDLLSLETGSLKLANGRVIEKTLYNRRTRQDEPALFVALTFERREVLDSSNIKPMNLIGVDRGENIPAVIALTDPEGCPLSRFKDSLGNPTHILRIGESYKEKQRTIQAKKEVEQRRAGGYSRKYASKAKNLADDMVRNTARDLLYYAVTQDAMLIFENLSRGFGRQGKRTFMAERQYTRMEDWLTAKLAYEGLPSKTYLSKTLAQYTSKTCSNCGFTITSADYDRVLEKLKKTATGWMTTINGKELKVEGQITYYNRYKRQNVVKDLSVELDRLSEESVNNDISSWTKGRSGEALSLLKKRFSHRPVQEKFVCLNCGFETHADEQAALNIARSWLFLRSQEYKKYQTNKTTGNTDKRAFVETWQSFYRKKLKEVWKPAV

SEQ ID NO: 46241 - protein, 978 aa, synthetic construct
  REGION 1..978: note = engineered CasX variant
QEIKRINKIRRRLVKDSNTKKAGKTGPMKTLLVRVMTPDLRERLENLRKKPENIPQPISNTSRANLNKLLTDYTEMKKAILHVYWEEFQVDPVGLMSRVAQPASKKIDQNKLKPEMDEKGNLTTAGFACSQCGQPLFVYKLEQVSEKGKAYTNYFGRCNVAEHEKLILLAQLKPEKDSDEAVTYSLGKFGQRALDFYSIHVTKESTHPVKPLAQIAGNRYASHPVGKALSDACMGTIASFLSKYQDIIIEHQKVVKGNQKRLESLRELAGKENLEYPSVTLPPQPHTKEGVDAYNEVIARVRMWVNLNLWQKLKLSRDDAKPLLRLKGFPSFPLVERQANEVDWWDMVCNVKKLINEKKEDGKVFWQNLAGYKRQEALRPYLSSEEDRKKGKKFARYQLGDLLLHLEKKHGEDWGKVYDEAWERIDKKVEGLSKHIKLEEERRSEDAQSKAALTDWLRAKASFVIEGLKEADKDEFCRCELKLQKWYGDLRGKPFAIEAENSILDISGFSKQYNCAFIWQKDGVKKLNLYLIINYFKGGKLRFKKIKPEAFEANRFYTVINKKSGEIVIMEVNFNFDDPNLIILPLAFGKRQGREFIWNDLLSLETGSLKLANGRVIEKTLYNRRTRQDEPALFVALTFERREVLDSSNIKPMNLIGVDRGENIPAVIALTDPEGCPLSRFKDSLGNPTHILRIGESYKEKQRTIQAKKEVEQRRAGGYSRKYASKAKNLADDMVRNTARDLLYYAVTQDAMLIFENLSRGFGRQGKRTFMAERQYTRMEDWLTAKLAYEGLPSKTYLSKTLAQYTSKTCSNCGFTITSADYDRVLEKLKKTATGWMTTINGKELKVEGQITYYNRYKRQNVVKDLSVELDRLSEESVNNDISSWTKGRSGEALSLLKKRFSHRPVQEKFVCLNCGFETHADEQAALNIARSWLFLRSQEYKKYQTNKTTGNTDKRAFVETWQSFYRKKLKEVWKPAV

SEQ ID NO: 46242 - protein, 978 aa, synthetic construct
  REGION 1..978: note = engineered CasX variant
QEIKRINKIRRRLVKDSNTKKAGKTGPMKTLLVRVMTPDLRERLENLRKKPENIPQPISNTSRANLNKLLTDYTEMKKAILHVYWEEFQVDPVGLMSRVAQPASKKIDQNKLKPEMDEKGNLTTAGFACSQCGQPLFVYKLEQVSEKGKAYTNYFGRCNVAEHEKLILLAQLKPEKDSDEAVTYSLGKFGQRALDFYSIHVTKESTHPVKPLAQIAGNRYASSPVGKALSDACMGTIASFLSKYQDIIIEHQKVVKGNQKRLESLRELAGKENLEYPSVTLPPQPHTKEGVDAYNEVIARVRMWVNLNLWQKLKLSRDDAKPLLRLKGFPSFPLVERQANEVDWWDMVCNVKKLINEKKEDGKVFWQNLAGYKRQEALRPYLSSEEDRKKGKKFARYQLGDLLLHLEKKHGEDWGKVYDEAWERIDKKVEGLSKHIKLEEERRSEDAQSKAALTDWLRAKASFVIEGLKEADKDEFCRCELKLQKWYGDLRGKPFAIEAENSILDISGFSKQYNCAFIWQKDGVKKLNLYLIINYFKGGKLRFKKIKPEAFEANRFYTVINKKSGEIVIMEVNFNFDDPNLIILPLAFGKRQGREFIWNDLLSLETGSLKLANGRVIEKTLYNRRTRQDEPALFVALTFERREVLDSSNIKPMNLIGVDRGENIPAVIALTDPEGCPLSRFKDSLGNPTHILRIGESYKEKQRTIQAKKEVEQRRAGGYSRKYASKAKNLADDMVRNTARDLLYYAVTQDAMLIFENLSRGFGRQGKRTFMAERQYTRMEDWLTAKLAYEGLPSKTYLSKTLAQYTSKTCSNCGFTITSADYDRVLEKLKKTATGWMTTINGKELKVEGQITYYNRYKRQNVVKDLSVELDRLSEESVNNDISSWTKGRSGEALSLLKKRFSHRPVQEKFVCLNCGFETHADEQAALNIARSWLFLRSQEYKKYQTNKTTGNTDKRAFVETWQSFYRKKLKEVWKPAV

SEQ ID NO: 46243 - protein, 978 aa, synthetic construct
  REGION 1..978: note = engineered CasX variant
QEIKRINKIRRRLVKDSNTKKAGKTGPMKTLLVRVMTPDLRERLENLRKKPENIPQPISNTSRANLNKLLTDYTEMKKAILHVYWEEFQVDPVGLMSRVAQPASKKIDQNKLKPEMDEKGNLTTAGFACSQCGQPLFVYKLEQVSEKGKAYTNYFGRCNVAEHEKLILLAQLKPEKDSDEAVTYSLGKFGQRALDFYSIHVTKESTHPVKPLAQIAGNRYASTPVGKALSDACMGTIASFLSKYQDIIIEHQKVVKGNQKRLESLRELAGKENLEYPSVTLPPQPHTKEGVDAYNEVIARVRMWVNLNLWQKLKLSRDDAKPLLRLKGFPSFPLVERQANEVDWWDMVCNVKKLINEKKEDGKVFWQNLAGYKRQEALRPYLSSEEDRKKGKKFARYQLGDLLLHLEKKHGEDWGKVYDEAWERIDKKVEGLSKHIKLEEERRSEDAQSKAALTDWLRAKASFVIEGLKEADKDEFCRCELKLQKWYGDLRGKPFAIEAENSILDISGFSKQYNCAFIWQKDGVKKLNLYLIINYFKGGKLRFKKIKPEAFEANRFYTVINKKSGEIVIMEVNFNFDDPNLIILPLAFGKRQGREFIWNDLLSLETGSLKLANGRVIEKTLYNRRTRQDEPALFVALTFERREVLDSSNIKPMNLIGVDRGENIPAVIALTDPEGCPLSRFKDSLGNPTHILRIGESYKEKQRTIQAKKEVEQRRAGGYSRKYASKAKNLADDMVRNTARDLLYYAVTQDAMLIFENLSRGFGRQGKRTFMAERQYTRMEDWLTAKLAYEGLPSKTYLSKTLAQYTSKTCSNCGFTITSADYDRVLEKLKKTATGWMTTINGKELKVEGQITYYNRYKRQNVVKDLSVELDRLSEESVNNDISSWTKGRSGEALSLLKKRFSHRPVQEKFVCLNCGFETHADEQAALNIARSWLFLRSQEYKKYQTNKTTGNTDKRAFVETWQSFYRKKLKEVWKPAV

SEQ ID NO: 46244 - protein, 978 aa, synthetic construct
  REGION 1..978: note = engineered CasX variant
QEIKRINKIRRRLVKDSNTKKAGKTGPMKTLLVRVMTPDLRERLENLRKKPENIPQPISNTSRANLNKLLTDYTEMKKAILHVYWEEFQVDPVGLMSRVAQPASKKIDQNKLKPEMDEKGNLTTAGFACSQCGQPLFVYKLEQVSEKGKAYTNYFGRCNVAEHEKLILLAQLKPEKDSDEAVTYSLGKFGQRALDFYSIHVTKESTHPVKPLAQIAGNRYASAPVGKALSDACMGTIASFLSKYQDIIIEHQKVVKGNQKRLESLRELAGKENLEYPSVTLPPQPHTKEGVDAYNEVIARVRMWVNLNLWQKLKLSRDDAKPLLRLKGFPSFPLVERQANEVDWWDMVCNVKKLINEKKEDGKVFWQNLAGYKRQEALRPYLSSEEDRKKGKKFARYQLGDLLLHLEKKHGEDWGKVYDEAWERIDKKVEGLSKHIKLEEERRSEDAQSKAALTDWLRAKASFVIEGLKEADKDEFCRCELKLQKWYGDLRGKPFAIEAENSILDISGFSKQYNCAFIWQKDGVKKLNLYLIINYFKGGKLRFKKIKPEAFEANRFYTVINKKSGEIVIMEVNFNFDDPNLIILPLAFGKRQGREFIWNDLLSLETGSLKLANGRVIEKTLYNRRTRQDEPALFVALTFERREVLDSSNIKPMNLIGVDRGENIPAVIALTDPEGCPLSRFKDSLGNPTHILRIGESYKEKQRTIQAKKEVEQRRAGGYSRKYASKAKNLADDMVRNTARDLLYYAVTQDAMLIFENLSRGFGRQGKRTFMAERQYTRMEDWLTAKLAYEGLPSKTYLSKTLAQYTSKTCSNCGFTITSADYDRVLEKLKKTATGWMTTINGKELKVEGQITYYNRYKRQNVVKDLSVELDRLSEESVNNDISSWTKGRSGEALSLLKKRFSHRPVQEKFVCLNCGFETHADEQAALNIARSWLFLRSQEYKKYQTNKTTGNTDKRAFVETWQSFYRKKLKEVWKPAV

SEQ ID NO: 46245 - protein, 978 aa, synthetic construct
  REGION 1..978: note = engineered CasX variant
QEIKRINKIRRRLVKDSNTKKAGKTGPMKTLLVRVMTPDLRERLENLRKKPENIPQPISNTSRANLNKLLTDYTEMKKAILHVYWEEFQVDPVGLMSRVAQPASKKIDQNKLKPEMDEKGNLTTAGFACSQCGQPLFVYKLEQVSEKGKAYTNYFGRCNVAEHEKLILLAQLKPEKDSDEAVTYSLGKFGQRALDFYSIHVTKESTHPVKPLAQIAGNRYASVPVGKALSDACMGTIASFLSKYQDIIIEHQKVVKGNQKRLESLRELAGKENLEYPSVTLPPQPHTKEGVDAYNEVIARVRMWVNLNLWQKLKLSRDDAKPLLRLKGFPSFPLVERQANEVDWWDMVCNVKKLINEKKEDGKVFWQNLAGYKRQEALRPYLSSEEDRKKGKKFARYQLGDLLLHLEKKHGEDWGKVYDEAWERIDKKVEGLSKHIKLEEERRSEDAQSKAALTDWLRAKASFVIEGLKEADKDEFCRCELKLQKWYGDLRGKPFAIEAENSILDISGFSKQYNCAFIWQKDGVKKLNLYLIINYFKGGKLRFKKIKPEAFEANRFYTVINKKSGEIVIMEVNFNFDDPNLIILPLAFGKRQGREFIWNDLLSLETGSLKLANGRVIEKTLYNRRTRQDEPALFVALTFERREVLDSSNIKPMNLIGVDRGENIPAVIALTDPEGCPLSRFKDSLGNPTHILRIGESYKEKQRTIQAKKEVEQRRAGGYSRKYASKAKNLADDMVRNTARDLLYYAVTQDAMLIFENLSRGFGRQGKRTFMAERQYTRMEDWLTAKLAYEGLPSKTYLSKTLAQYTSKTCSNCGFTITSADYDRVLEKLKKTATGWMTTINGKELKVEGQITYYNRYKRQNVVKDLSVELDRLSEESVNNDISSWTKGRSGEALSLLKKRFSHRPVQEKFVCLNCGFETHADEQAALNIARSWLFLRSQEYKKYQTNKTTGNTDKRAFVETWQSFYRKKLKEVWKPAV

SEQ ID NO: 46246 - protein, 978 aa, synthetic construct
  REGION 1..978: note = engineered CasX variant
QEIKRINKIRRRLVKDSNTKKAGKTGPMKTLLVRVMTPDLRERLENLRKKPENIPQPISNTSRANLNKLLTDYTEMKKAILHVYWEEFQVDPVGLMSRVAQPASKKIDQNKLKPEMDEKGNLTTAGFACSQCGQPLFVYKLEQVSEKGKAYTNYFGRCNVAEHEKLIKLAQLKPEKDSDEAVTYSLGKFGQRALDFYSIHVTKESTHPVKPLAQIAGNRYASGPVGKALSDACMGTIASFLSKYQDIIIEHQKVVKGNQKRLESLRELAGKENLEYPSVTLPPQPHTKEGVDAYNEVIARVRMWVNLNLWQKLKLSRDDAKPLLRLKGFPSFPLVERQANEVDWWDMVCNVKKLINEKKEDGKVFWQNLAGYKRQEALRPYLSSEEDRKKGKKFARYQLGDLLLHLEKKHGEDWGKVYDEAWERIDKKVEGLSKHIKLEEERRSEDAQSKAALTDWLRAKASFVIEGLKEADKDEFCRCELKLQKWYGDLRGKPFAIEAENSILDISGFSKQYNCAFIWQKDGVKKLNLYLIINYFKGGKLRFKKIKPEAFEANRFYTVINKKSGEIVIMEVNFNFDDPNLIILPLAFGKRQGREFIWNDLLSLETGSLKLANGRVIEKTLYNRRTRQDEPALFVALTFERREVLDSSNIKPMNLIGVDRGENIPAVIALTDPEGCPLSRFKDSLGNPTHILRIGESYKEKQRTIQAKKEVEQRRAGGYSRKYASKAKNLADDMVRNTARDLLYYAVTQDAMLIFENLSRGFGRQGKRTFMAERQYTRMEDWLTAKLAYEGLPSKTYLSKTLAQYTSKTCSNCGFTITSADYDRVLEKLKKTATGWMTTINGKELKVEGQITYYNRYKRQNVVKDLSVELDRLSEESVNNDISSWTKGRSGEALSLLKKRFSHRPVQEKFVCLNCGFETHADEQAALNIARSWLFLRSQEYKKYQTNKTTGNTDKRAFVETWQSFYRKKLKEVWKPAV

SEQ ID NO: 46247 - protein, 977 aa, synthetic construct
  REGION 1..977: note = engineered CasX variant
QEIKRINKIRRRLVKDSNTKKAGKTGPMKTLLVRVMTPDLRERLENLRKKPENIPQPISNTSRANLNKLLTDYTEMKKAILHVYWEEFQVDPVGLMSRVAQPASKKIDQNKLKPEMDEKGNLTTAGFACSQCGQPLFVYKLEQVSEKGKAYTNYFGRCNVAEHEKLILLAQLKPEKDSDEAVTYSLGKFGQRALDFYSIHVTKESTHPVKPLAQIAGNRYASPVGKALSDACMGTIASFLSKYQDIIIEHQKVVKGNQKRLESLRELAGKENLEYPSVTLPPQPHTKEGVDAYNEVIARVRMWVNLNLWQKLKLSRDDAKPLLRLKGFPSFPLVERQANEVDWWDMVCNVKKLINEKKEDGKVFWQNLAGYKRQEALRPYLSSEEDRKKGKKFARYQLGDLLLHLEKKHGEDWGKVYDEAWERIDKKVEGLSKHIKLEEERRSEDAQSKAALTDWLRAKASFVIEGLKEADKDEFCRCELKLQKWYGDLRGKPFAIEAENSILDISGFSKQYNCAFIWQKDGVKKLNLYLIINYFKGGKLRFKKIKPEAFEANRFYTVINKKSGEIVIMEVNFNFDDPNLIILPLAFGKRQGREFIWNDLLSLETGSLKLANGRVIEKTLYNRRTRQDEPALFVALTFERREVLDSSNIKPMNLIGVDRGENIPAVIALTDPEGCPLSRFKDSLGNPTHILRIGESYKEKQRTIQAKKEVEQRRAGGYSRKYASKAKNLADDMVRNTARDLLYYAVTQDAMLIFENLSRGFGRQGKRTFMAERQYTRMEDWLTAKLAYEGLPSKTYLSKTLAQYTSKTCSNCGFTITSADYDRVLEKLKKTATGWMTTINGKELKVEGQITYYNRYKRQNVVKDLSVELDRLSEESVNNDISSWTKGRSGEALSLLKKRFSHRPVQEKFVCLNCGFETHADEQAALNIARSWLFLRSQEYKKYQTNKTTGNTDKRAFVETWQSFYRKKLKEVWKPAV

SEQ ID NO: 46248 - protein, 978 aa, synthetic construct
  REGION 1..978: note = engineered CasX variant
QEIKRLNKIRRRLVKDSNTKKAGKTGPMKTLLVRVMTPDLRERLENLRKKPENIPQPISNTSRANLNKLLTDYTEMKKAILHVYWEEFQKDPVGLMSRVAQPASKKIDQNKLKPEMDEKGNLTTAGFACSQCGQPLFVYKLEQVSEKGKAYTNYFGRCNVAEHEKLILLAQLKPEKDSDEAVTYSLGKFGQRALDFYSIHVTKESTHPVKPLAQIAGNRYASYPVGKALSGACMGTIASFLSKYQDIIIEHQKVVKGNQKRLESLRELAGKENLEYPSVTLPPQPHTKEGVDAYNEVIARVRMWVNLNLWQKLKLSRDDAKPLLRLKGFPSFPLVERQANEVDWWDMVCNVKKLINEKKEDGKVFWQNLAGYKRQEALRPYLSSEEDRKKGKKFARYQLGDLLLHLEKKHGEDWGKVYDEAWERIDKKVEGLSKHIKLEEERRSEDAQSKAALTDWLRAKASFVIEGLKEADKDEFCRCELKLQKWYGDLRGKPFAIEAENSILDISGFSKQYNCAFIWQKDGVKKLNLYLIINYFKGGKLRFKKIKPEAFEANRFYTVINKKSGEIVPMEVNFNFDDPNLIILPLAFGKRQGREFIWNDLLSLETGSLKLANGRVIEKTLYNRRTRQDEPALFVALTFERREVLDSSNIKPMNLIGVDRGENIPAVIALTDPEGCPLSRFKDSLGNPTHILRIGESYKEKQRTIQAKKEVEQRRAGGYSRKYASKAKNLADDMVRNTARDLLYYAVTQDAMLIFENLSRGFGRQGKRTFMAERQYTRMEDWLTAKLAYEGLPSKTYLSKTLAQYTSKTCSNCGFTITSADYDRVLEKLKKTATGWMTTINGKELKVEGQITYYNRYKRQNVVKDLSVELDRLSEESVNNDISSWTKGRSGEALSLLKKRFSHRPVQEKFVCLNCGFETHADEQAALNIARSWLFLRSQEYKKYQTNKTTGNTDKRAFVETWQSFYRKKLKEVWKPAV

SEQ ID NO: 46249 - protein, 978 aa, synthetic construct
  REGION 1..978: note = engineered CasX variant
QEIKRLNKIRRRLVKDSNTKKAGKTGPMKTLLVRVMTPDLRERLENLRKKPENIPQPISNTSRANLNKLLTDYTEMKKAILHVYWEEFQKDPVGLMSRVAQPASKKIDQNKLKPEMDEKGNLTTAGFACSQCGQPLFVYKLEQVSEKGKAYTNYFGRCNVAEHEKLILLAQLKPEKDSDEAVTYSLGKFGQRALDFYSIHVTKESTHPVKPLAQIAGNRYASHPVGKALSGACMGTIASFLSKYQDIIIEHQKVVKGNQKRLESLRELAGKENLEYPSVTLPPQPHTKEGVDAYNEVIARVRMWVNLNLWQKLKLSRDDAKPLLRLKGFPSFPLVERQANEVDWWDMVCNVKKLINEKKEDGKVFWQNLAGYKRQEALRPYLSSEEDRKKGKKFARYQLGDLLLHLEKKHGEDWGKVYDEAWERIDKKVEGLSKHIKLEEERRSEDAQSKAALTDWLRAKASFVIEGLKEADKDEFCRCELKLQKWYGDLRGKPFAIEAENSILDISGFSKQYNCAFIWQKDGVKKLNLYLIINYFKGGKLRFKKIKPEAFEANRFYTVINKKSGEIVPMEVNFNFDDPNLIILPLAFGKRQGREFIWNDLLSLETGSLKLANGRVIEKTLYNRRTRQDEPALFVALTFERREVLDSSNIKPMNLIGVDRGENIPAVIALTDPEGCPLSRFKDSLGNPTHILRIGESYKEKQRTIQAKKEVEQRRAGGYSRKYASKAKNLADDMVRNTARDLLYYAVTQDAMLIFENLSRGFGRQGKRTFMAERQYTRMEDWLTAKLAYEGLPSKTYLSKTLAQYTSKTCSNCGFTITSADYDRVLEKLKKTATGWMTTINGKELKVEGQITYYNRYKRQNVVKDLSVELDRLSEESVNNDISSWTKGRSGEALSLLKKRFSHRPVQEKFVCLNCGFETHADEQAALNIARSWLFLRSQEYKKYQTNKTTGNTDKRAFVETWQSFYRKKLKEVWKPAV

SEQ ID NO: 46250 - protein, 978 aa, synthetic construct
  REGION 1..978: note = engineered CasX variant
QEIKRLNKIRRRLVKDSNTKKAGKTGPMKTLLVRVMTPDLRERLENLRKKPENIPQPISNTSRANLNKLLTDYTEMKKAILHVYWEEFQKDPVGLMSRVAQPASKKIDQNKLKPEMDEKGNLTTAGFACSQCGQPLFVYKLEQVSEKGKAYTNYFGRCNVAEHEKLILLAQLKPEKDSDEAVTYSLGKFGQRALDFYSIHVTKESTHPVKPLAQIAGNRYASSPVGKALSGACMGTIASFLSKYQDIIIEHQKVVKGNQKRLESLRELAGKENLEYPSVTLPPQPHTKEGVDAYNEVIARVRMWVNLNLWQKLKLSRDDAKPLLRLKGFPSFPLVERQANEVDWWDMVCNVKKLINEKKEDGKVFWQNLAGYKRQEALRPYLSSEEDRKKGKKFARYQLGDLLLHLEKKHGEDWGKVYDEAWERIDKKVEGLSKHIKLEEERRSEDAQSKAALTDWLRAKASFVIEGLKEADKDEFCRCELKLQKWYGDLRGKPFAIEAENSILDISGFSKQYNCAFIWQKDGVKKLNLYLIINYFKGGKLRFKKIKPEAFEANRFYTVINKKSGEIVPMEVNFNFDDPNLIILPLAFGKRQGREFIWNDLLSLETGSLKLANGRVIEKTLYNRRTRQDEPALFVALTFERREVLDSSNIKPMNLIGVDRGENIPAVIALTDPEGCPLSRFKDSLGNPTHILRIGESYKEKQRTIQAKKEVEQRRAGGYSRKYASKAKNLADDMVRNTARDLLYYAVTQDAMLIFENLSRGFGRQGKRTFMAERQYTRMEDWLTAKLAYEGLPSKTYLSKTLAQYTSKTCSNCGFTITSADYDRVLEKLKKTATGWMTTINGKELKVEGQITYYNRYKRQNVVKDLSVELDRLSEESVNNDISSWTKGRSGEALSLLKKRFSHRPVQEKFVCLNCGFETHADEQAALNIARSWLFLRSQEYKKYQTNKTTGNTDKRAFVETWQSFYRKKLKEVWKPAV

SEQ ID NO: 46251 - protein, 978 aa, synthetic construct
  REGION 1..978: note = engineered CasX variant
QEIKRLNKIRRRLVKDSNTKKAGKTGPMKTLLVRVMTPDLRERLENLRKKPENIPQPISNTSRANLNKLLTDYTEMKKAILHVYWEEFQKDPVGLMSRVAQPASKKIDQNKLKPEMDEKGNLTTAGFACSQCGQPLFVYKLEQVSEKGKAYTNYFGRCNVAEHEKLILLAQLKPEKDSDEAVTYSLGKFGQRALDFYSIHVTKESTHPVKPLAQIAGNRYASTPVGKALSGACMGTIASFLSKYQDIIIEHQKVVKGNQKRLESLRELAGKENLEYPSVTLPPQPHTKEGVDAYNEVIARVRMWVNLNLWQKLKLSRDDAKPLLRLKGFPSFPLVERQANEVDWWDMVCNVKKLINEKKEDGKVFWQNLAGYKRQEALRPYLSSEEDRKKGKKFARYQLGDLLLHLEKKHGEDWGKVYDEAWERIDKKVEGLSKHIKLEEERRSEDAQSKAALTDWLRAKASFVIEGLKEADKDEFCRCELKLQKWYGDLRGKPFAIEAENSILDISGFSKQYNCAFIWQKDGVKKLNLYLIINYFKGGKLRFKKIKPEAFEANRFYTVINKKSGEIVPMEVNFNFDDPNLIILPLAFGKRQGREFIWNDLLSLETGSLKLANGRVIEKTLYNRRTRQDEPALFVALTFERREVLDSSNIKPMNLIGVDRGENIPAVIALTDPEGCPLSRFKDSLGNPTHILRIGESYKEKQRTIQAKKEVEQRRAGGYSRKYASKAKNLADDMVRNTARDLLYYAVTQDAMLIFENLSRGFGRQGKRTFMAERQYTRMEDWLTAKLAYEGLPSKTYLSKTLAQYTSKTCSNCGFTITSADYDRVLEKLKKTATGWMTTINGKELKVEGQITYYNRYKRQNVVKDLSVELDRLSEESVNNDISSWTKGRSGEALSLLKKRFSHRPVQEKFVCLNCGFETHADEQAALNIARSWLFLRSQEYKKYQTNKTTGNTDKRAFVETWQSFYRKKLKEVWKPAV

SEQ ID NO: 46252 - protein, 978 aa, synthetic construct
  REGION 1..978: note = engineered CasX variant
QEIKRLNKIRRRLVKDSNTKKAGKTGPMKTLLVRVMTPDLRERLENLRKKPENIPQPISNTSRANLNKLLTDYTEMKKAILHVYWEEFQKDPVGLMSRVAQPASKKIDQNKLKPEMDEKGNLTTAGFACSQCGQPLFVYKLEQVSEKGKAYTNYFGRCNVAEHEKLILLAQLKPEKDSDEAVTYSLGKFGQRALDFYSIHVTKESTHPVKPLAQIAGNRYASAPVGKALSGACMGTIASFLSKYQDIIIEHQKVVKGNQKRLESLRELAGKENLEYPSVTLPPQPHTKEGVDAYNEVIARVRMWVNLNLWQKLKLSRDDAKPLLRLKGFPSFPLVERQANEVDWWDMVCNVKKLINEKKEDGKVFWQNLAGYKRQEALRPYLSSEEDRKKGKKFARYQLGDLLLHLEKKHGEDWGKVYDEAWERIDKKVEGLSKHIKLEEERRSEDAQSKAALTDWLRAKASFVIEGLKEADKDEFCRCELKLQKWYGDLRGKPFAIEAENSILDISGFSKQYNCAFIWQKDGVKKLNLYLIINYFKGGKLRFKKIKPEAFEANRFYTVINKKSGEIVPMEVNFNFDDPNLIILPLAFGKRQGREFIWNDLLSLETGSLKLANGRVIEKTLYNRRTRQDEPALFVALTFERREVLDSSNIKPMNLIGVDRGENIPAVIALTDPEGCPLSRFKDSLGNPTHILRIGESYKEKQRTIQAKKEVEQRRAGGYSRKYASKAKNLADDMVRNTARDLLYYAVTQDAMLIFENLSRGFGRQGKRTFMAERQYTRMEDWLTAKLAYEGLPSKTYLSKTLAQYTSKTCSNCGFTITSADYDRVLEKLKKTATGWMTTINGKELKVEGQITYYNRYKRQNVVKDLSVELDRLSEESVNNDISSWTKGRSGEALSLLKKRFSHRPVQEKFVCLNCGFETHADEQAALNIARSWLFLRSQEYKKYQTNKTTGNTDKRAFVETWQSFYRKKLKEVWKPAV

SEQ ID NO: 46253 - protein, 978 aa, synthetic construct
  REGION 1..978: note = engineered CasX variant
QEIKRLNKIRRRLVKDSNTKKAGKTGPMKTLLVRVMTPDLRERLENLRKKPENIPQPISNTSRANLNKLLTDYTEMKKAILHVYWEEFQKDPVGLMSRVAQPASKKIDQNKLKPEMDEKGNLTTAGFACSQCGQPLFVYKLEQVSEKGKAYTNYFGRCNVAEHEKLILLAQLKPEKDSDEAVTYSLGKFGQRALDFYSIHVTKESTHPVKPLAQIAGNRYASVPVGKALSGACMGTIASFLSKYQDIIIEHQKVVKGNQKRLESLRELAGKENLEYPSVTLPPQPHTKEGVDAYNEVIARVRMWVNLNLWQKLKLSRDDAKPLLRLKGFPSFPLVERQANEVDWWDMVCNVKKLINEKKEDGKVFWQNLAGYKRQEALRPYLSSEEDRKKGKKFARYQLGDLLLHLEKKHGEDWGKVYDEAWERIDKKVEGLSKHIKLEEERRSEDAQSKAALTDWLRAKASFVIEGLKEADKDEFCRCELKLQKWYGDLRGKPFAIEAENSILDISGFSKQYNCAFIWQKDGVKKLNLYLIINYFKGGKLRFKKIKPEAFEANRFYTVINKKSGEIVPMEVNFNFDDPNLIILPLAFGKRQGREFIWNDLLSLETGSLKLANGRVIEKTLYNRRTRQDEPALFVALTFERREVLDSSNIKPMNLIGVDRGENIPAVIALTDPEGCPLSRFKDSLGNPTHILRIGESYKEKQRTIQAKKEVEQRRAGGYSRKYASKAKNLADDMVRNTARDLLYYAVTQDAMLIFENLSRGFGRQGKRTFMAERQYTRMEDWLTAKLAYEGLPSKTYLSKTLAQYTSKTCSNCGFTITSADYDRVLEKLKKTATGWMTTINGKELKVEGQITYYNRYKRQNVVKDLSVELDRLSEESVNNDISSWTKGRSGEALSLLKKRFSHRPVQEKFVCLNCGFETHADEQAALNIARSWLFLRSQEYKKYQTNKTTGNTDKRAFVETWQSFYRKKLKEVWKPAV

SEQ ID NO: 46254 - protein, 978 aa, synthetic construct
  REGION 1..978: note = engineered CasX variant
QEIKRLNKIRRRLVKDSNTKKAGKTGPMKTLLVRVMTPDLRERLENLRKKPENIPQPISNTSRANLNKLLTDYTEMKKAILHVYWEEFQKDPVGLMSRVAQPASKKIDQNKLKPEMDEKGNLTTAGFACSQCGQPLFVYKLEQVSEKGKAYTNYFGRCNVAEHEKLIKLAQLKPEKDSDEAVTYSLGKFGQRALDFYSIHVTKESTHPVKPLAQIAGNRYASGPVGKALSGACMGTIASFLSKYQDIIIEHQKVVKGNQKRLESLRELAGKENLEYPSVTLPPQPHTKEGVDAYNEVIARVRMWVNLNLWQKLKLSRDDAKPLLRLKGFPSFPLVERQANEVDWWDMVCNVKKLINEKKEDGKVFWQNLAGYKRQEALRPYLSSEEDRKKGKKFARYQLGDLLLHLEKKHGEDWGKVYDEAWERIDKKVEGLSKHIKLEEERRSEDAQSKAALTDWLRAKASFVIEGLKEADKDEFCRCELKLQKWYGDLRGKPFAIEAENSILDISGFSKQYNCAFIWQKDGVKKLNLYLIINYFKGGKLRFKKIKPEAFEANRFYTVINKKSGEIVPMEVNFNFDDPNLIILPLAFGKRQGREFIWNDLLSLETGSLKLANGRVIEKTLYNRRTRQDEPALFVALTFERREVLDSSNIKPMNLIGVDRGENIPAVIALTDPEGCPLSRFKDSLGNPTHILRIGESYKEKQRTIQAKKEVEQRRAGGYSRKYASKAKNLADDMVRNTARDLLYYAVTQDAMLIFENLSRGFGRQGKRTFMAERQYTRMEDWLTAKLAYEGLPSKTYLSKTLAQYTSKTCSNCGFTITSADYDRVLEKLKKTATGWMTTINGKELKVEGQITYYNRYKRQNVVKDLSVELDRLSEESVNNDISSWTKGRSGEALSLLKKRFSHRPVQEKFVCLNCGFETHADEQAALNIARSWLFLRSQEYKKYQTNKTTGNTDKRAFVETWQSFYRKKLKEVWKPAV

SEQ ID NO: 46255 - protein, 977 aa, synthetic construct
  REGION 1..977: note = engineered CasX variant
QEIKRLNKIRRRLVKDSNTKKAGKTGPMKTLLVRVMTPDLRERLENLRKKPENIPQPISNTSRANLNKLLTDYTEMKKAILHVYWEEFQKDPVGLMSRVAQPASKKIDQNKLKPEMDEKGNLTTAGFACSQCGQPLFVYKLEQVSEKGKAYTNYFGRCNVAEHEKLILLAQLKPEKDSDEAVTYSLGKFGQRALDFYSIHVTKESTHPVKPLAQIAGNRYASPVGKALSGACMGTIASFLSKYQDIIIEHQKVVKGNQKRLESLRELAGKENLEYPSVTLPPQPHTKEGVDAYNEVIARVRMWVNLNLWQKLKLSRDDAKPLLRLKGFPSFPLVERQANEVDWWDMVCNVKKLINEKKEDGKVFWQNLAGYKRQEALRPYLSSEEDRKKGKKFARYQLGDLLLHLEKKHGEDWGKVYDEAWERIDKKVEGLSKHIKLEEERRSEDAQSKAALTDWLRAKASFVIEGLKEADKDEFCRCELKLQKWYGDLRGKPFAIEAENSILDISGFSKQYNCAFIWQKDGVKKLNLYLIINYFKGGKLRFKKIKPEAFEANRFYTVINKKSGEIVPMEVNFNFDDPNLIILPLAFGKRQGREFIWNDLLSLETGSLKLANGRVIEKTLYNRRTRQDEPALFVALTFERREVLDSSNIKPMNLIGVDRGENIPAVIALTDPEGCPLSRFKDSLGNPTHILRIGESYKEKQRTIQAKKEVEQRRAGGYSRKYASKAKNLADDMVRNTARDLLYYAVTQDAMLIFENLSRGFGRQGKRTFMAERQYTRMEDWLTAKLAYEGLPSKTYLSKTLAQYTSKTCSNCGFTITSADYDRVLEKLKKTATGWMTTINGKELKVEGQITYYNRYKRQNVVKDLSVELDRLSEESVNNDISSWTKGRSGEALSLLKKRFSHRPVQEKFVCLNCGFETHADEQAALNIARSWLFLRSQEYKKYQTNKTTGNTDKRAFVETWQSFYRKKLKEVWKPAV

SEQ ID NO: 46256 - protein, 978 aa, synthetic construct
  REGION 1..978: note = engineered CasX variant
QEIKRLNKIRRRLVKDSNTKKAGKTGPMKTLLVRVMTPDLRERLENLRKKPENIPQPISNTSRANLNKLLTDYTEMKKAILHVYWEEFQKDPVGLMSRVAQPASKKIDQNKLKPEMDEKGNLTTAGFACSQCGQPLFVYKLEQVSEKGKAYTNYFGRCNVAEHEKLILLAQLKPEKDSDEAVTYSLGKFGQRALDFYSIHVTKESTHPVKPLAQIAGNRYASYPVGKALSDACMGTIASFLSKYQDIIIEHQKVVKGNQKRLESLRELAGKENLEYPSVTLPPQPHTKEGVDAYNEVIARVRMWVNLNLWQKLKLSRDDAKPLLRLKNFPSFPLVERQANEVDWWDMVCNVKKLINEKKEDGKVFWQNLAGYKRQEALRPYLSSEEDRKKGKKFARYQLGDLLLHLEKKHGEDWGKVYDEAWERIDKKVEGLSKHIKLEEERRSEDAQSKAALTDWLRAKASFVIEGLKEADKDEFCRCELKLQKWYGDLRGKPFAIEAENSILDISGFSKQYNCAFIWQKDGVKKLNLYLIINYFKGGKLRFKKIKPEAFEANRFYTVINKKSGEIVPMEVNFNFDDPNLIILPLAFGKRQGREFIWNDLLSLETGSLKLANGRVIEKTLYNRRTRQDEPALFVALTFERREVLDSSNIKPMNLIGVDRGENIPAVIALTDPEGCPLSRFKDSLGNPTHILRIGESYKEKQRTIQAKKEVEQRRAGGYSRKYASKAKNLADDMVRNTARDLLYYAVTQDAMLIFENLSRGFGRQGKRTFMAERQYTRMEDWLTAKLAYEGLPSKTYLSKTLAQYTSKTCSNCGFTITSADYDRVLEKLKKTATGWMTTINGKELKVEGQITYYNRYKRQNVVKDLSVELDRLSEESVNNDISSWTKGRSGEALSLLKKRFSHRPVQEKFVCLNCGFETHADEQAALNIARSWLFLRSQEYKKYQTNKTTGNTDKRAFVETWQSFYRKKLKEVWKPAV

SEQ ID NO: 46257 - protein, 978 aa, synthetic construct
  REGION 1..978: note = engineered CasX variant
QEIKRLNKIRRRLVKDSNTKKAGKTGPMKTLLVRVMTPDLRERLENLRKKPENIPQPISNTSRANLNKLLTDYTEMKKAILHVYWEEFQKDPVGLMSRVAQPASKKIDQNKLKPEMDEKGNLTTAGFACSQCGQPLFVYKLEQVSEKGKAYTNYFGRCNVAEHEKLILLAQLKPEKDSDEAVTYSLGKFGQRALDFYSIHVTKESTHPVKPLAQIAGNRYASHPVGKALSDACMGTIASFLSKYQDIIIEHQKVVKGNQKRLESLRELAGKENLEYPSVTLPPQPHTKEGVDAYNEVIARVRMWVNLNLWQKLKLSRDDAKPLLRLKNFPSFPLVERQANEVDWWDMVCNVKKLINEKKEDGKVFWQNLAGYKRQEALRPYLSSEEDRKKGKKFARYQLGDLLLHLEKKHGEDWGKVYDEAWERIDKKVEGLSKHIKLEEERRSEDAQSKAALTDWLRAKASFVIEGLKEADKDEFCRCELKLQKWYGDLRGKPFAIEAENSILDISGFSKQYNCAFIWQKDGVKKLNLYLIINYFKGGKLRFKKIKPEAFEANRFYTVINKKSGEIVPMEVNFNFDDPNLIILPLAFGKRQGREFIWNDLLSLETGSLKLANGRVIEKTLYNRRTRQDEPALFVALTFERREVLDSSNIKPMNLIGVDRGENIPAVIALTDPEGCPLSRFKDSLGNPTHILRIGESYKEKQRTIQAKKEVEQRRAGGYSRKYASKAKNLADDMVRNTARDLLYYAVTQDAMLIFENLSRGFGRQGKRTFMAERQYTRMEDWLTAKLAYEGLPSKTYLSKTLAQYTSKTCSNCGFTITSADYDRVLEKLKKTATGWMTTINGKELKVEGQITYYNRYKRQNVVKDLSVELDRLSEESVNNDISSWTKGRSGEALSLLKKRFSHRPVQEKFVCLNCGFETHADEQAALNIARSWLFLRSQEYKKYQTNKTTGNTDKRAFVETWQSFYRKKLKEVWKPAV

SEQ ID NO: 46258 - protein, 978 aa, synthetic construct
  REGION 1..978: note = engineered CasX variant
QEIKRLNKIRRRLVKDSNTKKAGKTGPMKTLLVRVMTPDLRERLENLRKKPENIPQPISNTSRANLNKLLTDYTEMKKAILHVYWEEFQKDPVGLMSRVAQPASKKIDQNKLKPEMDEKGNLTTAGFACSQCGQPLFVYKLEQVSEKGKAYTNYFGRCNVAEHEKLILLAQLKPEKDSDEAVTYSLGKFGQRALDFYSIHVTKESTHPVKPLAQIAGNRYASSPVGKALSDACMGTIASFLSKYQDIIIEHQKVVKGNQKRLESLRELAGKENLEYPSVTLPPQPHTKEGVDAYNEVIARVRMWVNLNLWQKLKLSRDDAKPLLRLKNFPSFPLVERQANEVDWWDMVCNVKKLINEKKEDGKVFWQNLAGYKRQEALRPYLSSEEDRKKGKKFARYQLGDLLLHLEKKHGEDWGKVYDEAWERIDKKVEGLSKHIKLEEERRSEDAQSKAALTDWLRAKASFVIEGLKEADKDEFCRCELKLQKWYGDLRGKPFAIEAENSILDISGFSKQYNCAFIWQKDGVKKLNLYLIINYFKGGKLRFKKIKPEAFEANRFYTVINKKSGEIVPMEVNFNFDDPNLIILPLAFGKRQGREFIWNDLLSLETGSLKLANGRVIEKTLYNRRTRQDEPALFVALTFERREVLDSSNIKPMNLIGVDRGENIPAVIALTDPEGCPLSRFKDSLGNPTHILRIGESYKEKQRTIQAKKEVEQRRAGGYSRKYASKAKNLADDMVRNTARDLLYYAVTQDAMLIFENLSRGFGRQGKRTFMAERQYTRMEDWLTAKLAYEGLPSKTYLSKTLAQYTSKTCSNCGFTITSADYDRVLEKLKKTATGWMTTINGKELKVEGQITYYNRYKRQNVVKDLSVELDRLSEESVNNDISSWTKGRSGEALSLLKKRFSHRPVQEKFVCLNCGFETHADEQAALNIARSWLFLRSQEYKKYQTNKTTGNTDKRAFVETWQSFYRKKLKEVWKPAV

SEQ ID NO: 46259 - protein, 978 aa, synthetic construct
  REGION 1..978: note = engineered CasX variant
QEIKRLNKIRRRLVKDSNTKKAGKTGPMKTLLVRVMTPDLRERLENLRKKPENIPQPISNTSRANLNKLLTDYTEMKKAILHVYWEEFQKDPVGLMSRVAQPASKKIDQNKLKPEMDEKGNLTTAGFACSQCGQPLFVYKLEQVSEKGKAYTNYFGRCNVAEHEKLILLAQLKPEKDSDEAVTYSLGKFGQRALDFYSIHVTKESTHPVKPLAQIAGNRYASTPVGKALSDACMGTIASFLSKYQDIIIEHQKVVKGNQKRLESLRELAGKENLEYPSVTLPPQPHTKEGVDAYNEVIARVRMWVNLNLWQKLKLSRDDAKPLLRLKNFPSFPLVERQANEVDWWDMVCNVKKLINEKKEDGKVFWQNLAGYKRQEALRPYLSSEEDRKKGKKFARYQLGDLLLHLEKKHGEDWGKVYDEAWERIDKKVEGLSKHIKLEEERRSEDAQSKAALTDWLRAKASFVIEGLKEADKDEFCRCELKLQKWYGDLRGKPFAIEAENSILDISGFSKQYNCAFIWQKDGVKKLNLYLIINYFKGGKLRFKKIKPEAFEANRFYTVINKKSGEIVPMEVNFNFDDPNLIILPLAFGKRQGREFIWNDLLSLETGSLKLANGRVIEKTLYNRRTRQDEPALFVALTFERREVLDSSNIKPMNLIGVDRGENIPAVIALTDPEGCPLSRFKDSLGNPTHILRIGESYKEKQRTIQAKKEVEQRRAGGYSRKYASKAKNLADDMVRNTARDLLYYAVTQDAMLIFENLSRGFGRQGKRTFMAERQYTRMEDWLTAKLAYEGLPSKTYLSKTLAQYTSKTCSNCGFTITSADYDRVLEKLKKTATGWMTTINGKELKVEGQITYYNRYKRQNVVKDLSVELDRLSEESVNNDISSWTKGRSGEALSLLKKRFSHRPVQEKFVCLNCGFETHADEQAALNIARSWLFLRSQEYKKYQTNKTTGNTDKRAFVETWQSFYRKKLKEVWKPAV

SEQ ID NO: 46260 - protein, 978 aa, synthetic construct
  REGION 1..978: note = engineered CasX variant
QEIKRLNKIRRRLVKDSNTKKAGKTGPMKTLLVRVMTPDLRERLENLRKKPENIPQPISNTSRANLNKLLTDYTEMKKAILHVYWEEFQKDPVGLMSRVAQPASKKIDQNKLKPEMDEKGNLTTAGFACSQCGQPLFVYKLEQVSEKGKAYTNYFGRCNVAEHEKLILLAQLKPEKDSDEAVTYSLGKFGQRALDFYSIHVTKESTHPVKPLAQIAGNRYASAPVGKALSDACMGTIASFLSKYQDIIIEHQKVVKGNQKRLESLRELAGKENLEYPSVTLPPQPHTKEGVDAYNEVIARVRMWVNLNLWQKLKLSRDDAKPLLRLKNFPSFPLVERQANEVDWWDMVCNVKKLINEKKEDGKVFWQNLAGYKRQEALRPYLSSEEDRKKGKKFARYQLGDLLLHLEKKHGEDWGKVYDEAWERIDKKVEGLSKHIKLEEERRSEDAQSKAALTDWLRAKASFVIEGLKEADKDEFCRCELKLQKWYGDLRGKPFAIEAENSILDISGFSKQYNCAFIWQKDGVKKLNLYLIINYFKGGKLRFKKIKPEAFEANRFYTVINKKSGEIVPMEVNFNFDDPNLIILPLAFGKRQGREFIWNDLLSLETGSLKLANGRVIEKTLYNRRTRQDEPALFVALTFERREVLDSSNIKPMNLIGVDRGENIPAVIALTDPEGCPLSRFKDSLGNPTHILRIGESYKEKQRTIQAKKEVEQRRAGGYSRKYASKAKNLADDMVRNTARDLLYYAVTQDAMLIFENLSRGFGRQGKRTFMAERQYTRMEDWLTAKLAYEGLPSKTYLSKTLAQYTSKTCSNCGFTITSADYDRVLEKLKKTATGWMTTINGKELKVEGQITYYNRYKRQNVVKDLSVELDRLSEESVNNDISSWTKGRSGEALSLLKKRFSHRPVQEKFVCLNCGFETHADEQAALNIARSWLFLRSQEYKKYQTNKTTGNTDKRAFVETWQSFYRKKLKEVWKPAV

SEQ ID NO: 46261 - protein, 978 aa, synthetic construct
  REGION 1..978: note = engineered CasX variant
QEIKRLNKIRRRLVKDSNTKKAGKTGPMKTLLVRVMTPDLRERLENLRKKPENIPQPISNTSRANLNKLLTDYTEMKKAILHVYWEEFQKDPVGLMSRVAQPASKKIDQNKLKPEMDEKGNLTTAGFACSQCGQPLFVYKLEQVSEKGKAYTNYFGRCNVAEHEKLILLAQLKPEKDSDEAVTYSLGKFGQRALDFYSIHVTKESTHPVKPLAQIAGNRYASVPVGKALSDACMGTIASFLSKYQDIIIEHQKVVKGNQKRLESLRELAGKENLEYPSVTLPPQPHTKEGVDAYNEVIARVRMWVNLNLWQKLKLSRDDAKPLLRLKNFPSFPLVERQANEVDWWDMVCNVKKLINEKKEDGKVFWQNLAGYKRQEALRPYLSSEEDRKKGKKFARYQLGDLLLHLEKKHGEDWGKVYDEAWERIDKKVEGLSKHIKLEEERRSEDAQSKAALTDWLRAKASFVIEGLKEADKDEFCRCELKLQKWYGDLRGKPFAIEAENSILDISGFSKQYNCAFIWQKDGVKKLNLYLIINYFKGGKLRFKKIKPEAFEANRFYTVINKKSGEIVPMEVNFNFDDPNLIILPLAFGKRQGREFIWNDLLSLETGSLKLANGRVIEKTLYNRRTRQDEPALFVALTFERREVLDSSNIKPMNLIGVDRGENIPAVIALTDPEGCPLSRFKDSLGNPTHILRIGESYKEKQRTIQAKKEVEQRRAGGYSRKYASKAKNLADDMVRNTARDLLYYAVTQDAMLIFENLSRGFGRQGKRTFMAERQYTRMEDWLTAKLAYEGLPSKTYLSKTLAQYTSKTCSNCGFTITSADYDRVLEKLKKTATGWMTTINGKELKVEGQITYYNRYKRQNVVKDLSVELDRLSEESVNNDISSWTKGRSGEALSLLKKRFSHRPVQEKFVCLNCGFETHADEQAALNIARSWLFLRSQEYKKYQTNKTTGNTDKRAFVETWQSFYRKKLKEVWKPAV

SEQ ID NO: 46262 - protein, 978 aa, synthetic construct
  REGION 1..978: note = engineered CasX variant
QEIKRLNKIRRRLVKDSNTKKAGKTGPMKTLLVRVMTPDLRERLENLRKKPENIPQPISNTSRANLNKLLTDYTEMKKAILHVYWEEFQKDPVGLMSRVAQPASKKIDQNKLKPEMDEKGNLTTAGFACSQCGQPLFVYKLEQVSEKGKAYTNYFGRCNVAEHEKLIKLAQLKPEKDSDEAVTYSLGKFGQRALDFYSIHVTKESTHPVKPLAQIAGNRYASGPVGKALSDACMGTIASFLSKYQDIIIEHQKVVKGNQKRLESLRELAGKENLEYPSVTLPPQPHTKEGVDAYNEVIARVRMWVNLNLWQKLKLSRDDAKPLLRLKNFPSFPLVERQANEVDWWDMVCNVKKLINEKKEDGKVFWQNLAGYKRQEALRPYLSSEEDRKKGKKFARYQLGDLLLHLEKKHGEDWGKVYDEAWERIDKKVEGLSKHIKLEEERRSEDAQSKAALTDWLRAKASFVIEGLKEADKDEFCRCELKLQKWYGDLRGKPFAIEAENSILDISGFSKQYNCAFIWQKDGVKKLNLYLIINYFKGGKLRFKKIKPEAFEANRFYTVINKKSGEIVPMEVNFNFDDPNLIILPLAFGKRQGREFIWNDLLSLETGSLKLANGRVIEKTLYNRRTRQDEPALFVALTFERREVLDSSNIKPMNLIGVDRGENIPAVIALTDPEGCPLSRFKDSLGNPTHILRIGESYKEKQRTIQAKKEVEQRRAGGYSRKYASKAKNLADDMVRNTARDLLYYAVTQDAMLIFENLSRGFGRQGKRTFMAERQYTRMEDWLTAKLAYEGLPSKTYLSKTLAQYTSKTCSNCGFTITSADYDRVLEKLKKTATGWMTTINGKELKVEGQITYYNRYKRQNVVKDLSVELDRLSEESVNNDISSWTKGRSGEALSLLKKRFSHRPVQEKFVCLNCGFETHADEQAALNIARSWLFLRSQEYKKYQTNKTTGNTDKRAFVETWQSFYRKKLKEVWKPAV

SEQ ID NO: 46263 - protein, 977 aa, synthetic construct
  REGION 1..977: note = engineered CasX variant
QEIKRLNKIRRRLVKDSNTKKAGKTGPMKTLLVRVMTPDLRERLENLRKKPENIPQPISNTSRANLNKLLTDYTEMKKAILHVYWEEFQKDPVGLMSRVAQPASKKIDQNKLKPEMDEKGNLTTAGFACSQCGQPLFVYKLEQVSEKGKAYTNYFGRCNVAEHEKLILLAQLKPEKDSDEAVTYSLGKFGQRALDFYSIHVTKESTHPVKPLAQIAGNRYASPVGKALSDACMGTIASFLSKYQDIIIEHQKVVKGNQKRLESLRELAGKENLEYPSVTLPPQPHTKEGVDAYNEVIARVRMWVNLNLWQKLKLSRDDAKPLLRLKNFPSFPLVERQANEVDWWDMVCNVKKLINEKKEDGKVFWQNLAGYKRQEALRPYLSSEEDRKKGKKFARYQLGDLLLHLEKKHGEDWGKVYDEAWERIDKKVEGLSKHIKLEEERRSEDAQSKAALTDWLRAKASFVIEGLKEADKDEFCRCELKLQKWYGDLRGKPFAIEAENSILDISGFSKQYNCAFIWQKDGVKKLNLYLIINYFKGGKLRFKKIKPEAFEANRFYTVINKKSGEIVPMEVNFNFDDPNLIILPLAFGKRQGREFIWNDLLSLETGSLKLANGRVIEKTLYNRRTRQDEPALFVALTFERREVLDSSNIKPMNLIGVDRGENIPAVIALTDPEGCPLSRFKDSLGNPTHILRIGESYKEKQRTIQAKKEVEQRRAGGYSRKYASKAKNLADDMVRNTARDLLYYAVTQDAMLIFENLSRGFGRQGKRTFMAERQYTRMEDWLTAKLAYEGLPSKTYLSKTLAQYTSKTCSNCGFTITSADYDRVLEKLKKTATGWMTTINGKELKVEGQITYYNRYKRQNVVKDLSVELDRLSEESVNNDISSWTKGRSGEALSLLKKRFSHRPVQEKFVCLNCGFETHADEQAALNIARSWLFLRSQEYKKYQTNKTTGNTDKRAFVETWQSFYRKKLKEVWKPAV

SEQ ID NO: 46264 - protein, 978 aa, synthetic construct
  REGION 1..978: note = engineered CasX variant
QEIKRLNKIRRRLVKDSNTKKAGKTGPMKTLLVRVMTPDLRERLENLRKKPENIPQPISNTSRANLNKLLTDYTEMKKAILHVYWEEFQKDPVGLMSRVAQPASKKIDQNKLKPEMDEKGNLTTAGFACSQCGQPLFVYKLEQVSEKGKAYTNYFGRCNVAEHEKLILLAQLKPEKDSDEAVTYSLGKFGQRALDFYSIHVTKESTHPVKPLAQIAGNRYASYPVGKALSDACMGTIASFLSKYQDIIIEHQKVVKGNQKRLESLRELAGKENLEYPSVTLPPQPHTKEGVDAYNEVIARVRMWVNLNLWQKLKLSRDDAKPLLRLKGFPSFPLVERQANEVDWWDMVCNVKKLINEKKEDGKVFWQNLAGYKRQEALRPYLSSEEDRKKGKKFARYQLGDLLNHLEKKHGEDWGKVYDEAWERIDKKVEGLSKHIKLEEERRSEDAQSKAALTDWLRAKASFVIEGLKEADKDEFCRCELKLQKWYGDLRGKPFAIEAENSILDISGFSKQYNCAFIWQKDGVKKLNLYLIINYFKGGKLRFKKIKPEAFEANRFYTVINKKSGEIVPMEVNFNFDDPNLIILPLAFGKRQGREFIWNDLLSLETGSLKLANGRVIEKTLYNRRTRQDEPALFVALTFERREVLDSSNIKPMNLIGVDRGENIPAVIALTDPEGCPLSRFKDSLGNPTHILRIGESYKEKQRTIQAKKEVEQRRAGGYSRKYASKAKNLADDMVRNTARDLLYYAVTQDAMLIFENLSRGFGRQGKRTFMAERQYTRMEDWLTAKLAYEGLPSKTYLSKTLAQYTSKTCSNCGFTITSADYDRVLEKLKKTATGWMTTINGKELKVEGQITYYNRYKRQNVVKDLSVELDRLSEESVNNDISSWTKGRSGEALSLLKKRFSHRPVQEKFVCLNCGFETHADEQAALNIARSWLFLRSQEYKKYQTNKTTGNTDKRAFVETWQSFYRKKLKEVWKPAV

SEQ ID NO: 46265 - protein, 978 aa, synthetic construct
  REGION 1..978: note = engineered CasX variant
QEIKRLNKIRRRLVKDSNTKKAGKTGPMKTLLVRVMTPDLRERLENLRKKPENIPQPISNTSRANLNKLLTDYTEMKKAILHVYWEEFQKDPVGLMSRVAQPASKKIDQNKLKPEMDEKGNLTTAGFACSQCGQPLFVYKLEQVSEKGKAYTNYFGRCNVAEHEKLILLAQLKPEKDSDEAVTYSLGKFGQRALDFYSIHVTKESTHPVKPLAQIAGNRYASHPVGKALSDACMGTIASFLSKYQDIIIEHQKVVKGNQKRLESLRELAGKENLEYPSVTLPPQPHTKEGVDAYNEVIARVRMWVNLNLWQKLKLSRDDAKPLLRLKGFPSFPLVERQANEVDWWDMVCNVKKLINEKKEDGKVFWQNLAGYKRQEALRPYLSSEEDRKKGKKFARYQLGDLLNHLEKKHGEDWGKVYDEAWERIDKKVEGLSKHIKLEEERRSEDAQSKAALTDWLRAKASFVIEGLKEADKDEFCRCELKLQKWYGDLRGKPFAIEAENSILDISGFSKQYNCAFIWQKDGVKKLNLYLIINYFKGGKLRFKKIKPEAFEANRFYTVINKKSGEIVPMEVNFNFDDPNLIILPLAFGKRQGREFIWNDLLSLETGSLKLANGRVIEKTLYNRRTRQDEPALFVALTFERREVLDSSNIKPMNLIGVDRGENIPAVIALTDPEGCPLSRFKDSLGNPTHILRIGESYKEKQRTIQAKKEVEQRRAGGYSRKYASKAKNLADDMVRNTARDLLYYAVTQDAMLIFENLSRGFGRQGKRTFMAERQYTRMEDWLTAKLAYEGLPSKTYLSKTLAQYTSKTCSNCGFTITSADYDRVLEKLKKTATGWMTTINGKELKVEGQITYYNRYKRQNVVKDLSVELDRLSEESVNNDISSWTKGRSGEALSLLKKRFSHRPVQEKFVCLNCGFETHADEQAALNIARSWLFLRSQEYKKYQTNKTTGNTDKRAFVETWQSFYRKKLKEVWKPAV

SEQ ID NO: 46266 - protein, 978 aa, synthetic construct
  REGION 1..978: note = engineered CasX variant
QEIKRLNKIRRRLVKDSNTKKAGKTGPMKTLLVRVMTPDLRERLENLRKKPENIPQPISNTSRANLNKLLTDYTEMKKAILHVYWEEFQKDPVGLMSRVAQPASKKIDQNKLKPEMDEKGNLTTAGFACSQCGQPLFVYKLEQVSEKGKAYTNYFGRCNVAEHEKLILLAQLKPEKDSDEAVTYSLGKFGQRALDFYSIHVTKESTHPVKPLAQIAGNRYASSPVGKALSDACMGTIASFLSKYQDIIIEHQKVVKGNQKRLESLRELAGKENLEYPSVTLPPQPHTKEGVDAYNEVIARVRMWVNLNLWQKLKLSRDDAKPLLRLKGFPSFPLVERQANEVDWWDMVCNVKKLINEKKEDGKVFWQNLAGYKRQEALRPYLSSEEDRKKGKKFARYQLGDLLNHLEKKHGEDWGKVYDEAWERIDKKVEGLSKHIKLEEERRSEDAQSKAALTDWLRAKASFVIEGLKEADKDEFCRCELKLQKWYGDLRGKPFAIEAENSILDISGFSKQYNCAFIWQKDGVKKLNLYLIINYFKGGKLRFKKIKPEAFEANRFYTVINKKSGEIVPMEVNFNFDDPNLIILPLAFGKRQGREFIWNDLLSLETGSLKLANGRVIEKTLYNRRTRQDEPALFVALTFERREVLDSSNIKPMNLIGVDRGENIPAVIALTDPEGCPLSRFKDSLGNPTHILRIGESYKEKQRTIQAKKEVEQRRAGGYSRKYASKAKNLADDMVRNTARDLLYYAVTQDAMLIFENLSRGFGRQGKRTFMAERQYTRMEDWLTAKLAYEGLPSKTYLSKTLAQYTSKTCSNCGFTITSADYDRVLEKLKKTATGWMTTINGKELKVEGQITYYNRYKRQNVVKDLSVELDRLSEESVNNDISSWTKGRSGEALSLLKKRFSHRPVQEKFVCLNCGFETHADEQAALNIARSWLFLRSQEYKKYQTNKTTGNTDKRAFVETWQSFYRKKLKEVWKPAV

SEQ ID NO: 46267 - protein, 978 aa, synthetic construct
  REGION 1..978: note = engineered CasX variant
QEIKRLNKIRRRLVKDSNTKKAGKTGPMKTLLVRVMTPDLRERLENLRKKPENIPQPISNTSRANLNKLLTDYTEMKKAILHVYWEEFQKDPVGLMSRVAQPASKKIDQNKLKPEMDEKGNLTTAGFACSQCGQPLFVYKLEQVSEKGKAYTNYFGRCNVAEHEKLILLAQLKPEKDSDEAVTYSLGKFGQRALDFYSIHVTKESTHPVKPLAQIAGNRYASTPVGKALSDACMGTIASFLSKYQDIIIEHQKVVKGNQKRLESLRELAGKENLEYPSVTLPPQPHTKEGVDAYNEVIARVRMWVNLNLWQKLKLSRDDAKPLLRLKGFPSFPLVERQANEVDWWDMVCNVKKLINEKKEDGKVFWQNLAGYKRQEALRPYLSSEEDRKKGKKFARYQLGDLLNHLEKKHGEDWGKVYDEAWERIDKKVEGLSKHIKLEEERRSEDAQSKAALTDWLRAKASFVIEGLKEADKDEFCRCELKLQKWYGDLRGKPFAIEAENSILDISGFSKQYNCAFIWQKDGVKKLNLYLIINYFKGGKLRFKKIKPEAFEANRFYTVINKKSGEIVPMEVNFNFDDPNLIILPLAFGKRQGREFIWNDLLSLETGSLKLANGRVIEKTLYNRRTRQDEPALFVALTFERREVLDSSNIKPMNLIGVDRGENIPAVIALTDPEGCPLSRFKDSLGNPTHILRIGESYKEKQRTIQAKKEVEQRRAGGYSRKYASKAKNLADDMVRNTARDLLYYAVTQDAMLIFENLSRGFGRQGKRTFMAERQYTRMEDWLTAKLAYEGLPSKTYLSKTLAQYTSKTCSNCGFTITSADYDRVLEKLKKTATGWMTTINGKELKVEGQITYYNRYKRQNVVKDLSVELDRLSEESVNNDISSWTKGRSGEALSLLKKRFSHRPVQEKFVCLNCGFETHADEQAALNIARSWLFLRSQEYKKYQTNKTTGNTDKRAFVETWQSFYRKKLKEVWKPAV

SEQ ID NO: 46268 - protein, 978 aa, synthetic construct
  REGION 1..978: note = engineered CasX variant
QEIKRLNKIRRRLVKDSNTKKAGKTGPMKTLLVRVMTPDLRERLENLRKKPENIPQPISNTSRANLNKLLTDYTEMKKAILHVYWEEFQKDPVGLMSRVAQPASKKIDQNKLKPEMDEKGNLTTAGFACSQCGQPLFVYKLEQVSEKGKAYTNYFGRCNVAEHEKLILLAQLKPEKDSDEAVTYSLGKFGQRALDFYSIHVTKESTHPVKPLAQIAGNRYASAPVGKALSDACMGTIASFLSKYQDIIIEHQKVVKGNQKRLESLRELAGKENLEYPSVTLPPQPHTKEGVDAYNEVIARVRMWVNLNLWQKLKLSRDDAKPLLRLKGFPSFPLVERQANEVDWWDMVCNVKKLINEKKEDGKVFWQNLAGYKRQEALRPYLSSEEDRKKGKKFARYQLGDLLNHLEKKHGEDWGKVYDEAWERIDKKVEGLSKHIKLEEERRSEDAQSKAALTDWLRAKASFVIEGLKEADKDEFCRCELKLQKWYGDLRGKPFAIEAENSILDISGFSKQYNCAFIWQKDGVKKLNLYLIINYFKGGKLRFKKIKPEAFEANRFYTVINKKSGEIVPMEVNFNFDDPNLIILPLAFGKRQGREFIWNDLLSLETGSLKLANGRVIEKTLYNRRTRQDEPALFVALTFERREVLDSSNIKPMNLIGVDRGENIPAVIALTDPEGCPLSRFKDSLGNPTHILRIGESYKEKQRTIQAKKEVEQRRAGGYSRKYASKAKNLADDMVRNTARDLLYYAVTQDAMLIFENLSRGFGRQGKRTFMAERQYTRMEDWLTAKLAYEGLPSKTYLSKTLAQYTSKTCSNCGFTITSADYDRVLEKLKKTATGWMTTINGKELKVEGQITYYNRYKRQNVVKDLSVELDRLSEESVNNDISSWTKGRSGEALSLLKKRFSHRPVQEKFVCLNCGFETHADEQAALNIARSWLFLRSQEYKKYQTNKTTGNTDKRAFVETWQSFYRKKLKEVWKPAV

SEQ ID NO: 46269 - protein, 978 aa, synthetic construct
  REGION 1..978: note = engineered CasX variant
QEIKRLNKIRRRLVKDSNTKKAGKTGPMKTLLVRVMTPDLRERLENLRKKPENIPQPISNTSRANLNKLLTDYTEMKKAILHVYWEEFQKDPVGLMSRVAQPASKKIDQNKLKPEMDEKGNLTTAGFACSQCGQPLFVYKLEQVSEKGKAYTNYFGRCNVAEHEKLILLAQLKPEKDSDEAVTYSLGKFGQRALDFYSIHVTKESTHPVKPLAQIAGNRYASVPVGKALSDACMGTIASFLSKYQDIIIEHQKVVKGNQKRLESLRELAGKENLEYPSVTLPPQPHTKEGVDAYNEVIARVRMWVNLNLWQKLKLSRDDAKPLLRLKGFPSFPLVERQANEVDWWDMVCNVKKLINEKKEDGKVFWQNLAGYKRQEALRPYLSSEEDRKKGKKFARYQLGDLLNHLEKKHGEDWGKVYDEAWERIDKKVEGLSKHIKLEEERRSEDAQSKAALTDWLRAKASFVIEGLKEADKDEFCRCELKLQKWYGDLRGKPFAIEAENSILDISGFSKQYNCAFIWQKDGVKKLNLYLIINYFKGGKLRFKKIKPEAFEANRFYTVINKKSGEIVPMEVNFNFDDPNLIILPLAFGKRQGREFIWNDLLSLETGSLKLANGRVIEKTLYNRRTRQDEPALFVALTFERREVLDSSNIKPMNLIGVDRGENIPAVIALTDPEGCPLSRFKDSLGNPTHILRIGESYKEKQRTIQAKKEVEQRRAGGYSRKYASKAKNLADDMVRNTARDLLYYAVTQDAMLIFENLSRGFGRQGKRTFMAERQYTRMEDWLTAKLAYEGLPSKTYLSKTLAQYTSKTCSNCGFTITSADYDRVLEKLKKTATGWMTTINGKELKVEGQITYYNRYKRQNVVKDLSVELDRLSEESVNNDISSWTKGRSGEALSLLKKRFSHRPVQEKFVCLNCGFETHADEQAALNIARSWLFLRSQEYKKYQTNKTTGNTDKRAFVETWQSFYRKKLKEVWKPAV

SEQ ID NO: 46270 - protein, 978 aa, synthetic construct
  REGION 1..978: note = engineered CasX variant
QEIKRLNKIRRRLVKDSNTKKAGKTGPMKTLLVRVMTPDLRERLENLRKKPENIPQPISNTSRANLNKLLTDYTEMKKAILHVYWEEFQKDPVGLMSRVAQPASKKIDQNKLKPEMDEKGNLTTAGFACSQCGQPLFVYKLEQVSEKGKAYTNYFGRCNVAEHEKLIKLAQLKPEKDSDEAVTYSLGKFGQRALDFYSIHVTKESTHPVKPLAQIAGNRYASGPVGKALSDACMGTIASFLSKYQDIIIEHQKVVKGNQKRLESLRELAGKENLEYPSVTLPPQPHTKEGVDAYNEVIARVRMWVNLNLWQKLKLSRDDAKPLLRLKGFPSFPLVERQANEVDWWDMVCNVKKLINEKKEDGKVFWQNLAGYKRQEALRPYLSSEEDRKKGKKFARYQLGDLLNHLEKKHGEDWGKVYDEAWERIDKKVEGLSKHIKLEEERRSEDAQSKAALTDWLRAKASFVIEGLKEADKDEFCRCELKLQKWYGDLRGKPFAIEAENSILDISGFSKQYNCAFIWQKDGVKKLNLYLIINYFKGGKLRFKKIKPEAFEANRFYTVINKKSGEIVPMEVNFNFDDPNLIILPLAFGKRQGREFIWNDLLSLETGSLKLANGRVIEKTLYNRRTRQDEPALFVALTFERREVLDSSNIKPMNLIGVDRGENIPAVIALTDPEGCPLSRFKDSLGNPTHILRIGESYKEKQRTIQAKKEVEQRRAGGYSRKYASKAKNLADDMVRNTARDLLYYAVTQDAMLIFENLSRGFGRQGKRTFMAERQYTRMEDWLTAKLAYEGLPSKTYLSKTLAQYTSKTCSNCGFTITSADYDRVLEKLKKTATGWMTTINGKELKVEGQITYYNRYKRQNVVKDLSVELDRLSEESVNNDISSWTKGRSGEALSLLKKRFSHRPVQEKFVCLNCGFETHADEQAALNIARSWLFLRSQEYKKYQTNKTTGNTDKRAFVETWQSFYRKKLKEVWKPAV

SEQ ID NO: 46271 - protein, 977 aa, synthetic construct
  REGION 1..977: note = engineered CasX variant
QEIKRLNKIRRRLVKDSNTKKAGKTGPMKTLLVRVMTPDLRERLENLRKKPENIPQPISNTSRANLNKLLTDYTEMKKAILHVYWEEFQKDPVGLMSRVAQPASKKIDQNKLKPEMDEKGNLTTAGFACSQCGQPLFVYKLEQVSEKGKAYTNYFGRCNVAEHEKLILLAQLKPEKDSDEAVTYSLGKFGQRALDFYSIHVTKESTHPVKPLAQIAGNRYASPVGKALSDACMGTIASFLSKYQDIIIEHQKVVKGNQKRLESLRELAGKENLEYPSVTLPPQPHTKEGVDAYNEVIARVRMWVNLNLWQKLKLSRDDAKPLLRLKGFPSFPLVERQANEVDWWDMVCNVKKLINEKKEDGKVFWQNLAGYKRQEALRPYLSSEEDRKKGKKFARYQLGDLLNHLEKKHGEDWGKVYDEAWERIDKKVEGLSKHIKLEEERRSEDAQSKAALTDWLRAKASFVIEGLKEADKDEFCRCELKLQKWYGDLRGKPFAIEAENSILDISGFSKQYNCAFIWQKDGVKKLNLYLIINYFKGGKLRFKKIKPEAFEANRFYTVINKKSGEIVPMEVNFNFDDPNLIILPLAFGKRQGREFIWNDLLSLETGSLKLANGRVIEKTLYNRRTRQDEPALFVALTFERREVLDSSNIKPMNLIGVDRGENIPAVIALTDPEGCPLSRFKDSLGNPTHILRIGESYKEKQRTIQAKKEVEQRRAGGYSRKYASKAKNLADDMVRNTARDLLYYAVTQDAMLIFENLSRGFGRQGKRTFMAERQYTRMEDWLTAKLAYEGLPSKTYLSKTLAQYTSKTCSNCGFTITSADYDRVLEKLKKTATGWMTTINGKELKVEGQITYYNRYKRQNVVKDLSVELDRLSEESVNNDISSWTKGRSGEALSLLKKRFSHRPVQEKFVCLNCGFETHADEQAALNIARSWLFLRSQEYKKYQTNKTTGNTDKRAFVETWQSFYRKKLKEVWKPAV

SEQ ID NO: 46272 - protein, 978 aa, synthetic construct
  REGION 1..978: note = engineered CasX variant
QEIKRLNKIRRRLVKDSNTKKAGKTGPMKTLLVRVMTPDLRERLENLRKKPENIPQPISNTSRANLNKLLTDYTEMKKAILHVYWEEFQKDPVGLMSRVAQPASKKIDQNKLKPEMDEKGNLTTAGFACSQCGQPLFVYKLEQVSEKGKAYTNYFGRCNVAEHEKLILLAQLKPEKDSDEAVTYSLGKFGQRALDFYSIHVTKESTHPVKPLAQIAGNRYASYPVGKALSDACMGTIASFLSKYQDIIIEHQKVVKGNQKRLESLRELAGKENLEYPSVTLPPQPHTKEGVDAYNEVIARVRMWVNLNLWQKLKLSRDDAKPLLRLKGFPSFPLVERQANEVDWWDMVCNVKKLINEKKEDGKVFWQNLAGYKRQEALRPYLSSEEDRKKGKKFARYQLGDLLWHLEKKHGEDWGKVYDEAWERIDKKVEGLSKHIKLEEERRSEDAQSKAALTDWLRAKASFVIEGLKEADKDEFCRCELKLQKWYGDLRGKPFAIEAENSILDISGFSKQYNCAFIWQKDGVKKLNLYLIINYFKGGKLRFKKIKPEAFEANRFYTVINKKSGEIVPMEVNFNFDDPNLIILPLAFGKRQGREFIWNDLLSLETGSLKLANGRVIEKTLYNRRTRQDEPALFVALTFERREVLDSSNIKPMNLIGVDRGENIPAVIALTDPEGCPLSRFKDSLGNPTHILRIGESYKEKQRTIQAKKEVEQRRAGGYSRKYASKAKNLADDMVRNTARDLLYYAVTQDAMLIFENLSRGFGRQGKRTFMAERQYTRMEDWLTAKLAYEGLPSKTYLSKTLAQYTSKTCSNCGFTITSADYDRVLEKLKKTATGWMTTINGKELKVEGQITYYNRYKRQNVVKDLSVELDRLSEESVNNDISSWTKGRSGEALSLLKKRFSHRPVQEKFVCLNCGFETHADEQAALNIARSWLFLRSQEYKKYQTNKTTGNTDKRAFVETWQSFYRKKLKEVWKPAV

SEQ ID NO: 46273 - protein, 978 aa, synthetic construct
  REGION 1..978: note = engineered CasX variant
QEIKRLNKIRRRLVKDSNTKKAGKTGPMKTLLVRVMTPDLRERLENLRKKPENIPQPISNTSRANLNKLLTDYTEMKKAILHVYWEEFQKDPVGLMSRVAQPASKKIDQNKLKPEMDEKGNLTTAGFACSQCGQPLFVYKLEQVSEKGKAYTNYFGRCNVAEHEKLILLAQLKPEKDSDEAVTYSLGKFGQRALDFYSIHVTKESTHPVKPLAQIAGNRYASHPVGKALSDACMGTIASFLSKYQDIIIEHQKVVKGNQKRLESLRELAGKENLEYPSVTLPPQPHTKEGVDAYNEVIARVRMWVNLNLWQKLKLSRDDAKPLLRLKGFPSFPLVERQANEVDWWDMVCNVKKLINEKKEDGKVFWQNLAGYKRQEALRPYLSSEEDRKKGKKFARYQLGDLLWHLEKKHGEDWGKVYDEAWERIDKKVEGLSKHIKLEEERRSEDAQSKAALTDWLRAKASFVIEGLKEADKDEFCRCELKLQKWYGDLRGKPFAIEAENSILDISGFSKQYNCAFIWQKDGVKKLNLYLIINYFKGGKLRFKKIKPEAFEANRFYTVINKKSGEIVPMEVNFNFDDPNLIILPLAFGKRQGREFIWNDLLSLETGSLKLANGRVIEKTLYNRRTRQDEPALFVALTFERREVLDSSNIKPMNLIGVDRGENIPAVIALTDPEGCPLSRFKDSLGNPTHILRIGESYKEKQRTIQAKKEVEQRRAGGYSRKYASKAKNLADDMVRNTARDLLYYAVTQDAMLIFENLSRGFGRQGKRTFMAERQYTRMEDWLTAKLAYEGLPSKTYLSKTLAQYTSKTCSNCGFTITSADYDRVLEKLKKTATGWMTTINGKELKVEGQITYYNRYKRQNVVKDLSVELDRLSEESVNNDISSWTKGRSGEALSLLKKRFSHRPVQEKFVCLNCGFETHADEQAALNIARSWLFLRSQEYKKYQTNKTTGNTDKRAFVETWQSFYRKKLKEVWKPAV

SEQ ID NO: 46274 - protein, 978 aa, synthetic construct
  REGION 1..978: note = engineered CasX variant
QEIKRLNKIRRRLVKDSNTKKAGKTGPMKTLLVRVMTPDLRERLENLRKKPENIPQPISNTSRANLNKLLTDYTEMKKAILHVYWEEFQKDPVGLMSRVAQPASKKIDQNKLKPEMDEKGNLTTAGFACSQCGQPLFVYKLEQVSEKGKAYTNYFGRCNVAEHEKLILLAQLKPEKDSDEAVTYSLGKFGQRALDFYSIHVTKESTHPVKPLAQIAGNRYASSPVGKALSDACMGTIASFLSKYQDIIIEHQKVVKGNQKRLESLRELAGKENLEYPSVTLPPQPHTKEGVDAYNEVIARVRMWVNLNLWQKLKLSRDDAKPLLRLKGFPSFPLVERQANEVDWWDMVCNVKKLINEKKEDGKVFWQNLAGYKRQEALRPYLSSEEDRKKGKKFARYQLGDLLWHLEKKHGEDWGKVYDEAWERIDKKVEGLSKHIKLEEERRSEDAQSKAALTDWLRAKASFVIEGLKEADKDEFCRCELKLQKWYGDLRGKPFAIEAENSILDISGFSKQYNCAFIWQKDGVKKLNLYLIINYFKGGKLRFKKIKPEAFEANRFYTVINKKSGEIVPMEVNFNFDDPNLIILPLAFGKRQGREFIWNDLLSLETGSLKLANGRVIEKTLYNRRTRQDEPALFVALTFERREVLDSSNIKPMNLIGVDRGENIPAVIALTDPEGCPLSRFKDSLGNPTHILRIGESYKEKQRTIQAKKEVEQRRAGGYSRKYASKAKNLADDMVRNTARDLLYYAVTQDAMLIFENLSRGFGRQGKRTFMAERQYTRMEDWLTAKLAYEGLPSKTYLSKTLAQYTSKTCSNCGFTITSADYDRVLEKLKKTATGWMTTINGKELKVEGQITYYNRYKRQNVVKDLSVELDRLSEESVNNDISSWTKGRSGEALSLLKKRFSHRPVQEKFVCLNCGFETHADEQAALNIARSWLFLRSQEYKKYQTNKTTGNTDKRAFVETWQSFYRKKLKEVWKPAV

SEQ ID NO: 46275 - protein, 978 aa, synthetic construct
  REGION 1..978: note = engineered CasX variant
QEIKRLNKIRRRLVKDSNTKKAGKTGPMKTLLVRVMTPDLRERLENLRKKPENIPQPISNTSRANLNKLLTDYTEMKKAILHVYWEEFQKDPVGLMSRVAQPASKKIDQNKLKPEMDEKGNLTTAGFACSQCGQPLFVYKLEQVSEKGKAYTNYFGRCNVAEHEKLILLAQLKPEKDSDEAVTYSLGKFGQRALDFYSIHVTKESTHPVKPLAQIAGNRYASTPVGKALSDACMGTIASFLSKYQDIIIEHQKVVKGNQKRLESLRELAGKENLEYPSVTLPPQPHTKEGVDAYNEVIARVRMWVNLNLWQKLKLSRDDAKPLLRLKGFPSFPLVERQANEVDWWDMVCNVKKLINEKKEDGKVFWQNLAGYKRQEALRPYLSSEEDRKKGKKFARYQLGDLLWHLEKKHGEDWGKVYDEAWERIDKKVEGLSKHIKLEEERRSEDAQSKAALTDWLRAKASFVIEGLKEADKDEFCRCELKLQKWYGDLRGKPFAIEAENSILDISGFSKQYNCAFIWQKDGVKKLNLYLIINYFKGGKLRFKKIKPEAFEANRFYTVINKKSGEIVPMEVNFNFDDPNLIILPLAFGKRQGREFIWNDLLSLETGSLKLANGRVIEKTLYNRRTRQDEPALFVALTFERREVLDSSNIKPMNLIGVDRGENIPAVIALTDPEGCPLSRFKDSLGNPTHILRIGESYKEKQRTIQAKKEVEQRRAGGYSRKYASKAKNLADDMVRNTARDLLYYAVTQDAMLIFENLSRGFGRQGKRTFMAERQYTRMEDWLTAKLAYEGLPSKTYLSKTLAQYTSKTCSNCGFTITSADYDRVLEKLKKTATGWMTTINGKELKVEGQITYYNRYKRQNVVKDLSVELDRLSEESVNNDISSWTKGRSGEALSLLKKRFSHRPVQEKFVCLNCGFETHADEQAALNIARSWLFLRSQEYKKYQTNKTTGNTDKRAFVETWQSFYRKKLKEVWKPAV

SEQ ID NO: 46276 - protein, 978 aa, synthetic construct
  REGION 1..978: note = engineered CasX variant
QEIKRLNKIRRRLVKDSNTKKAGKTGPMKTLLVRVMTPDLRERLENLRKKPENIPQPISNTSRANLNKLLTDYTEMKKAILHVYWEEFQKDPVGLMSRVAQPASKKIDQNKLKPEMDEKGNLTTAGFACSQCGQPLFVYKLEQVSEKGKAYTNYFGRCNVAEHEKLILLAQLKPEKDSDEAVTYSLGKFGQRALDFYSIHVTKESTHPVKPLAQIAGNRYASAPVGKALSDACMGTIASFLSKYQDIIIEHQKVVKGNQKRLESLRELAGKENLEYPSVTLPPQPHTKEGVDAYNEVIARVRMWVNLNLWQKLKLSRDDAKPLLRLKGFPSFPLVERQANEVDWWDMVCNVKKLINEKKEDGKVFWQNLAGYKRQEALRPYLSSEEDRKKGKKFARYQLGDLLWHLEKKHGEDWGKVYDEAWERIDKKVEGLSKHIKLEEERRSEDAQSKAALTDWLRAKASFVIEGLKEADKDEFCRCELKLQKWYGDLRGKPFAIEAENSILDISGFSKQYNCAFIWQKDGVKKLNLYLIINYFKGGKLRFKKIKPEAFEANRFYTVINKKSGEIVPMEVNFNFDDPNLIILPLAFGKRQGREFIWNDLLSLETGSLKLANGRVIEKTLYNRRTRQDEPALFVALTFERREVLDSSNIKPMNLIGVDRGENIPAVIALTDPEGCPLSRFKDSLGNPTHILRIGESYKEKQRTIQAKKEVEQRRAGGYSRKYASKAKNLADDMVRNTARDLLYYAVTQDAMLIFENLSRGFGRQGKRTFMAERQYTRMEDWLTAKLAYEGLPSKTYLSKTLAQYTSKTCSNCGFTITSADYDRVLEKLKKTATGWMTTINGKELKVEGQITYYNRYKRQNVVKDLSVELDRLSEESVNNDISSWTKGRSGEALSLLKKRFSHRPVQEKFVCLNCGFETHADEQAALNIARSWLFLRSQEYKKYQTNKTTGNTDKRAFVETWQSFYRKKLKEVWKPAV

SEQ ID NO: 46277 - protein, 978 aa, synthetic construct
  REGION 1..978: note = engineered CasX variant
QEIKRLNKIRRRLVKDSNTKKAGKTGPMKTLLVRVMTPDLRERLENLRKKPENIPQPISNTSRANLNKLLTDYTEMKKAILHVYWEEFQKDPVGLMSRVAQPASKKIDQNKLKPEMDEKGNLTTAGFACSQCGQPLFVYKLEQVSEKGKAYTNYFGRCNVAEHEKLILLAQLKPEKDSDEAVTYSLGKFGQRALDFYSIHVTKESTHPVKPLAQIAGNRYASVPVGKALSDACMGTIASFLSKYQDIIIEHQKVVKGNQKRLESLRELAGKENLEYPSVTLPPQPHTKEGVDAYNEVIARVRMWVNLNLWQKLKLSRDDAKPLLRLKGFPSFPLVERQANEVDWWDMVCNVKKLINEKKEDGKVFWQNLAGYKRQEALRPYLSSEEDRKKGKKFARYQLGDLLWHLEKKHGEDWGKVYDEAWERIDKKVEGLSKHIKLEEERRSEDAQSKAALTDWLRAKASFVIEGLKEADKDEFCRCELKLQKWYGDLRGKPFAIEAENSILDISGFSKQYNCAFIWQKDGVKKLNLYLIINYFKGGKLRFKKIKPEAFEANRFYTVINKKSGEIVPMEVNFNFDDPNLIILPLAFGKRQGREFIWNDLLSLETGSLKLANGRVIEKTLYNRRTRQDEPALFVALTFERREVLDSSNIKPMNLIGVDRGENIPAVIALTDPEGCPLSRFKDSLGNPTHILRIGESYKEKQRTIQAKKEVEQRRAGGYSRKYASKAKNLADDMVRNTARDLLYYAVTQDAMLIFENLSRGFGRQGKRTFMAERQYTRMEDWLTAKLAYEGLPSKTYLSKTLAQYTSKTCSNCGFTITSADYDRVLEKLKKTATGWMTTINGKELKVEGQITYYNRYKRQNVVKDLSVELDRLSEESVNNDISSWTKGRSGEALSLLKKRFSHRPVQEKFVCLNCGFETHADEQAALNIARSWLFLRSQEYKKYQTNKTTGNTDKRAFVETWQSFYRKKLKEVWKPAV

SEQ ID NO: 46278 - protein, 978 aa, synthetic construct
  REGION 1..978: note = engineered CasX variant
QEIKRLNKIRRRLVKDSNTKKAGKTGPMKTLLVRVMTPDLRERLENLRKKPENIPQPISNTSRANLNKLLTDYTEMKKAILHVYWEEFQKDPVGLMSRVAQPASKKIDQNKLKPEMDEKGNLTTAGFACSQCGQPLFVYKLEQVSEKGKAYTNYFGRCNVAEHEKLIKLAQLKPEKDSDEAVTYSLGKFGQRALDFYSIHVTKESTHPVKPLAQIAGNRYASGPVGKALSDACMGTIASFLSKYQDIIIEHQKVVKGNQKRLESLRELAGKENLEYPSVTLPPQPHTKEGVDAYNEVIARVRMWVNLNLWQKLKLSRDDAKPLLRLKGFPSFPLVERQANEVDWWDMVCNVKKLINEKKEDGKVFWQNLAGYKRQEALRPYLSSEEDRKKGKKFARYQLGDLLWHLEKKHGEDWGKVYDEAWERIDKKVEGLSKHIKLEEERRSEDAQSKAALTDWLRAKASFVIEGLKEADKDEFCRCELKLQKWYGDLRGKPFAIEAENSILDISGFSKQYNCAFIWQKDGVKKLNLYLIINYFKGGKLRFKKIKPEAFEANRFYTVINKKSGEIVPMEVNFNFDDPNLIILPLAFGKRQGREFIWNDLLSLETGSLKLANGRVIEKTLYNRRTRQDEPALFVALTFERREVLDSSNIKPMNLIGVDRGENIPAVIALTDPEGCPLSRFKDSLGNPTHILRIGESYKEKQRTIQAKKEVEQRRAGGYSRKYASKAKNLADDMVRNTARDLLYYAVTQDAMLIFENLSRGFGRQGKRTFMAERQYTRMEDWLTAKLAYEGLPSKTYLSKTLAQYTSKTCSNCGFTITSADYDRVLEKLKKTATGWMTTINGKELKVEGQITYYNRYKRQNVVKDLSVELDRLSEESVNNDISSWTKGRSGEALSLLKKRFSHRPVQEKFVCLNCGFETHADEQAALNIARSWLFLRSQEYKKYQTNKTTGNTDKRAFVETWQSFYRKKLKEVWKPAV

SEQ ID NO: 46279 - protein, 977 aa, synthetic construct
  REGION 1..977: note = engineered CasX variant
QEIKRLNKIRRRLVKDSNTKKAGKTGPMKTLLVRVMTPDLRERLENLRKKPENIPQPISNTSRANLNKLLTDYTEMKKAILHVYWEEFQKDPVGLMSRVAQPASKKIDQNKLKPEMDEKGNLTTAGFACSQCGQPLFVYKLEQVSEKGKAYTNYFGRCNVAEHEKLILLAQLKPEKDSDEAVTYSLGKFGQRALDFYSIHVTKESTHPVKPLAQIAGNRYASPVGKALSDACMGTIASFLSKYQDIIIEHQKVVKGNQKRLESLRELAGKENLEYPSVTLPPQPHTKEGVDAYNEVIARVRMWVNLNLWQKLKLSRDDAKPLLRLKGFPSFPLVERQANEVDWWDMVCNVKKLINEKKEDGKVFWQNLAGYKRQEALRPYLSSEEDRKKGKKFARYQLGDLLWHLEKKHGEDWGKVYDEAWERIDKKVEGLSKHIKLEEERRSEDAQSKAALTDWLRAKASFVIEGLKEADKDEFCRCELKLQKWYGDLRGKPFAIEAENSILDISGFSKQYNCAFIWQKDGVKKLNLYLIINYFKGGKLRFKKIKPEAFEANRFYTVINKKSGEIVPMEVNFNFDDPNLIILPLAFGKRQGREFIWNDLLSLETGSLKLANGRVIEKTLYNRRTRQDEPALFVALTFERREVLDSSNIKPMNLIGVDRGENIPAVIALTDPEGCPLSRFKDSLGNPTHILRIGESYKEKQRTIQAKKEVEQRRAGGYSRKYASKAKNLADDMVRNTARDLLYYAVTQDAMLIFENLSRGFGRQGKRTFMAERQYTRMEDWLTAKLAYEGLPSKTYLSKTLAQYTSKTCSNCGFTITSADYDRVLEKLKKTATGWMTTINGKELKVEGQITYYNRYKRQNVVKDLSVELDRLSEESVNNDISSWTKGRSGEALSLLKKRFSHRPVQEKFVCLNCGFETHADEQAALNIARSWLFLRSQEYKKYQTNKTTGNTDKRAFVETWQSFYRKKLKEVWKPAV

SEQ ID NO: 46280 - protein, 978 aa, synthetic construct
  REGION 1..978: note = engineered CasX variant
QEIKRLNKIRRRLVKDSNTKKAGKTGPMKTLLVRVMTPDLRERLENLRKKPENIPQPISNTSRANLNKLLTDYTEMKKAILHVYWEEFQKDPVGLMSRVAQPASKKIDQNKLKPEMDEKGNLTTAGFACSQCGQPLFVYKLEQVSEKGKAYTNYFGRCNVAEHEKLILLAQLKPEKDSDEAVTYSLGKFGQRALDFYSIHVTKESTHPVKPLAQIAGNRYASYPVGKALSDACMGTIASFLSKYQDIIIEHQKVVKGNQKRLESLRELAGKENLEYPSVTLPPQPHTKEGVDAYNEVIARVRMWVNLNLWQKLKLSRDDAKPLLRLKGFPSFPLVERQANEVDWWDMVCNVKKLINEKKEDGKVFWQNLAGYKRQEALRPYLSSEEDRKKGKKFARYQLGDLLLHLYKKHGEDWGKVYDEAWERIDKKVEGLSKHIKLEEERRSEDAQSKAALTDWLRAKASFVIEGLKEADKDEFCRCELKLQKWYGDLRGKPFAIEAENSILDISGFSKQYNCAFIWQKDGVKKLNLYLIINYFKGGKLRFKKIKPEAFEANRFYTVINKKSGEIVPMEVNFNFDDPNLIILPLAFGKRQGREFIWNDLLSLETGSLKLANGRVIEKTLYNRRTRQDEPALFVALTFERREVLDSSNIKPMNLIGVDRGENIPAVIALTDPEGCPLSRFKDSLGNPTHILRIGESYKEKQRTIQAKKEVEQRRAGGYSRKYASKAKNLADDMVRNTARDLLYYAVTQDAMLIFENLSRGFGRQGKRTFMAERQYTRMEDWLTAKLAYEGLPSKTYLSKTLAQYTSKTCSNCGFTITSADYDRVLEKLKKTATGWMTTINGKELKVEGQITYYNRYKRQNVVKDLSVELDRLSEESVNNDISSWTKGRSGEALSLLKKRFSHRPVQEKFVCLNCGFETHADEQAALNIARSWLFLRSQEYKKYQTNKTTGNTDKRAFVETWQSFYRKKLKEVWKPAV

SEQ ID NO: 46281 - protein, 978 aa, synthetic construct
  REGION 1..978: note = engineered CasX variant
QEIKRLNKIRRRLVKDSNTKKAGKTGPMKTLLVRVMTPDLRERLENLRKKPENIPQPISNTSRANLNKLLTDYTEMKKAILHVYWEEFQKDPVGLMSRVAQPASKKIDQNKLKPEMDEKGNLTTAGFACSQCGQPLFVYKLEQVSEKGKAYTNYFGRCNVAEHEKLILLAQLKPEKDSDEAVTYSLGKFGQRALDFYSIHVTKESTHPVKPLAQIAGNRYASHPVGKALSDACMGTIASFLSKYQDIIIEHQKVVKGNQKRLESLRELAGKENLEYPSVTLPPQPHTKEGVDAYNEVIARVRMWVNLNLWQKLKLSRDDAKPLLRLKGFPSFPLVERQANEVDWWDMVCNVKKLINEKKEDGKVFWQNLAGYKRQEALRPYLSSEEDRKKGKKFARYQLGDLLLHLYKKHGEDWGKVYDEAWERIDKKVEGLSKHIKLEEERRSEDAQSKAALTDWLRAKASFVIEGLKEADKDEFCRCELKLQKWYGDLRGKPFAIEAENSILDISGFSKQYNCAFIWQKDGVKKLNLYLIINYFKGGKLRFKKIKPEAFEANRFYTVINKKSGEIVPMEVNFNFDDPNLIILPLAFGKRQGREFIWNDLLSLETGSLKLANGRVIEKTLYNRRTRQDEPALFVALTFERREVLDSSNIKPMNLIGVDRGENIPAVIALTDPEGCPLSRFKDSLGNPTHILRIGESYKEKQRTIQAKKEVEQRRAGGYSRKYASKAKNLADDMVRNTARDLLYYAVTQDAMLIFENLSRGFGRQGKRTFMAERQYTRMEDWLTAKLAYEGLPSKTYLSKTLAQYTSKTCSNCGFTITSADYDRVLEKLKKTATGWMTTINGKELKVEGQITYYNRYKRQNVVKDLSVELDRLSEESVNNDISSWTKGRSGEALSLLKKRFSHRPVQEKFVCLNCGFETHADEQAALNIARSWLFLRSQEYKKYQTNKTTGNTDKRAFVETWQSFYRKKLKEVWKPAV

SEQ ID NO: 46282 - protein, 978 aa, synthetic construct
  REGION 1..978: note = engineered CasX variant
QEIKRLNKIRRRLVKDSNTKKAGKTGPMKTLLVRVMTPDLRERLENLRKKPENIPQPISNTSRANLNKLLTDYTEMKKAILHVYWEEFQKDPVGLMSRVAQPASKKIDQNKLKPEMDEKGNLTTAGFACSQCGQPLFVYKLEQVSEKGKAYTNYFGRCNVAEHEKLILLAQLKPEKDSDEAVTYSLGKFGQRALDFYSIHVTKESTHPVKPLAQIAGNRYASSPVGKALSDACMGTIASFLSKYQDIIIEHQKVVKGNQKRLESLRELAGKENLEYPSVTLPPQPHTKEGVDAYNEVIARVRMWVNLNLWQKLKLSRDDAKPLLRLKGFPSFPLVERQANEVDWWDMVCNVKKLINEKKEDGKVFWQNLAGYKRQEALRPYLSSEEDRKKGKKFARYQLGDLLLHLYKKHGEDWGKVYDEAWERIDKKVEGLSKHIKLEEERRSEDAQSKAALTDWLRAKASFVIEGLKEADKDEFCRCELKLQKWYGDLRGKPFAIEAENSILDISGFSKQYNCAFIWQKDGVKKLNLYLIINYFKGGKLRFKKIKPEAFEANRFYTVINKKSGEIVPMEVNFNFDDPNLIILPLAFGKRQGREFIWNDLLSLETGSLKLANGRVIEKTLYNRRTRQDEPALFVALTFERREVLDSSNIKPMNLIGVDRGENIPAVIALTDPEGCPLSRFKDSLGNPTHILRIGESYKEKQRTIQAKKEVEQRRAGGYSRKYASKAKNLADDMVRNTARDLLYYAVTQDAMLIFENLSRGFGRQGKRTFMAERQYTRMEDWLTAKLAYEGLPSKTYLSKTLAQYTSKTCSNCGFTITSADYDRVLEKLKKTATGWMTTINGKELKVEGQITYYNRYKRQNVVKDLSVELDRLSEESVNNDISSWTKGRSGEALSLLKKRFSHRPVQEKFVCLNCGFETHADEQAALNIARSWLFLRSQEYKKYQTNKTTGNTDKRAFVETWQSFYRKKLKEVWKPAV

SEQ ID NO: 46283 - protein, 978 aa, synthetic construct
  REGION 1..978: note = engineered CasX variant
QEIKRLNKIRRRLVKDSNTKKAGKTGPMKTLLVRVMTPDLRERLENLRKKPENIPQPISNTSRANLNKLLTDYTEMKKAILHVYWEEFQKDPVGLMSRVAQPASKKIDQNKLKPEMDEKGNLTTAGFACSQCGQPLFVYKLEQVSEKGKAYTNYFGRCNVAEHEKLILLAQLKPEKDSDEAVTYSLGKFGQRALDFYSIHVTKESTHPVKPLAQIAGNRYASTPVGKALSDACMGTIASFLSKYQDIIIEHQKVVKGNQKRLESLRELAGKENLEYPSVTLPPQPHTKEGVDAYNEVIARVRMWVNLNLWQKLKLSRDDAKPLLRLKGFPSFPLVERQANEVDWWDMVCNVKKLINEKKEDGKVFWQNLAGYKRQEALRPYLSSEEDRKKGKKFARYQLGDLLLHLYKKHGEDWGKVYDEAWERIDKKVEGLSKHIKLEEERRSEDAQSKAALTDWLRAKASFVIEGLKEADKDEFCRCELKLQKWYGDLRGKPFAIEAENSILDISGFSKQYNCAFIWQKDGVKKLNLYLIINYFKGGKLRFKKIKPEAFEANRFYTVINKKSGEIVPMEVNFNFDDPNLIILPLAFGKRQGREFIWNDLLSLETGSLKLANGRVIEKTLYNRRTRQDEPALFVALTFERREVLDSSNIKPMNLIGVDRGENIPAVIALTDPEGCPLSRFKDSLGNPTHILRIGESYKEKQRTIQAKKEVEQRRAGGYSRKYASKAKNLADDMVRNTARDLLYYAVTQDAMLIFENLSRGFGRQGKRTFMAERQYTRMEDWLTAKLAYEGLPSKTYLSKTLAQYTSKTCSNCGFTITSADYDRVLEKLKKTATGWMTTINGKELKVEGQITYYNRYKRQNVVKDLSVELDRLSEESVNNDISSWTKGRSGEALSLLKKRFSHRPVQEKFVCLNCGFETHADEQAALNIARSWLFLRSQEYKKYQTNKTTGNTDKRAFVETWQSFYRKKLKEVWKPAV

SEQ ID NO: 46284 - protein, 978 aa, synthetic construct
  REGION 1..978: note = engineered CasX variant
QEIKRLNKIRRRLVKDSNTKKAGKTGPMKTLLVRVMTPDLRERLENLRKKPENIPQPISNTSRANLNKLLTDYTEMKKAILHVYWEEFQKDPVGLMSRVAQPASKKIDQNKLKPEMDEKGNLTTAGFACSQCGQPLFVYKLEQVSEKGKAYTNYFGRCNVAEHEKLILLAQLKPEKDSDEAVTYSLGKFGQRALDFYSIHVTKESTHPVKPLAQIAGNRYASAPVGKALSDACMGTIASFLSKYQDIIIEHQKVVKGNQKRLESLRELAGKENLEYPSVTLPPQPHTKEGVDAYNEVIARVRMWVNLNLWQKLKLSRDDAKPLLRLKGFPSFPLVERQANEVDWWDMVCNVKKLINEKKEDGKVFWQNLAGYKRQEALRPYLSSEEDRKKGKKFARYQLGDLLLHLYKKHGEDWGKVYDEAWERIDKKVEGLSKHIKLEEERRSEDAQSKAALTDWLRAKASFVIEGLKEADKDEFCRCELKLQKWYGDLRGKPFAIEAENSILDISGFSKQYNCAFIWQKDGVKKLNLYLIINYFKGGKLRFKKIKPEAFEANRFYTVINKKSGEIVPMEVNFNFDDPNLIILPLAFGKRQGREFIWNDLLSLETGSLKLANGRVIEKTLYNRRTRQDEPALFVALTFERREVLDSSNIKPMNLIGVDRGENIPAVIALTDPEGCPLSRFKDSLGNPTHILRIGESYKEKQRTIQAKKEVEQRRAGGYSRKYASKAKNLADDMVRNTARDLLYYAVTQDAMLIFENLSRGFGRQGKRTFMAERQYTRMEDWLTAKLAYEGLPSKTYLSKTLAQYTSKTCSNCGFTITSADYDRVLEKLKKTATGWMTTINGKELKVEGQITYYNRYKRQNVVKDLSVELDRLSEESVNNDISSWTKGRSGEALSLLKKRFSHRPVQEKFVCLNCGFETHADEQAALNIARSWLFLRSQEYKKYQTNKTTGNTDKRAFVETWQSFYRKKLKEVWKPAV

SEQ ID NO: 46285 - protein, 978 aa, synthetic construct
  REGION 1..978: note = engineered CasX variant
QEIKRLNKIRRRLVKDSNTKKAGKTGPMKTLLVRVMTPDLRERLENLRKKPENIPQPISNTSRANLNKLLTDYTEMKKAILHVYWEEFQKDPVGLMSRVAQPASKKIDQNKLKPEMDEKGNLTTAGFACSQCGQPLFVYKLEQVSEKGKAYTNYFGRCNVAEHEKLILLAQLKPEKDSDEAVTYSLGKFGQRALDFYSIHVTKESTHPVKPLAQIAGNRYASVPVGKALSDACMGTIASFLSKYQDIIIEHQKVVKGNQKRLESLRELAGKENLEYPSVTLPPQPHTKEGVDAYNEVIARVRMWVNLNLWQKLKLSRDDAKPLLRLKGFPSFPLVERQANEVDWWDMVCNVKKLINEKKEDGKVFWQNLAGYKRQEALRPYLSSEEDRKKGKKFARYQLGDLLLHLYKKHGEDWGKVYDEAWERIDKKVEGLSKHIKLEEERRSEDAQSKAALTDWLRAKASFVIEGLKEADKDEFCRCELKLQKWYGDLRGKPFAIEAENSILDISGFSKQYNCAFIWQKDGVKKLNLYLIINYFKGGKLRFKKIKPEAFEANRFYTVINKKSGEIVPMEVNFNFDDPNLIILPLAFGKRQGREFIWNDLLSLETGSLKLANGRVIEKTLYNRRTRQDEPALFVALTFERREVLDSSNIKPMNLIGVDRGENIPAVIALTDPEGCPLSRFKDSLGNPTHILRIGESYKEKQRTIQAKKEVEQRRAGGYSRKYASKAKNLADDMVRNTARDLLYYAVTQDAMLIFENLSRGFGRQGKRTFMAERQYTRMEDWLTAKLAYEGLPSKTYLSKTLAQYTSKTCSNCGFTITSADYDRVLEKLKKTATGWMTTINGKELKVEGQITYYNRYKRQNVVKDLSVELDRLSEESVNNDISSWTKGRSGEALSLLKKRFSHRPVQEKFVCLNCGFETHADEQAALNIARSWLFLRSQEYKKYQTNKTTGNTDKRAFVETWQSFYRKKLKEVWKPAV

SEQ ID NO: 46286 - protein, 978 aa, synthetic construct
  REGION 1..978: note = engineered CasX variant
QEIKRLNKIRRRLVKDSNTKKAGKTGPMKTLLVRVMTPDLRERLENLRKKPENIPQPISNTSRANLNKLLTDYTEMKKAILHVYWEEFQKDPVGLMSRVAQPASKKIDQNKLKPEMDEKGNLTTAGFACSQCGQPLFVYKLEQVSEKGKAYTNYFGRCNVAEHEKLIKLAQLKPEKDSDEAVTYSLGKFGQRALDFYSIHVTKESTHPVKPLAQIAGNRYASGPVGKALSDACMGTIASFLSKYQDIIIEHQKVVKGNQKRLESLRELAGKENLEYPSVTLPPQPHTKEGVDAYNEVIARVRMWVNLNLWQKLKLSRDDAKPLLRLKGFPSFPLVERQANEVDWWDMVCNVKKLINEKKEDGKVFWQNLAGYKRQEALRPYLSSEEDRKKGKKFARYQLGDLLLHLYKKHGEDWGKVYDEAWERIDKKVEGLSKHIKLEEERRSEDAQSKAALTDWLRAKASFVIEGLKEADKDEFCRCELKLQKWYGDLRGKPFAIEAENSILDISGFSKQYNCAFIWQKDGVKKLNLYLIINYFKGGKLRFKKIKPEAFEANRFYTVINKKSGEIVPMEVNFNFDDPNLIILPLAFGKRQGREFIWNDLLSLETGSLKLANGRVIEKTLYNRRTRQDEPALFVALTFERREVLDSSNIKPMNLIGVDRGENIPAVIALTDPEGCPLSRFKDSLGNPTHILRIGESYKEKQRTIQAKKEVEQRRAGGYSRKYASKAKNLADDMVRNTARDLLYYAVTQDAMLIFENLSRGFGRQGKRTFMAERQYTRMEDWLTAKLAYEGLPSKTYLSKTLAQYTSKTCSNCGFTITSADYDRVLEKLKKTATGWMTTINGKELKVEGQITYYNRYKRQNVVKDLSVELDRLSEESVNNDISSWTKGRSGEALSLLKKRFSHRPVQEKFVCLNCGFETHADEQAALNIARSWLFLRSQEYKKYQTNKTTGNTDKRAFVETWQSFYRKKLKEVWKPAV

SEQ ID NO: 46287 - protein, 977 aa, synthetic construct
  REGION 1..977: note = engineered CasX variant
QEIKRLNKIRRRLVKDSNTKKAGKTGPMKTLLVRVMTPDLRERLENLRKKPENIPQPISNTSRANLNKLLTDYTEMKKAILHVYWEEFQKDPVGLMSRVAQPASKKIDQNKLKPEMDEKGNLTTAGFACSQCGQPLFVYKLEQVSEKGKAYTNYFGRCNVAEHEKLILLAQLKPEKDSDEAVTYSLGKFGQRALDFYSIHVTKESTHPVKPLAQIAGNRYASPVGKALSDACMGTIASFLSKYQDIIIEHQKVVKGNQKRLESLRELAGKENLEYPSVTLPPQPHTKEGVDAYNEVIARVRMWVNLNLWQKLKLSRDDAKPLLRLKGFPSFPLVERQANEVDWWDMVCNVKKLINEKKEDGKVFWQNLAGYKRQEALRPYLSSEEDRKKGKKFARYQLGDLLLHLYKKHGEDWGKVYDEAWERIDKKVEGLSKHIKLEEERRSEDAQSKAALTDWLRAKASFVIEGLKEADKDEFCRCELKLQKWYGDLRGKPFAIEAENSILDISGFSKQYNCAFIWQKDGVKKLNLYLIINYFKGGKLRFKKIKPEAFEANRFYTVINKKSGEIVPMEVNFNFDDPNLIILPLAFGKRQGREFIWNDLLSLETGSLKLANGRVIEKTLYNRRTRQDEPALFVALTFERREVLDSSNIKPMNLIGVDRGENIPAVIALTDPEGCPLSRFKDSLGNPTHILRIGESYKEKQRTIQAKKEVEQRRAGGYSRKYASKAKNLADDMVRNTARDLLYYAVTQDAMLIFENLSRGFGRQGKRTFMAERQYTRMEDWLTAKLAYEGLPSKTYLSKTLAQYTSKTCSNCGFTITSADYDRVLEKLKKTATGWMTTINGKELKVEGQITYYNRYKRQNVVKDLSVELDRLSEESVNNDISSWTKGRSGEALSLLKKRFSHRPVQEKFVCLNCGFETHADEQAALNIARSWLFLRSQEYKKYQTNKTTGNTDKRAFVETWQSFYRKKLKEVWKPAV

SEQ ID NO: 46288 - protein, 978 aa, synthetic construct
  REGION 1..978: note = engineered CasX variant
QEIKRLNKIRRRLVKDSNTKKAGKTGPMKTLLVRVMTPDLRERLENLRKKPENIPQPISNTSRANLNKLLTDYTEMKKAILHVYWEEFQKDPVGLMSRVAQPASKKIDQNKLKPEMDEKGNLTTAGFACSQCGQPLFVYKLEQVSEKGKAYTNYFGRCNVAEHEKLILLAQLKPEKDSDEAVTYSLGKFGQRALDFYSIHVTKESTHPVKPLAQIAGNRYASYPVGKALSDACMGTIASFLSKYQDIIIEHQKVVKGNQKRLESLRELAGKENLEYPSVTLPPQPHTKEGVDAYNEVIARVRMWVNLNLWQKLKLSRDDAKPLLRLKGFPSFPLVERQANEVDWWDMVCNVKKLINEKKEDGKVFWQNLAGYKRQEALRPYLSSEEDRKKGKKFARYQLGDLLLHLEKKHPEDWGKVYDEAWERIDKKVEGLSKHIKLEEERRSEDAQSKAALTDWLRAKASFVIEGLKEADKDEFCRCELKLQKWYGDLRGKPFAIEAENSILDISGFSKQYNCAFIWQKDGVKKLNLYLIINYFKGGKLRFKKIKPEAFEANRFYTVINKKSGEIVPMEVNFNFDDPNLIILPLAFGKRQGREFIWNDLLSLETGSLKLANGRVIEKTLYNRRTRQDEPALFVALTFERREVLDSSNIKPMNLIGVDRGENIPAVIALTDPEGCPLSRFKDSLGNPTHILRIGESYKEKQRTIQAKKEVEQRRAGGYSRKYASKAKNLADDMVRNTARDLLYYAVTQDAMLIFENLSRGFGRQGKRTFMAERQYTRMEDWLTAKLAYEGLPSKTYLSKTLAQYTSKTCSNCGFTITSADYDRVLEKLKKTATGWMTTINGKELKVEGQITYYNRYKRQNVVKDLSVELDRLSEESVNNDISSWTKGRSGEALSLLKKRFSHRPVQEKFVCLNCGFETHADEQAALNIARSWLFLRSQEYKKYQTNKTTGNTDKRAFVETWQSFYRKKLKEVWKPAV

SEQ ID NO: 46289 - protein, 978 aa, synthetic construct
  REGION 1..978: note = engineered CasX variant
QEIKRLNKIRRRLVKDSNTKKAGKTGPMKTLLVRVMTPDLRERLENLRKKPENIPQPISNTSRANLNKLLTDYTEMKKAILHVYWEEFQKDPVGLMSRVAQPASKKIDQNKLKPEMDEKGNLTTAGFACSQCGQPLFVYKLEQVSEKGKAYTNYFGRCNVAEHEKLILLAQLKPEKDSDEAVTYSLGKFGQRALDFYSIHVTKESTHPVKPLAQIAGNRYASHPVGKALSDACMGTIASFLSKYQDIIIEHQKVVKGNQKRLESLRELAGKENLEYPSVTLPPQPHTKEGVDAYNEVIARVRMWVNLNLWQKLKLSRDDAKPLLRLKGFPSFPLVERQANEVDWWDMVCNVKKLINEKKEDGKVFWQNLAGYKRQEALRPYLSSEEDRKKGKKFARYQLGDLLLHLEKKHPEDWGKVYDEAWERIDKKVEGLSKHIKLEEERRSEDAQSKAALTDWLRAKASFVIEGLKEADKDEFCRCELKLQKWYGDLRGKPFAIEAENSILDISGFSKQYNCAFIWQKDGVKKLNLYLIINYFKGGKLRFKKIKPEAFEANRFYTVINKKSGEIVPMEVNFNFDDPNLIILPLAFGKRQGREFIWNDLLSLETGSLKLANGRVIEKTLYNRRTRQDEPALFVALTFERREVLDSSNIKPMNLIGVDRGENIPAVIALTDPEGCPLSRFKDSLGNPTHILRIGESYKEKQRTIQAKKEVEQRRAGGYSRKYASKAKNLADDMVRNTARDLLYYAVTQDAMLIFENLSRGFGRQGKRTFMAERQYTRMEDWLTAKLAYEGLPSKTYLSKTLAQYTSKTCSNCGFTITSADYDRVLEKLKKTATGWMTTINGKELKVEGQITYYNRYKRQNVVKDLSVELDRLSEESVNNDISSWTKGRSGEALSLLKKRFSHRPVQEKFVCLNCGFETHADEQAALNIARSWLFLRSQEYKKYQTNKTTGNTDKRAFVETWQSFYRKKLKEVWKPAV

SEQ ID NO: 46290 - protein, 978 aa, synthetic construct
  REGION 1..978: note = engineered CasX variant
QEIKRLNKIRRRLVKDSNTKKAGKTGPMKTLLVRVMTPDLRERLENLRKKPENIPQPISNTSRANLNKLLTDYTEMKKAILHVYWEEFQKDPVGLMSRVAQPASKKIDQNKLKPEMDEKGNLTTAGFACSQCGQPLFVYKLEQVSEKGKAYTNYFGRCNVAEHEKLILLAQLKPEKDSDEAVTYSLGKFGQRALDFYSIHVTKESTHPVKPLAQIAGNRYASSPVGKALSDACMGTIASFLSKYQDIIIEHQKVVKGNQKRLESLRELAGKENLEYPSVTLPPQPHTKEGVDAYNEVIARVRMWVNLNLWQKLKLSRDDAKPLLRLKGFPSFPLVERQANEVDWWDMVCNVKKLINEKKEDGKVFWQNLAGYKRQEALRPYLSSEEDRKKGKKFARYQLGDLLLHLEKKHPEDWGKVYDEAWERIDKKVEGLSKHIKLEEERRSEDAQSKAALTDWLRAKASFVIEGLKEADKDEFCRCELKLQKWYGDLRGKPFAIEAENSILDISGFSKQYNCAFIWQKDGVKKLNLYLIINYFKGGKLRFKKIKPEAFEANRFYTVINKKSGEIVPMEVNFNFDDPNLIILPLAFGKRQGREFIWNDLLSLETGSLKLANGRVIEKTLYNRRTRQDEPALFVALTFERREVLDSSNIKPMNLIGVDRGENIPAVIALTDPEGCPLSRFKDSLGNPTHILRIGESYKEKQRTIQAKKEVEQRRAGGYSRKYASKAKNLADDMVRNTARDLLYYAVTQDAMLIFENLSRGFGRQGKRTFMAERQYTRMEDWLTAKLAYEGLPSKTYLSKTLAQYTSKTCSNCGFTITSADYDRVLEKLKKTATGWMTTINGKELKVEGQITYYNRYKRQNVVKDLSVELDRLSEESVNNDISSWTKGRSGEALSLLKKRFSHRPVQEKFVCLNCGFETHADEQAALNIARSWLFLRSQEYKKYQTNKTTGNTDKRAFVETWQSFYRKKLKEVWKPAV

SEQ ID NO: 46291 - protein, 978 aa, synthetic construct
  REGION 1..978: note = engineered CasX variant
QEIKRLNKIRRRLVKDSNTKKAGKTGPMKTLLVRVMTPDLRERLENLRKKPENIPQPISNTSRANLNKLLTDYTEMKKAILHVYWEEFQKDPVGLMSRVAQPASKKIDQNKLKPEMDEKGNLTTAGFACSQCGQPLFVYKLEQVSEKGKAYTNYFGRCNVAEHEKLILLAQLKPEKDSDEAVTYSLGKFGQRALDFYSIHVTKESTHPVKPLAQIAGNRYASTPVGKALSDACMGTIASFLSKYQDIIIEHQKVVKGNQKRLESLRELAGKENLEYPSVTLPPQPHTKEGVDAYNEVIARVRMWVNLNLWQKLKLSRDDAKPLLRLKGFPSFPLVERQANEVDWWDMVCNVKKLINEKKEDGKVFWQNLAGYKRQEALRPYLSSEEDRKKGKKFARYQLGDLLLHLEKKHPEDWGKVYDEAWERIDKKVEGLSKHIKLEEERRSEDAQSKAALTDWLRAKASFVIEGLKEADKDEFCRCELKLQKWYGDLRGKPFAIEAENSILDISGFSKQYNCAFIWQKDGVKKLNLYLIINYFKGGKLRFKKIKPEAFEANRFYTVINKKSGEIVPMEVNFNFDDPNLIILPLAFGKRQGREFIWNDLLSLETGSLKLANGRVIEKTLYNRRTRQDEPALFVALTFERREVLDSSNIKPMNLIGVDRGENIPAVIALTDPEGCPLSRFKDSLGNPTHILRIGESYKEKQRTIQAKKEVEQRRAGGYSRKYASKAKNLADDMVRNTARDLLYYAVTQDAMLIFENLSRGFGRQGKRTFMAERQYTRMEDWLTAKLAYEGLPSKTYLSKTLAQYTSKTCSNCGFTITSADYDRVLEKLKKTATGWMTTINGKELKVEGQITYYNRYKRQNVVKDLSVELDRLSEESVNNDISSWTKGRSGEALSLLKKRFSHRPVQEKFVCLNCGFETHADEQAALNIARSWLFLRSQEYKKYQTNKTTGNTDKRAFVETWQSFYRKKLKEVWKPAV

SEQ ID NO: 46292 - protein, 978 aa, synthetic construct
  REGION 1..978: note = engineered CasX variant
QEIKRLNKIRRRLVKDSNTKKAGKTGPMKTLLVRVMTPDLRERLENLRKKPENIPQPISNTSRANLNKLLTDYTEMKKAILHVYWEEFQKDPVGLMSRVAQPASKKIDQNKLKPEMDEKGNLTTAGFACSQCGQPLFVYKLEQVSEKGKAYTNYFGRCNVAEHEKLILLAQLKPEKDSDEAVTYSLGKFGQRALDFYSIHVTKESTHPVKPLAQIAGNRYASAPVGKALSDACMGTIASFLSKYQDIIIEHQKVVKGNQKRLESLRELAGKENLEYPSVTLPPQPHTKEGVDAYNEVIARVRMWVNLNLWQKLKLSRDDAKPLLRLKGFPSFPLVERQANEVDWWDMVCNVKKLINEKKEDGKVFWQNLAGYKRQEALRPYLSSEEDRKKGKKFARYQLGDLLLHLEKKHPEDWGKVYDEAWERIDKKVEGLSKHIKLEEERRSEDAQSKAALTDWLRAKASFVIEGLKEADKDEFCRCELKLQKWYGDLRGKPFAIEAENSILDISGFSKQYNCAFIWQKDGVKKLNLYLIINYFKGGKLRFKKIKPEAFEANRFYTVINKKSGEIVPMEVNFNFDDPNLIILPLAFGKRQGREFIWNDLLSLETGSLKLANGRVIEKTLYNRRTRQDEPALFVALTFERREVLDSSNIKPMNLIGVDRGENIPAVIALTDPEGCPLSRFKDSLGNPTHILRIGESYKEKQRTIQAKKEVEQRRAGGYSRKYASKAKNLADDMVRNTARDLLYYAVTQDAMLIFENLSRGFGRQGKRTFMAERQYTRMEDWLTAKLAYEGLPSKTYLSKTLAQYTSKTCSNCGFTITSADYDRVLEKLKKTATGWMTTINGKELKVEGQITYYNRYKRQNVVKDLSVELDRLSEESVNNDISSWTKGRSGEALSLLKKRFSHRPVQEKFVCLNCGFETHADEQAALNIARSWLFLRSQEYKKYQTNKTTGNTDKRAFVETWQSFYRKKLKEVWKPAV

SEQ ID NO: 46293 - protein, 978 aa, synthetic construct
  REGION 1..978: note = engineered CasX variant
QEIKRLNKIRRRLVKDSNTKKAGKTGPMKTLLVRVMTPDLRERLENLRKKPENIPQPISNTSRANLNKLLTDYTEMKKAILHVYWEEFQKDPVGLMSRVAQPASKKIDQNKLKPEMDEKGNLTTAGFACSQCGQPLFVYKLEQVSEKGKAYTNYFGRCNVAEHEKLILLAQLKPEKDSDEAVTYSLGKFGQRALDFYSIHVTKESTHPVKPLAQIAGNRYASVPVGKALSDACMGTIASFLSKYQDIIIEHQKVVKGNQKRLESLRELAGKENLEYPSVTLPPQPHTKEGVDAYNEVIARVRMWVNLNLWQKLKLSRDDAKPLLRLKGFPSFPLVERQANEVDWWDMVCNVKKLINEKKEDGKVFWQNLAGYKRQEALRPYLSSEEDRKKGKKFARYQLGDLLLHLEKKHPEDWGKVYDEAWERIDKKVEGLSKHIKLEEERRSEDAQSKAALTDWLRAKASFVIEGLKEADKDEFCRCELKLQKWYGDLRGKPFAIEAENSILDISGFSKQYNCAFIWQKDGVKKLNLYLIINYFKGGKLRFKKIKPEAFEANRFYTVINKKSGEIVPMEVNFNFDDPNLIILPLAFGKRQGREFIWNDLLSLETGSLKLANGRVIEKTLYNRRTRQDEPALFVALTFERREVLDSSNIKPMNLIGVDRGENIPAVIALTDPEGCPLSRFKDSLGNPTHILRIGESYKEKQRTIQAKKEVEQRRAGGYSRKYASKAKNLADDMVRNTARDLLYYAVTQDAMLIFENLSRGFGRQGKRTFMAERQYTRMEDWLTAKLAYEGLPSKTYLSKTLAQYTSKTCSNCGFTITSADYDRVLEKLKKTATGWMTTINGKELKVEGQITYYNRYKRQNVVKDLSVELDRLSEESVNNDISSWTKGRSGEALSLLKKRFSHRPVQEKFVCLNCGFETHADEQAALNIARSWLFLRSQEYKKYQTNKTTGNTDKRAFVETWQSFYRKKLKEVWKPAV

SEQ ID NO: 46294 - protein, 978 aa, synthetic construct
  REGION 1..978: note = engineered CasX variant
QEIKRLNKIRRRLVKDSNTKKAGKTGPMKTLLVRVMTPDLRERLENLRKKPENIPQPISNTSRANLNKLLTDYTEMKKAILHVYWEEFQKDPVGLMSRVAQPASKKIDQNKLKPEMDEKGNLTTAGFACSQCGQPLFVYKLEQVSEKGKAYTNYFGRCNVAEHEKLIKLAQLKPEKDSDEAVTYSLGKFGQRALDFYSIHVTKESTHPVKPLAQIAGNRYASGPVGKALSDACMGTIASFLSKYQDIIIEHQKVVKGNQKRLESLRELAGKENLEYPSVTLPPQPHTKEGVDAYNEVIARVRMWVNLNLWQKLKLSRDDAKPLLRLKGFPSFPLVERQANEVDWWDMVCNVKKLINEKKEDGKVFWQNLAGYKRQEALRPYLSSEEDRKKGKKFARYQLGDLLLHLEKKHPEDWGKVYDEAWERIDKKVEGLSKHIKLEEERRSEDAQSKAALTDWLRAKASFVIEGLKEADKDEFCRCELKLQKWYGDLRGKPFAIEAENSILDISGFSKQYNCAFIWQKDGVKKLNLYLIINYFKGGKLRFKKIKPEAFEANRFYTVINKKSGEIVPMEVNFNFDDPNLIILPLAFGKRQGREFIWNDLLSLETGSLKLANGRVIEKTLYNRRTRQDEPALFVALTFERREVLDSSNIKPMNLIGVDRGENIPAVIALTDPEGCPLSRFKDSLGNPTHILRIGESYKEKQRTIQAKKEVEQRRAGGYSRKYASKAKNLADDMVRNTARDLLYYAVTQDAMLIFENLSRGFGRQGKRTFMAERQYTRMEDWLTAKLAYEGLPSKTYLSKTLAQYTSKTCSNCGFTITSADYDRVLEKLKKTATGWMTTINGKELKVEGQITYYNRYKRQNVVKDLSVELDRLSEESVNNDISSWTKGRSGEALSLLKKRFSHRPVQEKFVCLNCGFETHADEQAALNIARSWLFLRSQEYKKYQTNKTTGNTDKRAFVETWQSFYRKKLKEVWKPAV

SEQ ID NO: 46295 - protein, 977 aa, synthetic construct
  REGION 1..977: note = engineered CasX variant
QEIKRLNKIRRRLVKDSNTKKAGKTGPMKTLLVRVMTPDLRERLENLRKKPENIPQPISNTSRANLNKLLTDYTEMKKAILHVYWEEFQKDPVGLMSRVAQPASKKIDQNKLKPEMDEKGNLTTAGFACSQCGQPLFVYKLEQVSEKGKAYTNYFGRCNVAEHEKLILLAQLKPEKDSDEAVTYSLGKFGQRALDFYSIHVTKESTHPVKPLAQIAGNRYASPVGKALSDACMGTIASFLSKYQDIIIEHQKVVKGNQKRLESLRELAGKENLEYPSVTLPPQPHTKEGVDAYNEVIARVRMWVNLNLWQKLKLSRDDAKPLLRLKGFPSFPLVERQANEVDWWDMVCNVKKLINEKKEDGKVFWQNLAGYKRQEALRPYLSSEEDRKKGKKFARYQLGDLLLHLEKKHPEDWGKVYDEAWERIDKKVEGLSKHIKLEEERRSEDAQSKAALTDWLRAKASFVIEGLKEADKDEFCRCELKLQKWYGDLRGKPFAIEAENSILDISGFSKQYNCAFIWQKDGVKKLNLYLIINYFKGGKLRFKKIKPEAFEANRFYTVINKKSGEIVPMEVNFNFDDPNLIILPLAFGKRQGREFIWNDLLSLETGSLKLANGRVIEKTLYNRRTRQDEPALFVALTFERREVLDSSNIKPMNLIGVDRGENIPAVIALTDPEGCPLSRFKDSLGNPTHILRIGESYKEKQRTIQAKKEVEQRRAGGYSRKYASKAKNLADDMVRNTARDLLYYAVTQDAMLIFENLSRGFGRQGKRTFMAERQYTRMEDWLTAKLAYEGLPSKTYLSKTLAQYTSKTCSNCGFTITSADYDRVLEKLKKTATGWMTTINGKELKVEGQITYYNRYKRQNVVKDLSVELDRLSEESVNNDISSWTKGRSGEALSLLKKRFSHRPVQEKFVCLNCGFETHADEQAALNIARSWLFLRSQEYKKYQTNKTTGNTDKRAFVETWQSFYRKKLKEVWKPAV

SEQ ID NO: 46296 - protein, 979 aa, synthetic construct
  REGION 1..979: note = engineered CasX variant
QEIKRLNKIRRRLVKDSNTKKAGKTGPMKTLLVRVMTPDLRERLENLRKKPENIPQPISNTSRANLNKLLTDYTEMKKAILHVYWEEFQKDPVGLMSRVAQPASKKIDQNKLKPEMDEKGNLTTAGFACSQCGQPLFVYKLEQVSEKGKAYTNYFGRCNVAEHEKLILLAQLKPEKDSDEAVTYSLGKFGQRALDFYSIHVTKESTHPVKPLAQIAGNRYASYPVGKALSDACMGTIASFLSKYQDIIIEHQKVVKGNQKRLESLRELAGKENLEYPSVTLPPQPHTKEGVDAYNEVIARVRMWVNLNLWQKLKLSRDDAKPLLRLKGFPSFPLVERQANEVDWWDMVCNVKKLINEKKEDGKVFWQNLAGYKRQEALRPYLSSEEDRKKGKKFARYQLGDLLLHLEKKHGERDWGKVYDEAWERIDKKVEGLSKHIKLEEERRSEDAQSKAALTDWLRAKASFVIEGLKEADKDEFCRCELKLQKWYGDLRGKPFAIEAENSILDISGFSKQYNCAFIWQKDGVKKLNLYLIINYFKGGKLRFKKIKPEAFEANRFYTVINKKSGEIVPMEVNFNFDDPNLIILPLAFGKRQGREFIWNDLLSLETGSLKLANGRVIEKTLYNRRTRQDEPALFVALTFERREVLDSSNIKPMNLIGVDRGENIPAVIALTDPEGCPLSRFKDSLGNPTHILRIGESYKEKQRTIQAKKEVEQRRAGGYSRKYASKAKNLADDMVRNTARDLLYYAVTQDAMLIFENLSRGFGRQGKRTFMAERQYTRMEDWLTAKLAYEGLPSKTYLSKTLAQYTSKTCSNCGFTITSADYDRVLEKLKKTATGWMTTINGKELKVEGQITYYNRYKRQNVVKDLSVELDRLSEESVNNDISSWTKGRSGEALSLLKKRFSHRPVQEKFVCLNCGFETHADEQAALNIARSWLFLRSQEYKKYQTNKTTGNTDKRAFVETWQSFYRKKLKEVWKPAV

SEQ ID NO: 46297 - protein, 979 aa, synthetic construct
  REGION 1..979: note = engineered CasX variant
QEIKRLNKIRRRLVKDSNTKKAGKTGPMKTLLVRVMTPDLRERLENLRKKPENIPQPISNTSRANLNKLLTDYTEMKKAILHVYWEEFQKDPVGLMSRVAQPASKKIDQNKLKPEMDEKGNLTTAGFACSQCGQPLFVYKLEQVSEKGKAYTNYFGRCNVAEHEKLILLAQLKPEKDSDEAVTYSLGKFGQRALDFYSIHVTKESTHPVKPLAQIAGNRYASHPVGKALSDACMGTIASFLSKYQDIIIEHQKVVKGNQKRLESLRELAGKENLEYPSVTLPPQPHTKEGVDAYNEVIARVRMWVNLNLWQKLKLSRDDAKPLLRLKGFPSFPLVERQANEVDWWDMVCNVKKLINEKKEDGKVFWQNLAGYKRQEALRPYLSSEEDRKKGKKFARYQLGDLLLHLEKKHGERDWGKVYDEAWERIDKKVEGLSKHIKLEEERRSEDAQSKAALTDWLRAKASFVIEGLKEADKDEFCRCELKLQKWYGDLRGKPFAIEAENSILDISGFSKQYNCAFIWQKDGVKKLNLYLIINYFKGGKLRFKKIKPEAFEANRFYTVINKKSGEIVPMEVNFNFDDPNLIILPLAFGKRQGREFIWNDLLSLETGSLKLANGRVIEKTLYNRRTRQDEPALFVALTFERREVLDSSNIKPMNLIGVDRGENIPAVIALTDPEGCPLSRFKDSLGNPTHILRIGESYKEKQRTIQAKKEVEQRRAGGYSRKYASKAKNLADDMVRNTARDLLYYAVTQDAMLIFENLSRGFGRQGKRTFMAERQYTRMEDWLTAKLAYEGLPSKTYLSKTLAQYTSKTCSNCGFTITSADYDRVLEKLKKTATGWMTTINGKELKVEGQITYYNRYKRQNVVKDLSVELDRLSEESVNNDISSWTKGRSGEALSLLKKRFSHRPVQEKFVCLNCGFETHADEQAALNIARSWLFLRSQEYKKYQTNKTTGNTDKRAFVETWQSFYRKKLKEVWKPAV

SEQ ID NO: 46298 - protein, 979 aa, synthetic construct
  REGION 1..979: note = engineered CasX variant
QEIKRLNKIRRRLVKDSNTKKAGKTGPMKTLLVRVMTPDLRERLENLRKKPENIPQPISNTSRANLNKLLTDYTEMKKAILHVYWEEFQKDPVGLMSRVAQPASKKIDQNKLKPEMDEKGNLTTAGFACSQCGQPLFVYKLEQVSEKGKAYTNYFGRCNVAEHEKLILLAQLKPEKDSDEAVTYSLGKFGQRALDFYSIHVTKESTHPVKPLAQIAGNRYASSPVGKALSDACMGTIASFLSKYQDIIIEHQKVVKGNQKRLESLRELAGKENLEYPSVTLPPQPHTKEGVDAYNEVIARVRMWVNLNLWQKLKLSRDDAKPLLRLKGFPSFPLVERQANEVDWWDMVCNVKKLINEKKEDGKVFWQNLAGYKRQEALRPYLSSEEDRKKGKKFARYQLGDLLLHLEKKHGERDWGKVYDEAWERIDKKVEGLSKHIKLEEERRSEDAQSKAALTDWLRAKASFVIEGLKEADKDEFCRCELKLQKWYGDLRGKPFAIEAENSILDISGFSKQYNCAFIWQKDGVKKLNLYLIINYFKGGKLRFKKIKPEAFEANRFYTVINKKSGEIVPMEVNFNFDDPNLIILPLAFGKRQGREFIWNDLLSLETGSLKLANGRVIEKTLYNRRTRQDEPALFVALTFERREVLDSSNIKPMNLIGVDRGENIPAVIALTDPEGCPLSRFKDSLGNPTHILRIGESYKEKQRTIQAKKEVEQRRAGGYSRKYASKAKNLADDMVRNTARDLLYYAVTQDAMLIFENLSRGFGRQGKRTFMAERQYTRMEDWLTAKLAYEGLPSKTYLSKTLAQYTSKTCSNCGFTITSADYDRVLEKLKKTATGWMTTINGKELKVEGQITYYNRYKRQNVVKDLSVELDRLSEESVNNDISSWTKGRSGEALSLLKKRFSHRPVQEKFVCLNCGFETHADEQAALNIARSWLFLRSQEYKKYQTNKTTGNTDKRAFVETWQSFYRKKLKEVWKPAV

SEQ ID NO: 46299 - protein, 979 aa, synthetic construct
  REGION 1..979: note = engineered CasX variant
QEIKRLNKIRRRLVKDSNTKKAGKTGPMKTLLVRVMTPDLRERLENLRKKPENIPQPISNTSRANLNKLLTDYTEMKKAILHVYWEEFQKDPVGLMSRVAQPASKKIDQNKLKPEMDEKGNLTTAGFACSQCGQPLFVYKLEQVSEKGKAYTNYFGRCNVAEHEKLILLAQLKPEKDSDEAVTYSLGKFGQRALDFYSIHVTKESTHPVKPLAQIAGNRYASTPVGKALSDACMGTIASFLSKYQDIIIEHQKVVKGNQKRLESLRELAGKENLEYPSVTLPPQPHTKEGVDAYNEVIARVRMWVNLNLWQKLKLSRDDAKPLLRLKGFPSFPLVERQANEVDWWDMVCNVKKLINEKKEDGKVFWQNLAGYKRQEALRPYLSSEEDRKKGKKFARYQLGDLLLHLEKKHGERDWGKVYDEAWERIDKKVEGLSKHIKLEEERRSEDAQSKAALTDWLRAKASFVIEGLKEADKDEFCRCELKLQKWYGDLRGKPFAIEAENSILDISGFSKQYNCAFIWQKDGVKKLNLYLIINYFKGGKLRFKKIKPEAFEANRFYTVINKKSGEIVPMEVNFNFDDPNLIILPLAFGKRQGREFIWNDLLSLETGSLKLANGRVIEKTLYNRRTRQDEPALFVALTFERREVLDSSNIKPMNLIGVDRGENIPAVIALTDPEGCPLSRFKDSLGNPTHILRIGESYKEKQRTIQAKKEVEQRRAGGYSRKYASKAKNLADDMVRNTARDLLYYAVTQDAMLIFENLSRGFGRQGKRTFMAERQYTRMEDWLTAKLAYEGLPSKTYLSKTLAQYTSKTCSNCGFTITSADYDRVLEKLKKTATGWMTTINGKELKVEGQITYYNRYKRQNVVKDLSVELDRLSEESVNNDISSWTKGRSGEALSLLKKRFSHRPVQEKFVCLNCGFETHADEQAALNIARSWLFLRSQEYKKYQTNKTTGNTDKRAFVETWQSFYRKKLKEVWKPAV

SEQ ID NO: 46300 - protein, 979 aa, synthetic construct
  REGION 1..979: note = engineered CasX variant
QEIKRLNKIRRRLVKDSNTKKAGKTGPMKTLLVRVMTPDLRERLENLRKKPENIPQPISNTSRANLNKLLTDYTEMKKAILHVYWEEFQKDPVGLMSRVAQPASKKIDQNKLKPEMDEKGNLTTAGFACSQCGQPLFVYKLEQVSEKGKAYTNYFGRCNVAEHEKLILLAQLKPEKDSDEAVTYSLGKFGQRALDFYSIHVTKESTHPVKPLAQIAGNRYASAPVGKALSDACMGTIASFLSKYQDIIIEHQKVVKGNQKRLESLRELAGKENLEYPSVTLPPQPHTKEGVDAYNEVIARVRMWVNLNLWQKLKLSRDDAKPLLRLKGFPSFPLVERQANEVDWWDMVCNVKKLINEKKEDGKVFWQNLAGYKRQEALRPYLSSEEDRKKGKKFARYQLGDLLLHLEKKHGERDWGKVYDEAWERIDKKVEGLSKHIKLEEERRSEDAQSKAALTDWLRAKASFVIEGLKEADKDEFCRCELKLQKWYGDLRGKPFAIEAENSILDISGFSKQYNCAFIWQKDGVKKLNLYLIINYFKGGKLRFKKIKPEAFEANRFYTVINKKSGEIVPMEVNFNFDDPNLIILPLAFGKRQGREFIWNDLLSLETGSLKLANGRVIEKTLYNRRTRQDEPALFVALTFERREVLDSSNIKPMNLIGVDRGENIPAVIALTDPEGCPLSRFKDSLGNPTHILRIGESYKEKQRTIQAKKEVEQRRAGGYSRKYASKAKNLADDMVRNTARDLLYYAVTQDAMLIFENLSRGFGRQGKRTFMAERQYTRMEDWLTAKLAYEGLPSKTYLSKTLAQYTSKTCSNCGFTITSADYDRVLEKLKKTATGWMTTINGKELKVEGQITYYNRYKRQNVVKDLSVELDRLSEESVNNDISSWTKGRSGEALSLLKKRFSHRPVQEKFVCLNCGFETHADEQAALNIARSWLFLRSQEYKKYQTNKTTGNTDKRAFVETWQSFYRKKLKEVWKPAV

SEQ ID NO: 46301 - protein, 979 aa, synthetic construct
  REGION 1..979: note = engineered CasX variant
QEIKRLNKIRRRLVKDSNTKKAGKTGPMKTLLVRVMTPDLRERLENLRKKPENIPQPISNTSRANLNKLLTDYTEMKKAILHVYWEEFQKDPVGLMSRVAQPASKKIDQNKLKPEMDEKGNLTTAGFACSQCGQPLFVYKLEQVSEKGKAYTNYFGRCNVAEHEKLILLAQLKPEKDSDEAVTYSLGKFGQRALDFYSIHVTKESTHPVKPLAQIAGNRYASVPVGKALSDACMGTIASFLSKYQDIIIEHQKVVKGNQKRLESLRELAGKENLEYPSVTLPPQPHTKEGVDAYNEVIARVRMWVNLNLWQKLKLSRDDAKPLLRLKGFPSFPLVERQANEVDWWDMVCNVKKLINEKKEDGKVFWQNLAGYKRQEALRPYLSSEEDRKKGKKFARYQLGDLLLHLEKKHGERDWGKVYDEAWERIDKKVEGLSKHIKLEEERRSEDAQSKAALTDWLRAKASFVIEGLKEADKDEFCRCELKLQKWYGDLRGKPFAIEAENSILDISGFSKQYNCAFIWQKDGVKKLNLYLIINYFKGGKLRFKKIKPEAFEANRFYTVINKKSGEIVPMEVNFNFDDPNLIILPLAFGKRQGREFIWNDLLSLETGSLKLANGRVIEKTLYNRRTRQDEPALFVALTFERREVLDSSNIKPMNLIGVDRGENIPAVIALTDPEGCPLSRFKDSLGNPTHILRIGESYKEKQRTIQAKKEVEQRRAGGYSRKYASKAKNLADDMVRNTARDLLYYAVTQDAMLIFENLSRGFGRQGKRTFMAERQYTRMEDWLTAKLAYEGLPSKTYLSKTLAQYTSKTCSNCGFTITSADYDRVLEKLKKTATGWMTTINGKELKVEGQITYYNRYKRQNVVKDLSVELDRLSEESVNNDISSWTKGRSGEALSLLKKRFSHRPVQEKFVCLNCGFETHADEQAALNIARSWLFLRSQEYKKYQTNKTTGNTDKRAFVETWQSFYRKKLKEVWKPAV

SEQ ID NO: 46302 - protein, 979 aa, synthetic construct
  REGION 1..979: note = engineered CasX variant
QEIKRLNKIRRRLVKDSNTKKAGKTGPMKTLLVRVMTPDLRERLENLRKKPENIPQPISNTSRANLNKLLTDYTEMKKAILHVYWEEFQKDPVGLMSRVAQPASKKIDQNKLKPEMDEKGNLTTAGFACSQCGQPLFVYKLEQVSEKGKAYTNYFGRCNVAEHEKLIKLAQLKPEKDSDEAVTYSLGKFGQRALDFYSIHVTKESTHPVKPLAQIAGNRYASGPVGKALSDACMGTIASFLSKYQDIIIEHQKVVKGNQKRLESLRELAGKENLEYPSVTLPPQPHTKEGVDAYNEVIARVRMWVNLNLWQKLKLSRDDAKPLLRLKGFPSFPLVERQANEVDWWDMVCNVKKLINEKKEDGKVFWQNLAGYKRQEALRPYLSSEEDRKKGKKFARYQLGDLLLHLEKKHGERDWGKVYDEAWERIDKKVEGLSKHIKLEEERRSEDAQSKAALTDWLRAKASFVIEGLKEADKDEFCRCELKLQKWYGDLRGKPFAIEAENSILDISGFSKQYNCAFIWQKDGVKKLNLYLIINYFKGGKLRFKKIKPEAFEANRFYTVINKKSGEIVPMEVNFNFDDPNLIILPLAFGKRQGREFIWNDLLSLETGSLKLANGRVIEKTLYNRRTRQDEPALFVALTFERREVLDSSNIKPMNLIGVDRGENIPAVIALTDPEGCPLSRFKDSLGNPTHILRIGESYKEKQRTIQAKKEVEQRRAGGYSRKYASKAKNLADDMVRNTARDLLYYAVTQDAMLIFENLSRGFGRQGKRTFMAERQYTRMEDWLTAKLAYEGLPSKTYLSKTLAQYTSKTCSNCGFTITSADYDRVLEKLKKTATGWMTTINGKELKVEGQITYYNRYKRQNVVKDLSVELDRLSEESVNNDISSWTKGRSGEALSLLKKRFSHRPVQEKFVCLNCGFETHADEQAALNIARSWLFLRSQEYKKYQTNKTTGNTDKRAFVETWQSFYRKKLKEVWKPAV

SEQ ID NO: 46303 - protein, 978 aa, synthetic construct
  REGION 1..978: note = engineered CasX variant
QEIKRLNKIRRRLVKDSNTKKAGKTGPMKTLLVRVMTPDLRERLENLRKKPENIPQPISNTSRANLNKLLTDYTEMKKAILHVYWEEFQKDPVGLMSRVAQPASKKIDQNKLKPEMDEKGNLTTAGFACSQCGQPLFVYKLEQVSEKGKAYTNYFGRCNVAEHEKLILLAQLKPEKDSDEAVTYSLGKFGQRALDFYSIHVTKESTHPVKPLAQIAGNRYASPVGKALSDACMGTIASFLSKYQDIIIEHQKVVKGNQKRLESLRELAGKENLEYPSVTLPPQPHTKEGVDAYNEVIARVRMWVNLNLWQKLKLSRDDAKPLLRLKGFPSFPLVERQANEVDWWDMVCNVKKLINEKKEDGKVFWQNLAGYKRQEALRPYLSSEEDRKKGKKFARYQLGDLLLHLEKKHGERDWGKVYDEAWERIDKKVEGLSKHIKLEEERRSEDAQSKAALTDWLRAKASFVIEGLKEADKDEFCRCELKLQKWYGDLRGKPFAIEAENSILDISGFSKQYNCAFIWQKDGVKKLNLYLIINYFKGGKLRFKKIKPEAFEANRFYTVINKKSGEIVPMEVNFNFDDPNLIILPLAFGKRQGREFIWNDLLSLETGSLKLANGRVIEKTLYNRRTRQDEPALFVALTFERREVLDSSNIKPMNLIGVDRGENIPAVIALTDPEGCPLSRFKDSLGNPTHILRIGESYKEKQRTIQAKKEVEQRRAGGYSRKYASKAKNLADDMVRNTARDLLYYAVTQDAMLIFENLSRGFGRQGKRTFMAERQYTRMEDWLTAKLAYEGLPSKTYLSKTLAQYTSKTCSNCGFTITSADYDRVLEKLKKTATGWMTTINGKELKVEGQITYYNRYKRQNVVKDLSVELDRLSEESVNNDISSWTKGRSGEALSLLKKRFSHRPVQEKFVCLNCGFETHADEQAALNIARSWLFLRSQEYKKYQTNKTTGNTDKRAFVETWQSFYRKKLKEVWKPAV

SEQ ID NO: 46304 - protein, 979 aa, synthetic construct
  REGION 1..979: note = engineered CasX variant
QEIKRLNKIRRRLVKDSNTKKAGKTGPMKTLLVRVMTPDLRERLENLRKKPENIPQPISNTSRANLNKLLTDYTEMKKAILHVYWEEFQKDPVGLMSRVAQPASKKIDQNKLKPEMDEKGNLTTAGFACSQCGQPLFVYKLEQVSEKGKAYTNYFGRCNVAEHEKLILLAQLKPEKDSDEAVTYSLGKFGQRALDFYSIHVTKESTHPVKPLAQIAGNRYASYPVGKALSDACMGTIASFLSKYQDIIIEHQKVVKGNQKRLESLRELAGKENLEYPSVTLPPQPHTKEGVDAYNEVIARVRMWVNLNLWQKLKLSRDDAKPLLRLKGFPSFPLVERQANEVDWWDMVCNVKKLINEKKEDGKVFWQNLAGYKRQEALRPYLSSEEDRKKGKKFARYQLGDLLLHLEKKHGEYDWGKVYDEAWERIDKKVEGLSKHIKLEEERRSEDAQSKAALTDWLRAKASFVIEGLKEADKDEFCRCELKLQKWYGDLRGKPFAIEAENSILDISGFSKQYNCAFIWQKDGVKKLNLYLIINYFKGGKLRFKKIKPEAFEANRFYTVINKKSGEIVPMEVNFNFDDPNLIILPLAFGKRQGREFIWNDLLSLETGSLKLANGRVIEKTLYNRRTRQDEPALFVALTFERREVLDSSNIKPMNLIGVDRGENIPAVIALTDPEGCPLSRFKDSLGNPTHILRIGESYKEKQRTIQAKKEVEQRRAGGYSRKYASKAKNLADDMVRNTARDLLYYAVTQDAMLIFENLSRGFGRQGKRTFMAERQYTRMEDWLTAKLAYEGLPSKTYLSKTLAQYTSKTCSNCGFTITSADYDRVLEKLKKTATGWMTTINGKELKVEGQITYYNRYKRQNVVKDLSVELDRLSEESVNNDISSWTKGRSGEALSLLKKRFSHRPVQEKFVCLNCGFETHADEQAALNIARSWLFLRSQEYKKYQTNKTTGNTDKRAFVETWQSFYRKKLKEVWKPAV

SEQ ID NO: 46305 - protein, 979 aa, synthetic construct
  REGION 1..979: note = engineered CasX variant
QEIKRLNKIRRRLVKDSNTKKAGKTGPMKTLLVRVMTPDLRERLENLRKKPENIPQPISNTSRANLNKLLTDYTEMKKAILHVYWEEFQKDPVGLMSRVAQPASKKIDQNKLKPEMDEKGNLTTAGFACSQCGQPLFVYKLEQVSEKGKAYTNYFGRCNVAEHEKLILLAQLKPEKDSDEAVTYSLGKFGQRALDFYSIHVTKESTHPVKPLAQIAGNRYASHPVGKALSDACMGTIASFLSKYQDIIIEHQKVVKGNQKRLESLRELAGKENLEYPSVTLPPQPHTKEGVDAYNEVIARVRMWVNLNLWQKLKLSRDDAKPLLRLKGFPSFPLVERQANEVDWWDMVCNVKKLINEKKEDGKVFWQNLAGYKRQEALRPYLSSEEDRKKGKKFARYQLGDLLLHLEKKHGEYDWGKVYDEAWERIDKKVEGLSKHIKLEEERRSEDAQSKAALTDWLRAKASFVIEGLKEADKDEFCRCELKLQKWYGDLRGKPFAIEAENSILDISGFSKQYNCAFIWQKDGVKKLNLYLIINYFKGGKLRFKKIKPEAFEANRFYTVINKKSGEIVPMEVNFNFDDPNLIILPLAFGKRQGREFIWNDLLSLETGSLKLANGRVIEKTLYNRRTRQDEPALFVALTFERREVLDSSNIKPMNLIGVDRGENIPAVIALTDPEGCPLSRFKDSLGNPTHILRIGESYKEKQRTIQAKKEVEQRRAGGYSRKYASKAKNLADDMVRNTARDLLYYAVTQDAMLIFENLSRGFGRQGKRTFMAERQYTRMEDWLTAKLAYEGLPSKTYLSKTLAQYTSKTCSNCGFTITSADYDRVLEKLKKTATGWMTTINGKELKVEGQITYYNRYKRQNVVKDLSVELDRLSEESVNNDISSWTKGRSGEALSLLKKRFSHRPVQEKFVCLNCGFETHADEQAALNIARSWLFLRSQEYKKYQTNKTTGNTDKRAFVETWQSFYRKKLKEVWKPAV

SEQ ID NO: 46306 - protein, 979 aa, synthetic construct
  REGION 1..979: note = engineered CasX variant
QEIKRLNKIRRRLVKDSNTKKAGKTGPMKTLLVRVMTPDLRERLENLRKKPENIPQPISNTSRANLNKLLTDYTEMKKAILHVYWEEFQKDPVGLMSRVAQPASKKIDQNKLKPEMDEKGNLTTAGFACSQCGQPLFVYKLEQVSEKGKAYTNYFGRCNVAEHEKLILLAQLKPEKDSDEAVTYSLGKFGQRALDFYSIHVTKESTHPVKPLAQIAGNRYASSPVGKALSDACMGTIASFLSKYQDIIIEHQKVVKGNQKRLESLRELAGKENLEYPSVTLPPQPHTKEGVDAYNEVIARVRMWVNLNLWQKLKLSRDDAKPLLRLKGFPSFPLVERQANEVDWWDMVCNVKKLINEKKEDGKVFWQNLAGYKRQEALRPYLSSEEDRKKGKKFARYQLGDLLLHLEKKHGEYDWGKVYDEAWERIDKKVEGLSKHIKLEEERRSEDAQSKAALTDWLRAKASFVIEGLKEADKDEFCRCELKLQKWYGDLRGKPFAIEAENSILDISGFSKQYNCAFIWQKDGVKKLNLYLIINYFKGGKLRFKKIKPEAFEANRFYTVINKKSGEIVPMEVNFNFDDPNLIILPLAFGKRQGREFIWNDLLSLETGSLKLANGRVIEKTLYNRRTRQDEPALFVALTFERREVLDSSNIKPMNLIGVDRGENIPAVIALTDPEGCPLSRFKDSLGNPTHILRIGESYKEKQRTIQAKKEVEQRRAGGYSRKYASKAKNLADDMVRNTARDLLYYAVTQDAMLIFENLSRGFGRQGKRTFMAERQYTRMEDWLTAKLAYEGLPSKTYLSKTLAQYTSKTCSNCGFTITSADYDRVLEKLKKTATGWMTTINGKELKVEGQITYYNRYKRQNVVKDLSVELDRLSEESVNNDISSWTKGRSGEALSLLKKRFSHRPVQEKFVCLNCGFETHADEQAALNIARSWLFLRSQEYKKYQTNKTTGNTDKRAFVETWQSFYRKKLKEVWKPAV

SEQ ID NO: 46307 - protein, 979 aa, synthetic construct
  REGION 1..979: note = engineered CasX variant
QEIKRLNKIRRRLVKDSNTKKAGKTGPMKTLLVRVMTPDLRERLENLRKKPENIPQPISNTSRANLNKLLTDYTEMKKAILHVYWEEFQKDPVGLMSRVAQPASKKIDQNKLKPEMDEKGNLTTAGFACSQCGQPLFVYKLEQVSEKGKAYTNYFGRCNVAEHEKLILLAQLKPEKDSDEAVTYSLGKFGQRALDFYSIHVTKESTHPVKPLAQIAGNRYASTPVGKALSDACMGTIASFLSKYQDIIIEHQKVVKGNQKRLESLRELAGKENLEYPSVTLPPQPHTKEGVDAYNEVIARVRMWVNLNLWQKLKLSRDDAKPLLRLKGFPSFPLVERQANEVDWWDMVCNVKKLINEKKEDGKVFWQNLAGYKRQEALRPYLSSEEDRKKGKKFARYQLGDLLLHLEKKHGEYDWGKVYDEAWERIDKKVEGLSKHIKLEEERRSEDAQSKAALTDWLRAKASFVIEGLKEADKDEFCRCELKLQKWYGDLRGKPFAIEAENSILDISGFSKQYNCAFIWQKDGVKKLNLYLIINYFKGGKLRFKKIKPEAFEANRFYTVINKKSGEIVPMEVNFNFDDPNLIILPLAFGKRQGREFIWNDLLSLETGSLKLANGRVIEKTLYNRRTRQDEPALFVALTFERREVLDSSNIKPMNLIGVDRGENIPAVIALTDPEGCPLSRFKDSLGNPTHILRIGESYKEKQRTIQAKKEVEQRRAGGYSRKYASKAKNLADDMVRNTARDLLYYAVTQDAMLIFENLSRGFGRQGKRTFMAERQYTRMEDWLTAKLAYEGLPSKTYLSKTLAQYTSKTCSNCGFTITSADYDRVLEKLKKTATGWMTTINGKELKVEGQITYYNRYKRQNVVKDLSVELDRLSEESVNNDISSWTKGRSGEALSLLKKRFSHRPVQEKFVCLNCGFETHADEQAALNIARSWLFLRSQEYKKYQTNKTTGNTDKRAFVETWQSFYRKKLKEVWKPAV

SEQ ID NO: 46308 - protein, 979 aa, synthetic construct
  REGION 1..979: note = engineered CasX variant
QEIKRLNKIRRRLVKDSNTKKAGKTGPMKTLLVRVMTPDLRERLENLRKKPENIPQPISNTSRANLNKLLTDYTEMKKAILHVYWEEFQKDPVGLMSRVAQPASKKIDQNKLKPEMDEKGNLTTAGFACSQCGQPLFVYKLEQVSEKGKAYTNYFGRCNVAEHEKLILLAQLKPEKDSDEAVTYSLGKFGQRALDFYSIHVTKESTHPVKPLAQIAGNRYASAPVGKALSDACMGTIASFLSKYQDIIIEHQKVVKGNQKRLESLRELAGKENLEYPSVTLPPQPHTKEGVDAYNEVIARVRMWVNLNLWQKLKLSRDDAKPLLRLKGFPSFPLVERQANEVDWWDMVCNVKKLINEKKEDGKVFWQNLAGYKRQEALRPYLSSEEDRKKGKKFARYQLGDLLLHLEKKHGEYDWGKVYDEAWERIDKKVEGLSKHIKLEEERRSEDAQSKAALTDWLRAKASFVIEGLKEADKDEFCRCELKLQKWYGDLRGKPFAIEAENSILDISGFSKQYNCAFIWQKDGVKKLNLYLIINYFKGGKLRFKKIKPEAFEANRFYTVINKKSGEIVPMEVNFNFDDPNLIILPLAFGKRQGREFIWNDLLSLETGSLKLANGRVIEKTLYNRRTRQDEPALFVALTFERREVLDSSNIKPMNLIGVDRGENIPAVIALTDPEGCPLSRFKDSLGNPTHILRIGESYKEKQRTIQAKKEVEQRRAGGYSRKYASKAKNLADDMVRNTARDLLYYAVTQDAMLIFENLSRGFGRQGKRTFMAERQYTRMEDWLTAKLAYEGLPSKTYLSKTLAQYTSKTCSNCGFTITSADYDRVLEKLKKTATGWMTTINGKELKVEGQITYYNRYKRQNVVKDLSVELDRLSEESVNNDISSWTKGRSGEALSLLKKRFSHRPVQEKFVCLNCGFETHADEQAALNIARSWLFLRSQEYKKYQTNKTTGNTDKRAFVETWQSFYRKKLKEVWKPAV

SEQ ID NO: 46309 - protein, 979 aa, synthetic construct
  REGION 1..979: note = engineered CasX variant
QEIKRLNKIRRRLVKDSNTKKAGKTGPMKTLLVRVMTPDLRERLENLRKKPENIPQPISNTSRANLNKLLTDYTEMKKAILHVYWEEFQKDPVGLMSRVAQPASKKIDQNKLKPEMDEKGNLTTAGFACSQCGQPLFVYKLEQVSEKGKAYTNYFGRCNVAEHEKLILLAQLKPEKDSDEAVTYSLGKFGQRALDFYSIHVTKESTHPVKPLAQIAGNRYASVPVGKALSDACMGTIASFLSKYQDIIIEHQKVVKGNQKRLESLRELAGKENLEYPSVTLPPQPHTKEGVDAYNEVIARVRMWVNLNLWQKLKLSRDDAKPLLRLKGFPSFPLVERQANEVDWWDMVCNVKKLINEKKEDGKVFWQNLAGYKRQEALRPYLSSEEDRKKGKKFARYQLGDLLLHLEKKHGEYDWGKVYDEAWERIDKKVEGLSKHIKLEEERRSEDAQSKAALTDWLRAKASFVIEGLKEADKDEFCRCELKLQKWYGDLRGKPFAIEAENSILDISGFSKQYNCAFIWQKDGVKKLNLYLIINYFKGGKLRFKKIKPEAFEANRFYTVINKKSGEIVPMEVNFNFDDPNLIILPLAFGKRQGREFIWNDLLSLETGSLKLANGRVIEKTLYNRRTRQDEPALFVALTFERREVLDSSNIKPMNLIGVDRGENIPAVIALTDPEGCPLSRFKDSLGNPTHILRIGESYKEKQRTIQAKKEVEQRRAGGYSRKYASKAKNLADDMVRNTARDLLYYAVTQDAMLIFENLSRGFGRQGKRTFMAERQYTRMEDWLTAKLAYEGLPSKTYLSKTLAQYTSKTCSNCGFTITSADYDRVLEKLKKTATGWMTTINGKELKVEGQITYYNRYKRQNVVKDLSVELDRLSEESVNNDISSWTKGRSGEALSLLKKRFSHRPVQEKFVCLNCGFETHADEQAALNIARSWLFLRSQEYKKYQTNKTTGNTDKRAFVETWQSFYRKKLKEVWKPAV

SEQ ID NO: 46310 - protein, 979 aa, synthetic construct
  REGION 1..979: note = engineered CasX variant
QEIKRLNKIRRRLVKDSNTKKAGKTGPMKTLLVRVMTPDLRERLENLRKKPENIPQPISNTSRANLNKLLTDYTEMKKAILHVYWEEFQKDPVGLMSRVAQPASKKIDQNKLKPEMDEKGNLTTAGFACSQCGQPLFVYKLEQVSEKGKAYTNYFGRCNVAEHEKLIKLAQLKPEKDSDEAVTYSLGKFGQRALDFYSIHVTKESTHPVKPLAQIAGNRYASGPVGKALSDACMGTIASFLSKYQDIIIEHQKVVKGNQKRLESLRELAGKENLEYPSVTLPPQPHTKEGVDAYNEVIARVRMWVNLNLWQKLKLSRDDAKPLLRLKGFPSFPLVERQANEVDWWDMVCNVKKLINEKKEDGKVFWQNLAGYKRQEALRPYLSSEEDRKKGKKFARYQLGDLLLHLEKKHGEYDWGKVYDEAWERIDKKVEGLSKHIKLEEERRSEDAQSKAALTDWLRAKASFVIEGLKEADKDEFCRCELKLQKWYGDLRGKPFAIEAENSILDISGFSKQYNCAFIWQKDGVKKLNLYLIINYFKGGKLRFKKIKPEAFEANRFYTVINKKSGEIVPMEVNFNFDDPNLIILPLAFGKRQGREFIWNDLLSLETGSLKLANGRVIEKTLYNRRTRQDEPALFVALTFERREVLDSSNIKPMNLIGVDRGENIPAVIALTDPEGCPLSRFKDSLGNPTHILRIGESYKEKQRTIQAKKEVEQRRAGGYSRKYASKAKNLADDMVRNTARDLLYYAVTQDAMLIFENLSRGFGRQGKRTFMAERQYTRMEDWLTAKLAYEGLPSKTYLSKTLAQYTSKTCSNCGFTITSADYDRVLEKLKKTATGWMTTINGKELKVEGQITYYNRYKRQNVVKDLSVELDRLSEESVNNDISSWTKGRSGEALSLLKKRFSHRPVQEKFVCLNCGFETHADEQAALNIARSWLFLRSQEYKKYQTNKTTGNTDKRAFVETWQSFYRKKLKEVWKPAV

SEQ ID NO: 46311 - protein, 978 aa, synthetic construct
  REGION 1..978: note = engineered CasX variant
QEIKRLNKIRRRLVKDSNTKKAGKTGPMKTLLVRVMTPDLRERLENLRKKPENIPQPISNTSRANLNKLLTDYTEMKKAILHVYWEEFQKDPVGLMSRVAQPASKKIDQNKLKPEMDEKGNLTTAGFACSQCGQPLFVYKLEQVSEKGKAYTNYFGRCNVAEHEKLILLAQLKPEKDSDEAVTYSLGKFGQRALDFYSIHVTKESTHPVKPLAQIAGNRYASPVGKALSDACMGTIASFLSKYQDIIIEHQKVVKGNQKRLESLRELAGKENLEYPSVTLPPQPHTKEGVDAYNEVIARVRMWVNLNLWQKLKLSRDDAKPLLRLKGFPSFPLVERQANEVDWWDMVCNVKKLINEKKEDGKVFWQNLAGYKRQEALRPYLSSEEDRKKGKKFARYQLGDLLLHLEKKHGEYDWGKVYDEAWERIDKKVEGLSKHIKLEEERRSEDAQSKAALTDWLRAKASFVIEGLKEADKDEFCRCELKLQKWYGDLRGKPFAIEAENSILDISGFSKQYNCAFIWQKDGVKKLNLYLIINYFKGGKLRFKKIKPEAFEANRFYTVINKKSGEIVPMEVNFNFDDPNLIILPLAFGKRQGREFIWNDLLSLETGSLKLANGRVIEKTLYNRRTRQDEPALFVALTFERREVLDSSNIKPMNLIGVDRGENIPAVIALTDPEGCPLSRFKDSLGNPTHILRIGESYKEKQRTIQAKKEVEQRRAGGYSRKYASKAKNLADDMVRNTARDLLYYAVTQDAMLIFENLSRGFGRQGKRTFMAERQYTRMEDWLTAKLAYEGLPSKTYLSKTLAQYTSKTCSNCGFTITSADYDRVLEKLKKTATGWMTTINGKELKVEGQITYYNRYKRQNVVKDLSVELDRLSEESVNNDISSWTKGRSGEALSLLKKRFSHRPVQEKFVCLNCGFETHADEQAALNIARSWLFLRSQEYKKYQTNKTTGNTDKRAFVETWQSFYRKKLKEVWKPAV

SEQ ID NO: 46312 - protein, 978 aa, synthetic construct
  REGION 1..978: note = engineered CasX variant
QEIKRLNKIRRRLVKDSNTKKAGKTGPMKTLLVRVMTPDLRERLENLRKKPENIPQPISNTSRANLNKLLTDYTEMKKAILHVYWEEFQKDPVGLMSRVAQPASKKIDQNKLKPEMDEKGNLTTAGFACSQCGQPLFVYKLEQVSEKGKAYTNYFGRCNVAEHEKLILLAQLKPEKDSDEAVTYSLGKFGQRALDFYSIHVTKESTHPVKPLAQIAGNRYASYPVGKALSDACMGTIASFLSKYQDIIIEHQKVVKGNQKRLESLRELAGKENLEYPSVTLPPQPHTKEGVDAYNEVIARVRMWVNLNLWQKLKLSRDDAKPLLRLKGFPSFPLVERQANEVDWWDMVCNVKKLINEKKEDGKVFWQNLAGYKRQEALRPYLSSEEDRKKGKKFARYQLGDLLLHLEKKHGEDWGDVYDEAWERIDKKVEGLSKHIKLEEERRSEDAQSKAALTDWLRAKASFVIEGLKEADKDEFCRCELKLQKWYGDLRGKPFAIEAENSILDISGFSKQYNCAFIWQKDGVKKLNLYLIINYFKGGKLRFKKIKPEAFEANRFYTVINKKSGEIVPMEVNFNFDDPNLIILPLAFGKRQGREFIWNDLLSLETGSLKLANGRVIEKTLYNRRTRQDEPALFVALTFERREVLDSSNIKPMNLIGVDRGENIPAVIALTDPEGCPLSRFKDSLGNPTHILRIGESYKEKQRTIQAKKEVEQRRAGGYSRKYASKAKNLADDMVRNTARDLLYYAVTQDAMLIFENLSRGFGRQGKRTFMAERQYTRMEDWLTAKLAYEGLPSKTYLSKTLAQYTSKTCSNCGFTITSADYDRVLEKLKKTATGWMTTINGKELKVEGQITYYNRYKRQNVVKDLSVELDRLSEESVNNDISSWTKGRSGEALSLLKKRFSHRPVQEKFVCLNCGFETHADEQAALNIARSWLFLRSQEYKKYQTNKTTGNTDKRAFVETWQSFYRKKLKEVWKPAV

SEQ ID NO: 46313 - protein, 978 aa, synthetic construct
  REGION 1..978: note = engineered CasX variant
QEIKRLNKIRRRLVKDSNTKKAGKTGPMKTLLVRVMTPDLRERLENLRKKPENIPQPISNTSRANLNKLLTDYTEMKKAILHVYWEEFQKDPVGLMSRVAQPASKKIDQNKLKPEMDEKGNLTTAGFACSQCGQPLFVYKLEQVSEKGKAYTNYFGRCNVAEHEKLILLAQLKPEKDSDEAVTYSLGKFGQRALDFYSIHVTKESTHPVKPLAQIAGNRYASHPVGKALSDACMGTIASFLSKYQDIIIEHQKVVKGNQKRLESLRELAGKENLEYPSVTLPPQPHTKEGVDAYNEVIARVRMWVNLNLWQKLKLSRDDAKPLLRLKGFPSFPLVERQANEVDWWDMVCNVKKLINEKKEDGKVFWQNLAGYKRQEALRPYLSSEEDRKKGKKFARYQLGDLLLHLEKKHGEDWGDVYDEAWERIDKKVEGLSKHIKLEEERRSEDAQSKAALTDWLRAKASFVIEGLKEADKDEFCRCELKLQKWYGDLRGKPFAIEAENSILDISGFSKQYNCAFIWQKDGVKKLNLYLIINYFKGGKLRFKKIKPEAFEANRFYTVINKKSGEIVPMEVNFNFDDPNLIILPLAFGKRQGREFIWNDLLSLETGSLKLANGRVIEKTLYNRRTRQDEPALFVALTFERREVLDSSNIKPMNLIGVDRGENIPAVIALTDPEGCPLSRFKDSLGNPTHILRIGESYKEKQRTIQAKKEVEQRRAGGYSRKYASKAKNLADDMVRNTARDLLYYAVTQDAMLIFENLSRGFGRQGKRTFMAERQYTRMEDWLTAKLAYEGLPSKTYLSKTLAQYTSKTCSNCGFTITSADYDRVLEKLKKTATGWMTTINGKELKVEGQITYYNRYKRQNVVKDLSVELDRLSEESVNNDISSWTKGRSGEALSLLKKRFSHRPVQEKFVCLNCGFETHADEQAALNIARSWLFLRSQEYKKYQTNKTTGNTDKRAFVETWQSFYRKKLKEVWKPAV

SEQ ID NO: 46314 - protein, 978 aa, synthetic construct
  REGION 1..978: note = engineered CasX variant
QEIKRLNKIRRRLVKDSNTKKAGKTGPMKTLLVRVMTPDLRERLENLRKKPENIPQPISNTSRANLNKLLTDYTEMKKAILHVYWEEFQKDPVGLMSRVAQPASKKIDQNKLKPEMDEKGNLTTAGFACSQCGQPLFVYKLEQVSEKGKAYTNYFGRCNVAEHEKLILLAQLKPEKDSDEAVTYSLGKFGQRALDFYSIHVTKESTHPVKPLAQIAGNRYASSPVGKALSDACMGTIASFLSKYQDIIIEHQKVVKGNQKRLESLRELAGKENLEYPSVTLPPQPHTKEGVDAYNEVIARVRMWVNLNLWQKLKLSRDDAKPLLRLKGFPSFPLVERQANEVDWWDMVCNVKKLINEKKEDGKVFWQNLAGYKRQEALRPYLSSEEDRKKGKKFARYQLGDLLLHLEKKHGEDWGDVYDEAWERIDKKVEGLSKHIKLEEERRSEDAQSKAALTDWLRAKASFVIEGLKEADKDEFCRCELKLQKWYGDLRGKPFAIEAENSILDISGFSKQYNCAFIWQKDGVKKLNLYLIINYFKGGKLRFKKIKPEAFEANRFYTVINKKSGEIVPMEVNFNFDDPNLIILPLAFGKRQGREFIWNDLLSLETGSLKLANGRVIEKTLYNRRTRQDEPALFVALTFERREVLDSSNIKPMNLIGVDRGENIPAVIALTDPEGCPLSRFKDSLGNPTHILRIGESYKEKQRTIQAKKEVEQRRAGGYSRKYASKAKNLADDMVRNTARDLLYYAVTQDAMLIFENLSRGFGRQGKRTFMAERQYTRMEDWLTAKLAYEGLPSKTYLSKTLAQYTSKTCSNCGFTITSADYDRVLEKLKKTATGWMTTINGKELKVEGQITYYNRYKRQNVVKDLSVELDRLSEESVNNDISSWTKGRSGEALSLLKKRFSHRPVQEKFVCLNCGFETHADEQAALNIARSWLFLRSQEYKKYQTNKTTGNTDKRAFVETWQSFYRKKLKEVWKPAV

SEQ ID NO: 46315 - protein, 978 aa, synthetic construct
  REGION 1..978: note = engineered CasX variant
QEIKRLNKIRRRLVKDSNTKKAGKTGPMKTLLVRVMTPDLRERLENLRKKPENIPQPISNTSRANLNKLLTDYTEMKKAILHVYWEEFQKDPVGLMSRVAQPASKKIDQNKLKPEMDEKGNLTTAGFACSQCGQPLFVYKLEQVSEKGKAYTNYFGRCNVAEHEKLILLAQLKPEKDSDEAVTYSLGKFGQRALDFYSIHVTKESTHPVKPLAQIAGNRYASTPVGKALSDACMGTIASFLSKYQDIIIEHQKVVKGNQKRLESLRELAGKENLEYPSVTLPPQPHTKEGVDAYNEVIARVRMWVNLNLWQKLKLSRDDAKPLLRLKGFPSFPLVERQANEVDWWDMVCNVKKLINEKKEDGKVFWQNLAGYKRQEALRPYLSSEEDRKKGKKFARYQLGDLLLHLEKKHGEDWGDVYDEAWERIDKKVEGLSKHIKLEEERRSEDAQSKAALTDWLRAKASFVIEGLKEADKDEFCRCELKLQKWYGDLRGKPFAIEAENSILDISGFSKQYNCAFIWQKDGVKKLNLYLIINYFKGGKLRFKKIKPEAFEANRFYTVINKKSGEIVPMEVNFNFDDPNLIILPLAFGKRQGREFIWNDLLSLETGSLKLANGRVIEKTLYNRRTRQDEPALFVALTFERREVLDSSNIKPMNLIGVDRGENIPAVIALTDPEGCPLSRFKDSLGNPTHILRIGESYKEKQRTIQAKKEVEQRRAGGYSRKYASKAKNLADDMVRNTARDLLYYAVTQDAMLIFENLSRGFGRQGKRTFMAERQYTRMEDWLTAKLAYEGLPSKTYLSKTLAQYTSKTCSNCGFTITSADYDRVLEKLKKTATGWMTTINGKELKVEGQITYYNRYKRQNVVKDLSVELDRLSEESVNNDISSWTKGRSGEALSLLKKRFSHRPVQEKFVCLNCGFETHADEQAALNIARSWLFLRSQEYKKYQTNKTTGNTDKRAFVETWQSFYRKKLKEVWKPAV

SEQ ID NO: 46316 - protein, 978 aa, synthetic construct
  REGION 1..978: note = engineered CasX variant
QEIKRLNKIRRRLVKDSNTKKAGKTGPMKTLLVRVMTPDLRERLENLRKKPENIPQPISNTSRANLNKLLTDYTEMKKAILHVYWEEFQKDPVGLMSRVAQPASKKIDQNKLKPEMDEKGNLTTAGFACSQCGQPLFVYKLEQVSEKGKAYTNYFGRCNVAEHEKLILLAQLKPEKDSDEAVTYSLGKFGQRALDFYSIHVTKESTHPVKPLAQIAGNRYASAPVGKALSDACMGTIASFLSKYQDIIIEHQKVVKGNQKRLESLRELAGKENLEYPSVTLPPQPHTKEGVDAYNEVIARVRMWVNLNLWQKLKLSRDDAKPLLRLKGFPSFPLVERQANEVDWWDMVCNVKKLINEKKEDGKVFWQNLAGYKRQEALRPYLSSEEDRKKGKKFARYQLGDLLLHLEKKHGEDWGDVYDEAWERIDKKVEGLSKHIKLEEERRSEDAQSKAALTDWLRAKASFVIEGLKEADKDEFCRCELKLQKWYGDLRGKPFAIEAENSILDISGFSKQYNCAFIWQKDGVKKLNLYLIINYFKGGKLRFKKIKPEAFEANRFYTVINKKSGEIVPMEVNFNFDDPNLIILPLAFGKRQGREFIWNDLLSLETGSLKLANGRVIEKTLYNRRTRQDEPALFVALTFERREVLDSSNIKPMNLIGVDRGENIPAVIALTDPEGCPLSRFKDSLGNPTHILRIGESYKEKQRTIQAKKEVEQRRAGGYSRKYASKAKNLADDMVRNTARDLLYYAVTQDAMLIFENLSRGFGRQGKRTFMAERQYTRMEDWLTAKLAYEGLPSKTYLSKTLAQYTSKTCSNCGFTITSADYDRVLEKLKKTATGWMTTINGKELKVEGQITYYNRYKRQNVVKDLSVELDRLSEESVNNDISSWTKGRSGEALSLLKKRFSHRPVQEKFVCLNCGFETHADEQAALNIARSWLFLRSQEYKKYQTNKTTGNTDKRAFVETWQSFYRKKLKEVWKPAV

SEQ ID NO: 46317 - protein, 978 aa, synthetic construct
  REGION 1..978: note = engineered CasX variant
QEIKRLNKIRRRLVKDSNTKKAGKTGPMKTLLVRVMTPDLRERLENLRKKPENIPQPISNTSRANLNKLLTDYTEMKKAILHVYWEEFQKDPVGLMSRVAQPASKKIDQNKLKPEMDEKGNLTTAGFACSQCGQPLFVYKLEQVSEKGKAYTNYFGRCNVAEHEKLILLAQLKPEKDSDEAVTYSLGKFGQRALDFYSIHVTKESTHPVKPLAQIAGNRYASVPVGKALSDACMGTIASFLSKYQDIIIEHQKVVKGNQKRLESLRELAGKENLEYPSVTLPPQPHTKEGVDAYNEVIARVRMWVNLNLWQKLKLSRDDAKPLLRLKGFPSFPLVERQANEVDWWDMVCNVKKLINEKKEDGKVFWQNLAGYKRQEALRPYLSSEEDRKKGKKFARYQLGDLLLHLEKKHGEDWGDVYDEAWERIDKKVEGLSKHIKLEEERRSEDAQSKAALTDWLRAKASFVIEGLKEADKDEFCRCELKLQKWYGDLRGKPFAIEAENSILDISGFSKQYNCAFIWQKDGVKKLNLYLIINYFKGGKLRFKKIKPEAFEANRFYTVINKKSGEIVPMEVNFNFDDPNLIILPLAFGKRQGREFIWNDLLSLETGSLKLANGRVIEKTLYNRRTRQDEPALFVALTFERREVLDSSNIKPMNLIGVDRGENIPAVIALTDPEGCPLSRFKDSLGNPTHILRIGESYKEKQRTIQAKKEVEQRRAGGYSRKYASKAKNLADDMVRNTARDLLYYAVTQDAMLIFENLSRGFGRQGKRTFMAERQYTRMEDWLTAKLAYEGLPSKTYLSKTLAQYTSKTCSNCGFTITSADYDRVLEKLKKTATGWMTTINGKELKVEGQITYYNRYKRQNVVKDLSVELDRLSEESVNNDISSWTKGRSGEALSLLKKRFSHRPVQEKFVCLNCGFETHADEQAALNIARSWLFLRSQEYKKYQTNKTTGNTDKRAFVETWQSFYRKKLKEVWKPAV

SEQ ID NO: 46318 - protein, 978 aa, synthetic construct
  REGION 1..978: note = engineered CasX variant
QEIKRLNKIRRRLVKDSNTKKAGKTGPMKTLLVRVMTPDLRERLENLRKKPENIPQPISNTSRANLNKLLTDYTEMKKAILHVYWEEFQKDPVGLMSRVAQPASKKIDQNKLKPEMDEKGNLTTAGFACSQCGQPLFVYKLEQVSEKGKAYTNYFGRCNVAEHEKLIKLAQLKPEKDSDEAVTYSLGKFGQRALDFYSIHVTKESTHPVKPLAQIAGNRYASGPVGKALSDACMGTIASFLSKYQDIIIEHQKVVKGNQKRLESLRELAGKENLEYPSVTLPPQPHTKEGVDAYNEVIARVRMWVNLNLWQKLKLSRDDAKPLLRLKGFPSFPLVERQANEVDWWDMVCNVKKLINEKKEDGKVFWQNLAGYKRQEALRPYLSSEEDRKKGKKFARYQLGDLLLHLEKKHGEDWGDVYDEAWERIDKKVEGLSKHIKLEEERRSEDAQSKAALTDWLRAKASFVIEGLKEADKDEFCRCELKLQKWYGDLRGKPFAIEAENSILDISGFSKQYNCAFIWQKDGVKKLNLYLIINYFKGGKLRFKKIKPEAFEANRFYTVINKKSGEIVPMEVNFNFDDPNLIILPLAFGKRQGREFIWNDLLSLETGSLKLANGRVIEKTLYNRRTRQDEPALFVALTFERREVLDSSNIKPMNLIGVDRGENIPAVIALTDPEGCPLSRFKDSLGNPTHILRIGESYKEKQRTIQAKKEVEQRRAGGYSRKYASKAKNLADDMVRNTARDLLYYAVTQDAMLIFENLSRGFGRQGKRTFMAERQYTRMEDWLTAKLAYEGLPSKTYLSKTLAQYTSKTCSNCGFTITSADYDRVLEKLKKTATGWMTTINGKELKVEGQITYYNRYKRQNVVKDLSVELDRLSEESVNNDISSWTKGRSGEALSLLKKRFSHRPVQEKFVCLNCGFETHADEQAALNIARSWLFLRSQEYKKYQTNKTTGNTDKRAFVETWQSFYRKKLKEVWKPAV

SEQ ID NO: 46319 - protein, 977 aa, synthetic construct
  REGION 1..977: note = engineered CasX variant
QEIKRLNKIRRRLVKDSNTKKAGKTGPMKTLLVRVMTPDLRERLENLRKKPENIPQPISNTSRANLNKLLTDYTEMKKAILHVYWEEFQKDPVGLMSRVAQPASKKIDQNKLKPEMDEKGNLTTAGFACSQCGQPLFVYKLEQVSEKGKAYTNYFGRCNVAEHEKLILLAQLKPEKDSDEAVTYSLGKFGQRALDFYSIHVTKESTHPVKPLAQIAGNRYASPVGKALSDACMGTIASFLSKYQDIIIEHQKVVKGNQKRLESLRELAGKENLEYPSVTLPPQPHTKEGVDAYNEVIARVRMWVNLNLWQKLKLSRDDAKPLLRLKGFPSFPLVERQANEVDWWDMVCNVKKLINEKKEDGKVFWQNLAGYKRQEALRPYLSSEEDRKKGKKFARYQLGDLLLHLEKKHGEDWGDVYDEAWERIDKKVEGLSKHIKLEEERRSEDAQSKAALTDWLRAKASFVIEGLKEADKDEFCRCELKLQKWYGDLRGKPFAIEAENSILDISGFSKQYNCAFIWQKDGVKKLNLYLIINYFKGGKLRFKKIKPEAFEANRFYTVINKKSGEIVPMEVNFNFDDPNLIILPLAFGKRQGREFIWNDLLSLETGSLKLANGRVIEKTLYNRRTRQDEPALFVALTFERREVLDSSNIKPMNLIGVDRGENIPAVIALTDPEGCPLSRFKDSLGNPTHILRIGESYKEKQRTIQAKKEVEQRRAGGYSRKYASKAKNLADDMVRNTARDLLYYAVTQDAMLIFENLSRGFGRQGKRTFMAERQYTRMEDWLTAKLAYEGLPSKTYLSKTLAQYTSKTCSNCGFTITSADYDRVLEKLKKTATGWMTTINGKELKVEGQITYYNRYKRQNVVKDLSVELDRLSEESVNNDISSWTKGRSGEALSLLKKRFSHRPVQEKFVCLNCGFETHADEQAALNIARSWLFLRSQEYKKYQTNKTTGNTDKRAFVETWQSFYRKKLKEVWKPAV

SEQ ID NO: 46320 - protein, 978 aa, synthetic construct
  REGION 1..978: note = engineered CasX variant
QEIKRLNKIRRRLVKDSNTKKAGKTGPMKTLLVRVMTPDLRERLENLRKKPENIPQPISNTSRANLNKLLTDYTEMKKAILHVYWEEFQKDPVGLMSRVAQPASKKIDQNKLKPEMDEKGNLTTAGFACSQCGQPLFVYKLEQVSEKGKAYTNYFGRCNVAEHEKLILLAQLKPEKDSDEAVTYSLGKFGQRALDFYSIHVTKESTHPVKPLAQIAGNRYASYPVGKALSDACMGTIASFLSKYQDIIIEHQKVVKGNQKRLESLRELAGKENLEYPSVTLPPQPHTKEGVDAYNEVIARVRMWVNLNLWQKLKLSRDDAKPLLRLKGFPSFPLVERQANEVDWWDMVCNVKKLINEKKEDGKVFWQNLAGYKRQEALRPYLSSEEDRKKGKKFARYQLGDLLLHLEKKHGEDWGKVYGEAWERIDKKVEGLSKHIKLEEERRSEDAQSKAALTDWLRAKASFVIEGLKEADKDEFCRCELKLQKWYGDLRGKPFAIEAENSILDISGFSKQYNCAFIWQKDGVKKLNLYLIINYFKGGKLRFKKIKPEAFEANRFYTVINKKSGEIVPMEVNFNFDDPNLIILPLAFGKRQGREFIWNDLLSLETGSLKLANGRVIEKTLYNRRTRQDEPALFVALTFERREVLDSSNIKPMNLIGVDRGENIPAVIALTDPEGCPLSRFKDSLGNPTHILRIGESYKEKQRTIQAKKEVEQRRAGGYSRKYASKAKNLADDMVRNTARDLLYYAVTQDAMLIFENLSRGFGRQGKRTFMAERQYTRMEDWLTAKLAYEGLPSKTYLSKTLAQYTSKTCSNCGFTITSADYDRVLEKLKKTATGWMTTINGKELKVEGQITYYNRYKRQNVVKDLSVELDRLSEESVNNDISSWTKGRSGEALSLLKKRFSHRPVQEKFVCLNCGFETHADEQAALNIARSWLFLRSQEYKKYQTNKTTGNTDKRAFVETWQSFYRKKLKEVWKPAV

SEQ ID NO: 46321 - protein, 978 aa, synthetic construct
  REGION 1..978: note = engineered CasX variant
QEIKRLNKIRRRLVKDSNTKKAGKTGPMKTLLVRVMTPDLRERLENLRKKPENIPQPISNTSRANLNKLLTDYTEMKKAILHVYWEEFQKDPVGLMSRVAQPASKKIDQNKLKPEMDEKGNLTTAGFACSQCGQPLFVYKLEQVSEKGKAYTNYFGRCNVAEHEKLILLAQLKPEKDSDEAVTYSLGKFGQRALDFYSIHVTKESTHPVKPLAQIAGNRYASHPVGKALSDACMGTIASFLSKYQDIIIEHQKVVKGNQKRLESLRELAGKENLEYPSVTLPPQPHTKEGVDAYNEVIARVRMWVNLNLWQKLKLSRDDAKPLLRLKGFPSFPLVERQANEVDWWDMVCNVKKLINEKKEDGKVFWQNLAGYKRQEALRPYLSSEEDRKKGKKFARYQLGDLLLHLEKKHGEDWGKVYGEAWERIDKKVEGLSKHIKLEEERRSEDAQSKAALTDWLRAKASFVIEGLKEADKDEFCRCELKLQKWYGDLRGKPFAIEAENSILDISGFSKQYNCAFIWQKDGVKKLNLYLIINYFKGGKLRFKKIKPEAFEANRFYTVINKKSGEIVPMEVNFNFDDPNLIILPLAFGKRQGREFIWNDLLSLETGSLKLANGRVIEKTLYNRRTRQDEPALFVALTFERREVLDSSNIKPMNLIGVDRGENIPAVIALTDPEGCPLSRFKDSLGNPTHILRIGESYKEKQRTIQAKKEVEQRRAGGYSRKYASKAKNLADDMVRNTARDLLYYAVTQDAMLIFENLSRGFGRQGKRTFMAERQYTRMEDWLTAKLAYEGLPSKTYLSKTLAQYTSKTCSNCGFTITSADYDRVLEKLKKTATGWMTTINGKELKVEGQITYYNRYKRQNVVKDLSVELDRLSEESVNNDISSWTKGRSGEALSLLKKRFSHRPVQEKFVCLNCGFETHADEQAALNIARSWLFLRSQEYKKYQTNKTTGNTDKRAFVETWQSFYRKKLKEVWKPAV

SEQ ID NO: 46322 - protein, 978 aa, synthetic construct
  REGION 1..978: note = engineered CasX variant
QEIKRLNKIRRRLVKDSNTKKAGKTGPMKTLLVRVMTPDLRERLENLRKKPENIPQPISNTSRANLNKLLTDYTEMKKAILHVYWEEFQKDPVGLMSRVAQPASKKIDQNKLKPEMDEKGNLTTAGFACSQCGQPLFVYKLEQVSEKGKAYTNYFGRCNVAEHEKLILLAQLKPEKDSDEAVTYSLGKFGQRALDFYSIHVTKESTHPVKPLAQIAGNRYASSPVGKALSDACMGTIASFLSKYQDIIIEHQKVVKGNQKRLESLRELAGKENLEYPSVTLPPQPHTKEGVDAYNEVIARVRMWVNLNLWQKLKLSRDDAKPLLRLKGFPSFPLVERQANEVDWWDMVCNVKKLINEKKEDGKVFWQNLAGYKRQEALRPYLSSEEDRKKGKKFARYQLGDLLLHLEKKHGEDWGKVYGEAWERIDKKVEGLSKHIKLEEERRSEDAQSKAALTDWLRAKASFVIEGLKEADKDEFCRCELKLQKWYGDLRGKPFAIEAENSILDISGFSKQYNCAFIWQKDGVKKLNLYLIINYFKGGKLRFKKIKPEAFEANRFYTVINKKSGEIVPMEVNFNFDDPNLIILPLAFGKRQGREFIWNDLLSLETGSLKLANGRVIEKTLYNRRTRQDEPALFVALTFERREVLDSSNIKPMNLIGVDRGENIPAVIALTDPEGCPLSRFKDSLGNPTHILRIGESYKEKQRTIQAKKEVEQRRAGGYSRKYASKAKNLADDMVRNTARDLLYYAVTQDAMLIFENLSRGFGRQGKRTFMAERQYTRMEDWLTAKLAYEGLPSKTYLSKTLAQYTSKTCSNCGFTITSADYDRVLEKLKKTATGWMTTINGKELKVEGQITYYNRYKRQNVVKDLSVELDRLSEESVNNDISSWTKGRSGEALSLLKKRFSHRPVQEKFVCLNCGFETHADEQAALNIARSWLFLRSQEYKKYQTNKTTGNTDKRAFVETWQSFYRKKLKEVWKPAV

SEQ ID NO: 46323 - protein, 978 aa, synthetic construct
  REGION 1..978: note = engineered CasX variant
QEIKRLNKIRRRLVKDSNTKKAGKTGPMKTLLVRVMTPDLRERLENLRKKPENIPQPISNTSRANLNKLLTDYTEMKKAILHVYWEEFQKDPVGLMSRVAQPASKKIDQNKLKPEMDEKGNLTTAGFACSQCGQPLFVYKLEQVSEKGKAYTNYFGRCNVAEHEKLILLAQLKPEKDSDEAVTYSLGKFGQRALDFYSIHVTKESTHPVKPLAQIAGNRYASTPVGKALSDACMGTIASFLSKYQDIIIEHQKVVKGNQKRLESLRELAGKENLEYPSVTLPPQPHTKEGVDAYNEVIARVRMWVNLNLWQKLKLSRDDAKPLLRLKGFPSFPLVERQANEVDWWDMVCNVKKLINEKKEDGKVFWQNLAGYKRQEALRPYLSSEEDRKKGKKFARYQLGDLLLHLEKKHGEDWGKVYGEAWERIDKKVEGLSKHIKLEEERRSEDAQSKAALTDWLRAKASFVIEGLKEADKDEFCRCELKLQKWYGDLRGKPFAIEAENSILDISGFSKQYNCAFIWQKDGVKKLNLYLIINYFKGGKLRFKKIKPEAFEANRFYTVINKKSGEIVPMEVNFNFDDPNLIILPLAFGKRQGREFIWNDLLSLETGSLKLANGRVIEKTLYNRRTRQDEPALFVALTFERREVLDSSNIKPMNLIGVDRGENIPAVIALTDPEGCPLSRFKDSLGNPTHILRIGESYKEKQRTIQAKKEVEQRRAGGYSRKYASKAKNLADDMVRNTARDLLYYAVTQDAMLIFENLSRGFGRQGKRTFMAERQYTRMEDWLTAKLAYEGLPSKTYLSKTLAQYTSKTCSNCGFTITSADYDRVLEKLKKTATGWMTTINGKELKVEGQITYYNRYKRQNVVKDLSVELDRLSEESVNNDISSWTKGRSGEALSLLKKRFSHRPVQEKFVCLNCGFETHADEQAALNIARSWLFLRSQEYKKYQTNKTTGNTDKRAFVETWQSFYRKKLKEVWKPAV

SEQ ID NO: 46324 - protein, 978 aa, synthetic construct
  REGION 1..978: note = engineered CasX variant
QEIKRLNKIRRRLVKDSNTKKAGKTGPMKTLLVRVMTPDLRERLENLRKKPENIPQPISNTSRANLNKLLTDYTEMKKAILHVYWEEFQKDPVGLMSRVAQPASKKIDQNKLKPEMDEKGNLTTAGFACSQCGQPLFVYKLEQVSEKGKAYTNYFGRCNVAEHEKLILLAQLKPEKDSDEAVTYSLGKFGQRALDFYSIHVTKESTHPVKPLAQIAGNRYASAPVGKALSDACMGTIASFLSKYQDIIIEHQKVVKGNQKRLESLRELAGKENLEYPSVTLPPQPHTKEGVDAYNEVIARVRMWVNLNLWQKLKLSRDDAKPLLRLKGFPSFPLVERQANEVDWWDMVCNVKKLINEKKEDGKVFWQNLAGYKRQEALRPYLSSEEDRKKGKKFARYQLGDLLLHLEKKHGEDWGKVYGEAWERIDKKVEGLSKHIKLEEERRSEDAQSKAALTDWLRAKASFVIEGLKEADKDEFCRCELKLQKWYGDLRGKPFAIEAENSILDISGFSKQYNCAFIWQKDGVKKLNLYLIINYFKGGKLRFKKIKPEAFEANRFYTVINKKSGEIVPMEVNFNFDDPNLIILPLAFGKRQGREFIWNDLLSLETGSLKLANGRVIEKTLYNRRTRQDEPALFVALTFERREVLDSSNIKPMNLIGVDRGENIPAVIALTDPEGCPLSRFKDSLGNPTHILRIGESYKEKQRTIQAKKEVEQRRAGGYSRKYASKAKNLADDMVRNTARDLLYYAVTQDAMLIFENLSRGFGRQGKRTFMAERQYTRMEDWLTAKLAYEGLPSKTYLSKTLAQYTSKTCSNCGFTITSADYDRVLEKLKKTATGWMTTINGKELKVEGQITYYNRYKRQNVVKDLSVELDRLSEESVNNDISSWTKGRSGEALSLLKKRFSHRPVQEKFVCLNCGFETHADEQAALNIARSWLFLRSQEYKKYQTNKTTGNTDKRAFVETWQSFYRKKLKEVWKPAV

SEQ ID NO: 46325 - protein, 978 aa, synthetic construct
  REGION 1..978: note = engineered CasX variant
QEIKRLNKIRRRLVKDSNTKKAGKTGPMKTLLVRVMTPDLRERLENLRKKPENIPQPISNTSRANLNKLLTDYTEMKKAILHVYWEEFQKDPVGLMSRVAQPASKKIDQNKLKPEMDEKGNLTTAGFACSQCGQPLFVYKLEQVSEKGKAYTNYFGRCNVAEHEKLILLAQLKPEKDSDEAVTYSLGKFGQRALDFYSIHVTKESTHPVKPLAQIAGNRYASVPVGKALSDACMGTIASFLSKYQDIIIEHQKVVKGNQKRLESLRELAGKENLEYPSVTLPPQPHTKEGVDAYNEVIARVRMWVNLNLWQKLKLSRDDAKPLLRLKGFPSFPLVERQANEVDWWDMVCNVKKLINEKKEDGKVFWQNLAGYKRQEALRPYLSSEEDRKKGKKFARYQLGDLLLHLEKKHGEDWGKVYGEAWERIDKKVEGLSKHIKLEEERRSEDAQSKAALTDWLRAKASFVIEGLKEADKDEFCRCELKLQKWYGDLRGKPFAIEAENSILDISGFSKQYNCAFIWQKDGVKKLNLYLIINYFKGGKLRFKKIKPEAFEANRFYTVINKKSGEIVPMEVNFNFDDPNLIILPLAFGKRQGREFIWNDLLSLETGSLKLANGRVIEKTLYNRRTRQDEPALFVALTFERREVLDSSNIKPMNLIGVDRGENIPAVIALTDPEGCPLSRFKDSLGNPTHILRIGESYKEKQRTIQAKKEVEQRRAGGYSRKYASKAKNLADDMVRNTARDLLYYAVTQDAMLIFENLSRGFGRQGKRTFMAERQYTRMEDWLTAKLAYEGLPSKTYLSKTLAQYTSKTCSNCGFTITSADYDRVLEKLKKTATGWMTTINGKELKVEGQITYYNRYKRQNVVKDLSVELDRLSEESVNNDISSWTKGRSGEALSLLKKRFSHRPVQEKFVCLNCGFETHADEQAALNIARSWLFLRSQEYKKYQTNKTTGNTDKRAFVETWQSFYRKKLKEVWKPAV

SEQ ID NO: 46326 - protein, 978 aa, synthetic construct
  REGION 1..978: note = engineered CasX variant
QEIKRLNKIRRRLVKDSNTKKAGKTGPMKTLLVRVMTPDLRERLENLRKKPENIPQPISNTSRANLNKLLTDYTEMKKAILHVYWEEFQKDPVGLMSRVAQPASKKIDQNKLKPEMDEKGNLTTAGFACSQCGQPLFVYKLEQVSEKGKAYTNYFGRCNVAEHEKLIKLAQLKPEKDSDEAVTYSLGKFGQRALDFYSIHVTKESTHPVKPLAQIAGNRYASGPVGKALSDACMGTIASFLSKYQDIIIEHQKVVKGNQKRLESLRELAGKENLEYPSVTLPPQPHTKEGVDAYNEVIARVRMWVNLNLWQKLKLSRDDAKPLLRLKGFPSFPLVERQANEVDWWDMVCNVKKLINEKKEDGKVFWQNLAGYKRQEALRPYLSSEEDRKKGKKFARYQLGDLLLHLEKKHGEDWGKVYGEAWERIDKKVEGLSKHIKLEEERRSEDAQSKAALTDWLRAKASFVIEGLKEADKDEFCRCELKLQKWYGDLRGKPFAIEAENSILDISGFSKQYNCAFIWQKDGVKKLNLYLIINYFKGGKLRFKKIKPEAFEANRFYTVINKKSGEIVPMEVNFNFDDPNLIILPLAFGKRQGREFIWNDLLSLETGSLKLANGRVIEKTLYNRRTRQDEPALFVALTFERREVLDSSNIKPMNLIGVDRGENIPAVIALTDPEGCPLSRFKDSLGNPTHILRIGESYKEKQRTIQAKKEVEQRRAGGYSRKYASKAKNLADDMVRNTARDLLYYAVTQDAMLIFENLSRGFGRQGKRTFMAERQYTRMEDWLTAKLAYEGLPSKTYLSKTLAQYTSKTCSNCGFTITSADYDRVLEKLKKTATGWMTTINGKELKVEGQITYYNRYKRQNVVKDLSVELDRLSEESVNNDISSWTKGRSGEALSLLKKRFSHRPVQEKFVCLNCGFETHADEQAALNIARSWLFLRSQEYKKYQTNKTTGNTDKRAFVETWQSFYRKKLKEVWKPAV

SEQ ID NO: 46327 - protein, 977 aa, synthetic construct
  REGION 1..977: note = engineered CasX variant
QEIKRLNKIRRRLVKDSNTKKAGKTGPMKTLLVRVMTPDLRERLENLRKKPENIPQPISNTSRANLNKLLTDYTEMKKAILHVYWEEFQKDPVGLMSRVAQPASKKIDQNKLKPEMDEKGNLTTAGFACSQCGQPLFVYKLEQVSEKGKAYTNYFGRCNVAEHEKLILLAQLKPEKDSDEAVTYSLGKFGQRALDFYSIHVTKESTHPVKPLAQIAGNRYASPVGKALSDACMGTIASFLSKYQDIIIEHQKVVKGNQKRLESLRELAGKENLEYPSVTLPPQPHTKEGVDAYNEVIARVRMWVNLNLWQKLKLSRDDAKPLLRLKGFPSFPLVERQANEVDWWDMVCNVKKLINEKKEDGKVFWQNLAGYKRQEALRPYLSSEEDRKKGKKFARYQLGDLLLHLEKKHGEDWGKVYGEAWERIDKKVEGLSKHIKLEEERRSEDAQSKAALTDWLRAKASFVIEGLKEADKDEFCRCELKLQKWYGDLRGKPFAIEAENSILDISGFSKQYNCAFIWQKDGVKKLNLYLIINYFKGGKLRFKKIKPEAFEANRFYTVINKKSGEIVPMEVNFNFDDPNLIILPLAFGKRQGREFIWNDLLSLETGSLKLANGRVIEKTLYNRRTRQDEPALFVALTFERREVLDSSNIKPMNLIGVDRGENIPAVIALTDPEGCPLSRFKDSLGNPTHILRIGESYKEKQRTIQAKKEVEQRRAGGYSRKYASKAKNLADDMVRNTARDLLYYAVTQDAMLIFENLSRGFGRQGKRTFMAERQYTRMEDWLTAKLAYEGLPSKTYLSKTLAQYTSKTCSNCGFTITSADYDRVLEKLKKTATGWMTTINGKELKVEGQITYYNRYKRQNVVKDLSVELDRLSEESVNNDISSWTKGRSGEALSLLKKRFSHRPVQEKFVCLNCGFETHADEQAALNIARSWLFLRSQEYKKYQTNKTTGNTDKRAFVETWQSFYRKKLKEVWKPAV

SEQ ID NO: 46328 - protein, 978 aa, synthetic construct
  REGION 1..978: note = engineered CasX variant
QEIKRLNKIRRRLVKDSNTKKAGKTGPMKTLLVRVMTPDLRERLENLRKKPENIPQPISNTSRANLNKLLTDYTEMKKAILHVYWEEFQKDPVGLMSRVAQPASKKIDQNKLKPEMDEKGNLTTAGFACSQCGQPLFVYKLEQVSEKGKAYTNYFGRCNVAEHEKLILLAQLKPEKDSDEAVTYSLGKFGQRALDFYSIHVTKESTHPVKPLAQIAGNRYASYPVGKALSDACMGTIASFLSKYQDIIIEHQKVVKGNQKRLESLRELAGKENLEYPSVTLPPQPHTKEGVDAYNEVIARVRMWVNLNLWQKLKLSRDDAKPLLRLKGFPSFPLVERQANEVDWWDMVCNVKKLINEKKEDGKVFWQNLAGYKRQEALRPYLSSEEDRKKGKKFARYQLGDLLLHLEKKHGEDWGKVYDEAWERIDKKVEGLSKHIKLEEERRSEDAQSKAALTDWLRAKASFVIEGKKEADKDEFCRCELKLQKWYGDLRGKPFAIEAENSILDISGFSKQYNCAFIWQKDGVKKLNLYLIINYFKGGKLRFKKIKPEAFEANRFYTVINKKSGEIVPMEVNFNFDDPNLIILPLAFGKRQGREFIWNDLLSLETGSLKLANGRVIEKTLYNRRTRQDEPALFVALTFERREVLDSSNIKPMNLIGVDRGENIPAVIALTDPEGCPLSRFKDSLGNPTHILRIGESYKEKQRTIQAKKEVEQRRAGGYSRKYASKAKNLADDMVRNTARDLLYYAVTQDAMLIFENLSRGFGRQGKRTFMAERQYTRMEDWLTAKLAYEGLPSKTYLSKTLAQYTSKTCSNCGFTITSADYDRVLEKLKKTATGWMTTINGKELKVEGQITYYNRYKRQNVVKDLSVELDRLSEESVNNDISSWTKGRSGEALSLLKKRFSHRPVQEKFVCLNCGFETHADEQAALNIARSWLFLRSQEYKKYQTNKTTGNTDKRAFVETWQSFYRKKLKEVWKPAV

SEQ ID NO: 46329 - protein, 978 aa, synthetic construct
  REGION 1..978: note = engineered CasX variant
QEIKRLNKIRRRLVKDSNTKKAGKTGPMKTLLVRVMTPDLRERLENLRKKPENIPQPISNTSRANLNKLLTDYTEMKKAILHVYWEEFQKDPVGLMSRVAQPASKKIDQNKLKPEMDEKGNLTTAGFACSQCGQPLFVYKLEQVSEKGKAYTNYFGRCNVAEHEKLILLAQLKPEKDSDEAVTYSLGKFGQRALDFYSIHVTKESTHPVKPLAQIAGNRYASHPVGKALSDACMGTIASFLSKYQDIIIEHQKVVKGNQKRLESLRELAGKENLEYPSVTLPPQPHTKEGVDAYNEVIARVRMWVNLNLWQKLKLSRDDAKPLLRLKGFPSFPLVERQANEVDWWDMVCNVKKLINEKKEDGKVFWQNLAGYKRQEALRPYLSSEEDRKKGKKFARYQLGDLLLHLEKKHGEDWGKVYDEAWERIDKKVEGLSKHIKLEEERRSEDAQSKAALTDWLRAKASFVIEGKKEADKDEFCRCELKLQKWYGDLRGKPFAIEAENSILDISGFSKQYNCAFIWQKDGVKKLNLYLIINYFKGGKLRFKKIKPEAFEANRFYTVINKKSGEIVPMEVNFNFDDPNLIILPLAFGKRQGREFIWNDLLSLETGSLKLANGRVIEKTLYNRRTRQDEPALFVALTFERREVLDSSNIKPMNLIGVDRGENIPAVIALTDPEGCPLSRFKDSLGNPTHILRIGESYKEKQRTIQAKKEVEQRRAGGYSRKYASKAKNLADDMVRNTARDLLYYAVTQDAMLIFENLSRGFGRQGKRTFMAERQYTRMEDWLTAKLAYEGLPSKTYLSKTLAQYTSKTCSNCGFTITSADYDRVLEKLKKTATGWMTTINGKELKVEGQITYYNRYKRQNVVKDLSVELDRLSEESVNNDISSWTKGRSGEALSLLKKRFSHRPVQEKFVCLNCGFETHADEQAALNIARSWLFLRSQEYKKYQTNKTTGNTDKRAFVETWQSFYRKKLKEVWKPAV

SEQ ID NO: 46330 - protein, 978 aa, synthetic construct
  REGION 1..978: note = engineered CasX variant
QEIKRLNKIRRRLVKDSNTKKAGKTGPMKTLLVRVMTPDLRERLENLRKKPENIPQPISNTSRANLNKLLTDYTEMKKAILHVYWEEFQKDPVGLMSRVAQPASKKIDQNKLKPEMDEKGNLTTAGFACSQCGQPLFVYKLEQVSEKGKAYTNYFGRCNVAEHEKLILLAQLKPEKDSDEAVTYSLGKFGQRALDFYSIHVTKESTHPVKPLAQIAGNRYASSPVGKALSDACMGTIASFLSKYQDIIIEHQKVVKGNQKRLESLRELAGKENLEYPSVTLPPQPHTKEGVDAYNEVIARVRMWVNLNLWQKLKLSRDDAKPLLRLKGFPSFPLVERQANEVDWWDMVCNVKKLINEKKEDGKVFWQNLAGYKRQEALRPYLSSEEDRKKGKKFARYQLGDLLLHLEKKHGEDWGKVYDEAWERIDKKVEGLSKHIKLEEERRSEDAQSKAALTDWLRAKASFVIEGKKEADKDEFCRCELKLQKWYGDLRGKPFAIEAENSILDISGFSKQYNCAFIWQKDGVKKLNLYLIINYFKGGKLRFKKIKPEAFEANRFYTVINKKSGEIVPMEVNFNFDDPNLIILPLAFGKRQGREFIWNDLLSLETGSLKLANGRVIEKTLYNRRTRQDEPALFVALTFERREVLDSSNIKPMNLIGVDRGENIPAVIALTDPEGCPLSRFKDSLGNPTHILRIGESYKEKQRTIQAKKEVEQRRAGGYSRKYASKAKNLADDMVRNTARDLLYYAVTQDAMLIFENLSRGFGRQGKRTFMAERQYTRMEDWLTAKLAYEGLPSKTYLSKTLAQYTSKTCSNCGFTITSADYDRVLEKLKKTATGWMTTINGKELKVEGQITYYNRYKRQNVVKDLSVELDRLSEESVNNDISSWTKGRSGEALSLLKKRFSHRPVQEKFVCLNCGFETHADEQAALNIARSWLFLRSQEYKKYQTNKTTGNTDKRAFVETWQSFYRKKLKEVWKPAV

SEQ ID NO: 46331 - protein, 978 aa, synthetic construct
  REGION 1..978: note = engineered CasX variant
QEIKRLNKIRRRLVKDSNTKKAGKTGPMKTLLVRVMTPDLRERLENLRKKPENIPQPISNTSRANLNKLLTDYTEMKKAILHVYWEEFQKDPVGLMSRVAQPASKKIDQNKLKPEMDEKGNLTTAGFACSQCGQPLFVYKLEQVSEKGKAYTNYFGRCNVAEHEKLILLAQLKPEKDSDEAVTYSLGKFGQRALDFYSIHVTKESTHPVKPLAQIAGNRYASTPVGKALSDACMGTIASFLSKYQDIIIEHQKVVKGNQKRLESLRELAGKENLEYPSVTLPPQPHTKEGVDAYNEVIARVRMWVNLNLWQKLKLSRDDAKPLLRLKGFPSFPLVERQANEVDWWDMVCNVKKLINEKKEDGKVFWQNLAGYKRQEALRPYLSSEEDRKKGKKFARYQLGDLLLHLEKKHGEDWGKVYDEAWERIDKKVEGLSKHIKLEEERRSEDAQSKAALTDWLRAKASFVIEGKKEADKDEFCRCELKLQKWYGDLRGKPFAIEAENSILDISGFSKQYNCAFIWQKDGVKKLNLYLIINYFKGGKLRFKKIKPEAFEANRFYTVINKKSGEIVPMEVNFNFDDPNLIILPLAFGKRQGREFIWNDLLSLETGSLKLANGRVIEKTLYNRRTRQDEPALFVALTFERREVLDSSNIKPMNLIGVDRGENIPAVIALTDPEGCPLSRFKDSLGNPTHILRIGESYKEKQRTIQAKKEVEQRRAGGYSRKYASKAKNLADDMVRNTARDLLYYAVTQDAMLIFENLSRGFGRQGKRTFMAERQYTRMEDWLTAKLAYEGLPSKTYLSKTLAQYTSKTCSNCGFTITSADYDRVLEKLKKTATGWMTTINGKELKVEGQITYYNRYKRQNVVKDLSVELDRLSEESVNNDISSWTKGRSGEALSLLKKRFSHRPVQEKFVCLNCGFETHADEQAALNIARSWLFLRSQEYKKYQTNKTTGNTDKRAFVETWQSFYRKKLKEVWKPAV

SEQ ID NO: 46332 - protein, 978 aa, synthetic construct
  REGION 1..978: note = engineered CasX variant
QEIKRLNKIRRRLVKDSNTKKAGKTGPMKTLLVRVMTPDLRERLENLRKKPENIPQPISNTSRANLNKLLTDYTEMKKAILHVYWEEFQKDPVGLMSRVAQPASKKIDQNKLKPEMDEKGNLTTAGFACSQCGQPLFVYKLEQVSEKGKAYTNYFGRCNVAEHEKLILLAQLKPEKDSDEAVTYSLGKFGQRALDFYSIHVTKESTHPVKPLAQIAGNRYASAPVGKALSDACMGTIASFLSKYQDIIIEHQKVVKGNQKRLESLRELAGKENLEYPSVTLPPQPHTKEGVDAYNEVIARVRMWVNLNLWQKLKLSRDDAKPLLRLKGFPSFPLVERQANEVDWWDMVCNVKKLINEKKEDGKVFWQNLAGYKRQEALRPYLSSEEDRKKGKKFARYQLGDLLLHLEKKHGEDWGKVYDEAWERIDKKVEGLSKHIKLEEERRSEDAQSKAALTDWLRAKASFVIEGKKEADKDEFCRCELKLQKWYGDLRGKPFAIEAENSILDISGFSKQYNCAFIWQKDGVKKLNLYLIINYFKGGKLRFKKIKPEAFEANRFYTVINKKSGEIVPMEVNFNFDDPNLIILPLAFGKRQGREFIWNDLLSLETGSLKLANGRVIEKTLYNRRTRQDEPALFVALTFERREVLDSSNIKPMNLIGVDRGENIPAVIALTDPEGCPLSRFKDSLGNPTHILRIGESYKEKQRTIQAKKEVEQRRAGGYSRKYASKAKNLADDMVRNTARDLLYYAVTQDAMLIFENLSRGFGRQGKRTFMAERQYTRMEDWLTAKLAYEGLPSKTYLSKTLAQYTSKTCSNCGFTITSADYDRVLEKLKKTATGWMTTINGKELKVEGQITYYNRYKRQNVVKDLSVELDRLSEESVNNDISSWTKGRSGEALSLLKKRFSHRPVQEKFVCLNCGFETHADEQAALNIARSWLFLRSQEYKKYQTNKTTGNTDKRAFVETWQSFYRKKLKEVWKPAV

SEQ ID NO: 46333 - protein, 978 aa, synthetic construct
  REGION 1..978: note = engineered CasX variant
QEIKRLNKIRRRLVKDSNTKKAGKTGPMKTLLVRVMTPDLRERLENLRKKPENIPQPISNTSRANLNKLLTDYTEMKKAILHVYWEEFQKDPVGLMSRVAQPASKKIDQNKLKPEMDEKGNLTTAGFACSQCGQPLFVYKLEQVSEKGKAYTNYFGRCNVAEHEKLILLAQLKPEKDSDEAVTYSLGKFGQRALDFYSIHVTKESTHPVKPLAQIAGNRYASVPVGKALSDACMGTIASFLSKYQDIIIEHQKVVKGNQKRLESLRELAGKENLEYPSVTLPPQPHTKEGVDAYNEVIARVRMWVNLNLWQKLKLSRDDAKPLLRLKGFPSFPLVERQANEVDWWDMVCNVKKLINEKKEDGKVFWQNLAGYKRQEALRPYLSSEEDRKKGKKFARYQLGDLLLHLEKKHGEDWGKVYDEAWERIDKKVEGLSKHIKLEEERRSEDAQSKAALTDWLRAKASFVIEGKKEADKDEFCRCELKLQKWYGDLRGKPFAIEAENSILDISGFSKQYNCAFIWQKDGVKKLNLYLIINYFKGGKLRFKKIKPEAFEANRFYTVINKKSGEIVPMEVNFNFDDPNLIILPLAFGKRQGREFIWNDLLSLETGSLKLANGRVIEKTLYNRRTRQDEPALFVALTFERREVLDSSNIKPMNLIGVDRGENIPAVIALTDPEGCPLSRFKDSLGNPTHILRIGESYKEKQRTIQAKKEVEQRRAGGYSRKYASKAKNLADDMVRNTARDLLYYAVTQDAMLIFENLSRGFGRQGKRTFMAERQYTRMEDWLTAKLAYEGLPSKTYLSKTLAQYTSKTCSNCGFTITSADYDRVLEKLKKTATGWMTTINGKELKVEGQITYYNRYKRQNVVKDLSVELDRLSEESVNNDISSWTKGRSGEALSLLKKRFSHRPVQEKFVCLNCGFETHADEQAALNIARSWLFLRSQEYKKYQTNKTTGNTDKRAFVETWQSFYRKKLKEVWKPAV

SEQ ID NO: 46334 - protein, 978 aa, synthetic construct
  REGION 1..978: note = engineered CasX variant
QEIKRLNKIRRRLVKDSNTKKAGKTGPMKTLLVRVMTPDLRERLENLRKKPENIPQPISNTSRANLNKLLTDYTEMKKAILHVYWEEFQKDPVGLMSRVAQPASKKIDQNKLKPEMDEKGNLTTAGFACSQCGQPLFVYKLEQVSEKGKAYTNYFGRCNVAEHEKLIKLAQLKPEKDSDEAVTYSLGKFGQRALDFYSIHVTKESTHPVKPLAQIAGNRYASGPVGKALSDACMGTIASFLSKYQDIIIEHQKVVKGNQKRLESLRELAGKENLEYPSVTLPPQPHTKEGVDAYNEVIARVRMWVNLNLWQKLKLSRDDAKPLLRLKGFPSFPLVERQANEVDWWDMVCNVKKLINEKKEDGKVFWQNLAGYKRQEALRPYLSSEEDRKKGKKFARYQLGDLLLHLEKKHGEDWGKVYDEAWERIDKKVEGLSKHIKLEEERRSEDAQSKAALTDWLRAKASFVIEGKKEADKDEFCRCELKLQKWYGDLRGKPFAIEAENSILDISGFSKQYNCAFIWQKDGVKKLNLYLIINYFKGGKLRFKKIKPEAFEANRFYTVINKKSGEIVPMEVNFNFDDPNLIILPLAFGKRQGREFIWNDLLSLETGSLKLANGRVIEKTLYNRRTRQDEPALFVALTFERREVLDSSNIKPMNLIGVDRGENIPAVIALTDPEGCPLSRFKDSLGNPTHILRIGESYKEKQRTIQAKKEVEQRRAGGYSRKYASKAKNLADDMVRNTARDLLYYAVTQDAMLIFENLSRGFGRQGKRTFMAERQYTRMEDWLTAKLAYEGLPSKTYLSKTLAQYTSKTCSNCGFTITSADYDRVLEKLKKTATGWMTTINGKELKVEGQITYYNRYKRQNVVKDLSVELDRLSEESVNNDISSWTKGRSGEALSLLKKRFSHRPVQEKFVCLNCGFETHADEQAALNIARSWLFLRSQEYKKYQTNKTTGNTDKRAFVETWQSFYRKKLKEVWKPAV

SEQ ID NO: 46335 - protein, 977 aa, synthetic construct
  REGION 1..977: note = engineered CasX variant
QEIKRLNKIRRRLVKDSNTKKAGKTGPMKTLLVRVMTPDLRERLENLRKKPENIPQPISNTSRANLNKLLTDYTEMKKAILHVYWEEFQKDPVGLMSRVAQPASKKIDQNKLKPEMDEKGNLTTAGFACSQCGQPLFVYKLEQVSEKGKAYTNYFGRCNVAEHEKLILLAQLKPEKDSDEAVTYSLGKFGQRALDFYSIHVTKESTHPVKPLAQIAGNRYASPVGKALSDACMGTIASFLSKYQDIIIEHQKVVKGNQKRLESLRELAGKENLEYPSVTLPPQPHTKEGVDAYNEVIARVRMWVNLNLWQKLKLSRDDAKPLLRLKGFPSFPLVERQANEVDWWDMVCNVKKLINEKKEDGKVFWQNLAGYKRQEALRPYLSSEEDRKKGKKFARYQLGDLLLHLEKKHGEDWGKVYDEAWERIDKKVEGLSKHIKLEEERRSEDAQSKAALTDWLRAKASFVIEGKKEADKDEFCRCELKLQKWYGDLRGKPFAIEAENSILDISGFSKQYNCAFIWQKDGVKKLNLYLIINYFKGGKLRFKKIKPEAFEANRFYTVINKKSGEIVPMEVNFNFDDPNLIILPLAFGKRQGREFIWNDLLSLETGSLKLANGRVIEKTLYNRRTRQDEPALFVALTFERREVLDSSNIKPMNLIGVDRGENIPAVIALTDPEGCPLSRFKDSLGNPTHILRIGESYKEKQRTIQAKKEVEQRRAGGYSRKYASKAKNLADDMVRNTARDLLYYAVTQDAMLIFENLSRGFGRQGKRTFMAERQYTRMEDWLTAKLAYEGLPSKTYLSKTLAQYTSKTCSNCGFTITSADYDRVLEKLKKTATGWMTTINGKELKVEGQITYYNRYKRQNVVKDLSVELDRLSEESVNNDISSWTKGRSGEALSLLKKRFSHRPVQEKFVCLNCGFETHADEQAALNIARSWLFLRSQEYKKYQTNKTTGNTDKRAFVETWQSFYRKKLKEVWKPAV

SEQ ID NO: 46336 - protein, 978 aa, synthetic construct
  REGION 1..978: note = engineered CasX variant
QEIKRLNKIRRRLVKDSNTKKAGKTGPMKTLLVRVMTPDLRERLENLRKKPENIPQPISNTSRANLNKLLTDYTEMKKAILHVYWEEFQKDPVGLMSRVAQPASKKIDQNKLKPEMDEKGNLTTAGFACSQCGQPLFVYKLEQVSEKGKAYTNYFGRCNVAEHEKLILLAQLKPEKDSDEAVTYSLGKFGQRALDFYSIHVTKESTHPVKPLAQIAGNRYASYPVGKALSDACMGTIASFLSKYQDIIIEHQKVVKGNQKRLESLRELAGKENLEYPSVTLPPQPHTKEGVDAYNEVIARVRMWVNLNLWQKLKLSRDDAKPLLRLKGFPSFPLVERQANEVDWWDMVCNVKKLINEKKEDGKVFWQNLAGYKRQEALRPYLSSEEDRKKGKKFARYQLGDLLLHLEKKHGEDWGKVYDEAWERIDKKVEGLSKHIKLEEERRSEDAQSKAALTDWLRAKASFVIEGSKEADKDEFCRCELKLQKWYGDLRGKPFAIEAENSILDISGFSKQYNCAFIWQKDGVKKLNLYLIINYFKGGKLRFKKIKPEAFEANRFYTVINKKSGEIVPMEVNFNFDDPNLIILPLAFGKRQGREFIWNDLLSLETGSLKLANGRVIEKTLYNRRTRQDEPALFVALTFERREVLDSSNIKPMNLIGVDRGENIPAVIALTDPEGCPLSRFKDSLGNPTHILRIGESYKEKQRTIQAKKEVEQRRAGGYSRKYASKAKNLADDMVRNTARDLLYYAVTQDAMLIFENLSRGFGRQGKRTFMAERQYTRMEDWLTAKLAYEGLPSKTYLSKTLAQYTSKTCSNCGFTITSADYDRVLEKLKKTATGWMTTINGKELKVEGQITYYNRYKRQNVVKDLSVELDRLSEESVNNDISSWTKGRSGEALSLLKKRFSHRPVQEKFVCLNCGFETHADEQAALNIARSWLFLRSQEYKKYQTNKTTGNTDKRAFVETWQSFYRKKLKEVWKPAV

SEQ ID NO: 46337 - protein, 978 aa, synthetic construct
  REGION 1..978: note = engineered CasX variant
QEIKRLNKIRRRLVKDSNTKKAGKTGPMKTLLVRVMTPDLRERLENLRKKPENIPQPISNTSRANLNKLLTDYTEMKKAILHVYWEEFQKDPVGLMSRVAQPASKKIDQNKLKPEMDEKGNLTTAGFACSQCGQPLFVYKLEQVSEKGKAYTNYFGRCNVAEHEKLILLAQLKPEKDSDEAVTYSLGKFGQRALDFYSIHVTKESTHPVKPLAQIAGNRYASHPVGKALSDACMGTIASFLSKYQDIIIEHQKVVKGNQKRLESLRELAGKENLEYPSVTLPPQPHTKEGVDAYNEVIARVRMWVNLNLWQKLKLSRDDAKPLLRLKGFPSFPLVERQANEVDWWDMVCNVKKLINEKKEDGKVFWQNLAGYKRQEALRPYLSSEEDRKKGKKFARYQLGDLLLHLEKKHGEDWGKVYDEAWERIDKKVEGLSKHIKLEEERRSEDAQSKAALTDWLRAKASFVIEGSKEADKDEFCRCELKLQKWYGDLRGKPFAIEAENSILDISGFSKQYNCAFIWQKDGVKKLNLYLIINYFKGGKLRFKKIKPEAFEANRFYTVINKKSGEIVPMEVNFNFDDPNLIILPLAFGKRQGREFIWNDLLSLETGSLKLANGRVIEKTLYNRRTRQDEPALFVALTFERREVLDSSNIKPMNLIGVDRGENIPAVIALTDPEGCPLSRFKDSLGNPTHILRIGESYKEKQRTIQAKKEVEQRRAGGYSRKYASKAKNLADDMVRNTARDLLYYAVTQDAMLIFENLSRGFGRQGKRTFMAERQYTRMEDWLTAKLAYEGLPSKTYLSKTLAQYTSKTCSNCGFTITSADYDRVLEKLKKTATGWMTTINGKELKVEGQITYYNRYKRQNVVKDLSVELDRLSEESVNNDISSWTKGRSGEALSLLKKRFSHRPVQEKFVCLNCGFETHADEQAALNIARSWLFLRSQEYKKYQTNKTTGNTDKRAFVETWQSFYRKKLKEVWKPAV

SEQ ID NO: 46338 - protein, 978 aa, synthetic construct
  REGION 1..978: note = engineered CasX variant
QEIKRLNKIRRRLVKDSNTKKAGKTGPMKTLLVRVMTPDLRERLENLRKKPENIPQPISNTSRANLNKLLTDYTEMKKAILHVYWEEFQKDPVGLMSRVAQPASKKIDQNKLKPEMDEKGNLTTAGFACSQCGQPLFVYKLEQVSEKGKAYTNYFGRCNVAEHEKLILLAQLKPEKDSDEAVTYSLGKFGQRALDFYSIHVTKESTHPVKPLAQIAGNRYASSPVGKALSDACMGTIASFLSKYQDIIIEHQKVVKGNQKRLESLRELAGKENLEYPSVTLPPQPHTKEGVDAYNEVIARVRMWVNLNLWQKLKLSRDDAKPLLRLKGFPSFPLVERQANEVDWWDMVCNVKKLINEKKEDGKVFWQNLAGYKRQEALRPYLSSEEDRKKGKKFARYQLGDLLLHLEKKHGEDWGKVYDEAWERIDKKVEGLSKHIKLEEERRSEDAQSKAALTDWLRAKASFVIEGSKEADKDEFCRCELKLQKWYGDLRGKPFAIEAENSILDISGFSKQYNCAFIWQKDGVKKLNLYLIINYFKGGKLRFKKIKPEAFEANRFYTVINKKSGEIVPMEVNFNFDDPNLIILPLAFGKRQGREFIWNDLLSLETGSLKLANGRVIEKTLYNRRTRQDEPALFVALTFERREVLDSSNIKPMNLIGVDRGENIPAVIALTDPEGCPLSRFKDSLGNPTHILRIGESYKEKQRTIQAKKEVEQRRAGGYSRKYASKAKNLADDMVRNTARDLLYYAVTQDAMLIFENLSRGFGRQGKRTFMAERQYTRMEDWLTAKLAYEGLPSKTYLSKTLAQYTSKTCSNCGFTITSADYDRVLEKLKKTATGWMTTINGKELKVEGQITYYNRYKRQNVVKDLSVELDRLSEESVNNDISSWTKGRSGEALSLLKKRFSHRPVQEKFVCLNCGFETHADEQAALNIARSWLFLRSQEYKKYQTNKTTGNTDKRAFVETWQSFYRKKLKEVWKPAV

SEQ ID NO: 46339 - protein, 978 aa, synthetic construct
  REGION 1..978: note = engineered CasX variant
QEIKRLNKIRRRLVKDSNTKKAGKTGPMKTLLVRVMTPDLRERLENLRKKPENIPQPISNTSRANLNKLLTDYTEMKKAILHVYWEEFQKDPVGLMSRVAQPASKKIDQNKLKPEMDEKGNLTTAGFACSQCGQPLFVYKLEQVSEKGKAYTNYFGRCNVAEHEKLILLAQLKPEKDSDEAVTYSLGKFGQRALDFYSIHVTKESTHPVKPLAQIAGNRYASTPVGKALSDACMGTIASFLSKYQDIIIEHQKVVKGNQKRLESLRELAGKENLEYPSVTLPPQPHTKEGVDAYNEVIARVRMWVNLNLWQKLKLSRDDAKPLLRLKGFPSFPLVERQANEVDWWDMVCNVKKLINEKKEDGKVFWQNLAGYKRQEALRPYLSSEEDRKKGKKFARYQLGDLLLHLEKKHGEDWGKVYDEAWERIDKKVEGLSKHIKLEEERRSEDAQSKAALTDWLRAKASFVIEGSKEADKDEFCRCELKLQKWYGDLRGKPFAIEAENSILDISGFSKQYNCAFIWQKDGVKKLNLYLIINYFKGGKLRFKKIKPEAFEANRFYTVINKKSGEIVPMEVNFNFDDPNLIILPLAFGKRQGREFIWNDLLSLETGSLKLANGRVIEKTLYNRRTRQDEPALFVALTFERREVLDSSNIKPMNLIGVDRGENIPAVIALTDPEGCPLSRFKDSLGNPTHILRIGESYKEKQRTIQAKKEVEQRRAGGYSRKYASKAKNLADDMVRNTARDLLYYAVTQDAMLIFENLSRGFGRQGKRTFMAERQYTRMEDWLTAKLAYEGLPSKTYLSKTLAQYTSKTCSNCGFTITSADYDRVLEKLKKTATGWMTTINGKELKVEGQITYYNRYKRQNVVKDLSVELDRLSEESVNNDISSWTKGRSGEALSLLKKRFSHRPVQEKFVCLNCGFETHADEQAALNIARSWLFLRSQEYKKYQTNKTTGNTDKRAFVETWQSFYRKKLKEVWKPAV

SEQ ID NO: 46340 - protein, 978 aa, synthetic construct
  REGION 1..978: note = engineered CasX variant
QEIKRLNKIRRRLVKDSNTKKAGKTGPMKTLLVRVMTPDLRERLENLRKKPENIPQPISNTSRANLNKLLTDYTEMKKAILHVYWEEFQKDPVGLMSRVAQPASKKIDQNKLKPEMDEKGNLTTAGFACSQCGQPLFVYKLEQVSEKGKAYTNYFGRCNVAEHEKLILLAQLKPEKDSDEAVTYSLGKFGQRALDFYSIHVTKESTHPVKPLAQIAGNRYASAPVGKALSDACMGTIASFLSKYQDIIIEHQKVVKGNQKRLESLRELAGKENLEYPSVTLPPQPHTKEGVDAYNEVIARVRMWVNLNLWQKLKLSRDDAKPLLRLKGFPSFPLVERQANEVDWWDMVCNVKKLINEKKEDGKVFWQNLAGYKRQEALRPYLSSEEDRKKGKKFARYQLGDLLLHLEKKHGEDWGKVYDEAWERIDKKVEGLSKHIKLEEERRSEDAQSKAALTDWLRAKASFVIEGSKEADKDEFCRCELKLQKWYGDLRGKPFAIEAENSILDISGFSKQYNCAFIWQKDGVKKLNLYLIINYFKGGKLRFKKIKPEAFEANRFYTVINKKSGEIVPMEVNFNFDDPNLIILPLAFGKRQGREFIWNDLLSLETGSLKLANGRVIEKTLYNRRTRQDEPALFVALTFERREVLDSSNIKPMNLIGVDRGENIPAVIALTDPEGCPLSRFKDSLGNPTHILRIGESYKEKQRTIQAKKEVEQRRAGGYSRKYASKAKNLADDMVRNTARDLLYYAVTQDAMLIFENLSRGFGRQGKRTFMAERQYTRMEDWLTAKLAYEGLPSKTYLSKTLAQYTSKTCSNCGFTITSADYDRVLEKLKKTATGWMTTINGKELKVEGQITYYNRYKRQNVVKDLSVELDRLSEESVNNDISSWTKGRSGEALSLLKKRFSHRPVQEKFVCLNCGFETHADEQAALNIARSWLFLRSQEYKKYQTNKTTGNTDKRAFVETWQSFYRKKLKEVWKPAV

SEQ ID NO: 46341 - protein, 978 aa, synthetic construct
  REGION 1..978: note = engineered CasX variant
QEIKRLNKIRRRLVKDSNTKKAGKTGPMKTLLVRVMTPDLRERLENLRKKPENIPQPISNTSRANLNKLLTDYTEMKKAILHVYWEEFQKDPVGLMSRVAQPASKKIDQNKLKPEMDEKGNLTTAGFACSQCGQPLFVYKLEQVSEKGKAYTNYFGRCNVAEHEKLILLAQLKPEKDSDEAVTYSLGKFGQRALDFYSIHVTKESTHPVKPLAQIAGNRYASVPVGKALSDACMGTIASFLSKYQDIIIEHQKVVKGNQKRLESLRELAGKENLEYPSVTLPPQPHTKEGVDAYNEVIARVRMWVNLNLWQKLKLSRDDAKPLLRLKGFPSFPLVERQANEVDWWDMVCNVKKLINEKKEDGKVFWQNLAGYKRQEALRPYLSSEEDRKKGKKFARYQLGDLLLHLEKKHGEDWGKVYDEAWERIDKKVEGLSKHIKLEEERRSEDAQSKAALTDWLRAKASFVIEGSKEADKDEFCRCELKLQKWYGDLRGKPFAIEAENSILDISGFSKQYNCAFIWQKDGVKKLNLYLIINYFKGGKLRFKKIKPEAFEANRFYTVINKKSGEIVPMEVNFNFDDPNLIILPLAFGKRQGREFIWNDLLSLETGSLKLANGRVIEKTLYNRRTRQDEPALFVALTFERREVLDSSNIKPMNLIGVDRGENIPAVIALTDPEGCPLSRFKDSLGNPTHILRIGESYKEKQRTIQAKKEVEQRRAGGYSRKYASKAKNLADDMVRNTARDLLYYAVTQDAMLIFENLSRGFGRQGKRTFMAERQYTRMEDWLTAKLAYEGLPSKTYLSKTLAQYTSKTCSNCGFTITSADYDRVLEKLKKTATGWMTTINGKELKVEGQITYYNRYKRQNVVKDLSVELDRLSEESVNNDISSWTKGRSGEALSLLKKRFSHRPVQEKFVCLNCGFETHADEQAALNIARSWLFLRSQEYKKYQTNKTTGNTDKRAFVETWQSFYRKKLKEVWKPAV

SEQ ID NO: 46342 - protein, 978 aa, synthetic construct
  REGION 1..978: note = engineered CasX variant
QEIKRLNKIRRRLVKDSNTKKAGKTGPMKTLLVRVMTPDLRERLENLRKKPENIPQPISNTSRANLNKLLTDYTEMKKAILHVYWEEFQKDPVGLMSRVAQPASKKIDQNKLKPEMDEKGNLTTAGFACSQCGQPLFVYKLEQVSEKGKAYTNYFGRCNVAEHEKLIKLAQLKPEKDSDEAVTYSLGKFGQRALDFYSIHVTKESTHPVKPLAQIAGNRYASGPVGKALSDACMGTIASFLSKYQDIIIEHQKVVKGNQKRLESLRELAGKENLEYPSVTLPPQPHTKEGVDAYNEVIARVRMWVNLNLWQKLKLSRDDAKPLLRLKGFPSFPLVERQANEVDWWDMVCNVKKLINEKKEDGKVFWQNLAGYKRQEALRPYLSSEEDRKKGKKFARYQLGDLLLHLEKKHGEDWGKVYDEAWERIDKKVEGLSKHIKLEEERRSEDAQSKAALTDWLRAKASFVIEGSKEADKDEFCRCELKLQKWYGDLRGKPFAIEAENSILDISGFSKQYNCAFIWQKDGVKKLNLYLIINYFKGGKLRFKKIKPEAFEANRFYTVINKKSGEIVPMEVNFNFDDPNLIILPLAFGKRQGREFIWNDLLSLETGSLKLANGRVIEKTLYNRRTRQDEPALFVALTFERREVLDSSNIKPMNLIGVDRGENIPAVIALTDPEGCPLSRFKDSLGNPTHILRIGESYKEKQRTIQAKKEVEQRRAGGYSRKYASKAKNLADDMVRNTARDLLYYAVTQDAMLIFENLSRGFGRQGKRTFMAERQYTRMEDWLTAKLAYEGLPSKTYLSKTLAQYTSKTCSNCGFTITSADYDRVLEKLKKTATGWMTTINGKELKVEGQITYYNRYKRQNVVKDLSVELDRLSEESVNNDISSWTKGRSGEALSLLKKRFSHRPVQEKFVCLNCGFETHADEQAALNIARSWLFLRSQEYKKYQTNKTTGNTDKRAFVETWQSFYRKKLKEVWKPAV

SEQ ID NO: 46343 - protein, 977 aa, synthetic construct
  REGION 1..977: note = engineered CasX variant
QEIKRLNKIRRRLVKDSNTKKAGKTGPMKTLLVRVMTPDLRERLENLRKKPENIPQPISNTSRANLNKLLTDYTEMKKAILHVYWEEFQKDPVGLMSRVAQPASKKIDQNKLKPEMDEKGNLTTAGFACSQCGQPLFVYKLEQVSEKGKAYTNYFGRCNVAEHEKLILLAQLKPEKDSDEAVTYSLGKFGQRALDFYSIHVTKESTHPVKPLAQIAGNRYASPVGKALSDACMGTIASFLSKYQDIIIEHQKVVKGNQKRLESLRELAGKENLEYPSVTLPPQPHTKEGVDAYNEVIARVRMWVNLNLWQKLKLSRDDAKPLLRLKGFPSFPLVERQANEVDWWDMVCNVKKLINEKKEDGKVFWQNLAGYKRQEALRPYLSSEEDRKKGKKFARYQLGDLLLHLEKKHGEDWGKVYDEAWERIDKKVEGLSKHIKLEEERRSEDAQSKAALTDWLRAKASFVIEGSKEADKDEFCRCELKLQKWYGDLRGKPFAIEAENSILDISGFSKQYNCAFIWQKDGVKKLNLYLIINYFKGGKLRFKKIKPEAFEANRFYTVINKKSGEIVPMEVNFNFDDPNLIILPLAFGKRQGREFIWNDLLSLETGSLKLANGRVIEKTLYNRRTRQDEPALFVALTFERREVLDSSNIKPMNLIGVDRGENIPAVIALTDPEGCPLSRFKDSLGNPTHILRIGESYKEKQRTIQAKKEVEQRRAGGYSRKYASKAKNLADDMVRNTARDLLYYAVTQDAMLIFENLSRGFGRQGKRTFMAERQYTRMEDWLTAKLAYEGLPSKTYLSKTLAQYTSKTCSNCGFTITSADYDRVLEKLKKTATGWMTTINGKELKVEGQITYYNRYKRQNVVKDLSVELDRLSEESVNNDISSWTKGRSGEALSLLKKRFSHRPVQEKFVCLNCGFETHADEQAALNIARSWLFLRSQEYKKYQTNKTTGNTDKRAFVETWQSFYRKKLKEVWKPAV

SEQ ID NO: 46344 - protein, 979 aa, synthetic construct
  REGION 1..979: note = engineered CasX variant
QEIKRLNKIRRRLVKDSNTKKAGKTGPMKTLLVRVMTPDLRERLENLRKKPENIPQPISNTSRANLNKLLTDYTEMKKAILHVYWEEFQKDPVGLMSRVAQPASKKIDQNKLKPEMDEKGNLTTAGFACSQCGQPLFVYKLEQVSEKGKAYTNYFGRCNVAEHEKLILLAQLKPEKDSDEAVTYSLGKFGQRALDFYSIHVTKESTHPVKPLAQIAGNRYASYPVGKALSDACMGTIASFLSKYQDIIIEHQKVVKGNQKRLESLRELAGKENLEYPSVTLPPQPHTKEGVDAYNEVIARVRMWVNLNLWQKLKLSRDDAKPLLRLKGFPSFPLVERQANEVDWWDMVCNVKKLINEKKEDGKVFWQNLAGYKRQEALRPYLSSEEDRKKGKKFARYQLGDLLLHLEKKHGEDWGKVYDEAWERIDKKVEGLSKHIKLEEERRSEDAQSKAALTDWLRAKASFVIEGLKEADDKDEFCRCELKLQKWYGDLRGKPFAIEAENSILDISGFSKQYNCAFIWQKDGVKKLNLYLIINYFKGGKLRFKKIKPEAFEANRFYTVINKKSGEIVPMEVNFNFDDPNLIILPLAFGKRQGREFIWNDLLSLETGSLKLANGRVIEKTLYNRRTRQDEPALFVALTFERREVLDSSNIKPMNLIGVDRGENIPAVIALTDPEGCPLSRFKDSLGNPTHILRIGESYKEKQRTIQAKKEVEQRRAGGYSRKYASKAKNLADDMVRNTARDLLYYAVTQDAMLIFENLSRGFGRQGKRTFMAERQYTRMEDWLTAKLAYEGLPSKTYLSKTLAQYTSKTCSNCGFTITSADYDRVLEKLKKTATGWMTTINGKELKVEGQITYYNRYKRQNVVKDLSVELDRLSEESVNNDISSWTKGRSGEALSLLKKRFSHRPVQEKFVCLNCGFETHADEQAALNIARSWLFLRSQEYKKYQTNKTTGNTDKRAFVETWQSFYRKKLKEVWKPAV

SEQ ID NO: 46345 - protein, 979 aa, synthetic construct
  REGION 1..979: note = engineered CasX variant
QEIKRLNKIRRRLVKDSNTKKAGKTGPMKTLLVRVMTPDLRERLENLRKKPENIPQPISNTSRANLNKLLTDYTEMKKAILHVYWEEFQKDPVGLMSRVAQPASKKIDQNKLKPEMDEKGNLTTAGFACSQCGQPLFVYKLEQVSEKGKAYTNYFGRCNVAEHEKLILLAQLKPEKDSDEAVTYSLGKFGQRALDFYSIHVTKESTHPVKPLAQIAGNRYASHPVGKALSDACMGTIASFLSKYQDIIIEHQKVVKGNQKRLESLRELAGKENLEYPSVTLPPQPHTKEGVDAYNEVIARVRMWVNLNLWQKLKLSRDDAKPLLRLKGFPSFPLVERQANEVDWWDMVCNVKKLINEKKEDGKVFWQNLAGYKRQEALRPYLSSEEDRKKGKKFARYQLGDLLLHLEKKHGEDWGKVYDEAWERIDKKVEGLSKHIKLEEERRSEDAQSKAALTDWLRAKASFVIEGLKEADDKDEFCRCELKLQKWYGDLRGKPFAIEAENSILDISGFSKQYNCAFIWQKDGVKKLNLYLIINYFKGGKLRFKKIKPEAFEANRFYTVINKKSGEIVPMEVNFNFDDPNLIILPLAFGKRQGREFIWNDLLSLETGSLKLANGRVIEKTLYNRRTRQDEPALFVALTFERREVLDSSNIKPMNLIGVDRGENIPAVIALTDPEGCPLSRFKDSLGNPTHILRIGESYKEKQRTIQAKKEVEQRRAGGYSRKYASKAKNLADDMVRNTARDLLYYAVTQDAMLIFENLSRGFGRQGKRTFMAERQYTRMEDWLTAKLAYEGLPSKTYLSKTLAQYTSKTCSNCGFTITSADYDRVLEKLKKTATGWMTTINGKELKVEGQITYYNRYKRQNVVKDLSVELDRLSEESVNNDISSWTKGRSGEALSLLKKRFSHRPVQEKFVCLNCGFETHADEQAALNIARSWLFLRSQEYKKYQTNKTTGNTDKRAFVETWQSFYRKKLKEVWKPAV

SEQ ID NO: 46346 - protein, 979 aa, synthetic construct
  REGION 1..979: note = engineered CasX variant
QEIKRLNKIRRRLVKDSNTKKAGKTGPMKTLLVRVMTPDLRERLENLRKKPENIPQPISNTSRANLNKLLTDYTEMKKAILHVYWEEFQKDPVGLMSRVAQPASKKIDQNKLKPEMDEKGNLTTAGFACSQCGQPLFVYKLEQVSEKGKAYTNYFGRCNVAEHEKLILLAQLKPEKDSDEAVTYSLGKFGQRALDFYSIHVTKESTHPVKPLAQIAGNRYASSPVGKALSDACMGTIASFLSKYQDIIIEHQKVVKGNQKRLESLRELAGKENLEYPSVTLPPQPHTKEGVDAYNEVIARVRMWVNLNLWQKLKLSRDDAKPLLRLKGFPSFPLVERQANEVDWWDMVCNVKKLINEKKEDGKVFWQNLAGYKRQEALRPYLSSEEDRKKGKKFARYQLGDLLLHLEKKHGEDWGKVYDEAWERIDKKVEGLSKHIKLEEERRSEDAQSKAALTDWLRAKASFVIEGLKEADDKDEFCRCELKLQKWYGDLRGKPFAIEAENSILDISGFSKQYNCAFIWQKDGVKKLNLYLIINYFKGGKLRFKKIKPEAFEANRFYTVINKKSGEIVPMEVNFNFDDPNLIILPLAFGKRQGREFIWNDLLSLETGSLKLANGRVIEKTLYNRRTRQDEPALFVALTFERREVLDSSNIKPMNLIGVDRGENIPAVIALTDPEGCPLSRFKDSLGNPTHILRIGESYKEKQRTIQAKKEVEQRRAGGYSRKYASKAKNLADDMVRNTARDLLYYAVTQDAMLIFENLSRGFGRQGKRTFMAERQYTRMEDWLTAKLAYEGLPSKTYLSKTLAQYTSKTCSNCGFTITSADYDRVLEKLKKTATGWMTTINGKELKVEGQITYYNRYKRQNVVKDLSVELDRLSEESVNNDISSWTKGRSGEALSLLKKRFSHRPVQEKFVCLNCGFETHADEQAALNIARSWLFLRSQEYKKYQTNKTTGNTDKRAFVETWQSFYRKKLKEVWKPAV

SEQ ID NO: 46347 - protein, 979 aa, synthetic construct
  REGION 1..979: note = engineered CasX variant
QEIKRLNKIRRRLVKDSNTKKAGKTGPMKTLLVRVMTPDLRERLENLRKKPENIPQPISNTSRANLNKLLTDYTEMKKAILHVYWEEFQKDPVGLMSRVAQPASKKIDQNKLKPEMDEKGNLTTAGFACSQCGQPLFVYKLEQVSEKGKAYTNYFGRCNVAEHEKLILLAQLKPEKDSDEAVTYSLGKFGQRALDFYSIHVTKESTHPVKPLAQIAGNRYASTPVGKALSDACMGTIASFLSKYQDIIIEHQKVVKGNQKRLESLRELAGKENLEYPSVTLPPQPHTKEGVDAYNEVIARVRMWVNLNLWQKLKLSRDDAKPLLRLKGFPSFPLVERQANEVDWWDMVCNVKKLINEKKEDGKVFWQNLAGYKRQEALRPYLSSEEDRKKGKKFARYQLGDLLLHLEKKHGEDWGKVYDEAWERIDKKVEGLSKHIKLEEERRSEDAQSKAALTDWLRAKASFVIEGLKEADDKDEFCRCELKLQKWYGDLRGKPFAIEAENSILDISGFSKQYNCAFIWQKDGVKKLNLYLIINYFKGGKLRFKKIKPEAFEANRFYTVINKKSGEIVPMEVNFNFDDPNLIILPLAFGKRQGREFIWNDLLSLETGSLKLANGRVIEKTLYNRRTRQDEPALFVALTFERREVLDSSNIKPMNLIGVDRGENIPAVIALTDPEGCPLSRFKDSLGNPTHILRIGESYKEKQRTIQAKKEVEQRRAGGYSRKYASKAKNLADDMVRNTARDLLYYAVTQDAMLIFENLSRGFGRQGKRTFMAERQYTRMEDWLTAKLAYEGLPSKTYLSKTLAQYTSKTCSNCGFTITSADYDRVLEKLKKTATGWMTTINGKELKVEGQITYYNRYKRQNVVKDLSVELDRLSEESVNNDISSWTKGRSGEALSLLKKRFSHRPVQEKFVCLNCGFETHADEQAALNIARSWLFLRSQEYKKYQTNKTTGNTDKRAFVETWQSFYRKKLKEVWKPAV

SEQ ID NO: 46348 - protein, 979 aa, synthetic construct
  REGION 1..979: note = engineered CasX variant
QEIKRLNKIRRRLVKDSNTKKAGKTGPMKTLLVRVMTPDLRERLENLRKKPENIPQPISNTSRANLNKLLTDYTEMKKAILHVYWEEFQKDPVGLMSRVAQPASKKIDQNKLKPEMDEKGNLTTAGFACSQCGQPLFVYKLEQVSEKGKAYTNYFGRCNVAEHEKLILLAQLKPEKDSDEAVTYSLGKFGQRALDFYSIHVTKESTHPVKPLAQIAGNRYASAPVGKALSDACMGTIASFLSKYQDIIIEHQKVVKGNQKRLESLRELAGKENLEYPSVTLPPQPHTKEGVDAYNEVIARVRMWVNLNLWQKLKLSRDDAKPLLRLKGFPSFPLVERQANEVDWWDMVCNVKKLINEKKEDGKVFWQNLAGYKRQEALRPYLSSEEDRKKGKKFARYQLGDLLLHLEKKHGEDWGKVYDEAWERIDKKVEGLSKHIKLEEERRSEDAQSKAALTDWLRAKASFVIEGLKEADDKDEFCRCELKLQKWYGDLRGKPFAIEAENSILDISGFSKQYNCAFIWQKDGVKKLNLYLIINYFKGGKLRFKKIKPEAFEANRFYTVINKKSGEIVPMEVNFNFDDPNLIILPLAFGKRQGREFIWNDLLSLETGSLKLANGRVIEKTLYNRRTRQDEPALFVALTFERREVLDSSNIKPMNLIGVDRGENIPAVIALTDPEGCPLSRFKDSLGNPTHILRIGESYKEKQRTIQAKKEVEQRRAGGYSRKYASKAKNLADDMVRNTARDLLYYAVTQDAMLIFENLSRGFGRQGKRTFMAERQYTRMEDWLTAKLAYEGLPSKTYLSKTLAQYTSKTCSNCGFTITSADYDRVLEKLKKTATGWMTTINGKELKVEGQITYYNRYKRQNVVKDLSVELDRLSEESVNNDISSWTKGRSGEALSLLKKRFSHRPVQEKFVCLNCGFETHADEQAALNIARSWLFLRSQEYKKYQTNKTTGNTDKRAFVETWQSFYRKKLKEVWKPAV

SEQ ID NO: 46349 - protein, 979 aa, synthetic construct
  REGION 1..979: note = engineered CasX variant
QEIKRLNKIRRRLVKDSNTKKAGKTGPMKTLLVRVMTPDLRERLENLRKKPENIPQPISNTSRANLNKLLTDYTEMKKAILHVYWEEFQKDPVGLMSRVAQPASKKIDQNKLKPEMDEKGNLTTAGFACSQCGQPLFVYKLEQVSEKGKAYTNYFGRCNVAEHEKLILLAQLKPEKDSDEAVTYSLGKFGQRALDFYSIHVTKESTHPVKPLAQIAGNRYASVPVGKALSDACMGTIASFLSKYQDIIIEHQKVVKGNQKRLESLRELAGKENLEYPSVTLPPQPHTKEGVDAYNEVIARVRMWVNLNLWQKLKLSRDDAKPLLRLKGFPSFPLVERQANEVDWWDMVCNVKKLINEKKEDGKVFWQNLAGYKRQEALRPYLSSEEDRKKGKKFARYQLGDLLLHLEKKHGEDWGKVYDEAWERIDKKVEGLSKHIKLEEERRSEDAQSKAALTDWLRAKASFVIEGLKEADDKDEFCRCELKLQKWYGDLRGKPFAIEAENSILDISGFSKQYNCAFIWQKDGVKKLNLYLIINYFKGGKLRFKKIKPEAFEANRFYTVINKKSGEIVPMEVNFNFDDPNLIILPLAFGKRQGREFIWNDLLSLETGSLKLANGRVIEKTLYNRRTRQDEPALFVALTFERREVLDSSNIKPMNLIGVDRGENIPAVIALTDPEGCPLSRFKDSLGNPTHILRIGESYKEKQRTIQAKKEVEQRRAGGYSRKYASKAKNLADDMVRNTARDLLYYAVTQDAMLIFENLSRGFGRQGKRTFMAERQYTRMEDWLTAKLAYEGLPSKTYLSKTLAQYTSKTCSNCGFTITSADYDRVLEKLKKTATGWMTTINGKELKVEGQITYYNRYKRQNVVKDLSVELDRLSEESVNNDISSWTKGRSGEALSLLKKRFSHRPVQEKFVCLNCGFETHADEQAALNIARSWLFLRSQEYKKYQTNKTTGNTDKRAFVETWQSFYRKKLKEVWKPAV

SEQ ID NO: 46350 - protein, 979 aa, synthetic construct
  REGION 1..979: note = engineered CasX variant
QEIKRLNKIRRRLVKDSNTKKAGKTGPMKTLLVRVMTPDLRERLENLRKKPENIPQPISNTSRANLNKLLTDYTEMKKAILHVYWEEFQKDPVGLMSRVAQPASKKIDQNKLKPEMDEKGNLTTAGFACSQCGQPLFVYKLEQVSEKGKAYTNYFGRCNVAEHEKLIKLAQLKPEKDSDEAVTYSLGKFGQRALDFYSIHVTKESTHPVKPLAQIAGNRYASGPVGKALSDACMGTIASFLSKYQDIIIEHQKVVKGNQKRLESLRELAGKENLEYPSVTLPPQPHTKEGVDAYNEVIARVRMWVNLNLWQKLKLSRDDAKPLLRLKGFPSFPLVERQANEVDWWDMVCNVKKLINEKKEDGKVFWQNLAGYKRQEALRPYLSSEEDRKKGKKFARYQLGDLLLHLEKKHGEDWGKVYDEAWERIDKKVEGLSKHIKLEEERRSEDAQSKAALTDWLRAKASFVIEGLKEADDKDEFCRCELKLQKWYGDLRGKPFAIEAENSILDISGFSKQYNCAFIWQKDGVKKLNLYLIINYFKGGKLRFKKIKPEAFEANRFYTVINKKSGEIVPMEVNFNFDDPNLIILPLAFGKRQGREFIWNDLLSLETGSLKLANGRVIEKTLYNRRTRQDEPALFVALTFERREVLDSSNIKPMNLIGVDRGENIPAVIALTDPEGCPLSRFKDSLGNPTHILRIGESYKEKQRTIQAKKEVEQRRAGGYSRKYASKAKNLADDMVRNTARDLLYYAVTQDAMLIFENLSRGFGRQGKRTFMAERQYTRMEDWLTAKLAYEGLPSKTYLSKTLAQYTSKTCSNCGFTITSADYDRVLEKLKKTATGWMTTINGKELKVEGQITYYNRYKRQNVVKDLSVELDRLSEESVNNDISSWTKGRSGEALSLLKKRFSHRPVQEKFVCLNCGFETHADEQAALNIARSWLFLRSQEYKKYQTNKTTGNTDKRAFVETWQSFYRKKLKEVWKPAV

SEQ ID NO: 46351 - protein, 978 aa, synthetic construct
  REGION 1..978: note = engineered CasX variant
QEIKRLNKIRRRLVKDSNTKKAGKTGPMKTLLVRVMTPDLRERLENLRKKPENIPQPISNTSRANLNKLLTDYTEMKKAILHVYWEEFQKDPVGLMSRVAQPASKKIDQNKLKPEMDEKGNLTTAGFACSQCGQPLFVYKLEQVSEKGKAYTNYFGRCNVAEHEKLILLAQLKPEKDSDEAVTYSLGKFGQRALDFYSIHVTKESTHPVKPLAQIAGNRYASPVGKALSDACMGTIASFLSKYQDIIIEHQKVVKGNQKRLESLRELAGKENLEYPSVTLPPQPHTKEGVDAYNEVIARVRMWVNLNLWQKLKLSRDDAKPLLRLKGFPSFPLVERQANEVDWWDMVCNVKKLINEKKEDGKVFWQNLAGYKRQEALRPYLSSEEDRKKGKKFARYQLGDLLLHLEKKHGEDWGKVYDEAWERIDKKVEGLSKHIKLEEERRSEDAQSKAALTDWLRAKASFVIEGLKEADDKDEFCRCELKLQKWYGDLRGKPFAIEAENSILDISGFSKQYNCAFIWQKDGVKKLNLYLIINYFKGGKLRFKKIKPEAFEANRFYTVINKKSGEIVPMEVNFNFDDPNLIILPLAFGKRQGREFIWNDLLSLETGSLKLANGRVIEKTLYNRRTRQDEPALFVALTFERREVLDSSNIKPMNLIGVDRGENIPAVIALTDPEGCPLSRFKDSLGNPTHILRIGESYKEKQRTIQAKKEVEQRRAGGYSRKYASKAKNLADDMVRNTARDLLYYAVTQDAMLIFENLSRGFGRQGKRTFMAERQYTRMEDWLTAKLAYEGLPSKTYLSKTLAQYTSKTCSNCGFTITSADYDRVLEKLKKTATGWMTTINGKELKVEGQITYYNRYKRQNVVKDLSVELDRLSEESVNNDISSWTKGRSGEALSLLKKRFSHRPVQEKFVCLNCGFETHADEQAALNIARSWLFLRSQEYKKYQTNKTTGNTDKRAFVETWQSFYRKKLKEVWKPAV

SEQ ID NO: 46352 - protein, 979 aa, synthetic construct
  REGION 1..979: note = engineered CasX variant
QEIKRLNKIRRRLVKDSNTKKAGKTGPMKTLLVRVMTPDLRERLENLRKKPENIPQPISNTSRANLNKLLTDYTEMKKAILHVYWEEFQKDPVGLMSRVAQPASKKIDQNKLKPEMDEKGNLTTAGFACSQCGQPLFVYKLEQVSEKGKAYTNYFGRCNVAEHEKLILLAQLKPEKDSDEAVTYSLGKFGQRALDFYSIHVTKESTHPVKPLAQIAGNRYASYPVGKALSDACMGTIASFLSKYQDIIIEHQKVVKGNQKRLESLRELAGKENLEYPSVTLPPQPHTKEGVDAYNEVIARVRMWVNLNLWQKLKLSRDDAKPLLRLKGFPSFPLVERQANEVDWWDMVCNVKKLINEKKEDGKVFWQNLAGYKRQEALRPYLSSEEDRKKGKKFARYQLGDLLLHLEKKHGEDWGKVYDEAWERIDKKVEGLSKHIKLEEERRSEDAQSKAALTDWLRAKASFVIEGLKEADKDEFCRCELKLQKWYGDLRGKPFAIEAENSILDISGFSKQYNCAFIWQKDGVKKLNLYLIINYFKGGKLRFKKIKPEAFEANRFYTVINKKSGEIVPMEVNFNFDDPNLIILPLAFGKRQGREFIWNDLLSLETGSLKLANGRVIEKTLYNRRTRQDEPALFVALTFERREVLDSSNIKPMNLIGVDRGENIPAVIALTDPEGCPLSRFKDSLGNPTHILRIGESYKEKQRTIQAKKEVEQRRAGGYSRKYASKAKNLADDMVRNTARDLLYYAVTQDAMLIFENLSRGFGRQGKRTFMAERQYTRMEDWLTAKLAYEGLPSKTYLSKTLAQYTSKTCSNCGFTITSADYDRVLEKLKKTATGWMTTINGKELKVEGQITYYNRYKRQNVVKDLSVELDRLSEESVNNDISSWTKGRSGNEALSLLKKRFSHRPVQEKFVCLNCGFETHADEQAALNIARSWLFLRSQEYKKYQTNKTTGNTDKRAFVETWQSFYRKKLKEVWKPAV

SEQ ID NO: 46353 - protein, 979 aa, synthetic construct
  REGION 1..979: note = engineered CasX variant
QEIKRLNKIRRRLVKDSNTKKAGKTGPMKTLLVRVMTPDLRERLENLRKKPENIPQPISNTSRANLNKLLTDYTEMKKAILHVYWEEFQKDPVGLMSRVAQPASKKIDQNKLKPEMDEKGNLTTAGFACSQCGQPLFVYKLEQVSEKGKAYTNYFGRCNVAEHEKLILLAQLKPEKDSDEAVTYSLGKFGQRALDFYSIHVTKESTHPVKPLAQIAGNRYASHPVGKALSDACMGTIASFLSKYQDIIIEHQKVVKGNQKRLESLRELAGKENLEYPSVTLPPQPHTKEGVDAYNEVIARVRMWVNLNLWQKLKLSRDDAKPLLRLKGFPSFPLVERQANEVDWWDMVCNVKKLINEKKEDGKVFWQNLAGYKRQEALRPYLSSEEDRKKGKKFARYQLGDLLLHLEKKHGEDWGKVYDEAWERIDKKVEGLSKHIKLEEERRSEDAQSKAALTDWLRAKASFVIEGLKEADKDEFCRCELKLQKWYGDLRGKPFAIEAENSILDISGFSKQYNCAFIWQKDGVKKLNLYLIINYFKGGKLRFKKIKPEAFEANRFYTVINKKSGEIVPMEVNFNFDDPNLIILPLAFGKRQGREFIWNDLLSLETGSLKLANGRVIEKTLYNRRTRQDEPALFVALTFERREVLDSSNIKPMNLIGVDRGENIPAVIALTDPEGCPLSRFKDSLGNPTHILRIGESYKEKQRTIQAKKEVEQRRAGGYSRKYASKAKNLADDMVRNTARDLLYYAVTQDAMLIFENLSRGFGRQGKRTFMAERQYTRMEDWLTAKLAYEGLPSKTYLSKTLAQYTSKTCSNCGFTITSADYDRVLEKLKKTATGWMTTINGKELKVEGQITYYNRYKRQNVVKDLSVELDRLSEESVNNDISSWTKGRSGNEALSLLKKRFSHRPVQEKFVCLNCGFETHADEQAALNIARSWLFLRSQEYKKYQTNKTTGNTDKRAFVETWQSFYRKKLKEVWKPAV

SEQ ID NO: 46354 - protein, 979 aa, synthetic construct
  REGION 1..979: note = engineered CasX variant
QEIKRLNKIRRRLVKDSNTKKAGKTGPMKTLLVRVMTPDLRERLENLRKKPENIPQPISNTSRANLNKLLTDYTEMKKAILHVYWEEFQKDPVGLMSRVAQPASKKIDQNKLKPEMDEKGNLTTAGFACSQCGQPLFVYKLEQVSEKGKAYTNYFGRCNVAEHEKLILLAQLKPEKDSDEAVTYSLGKFGQRALDFYSIHVTKESTHPVKPLAQIAGNRYASSPVGKALSDACMGTIASFLSKYQDIIIEHQKVVKGNQKRLESLRELAGKENLEYPSVTLPPQPHTKEGVDAYNEVIARVRMWVNLNLWQKLKLSRDDAKPLLRLKGFPSFPLVERQANEVDWWDMVCNVKKLINEKKEDGKVFWQNLAGYKRQEALRPYLSSEEDRKKGKKFARYQLGDLLLHLEKKHGEDWGKVYDEAWERIDKKVEGLSKHIKLEEERRSEDAQSKAALTDWLRAKASFVIEGLKEADKDEFCRCELKLQKWYGDLRGKPFAIEAENSILDISGFSKQYNCAFIWQKDGVKKLNLYLIINYFKGGKLRFKKIKPEAFEANRFYTVINKKSGEIVPMEVNFNFDDPNLIILPLAFGKRQGREFIWNDLLSLETGSLKLANGRVIEKTLYNRRTRQDEPALFVALTFERREVLDSSNIKPMNLIGVDRGENIPAVIALTDPEGCPLSRFKDSLGNPTHILRIGESYKEKQRTIQAKKEVEQRRAGGYSRKYASKAKNLADDMVRNTARDLLYYAVTQDAMLIFENLSRGFGRQGKRTFMAERQYTRMEDWLTAKLAYEGLPSKTYLSKTLAQYTSKTCSNCGFTITSADYDRVLEKLKKTATGWMTTINGKELKVEGQITYYNRYKRQNVVKDLSVELDRLSEESVNNDISSWTKGRSGNEALSLLKKRFSHRPVQEKFVCLNCGFETHADEQAALNIARSWLFLRSQEYKKYQTNKTTGNTDKRAFVETWQSFYRKKLKEVWKPAV

SEQ ID NO: 46355 - protein, 979 aa, synthetic construct
  REGION 1..979: note = engineered CasX variant
QEIKRLNKIRRRLVKDSNTKKAGKTGPMKTLLVRVMTPDLRERLENLRKKPENIPQPISNTSRANLNKLLTDYTEMKKAILHVYWEEFQKDPVGLMSRVAQPASKKIDQNKLKPEMDEKGNLTTAGFACSQCGQPLFVYKLEQVSEKGKAYTNYFGRCNVAEHEKLILLAQLKPEKDSDEAVTYSLGKFGQRALDFYSIHVTKESTHPVKPLAQIAGNRYASTPVGKALSDACMGTIASFLSKYQDIIIEHQKVVKGNQKRLESLRELAGKENLEYPSVTLPPQPHTKEGVDAYNEVIARVRMWVNLNLWQKLKLSRDDAKPLLRLKGFPSFPLVERQANEVDWWDMVCNVKKLINEKKEDGKVFWQNLAGYKRQEALRPYLSSEEDRKKGKKFARYQLGDLLLHLEKKHGEDWGKVYDEAWERIDKKVEGLSKHIKLEEERRSEDAQSKAALTDWLRAKASFVIEGLKEADKDEFCRCELKLQKWYGDLRGKPFAIEAENSILDISGFSKQYNCAFIWQKDGVKKLNLYLIINYFKGGKLRFKKIKPEAFEANRFYTVINKKSGEIVPMEVNFNFDDPNLIILPLAFGKRQGREFIWNDLLSLETGSLKLANGRVIEKTLYNRRTRQDEPALFVALTFERREVLDSSNIKPMNLIGVDRGENIPAVIALTDPEGCPLSRFKDSLGNPTHILRIGESYKEKQRTIQAKKEVEQRRAGGYSRKYASKAKNLADDMVRNTARDLLYYAVTQDAMLIFENLSRGFGRQGKRTFMAERQYTRMEDWLTAKLAYEGLPSKTYLSKTLAQYTSKTCSNCGFTITSADYDRVLEKLKKTATGWMTTINGKELKVEGQITYYNRYKRQNVVKDLSVELDRLSEESVNNDISSWTKGRSGNEALSLLKKRFSHRPVQEKFVCLNCGFETHADEQAALNIARSWLFLRSQEYKKYQTNKTTGNTDKRAFVETWQSFYRKKLKEVWKPAV

SEQ ID NO: 46356 - protein, 979 aa, synthetic construct
  REGION 1..979: note = engineered CasX variant
QEIKRLNKIRRRLVKDSNTKKAGKTGPMKTLLVRVMTPDLRERLENLRKKPENIPQPISNTSRANLNKLLTDYTEMKKAILHVYWEEFQKDPVGLMSRVAQPASKKIDQNKLKPEMDEKGNLTTAGFACSQCGQPLFVYKLEQVSEKGKAYTNYFGRCNVAEHEKLILLAQLKPEKDSDEAVTYSLGKFGQRALDFYSIHVTKESTHPVKPLAQIAGNRYASAPVGKALSDACMGTIASFLSKYQDIIIEHQKVVKGNQKRLESLRELAGKENLEYPSVTLPPQPHTKEGVDAYNEVIARVRMWVNLNLWQKLKLSRDDAKPLLRLKGFPSFPLVERQANEVDWWDMVCNVKKLINEKKEDGKVFWQNLAGYKRQEALRPYLSSEEDRKKGKKFARYQLGDLLLHLEKKHGEDWGKVYDEAWERIDKKVEGLSKHIKLEEERRSEDAQSKAALTDWLRAKASFVIEGLKEADKDEFCRCELKLQKWYGDLRGKPFAIEAENSILDISGFSKQYNCAFIWQKDGVKKLNLYLIINYFKGGKLRFKKIKPEAFEANRFYTVINKKSGEIVPMEVNFNFDDPNLIILPLAFGKRQGREFIWNDLLSLETGSLKLANGRVIEKTLYNRRTRQDEPALFVALTFERREVLDSSNIKPMNLIGVDRGENIPAVIALTDPEGCPLSRFKDSLGNPTHILRIGESYKEKQRTIQAKKEVEQRRAGGYSRKYASKAKNLADDMVRNTARDLLYYAVTQDAMLIFENLSRGFGRQGKRTFMAERQYTRMEDWLTAKLAYEGLPSKTYLSKTLAQYTSKTCSNCGFTITSADYDRVLEKLKKTATGWMTTINGKELKVEGQITYYNRYKRQNVVKDLSVELDRLSEESVNNDISSWTKGRSGNEALSLLKKRFSHRPVQEKFVCLNCGFETHADEQAALNIARSWLFLRSQEYKKYQTNKTTGNTDKRAFVETWQSFYRKKLKEVWKPAV

SEQ ID NO: 46357 - protein, 979 aa, synthetic construct
  REGION 1..979: note = engineered CasX variant
QEIKRLNKIRRRLVKDSNTKKAGKTGPMKTLLVRVMTPDLRERLENLRKKPENIPQPISNTSRANLNKLLTDYTEMKKAILHVYWEEFQKDPVGLMSRVAQPASKKIDQNKLKPEMDEKGNLTTAGFACSQCGQPLFVYKLEQVSEKGKAYTNYFGRCNVAEHEKLILLAQLKPEKDSDEAVTYSLGKFGQRALDFYSIHVTKESTHPVKPLAQIAGNRYASVPVGKALSDACMGTIASFLSKYQDIIIEHQKVVKGNQKRLESLRELAGKENLEYPSVTLPPQPHTKEGVDAYNEVIARVRMWVNLNLWQKLKLSRDDAKPLLRLKGFPSFPLVERQANEVDWWDMVCNVKKLINEKKEDGKVFWQNLAGYKRQEALRPYLSSEEDRKKGKKFARYQLGDLLLHLEKKHGEDWGKVYDEAWERIDKKVEGLSKHIKLEEERRSEDAQSKAALTDWLRAKASFVIEGLKEADKDEFCRCELKLQKWYGDLRGKPFAIEAENSILDISGFSKQYNCAFIWQKDGVKKLNLYLIINYFKGGKLRFKKIKPEAFEANRFYTVINKKSGEIVPMEVNFNFDDPNLIILPLAFGKRQGREFIWNDLLSLETGSLKLANGRVIEKTLYNRRTRQDEPALFVALTFERREVLDSSNIKPMNLIGVDRGENIPAVIALTDPEGCPLSRFKDSLGNPTHILRIGESYKEKQRTIQAKKEVEQRRAGGYSRKYASKAKNLADDMVRNTARDLLYYAVTQDAMLIFENLSRGFGRQGKRTFMAERQYTRMEDWLTAKLAYEGLPSKTYLSKTLAQYTSKTCSNCGFTITSADYDRVLEKLKKTATGWMTTINGKELKVEGQITYYNRYKRQNVVKDLSVELDRLSEESVNNDISSWTKGRSGNEALSLLKKRFSHRPVQEKFVCLNCGFETHADEQAALNIARSWLFLRSQEYKKYQTNKTTGNTDKRAFVETWQSFYRKKLKEVWKPAV

SEQ ID NO: 46358 - protein, 979 aa, synthetic construct
  REGION 1..979: note = engineered CasX variant
QEIKRLNKIRRRLVKDSNTKKAGKTGPMKTLLVRVMTPDLRERLENLRKKPENIPQPISNTSRANLNKLLTDYTEMKKAILHVYWEEFQKDPVGLMSRVAQPASKKIDQNKLKPEMDEKGNLTTAGFACSQCGQPLFVYKLEQVSEKGKAYTNYFGRCNVAEHEKLIKLAQLKPEKDSDEAVTYSLGKFGQRALDFYSIHVTKESTHPVKPLAQIAGNRYASGPVGKALSDACMGTIASFLSKYQDIIIEHQKVVKGNQKRLESLRELAGKENLEYPSVTLPPQPHTKEGVDAYNEVIARVRMWVNLNLWQKLKLSRDDAKPLLRLKGFPSFPLVERQANEVDWWDMVCNVKKLINEKKEDGKVFWQNLAGYKRQEALRPYLSSEEDRKKGKKFARYQLGDLLLHLEKKHGEDWGKVYDEAWERIDKKVEGLSKHIKLEEERRSEDAQSKAALTDWLRAKASFVIEGLKEADKDEFCRCELKLQKWYGDLRGKPFAIEAENSILDISGFSKQYNCAFIWQKDGVKKLNLYLIINYFKGGKLRFKKIKPEAFEANRFYTVINKKSGEIVPMEVNFNFDDPNLIILPLAFGKRQGREFIWNDLLSLETGSLKLANGRVIEKTLYNRRTRQDEPALFVALTFERREVLDSSNIKPMNLIGVDRGENIPAVIALTDPEGCPLSRFKDSLGNPTHILRIGESYKEKQRTIQAKKEVEQRRAGGYSRKYASKAKNLADDMVRNTARDLLYYAVTQDAMLIFENLSRGFGRQGKRTFMAERQYTRMEDWLTAKLAYEGLPSKTYLSKTLAQYTSKTCSNCGFTITSADYDRVLEKLKKTATGWMTTINGKELKVEGQITYYNRYKRQNVVKDLSVELDRLSEESVNNDISSWTKGRSGNEALSLLKKRFSHRPVQEKFVCLNCGFETHADEQAALNIARSWLFLRSQEYKKYQTNKTTGNTDKRAFVETWQSFYRKKLKEVWKPAV

SEQ ID NO: 46359 - protein, 978 aa, synthetic construct
  REGION 1..978: note = engineered CasX variant
QEIKRLNKIRRRLVKDSNTKKAGKTGPMKTLLVRVMTPDLRERLENLRKKPENIPQPISNTSRANLNKLLTDYTEMKKAILHVYWEEFQKDPVGLMSRVAQPASKKIDQNKLKPEMDEKGNLTTAGFACSQCGQPLFVYKLEQVSEKGKAYTNYFGRCNVAEHEKLILLAQLKPEKDSDEAVTYSLGKFGQRALDFYSIHVTKESTHPVKPLAQIAGNRYASPVGKALSDACMGTIASFLSKYQDIIIEHQKVVKGNQKRLESLRELAGKENLEYPSVTLPPQPHTKEGVDAYNEVIARVRMWVNLNLWQKLKLSRDDAKPLLRLKGFPSFPLVERQANEVDWWDMVCNVKKLINEKKEDGKVFWQNLAGYKRQEALRPYLSSEEDRKKGKKFARYQLGDLLLHLEKKHGEDWGKVYDEAWERIDKKVEGLSKHIKLEEERRSEDAQSKAALTDWLRAKASFVIEGLKEADKDEFCRCELKLQKWYGDLRGKPFAIEAENSILDISGFSKQYNCAFIWQKDGVKKLNLYLIINYFKGGKLRFKKIKPEAFEANRFYTVINKKSGEIVPMEVNFNFDDPNLIILPLAFGKRQGREFIWNDLLSLETGSLKLANGRVIEKTLYNRRTRQDEPALFVALTFERREVLDSSNIKPMNLIGVDRGENIPAVIALTDPEGCPLSRFKDSLGNPTHILRIGESYKEKQRTIQAKKEVEQRRAGGYSRKYASKAKNLADDMVRNTARDLLYYAVTQDAMLIFENLSRGFGRQGKRTFMAERQYTRMEDWLTAKLAYEGLPSKTYLSKTLAQYTSKTCSNCGFTITSADYDRVLEKLKKTATGWMTTINGKELKVEGQITYYNRYKRQNVVKDLSVELDRLSEESVNNDISSWTKGRSGNEALSLLKKRFSHRPVQEKFVCLNCGFETHADEQAALNIARSWLFLRSQEYKKYQTNKTTGNTDKRAFVETWQSFYRKKLKEVWKPAV

SEQ ID NO: 46360 - protein, 978 aa, synthetic construct
  REGION 1..978: note = engineered CasX variant
QEIKRLNKIRRRLVKDSNTKKAGKTGPMKTLLVRVMTPDLRERLENLRKKPENIPQPISNTSRANLNKLLTDYTEMKKAILHVYWEEFQKDPVGLMSRVAQPASKKIDQNKLKPEMDEKGNLTTAGFACSQCGQPLFVYKLEQVSEKGKAYTNYFGRCNVAEHEKLILLAQLKPEKDSDEAVTYSLGKFGQRALDFYSIHVTKESTHPVKPLAQIAGNRYASYPVGKALSDACMGTIASFLSKYQDIIIEHQKVVKGNQKRLESLRELAGKENLEYPSVTLPPQPHTKEGVDAYNEVIARVRMWVNLNLWQKLKLSRDDAKPLLRLKGFPSFPLVERQANEVDWWDMVCNVKKLINEKKEDGKVFWQNLAGYKRQEALRPYLSSEEDRQKGKKFARYQLGDLLLHLEKKHGEDWGKVYDEAWERIDKKVEGLSKHIKLEEERRSEDAQSKAALTDWLRAKASFVIEGLKEADKDEFCRCELKLQKWYGDLRGKPFAIEAENSILDISGFSKQYNCAFIWQKDGVKKLNLYLIINYFKGGKLRFKKIKPEAFEANRFYTVINKKSGEIVPMEVNFNFDDPNLIILPLAFGKRQGREFIWNDLLSLETGSLKLANGRVIEKTLYNRRTRQDEPALFVALTFERREVLDSSNIKPMNLIGVDRGENIPAVIALTDPEGCPLSRFKDSLGNPTHILRIGESYKEKQRTIQAKKEVEQRRAGGYSRKYASKAKNLADDMVRNTARDLLYYAVTQDAMLIFENLSRGFGRQGKRTFMAERQYTRMEDWLTAKLAYEGLPSKTYLSKTLAQYTSKTCSNCGFTITSADYDRVLEKLKKTATGWMTTINGKELKVEGQITYYNRYKRQNVVKDLSVELDRLSEESVNNDISSWTKGRSGEALSLLKKRFSHRPVQEKFVCLNCGFETHADEQAALNIARSWLFLRSQEYKKYQTNKTTGNTDKRAFVETWQSFYRKKLKEVWKPAV

SEQ ID NO: 46361 - protein, 978 aa, synthetic construct
  REGION 1..978: note = engineered CasX variant
QEIKRLNKIRRRLVKDSNTKKAGKTGPMKTLLVRVMTPDLRERLENLRKKPENIPQPISNTSRANLNKLLTDYTEMKKAILHVYWEEFQKDPVGLMSRVAQPASKKIDQNKLKPEMDEKGNLTTAGFACSQCGQPLFVYKLEQVSEKGKAYTNYFGRCNVAEHEKLILLAQLKPEKDSDEAVTYSLGKFGQRALDFYSIHVTKESTHPVKPLAQIAGNRYASHPVGKALSDACMGTIASFLSKYQDIIIEHQKVVKGNQKRLESLRELAGKENLEYPSVTLPPQPHTKEGVDAYNEVIARVRMWVNLNLWQKLKLSRDDAKPLLRLKGFPSFPLVERQANEVDWWDMVCNVKKLINEKKEDGKVFWQNLAGYKRQEALRPYLSSEEDRQKGKKFARYQLGDLLLHLEKKHGEDWGKVYDEAWERIDKKVEGLSKHIKLEEERRSEDAQSKAALTDWLRAKASFVIEGLKEADKDEFCRCELKLQKWYGDLRGKPFAIEAENSILDISGFSKQYNCAFIWQKDGVKKLNLYLIINYFKGGKLRFKKIKPEAFEANRFYTVINKKSGEIVPMEVNFNFDDPNLIILPLAFGKRQGREFIWNDLLSLETGSLKLANGRVIEKTLYNRRTRQDEPALFVALTFERREVLDSSNIKPMNLIGVDRGENIPAVIALTDPEGCPLSRFKDSLGNPTHILRIGESYKEKQRTIQAKKEVEQRRAGGYSRKYASKAKNLADDMVRNTARDLLYYAVTQDAMLIFENLSRGFGRQGKRTFMAERQYTRMEDWLTAKLAYEGLPSKTYLSKTLAQYTSKTCSNCGFTITSADYDRVLEKLKKTATGWMTTINGKELKVEGQITYYNRYKRQNVVKDLSVELDRLSEESVNNDISSWTKGRSGEALSLLKKRFSHRPVQEKFVCLNCGFETHADEQAALNIARSWLFLRSQEYKKYQTNKTTGNTDKRAFVETWQSFYRKKLKEVWKPAV

SEQ ID NO: 46362 - protein, 978 aa, synthetic construct
  REGION 1..978: note = engineered CasX variant
QEIKRLNKIRRRLVKDSNTKKAGKTGPMKTLLVRVMTPDLRERLENLRKKPENIPQPISNTSRANLNKLLTDYTEMKKAILHVYWEEFQKDPVGLMSRVAQPASKKIDQNKLKPEMDEKGNLTTAGFACSQCGQPLFVYKLEQVSEKGKAYTNYFGRCNVAEHEKLILLAQLKPEKDSDEAVTYSLGKFGQRALDFYSIHVTKESTHPVKPLAQIAGNRYASSPVGKALSDACMGTIASFLSKYQDIIIEHQKVVKGNQKRLESLRELAGKENLEYPSVTLPPQPHTKEGVDAYNEVIARVRMWVNLNLWQKLKLSRDDAKPLLRLKGFPSFPLVERQANEVDWWDMVCNVKKLINEKKEDGKVFWQNLAGYKRQEALRPYLSSEEDRQKGKKFARYQLGDLLLHLEKKHGEDWGKVYDEAWERIDKKVEGLSKHIKLEEERRSEDAQSKAALTDWLRAKASFVIEGLKEADKDEFCRCELKLQKWYGDLRGKPFAIEAENSILDISGFSKQYNCAFIWQKDGVKKLNLYLIINYFKGGKLRFKKIKPEAFEANRFYTVINKKSGEIVPMEVNFNFDDPNLIILPLAFGKRQGREFIWNDLLSLETGSLKLANGRVIEKTLYNRRTRQDEPALFVALTFERREVLDSSNIKPMNLIGVDRGENIPAVIALTDPEGCPLSRFKDSLGNPTHILRIGESYKEKQRTIQAKKEVEQRRAGGYSRKYASKAKNLADDMVRNTARDLLYYAVTQDAMLIFENLSRGFGRQGKRTFMAERQYTRMEDWLTAKLAYEGLPSKTYLSKTLAQYTSKTCSNCGFTITSADYDRVLEKLKKTATGWMTTINGKELKVEGQITYYNRYKRQNVVKDLSVELDRLSEESVNNDISSWTKGRSGEALSLLKKRFSHRPVQEKFVCLNCGFETHADEQAALNIARSWLFLRSQEYKKYQTNKTTGNTDKRAFVETWQSFYRKKLKEVWKPAV

SEQ ID NO: 46363 - protein, 978 aa, synthetic construct
  REGION 1..978: note = engineered CasX variant
QEIKRLNKIRRRLVKDSNTKKAGKTGPMKTLLVRVMTPDLRERLENLRKKPENIPQPISNTSRANLNKLLTDYTEMKKAILHVYWEEFQKDPVGLMSRVAQPASKKIDQNKLKPEMDEKGNLTTAGFACSQCGQPLFVYKLEQVSEKGKAYTNYFGRCNVAEHEKLILLAQLKPEKDSDEAVTYSLGKFGQRALDFYSIHVTKESTHPVKPLAQIAGNRYASTPVGKALSDACMGTIASFLSKYQDIIIEHQKVVKGNQKRLESLRELAGKENLEYPSVTLPPQPHTKEGVDAYNEVIARVRMWVNLNLWQKLKLSRDDAKPLLRLKGFPSFPLVERQANEVDWWDMVCNVKKLINEKKEDGKVFWQNLAGYKRQEALRPYLSSEEDRQKGKKFARYQLGDLLLHLEKKHGEDWGKVYDEAWERIDKKVEGLSKHIKLEEERRSEDAQSKAALTDWLRAKASFVIEGLKEADKDEFCRCELKLQKWYGDLRGKPFAIEAENSILDISGFSKQYNCAFIWQKDGVKKLNLYLIINYFKGGKLRFKKIKPEAFEANRFYTVINKKSGEIVPMEVNFNFDDPNLIILPLAFGKRQGREFIWNDLLSLETGSLKLANGRVIEKTLYNRRTRQDEPALFVALTFERREVLDSSNIKPMNLIGVDRGENIPAVIALTDPEGCPLSRFKDSLGNPTHILRIGESYKEKQRTIQAKKEVEQRRAGGYSRKYASKAKNLADDMVRNTARDLLYYAVTQDAMLIFENLSRGFGRQGKRTFMAERQYTRMEDWLTAKLAYEGLPSKTYLSKTLAQYTSKTCSNCGFTITSADYDRVLEKLKKTATGWMTTINGKELKVEGQITYYNRYKRQNVVKDLSVELDRLSEESVNNDISSWTKGRSGEALSLLKKRFSHRPVQEKFVCLNCGFETHADEQAALNIARSWLFLRSQEYKKYQTNKTTGNTDKRAFVETWQSFYRKKLKEVWKPAV

SEQ ID NO: 46364 - protein, 978 aa, synthetic construct
  REGION 1..978: note = engineered CasX variant
QEIKRLNKIRRRLVKDSNTKKAGKTGPMKTLLVRVMTPDLRERLENLRKKPENIPQPISNTSRANLNKLLTDYTEMKKAILHVYWEEFQKDPVGLMSRVAQPASKKIDQNKLKPEMDEKGNLTTAGFACSQCGQPLFVYKLEQVSEKGKAYTNYFGRCNVAEHEKLILLAQLKPEKDSDEAVTYSLGKFGQRALDFYSIHVTKESTHPVKPLAQIAGNRYASAPVGKALSDACMGTIASFLSKYQDIIIEHQKVVKGNQKRLESLRELAGKENLEYPSVTLPPQPHTKEGVDAYNEVIARVRMWVNLNLWQKLKLSRDDAKPLLRLKGFPSFPLVERQANEVDWWDMVCNVKKLINEKKEDGKVFWQNLAGYKRQEALRPYLSSEEDRQKGKKFARYQLGDLLLHLEKKHGEDWGKVYDEAWERIDKKVEGLSKHIKLEEERRSEDAQSKAALTDWLRAKASFVIEGLKEADKDEFCRCELKLQKWYGDLRGKPFAIEAENSILDISGFSKQYNCAFIWQKDGVKKLNLYLIINYFKGGKLRFKKIKPEAFEANRFYTVINKKSGEIVPMEVNFNFDDPNLIILPLAFGKRQGREFIWNDLLSLETGSLKLANGRVIEKTLYNRRTRQDEPALFVALTFERREVLDSSNIKPMNLIGVDRGENIPAVIALTDPEGCPLSRFKDSLGNPTHILRIGESYKEKQRTIQAKKEVEQRRAGGYSRKYASKAKNLADDMVRNTARDLLYYAVTQDAMLIFENLSRGFGRQGKRTFMAERQYTRMEDWLTAKLAYEGLPSKTYLSKTLAQYTSKTCSNCGFTITSADYDRVLEKLKKTATGWMTTINGKELKVEGQITYYNRYKRQNVVKDLSVELDRLSEESVNNDISSWTKGRSGEALSLLKKRFSHRPVQEKFVCLNCGFETHADEQAALNIARSWLFLRSQEYKKYQTNKTTGNTDKRAFVETWQSFYRKKLKEVWKPAV

SEQ ID NO: 46365 - protein, 978 aa, synthetic construct
  REGION 1..978: note = engineered CasX variant
QEIKRLNKIRRRLVKDSNTKKAGKTGPMKTLLVRVMTPDLRERLENLRKKPENIPQPISNTSRANLNKLLTDYTEMKKAILHVYWEEFQKDPVGLMSRVAQPASKKIDQNKLKPEMDEKGNLTTAGFACSQCGQPLFVYKLEQVSEKGKAYTNYFGRCNVAEHEKLILLAQLKPEKDSDEAVTYSLGKFGQRALDFYSIHVTKESTHPVKPLAQIAGNRYASVPVGKALSDACMGTIASFLSKYQDIIIEHQKVVKGNQKRLESLRELAGKENLEYPSVTLPPQPHTKEGVDAYNEVIARVRMWVNLNLWQKLKLSRDDAKPLLRLKGFPSFPLVERQANEVDWWDMVCNVKKLINEKKEDGKVFWQNLAGYKRQEALRPYLSSEEDRQKGKKFARYQLGDLLLHLEKKHGEDWGKVYDEAWERIDKKVEGLSKHIKLEEERRSEDAQSKAALTDWLRAKASFVIEGLKEADKDEFCRCELKLQKWYGDLRGKPFAIEAENSILDISGFSKQYNCAFIWQKDGVKKLNLYLIINYFKGGKLRFKKIKPEAFEANRFYTVINKKSGEIVPMEVNFNFDDPNLIILPLAFGKRQGREFIWNDLLSLETGSLKLANGRVIEKTLYNRRTRQDEPALFVALTFERREVLDSSNIKPMNLIGVDRGENIPAVIALTDPEGCPLSRFKDSLGNPTHILRIGESYKEKQRTIQAKKEVEQRRAGGYSRKYASKAKNLADDMVRNTARDLLYYAVTQDAMLIFENLSRGFGRQGKRTFMAERQYTRMEDWLTAKLAYEGLPSKTYLSKTLAQYTSKTCSNCGFTITSADYDRVLEKLKKTATGWMTTINGKELKVEGQITYYNRYKRQNVVKDLSVELDRLSEESVNNDISSWTKGRSGEALSLLKKRFSHRPVQEKFVCLNCGFETHADEQAALNIARSWLFLRSQEYKKYQTNKTTGNTDKRAFVETWQSFYRKKLKEVWKPAV

SEQ ID NO: 46366 - protein, 978 aa, synthetic construct
  REGION 1..978: note = engineered CasX variant
QEIKRLNKIRRRLVKDSNTKKAGKTGPMKTLLVRVMTPDLRERLENLRKKPENIPQPISNTSRANLNKLLTDYTEMKKAILHVYWEEFQKDPVGLMSRVAQPASKKIDQNKLKPEMDEKGNLTTAGFACSQCGQPLFVYKLEQVSEKGKAYTNYFGRCNVAEHEKLIKLAQLKPEKDSDEAVTYSLGKFGQRALDFYSIHVTKESTHPVKPLAQIAGNRYASGPVGKALSDACMGTIASFLSKYQDIIIEHQKVVKGNQKRLESLRELAGKENLEYPSVTLPPQPHTKEGVDAYNEVIARVRMWVNLNLWQKLKLSRDDAKPLLRLKGFPSFPLVERQANEVDWWDMVCNVKKLINEKKEDGKVFWQNLAGYKRQEALRPYLSSEEDRQKGKKFARYQLGDLLLHLEKKHGEDWGKVYDEAWERIDKKVEGLSKHIKLEEERRSEDAQSKAALTDWLRAKASFVIEGLKEADKDEFCRCELKLQKWYGDLRGKPFAIEAENSILDISGFSKQYNCAFIWQKDGVKKLNLYLIINYFKGGKLRFKKIKPEAFEANRFYTVINKKSGEIVPMEVNFNFDDPNLIILPLAFGKRQGREFIWNDLLSLETGSLKLANGRVIEKTLYNRRTRQDEPALFVALTFERREVLDSSNIKPMNLIGVDRGENIPAVIALTDPEGCPLSRFKDSLGNPTHILRIGESYKEKQRTIQAKKEVEQRRAGGYSRKYASKAKNLADDMVRNTARDLLYYAVTQDAMLIFENLSRGFGRQGKRTFMAERQYTRMEDWLTAKLAYEGLPSKTYLSKTLAQYTSKTCSNCGFTITSADYDRVLEKLKKTATGWMTTINGKELKVEGQITYYNRYKRQNVVKDLSVELDRLSEESVNNDISSWTKGRSGEALSLLKKRFSHRPVQEKFVCLNCGFETHADEQAALNIARSWLFLRSQEYKKYQTNKTTGNTDKRAFVETWQSFYRKKLKEVWKPAV

SEQ ID NO: 46367 - protein, 977 aa, synthetic construct
  REGION 1..977: note = engineered CasX variant
QEIKRLNKIRRRLVKDSNTKKAGKTGPMKTLLVRVMTPDLRERLENLRKKPENIPQPISNTSRANLNKLLTDYTEMKKAILHVYWEEFQKDPVGLMSRVAQPASKKIDQNKLKPEMDEKGNLTTAGFACSQCGQPLFVYKLEQVSEKGKAYTNYFGRCNVAEHEKLILLAQLKPEKDSDEAVTYSLGKFGQRALDFYSIHVTKESTHPVKPLAQIAGNRYASPVGKALSDACMGTIASFLSKYQDIIIEHQKVVKGNQKRLESLRELAGKENLEYPSVTLPPQPHTKEGVDAYNEVIARVRMWVNLNLWQKLKLSRDDAKPLLRLKGFPSFPLVERQANEVDWWDMVCNVKKLINEKKEDGKVFWQNLAGYKRQEALRPYLSSEEDRQKGKKFARYQLGDLLLHLEKKHGEDWGKVYDEAWERIDKKVEGLSKHIKLEEERRSEDAQSKAALTDWLRAKASFVIEGLKEADKDEFCRCELKLQKWYGDLRGKPFAIEAENSILDISGFSKQYNCAFIWQKDGVKKLNLYLIINYFKGGKLRFKKIKPEAFEANRFYTVINKKSGEIVPMEVNFNFDDPNLIILPLAFGKRQGREFIWNDLLSLETGSLKLANGRVIEKTLYNRRTRQDEPALFVALTFERREVLDSSNIKPMNLIGVDRGENIPAVIALTDPEGCPLSRFKDSLGNPTHILRIGESYKEKQRTIQAKKEVEQRRAGGYSRKYASKAKNLADDMVRNTARDLLYYAVTQDAMLIFENLSRGFGRQGKRTFMAERQYTRMEDWLTAKLAYEGLPSKTYLSKTLAQYTSKTCSNCGFTITSADYDRVLEKLKKTATGWMTTINGKELKVEGQITYYNRYKRQNVVKDLSVELDRLSEESVNNDISSWTKGRSGEALSLLKKRFSHRPVQEKFVCLNCGFETHADEQAALNIARSWLFLRSQEYKKYQTNKTTGNTDKRAFVETWQSFYRKKLKEVWKPAV

SEQ ID NO: 46368 - protein, 978 aa, synthetic construct
  REGION 1..978: note = engineered CasX variant
QEIKRLNKIRRRLVKDSNTKKAGKTGPMKTLLVRVMTPDLRERLENLRKKPENIPQPISNTSRANLNKLLTDYTEMKKAILHVYWEEFQKDPVGLMSRVAQPASKKIDQNKLKPEMDEKGNLTTAGFACSQCGQPLFVYKLEQVSEKGKAYTNYFGRCNVAEHEKLILLAQLKPEKDSDEAVTYSLGKFGQRALDFYSIHVTKESTHPVKPLAQIAGNRYASYPVGKALSDACMGTIASFLSKYQDIIIEHQKVVKGNQKRLESLRELAGKENLEYPSVTLPPQPHTKEGVDAYNEVIARVRMWVNLNLWQKLKLSRDDAKPLLRLKGFPSFPLVERQANEVDWWDMVCNVKKLINEKKEDGKVFWQNLAGYKRQEALRPYLSSEEDRKKGKKFARYQLGDLLLHLEKKHGEDWGKVYDEAWERIDKKVEGLSKHIKLEEERRSEDAQSKAALTDWLRAKASFVIEGLKEADKDEFCRCELKLQKWYGDLRGKPFAIEAENSILDISGFSKQYNCAFIWQKDGVKKLNLYLIINYFKGGKLRFKKIKPEAFEANRFYTVINKKSGEIVPMEVNFNFDDPNLIILPLAFGKRQGREFIWNDLLSLETGSLKLANGRVIEKTLYNRRTRQDEPALFVALTFERREVLDSSNIKPMNLIGVDRGENIPAVIALTDPEGCPLSRFKDSLGNPTHILRIGESYKEKQRTIQAKKEVEQRRAGGYSRKYASKAKNLADDMVRNTARDLLYYAVTQDAMLIFENLSRGFGRQGKRTFMAERQYTRMEDWLTAKLAYEGLPSQTYLSKTLAQYTSKTCSNCGFTITSADYDRVLEKLKKTATGWMTTINGKELKVEGQITYYNRYKRQNVVKDLSVELDRLSEESVNNDISSWTKGRSGEALSLLKKRFSHRPVQEKFVCLNCGFETHADEQAALNIARSWLFLRSQEYKKYQTNKTTGNTDKRAFVETWQSFYRKKLKEVWKPAV

SEQ ID NO: 46369 - protein, 978 aa, synthetic construct
  REGION 1..978: note = engineered CasX variant
QEIKRLNKIRRRLVKDSNTKKAGKTGPMKTLLVRVMTPDLRERLENLRKKPENIPQPISNTSRANLNKLLTDYTEMKKAILHVYWEEFQKDPVGLMSRVAQPASKKIDQNKLKPEMDEKGNLTTAGFACSQCGQPLFVYKLEQVSEKGKAYTNYFGRCNVAEHEKLILLAQLKPEKDSDEAVTYSLGKFGQRALDFYSIHVTKESTHPVKPLAQIAGNRYASHPVGKALSDACMGTIASFLSKYQDIIIEHQKVVKGNQKRLESLRELAGKENLEYPSVTLPPQPHTKEGVDAYNEVIARVRMWVNLNLWQKLKLSRDDAKPLLRLKGFPSFPLVERQANEVDWWDMVCNVKKLINEKKEDGKVFWQNLAGYKRQEALRPYLSSEEDRKKGKKFARYQLGDLLLHLEKKHGEDWGKVYDEAWERIDKKVEGLSKHIKLEEERRSEDAQSKAALTDWLRAKASFVIEGLKEADKDEFCRCELKLQKWYGDLRGKPFAIEAENSILDISGFSKQYNCAFIWQKDGVKKLNLYLIINYFKGGKLRFKKIKPEAFEANRFYTVINKKSGEIVPMEVNFNFDDPNLIILPLAFGKRQGREFIWNDLLSLETGSLKLANGRVIEKTLYNRRTRQDEPALFVALTFERREVLDSSNIKPMNLIGVDRGENIPAVIALTDPEGCPLSRFKDSLGNPTHILRIGESYKEKQRTIQAKKEVEQRRAGGYSRKYASKAKNLADDMVRNTARDLLYYAVTQDAMLIFENLSRGFGRQGKRTFMAERQYTRMEDWLTAKLAYEGLPSQTYLSKTLAQYTSKTCSNCGFTITSADYDRVLEKLKKTATGWMTTINGKELKVEGQITYYNRYKRQNVVKDLSVELDRLSEESVNNDISSWTKGRSGEALSLLKKRFSHRPVQEKFVCLNCGFETHADEQAALNIARSWLFLRSQEYKKYQTNKTTGNTDKRAFVETWQSFYRKKLKEVWKPAV

SEQ ID NO: 46370 - protein, 978 aa, synthetic construct
  REGION 1..978: note = engineered CasX variant
QEIKRLNKIRRRLVKDSNTKKAGKTGPMKTLLVRVMTPDLRERLENLRKKPENIPQPISNTSRANLNKLLTDYTEMKKAILHVYWEEFQKDPVGLMSRVAQPASKKIDQNKLKPEMDEKGNLTTAGFACSQCGQPLFVYKLEQVSEKGKAYTNYFGRCNVAEHEKLILLAQLKPEKDSDEAVTYSLGKFGQRALDFYSIHVTKESTHPVKPLAQIAGNRYASSPVGKALSDACMGTIASFLSKYQDIIIEHQKVVKGNQKRLESLRELAGKENLEYPSVTLPPQPHTKEGVDAYNEVIARVRMWVNLNLWQKLKLSRDDAKPLLRLKGFPSFPLVERQANEVDWWDMVCNVKKLINEKKEDGKVFWQNLAGYKRQEALRPYLSSEEDRKKGKKFARYQLGDLLLHLEKKHGEDWGKVYDEAWERIDKKVEGLSKHIKLEEERRSEDAQSKAALTDWLRAKASFVIEGLKEADKDEFCRCELKLQKWYGDLRGKPFAIEAENSILDISGFSKQYNCAFIWQKDGVKKLNLYLIINYFKGGKLRFKKIKPEAFEANRFYTVINKKSGEIVPMEVNFNFDDPNLIILPLAFGKRQGREFIWNDLLSLETGSLKLANGRVIEKTLYNRRTRQDEPALFVALTFERREVLDSSNIKPMNLIGVDRGENIPAVIALTDPEGCPLSRFKDSLGNPTHILRIGESYKEKQRTIQAKKEVEQRRAGGYSRKYASKAKNLADDMVRNTARDLLYYAVTQDAMLIFENLSRGFGRQGKRTFMAERQYTRMEDWLTAKLAYEGLPSQTYLSKTLAQYTSKTCSNCGFTITSADYDRVLEKLKKTATGWMTTINGKELKVEGQITYYNRYKRQNVVKDLSVELDRLSEESVNNDISSWTKGRSGEALSLLKKRFSHRPVQEKFVCLNCGFETHADEQAALNIARSWLFLRSQEYKKYQTNKTTGNTDKRAFVETWQSFYRKKLKEVWKPAV

SEQ ID NO: 46371 - protein, 978 aa, synthetic construct
  REGION 1..978: note = engineered CasX variant
QEIKRLNKIRRRLVKDSNTKKAGKTGPMKTLLVRVMTPDLRERLENLRKKPENIPQPISNTSRANLNKLLTDYTEMKKAILHVYWEEFQKDPVGLMSRVAQPASKKIDQNKLKPEMDEKGNLTTAGFACSQCGQPLFVYKLEQVSEKGKAYTNYFGRCNVAEHEKLILLAQLKPEKDSDEAVTYSLGKFGQRALDFYSIHVTKESTHPVKPLAQIAGNRYASTPVGKALSDACMGTIASFLSKYQDIIIEHQKVVKGNQKRLESLRELAGKENLEYPSVTLPPQPHTKEGVDAYNEVIARVRMWVNLNLWQKLKLSRDDAKPLLRLKGFPSFPLVERQANEVDWWDMVCNVKKLINEKKEDGKVFWQNLAGYKRQEALRPYLSSEEDRKKGKKFARYQLGDLLLHLEKKHGEDWGKVYDEAWERIDKKVEGLSKHIKLEEERRSEDAQSKAALTDWLRAKASFVIEGLKEADKDEFCRCELKLQKWYGDLRGKPFAIEAENSILDISGFSKQYNCAFIWQKDGVKKLNLYLIINYFKGGKLRFKKIKPEAFEANRFYTVINKKSGEIVPMEVNFNFDDPNLIILPLAFGKRQGREFIWNDLLSLETGSLKLANGRVIEKTLYNRRTRQDEPALFVALTFERREVLDSSNIKPMNLIGVDRGENIPAVIALTDPEGCPLSRFKDSLGNPTHILRIGESYKEKQRTIQAKKEVEQRRAGGYSRKYASKAKNLADDMVRNTARDLLYYAVTQDAMLIFENLSRGFGRQGKRTFMAERQYTRMEDWLTAKLAYEGLPSQTYLSKTLAQYTSKTCSNCGFTITSADYDRVLEKLKKTATGWMTTINGKELKVEGQITYYNRYKRQNVVKDLSVELDRLSEESVNNDISSWTKGRSGEALSLLKKRFSHRPVQEKFVCLNCGFETHADEQAALNIARSWLFLRSQEYKKYQTNKTTGNTDKRAFVETWQSFYRKKLKEVWKPAV

SEQ ID NO: 46372 - protein, 978 aa, synthetic construct
  REGION 1..978: note = engineered CasX variant
QEIKRLNKIRRRLVKDSNTKKAGKTGPMKTLLVRVMTPDLRERLENLRKKPENIPQPISNTSRANLNKLLTDYTEMKKAILHVYWEEFQKDPVGLMSRVAQPASKKIDQNKLKPEMDEKGNLTTAGFACSQCGQPLFVYKLEQVSEKGKAYTNYFGRCNVAEHEKLILLAQLKPEKDSDEAVTYSLGKFGQRALDFYSIHVTKESTHPVKPLAQIAGNRYASAPVGKALSDACMGTIASFLSKYQDIIIEHQKVVKGNQKRLESLRELAGKENLEYPSVTLPPQPHTKEGVDAYNEVIARVRMWVNLNLWQKLKLSRDDAKPLLRLKGFPSFPLVERQANEVDWWDMVCNVKKLINEKKEDGKVFWQNLAGYKRQEALRPYLSSEEDRKKGKKFARYQLGDLLLHLEKKHGEDWGKVYDEAWERIDKKVEGLSKHIKLEEERRSEDAQSKAALTDWLRAKASFVIEGLKEADKDEFCRCELKLQKWYGDLRGKPFAIEAENSILDISGFSKQYNCAFIWQKDGVKKLNLYLIINYFKGGKLRFKKIKPEAFEANRFYTVINKKSGEIVPMEVNFNFDDPNLIILPLAFGKRQGREFIWNDLLSLETGSLKLANGRVIEKTLYNRRTRQDEPALFVALTFERREVLDSSNIKPMNLIGVDRGENIPAVIALTDPEGCPLSRFKDSLGNPTHILRIGESYKEKQRTIQAKKEVEQRRAGGYSRKYASKAKNLADDMVRNTARDLLYYAVTQDAMLIFENLSRGFGRQGKRTFMAERQYTRMEDWLTAKLAYEGLPSQTYLSKTLAQYTSKTCSNCGFTITSADYDRVLEKLKKTATGWMTTINGKELKVEGQITYYNRYKRQNVVKDLSVELDRLSEESVNNDISSWTKGRSGEALSLLKKRFSHRPVQEKFVCLNCGFETHADEQAALNIARSWLFLRSQEYKKYQTNKTTGNTDKRAFVETWQSFYRKKLKEVWKPAV

SEQ ID NO: 46373 - protein, 978 aa, synthetic construct
  REGION 1..978: note = engineered CasX variant
QEIKRLNKIRRRLVKDSNTKKAGKTGPMKTLLVRVMTPDLRERLENLRKKPENIPQPISNTSRANLNKLLTDYTEMKKAILHVYWEEFQKDPVGLMSRVAQPASKKIDQNKLKPEMDEKGNLTTAGFACSQCGQPLFVYKLEQVSEKGKAYTNYFGRCNVAEHEKLILLAQLKPEKDSDEAVTYSLGKFGQRALDFYSIHVTKESTHPVKPLAQIAGNRYASVPVGKALSDACMGTIASFLSKYQDIIIEHQKVVKGNQKRLESLRELAGKENLEYPSVTLPPQPHTKEGVDAYNEVIARVRMWVNLNLWQKLKLSRDDAKPLLRLKGFPSFPLVERQANEVDWWDMVCNVKKLINEKKEDGKVFWQNLAGYKRQEALRPYLSSEEDRKKGKKFARYQLGDLLLHLEKKHGEDWGKVYDEAWERIDKKVEGLSKHIKLEEERRSEDAQSKAALTDWLRAKASFVIEGLKEADKDEFCRCELKLQKWYGDLRGKPFAIEAENSILDISGFSKQYNCAFIWQKDGVKKLNLYLIINYFKGGKLRFKKIKPEAFEANRFYTVINKKSGEIVPMEVNFNFDDPNLIILPLAFGKRQGREFIWNDLLSLETGSLKLANGRVIEKTLYNRRTRQDEPALFVALTFERREVLDSSNIKPMNLIGVDRGENIPAVIALTDPEGCPLSRFKDSLGNPTHILRIGESYKEKQRTIQAKKEVEQRRAGGYSRKYASKAKNLADDMVRNTARDLLYYAVTQDAMLIFENLSRGFGRQGKRTFMAERQYTRMEDWLTAKLAYEGLPSQTYLSKTLAQYTSKTCSNCGFTITSADYDRVLEKLKKTATGWMTTINGKELKVEGQITYYNRYKRQNVVKDLSVELDRLSEESVNNDISSWTKGRSGEALSLLKKRFSHRPVQEKFVCLNCGFETHADEQAALNIARSWLFLRSQEYKKYQTNKTTGNTDKRAFVETWQSFYRKKLKEVWKPAV

SEQ ID NO: 46374 - protein, 978 aa, synthetic construct
  REGION 1..978: note = engineered CasX variant
QEIKRLNKIRRRLVKDSNTKKAGKTGPMKTLLVRVMTPDLRERLENLRKKPENIPQPISNTSRANLNKLLTDYTEMKKAILHVYWEEFQKDPVGLMSRVAQPASKKIDQNKLKPEMDEKGNLTTAGFACSQCGQPLFVYKLEQVSEKGKAYTNYFGRCNVAEHEKLIKLAQLKPEKDSDEAVTYSLGKFGQRALDFYSIHVTKESTHPVKPLAQIAGNRYASGPVGKALSDACMGTIASFLSKYQDIIIEHQKVVKGNQKRLESLRELAGKENLEYPSVTLPPQPHTKEGVDAYNEVIARVRMWVNLNLWQKLKLSRDDAKPLLRLKGFPSFPLVERQANEVDWWDMVCNVKKLINEKKEDGKVFWQNLAGYKRQEALRPYLSSEEDRKKGKKFARYQLGDLLLHLEKKHGEDWGKVYDEAWERIDKKVEGLSKHIKLEEERRSEDAQSKAALTDWLRAKASFVIEGLKEADKDEFCRCELKLQKWYGDLRGKPFAIEAENSILDISGFSKQYNCAFIWQKDGVKKLNLYLIINYFKGGKLRFKKIKPEAFEANRFYTVINKKSGEIVPMEVNFNFDDPNLIILPLAFGKRQGREFIWNDLLSLETGSLKLANGRVIEKTLYNRRTRQDEPALFVALTFERREVLDSSNIKPMNLIGVDRGENIPAVIALTDPEGCPLSRFKDSLGNPTHILRIGESYKEKQRTIQAKKEVEQRRAGGYSRKYASKAKNLADDMVRNTARDLLYYAVTQDAMLIFENLSRGFGRQGKRTFMAERQYTRMEDWLTAKLAYEGLPSQTYLSKTLAQYTSKTCSNCGFTITSADYDRVLEKLKKTATGWMTTINGKELKVEGQITYYNRYKRQNVVKDLSVELDRLSEESVNNDISSWTKGRSGEALSLLKKRFSHRPVQEKFVCLNCGFETHADEQAALNIARSWLFLRSQEYKKYQTNKTTGNTDKRAFVETWQSFYRKKLKEVWKPAV

SEQ ID NO: 46375 - protein, 977 aa, synthetic construct
  REGION 1..977: note = engineered CasX variant
QEIKRLNKIRRRLVKDSNTKKAGKTGPMKTLLVRVMTPDLRERLENLRKKPENIPQPISNTSRANLNKLLTDYTEMKKAILHVYWEEFQKDPVGLMSRVAQPASKKIDQNKLKPEMDEKGNLTTAGFACSQCGQPLFVYKLEQVSEKGKAYTNYFGRCNVAEHEKLILLAQLKPEKDSDEAVTYSLGKFGQRALDFYSIHVTKESTHPVKPLAQIAGNRYASPVGKALSDACMGTIASFLSKYQDIIIEHQKVVKGNQKRLESLRELAGKENLEYPSVTLPPQPHTKEGVDAYNEVIARVRMWVNLNLWQKLKLSRDDAKPLLRLKGFPSFPLVERQANEVDWWDMVCNVKKLINEKKEDGKVFWQNLAGYKRQEALRPYLSSEEDRKKGKKFARYQLGDLLLHLEKKHGEDWGKVYDEAWERIDKKVEGLSKHIKLEEERRSEDAQSKAALTDWLRAKASFVIEGLKEADKDEFCRCELKLQKWYGDLRGKPFAIEAENSILDISGFSKQYNCAFIWQKDGVKKLNLYLIINYFKGGKLRFKKIKPEAFEANRFYTVINKKSGEIVPMEVNFNFDDPNLIILPLAFGKRQGREFIWNDLLSLETGSLKLANGRVIEKTLYNRRTRQDEPALFVALTFERREVLDSSNIKPMNLIGVDRGENIPAVIALTDPEGCPLSRFKDSLGNPTHILRIGESYKEKQRTIQAKKEVEQRRAGGYSRKYASKAKNLADDMVRNTARDLLYYAVTQDAMLIFENLSRGFGRQGKRTFMAERQYTRMEDWLTAKLAYEGLPSQTYLSKTLAQYTSKTCSNCGFTITSADYDRVLEKLKKTATGWMTTINGKELKVEGQITYYNRYKRQNVVKDLSVELDRLSEESVNNDISSWTKGRSGEALSLLKKRFSHRPVQEKFVCLNCGFETHADEQAALNIARSWLFLRSQEYKKYQTNKTTGNTDKRAFVETWQSFYRKKLKEVWKPAV

SEQ ID NO: 46376 - protein, 978 aa, synthetic construct
  REGION 1..978: note = engineered CasX variant
QEIKRLNKIRRRLVKDSNTKKAGKTGPMKTLLVRVMTPDLRERLENLRKKPENIPQPISNTSRANLNKLLTDYTEMKKAILHVYWEEFQKDPVGLMSRVAQPASKKIDQNKLKPEMDEKGNLTTAGFACSQCGQPLFVYKLEQVSEKGKAYTNYFGRCNVAEHEKLILLAQLKPEKDSDEAVTYSLGKFGQRALDFYSIHVTKESTHPVKPLAQIAGNRYASYPVGKALSDACMGTIASFLSKYQDIIIEHQKVVKGNQKRLESLRELAGKENLEYPSVTLPPQPHTKEGVDAYNEVIARVRMWVNLNLWQKLKLSRDDAKPLLRLKGFPSFPLVERQANEVDWWDMVCNVKKLINEKKEDGKVFWQNLAGYKRQEALRPYLSSEEDRKKGKKFARYQLGDLLLHLEKKHGEDWGKVYDEAWERIDKKVEGLSKHIKLEEERRSEDAQSKAALTDWLRAKASFVIEGLKEADKDEFCRCELKLQKWYGDLRGKPFAIEAENSILDISGFSKQYNCAFIWQKDGVKKLNLYLIINYFKGGKLRFKKIKPEAFEANRFYTVINKKSGEIVPMEVNFNFDDPNLIILPLAFGKRQGREFIWNDLLSLETGSLKLANGRVIEKTLYNRRTRQDEPALFVALTFERREVLDSSNIKPMNLIGVDRGENIPAVIALTDPEGCPLSRFKDSLGNPTHILRIGESYKEKQRTIQAKKEVEQRRAGGYSRKYASKAKNLADDMVRNTARDLLYYAVTQDAMLIFENLSRGFGRQGKRTFMAERQYTRMEDWLTAKLAYNGLPSKTYLSKTLAQYTSKTCSNCGFTITSADYDRVLEKLKKTATGWMTTINGKELKVEGQITYYNRYKRQNVVKDLSVELDRLSEESVNNDISSWTKGRSGEALSLLKKRFSHRPVQEKFVCLNCGFETHADEQAALNIARSWLFLRSQEYKKYQTNKTTGNTDKRAFVETWQSFYRKKLKEVWKPAV

SEQ ID NO: 46377 - protein, 978 aa, synthetic construct
  REGION 1..978: note = engineered CasX variant
QEIKRLNKIRRRLVKDSNTKKAGKTGPMKTLLVRVMTPDLRERLENLRKKPENIPQPISNTSRANLNKLLTDYTEMKKAILHVYWEEFQKDPVGLMSRVAQPASKKIDQNKLKPEMDEKGNLTTAGFACSQCGQPLFVYKLEQVSEKGKAYTNYFGRCNVAEHEKLILLAQLKPEKDSDEAVTYSLGKFGQRALDFYSIHVTKESTHPVKPLAQIAGNRYASHPVGKALSDACMGTIASFLSKYQDIIIEHQKVVKGNQKRLESLRELAGKENLEYPSVTLPPQPHTKEGVDAYNEVIARVRMWVNLNLWQKLKLSRDDAKPLLRLKGFPSFPLVERQANEVDWWDMVCNVKKLINEKKEDGKVFWQNLAGYKRQEALRPYLSSEEDRKKGKKFARYQLGDLLLHLEKKHGEDWGKVYDEAWERIDKKVEGLSKHIKLEEERRSEDAQSKAALTDWLRAKASFVIEGLKEADKDEFCRCELKLQKWYGDLRGKPFAIEAENSILDISGFSKQYNCAFIWQKDGVKKLNLYLIINYFKGGKLRFKKIKPEAFEANRFYTVINKKSGEIVPMEVNFNFDDPNLIILPLAFGKRQGREFIWNDLLSLETGSLKLANGRVIEKTLYNRRTRQDEPALFVALTFERREVLDSSNIKPMNLIGVDRGENIPAVIALTDPEGCPLSRFKDSLGNPTHILRIGESYKEKQRTIQAKKEVEQRRAGGYSRKYASKAKNLADDMVRNTARDLLYYAVTQDAMLIFENLSRGFGRQGKRTFMAERQYTRMEDWLTAKLAYNGLPSKTYLSKTLAQYTSKTCSNCGFTITSADYDRVLEKLKKTATGWMTTINGKELKVEGQITYYNRYKRQNVVKDLSVELDRLSEESVNNDISSWTKGRSGEALSLLKKRFSHRPVQEKFVCLNCGFETHADEQAALNIARSWLFLRSQEYKKYQTNKTTGNTDKRAFVETWQSFYRKKLKEVWKPAV

SEQ ID NO: 46378 - protein, 978 aa, synthetic construct
  REGION 1..978: note = engineered CasX variant
QEIKRLNKIRRRLVKDSNTKKAGKTGPMKTLLVRVMTPDLRERLENLRKKPENIPQPISNTSRANLNKLLTDYTEMKKAILHVYWEEFQKDPVGLMSRVAQPASKKIDQNKLKPEMDEKGNLTTAGFACSQCGQPLFVYKLEQVSEKGKAYTNYFGRCNVAEHEKLILLAQLKPEKDSDEAVTYSLGKFGQRALDFYSIHVTKESTHPVKPLAQIAGNRYASSPVGKALSDACMGTIASFLSKYQDIIIEHQKVVKGNQKRLESLRELAGKENLEYPSVTLPPQPHTKEGVDAYNEVIARVRMWVNLNLWQKLKLSRDDAKPLLRLKGFPSFPLVERQANEVDWWDMVCNVKKLINEKKEDGKVFWQNLAGYKRQEALRPYLSSEEDRKKGKKFARYQLGDLLLHLEKKHGEDWGKVYDEAWERIDKKVEGLSKHIKLEEERRSEDAQSKAALTDWLRAKASFVIEGLKEADKDEFCRCELKLQKWYGDLRGKPFAIEAENSILDISGFSKQYNCAFIWQKDGVKKLNLYLIINYFKGGKLRFKKIKPEAFEANRFYTVINKKSGEIVPMEVNFNFDDPNLIILPLAFGKRQGREFIWNDLLSLETGSLKLANGRVIEKTLYNRRTRQDEPALFVALTFERREVLDSSNIKPMNLIGVDRGENIPAVIALTDPEGCPLSRFKDSLGNPTHILRIGESYKEKQRTIQAKKEVEQRRAGGYSRKYASKAKNLADDMVRNTARDLLYYAVTQDAMLIFENLSRGFGRQGKRTFMAERQYTRMEDWLTAKLAYNGLPSKTYLSKTLAQYTSKTCSNCGFTITSADYDRVLEKLKKTATGWMTTINGKELKVEGQITYYNRYKRQNVVKDLSVELDRLSEESVNNDISSWTKGRSGEALSLLKKRFSHRPVQEKFVCLNCGFETHADEQAALNIARSWLFLRSQEYKKYQTNKTTGNTDKRAFVETWQSFYRKKLKEVWKPAV

SEQ ID NO: 46379 - protein, 978 aa, synthetic construct
  REGION 1..978: note = engineered CasX variant
QEIKRLNKIRRRLVKDSNTKKAGKTGPMKTLLVRVMTPDLRERLENLRKKPENIPQPISNTSRANLNKLLTDYTEMKKAILHVYWEEFQKDPVGLMSRVAQPASKKIDQNKLKPEMDEKGNLTTAGFACSQCGQPLFVYKLEQVSEKGKAYTNYFGRCNVAEHEKLILLAQLKPEKDSDEAVTYSLGKFGQRALDFYSIHVTKESTHPVKPLAQIAGNRYASTPVGKALSDACMGTIASFLSKYQDIIIEHQKVVKGNQKRLESLRELAGKENLEYPSVTLPPQPHTKEGVDAYNEVIARVRMWVNLNLWQKLKLSRDDAKPLLRLKGFPSFPLVERQANEVDWWDMVCNVKKLINEKKEDGKVFWQNLAGYKRQEALRPYLSSEEDRKKGKKFARYQLGDLLLHLEKKHGEDWGKVYDEAWERIDKKVEGLSKHIKLEEERRSEDAQSKAALTDWLRAKASFVIEGLKEADKDEFCRCELKLQKWYGDLRGKPFAIEAENSILDISGFSKQYNCAFIWQKDGVKKLNLYLIINYFKGGKLRFKKIKPEAFEANRFYTVINKKSGEIVPMEVNFNFDDPNLIILPLAFGKRQGREFIWNDLLSLETGSLKLANGRVIEKTLYNRRTRQDEPALFVALTFERREVLDSSNIKPMNLIGVDRGENIPAVIALTDPEGCPLSRFKDSLGNPTHILRIGESYKEKQRTIQAKKEVEQRRAGGYSRKYASKAKNLADDMVRNTARDLLYYAVTQDAMLIFENLSRGFGRQGKRTFMAERQYTRMEDWLTAKLAYNGLPSKTYLSKTLAQYTSKTCSNCGFTITSADYDRVLEKLKKTATGWMTTINGKELKVEGQITYYNRYKRQNVVKDLSVELDRLSEESVNNDISSWTKGRSGEALSLLKKRFSHRPVQEKFVCLNCGFETHADEQAALNIARSWLFLRSQEYKKYQTNKTTGNTDKRAFVETWQSFYRKKLKEVWKPAV

SEQ ID NO: 46380 - protein, 978 aa, synthetic construct
  REGION 1..978: note = engineered CasX variant
QEIKRLNKIRRRLVKDSNTKKAGKTGPMKTLLVRVMTPDLRERLENLRKKPENIPQPISNTSRANLNKLLTDYTEMKKAILHVYWEEFQKDPVGLMSRVAQPASKKIDQNKLKPEMDEKGNLTTAGFACSQCGQPLFVYKLEQVSEKGKAYTNYFGRCNVAEHEKLILLAQLKPEKDSDEAVTYSLGKFGQRALDFYSIHVTKESTHPVKPLAQIAGNRYASAPVGKALSDACMGTIASFLSKYQDIIIEHQKVVKGNQKRLESLRELAGKENLEYPSVTLPPQPHTKEGVDAYNEVIARVRMWVNLNLWQKLKLSRDDAKPLLRLKGFPSFPLVERQANEVDWWDMVCNVKKLINEKKEDGKVFWQNLAGYKRQEALRPYLSSEEDRKKGKKFARYQLGDLLLHLEKKHGEDWGKVYDEAWERIDKKVEGLSKHIKLEEERRSEDAQSKAALTDWLRAKASFVIEGLKEADKDEFCRCELKLQKWYGDLRGKPFAIEAENSILDISGFSKQYNCAFIWQKDGVKKLNLYLIINYFKGGKLRFKKIKPEAFEANRFYTVINKKSGEIVPMEVNFNFDDPNLIILPLAFGKRQGREFIWNDLLSLETGSLKLANGRVIEKTLYNRRTRQDEPALFVALTFERREVLDSSNIKPMNLIGVDRGENIPAVIALTDPEGCPLSRFKDSLGNPTHILRIGESYKEKQRTIQAKKEVEQRRAGGYSRKYASKAKNLADDMVRNTARDLLYYAVTQDAMLIFENLSRGFGRQGKRTFMAERQYTRMEDWLTAKLAYNGLPSKTYLSKTLAQYTSKTCSNCGFTITSADYDRVLEKLKKTATGWMTTINGKELKVEGQITYYNRYKRQNVVKDLSVELDRLSEESVNNDISSWTKGRSGEALSLLKKRFSHRPVQEKFVCLNCGFETHADEQAALNIARSWLFLRSQEYKKYQTNKTTGNTDKRAFVETWQSFYRKKLKEVWKPAV

SEQ ID NO: 46381 - protein, 978 aa, synthetic construct
  REGION 1..978: note = engineered CasX variant
QEIKRLNKIRRRLVKDSNTKKAGKTGPMKTLLVRVMTPDLRERLENLRKKPENIPQPISNTSRANLNKLLTDYTEMKKAILHVYWEEFQKDPVGLMSRVAQPASKKIDQNKLKPEMDEKGNLTTAGFACSQCGQPLFVYKLEQVSEKGKAYTNYFGRCNVAEHEKLILLAQLKPEKDSDEAVTYSLGKFGQRALDFYSIHVTKESTHPVKPLAQIAGNRYASVPVGKALSDACMGTIASFLSKYQDIIIEHQKVVKGNQKRLESLRELAGKENLEYPSVTLPPQPHTKEGVDAYNEVIARVRMWVNLNLWQKLKLSRDDAKPLLRLKGFPSFPLVERQANEVDWWDMVCNVKKLINEKKEDGKVFWQNLAGYKRQEALRPYLSSEEDRKKGKKFARYQLGDLLLHLEKKHGEDWGKVYDEAWERIDKKVEGLSKHIKLEEERRSEDAQSKAALTDWLRAKASFVIEGLKEADKDEFCRCELKLQKWYGDLRGKPFAIEAENSILDISGFSKQYNCAFIWQKDGVKKLNLYLIINYFKGGKLRFKKIKPEAFEANRFYTVINKKSGEIVPMEVNFNFDDPNLIILPLAFGKRQGREFIWNDLLSLETGSLKLANGRVIEKTLYNRRTRQDEPALFVALTFERREVLDSSNIKPMNLIGVDRGENIPAVIALTDPEGCPLSRFKDSLGNPTHILRIGESYKEKQRTIQAKKEVEQRRAGGYSRKYASKAKNLADDMVRNTARDLLYYAVTQDAMLIFENLSRGFGRQGKRTFMAERQYTRMEDWLTAKLAYNGLPSKTYLSKTLAQYTSKTCSNCGFTITSADYDRVLEKLKKTATGWMTTINGKELKVEGQITYYNRYKRQNVVKDLSVELDRLSEESVNNDISSWTKGRSGEALSLLKKRFSHRPVQEKFVCLNCGFETHADEQAALNIARSWLFLRSQEYKKYQTNKTTGNTDKRAFVETWQSFYRKKLKEVWKPAV

SEQ ID NO: 46382 - protein, 978 aa, synthetic construct
  REGION 1..978: note = engineered CasX variant
QEIKRLNKIRRRLVKDSNTKKAGKTGPMKTLLVRVMTPDLRERLENLRKKPENIPQPISNTSRANLNKLLTDYTEMKKAILHVYWEEFQKDPVGLMSRVAQPASKKIDQNKLKPEMDEKGNLTTAGFACSQCGQPLFVYKLEQVSEKGKAYTNYFGRCNVAEHEKLIKLAQLKPEKDSDEAVTYSLGKFGQRALDFYSIHVTKESTHPVKPLAQIAGNRYASGPVGKALSDACMGTIASFLSKYQDIIIEHQKVVKGNQKRLESLRELAGKENLEYPSVTLPPQPHTKEGVDAYNEVIARVRMWVNLNLWQKLKLSRDDAKPLLRLKGFPSFPLVERQANEVDWWDMVCNVKKLINEKKEDGKVFWQNLAGYKRQEALRPYLSSEEDRKKGKKFARYQLGDLLLHLEKKHGEDWGKVYDEAWERIDKKVEGLSKHIKLEEERRSEDAQSKAALTDWLRAKASFVIEGLKEADKDEFCRCELKLQKWYGDLRGKPFAIEAENSILDISGFSKQYNCAFIWQKDGVKKLNLYLIINYFKGGKLRFKKIKPEAFEANRFYTVINKKSGEIVPMEVNFNFDDPNLIILPLAFGKRQGREFIWNDLLSLETGSLKLANGRVIEKTLYNRRTRQDEPALFVALTFERREVLDSSNIKPMNLIGVDRGENIPAVIALTDPEGCPLSRFKDSLGNPTHILRIGESYKEKQRTIQAKKEVEQRRAGGYSRKYASKAKNLADDMVRNTARDLLYYAVTQDAMLIFENLSRGFGRQGKRTFMAERQYTRMEDWLTAKLAYNGLPSKTYLSKTLAQYTSKTCSNCGFTITSADYDRVLEKLKKTATGWMTTINGKELKVEGQITYYNRYKRQNVVKDLSVELDRLSEESVNNDISSWTKGRSGEALSLLKKRFSHRPVQEKFVCLNCGFETHADEQAALNIARSWLFLRSQEYKKYQTNKTTGNTDKRAFVETWQSFYRKKLKEVWKPAV

SEQ ID NO: 46383 - protein, 977 aa, synthetic construct
  REGION 1..977: note = engineered CasX variant
QEIKRLNKIRRRLVKDSNTKKAGKTGPMKTLLVRVMTPDLRERLENLRKKPENIPQPISNTSRANLNKLLTDYTEMKKAILHVYWEEFQKDPVGLMSRVAQPASKKIDQNKLKPEMDEKGNLTTAGFACSQCGQPLFVYKLEQVSEKGKAYTNYFGRCNVAEHEKLILLAQLKPEKDSDEAVTYSLGKFGQRALDFYSIHVTKESTHPVKPLAQIAGNRYASPVGKALSDACMGTIASFLSKYQDIIIEHQKVVKGNQKRLESLRELAGKENLEYPSVTLPPQPHTKEGVDAYNEVIARVRMWVNLNLWQKLKLSRDDAKPLLRLKGFPSFPLVERQANEVDWWDMVCNVKKLINEKKEDGKVFWQNLAGYKRQEALRPYLSSEEDRKKGKKFARYQLGDLLLHLEKKHGEDWGKVYDEAWERIDKKVEGLSKHIKLEEERRSEDAQSKAALTDWLRAKASFVIEGLKEADKDEFCRCELKLQKWYGDLRGKPFAIEAENSILDISGFSKQYNCAFIWQKDGVKKLNLYLIINYFKGGKLRFKKIKPEAFEANRFYTVINKKSGEIVPMEVNFNFDDPNLIILPLAFGKRQGREFIWNDLLSLETGSLKLANGRVIEKTLYNRRTRQDEPALFVALTFERREVLDSSNIKPMNLIGVDRGENIPAVIALTDPEGCPLSRFKDSLGNPTHILRIGESYKEKQRTIQAKKEVEQRRAGGYSRKYASKAKNLADDMVRNTARDLLYYAVTQDAMLIFENLSRGFGRQGKRTFMAERQYTRMEDWLTAKLAYNGLPSKTYLSKTLAQYTSKTCSNCGFTITSADYDRVLEKLKKTATGWMTTINGKELKVEGQITYYNRYKRQNVVKDLSVELDRLSEESVNNDISSWTKGRSGEALSLLKKRFSHRPVQEKFVCLNCGFETHADEQAALNIARSWLFLRSQEYKKYQTNKTTGNTDKRAFVETWQSFYRKKLKEVWKPAV

SEQ ID NO: 46384 - protein, 978 aa, synthetic construct
  REGION 1..978: note = engineered CasX variant
QEIKRLNKIRRRLVKDSNTKKAGKTGPMKTLLVRVMTPDLRERLENLRKKPENIPQPISNTSRANLNKLLTDYTEMKKAILHVYWEEFQKDPVGLMSRVAQPASKKIDQNKLKPEMDEKGNLTTAGFACSQCGQPLFVYKLEQVSEKGKAYTNYFGRCNVAEHEKLIQLAQLKPEKDSDEAVTYSLGKFGQRALDFYSIHVTKESTHPVKPLAQIAGNRYASYPVGKALSDACMGTIASFLSKYQDIIIEHQKVVKGNQKRLESLRELAGKENLEYPSVTLPPQPHTKEGVDAYNEVIARVRMWVNLNLWQKLKLSRDDAKPLLRLKGFPSFPLVERQANEVDWWDMVCNVKKLINEKKEDGKVFWQNLAGYKRQEALRPYLSSEEDRKKGKKFARYQLGDLLLHLEKKHGEDWGKVYDEAWERIDKKVEGLSKHIKLEEERRSEDAQSKAALTDWLRAKASFVIEGLKEADKDEFCRCELKLQKWYGDLRGKPFAIEAENSILDISGFSKQYNCAFIWQKDGVKKLNLYLIINYFKGGKLRFKKIKPEAFEANRFYTVINKKSGEIVPMEVNFNFDDPNLIILPLAFGKRQGREFIWNDLLSLETGSLKLANGRVIEKTLYNRRTRQDEPALFVALTFERREVLDSSNIKPMNLIGVDRGENIPAVIALTDPEGCPLSRFKDSLGNPTHILRIGESYKEKQRTIQAKKEVEQRRAGGYSRKYASKAKNLADDMVRNTARDLLYYAVTQDAMLIFENLSRGFGRQGKRTFMAERQYTRMEDWLTAKLAYEGLPSKTYLSKTLAQYTSKTCSNCGFTITSADYDRVLEKLKKTATGWMTTINGKELKVEGQITYYNRYKRQNVVKDLSVELDRLSEESVNNDISSWTKGRSGEALSLLKKRFSHRPVQEKFVCLNCGFETHADEQAALNIARSWLFLRSQEYKKYQTNKTTGNTDKRAFVETWQSFYRKKLKEVWKPAV

SEQ ID NO: 46385 - protein, 978 aa, synthetic construct
  REGION 1..978: note = engineered CasX variant
QEIKRLNKIRRRLVKDSNTKKAGKTGPMKTLLVRVMTPDLRERLENLRKKPENIPQPISNTSRANLNKLLTDYTEMKKAILHVYWEEFQKDPVGLMSRVAQPASKKIDQNKLKPEMDEKGNLTTAGFACSQCGQPLFVYKLEQVSEKGKAYTNYFGRCNVAEHEKLIQLAQLKPEKDSDEAVTYSLGKFGQRALDFYSIHVTKESTHPVKPLAQIAGNRYASHPVGKALSDACMGTIASFLSKYQDIIIEHQKVVKGNQKRLESLRELAGKENLEYPSVTLPPQPHTKEGVDAYNEVIARVRMWVNLNLWQKLKLSRDDAKPLLRLKGFPSFPLVERQANEVDWWDMVCNVKKLINEKKEDGKVFWQNLAGYKRQEALRPYLSSEEDRKKGKKFARYQLGDLLLHLEKKHGEDWGKVYDEAWERIDKKVEGLSKHIKLEEERRSEDAQSKAALTDWLRAKASFVIEGLKEADKDEFCRCELKLQKWYGDLRGKPFAIEAENSILDISGFSKQYNCAFIWQKDGVKKLNLYLIINYFKGGKLRFKKIKPEAFEANRFYTVINKKSGEIVPMEVNFNFDDPNLIILPLAFGKRQGREFIWNDLLSLETGSLKLANGRVIEKTLYNRRTRQDEPALFVALTFERREVLDSSNIKPMNLIGVDRGENIPAVIALTDPEGCPLSRFKDSLGNPTHILRIGESYKEKQRTIQAKKEVEQRRAGGYSRKYASKAKNLADDMVRNTARDLLYYAVTQDAMLIFENLSRGFGRQGKRTFMAERQYTRMEDWLTAKLAYEGLPSKTYLSKTLAQYTSKTCSNCGFTITSADYDRVLEKLKKTATGWMTTINGKELKVEGQITYYNRYKRQNVVKDLSVELDRLSEESVNNDISSWTKGRSGEALSLLKKRFSHRPVQEKFVCLNCGFETHADEQAALNIARSWLFLRSQEYKKYQTNKTTGNTDKRAFVETWQSFYRKKLKEVWKPAV

SEQ ID NO: 46386 - protein, 978 aa, synthetic construct
  REGION 1..978: note = engineered CasX variant
QEIKRLNKIRRRLVKDSNTKKAGKTGPMKTLLVRVMTPDLRERLENLRKKPENIPQPISNTSRANLNKLLTDYTEMKKAILHVYWEEFQKDPVGLMSRVAQPASKKIDQNKLKPEMDEKGNLTTAGFACSQCGQPLFVYKLEQVSEKGKAYTNYFGRCNVAEHEKLIQLAQLKPEKDSDEAVTYSLGKFGQRALDFYSIHVTKESTHPVKPLAQIAGNRYASSPVGKALSDACMGTIASFLSKYQDIIIEHQKVVKGNQKRLESLRELAGKENLEYPSVTLPPQPHTKEGVDAYNEVIARVRMWVNLNLWQKLKLSRDDAKPLLRLKGFPSFPLVERQANEVDWWDMVCNVKKLINEKKEDGKVFWQNLAGYKRQEALRPYLSSEEDRKKGKKFARYQLGDLLLHLEKKHGEDWGKVYDEAWERIDKKVEGLSKHIKLEEERRSEDAQSKAALTDWLRAKASFVIEGLKEADKDEFCRCELKLQKWYGDLRGKPFAIEAENSILDISGFSKQYNCAFIWQKDGVKKLNLYLIINYFKGGKLRFKKIKPEAFEANRFYTVINKKSGEIVPMEVNFNFDDPNLIILPLAFGKRQGREFIWNDLLSLETGSLKLANGRVIEKTLYNRRTRQDEPALFVALTFERREVLDSSNIKPMNLIGVDRGENIPAVIALTDPEGCPLSRFKDSLGNPTHILRIGESYKEKQRTIQAKKEVEQRRAGGYSRKYASKAKNLADDMVRNTARDLLYYAVTQDAMLIFENLSRGFGRQGKRTFMAERQYTRMEDWLTAKLAYEGLPSKTYLSKTLAQYTSKTCSNCGFTITSADYDRVLEKLKKTATGWMTTINGKELKVEGQITYYNRYKRQNVVKDLSVELDRLSEESVNNDISSWTKGRSGEALSLLKKRFSHRPVQEKFVCLNCGFETHADEQAALNIARSWLFLRSQEYKKYQTNKTTGNTDKRAFVETWQSFYRKKLKEVWKPAV

SEQ ID NO: 46387 - protein, 978 aa, synthetic construct
  REGION 1..978: note = engineered CasX variant
QEIKRLNKIRRRLVKDSNTKKAGKTGPMKTLLVRVMTPDLRERLENLRKKPENIPQPISNTSRANLNKLLTDYTEMKKAILHVYWEEFQKDPVGLMSRVAQPASKKIDQNKLKPEMDEKGNLTTAGFACSQCGQPLFVYKLEQVSEKGKAYTNYFGRCNVAEHEKLIQLAQLKPEKDSDEAVTYSLGKFGQRALDFYSIHVTKESTHPVKPLAQIAGNRYASTPVGKALSDACMGTIASFLSKYQDIIIEHQKVVKGNQKRLESLRELAGKENLEYPSVTLPPQPHTKEGVDAYNEVIARVRMWVNLNLWQKLKLSRDDAKPLLRLKGFPSFPLVERQANEVDWWDMVCNVKKLINEKKEDGKVFWQNLAGYKRQEALRPYLSSEEDRKKGKKFARYQLGDLLLHLEKKHGEDWGKVYDEAWERIDKKVEGLSKHIKLEEERRSEDAQSKAALTDWLRAKASFVIEGLKEADKDEFCRCELKLQKWYGDLRGKPFAIEAENSILDISGFSKQYNCAFIWQKDGVKKLNLYLIINYFKGGKLRFKKIKPEAFEANRFYTVINKKSGEIVPMEVNFNFDDPNLIILPLAFGKRQGREFIWNDLLSLETGSLKLANGRVIEKTLYNRRTRQDEPALFVALTFERREVLDSSNIKPMNLIGVDRGENIPAVIALTDPEGCPLSRFKDSLGNPTHILRIGESYKEKQRTIQAKKEVEQRRAGGYSRKYASKAKNLADDMVRNTARDLLYYAVTQDAMLIFENLSRGFGRQGKRTFMAERQYTRMEDWLTAKLAYEGLPSKTYLSKTLAQYTSKTCSNCGFTITSADYDRVLEKLKKTATGWMTTINGKELKVEGQITYYNRYKRQNVVKDLSVELDRLSEESVNNDISSWTKGRSGEALSLLKKRFSHRPVQEKFVCLNCGFETHADEQAALNIARSWLFLRSQEYKKYQTNKTTGNTDKRAFVETWQSFYRKKLKEVWKPAV

SEQ ID NO: 46388 - protein, 978 aa, synthetic construct
  REGION 1..978: note = engineered CasX variant
QEIKRLNKIRRRLVKDSNTKKAGKTGPMKTLLVRVMTPDLRERLENLRKKPENIPQPISNTSRANLNKLLTDYTEMKKAILHVYWEEFQKDPVGLMSRVAQPASKKIDQNKLKPEMDEKGNLTTAGFACSQCGQPLFVYKLEQVSEKGKAYTNYFGRCNVAEHEKLIQLAQLKPEKDSDEAVTYSLGKFGQRALDFYSIHVTKESTHPVKPLAQIAGNRYASAPVGKALSDACMGTIASFLSKYQDIIIEHQKVVKGNQKRLESLRELAGKENLEYPSVTLPPQPHTKEGVDAYNEVIARVRMWVNLNLWQKLKLSRDDAKPLLRLKGFPSFPLVERQANEVDWWDMVCNVKKLINEKKEDGKVFWQNLAGYKRQEALRPYLSSEEDRKKGKKFARYQLGDLLLHLEKKHGEDWGKVYDEAWERIDKKVEGLSKHIKLEEERRSEDAQSKAALTDWLRAKASFVIEGLKEADKDEFCRCELKLQKWYGDLRGKPFAIEAENSILDISGFSKQYNCAFIWQKDGVKKLNLYLIINYFKGGKLRFKKIKPEAFEANRFYTVINKKSGEIVPMEVNFNFDDPNLIILPLAFGKRQGREFIWNDLLSLETGSLKLANGRVIEKTLYNRRTRQDEPALFVALTFERREVLDSSNIKPMNLIGVDRGENIPAVIALTDPEGCPLSRFKDSLGNPTHILRIGESYKEKQRTIQAKKEVEQRRAGGYSRKYASKAKNLADDMVRNTARDLLYYAVTQDAMLIFENLSRGFGRQGKRTFMAERQYTRMEDWLTAKLAYEGLPSKTYLSKTLAQYTSKTCSNCGFTITSADYDRVLEKLKKTATGWMTTINGKELKVEGQITYYNRYKRQNVVKDLSVELDRLSEESVNNDISSWTKGRSGEALSLLKKRFSHRPVQEKFVCLNCGFETHADEQAALNIARSWLFLRSQEYKKYQTNKTTGNTDKRAFVETWQSFYRKKLKEVWKPAV

SEQ ID NO: 46389 - protein, 978 aa, synthetic construct
  REGION 1..978: note = engineered CasX variant
QEIKRLNKIRRRLVKDSNTKKAGKTGPMKTLLVRVMTPDLRERLENLRKKPENIPQPISNTSRANLNKLLTDYTEMKKAILHVYWEEFQKDPVGLMSRVAQPASKKIDQNKLKPEMDEKGNLTTAGFACSQCGQPLFVYKLEQVSEKGKAYTNYFGRCNVAEHEKLIQLAQLKPEKDSDEAVTYSLGKFGQRALDFYSIHVTKESTHPVKPLAQIAGNRYASVPVGKALSDACMGTIASFLSKYQDIIIEHQKVVKGNQKRLESLRELAGKENLEYPSVTLPPQPHTKEGVDAYNEVIARVRMWVNLNLWQKLKLSRDDAKPLLRLKGFPSFPLVERQANEVDWWDMVCNVKKLINEKKEDGKVFWQNLAGYKRQEALRPYLSSEEDRKKGKKFARYQLGDLLLHLEKKHGEDWGKVYDEAWERIDKKVEGLSKHIKLEEERRSEDAQSKAALTDWLRAKASFVIEGLKEADKDEFCRCELKLQKWYGDLRGKPFAIEAENSILDISGFSKQYNCAFIWQKDGVKKLNLYLIINYFKGGKLRFKKIKPEAFEANRFYTVINKKSGEIVPMEVNFNFDDPNLIILPLAFGKRQGREFIWNDLLSLETGSLKLANGRVIEKTLYNRRTRQDEPALFVALTFERREVLDSSNIKPMNLIGVDRGENIPAVIALTDPEGCPLSRFKDSLGNPTHILRIGESYKEKQRTIQAKKEVEQRRAGGYSRKYASKAKNLADDMVRNTARDLLYYAVTQDAMLIFENLSRGFGRQGKRTFMAERQYTRMEDWLTAKLAYEGLPSKTYLSKTLAQYTSKTCSNCGFTITSADYDRVLEKLKKTATGWMTTINGKELKVEGQITYYNRYKRQNVVKDLSVELDRLSEESVNNDISSWTKGRSGEALSLLKKRFSHRPVQEKFVCLNCGFETHADEQAALNIARSWLFLRSQEYKKYQTNKTTGNTDKRAFVETWQSFYRKKLKEVWKPAV

SEQ ID NO: 46390 - protein, 979 aa, synthetic construct
  REGION 1..979: note = engineered CasX variant
QEIKRLNKIRRRLVKDSNTKKAGKTGPMKTLLVRVMTPDLRERLENLRKKPENIPQPISNTSRANLNKLLTDYTEMKKAILHVYWEEFQKDPVGLMSRVAQPASKKIDQNKLKPEMDEKGNLTTAGFACSQCGQPLFVYKLEQVSEKGKAYTNYFGRCNVAEHEKLIQKLAQLKPEKDSDEAVTYSLGKFGQRALDFYSIHVTKESTHPVKPLAQIAGNRYASGPVGKALSDACMGTIASFLSKYQDIIIEHQKVVKGNQKRLESLRELAGKENLEYPSVTLPPQPHTKEGVDAYNEVIARVRMWVNLNLWQKLKLSRDDAKPLLRLKGFPSFPLVERQANEVDWWDMVCNVKKLINEKKEDGKVFWQNLAGYKRQEALRPYLSSEEDRKKGKKFARYQLGDLLLHLEKKHGEDWGKVYDEAWERIDKKVEGLSKHIKLEEERRSEDAQSKAALTDWLRAKASFVIEGLKEADKDEFCRCELKLQKWYGDLRGKPFAIEAENSILDISGFSKQYNCAFIWQKDGVKKLNLYLIINYFKGGKLRFKKIKPEAFEANRFYTVINKKSGEIVPMEVNFNFDDPNLIILPLAFGKRQGREFIWNDLLSLETGSLKLANGRVIEKTLYNRRTRQDEPALFVALTFERREVLDSSNIKPMNLIGVDRGENIPAVIALTDPEGCPLSRFKDSLGNPTHILRIGESYKEKQRTIQAKKEVEQRRAGGYSRKYASKAKNLADDMVRNTARDLLYYAVTQDAMLIFENLSRGFGRQGKRTFMAERQYTRMEDWLTAKLAYEGLPSKTYLSKTLAQYTSKTCSNCGFTITSADYDRVLEKLKKTATGWMTTINGKELKVEGQITYYNRYKRQNVVKDLSVELDRLSEESVNNDISSWTKGRSGEALSLLKKRFSHRPVQEKFVCLNCGFETHADEQAALNIARSWLFLRSQEYKKYQTNKTTGNTDKRAFVETWQSFYRKKLKEVWKPAV

SEQ ID NO: 46391 - protein, 977 aa, synthetic construct
  REGION 1..977: note = engineered CasX variant
QEIKRLNKIRRRLVKDSNTKKAGKTGPMKTLLVRVMTPDLRERLENLRKKPENIPQPISNTSRANLNKLLTDYTEMKKAILHVYWEEFQKDPVGLMSRVAQPASKKIDQNKLKPEMDEKGNLTTAGFACSQCGQPLFVYKLEQVSEKGKAYTNYFGRCNVAEHEKLIQLAQLKPEKDSDEAVTYSLGKFGQRALDFYSIHVTKESTHPVKPLAQIAGNRYASPVGKALSDACMGTIASFLSKYQDIIIEHQKVVKGNQKRLESLRELAGKENLEYPSVTLPPQPHTKEGVDAYNEVIARVRMWVNLNLWQKLKLSRDDAKPLLRLKGFPSFPLVERQANEVDWWDMVCNVKKLINEKKEDGKVFWQNLAGYKRQEALRPYLSSEEDRKKGKKFARYQLGDLLLHLEKKHGEDWGKVYDEAWERIDKKVEGLSKHIKLEEERRSEDAQSKAALTDWLRAKASFVIEGLKEADKDEFCRCELKLQKWYGDLRGKPFAIEAENSILDISGFSKQYNCAFIWQKDGVKKLNLYLIINYFKGGKLRFKKIKPEAFEANRFYTVINKKSGEIVPMEVNFNFDDPNLIILPLAFGKRQGREFIWNDLLSLETGSLKLANGRVIEKTLYNRRTRQDEPALFVALTFERREVLDSSNIKPMNLIGVDRGENIPAVIALTDPEGCPLSRFKDSLGNPTHILRIGESYKEKQRTIQAKKEVEQRRAGGYSRKYASKAKNLADDMVRNTARDLLYYAVTQDAMLIFENLSRGFGRQGKRTFMAERQYTRMEDWLTAKLAYEGLPSKTYLSKTLAQYTSKTCSNCGFTITSADYDRVLEKLKKTATGWMTTINGKELKVEGQITYYNRYKRQNVVKDLSVELDRLSEESVNNDISSWTKGRSGEALSLLKKRFSHRPVQEKFVCLNCGFETHADEQAALNIARSWLFLRSQEYKKYQTNKTTGNTDKRAFVETWQSFYRKKLKEVWKPAV

SEQ ID NO: 46392 - protein, 978 aa, synthetic construct
  REGION 1..978: note = engineered CasX variant
QEIKRLNKIRRRLVKDSNTKKAGKTGPMKTLLVRVMTPDLRERLENLRKKPENIPQPISNTSRANLNKLLTDYTEMKKAILHVYWEEFQKDPVGLMSRVAQPASKKIDQNKLKPEMDEKGNLTTAGFACSQCGQPLFVYKLEQVSEKGKAYTNYFGRCNVAEHEKLILLAQLKPEKDSDEAVTYSLGKFGQRALDFYSIHVTKESTHPVKPLAQIAGNRYASYPVGKALSDACMGTIASFLSKYQDIIIEHQKVVKGNQKRLESLRELAGKENLEYPSVTLPPQPHTKEGVDAYNEVIARVRMWVNLNLWQKLKLSRDDAKPLLRLKGFPSFPLVERQANEVDWWDMVCNVKKLINEKKEDGKVFWQNLAIYKRQEALRPYLSSEEDRKKGKKFARYQLGDLLLHLEKKHGEDWGKVYDEAWERIDKKVEGLSKHIKLEEERRSEDAQSKAALTDWLRAKASFVIEGLKEADKDEFCRCELKLQKWYGDLRGKPFAIEAENSILDISGFSKQYNCAFIWQKDGVKKLNLYLIINYFKGGKLRFKKIKPEAFEANRFYTVINKKSGEIVPMEVNFNFDDPNLIILPLAFGKRQGREFIWNDLLSLETGSLKLANGRVIEKTLYNRRTRQDEPALFVALTFERREVLDSSNIKPMNLIGVDRGENIPAVIALTDPEGCPLSRFKDSLGNPTHILRIGESYKEKQRTIQAKKEVEQRRAGGYSRKYASKAKNLADDMVRNTARDLLYYAVTQDAMLIFENLSRGFGRQGKRTFMAERQYTRMEDWLTAKLAYEGLPSKTYLSKTLAQYTSKTCSNCGFTITSADYDRVLEKLKKTATGWMTTINGKELKVEGQITYYNRYKRQNVVKDLSVELDRLSEESVNNDISSWTKGRSGEALSLLKKRFSHRPVQEKFVCLNCGFETHADEQAALNIARSWLFLRSQEYKKYQTNKTTGNTDKRAFVETWQSFYRKKLKEVWKPAV

SEQ ID NO: 46393 - protein, 978 aa, synthetic construct
  REGION 1..978: note = engineered CasX variant
QEIKRLNKIRRRLVKDSNTKKAGKTGPMKTLLVRVMTPDLRERLENLRKKPENIPQPISNTSRANLNKLLTDYTEMKKAILHVYWEEFQKDPVGLMSRVAQPASKKIDQNKLKPEMDEKGNLTTAGFACSQCGQPLFVYKLEQVSEKGKAYTNYFGRCNVAEHEKLILLAQLKPEKDSDEAVTYSLGKFGQRALDFYSIHVTKESTHPVKPLAQIAGNRYASHPVGKALSDACMGTIASFLSKYQDIIIEHQKVVKGNQKRLESLRELAGKENLEYPSVTLPPQPHTKEGVDAYNEVIARVRMWVNLNLWQKLKLSRDDAKPLLRLKGFPSFPLVERQANEVDWWDMVCNVKKLINEKKEDGKVFWQNLAIYKRQEALRPYLSSEEDRKKGKKFARYQLGDLLLHLEKKHGEDWGKVYDEAWERIDKKVEGLSKHIKLEEERRSEDAQSKAALTDWLRAKASFVIEGLKEADKDEFCRCELKLQKWYGDLRGKPFAIEAENSILDISGFSKQYNCAFIWQKDGVKKLNLYLIINYFKGGKLRFKKIKPEAFEANRFYTVINKKSGEIVPMEVNFNFDDPNLIILPLAFGKRQGREFIWNDLLSLETGSLKLANGRVIEKTLYNRRTRQDEPALFVALTFERREVLDSSNIKPMNLIGVDRGENIPAVIALTDPEGCPLSRFKDSLGNPTHILRIGESYKEKQRTIQAKKEVEQRRAGGYSRKYASKAKNLADDMVRNTARDLLYYAVTQDAMLIFENLSRGFGRQGKRTFMAERQYTRMEDWLTAKLAYEGLPSKTYLSKTLAQYTSKTCSNCGFTITSADYDRVLEKLKKTATGWMTTINGKELKVEGQITYYNRYKRQNVVKDLSVELDRLSEESVNNDISSWTKGRSGEALSLLKKRFSHRPVQEKFVCLNCGFETHADEQAALNIARSWLFLRSQEYKKYQTNKTTGNTDKRAFVETWQSFYRKKLKEVWKPAV

SEQ ID NO: 46394 - protein, 978 aa, synthetic construct
  REGION 1..978: note = engineered CasX variant
QEIKRLNKIRRRLVKDSNTKKAGKTGPMKTLLVRVMTPDLRERLENLRKKPENIPQPISNTSRANLNKLLTDYTEMKKAILHVYWEEFQKDPVGLMSRVAQPASKKIDQNKLKPEMDEKGNLTTAGFACSQCGQPLFVYKLEQVSEKGKAYTNYFGRCNVAEHEKLILLAQLKPEKDSDEAVTYSLGKFGQRALDFYSIHVTKESTHPVKPLAQIAGNRYASSPVGKALSDACMGTIASFLSKYQDIIIEHQKVVKGNQKRLESLRELAGKENLEYPSVTLPPQPHTKEGVDAYNEVIARVRMWVNLNLWQKLKLSRDDAKPLLRLKGFPSFPLVERQANEVDWWDMVCNVKKLINEKKEDGKVFWQNLAIYKRQEALRPYLSSEEDRKKGKKFARYQLGDLLLHLEKKHGEDWGKVYDEAWERIDKKVEGLSKHIKLEEERRSEDAQSKAALTDWLRAKASFVIEGLKEADKDEFCRCELKLQKWYGDLRGKPFAIEAENSILDISGFSKQYNCAFIWQKDGVKKLNLYLIINYFKGGKLRFKKIKPEAFEANRFYTVINKKSGEIVPMEVNFNFDDPNLIILPLAFGKRQGREFIWNDLLSLETGSLKLANGRVIEKTLYNRRTRQDEPALFVALTFERREVLDSSNIKPMNLIGVDRGENIPAVIALTDPEGCPLSRFKDSLGNPTHILRIGESYKEKQRTIQAKKEVEQRRAGGYSRKYASKAKNLADDMVRNTARDLLYYAVTQDAMLIFENLSRGFGRQGKRTFMAERQYTRMEDWLTAKLAYEGLPSKTYLSKTLAQYTSKTCSNCGFTITSADYDRVLEKLKKTATGWMTTINGKELKVEGQITYYNRYKRQNVVKDLSVELDRLSEESVNNDISSWTKGRSGEALSLLKKRFSHRPVQEKFVCLNCGFETHADEQAALNIARSWLFLRSQEYKKYQTNKTTGNTDKRAFVETWQSFYRKKLKEVWKPAV

SEQ ID NO: 46395 - protein, 978 aa, synthetic construct
  REGION 1..978: note = engineered CasX variant
QEIKRLNKIRRRLVKDSNTKKAGKTGPMKTLLVRVMTPDLRERLENLRKKPENIPQPISNTSRANLNKLLTDYTEMKKAILHVYWEEFQKDPVGLMSRVAQPASKKIDQNKLKPEMDEKGNLTTAGFACSQCGQPLFVYKLEQVSEKGKAYTNYFGRCNVAEHEKLILLAQLKPEKDSDEAVTYSLGKFGQRALDFYSIHVTKESTHPVKPLAQIAGNRYASTPVGKALSDACMGTIASFLSKYQDIIIEHQKVVKGNQKRLESLRELAGKENLEYPSVTLPPQPHTKEGVDAYNEVIARVRMWVNLNLWQKLKLSRDDAKPLLRLKGFPSFPLVERQANEVDWWDMVCNVKKLINEKKEDGKVFWQNLAIYKRQEALRPYLSSEEDRKKGKKFARYQLGDLLLHLEKKHGEDWGKVYDEAWERIDKKVEGLSKHIKLEEERRSEDAQSKAALTDWLRAKASFVIEGLKEADKDEFCRCELKLQKWYGDLRGKPFAIEAENSILDISGFSKQYNCAFIWQKDGVKKLNLYLIINYFKGGKLRFKKIKPEAFEANRFYTVINKKSGEIVPMEVNFNFDDPNLIILPLAFGKRQGREFIWNDLLSLETGSLKLANGRVIEKTLYNRRTRQDEPALFVALTFERREVLDSSNIKPMNLIGVDRGENIPAVIALTDPEGCPLSRFKDSLGNPTHILRIGESYKEKQRTIQAKKEVEQRRAGGYSRKYASKAKNLADDMVRNTARDLLYYAVTQDAMLIFENLSRGFGRQGKRTFMAERQYTRMEDWLTAKLAYEGLPSKTYLSKTLAQYTSKTCSNCGFTITSADYDRVLEKLKKTATGWMTTINGKELKVEGQITYYNRYKRQNVVKDLSVELDRLSEESVNNDISSWTKGRSGEALSLLKKRFSHRPVQEKFVCLNCGFETHADEQAALNIARSWLFLRSQEYKKYQTNKTTGNTDKRAFVETWQSFYRKKLKEVWKPAV

SEQ ID NO: 46396 - protein, 978 aa, synthetic construct
  REGION 1..978: note = engineered CasX variant
QEIKRLNKIRRRLVKDSNTKKAGKTGPMKTLLVRVMTPDLRERLENLRKKPENIPQPISNTSRANLNKLLTDYTEMKKAILHVYWEEFQKDPVGLMSRVAQPASKKIDQNKLKPEMDEKGNLTTAGFACSQCGQPLFVYKLEQVSEKGKAYTNYFGRCNVAEHEKLILLAQLKPEKDSDEAVTYSLGKFGQRALDFYSIHVTKESTHPVKPLAQIAGNRYASAPVGKALSDACMGTIASFLSKYQDIIIEHQKVVKGNQKRLESLRELAGKENLEYPSVTLPPQPHTKEGVDAYNEVIARVRMWVNLNLWQKLKLSRDDAKPLLRLKGFPSFPLVERQANEVDWWDMVCNVKKLINEKKEDGKVFWQNLAIYKRQEALRPYLSSEEDRKKGKKFARYQLGDLLLHLEKKHGEDWGKVYDEAWERIDKKVEGLSKHIKLEEERRSEDAQSKAALTDWLRAKASFVIEGLKEADKDEFCRCELKLQKWYGDLRGKPFAIEAENSILDISGFSKQYNCAFIWQKDGVKKLNLYLIINYFKGGKLRFKKIKPEAFEANRFYTVINKKSGEIVPMEVNFNFDDPNLIILPLAFGKRQGREFIWNDLLSLETGSLKLANGRVIEKTLYNRRTRQDEPALFVALTFERREVLDSSNIKPMNLIGVDRGENIPAVIALTDPEGCPLSRFKDSLGNPTHILRIGESYKEKQRTIQAKKEVEQRRAGGYSRKYASKAKNLADDMVRNTARDLLYYAVTQDAMLIFENLSRGFGRQGKRTFMAERQYTRMEDWLTAKLAYEGLPSKTYLSKTLAQYTSKTCSNCGFTITSADYDRVLEKLKKTATGWMTTINGKELKVEGQITYYNRYKRQNVVKDLSVELDRLSEESVNNDISSWTKGRSGEALSLLKKRFSHRPVQEKFVCLNCGFETHADEQAALNIARSWLFLRSQEYKKYQTNKTTGNTDKRAFVETWQSFYRKKLKEVWKPAV

SEQ ID NO: 46397 - protein, 978 aa, synthetic construct
  REGION 1..978: note = engineered CasX variant
QEIKRLNKIRRRLVKDSNTKKAGKTGPMKTLLVRVMTPDLRERLENLRKKPENIPQPISNTSRANLNKLLTDYTEMKKAILHVYWEEFQKDPVGLMSRVAQPASKKIDQNKLKPEMDEKGNLTTAGFACSQCGQPLFVYKLEQVSEKGKAYTNYFGRCNVAEHEKLILLAQLKPEKDSDEAVTYSLGKFGQRALDFYSIHVTKESTHPVKPLAQIAGNRYASVPVGKALSDACMGTIASFLSKYQDIIIEHQKVVKGNQKRLESLRELAGKENLEYPSVTLPPQPHTKEGVDAYNEVIARVRMWVNLNLWQKLKLSRDDAKPLLRLKGFPSFPLVERQANEVDWWDMVCNVKKLINEKKEDGKVFWQNLAIYKRQEALRPYLSSEEDRKKGKKFARYQLGDLLLHLEKKHGEDWGKVYDEAWERIDKKVEGLSKHIKLEEERRSEDAQSKAALTDWLRAKASFVIEGLKEADKDEFCRCELKLQKWYGDLRGKPFAIEAENSILDISGFSKQYNCAFIWQKDGVKKLNLYLIINYFKGGKLRFKKIKPEAFEANRFYTVINKKSGEIVPMEVNFNFDDPNLIILPLAFGKRQGREFIWNDLLSLETGSLKLANGRVIEKTLYNRRTRQDEPALFVALTFERREVLDSSNIKPMNLIGVDRGENIPAVIALTDPEGCPLSRFKDSLGNPTHILRIGESYKEKQRTIQAKKEVEQRRAGGYSRKYASKAKNLADDMVRNTARDLLYYAVTQDAMLIFENLSRGFGRQGKRTFMAERQYTRMEDWLTAKLAYEGLPSKTYLSKTLAQYTSKTCSNCGFTITSADYDRVLEKLKKTATGWMTTINGKELKVEGQITYYNRYKRQNVVKDLSVELDRLSEESVNNDISSWTKGRSGEALSLLKKRFSHRPVQEKFVCLNCGFETHADEQAALNIARSWLFLRSQEYKKYQTNKTTGNTDKRAFVETWQSFYRKKLKEVWKPAV

SEQ ID NO: 46398 - protein, 978 aa, synthetic construct
  REGION 1..978: note = engineered CasX variant
QEIKRLNKIRRRLVKDSNTKKAGKTGPMKTLLVRVMTPDLRERLENLRKKPENIPQPISNTSRANLNKLLTDYTEMKKAILHVYWEEFQKDPVGLMSRVAQPASKKIDQNKLKPEMDEKGNLTTAGFACSQCGQPLFVYKLEQVSEKGKAYTNYFGRCNVAEHEKLIKLAQLKPEKDSDEAVTYSLGKFGQRALDFYSIHVTKESTHPVKPLAQIAGNRYASGPVGKALSDACMGTIASFLSKYQDIIIEHQKVVKGNQKRLESLRELAGKENLEYPSVTLPPQPHTKEGVDAYNEVIARVRMWVNLNLWQKLKLSRDDAKPLLRLKGFPSFPLVERQANEVDWWDMVCNVKKLINEKKEDGKVFWQNLAIYKRQEALRPYLSSEEDRKKGKKFARYQLGDLLLHLEKKHGEDWGKVYDEAWERIDKKVEGLSKHIKLEEERRSEDAQSKAALTDWLRAKASFVIEGLKEADKDEFCRCELKLQKWYGDLRGKPFAIEAENSILDISGFSKQYNCAFIWQKDGVKKLNLYLIINYFKGGKLRFKKIKPEAFEANRFYTVINKKSGEIVPMEVNFNFDDPNLIILPLAFGKRQGREFIWNDLLSLETGSLKLANGRVIEKTLYNRRTRQDEPALFVALTFERREVLDSSNIKPMNLIGVDRGENIPAVIALTDPEGCPLSRFKDSLGNPTHILRIGESYKEKQRTIQAKKEVEQRRAGGYSRKYASKAKNLADDMVRNTARDLLYYAVTQDAMLIFENLSRGFGRQGKRTFMAERQYTRMEDWLTAKLAYEGLPSKTYLSKTLAQYTSKTCSNCGFTITSADYDRVLEKLKKTATGWMTTINGKELKVEGQITYYNRYKRQNVVKDLSVELDRLSEESVNNDISSWTKGRSGEALSLLKKRFSHRPVQEKFVCLNCGFETHADEQAALNIARSWLFLRSQEYKKYQTNKTTGNTDKRAFVETWQSFYRKKLKEVWKPAV

SEQ ID NO: 46399 - protein, 977 aa, synthetic construct
  REGION 1..977: note = engineered CasX variant
QEIKRLNKIRRRLVKDSNTKKAGKTGPMKTLLVRVMTPDLRERLENLRKKPENIPQPISNTSRANLNKLLTDYTEMKKAILHVYWEEFQKDPVGLMSRVAQPASKKIDQNKLKPEMDEKGNLTTAGFACSQCGQPLFVYKLEQVSEKGKAYTNYFGRCNVAEHEKLILLAQLKPEKDSDEAVTYSLGKFGQRALDFYSIHVTKESTHPVKPLAQIAGNRYASPVGKALSDACMGTIASFLSKYQDIIIEHQKVVKGNQKRLESLRELAGKENLEYPSVTLPPQPHTKEGVDAYNEVIARVRMWVNLNLWQKLKLSRDDAKPLLRLKGFPSFPLVERQANEVDWWDMVCNVKKLINEKKEDGKVFWQNLAIYKRQEALRPYLSSEEDRKKGKKFARYQLGDLLLHLEKKHGEDWGKVYDEAWERIDKKVEGLSKHIKLEEERRSEDAQSKAALTDWLRAKASFVIEGLKEADKDEFCRCELKLQKWYGDLRGKPFAIEAENSILDISGFSKQYNCAFIWQKDGVKKLNLYLIINYFKGGKLRFKKIKPEAFEANRFYTVINKKSGEIVPMEVNFNFDDPNLIILPLAFGKRQGREFIWNDLLSLETGSLKLANGRVIEKTLYNRRTRQDEPALFVALTFERREVLDSSNIKPMNLIGVDRGENIPAVIALTDPEGCPLSRFKDSLGNPTHILRIGESYKEKQRTIQAKKEVEQRRAGGYSRKYASKAKNLADDMVRNTARDLLYYAVTQDAMLIFENLSRGFGRQGKRTFMAERQYTRMEDWLTAKLAYEGLPSKTYLSKTLAQYTSKTCSNCGFTITSADYDRVLEKLKKTATGWMTTINGKELKVEGQITYYNRYKRQNVVKDLSVELDRLSEESVNNDISSWTKGRSGEALSLLKKRFSHRPVQEKFVCLNCGFETHADEQAALNIARSWLFLRSQEYKKYQTNKTTGNTDKRAFVETWQSFYRKKLKEVWKPAV

SEQ ID NO: 46400 - protein, 978 aa, synthetic construct
  REGION 1..978: note = engineered CasX variant
QEIKRLNKIRRRLVKDSNTKKAGKTGPMKTLLVRVMTPDLRERLENLRKKPENIPQPISNTSRANLNKLLTDYTEMKKAILHVYWEEFQKDPVGLMSRVAQPASKKIDQNKLKPEMDEKGNLTTAGFACSQCGQPLFVYKLEQVSEKGKAYTNYFGRCNVAEHEKLILLAQLKPEKDSDEAVTYSLGKFGQRALDFYSIHVTKESTHPVKPLAQIAGNRYASYPVGKALSDACMGTIASFLSKYQDIIIEHQKVVKGNQKRLESLRELAGKENLEYPSVTLPPQPHTKEGVDAYNEVIARVRMWVNLNLWQKLKLSRDDAKPLLRLKGFPSFPLVERQANEVDWWDMVCNVKKLINEKKEDGKVFWQNLAGYKRQEALRPYLSSEEDREKGKKFARYQLGDLLLHLEKKHGEDWGKVYDEAWERIDKKVEGLSKHIKLEEERRSEDAQSKAALTDWLRAKASFVIEGLKEADKDEFCRCELKLQKWYGDLRGKPFAIEAENSILDISGFSKQYNCAFIWQKDGVKKLNLYLIINYFKGGKLRFKKIKPEAFEANRFYTVINKKSGEIVPMEVNFNFDDPNLIILPLAFGKRQGREFIWNDLLSLETGSLKLANGRVIEKTLYNRRTRQDEPALFVALTFERREVLDSSNIKPMNLIGVDRGENIPAVIALTDPEGCPLSRFKDSLGNPTHILRIGESYKEKQRTIQAKKEVEQRRAGGYSRKYASKAKNLADDMVRNTARDLLYYAVTQDAMLIFENLSRGFGRQGKRTFMAERQYTRMEDWLTAKLAYEGLPSKTYLSKTLAQYTSKTCSNCGFTITSADYDRVLEKLKKTATGWMTTINGKELKVEGQITYYNRYKRQNVVKDLSVELDRLSEESVNNDISSWTKGRSGEALSLLKKRFSHRPVQEKFVCLNCGFETHADEQAALNIARSWLFLRSQEYKKYQTNKTTGNTDKRAFVETWQSFYRKKLKEVWKPAV

SEQ ID NO: 46401 - protein, 978 aa, synthetic construct
  REGION 1..978: note = engineered CasX variant
QEIKRLNKIRRRLVKDSNTKKAGKTGPMKTLLVRVMTPDLRERLENLRKKPENIPQPISNTSRANLNKLLTDYTEMKKAILHVYWEEFQKDPVGLMSRVAQPASKKIDQNKLKPEMDEKGNLTTAGFACSQCGQPLFVYKLEQVSEKGKAYTNYFGRCNVAEHEKLILLAQLKPEKDSDEAVTYSLGKFGQRALDFYSIHVTKESTHPVKPLAQIAGNRYASHPVGKALSDACMGTIASFLSKYQDIIIEHQKVVKGNQKRLESLRELAGKENLEYPSVTLPPQPHTKEGVDAYNEVIARVRMWVNLNLWQKLKLSRDDAKPLLRLKGFPSFPLVERQANEVDWWDMVCNVKKLINEKKEDGKVFWQNLAGYKRQEALRPYLSSEEDREKGKKFARYQLGDLLLHLEKKHGEDWGKVYDEAWERIDKKVEGLSKHIKLEEERRSEDAQSKAALTDWLRAKASFVIEGLKEADKDEFCRCELKLQKWYGDLRGKPFAIEAENSILDISGFSKQYNCAFIWQKDGVKKLNLYLIINYFKGGKLRFKKIKPEAFEANRFYTVINKKSGEIVPMEVNFNFDDPNLIILPLAFGKRQGREFIWNDLLSLETGSLKLANGRVIEKTLYNRRTRQDEPALFVALTFERREVLDSSNIKPMNLIGVDRGENIPAVIALTDPEGCPLSRFKDSLGNPTHILRIGESYKEKQRTIQAKKEVEQRRAGGYSRKYASKAKNLADDMVRNTARDLLYYAVTQDAMLIFENLSRGFGRQGKRTFMAERQYTRMEDWLTAKLAYEGLPSKTYLSKTLAQYTSKTCSNCGFTITSADYDRVLEKLKKTATGWMTTINGKELKVEGQITYYNRYKRQNVVKDLSVELDRLSEESVNNDISSWTKGRSGEALSLLKKRFSHRPVQEKFVCLNCGFETHADEQAALNIARSWLFLRSQEYKKYQTNKTTGNTDKRAFVETWQSFYRKKLKEVWKPAV

SEQ ID NO: 46402 - protein, 978 aa, synthetic construct
  REGION 1..978: note = engineered CasX variant
QEIKRLNKIRRRLVKDSNTKKAGKTGPMKTLLVRVMTPDLRERLENLRKKPENIPQPISNTSRANLNKLLTDYTEMKKAILHVYWEEFQKDPVGLMSRVAQPASKKIDQNKLKPEMDEKGNLTTAGFACSQCGQPLFVYKLEQVSEKGKAYTNYFGRCNVAEHEKLILLAQLKPEKDSDEAVTYSLGKFGQRALDFYSIHVTKESTHPVKPLAQIAGNRYASSPVGKALSDACMGTIASFLSKYQDIIIEHQKVVKGNQKRLESLRELAGKENLEYPSVTLPPQPHTKEGVDAYNEVIARVRMWVNLNLWQKLKLSRDDAKPLLRLKGFPSFPLVERQANEVDWWDMVCNVKKLINEKKEDGKVFWQNLAGYKRQEALRPYLSSEEDREKGKKFARYQLGDLLLHLEKKHGEDWGKVYDEAWERIDKKVEGLSKHIKLEEERRSEDAQSKAALTDWLRAKASFVIEGLKEADKDEFCRCELKLQKWYGDLRGKPFAIEAENSILDISGFSKQYNCAFIWQKDGVKKLNLYLIINYFKGGKLRFKKIKPEAFEANRFYTVINKKSGEIVPMEVNFNFDDPNLIILPLAFGKRQGREFIWNDLLSLETGSLKLANGRVIEKTLYNRRTRQDEPALFVALTFERREVLDSSNIKPMNLIGVDRGENIPAVIALTDPEGCPLSRFKDSLGNPTHILRIGESYKEKQRTIQAKKEVEQRRAGGYSRKYASKAKNLADDMVRNTARDLLYYAVTQDAMLIFENLSRGFGRQGKRTFMAERQYTRMEDWLTAKLAYEGLPSKTYLSKTLAQYTSKTCSNCGFTITSADYDRVLEKLKKTATGWMTTINGKELKVEGQITYYNRYKRQNVVKDLSVELDRLSEESVNNDISSWTKGRSGEALSLLKKRFSHRPVQEKFVCLNCGFETHADEQAALNIARSWLFLRSQEYKKYQTNKTTGNTDKRAFVETWQSFYRKKLKEVWKPAV

SEQ ID NO: 46403 - protein, 978 aa, synthetic construct
  REGION 1..978: note = engineered CasX variant
QEIKRLNKIRRRLVKDSNTKKAGKTGPMKTLLVRVMTPDLRERLENLRKKPENIPQPISNTSRANLNKLLTDYTEMKKAILHVYWEEFQKDPVGLMSRVAQPASKKIDQNKLKPEMDEKGNLTTAGFACSQCGQPLFVYKLEQVSEKGKAYTNYFGRCNVAEHEKLILLAQLKPEKDSDEAVTYSLGKFGQRALDFYSIHVTKESTHPVKPLAQIAGNRYASTPVGKALSDACMGTIASFLSKYQDIIIEHQKVVKGNQKRLESLRELAGKENLEYPSVTLPPQPHTKEGVDAYNEVIARVRMWVNLNLWQKLKLSRDDAKPLLRLKGFPSFPLVERQANEVDWWDMVCNVKKLINEKKEDGKVFWQNLAGYKRQEALRPYLSSEEDREKGKKFARYQLGDLLLHLEKKHGEDWGKVYDEAWERIDKKVEGLSKHIKLEEERRSEDAQSKAALTDWLRAKASFVIEGLKEADKDEFCRCELKLQKWYGDLRGKPFAIEAENSILDISGFSKQYNCAFIWQKDGVKKLNLYLIINYFKGGKLRFKKIKPEAFEANRFYTVINKKSGEIVPMEVNFNFDDPNLIILPLAFGKRQGREFIWNDLLSLETGSLKLANGRVIEKTLYNRRTRQDEPALFVALTFERREVLDSSNIKPMNLIGVDRGENIPAVIALTDPEGCPLSRFKDSLGNPTHILRIGESYKEKQRTIQAKKEVEQRRAGGYSRKYASKAKNLADDMVRNTARDLLYYAVTQDAMLIFENLSRGFGRQGKRTFMAERQYTRMEDWLTAKLAYEGLPSKTYLSKTLAQYTSKTCSNCGFTITSADYDRVLEKLKKTATGWMTTINGKELKVEGQITYYNRYKRQNVVKDLSVELDRLSEESVNNDISSWTKGRSGEALSLLKKRFSHRPVQEKFVCLNCGFETHADEQAALNIARSWLFLRSQEYKKYQTNKTTGNTDKRAFVETWQSFYRKKLKEVWKPAV

SEQ ID NO: 46404 - protein, 978 aa, synthetic construct
  REGION 1..978: note = engineered CasX variant
QEIKRLNKIRRRLVKDSNTKKAGKTGPMKTLLVRVMTPDLRERLENLRKKPENIPQPISNTSRANLNKLLTDYTEMKKAILHVYWEEFQKDPVGLMSRVAQPASKKIDQNKLKPEMDEKGNLTTAGFACSQCGQPLFVYKLEQVSEKGKAYTNYFGRCNVAEHEKLILLAQLKPEKDSDEAVTYSLGKFGQRALDFYSIHVTKESTHPVKPLAQIAGNRYASAPVGKALSDACMGTIASFLSKYQDIIIEHQKVVKGNQKRLESLRELAGKENLEYPSVTLPPQPHTKEGVDAYNEVIARVRMWVNLNLWQKLKLSRDDAKPLLRLKGFPSFPLVERQANEVDWWDMVCNVKKLINEKKEDGKVFWQNLAGYKRQEALRPYLSSEEDREKGKKFARYQLGDLLLHLEKKHGEDWGKVYDEAWERIDKKVEGLSKHIKLEEERRSEDAQSKAALTDWLRAKASFVIEGLKEADKDEFCRCELKLQKWYGDLRGKPFAIEAENSILDISGFSKQYNCAFIWQKDGVKKLNLYLIINYFKGGKLRFKKIKPEAFEANRFYTVINKKSGEIVPMEVNFNFDDPNLIILPLAFGKRQGREFIWNDLLSLETGSLKLANGRVIEKTLYNRRTRQDEPALFVALTFERREVLDSSNIKPMNLIGVDRGENIPAVIALTDPEGCPLSRFKDSLGNPTHILRIGESYKEKQRTIQAKKEVEQRRAGGYSRKYASKAKNLADDMVRNTARDLLYYAVTQDAMLIFENLSRGFGRQGKRTFMAERQYTRMEDWLTAKLAYEGLPSKTYLSKTLAQYTSKTCSNCGFTITSADYDRVLEKLKKTATGWMTTINGKELKVEGQITYYNRYKRQNVVKDLSVELDRLSEESVNNDISSWTKGRSGEALSLLKKRFSHRPVQEKFVCLNCGFETHADEQAALNIARSWLFLRSQEYKKYQTNKTTGNTDKRAFVETWQSFYRKKLKEVWKPAV

SEQ ID NO: 46405 - protein, 978 aa, synthetic construct
  REGION 1..978: note = engineered CasX variant
QEIKRLNKIRRRLVKDSNTKKAGKTGPMKTLLVRVMTPDLRERLENLRKKPENIPQPISNTSRANLNKLLTDYTEMKKAILHVYWEEFQKDPVGLMSRVAQPASKKIDQNKLKPEMDEKGNLTTAGFACSQCGQPLFVYKLEQVSEKGKAYTNYFGRCNVAEHEKLILLAQLKPEKDSDEAVTYSLGKFGQRALDFYSIHVTKESTHPVKPLAQIAGNRYASVPVGKALSDACMGTIASFLSKYQDIIIEHQKVVKGNQKRLESLRELAGKENLEYPSVTLPPQPHTKEGVDAYNEVIARVRMWVNLNLWQKLKLSRDDAKPLLRLKGFPSFPLVERQANEVDWWDMVCNVKKLINEKKEDGKVFWQNLAGYKRQEALRPYLSSEEDREKGKKFARYQLGDLLLHLEKKHGEDWGKVYDEAWERIDKKVEGLSKHIKLEEERRSEDAQSKAALTDWLRAKASFVIEGLKEADKDEFCRCELKLQKWYGDLRGKPFAIEAENSILDISGFSKQYNCAFIWQKDGVKKLNLYLIINYFKGGKLRFKKIKPEAFEANRFYTVINKKSGEIVPMEVNFNFDDPNLIILPLAFGKRQGREFIWNDLLSLETGSLKLANGRVIEKTLYNRRTRQDEPALFVALTFERREVLDSSNIKPMNLIGVDRGENIPAVIALTDPEGCPLSRFKDSLGNPTHILRIGESYKEKQRTIQAKKEVEQRRAGGYSRKYASKAKNLADDMVRNTARDLLYYAVTQDAMLIFENLSRGFGRQGKRTFMAERQYTRMEDWLTAKLAYEGLPSKTYLSKTLAQYTSKTCSNCGFTITSADYDRVLEKLKKTATGWMTTINGKELKVEGQITYYNRYKRQNVVKDLSVELDRLSEESVNNDISSWTKGRSGEALSLLKKRFSHRPVQEKFVCLNCGFETHADEQAALNIARSWLFLRSQEYKKYQTNKTTGNTDKRAFVETWQSFYRKKLKEVWKPAV

SEQ ID NO: 46406 - protein, 978 aa, synthetic construct
  REGION 1..978: note = engineered CasX variant
QEIKRLNKIRRRLVKDSNTKKAGKTGPMKTLLVRVMTPDLRERLENLRKKPENIPQPISNTSRANLNKLLTDYTEMKKAILHVYWEEFQKDPVGLMSRVAQPASKKIDQNKLKPEMDEKGNLTTAGFACSQCGQPLFVYKLEQVSEKGKAYTNYFGRCNVAEHEKLIKLAQLKPEKDSDEAVTYSLGKFGQRALDFYSIHVTKESTHPVKPLAQIAGNRYASGPVGKALSDACMGTIASFLSKYQDIIIEHQKVVKGNQKRLESLRELAGKENLEYPSVTLPPQPHTKEGVDAYNEVIARVRMWVNLNLWQKLKLSRDDAKPLLRLKGFPSFPLVERQANEVDWWDMVCNVKKLINEKKEDGKVFWQNLAGYKRQEALRPYLSSEEDREKGKKFARYQLGDLLLHLEKKHGEDWGKVYDEAWERIDKKVEGLSKHIKLEEERRSEDAQSKAALTDWLRAKASFVIEGLKEADKDEFCRCELKLQKWYGDLRGKPFAIEAENSILDISGFSKQYNCAFIWQKDGVKKLNLYLIINYFKGGKLRFKKIKPEAFEANRFYTVINKKSGEIVPMEVNFNFDDPNLIILPLAFGKRQGREFIWNDLLSLETGSLKLANGRVIEKTLYNRRTRQDEPALFVALTFERREVLDSSNIKPMNLIGVDRGENIPAVIALTDPEGCPLSRFKDSLGNPTHILRIGESYKEKQRTIQAKKEVEQRRAGGYSRKYASKAKNLADDMVRNTARDLLYYAVTQDAMLIFENLSRGFGRQGKRTFMAERQYTRMEDWLTAKLAYEGLPSKTYLSKTLAQYTSKTCSNCGFTITSADYDRVLEKLKKTATGWMTTINGKELKVEGQITYYNRYKRQNVVKDLSVELDRLSEESVNNDISSWTKGRSGEALSLLKKRFSHRPVQEKFVCLNCGFETHADEQAALNIARSWLFLRSQEYKKYQTNKTTGNTDKRAFVETWQSFYRKKLKEVWKPAV

SEQ ID NO: 46407 - protein, 977 aa, synthetic construct
  REGION 1..977: note = engineered CasX variant
QEIKRLNKIRRRLVKDSNTKKAGKTGPMKTLLVRVMTPDLRERLENLRKKPENIPQPISNTSRANLNKLLTDYTEMKKAILHVYWEEFQKDPVGLMSRVAQPASKKIDQNKLKPEMDEKGNLTTAGFACSQCGQPLFVYKLEQVSEKGKAYTNYFGRCNVAEHEKLILLAQLKPEKDSDEAVTYSLGKFGQRALDFYSIHVTKESTHPVKPLAQIAGNRYASPVGKALSDACMGTIASFLSKYQDIIIEHQKVVKGNQKRLESLRELAGKENLEYPSVTLPPQPHTKEGVDAYNEVIARVRMWVNLNLWQKLKLSRDDAKPLLRLKGFPSFPLVERQANEVDWWDMVCNVKKLINEKKEDGKVFWQNLAGYKRQEALRPYLSSEEDREKGKKFARYQLGDLLLHLEKKHGEDWGKVYDEAWERIDKKVEGLSKHIKLEEERRSEDAQSKAALTDWLRAKASFVIEGLKEADKDEFCRCELKLQKWYGDLRGKPFAIEAENSILDISGFSKQYNCAFIWQKDGVKKLNLYLIINYFKGGKLRFKKIKPEAFEANRFYTVINKKSGEIVPMEVNFNFDDPNLIILPLAFGKRQGREFIWNDLLSLETGSLKLANGRVIEKTLYNRRTRQDEPALFVALTFERREVLDSSNIKPMNLIGVDRGENIPAVIALTDPEGCPLSRFKDSLGNPTHILRIGESYKEKQRTIQAKKEVEQRRAGGYSRKYASKAKNLADDMVRNTARDLLYYAVTQDAMLIFENLSRGFGRQGKRTFMAERQYTRMEDWLTAKLAYEGLPSKTYLSKTLAQYTSKTCSNCGFTITSADYDRVLEKLKKTATGWMTTINGKELKVEGQITYYNRYKRQNVVKDLSVELDRLSEESVNNDISSWTKGRSGEALSLLKKRFSHRPVQEKFVCLNCGFETHADEQAALNIARSWLFLRSQEYKKYQTNKTTGNTDKRAFVETWQSFYRKKLKEVWKPAV

SEQ ID NO: 46408 - protein, 978 aa, synthetic construct
  REGION 1..978: note = engineered CasX variant
QEIKRLNKIRRRLVKDSNTKKAGKTGPMKTLLVRVMTPDLRERLENLRKKPENIPQPISNTSRANLNKLLTDYTEMKKAILHVYWEEFQKDPVGLMSRVAQPASKKIDQNKLKPEMDEKGNLTTAGFACSQCGQPLFVYKLEQVSEKGKAYTNYFGRCNVAEHEKLILLAQLKPEKDSDEAVTYSLGKFGQRALDFYSIHVTKESTHPVKPLAQIAGNRYASYPVGKALSDACMGTIASFLSKYQDIIIEHQKVVKGNQKRLESLRELAGKENLEYPSVTLPPQPHTKEGVDAYNEVIARVRMWVNLNLWQKLKLSRDDAKPLLRLKGFPSFPLVERQANEVDWWDMVCNVKKLINEKKEDGKVFWQNLAGYKRQEALRPYLSSEEDRKKGKKFARYQLGDLLLHLEKKHGEDWGKVYDEAWERIDKKVEGLSKHIKLEEERRSEDAQSKAALTDWLRAKASFVIEGLKEADKDEFCRCELKLQKWYGDLRGKPFAIEAENSILDISGFSKQYNCAFIWQKDGVKKLNLYLIINYFKGGKLRFKKIKPEAFEANRFYTVINKKSGEIVIMEVNFNFDDPNLIILPLAFGKRQGREFIWNDLLSLETGSLKLANGRVIEKTLYNRRTRQDEPALFVALTFERREVLDSSNIKPMNLIGVDRGENIPAVIALTDPEGCPLSRFKDSLGNPTHILRIGESYKEKQRTIQAKKEVEQRRAGGYSRKYASKAKNLADDMVRNTARDLLYYAVTQDAMLIFENLSRGFGRQGKRTFMAERQYTRMEDWLTAKLAYEGLPSKTYLSKTLAQYTSKTCSNCGFTITSADYDRVLEKLKKTATGWMTTINGKELKVEGQITYYNRYKRQNVVKDLSVELDRLSEESVNNDISSWTKGRSGEALSLLKKRFSHRPVQEKFVCLNCGFETHADEQAALNIARSWLFLRSQEYKKYQTNKTTGNTDKRAFVETWQSFYRKKLKEVWKPAV

SEQ ID NO: 46409 - protein, 978 aa, synthetic construct
  REGION 1..978: note = engineered CasX variant
QEIKRLNKIRRRLVKDSNTKKAGKTGPMKTLLVRVMTPDLRERLENLRKKPENIPQPISNTSRANLNKLLTDYTEMKKAILHVYWEEFQKDPVGLMSRVAQPASKKIDQNKLKPEMDEKGNLTTAGFACSQCGQPLFVYKLEQVSEKGKAYTNYFGRCNVAEHEKLILLAQLKPEKDSDEAVTYSLGKFGQRALDFYSIHVTKESTHPVKPLAQIAGNRYASHPVGKALSDACMGTIASFLSKYQDIIIEHQKVVKGNQKRLESLRELAGKENLEYPSVTLPPQPHTKEGVDAYNEVIARVRMWVNLNLWQKLKLSRDDAKPLLRLKGFPSFPLVERQANEVDWWDMVCNVKKLINEKKEDGKVFWQNLAGYKRQEALRPYLSSEEDRKKGKKFARYQLGDLLLHLEKKHGEDWGKVYDEAWERIDKKVEGLSKHIKLEEERRSEDAQSKAALTDWLRAKASFVIEGLKEADKDEFCRCELKLQKWYGDLRGKPFAIEAENSILDISGFSKQYNCAFIWQKDGVKKLNLYLIINYFKGGKLRFKKIKPEAFEANRFYTVINKKSGEIVIMEVNFNFDDPNLIILPLAFGKRQGREFIWNDLLSLETGSLKLANGRVIEKTLYNRRTRQDEPALFVALTFERREVLDSSNIKPMNLIGVDRGENIPAVIALTDPEGCPLSRFKDSLGNPTHILRIGESYKEKQRTIQAKKEVEQRRAGGYSRKYASKAKNLADDMVRNTARDLLYYAVTQDAMLIFENLSRGFGRQGKRTFMAERQYTRMEDWLTAKLAYEGLPSKTYLSKTLAQYTSKTCSNCGFTITSADYDRVLEKLKKTATGWMTTINGKELKVEGQITYYNRYKRQNVVKDLSVELDRLSEESVNNDISSWTKGRSGEALSLLKKRFSHRPVQEKFVCLNCGFETHADEQAALNIARSWLFLRSQEYKKYQTNKTTGNTDKRAFVETWQSFYRKKLKEVWKPAV

SEQ ID NO: 46410 - protein, 978 aa, synthetic construct
  REGION 1..978: note = engineered CasX variant
QEIKRLNKIRRRLVKDSNTKKAGKTGPMKTLLVRVMTPDLRERLENLRKKPENIPQPISNTSRANLNKLLTDYTEMKKAILHVYWEEFQKDPVGLMSRVAQPASKKIDQNKLKPEMDEKGNLTTAGFACSQCGQPLFVYKLEQVSEKGKAYTNYFGRCNVAEHEKLILLAQLKPEKDSDEAVTYSLGKFGQRALDFYSIHVTKESTHPVKPLAQIAGNRYASSPVGKALSDACMGTIASFLSKYQDIIIEHQKVVKGNQKRLESLRELAGKENLEYPSVTLPPQPHTKEGVDAYNEVIARVRMWVNLNLWQKLKLSRDDAKPLLRLKGFPSFPLVERQANEVDWWDMVCNVKKLINEKKEDGKVFWQNLAGYKRQEALRPYLSSEEDRKKGKKFARYQLGDLLLHLEKKHGEDWGKVYDEAWERIDKKVEGLSKHIKLEEERRSEDAQSKAALTDWLRAKASFVIEGLKEADKDEFCRCELKLQKWYGDLRGKPFAIEAENSILDISGFSKQYNCAFIWQKDGVKKLNLYLIINYFKGGKLRFKKIKPEAFEANRFYTVINKKSGEIVIMEVNFNFDDPNLIILPLAFGKRQGREFIWNDLLSLETGSLKLANGRVIEKTLYNRRTRQDEPALFVALTFERREVLDSSNIKPMNLIGVDRGENIPAVIALTDPEGCPLSRFKDSLGNPTHILRIGESYKEKQRTIQAKKEVEQRRAGGYSRKYASKAKNLADDMVRNTARDLLYYAVTQDAMLIFENLSRGFGRQGKRTFMAERQYTRMEDWLTAKLAYEGLPSKTYLSKTLAQYTSKTCSNCGFTITSADYDRVLEKLKKTATGWMTTINGKELKVEGQITYYNRYKRQNVVKDLSVELDRLSEESVNNDISSWTKGRSGEALSLLKKRFSHRPVQEKFVCLNCGFETHADEQAALNIARSWLFLRSQEYKKYQTNKTTGNTDKRAFVETWQSFYRKKLKEVWKPAV

SEQ ID NO: 46411 - protein, 978 aa, synthetic construct
  REGION 1..978: note = engineered CasX variant
QEIKRLNKIRRRLVKDSNTKKAGKTGPMKTLLVRVMTPDLRERLENLRKKPENIPQPISNTSRANLNKLLTDYTEMKKAILHVYWEEFQKDPVGLMSRVAQPASKKIDQNKLKPEMDEKGNLTTAGFACSQCGQPLFVYKLEQVSEKGKAYTNYFGRCNVAEHEKLILLAQLKPEKDSDEAVTYSLGKFGQRALDFYSIHVTKESTHPVKPLAQIAGNRYASTPVGKALSDACMGTIASFLSKYQDIIIEHQKVVKGNQKRLESLRELAGKENLEYPSVTLPPQPHTKEGVDAYNEVIARVRMWVNLNLWQKLKLSRDDAKPLLRLKGFPSFPLVERQANEVDWWDMVCNVKKLINEKKEDGKVFWQNLAGYKRQEALRPYLSSEEDRKKGKKFARYQLGDLLLHLEKKHGEDWGKVYDEAWERIDKKVEGLSKHIKLEEERRSEDAQSKAALTDWLRAKASFVIEGLKEADKDEFCRCELKLQKWYGDLRGKPFAIEAENSILDISGFSKQYNCAFIWQKDGVKKLNLYLIINYFKGGKLRFKKIKPEAFEANRFYTVINKKSGEIVIMEVNFNFDDPNLIILPLAFGKRQGREFIWNDLLSLETGSLKLANGRVIEKTLYNRRTRQDEPALFVALTFERREVLDSSNIKPMNLIGVDRGENIPAVIALTDPEGCPLSRFKDSLGNPTHILRIGESYKEKQRTIQAKKEVEQRRAGGYSRKYASKAKNLADDMVRNTARDLLYYAVTQDAMLIFENLSRGFGRQGKRTFMAERQYTRMEDWLTAKLAYEGLPSKTYLSKTLAQYTSKTCSNCGFTITSADYDRVLEKLKKTATGWMTTINGKELKVEGQITYYNRYKRQNVVKDLSVELDRLSEESVNNDISSWTKGRSGEALSLLKKRFSHRPVQEKFVCLNCGFETHADEQAALNIARSWLFLRSQEYKKYQTNKTTGNTDKRAFVETWQSFYRKKLKEVWKPAV

SEQ ID NO: 46412 - protein, 978 aa, synthetic construct
  REGION 1..978: note = engineered CasX variant
QEIKRLNKIRRRLVKDSNTKKAGKTGPMKTLLVRVMTPDLRERLENLRKKPENIPQPISNTSRANLNKLLTDYTEMKKAILHVYWEEFQKDPVGLMSRVAQPASKKIDQNKLKPEMDEKGNLTTAGFACSQCGQPLFVYKLEQVSEKGKAYTNYFGRCNVAEHEKLILLAQLKPEKDSDEAVTYSLGKFGQRALDFYSIHVTKESTHPVKPLAQIAGNRYASAPVGKALSDACMGTIASFLSKYQDIIIEHQKVVKGNQKRLESLRELAGKENLEYPSVTLPPQPHTKEGVDAYNEVIARVRMWVNLNLWQKLKLSRDDAKPLLRLKGFPSFPLVERQANEVDWWDMVCNVKKLINEKKEDGKVFWQNLAGYKRQEALRPYLSSEEDRKKGKKFARYQLGDLLLHLEKKHGEDWGKVYDEAWERIDKKVEGLSKHIKLEEERRSEDAQSKAALTDWLRAKASFVIEGLKEADKDEFCRCELKLQKWYGDLRGKPFAIEAENSILDISGFSKQYNCAFIWQKDGVKKLNLYLIINYFKGGKLRFKKIKPEAFEANRFYTVINKKSGEIVIMEVNFNFDDPNLIILPLAFGKRQGREFIWNDLLSLETGSLKLANGRVIEKTLYNRRTRQDEPALFVALTFERREVLDSSNIKPMNLIGVDRGENIPAVIALTDPEGCPLSRFKDSLGNPTHILRIGESYKEKQRTIQAKKEVEQRRAGGYSRKYASKAKNLADDMVRNTARDLLYYAVTQDAMLIFENLSRGFGRQGKRTFMAERQYTRMEDWLTAKLAYEGLPSKTYLSKTLAQYTSKTCSNCGFTITSADYDRVLEKLKKTATGWMTTINGKELKVEGQITYYNRYKRQNVVKDLSVELDRLSEESVNNDISSWTKGRSGEALSLLKKRFSHRPVQEKFVCLNCGFETHADEQAALNIARSWLFLRSQEYKKYQTNKTTGNTDKRAFVETWQSFYRKKLKEVWKPAV

SEQ ID NO: 46413 - protein, 978 aa, synthetic construct
  REGION 1..978: note = engineered CasX variant
QEIKRLNKIRRRLVKDSNTKKAGKTGPMKTLLVRVMTPDLRERLENLRKKPENIPQPISNTSRANLNKLLTDYTEMKKAILHVYWEEFQKDPVGLMSRVAQPASKKIDQNKLKPEMDEKGNLTTAGFACSQCGQPLFVYKLEQVSEKGKAYTNYFGRCNVAEHEKLILLAQLKPEKDSDEAVTYSLGKFGQRALDFYSIHVTKESTHPVKPLAQIAGNRYASVPVGKALSDACMGTIASFLSKYQDIIIEHQKVVKGNQKRLESLRELAGKENLEYPSVTLPPQPHTKEGVDAYNEVIARVRMWVNLNLWQKLKLSRDDAKPLLRLKGFPSFPLVERQANEVDWWDMVCNVKKLINEKKEDGKVFWQNLAGYKRQEALRPYLSSEEDRKKGKKFARYQLGDLLLHLEKKHGEDWGKVYDEAWERIDKKVEGLSKHIKLEEERRSEDAQSKAALTDWLRAKASFVIEGLKEADKDEFCRCELKLQKWYGDLRGKPFAIEAENSILDISGFSKQYNCAFIWQKDGVKKLNLYLIINYFKGGKLRFKKIKPEAFEANRFYTVINKKSGEIVIMEVNFNFDDPNLIILPLAFGKRQGREFIWNDLLSLETGSLKLANGRVIEKTLYNRRTRQDEPALFVALTFERREVLDSSNIKPMNLIGVDRGENIPAVIALTDPEGCPLSRFKDSLGNPTHILRIGESYKEKQRTIQAKKEVEQRRAGGYSRKYASKAKNLADDMVRNTARDLLYYAVTQDAMLIFENLSRGFGRQGKRTFMAERQYTRMEDWLTAKLAYEGLPSKTYLSKTLAQYTSKTCSNCGFTITSADYDRVLEKLKKTATGWMTTINGKELKVEGQITYYNRYKRQNVVKDLSVELDRLSEESVNNDISSWTKGRSGEALSLLKKRFSHRPVQEKFVCLNCGFETHADEQAALNIARSWLFLRSQEYKKYQTNKTTGNTDKRAFVETWQSFYRKKLKEVWKPAV

SEQ ID NO: 46414 - protein, 978 aa, synthetic construct
  REGION 1..978: note = engineered CasX variant
QEIKRLNKIRRRLVKDSNTKKAGKTGPMKTLLVRVMTPDLRERLENLRKKPENIPQPISNTSRANLNKLLTDYTEMKKAILHVYWEEFQKDPVGLMSRVAQPASKKIDQNKLKPEMDEKGNLTTAGFACSQCGQPLFVYKLEQVSEKGKAYTNYFGRCNVAEHEKLIKLAQLKPEKDSDEAVTYSLGKFGQRALDFYSIHVTKESTHPVKPLAQIAGNRYASGPVGKALSDACMGTIASFLSKYQDIIIEHQKVVKGNQKRLESLRELAGKENLEYPSVTLPPQPHTKEGVDAYNEVIARVRMWVNLNLWQKLKLSRDDAKPLLRLKGFPSFPLVERQANEVDWWDMVCNVKKLINEKKEDGKVFWQNLAGYKRQEALRPYLSSEEDRKKGKKFARYQLGDLLLHLEKKHGEDWGKVYDEAWERIDKKVEGLSKHIKLEEERRSEDAQSKAALTDWLRAKASFVIEGLKEADKDEFCRCELKLQKWYGDLRGKPFAIEAENSILDISGFSKQYNCAFIWQKDGVKKLNLYLIINYFKGGKLRFKKIKPEAFEANRFYTVINKKSGEIVIMEVNFNFDDPNLIILPLAFGKRQGREFIWNDLLSLETGSLKLANGRVIEKTLYNRRTRQDEPALFVALTFERREVLDSSNIKPMNLIGVDRGENIPAVIALTDPEGCPLSRFKDSLGNPTHILRIGESYKEKQRTIQAKKEVEQRRAGGYSRKYASKAKNLADDMVRNTARDLLYYAVTQDAMLIFENLSRGFGRQGKRTFMAERQYTRMEDWLTAKLAYEGLPSKTYLSKTLAQYTSKTCSNCGFTITSADYDRVLEKLKKTATGWMTTINGKELKVEGQITYYNRYKRQNVVKDLSVELDRLSEESVNNDISSWTKGRSGEALSLLKKRFSHRPVQEKFVCLNCGFETHADEQAALNIARSWLFLRSQEYKKYQTNKTTGNTDKRAFVETWQSFYRKKLKEVWKPAV

SEQ ID NO: 46415 - protein, 977 aa, synthetic construct
  REGION 1..977: note = engineered CasX variant
QEIKRLNKIRRRLVKDSNTKKAGKTGPMKTLLVRVMTPDLRERLENLRKKPENIPQPISNTSRANLNKLLTDYTEMKKAILHVYWEEFQKDPVGLMSRVAQPASKKIDQNKLKPEMDEKGNLTTAGFACSQCGQPLFVYKLEQVSEKGKAYTNYFGRCNVAEHEKLILLAQLKPEKDSDEAVTYSLGKFGQRALDFYSIHVTKESTHPVKPLAQIAGNRYASPVGKALSDACMGTIASFLSKYQDIIIEHQKVVKGNQKRLESLRELAGKENLEYPSVTLPPQPHTKEGVDAYNEVIARVRMWVNLNLWQKLKLSRDDAKPLLRLKGFPSFPLVERQANEVDWWDMVCNVKKLINEKKEDGKVFWQNLAGYKRQEALRPYLSSEEDRKKGKKFARYQLGDLLLHLEKKHGEDWGKVYDEAWERIDKKVEGLSKHIKLEEERRSEDAQSKAALTDWLRAKASFVIEGLKEADKDEFCRCELKLQKWYGDLRGKPFAIEAENSILDISGFSKQYNCAFIWQKDGVKKLNLYLIINYFKGGKLRFKKIKPEAFEANRFYTVINKKSGEIVIMEVNFNFDDPNLIILPLAFGKRQGREFIWNDLLSLETGSLKLANGRVIEKTLYNRRTRQDEPALFVALTFERREVLDSSNIKPMNLIGVDRGENIPAVIALTDPEGCPLSRFKDSLGNPTHILRIGESYKEKQRTIQAKKEVEQRRAGGYSRKYASKAKNLADDMVRNTARDLLYYAVTQDAMLIFENLSRGFGRQGKRTFMAERQYTRMEDWLTAKLAYEGLPSKTYLSKTLAQYTSKTCSNCGFTITSADYDRVLEKLKKTATGWMTTINGKELKVEGQITYYNRYKRQNVVKDLSVELDRLSEESVNNDISSWTKGRSGEALSLLKKRFSHRPVQEKFVCLNCGFETHADEQAALNIARSWLFLRSQEYKKYQTNKTTGNTDKRAFVETWQSFYRKKLKEVWKPAV

SEQ ID NO: 46416 - protein, 978 aa, synthetic construct
  REGION 1..978: note = engineered CasX variant
QEIKRINKIRRRLVKDSNTKKAGKTGPMKTLLVRVMTPDLRERLENLRKKPENIPQPISNTSRANLNKLLTDYTEMKKAILHVYWEEFQKDPVGLMSRVAQPASKKIDQNKLKPEMDEKGNLTTAGFACSQCGQPLFVYKLEQVSEKGKAYTNYVGRCNVAEHEKLILLAQLKPEKDSDEAVTYSLGKFGQRALDFYSIHVTKESTHPVKPLAQIAGNRYASYPVGKALSGACMGTIASFLSKYQDIIIEHQKVVKGNQKRLESLRELAGKENLEYPSVTLPPQPHTKEGVDAYNEVIARVRMWVNLNLWQKLKLSRDDAKPLLRLKGFPSFPLVERQANEVDWWDMVCNVKKLINEKKEDGKVFWQNLAGYKRQEALRPYLSSEEDRKKGKKFARYQLGDLLLHLEKKHGEDWGKVYDEAWERIDKKVEGLSKHIKLEEERRSEDAQSKAALTDWLRAKASFVIEGLKEADKDEFCRCELKLQKWYGDLRGKPFAIEAENSILDISGFSKQYNCAFIWQKDGVKKLNLYLIINYFKGGKLRFKKIKPEAFEANRFYTVINKKSGEIVPMEVNFNFDDPNLIILPLAFGKRQGREFIWNDLLSLETGSLKLANGRVIEKTLYNRRTRQDEPALFVALTFERREVLDSSNIKPMNLIGVDRGENIPAVIALTDPEGCPLSRFKDSLGNPTHILRIGESYKEKQRTIQAKKEVEQRRAGGYSRKYASKAKNLADDMVRNTARDLLYYAVTQDAMLIFENLSRGFGRQGKRTFMAERQYTRMEDWLTAKLAYEGLPSKTYLSKTLAQYTSKTCSNCGFTITSADYDRVLEKLKKTATGWMTTINGKELKVEGQITYYNRYKRQNVVKDLSVELDRLSEESVNNDISSWTKGRSGEALSLLKKRFSHRPVQEKFVCLNCGFETHADEQAALNIARSWLFLRSQEYKKYQTNKTTGNTDKRAFVETWQSFYRKKLKEVWKPAV

SEQ ID NO: 46417 - protein, 978 aa, synthetic construct
  REGION 1..978: note = engineered CasX variant
QEIKRINKIRRRLVKDSNTKKAGKTGPMKTLLVRVMTPDLRERLENLRKKPENIPQPISNTSRANLNKLLTDYTEMKKAILHVYWEEFQKDPVGLMSRVAQPASKKIDQNKLKPEMDEKGNLTTAGFACSQCGQPLFVYKLEQVSEKGKAYTNYVGRCNVAEHEKLILLAQLKPEKDSDEAVTYSLGKFGQRALDFYSIHVTKESTHPVKPLAQIAGNRYASHPVGKALSGACMGTIASFLSKYQDIIIEHQKVVKGNQKRLESLRELAGKENLEYPSVTLPPQPHTKEGVDAYNEVIARVRMWVNLNLWQKLKLSRDDAKPLLRLKGFPSFPLVERQANEVDWWDMVCNVKKLINEKKEDGKVFWQNLAGYKRQEALRPYLSSEEDRKKGKKFARYQLGDLLLHLEKKHGEDWGKVYDEAWERIDKKVEGLSKHIKLEEERRSEDAQSKAALTDWLRAKASFVIEGLKEADKDEFCRCELKLQKWYGDLRGKPFAIEAENSILDISGFSKQYNCAFIWQKDGVKKLNLYLIINYFKGGKLRFKKIKPEAFEANRFYTVINKKSGEIVPMEVNFNFDDPNLIILPLAFGKRQGREFIWNDLLSLETGSLKLANGRVIEKTLYNRRTRQDEPALFVALTFERREVLDSSNIKPMNLIGVDRGENIPAVIALTDPEGCPLSRFKDSLGNPTHILRIGESYKEKQRTIQAKKEVEQRRAGGYSRKYASKAKNLADDMVRNTARDLLYYAVTQDAMLIFENLSRGFGRQGKRTFMAERQYTRMEDWLTAKLAYEGLPSKTYLSKTLAQYTSKTCSNCGFTITSADYDRVLEKLKKTATGWMTTINGKELKVEGQITYYNRYKRQNVVKDLSVELDRLSEESVNNDISSWTKGRSGEALSLLKKRFSHRPVQEKFVCLNCGFETHADEQAALNIARSWLFLRSQEYKKYQTNKTTGNTDKRAFVETWQSFYRKKLKEVWKPAV

SEQ ID NO: 46418 - protein, 978 aa, synthetic construct
  REGION 1..978: note = engineered CasX variant
QEIKRINKIRRRLVKDSNTKKAGKTGPMKTLLVRVMTPDLRERLENLRKKPENIPQPISNTSRANLNKLLTDYTEMKKAILHVYWEEFQKDPVGLMSRVAQPASKKIDQNKLKPEMDEKGNLTTAGFACSQCGQPLFVYKLEQVSEKGKAYTNYVGRCNVAEHEKLILLAQLKPEKDSDEAVTYSLGKFGQRALDFYSIHVTKESTHPVKPLAQIAGNRYASSPVGKALSGACMGTIASFLSKYQDIIIEHQKVVKGNQKRLESLRELAGKENLEYPSVTLPPQPHTKEGVDAYNEVIARVRMWVNLNLWQKLKLSRDDAKPLLRLKGFPSFPLVERQANEVDWWDMVCNVKKLINEKKEDGKVFWQNLAGYKRQEALRPYLSSEEDRKKGKKFARYQLGDLLLHLEKKHGEDWGKVYDEAWERIDKKVEGLSKHIKLEEERRSEDAQSKAALTDWLRAKASFVIEGLKEADKDEFCRCELKLQKWYGDLRGKPFAIEAENSILDISGFSKQYNCAFIWQKDGVKKLNLYLIINYFKGGKLRFKKIKPEAFEANRFYTVINKKSGEIVPMEVNFNFDDPNLIILPLAFGKRQGREFIWNDLLSLETGSLKLANGRVIEKTLYNRRTRQDEPALFVALTFERREVLDSSNIKPMNLIGVDRGENIPAVIALTDPEGCPLSRFKDSLGNPTHILRIGESYKEKQRTIQAKKEVEQRRAGGYSRKYASKAKNLADDMVRNTARDLLYYAVTQDAMLIFENLSRGFGRQGKRTFMAERQYTRMEDWLTAKLAYEGLPSKTYLSKTLAQYTSKTCSNCGFTITSADYDRVLEKLKKTATGWMTTINGKELKVEGQITYYNRYKRQNVVKDLSVELDRLSEESVNNDISSWTKGRSGEALSLLKKRFSHRPVQEKFVCLNCGFETHADEQAALNIARSWLFLRSQEYKKYQTNKTTGNTDKRAFVETWQSFYRKKLKEVWKPAV

SEQ ID NO: 46419 - protein, 978 aa, synthetic construct
  REGION 1..978: note = engineered CasX variant
QEIKRINKIRRRLVKDSNTKKAGKTGPMKTLLVRVMTPDLRERLENLRKKPENIPQPISNTSRANLNKLLTDYTEMKKAILHVYWEEFQKDPVGLMSRVAQPASKKIDQNKLKPEMDEKGNLTTAGFACSQCGQPLFVYKLEQVSEKGKAYTNYVGRCNVAEHEKLILLAQLKPEKDSDEAVTYSLGKFGQRALDFYSIHVTKESTHPVKPLAQIAGNRYASTPVGKALSGACMGTIASFLSKYQDIIIEHQKVVKGNQKRLESLRELAGKENLEYPSVTLPPQPHTKEGVDAYNEVIARVRMWVNLNLWQKLKLSRDDAKPLLRLKGFPSFPLVERQANEVDWWDMVCNVKKLINEKKEDGKVFWQNLAGYKRQEALRPYLSSEEDRKKGKKFARYQLGDLLLHLEKKHGEDWGKVYDEAWERIDKKVEGLSKHIKLEEERRSEDAQSKAALTDWLRAKASFVIEGLKEADKDEFCRCELKLQKWYGDLRGKPFAIEAENSILDISGFSKQYNCAFIWQKDGVKKLNLYLIINYFKGGKLRFKKIKPEAFEANRFYTVINKKSGEIVPMEVNFNFDDPNLIILPLAFGKRQGREFIWNDLLSLETGSLKLANGRVIEKTLYNRRTRQDEPALFVALTFERREVLDSSNIKPMNLIGVDRGENIPAVIALTDPEGCPLSRFKDSLGNPTHILRIGESYKEKQRTIQAKKEVEQRRAGGYSRKYASKAKNLADDMVRNTARDLLYYAVTQDAMLIFENLSRGFGRQGKRTFMAERQYTRMEDWLTAKLAYEGLPSKTYLSKTLAQYTSKTCSNCGFTITSADYDRVLEKLKKTATGWMTTINGKELKVEGQITYYNRYKRQNVVKDLSVELDRLSEESVNNDISSWTKGRSGEALSLLKKRFSHRPVQEKFVCLNCGFETHADEQAALNIARSWLFLRSQEYKKYQTNKTTGNTDKRAFVETWQSFYRKKLKEVWKPAV

SEQ ID NO: 46420 - protein, 978 aa, synthetic construct
  REGION 1..978: note = engineered CasX variant
QEIKRINKIRRRLVKDSNTKKAGKTGPMKTLLVRVMTPDLRERLENLRKKPENIPQPISNTSRANLNKLLTDYTEMKKAILHVYWEEFQKDPVGLMSRVAQPASKKIDQNKLKPEMDEKGNLTTAGFACSQCGQPLFVYKLEQVSEKGKAYTNYVGRCNVAEHEKLILLAQLKPEKDSDEAVTYSLGKFGQRALDFYSIHVTKESTHPVKPLAQIAGNRYASAPVGKALSGACMGTIASFLSKYQDIIIEHQKVVKGNQKRLESLRELAGKENLEYPSVTLPPQPHTKEGVDAYNEVIARVRMWVNLNLWQKLKLSRDDAKPLLRLKGFPSFPLVERQANEVDWWDMVCNVKKLINEKKEDGKVFWQNLAGYKRQEALRPYLSSEEDRKKGKKFARYQLGDLLLHLEKKHGEDWGKVYDEAWERIDKKVEGLSKHIKLEEERRSEDAQSKAALTDWLRAKASFVIEGLKEADKDEFCRCELKLQKWYGDLRGKPFAIEAENSILDISGFSKQYNCAFIWQKDGVKKLNLYLIINYFKGGKLRFKKIKPEAFEANRFYTVINKKSGEIVPMEVNFNFDDPNLIILPLAFGKRQGREFIWNDLLSLETGSLKLANGRVIEKTLYNRRTRQDEPALFVALTFERREVLDSSNIKPMNLIGVDRGENIPAVIALTDPEGCPLSRFKDSLGNPTHILRIGESYKEKQRTIQAKKEVEQRRAGGYSRKYASKAKNLADDMVRNTARDLLYYAVTQDAMLIFENLSRGFGRQGKRTFMAERQYTRMEDWLTAKLAYEGLPSKTYLSKTLAQYTSKTCSNCGFTITSADYDRVLEKLKKTATGWMTTINGKELKVEGQITYYNRYKRQNVVKDLSVELDRLSEESVNNDISSWTKGRSGEALSLLKKRFSHRPVQEKFVCLNCGFETHADEQAALNIARSWLFLRSQEYKKYQTNKTTGNTDKRAFVETWQSFYRKKLKEVWKPAV

SEQ ID NO: 46421 - protein, 978 aa, synthetic construct
  REGION 1..978: note = engineered CasX variant
QEIKRINKIRRRLVKDSNTKKAGKTGPMKTLLVRVMTPDLRERLENLRKKPENIPQPISNTSRANLNKLLTDYTEMKKAILHVYWEEFQKDPVGLMSRVAQPASKKIDQNKLKPEMDEKGNLTTAGFACSQCGQPLFVYKLEQVSEKGKAYTNYVGRCNVAEHEKLILLAQLKPEKDSDEAVTYSLGKFGQRALDFYSIHVTKESTHPVKPLAQIAGNRYASVPVGKALSGACMGTIASFLSKYQDIIIEHQKVVKGNQKRLESLRELAGKENLEYPSVTLPPQPHTKEGVDAYNEVIARVRMWVNLNLWQKLKLSRDDAKPLLRLKGFPSFPLVERQANEVDWWDMVCNVKKLINEKKEDGKVFWQNLAGYKRQEALRPYLSSEEDRKKGKKFARYQLGDLLLHLEKKHGEDWGKVYDEAWERIDKKVEGLSKHIKLEEERRSEDAQSKAALTDWLRAKASFVIEGLKEADKDEFCRCELKLQKWYGDLRGKPFAIEAENSILDISGFSKQYNCAFIWQKDGVKKLNLYLIINYFKGGKLRFKKIKPEAFEANRFYTVINKKSGEIVPMEVNFNFDDPNLIILPLAFGKRQGREFIWNDLLSLETGSLKLANGRVIEKTLYNRRTRQDEPALFVALTFERREVLDSSNIKPMNLIGVDRGENIPAVIALTDPEGCPLSRFKDSLGNPTHILRIGESYKEKQRTIQAKKEVEQRRAGGYSRKYASKAKNLADDMVRNTARDLLYYAVTQDAMLIFENLSRGFGRQGKRTFMAERQYTRMEDWLTAKLAYEGLPSKTYLSKTLAQYTSKTCSNCGFTITSADYDRVLEKLKKTATGWMTTINGKELKVEGQITYYNRYKRQNVVKDLSVELDRLSEESVNNDISSWTKGRSGEALSLLKKRFSHRPVQEKFVCLNCGFETHADEQAALNIARSWLFLRSQEYKKYQTNKTTGNTDKRAFVETWQSFYRKKLKEVWKPAV

SEQ ID NO: 46422 - protein, 978 aa, synthetic construct
  REGION 1..978: note = engineered CasX variant
QEIKRINKIRRRLVKDSNTKKAGKTGPMKTLLVRVMTPDLRERLENLRKKPENIPQPISNTSRANLNKLLTDYTEMKKAILHVYWEEFQKDPVGLMSRVAQPASKKIDQNKLKPEMDEKGNLTTAGFACSQCGQPLFVYKLEQVSEKGKAYTNYVGRCNVAEHEKLIKLAQLKPEKDSDEAVTYSLGKFGQRALDFYSIHVTKESTHPVKPLAQIAGNRYASGPVGKALSGACMGTIASFLSKYQDIIIEHQKVVKGNQKRLESLRELAGKENLEYPSVTLPPQPHTKEGVDAYNEVIARVRMWVNLNLWQKLKLSRDDAKPLLRLKGFPSFPLVERQANEVDWWDMVCNVKKLINEKKEDGKVFWQNLAGYKRQEALRPYLSSEEDRKKGKKFARYQLGDLLLHLEKKHGEDWGKVYDEAWERIDKKVEGLSKHIKLEEERRSEDAQSKAALTDWLRAKASFVIEGLKEADKDEFCRCELKLQKWYGDLRGKPFAIEAENSILDISGFSKQYNCAFIWQKDGVKKLNLYLIINYFKGGKLRFKKIKPEAFEANRFYTVINKKSGEIVPMEVNFNFDDPNLIILPLAFGKRQGREFIWNDLLSLETGSLKLANGRVIEKTLYNRRTRQDEPALFVALTFERREVLDSSNIKPMNLIGVDRGENIPAVIALTDPEGCPLSRFKDSLGNPTHILRIGESYKEKQRTIQAKKEVEQRRAGGYSRKYASKAKNLADDMVRNTARDLLYYAVTQDAMLIFENLSRGFGRQGKRTFMAERQYTRMEDWLTAKLAYEGLPSKTYLSKTLAQYTSKTCSNCGFTITSADYDRVLEKLKKTATGWMTTINGKELKVEGQITYYNRYKRQNVVKDLSVELDRLSEESVNNDISSWTKGRSGEALSLLKKRFSHRPVQEKFVCLNCGFETHADEQAALNIARSWLFLRSQEYKKYQTNKTTGNTDKRAFVETWQSFYRKKLKEVWKPAV

SEQ ID NO: 46423 - protein, 977 aa, synthetic construct
  REGION 1..977: note = engineered CasX variant
QEIKRINKIRRRLVKDSNTKKAGKTGPMKTLLVRVMTPDLRERLENLRKKPENIPQPISNTSRANLNKLLTDYTEMKKAILHVYWEEFQKDPVGLMSRVAQPASKKIDQNKLKPEMDEKGNLTTAGFACSQCGQPLFVYKLEQVSEKGKAYTNYVGRCNVAEHEKLILLAQLKPEKDSDEAVTYSLGKFGQRALDFYSIHVTKESTHPVKPLAQIAGNRYASPVGKALSGACMGTIASFLSKYQDIIIEHQKVVKGNQKRLESLRELAGKENLEYPSVTLPPQPHTKEGVDAYNEVIARVRMWVNLNLWQKLKLSRDDAKPLLRLKGFPSFPLVERQANEVDWWDMVCNVKKLINEKKEDGKVFWQNLAGYKRQEALRPYLSSEEDRKKGKKFARYQLGDLLLHLEKKHGEDWGKVYDEAWERIDKKVEGLSKHIKLEEERRSEDAQSKAALTDWLRAKASFVIEGLKEADKDEFCRCELKLQKWYGDLRGKPFAIEAENSILDISGFSKQYNCAFIWQKDGVKKLNLYLIINYFKGGKLRFKKIKPEAFEANRFYTVINKKSGEIVPMEVNFNFDDPNLIILPLAFGKRQGREFIWNDLLSLETGSLKLANGRVIEKTLYNRRTRQDEPALFVALTFERREVLDSSNIKPMNLIGVDRGENIPAVIALTDPEGCPLSRFKDSLGNPTHILRIGESYKEKQRTIQAKKEVEQRRAGGYSRKYASKAKNLADDMVRNTARDLLYYAVTQDAMLIFENLSRGFGRQGKRTFMAERQYTRMEDWLTAKLAYEGLPSKTYLSKTLAQYTSKTCSNCGFTITSADYDRVLEKLKKTATGWMTTINGKELKVEGQITYYNRYKRQNVVKDLSVELDRLSEESVNNDISSWTKGRSGEALSLLKKRFSHRPVQEKFVCLNCGFETHADEQAALNIARSWLFLRSQEYKKYQTNKTTGNTDKRAFVETWQSFYRKKLKEVWKPAV

SEQ ID NO: 46424 - protein, 978 aa, synthetic construct
  REGION 1..978: note = engineered CasX variant
QEIKRINKIRRRLVKDSNTKKAGKTGPMKTLLVRVMTPDLRERLENLRKKPENIPQPISNTSRANLNKLLTDYTEMKKAILHVYWEEFQKDPVGLMSRVAQPASKKIDQNKLKPEMDEKGNLTTAGFACSQCGQPLFVYKLEQVSEKGKAYTNYVGRCNVAEHEKLILLAQLKPEKDSDEAVTYSLGKFGQRALDFYSIHVTKESTHPVKPLAQIAGNRYASYPVGKALSDACMGTIASFLSKYQDIIIEHQKVVKGNQKRLESLRELAGKENLEYPSVTLPPQPHTKEGVDAYNEVIARVRMWVNLNLWQKLKLSRDDAKPLLRLKNFPSFPLVERQANEVDWWDMVCNVKKLINEKKEDGKVFWQNLAGYKRQEALRPYLSSEEDRKKGKKFARYQLGDLLLHLEKKHGEDWGKVYDEAWERIDKKVEGLSKHIKLEEERRSEDAQSKAALTDWLRAKASFVIEGLKEADKDEFCRCELKLQKWYGDLRGKPFAIEAENSILDISGFSKQYNCAFIWQKDGVKKLNLYLIINYFKGGKLRFKKIKPEAFEANRFYTVINKKSGEIVPMEVNFNFDDPNLIILPLAFGKRQGREFIWNDLLSLETGSLKLANGRVIEKTLYNRRTRQDEPALFVALTFERREVLDSSNIKPMNLIGVDRGENIPAVIALTDPEGCPLSRFKDSLGNPTHILRIGESYKEKQRTIQAKKEVEQRRAGGYSRKYASKAKNLADDMVRNTARDLLYYAVTQDAMLIFENLSRGFGRQGKRTFMAERQYTRMEDWLTAKLAYEGLPSKTYLSKTLAQYTSKTCSNCGFTITSADYDRVLEKLKKTATGWMTTINGKELKVEGQITYYNRYKRQNVVKDLSVELDRLSEESVNNDISSWTKGRSGEALSLLKKRFSHRPVQEKFVCLNCGFETHADEQAALNIARSWLFLRSQEYKKYQTNKTTGNTDKRAFVETWQSFYRKKLKEVWKPAV

SEQ ID NO: 46425 - protein, 978 aa, synthetic construct
  REGION 1..978: note = engineered CasX variant
QEIKRINKIRRRLVKDSNTKKAGKTGPMKTLLVRVMTPDLRERLENLRKKPENIPQPISNTSRANLNKLLTDYTEMKKAILHVYWEEFQKDPVGLMSRVAQPASKKIDQNKLKPEMDEKGNLTTAGFACSQCGQPLFVYKLEQVSEKGKAYTNYVGRCNVAEHEKLILLAQLKPEKDSDEAVTYSLGKFGQRALDFYSIHVTKESTHPVKPLAQIAGNRYASHPVGKALSDACMGTIASFLSKYQDIIIEHQKVVKGNQKRLESLRELAGKENLEYPSVTLPPQPHTKEGVDAYNEVIARVRMWVNLNLWQKLKLSRDDAKPLLRLKNFPSFPLVERQANEVDWWDMVCNVKKLINEKKEDGKVFWQNLAGYKRQEALRPYLSSEEDRKKGKKFARYQLGDLLLHLEKKHGEDWGKVYDEAWERIDKKVEGLSKHIKLEEERRSEDAQSKAALTDWLRAKASFVIEGLKEADKDEFCRCELKLQKWYGDLRGKPFAIEAENSILDISGFSKQYNCAFIWQKDGVKKLNLYLIINYFKGGKLRFKKIKPEAFEANRFYTVINKKSGEIVPMEVNFNFDDPNLIILPLAFGKRQGREFIWNDLLSLETGSLKLANGRVIEKTLYNRRTRQDEPALFVALTFERREVLDSSNIKPMNLIGVDRGENIPAVIALTDPEGCPLSRFKDSLGNPTHILRIGESYKEKQRTIQAKKEVEQRRAGGYSRKYASKAKNLADDMVRNTARDLLYYAVTQDAMLIFENLSRGFGRQGKRTFMAERQYTRMEDWLTAKLAYEGLPSKTYLSKTLAQYTSKTCSNCGFTITSADYDRVLEKLKKTATGWMTTINGKELKVEGQITYYNRYKRQNVVKDLSVELDRLSEESVNNDISSWTKGRSGEALSLLKKRFSHRPVQEKFVCLNCGFETHADEQAALNIARSWLFLRSQEYKKYQTNKTTGNTDKRAFVETWQSFYRKKLKEVWKPAV

SEQ ID NO: 46426 - protein, 978 aa, synthetic construct
  REGION 1..978: note = engineered CasX variant
QEIKRINKIRRRLVKDSNTKKAGKTGPMKTLLVRVMTPDLRERLENLRKKPENIPQPISNTSRANLNKLLTDYTEMKKAILHVYWEEFQKDPVGLMSRVAQPASKKIDQNKLKPEMDEKGNLTTAGFACSQCGQPLFVYKLEQVSEKGKAYTNYVGRCNVAEHEKLILLAQLKPEKDSDEAVTYSLGKFGQRALDFYSIHVTKESTHPVKPLAQIAGNRYASSPVGKALSDACMGTIASFLSKYQDIIIEHQKVVKGNQKRLESLRELAGKENLEYPSVTLPPQPHTKEGVDAYNEVIARVRMWVNLNLWQKLKLSRDDAKPLLRLKNFPSFPLVERQANEVDWWDMVCNVKKLINEKKEDGKVFWQNLAGYKRQEALRPYLSSEEDRKKGKKFARYQLGDLLLHLEKKHGEDWGKVYDEAWERIDKKVEGLSKHIKLEEERRSEDAQSKAALTDWLRAKASFVIEGLKEADKDEFCRCELKLQKWYGDLRGKPFAIEAENSILDISGFSKQYNCAFIWQKDGVKKLNLYLIINYFKGGKLRFKKIKPEAFEANRFYTVINKKSGEIVPMEVNFNFDDPNLIILPLAFGKRQGREFIWNDLLSLETGSLKLANGRVIEKTLYNRRTRQDEPALFVALTFERREVLDSSNIKPMNLIGVDRGENIPAVIALTDPEGCPLSRFKDSLGNPTHILRIGESYKEKQRTIQAKKEVEQRRAGGYSRKYASKAKNLADDMVRNTARDLLYYAVTQDAMLIFENLSRGFGRQGKRTFMAERQYTRMEDWLTAKLAYEGLPSKTYLSKTLAQYTSKTCSNCGFTITSADYDRVLEKLKKTATGWMTTINGKELKVEGQITYYNRYKRQNVVKDLSVELDRLSEESVNNDISSWTKGRSGEALSLLKKRFSHRPVQEKFVCLNCGFETHADEQAALNIARSWLFLRSQEYKKYQTNKTTGNTDKRAFVETWQSFYRKKLKEVWKPAV

SEQ ID NO: 46427 - protein, 978 aa, synthetic construct
  REGION 1..978: note = engineered CasX variant
QEIKRINKIRRRLVKDSNTKKAGKTGPMKTLLVRVMTPDLRERLENLRKKPENIPQPISNTSRANLNKLLTDYTEMKKAILHVYWEEFQKDPVGLMSRVAQPASKKIDQNKLKPEMDEKGNLTTAGFACSQCGQPLFVYKLEQVSEKGKAYTNYVGRCNVAEHEKLILLAQLKPEKDSDEAVTYSLGKFGQRALDFYSIHVTKESTHPVKPLAQIAGNRYASTPVGKALSDACMGTIASFLSKYQDIIIEHQKVVKGNQKRLESLRELAGKENLEYPSVTLPPQPHTKEGVDAYNEVIARVRMWVNLNLWQKLKLSRDDAKPLLRLKNFPSFPLVERQANEVDWWDMVCNVKKLINEKKEDGKVFWQNLAGYKRQEALRPYLSSEEDRKKGKKFARYQLGDLLLHLEKKHGEDWGKVYDEAWERIDKKVEGLSKHIKLEEERRSEDAQSKAALTDWLRAKASFVIEGLKEADKDEFCRCELKLQKWYGDLRGKPFAIEAENSILDISGFSKQYNCAFIWQKDGVKKLNLYLIINYFKGGKLRFKKIKPEAFEANRFYTVINKKSGEIVPMEVNFNFDDPNLIILPLAFGKRQGREFIWNDLLSLETGSLKLANGRVIEKTLYNRRTRQDEPALFVALTFERREVLDSSNIKPMNLIGVDRGENIPAVIALTDPEGCPLSRFKDSLGNPTHILRIGESYKEKQRTIQAKKEVEQRRAGGYSRKYASKAKNLADDMVRNTARDLLYYAVTQDAMLIFENLSRGFGRQGKRTFMAERQYTRMEDWLTAKLAYEGLPSKTYLSKTLAQYTSKTCSNCGFTITSADYDRVLEKLKKTATGWMTTINGKELKVEGQITYYNRYKRQNVVKDLSVELDRLSEESVNNDISSWTKGRSGEALSLLKKRFSHRPVQEKFVCLNCGFETHADEQAALNIARSWLFLRSQEYKKYQTNKTTGNTDKRAFVETWQSFYRKKLKEVWKPAV

SEQ ID NO: 46428 - protein, 978 aa, synthetic construct
  REGION 1..978: note = engineered CasX variant
QEIKRINKIRRRLVKDSNTKKAGKTGPMKTLLVRVMTPDLRERLENLRKKPENIPQPISNTSRANLNKLLTDYTEMKKAILHVYWEEFQKDPVGLMSRVAQPASKKIDQNKLKPEMDEKGNLTTAGFACSQCGQPLFVYKLEQVSEKGKAYTNYVGRCNVAEHEKLILLAQLKPEKDSDEAVTYSLGKFGQRALDFYSIHVTKESTHPVKPLAQIAGNRYASAPVGKALSDACMGTIASFLSKYQDIIIEHQKVVKGNQKRLESLRELAGKENLEYPSVTLPPQPHTKEGVDAYNEVIARVRMWVNLNLWQKLKLSRDDAKPLLRLKNFPSFPLVERQANEVDWWDMVCNVKKLINEKKEDGKVFWQNLAGYKRQEALRPYLSSEEDRKKGKKFARYQLGDLLLHLEKKHGEDWGKVYDEAWERIDKKVEGLSKHIKLEEERRSEDAQSKAALTDWLRAKASFVIEGLKEADKDEFCRCELKLQKWYGDLRGKPFAIEAENSILDISGFSKQYNCAFIWQKDGVKKLNLYLIINYFKGGKLRFKKIKPEAFEANRFYTVINKKSGEIVPMEVNFNFDDPNLIILPLAFGKRQGREFIWNDLLSLETGSLKLANGRVIEKTLYNRRTRQDEPALFVALTFERREVLDSSNIKPMNLIGVDRGENIPAVIALTDPEGCPLSRFKDSLGNPTHILRIGESYKEKQRTIQAKKEVEQRRAGGYSRKYASKAKNLADDMVRNTARDLLYYAVTQDAMLIFENLSRGFGRQGKRTFMAERQYTRMEDWLTAKLAYEGLPSKTYLSKTLAQYTSKTCSNCGFTITSADYDRVLEKLKKTATGWMTTINGKELKVEGQITYYNRYKRQNVVKDLSVELDRLSEESVNNDISSWTKGRSGEALSLLKKRFSHRPVQEKFVCLNCGFETHADEQAALNIARSWLFLRSQEYKKYQTNKTTGNTDKRAFVETWQSFYRKKLKEVWKPAV

SEQ ID NO: 46429 - protein, 978 aa, synthetic construct
  REGION 1..978: note = engineered CasX variant
QEIKRINKIRRRLVKDSNTKKAGKTGPMKTLLVRVMTPDLRERLENLRKKPENIPQPISNTSRANLNKLLTDYTEMKKAILHVYWEEFQKDPVGLMSRVAQPASKKIDQNKLKPEMDEKGNLTTAGFACSQCGQPLFVYKLEQVSEKGKAYTNYVGRCNVAEHEKLILLAQLKPEKDSDEAVTYSLGKFGQRALDFYSIHVTKESTHPVKPLAQIAGNRYASVPVGKALSDACMGTIASFLSKYQDIIIEHQKVVKGNQKRLESLRELAGKENLEYPSVTLPPQPHTKEGVDAYNEVIARVRMWVNLNLWQKLKLSRDDAKPLLRLKNFPSFPLVERQANEVDWWDMVCNVKKLINEKKEDGKVFWQNLAGYKRQEALRPYLSSEEDRKKGKKFARYQLGDLLLHLEKKHGEDWGKVYDEAWERIDKKVEGLSKHIKLEEERRSEDAQSKAALTDWLRAKASFVIEGLKEADKDEFCRCELKLQKWYGDLRGKPFAIEAENSILDISGFSKQYNCAFIWQKDGVKKLNLYLIINYFKGGKLRFKKIKPEAFEANRFYTVINKKSGEIVPMEVNFNFDDPNLIILPLAFGKRQGREFIWNDLLSLETGSLKLANGRVIEKTLYNRRTRQDEPALFVALTFERREVLDSSNIKPMNLIGVDRGENIPAVIALTDPEGCPLSRFKDSLGNPTHILRIGESYKEKQRTIQAKKEVEQRRAGGYSRKYASKAKNLADDMVRNTARDLLYYAVTQDAMLIFENLSRGFGRQGKRTFMAERQYTRMEDWLTAKLAYEGLPSKTYLSKTLAQYTSKTCSNCGFTITSADYDRVLEKLKKTATGWMTTINGKELKVEGQITYYNRYKRQNVVKDLSVELDRLSEESVNNDISSWTKGRSGEALSLLKKRFSHRPVQEKFVCLNCGFETHADEQAALNIARSWLFLRSQEYKKYQTNKTTGNTDKRAFVETWQSFYRKKLKEVWKPAV

SEQ ID NO: 46430 - protein, 978 aa, synthetic construct
  REGION 1..978: note = engineered CasX variant
QEIKRINKIRRRLVKDSNTKKAGKTGPMKTLLVRVMTPDLRERLENLRKKPENIPQPISNTSRANLNKLLTDYTEMKKAILHVYWEEFQKDPVGLMSRVAQPASKKIDQNKLKPEMDEKGNLTTAGFACSQCGQPLFVYKLEQVSEKGKAYTNYVGRCNVAEHEKLIKLAQLKPEKDSDEAVTYSLGKFGQRALDFYSIHVTKESTHPVKPLAQIAGNRYASGPVGKALSDACMGTIASFLSKYQDIIIEHQKVVKGNQKRLESLRELAGKENLEYPSVTLPPQPHTKEGVDAYNEVIARVRMWVNLNLWQKLKLSRDDAKPLLRLKNFPSFPLVERQANEVDWWDMVCNVKKLINEKKEDGKVFWQNLAGYKRQEALRPYLSSEEDRKKGKKFARYQLGDLLLHLEKKHGEDWGKVYDEAWERIDKKVEGLSKHIKLEEERRSEDAQSKAALTDWLRAKASFVIEGLKEADKDEFCRCELKLQKWYGDLRGKPFAIEAENSILDISGFSKQYNCAFIWQKDGVKKLNLYLIINYFKGGKLRFKKIKPEAFEANRFYTVINKKSGEIVPMEVNFNFDDPNLIILPLAFGKRQGREFIWNDLLSLETGSLKLANGRVIEKTLYNRRTRQDEPALFVALTFERREVLDSSNIKPMNLIGVDRGENIPAVIALTDPEGCPLSRFKDSLGNPTHILRIGESYKEKQRTIQAKKEVEQRRAGGYSRKYASKAKNLADDMVRNTARDLLYYAVTQDAMLIFENLSRGFGRQGKRTFMAERQYTRMEDWLTAKLAYEGLPSKTYLSKTLAQYTSKTCSNCGFTITSADYDRVLEKLKKTATGWMTTINGKELKVEGQITYYNRYKRQNVVKDLSVELDRLSEESVNNDISSWTKGRSGEALSLLKKRFSHRPVQEKFVCLNCGFETHADEQAALNIARSWLFLRSQEYKKYQTNKTTGNTDKRAFVETWQSFYRKKLKEVWKPAV

SEQ ID NO: 46431 - protein, 977 aa, synthetic construct
  REGION 1..977: note = engineered CasX variant
QEIKRINKIRRRLVKDSNTKKAGKTGPMKTLLVRVMTPDLRERLENLRKKPENIPQPISNTSRANLNKLLTDYTEMKKAILHVYWEEFQKDPVGLMSRVAQPASKKIDQNKLKPEMDEKGNLTTAGFACSQCGQPLFVYKLEQVSEKGKAYTNYVGRCNVAEHEKLILLAQLKPEKDSDEAVTYSLGKFGQRALDFYSIHVTKESTHPVKPLAQIAGNRYASPVGKALSDACMGTIASFLSKYQDIIIEHQKVVKGNQKRLESLRELAGKENLEYPSVTLPPQPHTKEGVDAYNEVIARVRMWVNLNLWQKLKLSRDDAKPLLRLKNFPSFPLVERQANEVDWWDMVCNVKKLINEKKEDGKVFWQNLAGYKRQEALRPYLSSEEDRKKGKKFARYQLGDLLLHLEKKHGEDWGKVYDEAWERIDKKVEGLSKHIKLEEERRSEDAQSKAALTDWLRAKASFVIEGLKEADKDEFCRCELKLQKWYGDLRGKPFAIEAENSILDISGFSKQYNCAFIWQKDGVKKLNLYLIINYFKGGKLRFKKIKPEAFEANRFYTVINKKSGEIVPMEVNFNFDDPNLIILPLAFGKRQGREFIWNDLLSLETGSLKLANGRVIEKTLYNRRTRQDEPALFVALTFERREVLDSSNIKPMNLIGVDRGENIPAVIALTDPEGCPLSRFKDSLGNPTHILRIGESYKEKQRTIQAKKEVEQRRAGGYSRKYASKAKNLADDMVRNTARDLLYYAVTQDAMLIFENLSRGFGRQGKRTFMAERQYTRMEDWLTAKLAYEGLPSKTYLSKTLAQYTSKTCSNCGFTITSADYDRVLEKLKKTATGWMTTINGKELKVEGQITYYNRYKRQNVVKDLSVELDRLSEESVNNDISSWTKGRSGEALSLLKKRFSHRPVQEKFVCLNCGFETHADEQAALNIARSWLFLRSQEYKKYQTNKTTGNTDKRAFVETWQSFYRKKLKEVWKPAV

SEQ ID NO: 46432 - protein, 978 aa, synthetic construct
  REGION 1..978: note = engineered CasX variant
QEIKRINKIRRRLVKDSNTKKAGKTGPMKTLLVRVMTPDLRERLENLRKKPENIPQPISNTSRANLNKLLTDYTEMKKAILHVYWEEFQKDPVGLMSRVAQPASKKIDQNKLKPEMDEKGNLTTAGFACSQCGQPLFVYKLEQVSEKGKAYTNYVGRCNVAEHEKLILLAQLKPEKDSDEAVTYSLGKFGQRALDFYSIHVTKESTHPVKPLAQIAGNRYASYPVGKALSDACMGTIASFLSKYQDIIIEHQKVVKGNQKRLESLRELAGKENLEYPSVTLPPQPHTKEGVDAYNEVIARVRMWVNLNLWQKLKLSRDDAKPLLRLKGFPSFPLVERQANEVDWWDMVCNVKKLINEKKEDGKVFWQNLAGYKRQEALRPYLSSEEDRKKGKKFARYQLGDLLNHLEKKHGEDWGKVYDEAWERIDKKVEGLSKHIKLEEERRSEDAQSKAALTDWLRAKASFVIEGLKEADKDEFCRCELKLQKWYGDLRGKPFAIEAENSILDISGFSKQYNCAFIWQKDGVKKLNLYLIINYFKGGKLRFKKIKPEAFEANRFYTVINKKSGEIVPMEVNFNFDDPNLIILPLAFGKRQGREFIWNDLLSLETGSLKLANGRVIEKTLYNRRTRQDEPALFVALTFERREVLDSSNIKPMNLIGVDRGENIPAVIALTDPEGCPLSRFKDSLGNPTHILRIGESYKEKQRTIQAKKEVEQRRAGGYSRKYASKAKNLADDMVRNTARDLLYYAVTQDAMLIFENLSRGFGRQGKRTFMAERQYTRMEDWLTAKLAYEGLPSKTYLSKTLAQYTSKTCSNCGFTITSADYDRVLEKLKKTATGWMTTINGKELKVEGQITYYNRYKRQNVVKDLSVELDRLSEESVNNDISSWTKGRSGEALSLLKKRFSHRPVQEKFVCLNCGFETHADEQAALNIARSWLFLRSQEYKKYQTNKTTGNTDKRAFVETWQSFYRKKLKEVWKPAV

SEQ ID NO: 46433 - protein, 978 aa, synthetic construct
  REGION 1..978: note = engineered CasX variant
QEIKRINKIRRRLVKDSNTKKAGKTGPMKTLLVRVMTPDLRERLENLRKKPENIPQPISNTSRANLNKLLTDYTEMKKAILHVYWEEFQKDPVGLMSRVAQPASKKIDQNKLKPEMDEKGNLTTAGFACSQCGQPLFVYKLEQVSEKGKAYTNYVGRCNVAEHEKLILLAQLKPEKDSDEAVTYSLGKFGQRALDFYSIHVTKESTHPVKPLAQIAGNRYASHPVGKALSDACMGTIASFLSKYQDIIIEHQKVVKGNQKRLESLRELAGKENLEYPSVTLPPQPHTKEGVDAYNEVIARVRMWVNLNLWQKLKLSRDDAKPLLRLKGFPSFPLVERQANEVDWWDMVCNVKKLINEKKEDGKVFWQNLAGYKRQEALRPYLSSEEDRKKGKKFARYQLGDLLNHLEKKHGEDWGKVYDEAWERIDKKVEGLSKHIKLEEERRSEDAQSKAALTDWLRAKASFVIEGLKEADKDEFCRCELKLQKWYGDLRGKPFAIEAENSILDISGFSKQYNCAFIWQKDGVKKLNLYLIINYFKGGKLRFKKIKPEAFEANRFYTVINKKSGEIVPMEVNFNFDDPNLIILPLAFGKRQGREFIWNDLLSLETGSLKLANGRVIEKTLYNRRTRQDEPALFVALTFERREVLDSSNIKPMNLIGVDRGENIPAVIALTDPEGCPLSRFKDSLGNPTHILRIGESYKEKQRTIQAKKEVEQRRAGGYSRKYASKAKNLADDMVRNTARDLLYYAVTQDAMLIFENLSRGFGRQGKRTFMAERQYTRMEDWLTAKLAYEGLPSKTYLSKTLAQYTSKTCSNCGFTITSADYDRVLEKLKKTATGWMTTINGKELKVEGQITYYNRYKRQNVVKDLSVELDRLSEESVNNDISSWTKGRSGEALSLLKKRFSHRPVQEKFVCLNCGFETHADEQAALNIARSWLFLRSQEYKKYQTNKTTGNTDKRAFVETWQSFYRKKLKEVWKPAV

SEQ ID NO: 46434 - protein, 978 aa, synthetic construct
  REGION 1..978: note = engineered CasX variant
QEIKRINKIRRRLVKDSNTKKAGKTGPMKTLLVRVMTPDLRERLENLRKKPENIPQPISNTSRANLNKLLTDYTEMKKAILHVYWEEFQKDPVGLMSRVAQPASKKIDQNKLKPEMDEKGNLTTAGFACSQCGQPLFVYKLEQVSEKGKAYTNYVGRCNVAEHEKLILLAQLKPEKDSDEAVTYSLGKFGQRALDFYSIHVTKESTHPVKPLAQIAGNRYASSPVGKALSDACMGTIASFLSKYQDIIIEHQKVVKGNQKRLESLRELAGKENLEYPSVTLPPQPHTKEGVDAYNEVIARVRMWVNLNLWQKLKLSRDDAKPLLRLKGFPSFPLVERQANEVDWWDMVCNVKKLINEKKEDGKVFWQNLAGYKRQEALRPYLSSEEDRKKGKKFARYQLGDLLNHLEKKHGEDWGKVYDEAWERIDKKVEGLSKHIKLEEERRSEDAQSKAALTDWLRAKASFVIEGLKEADKDEFCRCELKLQKWYGDLRGKPFAIEAENSILDISGFSKQYNCAFIWQKDGVKKLNLYLIINYFKGGKLRFKKIKPEAFEANRFYTVINKKSGEIVPMEVNFNFDDPNLIILPLAFGKRQGREFIWNDLLSLETGSLKLANGRVIEKTLYNRRTRQDEPALFVALTFERREVLDSSNIKPMNLIGVDRGENIPAVIALTDPEGCPLSRFKDSLGNPTHILRIGESYKEKQRTIQAKKEVEQRRAGGYSRKYASKAKNLADDMVRNTARDLLYYAVTQDAMLIFENLSRGFGRQGKRTFMAERQYTRMEDWLTAKLAYEGLPSKTYLSKTLAQYTSKTCSNCGFTITSADYDRVLEKLKKTATGWMTTINGKELKVEGQITYYNRYKRQNVVKDLSVELDRLSEESVNNDISSWTKGRSGEALSLLKKRFSHRPVQEKFVCLNCGFETHADEQAALNIARSWLFLRSQEYKKYQTNKTTGNTDKRAFVETWQSFYRKKLKEVWKPAV

SEQ ID NO: 46435 - protein, 978 aa, synthetic construct
  REGION 1..978: note = engineered CasX variant
QEIKRINKIRRRLVKDSNTKKAGKTGPMKTLLVRVMTPDLRERLENLRKKPENIPQPISNTSRANLNKLLTDYTEMKKAILHVYWEEFQKDPVGLMSRVAQPASKKIDQNKLKPEMDEKGNLTTAGFACSQCGQPLFVYKLEQVSEKGKAYTNYVGRCNVAEHEKLILLAQLKPEKDSDEAVTYSLGKFGQRALDFYSIHVTKESTHPVKPLAQIAGNRYASTPVGKALSDACMGTIASFLSKYQDIIIEHQKVVKGNQKRLESLRELAGKENLEYPSVTLPPQPHTKEGVDAYNEVIARVRMWVNLNLWQKLKLSRDDAKPLLRLKGFPSFPLVERQANEVDWWDMVCNVKKLINEKKEDGKVFWQNLAGYKRQEALRPYLSSEEDRKKGKKFARYQLGDLLNHLEKKHGEDWGKVYDEAWERIDKKVEGLSKHIKLEEERRSEDAQSKAALTDWLRAKASFVIEGLKEADKDEFCRCELKLQKWYGDLRGKPFAIEAENSILDISGFSKQYNCAFIWQKDGVKKLNLYLIINYFKGGKLRFKKIKPEAFEANRFYTVINKKSGEIVPMEVNFNFDDPNLIILPLAFGKRQGREFIWNDLLSLETGSLKLANGRVIEKTLYNRRTRQDEPALFVALTFERREVLDSSNIKPMNLIGVDRGENIPAVIALTDPEGCPLSRFKDSLGNPTHILRIGESYKEKQRTIQAKKEVEQRRAGGYSRKYASKAKNLADDMVRNTARDLLYYAVTQDAMLIFENLSRGFGRQGKRTFMAERQYTRMEDWLTAKLAYEGLPSKTYLSKTLAQYTSKTCSNCGFTITSADYDRVLEKLKKTATGWMTTINGKELKVEGQITYYNRYKRQNVVKDLSVELDRLSEESVNNDISSWTKGRSGEALSLLKKRFSHRPVQEKFVCLNCGFETHADEQAALNIARSWLFLRSQEYKKYQTNKTTGNTDKRAFVETWQSFYRKKLKEVWKPAV

SEQ ID NO: 46436 - protein, 978 aa, synthetic construct
  REGION 1..978: note = engineered CasX variant
QEIKRINKIRRRLVKDSNTKKAGKTGPMKTLLVRVMTPDLRERLENLRKKPENIPQPISNTSRANLNKLLTDYTEMKKAILHVYWEEFQKDPVGLMSRVAQPASKKIDQNKLKPEMDEKGNLTTAGFACSQCGQPLFVYKLEQVSEKGKAYTNYVGRCNVAEHEKLILLAQLKPEKDSDEAVTYSLGKFGQRALDFYSIHVTKESTHPVKPLAQIAGNRYASAPVGKALSDACMGTIASFLSKYQDIIIEHQKVVKGNQKRLESLRELAGKENLEYPSVTLPPQPHTKEGVDAYNEVIARVRMWVNLNLWQKLKLSRDDAKPLLRLKGFPSFPLVERQANEVDWWDMVCNVKKLINEKKEDGKVFWQNLAGYKRQEALRPYLSSEEDRKKGKKFARYQLGDLLNHLEKKHGEDWGKVYDEAWERIDKKVEGLSKHIKLEEERRSEDAQSKAALTDWLRAKASFVIEGLKEADKDEFCRCELKLQKWYGDLRGKPFAIEAENSILDISGFSKQYNCAFIWQKDGVKKLNLYLIINYFKGGKLRFKKIKPEAFEANRFYTVINKKSGEIVPMEVNFNFDDPNLIILPLAFGKRQGREFIWNDLLSLETGSLKLANGRVIEKTLYNRRTRQDEPALFVALTFERREVLDSSNIKPMNLIGVDRGENIPAVIALTDPEGCPLSRFKDSLGNPTHILRIGESYKEKQRTIQAKKEVEQRRAGGYSRKYASKAKNLADDMVRNTARDLLYYAVTQDAMLIFENLSRGFGRQGKRTFMAERQYTRMEDWLTAKLAYEGLPSKTYLSKTLAQYTSKTCSNCGFTITSADYDRVLEKLKKTATGWMTTINGKELKVEGQITYYNRYKRQNVVKDLSVELDRLSEESVNNDISSWTKGRSGEALSLLKKRFSHRPVQEKFVCLNCGFETHADEQAALNIARSWLFLRSQEYKKYQTNKTTGNTDKRAFVETWQSFYRKKLKEVWKPAV

SEQ ID NO: 46437 - protein, 978 aa, synthetic construct
  REGION 1..978: note = engineered CasX variant
QEIKRINKIRRRLVKDSNTKKAGKTGPMKTLLVRVMTPDLRERLENLRKKPENIPQPISNTSRANLNKLLTDYTEMKKAILHVYWEEFQKDPVGLMSRVAQPASKKIDQNKLKPEMDEKGNLTTAGFACSQCGQPLFVYKLEQVSEKGKAYTNYVGRCNVAEHEKLILLAQLKPEKDSDEAVTYSLGKFGQRALDFYSIHVTKESTHPVKPLAQIAGNRYASVPVGKALSDACMGTIASFLSKYQDIIIEHQKVVKGNQKRLESLRELAGKENLEYPSVTLPPQPHTKEGVDAYNEVIARVRMWVNLNLWQKLKLSRDDAKPLLRLKGFPSFPLVERQANEVDWWDMVCNVKKLINEKKEDGKVFWQNLAGYKRQEALRPYLSSEEDRKKGKKFARYQLGDLLNHLEKKHGEDWGKVYDEAWERIDKKVEGLSKHIKLEEERRSEDAQSKAALTDWLRAKASFVIEGLKEADKDEFCRCELKLQKWYGDLRGKPFAIEAENSILDISGFSKQYNCAFIWQKDGVKKLNLYLIINYFKGGKLRFKKIKPEAFEANRFYTVINKKSGEIVPMEVNFNFDDPNLIILPLAFGKRQGREFIWNDLLSLETGSLKLANGRVIEKTLYNRRTRQDEPALFVALTFERREVLDSSNIKPMNLIGVDRGENIPAVIALTDPEGCPLSRFKDSLGNPTHILRIGESYKEKQRTIQAKKEVEQRRAGGYSRKYASKAKNLADDMVRNTARDLLYYAVTQDAMLIFENLSRGFGRQGKRTFMAERQYTRMEDWLTAKLAYEGLPSKTYLSKTLAQYTSKTCSNCGFTITSADYDRVLEKLKKTATGWMTTINGKELKVEGQITYYNRYKRQNVVKDLSVELDRLSEESVNNDISSWTKGRSGEALSLLKKRFSHRPVQEKFVCLNCGFETHADEQAALNIARSWLFLRSQEYKKYQTNKTTGNTDKRAFVETWQSFYRKKLKEVWKPAV

SEQ ID NO: 46438 - protein, 978 aa, synthetic construct
  REGION 1..978: note = engineered CasX variant
QEIKRINKIRRRLVKDSNTKKAGKTGPMKTLLVRVMTPDLRERLENLRKKPENIPQPISNTSRANLNKLLTDYTEMKKAILHVYWEEFQKDPVGLMSRVAQPASKKIDQNKLKPEMDEKGNLTTAGFACSQCGQPLFVYKLEQVSEKGKAYTNYVGRCNVAEHEKLIKLAQLKPEKDSDEAVTYSLGKFGQRALDFYSIHVTKESTHPVKPLAQIAGNRYASGPVGKALSDACMGTIASFLSKYQDIIIEHQKVVKGNQKRLESLRELAGKENLEYPSVTLPPQPHTKEGVDAYNEVIARVRMWVNLNLWQKLKLSRDDAKPLLRLKGFPSFPLVERQANEVDWWDMVCNVKKLINEKKEDGKVFWQNLAGYKRQEALRPYLSSEEDRKKGKKFARYQLGDLLNHLEKKHGEDWGKVYDEAWERIDKKVEGLSKHIKLEEERRSEDAQSKAALTDWLRAKASFVIEGLKEADKDEFCRCELKLQKWYGDLRGKPFAIEAENSILDISGFSKQYNCAFIWQKDGVKKLNLYLIINYFKGGKLRFKKIKPEAFEANRFYTVINKKSGEIVPMEVNFNFDDPNLIILPLAFGKRQGREFIWNDLLSLETGSLKLANGRVIEKTLYNRRTRQDEPALFVALTFERREVLDSSNIKPMNLIGVDRGENIPAVIALTDPEGCPLSRFKDSLGNPTHILRIGESYKEKQRTIQAKKEVEQRRAGGYSRKYASKAKNLADDMVRNTARDLLYYAVTQDAMLIFENLSRGFGRQGKRTFMAERQYTRMEDWLTAKLAYEGLPSKTYLSKTLAQYTSKTCSNCGFTITSADYDRVLEKLKKTATGWMTTINGKELKVEGQITYYNRYKRQNVVKDLSVELDRLSEESVNNDISSWTKGRSGEALSLLKKRFSHRPVQEKFVCLNCGFETHADEQAALNIARSWLFLRSQEYKKYQTNKTTGNTDKRAFVETWQSFYRKKLKEVWKPAV

SEQ ID NO: 46439 - protein, 977 aa, synthetic construct
  REGION 1..977: note = engineered CasX variant
QEIKRINKIRRRLVKDSNTKKAGKTGPMKTLLVRVMTPDLRERLENLRKKPENIPQPISNTSRANLNKLLTDYTEMKKAILHVYWEEFQKDPVGLMSRVAQPASKKIDQNKLKPEMDEKGNLTTAGFACSQCGQPLFVYKLEQVSEKGKAYTNYVGRCNVAEHEKLILLAQLKPEKDSDEAVTYSLGKFGQRALDFYSIHVTKESTHPVKPLAQIAGNRYASPVGKALSDACMGTIASFLSKYQDIIIEHQKVVKGNQKRLESLRELAGKENLEYPSVTLPPQPHTKEGVDAYNEVIARVRMWVNLNLWQKLKLSRDDAKPLLRLKGFPSFPLVERQANEVDWWDMVCNVKKLINEKKEDGKVFWQNLAGYKRQEALRPYLSSEEDRKKGKKFARYQLGDLLNHLEKKHGEDWGKVYDEAWERIDKKVEGLSKHIKLEEERRSEDAQSKAALTDWLRAKASFVIEGLKEADKDEFCRCELKLQKWYGDLRGKPFAIEAENSILDISGFSKQYNCAFIWQKDGVKKLNLYLIINYFKGGKLRFKKIKPEAFEANRFYTVINKKSGEIVPMEVNFNFDDPNLIILPLAFGKRQGREFIWNDLLSLETGSLKLANGRVIEKTLYNRRTRQDEPALFVALTFERREVLDSSNIKPMNLIGVDRGENIPAVIALTDPEGCPLSRFKDSLGNPTHILRIGESYKEKQRTIQAKKEVEQRRAGGYSRKYASKAKNLADDMVRNTARDLLYYAVTQDAMLIFENLSRGFGRQGKRTFMAERQYTRMEDWLTAKLAYEGLPSKTYLSKTLAQYTSKTCSNCGFTITSADYDRVLEKLKKTATGWMTTINGKELKVEGQITYYNRYKRQNVVKDLSVELDRLSEESVNNDISSWTKGRSGEALSLLKKRFSHRPVQEKFVCLNCGFETHADEQAALNIARSWLFLRSQEYKKYQTNKTTGNTDKRAFVETWQSFYRKKLKEVWKPAV

SEQ ID NO: 46440 - protein, 978 aa, synthetic construct
  REGION 1..978: note = engineered CasX variant
QEIKRINKIRRRLVKDSNTKKAGKTGPMKTLLVRVMTPDLRERLENLRKKPENIPQPISNTSRANLNKLLTDYTEMKKAILHVYWEEFQKDPVGLMSRVAQPASKKIDQNKLKPEMDEKGNLTTAGFACSQCGQPLFVYKLEQVSEKGKAYTNYVGRCNVAEHEKLILLAQLKPEKDSDEAVTYSLGKFGQRALDFYSIHVTKESTHPVKPLAQIAGNRYASYPVGKALSDACMGTIASFLSKYQDIIIEHQKVVKGNQKRLESLRELAGKENLEYPSVTLPPQPHTKEGVDAYNEVIARVRMWVNLNLWQKLKLSRDDAKPLLRLKGFPSFPLVERQANEVDWWDMVCNVKKLINEKKEDGKVFWQNLAGYKRQEALRPYLSSEEDRKKGKKFARYQLGDLLWHLEKKHGEDWGKVYDEAWERIDKKVEGLSKHIKLEEERRSEDAQSKAALTDWLRAKASFVIEGLKEADKDEFCRCELKLQKWYGDLRGKPFAIEAENSILDISGFSKQYNCAFIWQKDGVKKLNLYLIINYFKGGKLRFKKIKPEAFEANRFYTVINKKSGEIVPMEVNFNFDDPNLIILPLAFGKRQGREFIWNDLLSLETGSLKLANGRVIEKTLYNRRTRQDEPALFVALTFERREVLDSSNIKPMNLIGVDRGENIPAVIALTDPEGCPLSRFKDSLGNPTHILRIGESYKEKQRTIQAKKEVEQRRAGGYSRKYASKAKNLADDMVRNTARDLLYYAVTQDAMLIFENLSRGFGRQGKRTFMAERQYTRMEDWLTAKLAYEGLPSKTYLSKTLAQYTSKTCSNCGFTITSADYDRVLEKLKKTATGWMTTINGKELKVEGQITYYNRYKRQNVVKDLSVELDRLSEESVNNDISSWTKGRSGEALSLLKKRFSHRPVQEKFVCLNCGFETHADEQAALNIARSWLFLRSQEYKKYQTNKTTGNTDKRAFVETWQSFYRKKLKEVWKPAV

SEQ ID NO: 46441 - protein, 978 aa, synthetic construct
  REGION 1..978: note = engineered CasX variant
QEIKRINKIRRRLVKDSNTKKAGKTGPMKTLLVRVMTPDLRERLENLRKKPENIPQPISNTSRANLNKLLTDYTEMKKAILHVYWEEFQKDPVGLMSRVAQPASKKIDQNKLKPEMDEKGNLTTAGFACSQCGQPLFVYKLEQVSEKGKAYTNYVGRCNVAEHEKLILLAQLKPEKDSDEAVTYSLGKFGQRALDFYSIHVTKESTHPVKPLAQIAGNRYASHPVGKALSDACMGTIASFLSKYQDIIIEHQKVVKGNQKRLESLRELAGKENLEYPSVTLPPQPHTKEGVDAYNEVIARVRMWVNLNLWQKLKLSRDDAKPLLRLKGFPSFPLVERQANEVDWWDMVCNVKKLINEKKEDGKVFWQNLAGYKRQEALRPYLSSEEDRKKGKKFARYQLGDLLWHLEKKHGEDWGKVYDEAWERIDKKVEGLSKHIKLEEERRSEDAQSKAALTDWLRAKASFVIEGLKEADKDEFCRCELKLQKWYGDLRGKPFAIEAENSILDISGFSKQYNCAFIWQKDGVKKLNLYLIINYFKGGKLRFKKIKPEAFEANRFYTVINKKSGEIVPMEVNFNFDDPNLIILPLAFGKRQGREFIWNDLLSLETGSLKLANGRVIEKTLYNRRTRQDEPALFVALTFERREVLDSSNIKPMNLIGVDRGENIPAVIALTDPEGCPLSRFKDSLGNPTHILRIGESYKEKQRTIQAKKEVEQRRAGGYSRKYASKAKNLADDMVRNTARDLLYYAVTQDAMLIFENLSRGFGRQGKRTFMAERQYTRMEDWLTAKLAYEGLPSKTYLSKTLAQYTSKTCSNCGFTITSADYDRVLEKLKKTATGWMTTINGKELKVEGQITYYNRYKRQNVVKDLSVELDRLSEESVNNDISSWTKGRSGEALSLLKKRFSHRPVQEKFVCLNCGFETHADEQAALNIARSWLFLRSQEYKKYQTNKTTGNTDKRAFVETWQSFYRKKLKEVWKPAV

SEQ ID NO: 46442 - protein, 978 aa, synthetic construct
  REGION 1..978: note = engineered CasX variant
QEIKRINKIRRRLVKDSNTKKAGKTGPMKTLLVRVMTPDLRERLENLRKKPENIPQPISNTSRANLNKLLTDYTEMKKAILHVYWEEFQKDPVGLMSRVAQPASKKIDQNKLKPEMDEKGNLTTAGFACSQCGQPLFVYKLEQVSEKGKAYTNYVGRCNVAEHEKLILLAQLKPEKDSDEAVTYSLGKFGQRALDFYSIHVTKESTHPVKPLAQIAGNRYASSPVGKALSDACMGTIASFLSKYQDIIIEHQKVVKGNQKRLESLRELAGKENLEYPSVTLPPQPHTKEGVDAYNEVIARVRMWVNLNLWQKLKLSRDDAKPLLRLKGFPSFPLVERQANEVDWWDMVCNVKKLINEKKEDGKVFWQNLAGYKRQEALRPYLSSEEDRKKGKKFARYQLGDLLWHLEKKHGEDWGKVYDEAWERIDKKVEGLSKHIKLEEERRSEDAQSKAALTDWLRAKASFVIEGLKEADKDEFCRCELKLQKWYGDLRGKPFAIEAENSILDISGFSKQYNCAFIWQKDGVKKLNLYLIINYFKGGKLRFKKIKPEAFEANRFYTVINKKSGEIVPMEVNFNFDDPNLIILPLAFGKRQGREFIWNDLLSLETGSLKLANGRVIEKTLYNRRTRQDEPALFVALTFERREVLDSSNIKPMNLIGVDRGENIPAVIALTDPEGCPLSRFKDSLGNPTHILRIGESYKEKQRTIQAKKEVEQRRAGGYSRKYASKAKNLADDMVRNTARDLLYYAVTQDAMLIFENLSRGFGRQGKRTFMAERQYTRMEDWLTAKLAYEGLPSKTYLSKTLAQYTSKTCSNCGFTITSADYDRVLEKLKKTATGWMTTINGKELKVEGQITYYNRYKRQNVVKDLSVELDRLSEESVNNDISSWTKGRSGEALSLLKKRFSHRPVQEKFVCLNCGFETHADEQAALNIARSWLFLRSQEYKKYQTNKTTGNTDKRAFVETWQSFYRKKLKEVWKPAV

SEQ ID NO: 46443 - protein, 978 aa, synthetic construct
  REGION 1..978: note = engineered CasX variant
QEIKRINKIRRRLVKDSNTKKAGKTGPMKTLLVRVMTPDLRERLENLRKKPENIPQPISNTSRANLNKLLTDYTEMKKAILHVYWEEFQKDPVGLMSRVAQPASKKIDQNKLKPEMDEKGNLTTAGFACSQCGQPLFVYKLEQVSEKGKAYTNYVGRCNVAEHEKLILLAQLKPEKDSDEAVTYSLGKFGQRALDFYSIHVTKESTHPVKPLAQIAGNRYASTPVGKALSDACMGTIASFLSKYQDIIIEHQKVVKGNQKRLESLRELAGKENLEYPSVTLPPQPHTKEGVDAYNEVIARVRMWVNLNLWQKLKLSRDDAKPLLRLKGFPSFPLVERQANEVDWWDMVCNVKKLINEKKEDGKVFWQNLAGYKRQEALRPYLSSEEDRKKGKKFARYQLGDLLWHLEKKHGEDWGKVYDEAWERIDKKVEGLSKHIKLEEERRSEDAQSKAALTDWLRAKASFVIEGLKEADKDEFCRCELKLQKWYGDLRGKPFAIEAENSILDISGFSKQYNCAFIWQKDGVKKLNLYLIINYFKGGKLRFKKIKPEAFEANRFYTVINKKSGEIVPMEVNFNFDDPNLIILPLAFGKRQGREFIWNDLLSLETGSLKLANGRVIEKTLYNRRTRQDEPALFVALTFERREVLDSSNIKPMNLIGVDRGENIPAVIALTDPEGCPLSRFKDSLGNPTHILRIGESYKEKQRTIQAKKEVEQRRAGGYSRKYASKAKNLADDMVRNTARDLLYYAVTQDAMLIFENLSRGFGRQGKRTFMAERQYTRMEDWLTAKLAYEGLPSKTYLSKTLAQYTSKTCSNCGFTITSADYDRVLEKLKKTATGWMTTINGKELKVEGQITYYNRYKRQNVVKDLSVELDRLSEESVNNDISSWTKGRSGEALSLLKKRFSHRPVQEKFVCLNCGFETHADEQAALNIARSWLFLRSQEYKKYQTNKTTGNTDKRAFVETWQSFYRKKLKEVWKPAV

SEQ ID NO: 46444 - protein, 978 aa, synthetic construct
  REGION 1..978: note = engineered CasX variant
QEIKRINKIRRRLVKDSNTKKAGKTGPMKTLLVRVMTPDLRERLENLRKKPENIPQPISNTSRANLNKLLTDYTEMKKAILHVYWEEFQKDPVGLMSRVAQPASKKIDQNKLKPEMDEKGNLTTAGFACSQCGQPLFVYKLEQVSEKGKAYTNYVGRCNVAEHEKLILLAQLKPEKDSDEAVTYSLGKFGQRALDFYSIHVTKESTHPVKPLAQIAGNRYASAPVGKALSDACMGTIASFLSKYQDIIIEHQKVVKGNQKRLESLRELAGKENLEYPSVTLPPQPHTKEGVDAYNEVIARVRMWVNLNLWQKLKLSRDDAKPLLRLKGFPSFPLVERQANEVDWWDMVCNVKKLINEKKEDGKVFWQNLAGYKRQEALRPYLSSEEDRKKGKKFARYQLGDLLWHLEKKHGEDWGKVYDEAWERIDKKVEGLSKHIKLEEERRSEDAQSKAALTDWLRAKASFVIEGLKEADKDEFCRCELKLQKWYGDLRGKPFAIEAENSILDISGFSKQYNCAFIWQKDGVKKLNLYLIINYFKGGKLRFKKIKPEAFEANRFYTVINKKSGEIVPMEVNFNFDDPNLIILPLAFGKRQGREFIWNDLLSLETGSLKLANGRVIEKTLYNRRTRQDEPALFVALTFERREVLDSSNIKPMNLIGVDRGENIPAVIALTDPEGCPLSRFKDSLGNPTHILRIGESYKEKQRTIQAKKEVEQRRAGGYSRKYASKAKNLADDMVRNTARDLLYYAVTQDAMLIFENLSRGFGRQGKRTFMAERQYTRMEDWLTAKLAYEGLPSKTYLSKTLAQYTSKTCSNCGFTITSADYDRVLEKLKKTATGWMTTINGKELKVEGQITYYNRYKRQNVVKDLSVELDRLSEESVNNDISSWTKGRSGEALSLLKKRFSHRPVQEKFVCLNCGFETHADEQAALNIARSWLFLRSQEYKKYQTNKTTGNTDKRAFVETWQSFYRKKLKEVWKPAV

SEQ ID NO: 46445 - protein, 978 aa, synthetic construct
  REGION 1..978: note = engineered CasX variant
QEIKRINKIRRRLVKDSNTKKAGKTGPMKTLLVRVMTPDLRERLENLRKKPENIPQPISNTSRANLNKLLTDYTEMKKAILHVYWEEFQKDPVGLMSRVAQPASKKIDQNKLKPEMDEKGNLTTAGFACSQCGQPLFVYKLEQVSEKGKAYTNYVGRCNVAEHEKLILLAQLKPEKDSDEAVTYSLGKFGQRALDFYSIHVTKESTHPVKPLAQIAGNRYASVPVGKALSDACMGTIASFLSKYQDIIIEHQKVVKGNQKRLESLRELAGKENLEYPSVTLPPQPHTKEGVDAYNEVIARVRMWVNLNLWQKLKLSRDDAKPLLRLKGFPSFPLVERQANEVDWWDMVCNVKKLINEKKEDGKVFWQNLAGYKRQEALRPYLSSEEDRKKGKKFARYQLGDLLWHLEKKHGEDWGKVYDEAWERIDKKVEGLSKHIKLEEERRSEDAQSKAALTDWLRAKASFVIEGLKEADKDEFCRCELKLQKWYGDLRGKPFAIEAENSILDISGFSKQYNCAFIWQKDGVKKLNLYLIINYFKGGKLRFKKIKPEAFEANRFYTVINKKSGEIVPMEVNFNFDDPNLIILPLAFGKRQGREFIWNDLLSLETGSLKLANGRVIEKTLYNRRTRQDEPALFVALTFERREVLDSSNIKPMNLIGVDRGENIPAVIALTDPEGCPLSRFKDSLGNPTHILRIGESYKEKQRTIQAKKEVEQRRAGGYSRKYASKAKNLADDMVRNTARDLLYYAVTQDAMLIFENLSRGFGRQGKRTFMAERQYTRMEDWLTAKLAYEGLPSKTYLSKTLAQYTSKTCSNCGFTITSADYDRVLEKLKKTATGWMTTINGKELKVEGQITYYNRYKRQNVVKDLSVELDRLSEESVNNDISSWTKGRSGEALSLLKKRFSHRPVQEKFVCLNCGFETHADEQAALNIARSWLFLRSQEYKKYQTNKTTGNTDKRAFVETWQSFYRKKLKEVWKPAV

SEQ ID NO: 46446 - protein, 978 aa, synthetic construct
  REGION 1..978: note = engineered CasX variant
QEIKRINKIRRRLVKDSNTKKAGKTGPMKTLLVRVMTPDLRERLENLRKKPENIPQPISNTSRANLNKLLTDYTEMKKAILHVYWEEFQKDPVGLMSRVAQPASKKIDQNKLKPEMDEKGNLTTAGFACSQCGQPLFVYKLEQVSEKGKAYTNYVGRCNVAEHEKLIKLAQLKPEKDSDEAVTYSLGKFGQRALDFYSIHVTKESTHPVKPLAQIAGNRYASGPVGKALSDACMGTIASFLSKYQDIIIEHQKVVKGNQKRLESLRELAGKENLEYPSVTLPPQPHTKEGVDAYNEVIARVRMWVNLNLWQKLKLSRDDAKPLLRLKGFPSFPLVERQANEVDWWDMVCNVKKLINEKKEDGKVFWQNLAGYKRQEALRPYLSSEEDRKKGKKFARYQLGDLLWHLEKKHGEDWGKVYDEAWERIDKKVEGLSKHIKLEEERRSEDAQSKAALTDWLRAKASFVIEGLKEADKDEFCRCELKLQKWYGDLRGKPFAIEAENSILDISGFSKQYNCAFIWQKDGVKKLNLYLIINYFKGGKLRFKKIKPEAFEANRFYTVINKKSGEIVPMEVNFNFDDPNLIILPLAFGKRQGREFIWNDLLSLETGSLKLANGRVIEKTLYNRRTRQDEPALFVALTFERREVLDSSNIKPMNLIGVDRGENIPAVIALTDPEGCPLSRFKDSLGNPTHILRIGESYKEKQRTIQAKKEVEQRRAGGYSRKYASKAKNLADDMVRNTARDLLYYAVTQDAMLIFENLSRGFGRQGKRTFMAERQYTRMEDWLTAKLAYEGLPSKTYLSKTLAQYTSKTCSNCGFTITSADYDRVLEKLKKTATGWMTTINGKELKVEGQITYYNRYKRQNVVKDLSVELDRLSEESVNNDISSWTKGRSGEALSLLKKRFSHRPVQEKFVCLNCGFETHADEQAALNIARSWLFLRSQEYKKYQTNKTTGNTDKRAFVETWQSFYRKKLKEVWKPAV

SEQ ID NO: 46447 - protein, 977 aa, synthetic construct
  REGION 1..977: note = engineered CasX variant
QEIKRINKIRRRLVKDSNTKKAGKTGPMKTLLVRVMTPDLRERLENLRKKPENIPQPISNTSRANLNKLLTDYTEMKKAILHVYWEEFQKDPVGLMSRVAQPASKKIDQNKLKPEMDEKGNLTTAGFACSQCGQPLFVYKLEQVSEKGKAYTNYVGRCNVAEHEKLILLAQLKPEKDSDEAVTYSLGKFGQRALDFYSIHVTKESTHPVKPLAQIAGNRYASPVGKALSDACMGTIASFLSKYQDIIIEHQKVVKGNQKRLESLRELAGKENLEYPSVTLPPQPHTKEGVDAYNEVIARVRMWVNLNLWQKLKLSRDDAKPLLRLKGFPSFPLVERQANEVDWWDMVCNVKKLINEKKEDGKVFWQNLAGYKRQEALRPYLSSEEDRKKGKKFARYQLGDLLWHLEKKHGEDWGKVYDEAWERIDKKVEGLSKHIKLEEERRSEDAQSKAALTDWLRAKASFVIEGLKEADKDEFCRCELKLQKWYGDLRGKPFAIEAENSILDISGFSKQYNCAFIWQKDGVKKLNLYLIINYFKGGKLRFKKIKPEAFEANRFYTVINKKSGEIVPMEVNFNFDDPNLIILPLAFGKRQGREFIWNDLLSLETGSLKLANGRVIEKTLYNRRTRQDEPALFVALTFERREVLDSSNIKPMNLIGVDRGENIPAVIALTDPEGCPLSRFKDSLGNPTHILRIGESYKEKQRTIQAKKEVEQRRAGGYSRKYASKAKNLADDMVRNTARDLLYYAVTQDAMLIFENLSRGFGRQGKRTFMAERQYTRMEDWLTAKLAYEGLPSKTYLSKTLAQYTSKTCSNCGFTITSADYDRVLEKLKKTATGWMTTINGKELKVEGQITYYNRYKRQNVVKDLSVELDRLSEESVNNDISSWTKGRSGEALSLLKKRFSHRPVQEKFVCLNCGFETHADEQAALNIARSWLFLRSQEYKKYQTNKTTGNTDKRAFVETWQSFYRKKLKEVWKPAV

SEQ ID NO: 46448 - protein, 978 aa, synthetic construct
  REGION 1..978: note = engineered CasX variant
QEIKRINKIRRRLVKDSNTKKAGKTGPMKTLLVRVMTPDLRERLENLRKKPENIPQPISNTSRANLNKLLTDYTEMKKAILHVYWEEFQKDPVGLMSRVAQPASKKIDQNKLKPEMDEKGNLTTAGFACSQCGQPLFVYKLEQVSEKGKAYTNYVGRCNVAEHEKLILLAQLKPEKDSDEAVTYSLGKFGQRALDFYSIHVTKESTHPVKPLAQIAGNRYASYPVGKALSDACMGTIASFLSKYQDIIIEHQKVVKGNQKRLESLRELAGKENLEYPSVTLPPQPHTKEGVDAYNEVIARVRMWVNLNLWQKLKLSRDDAKPLLRLKGFPSFPLVERQANEVDWWDMVCNVKKLINEKKEDGKVFWQNLAGYKRQEALRPYLSSEEDRKKGKKFARYQLGDLLLHLYKKHGEDWGKVYDEAWERIDKKVEGLSKHIKLEEERRSEDAQSKAALTDWLRAKASFVIEGLKEADKDEFCRCELKLQKWYGDLRGKPFAIEAENSILDISGFSKQYNCAFIWQKDGVKKLNLYLIINYFKGGKLRFKKIKPEAFEANRFYTVINKKSGEIVPMEVNFNFDDPNLIILPLAFGKRQGREFIWNDLLSLETGSLKLANGRVIEKTLYNRRTRQDEPALFVALTFERREVLDSSNIKPMNLIGVDRGENIPAVIALTDPEGCPLSRFKDSLGNPTHILRIGESYKEKQRTIQAKKEVEQRRAGGYSRKYASKAKNLADDMVRNTARDLLYYAVTQDAMLIFENLSRGFGRQGKRTFMAERQYTRMEDWLTAKLAYEGLPSKTYLSKTLAQYTSKTCSNCGFTITSADYDRVLEKLKKTATGWMTTINGKELKVEGQITYYNRYKRQNVVKDLSVELDRLSEESVNNDISSWTKGRSGEALSLLKKRFSHRPVQEKFVCLNCGFETHADEQAALNIARSWLFLRSQEYKKYQTNKTTGNTDKRAFVETWQSFYRKKLKEVWKPAV

SEQ ID NO: 46449 - protein, 978 aa, synthetic construct
  REGION 1..978: note = engineered CasX variant
QEIKRINKIRRRLVKDSNTKKAGKTGPMKTLLVRVMTPDLRERLENLRKKPENIPQPISNTSRANLNKLLTDYTEMKKAILHVYWEEFQKDPVGLMSRVAQPASKKIDQNKLKPEMDEKGNLTTAGFACSQCGQPLFVYKLEQVSEKGKAYTNYVGRCNVAEHEKLILLAQLKPEKDSDEAVTYSLGKFGQRALDFYSIHVTKESTHPVKPLAQIAGNRYASHPVGKALSDACMGTIASFLSKYQDIIIEHQKVVKGNQKRLESLRELAGKENLEYPSVTLPPQPHTKEGVDAYNEVIARVRMWVNLNLWQKLKLSRDDAKPLLRLKGFPSFPLVERQANEVDWWDMVCNVKKLINEKKEDGKVFWQNLAGYKRQEALRPYLSSEEDRKKGKKFARYQLGDLLLHLYKKHGEDWGKVYDEAWERIDKKVEGLSKHIKLEEERRSEDAQSKAALTDWLRAKASFVIEGLKEADKDEFCRCELKLQKWYGDLRGKPFAIEAENSILDISGFSKQYNCAFIWQKDGVKKLNLYLIINYFKGGKLRFKKIKPEAFEANRFYTVINKKSGEIVPMEVNFNFDDPNLIILPLAFGKRQGREFIWNDLLSLETGSLKLANGRVIEKTLYNRRTRQDEPALFVALTFERREVLDSSNIKPMNLIGVDRGENIPAVIALTDPEGCPLSRFKDSLGNPTHILRIGESYKEKQRTIQAKKEVEQRRAGGYSRKYASKAKNLADDMVRNTARDLLYYAVTQDAMLIFENLSRGFGRQGKRTFMAERQYTRMEDWLTAKLAYEGLPSKTYLSKTLAQYTSKTCSNCGFTITSADYDRVLEKLKKTATGWMTTINGKELKVEGQITYYNRYKRQNVVKDLSVELDRLSEESVNNDISSWTKGRSGEALSLLKKRFSHRPVQEKFVCLNCGFETHADEQAALNIARSWLFLRSQEYKKYQTNKTTGNTDKRAFVETWQSFYRKKLKEVWKPAV

SEQ ID NO: 46450 - protein, 978 aa, synthetic construct
  REGION 1..978: note = engineered CasX variant
QEIKRINKIRRRLVKDSNTKKAGKTGPMKTLLVRVMTPDLRERLENLRKKPENIPQPISNTSRANLNKLLTDYTEMKKAILHVYWEEFQKDPVGLMSRVAQPASKKIDQNKLKPEMDEKGNLTTAGFACSQCGQPLFVYKLEQVSEKGKAYTNYVGRCNVAEHEKLILLAQLKPEKDSDEAVTYSLGKFGQRALDFYSIHVTKESTHPVKPLAQIAGNRYASSPVGKALSDACMGTIASFLSKYQDIIIEHQKVVKGNQKRLESLRELAGKENLEYPSVTLPPQPHTKEGVDAYNEVIARVRMWVNLNLWQKLKLSRDDAKPLLRLKGFPSFPLVERQANEVDWWDMVCNVKKLINEKKEDGKVFWQNLAGYKRQEALRPYLSSEEDRKKGKKFARYQLGDLLLHLYKKHGEDWGKVYDEAWERIDKKVEGLSKHIKLEEERRSEDAQSKAALTDWLRAKASFVIEGLKEADKDEFCRCELKLQKWYGDLRGKPFAIEAENSILDISGFSKQYNCAFIWQKDGVKKLNLYLIINYFKGGKLRFKKIKPEAFEANRFYTVINKKSGEIVPMEVNFNFDDPNLIILPLAFGKRQGREFIWNDLLSLETGSLKLANGRVIEKTLYNRRTRQDEPALFVALTFERREVLDSSNIKPMNLIGVDRGENIPAVIALTDPEGCPLSRFKDSLGNPTHILRIGESYKEKQRTIQAKKEVEQRRAGGYSRKYASKAKNLADDMVRNTARDLLYYAVTQDAMLIFENLSRGFGRQGKRTFMAERQYTRMEDWLTAKLAYEGLPSKTYLSKTLAQYTSKTCSNCGFTITSADYDRVLEKLKKTATGWMTTINGKELKVEGQITYYNRYKRQNVVKDLSVELDRLSEESVNNDISSWTKGRSGEALSLLKKRFSHRPVQEKFVCLNCGFETHADEQAALNIARSWLFLRSQEYKKYQTNKTTGNTDKRAFVETWQSFYRKKLKEVWKPAV

SEQ ID NO: 46451 - protein, 978 aa, synthetic construct
  REGION 1..978: note = engineered CasX variant
QEIKRINKIRRRLVKDSNTKKAGKTGPMKTLLVRVMTPDLRERLENLRKKPENIPQPISNTSRANLNKLLTDYTEMKKAILHVYWEEFQKDPVGLMSRVAQPASKKIDQNKLKPEMDEKGNLTTAGFACSQCGQPLFVYKLEQVSEKGKAYTNYVGRCNVAEHEKLILLAQLKPEKDSDEAVTYSLGKFGQRALDFYSIHVTKESTHPVKPLAQIAGNRYASTPVGKALSDACMGTIASFLSKYQDIIIEHQKVVKGNQKRLESLRELAGKENLEYPSVTLPPQPHTKEGVDAYNEVIARVRMWVNLNLWQKLKLSRDDAKPLLRLKGFPSFPLVERQANEVDWWDMVCNVKKLINEKKEDGKVFWQNLAGYKRQEALRPYLSSEEDRKKGKKFARYQLGDLLLHLYKKHGEDWGKVYDEAWERIDKKVEGLSKHIKLEEERRSEDAQSKAALTDWLRAKASFVIEGLKEADKDEFCRCELKLQKWYGDLRGKPFAIEAENSILDISGFSKQYNCAFIWQKDGVKKLNLYLIINYFKGGKLRFKKIKPEAFEANRFYTVINKKSGEIVPMEVNFNFDDPNLIILPLAFGKRQGREFIWNDLLSLETGSLKLANGRVIEKTLYNRRTRQDEPALFVALTFERREVLDSSNIKPMNLIGVDRGENIPAVIALTDPEGCPLSRFKDSLGNPTHILRIGESYKEKQRTIQAKKEVEQRRAGGYSRKYASKAKNLADDMVRNTARDLLYYAVTQDAMLIFENLSRGFGRQGKRTFMAERQYTRMEDWLTAKLAYEGLPSKTYLSKTLAQYTSKTCSNCGFTITSADYDRVLEKLKKTATGWMTTINGKELKVEGQITYYNRYKRQNVVKDLSVELDRLSEESVNNDISSWTKGRSGEALSLLKKRFSHRPVQEKFVCLNCGFETHADEQAALNIARSWLFLRSQEYKKYQTNKTTGNTDKRAFVETWQSFYRKKLKEVWKPAV

SEQ ID NO: 46452 - protein, 978 aa, synthetic construct
  REGION 1..978: note = engineered CasX variant
QEIKRINKIRRRLVKDSNTKKAGKTGPMKTLLVRVMTPDLRERLENLRKKPENIPQPISNTSRANLNKLLTDYTEMKKAILHVYWEEFQKDPVGLMSRVAQPASKKIDQNKLKPEMDEKGNLTTAGFACSQCGQPLFVYKLEQVSEKGKAYTNYVGRCNVAEHEKLILLAQLKPEKDSDEAVTYSLGKFGQRALDFYSIHVTKESTHPVKPLAQIAGNRYASAPVGKALSDACMGTIASFLSKYQDIIIEHQKVVKGNQKRLESLRELAGKENLEYPSVTLPPQPHTKEGVDAYNEVIARVRMWVNLNLWQKLKLSRDDAKPLLRLKGFPSFPLVERQANEVDWWDMVCNVKKLINEKKEDGKVFWQNLAGYKRQEALRPYLSSEEDRKKGKKFARYQLGDLLLHLYKKHGEDWGKVYDEAWERIDKKVEGLSKHIKLEEERRSEDAQSKAALTDWLRAKASFVIEGLKEADKDEFCRCELKLQKWYGDLRGKPFAIEAENSILDISGFSKQYNCAFIWQKDGVKKLNLYLIINYFKGGKLRFKKIKPEAFEANRFYTVINKKSGEIVPMEVNFNFDDPNLIILPLAFGKRQGREFIWNDLLSLETGSLKLANGRVIEKTLYNRRTRQDEPALFVALTFERREVLDSSNIKPMNLIGVDRGENIPAVIALTDPEGCPLSRFKDSLGNPTHILRIGESYKEKQRTIQAKKEVEQRRAGGYSRKYASKAKNLADDMVRNTARDLLYYAVTQDAMLIFENLSRGFGRQGKRTFMAERQYTRMEDWLTAKLAYEGLPSKTYLSKTLAQYTSKTCSNCGFTITSADYDRVLEKLKKTATGWMTTINGKELKVEGQITYYNRYKRQNVVKDLSVELDRLSEESVNNDISSWTKGRSGEALSLLKKRFSHRPVQEKFVCLNCGFETHADEQAALNIARSWLFLRSQEYKKYQTNKTTGNTDKRAFVETWQSFYRKKLKEVWKPAV

SEQ ID NO: 46453 - protein, 978 aa, synthetic construct
  REGION 1..978: note = engineered CasX variant
QEIKRINKIRRRLVKDSNTKKAGKTGPMKTLLVRVMTPDLRERLENLRKKPENIPQPISNTSRANLNKLLTDYTEMKKAILHVYWEEFQKDPVGLMSRVAQPASKKIDQNKLKPEMDEKGNLTTAGFACSQCGQPLFVYKLEQVSEKGKAYTNYVGRCNVAEHEKLILLAQLKPEKDSDEAVTYSLGKFGQRALDFYSIHVTKESTHPVKPLAQIAGNRYASVPVGKALSDACMGTIASFLSKYQDIIIEHQKVVKGNQKRLESLRELAGKENLEYPSVTLPPQPHTKEGVDAYNEVIARVRMWVNLNLWQKLKLSRDDAKPLLRLKGFPSFPLVERQANEVDWWDMVCNVKKLINEKKEDGKVFWQNLAGYKRQEALRPYLSSEEDRKKGKKFARYQLGDLLLHLYKKHGEDWGKVYDEAWERIDKKVEGLSKHIKLEEERRSEDAQSKAALTDWLRAKASFVIEGLKEADKDEFCRCELKLQKWYGDLRGKPFAIEAENSILDISGFSKQYNCAFIWQKDGVKKLNLYLIINYFKGGKLRFKKIKPEAFEANRFYTVINKKSGEIVPMEVNFNFDDPNLIILPLAFGKRQGREFIWNDLLSLETGSLKLANGRVIEKTLYNRRTRQDEPALFVALTFERREVLDSSNIKPMNLIGVDRGENIPAVIALTDPEGCPLSRFKDSLGNPTHILRIGESYKEKQRTIQAKKEVEQRRAGGYSRKYASKAKNLADDMVRNTARDLLYYAVTQDAMLIFENLSRGFGRQGKRTFMAERQYTRMEDWLTAKLAYEGLPSKTYLSKTLAQYTSKTCSNCGFTITSADYDRVLEKLKKTATGWMTTINGKELKVEGQITYYNRYKRQNVVKDLSVELDRLSEESVNNDISSWTKGRSGEALSLLKKRFSHRPVQEKFVCLNCGFETHADEQAALNIARSWLFLRSQEYKKYQTNKTTGNTDKRAFVETWQSFYRKKLKEVWKPAV

SEQ ID NO: 46454 - protein, 978 aa, synthetic construct
  REGION 1..978: note = engineered CasX variant
QEIKRINKIRRRLVKDSNTKKAGKTGPMKTLLVRVMTPDLRERLENLRKKPENIPQPISNTSRANLNKLLTDYTEMKKAILHVYWEEFQKDPVGLMSRVAQPASKKIDQNKLKPEMDEKGNLTTAGFACSQCGQPLFVYKLEQVSEKGKAYTNYVGRCNVAEHEKLIKLAQLKPEKDSDEAVTYSLGKFGQRALDFYSIHVTKESTHPVKPLAQIAGNRYASGPVGKALSDACMGTIASFLSKYQDIIIEHQKVVKGNQKRLESLRELAGKENLEYPSVTLPPQPHTKEGVDAYNEVIARVRMWVNLNLWQKLKLSRDDAKPLLRLKGFPSFPLVERQANEVDWWDMVCNVKKLINEKKEDGKVFWQNLAGYKRQEALRPYLSSEEDRKKGKKFARYQLGDLLLHLYKKHGEDWGKVYDEAWERIDKKVEGLSKHIKLEEERRSEDAQSKAALTDWLRAKASFVIEGLKEADKDEFCRCELKLQKWYGDLRGKPFAIEAENSILDISGFSKQYNCAFIWQKDGVKKLNLYLIINYFKGGKLRFKKIKPEAFEANRFYTVINKKSGEIVPMEVNFNFDDPNLIILPLAFGKRQGREFIWNDLLSLETGSLKLANGRVIEKTLYNRRTRQDEPALFVALTFERREVLDSSNIKPMNLIGVDRGENIPAVIALTDPEGCPLSRFKDSLGNPTHILRIGESYKEKQRTIQAKKEVEQRRAGGYSRKYASKAKNLADDMVRNTARDLLYYAVTQDAMLIFENLSRGFGRQGKRTFMAERQYTRMEDWLTAKLAYEGLPSKTYLSKTLAQYTSKTCSNCGFTITSADYDRVLEKLKKTATGWMTTINGKELKVEGQITYYNRYKRQNVVKDLSVELDRLSEESVNNDISSWTKGRSGEALSLLKKRFSHRPVQEKFVCLNCGFETHADEQAALNIARSWLFLRSQEYKKYQTNKTTGNTDKRAFVETWQSFYRKKLKEVWKPAV

SEQ ID NO: 46455 - protein, 977 aa, synthetic construct
  REGION 1..977: note = engineered CasX variant
QEIKRINKIRRRLVKDSNTKKAGKTGPMKTLLVRVMTPDLRERLENLRKKPENIPQPISNTSRANLNKLLTDYTEMKKAILHVYWEEFQKDPVGLMSRVAQPASKKIDQNKLKPEMDEKGNLTTAGFACSQCGQPLFVYKLEQVSEKGKAYTNYVGRCNVAEHEKLILLAQLKPEKDSDEAVTYSLGKFGQRALDFYSIHVTKESTHPVKPLAQIAGNRYASPVGKALSDACMGTIASFLSKYQDIIIEHQKVVKGNQKRLESLRELAGKENLEYPSVTLPPQPHTKEGVDAYNEVIARVRMWVNLNLWQKLKLSRDDAKPLLRLKGFPSFPLVERQANEVDWWDMVCNVKKLINEKKEDGKVFWQNLAGYKRQEALRPYLSSEEDRKKGKKFARYQLGDLLLHLYKKHGEDWGKVYDEAWERIDKKVEGLSKHIKLEEERRSEDAQSKAALTDWLRAKASFVIEGLKEADKDEFCRCELKLQKWYGDLRGKPFAIEAENSILDISGFSKQYNCAFIWQKDGVKKLNLYLIINYFKGGKLRFKKIKPEAFEANRFYTVINKKSGEIVPMEVNFNFDDPNLIILPLAFGKRQGREFIWNDLLSLETGSLKLANGRVIEKTLYNRRTRQDEPALFVALTFERREVLDSSNIKPMNLIGVDRGENIPAVIALTDPEGCPLSRFKDSLGNPTHILRIGESYKEKQRTIQAKKEVEQRRAGGYSRKYASKAKNLADDMVRNTARDLLYYAVTQDAMLIFENLSRGFGRQGKRTFMAERQYTRMEDWLTAKLAYEGLPSKTYLSKTLAQYTSKTCSNCGFTITSADYDRVLEKLKKTATGWMTTINGKELKVEGQITYYNRYKRQNVVKDLSVELDRLSEESVNNDISSWTKGRSGEALSLLKKRFSHRPVQEKFVCLNCGFETHADEQAALNIARSWLFLRSQEYKKYQTNKTTGNTDKRAFVETWQSFYRKKLKEVWKPAV

SEQ ID NO: 46456 - protein, 978 aa, synthetic construct
  REGION 1..978: note = engineered CasX variant
QEIKRINKIRRRLVKDSNTKKAGKTGPMKTLLVRVMTPDLRERLENLRKKPENIPQPISNTSRANLNKLLTDYTEMKKAILHVYWEEFQKDPVGLMSRVAQPASKKIDQNKLKPEMDEKGNLTTAGFACSQCGQPLFVYKLEQVSEKGKAYTNYVGRCNVAEHEKLILLAQLKPEKDSDEAVTYSLGKFGQRALDFYSIHVTKESTHPVKPLAQIAGNRYASYPVGKALSDACMGTIASFLSKYQDIIIEHQKVVKGNQKRLESLRELAGKENLEYPSVTLPPQPHTKEGVDAYNEVIARVRMWVNLNLWQKLKLSRDDAKPLLRLKGFPSFPLVERQANEVDWWDMVCNVKKLINEKKEDGKVFWQNLAGYKRQEALRPYLSSEEDRKKGKKFARYQLGDLLLHLEKKHPEDWGKVYDEAWERIDKKVEGLSKHIKLEEERRSEDAQSKAALTDWLRAKASFVIEGLKEADKDEFCRCELKLQKWYGDLRGKPFAIEAENSILDISGFSKQYNCAFIWQKDGVKKLNLYLIINYFKGGKLRFKKIKPEAFEANRFYTVINKKSGEIVPMEVNFNFDDPNLIILPLAFGKRQGREFIWNDLLSLETGSLKLANGRVIEKTLYNRRTRQDEPALFVALTFERREVLDSSNIKPMNLIGVDRGENIPAVIALTDPEGCPLSRFKDSLGNPTHILRIGESYKEKQRTIQAKKEVEQRRAGGYSRKYASKAKNLADDMVRNTARDLLYYAVTQDAMLIFENLSRGFGRQGKRTFMAERQYTRMEDWLTAKLAYEGLPSKTYLSKTLAQYTSKTCSNCGFTITSADYDRVLEKLKKTATGWMTTINGKELKVEGQITYYNRYKRQNVVKDLSVELDRLSEESVNNDISSWTKGRSGEALSLLKKRFSHRPVQEKFVCLNCGFETHADEQAALNIARSWLFLRSQEYKKYQTNKTTGNTDKRAFVETWQSFYRKKLKEVWKPAV

SEQ ID NO: 46457 - protein, 978 aa, synthetic construct
  REGION 1..978: note = engineered CasX variant
QEIKRINKIRRRLVKDSNTKKAGKTGPMKTLLVRVMTPDLRERLENLRKKPENIPQPISNTSRANLNKLLTDYTEMKKAILHVYWEEFQKDPVGLMSRVAQPASKKIDQNKLKPEMDEKGNLTTAGFACSQCGQPLFVYKLEQVSEKGKAYTNYVGRCNVAEHEKLILLAQLKPEKDSDEAVTYSLGKFGQRALDFYSIHVTKESTHPVKPLAQIAGNRYASHPVGKALSDACMGTIASFLSKYQDIIIEHQKVVKGNQKRLESLRELAGKENLEYPSVTLPPQPHTKEGVDAYNEVIARVRMWVNLNLWQKLKLSRDDAKPLLRLKGFPSFPLVERQANEVDWWDMVCNVKKLINEKKEDGKVFWQNLAGYKRQEALRPYLSSEEDRKKGKKFARYQLGDLLLHLEKKHPEDWGKVYDEAWERIDKKVEGLSKHIKLEEERRSEDAQSKAALTDWLRAKASFVIEGLKEADKDEFCRCELKLQKWYGDLRGKPFAIEAENSILDISGFSKQYNCAFIWQKDGVKKLNLYLIINYFKGGKLRFKKIKPEAFEANRFYTVINKKSGEIVPMEVNFNFDDPNLIILPLAFGKRQGREFIWNDLLSLETGSLKLANGRVIEKTLYNRRTRQDEPALFVALTFERREVLDSSNIKPMNLIGVDRGENIPAVIALTDPEGCPLSRFKDSLGNPTHILRIGESYKEKQRTIQAKKEVEQRRAGGYSRKYASKAKNLADDMVRNTARDLLYYAVTQDAMLIFENLSRGFGRQGKRTFMAERQYTRMEDWLTAKLAYEGLPSKTYLSKTLAQYTSKTCSNCGFTITSADYDRVLEKLKKTATGWMTTINGKELKVEGQITYYNRYKRQNVVKDLSVELDRLSEESVNNDISSWTKGRSGEALSLLKKRFSHRPVQEKFVCLNCGFETHADEQAALNIARSWLFLRSQEYKKYQTNKTTGNTDKRAFVETWQSFYRKKLKEVWKPAV

SEQ ID NO: 46458 - protein, 978 aa, synthetic construct
  REGION 1..978: note = engineered CasX variant
QEIKRINKIRRRLVKDSNTKKAGKTGPMKTLLVRVMTPDLRERLENLRKKPENIPQPISNTSRANLNKLLTDYTEMKKAILHVYWEEFQKDPVGLMSRVAQPASKKIDQNKLKPEMDEKGNLTTAGFACSQCGQPLFVYKLEQVSEKGKAYTNYVGRCNVAEHEKLILLAQLKPEKDSDEAVTYSLGKFGQRALDFYSIHVTKESTHPVKPLAQIAGNRYASSPVGKALSDACMGTIASFLSKYQDIIIEHQKVVKGNQKRLESLRELAGKENLEYPSVTLPPQPHTKEGVDAYNEVIARVRMWVNLNLWQKLKLSRDDAKPLLRLKGFPSFPLVERQANEVDWWDMVCNVKKLINEKKEDGKVFWQNLAGYKRQEALRPYLSSEEDRKKGKKFARYQLGDLLLHLEKKHPEDWGKVYDEAWERIDKKVEGLSKHIKLEEERRSEDAQSKAALTDWLRAKASFVIEGLKEADKDEFCRCELKLQKWYGDLRGKPFAIEAENSILDISGFSKQYNCAFIWQKDGVKKLNLYLIINYFKGGKLRFKKIKPEAFEANRFYTVINKKSGEIVPMEVNFNFDDPNLIILPLAFGKRQGREFIWNDLLSLETGSLKLANGRVIEKTLYNRRTRQDEPALFVALTFERREVLDSSNIKPMNLIGVDRGENIPAVIALTDPEGCPLSRFKDSLGNPTHILRIGESYKEKQRTIQAKKEVEQRRAGGYSRKYASKAKNLADDMVRNTARDLLYYAVTQDAMLIFENLSRGFGRQGKRTFMAERQYTRMEDWLTAKLAYEGLPSKTYLSKTLAQYTSKTCSNCGFTITSADYDRVLEKLKKTATGWMTTINGKELKVEGQITYYNRYKRQNVVKDLSVELDRLSEESVNNDISSWTKGRSGEALSLLKKRFSHRPVQEKFVCLNCGFETHADEQAALNIARSWLFLRSQEYKKYQTNKTTGNTDKRAFVETWQSFYRKKLKEVWKPAV

SEQ ID NO: 46459 - protein, 978 aa, synthetic construct
  REGION 1..978: note = engineered CasX variant
QEIKRINKIRRRLVKDSNTKKAGKTGPMKTLLVRVMTPDLRERLENLRKKPENIPQPISNTSRANLNKLLTDYTEMKKAILHVYWEEFQKDPVGLMSRVAQPASKKIDQNKLKPEMDEKGNLTTAGFACSQCGQPLFVYKLEQVSEKGKAYTNYVGRCNVAEHEKLILLAQLKPEKDSDEAVTYSLGKFGQRALDFYSIHVTKESTHPVKPLAQIAGNRYASTPVGKALSDACMGTIASFLSKYQDIIIEHQKVVKGNQKRLESLRELAGKENLEYPSVTLPPQPHTKEGVDAYNEVIARVRMWVNLNLWQKLKLSRDDAKPLLRLKGFPSFPLVERQANEVDWWDMVCNVKKLINEKKEDGKVFWQNLAGYKRQEALRPYLSSEEDRKKGKKFARYQLGDLLLHLEKKHPEDWGKVYDEAWERIDKKVEGLSKHIKLEEERRSEDAQSKAALTDWLRAKASFVIEGLKEADKDEFCRCELKLQKWYGDLRGKPFAIEAENSILDISGFSKQYNCAFIWQKDGVKKLNLYLIINYFKGGKLRFKKIKPEAFEANRFYTVINKKSGEIVPMEVNFNFDDPNLIILPLAFGKRQGREFIWNDLLSLETGSLKLANGRVIEKTLYNRRTRQDEPALFVALTFERREVLDSSNIKPMNLIGVDRGENIPAVIALTDPEGCPLSRFKDSLGNPTHILRIGESYKEKQRTIQAKKEVEQRRAGGYSRKYASKAKNLADDMVRNTARDLLYYAVTQDAMLIFENLSRGFGRQGKRTFMAERQYTRMEDWLTAKLAYEGLPSKTYLSKTLAQYTSKTCSNCGFTITSADYDRVLEKLKKTATGWMTTINGKELKVEGQITYYNRYKRQNVVKDLSVELDRLSEESVNNDISSWTKGRSGEALSLLKKRFSHRPVQEKFVCLNCGFETHADEQAALNIARSWLFLRSQEYKKYQTNKTTGNTDKRAFVETWQSFYRKKLKEVWKPAV

SEQ ID NO: 46460 - protein, 978 aa, synthetic construct
  REGION 1..978: note = engineered CasX variant
QEIKRINKIRRRLVKDSNTKKAGKTGPMKTLLVRVMTPDLRERLENLRKKPENIPQPISNTSRANLNKLLTDYTEMKKAILHVYWEEFQKDPVGLMSRVAQPASKKIDQNKLKPEMDEKGNLTTAGFACSQCGQPLFVYKLEQVSEKGKAYTNYVGRCNVAEHEKLILLAQLKPEKDSDEAVTYSLGKFGQRALDFYSIHVTKESTHPVKPLAQIAGNRYASAPVGKALSDACMGTIASFLSKYQDIIIEHQKVVKGNQKRLESLRELAGKENLEYPSVTLPPQPHTKEGVDAYNEVIARVRMWVNLNLWQKLKLSRDDAKPLLRLKGFPSFPLVERQANEVDWWDMVCNVKKLINEKKEDGKVFWQNLAGYKRQEALRPYLSSEEDRKKGKKFARYQLGDLLLHLEKKHPEDWGKVYDEAWERIDKKVEGLSKHIKLEEERRSEDAQSKAALTDWLRAKASFVIEGLKEADKDEFCRCELKLQKWYGDLRGKPFAIEAENSILDISGFSKQYNCAFIWQKDGVKKLNLYLIINYFKGGKLRFKKIKPEAFEANRFYTVINKKSGEIVPMEVNFNFDDPNLIILPLAFGKRQGREFIWNDLLSLETGSLKLANGRVIEKTLYNRRTRQDEPALFVALTFERREVLDSSNIKPMNLIGVDRGENIPAVIALTDPEGCPLSRFKDSLGNPTHILRIGESYKEKQRTIQAKKEVEQRRAGGYSRKYASKAKNLADDMVRNTARDLLYYAVTQDAMLIFENLSRGFGRQGKRTFMAERQYTRMEDWLTAKLAYEGLPSKTYLSKTLAQYTSKTCSNCGFTITSADYDRVLEKLKKTATGWMTTINGKELKVEGQITYYNRYKRQNVVKDLSVELDRLSEESVNNDISSWTKGRSGEALSLLKKRFSHRPVQEKFVCLNCGFETHADEQAALNIARSWLFLRSQEYKKYQTNKTTGNTDKRAFVETWQSFYRKKLKEVWKPAV

SEQ ID NO: 46461 - protein, 978 aa, synthetic construct
  REGION 1..978: note = engineered CasX variant
QEIKRINKIRRRLVKDSNTKKAGKTGPMKTLLVRVMTPDLRERLENLRKKPENIPQPISNTSRANLNKLLTDYTEMKKAILHVYWEEFQKDPVGLMSRVAQPASKKIDQNKLKPEMDEKGNLTTAGFACSQCGQPLFVYKLEQVSEKGKAYTNYVGRCNVAEHEKLILLAQLKPEKDSDEAVTYSLGKFGQRALDFYSIHVTKESTHPVKPLAQIAGNRYASVPVGKALSDACMGTIASFLSKYQDIIIEHQKVVKGNQKRLESLRELAGKENLEYPSVTLPPQPHTKEGVDAYNEVIARVRMWVNLNLWQKLKLSRDDAKPLLRLKGFPSFPLVERQANEVDWWDMVCNVKKLINEKKEDGKVFWQNLAGYKRQEALRPYLSSEEDRKKGKKFARYQLGDLLLHLEKKHPEDWGKVYDEAWERIDKKVEGLSKHIKLEEERRSEDAQSKAALTDWLRAKASFVIEGLKEADKDEFCRCELKLQKWYGDLRGKPFAIEAENSILDISGFSKQYNCAFIWQKDGVKKLNLYLIINYFKGGKLRFKKIKPEAFEANRFYTVINKKSGEIVPMEVNFNFDDPNLIILPLAFGKRQGREFIWNDLLSLETGSLKLANGRVIEKTLYNRRTRQDEPALFVALTFERREVLDSSNIKPMNLIGVDRGENIPAVIALTDPEGCPLSRFKDSLGNPTHILRIGESYKEKQRTIQAKKEVEQRRAGGYSRKYASKAKNLADDMVRNTARDLLYYAVTQDAMLIFENLSRGFGRQGKRTFMAERQYTRMEDWLTAKLAYEGLPSKTYLSKTLAQYTSKTCSNCGFTITSADYDRVLEKLKKTATGWMTTINGKELKVEGQITYYNRYKRQNVVKDLSVELDRLSEESVNNDISSWTKGRSGEALSLLKKRFSHRPVQEKFVCLNCGFETHADEQAALNIARSWLFLRSQEYKKYQTNKTTGNTDKRAFVETWQSFYRKKLKEVWKPAV

SEQ ID NO: 46462 - protein, 978 aa, synthetic construct
  REGION 1..978: note = engineered CasX variant
QEIKRINKIRRRLVKDSNTKKAGKTGPMKTLLVRVMTPDLRERLENLRKKPENIPQPISNTSRANLNKLLTDYTEMKKAILHVYWEEFQKDPVGLMSRVAQPASKKIDQNKLKPEMDEKGNLTTAGFACSQCGQPLFVYKLEQVSEKGKAYTNYVGRCNVAEHEKLIKLAQLKPEKDSDEAVTYSLGKFGQRALDFYSIHVTKESTHPVKPLAQIAGNRYASGPVGKALSDACMGTIASFLSKYQDIIIEHQKVVKGNQKRLESLRELAGKENLEYPSVTLPPQPHTKEGVDAYNEVIARVRMWVNLNLWQKLKLSRDDAKPLLRLKGFPSFPLVERQANEVDWWDMVCNVKKLINEKKEDGKVFWQNLAGYKRQEALRPYLSSEEDRKKGKKFARYQLGDLLLHLEKKHPEDWGKVYDEAWERIDKKVEGLSKHIKLEEERRSEDAQSKAALTDWLRAKASFVIEGLKEADKDEFCRCELKLQKWYGDLRGKPFAIEAENSILDISGFSKQYNCAFIWQKDGVKKLNLYLIINYFKGGKLRFKKIKPEAFEANRFYTVINKKSGEIVPMEVNFNFDDPNLIILPLAFGKRQGREFIWNDLLSLETGSLKLANGRVIEKTLYNRRTRQDEPALFVALTFERREVLDSSNIKPMNLIGVDRGENIPAVIALTDPEGCPLSRFKDSLGNPTHILRIGESYKEKQRTIQAKKEVEQRRAGGYSRKYASKAKNLADDMVRNTARDLLYYAVTQDAMLIFENLSRGFGRQGKRTFMAERQYTRMEDWLTAKLAYEGLPSKTYLSKTLAQYTSKTCSNCGFTITSADYDRVLEKLKKTATGWMTTINGKELKVEGQITYYNRYKRQNVVKDLSVELDRLSEESVNNDISSWTKGRSGEALSLLKKRFSHRPVQEKFVCLNCGFETHADEQAALNIARSWLFLRSQEYKKYQTNKTTGNTDKRAFVETWQSFYRKKLKEVWKPAV

SEQ ID NO: 46463 - protein, 977 aa, synthetic construct
  REGION 1..977: note = engineered CasX variant
QEIKRINKIRRRLVKDSNTKKAGKTGPMKTLLVRVMTPDLRERLENLRKKPENIPQPISNTSRANLNKLLTDYTEMKKAILHVYWEEFQKDPVGLMSRVAQPASKKIDQNKLKPEMDEKGNLTTAGFACSQCGQPLFVYKLEQVSEKGKAYTNYVGRCNVAEHEKLILLAQLKPEKDSDEAVTYSLGKFGQRALDFYSIHVTKESTHPVKPLAQIAGNRYASPVGKALSDACMGTIASFLSKYQDIIIEHQKVVKGNQKRLESLRELAGKENLEYPSVTLPPQPHTKEGVDAYNEVIARVRMWVNLNLWQKLKLSRDDAKPLLRLKGFPSFPLVERQANEVDWWDMVCNVKKLINEKKEDGKVFWQNLAGYKRQEALRPYLSSEEDRKKGKKFARYQLGDLLLHLEKKHPEDWGKVYDEAWERIDKKVEGLSKHIKLEEERRSEDAQSKAALTDWLRAKASFVIEGLKEADKDEFCRCELKLQKWYGDLRGKPFAIEAENSILDISGFSKQYNCAFIWQKDGVKKLNLYLIINYFKGGKLRFKKIKPEAFEANRFYTVINKKSGEIVPMEVNFNFDDPNLIILPLAFGKRQGREFIWNDLLSLETGSLKLANGRVIEKTLYNRRTRQDEPALFVALTFERREVLDSSNIKPMNLIGVDRGENIPAVIALTDPEGCPLSRFKDSLGNPTHILRIGESYKEKQRTIQAKKEVEQRRAGGYSRKYASKAKNLADDMVRNTARDLLYYAVTQDAMLIFENLSRGFGRQGKRTFMAERQYTRMEDWLTAKLAYEGLPSKTYLSKTLAQYTSKTCSNCGFTITSADYDRVLEKLKKTATGWMTTINGKELKVEGQITYYNRYKRQNVVKDLSVELDRLSEESVNNDISSWTKGRSGEALSLLKKRFSHRPVQEKFVCLNCGFETHADEQAALNIARSWLFLRSQEYKKYQTNKTTGNTDKRAFVETWQSFYRKKLKEVWKPAV

SEQ ID NO: 46464 - protein, 979 aa, synthetic construct
  REGION 1..979: note = engineered CasX variant
QEIKRINKIRRRLVKDSNTKKAGKTGPMKTLLVRVMTPDLRERLENLRKKPENIPQPISNTSRANLNKLLTDYTEMKKAILHVYWEEFQKDPVGLMSRVAQPASKKIDQNKLKPEMDEKGNLTTAGFACSQCGQPLFVYKLEQVSEKGKAYTNYVGRCNVAEHEKLILLAQLKPEKDSDEAVTYSLGKFGQRALDFYSIHVTKESTHPVKPLAQIAGNRYASYPVGKALSDACMGTIASFLSKYQDIIIEHQKVVKGNQKRLESLRELAGKENLEYPSVTLPPQPHTKEGVDAYNEVIARVRMWVNLNLWQKLKLSRDDAKPLLRLKGFPSFPLVERQANEVDWWDMVCNVKKLINEKKEDGKVFWQNLAGYKRQEALRPYLSSEEDRKKGKKFARYQLGDLLLHLEKKHGERDWGKVYDEAWERIDKKVEGLSKHIKLEEERRSEDAQSKAALTDWLRAKASFVIEGLKEADKDEFCRCELKLQKWYGDLRGKPFAIEAENSILDISGFSKQYNCAFIWQKDGVKKLNLYLIINYFKGGKLRFKKIKPEAFEANRFYTVINKKSGEIVPMEVNFNFDDPNLIILPLAFGKRQGREFIWNDLLSLETGSLKLANGRVIEKTLYNRRTRQDEPALFVALTFERREVLDSSNIKPMNLIGVDRGENIPAVIALTDPEGCPLSRFKDSLGNPTHILRIGESYKEKQRTIQAKKEVEQRRAGGYSRKYASKAKNLADDMVRNTARDLLYYAVTQDAMLIFENLSRGFGRQGKRTFMAERQYTRMEDWLTAKLAYEGLPSKTYLSKTLAQYTSKTCSNCGFTITSADYDRVLEKLKKTATGWMTTINGKELKVEGQITYYNRYKRQNVVKDLSVELDRLSEESVNNDISSWTKGRSGEALSLLKKRFSHRPVQEKFVCLNCGFETHADEQAALNIARSWLFLRSQEYKKYQTNKTTGNTDKRAFVETWQSFYRKKLKEVWKPAV

SEQ ID NO: 46465 - protein, 979 aa, synthetic construct
  REGION 1..979: note = engineered CasX variant
QEIKRINKIRRRLVKDSNTKKAGKTGPMKTLLVRVMTPDLRERLENLRKKPENIPQPISNTSRANLNKLLTDYTEMKKAILHVYWEEFQKDPVGLMSRVAQPASKKIDQNKLKPEMDEKGNLTTAGFACSQCGQPLFVYKLEQVSEKGKAYTNYVGRCNVAEHEKLILLAQLKPEKDSDEAVTYSLGKFGQRALDFYSIHVTKESTHPVKPLAQIAGNRYASHPVGKALSDACMGTIASFLSKYQDIIIEHQKVVKGNQKRLESLRELAGKENLEYPSVTLPPQPHTKEGVDAYNEVIARVRMWVNLNLWQKLKLSRDDAKPLLRLKGFPSFPLVERQANEVDWWDMVCNVKKLINEKKEDGKVFWQNLAGYKRQEALRPYLSSEEDRKKGKKFARYQLGDLLLHLEKKHGERDWGKVYDEAWERIDKKVEGLSKHIKLEEERRSEDAQSKAALTDWLRAKASFVIEGLKEADKDEFCRCELKLQKWYGDLRGKPFAIEAENSILDISGFSKQYNCAFIWQKDGVKKLNLYLIINYFKGGKLRFKKIKPEAFEANRFYTVINKKSGEIVPMEVNFNFDDPNLIILPLAFGKRQGREFIWNDLLSLETGSLKLANGRVIEKTLYNRRTRQDEPALFVALTFERREVLDSSNIKPMNLIGVDRGENIPAVIALTDPEGCPLSRFKDSLGNPTHILRIGESYKEKQRTIQAKKEVEQRRAGGYSRKYASKAKNLADDMVRNTARDLLYYAVTQDAMLIFENLSRGFGRQGKRTFMAERQYTRMEDWLTAKLAYEGLPSKTYLSKTLAQYTSKTCSNCGFTITSADYDRVLEKLKKTATGWMTTINGKELKVEGQITYYNRYKRQNVVKDLSVELDRLSEESVNNDISSWTKGRSGEALSLLKKRFSHRPVQEKFVCLNCGFETHADEQAALNIARSWLFLRSQEYKKYQTNKTTGNTDKRAFVETWQSFYRKKLKEVWKPAV

SEQ ID NO: 46466 - protein, 979 aa, synthetic construct
  REGION 1..979: note = engineered CasX variant
QEIKRINKIRRRLVKDSNTKKAGKTGPMKTLLVRVMTPDLRERLENLRKKPENIPQPISNTSRANLNKLLTDYTEMKKAILHVYWEEFQKDPVGLMSRVAQPASKKIDQNKLKPEMDEKGNLTTAGFACSQCGQPLFVYKLEQVSEKGKAYTNYVGRCNVAEHEKLILLAQLKPEKDSDEAVTYSLGKFGQRALDFYSIHVTKESTHPVKPLAQIAGNRYASSPVGKALSDACMGTIASFLSKYQDIIIEHQKVVKGNQKRLESLRELAGKENLEYPSVTLPPQPHTKEGVDAYNEVIARVRMWVNLNLWQKLKLSRDDAKPLLRLKGFPSFPLVERQANEVDWWDMVCNVKKLINEKKEDGKVFWQNLAGYKRQEALRPYLSSEEDRKKGKKFARYQLGDLLLHLEKKHGERDWGKVYDEAWERIDKKVEGLSKHIKLEEERRSEDAQSKAALTDWLRAKASFVIEGLKEADKDEFCRCELKLQKWYGDLRGKPFAIEAENSILDISGFSKQYNCAFIWQKDGVKKLNLYLIINYFKGGKLRFKKIKPEAFEANRFYTVINKKSGEIVPMEVNFNFDDPNLIILPLAFGKRQGREFIWNDLLSLETGSLKLANGRVIEKTLYNRRTRQDEPALFVALTFERREVLDSSNIKPMNLIGVDRGENIPAVIALTDPEGCPLSRFKDSLGNPTHILRIGESYKEKQRTIQAKKEVEQRRAGGYSRKYASKAKNLADDMVRNTARDLLYYAVTQDAMLIFENLSRGFGRQGKRTFMAERQYTRMEDWLTAKLAYEGLPSKTYLSKTLAQYTSKTCSNCGFTITSADYDRVLEKLKKTATGWMTTINGKELKVEGQITYYNRYKRQNVVKDLSVELDRLSEESVNNDISSWTKGRSGEALSLLKKRFSHRPVQEKFVCLNCGFETHADEQAALNIARSWLFLRSQEYKKYQTNKTTGNTDKRAFVETWQSFYRKKLKEVWKPAV

SEQ ID NO: 46467 - protein, 979 aa, synthetic construct
  REGION 1..979: note = engineered CasX variant
QEIKRINKIRRRLVKDSNTKKAGKTGPMKTLLVRVMTPDLRERLENLRKKPENIPQPISNTSRANLNKLLTDYTEMKKAILHVYWEEFQKDPVGLMSRVAQPASKKIDQNKLKPEMDEKGNLTTAGFACSQCGQPLFVYKLEQVSEKGKAYTNYVGRCNVAEHEKLILLAQLKPEKDSDEAVTYSLGKFGQRALDFYSIHVTKESTHPVKPLAQIAGNRYASTPVGKALSDACMGTIASFLSKYQDIIIEHQKVVKGNQKRLESLRELAGKENLEYPSVTLPPQPHTKEGVDAYNEVIARVRMWVNLNLWQKLKLSRDDAKPLLRLKGFPSFPLVERQANEVDWWDMVCNVKKLINEKKEDGKVFWQNLAGYKRQEALRPYLSSEEDRKKGKKFARYQLGDLLLHLEKKHGERDWGKVYDEAWERIDKKVEGLSKHIKLEEERRSEDAQSKAALTDWLRAKASFVIEGLKEADKDEFCRCELKLQKWYGDLRGKPFAIEAENSILDISGFSKQYNCAFIWQKDGVKKLNLYLIINYFKGGKLRFKKIKPEAFEANRFYTVINKKSGEIVPMEVNFNFDDPNLIILPLAFGKRQGREFIWNDLLSLETGSLKLANGRVIEKTLYNRRTRQDEPALFVALTFERREVLDSSNIKPMNLIGVDRGENIPAVIALTDPEGCPLSRFKDSLGNPTHILRIGESYKEKQRTIQAKKEVEQRRAGGYSRKYASKAKNLADDMVRNTARDLLYYAVTQDAMLIFENLSRGFGRQGKRTFMAERQYTRMEDWLTAKLAYEGLPSKTYLSKTLAQYTSKTCSNCGFTITSADYDRVLEKLKKTATGWMTTINGKELKVEGQITYYNRYKRQNVVKDLSVELDRLSEESVNNDISSWTKGRSGEALSLLKKRFSHRPVQEKFVCLNCGFETHADEQAALNIARSWLFLRSQEYKKYQTNKTTGNTDKRAFVETWQSFYRKKLKEVWKPAV

SEQ ID NO: 46468 - protein, 979 aa, synthetic construct
  REGION 1..979: note = engineered CasX variant
QEIKRINKIRRRLVKDSNTKKAGKTGPMKTLLVRVMTPDLRERLENLRKKPENIPQPISNTSRANLNKLLTDYTEMKKAILHVYWEEFQKDPVGLMSRVAQPASKKIDQNKLKPEMDEKGNLTTAGFACSQCGQPLFVYKLEQVSEKGKAYTNYVGRCNVAEHEKLILLAQLKPEKDSDEAVTYSLGKFGQRALDFYSIHVTKESTHPVKPLAQIAGNRYASAPVGKALSDACMGTIASFLSKYQDIIIEHQKVVKGNQKRLESLRELAGKENLEYPSVTLPPQPHTKEGVDAYNEVIARVRMWVNLNLWQKLKLSRDDAKPLLRLKGFPSFPLVERQANEVDWWDMVCNVKKLINEKKEDGKVFWQNLAGYKRQEALRPYLSSEEDRKKGKKFARYQLGDLLLHLEKKHGERDWGKVYDEAWERIDKKVEGLSKHIKLEEERRSEDAQSKAALTDWLRAKASFVIEGLKEADKDEFCRCELKLQKWYGDLRGKPFAIEAENSILDISGFSKQYNCAFIWQKDGVKKLNLYLIINYFKGGKLRFKKIKPEAFEANRFYTVINKKSGEIVPMEVNFNFDDPNLIILPLAFGKRQGREFIWNDLLSLETGSLKLANGRVIEKTLYNRRTRQDEPALFVALTFERREVLDSSNIKPMNLIGVDRGENIPAVIALTDPEGCPLSRFKDSLGNPTHILRIGESYKEKQRTIQAKKEVEQRRAGGYSRKYASKAKNLADDMVRNTARDLLYYAVTQDAMLIFENLSRGFGRQGKRTFMAERQYTRMEDWLTAKLAYEGLPSKTYLSKTLAQYTSKTCSNCGFTITSADYDRVLEKLKKTATGWMTTINGKELKVEGQITYYNRYKRQNVVKDLSVELDRLSEESVNNDISSWTKGRSGEALSLLKKRFSHRPVQEKFVCLNCGFETHADEQAALNIARSWLFLRSQEYKKYQTNKTTGNTDKRAFVETWQSFYRKKLKEVWKPAV

SEQ ID NO: 46469 - protein, 979 aa, synthetic construct
  REGION 1..979: note = engineered CasX variant
QEIKRINKIRRRLVKDSNTKKAGKTGPMKTLLVRVMTPDLRERLENLRKKPENIPQPISNTSRANLNKLLTDYTEMKKAILHVYWEEFQKDPVGLMSRVAQPASKKIDQNKLKPEMDEKGNLTTAGFACSQCGQPLFVYKLEQVSEKGKAYTNYVGRCNVAEHEKLILLAQLKPEKDSDEAVTYSLGKFGQRALDFYSIHVTKESTHPVKPLAQIAGNRYASVPVGKALSDACMGTIASFLSKYQDIIIEHQKVVKGNQKRLESLRELAGKENLEYPSVTLPPQPHTKEGVDAYNEVIARVRMWVNLNLWQKLKLSRDDAKPLLRLKGFPSFPLVERQANEVDWWDMVCNVKKLINEKKEDGKVFWQNLAGYKRQEALRPYLSSEEDRKKGKKFARYQLGDLLLHLEKKHGERDWGKVYDEAWERIDKKVEGLSKHIKLEEERRSEDAQSKAALTDWLRAKASFVIEGLKEADKDEFCRCELKLQKWYGDLRGKPFAIEAENSILDISGFSKQYNCAFIWQKDGVKKLNLYLIINYFKGGKLRFKKIKPEAFEANRFYTVINKKSGEIVPMEVNFNFDDPNLIILPLAFGKRQGREFIWNDLLSLETGSLKLANGRVIEKTLYNRRTRQDEPALFVALTFERREVLDSSNIKPMNLIGVDRGENIPAVIALTDPEGCPLSRFKDSLGNPTHILRIGESYKEKQRTIQAKKEVEQRRAGGYSRKYASKAKNLADDMVRNTARDLLYYAVTQDAMLIFENLSRGFGRQGKRTFMAERQYTRMEDWLTAKLAYEGLPSKTYLSKTLAQYTSKTCSNCGFTITSADYDRVLEKLKKTATGWMTTINGKELKVEGQITYYNRYKRQNVVKDLSVELDRLSEESVNNDISSWTKGRSGEALSLLKKRFSHRPVQEKFVCLNCGFETHADEQAALNIARSWLFLRSQEYKKYQTNKTTGNTDKRAFVETWQSFYRKKLKEVWKPAV

SEQ ID NO: 46470 - protein, 979 aa, synthetic construct
  REGION 1..979: note = engineered CasX variant
QEIKRINKIRRRLVKDSNTKKAGKTGPMKTLLVRVMTPDLRERLENLRKKPENIPQPISNTSRANLNKLLTDYTEMKKAILHVYWEEFQKDPVGLMSRVAQPASKKIDQNKLKPEMDEKGNLTTAGFACSQCGQPLFVYKLEQVSEKGKAYTNYVGRCNVAEHEKLIKLAQLKPEKDSDEAVTYSLGKFGQRALDFYSIHVTKESTHPVKPLAQIAGNRYASGPVGKALSDACMGTIASFLSKYQDIIIEHQKVVKGNQKRLESLRELAGKENLEYPSVTLPPQPHTKEGVDAYNEVIARVRMWVNLNLWQKLKLSRDDAKPLLRLKGFPSFPLVERQANEVDWWDMVCNVKKLINEKKEDGKVFWQNLAGYKRQEALRPYLSSEEDRKKGKKFARYQLGDLLLHLEKKHGERDWGKVYDEAWERIDKKVEGLSKHIKLEEERRSEDAQSKAALTDWLRAKASFVIEGLKEADKDEFCRCELKLQKWYGDLRGKPFAIEAENSILDISGFSKQYNCAFIWQKDGVKKLNLYLIINYFKGGKLRFKKIKPEAFEANRFYTVINKKSGEIVPMEVNFNFDDPNLIILPLAFGKRQGREFIWNDLLSLETGSLKLANGRVIEKTLYNRRTRQDEPALFVALTFERREVLDSSNIKPMNLIGVDRGENIPAVIALTDPEGCPLSRFKDSLGNPTHILRIGESYKEKQRTIQAKKEVEQRRAGGYSRKYASKAKNLADDMVRNTARDLLYYAVTQDAMLIFENLSRGFGRQGKRTFMAERQYTRMEDWLTAKLAYEGLPSKTYLSKTLAQYTSKTCSNCGFTITSADYDRVLEKLKKTATGWMTTINGKELKVEGQITYYNRYKRQNVVKDLSVELDRLSEESVNNDISSWTKGRSGEALSLLKKRFSHRPVQEKFVCLNCGFETHADEQAALNIARSWLFLRSQEYKKYQTNKTTGNTDKRAFVETWQSFYRKKLKEVWKPAV

SEQ ID NO: 46471 - protein, 978 aa, synthetic construct
  REGION 1..978: note = engineered CasX variant
QEIKRINKIRRRLVKDSNTKKAGKTGPMKTLLVRVMTPDLRERLENLRKKPENIPQPISNTSRANLNKLLTDYTEMKKAILHVYWEEFQKDPVGLMSRVAQPASKKIDQNKLKPEMDEKGNLTTAGFACSQCGQPLFVYKLEQVSEKGKAYTNYVGRCNVAEHEKLILLAQLKPEKDSDEAVTYSLGKFGQRALDFYSIHVTKESTHPVKPLAQIAGNRYASPVGKALSDACMGTIASFLSKYQDIIIEHQKVVKGNQKRLESLRELAGKENLEYPSVTLPPQPHTKEGVDAYNEVIARVRMWVNLNLWQKLKLSRDDAKPLLRLKGFPSFPLVERQANEVDWWDMVCNVKKLINEKKEDGKVFWQNLAGYKRQEALRPYLSSEEDRKKGKKFARYQLGDLLLHLEKKHGERDWGKVYDEAWERIDKKVEGLSKHIKLEEERRSEDAQSKAALTDWLRAKASFVIEGLKEADKDEFCRCELKLQKWYGDLRGKPFAIEAENSILDISGFSKQYNCAFIWQKDGVKKLNLYLIINYFKGGKLRFKKIKPEAFEANRFYTVINKKSGEIVPMEVNFNFDDPNLIILPLAFGKRQGREFIWNDLLSLETGSLKLANGRVIEKTLYNRRTRQDEPALFVALTFERREVLDSSNIKPMNLIGVDRGENIPAVIALTDPEGCPLSRFKDSLGNPTHILRIGESYKEKQRTIQAKKEVEQRRAGGYSRKYASKAKNLADDMVRNTARDLLYYAVTQDAMLIFENLSRGFGRQGKRTFMAERQYTRMEDWLTAKLAYEGLPSKTYLSKTLAQYTSKTCSNCGFTITSADYDRVLEKLKKTATGWMTTINGKELKVEGQITYYNRYKRQNVVKDLSVELDRLSEESVNNDISSWTKGRSGEALSLLKKRFSHRPVQEKFVCLNCGFETHADEQAALNIARSWLFLRSQEYKKYQTNKTTGNTDKRAFVETWQSFYRKKLKEVWKPAV

SEQ ID NO: 46472 - protein, 979 aa, synthetic construct
  REGION 1..979: note = engineered CasX variant
QEIKRINKIRRRLVKDSNTKKAGKTGPMKTLLVRVMTPDLRERLENLRKKPENIPQPISNTSRANLNKLLTDYTEMKKAILHVYWEEFQKDPVGLMSRVAQPASKKIDQNKLKPEMDEKGNLTTAGFACSQCGQPLFVYKLEQVSEKGKAYTNYVGRCNVAEHEKLILLAQLKPEKDSDEAVTYSLGKFGQRALDFYSIHVTKESTHPVKPLAQIAGNRYASYPVGKALSDACMGTIASFLSKYQDIIIEHQKVVKGNQKRLESLRELAGKENLEYPSVTLPPQPHTKEGVDAYNEVIARVRMWVNLNLWQKLKLSRDDAKPLLRLKGFPSFPLVERQANEVDWWDMVCNVKKLINEKKEDGKVFWQNLAGYKRQEALRPYLSSEEDRKKGKKFARYQLGDLLLHLEKKHGEYDWGKVYDEAWERIDKKVEGLSKHIKLEEERRSEDAQSKAALTDWLRAKASFVIEGLKEADKDEFCRCELKLQKWYGDLRGKPFAIEAENSILDISGFSKQYNCAFIWQKDGVKKLNLYLIINYFKGGKLRFKKIKPEAFEANRFYTVINKKSGEIVPMEVNFNFDDPNLIILPLAFGKRQGREFIWNDLLSLETGSLKLANGRVIEKTLYNRRTRQDEPALFVALTFERREVLDSSNIKPMNLIGVDRGENIPAVIALTDPEGCPLSRFKDSLGNPTHILRIGESYKEKQRTIQAKKEVEQRRAGGYSRKYASKAKNLADDMVRNTARDLLYYAVTQDAMLIFENLSRGFGRQGKRTFMAERQYTRMEDWLTAKLAYEGLPSKTYLSKTLAQYTSKTCSNCGFTITSADYDRVLEKLKKTATGWMTTINGKELKVEGQITYYNRYKRQNVVKDLSVELDRLSEESVNNDISSWTKGRSGEALSLLKKRFSHRPVQEKFVCLNCGFETHADEQAALNIARSWLFLRSQEYKKYQTNKTTGNTDKRAFVETWQSFYRKKLKEVWKPAV

SEQ ID NO: 46473 - protein, 979 aa, synthetic construct
  REGION 1..979: note = engineered CasX variant
QEIKRINKIRRRLVKDSNTKKAGKTGPMKTLLVRVMTPDLRERLENLRKKPENIPQPISNTSRANLNKLLTDYTEMKKAILHVYWEEFQKDPVGLMSRVAQPASKKIDQNKLKPEMDEKGNLTTAGFACSQCGQPLFVYKLEQVSEKGKAYTNYVGRCNVAEHEKLILLAQLKPEKDSDEAVTYSLGKFGQRALDFYSIHVTKESTHPVKPLAQIAGNRYASHPVGKALSDACMGTIASFLSKYQDIIIEHQKVVKGNQKRLESLRELAGKENLEYPSVTLPPQPHTKEGVDAYNEVIARVRMWVNLNLWQKLKLSRDDAKPLLRLKGFPSFPLVERQANEVDWWDMVCNVKKLINEKKEDGKVFWQNLAGYKRQEALRPYLSSEEDRKKGKKFARYQLGDLLLHLEKKHGEYDWGKVYDEAWERIDKKVEGLSKHIKLEEERRSEDAQSKAALTDWLRAKASFVIEGLKEADKDEFCRCELKLQKWYGDLRGKPFAIEAENSILDISGFSKQYNCAFIWQKDGVKKLNLYLIINYFKGGKLRFKKIKPEAFEANRFYTVINKKSGEIVPMEVNFNFDDPNLIILPLAFGKRQGREFIWNDLLSLETGSLKLANGRVIEKTLYNRRTRQDEPALFVALTFERREVLDSSNIKPMNLIGVDRGENIPAVIALTDPEGCPLSRFKDSLGNPTHILRIGESYKEKQRTIQAKKEVEQRRAGGYSRKYASKAKNLADDMVRNTARDLLYYAVTQDAMLIFENLSRGFGRQGKRTFMAERQYTRMEDWLTAKLAYEGLPSKTYLSKTLAQYTSKTCSNCGFTITSADYDRVLEKLKKTATGWMTTINGKELKVEGQITYYNRYKRQNVVKDLSVELDRLSEESVNNDISSWTKGRSGEALSLLKKRFSHRPVQEKFVCLNCGFETHADEQAALNIARSWLFLRSQEYKKYQTNKTTGNTDKRAFVETWQSFYRKKLKEVWKPAV

SEQ ID NO: 46474 - protein, 979 aa, synthetic construct
  REGION 1..979: note = engineered CasX variant
QEIKRINKIRRRLVKDSNTKKAGKTGPMKTLLVRVMTPDLRERLENLRKKPENIPQPISNTSRANLNKLLTDYTEMKKAILHVYWEEFQKDPVGLMSRVAQPASKKIDQNKLKPEMDEKGNLTTAGFACSQCGQPLFVYKLEQVSEKGKAYTNYVGRCNVAEHEKLILLAQLKPEKDSDEAVTYSLGKFGQRALDFYSIHVTKESTHPVKPLAQIAGNRYASSPVGKALSDACMGTIASFLSKYQDIIIEHQKVVKGNQKRLESLRELAGKENLEYPSVTLPPQPHTKEGVDAYNEVIARVRMWVNLNLWQKLKLSRDDAKPLLRLKGFPSFPLVERQANEVDWWDMVCNVKKLINEKKEDGKVFWQNLAGYKRQEALRPYLSSEEDRKKGKKFARYQLGDLLLHLEKKHGEYDWGKVYDEAWERIDKKVEGLSKHIKLEEERRSEDAQSKAALTDWLRAKASFVIEGLKEADKDEFCRCELKLQKWYGDLRGKPFAIEAENSILDISGFSKQYNCAFIWQKDGVKKLNLYLIINYFKGGKLRFKKIKPEAFEANRFYTVINKKSGEIVPMEVNFNFDDPNLIILPLAFGKRQGREFIWNDLLSLETGSLKLANGRVIEKTLYNRRTRQDEPALFVALTFERREVLDSSNIKPMNLIGVDRGENIPAVIALTDPEGCPLSRFKDSLGNPTHILRIGESYKEKQRTIQAKKEVEQRRAGGYSRKYASKAKNLADDMVRNTARDLLYYAVTQDAMLIFENLSRGFGRQGKRTFMAERQYTRMEDWLTAKLAYEGLPSKTYLSKTLAQYTSKTCSNCGFTITSADYDRVLEKLKKTATGWMTTINGKELKVEGQITYYNRYKRQNVVKDLSVELDRLSEESVNNDISSWTKGRSGEALSLLKKRFSHRPVQEKFVCLNCGFETHADEQAALNIARSWLFLRSQEYKKYQTNKTTGNTDKRAFVETWQSFYRKKLKEVWKPAV

SEQ ID NO: 46475 - protein, 979 aa, synthetic construct
  REGION 1..979: note = engineered CasX variant
QEIKRINKIRRRLVKDSNTKKAGKTGPMKTLLVRVMTPDLRERLENLRKKPENIPQPISNTSRANLNKLLTDYTEMKKAILHVYWEEFQKDPVGLMSRVAQPASKKIDQNKLKPEMDEKGNLTTAGFACSQCGQPLFVYKLEQVSEKGKAYTNYVGRCNVAEHEKLILLAQLKPEKDSDEAVTYSLGKFGQRALDFYSIHVTKESTHPVKPLAQIAGNRYASTPVGKALSDACMGTIASFLSKYQDIIIEHQKVVKGNQKRLESLRELAGKENLEYPSVTLPPQPHTKEGVDAYNEVIARVRMWVNLNLWQKLKLSRDDAKPLLRLKGFPSFPLVERQANEVDWWDMVCNVKKLINEKKEDGKVFWQNLAGYKRQEALRPYLSSEEDRKKGKKFARYQLGDLLLHLEKKHGEYDWGKVYDEAWERIDKKVEGLSKHIKLEEERRSEDAQSKAALTDWLRAKASFVIEGLKEADKDEFCRCELKLQKWYGDLRGKPFAIEAENSILDISGFSKQYNCAFIWQKDGVKKLNLYLIINYFKGGKLRFKKIKPEAFEANRFYTVINKKSGEIVPMEVNFNFDDPNLIILPLAFGKRQGREFIWNDLLSLETGSLKLANGRVIEKTLYNRRTRQDEPALFVALTFERREVLDSSNIKPMNLIGVDRGENIPAVIALTDPEGCPLSRFKDSLGNPTHILRIGESYKEKQRTIQAKKEVEQRRAGGYSRKYASKAKNLADDMVRNTARDLLYYAVTQDAMLIFENLSRGFGRQGKRTFMAERQYTRMEDWLTAKLAYEGLPSKTYLSKTLAQYTSKTCSNCGFTITSADYDRVLEKLKKTATGWMTTINGKELKVEGQITYYNRYKRQNVVKDLSVELDRLSEESVNNDISSWTKGRSGEALSLLKKRFSHRPVQEKFVCLNCGFETHADEQAALNIARSWLFLRSQEYKKYQTNKTTGNTDKRAFVETWQSFYRKKLKEVWKPAV

SEQ ID NO: 46476 - protein, 979 aa, synthetic construct
  REGION 1..979: note = engineered CasX variant
QEIKRINKIRRRLVKDSNTKKAGKTGPMKTLLVRVMTPDLRERLENLRKKPENIPQPISNTSRANLNKLLTDYTEMKKAILHVYWEEFQKDPVGLMSRVAQPASKKIDQNKLKPEMDEKGNLTTAGFACSQCGQPLFVYKLEQVSEKGKAYTNYVGRCNVAEHEKLILLAQLKPEKDSDEAVTYSLGKFGQRALDFYSIHVTKESTHPVKPLAQIAGNRYASAPVGKALSDACMGTIASFLSKYQDIIIEHQKVVKGNQKRLESLRELAGKENLEYPSVTLPPQPHTKEGVDAYNEVIARVRMWVNLNLWQKLKLSRDDAKPLLRLKGFPSFPLVERQANEVDWWDMVCNVKKLINEKKEDGKVFWQNLAGYKRQEALRPYLSSEEDRKKGKKFARYQLGDLLLHLEKKHGEYDWGKVYDEAWERIDKKVEGLSKHIKLEEERRSEDAQSKAALTDWLRAKASFVIEGLKEADKDEFCRCELKLQKWYGDLRGKPFAIEAENSILDISGFSKQYNCAFIWQKDGVKKLNLYLIINYFKGGKLRFKKIKPEAFEANRFYTVINKKSGEIVPMEVNFNFDDPNLIILPLAFGKRQGREFIWNDLLSLETGSLKLANGRVIEKTLYNRRTRQDEPALFVALTFERREVLDSSNIKPMNLIGVDRGENIPAVIALTDPEGCPLSRFKDSLGNPTHILRIGESYKEKQRTIQAKKEVEQRRAGGYSRKYASKAKNLADDMVRNTARDLLYYAVTQDAMLIFENLSRGFGRQGKRTFMAERQYTRMEDWLTAKLAYEGLPSKTYLSKTLAQYTSKTCSNCGFTITSADYDRVLEKLKKTATGWMTTINGKELKVEGQITYYNRYKRQNVVKDLSVELDRLSEESVNNDISSWTKGRSGEALSLLKKRFSHRPVQEKFVCLNCGFETHADEQAALNIARSWLFLRSQEYKKYQTNKTTGNTDKRAFVETWQSFYRKKLKEVWKPAV

SEQ ID NO: 46477 - protein, 979 aa, synthetic construct
  REGION 1..979: note = engineered CasX variant
QEIKRINKIRRRLVKDSNTKKAGKTGPMKTLLVRVMTPDLRERLENLRKKPENIPQPISNTSRANLNKLLTDYTEMKKAILHVYWEEFQKDPVGLMSRVAQPASKKIDQNKLKPEMDEKGNLTTAGFACSQCGQPLFVYKLEQVSEKGKAYTNYVGRCNVAEHEKLILLAQLKPEKDSDEAVTYSLGKFGQRALDFYSIHVTKESTHPVKPLAQIAGNRYASVPVGKALSDACMGTIASFLSKYQDIIIEHQKVVKGNQKRLESLRELAGKENLEYPSVTLPPQPHTKEGVDAYNEVIARVRMWVNLNLWQKLKLSRDDAKPLLRLKGFPSFPLVERQANEVDWWDMVCNVKKLINEKKEDGKVFWQNLAGYKRQEALRPYLSSEEDRKKGKKFARYQLGDLLLHLEKKHGEYDWGKVYDEAWERIDKKVEGLSKHIKLEEERRSEDAQSKAALTDWLRAKASFVIEGLKEADKDEFCRCELKLQKWYGDLRGKPFAIEAENSILDISGFSKQYNCAFIWQKDGVKKLNLYLIINYFKGGKLRFKKIKPEAFEANRFYTVINKKSGEIVPMEVNFNFDDPNLIILPLAFGKRQGREFIWNDLLSLETGSLKLANGRVIEKTLYNRRTRQDEPALFVALTFERREVLDSSNIKPMNLIGVDRGENIPAVIALTDPEGCPLSRFKDSLGNPTHILRIGESYKEKQRTIQAKKEVEQRRAGGYSRKYASKAKNLADDMVRNTARDLLYYAVTQDAMLIFENLSRGFGRQGKRTFMAERQYTRMEDWLTAKLAYEGLPSKTYLSKTLAQYTSKTCSNCGFTITSADYDRVLEKLKKTATGWMTTINGKELKVEGQITYYNRYKRQNVVKDLSVELDRLSEESVNNDISSWTKGRSGEALSLLKKRFSHRPVQEKFVCLNCGFETHADEQAALNIARSWLFLRSQEYKKYQTNKTTGNTDKRAFVETWQSFYRKKLKEVWKPAV

SEQ ID NO: 46478 - protein, 979 aa, synthetic construct
  REGION 1..979: note = engineered CasX variant
QEIKRINKIRRRLVKDSNTKKAGKTGPMKTLLVRVMTPDLRERLENLRKKPENIPQPISNTSRANLNKLLTDYTEMKKAILHVYWEEFQKDPVGLMSRVAQPASKKIDQNKLKPEMDEKGNLTTAGFACSQCGQPLFVYKLEQVSEKGKAYTNYVGRCNVAEHEKLIKLAQLKPEKDSDEAVTYSLGKFGQRALDFYSIHVTKESTHPVKPLAQIAGNRYASGPVGKALSDACMGTIASFLSKYQDIIIEHQKVVKGNQKRLESLRELAGKENLEYPSVTLPPQPHTKEGVDAYNEVIARVRMWVNLNLWQKLKLSRDDAKPLLRLKGFPSFPLVERQANEVDWWDMVCNVKKLINEKKEDGKVFWQNLAGYKRQEALRPYLSSEEDRKKGKKFARYQLGDLLLHLEKKHGEYDWGKVYDEAWERIDKKVEGLSKHIKLEEERRSEDAQSKAALTDWLRAKASFVIEGLKEADKDEFCRCELKLQKWYGDLRGKPFAIEAENSILDISGFSKQYNCAFIWQKDGVKKLNLYLIINYFKGGKLRFKKIKPEAFEANRFYTVINKKSGEIVPMEVNFNFDDPNLIILPLAFGKRQGREFIWNDLLSLETGSLKLANGRVIEKTLYNRRTRQDEPALFVALTFERREVLDSSNIKPMNLIGVDRGENIPAVIALTDPEGCPLSRFKDSLGNPTHILRIGESYKEKQRTIQAKKEVEQRRAGGYSRKYASKAKNLADDMVRNTARDLLYYAVTQDAMLIFENLSRGFGRQGKRTFMAERQYTRMEDWLTAKLAYEGLPSKTYLSKTLAQYTSKTCSNCGFTITSADYDRVLEKLKKTATGWMTTINGKELKVEGQITYYNRYKRQNVVKDLSVELDRLSEESVNNDISSWTKGRSGEALSLLKKRFSHRPVQEKFVCLNCGFETHADEQAALNIARSWLFLRSQEYKKYQTNKTTGNTDKRAFVETWQSFYRKKLKEVWKPAV

SEQ ID NO: 46479 - protein, 978 aa, synthetic construct
  REGION 1..978: note = engineered CasX variant
QEIKRINKIRRRLVKDSNTKKAGKTGPMKTLLVRVMTPDLRERLENLRKKPENIPQPISNTSRANLNKLLTDYTEMKKAILHVYWEEFQKDPVGLMSRVAQPASKKIDQNKLKPEMDEKGNLTTAGFACSQCGQPLFVYKLEQVSEKGKAYTNYVGRCNVAEHEKLILLAQLKPEKDSDEAVTYSLGKFGQRALDFYSIHVTKESTHPVKPLAQIAGNRYASPVGKALSDACMGTIASFLSKYQDIIIEHQKVVKGNQKRLESLRELAGKENLEYPSVTLPPQPHTKEGVDAYNEVIARVRMWVNLNLWQKLKLSRDDAKPLLRLKGFPSFPLVERQANEVDWWDMVCNVKKLINEKKEDGKVFWQNLAGYKRQEALRPYLSSEEDRKKGKKFARYQLGDLLLHLEKKHGEYDWGKVYDEAWERIDKKVEGLSKHIKLEEERRSEDAQSKAALTDWLRAKASFVIEGLKEADKDEFCRCELKLQKWYGDLRGKPFAIEAENSILDISGFSKQYNCAFIWQKDGVKKLNLYLIINYFKGGKLRFKKIKPEAFEANRFYTVINKKSGEIVPMEVNFNFDDPNLIILPLAFGKRQGREFIWNDLLSLETGSLKLANGRVIEKTLYNRRTRQDEPALFVALTFERREVLDSSNIKPMNLIGVDRGENIPAVIALTDPEGCPLSRFKDSLGNPTHILRIGESYKEKQRTIQAKKEVEQRRAGGYSRKYASKAKNLADDMVRNTARDLLYYAVTQDAMLIFENLSRGFGRQGKRTFMAERQYTRMEDWLTAKLAYEGLPSKTYLSKTLAQYTSKTCSNCGFTITSADYDRVLEKLKKTATGWMTTINGKELKVEGQITYYNRYKRQNVVKDLSVELDRLSEESVNNDISSWTKGRSGEALSLLKKRFSHRPVQEKFVCLNCGFETHADEQAALNIARSWLFLRSQEYKKYQTNKTTGNTDKRAFVETWQSFYRKKLKEVWKPAV

SEQ ID NO: 46480 - protein, 978 aa, synthetic construct
  REGION 1..978: note = engineered CasX variant
QEIKRINKIRRRLVKDSNTKKAGKTGPMKTLLVRVMTPDLRERLENLRKKPENIPQPISNTSRANLNKLLTDYTEMKKAILHVYWEEFQKDPVGLMSRVAQPASKKIDQNKLKPEMDEKGNLTTAGFACSQCGQPLFVYKLEQVSEKGKAYTNYVGRCNVAEHEKLILLAQLKPEKDSDEAVTYSLGKFGQRALDFYSIHVTKESTHPVKPLAQIAGNRYASYPVGKALSDACMGTIASFLSKYQDIIIEHQKVVKGNQKRLESLRELAGKENLEYPSVTLPPQPHTKEGVDAYNEVIARVRMWVNLNLWQKLKLSRDDAKPLLRLKGFPSFPLVERQANEVDWWDMVCNVKKLINEKKEDGKVFWQNLAGYKRQEALRPYLSSEEDRKKGKKFARYQLGDLLLHLEKKHGEDWGDVYDEAWERIDKKVEGLSKHIKLEEERRSEDAQSKAALTDWLRAKASFVIEGLKEADKDEFCRCELKLQKWYGDLRGKPFAIEAENSILDISGFSKQYNCAFIWQKDGVKKLNLYLIINYFKGGKLRFKKIKPEAFEANRFYTVINKKSGEIVPMEVNFNFDDPNLIILPLAFGKRQGREFIWNDLLSLETGSLKLANGRVIEKTLYNRRTRQDEPALFVALTFERREVLDSSNIKPMNLIGVDRGENIPAVIALTDPEGCPLSRFKDSLGNPTHILRIGESYKEKQRTIQAKKEVEQRRAGGYSRKYASKAKNLADDMVRNTARDLLYYAVTQDAMLIFENLSRGFGRQGKRTFMAERQYTRMEDWLTAKLAYEGLPSKTYLSKTLAQYTSKTCSNCGFTITSADYDRVLEKLKKTATGWMTTINGKELKVEGQITYYNRYKRQNVVKDLSVELDRLSEESVNNDISSWTKGRSGEALSLLKKRFSHRPVQEKFVCLNCGFETHADEQAALNIARSWLFLRSQEYKKYQTNKTTGNTDKRAFVETWQSFYRKKLKEVWKPAV

SEQ ID NO: 46481 - protein, 978 aa, synthetic construct
  REGION 1..978: note = engineered CasX variant
QEIKRINKIRRRLVKDSNTKKAGKTGPMKTLLVRVMTPDLRERLENLRKKPENIPQPISNTSRANLNKLLTDYTEMKKAILHVYWEEFQKDPVGLMSRVAQPASKKIDQNKLKPEMDEKGNLTTAGFACSQCGQPLFVYKLEQVSEKGKAYTNYVGRCNVAEHEKLILLAQLKPEKDSDEAVTYSLGKFGQRALDFYSIHVTKESTHPVKPLAQIAGNRYASHPVGKALSDACMGTIASFLSKYQDIIIEHQKVVKGNQKRLESLRELAGKENLEYPSVTLPPQPHTKEGVDAYNEVIARVRMWVNLNLWQKLKLSRDDAKPLLRLKGFPSFPLVERQANEVDWWDMVCNVKKLINEKKEDGKVFWQNLAGYKRQEALRPYLSSEEDRKKGKKFARYQLGDLLLHLEKKHGEDWGDVYDEAWERIDKKVEGLSKHIKLEEERRSEDAQSKAALTDWLRAKASFVIEGLKEADKDEFCRCELKLQKWYGDLRGKPFAIEAENSILDISGFSKQYNCAFIWQKDGVKKLNLYLIINYFKGGKLRFKKIKPEAFEANRFYTVINKKSGEIVPMEVNFNFDDPNLIILPLAFGKRQGREFIWNDLLSLETGSLKLANGRVIEKTLYNRRTRQDEPALFVALTFERREVLDSSNIKPMNLIGVDRGENIPAVIALTDPEGCPLSRFKDSLGNPTHILRIGESYKEKQRTIQAKKEVEQRRAGGYSRKYASKAKNLADDMVRNTARDLLYYAVTQDAMLIFENLSRGFGRQGKRTFMAERQYTRMEDWLTAKLAYEGLPSKTYLSKTLAQYTSKTCSNCGFTITSADYDRVLEKLKKTATGWMTTINGKELKVEGQITYYNRYKRQNVVKDLSVELDRLSEESVNNDISSWTKGRSGEALSLLKKRFSHRPVQEKFVCLNCGFETHADEQAALNIARSWLFLRSQEYKKYQTNKTTGNTDKRAFVETWQSFYRKKLKEVWKPAV

SEQ ID NO: 46482 - protein, 978 aa, synthetic construct
  REGION 1..978: note = engineered CasX variant
QEIKRINKIRRRLVKDSNTKKAGKTGPMKTLLVRVMTPDLRERLENLRKKPENIPQPISNTSRANLNKLLTDYTEMKKAILHVYWEEFQKDPVGLMSRVAQPASKKIDQNKLKPEMDEKGNLTTAGFACSQCGQPLFVYKLEQVSEKGKAYTNYVGRCNVAEHEKLILLAQLKPEKDSDEAVTYSLGKFGQRALDFYSIHVTKESTHPVKPLAQIAGNRYASSPVGKALSDACMGTIASFLSKYQDIIIEHQKVVKGNQKRLESLRELAGKENLEYPSVTLPPQPHTKEGVDAYNEVIARVRMWVNLNLWQKLKLSRDDAKPLLRLKGFPSFPLVERQANEVDWWDMVCNVKKLINEKKEDGKVFWQNLAGYKRQEALRPYLSSEEDRKKGKKFARYQLGDLLLHLEKKHGEDWGDVYDEAWERIDKKVEGLSKHIKLEEERRSEDAQSKAALTDWLRAKASFVIEGLKEADKDEFCRCELKLQKWYGDLRGKPFAIEAENSILDISGFSKQYNCAFIWQKDGVKKLNLYLIINYFKGGKLRFKKIKPEAFEANRFYTVINKKSGEIVPMEVNFNFDDPNLIILPLAFGKRQGREFIWNDLLSLETGSLKLANGRVIEKTLYNRRTRQDEPALFVALTFERREVLDSSNIKPMNLIGVDRGENIPAVIALTDPEGCPLSRFKDSLGNPTHILRIGESYKEKQRTIQAKKEVEQRRAGGYSRKYASKAKNLADDMVRNTARDLLYYAVTQDAMLIFENLSRGFGRQGKRTFMAERQYTRMEDWLTAKLAYEGLPSKTYLSKTLAQYTSKTCSNCGFTITSADYDRVLEKLKKTATGWMTTINGKELKVEGQITYYNRYKRQNVVKDLSVELDRLSEESVNNDISSWTKGRSGEALSLLKKRFSHRPVQEKFVCLNCGFETHADEQAALNIARSWLFLRSQEYKKYQTNKTTGNTDKRAFVETWQSFYRKKLKEVWKPAV

SEQ ID NO: 46483 - protein, 978 aa, synthetic construct
  REGION 1..978: note = engineered CasX variant
QEIKRINKIRRRLVKDSNTKKAGKTGPMKTLLVRVMTPDLRERLENLRKKPENIPQPISNTSRANLNKLLTDYTEMKKAILHVYWEEFQKDPVGLMSRVAQPASKKIDQNKLKPEMDEKGNLTTAGFACSQCGQPLFVYKLEQVSEKGKAYTNYVGRCNVAEHEKLILLAQLKPEKDSDEAVTYSLGKFGQRALDFYSIHVTKESTHPVKPLAQIAGNRYASTPVGKALSDACMGTIASFLSKYQDIIIEHQKVVKGNQKRLESLRELAGKENLEYPSVTLPPQPHTKEGVDAYNEVIARVRMWVNLNLWQKLKLSRDDAKPLLRLKGFPSFPLVERQANEVDWWDMVCNVKKLINEKKEDGKVFWQNLAGYKRQEALRPYLSSEEDRKKGKKFARYQLGDLLLHLEKKHGEDWGDVYDEAWERIDKKVEGLSKHIKLEEERRSEDAQSKAALTDWLRAKASFVIEGLKEADKDEFCRCELKLQKWYGDLRGKPFAIEAENSILDISGFSKQYNCAFIWQKDGVKKLNLYLIINYFKGGKLRFKKIKPEAFEANRFYTVINKKSGEIVPMEVNFNFDDPNLIILPLAFGKRQGREFIWNDLLSLETGSLKLANGRVIEKTLYNRRTRQDEPALFVALTFERREVLDSSNIKPMNLIGVDRGENIPAVIALTDPEGCPLSRFKDSLGNPTHILRIGESYKEKQRTIQAKKEVEQRRAGGYSRKYASKAKNLADDMVRNTARDLLYYAVTQDAMLIFENLSRGFGRQGKRTFMAERQYTRMEDWLTAKLAYEGLPSKTYLSKTLAQYTSKTCSNCGFTITSADYDRVLEKLKKTATGWMTTINGKELKVEGQITYYNRYKRQNVVKDLSVELDRLSEESVNNDISSWTKGRSGEALSLLKKRFSHRPVQEKFVCLNCGFETHADEQAALNIARSWLFLRSQEYKKYQTNKTTGNTDKRAFVETWQSFYRKKLKEVWKPAV

SEQ ID NO: 46484 - protein, 978 aa, synthetic construct
  REGION 1..978: note = engineered CasX variant
QEIKRINKIRRRLVKDSNTKKAGKTGPMKTLLVRVMTPDLRERLENLRKKPENIPQPISNTSRANLNKLLTDYTEMKKAILHVYWEEFQKDPVGLMSRVAQPASKKIDQNKLKPEMDEKGNLTTAGFACSQCGQPLFVYKLEQVSEKGKAYTNYVGRCNVAEHEKLILLAQLKPEKDSDEAVTYSLGKFGQRALDFYSIHVTKESTHPVKPLAQIAGNRYASAPVGKALSDACMGTIASFLSKYQDIIIEHQKVVKGNQKRLESLRELAGKENLEYPSVTLPPQPHTKEGVDAYNEVIARVRMWVNLNLWQKLKLSRDDAKPLLRLKGFPSFPLVERQANEVDWWDMVCNVKKLINEKKEDGKVFWQNLAGYKRQEALRPYLSSEEDRKKGKKFARYQLGDLLLHLEKKHGEDWGDVYDEAWERIDKKVEGLSKHIKLEEERRSEDAQSKAALTDWLRAKASFVIEGLKEADKDEFCRCELKLQKWYGDLRGKPFAIEAENSILDISGFSKQYNCAFIWQKDGVKKLNLYLIINYFKGGKLRFKKIKPEAFEANRFYTVINKKSGEIVPMEVNFNFDDPNLIILPLAFGKRQGREFIWNDLLSLETGSLKLANGRVIEKTLYNRRTRQDEPALFVALTFERREVLDSSNIKPMNLIGVDRGENIPAVIALTDPEGCPLSRFKDSLGNPTHILRIGESYKEKQRTIQAKKEVEQRRAGGYSRKYASKAKNLADDMVRNTARDLLYYAVTQDAMLIFENLSRGFGRQGKRTFMAERQYTRMEDWLTAKLAYEGLPSKTYLSKTLAQYTSKTCSNCGFTITSADYDRVLEKLKKTATGWMTTINGKELKVEGQITYYNRYKRQNVVKDLSVELDRLSEESVNNDISSWTKGRSGEALSLLKKRFSHRPVQEKFVCLNCGFETHADEQAALNIARSWLFLRSQEYKKYQTNKTTGNTDKRAFVETWQSFYRKKLKEVWKPAV

SEQ ID NO: 46485 - protein, 978 aa, synthetic construct
  REGION 1..978: note = engineered CasX variant
QEIKRINKIRRRLVKDSNTKKAGKTGPMKTLLVRVMTPDLRERLENLRKKPENIPQPISNTSRANLNKLLTDYTEMKKAILHVYWEEFQKDPVGLMSRVAQPASKKIDQNKLKPEMDEKGNLTTAGFACSQCGQPLFVYKLEQVSEKGKAYTNYVGRCNVAEHEKLILLAQLKPEKDSDEAVTYSLGKFGQRALDFYSIHVTKESTHPVKPLAQIAGNRYASVPVGKALSDACMGTIASFLSKYQDIIIEHQKVVKGNQKRLESLRELAGKENLEYPSVTLPPQPHTKEGVDAYNEVIARVRMWVNLNLWQKLKLSRDDAKPLLRLKGFPSFPLVERQANEVDWWDMVCNVKKLINEKKEDGKVFWQNLAGYKRQEALRPYLSSEEDRKKGKKFARYQLGDLLLHLEKKHGEDWGDVYDEAWERIDKKVEGLSKHIKLEEERRSEDAQSKAALTDWLRAKASFVIEGLKEADKDEFCRCELKLQKWYGDLRGKPFAIEAENSILDISGFSKQYNCAFIWQKDGVKKLNLYLIINYFKGGKLRFKKIKPEAFEANRFYTVINKKSGEIVPMEVNFNFDDPNLIILPLAFGKRQGREFIWNDLLSLETGSLKLANGRVIEKTLYNRRTRQDEPALFVALTFERREVLDSSNIKPMNLIGVDRGENIPAVIALTDPEGCPLSRFKDSLGNPTHILRIGESYKEKQRTIQAKKEVEQRRAGGYSRKYASKAKNLADDMVRNTARDLLYYAVTQDAMLIFENLSRGFGRQGKRTFMAERQYTRMEDWLTAKLAYEGLPSKTYLSKTLAQYTSKTCSNCGFTITSADYDRVLEKLKKTATGWMTTINGKELKVEGQITYYNRYKRQNVVKDLSVELDRLSEESVNNDISSWTKGRSGEALSLLKKRFSHRPVQEKFVCLNCGFETHADEQAALNIARSWLFLRSQEYKKYQTNKTTGNTDKRAFVETWQSFYRKKLKEVWKPAV

SEQ ID NO: 46486 - protein, 978 aa, synthetic construct
  REGION 1..978: note = engineered CasX variant
QEIKRINKIRRRLVKDSNTKKAGKTGPMKTLLVRVMTPDLRERLENLRKKPENIPQPISNTSRANLNKLLTDYTEMKKAILHVYWEEFQKDPVGLMSRVAQPASKKIDQNKLKPEMDEKGNLTTAGFACSQCGQPLFVYKLEQVSEKGKAYTNYVGRCNVAEHEKLIKLAQLKPEKDSDEAVTYSLGKFGQRALDFYSIHVTKESTHPVKPLAQIAGNRYASGPVGKALSDACMGTIASFLSKYQDIIIEHQKVVKGNQKRLESLRELAGKENLEYPSVTLPPQPHTKEGVDAYNEVIARVRMWVNLNLWQKLKLSRDDAKPLLRLKGFPSFPLVERQANEVDWWDMVCNVKKLINEKKEDGKVFWQNLAGYKRQEALRPYLSSEEDRKKGKKFARYQLGDLLLHLEKKHGEDWGDVYDEAWERIDKKVEGLSKHIKLEEERRSEDAQSKAALTDWLRAKASFVIEGLKEADKDEFCRCELKLQKWYGDLRGKPFAIEAENSILDISGFSKQYNCAFIWQKDGVKKLNLYLIINYFKGGKLRFKKIKPEAFEANRFYTVINKKSGEIVPMEVNFNFDDPNLIILPLAFGKRQGREFIWNDLLSLETGSLKLANGRVIEKTLYNRRTRQDEPALFVALTFERREVLDSSNIKPMNLIGVDRGENIPAVIALTDPEGCPLSRFKDSLGNPTHILRIGESYKEKQRTIQAKKEVEQRRAGGYSRKYASKAKNLADDMVRNTARDLLYYAVTQDAMLIFENLSRGFGRQGKRTFMAERQYTRMEDWLTAKLAYEGLPSKTYLSKTLAQYTSKTCSNCGFTITSADYDRVLEKLKKTATGWMTTINGKELKVEGQITYYNRYKRQNVVKDLSVELDRLSEESVNNDISSWTKGRSGEALSLLKKRFSHRPVQEKFVCLNCGFETHADEQAALNIARSWLFLRSQEYKKYQTNKTTGNTDKRAFVETWQSFYRKKLKEVWKPAV

SEQ ID NO: 46487 - protein, 977 aa, synthetic construct
  REGION 1..977: note = engineered CasX variant
QEIKRINKIRRRLVKDSNTKKAGKTGPMKTLLVRVMTPDLRERLENLRKKPENIPQPISNTSRANLNKLLTDYTEMKKAILHVYWEEFQKDPVGLMSRVAQPASKKIDQNKLKPEMDEKGNLTTAGFACSQCGQPLFVYKLEQVSEKGKAYTNYVGRCNVAEHEKLILLAQLKPEKDSDEAVTYSLGKFGQRALDFYSIHVTKESTHPVKPLAQIAGNRYASPVGKALSDACMGTIASFLSKYQDIIIEHQKVVKGNQKRLESLRELAGKENLEYPSVTLPPQPHTKEGVDAYNEVIARVRMWVNLNLWQKLKLSRDDAKPLLRLKGFPSFPLVERQANEVDWWDMVCNVKKLINEKKEDGKVFWQNLAGYKRQEALRPYLSSEEDRKKGKKFARYQLGDLLLHLEKKHGEDWGDVYDEAWERIDKKVEGLSKHIKLEEERRSEDAQSKAALTDWLRAKASFVIEGLKEADKDEFCRCELKLQKWYGDLRGKPFAIEAENSILDISGFSKQYNCAFIWQKDGVKKLNLYLIINYFKGGKLRFKKIKPEAFEANRFYTVINKKSGEIVPMEVNFNFDDPNLIILPLAFGKRQGREFIWNDLLSLETGSLKLANGRVIEKTLYNRRTRQDEPALFVALTFERREVLDSSNIKPMNLIGVDRGENIPAVIALTDPEGCPLSRFKDSLGNPTHILRIGESYKEKQRTIQAKKEVEQRRAGGYSRKYASKAKNLADDMVRNTARDLLYYAVTQDAMLIFENLSRGFGRQGKRTFMAERQYTRMEDWLTAKLAYEGLPSKTYLSKTLAQYTSKTCSNCGFTITSADYDRVLEKLKKTATGWMTTINGKELKVEGQITYYNRYKRQNVVKDLSVELDRLSEESVNNDISSWTKGRSGEALSLLKKRFSHRPVQEKFVCLNCGFETHADEQAALNIARSWLFLRSQEYKKYQTNKTTGNTDKRAFVETWQSFYRKKLKEVWKPAV

SEQ ID NO: 46488 - protein, 978 aa, synthetic construct
  REGION 1..978: note = engineered CasX variant
QEIKRINKIRRRLVKDSNTKKAGKTGPMKTLLVRVMTPDLRERLENLRKKPENIPQPISNTSRANLNKLLTDYTEMKKAILHVYWEEFQKDPVGLMSRVAQPASKKIDQNKLKPEMDEKGNLTTAGFACSQCGQPLFVYKLEQVSEKGKAYTNYVGRCNVAEHEKLILLAQLKPEKDSDEAVTYSLGKFGQRALDFYSIHVTKESTHPVKPLAQIAGNRYASYPVGKALSDACMGTIASFLSKYQDIIIEHQKVVKGNQKRLESLRELAGKENLEYPSVTLPPQPHTKEGVDAYNEVIARVRMWVNLNLWQKLKLSRDDAKPLLRLKGFPSFPLVERQANEVDWWDMVCNVKKLINEKKEDGKVFWQNLAGYKRQEALRPYLSSEEDRKKGKKFARYQLGDLLLHLEKKHGEDWGKVYGEAWERIDKKVEGLSKHIKLEEERRSEDAQSKAALTDWLRAKASFVIEGLKEADKDEFCRCELKLQKWYGDLRGKPFAIEAENSILDISGFSKQYNCAFIWQKDGVKKLNLYLIINYFKGGKLRFKKIKPEAFEANRFYTVINKKSGEIVPMEVNFNFDDPNLIILPLAFGKRQGREFIWNDLLSLETGSLKLANGRVIEKTLYNRRTRQDEPALFVALTFERREVLDSSNIKPMNLIGVDRGENIPAVIALTDPEGCPLSRFKDSLGNPTHILRIGESYKEKQRTIQAKKEVEQRRAGGYSRKYASKAKNLADDMVRNTARDLLYYAVTQDAMLIFENLSRGFGRQGKRTFMAERQYTRMEDWLTAKLAYEGLPSKTYLSKTLAQYTSKTCSNCGFTITSADYDRVLEKLKKTATGWMTTINGKELKVEGQITYYNRYKRQNVVKDLSVELDRLSEESVNNDISSWTKGRSGEALSLLKKRFSHRPVQEKFVCLNCGFETHADEQAALNIARSWLFLRSQEYKKYQTNKTTGNTDKRAFVETWQSFYRKKLKEVWKPAV

SEQ ID NO: 46489 - protein, 978 aa, synthetic construct
  REGION 1..978: note = engineered CasX variant
QEIKRINKIRRRLVKDSNTKKAGKTGPMKTLLVRVMTPDLRERLENLRKKPENIPQPISNTSRANLNKLLTDYTEMKKAILHVYWEEFQKDPVGLMSRVAQPASKKIDQNKLKPEMDEKGNLTTAGFACSQCGQPLFVYKLEQVSEKGKAYTNYVGRCNVAEHEKLILLAQLKPEKDSDEAVTYSLGKFGQRALDFYSIHVTKESTHPVKPLAQIAGNRYASHPVGKALSDACMGTIASFLSKYQDIIIEHQKVVKGNQKRLESLRELAGKENLEYPSVTLPPQPHTKEGVDAYNEVIARVRMWVNLNLWQKLKLSRDDAKPLLRLKGFPSFPLVERQANEVDWWDMVCNVKKLINEKKEDGKVFWQNLAGYKRQEALRPYLSSEEDRKKGKKFARYQLGDLLLHLEKKHGEDWGKVYGEAWERIDKKVEGLSKHIKLEEERRSEDAQSKAALTDWLRAKASFVIEGLKEADKDEFCRCELKLQKWYGDLRGKPFAIEAENSILDISGFSKQYNCAFIWQKDGVKKLNLYLIINYFKGGKLRFKKIKPEAFEANRFYTVINKKSGEIVPMEVNFNFDDPNLIILPLAFGKRQGREFIWNDLLSLETGSLKLANGRVIEKTLYNRRTRQDEPALFVALTFERREVLDSSNIKPMNLIGVDRGENIPAVIALTDPEGCPLSRFKDSLGNPTHILRIGESYKEKQRTIQAKKEVEQRRAGGYSRKYASKAKNLADDMVRNTARDLLYYAVTQDAMLIFENLSRGFGRQGKRTFMAERQYTRMEDWLTAKLAYEGLPSKTYLSKTLAQYTSKTCSNCGFTITSADYDRVLEKLKKTATGWMTTINGKELKVEGQITYYNRYKRQNVVKDLSVELDRLSEESVNNDISSWTKGRSGEALSLLKKRFSHRPVQEKFVCLNCGFETHADEQAALNIARSWLFLRSQEYKKYQTNKTTGNTDKRAFVETWQSFYRKKLKEVWKPAV

SEQ ID NO: 46490 - protein, 978 aa, synthetic construct
  REGION 1..978: note = engineered CasX variant
QEIKRINKIRRRLVKDSNTKKAGKTGPMKTLLVRVMTPDLRERLENLRKKPENIPQPISNTSRANLNKLLTDYTEMKKAILHVYWEEFQKDPVGLMSRVAQPASKKIDQNKLKPEMDEKGNLTTAGFACSQCGQPLFVYKLEQVSEKGKAYTNYVGRCNVAEHEKLILLAQLKPEKDSDEAVTYSLGKFGQRALDFYSIHVTKESTHPVKPLAQIAGNRYASSPVGKALSDACMGTIASFLSKYQDIIIEHQKVVKGNQKRLESLRELAGKENLEYPSVTLPPQPHTKEGVDAYNEVIARVRMWVNLNLWQKLKLSRDDAKPLLRLKGFPSFPLVERQANEVDWWDMVCNVKKLINEKKEDGKVFWQNLAGYKRQEALRPYLSSEEDRKKGKKFARYQLGDLLLHLEKKHGEDWGKVYGEAWERIDKKVEGLSKHIKLEEERRSEDAQSKAALTDWLRAKASFVIEGLKEADKDEFCRCELKLQKWYGDLRGKPFAIEAENSILDISGFSKQYNCAFIWQKDGVKKLNLYLIINYFKGGKLRFKKIKPEAFEANRFYTVINKKSGEIVPMEVNFNFDDPNLIILPLAFGKRQGREFIWNDLLSLETGSLKLANGRVIEKTLYNRRTRQDEPALFVALTFERREVLDSSNIKPMNLIGVDRGENIPAVIALTDPEGCPLSRFKDSLGNPTHILRIGESYKEKQRTIQAKKEVEQRRAGGYSRKYASKAKNLADDMVRNTARDLLYYAVTQDAMLIFENLSRGFGRQGKRTFMAERQYTRMEDWLTAKLAYEGLPSKTYLSKTLAQYTSKTCSNCGFTITSADYDRVLEKLKKTATGWMTTINGKELKVEGQITYYNRYKRQNVVKDLSVELDRLSEESVNNDISSWTKGRSGEALSLLKKRFSHRPVQEKFVCLNCGFETHADEQAALNIARSWLFLRSQEYKKYQTNKTTGNTDKRAFVETWQSFYRKKLKEVWKPAV

SEQ ID NO: 46491 - protein, 978 aa, synthetic construct
  REGION 1..978: note = engineered CasX variant
QEIKRINKIRRRLVKDSNTKKAGKTGPMKTLLVRVMTPDLRERLENLRKKPENIPQPISNTSRANLNKLLTDYTEMKKAILHVYWEEFQKDPVGLMSRVAQPASKKIDQNKLKPEMDEKGNLTTAGFACSQCGQPLFVYKLEQVSEKGKAYTNYVGRCNVAEHEKLILLAQLKPEKDSDEAVTYSLGKFGQRALDFYSIHVTKESTHPVKPLAQIAGNRYASTPVGKALSDACMGTIASFLSKYQDIIIEHQKVVKGNQKRLESLRELAGKENLEYPSVTLPPQPHTKEGVDAYNEVIARVRMWVNLNLWQKLKLSRDDAKPLLRLKGFPSFPLVERQANEVDWWDMVCNVKKLINEKKEDGKVFWQNLAGYKRQEALRPYLSSEEDRKKGKKFARYQLGDLLLHLEKKHGEDWGKVYGEAWERIDKKVEGLSKHIKLEEERRSEDAQSKAALTDWLRAKASFVIEGLKEADKDEFCRCELKLQKWYGDLRGKPFAIEAENSILDISGFSKQYNCAFIWQKDGVKKLNLYLIINYFKGGKLRFKKIKPEAFEANRFYTVINKKSGEIVPMEVNFNFDDPNLIILPLAFGKRQGREFIWNDLLSLETGSLKLANGRVIEKTLYNRRTRQDEPALFVALTFERREVLDSSNIKPMNLIGVDRGENIPAVIALTDPEGCPLSRFKDSLGNPTHILRIGESYKEKQRTIQAKKEVEQRRAGGYSRKYASKAKNLADDMVRNTARDLLYYAVTQDAMLIFENLSRGFGRQGKRTFMAERQYTRMEDWLTAKLAYEGLPSKTYLSKTLAQYTSKTCSNCGFTITSADYDRVLEKLKKTATGWMTTINGKELKVEGQITYYNRYKRQNVVKDLSVELDRLSEESVNNDISSWTKGRSGEALSLLKKRFSHRPVQEKFVCLNCGFETHADEQAALNIARSWLFLRSQEYKKYQTNKTTGNTDKRAFVETWQSFYRKKLKEVWKPAV

SEQ ID NO: 46492 - protein, 978 aa, synthetic construct
  REGION 1..978: note = engineered CasX variant
QEIKRINKIRRRLVKDSNTKKAGKTGPMKTLLVRVMTPDLRERLENLRKKPENIPQPISNTSRANLNKLLTDYTEMKKAILHVYWEEFQKDPVGLMSRVAQPASKKIDQNKLKPEMDEKGNLTTAGFACSQCGQPLFVYKLEQVSEKGKAYTNYVGRCNVAEHEKLILLAQLKPEKDSDEAVTYSLGKFGQRALDFYSIHVTKESTHPVKPLAQIAGNRYASAPVGKALSDACMGTIASFLSKYQDIIIEHQKVVKGNQKRLESLRELAGKENLEYPSVTLPPQPHTKEGVDAYNEVIARVRMWVNLNLWQKLKLSRDDAKPLLRLKGFPSFPLVERQANEVDWWDMVCNVKKLINEKKEDGKVFWQNLAGYKRQEALRPYLSSEEDRKKGKKFARYQLGDLLLHLEKKHGEDWGKVYGEAWERIDKKVEGLSKHIKLEEERRSEDAQSKAALTDWLRAKASFVIEGLKEADKDEFCRCELKLQKWYGDLRGKPFAIEAENSILDISGFSKQYNCAFIWQKDGVKKLNLYLIINYFKGGKLRFKKIKPEAFEANRFYTVINKKSGEIVPMEVNFNFDDPNLIILPLAFGKRQGREFIWNDLLSLETGSLKLANGRVIEKTLYNRRTRQDEPALFVALTFERREVLDSSNIKPMNLIGVDRGENIPAVIALTDPEGCPLSRFKDSLGNPTHILRIGESYKEKQRTIQAKKEVEQRRAGGYSRKYASKAKNLADDMVRNTARDLLYYAVTQDAMLIFENLSRGFGRQGKRTFMAERQYTRMEDWLTAKLAYEGLPSKTYLSKTLAQYTSKTCSNCGFTITSADYDRVLEKLKKTATGWMTTINGKELKVEGQITYYNRYKRQNVVKDLSVELDRLSEESVNNDISSWTKGRSGEALSLLKKRFSHRPVQEKFVCLNCGFETHADEQAALNIARSWLFLRSQEYKKYQTNKTTGNTDKRAFVETWQSFYRKKLKEVWKPAV

SEQ ID NO: 46493 - protein, 978 aa, synthetic construct
  REGION 1..978: note = engineered CasX variant
QEIKRINKIRRRLVKDSNTKKAGKTGPMKTLLVRVMTPDLRERLENLRKKPENIPQPISNTSRANLNKLLTDYTEMKKAILHVYWEEFQKDPVGLMSRVAQPASKKIDQNKLKPEMDEKGNLTTAGFACSQCGQPLFVYKLEQVSEKGKAYTNYVGRCNVAEHEKLILLAQLKPEKDSDEAVTYSLGKFGQRALDFYSIHVTKESTHPVKPLAQIAGNRYASVPVGKALSDACMGTIASFLSKYQDIIIEHQKVVKGNQKRLESLRELAGKENLEYPSVTLPPQPHTKEGVDAYNEVIARVRMWVNLNLWQKLKLSRDDAKPLLRLKGFPSFPLVERQANEVDWWDMVCNVKKLINEKKEDGKVFWQNLAGYKRQEALRPYLSSEEDRKKGKKFARYQLGDLLLHLEKKHGEDWGKVYGEAWERIDKKVEGLSKHIKLEEERRSEDAQSKAALTDWLRAKASFVIEGLKEADKDEFCRCELKLQKWYGDLRGKPFAIEAENSILDISGFSKQYNCAFIWQKDGVKKLNLYLIINYFKGGKLRFKKIKPEAFEANRFYTVINKKSGEIVPMEVNFNFDDPNLIILPLAFGKRQGREFIWNDLLSLETGSLKLANGRVIEKTLYNRRTRQDEPALFVALTFERREVLDSSNIKPMNLIGVDRGENIPAVIALTDPEGCPLSRFKDSLGNPTHILRIGESYKEKQRTIQAKKEVEQRRAGGYSRKYASKAKNLADDMVRNTARDLLYYAVTQDAMLIFENLSRGFGRQGKRTFMAERQYTRMEDWLTAKLAYEGLPSKTYLSKTLAQYTSKTCSNCGFTITSADYDRVLEKLKKTATGWMTTINGKELKVEGQITYYNRYKRQNVVKDLSVELDRLSEESVNNDISSWTKGRSGEALSLLKKRFSHRPVQEKFVCLNCGFETHADEQAALNIARSWLFLRSQEYKKYQTNKTTGNTDKRAFVETWQSFYRKKLKEVWKPAV

SEQ ID NO: 46494 - protein, 978 aa, synthetic construct
  REGION 1..978: note = engineered CasX variant
QEIKRINKIRRRLVKDSNTKKAGKTGPMKTLLVRVMTPDLRERLENLRKKPENIPQPISNTSRANLNKLLTDYTEMKKAILHVYWEEFQKDPVGLMSRVAQPASKKIDQNKLKPEMDEKGNLTTAGFACSQCGQPLFVYKLEQVSEKGKAYTNYVGRCNVAEHEKLIKLAQLKPEKDSDEAVTYSLGKFGQRALDFYSIHVTKESTHPVKPLAQIAGNRYASGPVGKALSDACMGTIASFLSKYQDIIIEHQKVVKGNQKRLESLRELAGKENLEYPSVTLPPQPHTKEGVDAYNEVIARVRMWVNLNLWQKLKLSRDDAKPLLRLKGFPSFPLVERQANEVDWWDMVCNVKKLINEKKEDGKVFWQNLAGYKRQEALRPYLSSEEDRKKGKKFARYQLGDLLLHLEKKHGEDWGKVYGEAWERIDKKVEGLSKHIKLEEERRSEDAQSKAALTDWLRAKASFVIEGLKEADKDEFCRCELKLQKWYGDLRGKPFAIEAENSILDISGFSKQYNCAFIWQKDGVKKLNLYLIINYFKGGKLRFKKIKPEAFEANRFYTVINKKSGEIVPMEVNFNFDDPNLIILPLAFGKRQGREFIWNDLLSLETGSLKLANGRVIEKTLYNRRTRQDEPALFVALTFERREVLDSSNIKPMNLIGVDRGENIPAVIALTDPEGCPLSRFKDSLGNPTHILRIGESYKEKQRTIQAKKEVEQRRAGGYSRKYASKAKNLADDMVRNTARDLLYYAVTQDAMLIFENLSRGFGRQGKRTFMAERQYTRMEDWLTAKLAYEGLPSKTYLSKTLAQYTSKTCSNCGFTITSADYDRVLEKLKKTATGWMTTINGKELKVEGQITYYNRYKRQNVVKDLSVELDRLSEESVNNDISSWTKGRSGEALSLLKKRFSHRPVQEKFVCLNCGFETHADEQAALNIARSWLFLRSQEYKKYQTNKTTGNTDKRAFVETWQSFYRKKLKEVWKPAV

SEQ ID NO: 46495 - protein, 977 aa, synthetic construct
  REGION 1..977: note = engineered CasX variant
QEIKRINKIRRRLVKDSNTKKAGKTGPMKTLLVRVMTPDLRERLENLRKKPENIPQPISNTSRANLNKLLTDYTEMKKAILHVYWEEFQKDPVGLMSRVAQPASKKIDQNKLKPEMDEKGNLTTAGFACSQCGQPLFVYKLEQVSEKGKAYTNYVGRCNVAEHEKLILLAQLKPEKDSDEAVTYSLGKFGQRALDFYSIHVTKESTHPVKPLAQIAGNRYASPVGKALSDACMGTIASFLSKYQDIIIEHQKVVKGNQKRLESLRELAGKENLEYPSVTLPPQPHTKEGVDAYNEVIARVRMWVNLNLWQKLKLSRDDAKPLLRLKGFPSFPLVERQANEVDWWDMVCNVKKLINEKKEDGKVFWQNLAGYKRQEALRPYLSSEEDRKKGKKFARYQLGDLLLHLEKKHGEDWGKVYGEAWERIDKKVEGLSKHIKLEEERRSEDAQSKAALTDWLRAKASFVIEGLKEADKDEFCRCELKLQKWYGDLRGKPFAIEAENSILDISGFSKQYNCAFIWQKDGVKKLNLYLIINYFKGGKLRFKKIKPEAFEANRFYTVINKKSGEIVPMEVNFNFDDPNLIILPLAFGKRQGREFIWNDLLSLETGSLKLANGRVIEKTLYNRRTRQDEPALFVALTFERREVLDSSNIKPMNLIGVDRGENIPAVIALTDPEGCPLSRFKDSLGNPTHILRIGESYKEKQRTIQAKKEVEQRRAGGYSRKYASKAKNLADDMVRNTARDLLYYAVTQDAMLIFENLSRGFGRQGKRTFMAERQYTRMEDWLTAKLAYEGLPSKTYLSKTLAQYTSKTCSNCGFTITSADYDRVLEKLKKTATGWMTTINGKELKVEGQITYYNRYKRQNVVKDLSVELDRLSEESVNNDISSWTKGRSGEALSLLKKRFSHRPVQEKFVCLNCGFETHADEQAALNIARSWLFLRSQEYKKYQTNKTTGNTDKRAFVETWQSFYRKKLKEVWKPAV

SEQ ID NO: 46496 - protein, 978 aa, synthetic construct
  REGION 1..978: note = engineered CasX variant
QEIKRINKIRRRLVKDSNTKKAGKTGPMKTLLVRVMTPDLRERLENLRKKPENIPQPISNTSRANLNKLLTDYTEMKKAILHVYWEEFQKDPVGLMSRVAQPASKKIDQNKLKPEMDEKGNLTTAGFACSQCGQPLFVYKLEQVSEKGKAYTNYVGRCNVAEHEKLILLAQLKPEKDSDEAVTYSLGKFGQRALDFYSIHVTKESTHPVKPLAQIAGNRYASYPVGKALSDACMGTIASFLSKYQDIIIEHQKVVKGNQKRLESLRELAGKENLEYPSVTLPPQPHTKEGVDAYNEVIARVRMWVNLNLWQKLKLSRDDAKPLLRLKGFPSFPLVERQANEVDWWDMVCNVKKLINEKKEDGKVFWQNLAGYKRQEALRPYLSSEEDRKKGKKFARYQLGDLLLHLEKKHGEDWGKVYDEAWERIDKKVEGLSKHIKLEEERRSEDAQSKAALTDWLRAKASFVIEGKKEADKDEFCRCELKLQKWYGDLRGKPFAIEAENSILDISGFSKQYNCAFIWQKDGVKKLNLYLIINYFKGGKLRFKKIKPEAFEANRFYTVINKKSGEIVPMEVNFNFDDPNLIILPLAFGKRQGREFIWNDLLSLETGSLKLANGRVIEKTLYNRRTRQDEPALFVALTFERREVLDSSNIKPMNLIGVDRGENIPAVIALTDPEGCPLSRFKDSLGNPTHILRIGESYKEKQRTIQAKKEVEQRRAGGYSRKYASKAKNLADDMVRNTARDLLYYAVTQDAMLIFENLSRGFGRQGKRTFMAERQYTRMEDWLTAKLAYEGLPSKTYLSKTLAQYTSKTCSNCGFTITSADYDRVLEKLKKTATGWMTTINGKELKVEGQITYYNRYKRQNVVKDLSVELDRLSEESVNNDISSWTKGRSGEALSLLKKRFSHRPVQEKFVCLNCGFETHADEQAALNIARSWLFLRSQEYKKYQTNKTTGNTDKRAFVETWQSFYRKKLKEVWKPAV

SEQ ID NO: 46497 - protein, 978 aa, synthetic construct
  REGION 1..978: note = engineered CasX variant
QEIKRINKIRRRLVKDSNTKKAGKTGPMKTLLVRVMTPDLRERLENLRKKPENIPQPISNTSRANLNKLLTDYTEMKKAILHVYWEEFQKDPVGLMSRVAQPASKKIDQNKLKPEMDEKGNLTTAGFACSQCGQPLFVYKLEQVSEKGKAYTNYVGRCNVAEHEKLILLAQLKPEKDSDEAVTYSLGKFGQRALDFYSIHVTKESTHPVKPLAQIAGNRYASHPVGKALSDACMGTIASFLSKYQDIIIEHQKVVKGNQKRLESLRELAGKENLEYPSVTLPPQPHTKEGVDAYNEVIARVRMWVNLNLWQKLKLSRDDAKPLLRLKGFPSFPLVERQANEVDWWDMVCNVKKLINEKKEDGKVFWQNLAGYKRQEALRPYLSSEEDRKKGKKFARYQLGDLLLHLEKKHGEDWGKVYDEAWERIDKKVEGLSKHIKLEEERRSEDAQSKAALTDWLRAKASFVIEGKKEADKDEFCRCELKLQKWYGDLRGKPFAIEAENSILDISGFSKQYNCAFIWQKDGVKKLNLYLIINYFKGGKLRFKKIKPEAFEANRFYTVINKKSGEIVPMEVNFNFDDPNLIILPLAFGKRQGREFIWNDLLSLETGSLKLANGRVIEKTLYNRRTRQDEPALFVALTFERREVLDSSNIKPMNLIGVDRGENIPAVIALTDPEGCPLSRFKDSLGNPTHILRIGESYKEKQRTIQAKKEVEQRRAGGYSRKYASKAKNLADDMVRNTARDLLYYAVTQDAMLIFENLSRGFGRQGKRTFMAERQYTRMEDWLTAKLAYEGLPSKTYLSKTLAQYTSKTCSNCGFTITSADYDRVLEKLKKTATGWMTTINGKELKVEGQITYYNRYKRQNVVKDLSVELDRLSEESVNNDISSWTKGRSGEALSLLKKRFSHRPVQEKFVCLNCGFETHADEQAALNIARSWLFLRSQEYKKYQTNKTTGNTDKRAFVETWQSFYRKKLKEVWKPAV

SEQ ID NO: 46498 - protein, 978 aa, synthetic construct
  REGION 1..978: note = engineered CasX variant
QEIKRINKIRRRLVKDSNTKKAGKTGPMKTLLVRVMTPDLRERLENLRKKPENIPQPISNTSRANLNKLLTDYTEMKKAILHVYWEEFQKDPVGLMSRVAQPASKKIDQNKLKPEMDEKGNLTTAGFACSQCGQPLFVYKLEQVSEKGKAYTNYVGRCNVAEHEKLILLAQLKPEKDSDEAVTYSLGKFGQRALDFYSIHVTKESTHPVKPLAQIAGNRYASSPVGKALSDACMGTIASFLSKYQDIIIEHQKVVKGNQKRLESLRELAGKENLEYPSVTLPPQPHTKEGVDAYNEVIARVRMWVNLNLWQKLKLSRDDAKPLLRLKGFPSFPLVERQANEVDWWDMVCNVKKLINEKKEDGKVFWQNLAGYKRQEALRPYLSSEEDRKKGKKFARYQLGDLLLHLEKKHGEDWGKVYDEAWERIDKKVEGLSKHIKLEEERRSEDAQSKAALTDWLRAKASFVIEGKKEADKDEFCRCELKLQKWYGDLRGKPFAIEAENSILDISGFSKQYNCAFIWQKDGVKKLNLYLIINYFKGGKLRFKKIKPEAFEANRFYTVINKKSGEIVPMEVNFNFDDPNLIILPLAFGKRQGREFIWNDLLSLETGSLKLANGRVIEKTLYNRRTRQDEPALFVALTFERREVLDSSNIKPMNLIGVDRGENIPAVIALTDPEGCPLSRFKDSLGNPTHILRIGESYKEKQRTIQAKKEVEQRRAGGYSRKYASKAKNLADDMVRNTARDLLYYAVTQDAMLIFENLSRGFGRQGKRTFMAERQYTRMEDWLTAKLAYEGLPSKTYLSKTLAQYTSKTCSNCGFTITSADYDRVLEKLKKTATGWMTTINGKELKVEGQITYYNRYKRQNVVKDLSVELDRLSEESVNNDISSWTKGRSGEALSLLKKRFSHRPVQEKFVCLNCGFETHADEQAALNIARSWLFLRSQEYKKYQTNKTTGNTDKRAFVETWQSFYRKKLKEVWKPAV

SEQ ID NO: 46499 - protein, 978 aa, synthetic construct
  REGION 1..978: note = engineered CasX variant
QEIKRINKIRRRLVKDSNTKKAGKTGPMKTLLVRVMTPDLRERLENLRKKPENIPQPISNTSRANLNKLLTDYTEMKKAILHVYWEEFQKDPVGLMSRVAQPASKKIDQNKLKPEMDEKGNLTTAGFACSQCGQPLFVYKLEQVSEKGKAYTNYVGRCNVAEHEKLILLAQLKPEKDSDEAVTYSLGKFGQRALDFYSIHVTKESTHPVKPLAQIAGNRYASTPVGKALSDACMGTIASFLSKYQDIIIEHQKVVKGNQKRLESLRELAGKENLEYPSVTLPPQPHTKEGVDAYNEVIARVRMWVNLNLWQKLKLSRDDAKPLLRLKGFPSFPLVERQANEVDWWDMVCNVKKLINEKKEDGKVFWQNLAGYKRQEALRPYLSSEEDRKKGKKFARYQLGDLLLHLEKKHGEDWGKVYDEAWERIDKKVEGLSKHIKLEEERRSEDAQSKAALTDWLRAKASFVIEGKKEADKDEFCRCELKLQKWYGDLRGKPFAIEAENSILDISGFSKQYNCAFIWQKDGVKKLNLYLIINYFKGGKLRFKKIKPEAFEANRFYTVINKKSGEIVPMEVNFNFDDPNLIILPLAFGKRQGREFIWNDLLSLETGSLKLANGRVIEKTLYNRRTRQDEPALFVALTFERREVLDSSNIKPMNLIGVDRGENIPAVIALTDPEGCPLSRFKDSLGNPTHILRIGESYKEKQRTIQAKKEVEQRRAGGYSRKYASKAKNLADDMVRNTARDLLYYAVTQDAMLIFENLSRGFGRQGKRTFMAERQYTRMEDWLTAKLAYEGLPSKTYLSKTLAQYTSKTCSNCGFTITSADYDRVLEKLKKTATGWMTTINGKELKVEGQITYYNRYKRQNVVKDLSVELDRLSEESVNNDISSWTKGRSGEALSLLKKRFSHRPVQEKFVCLNCGFETHADEQAALNIARSWLFLRSQEYKKYQTNKTTGNTDKRAFVETWQSFYRKKLKEVWKPAV

SEQ ID NO: 46500 - protein, 978 aa, synthetic construct
  REGION 1..978: note = engineered CasX variant
QEIKRINKIRRRLVKDSNTKKAGKTGPMKTLLVRVMTPDLRERLENLRKKPENIPQPISNTSRANLNKLLTDYTEMKKAILHVYWEEFQKDPVGLMSRVAQPASKKIDQNKLKPEMDEKGNLTTAGFACSQCGQPLFVYKLEQVSEKGKAYTNYVGRCNVAEHEKLILLAQLKPEKDSDEAVTYSLGKFGQRALDFYSIHVTKESTHPVKPLAQIAGNRYASAPVGKALSDACMGTIASFLSKYQDIIIEHQKVVKGNQKRLESLRELAGKENLEYPSVTLPPQPHTKEGVDAYNEVIARVRMWVNLNLWQKLKLSRDDAKPLLRLKGFPSFPLVERQANEVDWWDMVCNVKKLINEKKEDGKVFWQNLAGYKRQEALRPYLSSEEDRKKGKKFARYQLGDLLLHLEKKHGEDWGKVYDEAWERIDKKVEGLSKHIKLEEERRSEDAQSKAALTDWLRAKASFVIEGKKEADKDEFCRCELKLQKWYGDLRGKPFAIEAENSILDISGFSKQYNCAFIWQKDGVKKLNLYLIINYFKGGKLRFKKIKPEAFEANRFYTVINKKSGEIVPMEVNFNFDDPNLIILPLAFGKRQGREFIWNDLLSLETGSLKLANGRVIEKTLYNRRTRQDEPALFVALTFERREVLDSSNIKPMNLIGVDRGENIPAVIALTDPEGCPLSRFKDSLGNPTHILRIGESYKEKQRTIQAKKEVEQRRAGGYSRKYASKAKNLADDMVRNTARDLLYYAVTQDAMLIFENLSRGFGRQGKRTFMAERQYTRMEDWLTAKLAYEGLPSKTYLSKTLAQYTSKTCSNCGFTITSADYDRVLEKLKKTATGWMTTINGKELKVEGQITYYNRYKRQNVVKDLSVELDRLSEESVNNDISSWTKGRSGEALSLLKKRFSHRPVQEKFVCLNCGFETHADEQAALNIARSWLFLRSQEYKKYQTNKTTGNTDKRAFVETWQSFYRKKLKEVWKPAV

SEQ ID NO: 46501 - protein, 978 aa, synthetic construct
  REGION 1..978: note = engineered CasX variant
QEIKRINKIRRRLVKDSNTKKAGKTGPMKTLLVRVMTPDLRERLENLRKKPENIPQPISNTSRANLNKLLTDYTEMKKAILHVYWEEFQKDPVGLMSRVAQPASKKIDQNKLKPEMDEKGNLTTAGFACSQCGQPLFVYKLEQVSEKGKAYTNYVGRCNVAEHEKLILLAQLKPEKDSDEAVTYSLGKFGQRALDFYSIHVTKESTHPVKPLAQIAGNRYASVPVGKALSDACMGTIASFLSKYQDIIIEHQKVVKGNQKRLESLRELAGKENLEYPSVTLPPQPHTKEGVDAYNEVIARVRMWVNLNLWQKLKLSRDDAKPLLRLKGFPSFPLVERQANEVDWWDMVCNVKKLINEKKEDGKVFWQNLAGYKRQEALRPYLSSEEDRKKGKKFARYQLGDLLLHLEKKHGEDWGKVYDEAWERIDKKVEGLSKHIKLEEERRSEDAQSKAALTDWLRAKASFVIEGKKEADKDEFCRCELKLQKWYGDLRGKPFAIEAENSILDISGFSKQYNCAFIWQKDGVKKLNLYLIINYFKGGKLRFKKIKPEAFEANRFYTVINKKSGEIVPMEVNFNFDDPNLIILPLAFGKRQGREFIWNDLLSLETGSLKLANGRVIEKTLYNRRTRQDEPALFVALTFERREVLDSSNIKPMNLIGVDRGENIPAVIALTDPEGCPLSRFKDSLGNPTHILRIGESYKEKQRTIQAKKEVEQRRAGGYSRKYASKAKNLADDMVRNTARDLLYYAVTQDAMLIFENLSRGFGRQGKRTFMAERQYTRMEDWLTAKLAYEGLPSKTYLSKTLAQYTSKTCSNCGFTITSADYDRVLEKLKKTATGWMTTINGKELKVEGQITYYNRYKRQNVVKDLSVELDRLSEESVNNDISSWTKGRSGEALSLLKKRFSHRPVQEKFVCLNCGFETHADEQAALNIARSWLFLRSQEYKKYQTNKTTGNTDKRAFVETWQSFYRKKLKEVWKPAV

SEQ ID NO: 46502 - protein, 978 aa, synthetic construct
  REGION 1..978: note = engineered CasX variant
QEIKRINKIRRRLVKDSNTKKAGKTGPMKTLLVRVMTPDLRERLENLRKKPENIPQPISNTSRANLNKLLTDYTEMKKAILHVYWEEFQKDPVGLMSRVAQPASKKIDQNKLKPEMDEKGNLTTAGFACSQCGQPLFVYKLEQVSEKGKAYTNYVGRCNVAEHEKLIKLAQLKPEKDSDEAVTYSLGKFGQRALDFYSIHVTKESTHPVKPLAQIAGNRYASGPVGKALSDACMGTIASFLSKYQDIIIEHQKVVKGNQKRLESLRELAGKENLEYPSVTLPPQPHTKEGVDAYNEVIARVRMWVNLNLWQKLKLSRDDAKPLLRLKGFPSFPLVERQANEVDWWDMVCNVKKLINEKKEDGKVFWQNLAGYKRQEALRPYLSSEEDRKKGKKFARYQLGDLLLHLEKKHGEDWGKVYDEAWERIDKKVEGLSKHIKLEEERRSEDAQSKAALTDWLRAKASFVIEGKKEADKDEFCRCELKLQKWYGDLRGKPFAIEAENSILDISGFSKQYNCAFIWQKDGVKKLNLYLIINYFKGGKLRFKKIKPEAFEANRFYTVINKKSGEIVPMEVNFNFDDPNLIILPLAFGKRQGREFIWNDLLSLETGSLKLANGRVIEKTLYNRRTRQDEPALFVALTFERREVLDSSNIKPMNLIGVDRGENIPAVIALTDPEGCPLSRFKDSLGNPTHILRIGESYKEKQRTIQAKKEVEQRRAGGYSRKYASKAKNLADDMVRNTARDLLYYAVTQDAMLIFENLSRGFGRQGKRTFMAERQYTRMEDWLTAKLAYEGLPSKTYLSKTLAQYTSKTCSNCGFTITSADYDRVLEKLKKTATGWMTTINGKELKVEGQITYYNRYKRQNVVKDLSVELDRLSEESVNNDISSWTKGRSGEALSLLKKRFSHRPVQEKFVCLNCGFETHADEQAALNIARSWLFLRSQEYKKYQTNKTTGNTDKRAFVETWQSFYRKKLKEVWKPAV

SEQ ID NO: 46503 - protein, 977 aa, synthetic construct
  REGION 1..977: note = engineered CasX variant
QEIKRINKIRRRLVKDSNTKKAGKTGPMKTLLVRVMTPDLRERLENLRKKPENIPQPISNTSRANLNKLLTDYTEMKKAILHVYWEEFQKDPVGLMSRVAQPASKKIDQNKLKPEMDEKGNLTTAGFACSQCGQPLFVYKLEQVSEKGKAYTNYVGRCNVAEHEKLILLAQLKPEKDSDEAVTYSLGKFGQRALDFYSIHVTKESTHPVKPLAQIAGNRYASPVGKALSDACMGTIASFLSKYQDIIIEHQKVVKGNQKRLESLRELAGKENLEYPSVTLPPQPHTKEGVDAYNEVIARVRMWVNLNLWQKLKLSRDDAKPLLRLKGFPSFPLVERQANEVDWWDMVCNVKKLINEKKEDGKVFWQNLAGYKRQEALRPYLSSEEDRKKGKKFARYQLGDLLLHLEKKHGEDWGKVYDEAWERIDKKVEGLSKHIKLEEERRSEDAQSKAALTDWLRAKASFVIEGKKEADKDEFCRCELKLQKWYGDLRGKPFAIEAENSILDISGFSKQYNCAFIWQKDGVKKLNLYLIINYFKGGKLRFKKIKPEAFEANRFYTVINKKSGEIVPMEVNFNFDDPNLIILPLAFGKRQGREFIWNDLLSLETGSLKLANGRVIEKTLYNRRTRQDEPALFVALTFERREVLDSSNIKPMNLIGVDRGENIPAVIALTDPEGCPLSRFKDSLGNPTHILRIGESYKEKQRTIQAKKEVEQRRAGGYSRKYASKAKNLADDMVRNTARDLLYYAVTQDAMLIFENLSRGFGRQGKRTFMAERQYTRMEDWLTAKLAYEGLPSKTYLSKTLAQYTSKTCSNCGFTITSADYDRVLEKLKKTATGWMTTINGKELKVEGQITYYNRYKRQNVVKDLSVELDRLSEESVNNDISSWTKGRSGEALSLLKKRFSHRPVQEKFVCLNCGFETHADEQAALNIARSWLFLRSQEYKKYQTNKTTGNTDKRAFVETWQSFYRKKLKEVWKPAV

SEQ ID NO: 46504 - protein, 978 aa, synthetic construct
  REGION 1..978: note = engineered CasX variant
QEIKRINKIRRRLVKDSNTKKAGKTGPMKTLLVRVMTPDLRERLENLRKKPENIPQPISNTSRANLNKLLTDYTEMKKAILHVYWEEFQKDPVGLMSRVAQPASKKIDQNKLKPEMDEKGNLTTAGFACSQCGQPLFVYKLEQVSEKGKAYTNYVGRCNVAEHEKLILLAQLKPEKDSDEAVTYSLGKFGQRALDFYSIHVTKESTHPVKPLAQIAGNRYASYPVGKALSDACMGTIASFLSKYQDIIIEHQKVVKGNQKRLESLRELAGKENLEYPSVTLPPQPHTKEGVDAYNEVIARVRMWVNLNLWQKLKLSRDDAKPLLRLKGFPSFPLVERQANEVDWWDMVCNVKKLINEKKEDGKVFWQNLAGYKRQEALRPYLSSEEDRKKGKKFARYQLGDLLLHLEKKHGEDWGKVYDEAWERIDKKVEGLSKHIKLEEERRSEDAQSKAALTDWLRAKASFVIEGSKEADKDEFCRCELKLQKWYGDLRGKPFAIEAENSILDISGFSKQYNCAFIWQKDGVKKLNLYLIINYFKGGKLRFKKIKPEAFEANRFYTVINKKSGEIVPMEVNFNFDDPNLIILPLAFGKRQGREFIWNDLLSLETGSLKLANGRVIEKTLYNRRTRQDEPALFVALTFERREVLDSSNIKPMNLIGVDRGENIPAVIALTDPEGCPLSRFKDSLGNPTHILRIGESYKEKQRTIQAKKEVEQRRAGGYSRKYASKAKNLADDMVRNTARDLLYYAVTQDAMLIFENLSRGFGRQGKRTFMAERQYTRMEDWLTAKLAYEGLPSKTYLSKTLAQYTSKTCSNCGFTITSADYDRVLEKLKKTATGWMTTINGKELKVEGQITYYNRYKRQNVVKDLSVELDRLSEESVNNDISSWTKGRSGEALSLLKKRFSHRPVQEKFVCLNCGFETHADEQAALNIARSWLFLRSQEYKKYQTNKTTGNTDKRAFVETWQSFYRKKLKEVWKPAV

SEQ ID NO: 46505 - protein, 978 aa, synthetic construct
  REGION 1..978: note = engineered CasX variant
QEIKRINKIRRRLVKDSNTKKAGKTGPMKTLLVRVMTPDLRERLENLRKKPENIPQPISNTSRANLNKLLTDYTEMKKAILHVYWEEFQKDPVGLMSRVAQPASKKIDQNKLKPEMDEKGNLTTAGFACSQCGQPLFVYKLEQVSEKGKAYTNYVGRCNVAEHEKLILLAQLKPEKDSDEAVTYSLGKFGQRALDFYSIHVTKESTHPVKPLAQIAGNRYASHPVGKALSDACMGTIASFLSKYQDIIIEHQKVVKGNQKRLESLRELAGKENLEYPSVTLPPQPHTKEGVDAYNEVIARVRMWVNLNLWQKLKLSRDDAKPLLRLKGFPSFPLVERQANEVDWWDMVCNVKKLINEKKEDGKVFWQNLAGYKRQEALRPYLSSEEDRKKGKKFARYQLGDLLLHLEKKHGEDWGKVYDEAWERIDKKVEGLSKHIKLEEERRSEDAQSKAALTDWLRAKASFVIEGSKEADKDEFCRCELKLQKWYGDLRGKPFAIEAENSILDISGFSKQYNCAFIWQKDGVKKLNLYLIINYFKGGKLRFKKIKPEAFEANRFYTVINKKSGEIVPMEVNFNFDDPNLIILPLAFGKRQGREFIWNDLLSLETGSLKLANGRVIEKTLYNRRTRQDEPALFVALTFERREVLDSSNIKPMNLIGVDRGENIPAVIALTDPEGCPLSRFKDSLGNPTHILRIGESYKEKQRTIQAKKEVEQRRAGGYSRKYASKAKNLADDMVRNTARDLLYYAVTQDAMLIFENLSRGFGRQGKRTFMAERQYTRMEDWLTAKLAYEGLPSKTYLSKTLAQYTSKTCSNCGFTITSADYDRVLEKLKKTATGWMTTINGKELKVEGQITYYNRYKRQNVVKDLSVELDRLSEESVNNDISSWTKGRSGEALSLLKKRFSHRPVQEKFVCLNCGFETHADEQAALNIARSWLFLRSQEYKKYQTNKTTGNTDKRAFVETWQSFYRKKLKEVWKPAV

SEQ ID NO: 46506 - protein, 978 aa, synthetic construct
  REGION 1..978: note = engineered CasX variant
QEIKRINKIRRRLVKDSNTKKAGKTGPMKTLLVRVMTPDLRERLENLRKKPENIPQPISNTSRANLNKLLTDYTEMKKAILHVYWEEFQKDPVGLMSRVAQPASKKIDQNKLKPEMDEKGNLTTAGFACSQCGQPLFVYKLEQVSEKGKAYTNYVGRCNVAEHEKLILLAQLKPEKDSDEAVTYSLGKFGQRALDFYSIHVTKESTHPVKPLAQIAGNRYASSPVGKALSDACMGTIASFLSKYQDIIIEHQKVVKGNQKRLESLRELAGKENLEYPSVTLPPQPHTKEGVDAYNEVIARVRMWVNLNLWQKLKLSRDDAKPLLRLKGFPSFPLVERQANEVDWWDMVCNVKKLINEKKEDGKVFWQNLAGYKRQEALRPYLSSEEDRKKGKKFARYQLGDLLLHLEKKHGEDWGKVYDEAWERIDKKVEGLSKHIKLEEERRSEDAQSKAALTDWLRAKASFVIEGSKEADKDEFCRCELKLQKWYGDLRGKPFAIEAENSILDISGFSKQYNCAFIWQKDGVKKLNLYLIINYFKGGKLRFKKIKPEAFEANRFYTVINKKSGEIVPMEVNFNFDDPNLIILPLAFGKRQGREFIWNDLLSLETGSLKLANGRVIEKTLYNRRTRQDEPALFVALTFERREVLDSSNIKPMNLIGVDRGENIPAVIALTDPEGCPLSRFKDSLGNPTHILRIGESYKEKQRTIQAKKEVEQRRAGGYSRKYASKAKNLADDMVRNTARDLLYYAVTQDAMLIFENLSRGFGRQGKRTFMAERQYTRMEDWLTAKLAYEGLPSKTYLSKTLAQYTSKTCSNCGFTITSADYDRVLEKLKKTATGWMTTINGKELKVEGQITYYNRYKRQNVVKDLSVELDRLSEESVNNDISSWTKGRSGEALSLLKKRFSHRPVQEKFVCLNCGFETHADEQAALNIARSWLFLRSQEYKKYQTNKTTGNTDKRAFVETWQSFYRKKLKEVWKPAV

SEQ ID NO: 46507 - protein, 978 aa, synthetic construct
  REGION 1..978: note = engineered CasX variant
QEIKRINKIRRRLVKDSNTKKAGKTGPMKTLLVRVMTPDLRERLENLRKKPENIPQPISNTSRANLNKLLTDYTEMKKAILHVYWEEFQKDPVGLMSRVAQPASKKIDQNKLKPEMDEKGNLTTAGFACSQCGQPLFVYKLEQVSEKGKAYTNYVGRCNVAEHEKLILLAQLKPEKDSDEAVTYSLGKFGQRALDFYSIHVTKESTHPVKPLAQIAGNRYASTPVGKALSDACMGTIASFLSKYQDIIIEHQKVVKGNQKRLESLRELAGKENLEYPSVTLPPQPHTKEGVDAYNEVIARVRMWVNLNLWQKLKLSRDDAKPLLRLKGFPSFPLVERQANEVDWWDMVCNVKKLINEKKEDGKVFWQNLAGYKRQEALRPYLSSEEDRKKGKKFARYQLGDLLLHLEKKHGEDWGKVYDEAWERIDKKVEGLSKHIKLEEERRSEDAQSKAALTDWLRAKASFVIEGSKEADKDEFCRCELKLQKWYGDLRGKPFAIEAENSILDISGFSKQYNCAFIWQKDGVKKLNLYLIINYFKGGKLRFKKIKPEAFEANRFYTVINKKSGEIVPMEVNFNFDDPNLIILPLAFGKRQGREFIWNDLLSLETGSLKLANGRVIEKTLYNRRTRQDEPALFVALTFERREVLDSSNIKPMNLIGVDRGENIPAVIALTDPEGCPLSRFKDSLGNPTHILRIGESYKEKQRTIQAKKEVEQRRAGGYSRKYASKAKNLADDMVRNTARDLLYYAVTQDAMLIFENLSRGFGRQGKRTFMAERQYTRMEDWLTAKLAYEGLPSKTYLSKTLAQYTSKTCSNCGFTITSADYDRVLEKLKKTATGWMTTINGKELKVEGQITYYNRYKRQNVVKDLSVELDRLSEESVNNDISSWTKGRSGEALSLLKKRFSHRPVQEKFVCLNCGFETHADEQAALNIARSWLFLRSQEYKKYQTNKTTGNTDKRAFVETWQSFYRKKLKEVWKPAV

SEQ ID NO: 46508 - protein, 978 aa, synthetic construct
  REGION 1..978: note = engineered CasX variant
QEIKRINKIRRRLVKDSNTKKAGKTGPMKTLLVRVMTPDLRERLENLRKKPENIPQPISNTSRANLNKLLTDYTEMKKAILHVYWEEFQKDPVGLMSRVAQPASKKIDQNKLKPEMDEKGNLTTAGFACSQCGQPLFVYKLEQVSEKGKAYTNYVGRCNVAEHEKLILLAQLKPEKDSDEAVTYSLGKFGQRALDFYSIHVTKESTHPVKPLAQIAGNRYASAPVGKALSDACMGTIASFLSKYQDIIIEHQKVVKGNQKRLESLRELAGKENLEYPSVTLPPQPHTKEGVDAYNEVIARVRMWVNLNLWQKLKLSRDDAKPLLRLKGFPSFPLVERQANEVDWWDMVCNVKKLINEKKEDGKVFWQNLAGYKRQEALRPYLSSEEDRKKGKKFARYQLGDLLLHLEKKHGEDWGKVYDEAWERIDKKVEGLSKHIKLEEERRSEDAQSKAALTDWLRAKASFVIEGSKEADKDEFCRCELKLQKWYGDLRGKPFAIEAENSILDISGFSKQYNCAFIWQKDGVKKLNLYLIINYFKGGKLRFKKIKPEAFEANRFYTVINKKSGEIVPMEVNFNFDDPNLIILPLAFGKRQGREFIWNDLLSLETGSLKLANGRVIEKTLYNRRTRQDEPALFVALTFERREVLDSSNIKPMNLIGVDRGENIPAVIALTDPEGCPLSRFKDSLGNPTHILRIGESYKEKQRTIQAKKEVEQRRAGGYSRKYASKAKNLADDMVRNTARDLLYYAVTQDAMLIFENLSRGFGRQGKRTFMAERQYTRMEDWLTAKLAYEGLPSKTYLSKTLAQYTSKTCSNCGFTITSADYDRVLEKLKKTATGWMTTINGKELKVEGQITYYNRYKRQNVVKDLSVELDRLSEESVNNDISSWTKGRSGEALSLLKKRFSHRPVQEKFVCLNCGFETHADEQAALNIARSWLFLRSQEYKKYQTNKTTGNTDKRAFVETWQSFYRKKLKEVWKPAV

SEQ ID NO: 46509 - protein, 978 aa, synthetic construct
  REGION 1..978: note = engineered CasX variant
QEIKRINKIRRRLVKDSNTKKAGKTGPMKTLLVRVMTPDLRERLENLRKKPENIPQPISNTSRANLNKLLTDYTEMKKAILHVYWEEFQKDPVGLMSRVAQPASKKIDQNKLKPEMDEKGNLTTAGFACSQCGQPLFVYKLEQVSEKGKAYTNYVGRCNVAEHEKLILLAQLKPEKDSDEAVTYSLGKFGQRALDFYSIHVTKESTHPVKPLAQIAGNRYASVPVGKALSDACMGTIASFLSKYQDIIIEHQKVVKGNQKRLESLRELAGKENLEYPSVTLPPQPHTKEGVDAYNEVIARVRMWVNLNLWQKLKLSRDDAKPLLRLKGFPSFPLVERQANEVDWWDMVCNVKKLINEKKEDGKVFWQNLAGYKRQEALRPYLSSEEDRKKGKKFARYQLGDLLLHLEKKHGEDWGKVYDEAWERIDKKVEGLSKHIKLEEERRSEDAQSKAALTDWLRAKASFVIEGSKEADKDEFCRCELKLQKWYGDLRGKPFAIEAENSILDISGFSKQYNCAFIWQKDGVKKLNLYLIINYFKGGKLRFKKIKPEAFEANRFYTVINKKSGEIVPMEVNFNFDDPNLIILPLAFGKRQGREFIWNDLLSLETGSLKLANGRVIEKTLYNRRTRQDEPALFVALTFERREVLDSSNIKPMNLIGVDRGENIPAVIALTDPEGCPLSRFKDSLGNPTHILRIGESYKEKQRTIQAKKEVEQRRAGGYSRKYASKAKNLADDMVRNTARDLLYYAVTQDAMLIFENLSRGFGRQGKRTFMAERQYTRMEDWLTAKLAYEGLPSKTYLSKTLAQYTSKTCSNCGFTITSADYDRVLEKLKKTATGWMTTINGKELKVEGQITYYNRYKRQNVVKDLSVELDRLSEESVNNDISSWTKGRSGEALSLLKKRFSHRPVQEKFVCLNCGFETHADEQAALNIARSWLFLRSQEYKKYQTNKTTGNTDKRAFVETWQSFYRKKLKEVWKPAV

SEQ ID NO: 46510 - protein, 978 aa, synthetic construct
  REGION 1..978: note = engineered CasX variant
QEIKRINKIRRRLVKDSNTKKAGKTGPMKTLLVRVMTPDLRERLENLRKKPENIPQPISNTSRANLNKLLTDYTEMKKAILHVYWEEFQKDPVGLMSRVAQPASKKIDQNKLKPEMDEKGNLTTAGFACSQCGQPLFVYKLEQVSEKGKAYTNYVGRCNVAEHEKLIKLAQLKPEKDSDEAVTYSLGKFGQRALDFYSIHVTKESTHPVKPLAQIAGNRYASGPVGKALSDACMGTIASFLSKYQDIIIEHQKVVKGNQKRLESLRELAGKENLEYPSVTLPPQPHTKEGVDAYNEVIARVRMWVNLNLWQKLKLSRDDAKPLLRLKGFPSFPLVERQANEVDWWDMVCNVKKLINEKKEDGKVFWQNLAGYKRQEALRPYLSSEEDRKKGKKFARYQLGDLLLHLEKKHGEDWGKVYDEAWERIDKKVEGLSKHIKLEEERRSEDAQSKAALTDWLRAKASFVIEGSKEADKDEFCRCELKLQKWYGDLRGKPFAIEAENSILDISGFSKQYNCAFIWQKDGVKKLNLYLIINYFKGGKLRFKKIKPEAFEANRFYTVINKKSGEIVPMEVNFNFDDPNLIILPLAFGKRQGREFIWNDLLSLETGSLKLANGRVIEKTLYNRRTRQDEPALFVALTFERREVLDSSNIKPMNLIGVDRGENIPAVIALTDPEGCPLSRFKDSLGNPTHILRIGESYKEKQRTIQAKKEVEQRRAGGYSRKYASKAKNLADDMVRNTARDLLYYAVTQDAMLIFENLSRGFGRQGKRTFMAERQYTRMEDWLTAKLAYEGLPSKTYLSKTLAQYTSKTCSNCGFTITSADYDRVLEKLKKTATGWMTTINGKELKVEGQITYYNRYKRQNVVKDLSVELDRLSEESVNNDISSWTKGRSGEALSLLKKRFSHRPVQEKFVCLNCGFETHADEQAALNIARSWLFLRSQEYKKYQTNKTTGNTDKRAFVETWQSFYRKKLKEVWKPAV

SEQ ID NO: 46511 - protein, 977 aa, synthetic construct
  REGION 1..977: note = engineered CasX variant
QEIKRINKIRRRLVKDSNTKKAGKTGPMKTLLVRVMTPDLRERLENLRKKPENIPQPISNTSRANLNKLLTDYTEMKKAILHVYWEEFQKDPVGLMSRVAQPASKKIDQNKLKPEMDEKGNLTTAGFACSQCGQPLFVYKLEQVSEKGKAYTNYVGRCNVAEHEKLILLAQLKPEKDSDEAVTYSLGKFGQRALDFYSIHVTKESTHPVKPLAQIAGNRYASPVGKALSDACMGTIASFLSKYQDIIIEHQKVVKGNQKRLESLRELAGKENLEYPSVTLPPQPHTKEGVDAYNEVIARVRMWVNLNLWQKLKLSRDDAKPLLRLKGFPSFPLVERQANEVDWWDMVCNVKKLINEKKEDGKVFWQNLAGYKRQEALRPYLSSEEDRKKGKKFARYQLGDLLLHLEKKHGEDWGKVYDEAWERIDKKVEGLSKHIKLEEERRSEDAQSKAALTDWLRAKASFVIEGSKEADKDEFCRCELKLQKWYGDLRGKPFAIEAENSILDISGFSKQYNCAFIWQKDGVKKLNLYLIINYFKGGKLRFKKIKPEAFEANRFYTVINKKSGEIVPMEVNFNFDDPNLIILPLAFGKRQGREFIWNDLLSLETGSLKLANGRVIEKTLYNRRTRQDEPALFVALTFERREVLDSSNIKPMNLIGVDRGENIPAVIALTDPEGCPLSRFKDSLGNPTHILRIGESYKEKQRTIQAKKEVEQRRAGGYSRKYASKAKNLADDMVRNTARDLLYYAVTQDAMLIFENLSRGFGRQGKRTFMAERQYTRMEDWLTAKLAYEGLPSKTYLSKTLAQYTSKTCSNCGFTITSADYDRVLEKLKKTATGWMTTINGKELKVEGQITYYNRYKRQNVVKDLSVELDRLSEESVNNDISSWTKGRSGEALSLLKKRFSHRPVQEKFVCLNCGFETHADEQAALNIARSWLFLRSQEYKKYQTNKTTGNTDKRAFVETWQSFYRKKLKEVWKPAV

SEQ ID NO: 46512 - protein, 979 aa, synthetic construct
  REGION 1..979: note = engineered CasX variant
QEIKRINKIRRRLVKDSNTKKAGKTGPMKTLLVRVMTPDLRERLENLRKKPENIPQPISNTSRANLNKLLTDYTEMKKAILHVYWEEFQKDPVGLMSRVAQPASKKIDQNKLKPEMDEKGNLTTAGFACSQCGQPLFVYKLEQVSEKGKAYTNYVGRCNVAEHEKLILLAQLKPEKDSDEAVTYSLGKFGQRALDFYSIHVTKESTHPVKPLAQIAGNRYASYPVGKALSDACMGTIASFLSKYQDIIIEHQKVVKGNQKRLESLRELAGKENLEYPSVTLPPQPHTKEGVDAYNEVIARVRMWVNLNLWQKLKLSRDDAKPLLRLKGFPSFPLVERQANEVDWWDMVCNVKKLINEKKEDGKVFWQNLAGYKRQEALRPYLSSEEDRKKGKKFARYQLGDLLLHLEKKHGEDWGKVYDEAWERIDKKVEGLSKHIKLEEERRSEDAQSKAALTDWLRAKASFVIEGLKEADDKDEFCRCELKLQKWYGDLRGKPFAIEAENSILDISGFSKQYNCAFIWQKDGVKKLNLYLIINYFKGGKLRFKKIKPEAFEANRFYTVINKKSGEIVPMEVNFNFDDPNLIILPLAFGKRQGREFIWNDLLSLETGSLKLANGRVIEKTLYNRRTRQDEPALFVALTFERREVLDSSNIKPMNLIGVDRGENIPAVIALTDPEGCPLSRFKDSLGNPTHILRIGESYKEKQRTIQAKKEVEQRRAGGYSRKYASKAKNLADDMVRNTARDLLYYAVTQDAMLIFENLSRGFGRQGKRTFMAERQYTRMEDWLTAKLAYEGLPSKTYLSKTLAQYTSKTCSNCGFTITSADYDRVLEKLKKTATGWMTTINGKELKVEGQITYYNRYKRQNVVKDLSVELDRLSEESVNNDISSWTKGRSGEALSLLKKRFSHRPVQEKFVCLNCGFETHADEQAALNIARSWLFLRSQEYKKYQTNKTTGNTDKRAFVETWQSFYRKKLKEVWKPAV

SEQ ID NO: 46513 - protein, 979 aa, synthetic construct
  REGION 1..979: note = engineered CasX variant
QEIKRINKIRRRLVKDSNTKKAGKTGPMKTLLVRVMTPDLRERLENLRKKPENIPQPISNTSRANLNKLLTDYTEMKKAILHVYWEEFQKDPVGLMSRVAQPASKKIDQNKLKPEMDEKGNLTTAGFACSQCGQPLFVYKLEQVSEKGKAYTNYVGRCNVAEHEKLILLAQLKPEKDSDEAVTYSLGKFGQRALDFYSIHVTKESTHPVKPLAQIAGNRYASHPVGKALSDACMGTIASFLSKYQDIIIEHQKVVKGNQKRLESLRELAGKENLEYPSVTLPPQPHTKEGVDAYNEVIARVRMWVNLNLWQKLKLSRDDAKPLLRLKGFPSFPLVERQANEVDWWDMVCNVKKLINEKKEDGKVFWQNLAGYKRQEALRPYLSSEEDRKKGKKFARYQLGDLLLHLEKKHGEDWGKVYDEAWERIDKKVEGLSKHIKLEEERRSEDAQSKAALTDWLRAKASFVIEGLKEADDKDEFCRCELKLQKWYGDLRGKPFAIEAENSILDISGFSKQYNCAFIWQKDGVKKLNLYLIINYFKGGKLRFKKIKPEAFEANRFYTVINKKSGEIVPMEVNFNFDDPNLIILPLAFGKRQGREFIWNDLLSLETGSLKLANGRVIEKTLYNRRTRQDEPALFVALTFERREVLDSSNIKPMNLIGVDRGENIPAVIALTDPEGCPLSRFKDSLGNPTHILRIGESYKEKQRTIQAKKEVEQRRAGGYSRKYASKAKNLADDMVRNTARDLLYYAVTQDAMLIFENLSRGFGRQGKRTFMAERQYTRMEDWLTAKLAYEGLPSKTYLSKTLAQYTSKTCSNCGFTITSADYDRVLEKLKKTATGWMTTINGKELKVEGQITYYNRYKRQNVVKDLSVELDRLSEESVNNDISSWTKGRSGEALSLLKKRFSHRPVQEKFVCLNCGFETHADEQAALNIARSWLFLRSQEYKKYQTNKTTGNTDKRAFVETWQSFYRKKLKEVWKPAV

SEQ ID NO: 46514 - protein, 979 aa, synthetic construct
  REGION 1..979: note = engineered CasX variant
QEIKRINKIRRRLVKDSNTKKAGKTGPMKTLLVRVMTPDLRERLENLRKKPENIPQPISNTSRANLNKLLTDYTEMKKAILHVYWEEFQKDPVGLMSRVAQPASKKIDQNKLKPEMDEKGNLTTAGFACSQCGQPLFVYKLEQVSEKGKAYTNYVGRCNVAEHEKLILLAQLKPEKDSDEAVTYSLGKFGQRALDFYSIHVTKESTHPVKPLAQIAGNRYASSPVGKALSDACMGTIASFLSKYQDIIIEHQKVVKGNQKRLESLRELAGKENLEYPSVTLPPQPHTKEGVDAYNEVIARVRMWVNLNLWQKLKLSRDDAKPLLRLKGFPSFPLVERQANEVDWWDMVCNVKKLINEKKEDGKVFWQNLAGYKRQEALRPYLSSEEDRKKGKKFARYQLGDLLLHLEKKHGEDWGKVYDEAWERIDKKVEGLSKHIKLEEERRSEDAQSKAALTDWLRAKASFVIEGLKEADDKDEFCRCELKLQKWYGDLRGKPFAIEAENSILDISGFSKQYNCAFIWQKDGVKKLNLYLIINYFKGGKLRFKKIKPEAFEANRFYTVINKKSGEIVPMEVNFNFDDPNLIILPLAFGKRQGREFIWNDLLSLETGSLKLANGRVIEKTLYNRRTRQDEPALFVALTFERREVLDSSNIKPMNLIGVDRGENIPAVIALTDPEGCPLSRFKDSLGNPTHILRIGESYKEKQRTIQAKKEVEQRRAGGYSRKYASKAKNLADDMVRNTARDLLYYAVTQDAMLIFENLSRGFGRQGKRTFMAERQYTRMEDWLTAKLAYEGLPSKTYLSKTLAQYTSKTCSNCGFTITSADYDRVLEKLKKTATGWMTTINGKELKVEGQITYYNRYKRQNVVKDLSVELDRLSEESVNNDISSWTKGRSGEALSLLKKRFSHRPVQEKFVCLNCGFETHADEQAALNIARSWLFLRSQEYKKYQTNKTTGNTDKRAFVETWQSFYRKKLKEVWKPAV

SEQ ID NO: 46515 - protein, 979 aa, synthetic construct
  REGION 1..979: note = engineered CasX variant
QEIKRINKIRRRLVKDSNTKKAGKTGPMKTLLVRVMTPDLRERLENLRKKPENIPQPISNTSRANLNKLLTDYTEMKKAILHVYWEEFQKDPVGLMSRVAQPASKKIDQNKLKPEMDEKGNLTTAGFACSQCGQPLFVYKLEQVSEKGKAYTNYVGRCNVAEHEKLILLAQLKPEKDSDEAVTYSLGKFGQRALDFYSIHVTKESTHPVKPLAQIAGNRYASTPVGKALSDACMGTIASFLSKYQDIIIEHQKVVKGNQKRLESLRELAGKENLEYPSVTLPPQPHTKEGVDAYNEVIARVRMWVNLNLWQKLKLSRDDAKPLLRLKGFPSFPLVERQANEVDWWDMVCNVKKLINEKKEDGKVFWQNLAGYKRQEALRPYLSSEEDRKKGKKFARYQLGDLLLHLEKKHGEDWGKVYDEAWERIDKKVEGLSKHIKLEEERRSEDAQSKAALTDWLRAKASFVIEGLKEADDKDEFCRCELKLQKWYGDLRGKPFAIEAENSILDISGFSKQYNCAFIWQKDGVKKLNLYLIINYFKGGKLRFKKIKPEAFEANRFYTVINKKSGEIVPMEVNFNFDDPNLIILPLAFGKRQGREFIWNDLLSLETGSLKLANGRVIEKTLYNRRTRQDEPALFVALTFERREVLDSSNIKPMNLIGVDRGENIPAVIALTDPEGCPLSRFKDSLGNPTHILRIGESYKEKQRTIQAKKEVEQRRAGGYSRKYASKAKNLADDMVRNTARDLLYYAVTQDAMLIFENLSRGFGRQGKRTFMAERQYTRMEDWLTAKLAYEGLPSKTYLSKTLAQYTSKTCSNCGFTITSADYDRVLEKLKKTATGWMTTINGKELKVEGQITYYNRYKRQNVVKDLSVELDRLSEESVNNDISSWTKGRSGEALSLLKKRFSHRPVQEKFVCLNCGFETHADEQAALNIARSWLFLRSQEYKKYQTNKTTGNTDKRAFVETWQSFYRKKLKEVWKPAV

SEQ ID NO: 46516 - protein, 979 aa, synthetic construct
  REGION 1..979: note = engineered CasX variant
QEIKRINKIRRRLVKDSNTKKAGKTGPMKTLLVRVMTPDLRERLENLRKKPENIPQPISNTSRANLNKLLTDYTEMKKAILHVYWEEFQKDPVGLMSRVAQPASKKIDQNKLKPEMDEKGNLTTAGFACSQCGQPLFVYKLEQVSEKGKAYTNYVGRCNVAEHEKLILLAQLKPEKDSDEAVTYSLGKFGQRALDFYSIHVTKESTHPVKPLAQIAGNRYASAPVGKALSDACMGTIASFLSKYQDIIIEHQKVVKGNQKRLESLRELAGKENLEYPSVTLPPQPHTKEGVDAYNEVIARVRMWVNLNLWQKLKLSRDDAKPLLRLKGFPSFPLVERQANEVDWWDMVCNVKKLINEKKEDGKVFWQNLAGYKRQEALRPYLSSEEDRKKGKKFARYQLGDLLLHLEKKHGEDWGKVYDEAWERIDKKVEGLSKHIKLEEERRSEDAQSKAALTDWLRAKASFVIEGLKEADDKDEFCRCELKLQKWYGDLRGKPFAIEAENSILDISGFSKQYNCAFIWQKDGVKKLNLYLIINYFKGGKLRFKKIKPEAFEANRFYTVINKKSGEIVPMEVNFNFDDPNLIILPLAFGKRQGREFIWNDLLSLETGSLKLANGRVIEKTLYNRRTRQDEPALFVALTFERREVLDSSNIKPMNLIGVDRGENIPAVIALTDPEGCPLSRFKDSLGNPTHILRIGESYKEKQRTIQAKKEVEQRRAGGYSRKYASKAKNLADDMVRNTARDLLYYAVTQDAMLIFENLSRGFGRQGKRTFMAERQYTRMEDWLTAKLAYEGLPSKTYLSKTLAQYTSKTCSNCGFTITSADYDRVLEKLKKTATGWMTTINGKELKVEGQITYYNRYKRQNVVKDLSVELDRLSEESVNNDISSWTKGRSGEALSLLKKRFSHRPVQEKFVCLNCGFETHADEQAALNIARSWLFLRSQEYKKYQTNKTTGNTDKRAFVETWQSFYRKKLKEVWKPAV

SEQ ID NO: 46517 - protein, 979 aa, synthetic construct
  REGION 1..979: note = engineered CasX variant
QEIKRINKIRRRLVKDSNTKKAGKTGPMKTLLVRVMTPDLRERLENLRKKPENIPQPISNTSRANLNKLLTDYTEMKKAILHVYWEEFQKDPVGLMSRVAQPASKKIDQNKLKPEMDEKGNLTTAGFACSQCGQPLFVYKLEQVSEKGKAYTNYVGRCNVAEHEKLILLAQLKPEKDSDEAVTYSLGKFGQRALDFYSIHVTKESTHPVKPLAQIAGNRYASVPVGKALSDACMGTIASFLSKYQDIIIEHQKVVKGNQKRLESLRELAGKENLEYPSVTLPPQPHTKEGVDAYNEVIARVRMWVNLNLWQKLKLSRDDAKPLLRLKGFPSFPLVERQANEVDWWDMVCNVKKLINEKKEDGKVFWQNLAGYKRQEALRPYLSSEEDRKKGKKFARYQLGDLLLHLEKKHGEDWGKVYDEAWERIDKKVEGLSKHIKLEEERRSEDAQSKAALTDWLRAKASFVIEGLKEADDKDEFCRCELKLQKWYGDLRGKPFAIEAENSILDISGFSKQYNCAFIWQKDGVKKLNLYLIINYFKGGKLRFKKIKPEAFEANRFYTVINKKSGEIVPMEVNFNFDDPNLIILPLAFGKRQGREFIWNDLLSLETGSLKLANGRVIEKTLYNRRTRQDEPALFVALTFERREVLDSSNIKPMNLIGVDRGENIPAVIALTDPEGCPLSRFKDSLGNPTHILRIGESYKEKQRTIQAKKEVEQRRAGGYSRKYASKAKNLADDMVRNTARDLLYYAVTQDAMLIFENLSRGFGRQGKRTFMAERQYTRMEDWLTAKLAYEGLPSKTYLSKTLAQYTSKTCSNCGFTITSADYDRVLEKLKKTATGWMTTINGKELKVEGQITYYNRYKRQNVVKDLSVELDRLSEESVNNDISSWTKGRSGEALSLLKKRFSHRPVQEKFVCLNCGFETHADEQAALNIARSWLFLRSQEYKKYQTNKTTGNTDKRAFVETWQSFYRKKLKEVWKPAV

SEQ ID NO: 46518 - protein, 979 aa, synthetic construct
  REGION 1..979: note = engineered CasX variant
QEIKRINKIRRRLVKDSNTKKAGKTGPMKTLLVRVMTPDLRERLENLRKKPENIPQPISNTSRANLNKLLTDYTEMKKAILHVYWEEFQKDPVGLMSRVAQPASKKIDQNKLKPEMDEKGNLTTAGFACSQCGQPLFVYKLEQVSEKGKAYTNYVGRCNVAEHEKLIKLAQLKPEKDSDEAVTYSLGKFGQRALDFYSIHVTKESTHPVKPLAQIAGNRYASGPVGKALSDACMGTIASFLSKYQDIIIEHQKVVKGNQKRLESLRELAGKENLEYPSVTLPPQPHTKEGVDAYNEVIARVRMWVNLNLWQKLKLSRDDAKPLLRLKGFPSFPLVERQANEVDWWDMVCNVKKLINEKKEDGKVFWQNLAGYKRQEALRPYLSSEEDRKKGKKFARYQLGDLLLHLEKKHGEDWGKVYDEAWERIDKKVEGLSKHIKLEEERRSEDAQSKAALTDWLRAKASFVIEGLKEADDKDEFCRCELKLQKWYGDLRGKPFAIEAENSILDISGFSKQYNCAFIWQKDGVKKLNLYLIINYFKGGKLRFKKIKPEAFEANRFYTVINKKSGEIVPMEVNFNFDDPNLIILPLAFGKRQGREFIWNDLLSLETGSLKLANGRVIEKTLYNRRTRQDEPALFVALTFERREVLDSSNIKPMNLIGVDRGENIPAVIALTDPEGCPLSRFKDSLGNPTHILRIGESYKEKQRTIQAKKEVEQRRAGGYSRKYASKAKNLADDMVRNTARDLLYYAVTQDAMLIFENLSRGFGRQGKRTFMAERQYTRMEDWLTAKLAYEGLPSKTYLSKTLAQYTSKTCSNCGFTITSADYDRVLEKLKKTATGWMTTINGKELKVEGQITYYNRYKRQNVVKDLSVELDRLSEESVNNDISSWTKGRSGEALSLLKKRFSHRPVQEKFVCLNCGFETHADEQAALNIARSWLFLRSQEYKKYQTNKTTGNTDKRAFVETWQSFYRKKLKEVWKPAV

SEQ ID NO: 46519 - protein, 978 aa, synthetic construct
  REGION 1..978: note = engineered CasX variant
QEIKRINKIRRRLVKDSNTKKAGKTGPMKTLLVRVMTPDLRERLENLRKKPENIPQPISNTSRANLNKLLTDYTEMKKAILHVYWEEFQKDPVGLMSRVAQPASKKIDQNKLKPEMDEKGNLTTAGFACSQCGQPLFVYKLEQVSEKGKAYTNYVGRCNVAEHEKLILLAQLKPEKDSDEAVTYSLGKFGQRALDFYSIHVTKESTHPVKPLAQIAGNRYASPVGKALSDACMGTIASFLSKYQDIIIEHQKVVKGNQKRLESLRELAGKENLEYPSVTLPPQPHTKEGVDAYNEVIARVRMWVNLNLWQKLKLSRDDAKPLLRLKGFPSFPLVERQANEVDWWDMVCNVKKLINEKKEDGKVFWQNLAGYKRQEALRPYLSSEEDRKKGKKFARYQLGDLLLHLEKKHGEDWGKVYDEAWERIDKKVEGLSKHIKLEEERRSEDAQSKAALTDWLRAKASFVIEGLKEADDKDEFCRCELKLQKWYGDLRGKPFAIEAENSILDISGFSKQYNCAFIWQKDGVKKLNLYLIINYFKGGKLRFKKIKPEAFEANRFYTVINKKSGEIVPMEVNFNFDDPNLIILPLAFGKRQGREFIWNDLLSLETGSLKLANGRVIEKTLYNRRTRQDEPALFVALTFERREVLDSSNIKPMNLIGVDRGENIPAVIALTDPEGCPLSRFKDSLGNPTHILRIGESYKEKQRTIQAKKEVEQRRAGGYSRKYASKAKNLADDMVRNTARDLLYYAVTQDAMLIFENLSRGFGRQGKRTFMAERQYTRMEDWLTAKLAYEGLPSKTYLSKTLAQYTSKTCSNCGFTITSADYDRVLEKLKKTATGWMTTINGKELKVEGQITYYNRYKRQNVVKDLSVELDRLSEESVNNDISSWTKGRSGEALSLLKKRFSHRPVQEKFVCLNCGFETHADEQAALNIARSWLFLRSQEYKKYQTNKTTGNTDKRAFVETWQSFYRKKLKEVWKPAV

SEQ ID NO: 46520 - protein, 979 aa, synthetic construct
  REGION 1..979: note = engineered CasX variant
QEIKRINKIRRRLVKDSNTKKAGKTGPMKTLLVRVMTPDLRERLENLRKKPENIPQPISNTSRANLNKLLTDYTEMKKAILHVYWEEFQKDPVGLMSRVAQPASKKIDQNKLKPEMDEKGNLTTAGFACSQCGQPLFVYKLEQVSEKGKAYTNYVGRCNVAEHEKLILLAQLKPEKDSDEAVTYSLGKFGQRALDFYSIHVTKESTHPVKPLAQIAGNRYASYPVGKALSDACMGTIASFLSKYQDIIIEHQKVVKGNQKRLESLRELAGKENLEYPSVTLPPQPHTKEGVDAYNEVIARVRMWVNLNLWQKLKLSRDDAKPLLRLKGFPSFPLVERQANEVDWWDMVCNVKKLINEKKEDGKVFWQNLAGYKRQEALRPYLSSEEDRKKGKKFARYQLGDLLLHLEKKHGEDWGKVYDEAWERIDKKVEGLSKHIKLEEERRSEDAQSKAALTDWLRAKASFVIEGLKEADKDEFCRCELKLQKWYGDLRGKPFAIEAENSILDISGFSKQYNCAFIWQKDGVKKLNLYLIINYFKGGKLRFKKIKPEAFEANRFYTVINKKSGEIVPMEVNFNFDDPNLIILPLAFGKRQGREFIWNDLLSLETGSLKLANGRVIEKTLYNRRTRQDEPALFVALTFERREVLDSSNIKPMNLIGVDRGENIPAVIALTDPEGCPLSRFKDSLGNPTHILRIGESYKEKQRTIQAKKEVEQRRAGGYSRKYASKAKNLADDMVRNTARDLLYYAVTQDAMLIFENLSRGFGRQGKRTFMAERQYTRMEDWLTAKLAYEGLPSKTYLSKTLAQYTSKTCSNCGFTITSADYDRVLEKLKKTATGWMTTINGKELKVEGQITYYNRYKRQNVVKDLSVELDRLSEESVNNDISSWTKGRSGNEALSLLKKRFSHRPVQEKFVCLNCGFETHADEQAALNIARSWLFLRSQEYKKYQTNKTTGNTDKRAFVETWQSFYRKKLKEVWKPAV

SEQ ID NO: 46521 - protein, 979 aa, synthetic construct
  REGION 1..979: note = engineered CasX variant
QEIKRINKIRRRLVKDSNTKKAGKTGPMKTLLVRVMTPDLRERLENLRKKPENIPQPISNTSRANLNKLLTDYTEMKKAILHVYWEEFQKDPVGLMSRVAQPASKKIDQNKLKPEMDEKGNLTTAGFACSQCGQPLFVYKLEQVSEKGKAYTNYVGRCNVAEHEKLILLAQLKPEKDSDEAVTYSLGKFGQRALDFYSIHVTKESTHPVKPLAQIAGNRYASHPVGKALSDACMGTIASFLSKYQDIIIEHQKVVKGNQKRLESLRELAGKENLEYPSVTLPPQPHTKEGVDAYNEVIARVRMWVNLNLWQKLKLSRDDAKPLLRLKGFPSFPLVERQANEVDWWDMVCNVKKLINEKKEDGKVFWQNLAGYKRQEALRPYLSSEEDRKKGKKFARYQLGDLLLHLEKKHGEDWGKVYDEAWERIDKKVEGLSKHIKLEEERRSEDAQSKAALTDWLRAKASFVIEGLKEADKDEFCRCELKLQKWYGDLRGKPFAIEAENSILDISGFSKQYNCAFIWQKDGVKKLNLYLIINYFKGGKLRFKKIKPEAFEANRFYTVINKKSGEIVPMEVNFNFDDPNLIILPLAFGKRQGREFIWNDLLSLETGSLKLANGRVIEKTLYNRRTRQDEPALFVALTFERREVLDSSNIKPMNLIGVDRGENIPAVIALTDPEGCPLSRFKDSLGNPTHILRIGESYKEKQRTIQAKKEVEQRRAGGYSRKYASKAKNLADDMVRNTARDLLYYAVTQDAMLIFENLSRGFGRQGKRTFMAERQYTRMEDWLTAKLAYEGLPSKTYLSKTLAQYTSKTCSNCGFTITSADYDRVLEKLKKTATGWMTTINGKELKVEGQITYYNRYKRQNVVKDLSVELDRLSEESVNNDISSWTKGRSGNEALSLLKKRFSHRPVQEKFVCLNCGFETHADEQAALNIARSWLFLRSQEYKKYQTNKTTGNTDKRAFVETWQSFYRKKLKEVWKPAV

SEQ ID NO: 46522 - protein, 979 aa, synthetic construct
  REGION 1..979: note = engineered CasX variant
QEIKRINKIRRRLVKDSNTKKAGKTGPMKTLLVRVMTPDLRERLENLRKKPENIPQPISNTSRANLNKLLTDYTEMKKAILHVYWEEFQKDPVGLMSRVAQPASKKIDQNKLKPEMDEKGNLTTAGFACSQCGQPLFVYKLEQVSEKGKAYTNYVGRCNVAEHEKLILLAQLKPEKDSDEAVTYSLGKFGQRALDFYSIHVTKESTHPVKPLAQIAGNRYASSPVGKALSDACMGTIASFLSKYQDIIIEHQKVVKGNQKRLESLRELAGKENLEYPSVTLPPQPHTKEGVDAYNEVIARVRMWVNLNLWQKLKLSRDDAKPLLRLKGFPSFPLVERQANEVDWWDMVCNVKKLINEKKEDGKVFWQNLAGYKRQEALRPYLSSEEDRKKGKKFARYQLGDLLLHLEKKHGEDWGKVYDEAWERIDKKVEGLSKHIKLEEERRSEDAQSKAALTDWLRAKASFVIEGLKEADKDEFCRCELKLQKWYGDLRGKPFAIEAENSILDISGFSKQYNCAFIWQKDGVKKLNLYLIINYFKGGKLRFKKIKPEAFEANRFYTVINKKSGEIVPMEVNFNFDDPNLIILPLAFGKRQGREFIWNDLLSLETGSLKLANGRVIEKTLYNRRTRQDEPALFVALTFERREVLDSSNIKPMNLIGVDRGENIPAVIALTDPEGCPLSRFKDSLGNPTHILRIGESYKEKQRTIQAKKEVEQRRAGGYSRKYASKAKNLADDMVRNTARDLLYYAVTQDAMLIFENLSRGFGRQGKRTFMAERQYTRMEDWLTAKLAYEGLPSKTYLSKTLAQYTSKTCSNCGFTITSADYDRVLEKLKKTATGWMTTINGKELKVEGQITYYNRYKRQNVVKDLSVELDRLSEESVNNDISSWTKGRSGNEALSLLKKRFSHRPVQEKFVCLNCGFETHADEQAALNIARSWLFLRSQEYKKYQTNKTTGNTDKRAFVETWQSFYRKKLKEVWKPAV

SEQ ID NO: 46523 - protein, 979 aa, synthetic construct
  REGION 1..979: note = engineered CasX variant
QEIKRINKIRRRLVKDSNTKKAGKTGPMKTLLVRVMTPDLRERLENLRKKPENIPQPISNTSRANLNKLLTDYTEMKKAILHVYWEEFQKDPVGLMSRVAQPASKKIDQNKLKPEMDEKGNLTTAGFACSQCGQPLFVYKLEQVSEKGKAYTNYVGRCNVAEHEKLILLAQLKPEKDSDEAVTYSLGKFGQRALDFYSIHVTKESTHPVKPLAQIAGNRYASTPVGKALSDACMGTIASFLSKYQDIIIEHQKVVKGNQKRLESLRELAGKENLEYPSVTLPPQPHTKEGVDAYNEVIARVRMWVNLNLWQKLKLSRDDAKPLLRLKGFPSFPLVERQANEVDWWDMVCNVKKLINEKKEDGKVFWQNLAGYKRQEALRPYLSSEEDRKKGKKFARYQLGDLLLHLEKKHGEDWGKVYDEAWERIDKKVEGLSKHIKLEEERRSEDAQSKAALTDWLRAKASFVIEGLKEADKDEFCRCELKLQKWYGDLRGKPFAIEAENSILDISGFSKQYNCAFIWQKDGVKKLNLYLIINYFKGGKLRFKKIKPEAFEANRFYTVINKKSGEIVPMEVNFNFDDPNLIILPLAFGKRQGREFIWNDLLSLETGSLKLANGRVIEKTLYNRRTRQDEPALFVALTFERREVLDSSNIKPMNLIGVDRGENIPAVIALTDPEGCPLSRFKDSLGNPTHILRIGESYKEKQRTIQAKKEVEQRRAGGYSRKYASKAKNLADDMVRNTARDLLYYAVTQDAMLIFENLSRGFGRQGKRTFMAERQYTRMEDWLTAKLAYEGLPSKTYLSKTLAQYTSKTCSNCGFTITSADYDRVLEKLKKTATGWMTTINGKELKVEGQITYYNRYKRQNVVKDLSVELDRLSEESVNNDISSWTKGRSGNEALSLLKKRFSHRPVQEKFVCLNCGFETHADEQAALNIARSWLFLRSQEYKKYQTNKTTGNTDKRAFVETWQSFYRKKLKEVWKPAV

SEQ ID NO: 46524 - protein, 979 aa, synthetic construct
  REGION 1..979: note = engineered CasX variant
QEIKRINKIRRRLVKDSNTKKAGKTGPMKTLLVRVMTPDLRERLENLRKKPENIPQPISNTSRANLNKLLTDYTEMKKAILHVYWEEFQKDPVGLMSRVAQPASKKIDQNKLKPEMDEKGNLTTAGFACSQCGQPLFVYKLEQVSEKGKAYTNYVGRCNVAEHEKLILLAQLKPEKDSDEAVTYSLGKFGQRALDFYSIHVTKESTHPVKPLAQIAGNRYASAPVGKALSDACMGTIASFLSKYQDIIIEHQKVVKGNQKRLESLRELAGKENLEYPSVTLPPQPHTKEGVDAYNEVIARVRMWVNLNLWQKLKLSRDDAKPLLRLKGFPSFPLVERQANEVDWWDMVCNVKKLINEKKEDGKVFWQNLAGYKRQEALRPYLSSEEDRKKGKKFARYQLGDLLLHLEKKHGEDWGKVYDEAWERIDKKVEGLSKHIKLEEERRSEDAQSKAALTDWLRAKASFVIEGLKEADKDEFCRCELKLQKWYGDLRGKPFAIEAENSILDISGFSKQYNCAFIWQKDGVKKLNLYLIINYFKGGKLRFKKIKPEAFEANRFYTVINKKSGEIVPMEVNFNFDDPNLIILPLAFGKRQGREFIWNDLLSLETGSLKLANGRVIEKTLYNRRTRQDEPALFVALTFERREVLDSSNIKPMNLIGVDRGENIPAVIALTDPEGCPLSRFKDSLGNPTHILRIGESYKEKQRTIQAKKEVEQRRAGGYSRKYASKAKNLADDMVRNTARDLLYYAVTQDAMLIFENLSRGFGRQGKRTFMAERQYTRMEDWLTAKLAYEGLPSKTYLSKTLAQYTSKTCSNCGFTITSADYDRVLEKLKKTATGWMTTINGKELKVEGQITYYNRYKRQNVVKDLSVELDRLSEESVNNDISSWTKGRSGNEALSLLKKRFSHRPVQEKFVCLNCGFETHADEQAALNIARSWLFLRSQEYKKYQTNKTTGNTDKRAFVETWQSFYRKKLKEVWKPAV

SEQ ID NO: 46525 - protein, 979 aa, synthetic construct
  REGION 1..979: note = engineered CasX variant
QEIKRINKIRRRLVKDSNTKKAGKTGPMKTLLVRVMTPDLRERLENLRKKPENIPQPISNTSRANLNKLLTDYTEMKKAILHVYWEEFQKDPVGLMSRVAQPASKKIDQNKLKPEMDEKGNLTTAGFACSQCGQPLFVYKLEQVSEKGKAYTNYVGRCNVAEHEKLILLAQLKPEKDSDEAVTYSLGKFGQRALDFYSIHVTKESTHPVKPLAQIAGNRYASVPVGKALSDACMGTIASFLSKYQDIIIEHQKVVKGNQKRLESLRELAGKENLEYPSVTLPPQPHTKEGVDAYNEVIARVRMWVNLNLWQKLKLSRDDAKPLLRLKGFPSFPLVERQANEVDWWDMVCNVKKLINEKKEDGKVFWQNLAGYKRQEALRPYLSSEEDRKKGKKFARYQLGDLLLHLEKKHGEDWGKVYDEAWERIDKKVEGLSKHIKLEEERRSEDAQSKAALTDWLRAKASFVIEGLKEADKDEFCRCELKLQKWYGDLRGKPFAIEAENSILDISGFSKQYNCAFIWQKDGVKKLNLYLIINYFKGGKLRFKKIKPEAFEANRFYTVINKKSGEIVPMEVNFNFDDPNLIILPLAFGKRQGREFIWNDLLSLETGSLKLANGRVIEKTLYNRRTRQDEPALFVALTFERREVLDSSNIKPMNLIGVDRGENIPAVIALTDPEGCPLSRFKDSLGNPTHILRIGESYKEKQRTIQAKKEVEQRRAGGYSRKYASKAKNLADDMVRNTARDLLYYAVTQDAMLIFENLSRGFGRQGKRTFMAERQYTRMEDWLTAKLAYEGLPSKTYLSKTLAQYTSKTCSNCGFTITSADYDRVLEKLKKTATGWMTTINGKELKVEGQITYYNRYKRQNVVKDLSVELDRLSEESVNNDISSWTKGRSGNEALSLLKKRFSHRPVQEKFVCLNCGFETHADEQAALNIARSWLFLRSQEYKKYQTNKTTGNTDKRAFVETWQSFYRKKLKEVWKPAV

SEQ ID NO: 46526 - protein, 979 aa, synthetic construct
  REGION 1..979: note = engineered CasX variant
QEIKRINKIRRRLVKDSNTKKAGKTGPMKTLLVRVMTPDLRERLENLRKKPENIPQPISNTSRANLNKLLTDYTEMKKAILHVYWEEFQKDPVGLMSRVAQPASKKIDQNKLKPEMDEKGNLTTAGFACSQCGQPLFVYKLEQVSEKGKAYTNYVGRCNVAEHEKLIKLAQLKPEKDSDEAVTYSLGKFGQRALDFYSIHVTKESTHPVKPLAQIAGNRYASGPVGKALSDACMGTIASFLSKYQDIIIEHQKVVKGNQKRLESLRELAGKENLEYPSVTLPPQPHTKEGVDAYNEVIARVRMWVNLNLWQKLKLSRDDAKPLLRLKGFPSFPLVERQANEVDWWDMVCNVKKLINEKKEDGKVFWQNLAGYKRQEALRPYLSSEEDRKKGKKFARYQLGDLLLHLEKKHGEDWGKVYDEAWERIDKKVEGLSKHIKLEEERRSEDAQSKAALTDWLRAKASFVIEGLKEADKDEFCRCELKLQKWYGDLRGKPFAIEAENSILDISGFSKQYNCAFIWQKDGVKKLNLYLIINYFKGGKLRFKKIKPEAFEANRFYTVINKKSGEIVPMEVNFNFDDPNLIILPLAFGKRQGREFIWNDLLSLETGSLKLANGRVIEKTLYNRRTRQDEPALFVALTFERREVLDSSNIKPMNLIGVDRGENIPAVIALTDPEGCPLSRFKDSLGNPTHILRIGESYKEKQRTIQAKKEVEQRRAGGYSRKYASKAKNLADDMVRNTARDLLYYAVTQDAMLIFENLSRGFGRQGKRTFMAERQYTRMEDWLTAKLAYEGLPSKTYLSKTLAQYTSKTCSNCGFTITSADYDRVLEKLKKTATGWMTTINGKELKVEGQITYYNRYKRQNVVKDLSVELDRLSEESVNNDISSWTKGRSGNEALSLLKKRFSHRPVQEKFVCLNCGFETHADEQAALNIARSWLFLRSQEYKKYQTNKTTGNTDKRAFVETWQSFYRKKLKEVWKPAV

SEQ ID NO: 46527 - protein, 978 aa, synthetic construct
  REGION 1..978: note = engineered CasX variant
QEIKRINKIRRRLVKDSNTKKAGKTGPMKTLLVRVMTPDLRERLENLRKKPENIPQPISNTSRANLNKLLTDYTEMKKAILHVYWEEFQKDPVGLMSRVAQPASKKIDQNKLKPEMDEKGNLTTAGFACSQCGQPLFVYKLEQVSEKGKAYTNYVGRCNVAEHEKLILLAQLKPEKDSDEAVTYSLGKFGQRALDFYSIHVTKESTHPVKPLAQIAGNRYASPVGKALSDACMGTIASFLSKYQDIIIEHQKVVKGNQKRLESLRELAGKENLEYPSVTLPPQPHTKEGVDAYNEVIARVRMWVNLNLWQKLKLSRDDAKPLLRLKGFPSFPLVERQANEVDWWDMVCNVKKLINEKKEDGKVFWQNLAGYKRQEALRPYLSSEEDRKKGKKFARYQLGDLLLHLEKKHGEDWGKVYDEAWERIDKKVEGLSKHIKLEEERRSEDAQSKAALTDWLRAKASFVIEGLKEADKDEFCRCELKLQKWYGDLRGKPFAIEAENSILDISGFSKQYNCAFIWQKDGVKKLNLYLIINYFKGGKLRFKKIKPEAFEANRFYTVINKKSGEIVPMEVNFNFDDPNLIILPLAFGKRQGREFIWNDLLSLETGSLKLANGRVIEKTLYNRRTRQDEPALFVALTFERREVLDSSNIKPMNLIGVDRGENIPAVIALTDPEGCPLSRFKDSLGNPTHILRIGESYKEKQRTIQAKKEVEQRRAGGYSRKYASKAKNLADDMVRNTARDLLYYAVTQDAMLIFENLSRGFGRQGKRTFMAERQYTRMEDWLTAKLAYEGLPSKTYLSKTLAQYTSKTCSNCGFTITSADYDRVLEKLKKTATGWMTTINGKELKVEGQITYYNRYKRQNVVKDLSVELDRLSEESVNNDISSWTKGRSGNEALSLLKKRFSHRPVQEKFVCLNCGFETHADEQAALNIARSWLFLRSQEYKKYQTNKTTGNTDKRAFVETWQSFYRKKLKEVWKPAV

SEQ ID NO: 46528 - protein, 978 aa, synthetic construct
  REGION 1..978: note = engineered CasX variant
QEIKRINKIRRRLVKDSNTKKAGKTGPMKTLLVRVMTPDLRERLENLRKKPENIPQPISNTSRANLNKLLTDYTEMKKAILHVYWEEFQKDPVGLMSRVAQPASKKIDQNKLKPEMDEKGNLTTAGFACSQCGQPLFVYKLEQVSEKGKAYTNYVGRCNVAEHEKLILLAQLKPEKDSDEAVTYSLGKFGQRALDFYSIHVTKESTHPVKPLAQIAGNRYASYPVGKALSDACMGTIASFLSKYQDIIIEHQKVVKGNQKRLESLRELAGKENLEYPSVTLPPQPHTKEGVDAYNEVIARVRMWVNLNLWQKLKLSRDDAKPLLRLKGFPSFPLVERQANEVDWWDMVCNVKKLINEKKEDGKVFWQNLAGYKRQEALRPYLSSEEDRQKGKKFARYQLGDLLLHLEKKHGEDWGKVYDEAWERIDKKVEGLSKHIKLEEERRSEDAQSKAALTDWLRAKASFVIEGLKEADKDEFCRCELKLQKWYGDLRGKPFAIEAENSILDISGFSKQYNCAFIWQKDGVKKLNLYLIINYFKGGKLRFKKIKPEAFEANRFYTVINKKSGEIVPMEVNFNFDDPNLIILPLAFGKRQGREFIWNDLLSLETGSLKLANGRVIEKTLYNRRTRQDEPALFVALTFERREVLDSSNIKPMNLIGVDRGENIPAVIALTDPEGCPLSRFKDSLGNPTHILRIGESYKEKQRTIQAKKEVEQRRAGGYSRKYASKAKNLADDMVRNTARDLLYYAVTQDAMLIFENLSRGFGRQGKRTFMAERQYTRMEDWLTAKLAYEGLPSKTYLSKTLAQYTSKTCSNCGFTITSADYDRVLEKLKKTATGWMTTINGKELKVEGQITYYNRYKRQNVVKDLSVELDRLSEESVNNDISSWTKGRSGEALSLLKKRFSHRPVQEKFVCLNCGFETHADEQAALNIARSWLFLRSQEYKKYQTNKTTGNTDKRAFVETWQSFYRKKLKEVWKPAV

SEQ ID NO: 46529 - protein, 978 aa, synthetic construct
  REGION 1..978: note = engineered CasX variant
QEIKRINKIRRRLVKDSNTKKAGKTGPMKTLLVRVMTPDLRERLENLRKKPENIPQPISNTSRANLNKLLTDYTEMKKAILHVYWEEFQKDPVGLMSRVAQPASKKIDQNKLKPEMDEKGNLTTAGFACSQCGQPLFVYKLEQVSEKGKAYTNYVGRCNVAEHEKLILLAQLKPEKDSDEAVTYSLGKFGQRALDFYSIHVTKESTHPVKPLAQIAGNRYASHPVGKALSDACMGTIASFLSKYQDIIIEHQKVVKGNQKRLESLRELAGKENLEYPSVTLPPQPHTKEGVDAYNEVIARVRMWVNLNLWQKLKLSRDDAKPLLRLKGFPSFPLVERQANEVDWWDMVCNVKKLINEKKEDGKVFWQNLAGYKRQEALRPYLSSEEDRQKGKKFARYQLGDLLLHLEKKHGEDWGKVYDEAWERIDKKVEGLSKHIKLEEERRSEDAQSKAALTDWLRAKASFVIEGLKEADKDEFCRCELKLQKWYGDLRGKPFAIEAENSILDISGFSKQYNCAFIWQKDGVKKLNLYLIINYFKGGKLRFKKIKPEAFEANRFYTVINKKSGEIVPMEVNFNFDDPNLIILPLAFGKRQGREFIWNDLLSLETGSLKLANGRVIEKTLYNRRTRQDEPALFVALTFERREVLDSSNIKPMNLIGVDRGENIPAVIALTDPEGCPLSRFKDSLGNPTHILRIGESYKEKQRTIQAKKEVEQRRAGGYSRKYASKAKNLADDMVRNTARDLLYYAVTQDAMLIFENLSRGFGRQGKRTFMAERQYTRMEDWLTAKLAYEGLPSKTYLSKTLAQYTSKTCSNCGFTITSADYDRVLEKLKKTATGWMTTINGKELKVEGQITYYNRYKRQNVVKDLSVELDRLSEESVNNDISSWTKGRSGEALSLLKKRFSHRPVQEKFVCLNCGFETHADEQAALNIARSWLFLRSQEYKKYQTNKTTGNTDKRAFVETWQSFYRKKLKEVWKPAV

SEQ ID NO: 46530 - protein, 978 aa, synthetic construct
  REGION 1..978: note = engineered CasX variant
QEIKRINKIRRRLVKDSNTKKAGKTGPMKTLLVRVMTPDLRERLENLRKKPENIPQPISNTSRANLNKLLTDYTEMKKAILHVYWEEFQKDPVGLMSRVAQPASKKIDQNKLKPEMDEKGNLTTAGFACSQCGQPLFVYKLEQVSEKGKAYTNYVGRCNVAEHEKLILLAQLKPEKDSDEAVTYSLGKFGQRALDFYSIHVTKESTHPVKPLAQIAGNRYASSPVGKALSDACMGTIASFLSKYQDIIIEHQKVVKGNQKRLESLRELAGKENLEYPSVTLPPQPHTKEGVDAYNEVIARVRMWVNLNLWQKLKLSRDDAKPLLRLKGFPSFPLVERQANEVDWWDMVCNVKKLINEKKEDGKVFWQNLAGYKRQEALRPYLSSEEDRQKGKKFARYQLGDLLLHLEKKHGEDWGKVYDEAWERIDKKVEGLSKHIKLEEERRSEDAQSKAALTDWLRAKASFVIEGLKEADKDEFCRCELKLQKWYGDLRGKPFAIEAENSILDISGFSKQYNCAFIWQKDGVKKLNLYLIINYFKGGKLRFKKIKPEAFEANRFYTVINKKSGEIVPMEVNFNFDDPNLIILPLAFGKRQGREFIWNDLLSLETGSLKLANGRVIEKTLYNRRTRQDEPALFVALTFERREVLDSSNIKPMNLIGVDRGENIPAVIALTDPEGCPLSRFKDSLGNPTHILRIGESYKEKQRTIQAKKEVEQRRAGGYSRKYASKAKNLADDMVRNTARDLLYYAVTQDAMLIFENLSRGFGRQGKRTFMAERQYTRMEDWLTAKLAYEGLPSKTYLSKTLAQYTSKTCSNCGFTITSADYDRVLEKLKKTATGWMTTINGKELKVEGQITYYNRYKRQNVVKDLSVELDRLSEESVNNDISSWTKGRSGEALSLLKKRFSHRPVQEKFVCLNCGFETHADEQAALNIARSWLFLRSQEYKKYQTNKTTGNTDKRAFVETWQSFYRKKLKEVWKPAV

SEQ ID NO: 46531 - protein, 978 aa, synthetic construct
  REGION 1..978: note = engineered CasX variant
QEIKRINKIRRRLVKDSNTKKAGKTGPMKTLLVRVMTPDLRERLENLRKKPENIPQPISNTSRANLNKLLTDYTEMKKAILHVYWEEFQKDPVGLMSRVAQPASKKIDQNKLKPEMDEKGNLTTAGFACSQCGQPLFVYKLEQVSEKGKAYTNYVGRCNVAEHEKLILLAQLKPEKDSDEAVTYSLGKFGQRALDFYSIHVTKESTHPVKPLAQIAGNRYASTPVGKALSDACMGTIASFLSKYQDIIIEHQKVVKGNQKRLESLRELAGKENLEYPSVTLPPQPHTKEGVDAYNEVIARVRMWVNLNLWQKLKLSRDDAKPLLRLKGFPSFPLVERQANEVDWWDMVCNVKKLINEKKEDGKVFWQNLAGYKRQEALRPYLSSEEDRQKGKKFARYQLGDLLLHLEKKHGEDWGKVYDEAWERIDKKVEGLSKHIKLEEERRSEDAQSKAALTDWLRAKASFVIEGLKEADKDEFCRCELKLQKWYGDLRGKPFAIEAENSILDISGFSKQYNCAFIWQKDGVKKLNLYLIINYFKGGKLRFKKIKPEAFEANRFYTVINKKSGEIVPMEVNFNFDDPNLIILPLAFGKRQGREFIWNDLLSLETGSLKLANGRVIEKTLYNRRTRQDEPALFVALTFERREVLDSSNIKPMNLIGVDRGENIPAVIALTDPEGCPLSRFKDSLGNPTHILRIGESYKEKQRTIQAKKEVEQRRAGGYSRKYASKAKNLADDMVRNTARDLLYYAVTQDAMLIFENLSRGFGRQGKRTFMAERQYTRMEDWLTAKLAYEGLPSKTYLSKTLAQYTSKTCSNCGFTITSADYDRVLEKLKKTATGWMTTINGKELKVEGQITYYNRYKRQNVVKDLSVELDRLSEESVNNDISSWTKGRSGEALSLLKKRFSHRPVQEKFVCLNCGFETHADEQAALNIARSWLFLRSQEYKKYQTNKTTGNTDKRAFVETWQSFYRKKLKEVWKPAV

SEQ ID NO: 46532 - protein, 978 aa, synthetic construct
  REGION 1..978: note = engineered CasX variant
QEIKRINKIRRRLVKDSNTKKAGKTGPMKTLLVRVMTPDLRERLENLRKKPENIPQPISNTSRANLNKLLTDYTEMKKAILHVYWEEFQKDPVGLMSRVAQPASKKIDQNKLKPEMDEKGNLTTAGFACSQCGQPLFVYKLEQVSEKGKAYTNYVGRCNVAEHEKLILLAQLKPEKDSDEAVTYSLGKFGQRALDFYSIHVTKESTHPVKPLAQIAGNRYASAPVGKALSDACMGTIASFLSKYQDIIIEHQKVVKGNQKRLESLRELAGKENLEYPSVTLPPQPHTKEGVDAYNEVIARVRMWVNLNLWQKLKLSRDDAKPLLRLKGFPSFPLVERQANEVDWWDMVCNVKKLINEKKEDGKVFWQNLAGYKRQEALRPYLSSEEDRQKGKKFARYQLGDLLLHLEKKHGEDWGKVYDEAWERIDKKVEGLSKHIKLEEERRSEDAQSKAALTDWLRAKASFVIEGLKEADKDEFCRCELKLQKWYGDLRGKPFAIEAENSILDISGFSKQYNCAFIWQKDGVKKLNLYLIINYFKGGKLRFKKIKPEAFEANRFYTVINKKSGEIVPMEVNFNFDDPNLIILPLAFGKRQGREFIWNDLLSLETGSLKLANGRVIEKTLYNRRTRQDEPALFVALTFERREVLDSSNIKPMNLIGVDRGENIPAVIALTDPEGCPLSRFKDSLGNPTHILRIGESYKEKQRTIQAKKEVEQRRAGGYSRKYASKAKNLADDMVRNTARDLLYYAVTQDAMLIFENLSRGFGRQGKRTFMAERQYTRMEDWLTAKLAYEGLPSKTYLSKTLAQYTSKTCSNCGFTITSADYDRVLEKLKKTATGWMTTINGKELKVEGQITYYNRYKRQNVVKDLSVELDRLSEESVNNDISSWTKGRSGEALSLLKKRFSHRPVQEKFVCLNCGFETHADEQAALNIARSWLFLRSQEYKKYQTNKTTGNTDKRAFVETWQSFYRKKLKEVWKPAV

SEQ ID NO: 46533 - protein, 978 aa, synthetic construct
  REGION 1..978: note = engineered CasX variant
QEIKRINKIRRRLVKDSNTKKAGKTGPMKTLLVRVMTPDLRERLENLRKKPENIPQPISNTSRANLNKLLTDYTEMKKAILHVYWEEFQKDPVGLMSRVAQPASKKIDQNKLKPEMDEKGNLTTAGFACSQCGQPLFVYKLEQVSEKGKAYTNYVGRCNVAEHEKLILLAQLKPEKDSDEAVTYSLGKFGQRALDFYSIHVTKESTHPVKPLAQIAGNRYASVPVGKALSDACMGTIASFLSKYQDIIIEHQKVVKGNQKRLESLRELAGKENLEYPSVTLPPQPHTKEGVDAYNEVIARVRMWVNLNLWQKLKLSRDDAKPLLRLKGFPSFPLVERQANEVDWWDMVCNVKKLINEKKEDGKVFWQNLAGYKRQEALRPYLSSEEDRQKGKKFARYQLGDLLLHLEKKHGEDWGKVYDEAWERIDKKVEGLSKHIKLEEERRSEDAQSKAALTDWLRAKASFVIEGLKEADKDEFCRCELKLQKWYGDLRGKPFAIEAENSILDISGFSKQYNCAFIWQKDGVKKLNLYLIINYFKGGKLRFKKIKPEAFEANRFYTVINKKSGEIVPMEVNFNFDDPNLIILPLAFGKRQGREFIWNDLLSLETGSLKLANGRVIEKTLYNRRTRQDEPALFVALTFERREVLDSSNIKPMNLIGVDRGENIPAVIALTDPEGCPLSRFKDSLGNPTHILRIGESYKEKQRTIQAKKEVEQRRAGGYSRKYASKAKNLADDMVRNTARDLLYYAVTQDAMLIFENLSRGFGRQGKRTFMAERQYTRMEDWLTAKLAYEGLPSKTYLSKTLAQYTSKTCSNCGFTITSADYDRVLEKLKKTATGWMTTINGKELKVEGQITYYNRYKRQNVVKDLSVELDRLSEESVNNDISSWTKGRSGEALSLLKKRFSHRPVQEKFVCLNCGFETHADEQAALNIARSWLFLRSQEYKKYQTNKTTGNTDKRAFVETWQSFYRKKLKEVWKPAV

SEQ ID NO: 46534 - protein, 978 aa, synthetic construct
  REGION 1..978: note = engineered CasX variant
QEIKRINKIRRRLVKDSNTKKAGKTGPMKTLLVRVMTPDLRERLENLRKKPENIPQPISNTSRANLNKLLTDYTEMKKAILHVYWEEFQKDPVGLMSRVAQPASKKIDQNKLKPEMDEKGNLTTAGFACSQCGQPLFVYKLEQVSEKGKAYTNYVGRCNVAEHEKLIKLAQLKPEKDSDEAVTYSLGKFGQRALDFYSIHVTKESTHPVKPLAQIAGNRYASGPVGKALSDACMGTIASFLSKYQDIIIEHQKVVKGNQKRLESLRELAGKENLEYPSVTLPPQPHTKEGVDAYNEVIARVRMWVNLNLWQKLKLSRDDAKPLLRLKGFPSFPLVERQANEVDWWDMVCNVKKLINEKKEDGKVFWQNLAGYKRQEALRPYLSSEEDRQKGKKFARYQLGDLLLHLEKKHGEDWGKVYDEAWERIDKKVEGLSKHIKLEEERRSEDAQSKAALTDWLRAKASFVIEGLKEADKDEFCRCELKLQKWYGDLRGKPFAIEAENSILDISGFSKQYNCAFIWQKDGVKKLNLYLIINYFKGGKLRFKKIKPEAFEANRFYTVINKKSGEIVPMEVNFNFDDPNLIILPLAFGKRQGREFIWNDLLSLETGSLKLANGRVIEKTLYNRRTRQDEPALFVALTFERREVLDSSNIKPMNLIGVDRGENIPAVIALTDPEGCPLSRFKDSLGNPTHILRIGESYKEKQRTIQAKKEVEQRRAGGYSRKYASKAKNLADDMVRNTARDLLYYAVTQDAMLIFENLSRGFGRQGKRTFMAERQYTRMEDWLTAKLAYEGLPSKTYLSKTLAQYTSKTCSNCGFTITSADYDRVLEKLKKTATGWMTTINGKELKVEGQITYYNRYKRQNVVKDLSVELDRLSEESVNNDISSWTKGRSGEALSLLKKRFSHRPVQEKFVCLNCGFETHADEQAALNIARSWLFLRSQEYKKYQTNKTTGNTDKRAFVETWQSFYRKKLKEVWKPAV

SEQ ID NO: 46535 - protein, 977 aa, synthetic construct
  REGION 1..977: note = engineered CasX variant
QEIKRINKIRRRLVKDSNTKKAGKTGPMKTLLVRVMTPDLRERLENLRKKPENIPQPISNTSRANLNKLLTDYTEMKKAILHVYWEEFQKDPVGLMSRVAQPASKKIDQNKLKPEMDEKGNLTTAGFACSQCGQPLFVYKLEQVSEKGKAYTNYVGRCNVAEHEKLILLAQLKPEKDSDEAVTYSLGKFGQRALDFYSIHVTKESTHPVKPLAQIAGNRYASPVGKALSDACMGTIASFLSKYQDIIIEHQKVVKGNQKRLESLRELAGKENLEYPSVTLPPQPHTKEGVDAYNEVIARVRMWVNLNLWQKLKLSRDDAKPLLRLKGFPSFPLVERQANEVDWWDMVCNVKKLINEKKEDGKVFWQNLAGYKRQEALRPYLSSEEDRQKGKKFARYQLGDLLLHLEKKHGEDWGKVYDEAWERIDKKVEGLSKHIKLEEERRSEDAQSKAALTDWLRAKASFVIEGLKEADKDEFCRCELKLQKWYGDLRGKPFAIEAENSILDISGFSKQYNCAFIWQKDGVKKLNLYLIINYFKGGKLRFKKIKPEAFEANRFYTVINKKSGEIVPMEVNFNFDDPNLIILPLAFGKRQGREFIWNDLLSLETGSLKLANGRVIEKTLYNRRTRQDEPALFVALTFERREVLDSSNIKPMNLIGVDRGENIPAVIALTDPEGCPLSRFKDSLGNPTHILRIGESYKEKQRTIQAKKEVEQRRAGGYSRKYASKAKNLADDMVRNTARDLLYYAVTQDAMLIFENLSRGFGRQGKRTFMAERQYTRMEDWLTAKLAYEGLPSKTYLSKTLAQYTSKTCSNCGFTITSADYDRVLEKLKKTATGWMTTINGKELKVEGQITYYNRYKRQNVVKDLSVELDRLSEESVNNDISSWTKGRSGEALSLLKKRFSHRPVQEKFVCLNCGFETHADEQAALNIARSWLFLRSQEYKKYQTNKTTGNTDKRAFVETWQSFYRKKLKEVWKPAV

SEQ ID NO: 46536 - protein, 978 aa, synthetic construct
  REGION 1..978: note = engineered CasX variant
QEIKRINKIRRRLVKDSNTKKAGKTGPMKTLLVRVMTPDLRERLENLRKKPENIPQPISNTSRANLNKLLTDYTEMKKAILHVYWEEFQKDPVGLMSRVAQPASKKIDQNKLKPEMDEKGNLTTAGFACSQCGQPLFVYKLEQVSEKGKAYTNYVGRCNVAEHEKLILLAQLKPEKDSDEAVTYSLGKFGQRALDFYSIHVTKESTHPVKPLAQIAGNRYASYPVGKALSDACMGTIASFLSKYQDIIIEHQKVVKGNQKRLESLRELAGKENLEYPSVTLPPQPHTKEGVDAYNEVIARVRMWVNLNLWQKLKLSRDDAKPLLRLKGFPSFPLVERQANEVDWWDMVCNVKKLINEKKEDGKVFWQNLAGYKRQEALRPYLSSEEDRKKGKKFARYQLGDLLLHLEKKHGEDWGKVYDEAWERIDKKVEGLSKHIKLEEERRSEDAQSKAALTDWLRAKASFVIEGLKEADKDEFCRCELKLQKWYGDLRGKPFAIEAENSILDISGFSKQYNCAFIWQKDGVKKLNLYLIINYFKGGKLRFKKIKPEAFEANRFYTVINKKSGEIVPMEVNFNFDDPNLIILPLAFGKRQGREFIWNDLLSLETGSLKLANGRVIEKTLYNRRTRQDEPALFVALTFERREVLDSSNIKPMNLIGVDRGENIPAVIALTDPEGCPLSRFKDSLGNPTHILRIGESYKEKQRTIQAKKEVEQRRAGGYSRKYASKAKNLADDMVRNTARDLLYYAVTQDAMLIFENLSRGFGRQGKRTFMAERQYTRMEDWLTAKLAYEGLPSQTYLSKTLAQYTSKTCSNCGFTITSADYDRVLEKLKKTATGWMTTINGKELKVEGQITYYNRYKRQNVVKDLSVELDRLSEESVNNDISSWTKGRSGEALSLLKKRFSHRPVQEKFVCLNCGFETHADEQAALNIARSWLFLRSQEYKKYQTNKTTGNTDKRAFVETWQSFYRKKLKEVWKPAV

SEQ ID NO: 46537 - protein, 978 aa, synthetic construct
  REGION 1..978: note = engineered CasX variant
QEIKRINKIRRRLVKDSNTKKAGKTGPMKTLLVRVMTPDLRERLENLRKKPENIPQPISNTSRANLNKLLTDYTEMKKAILHVYWEEFQKDPVGLMSRVAQPASKKIDQNKLKPEMDEKGNLTTAGFACSQCGQPLFVYKLEQVSEKGKAYTNYVGRCNVAEHEKLILLAQLKPEKDSDEAVTYSLGKFGQRALDFYSIHVTKESTHPVKPLAQIAGNRYASHPVGKALSDACMGTIASFLSKYQDIIIEHQKVVKGNQKRLESLRELAGKENLEYPSVTLPPQPHTKEGVDAYNEVIARVRMWVNLNLWQKLKLSRDDAKPLLRLKGFPSFPLVERQANEVDWWDMVCNVKKLINEKKEDGKVFWQNLAGYKRQEALRPYLSSEEDRKKGKKFARYQLGDLLLHLEKKHGEDWGKVYDEAWERIDKKVEGLSKHIKLEEERRSEDAQSKAALTDWLRAKASFVIEGLKEADKDEFCRCELKLQKWYGDLRGKPFAIEAENSILDISGFSKQYNCAFIWQKDGVKKLNLYLIINYFKGGKLRFKKIKPEAFEANRFYTVINKKSGEIVPMEVNFNFDDPNLIILPLAFGKRQGREFIWNDLLSLETGSLKLANGRVIEKTLYNRRTRQDEPALFVALTFERREVLDSSNIKPMNLIGVDRGENIPAVIALTDPEGCPLSRFKDSLGNPTHILRIGESYKEKQRTIQAKKEVEQRRAGGYSRKYASKAKNLADDMVRNTARDLLYYAVTQDAMLIFENLSRGFGRQGKRTFMAERQYTRMEDWLTAKLAYEGLPSQTYLSKTLAQYTSKTCSNCGFTITSADYDRVLEKLKKTATGWMTTINGKELKVEGQITYYNRYKRQNVVKDLSVELDRLSEESVNNDISSWTKGRSGEALSLLKKRFSHRPVQEKFVCLNCGFETHADEQAALNIARSWLFLRSQEYKKYQTNKTTGNTDKRAFVETWQSFYRKKLKEVWKPAV

SEQ ID NO: 46538 - protein, 978 aa, synthetic construct
  REGION 1..978: note = engineered CasX variant
QEIKRINKIRRRLVKDSNTKKAGKTGPMKTLLVRVMTPDLRERLENLRKKPENIPQPISNTSRANLNKLLTDYTEMKKAILHVYWEEFQKDPVGLMSRVAQPASKKIDQNKLKPEMDEKGNLTTAGFACSQCGQPLFVYKLEQVSEKGKAYTNYVGRCNVAEHEKLILLAQLKPEKDSDEAVTYSLGKFGQRALDFYSIHVTKESTHPVKPLAQIAGNRYASSPVGKALSDACMGTIASFLSKYQDIIIEHQKVVKGNQKRLESLRELAGKENLEYPSVTLPPQPHTKEGVDAYNEVIARVRMWVNLNLWQKLKLSRDDAKPLLRLKGFPSFPLVERQANEVDWWDMVCNVKKLINEKKEDGKVFWQNLAGYKRQEALRPYLSSEEDRKKGKKFARYQLGDLLLHLEKKHGEDWGKVYDEAWERIDKKVEGLSKHIKLEEERRSEDAQSKAALTDWLRAKASFVIEGLKEADKDEFCRCELKLQKWYGDLRGKPFAIEAENSILDISGFSKQYNCAFIWQKDGVKKLNLYLIINYFKGGKLRFKKIKPEAFEANRFYTVINKKSGEIVPMEVNFNFDDPNLIILPLAFGKRQGREFIWNDLLSLETGSLKLANGRVIEKTLYNRRTRQDEPALFVALTFERREVLDSSNIKPMNLIGVDRGENIPAVIALTDPEGCPLSRFKDSLGNPTHILRIGESYKEKQRTIQAKKEVEQRRAGGYSRKYASKAKNLADDMVRNTARDLLYYAVTQDAMLIFENLSRGFGRQGKRTFMAERQYTRMEDWLTAKLAYEGLPSQTYLSKTLAQYTSKTCSNCGFTITSADYDRVLEKLKKTATGWMTTINGKELKVEGQITYYNRYKRQNVVKDLSVELDRLSEESVNNDISSWTKGRSGEALSLLKKRFSHRPVQEKFVCLNCGFETHADEQAALNIARSWLFLRSQEYKKYQTNKTTGNTDKRAFVETWQSFYRKKLKEVWKPAV

SEQ ID NO: 46539 - protein, 978 aa, synthetic construct
  REGION 1..978: note = engineered CasX variant
QEIKRINKIRRRLVKDSNTKKAGKTGPMKTLLVRVMTPDLRERLENLRKKPENIPQPISNTSRANLNKLLTDYTEMKKAILHVYWEEFQKDPVGLMSRVAQPASKKIDQNKLKPEMDEKGNLTTAGFACSQCGQPLFVYKLEQVSEKGKAYTNYVGRCNVAEHEKLILLAQLKPEKDSDEAVTYSLGKFGQRALDFYSIHVTKESTHPVKPLAQIAGNRYASTPVGKALSDACMGTIASFLSKYQDIIIEHQKVVKGNQKRLESLRELAGKENLEYPSVTLPPQPHTKEGVDAYNEVIARVRMWVNLNLWQKLKLSRDDAKPLLRLKGFPSFPLVERQANEVDWWDMVCNVKKLINEKKEDGKVFWQNLAGYKRQEALRPYLSSEEDRKKGKKFARYQLGDLLLHLEKKHGEDWGKVYDEAWERIDKKVEGLSKHIKLEEERRSEDAQSKAALTDWLRAKASFVIEGLKEADKDEFCRCELKLQKWYGDLRGKPFAIEAENSILDISGFSKQYNCAFIWQKDGVKKLNLYLIINYFKGGKLRFKKIKPEAFEANRFYTVINKKSGEIVPMEVNFNFDDPNLIILPLAFGKRQGREFIWNDLLSLETGSLKLANGRVIEKTLYNRRTRQDEPALFVALTFERREVLDSSNIKPMNLIGVDRGENIPAVIALTDPEGCPLSRFKDSLGNPTHILRIGESYKEKQRTIQAKKEVEQRRAGGYSRKYASKAKNLADDMVRNTARDLLYYAVTQDAMLIFENLSRGFGRQGKRTFMAERQYTRMEDWLTAKLAYEGLPSQTYLSKTLAQYTSKTCSNCGFTITSADYDRVLEKLKKTATGWMTTINGKELKVEGQITYYNRYKRQNVVKDLSVELDRLSEESVNNDISSWTKGRSGEALSLLKKRFSHRPVQEKFVCLNCGFETHADEQAALNIARSWLFLRSQEYKKYQTNKTTGNTDKRAFVETWQSFYRKKLKEVWKPAV

SEQ ID NO: 46540 - protein, 978 aa, synthetic construct
  REGION 1..978: note = engineered CasX variant
QEIKRINKIRRRLVKDSNTKKAGKTGPMKTLLVRVMTPDLRERLENLRKKPENIPQPISNTSRANLNKLLTDYTEMKKAILHVYWEEFQKDPVGLMSRVAQPASKKIDQNKLKPEMDEKGNLTTAGFACSQCGQPLFVYKLEQVSEKGKAYTNYVGRCNVAEHEKLILLAQLKPEKDSDEAVTYSLGKFGQRALDFYSIHVTKESTHPVKPLAQIAGNRYASAPVGKALSDACMGTIASFLSKYQDIIIEHQKVVKGNQKRLESLRELAGKENLEYPSVTLPPQPHTKEGVDAYNEVIARVRMWVNLNLWQKLKLSRDDAKPLLRLKGFPSFPLVERQANEVDWWDMVCNVKKLINEKKEDGKVFWQNLAGYKRQEALRPYLSSEEDRKKGKKFARYQLGDLLLHLEKKHGEDWGKVYDEAWERIDKKVEGLSKHIKLEEERRSEDAQSKAALTDWLRAKASFVIEGLKEADKDEFCRCELKLQKWYGDLRGKPFAIEAENSILDISGFSKQYNCAFIWQKDGVKKLNLYLIINYFKGGKLRFKKIKPEAFEANRFYTVINKKSGEIVPMEVNFNFDDPNLIILPLAFGKRQGREFIWNDLLSLETGSLKLANGRVIEKTLYNRRTRQDEPALFVALTFERREVLDSSNIKPMNLIGVDRGENIPAVIALTDPEGCPLSRFKDSLGNPTHILRIGESYKEKQRTIQAKKEVEQRRAGGYSRKYASKAKNLADDMVRNTARDLLYYAVTQDAMLIFENLSRGFGRQGKRTFMAERQYTRMEDWLTAKLAYEGLPSQTYLSKTLAQYTSKTCSNCGFTITSADYDRVLEKLKKTATGWMTTINGKELKVEGQITYYNRYKRQNVVKDLSVELDRLSEESVNNDISSWTKGRSGEALSLLKKRFSHRPVQEKFVCLNCGFETHADEQAALNIARSWLFLRSQEYKKYQTNKTTGNTDKRAFVETWQSFYRKKLKEVWKPAV

SEQ ID NO: 46541 - protein, 978 aa, synthetic construct
  REGION 1..978: note = engineered CasX variant
QEIKRINKIRRRLVKDSNTKKAGKTGPMKTLLVRVMTPDLRERLENLRKKPENIPQPISNTSRANLNKLLTDYTEMKKAILHVYWEEFQKDPVGLMSRVAQPASKKIDQNKLKPEMDEKGNLTTAGFACSQCGQPLFVYKLEQVSEKGKAYTNYVGRCNVAEHEKLILLAQLKPEKDSDEAVTYSLGKFGQRALDFYSIHVTKESTHPVKPLAQIAGNRYASVPVGKALSDACMGTIASFLSKYQDIIIEHQKVVKGNQKRLESLRELAGKENLEYPSVTLPPQPHTKEGVDAYNEVIARVRMWVNLNLWQKLKLSRDDAKPLLRLKGFPSFPLVERQANEVDWWDMVCNVKKLINEKKEDGKVFWQNLAGYKRQEALRPYLSSEEDRKKGKKFARYQLGDLLLHLEKKHGEDWGKVYDEAWERIDKKVEGLSKHIKLEEERRSEDAQSKAALTDWLRAKASFVIEGLKEADKDEFCRCELKLQKWYGDLRGKPFAIEAENSILDISGFSKQYNCAFIWQKDGVKKLNLYLIINYFKGGKLRFKKIKPEAFEANRFYTVINKKSGEIVPMEVNFNFDDPNLIILPLAFGKRQGREFIWNDLLSLETGSLKLANGRVIEKTLYNRRTRQDEPALFVALTFERREVLDSSNIKPMNLIGVDRGENIPAVIALTDPEGCPLSRFKDSLGNPTHILRIGESYKEKQRTIQAKKEVEQRRAGGYSRKYASKAKNLADDMVRNTARDLLYYAVTQDAMLIFENLSRGFGRQGKRTFMAERQYTRMEDWLTAKLAYEGLPSQTYLSKTLAQYTSKTCSNCGFTITSADYDRVLEKLKKTATGWMTTINGKELKVEGQITYYNRYKRQNVVKDLSVELDRLSEESVNNDISSWTKGRSGEALSLLKKRFSHRPVQEKFVCLNCGFETHADEQAALNIARSWLFLRSQEYKKYQTNKTTGNTDKRAFVETWQSFYRKKLKEVWKPAV

SEQ ID NO: 46542 - protein, 978 aa, synthetic construct
  REGION 1..978: note = engineered CasX variant
QEIKRINKIRRRLVKDSNTKKAGKTGPMKTLLVRVMTPDLRERLENLRKKPENIPQPISNTSRANLNKLLTDYTEMKKAILHVYWEEFQKDPVGLMSRVAQPASKKIDQNKLKPEMDEKGNLTTAGFACSQCGQPLFVYKLEQVSEKGKAYTNYVGRCNVAEHEKLIKLAQLKPEKDSDEAVTYSLGKFGQRALDFYSIHVTKESTHPVKPLAQIAGNRYASGPVGKALSDACMGTIASFLSKYQDIIIEHQKVVKGNQKRLESLRELAGKENLEYPSVTLPPQPHTKEGVDAYNEVIARVRMWVNLNLWQKLKLSRDDAKPLLRLKGFPSFPLVERQANEVDWWDMVCNVKKLINEKKEDGKVFWQNLAGYKRQEALRPYLSSEEDRKKGKKFARYQLGDLLLHLEKKHGEDWGKVYDEAWERIDKKVEGLSKHIKLEEERRSEDAQSKAALTDWLRAKASFVIEGLKEADKDEFCRCELKLQKWYGDLRGKPFAIEAENSILDISGFSKQYNCAFIWQKDGVKKLNLYLIINYFKGGKLRFKKIKPEAFEANRFYTVINKKSGEIVPMEVNFNFDDPNLIILPLAFGKRQGREFIWNDLLSLETGSLKLANGRVIEKTLYNRRTRQDEPALFVALTFERREVLDSSNIKPMNLIGVDRGENIPAVIALTDPEGCPLSRFKDSLGNPTHILRIGESYKEKQRTIQAKKEVEQRRAGGYSRKYASKAKNLADDMVRNTARDLLYYAVTQDAMLIFENLSRGFGRQGKRTFMAERQYTRMEDWLTAKLAYEGLPSQTYLSKTLAQYTSKTCSNCGFTITSADYDRVLEKLKKTATGWMTTINGKELKVEGQITYYNRYKRQNVVKDLSVELDRLSEESVNNDISSWTKGRSGEALSLLKKRFSHRPVQEKFVCLNCGFETHADEQAALNIARSWLFLRSQEYKKYQTNKTTGNTDKRAFVETWQSFYRKKLKEVWKPAV

SEQ ID NO: 46543 - protein, 977 aa, synthetic construct
  REGION 1..977: note = engineered CasX variant
QEIKRINKIRRRLVKDSNTKKAGKTGPMKTLLVRVMTPDLRERLENLRKKPENIPQPISNTSRANLNKLLTDYTEMKKAILHVYWEEFQKDPVGLMSRVAQPASKKIDQNKLKPEMDEKGNLTTAGFACSQCGQPLFVYKLEQVSEKGKAYTNYVGRCNVAEHEKLILLAQLKPEKDSDEAVTYSLGKFGQRALDFYSIHVTKESTHPVKPLAQIAGNRYASPVGKALSDACMGTIASFLSKYQDIIIEHQKVVKGNQKRLESLRELAGKENLEYPSVTLPPQPHTKEGVDAYNEVIARVRMWVNLNLWQKLKLSRDDAKPLLRLKGFPSFPLVERQANEVDWWDMVCNVKKLINEKKEDGKVFWQNLAGYKRQEALRPYLSSEEDRKKGKKFARYQLGDLLLHLEKKHGEDWGKVYDEAWERIDKKVEGLSKHIKLEEERRSEDAQSKAALTDWLRAKASFVIEGLKEADKDEFCRCELKLQKWYGDLRGKPFAIEAENSILDISGFSKQYNCAFIWQKDGVKKLNLYLIINYFKGGKLRFKKIKPEAFEANRFYTVINKKSGEIVPMEVNFNFDDPNLIILPLAFGKRQGREFIWNDLLSLETGSLKLANGRVIEKTLYNRRTRQDEPALFVALTFERREVLDSSNIKPMNLIGVDRGENIPAVIALTDPEGCPLSRFKDSLGNPTHILRIGESYKEKQRTIQAKKEVEQRRAGGYSRKYASKAKNLADDMVRNTARDLLYYAVTQDAMLIFENLSRGFGRQGKRTFMAERQYTRMEDWLTAKLAYEGLPSQTYLSKTLAQYTSKTCSNCGFTITSADYDRVLEKLKKTATGWMTTINGKELKVEGQITYYNRYKRQNVVKDLSVELDRLSEESVNNDISSWTKGRSGEALSLLKKRFSHRPVQEKFVCLNCGFETHADEQAALNIARSWLFLRSQEYKKYQTNKTTGNTDKRAFVETWQSFYRKKLKEVWKPAV

SEQ ID NO: 46544 - protein, 978 aa, synthetic construct
  REGION 1..978: note = engineered CasX variant
QEIKRINKIRRRLVKDSNTKKAGKTGPMKTLLVRVMTPDLRERLENLRKKPENIPQPISNTSRANLNKLLTDYTEMKKAILHVYWEEFQKDPVGLMSRVAQPASKKIDQNKLKPEMDEKGNLTTAGFACSQCGQPLFVYKLEQVSEKGKAYTNYVGRCNVAEHEKLILLAQLKPEKDSDEAVTYSLGKFGQRALDFYSIHVTKESTHPVKPLAQIAGNRYASYPVGKALSDACMGTIASFLSKYQDIIIEHQKVVKGNQKRLESLRELAGKENLEYPSVTLPPQPHTKEGVDAYNEVIARVRMWVNLNLWQKLKLSRDDAKPLLRLKGFPSFPLVERQANEVDWWDMVCNVKKLINEKKEDGKVFWQNLAGYKRQEALRPYLSSEEDRKKGKKFARYQLGDLLLHLEKKHGEDWGKVYDEAWERIDKKVEGLSKHIKLEEERRSEDAQSKAALTDWLRAKASFVIEGLKEADKDEFCRCELKLQKWYGDLRGKPFAIEAENSILDISGFSKQYNCAFIWQKDGVKKLNLYLIINYFKGGKLRFKKIKPEAFEANRFYTVINKKSGEIVPMEVNFNFDDPNLIILPLAFGKRQGREFIWNDLLSLETGSLKLANGRVIEKTLYNRRTRQDEPALFVALTFERREVLDSSNIKPMNLIGVDRGENIPAVIALTDPEGCPLSRFKDSLGNPTHILRIGESYKEKQRTIQAKKEVEQRRAGGYSRKYASKAKNLADDMVRNTARDLLYYAVTQDAMLIFENLSRGFGRQGKRTFMAERQYTRMEDWLTAKLAYNGLPSKTYLSKTLAQYTSKTCSNCGFTITSADYDRVLEKLKKTATGWMTTINGKELKVEGQITYYNRYKRQNVVKDLSVELDRLSEESVNNDISSWTKGRSGEALSLLKKRFSHRPVQEKFVCLNCGFETHADEQAALNIARSWLFLRSQEYKKYQTNKTTGNTDKRAFVETWQSFYRKKLKEVWKPAV

SEQ ID NO: 46545 - protein, 978 aa, synthetic construct
  REGION 1..978: note = engineered CasX variant
QEIKRINKIRRRLVKDSNTKKAGKTGPMKTLLVRVMTPDLRERLENLRKKPENIPQPISNTSRANLNKLLTDYTEMKKAILHVYWEEFQKDPVGLMSRVAQPASKKIDQNKLKPEMDEKGNLTTAGFACSQCGQPLFVYKLEQVSEKGKAYTNYVGRCNVAEHEKLILLAQLKPEKDSDEAVTYSLGKFGQRALDFYSIHVTKESTHPVKPLAQIAGNRYASHPVGKALSDACMGTIASFLSKYQDIIIEHQKVVKGNQKRLESLRELAGKENLEYPSVTLPPQPHTKEGVDAYNEVIARVRMWVNLNLWQKLKLSRDDAKPLLRLKGFPSFPLVERQANEVDWWDMVCNVKKLINEKKEDGKVFWQNLAGYKRQEALRPYLSSEEDRKKGKKFARYQLGDLLLHLEKKHGEDWGKVYDEAWERIDKKVEGLSKHIKLEEERRSEDAQSKAALTDWLRAKASFVIEGLKEADKDEFCRCELKLQKWYGDLRGKPFAIEAENSILDISGFSKQYNCAFIWQKDGVKKLNLYLIINYFKGGKLRFKKIKPEAFEANRFYTVINKKSGEIVPMEVNFNFDDPNLIILPLAFGKRQGREFIWNDLLSLETGSLKLANGRVIEKTLYNRRTRQDEPALFVALTFERREVLDSSNIKPMNLIGVDRGENIPAVIALTDPEGCPLSRFKDSLGNPTHILRIGESYKEKQRTIQAKKEVEQRRAGGYSRKYASKAKNLADDMVRNTARDLLYYAVTQDAMLIFENLSRGFGRQGKRTFMAERQYTRMEDWLTAKLAYNGLPSKTYLSKTLAQYTSKTCSNCGFTITSADYDRVLEKLKKTATGWMTTINGKELKVEGQITYYNRYKRQNVVKDLSVELDRLSEESVNNDISSWTKGRSGEALSLLKKRFSHRPVQEKFVCLNCGFETHADEQAALNIARSWLFLRSQEYKKYQTNKTTGNTDKRAFVETWQSFYRKKLKEVWKPAV

SEQ ID NO: 46546 - protein, 978 aa, synthetic construct
  REGION 1..978: note = engineered CasX variant
QEIKRINKIRRRLVKDSNTKKAGKTGPMKTLLVRVMTPDLRERLENLRKKPENIPQPISNTSRANLNKLLTDYTEMKKAILHVYWEEFQKDPVGLMSRVAQPASKKIDQNKLKPEMDEKGNLTTAGFACSQCGQPLFVYKLEQVSEKGKAYTNYVGRCNVAEHEKLILLAQLKPEKDSDEAVTYSLGKFGQRALDFYSIHVTKESTHPVKPLAQIAGNRYASSPVGKALSDACMGTIASFLSKYQDIIIEHQKVVKGNQKRLESLRELAGKENLEYPSVTLPPQPHTKEGVDAYNEVIARVRMWVNLNLWQKLKLSRDDAKPLLRLKGFPSFPLVERQANEVDWWDMVCNVKKLINEKKEDGKVFWQNLAGYKRQEALRPYLSSEEDRKKGKKFARYQLGDLLLHLEKKHGEDWGKVYDEAWERIDKKVEGLSKHIKLEEERRSEDAQSKAALTDWLRAKASFVIEGLKEADKDEFCRCELKLQKWYGDLRGKPFAIEAENSILDISGFSKQYNCAFIWQKDGVKKLNLYLIINYFKGGKLRFKKIKPEAFEANRFYTVINKKSGEIVPMEVNFNFDDPNLIILPLAFGKRQGREFIWNDLLSLETGSLKLANGRVIEKTLYNRRTRQDEPALFVALTFERREVLDSSNIKPMNLIGVDRGENIPAVIALTDPEGCPLSRFKDSLGNPTHILRIGESYKEKQRTIQAKKEVEQRRAGGYSRKYASKAKNLADDMVRNTARDLLYYAVTQDAMLIFENLSRGFGRQGKRTFMAERQYTRMEDWLTAKLAYNGLPSKTYLSKTLAQYTSKTCSNCGFTITSADYDRVLEKLKKTATGWMTTINGKELKVEGQITYYNRYKRQNVVKDLSVELDRLSEESVNNDISSWTKGRSGEALSLLKKRFSHRPVQEKFVCLNCGFETHADEQAALNIARSWLFLRSQEYKKYQTNKTTGNTDKRAFVETWQSFYRKKLKEVWKPAV

SEQ ID NO: 46547 - protein, 978 aa, synthetic construct
  REGION 1..978: note = engineered CasX variant
QEIKRINKIRRRLVKDSNTKKAGKTGPMKTLLVRVMTPDLRERLENLRKKPENIPQPISNTSRANLNKLLTDYTEMKKAILHVYWEEFQKDPVGLMSRVAQPASKKIDQNKLKPEMDEKGNLTTAGFACSQCGQPLFVYKLEQVSEKGKAYTNYVGRCNVAEHEKLILLAQLKPEKDSDEAVTYSLGKFGQRALDFYSIHVTKESTHPVKPLAQIAGNRYASTPVGKALSDACMGTIASFLSKYQDIIIEHQKVVKGNQKRLESLRELAGKENLEYPSVTLPPQPHTKEGVDAYNEVIARVRMWVNLNLWQKLKLSRDDAKPLLRLKGFPSFPLVERQANEVDWWDMVCNVKKLINEKKEDGKVFWQNLAGYKRQEALRPYLSSEEDRKKGKKFARYQLGDLLLHLEKKHGEDWGKVYDEAWERIDKKVEGLSKHIKLEEERRSEDAQSKAALTDWLRAKASFVIEGLKEADKDEFCRCELKLQKWYGDLRGKPFAIEAENSILDISGFSKQYNCAFIWQKDGVKKLNLYLIINYFKGGKLRFKKIKPEAFEANRFYTVINKKSGEIVPMEVNFNFDDPNLIILPLAFGKRQGREFIWNDLLSLETGSLKLANGRVIEKTLYNRRTRQDEPALFVALTFERREVLDSSNIKPMNLIGVDRGENIPAVIALTDPEGCPLSRFKDSLGNPTHILRIGESYKEKQRTIQAKKEVEQRRAGGYSRKYASKAKNLADDMVRNTARDLLYYAVTQDAMLIFENLSRGFGRQGKRTFMAERQYTRMEDWLTAKLAYNGLPSKTYLSKTLAQYTSKTCSNCGFTITSADYDRVLEKLKKTATGWMTTINGKELKVEGQITYYNRYKRQNVVKDLSVELDRLSEESVNNDISSWTKGRSGEALSLLKKRFSHRPVQEKFVCLNCGFETHADEQAALNIARSWLFLRSQEYKKYQTNKTTGNTDKRAFVETWQSFYRKKLKEVWKPAV

SEQ ID NO: 46548 - protein, 978 aa, synthetic construct
  REGION 1..978: note = engineered CasX variant
QEIKRINKIRRRLVKDSNTKKAGKTGPMKTLLVRVMTPDLRERLENLRKKPENIPQPISNTSRANLNKLLTDYTEMKKAILHVYWEEFQKDPVGLMSRVAQPASKKIDQNKLKPEMDEKGNLTTAGFACSQCGQPLFVYKLEQVSEKGKAYTNYVGRCNVAEHEKLILLAQLKPEKDSDEAVTYSLGKFGQRALDFYSIHVTKESTHPVKPLAQIAGNRYASAPVGKALSDACMGTIASFLSKYQDIIIEHQKVVKGNQKRLESLRELAGKENLEYPSVTLPPQPHTKEGVDAYNEVIARVRMWVNLNLWQKLKLSRDDAKPLLRLKGFPSFPLVERQANEVDWWDMVCNVKKLINEKKEDGKVFWQNLAGYKRQEALRPYLSSEEDRKKGKKFARYQLGDLLLHLEKKHGEDWGKVYDEAWERIDKKVEGLSKHIKLEEERRSEDAQSKAALTDWLRAKASFVIEGLKEADKDEFCRCELKLQKWYGDLRGKPFAIEAENSILDISGFSKQYNCAFIWQKDGVKKLNLYLIINYFKGGKLRFKKIKPEAFEANRFYTVINKKSGEIVPMEVNFNFDDPNLIILPLAFGKRQGREFIWNDLLSLETGSLKLANGRVIEKTLYNRRTRQDEPALFVALTFERREVLDSSNIKPMNLIGVDRGENIPAVIALTDPEGCPLSRFKDSLGNPTHILRIGESYKEKQRTIQAKKEVEQRRAGGYSRKYASKAKNLADDMVRNTARDLLYYAVTQDAMLIFENLSRGFGRQGKRTFMAERQYTRMEDWLTAKLAYNGLPSKTYLSKTLAQYTSKTCSNCGFTITSADYDRVLEKLKKTATGWMTTINGKELKVEGQITYYNRYKRQNVVKDLSVELDRLSEESVNNDISSWTKGRSGEALSLLKKRFSHRPVQEKFVCLNCGFETHADEQAALNIARSWLFLRSQEYKKYQTNKTTGNTDKRAFVETWQSFYRKKLKEVWKPAV

SEQ ID NO: 46549 - protein, 978 aa, synthetic construct
  REGION 1..978: note = engineered CasX variant
QEIKRINKIRRRLVKDSNTKKAGKTGPMKTLLVRVMTPDLRERLENLRKKPENIPQPISNTSRANLNKLLTDYTEMKKAILHVYWEEFQKDPVGLMSRVAQPASKKIDQNKLKPEMDEKGNLTTAGFACSQCGQPLFVYKLEQVSEKGKAYTNYVGRCNVAEHEKLILLAQLKPEKDSDEAVTYSLGKFGQRALDFYSIHVTKESTHPVKPLAQIAGNRYASVPVGKALSDACMGTIASFLSKYQDIIIEHQKVVKGNQKRLESLRELAGKENLEYPSVTLPPQPHTKEGVDAYNEVIARVRMWVNLNLWQKLKLSRDDAKPLLRLKGFPSFPLVERQANEVDWWDMVCNVKKLINEKKEDGKVFWQNLAGYKRQEALRPYLSSEEDRKKGKKFARYQLGDLLLHLEKKHGEDWGKVYDEAWERIDKKVEGLSKHIKLEEERRSEDAQSKAALTDWLRAKASFVIEGLKEADKDEFCRCELKLQKWYGDLRGKPFAIEAENSILDISGFSKQYNCAFIWQKDGVKKLNLYLIINYFKGGKLRFKKIKPEAFEANRFYTVINKKSGEIVPMEVNFNFDDPNLIILPLAFGKRQGREFIWNDLLSLETGSLKLANGRVIEKTLYNRRTRQDEPALFVALTFERREVLDSSNIKPMNLIGVDRGENIPAVIALTDPEGCPLSRFKDSLGNPTHILRIGESYKEKQRTIQAKKEVEQRRAGGYSRKYASKAKNLADDMVRNTARDLLYYAVTQDAMLIFENLSRGFGRQGKRTFMAERQYTRMEDWLTAKLAYNGLPSKTYLSKTLAQYTSKTCSNCGFTITSADYDRVLEKLKKTATGWMTTINGKELKVEGQITYYNRYKRQNVVKDLSVELDRLSEESVNNDISSWTKGRSGEALSLLKKRFSHRPVQEKFVCLNCGFETHADEQAALNIARSWLFLRSQEYKKYQTNKTTGNTDKRAFVETWQSFYRKKLKEVWKPAV

SEQ ID NO: 46550 - protein, 978 aa, synthetic construct
  REGION 1..978: note = engineered CasX variant
QEIKRINKIRRRLVKDSNTKKAGKTGPMKTLLVRVMTPDLRERLENLRKKPENIPQPISNTSRANLNKLLTDYTEMKKAILHVYWEEFQKDPVGLMSRVAQPASKKIDQNKLKPEMDEKGNLTTAGFACSQCGQPLFVYKLEQVSEKGKAYTNYVGRCNVAEHEKLIKLAQLKPEKDSDEAVTYSLGKFGQRALDFYSIHVTKESTHPVKPLAQIAGNRYASGPVGKALSDACMGTIASFLSKYQDIIIEHQKVVKGNQKRLESLRELAGKENLEYPSVTLPPQPHTKEGVDAYNEVIARVRMWVNLNLWQKLKLSRDDAKPLLRLKGFPSFPLVERQANEVDWWDMVCNVKKLINEKKEDGKVFWQNLAGYKRQEALRPYLSSEEDRKKGKKFARYQLGDLLLHLEKKHGEDWGKVYDEAWERIDKKVEGLSKHIKLEEERRSEDAQSKAALTDWLRAKASFVIEGLKEADKDEFCRCELKLQKWYGDLRGKPFAIEAENSILDISGFSKQYNCAFIWQKDGVKKLNLYLIINYFKGGKLRFKKIKPEAFEANRFYTVINKKSGEIVPMEVNFNFDDPNLIILPLAFGKRQGREFIWNDLLSLETGSLKLANGRVIEKTLYNRRTRQDEPALFVALTFERREVLDSSNIKPMNLIGVDRGENIPAVIALTDPEGCPLSRFKDSLGNPTHILRIGESYKEKQRTIQAKKEVEQRRAGGYSRKYASKAKNLADDMVRNTARDLLYYAVTQDAMLIFENLSRGFGRQGKRTFMAERQYTRMEDWLTAKLAYNGLPSKTYLSKTLAQYTSKTCSNCGFTITSADYDRVLEKLKKTATGWMTTINGKELKVEGQITYYNRYKRQNVVKDLSVELDRLSEESVNNDISSWTKGRSGEALSLLKKRFSHRPVQEKFVCLNCGFETHADEQAALNIARSWLFLRSQEYKKYQTNKTTGNTDKRAFVETWQSFYRKKLKEVWKPAV

SEQ ID NO: 46551 - protein, 977 aa, synthetic construct
  REGION 1..977: note = engineered CasX variant
QEIKRINKIRRRLVKDSNTKKAGKTGPMKTLLVRVMTPDLRERLENLRKKPENIPQPISNTSRANLNKLLTDYTEMKKAILHVYWEEFQKDPVGLMSRVAQPASKKIDQNKLKPEMDEKGNLTTAGFACSQCGQPLFVYKLEQVSEKGKAYTNYVGRCNVAEHEKLILLAQLKPEKDSDEAVTYSLGKFGQRALDFYSIHVTKESTHPVKPLAQIAGNRYASPVGKALSDACMGTIASFLSKYQDIIIEHQKVVKGNQKRLESLRELAGKENLEYPSVTLPPQPHTKEGVDAYNEVIARVRMWVNLNLWQKLKLSRDDAKPLLRLKGFPSFPLVERQANEVDWWDMVCNVKKLINEKKEDGKVFWQNLAGYKRQEALRPYLSSEEDRKKGKKFARYQLGDLLLHLEKKHGEDWGKVYDEAWERIDKKVEGLSKHIKLEEERRSEDAQSKAALTDWLRAKASFVIEGLKEADKDEFCRCELKLQKWYGDLRGKPFAIEAENSILDISGFSKQYNCAFIWQKDGVKKLNLYLIINYFKGGKLRFKKIKPEAFEANRFYTVINKKSGEIVPMEVNFNFDDPNLIILPLAFGKRQGREFIWNDLLSLETGSLKLANGRVIEKTLYNRRTRQDEPALFVALTFERREVLDSSNIKPMNLIGVDRGENIPAVIALTDPEGCPLSRFKDSLGNPTHILRIGESYKEKQRTIQAKKEVEQRRAGGYSRKYASKAKNLADDMVRNTARDLLYYAVTQDAMLIFENLSRGFGRQGKRTFMAERQYTRMEDWLTAKLAYNGLPSKTYLSKTLAQYTSKTCSNCGFTITSADYDRVLEKLKKTATGWMTTINGKELKVEGQITYYNRYKRQNVVKDLSVELDRLSEESVNNDISSWTKGRSGEALSLLKKRFSHRPVQEKFVCLNCGFETHADEQAALNIARSWLFLRSQEYKKYQTNKTTGNTDKRAFVETWQSFYRKKLKEVWKPAV

SEQ ID NO: 46552 - protein, 978 aa, synthetic construct
  REGION 1..978: note = engineered CasX variant
QEIKRINKIRRRLVKDSNTKKAGKTGPMKTLLVRVMTPDLRERLENLRKKPENIPQPISNTSRANLNKLLTDYTEMKKAILHVYWEEFQKDPVGLMSRVAQPASKKIDQNKLKPEMDEKGNLTTAGFACSQCGQPLFVYKLEQVSEKGKAYTNYVGRCNVAEHEKLIQLAQLKPEKDSDEAVTYSLGKFGQRALDFYSIHVTKESTHPVKPLAQIAGNRYASYPVGKALSDACMGTIASFLSKYQDIIIEHQKVVKGNQKRLESLRELAGKENLEYPSVTLPPQPHTKEGVDAYNEVIARVRMWVNLNLWQKLKLSRDDAKPLLRLKGFPSFPLVERQANEVDWWDMVCNVKKLINEKKEDGKVFWQNLAGYKRQEALRPYLSSEEDRKKGKKFARYQLGDLLLHLEKKHGEDWGKVYDEAWERIDKKVEGLSKHIKLEEERRSEDAQSKAALTDWLRAKASFVIEGLKEADKDEFCRCELKLQKWYGDLRGKPFAIEAENSILDISGFSKQYNCAFIWQKDGVKKLNLYLIINYFKGGKLRFKKIKPEAFEANRFYTVINKKSGEIVPMEVNFNFDDPNLIILPLAFGKRQGREFIWNDLLSLETGSLKLANGRVIEKTLYNRRTRQDEPALFVALTFERREVLDSSNIKPMNLIGVDRGENIPAVIALTDPEGCPLSRFKDSLGNPTHILRIGESYKEKQRTIQAKKEVEQRRAGGYSRKYASKAKNLADDMVRNTARDLLYYAVTQDAMLIFENLSRGFGRQGKRTFMAERQYTRMEDWLTAKLAYEGLPSKTYLSKTLAQYTSKTCSNCGFTITSADYDRVLEKLKKTATGWMTTINGKELKVEGQITYYNRYKRQNVVKDLSVELDRLSEESVNNDISSWTKGRSGEALSLLKKRFSHRPVQEKFVCLNCGFETHADEQAALNIARSWLFLRSQEYKKYQTNKTTGNTDKRAFVETWQSFYRKKLKEVWKPAV

SEQ ID NO: 46553 - protein, 978 aa, synthetic construct
  REGION 1..978: note = engineered CasX variant
QEIKRINKIRRRLVKDSNTKKAGKTGPMKTLLVRVMTPDLRERLENLRKKPENIPQPISNTSRANLNKLLTDYTEMKKAILHVYWEEFQKDPVGLMSRVAQPASKKIDQNKLKPEMDEKGNLTTAGFACSQCGQPLFVYKLEQVSEKGKAYTNYVGRCNVAEHEKLIQLAQLKPEKDSDEAVTYSLGKFGQRALDFYSIHVTKESTHPVKPLAQIAGNRYASHPVGKALSDACMGTIASFLSKYQDIIIEHQKVVKGNQKRLESLRELAGKENLEYPSVTLPPQPHTKEGVDAYNEVIARVRMWVNLNLWQKLKLSRDDAKPLLRLKGFPSFPLVERQANEVDWWDMVCNVKKLINEKKEDGKVFWQNLAGYKRQEALRPYLSSEEDRKKGKKFARYQLGDLLLHLEKKHGEDWGKVYDEAWERIDKKVEGLSKHIKLEEERRSEDAQSKAALTDWLRAKASFVIEGLKEADKDEFCRCELKLQKWYGDLRGKPFAIEAENSILDISGFSKQYNCAFIWQKDGVKKLNLYLIINYFKGGKLRFKKIKPEAFEANRFYTVINKKSGEIVPMEVNFNFDDPNLIILPLAFGKRQGREFIWNDLLSLETGSLKLANGRVIEKTLYNRRTRQDEPALFVALTFERREVLDSSNIKPMNLIGVDRGENIPAVIALTDPEGCPLSRFKDSLGNPTHILRIGESYKEKQRTIQAKKEVEQRRAGGYSRKYASKAKNLADDMVRNTARDLLYYAVTQDAMLIFENLSRGFGRQGKRTFMAERQYTRMEDWLTAKLAYEGLPSKTYLSKTLAQYTSKTCSNCGFTITSADYDRVLEKLKKTATGWMTTINGKELKVEGQITYYNRYKRQNVVKDLSVELDRLSEESVNNDISSWTKGRSGEALSLLKKRFSHRPVQEKFVCLNCGFETHADEQAALNIARSWLFLRSQEYKKYQTNKTTGNTDKRAFVETWQSFYRKKLKEVWKPAV

SEQ ID NO: 46554 - protein, 978 aa, synthetic construct
  REGION 1..978: note = engineered CasX variant
QEIKRINKIRRRLVKDSNTKKAGKTGPMKTLLVRVMTPDLRERLENLRKKPENIPQPISNTSRANLNKLLTDYTEMKKAILHVYWEEFQKDPVGLMSRVAQPASKKIDQNKLKPEMDEKGNLTTAGFACSQCGQPLFVYKLEQVSEKGKAYTNYVGRCNVAEHEKLIQLAQLKPEKDSDEAVTYSLGKFGQRALDFYSIHVTKESTHPVKPLAQIAGNRYASSPVGKALSDACMGTIASFLSKYQDIIIEHQKVVKGNQKRLESLRELAGKENLEYPSVTLPPQPHTKEGVDAYNEVIARVRMWVNLNLWQKLKLSRDDAKPLLRLKGFPSFPLVERQANEVDWWDMVCNVKKLINEKKEDGKVFWQNLAGYKRQEALRPYLSSEEDRKKGKKFARYQLGDLLLHLEKKHGEDWGKVYDEAWERIDKKVEGLSKHIKLEEERRSEDAQSKAALTDWLRAKASFVIEGLKEADKDEFCRCELKLQKWYGDLRGKPFAIEAENSILDISGFSKQYNCAFIWQKDGVKKLNLYLIINYFKGGKLRFKKIKPEAFEANRFYTVINKKSGEIVPMEVNFNFDDPNLIILPLAFGKRQGREFIWNDLLSLETGSLKLANGRVIEKTLYNRRTRQDEPALFVALTFERREVLDSSNIKPMNLIGVDRGENIPAVIALTDPEGCPLSRFKDSLGNPTHILRIGESYKEKQRTIQAKKEVEQRRAGGYSRKYASKAKNLADDMVRNTARDLLYYAVTQDAMLIFENLSRGFGRQGKRTFMAERQYTRMEDWLTAKLAYEGLPSKTYLSKTLAQYTSKTCSNCGFTITSADYDRVLEKLKKTATGWMTTINGKELKVEGQITYYNRYKRQNVVKDLSVELDRLSEESVNNDISSWTKGRSGEALSLLKKRFSHRPVQEKFVCLNCGFETHADEQAALNIARSWLFLRSQEYKKYQTNKTTGNTDKRAFVETWQSFYRKKLKEVWKPAV

SEQ ID NO: 46555 - protein, 978 aa, synthetic construct
  REGION 1..978: note = engineered CasX variant
QEIKRINKIRRRLVKDSNTKKAGKTGPMKTLLVRVMTPDLRERLENLRKKPENIPQPISNTSRANLNKLLTDYTEMKKAILHVYWEEFQKDPVGLMSRVAQPASKKIDQNKLKPEMDEKGNLTTAGFACSQCGQPLFVYKLEQVSEKGKAYTNYVGRCNVAEHEKLIQLAQLKPEKDSDEAVTYSLGKFGQRALDFYSIHVTKESTHPVKPLAQIAGNRYASTPVGKALSDACMGTIASFLSKYQDIIIEHQKVVKGNQKRLESLRELAGKENLEYPSVTLPPQPHTKEGVDAYNEVIARVRMWVNLNLWQKLKLSRDDAKPLLRLKGFPSFPLVERQANEVDWWDMVCNVKKLINEKKEDGKVFWQNLAGYKRQEALRPYLSSEEDRKKGKKFARYQLGDLLLHLEKKHGEDWGKVYDEAWERIDKKVEGLSKHIKLEEERRSEDAQSKAALTDWLRAKASFVIEGLKEADKDEFCRCELKLQKWYGDLRGKPFAIEAENSILDISGFSKQYNCAFIWQKDGVKKLNLYLIINYFKGGKLRFKKIKPEAFEANRFYTVINKKSGEIVPMEVNFNFDDPNLIILPLAFGKRQGREFIWNDLLSLETGSLKLANGRVIEKTLYNRRTRQDEPALFVALTFERREVLDSSNIKPMNLIGVDRGENIPAVIALTDPEGCPLSRFKDSLGNPTHILRIGESYKEKQRTIQAKKEVEQRRAGGYSRKYASKAKNLADDMVRNTARDLLYYAVTQDAMLIFENLSRGFGRQGKRTFMAERQYTRMEDWLTAKLAYEGLPSKTYLSKTLAQYTSKTCSNCGFTITSADYDRVLEKLKKTATGWMTTINGKELKVEGQITYYNRYKRQNVVKDLSVELDRLSEESVNNDISSWTKGRSGEALSLLKKRFSHRPVQEKFVCLNCGFETHADEQAALNIARSWLFLRSQEYKKYQTNKTTGNTDKRAFVETWQSFYRKKLKEVWKPAV

SEQ ID NO: 46556 - protein, 978 aa, synthetic construct
  REGION 1..978: note = engineered CasX variant
QEIKRINKIRRRLVKDSNTKKAGKTGPMKTLLVRVMTPDLRERLENLRKKPENIPQPISNTSRANLNKLLTDYTEMKKAILHVYWEEFQKDPVGLMSRVAQPASKKIDQNKLKPEMDEKGNLTTAGFACSQCGQPLFVYKLEQVSEKGKAYTNYVGRCNVAEHEKLIQLAQLKPEKDSDEAVTYSLGKFGQRALDFYSIHVTKESTHPVKPLAQIAGNRYASAPVGKALSDACMGTIASFLSKYQDIIIEHQKVVKGNQKRLESLRELAGKENLEYPSVTLPPQPHTKEGVDAYNEVIARVRMWVNLNLWQKLKLSRDDAKPLLRLKGFPSFPLVERQANEVDWWDMVCNVKKLINEKKEDGKVFWQNLAGYKRQEALRPYLSSEEDRKKGKKFARYQLGDLLLHLEKKHGEDWGKVYDEAWERIDKKVEGLSKHIKLEEERRSEDAQSKAALTDWLRAKASFVIEGLKEADKDEFCRCELKLQKWYGDLRGKPFAIEAENSILDISGFSKQYNCAFIWQKDGVKKLNLYLIINYFKGGKLRFKKIKPEAFEANRFYTVINKKSGEIVPMEVNFNFDDPNLIILPLAFGKRQGREFIWNDLLSLETGSLKLANGRVIEKTLYNRRTRQDEPALFVALTFERREVLDSSNIKPMNLIGVDRGENIPAVIALTDPEGCPLSRFKDSLGNPTHILRIGESYKEKQRTIQAKKEVEQRRAGGYSRKYASKAKNLADDMVRNTARDLLYYAVTQDAMLIFENLSRGFGRQGKRTFMAERQYTRMEDWLTAKLAYEGLPSKTYLSKTLAQYTSKTCSNCGFTITSADYDRVLEKLKKTATGWMTTINGKELKVEGQITYYNRYKRQNVVKDLSVELDRLSEESVNNDISSWTKGRSGEALSLLKKRFSHRPVQEKFVCLNCGFETHADEQAALNIARSWLFLRSQEYKKYQTNKTTGNTDKRAFVETWQSFYRKKLKEVWKPAV

SEQ ID NO: 46557 - protein, 978 aa, synthetic construct
  REGION 1..978: note = engineered CasX variant
QEIKRINKIRRRLVKDSNTKKAGKTGPMKTLLVRVMTPDLRERLENLRKKPENIPQPISNTSRANLNKLLTDYTEMKKAILHVYWEEFQKDPVGLMSRVAQPASKKIDQNKLKPEMDEKGNLTTAGFACSQCGQPLFVYKLEQVSEKGKAYTNYVGRCNVAEHEKLIQLAQLKPEKDSDEAVTYSLGKFGQRALDFYSIHVTKESTHPVKPLAQIAGNRYASVPVGKALSDACMGTIASFLSKYQDIIIEHQKVVKGNQKRLESLRELAGKENLEYPSVTLPPQPHTKEGVDAYNEVIARVRMWVNLNLWQKLKLSRDDAKPLLRLKGFPSFPLVERQANEVDWWDMVCNVKKLINEKKEDGKVFWQNLAGYKRQEALRPYLSSEEDRKKGKKFARYQLGDLLLHLEKKHGEDWGKVYDEAWERIDKKVEGLSKHIKLEEERRSEDAQSKAALTDWLRAKASFVIEGLKEADKDEFCRCELKLQKWYGDLRGKPFAIEAENSILDISGFSKQYNCAFIWQKDGVKKLNLYLIINYFKGGKLRFKKIKPEAFEANRFYTVINKKSGEIVPMEVNFNFDDPNLIILPLAFGKRQGREFIWNDLLSLETGSLKLANGRVIEKTLYNRRTRQDEPALFVALTFERREVLDSSNIKPMNLIGVDRGENIPAVIALTDPEGCPLSRFKDSLGNPTHILRIGESYKEKQRTIQAKKEVEQRRAGGYSRKYASKAKNLADDMVRNTARDLLYYAVTQDAMLIFENLSRGFGRQGKRTFMAERQYTRMEDWLTAKLAYEGLPSKTYLSKTLAQYTSKTCSNCGFTITSADYDRVLEKLKKTATGWMTTINGKELKVEGQITYYNRYKRQNVVKDLSVELDRLSEESVNNDISSWTKGRSGEALSLLKKRFSHRPVQEKFVCLNCGFETHADEQAALNIARSWLFLRSQEYKKYQTNKTTGNTDKRAFVETWQSFYRKKLKEVWKPAV

SEQ ID NO: 46558 - protein, 979 aa, synthetic construct
  REGION 1..979: note = engineered CasX variant
QEIKRINKIRRRLVKDSNTKKAGKTGPMKTLLVRVMTPDLRERLENLRKKPENIPQPISNTSRANLNKLLTDYTEMKKAILHVYWEEFQKDPVGLMSRVAQPASKKIDQNKLKPEMDEKGNLTTAGFACSQCGQPLFVYKLEQVSEKGKAYTNYVGRCNVAEHEKLIQKLAQLKPEKDSDEAVTYSLGKFGQRALDFYSIHVTKESTHPVKPLAQIAGNRYASGPVGKALSDACMGTIASFLSKYQDIIIEHQKVVKGNQKRLESLRELAGKENLEYPSVTLPPQPHTKEGVDAYNEVIARVRMWVNLNLWQKLKLSRDDAKPLLRLKGFPSFPLVERQANEVDWWDMVCNVKKLINEKKEDGKVFWQNLAGYKRQEALRPYLSSEEDRKKGKKFARYQLGDLLLHLEKKHGEDWGKVYDEAWERIDKKVEGLSKHIKLEEERRSEDAQSKAALTDWLRAKASFVIEGLKEADKDEFCRCELKLQKWYGDLRGKPFAIEAENSILDISGFSKQYNCAFIWQKDGVKKLNLYLIINYFKGGKLRFKKIKPEAFEANRFYTVINKKSGEIVPMEVNFNFDDPNLIILPLAFGKRQGREFIWNDLLSLETGSLKLANGRVIEKTLYNRRTRQDEPALFVALTFERREVLDSSNIKPMNLIGVDRGENIPAVIALTDPEGCPLSRFKDSLGNPTHILRIGESYKEKQRTIQAKKEVEQRRAGGYSRKYASKAKNLADDMVRNTARDLLYYAVTQDAMLIFENLSRGFGRQGKRTFMAERQYTRMEDWLTAKLAYEGLPSKTYLSKTLAQYTSKTCSNCGFTITSADYDRVLEKLKKTATGWMTTINGKELKVEGQITYYNRYKRQNVVKDLSVELDRLSEESVNNDISSWTKGRSGEALSLLKKRFSHRPVQEKFVCLNCGFETHADEQAALNIARSWLFLRSQEYKKYQTNKTTGNTDKRAFVETWQSFYRKKLKEVWKPAV

SEQ ID NO: 46559 - protein, 977 aa, synthetic construct
  REGION 1..977: note = engineered CasX variant
QEIKRINKIRRRLVKDSNTKKAGKTGPMKTLLVRVMTPDLRERLENLRKKPENIPQPISNTSRANLNKLLTDYTEMKKAILHVYWEEFQKDPVGLMSRVAQPASKKIDQNKLKPEMDEKGNLTTAGFACSQCGQPLFVYKLEQVSEKGKAYTNYVGRCNVAEHEKLIQLAQLKPEKDSDEAVTYSLGKFGQRALDFYSIHVTKESTHPVKPLAQIAGNRYASPVGKALSDACMGTIASFLSKYQDIIIEHQKVVKGNQKRLESLRELAGKENLEYPSVTLPPQPHTKEGVDAYNEVIARVRMWVNLNLWQKLKLSRDDAKPLLRLKGFPSFPLVERQANEVDWWDMVCNVKKLINEKKEDGKVFWQNLAGYKRQEALRPYLSSEEDRKKGKKFARYQLGDLLLHLEKKHGEDWGKVYDEAWERIDKKVEGLSKHIKLEEERRSEDAQSKAALTDWLRAKASFVIEGLKEADKDEFCRCELKLQKWYGDLRGKPFAIEAENSILDISGFSKQYNCAFIWQKDGVKKLNLYLIINYFKGGKLRFKKIKPEAFEANRFYTVINKKSGEIVPMEVNFNFDDPNLIILPLAFGKRQGREFIWNDLLSLETGSLKLANGRVIEKTLYNRRTRQDEPALFVALTFERREVLDSSNIKPMNLIGVDRGENIPAVIALTDPEGCPLSRFKDSLGNPTHILRIGESYKEKQRTIQAKKEVEQRRAGGYSRKYASKAKNLADDMVRNTARDLLYYAVTQDAMLIFENLSRGFGRQGKRTFMAERQYTRMEDWLTAKLAYEGLPSKTYLSKTLAQYTSKTCSNCGFTITSADYDRVLEKLKKTATGWMTTINGKELKVEGQITYYNRYKRQNVVKDLSVELDRLSEESVNNDISSWTKGRSGEALSLLKKRFSHRPVQEKFVCLNCGFETHADEQAALNIARSWLFLRSQEYKKYQTNKTTGNTDKRAFVETWQSFYRKKLKEVWKPAV

SEQ ID NO: 46560 - protein, 978 aa, synthetic construct
  REGION 1..978: note = engineered CasX variant
QEIKRINKIRRRLVKDSNTKKAGKTGPMKTLLVRVMTPDLRERLENLRKKPENIPQPISNTSRANLNKLLTDYTEMKKAILHVYWEEFQKDPVGLMSRVAQPASKKIDQNKLKPEMDEKGNLTTAGFACSQCGQPLFVYKLEQVSEKGKAYTNYVGRCNVAEHEKLILLAQLKPEKDSDEAVTYSLGKFGQRALDFYSIHVTKESTHPVKPLAQIAGNRYASYPVGKALSDACMGTIASFLSKYQDIIIEHQKVVKGNQKRLESLRELAGKENLEYPSVTLPPQPHTKEGVDAYNEVIARVRMWVNLNLWQKLKLSRDDAKPLLRLKGFPSFPLVERQANEVDWWDMVCNVKKLINEKKEDGKVFWQNLAIYKRQEALRPYLSSEEDRKKGKKFARYQLGDLLLHLEKKHGEDWGKVYDEAWERIDKKVEGLSKHIKLEEERRSEDAQSKAALTDWLRAKASFVIEGLKEADKDEFCRCELKLQKWYGDLRGKPFAIEAENSILDISGFSKQYNCAFIWQKDGVKKLNLYLIINYFKGGKLRFKKIKPEAFEANRFYTVINKKSGEIVPMEVNFNFDDPNLIILPLAFGKRQGREFIWNDLLSLETGSLKLANGRVIEKTLYNRRTRQDEPALFVALTFERREVLDSSNIKPMNLIGVDRGENIPAVIALTDPEGCPLSRFKDSLGNPTHILRIGESYKEKQRTIQAKKEVEQRRAGGYSRKYASKAKNLADDMVRNTARDLLYYAVTQDAMLIFENLSRGFGRQGKRTFMAERQYTRMEDWLTAKLAYEGLPSKTYLSKTLAQYTSKTCSNCGFTITSADYDRVLEKLKKTATGWMTTINGKELKVEGQITYYNRYKRQNVVKDLSVELDRLSEESVNNDISSWTKGRSGEALSLLKKRFSHRPVQEKFVCLNCGFETHADEQAALNIARSWLFLRSQEYKKYQTNKTTGNTDKRAFVETWQSFYRKKLKEVWKPAV

SEQ ID NO: 46561 - protein, 978 aa, synthetic construct
  REGION 1..978: note = engineered CasX variant
QEIKRINKIRRRLVKDSNTKKAGKTGPMKTLLVRVMTPDLRERLENLRKKPENIPQPISNTSRANLNKLLTDYTEMKKAILHVYWEEFQKDPVGLMSRVAQPASKKIDQNKLKPEMDEKGNLTTAGFACSQCGQPLFVYKLEQVSEKGKAYTNYVGRCNVAEHEKLILLAQLKPEKDSDEAVTYSLGKFGQRALDFYSIHVTKESTHPVKPLAQIAGNRYASHPVGKALSDACMGTIASFLSKYQDIIIEHQKVVKGNQKRLESLRELAGKENLEYPSVTLPPQPHTKEGVDAYNEVIARVRMWVNLNLWQKLKLSRDDAKPLLRLKGFPSFPLVERQANEVDWWDMVCNVKKLINEKKEDGKVFWQNLAIYKRQEALRPYLSSEEDRKKGKKFARYQLGDLLLHLEKKHGEDWGKVYDEAWERIDKKVEGLSKHIKLEEERRSEDAQSKAALTDWLRAKASFVIEGLKEADKDEFCRCELKLQKWYGDLRGKPFAIEAENSILDISGFSKQYNCAFIWQKDGVKKLNLYLIINYFKGGKLRFKKIKPEAFEANRFYTVINKKSGEIVPMEVNFNFDDPNLIILPLAFGKRQGREFIWNDLLSLETGSLKLANGRVIEKTLYNRRTRQDEPALFVALTFERREVLDSSNIKPMNLIGVDRGENIPAVIALTDPEGCPLSRFKDSLGNPTHILRIGESYKEKQRTIQAKKEVEQRRAGGYSRKYASKAKNLADDMVRNTARDLLYYAVTQDAMLIFENLSRGFGRQGKRTFMAERQYTRMEDWLTAKLAYEGLPSKTYLSKTLAQYTSKTCSNCGFTITSADYDRVLEKLKKTATGWMTTINGKELKVEGQITYYNRYKRQNVVKDLSVELDRLSEESVNNDISSWTKGRSGEALSLLKKRFSHRPVQEKFVCLNCGFETHADEQAALNIARSWLFLRSQEYKKYQTNKTTGNTDKRAFVETWQSFYRKKLKEVWKPAV

SEQ ID NO: 46562 - protein, 978 aa, synthetic construct
  REGION 1..978: note = engineered CasX variant
QEIKRINKIRRRLVKDSNTKKAGKTGPMKTLLVRVMTPDLRERLENLRKKPENIPQPISNTSRANLNKLLTDYTEMKKAILHVYWEEFQKDPVGLMSRVAQPASKKIDQNKLKPEMDEKGNLTTAGFACSQCGQPLFVYKLEQVSEKGKAYTNYVGRCNVAEHEKLILLAQLKPEKDSDEAVTYSLGKFGQRALDFYSIHVTKESTHPVKPLAQIAGNRYASSPVGKALSDACMGTIASFLSKYQDIIIEHQKVVKGNQKRLESLRELAGKENLEYPSVTLPPQPHTKEGVDAYNEVIARVRMWVNLNLWQKLKLSRDDAKPLLRLKGFPSFPLVERQANEVDWWDMVCNVKKLINEKKEDGKVFWQNLAIYKRQEALRPYLSSEEDRKKGKKFARYQLGDLLLHLEKKHGEDWGKVYDEAWERIDKKVEGLSKHIKLEEERRSEDAQSKAALTDWLRAKASFVIEGLKEADKDEFCRCELKLQKWYGDLRGKPFAIEAENSILDISGFSKQYNCAFIWQKDGVKKLNLYLIINYFKGGKLRFKKIKPEAFEANRFYTVINKKSGEIVPMEVNFNFDDPNLIILPLAFGKRQGREFIWNDLLSLETGSLKLANGRVIEKTLYNRRTRQDEPALFVALTFERREVLDSSNIKPMNLIGVDRGENIPAVIALTDPEGCPLSRFKDSLGNPTHILRIGESYKEKQRTIQAKKEVEQRRAGGYSRKYASKAKNLADDMVRNTARDLLYYAVTQDAMLIFENLSRGFGRQGKRTFMAERQYTRMEDWLTAKLAYEGLPSKTYLSKTLAQYTSKTCSNCGFTITSADYDRVLEKLKKTATGWMTTINGKELKVEGQITYYNRYKRQNVVKDLSVELDRLSEESVNNDISSWTKGRSGEALSLLKKRFSHRPVQEKFVCLNCGFETHADEQAALNIARSWLFLRSQEYKKYQTNKTTGNTDKRAFVETWQSFYRKKLKEVWKPAV

SEQ ID NO: 46563 - protein, 978 aa, synthetic construct
  REGION 1..978: note = engineered CasX variant
QEIKRINKIRRRLVKDSNTKKAGKTGPMKTLLVRVMTPDLRERLENLRKKPENIPQPISNTSRANLNKLLTDYTEMKKAILHVYWEEFQKDPVGLMSRVAQPASKKIDQNKLKPEMDEKGNLTTAGFACSQCGQPLFVYKLEQVSEKGKAYTNYVGRCNVAEHEKLILLAQLKPEKDSDEAVTYSLGKFGQRALDFYSIHVTKESTHPVKPLAQIAGNRYASTPVGKALSDACMGTIASFLSKYQDIIIEHQKVVKGNQKRLESLRELAGKENLEYPSVTLPPQPHTKEGVDAYNEVIARVRMWVNLNLWQKLKLSRDDAKPLLRLKGFPSFPLVERQANEVDWWDMVCNVKKLINEKKEDGKVFWQNLAIYKRQEALRPYLSSEEDRKKGKKFARYQLGDLLLHLEKKHGEDWGKVYDEAWERIDKKVEGLSKHIKLEEERRSEDAQSKAALTDWLRAKASFVIEGLKEADKDEFCRCELKLQKWYGDLRGKPFAIEAENSILDISGFSKQYNCAFIWQKDGVKKLNLYLIINYFKGGKLRFKKIKPEAFEANRFYTVINKKSGEIVPMEVNFNFDDPNLIILPLAFGKRQGREFIWNDLLSLETGSLKLANGRVIEKTLYNRRTRQDEPALFVALTFERREVLDSSNIKPMNLIGVDRGENIPAVIALTDPEGCPLSRFKDSLGNPTHILRIGESYKEKQRTIQAKKEVEQRRAGGYSRKYASKAKNLADDMVRNTARDLLYYAVTQDAMLIFENLSRGFGRQGKRTFMAERQYTRMEDWLTAKLAYEGLPSKTYLSKTLAQYTSKTCSNCGFTITSADYDRVLEKLKKTATGWMTTINGKELKVEGQITYYNRYKRQNVVKDLSVELDRLSEESVNNDISSWTKGRSGEALSLLKKRFSHRPVQEKFVCLNCGFETHADEQAALNIARSWLFLRSQEYKKYQTNKTTGNTDKRAFVETWQSFYRKKLKEVWKPAV

SEQ ID NO: 46564 - protein, 978 aa, synthetic construct
  REGION 1..978: note = engineered CasX variant
QEIKRINKIRRRLVKDSNTKKAGKTGPMKTLLVRVMTPDLRERLENLRKKPENIPQPISNTSRANLNKLLTDYTEMKKAILHVYWEEFQKDPVGLMSRVAQPASKKIDQNKLKPEMDEKGNLTTAGFACSQCGQPLFVYKLEQVSEKGKAYTNYVGRCNVAEHEKLILLAQLKPEKDSDEAVTYSLGKFGQRALDFYSIHVTKESTHPVKPLAQIAGNRYASAPVGKALSDACMGTIASFLSKYQDIIIEHQKVVKGNQKRLESLRELAGKENLEYPSVTLPPQPHTKEGVDAYNEVIARVRMWVNLNLWQKLKLSRDDAKPLLRLKGFPSFPLVERQANEVDWWDMVCNVKKLINEKKEDGKVFWQNLAIYKRQEALRPYLSSEEDRKKGKKFARYQLGDLLLHLEKKHGEDWGKVYDEAWERIDKKVEGLSKHIKLEEERRSEDAQSKAALTDWLRAKASFVIEGLKEADKDEFCRCELKLQKWYGDLRGKPFAIEAENSILDISGFSKQYNCAFIWQKDGVKKLNLYLIINYFKGGKLRFKKIKPEAFEANRFYTVINKKSGEIVPMEVNFNFDDPNLIILPLAFGKRQGREFIWNDLLSLETGSLKLANGRVIEKTLYNRRTRQDEPALFVALTFERREVLDSSNIKPMNLIGVDRGENIPAVIALTDPEGCPLSRFKDSLGNPTHILRIGESYKEKQRTIQAKKEVEQRRAGGYSRKYASKAKNLADDMVRNTARDLLYYAVTQDAMLIFENLSRGFGRQGKRTFMAERQYTRMEDWLTAKLAYEGLPSKTYLSKTLAQYTSKTCSNCGFTITSADYDRVLEKLKKTATGWMTTINGKELKVEGQITYYNRYKRQNVVKDLSVELDRLSEESVNNDISSWTKGRSGEALSLLKKRFSHRPVQEKFVCLNCGFETHADEQAALNIARSWLFLRSQEYKKYQTNKTTGNTDKRAFVETWQSFYRKKLKEVWKPAV

SEQ ID NO: 46565 - protein, 978 aa, synthetic construct
  REGION 1..978: note = engineered CasX variant
QEIKRINKIRRRLVKDSNTKKAGKTGPMKTLLVRVMTPDLRERLENLRKKPENIPQPISNTSRANLNKLLTDYTEMKKAILHVYWEEFQKDPVGLMSRVAQPASKKIDQNKLKPEMDEKGNLTTAGFACSQCGQPLFVYKLEQVSEKGKAYTNYVGRCNVAEHEKLILLAQLKPEKDSDEAVTYSLGKFGQRALDFYSIHVTKESTHPVKPLAQIAGNRYASVPVGKALSDACMGTIASFLSKYQDIIIEHQKVVKGNQKRLESLRELAGKENLEYPSVTLPPQPHTKEGVDAYNEVIARVRMWVNLNLWQKLKLSRDDAKPLLRLKGFPSFPLVERQANEVDWWDMVCNVKKLINEKKEDGKVFWQNLAIYKRQEALRPYLSSEEDRKKGKKFARYQLGDLLLHLEKKHGEDWGKVYDEAWERIDKKVEGLSKHIKLEEERRSEDAQSKAALTDWLRAKASFVIEGLKEADKDEFCRCELKLQKWYGDLRGKPFAIEAENSILDISGFSKQYNCAFIWQKDGVKKLNLYLIINYFKGGKLRFKKIKPEAFEANRFYTVINKKSGEIVPMEVNFNFDDPNLIILPLAFGKRQGREFIWNDLLSLETGSLKLANGRVIEKTLYNRRTRQDEPALFVALTFERREVLDSSNIKPMNLIGVDRGENIPAVIALTDPEGCPLSRFKDSLGNPTHILRIGESYKEKQRTIQAKKEVEQRRAGGYSRKYASKAKNLADDMVRNTARDLLYYAVTQDAMLIFENLSRGFGRQGKRTFMAERQYTRMEDWLTAKLAYEGLPSKTYLSKTLAQYTSKTCSNCGFTITSADYDRVLEKLKKTATGWMTTINGKELKVEGQITYYNRYKRQNVVKDLSVELDRLSEESVNNDISSWTKGRSGEALSLLKKRFSHRPVQEKFVCLNCGFETHADEQAALNIARSWLFLRSQEYKKYQTNKTTGNTDKRAFVETWQSFYRKKLKEVWKPAV

SEQ ID NO: 46566 - protein, 978 aa, synthetic construct
  REGION 1..978: note = engineered CasX variant
QEIKRINKIRRRLVKDSNTKKAGKTGPMKTLLVRVMTPDLRERLENLRKKPENIPQPISNTSRANLNKLLTDYTEMKKAILHVYWEEFQKDPVGLMSRVAQPASKKIDQNKLKPEMDEKGNLTTAGFACSQCGQPLFVYKLEQVSEKGKAYTNYVGRCNVAEHEKLIKLAQLKPEKDSDEAVTYSLGKFGQRALDFYSIHVTKESTHPVKPLAQIAGNRYASGPVGKALSDACMGTIASFLSKYQDIIIEHQKVVKGNQKRLESLRELAGKENLEYPSVTLPPQPHTKEGVDAYNEVIARVRMWVNLNLWQKLKLSRDDAKPLLRLKGFPSFPLVERQANEVDWWDMVCNVKKLINEKKEDGKVFWQNLAIYKRQEALRPYLSSEEDRKKGKKFARYQLGDLLLHLEKKHGEDWGKVYDEAWERIDKKVEGLSKHIKLEEERRSEDAQSKAALTDWLRAKASFVIEGLKEADKDEFCRCELKLQKWYGDLRGKPFAIEAENSILDISGFSKQYNCAFIWQKDGVKKLNLYLIINYFKGGKLRFKKIKPEAFEANRFYTVINKKSGEIVPMEVNFNFDDPNLIILPLAFGKRQGREFIWNDLLSLETGSLKLANGRVIEKTLYNRRTRQDEPALFVALTFERREVLDSSNIKPMNLIGVDRGENIPAVIALTDPEGCPLSRFKDSLGNPTHILRIGESYKEKQRTIQAKKEVEQRRAGGYSRKYASKAKNLADDMVRNTARDLLYYAVTQDAMLIFENLSRGFGRQGKRTFMAERQYTRMEDWLTAKLAYEGLPSKTYLSKTLAQYTSKTCSNCGFTITSADYDRVLEKLKKTATGWMTTINGKELKVEGQITYYNRYKRQNVVKDLSVELDRLSEESVNNDISSWTKGRSGEALSLLKKRFSHRPVQEKFVCLNCGFETHADEQAALNIARSWLFLRSQEYKKYQTNKTTGNTDKRAFVETWQSFYRKKLKEVWKPAV

SEQ ID NO: 46567 - protein, 977 aa, synthetic construct
  REGION 1..977: note = engineered CasX variant
QEIKRINKIRRRLVKDSNTKKAGKTGPMKTLLVRVMTPDLRERLENLRKKPENIPQPISNTSRANLNKLLTDYTEMKKAILHVYWEEFQKDPVGLMSRVAQPASKKIDQNKLKPEMDEKGNLTTAGFACSQCGQPLFVYKLEQVSEKGKAYTNYVGRCNVAEHEKLILLAQLKPEKDSDEAVTYSLGKFGQRALDFYSIHVTKESTHPVKPLAQIAGNRYASPVGKALSDACMGTIASFLSKYQDIIIEHQKVVKGNQKRLESLRELAGKENLEYPSVTLPPQPHTKEGVDAYNEVIARVRMWVNLNLWQKLKLSRDDAKPLLRLKGFPSFPLVERQANEVDWWDMVCNVKKLINEKKEDGKVFWQNLAIYKRQEALRPYLSSEEDRKKGKKFARYQLGDLLLHLEKKHGEDWGKVYDEAWERIDKKVEGLSKHIKLEEERRSEDAQSKAALTDWLRAKASFVIEGLKEADKDEFCRCELKLQKWYGDLRGKPFAIEAENSILDISGFSKQYNCAFIWQKDGVKKLNLYLIINYFKGGKLRFKKIKPEAFEANRFYTVINKKSGEIVPMEVNFNFDDPNLIILPLAFGKRQGREFIWNDLLSLETGSLKLANGRVIEKTLYNRRTRQDEPALFVALTFERREVLDSSNIKPMNLIGVDRGENIPAVIALTDPEGCPLSRFKDSLGNPTHILRIGESYKEKQRTIQAKKEVEQRRAGGYSRKYASKAKNLADDMVRNTARDLLYYAVTQDAMLIFENLSRGFGRQGKRTFMAERQYTRMEDWLTAKLAYEGLPSKTYLSKTLAQYTSKTCSNCGFTITSADYDRVLEKLKKTATGWMTTINGKELKVEGQITYYNRYKRQNVVKDLSVELDRLSEESVNNDISSWTKGRSGEALSLLKKRFSHRPVQEKFVCLNCGFETHADEQAALNIARSWLFLRSQEYKKYQTNKTTGNTDKRAFVETWQSFYRKKLKEVWKPAV

SEQ ID NO: 46568 - protein, 978 aa, synthetic construct
  REGION 1..978: note = engineered CasX variant
QEIKRINKIRRRLVKDSNTKKAGKTGPMKTLLVRVMTPDLRERLENLRKKPENIPQPISNTSRANLNKLLTDYTEMKKAILHVYWEEFQKDPVGLMSRVAQPASKKIDQNKLKPEMDEKGNLTTAGFACSQCGQPLFVYKLEQVSEKGKAYTNYVGRCNVAEHEKLILLAQLKPEKDSDEAVTYSLGKFGQRALDFYSIHVTKESTHPVKPLAQIAGNRYASYPVGKALSDACMGTIASFLSKYQDIIIEHQKVVKGNQKRLESLRELAGKENLEYPSVTLPPQPHTKEGVDAYNEVIARVRMWVNLNLWQKLKLSRDDAKPLLRLKGFPSFPLVERQANEVDWWDMVCNVKKLINEKKEDGKVFWQNLAGYKRQEALRPYLSSEEDREKGKKFARYQLGDLLLHLEKKHGEDWGKVYDEAWERIDKKVEGLSKHIKLEEERRSEDAQSKAALTDWLRAKASFVIEGLKEADKDEFCRCELKLQKWYGDLRGKPFAIEAENSILDISGFSKQYNCAFIWQKDGVKKLNLYLIINYFKGGKLRFKKIKPEAFEANRFYTVINKKSGEIVPMEVNFNFDDPNLIILPLAFGKRQGREFIWNDLLSLETGSLKLANGRVIEKTLYNRRTRQDEPALFVALTFERREVLDSSNIKPMNLIGVDRGENIPAVIALTDPEGCPLSRFKDSLGNPTHILRIGESYKEKQRTIQAKKEVEQRRAGGYSRKYASKAKNLADDMVRNTARDLLYYAVTQDAMLIFENLSRGFGRQGKRTFMAERQYTRMEDWLTAKLAYEGLPSKTYLSKTLAQYTSKTCSNCGFTITSADYDRVLEKLKKTATGWMTTINGKELKVEGQITYYNRYKRQNVVKDLSVELDRLSEESVNNDISSWTKGRSGEALSLLKKRFSHRPVQEKFVCLNCGFETHADEQAALNIARSWLFLRSQEYKKYQTNKTTGNTDKRAFVETWQSFYRKKLKEVWKPAV

SEQ ID NO: 46569 - protein, 978 aa, synthetic construct
  REGION 1..978: note = engineered CasX variant
QEIKRINKIRRRLVKDSNTKKAGKTGPMKTLLVRVMTPDLRERLENLRKKPENIPQPISNTSRANLNKLLTDYTEMKKAILHVYWEEFQKDPVGLMSRVAQPASKKIDQNKLKPEMDEKGNLTTAGFACSQCGQPLFVYKLEQVSEKGKAYTNYVGRCNVAEHEKLILLAQLKPEKDSDEAVTYSLGKFGQRALDFYSIHVTKESTHPVKPLAQIAGNRYASHPVGKALSDACMGTIASFLSKYQDIIIEHQKVVKGNQKRLESLRELAGKENLEYPSVTLPPQPHTKEGVDAYNEVIARVRMWVNLNLWQKLKLSRDDAKPLLRLKGFPSFPLVERQANEVDWWDMVCNVKKLINEKKEDGKVFWQNLAGYKRQEALRPYLSSEEDREKGKKFARYQLGDLLLHLEKKHGEDWGKVYDEAWERIDKKVEGLSKHIKLEEERRSEDAQSKAALTDWLRAKASFVIEGLKEADKDEFCRCELKLQKWYGDLRGKPFAIEAENSILDISGFSKQYNCAFIWQKDGVKKLNLYLIINYFKGGKLRFKKIKPEAFEANRFYTVINKKSGEIVPMEVNFNFDDPNLIILPLAFGKRQGREFIWNDLLSLETGSLKLANGRVIEKTLYNRRTRQDEPALFVALTFERREVLDSSNIKPMNLIGVDRGENIPAVIALTDPEGCPLSRFKDSLGNPTHILRIGESYKEKQRTIQAKKEVEQRRAGGYSRKYASKAKNLADDMVRNTARDLLYYAVTQDAMLIFENLSRGFGRQGKRTFMAERQYTRMEDWLTAKLAYEGLPSKTYLSKTLAQYTSKTCSNCGFTITSADYDRVLEKLKKTATGWMTTINGKELKVEGQITYYNRYKRQNVVKDLSVELDRLSEESVNNDISSWTKGRSGEALSLLKKRFSHRPVQEKFVCLNCGFETHADEQAALNIARSWLFLRSQEYKKYQTNKTTGNTDKRAFVETWQSFYRKKLKEVWKPAV

SEQ ID NO: 46570 - protein, 978 aa, synthetic construct
  REGION 1..978: note = engineered CasX variant
QEIKRINKIRRRLVKDSNTKKAGKTGPMKTLLVRVMTPDLRERLENLRKKPENIPQPISNTSRANLNKLLTDYTEMKKAILHVYWEEFQKDPVGLMSRVAQPASKKIDQNKLKPEMDEKGNLTTAGFACSQCGQPLFVYKLEQVSEKGKAYTNYVGRCNVAEHEKLILLAQLKPEKDSDEAVTYSLGKFGQRALDFYSIHVTKESTHPVKPLAQIAGNRYASSPVGKALSDACMGTIASFLSKYQDIIIEHQKVVKGNQKRLESLRELAGKENLEYPSVTLPPQPHTKEGVDAYNEVIARVRMWVNLNLWQKLKLSRDDAKPLLRLKGFPSFPLVERQANEVDWWDMVCNVKKLINEKKEDGKVFWQNLAGYKRQEALRPYLSSEEDREKGKKFARYQLGDLLLHLEKKHGEDWGKVYDEAWERIDKKVEGLSKHIKLEEERRSEDAQSKAALTDWLRAKASFVIEGLKEADKDEFCRCELKLQKWYGDLRGKPFAIEAENSILDISGFSKQYNCAFIWQKDGVKKLNLYLIINYFKGGKLRFKKIKPEAFEANRFYTVINKKSGEIVPMEVNFNFDDPNLIILPLAFGKRQGREFIWNDLLSLETGSLKLANGRVIEKTLYNRRTRQDEPALFVALTFERREVLDSSNIKPMNLIGVDRGENIPAVIALTDPEGCPLSRFKDSLGNPTHILRIGESYKEKQRTIQAKKEVEQRRAGGYSRKYASKAKNLADDMVRNTARDLLYYAVTQDAMLIFENLSRGFGRQGKRTFMAERQYTRMEDWLTAKLAYEGLPSKTYLSKTLAQYTSKTCSNCGFTITSADYDRVLEKLKKTATGWMTTINGKELKVEGQITYYNRYKRQNVVKDLSVELDRLSEESVNNDISSWTKGRSGEALSLLKKRFSHRPVQEKFVCLNCGFETHADEQAALNIARSWLFLRSQEYKKYQTNKTTGNTDKRAFVETWQSFYRKKLKEVWKPAV

SEQ ID NO: 46571 - protein, 978 aa, synthetic construct
  REGION 1..978: note = engineered CasX variant
QEIKRINKIRRRLVKDSNTKKAGKTGPMKTLLVRVMTPDLRERLENLRKKPENIPQPISNTSRANLNKLLTDYTEMKKAILHVYWEEFQKDPVGLMSRVAQPASKKIDQNKLKPEMDEKGNLTTAGFACSQCGQPLFVYKLEQVSEKGKAYTNYVGRCNVAEHEKLILLAQLKPEKDSDEAVTYSLGKFGQRALDFYSIHVTKESTHPVKPLAQIAGNRYASTPVGKALSDACMGTIASFLSKYQDIIIEHQKVVKGNQKRLESLRELAGKENLEYPSVTLPPQPHTKEGVDAYNEVIARVRMWVNLNLWQKLKLSRDDAKPLLRLKGFPSFPLVERQANEVDWWDMVCNVKKLINEKKEDGKVFWQNLAGYKRQEALRPYLSSEEDREKGKKFARYQLGDLLLHLEKKHGEDWGKVYDEAWERIDKKVEGLSKHIKLEEERRSEDAQSKAALTDWLRAKASFVIEGLKEADKDEFCRCELKLQKWYGDLRGKPFAIEAENSILDISGFSKQYNCAFIWQKDGVKKLNLYLIINYFKGGKLRFKKIKPEAFEANRFYTVINKKSGEIVPMEVNFNFDDPNLIILPLAFGKRQGREFIWNDLLSLETGSLKLANGRVIEKTLYNRRTRQDEPALFVALTFERREVLDSSNIKPMNLIGVDRGENIPAVIALTDPEGCPLSRFKDSLGNPTHILRIGESYKEKQRTIQAKKEVEQRRAGGYSRKYASKAKNLADDMVRNTARDLLYYAVTQDAMLIFENLSRGFGRQGKRTFMAERQYTRMEDWLTAKLAYEGLPSKTYLSKTLAQYTSKTCSNCGFTITSADYDRVLEKLKKTATGWMTTINGKELKVEGQITYYNRYKRQNVVKDLSVELDRLSEESVNNDISSWTKGRSGEALSLLKKRFSHRPVQEKFVCLNCGFETHADEQAALNIARSWLFLRSQEYKKYQTNKTTGNTDKRAFVETWQSFYRKKLKEVWKPAV

SEQ ID NO: 46572 - protein, 978 aa, synthetic construct
  REGION 1..978: note = engineered CasX variant
QEIKRINKIRRRLVKDSNTKKAGKTGPMKTLLVRVMTPDLRERLENLRKKPENIPQPISNTSRANLNKLLTDYTEMKKAILHVYWEEFQKDPVGLMSRVAQPASKKIDQNKLKPEMDEKGNLTTAGFACSQCGQPLFVYKLEQVSEKGKAYTNYVGRCNVAEHEKLILLAQLKPEKDSDEAVTYSLGKFGQRALDFYSIHVTKESTHPVKPLAQIAGNRYASAPVGKALSDACMGTIASFLSKYQDIIIEHQKVVKGNQKRLESLRELAGKENLEYPSVTLPPQPHTKEGVDAYNEVIARVRMWVNLNLWQKLKLSRDDAKPLLRLKGFPSFPLVERQANEVDWWDMVCNVKKLINEKKEDGKVFWQNLAGYKRQEALRPYLSSEEDREKGKKFARYQLGDLLLHLEKKHGEDWGKVYDEAWERIDKKVEGLSKHIKLEEERRSEDAQSKAALTDWLRAKASFVIEGLKEADKDEFCRCELKLQKWYGDLRGKPFAIEAENSILDISGFSKQYNCAFIWQKDGVKKLNLYLIINYFKGGKLRFKKIKPEAFEANRFYTVINKKSGEIVPMEVNFNFDDPNLIILPLAFGKRQGREFIWNDLLSLETGSLKLANGRVIEKTLYNRRTRQDEPALFVALTFERREVLDSSNIKPMNLIGVDRGENIPAVIALTDPEGCPLSRFKDSLGNPTHILRIGESYKEKQRTIQAKKEVEQRRAGGYSRKYASKAKNLADDMVRNTARDLLYYAVTQDAMLIFENLSRGFGRQGKRTFMAERQYTRMEDWLTAKLAYEGLPSKTYLSKTLAQYTSKTCSNCGFTITSADYDRVLEKLKKTATGWMTTINGKELKVEGQITYYNRYKRQNVVKDLSVELDRLSEESVNNDISSWTKGRSGEALSLLKKRFSHRPVQEKFVCLNCGFETHADEQAALNIARSWLFLRSQEYKKYQTNKTTGNTDKRAFVETWQSFYRKKLKEVWKPAV

SEQ ID NO: 46573 - protein, 978 aa, synthetic construct
  REGION 1..978: note = engineered CasX variant
QEIKRINKIRRRLVKDSNTKKAGKTGPMKTLLVRVMTPDLRERLENLRKKPENIPQPISNTSRANLNKLLTDYTEMKKAILHVYWEEFQKDPVGLMSRVAQPASKKIDQNKLKPEMDEKGNLTTAGFACSQCGQPLFVYKLEQVSEKGKAYTNYVGRCNVAEHEKLILLAQLKPEKDSDEAVTYSLGKFGQRALDFYSIHVTKESTHPVKPLAQIAGNRYASVPVGKALSDACMGTIASFLSKYQDIIIEHQKVVKGNQKRLESLRELAGKENLEYPSVTLPPQPHTKEGVDAYNEVIARVRMWVNLNLWQKLKLSRDDAKPLLRLKGFPSFPLVERQANEVDWWDMVCNVKKLINEKKEDGKVFWQNLAGYKRQEALRPYLSSEEDREKGKKFARYQLGDLLLHLEKKHGEDWGKVYDEAWERIDKKVEGLSKHIKLEEERRSEDAQSKAALTDWLRAKASFVIEGLKEADKDEFCRCELKLQKWYGDLRGKPFAIEAENSILDISGFSKQYNCAFIWQKDGVKKLNLYLIINYFKGGKLRFKKIKPEAFEANRFYTVINKKSGEIVPMEVNFNFDDPNLIILPLAFGKRQGREFIWNDLLSLETGSLKLANGRVIEKTLYNRRTRQDEPALFVALTFERREVLDSSNIKPMNLIGVDRGENIPAVIALTDPEGCPLSRFKDSLGNPTHILRIGESYKEKQRTIQAKKEVEQRRAGGYSRKYASKAKNLADDMVRNTARDLLYYAVTQDAMLIFENLSRGFGRQGKRTFMAERQYTRMEDWLTAKLAYEGLPSKTYLSKTLAQYTSKTCSNCGFTITSADYDRVLEKLKKTATGWMTTINGKELKVEGQITYYNRYKRQNVVKDLSVELDRLSEESVNNDISSWTKGRSGEALSLLKKRFSHRPVQEKFVCLNCGFETHADEQAALNIARSWLFLRSQEYKKYQTNKTTGNTDKRAFVETWQSFYRKKLKEVWKPAV

SEQ ID NO: 46574 - protein, 978 aa, synthetic construct
  REGION 1..978: note = engineered CasX variant
QEIKRINKIRRRLVKDSNTKKAGKTGPMKTLLVRVMTPDLRERLENLRKKPENIPQPISNTSRANLNKLLTDYTEMKKAILHVYWEEFQKDPVGLMSRVAQPASKKIDQNKLKPEMDEKGNLTTAGFACSQCGQPLFVYKLEQVSEKGKAYTNYVGRCNVAEHEKLIKLAQLKPEKDSDEAVTYSLGKFGQRALDFYSIHVTKESTHPVKPLAQIAGNRYASGPVGKALSDACMGTIASFLSKYQDIIIEHQKVVKGNQKRLESLRELAGKENLEYPSVTLPPQPHTKEGVDAYNEVIARVRMWVNLNLWQKLKLSRDDAKPLLRLKGFPSFPLVERQANEVDWWDMVCNVKKLINEKKEDGKVFWQNLAGYKRQEALRPYLSSEEDREKGKKFARYQLGDLLLHLEKKHGEDWGKVYDEAWERIDKKVEGLSKHIKLEEERRSEDAQSKAALTDWLRAKASFVIEGLKEADKDEFCRCELKLQKWYGDLRGKPFAIEAENSILDISGFSKQYNCAFIWQKDGVKKLNLYLIINYFKGGKLRFKKIKPEAFEANRFYTVINKKSGEIVPMEVNFNFDDPNLIILPLAFGKRQGREFIWNDLLSLETGSLKLANGRVIEKTLYNRRTRQDEPALFVALTFERREVLDSSNIKPMNLIGVDRGENIPAVIALTDPEGCPLSRFKDSLGNPTHILRIGESYKEKQRTIQAKKEVEQRRAGGYSRKYASKAKNLADDMVRNTARDLLYYAVTQDAMLIFENLSRGFGRQGKRTFMAERQYTRMEDWLTAKLAYEGLPSKTYLSKTLAQYTSKTCSNCGFTITSADYDRVLEKLKKTATGWMTTINGKELKVEGQITYYNRYKRQNVVKDLSVELDRLSEESVNNDISSWTKGRSGEALSLLKKRFSHRPVQEKFVCLNCGFETHADEQAALNIARSWLFLRSQEYKKYQTNKTTGNTDKRAFVETWQSFYRKKLKEVWKPAV

SEQ ID NO: 46575 - protein, 977 aa, synthetic construct
  REGION 1..977: note = engineered CasX variant
QEIKRINKIRRRLVKDSNTKKAGKTGPMKTLLVRVMTPDLRERLENLRKKPENIPQPISNTSRANLNKLLTDYTEMKKAILHVYWEEFQKDPVGLMSRVAQPASKKIDQNKLKPEMDEKGNLTTAGFACSQCGQPLFVYKLEQVSEKGKAYTNYVGRCNVAEHEKLILLAQLKPEKDSDEAVTYSLGKFGQRALDFYSIHVTKESTHPVKPLAQIAGNRYASPVGKALSDACMGTIASFLSKYQDIIIEHQKVVKGNQKRLESLRELAGKENLEYPSVTLPPQPHTKEGVDAYNEVIARVRMWVNLNLWQKLKLSRDDAKPLLRLKGFPSFPLVERQANEVDWWDMVCNVKKLINEKKEDGKVFWQNLAGYKRQEALRPYLSSEEDREKGKKFARYQLGDLLLHLEKKHGEDWGKVYDEAWERIDKKVEGLSKHIKLEEERRSEDAQSKAALTDWLRAKASFVIEGLKEADKDEFCRCELKLQKWYGDLRGKPFAIEAENSILDISGFSKQYNCAFIWQKDGVKKLNLYLIINYFKGGKLRFKKIKPEAFEANRFYTVINKKSGEIVPMEVNFNFDDPNLIILPLAFGKRQGREFIWNDLLSLETGSLKLANGRVIEKTLYNRRTRQDEPALFVALTFERREVLDSSNIKPMNLIGVDRGENIPAVIALTDPEGCPLSRFKDSLGNPTHILRIGESYKEKQRTIQAKKEVEQRRAGGYSRKYASKAKNLADDMVRNTARDLLYYAVTQDAMLIFENLSRGFGRQGKRTFMAERQYTRMEDWLTAKLAYEGLPSKTYLSKTLAQYTSKTCSNCGFTITSADYDRVLEKLKKTATGWMTTINGKELKVEGQITYYNRYKRQNVVKDLSVELDRLSEESVNNDISSWTKGRSGEALSLLKKRFSHRPVQEKFVCLNCGFETHADEQAALNIARSWLFLRSQEYKKYQTNKTTGNTDKRAFVETWQSFYRKKLKEVWKPAV

SEQ ID NO: 46576 - protein, 978 aa, synthetic construct
  REGION 1..978: note = engineered CasX variant
QEIKRINKIRRRLVKDSNTKKAGKTGPMKTLLVRVMTPDLRERLENLRKKPENIPQPISNTSRANLNKLLTDYTEMKKAILHVYWEEFQKDPVGLMSRVAQPASKKIDQNKLKPEMDEKGNLTTAGFACSQCGQPLFVYKLEQVSEKGKAYTNYVGRCNVAEHEKLILLAQLKPEKDSDEAVTYSLGKFGQRALDFYSIHVTKESTHPVKPLAQIAGNRYASYPVGKALSDACMGTIASFLSKYQDIIIEHQKVVKGNQKRLESLRELAGKENLEYPSVTLPPQPHTKEGVDAYNEVIARVRMWVNLNLWQKLKLSRDDAKPLLRLKGFPSFPLVERQANEVDWWDMVCNVKKLINEKKEDGKVFWQNLAGYKRQEALRPYLSSEEDRKKGKKFARYQLGDLLLHLEKKHGEDWGKVYDEAWERIDKKVEGLSKHIKLEEERRSEDAQSKAALTDWLRAKASFVIEGLKEADKDEFCRCELKLQKWYGDLRGKPFAIEAENSILDISGFSKQYNCAFIWQKDGVKKLNLYLIINYFKGGKLRFKKIKPEAFEANRFYTVINKKSGEIVIMEVNFNFDDPNLIILPLAFGKRQGREFIWNDLLSLETGSLKLANGRVIEKTLYNRRTRQDEPALFVALTFERREVLDSSNIKPMNLIGVDRGENIPAVIALTDPEGCPLSRFKDSLGNPTHILRIGESYKEKQRTIQAKKEVEQRRAGGYSRKYASKAKNLADDMVRNTARDLLYYAVTQDAMLIFENLSRGFGRQGKRTFMAERQYTRMEDWLTAKLAYEGLPSKTYLSKTLAQYTSKTCSNCGFTITSADYDRVLEKLKKTATGWMTTINGKELKVEGQITYYNRYKRQNVVKDLSVELDRLSEESVNNDISSWTKGRSGEALSLLKKRFSHRPVQEKFVCLNCGFETHADEQAALNIARSWLFLRSQEYKKYQTNKTTGNTDKRAFVETWQSFYRKKLKEVWKPAV

SEQ ID NO: 46577 - protein, 978 aa, synthetic construct
  REGION 1..978: note = engineered CasX variant
QEIKRINKIRRRLVKDSNTKKAGKTGPMKTLLVRVMTPDLRERLENLRKKPENIPQPISNTSRANLNKLLTDYTEMKKAILHVYWEEFQKDPVGLMSRVAQPASKKIDQNKLKPEMDEKGNLTTAGFACSQCGQPLFVYKLEQVSEKGKAYTNYVGRCNVAEHEKLILLAQLKPEKDSDEAVTYSLGKFGQRALDFYSIHVTKESTHPVKPLAQIAGNRYASHPVGKALSDACMGTIASFLSKYQDIIIEHQKVVKGNQKRLESLRELAGKENLEYPSVTLPPQPHTKEGVDAYNEVIARVRMWVNLNLWQKLKLSRDDAKPLLRLKGFPSFPLVERQANEVDWWDMVCNVKKLINEKKEDGKVFWQNLAGYKRQEALRPYLSSEEDRKKGKKFARYQLGDLLLHLEKKHGEDWGKVYDEAWERIDKKVEGLSKHIKLEEERRSEDAQSKAALTDWLRAKASFVIEGLKEADKDEFCRCELKLQKWYGDLRGKPFAIEAENSILDISGFSKQYNCAFIWQKDGVKKLNLYLIINYFKGGKLRFKKIKPEAFEANRFYTVINKKSGEIVIMEVNFNFDDPNLIILPLAFGKRQGREFIWNDLLSLETGSLKLANGRVIEKTLYNRRTRQDEPALFVALTFERREVLDSSNIKPMNLIGVDRGENIPAVIALTDPEGCPLSRFKDSLGNPTHILRIGESYKEKQRTIQAKKEVEQRRAGGYSRKYASKAKNLADDMVRNTARDLLYYAVTQDAMLIFENLSRGFGRQGKRTFMAERQYTRMEDWLTAKLAYEGLPSKTYLSKTLAQYTSKTCSNCGFTITSADYDRVLEKLKKTATGWMTTINGKELKVEGQITYYNRYKRQNVVKDLSVELDRLSEESVNNDISSWTKGRSGEALSLLKKRFSHRPVQEKFVCLNCGFETHADEQAALNIARSWLFLRSQEYKKYQTNKTTGNTDKRAFVETWQSFYRKKLKEVWKPAV

SEQ ID NO: 46578 - protein, 978 aa, synthetic construct
  REGION 1..978: note = engineered CasX variant
QEIKRINKIRRRLVKDSNTKKAGKTGPMKTLLVRVMTPDLRERLENLRKKPENIPQPISNTSRANLNKLLTDYTEMKKAILHVYWEEFQKDPVGLMSRVAQPASKKIDQNKLKPEMDEKGNLTTAGFACSQCGQPLFVYKLEQVSEKGKAYTNYVGRCNVAEHEKLILLAQLKPEKDSDEAVTYSLGKFGQRALDFYSIHVTKESTHPVKPLAQIAGNRYASSPVGKALSDACMGTIASFLSKYQDIIIEHQKVVKGNQKRLESLRELAGKENLEYPSVTLPPQPHTKEGVDAYNEVIARVRMWVNLNLWQKLKLSRDDAKPLLRLKGFPSFPLVERQANEVDWWDMVCNVKKLINEKKEDGKVFWQNLAGYKRQEALRPYLSSEEDRKKGKKFARYQLGDLLLHLEKKHGEDWGKVYDEAWERIDKKVEGLSKHIKLEEERRSEDAQSKAALTDWLRAKASFVIEGLKEADKDEFCRCELKLQKWYGDLRGKPFAIEAENSILDISGFSKQYNCAFIWQKDGVKKLNLYLIINYFKGGKLRFKKIKPEAFEANRFYTVINKKSGEIVIMEVNFNFDDPNLIILPLAFGKRQGREFIWNDLLSLETGSLKLANGRVIEKTLYNRRTRQDEPALFVALTFERREVLDSSNIKPMNLIGVDRGENIPAVIALTDPEGCPLSRFKDSLGNPTHILRIGESYKEKQRTIQAKKEVEQRRAGGYSRKYASKAKNLADDMVRNTARDLLYYAVTQDAMLIFENLSRGFGRQGKRTFMAERQYTRMEDWLTAKLAYEGLPSKTYLSKTLAQYTSKTCSNCGFTITSADYDRVLEKLKKTATGWMTTINGKELKVEGQITYYNRYKRQNVVKDLSVELDRLSEESVNNDISSWTKGRSGEALSLLKKRFSHRPVQEKFVCLNCGFETHADEQAALNIARSWLFLRSQEYKKYQTNKTTGNTDKRAFVETWQSFYRKKLKEVWKPAV

SEQ ID NO: 46579 - protein, 978 aa, synthetic construct
  REGION 1..978: note = engineered CasX variant
QEIKRINKIRRRLVKDSNTKKAGKTGPMKTLLVRVMTPDLRERLENLRKKPENIPQPISNTSRANLNKLLTDYTEMKKAILHVYWEEFQKDPVGLMSRVAQPASKKIDQNKLKPEMDEKGNLTTAGFACSQCGQPLFVYKLEQVSEKGKAYTNYVGRCNVAEHEKLILLAQLKPEKDSDEAVTYSLGKFGQRALDFYSIHVTKESTHPVKPLAQIAGNRYASTPVGKALSDACMGTIASFLSKYQDIIIEHQKVVKGNQKRLESLRELAGKENLEYPSVTLPPQPHTKEGVDAYNEVIARVRMWVNLNLWQKLKLSRDDAKPLLRLKGFPSFPLVERQANEVDWWDMVCNVKKLINEKKEDGKVFWQNLAGYKRQEALRPYLSSEEDRKKGKKFARYQLGDLLLHLEKKHGEDWGKVYDEAWERIDKKVEGLSKHIKLEEERRSEDAQSKAALTDWLRAKASFVIEGLKEADKDEFCRCELKLQKWYGDLRGKPFAIEAENSILDISGFSKQYNCAFIWQKDGVKKLNLYLIINYFKGGKLRFKKIKPEAFEANRFYTVINKKSGEIVIMEVNFNFDDPNLIILPLAFGKRQGREFIWNDLLSLETGSLKLANGRVIEKTLYNRRTRQDEPALFVALTFERREVLDSSNIKPMNLIGVDRGENIPAVIALTDPEGCPLSRFKDSLGNPTHILRIGESYKEKQRTIQAKKEVEQRRAGGYSRKYASKAKNLADDMVRNTARDLLYYAVTQDAMLIFENLSRGFGRQGKRTFMAERQYTRMEDWLTAKLAYEGLPSKTYLSKTLAQYTSKTCSNCGFTITSADYDRVLEKLKKTATGWMTTINGKELKVEGQITYYNRYKRQNVVKDLSVELDRLSEESVNNDISSWTKGRSGEALSLLKKRFSHRPVQEKFVCLNCGFETHADEQAALNIARSWLFLRSQEYKKYQTNKTTGNTDKRAFVETWQSFYRKKLKEVWKPAV

SEQ ID NO: 46580 - protein, 978 aa, synthetic construct
  REGION 1..978: note = engineered CasX variant
QEIKRINKIRRRLVKDSNTKKAGKTGPMKTLLVRVMTPDLRERLENLRKKPENIPQPISNTSRANLNKLLTDYTEMKKAILHVYWEEFQKDPVGLMSRVAQPASKKIDQNKLKPEMDEKGNLTTAGFACSQCGQPLFVYKLEQVSEKGKAYTNYVGRCNVAEHEKLILLAQLKPEKDSDEAVTYSLGKFGQRALDFYSIHVTKESTHPVKPLAQIAGNRYASAPVGKALSDACMGTIASFLSKYQDIIIEHQKVVKGNQKRLESLRELAGKENLEYPSVTLPPQPHTKEGVDAYNEVIARVRMWVNLNLWQKLKLSRDDAKPLLRLKGFPSFPLVERQANEVDWWDMVCNVKKLINEKKEDGKVFWQNLAGYKRQEALRPYLSSEEDRKKGKKFARYQLGDLLLHLEKKHGEDWGKVYDEAWERIDKKVEGLSKHIKLEEERRSEDAQSKAALTDWLRAKASFVIEGLKEADKDEFCRCELKLQKWYGDLRGKPFAIEAENSILDISGFSKQYNCAFIWQKDGVKKLNLYLIINYFKGGKLRFKKIKPEAFEANRFYTVINKKSGEIVIMEVNFNFDDPNLIILPLAFGKRQGREFIWNDLLSLETGSLKLANGRVIEKTLYNRRTRQDEPALFVALTFERREVLDSSNIKPMNLIGVDRGENIPAVIALTDPEGCPLSRFKDSLGNPTHILRIGESYKEKQRTIQAKKEVEQRRAGGYSRKYASKAKNLADDMVRNTARDLLYYAVTQDAMLIFENLSRGFGRQGKRTFMAERQYTRMEDWLTAKLAYEGLPSKTYLSKTLAQYTSKTCSNCGFTITSADYDRVLEKLKKTATGWMTTINGKELKVEGQITYYNRYKRQNVVKDLSVELDRLSEESVNNDISSWTKGRSGEALSLLKKRFSHRPVQEKFVCLNCGFETHADEQAALNIARSWLFLRSQEYKKYQTNKTTGNTDKRAFVETWQSFYRKKLKEVWKPAV

SEQ ID NO: 46581 - protein, 978 aa, synthetic construct
  REGION 1..978: note = engineered CasX variant
QEIKRINKIRRRLVKDSNTKKAGKTGPMKTLLVRVMTPDLRERLENLRKKPENIPQPISNTSRANLNKLLTDYTEMKKAILHVYWEEFQKDPVGLMSRVAQPASKKIDQNKLKPEMDEKGNLTTAGFACSQCGQPLFVYKLEQVSEKGKAYTNYVGRCNVAEHEKLILLAQLKPEKDSDEAVTYSLGKFGQRALDFYSIHVTKESTHPVKPLAQIAGNRYASVPVGKALSDACMGTIASFLSKYQDIIIEHQKVVKGNQKRLESLRELAGKENLEYPSVTLPPQPHTKEGVDAYNEVIARVRMWVNLNLWQKLKLSRDDAKPLLRLKGFPSFPLVERQANEVDWWDMVCNVKKLINEKKEDGKVFWQNLAGYKRQEALRPYLSSEEDRKKGKKFARYQLGDLLLHLEKKHGEDWGKVYDEAWERIDKKVEGLSKHIKLEEERRSEDAQSKAALTDWLRAKASFVIEGLKEADKDEFCRCELKLQKWYGDLRGKPFAIEAENSILDISGFSKQYNCAFIWQKDGVKKLNLYLIINYFKGGKLRFKKIKPEAFEANRFYTVINKKSGEIVIMEVNFNFDDPNLIILPLAFGKRQGREFIWNDLLSLETGSLKLANGRVIEKTLYNRRTRQDEPALFVALTFERREVLDSSNIKPMNLIGVDRGENIPAVIALTDPEGCPLSRFKDSLGNPTHILRIGESYKEKQRTIQAKKEVEQRRAGGYSRKYASKAKNLADDMVRNTARDLLYYAVTQDAMLIFENLSRGFGRQGKRTFMAERQYTRMEDWLTAKLAYEGLPSKTYLSKTLAQYTSKTCSNCGFTITSADYDRVLEKLKKTATGWMTTINGKELKVEGQITYYNRYKRQNVVKDLSVELDRLSEESVNNDISSWTKGRSGEALSLLKKRFSHRPVQEKFVCLNCGFETHADEQAALNIARSWLFLRSQEYKKYQTNKTTGNTDKRAFVETWQSFYRKKLKEVWKPAV

SEQ ID NO: 46582 - protein, 978 aa, synthetic construct
  REGION 1..978: note = engineered CasX variant
QEIKRINKIRRRLVKDSNTKKAGKTGPMKTLLVRVMTPDLRERLENLRKKPENIPQPISNTSRANLNKLLTDYTEMKKAILHVYWEEFQKDPVGLMSRVAQPASKKIDQNKLKPEMDEKGNLTTAGFACSQCGQPLFVYKLEQVSEKGKAYTNYVGRCNVAEHEKLIKLAQLKPEKDSDEAVTYSLGKFGQRALDFYSIHVTKESTHPVKPLAQIAGNRYASGPVGKALSDACMGTIASFLSKYQDIIIEHQKVVKGNQKRLESLRELAGKENLEYPSVTLPPQPHTKEGVDAYNEVIARVRMWVNLNLWQKLKLSRDDAKPLLRLKGFPSFPLVERQANEVDWWDMVCNVKKLINEKKEDGKVFWQNLAGYKRQEALRPYLSSEEDRKKGKKFARYQLGDLLLHLEKKHGEDWGKVYDEAWERIDKKVEGLSKHIKLEEERRSEDAQSKAALTDWLRAKASFVIEGLKEADKDEFCRCELKLQKWYGDLRGKPFAIEAENSILDISGFSKQYNCAFIWQKDGVKKLNLYLIINYFKGGKLRFKKIKPEAFEANRFYTVINKKSGEIVIMEVNFNFDDPNLIILPLAFGKRQGREFIWNDLLSLETGSLKLANGRVIEKTLYNRRTRQDEPALFVALTFERREVLDSSNIKPMNLIGVDRGENIPAVIALTDPEGCPLSRFKDSLGNPTHILRIGESYKEKQRTIQAKKEVEQRRAGGYSRKYASKAKNLADDMVRNTARDLLYYAVTQDAMLIFENLSRGFGRQGKRTFMAERQYTRMEDWLTAKLAYEGLPSKTYLSKTLAQYTSKTCSNCGFTITSADYDRVLEKLKKTATGWMTTINGKELKVEGQITYYNRYKRQNVVKDLSVELDRLSEESVNNDISSWTKGRSGEALSLLKKRFSHRPVQEKFVCLNCGFETHADEQAALNIARSWLFLRSQEYKKYQTNKTTGNTDKRAFVETWQSFYRKKLKEVWKPAV

SEQ ID NO: 46583 - protein, 977 aa, synthetic construct
  REGION 1..977: note = engineered CasX variant
QEIKRINKIRRRLVKDSNTKKAGKTGPMKTLLVRVMTPDLRERLENLRKKPENIPQPISNTSRANLNKLLTDYTEMKKAILHVYWEEFQKDPVGLMSRVAQPASKKIDQNKLKPEMDEKGNLTTAGFACSQCGQPLFVYKLEQVSEKGKAYTNYVGRCNVAEHEKLILLAQLKPEKDSDEAVTYSLGKFGQRALDFYSIHVTKESTHPVKPLAQIAGNRYASPVGKALSDACMGTIASFLSKYQDIIIEHQKVVKGNQKRLESLRELAGKENLEYPSVTLPPQPHTKEGVDAYNEVIARVRMWVNLNLWQKLKLSRDDAKPLLRLKGFPSFPLVERQANEVDWWDMVCNVKKLINEKKEDGKVFWQNLAGYKRQEALRPYLSSEEDRKKGKKFARYQLGDLLLHLEKKHGEDWGKVYDEAWERIDKKVEGLSKHIKLEEERRSEDAQSKAALTDWLRAKASFVIEGLKEADKDEFCRCELKLQKWYGDLRGKPFAIEAENSILDISGFSKQYNCAFIWQKDGVKKLNLYLIINYFKGGKLRFKKIKPEAFEANRFYTVINKKSGEIVIMEVNFNFDDPNLIILPLAFGKRQGREFIWNDLLSLETGSLKLANGRVIEKTLYNRRTRQDEPALFVALTFERREVLDSSNIKPMNLIGVDRGENIPAVIALTDPEGCPLSRFKDSLGNPTHILRIGESYKEKQRTIQAKKEVEQRRAGGYSRKYASKAKNLADDMVRNTARDLLYYAVTQDAMLIFENLSRGFGRQGKRTFMAERQYTRMEDWLTAKLAYEGLPSKTYLSKTLAQYTSKTCSNCGFTITSADYDRVLEKLKKTATGWMTTINGKELKVEGQITYYNRYKRQNVVKDLSVELDRLSEESVNNDISSWTKGRSGEALSLLKKRFSHRPVQEKFVCLNCGFETHADEQAALNIARSWLFLRSQEYKKYQTNKTTGNTDKRAFVETWQSFYRKKLKEVWKPAV

SEQ ID NO: 46584 - protein, 978 aa, synthetic construct
  REGION 1..978: note = engineered CasX variant
QEIKRINKIRRRLVKDSNTKKAGKTGPMKTLLVRVMTPDLRERLENLRKKPENIPQPISNTSRANLNKLLTDYTEMKKAILHVYWEEFQKDPVGLMSRVAQPASKKIDQNKLKPEMDEKGNLTTAGFACSQCGQPLFVYKLEQVSEKGKAYTNYFGRCNVAEHEKLILLAQLKPEKDSDEAVTYSLGKFGQRALDFYSIHVTKESTHPVKPLAQIAGNRYASYPVGKALSGACMGTIASFLSKYQDIIIEHQKVVKGNQKRLESLRELAGKENLEYPSVTLPPQPHTKEGVDAYNEVIARVRMWVNLNLWQKLKLSRDDAKPLLRLKGFPSFPLVERQANEVDWWDMVCNVKKLINEKKEDGKVFWQNLAGYKRQEALRPYLSSEEDRKKGKKFARYQLGDLLLHLEKKHGEDWGKVYDEAWERIDKKVEGLSKHIKLEEERRSEDAQSKAALTDWLRAKASFVIEGLKEADKDEFCRCELKLQKWYGDLRGKPFAIEAENSILDISGFSKQYNCAFIWQKDGVKKLNLYLIINYFKGGKLRFKKIKPEAFEANRFYTVINKKSGEIVPMEVNFNFDDPNLIILPLAFGKRQGREFIWNDLLSLETGSLKLANGRVIEKTLYNRRTRQDEPALFVALTFERREVLDSSNIKPMNLIGVDRGENIPAVIALTDPEGCPLSRFKDSLGNPTHILRIGESYKEKQRTIQAKKEVEQRRAGGYSRKYASKAKNLADDMVRNTARDLLYYAVTQDAMLIFENLSRGFGRQGKRTFMAERQYTRMEDWLTAKLAYEGLASKTYLSKTLAQYTSKTCSNCGFTITSADYDRVLEKLKKTATGWMTTINGKELKVEGQITYYNRYKRQNVVKDLSVELDRLSEESVNNDISSWTKGRSGEALSLLKKRFSHRPVQEKFVCLNCGFETHADEQAALNIARSWLFLRSQEYKKYQTNKTTGNTDKRAFVETWQSFYRKKLKEVWKPAV

SEQ ID NO: 46585 - protein, 978 aa, synthetic construct
  REGION 1..978: note = engineered CasX variant
QEIKRINKIRRRLVKDSNTKKAGKTGPMKTLLVRVMTPDLRERLENLRKKPENIPQPISNTSRANLNKLLTDYTEMKKAILHVYWEEFQKDPVGLMSRVAQPASKKIDQNKLKPEMDEKGNLTTAGFACSQCGQPLFVYKLEQVSEKGKAYTNYFGRCNVAEHEKLILLAQLKPEKDSDEAVTYSLGKFGQRALDFYSIHVTKESTHPVKPLAQIAGNRYASHPVGKALSGACMGTIASFLSKYQDIIIEHQKVVKGNQKRLESLRELAGKENLEYPSVTLPPQPHTKEGVDAYNEVIARVRMWVNLNLWQKLKLSRDDAKPLLRLKGFPSFPLVERQANEVDWWDMVCNVKKLINEKKEDGKVFWQNLAGYKRQEALRPYLSSEEDRKKGKKFARYQLGDLLLHLEKKHGEDWGKVYDEAWERIDKKVEGLSKHIKLEEERRSEDAQSKAALTDWLRAKASFVIEGLKEADKDEFCRCELKLQKWYGDLRGKPFAIEAENSILDISGFSKQYNCAFIWQKDGVKKLNLYLIINYFKGGKLRFKKIKPEAFEANRFYTVINKKSGEIVPMEVNFNFDDPNLIILPLAFGKRQGREFIWNDLLSLETGSLKLANGRVIEKTLYNRRTRQDEPALFVALTFERREVLDSSNIKPMNLIGVDRGENIPAVIALTDPEGCPLSRFKDSLGNPTHILRIGESYKEKQRTIQAKKEVEQRRAGGYSRKYASKAKNLADDMVRNTARDLLYYAVTQDAMLIFENLSRGFGRQGKRTFMAERQYTRMEDWLTAKLAYEGLASKTYLSKTLAQYTSKTCSNCGFTITSADYDRVLEKLKKTATGWMTTINGKELKVEGQITYYNRYKRQNVVKDLSVELDRLSEESVNNDISSWTKGRSGEALSLLKKRFSHRPVQEKFVCLNCGFETHADEQAALNIARSWLFLRSQEYKKYQTNKTTGNTDKRAFVETWQSFYRKKLKEVWKPAV

SEQ ID NO: 46586 - protein, 978 aa, synthetic construct
  REGION 1..978: note = engineered CasX variant
QEIKRINKIRRRLVKDSNTKKAGKTGPMKTLLVRVMTPDLRERLENLRKKPENIPQPISNTSRANLNKLLTDYTEMKKAILHVYWEEFQKDPVGLMSRVAQPASKKIDQNKLKPEMDEKGNLTTAGFACSQCGQPLFVYKLEQVSEKGKAYTNYFGRCNVAEHEKLILLAQLKPEKDSDEAVTYSLGKFGQRALDFYSIHVTKESTHPVKPLAQIAGNRYASSPVGKALSGACMGTIASFLSKYQDIIIEHQKVVKGNQKRLESLRELAGKENLEYPSVTLPPQPHTKEGVDAYNEVIARVRMWVNLNLWQKLKLSRDDAKPLLRLKGFPSFPLVERQANEVDWWDMVCNVKKLINEKKEDGKVFWQNLAGYKRQEALRPYLSSEEDRKKGKKFARYQLGDLLLHLEKKHGEDWGKVYDEAWERIDKKVEGLSKHIKLEEERRSEDAQSKAALTDWLRAKASFVIEGLKEADKDEFCRCELKLQKWYGDLRGKPFAIEAENSILDISGFSKQYNCAFIWQKDGVKKLNLYLIINYFKGGKLRFKKIKPEAFEANRFYTVINKKSGEIVPMEVNFNFDDPNLIILPLAFGKRQGREFIWNDLLSLETGSLKLANGRVIEKTLYNRRTRQDEPALFVALTFERREVLDSSNIKPMNLIGVDRGENIPAVIALTDPEGCPLSRFKDSLGNPTHILRIGESYKEKQRTIQAKKEVEQRRAGGYSRKYASKAKNLADDMVRNTARDLLYYAVTQDAMLIFENLSRGFGRQGKRTFMAERQYTRMEDWLTAKLAYEGLASKTYLSKTLAQYTSKTCSNCGFTITSADYDRVLEKLKKTATGWMTTINGKELKVEGQITYYNRYKRQNVVKDLSVELDRLSEESVNNDISSWTKGRSGEALSLLKKRFSHRPVQEKFVCLNCGFETHADEQAALNIARSWLFLRSQEYKKYQTNKTTGNTDKRAFVETWQSFYRKKLKEVWKPAV

SEQ ID NO: 46587 - protein, 978 aa, synthetic construct
  REGION 1..978: note = engineered CasX variant
QEIKRINKIRRRLVKDSNTKKAGKTGPMKTLLVRVMTPDLRERLENLRKKPENIPQPISNTSRANLNKLLTDYTEMKKAILHVYWEEFQKDPVGLMSRVAQPASKKIDQNKLKPEMDEKGNLTTAGFACSQCGQPLFVYKLEQVSEKGKAYTNYFGRCNVAEHEKLILLAQLKPEKDSDEAVTYSLGKFGQRALDFYSIHVTKESTHPVKPLAQIAGNRYASTPVGKALSGACMGTIASFLSKYQDIIIEHQKVVKGNQKRLESLRELAGKENLEYPSVTLPPQPHTKEGVDAYNEVIARVRMWVNLNLWQKLKLSRDDAKPLLRLKGFPSFPLVERQANEVDWWDMVCNVKKLINEKKEDGKVFWQNLAGYKRQEALRPYLSSEEDRKKGKKFARYQLGDLLLHLEKKHGEDWGKVYDEAWERIDKKVEGLSKHIKLEEERRSEDAQSKAALTDWLRAKASFVIEGLKEADKDEFCRCELKLQKWYGDLRGKPFAIEAENSILDISGFSKQYNCAFIWQKDGVKKLNLYLIINYFKGGKLRFKKIKPEAFEANRFYTVINKKSGEIVPMEVNFNFDDPNLIILPLAFGKRQGREFIWNDLLSLETGSLKLANGRVIEKTLYNRRTRQDEPALFVALTFERREVLDSSNIKPMNLIGVDRGENIPAVIALTDPEGCPLSRFKDSLGNPTHILRIGESYKEKQRTIQAKKEVEQRRAGGYSRKYASKAKNLADDMVRNTARDLLYYAVTQDAMLIFENLSRGFGRQGKRTFMAERQYTRMEDWLTAKLAYEGLASKTYLSKTLAQYTSKTCSNCGFTITSADYDRVLEKLKKTATGWMTTINGKELKVEGQITYYNRYKRQNVVKDLSVELDRLSEESVNNDISSWTKGRSGEALSLLKKRFSHRPVQEKFVCLNCGFETHADEQAALNIARSWLFLRSQEYKKYQTNKTTGNTDKRAFVETWQSFYRKKLKEVWKPAV

SEQ ID NO: 46588 - protein, 978 aa, synthetic construct
  REGION 1..978: note = engineered CasX variant
QEIKRINKIRRRLVKDSNTKKAGKTGPMKTLLVRVMTPDLRERLENLRKKPENIPQPISNTSRANLNKLLTDYTEMKKAILHVYWEEFQKDPVGLMSRVAQPASKKIDQNKLKPEMDEKGNLTTAGFACSQCGQPLFVYKLEQVSEKGKAYTNYFGRCNVAEHEKLILLAQLKPEKDSDEAVTYSLGKFGQRALDFYSIHVTKESTHPVKPLAQIAGNRYASAPVGKALSGACMGTIASFLSKYQDIIIEHQKVVKGNQKRLESLRELAGKENLEYPSVTLPPQPHTKEGVDAYNEVIARVRMWVNLNLWQKLKLSRDDAKPLLRLKGFPSFPLVERQANEVDWWDMVCNVKKLINEKKEDGKVFWQNLAGYKRQEALRPYLSSEEDRKKGKKFARYQLGDLLLHLEKKHGEDWGKVYDEAWERIDKKVEGLSKHIKLEEERRSEDAQSKAALTDWLRAKASFVIEGLKEADKDEFCRCELKLQKWYGDLRGKPFAIEAENSILDISGFSKQYNCAFIWQKDGVKKLNLYLIINYFKGGKLRFKKIKPEAFEANRFYTVINKKSGEIVPMEVNFNFDDPNLIILPLAFGKRQGREFIWNDLLSLETGSLKLANGRVIEKTLYNRRTRQDEPALFVALTFERREVLDSSNIKPMNLIGVDRGENIPAVIALTDPEGCPLSRFKDSLGNPTHILRIGESYKEKQRTIQAKKEVEQRRAGGYSRKYASKAKNLADDMVRNTARDLLYYAVTQDAMLIFENLSRGFGRQGKRTFMAERQYTRMEDWLTAKLAYEGLASKTYLSKTLAQYTSKTCSNCGFTITSADYDRVLEKLKKTATGWMTTINGKELKVEGQITYYNRYKRQNVVKDLSVELDRLSEESVNNDISSWTKGRSGEALSLLKKRFSHRPVQEKFVCLNCGFETHADEQAALNIARSWLFLRSQEYKKYQTNKTTGNTDKRAFVETWQSFYRKKLKEVWKPAV

SEQ ID NO: 46589 - protein, 978 aa, synthetic construct
  REGION 1..978: note = engineered CasX variant
QEIKRINKIRRRLVKDSNTKKAGKTGPMKTLLVRVMTPDLRERLENLRKKPENIPQPISNTSRANLNKLLTDYTEMKKAILHVYWEEFQKDPVGLMSRVAQPASKKIDQNKLKPEMDEKGNLTTAGFACSQCGQPLFVYKLEQVSEKGKAYTNYFGRCNVAEHEKLILLAQLKPEKDSDEAVTYSLGKFGQRALDFYSIHVTKESTHPVKPLAQIAGNRYASVPVGKALSGACMGTIASFLSKYQDIIIEHQKVVKGNQKRLESLRELAGKENLEYPSVTLPPQPHTKEGVDAYNEVIARVRMWVNLNLWQKLKLSRDDAKPLLRLKGFPSFPLVERQANEVDWWDMVCNVKKLINEKKEDGKVFWQNLAGYKRQEALRPYLSSEEDRKKGKKFARYQLGDLLLHLEKKHGEDWGKVYDEAWERIDKKVEGLSKHIKLEEERRSEDAQSKAALTDWLRAKASFVIEGLKEADKDEFCRCELKLQKWYGDLRGKPFAIEAENSILDISGFSKQYNCAFIWQKDGVKKLNLYLIINYFKGGKLRFKKIKPEAFEANRFYTVINKKSGEIVPMEVNFNFDDPNLIILPLAFGKRQGREFIWNDLLSLETGSLKLANGRVIEKTLYNRRTRQDEPALFVALTFERREVLDSSNIKPMNLIGVDRGENIPAVIALTDPEGCPLSRFKDSLGNPTHILRIGESYKEKQRTIQAKKEVEQRRAGGYSRKYASKAKNLADDMVRNTARDLLYYAVTQDAMLIFENLSRGFGRQGKRTFMAERQYTRMEDWLTAKLAYEGLASKTYLSKTLAQYTSKTCSNCGFTITSADYDRVLEKLKKTATGWMTTINGKELKVEGQITYYNRYKRQNVVKDLSVELDRLSEESVNNDISSWTKGRSGEALSLLKKRFSHRPVQEKFVCLNCGFETHADEQAALNIARSWLFLRSQEYKKYQTNKTTGNTDKRAFVETWQSFYRKKLKEVWKPAV

SEQ ID NO: 46590 - protein, 978 aa, synthetic construct
  REGION 1..978: note = engineered CasX variant
QEIKRINKIRRRLVKDSNTKKAGKTGPMKTLLVRVMTPDLRERLENLRKKPENIPQPISNTSRANLNKLLTDYTEMKKAILHVYWEEFQKDPVGLMSRVAQPASKKIDQNKLKPEMDEKGNLTTAGFACSQCGQPLFVYKLEQVSEKGKAYTNYFGRCNVAEHEKLIKLAQLKPEKDSDEAVTYSLGKFGQRALDFYSIHVTKESTHPVKPLAQIAGNRYASGPVGKALSGACMGTIASFLSKYQDIIIEHQKVVKGNQKRLESLRELAGKENLEYPSVTLPPQPHTKEGVDAYNEVIARVRMWVNLNLWQKLKLSRDDAKPLLRLKGFPSFPLVERQANEVDWWDMVCNVKKLINEKKEDGKVFWQNLAGYKRQEALRPYLSSEEDRKKGKKFARYQLGDLLLHLEKKHGEDWGKVYDEAWERIDKKVEGLSKHIKLEEERRSEDAQSKAALTDWLRAKASFVIEGLKEADKDEFCRCELKLQKWYGDLRGKPFAIEAENSILDISGFSKQYNCAFIWQKDGVKKLNLYLIINYFKGGKLRFKKIKPEAFEANRFYTVINKKSGEIVPMEVNFNFDDPNLIILPLAFGKRQGREFIWNDLLSLETGSLKLANGRVIEKTLYNRRTRQDEPALFVALTFERREVLDSSNIKPMNLIGVDRGENIPAVIALTDPEGCPLSRFKDSLGNPTHILRIGESYKEKQRTIQAKKEVEQRRAGGYSRKYASKAKNLADDMVRNTARDLLYYAVTQDAMLIFENLSRGFGRQGKRTFMAERQYTRMEDWLTAKLAYEGLASKTYLSKTLAQYTSKTCSNCGFTITSADYDRVLEKLKKTATGWMTTINGKELKVEGQITYYNRYKRQNVVKDLSVELDRLSEESVNNDISSWTKGRSGEALSLLKKRFSHRPVQEKFVCLNCGFETHADEQAALNIARSWLFLRSQEYKKYQTNKTTGNTDKRAFVETWQSFYRKKLKEVWKPAV

SEQ ID NO: 46591 - protein, 977 aa, synthetic construct
  REGION 1..977: note = engineered CasX variant
QEIKRINKIRRRLVKDSNTKKAGKTGPMKTLLVRVMTPDLRERLENLRKKPENIPQPISNTSRANLNKLLTDYTEMKKAILHVYWEEFQKDPVGLMSRVAQPASKKIDQNKLKPEMDEKGNLTTAGFACSQCGQPLFVYKLEQVSEKGKAYTNYFGRCNVAEHEKLILLAQLKPEKDSDEAVTYSLGKFGQRALDFYSIHVTKESTHPVKPLAQIAGNRYASPVGKALSGACMGTIASFLSKYQDIIIEHQKVVKGNQKRLESLRELAGKENLEYPSVTLPPQPHTKEGVDAYNEVIARVRMWVNLNLWQKLKLSRDDAKPLLRLKGFPSFPLVERQANEVDWWDMVCNVKKLINEKKEDGKVFWQNLAGYKRQEALRPYLSSEEDRKKGKKFARYQLGDLLLHLEKKHGEDWGKVYDEAWERIDKKVEGLSKHIKLEEERRSEDAQSKAALTDWLRAKASFVIEGLKEADKDEFCRCELKLQKWYGDLRGKPFAIEAENSILDISGFSKQYNCAFIWQKDGVKKLNLYLIINYFKGGKLRFKKIKPEAFEANRFYTVINKKSGEIVPMEVNFNFDDPNLIILPLAFGKRQGREFIWNDLLSLETGSLKLANGRVIEKTLYNRRTRQDEPALFVALTFERREVLDSSNIKPMNLIGVDRGENIPAVIALTDPEGCPLSRFKDSLGNPTHILRIGESYKEKQRTIQAKKEVEQRRAGGYSRKYASKAKNLADDMVRNTARDLLYYAVTQDAMLIFENLSRGFGRQGKRTFMAERQYTRMEDWLTAKLAYEGLASKTYLSKTLAQYTSKTCSNCGFTITSADYDRVLEKLKKTATGWMTTINGKELKVEGQITYYNRYKRQNVVKDLSVELDRLSEESVNNDISSWTKGRSGEALSLLKKRFSHRPVQEKFVCLNCGFETHADEQAALNIARSWLFLRSQEYKKYQTNKTTGNTDKRAFVETWQSFYRKKLKEVWKPAV

SEQ ID NO: 46592 - protein, 978 aa, synthetic construct
  REGION 1..978: note = engineered CasX variant
QEIKRINKIRRRLVKDSNTKKAGKTGPMKTLLVRVMTPDLRERLENLRKKPENIPQPISNTSRANLNKLLTDYTEMKKAILHVYWEEFQKDPVGLMSRVAQPASKKIDQNKLKPEMDEKGNLTTAGFACSQCGQPLFVYKLEQVSEKGKAYTNYFGRCNVAEHEKLILLAQLKPEKDSDEAVTYSLGKFGQRALDFYSIHVTKESTHPVKPLAQIAGNRYASYPVGKALSDACMGTIASFLSKYQDIIIEHQKVVKGNQKRLESLRELAGKENLEYPSVTLPPQPHTKEGVDAYNEVIARVRMWVNLNLWQKLKLSRDDAKPLLRLKNFPSFPLVERQANEVDWWDMVCNVKKLINEKKEDGKVFWQNLAGYKRQEALRPYLSSEEDRKKGKKFARYQLGDLLLHLEKKHGEDWGKVYDEAWERIDKKVEGLSKHIKLEEERRSEDAQSKAALTDWLRAKASFVIEGLKEADKDEFCRCELKLQKWYGDLRGKPFAIEAENSILDISGFSKQYNCAFIWQKDGVKKLNLYLIINYFKGGKLRFKKIKPEAFEANRFYTVINKKSGEIVPMEVNFNFDDPNLIILPLAFGKRQGREFIWNDLLSLETGSLKLANGRVIEKTLYNRRTRQDEPALFVALTFERREVLDSSNIKPMNLIGVDRGENIPAVIALTDPEGCPLSRFKDSLGNPTHILRIGESYKEKQRTIQAKKEVEQRRAGGYSRKYASKAKNLADDMVRNTARDLLYYAVTQDAMLIFENLSRGFGRQGKRTFMAERQYTRMEDWLTAKLAYEGLASKTYLSKTLAQYTSKTCSNCGFTITSADYDRVLEKLKKTATGWMTTINGKELKVEGQITYYNRYKRQNVVKDLSVELDRLSEESVNNDISSWTKGRSGEALSLLKKRFSHRPVQEKFVCLNCGFETHADEQAALNIARSWLFLRSQEYKKYQTNKTTGNTDKRAFVETWQSFYRKKLKEVWKPAV

SEQ ID NO: 46593 - protein, 978 aa, synthetic construct
  REGION 1..978: note = engineered CasX variant
QEIKRINKIRRRLVKDSNTKKAGKTGPMKTLLVRVMTPDLRERLENLRKKPENIPQPISNTSRANLNKLLTDYTEMKKAILHVYWEEFQKDPVGLMSRVAQPASKKIDQNKLKPEMDEKGNLTTAGFACSQCGQPLFVYKLEQVSEKGKAYTNYFGRCNVAEHEKLILLAQLKPEKDSDEAVTYSLGKFGQRALDFYSIHVTKESTHPVKPLAQIAGNRYASHPVGKALSDACMGTIASFLSKYQDIIIEHQKVVKGNQKRLESLRELAGKENLEYPSVTLPPQPHTKEGVDAYNEVIARVRMWVNLNLWQKLKLSRDDAKPLLRLKNFPSFPLVERQANEVDWWDMVCNVKKLINEKKEDGKVFWQNLAGYKRQEALRPYLSSEEDRKKGKKFARYQLGDLLLHLEKKHGEDWGKVYDEAWERIDKKVEGLSKHIKLEEERRSEDAQSKAALTDWLRAKASFVIEGLKEADKDEFCRCELKLQKWYGDLRGKPFAIEAENSILDISGFSKQYNCAFIWQKDGVKKLNLYLIINYFKGGKLRFKKIKPEAFEANRFYTVINKKSGEIVPMEVNFNFDDPNLIILPLAFGKRQGREFIWNDLLSLETGSLKLANGRVIEKTLYNRRTRQDEPALFVALTFERREVLDSSNIKPMNLIGVDRGENIPAVIALTDPEGCPLSRFKDSLGNPTHILRIGESYKEKQRTIQAKKEVEQRRAGGYSRKYASKAKNLADDMVRNTARDLLYYAVTQDAMLIFENLSRGFGRQGKRTFMAERQYTRMEDWLTAKLAYEGLASKTYLSKTLAQYTSKTCSNCGFTITSADYDRVLEKLKKTATGWMTTINGKELKVEGQITYYNRYKRQNVVKDLSVELDRLSEESVNNDISSWTKGRSGEALSLLKKRFSHRPVQEKFVCLNCGFETHADEQAALNIARSWLFLRSQEYKKYQTNKTTGNTDKRAFVETWQSFYRKKLKEVWKPAV

SEQ ID NO: 46594 - protein, 978 aa, synthetic construct
  REGION 1..978: note = engineered CasX variant
QEIKRINKIRRRLVKDSNTKKAGKTGPMKTLLVRVMTPDLRERLENLRKKPENIPQPISNTSRANLNKLLTDYTEMKKAILHVYWEEFQKDPVGLMSRVAQPASKKIDQNKLKPEMDEKGNLTTAGFACSQCGQPLFVYKLEQVSEKGKAYTNYFGRCNVAEHEKLILLAQLKPEKDSDEAVTYSLGKFGQRALDFYSIHVTKESTHPVKPLAQIAGNRYASSPVGKALSDACMGTIASFLSKYQDIIIEHQKVVKGNQKRLESLRELAGKENLEYPSVTLPPQPHTKEGVDAYNEVIARVRMWVNLNLWQKLKLSRDDAKPLLRLKNFPSFPLVERQANEVDWWDMVCNVKKLINEKKEDGKVFWQNLAGYKRQEALRPYLSSEEDRKKGKKFARYQLGDLLLHLEKKHGEDWGKVYDEAWERIDKKVEGLSKHIKLEEERRSEDAQSKAALTDWLRAKASFVIEGLKEADKDEFCRCELKLQKWYGDLRGKPFAIEAENSILDISGFSKQYNCAFIWQKDGVKKLNLYLIINYFKGGKLRFKKIKPEAFEANRFYTVINKKSGEIVPMEVNFNFDDPNLIILPLAFGKRQGREFIWNDLLSLETGSLKLANGRVIEKTLYNRRTRQDEPALFVALTFERREVLDSSNIKPMNLIGVDRGENIPAVIALTDPEGCPLSRFKDSLGNPTHILRIGESYKEKQRTIQAKKEVEQRRAGGYSRKYASKAKNLADDMVRNTARDLLYYAVTQDAMLIFENLSRGFGRQGKRTFMAERQYTRMEDWLTAKLAYEGLASKTYLSKTLAQYTSKTCSNCGFTITSADYDRVLEKLKKTATGWMTTINGKELKVEGQITYYNRYKRQNVVKDLSVELDRLSEESVNNDISSWTKGRSGEALSLLKKRFSHRPVQEKFVCLNCGFETHADEQAALNIARSWLFLRSQEYKKYQTNKTTGNTDKRAFVETWQSFYRKKLKEVWKPAV

SEQ ID NO: 46595 - protein, 978 aa, synthetic construct
  REGION 1..978: note = engineered CasX variant
QEIKRINKIRRRLVKDSNTKKAGKTGPMKTLLVRVMTPDLRERLENLRKKPENIPQPISNTSRANLNKLLTDYTEMKKAILHVYWEEFQKDPVGLMSRVAQPASKKIDQNKLKPEMDEKGNLTTAGFACSQCGQPLFVYKLEQVSEKGKAYTNYFGRCNVAEHEKLILLAQLKPEKDSDEAVTYSLGKFGQRALDFYSIHVTKESTHPVKPLAQIAGNRYASTPVGKALSDACMGTIASFLSKYQDIIIEHQKVVKGNQKRLESLRELAGKENLEYPSVTLPPQPHTKEGVDAYNEVIARVRMWVNLNLWQKLKLSRDDAKPLLRLKNFPSFPLVERQANEVDWWDMVCNVKKLINEKKEDGKVFWQNLAGYKRQEALRPYLSSEEDRKKGKKFARYQLGDLLLHLEKKHGEDWGKVYDEAWERIDKKVEGLSKHIKLEEERRSEDAQSKAALTDWLRAKASFVIEGLKEADKDEFCRCELKLQKWYGDLRGKPFAIEAENSILDISGFSKQYNCAFIWQKDGVKKLNLYLIINYFKGGKLRFKKIKPEAFEANRFYTVINKKSGEIVPMEVNFNFDDPNLIILPLAFGKRQGREFIWNDLLSLETGSLKLANGRVIEKTLYNRRTRQDEPALFVALTFERREVLDSSNIKPMNLIGVDRGENIPAVIALTDPEGCPLSRFKDSLGNPTHILRIGESYKEKQRTIQAKKEVEQRRAGGYSRKYASKAKNLADDMVRNTARDLLYYAVTQDAMLIFENLSRGFGRQGKRTFMAERQYTRMEDWLTAKLAYEGLASKTYLSKTLAQYTSKTCSNCGFTITSADYDRVLEKLKKTATGWMTTINGKELKVEGQITYYNRYKRQNVVKDLSVELDRLSEESVNNDISSWTKGRSGEALSLLKKRFSHRPVQEKFVCLNCGFETHADEQAALNIARSWLFLRSQEYKKYQTNKTTGNTDKRAFVETWQSFYRKKLKEVWKPAV

SEQ ID NO: 46596 - protein, 978 aa, synthetic construct
  REGION 1..978: note = engineered CasX variant
QEIKRINKIRRRLVKDSNTKKAGKTGPMKTLLVRVMTPDLRERLENLRKKPENIPQPISNTSRANLNKLLTDYTEMKKAILHVYWEEFQKDPVGLMSRVAQPASKKIDQNKLKPEMDEKGNLTTAGFACSQCGQPLFVYKLEQVSEKGKAYTNYFGRCNVAEHEKLILLAQLKPEKDSDEAVTYSLGKFGQRALDFYSIHVTKESTHPVKPLAQIAGNRYASAPVGKALSDACMGTIASFLSKYQDIIIEHQKVVKGNQKRLESLRELAGKENLEYPSVTLPPQPHTKEGVDAYNEVIARVRMWVNLNLWQKLKLSRDDAKPLLRLKNFPSFPLVERQANEVDWWDMVCNVKKLINEKKEDGKVFWQNLAGYKRQEALRPYLSSEEDRKKGKKFARYQLGDLLLHLEKKHGEDWGKVYDEAWERIDKKVEGLSKHIKLEEERRSEDAQSKAALTDWLRAKASFVIEGLKEADKDEFCRCELKLQKWYGDLRGKPFAIEAENSILDISGFSKQYNCAFIWQKDGVKKLNLYLIINYFKGGKLRFKKIKPEAFEANRFYTVINKKSGEIVPMEVNFNFDDPNLIILPLAFGKRQGREFIWNDLLSLETGSLKLANGRVIEKTLYNRRTRQDEPALFVALTFERREVLDSSNIKPMNLIGVDRGENIPAVIALTDPEGCPLSRFKDSLGNPTHILRIGESYKEKQRTIQAKKEVEQRRAGGYSRKYASKAKNLADDMVRNTARDLLYYAVTQDAMLIFENLSRGFGRQGKRTFMAERQYTRMEDWLTAKLAYEGLASKTYLSKTLAQYTSKTCSNCGFTITSADYDRVLEKLKKTATGWMTTINGKELKVEGQITYYNRYKRQNVVKDLSVELDRLSEESVNNDISSWTKGRSGEALSLLKKRFSHRPVQEKFVCLNCGFETHADEQAALNIARSWLFLRSQEYKKYQTNKTTGNTDKRAFVETWQSFYRKKLKEVWKPAV

SEQ ID NO: 46597 - protein, 978 aa, synthetic construct
  REGION 1..978: note = engineered CasX variant
QEIKRINKIRRRLVKDSNTKKAGKTGPMKTLLVRVMTPDLRERLENLRKKPENIPQPISNTSRANLNKLLTDYTEMKKAILHVYWEEFQKDPVGLMSRVAQPASKKIDQNKLKPEMDEKGNLTTAGFACSQCGQPLFVYKLEQVSEKGKAYTNYFGRCNVAEHEKLILLAQLKPEKDSDEAVTYSLGKFGQRALDFYSIHVTKESTHPVKPLAQIAGNRYASVPVGKALSDACMGTIASFLSKYQDIIIEHQKVVKGNQKRLESLRELAGKENLEYPSVTLPPQPHTKEGVDAYNEVIARVRMWVNLNLWQKLKLSRDDAKPLLRLKNFPSFPLVERQANEVDWWDMVCNVKKLINEKKEDGKVFWQNLAGYKRQEALRPYLSSEEDRKKGKKFARYQLGDLLLHLEKKHGEDWGKVYDEAWERIDKKVEGLSKHIKLEEERRSEDAQSKAALTDWLRAKASFVIEGLKEADKDEFCRCELKLQKWYGDLRGKPFAIEAENSILDISGFSKQYNCAFIWQKDGVKKLNLYLIINYFKGGKLRFKKIKPEAFEANRFYTVINKKSGEIVPMEVNFNFDDPNLIILPLAFGKRQGREFIWNDLLSLETGSLKLANGRVIEKTLYNRRTRQDEPALFVALTFERREVLDSSNIKPMNLIGVDRGENIPAVIALTDPEGCPLSRFKDSLGNPTHILRIGESYKEKQRTIQAKKEVEQRRAGGYSRKYASKAKNLADDMVRNTARDLLYYAVTQDAMLIFENLSRGFGRQGKRTFMAERQYTRMEDWLTAKLAYEGLASKTYLSKTLAQYTSKTCSNCGFTITSADYDRVLEKLKKTATGWMTTINGKELKVEGQITYYNRYKRQNVVKDLSVELDRLSEESVNNDISSWTKGRSGEALSLLKKRFSHRPVQEKFVCLNCGFETHADEQAALNIARSWLFLRSQEYKKYQTNKTTGNTDKRAFVETWQSFYRKKLKEVWKPAV

SEQ ID NO: 46598 - protein, 978 aa, synthetic construct
  REGION 1..978: note = engineered CasX variant
QEIKRINKIRRRLVKDSNTKKAGKTGPMKTLLVRVMTPDLRERLENLRKKPENIPQPISNTSRANLNKLLTDYTEMKKAILHVYWEEFQKDPVGLMSRVAQPASKKIDQNKLKPEMDEKGNLTTAGFACSQCGQPLFVYKLEQVSEKGKAYTNYFGRCNVAEHEKLIKLAQLKPEKDSDEAVTYSLGKFGQRALDFYSIHVTKESTHPVKPLAQIAGNRYASGPVGKALSDACMGTIASFLSKYQDIIIEHQKVVKGNQKRLESLRELAGKENLEYPSVTLPPQPHTKEGVDAYNEVIARVRMWVNLNLWQKLKLSRDDAKPLLRLKNFPSFPLVERQANEVDWWDMVCNVKKLINEKKEDGKVFWQNLAGYKRQEALRPYLSSEEDRKKGKKFARYQLGDLLLHLEKKHGEDWGKVYDEAWERIDKKVEGLSKHIKLEEERRSEDAQSKAALTDWLRAKASFVIEGLKEADKDEFCRCELKLQKWYGDLRGKPFAIEAENSILDISGFSKQYNCAFIWQKDGVKKLNLYLIINYFKGGKLRFKKIKPEAFEANRFYTVINKKSGEIVPMEVNFNFDDPNLIILPLAFGKRQGREFIWNDLLSLETGSLKLANGRVIEKTLYNRRTRQDEPALFVALTFERREVLDSSNIKPMNLIGVDRGENIPAVIALTDPEGCPLSRFKDSLGNPTHILRIGESYKEKQRTIQAKKEVEQRRAGGYSRKYASKAKNLADDMVRNTARDLLYYAVTQDAMLIFENLSRGFGRQGKRTFMAERQYTRMEDWLTAKLAYEGLASKTYLSKTLAQYTSKTCSNCGFTITSADYDRVLEKLKKTATGWMTTINGKELKVEGQITYYNRYKRQNVVKDLSVELDRLSEESVNNDISSWTKGRSGEALSLLKKRFSHRPVQEKFVCLNCGFETHADEQAALNIARSWLFLRSQEYKKYQTNKTTGNTDKRAFVETWQSFYRKKLKEVWKPAV

SEQ ID NO: 46599 - protein, 977 aa, synthetic construct
  REGION 1..977: note = engineered CasX variant
QEIKRINKIRRRLVKDSNTKKAGKTGPMKTLLVRVMTPDLRERLENLRKKPENIPQPISNTSRANLNKLLTDYTEMKKAILHVYWEEFQKDPVGLMSRVAQPASKKIDQNKLKPEMDEKGNLTTAGFACSQCGQPLFVYKLEQVSEKGKAYTNYFGRCNVAEHEKLILLAQLKPEKDSDEAVTYSLGKFGQRALDFYSIHVTKESTHPVKPLAQIAGNRYASPVGKALSDACMGTIASFLSKYQDIIIEHQKVVKGNQKRLESLRELAGKENLEYPSVTLPPQPHTKEGVDAYNEVIARVRMWVNLNLWQKLKLSRDDAKPLLRLKNFPSFPLVERQANEVDWWDMVCNVKKLINEKKEDGKVFWQNLAGYKRQEALRPYLSSEEDRKKGKKFARYQLGDLLLHLEKKHGEDWGKVYDEAWERIDKKVEGLSKHIKLEEERRSEDAQSKAALTDWLRAKASFVIEGLKEADKDEFCRCELKLQKWYGDLRGKPFAIEAENSILDISGFSKQYNCAFIWQKDGVKKLNLYLIINYFKGGKLRFKKIKPEAFEANRFYTVINKKSGEIVPMEVNFNFDDPNLIILPLAFGKRQGREFIWNDLLSLETGSLKLANGRVIEKTLYNRRTRQDEPALFVALTFERREVLDSSNIKPMNLIGVDRGENIPAVIALTDPEGCPLSRFKDSLGNPTHILRIGESYKEKQRTIQAKKEVEQRRAGGYSRKYASKAKNLADDMVRNTARDLLYYAVTQDAMLIFENLSRGFGRQGKRTFMAERQYTRMEDWLTAKLAYEGLASKTYLSKTLAQYTSKTCSNCGFTITSADYDRVLEKLKKTATGWMTTINGKELKVEGQITYYNRYKRQNVVKDLSVELDRLSEESVNNDISSWTKGRSGEALSLLKKRFSHRPVQEKFVCLNCGFETHADEQAALNIARSWLFLRSQEYKKYQTNKTTGNTDKRAFVETWQSFYRKKLKEVWKPAV

SEQ ID NO: 46600 - protein, 978 aa, synthetic construct
  REGION 1..978: note = engineered CasX variant
QEIKRINKIRRRLVKDSNTKKAGKTGPMKTLLVRVMTPDLRERLENLRKKPENIPQPISNTSRANLNKLLTDYTEMKKAILHVYWEEFQKDPVGLMSRVAQPASKKIDQNKLKPEMDEKGNLTTAGFACSQCGQPLFVYKLEQVSEKGKAYTNYFGRCNVAEHEKLILLAQLKPEKDSDEAVTYSLGKFGQRALDFYSIHVTKESTHPVKPLAQIAGNRYASYPVGKALSDACMGTIASFLSKYQDIIIEHQKVVKGNQKRLESLRELAGKENLEYPSVTLPPQPHTKEGVDAYNEVIARVRMWVNLNLWQKLKLSRDDAKPLLRLKGFPSFPLVERQANEVDWWDMVCNVKKLINEKKEDGKVFWQNLAGYKRQEALRPYLSSEEDRKKGKKFARYQLGDLLNHLEKKHGEDWGKVYDEAWERIDKKVEGLSKHIKLEEERRSEDAQSKAALTDWLRAKASFVIEGLKEADKDEFCRCELKLQKWYGDLRGKPFAIEAENSILDISGFSKQYNCAFIWQKDGVKKLNLYLIINYFKGGKLRFKKIKPEAFEANRFYTVINKKSGEIVPMEVNFNFDDPNLIILPLAFGKRQGREFIWNDLLSLETGSLKLANGRVIEKTLYNRRTRQDEPALFVALTFERREVLDSSNIKPMNLIGVDRGENIPAVIALTDPEGCPLSRFKDSLGNPTHILRIGESYKEKQRTIQAKKEVEQRRAGGYSRKYASKAKNLADDMVRNTARDLLYYAVTQDAMLIFENLSRGFGRQGKRTFMAERQYTRMEDWLTAKLAYEGLASKTYLSKTLAQYTSKTCSNCGFTITSADYDRVLEKLKKTATGWMTTINGKELKVEGQITYYNRYKRQNVVKDLSVELDRLSEESVNNDISSWTKGRSGEALSLLKKRFSHRPVQEKFVCLNCGFETHADEQAALNIARSWLFLRSQEYKKYQTNKTTGNTDKRAFVETWQSFYRKKLKEVWKPAV

SEQ ID NO: 46601 - protein, 978 aa, synthetic construct
  REGION 1..978: note = engineered CasX variant
QEIKRINKIRRRLVKDSNTKKAGKTGPMKTLLVRVMTPDLRERLENLRKKPENIPQPISNTSRANLNKLLTDYTEMKKAILHVYWEEFQKDPVGLMSRVAQPASKKIDQNKLKPEMDEKGNLTTAGFACSQCGQPLFVYKLEQVSEKGKAYTNYFGRCNVAEHEKLILLAQLKPEKDSDEAVTYSLGKFGQRALDFYSIHVTKESTHPVKPLAQIAGNRYASHPVGKALSDACMGTIASFLSKYQDIIIEHQKVVKGNQKRLESLRELAGKENLEYPSVTLPPQPHTKEGVDAYNEVIARVRMWVNLNLWQKLKLSRDDAKPLLRLKGFPSFPLVERQANEVDWWDMVCNVKKLINEKKEDGKVFWQNLAGYKRQEALRPYLSSEEDRKKGKKFARYQLGDLLNHLEKKHGEDWGKVYDEAWERIDKKVEGLSKHIKLEEERRSEDAQSKAALTDWLRAKASFVIEGLKEADKDEFCRCELKLQKWYGDLRGKPFAIEAENSILDISGFSKQYNCAFIWQKDGVKKLNLYLIINYFKGGKLRFKKIKPEAFEANRFYTVINKKSGEIVPMEVNFNFDDPNLIILPLAFGKRQGREFIWNDLLSLETGSLKLANGRVIEKTLYNRRTRQDEPALFVALTFERREVLDSSNIKPMNLIGVDRGENIPAVIALTDPEGCPLSRFKDSLGNPTHILRIGESYKEKQRTIQAKKEVEQRRAGGYSRKYASKAKNLADDMVRNTARDLLYYAVTQDAMLIFENLSRGFGRQGKRTFMAERQYTRMEDWLTAKLAYEGLASKTYLSKTLAQYTSKTCSNCGFTITSADYDRVLEKLKKTATGWMTTINGKELKVEGQITYYNRYKRQNVVKDLSVELDRLSEESVNNDISSWTKGRSGEALSLLKKRFSHRPVQEKFVCLNCGFETHADEQAALNIARSWLFLRSQEYKKYQTNKTTGNTDKRAFVETWQSFYRKKLKEVWKPAV

SEQ ID NO: 46602 - protein, 978 aa, synthetic construct
  REGION 1..978: note = engineered CasX variant
QEIKRINKIRRRLVKDSNTKKAGKTGPMKTLLVRVMTPDLRERLENLRKKPENIPQPISNTSRANLNKLLTDYTEMKKAILHVYWEEFQKDPVGLMSRVAQPASKKIDQNKLKPEMDEKGNLTTAGFACSQCGQPLFVYKLEQVSEKGKAYTNYFGRCNVAEHEKLILLAQLKPEKDSDEAVTYSLGKFGQRALDFYSIHVTKESTHPVKPLAQIAGNRYASSPVGKALSDACMGTIASFLSKYQDIIIEHQKVVKGNQKRLESLRELAGKENLEYPSVTLPPQPHTKEGVDAYNEVIARVRMWVNLNLWQKLKLSRDDAKPLLRLKGFPSFPLVERQANEVDWWDMVCNVKKLINEKKEDGKVFWQNLAGYKRQEALRPYLSSEEDRKKGKKFARYQLGDLLNHLEKKHGEDWGKVYDEAWERIDKKVEGLSKHIKLEEERRSEDAQSKAALTDWLRAKASFVIEGLKEADKDEFCRCELKLQKWYGDLRGKPFAIEAENSILDISGFSKQYNCAFIWQKDGVKKLNLYLIINYFKGGKLRFKKIKPEAFEANRFYTVINKKSGEIVPMEVNFNFDDPNLIILPLAFGKRQGREFIWNDLLSLETGSLKLANGRVIEKTLYNRRTRQDEPALFVALTFERREVLDSSNIKPMNLIGVDRGENIPAVIALTDPEGCPLSRFKDSLGNPTHILRIGESYKEKQRTIQAKKEVEQRRAGGYSRKYASKAKNLADDMVRNTARDLLYYAVTQDAMLIFENLSRGFGRQGKRTFMAERQYTRMEDWLTAKLAYEGLASKTYLSKTLAQYTSKTCSNCGFTITSADYDRVLEKLKKTATGWMTTINGKELKVEGQITYYNRYKRQNVVKDLSVELDRLSEESVNNDISSWTKGRSGEALSLLKKRFSHRPVQEKFVCLNCGFETHADEQAALNIARSWLFLRSQEYKKYQTNKTTGNTDKRAFVETWQSFYRKKLKEVWKPAV

SEQ ID NO: 46603 - protein, 978 aa, synthetic construct
  REGION 1..978: note = engineered CasX variant
QEIKRINKIRRRLVKDSNTKKAGKTGPMKTLLVRVMTPDLRERLENLRKKPENIPQPISNTSRANLNKLLTDYTEMKKAILHVYWEEFQKDPVGLMSRVAQPASKKIDQNKLKPEMDEKGNLTTAGFACSQCGQPLFVYKLEQVSEKGKAYTNYFGRCNVAEHEKLILLAQLKPEKDSDEAVTYSLGKFGQRALDFYSIHVTKESTHPVKPLAQIAGNRYASTPVGKALSDACMGTIASFLSKYQDIIIEHQKVVKGNQKRLESLRELAGKENLEYPSVTLPPQPHTKEGVDAYNEVIARVRMWVNLNLWQKLKLSRDDAKPLLRLKGFPSFPLVERQANEVDWWDMVCNVKKLINEKKEDGKVFWQNLAGYKRQEALRPYLSSEEDRKKGKKFARYQLGDLLNHLEKKHGEDWGKVYDEAWERIDKKVEGLSKHIKLEEERRSEDAQSKAALTDWLRAKASFVIEGLKEADKDEFCRCELKLQKWYGDLRGKPFAIEAENSILDISGFSKQYNCAFIWQKDGVKKLNLYLIINYFKGGKLRFKKIKPEAFEANRFYTVINKKSGEIVPMEVNFNFDDPNLIILPLAFGKRQGREFIWNDLLSLETGSLKLANGRVIEKTLYNRRTRQDEPALFVALTFERREVLDSSNIKPMNLIGVDRGENIPAVIALTDPEGCPLSRFKDSLGNPTHILRIGESYKEKQRTIQAKKEVEQRRAGGYSRKYASKAKNLADDMVRNTARDLLYYAVTQDAMLIFENLSRGFGRQGKRTFMAERQYTRMEDWLTAKLAYEGLASKTYLSKTLAQYTSKTCSNCGFTITSADYDRVLEKLKKTATGWMTTINGKELKVEGQITYYNRYKRQNVVKDLSVELDRLSEESVNNDISSWTKGRSGEALSLLKKRFSHRPVQEKFVCLNCGFETHADEQAALNIARSWLFLRSQEYKKYQTNKTTGNTDKRAFVETWQSFYRKKLKEVWKPAV

SEQ ID NO: 46604 - protein, 978 aa, synthetic construct
  REGION 1..978: note = engineered CasX variant
QEIKRINKIRRRLVKDSNTKKAGKTGPMKTLLVRVMTPDLRERLENLRKKPENIPQPISNTSRANLNKLLTDYTEMKKAILHVYWEEFQKDPVGLMSRVAQPASKKIDQNKLKPEMDEKGNLTTAGFACSQCGQPLFVYKLEQVSEKGKAYTNYFGRCNVAEHEKLILLAQLKPEKDSDEAVTYSLGKFGQRALDFYSIHVTKESTHPVKPLAQIAGNRYASAPVGKALSDACMGTIASFLSKYQDIIIEHQKVVKGNQKRLESLRELAGKENLEYPSVTLPPQPHTKEGVDAYNEVIARVRMWVNLNLWQKLKLSRDDAKPLLRLKGFPSFPLVERQANEVDWWDMVCNVKKLINEKKEDGKVFWQNLAGYKRQEALRPYLSSEEDRKKGKKFARYQLGDLLNHLEKKHGEDWGKVYDEAWERIDKKVEGLSKHIKLEEERRSEDAQSKAALTDWLRAKASFVIEGLKEADKDEFCRCELKLQKWYGDLRGKPFAIEAENSILDISGFSKQYNCAFIWQKDGVKKLNLYLIINYFKGGKLRFKKIKPEAFEANRFYTVINKKSGEIVPMEVNFNFDDPNLIILPLAFGKRQGREFIWNDLLSLETGSLKLANGRVIEKTLYNRRTRQDEPALFVALTFERREVLDSSNIKPMNLIGVDRGENIPAVIALTDPEGCPLSRFKDSLGNPTHILRIGESYKEKQRTIQAKKEVEQRRAGGYSRKYASKAKNLADDMVRNTARDLLYYAVTQDAMLIFENLSRGFGRQGKRTFMAERQYTRMEDWLTAKLAYEGLASKTYLSKTLAQYTSKTCSNCGFTITSADYDRVLEKLKKTATGWMTTINGKELKVEGQITYYNRYKRQNVVKDLSVELDRLSEESVNNDISSWTKGRSGEALSLLKKRFSHRPVQEKFVCLNCGFETHADEQAALNIARSWLFLRSQEYKKYQTNKTTGNTDKRAFVETWQSFYRKKLKEVWKPAV

SEQ ID NO: 46605 - protein, 978 aa, synthetic construct
  REGION 1..978: note = engineered CasX variant
QEIKRINKIRRRLVKDSNTKKAGKTGPMKTLLVRVMTPDLRERLENLRKKPENIPQPISNTSRANLNKLLTDYTEMKKAILHVYWEEFQKDPVGLMSRVAQPASKKIDQNKLKPEMDEKGNLTTAGFACSQCGQPLFVYKLEQVSEKGKAYTNYFGRCNVAEHEKLILLAQLKPEKDSDEAVTYSLGKFGQRALDFYSIHVTKESTHPVKPLAQIAGNRYASVPVGKALSDACMGTIASFLSKYQDIIIEHQKVVKGNQKRLESLRELAGKENLEYPSVTLPPQPHTKEGVDAYNEVIARVRMWVNLNLWQKLKLSRDDAKPLLRLKGFPSFPLVERQANEVDWWDMVCNVKKLINEKKEDGKVFWQNLAGYKRQEALRPYLSSEEDRKKGKKFARYQLGDLLNHLEKKHGEDWGKVYDEAWERIDKKVEGLSKHIKLEEERRSEDAQSKAALTDWLRAKASFVIEGLKEADKDEFCRCELKLQKWYGDLRGKPFAIEAENSILDISGFSKQYNCAFIWQKDGVKKLNLYLIINYFKGGKLRFKKIKPEAFEANRFYTVINKKSGEIVPMEVNFNFDDPNLIILPLAFGKRQGREFIWNDLLSLETGSLKLANGRVIEKTLYNRRTRQDEPALFVALTFERREVLDSSNIKPMNLIGVDRGENIPAVIALTDPEGCPLSRFKDSLGNPTHILRIGESYKEKQRTIQAKKEVEQRRAGGYSRKYASKAKNLADDMVRNTARDLLYYAVTQDAMLIFENLSRGFGRQGKRTFMAERQYTRMEDWLTAKLAYEGLASKTYLSKTLAQYTSKTCSNCGFTITSADYDRVLEKLKKTATGWMTTINGKELKVEGQITYYNRYKRQNVVKDLSVELDRLSEESVNNDISSWTKGRSGEALSLLKKRFSHRPVQEKFVCLNCGFETHADEQAALNIARSWLFLRSQEYKKYQTNKTTGNTDKRAFVETWQSFYRKKLKEVWKPAV

SEQ ID NO: 46606 - protein, 978 aa, synthetic construct
  REGION 1..978: note = engineered CasX variant
QEIKRINKIRRRLVKDSNTKKAGKTGPMKTLLVRVMTPDLRERLENLRKKPENIPQPISNTSRANLNKLLTDYTEMKKAILHVYWEEFQKDPVGLMSRVAQPASKKIDQNKLKPEMDEKGNLTTAGFACSQCGQPLFVYKLEQVSEKGKAYTNYFGRCNVAEHEKLIKLAQLKPEKDSDEAVTYSLGKFGQRALDFYSIHVTKESTHPVKPLAQIAGNRYASGPVGKALSDACMGTIASFLSKYQDIIIEHQKVVKGNQKRLESLRELAGKENLEYPSVTLPPQPHTKEGVDAYNEVIARVRMWVNLNLWQKLKLSRDDAKPLLRLKGFPSFPLVERQANEVDWWDMVCNVKKLINEKKEDGKVFWQNLAGYKRQEALRPYLSSEEDRKKGKKFARYQLGDLLNHLEKKHGEDWGKVYDEAWERIDKKVEGLSKHIKLEEERRSEDAQSKAALTDWLRAKASFVIEGLKEADKDEFCRCELKLQKWYGDLRGKPFAIEAENSILDISGFSKQYNCAFIWQKDGVKKLNLYLIINYFKGGKLRFKKIKPEAFEANRFYTVINKKSGEIVPMEVNFNFDDPNLIILPLAFGKRQGREFIWNDLLSLETGSLKLANGRVIEKTLYNRRTRQDEPALFVALTFERREVLDSSNIKPMNLIGVDRGENIPAVIALTDPEGCPLSRFKDSLGNPTHILRIGESYKEKQRTIQAKKEVEQRRAGGYSRKYASKAKNLADDMVRNTARDLLYYAVTQDAMLIFENLSRGFGRQGKRTFMAERQYTRMEDWLTAKLAYEGLASKTYLSKTLAQYTSKTCSNCGFTITSADYDRVLEKLKKTATGWMTTINGKELKVEGQITYYNRYKRQNVVKDLSVELDRLSEESVNNDISSWTKGRSGEALSLLKKRFSHRPVQEKFVCLNCGFETHADEQAALNIARSWLFLRSQEYKKYQTNKTTGNTDKRAFVETWQSFYRKKLKEVWKPAV

SEQ ID NO: 46607 - protein, 977 aa, synthetic construct
  REGION 1..977: note = engineered CasX variant
QEIKRINKIRRRLVKDSNTKKAGKTGPMKTLLVRVMTPDLRERLENLRKKPENIPQPISNTSRANLNKLLTDYTEMKKAILHVYWEEFQKDPVGLMSRVAQPASKKIDQNKLKPEMDEKGNLTTAGFACSQCGQPLFVYKLEQVSEKGKAYTNYFGRCNVAEHEKLILLAQLKPEKDSDEAVTYSLGKFGQRALDFYSIHVTKESTHPVKPLAQIAGNRYASPVGKALSDACMGTIASFLSKYQDIIIEHQKVVKGNQKRLESLRELAGKENLEYPSVTLPPQPHTKEGVDAYNEVIARVRMWVNLNLWQKLKLSRDDAKPLLRLKGFPSFPLVERQANEVDWWDMVCNVKKLINEKKEDGKVFWQNLAGYKRQEALRPYLSSEEDRKKGKKFARYQLGDLLNHLEKKHGEDWGKVYDEAWERIDKKVEGLSKHIKLEEERRSEDAQSKAALTDWLRAKASFVIEGLKEADKDEFCRCELKLQKWYGDLRGKPFAIEAENSILDISGFSKQYNCAFIWQKDGVKKLNLYLIINYFKGGKLRFKKIKPEAFEANRFYTVINKKSGEIVPMEVNFNFDDPNLIILPLAFGKRQGREFIWNDLLSLETGSLKLANGRVIEKTLYNRRTRQDEPALFVALTFERREVLDSSNIKPMNLIGVDRGENIPAVIALTDPEGCPLSRFKDSLGNPTHILRIGESYKEKQRTIQAKKEVEQRRAGGYSRKYASKAKNLADDMVRNTARDLLYYAVTQDAMLIFENLSRGFGRQGKRTFMAERQYTRMEDWLTAKLAYEGLASKTYLSKTLAQYTSKTCSNCGFTITSADYDRVLEKLKKTATGWMTTINGKELKVEGQITYYNRYKRQNVVKDLSVELDRLSEESVNNDISSWTKGRSGEALSLLKKRFSHRPVQEKFVCLNCGFETHADEQAALNIARSWLFLRSQEYKKYQTNKTTGNTDKRAFVETWQSFYRKKLKEVWKPAV

SEQ ID NO: 46608 - protein, 978 aa, synthetic construct
  REGION 1..978: note = engineered CasX variant
QEIKRINKIRRRLVKDSNTKKAGKTGPMKTLLVRVMTPDLRERLENLRKKPENIPQPISNTSRANLNKLLTDYTEMKKAILHVYWEEFQKDPVGLMSRVAQPASKKIDQNKLKPEMDEKGNLTTAGFACSQCGQPLFVYKLEQVSEKGKAYTNYFGRCNVAEHEKLILLAQLKPEKDSDEAVTYSLGKFGQRALDFYSIHVTKESTHPVKPLAQIAGNRYASYPVGKALSDACMGTIASFLSKYQDIIIEHQKVVKGNQKRLESLRELAGKENLEYPSVTLPPQPHTKEGVDAYNEVIARVRMWVNLNLWQKLKLSRDDAKPLLRLKGFPSFPLVERQANEVDWWDMVCNVKKLINEKKEDGKVFWQNLAGYKRQEALRPYLSSEEDRKKGKKFARYQLGDLLWHLEKKHGEDWGKVYDEAWERIDKKVEGLSKHIKLEEERRSEDAQSKAALTDWLRAKASFVIEGLKEADKDEFCRCELKLQKWYGDLRGKPFAIEAENSILDISGFSKQYNCAFIWQKDGVKKLNLYLIINYFKGGKLRFKKIKPEAFEANRFYTVINKKSGEIVPMEVNFNFDDPNLIILPLAFGKRQGREFIWNDLLSLETGSLKLANGRVIEKTLYNRRTRQDEPALFVALTFERREVLDSSNIKPMNLIGVDRGENIPAVIALTDPEGCPLSRFKDSLGNPTHILRIGESYKEKQRTIQAKKEVEQRRAGGYSRKYASKAKNLADDMVRNTARDLLYYAVTQDAMLIFENLSRGFGRQGKRTFMAERQYTRMEDWLTAKLAYEGLASKTYLSKTLAQYTSKTCSNCGFTITSADYDRVLEKLKKTATGWMTTINGKELKVEGQITYYNRYKRQNVVKDLSVELDRLSEESVNNDISSWTKGRSGEALSLLKKRFSHRPVQEKFVCLNCGFETHADEQAALNIARSWLFLRSQEYKKYQTNKTTGNTDKRAFVETWQSFYRKKLKEVWKPAV

SEQ ID NO: 46609 - protein, 978 aa, synthetic construct
  REGION 1..978: note = engineered CasX variant
QEIKRINKIRRRLVKDSNTKKAGKTGPMKTLLVRVMTPDLRERLENLRKKPENIPQPISNTSRANLNKLLTDYTEMKKAILHVYWEEFQKDPVGLMSRVAQPASKKIDQNKLKPEMDEKGNLTTAGFACSQCGQPLFVYKLEQVSEKGKAYTNYFGRCNVAEHEKLILLAQLKPEKDSDEAVTYSLGKFGQRALDFYSIHVTKESTHPVKPLAQIAGNRYASHPVGKALSDACMGTIASFLSKYQDIIIEHQKVVKGNQKRLESLRELAGKENLEYPSVTLPPQPHTKEGVDAYNEVIARVRMWVNLNLWQKLKLSRDDAKPLLRLKGFPSFPLVERQANEVDWWDMVCNVKKLINEKKEDGKVFWQNLAGYKRQEALRPYLSSEEDRKKGKKFARYQLGDLLWHLEKKHGEDWGKVYDEAWERIDKKVEGLSKHIKLEEERRSEDAQSKAALTDWLRAKASFVIEGLKEADKDEFCRCELKLQKWYGDLRGKPFAIEAENSILDISGFSKQYNCAFIWQKDGVKKLNLYLIINYFKGGKLRFKKIKPEAFEANRFYTVINKKSGEIVPMEVNFNFDDPNLIILPLAFGKRQGREFIWNDLLSLETGSLKLANGRVIEKTLYNRRTRQDEPALFVALTFERREVLDSSNIKPMNLIGVDRGENIPAVIALTDPEGCPLSRFKDSLGNPTHILRIGESYKEKQRTIQAKKEVEQRRAGGYSRKYASKAKNLADDMVRNTARDLLYYAVTQDAMLIFENLSRGFGRQGKRTFMAERQYTRMEDWLTAKLAYEGLASKTYLSKTLAQYTSKTCSNCGFTITSADYDRVLEKLKKTATGWMTTINGKELKVEGQITYYNRYKRQNVVKDLSVELDRLSEESVNNDISSWTKGRSGEALSLLKKRFSHRPVQEKFVCLNCGFETHADEQAALNIARSWLFLRSQEYKKYQTNKTTGNTDKRAFVETWQSFYRKKLKEVWKPAV

SEQ ID NO: 46610 - protein, 978 aa, synthetic construct
  REGION 1..978: note = engineered CasX variant
QEIKRINKIRRRLVKDSNTKKAGKTGPMKTLLVRVMTPDLRERLENLRKKPENIPQPISNTSRANLNKLLTDYTEMKKAILHVYWEEFQKDPVGLMSRVAQPASKKIDQNKLKPEMDEKGNLTTAGFACSQCGQPLFVYKLEQVSEKGKAYTNYFGRCNVAEHEKLILLAQLKPEKDSDEAVTYSLGKFGQRALDFYSIHVTKESTHPVKPLAQIAGNRYASSPVGKALSDACMGTIASFLSKYQDIIIEHQKVVKGNQKRLESLRELAGKENLEYPSVTLPPQPHTKEGVDAYNEVIARVRMWVNLNLWQKLKLSRDDAKPLLRLKGFPSFPLVERQANEVDWWDMVCNVKKLINEKKEDGKVFWQNLAGYKRQEALRPYLSSEEDRKKGKKFARYQLGDLLWHLEKKHGEDWGKVYDEAWERIDKKVEGLSKHIKLEEERRSEDAQSKAALTDWLRAKASFVIEGLKEADKDEFCRCELKLQKWYGDLRGKPFAIEAENSILDISGFSKQYNCAFIWQKDGVKKLNLYLIINYFKGGKLRFKKIKPEAFEANRFYTVINKKSGEIVPMEVNFNFDDPNLIILPLAFGKRQGREFIWNDLLSLETGSLKLANGRVIEKTLYNRRTRQDEPALFVALTFERREVLDSSNIKPMNLIGVDRGENIPAVIALTDPEGCPLSRFKDSLGNPTHILRIGESYKEKQRTIQAKKEVEQRRAGGYSRKYASKAKNLADDMVRNTARDLLYYAVTQDAMLIFENLSRGFGRQGKRTFMAERQYTRMEDWLTAKLAYEGLASKTYLSKTLAQYTSKTCSNCGFTITSADYDRVLEKLKKTATGWMTTINGKELKVEGQITYYNRYKRQNVVKDLSVELDRLSEESVNNDISSWTKGRSGEALSLLKKRFSHRPVQEKFVCLNCGFETHADEQAALNIARSWLFLRSQEYKKYQTNKTTGNTDKRAFVETWQSFYRKKLKEVWKPAV

SEQ ID NO: 46611 - protein, 978 aa, synthetic construct
  REGION 1..978: note = engineered CasX variant
QEIKRINKIRRRLVKDSNTKKAGKTGPMKTLLVRVMTPDLRERLENLRKKPENIPQPISNTSRANLNKLLTDYTEMKKAILHVYWEEFQKDPVGLMSRVAQPASKKIDQNKLKPEMDEKGNLTTAGFACSQCGQPLFVYKLEQVSEKGKAYTNYFGRCNVAEHEKLILLAQLKPEKDSDEAVTYSLGKFGQRALDFYSIHVTKESTHPVKPLAQIAGNRYASTPVGKALSDACMGTIASFLSKYQDIIIEHQKVVKGNQKRLESLRELAGKENLEYPSVTLPPQPHTKEGVDAYNEVIARVRMWVNLNLWQKLKLSRDDAKPLLRLKGFPSFPLVERQANEVDWWDMVCNVKKLINEKKEDGKVFWQNLAGYKRQEALRPYLSSEEDRKKGKKFARYQLGDLLWHLEKKHGEDWGKVYDEAWERIDKKVEGLSKHIKLEEERRSEDAQSKAALTDWLRAKASFVIEGLKEADKDEFCRCELKLQKWYGDLRGKPFAIEAENSILDISGFSKQYNCAFIWQKDGVKKLNLYLIINYFKGGKLRFKKIKPEAFEANRFYTVINKKSGEIVPMEVNFNFDDPNLIILPLAFGKRQGREFIWNDLLSLETGSLKLANGRVIEKTLYNRRTRQDEPALFVALTFERREVLDSSNIKPMNLIGVDRGENIPAVIALTDPEGCPLSRFKDSLGNPTHILRIGESYKEKQRTIQAKKEVEQRRAGGYSRKYASKAKNLADDMVRNTARDLLYYAVTQDAMLIFENLSRGFGRQGKRTFMAERQYTRMEDWLTAKLAYEGLASKTYLSKTLAQYTSKTCSNCGFTITSADYDRVLEKLKKTATGWMTTINGKELKVEGQITYYNRYKRQNVVKDLSVELDRLSEESVNNDISSWTKGRSGEALSLLKKRFSHRPVQEKFVCLNCGFETHADEQAALNIARSWLFLRSQEYKKYQTNKTTGNTDKRAFVETWQSFYRKKLKEVWKPAV

SEQ ID NO: 46612 - protein, 978 aa, synthetic construct
  REGION 1..978: note = engineered CasX variant
QEIKRINKIRRRLVKDSNTKKAGKTGPMKTLLVRVMTPDLRERLENLRKKPENIPQPISNTSRANLNKLLTDYTEMKKAILHVYWEEFQKDPVGLMSRVAQPASKKIDQNKLKPEMDEKGNLTTAGFACSQCGQPLFVYKLEQVSEKGKAYTNYFGRCNVAEHEKLILLAQLKPEKDSDEAVTYSLGKFGQRALDFYSIHVTKESTHPVKPLAQIAGNRYASAPVGKALSDACMGTIASFLSKYQDIIIEHQKVVKGNQKRLESLRELAGKENLEYPSVTLPPQPHTKEGVDAYNEVIARVRMWVNLNLWQKLKLSRDDAKPLLRLKGFPSFPLVERQANEVDWWDMVCNVKKLINEKKEDGKVFWQNLAGYKRQEALRPYLSSEEDRKKGKKFARYQLGDLLWHLEKKHGEDWGKVYDEAWERIDKKVEGLSKHIKLEEERRSEDAQSKAALTDWLRAKASFVIEGLKEADKDEFCRCELKLQKWYGDLRGKPFAIEAENSILDISGFSKQYNCAFIWQKDGVKKLNLYLIINYFKGGKLRFKKIKPEAFEANRFYTVINKKSGEIVPMEVNFNFDDPNLIILPLAFGKRQGREFIWNDLLSLETGSLKLANGRVIEKTLYNRRTRQDEPALFVALTFERREVLDSSNIKPMNLIGVDRGENIPAVIALTDPEGCPLSRFKDSLGNPTHILRIGESYKEKQRTIQAKKEVEQRRAGGYSRKYASKAKNLADDMVRNTARDLLYYAVTQDAMLIFENLSRGFGRQGKRTFMAERQYTRMEDWLTAKLAYEGLASKTYLSKTLAQYTSKTCSNCGFTITSADYDRVLEKLKKTATGWMTTINGKELKVEGQITYYNRYKRQNVVKDLSVELDRLSEESVNNDISSWTKGRSGEALSLLKKRFSHRPVQEKFVCLNCGFETHADEQAALNIARSWLFLRSQEYKKYQTNKTTGNTDKRAFVETWQSFYRKKLKEVWKPAV

SEQ ID NO: 46613 - protein, 978 aa, synthetic construct
  REGION 1..978: note = engineered CasX variant
QEIKRINKIRRRLVKDSNTKKAGKTGPMKTLLVRVMTPDLRERLENLRKKPENIPQPISNTSRANLNKLLTDYTEMKKAILHVYWEEFQKDPVGLMSRVAQPASKKIDQNKLKPEMDEKGNLTTAGFACSQCGQPLFVYKLEQVSEKGKAYTNYFGRCNVAEHEKLILLAQLKPEKDSDEAVTYSLGKFGQRALDFYSIHVTKESTHPVKPLAQIAGNRYASVPVGKALSDACMGTIASFLSKYQDIIIEHQKVVKGNQKRLESLRELAGKENLEYPSVTLPPQPHTKEGVDAYNEVIARVRMWVNLNLWQKLKLSRDDAKPLLRLKGFPSFPLVERQANEVDWWDMVCNVKKLINEKKEDGKVFWQNLAGYKRQEALRPYLSSEEDRKKGKKFARYQLGDLLWHLEKKHGEDWGKVYDEAWERIDKKVEGLSKHIKLEEERRSEDAQSKAALTDWLRAKASFVIEGLKEADKDEFCRCELKLQKWYGDLRGKPFAIEAENSILDISGFSKQYNCAFIWQKDGVKKLNLYLIINYFKGGKLRFKKIKPEAFEANRFYTVINKKSGEIVPMEVNFNFDDPNLIILPLAFGKRQGREFIWNDLLSLETGSLKLANGRVIEKTLYNRRTRQDEPALFVALTFERREVLDSSNIKPMNLIGVDRGENIPAVIALTDPEGCPLSRFKDSLGNPTHILRIGESYKEKQRTIQAKKEVEQRRAGGYSRKYASKAKNLADDMVRNTARDLLYYAVTQDAMLIFENLSRGFGRQGKRTFMAERQYTRMEDWLTAKLAYEGLASKTYLSKTLAQYTSKTCSNCGFTITSADYDRVLEKLKKTATGWMTTINGKELKVEGQITYYNRYKRQNVVKDLSVELDRLSEESVNNDISSWTKGRSGEALSLLKKRFSHRPVQEKFVCLNCGFETHADEQAALNIARSWLFLRSQEYKKYQTNKTTGNTDKRAFVETWQSFYRKKLKEVWKPAV

SEQ ID NO: 46614 - protein, 978 aa, synthetic construct
  REGION 1..978: note = engineered CasX variant
QEIKRINKIRRRLVKDSNTKKAGKTGPMKTLLVRVMTPDLRERLENLRKKPENIPQPISNTSRANLNKLLTDYTEMKKAILHVYWEEFQKDPVGLMSRVAQPASKKIDQNKLKPEMDEKGNLTTAGFACSQCGQPLFVYKLEQVSEKGKAYTNYFGRCNVAEHEKLIKLAQLKPEKDSDEAVTYSLGKFGQRALDFYSIHVTKESTHPVKPLAQIAGNRYASGPVGKALSDACMGTIASFLSKYQDIIIEHQKVVKGNQKRLESLRELAGKENLEYPSVTLPPQPHTKEGVDAYNEVIARVRMWVNLNLWQKLKLSRDDAKPLLRLKGFPSFPLVERQANEVDWWDMVCNVKKLINEKKEDGKVFWQNLAGYKRQEALRPYLSSEEDRKKGKKFARYQLGDLLWHLEKKHGEDWGKVYDEAWERIDKKVEGLSKHIKLEEERRSEDAQSKAALTDWLRAKASFVIEGLKEADKDEFCRCELKLQKWYGDLRGKPFAIEAENSILDISGFSKQYNCAFIWQKDGVKKLNLYLIINYFKGGKLRFKKIKPEAFEANRFYTVINKKSGEIVPMEVNFNFDDPNLIILPLAFGKRQGREFIWNDLLSLETGSLKLANGRVIEKTLYNRRTRQDEPALFVALTFERREVLDSSNIKPMNLIGVDRGENIPAVIALTDPEGCPLSRFKDSLGNPTHILRIGESYKEKQRTIQAKKEVEQRRAGGYSRKYASKAKNLADDMVRNTARDLLYYAVTQDAMLIFENLSRGFGRQGKRTFMAERQYTRMEDWLTAKLAYEGLASKTYLSKTLAQYTSKTCSNCGFTITSADYDRVLEKLKKTATGWMTTINGKELKVEGQITYYNRYKRQNVVKDLSVELDRLSEESVNNDISSWTKGRSGEALSLLKKRFSHRPVQEKFVCLNCGFETHADEQAALNIARSWLFLRSQEYKKYQTNKTTGNTDKRAFVETWQSFYRKKLKEVWKPAV

SEQ ID NO: 46615 - protein, 977 aa, synthetic construct
  REGION 1..977: note = engineered CasX variant
QEIKRINKIRRRLVKDSNTKKAGKTGPMKTLLVRVMTPDLRERLENLRKKPENIPQPISNTSRANLNKLLTDYTEMKKAILHVYWEEFQKDPVGLMSRVAQPASKKIDQNKLKPEMDEKGNLTTAGFACSQCGQPLFVYKLEQVSEKGKAYTNYFGRCNVAEHEKLILLAQLKPEKDSDEAVTYSLGKFGQRALDFYSIHVTKESTHPVKPLAQIAGNRYASPVGKALSDACMGTIASFLSKYQDIIIEHQKVVKGNQKRLESLRELAGKENLEYPSVTLPPQPHTKEGVDAYNEVIARVRMWVNLNLWQKLKLSRDDAKPLLRLKGFPSFPLVERQANEVDWWDMVCNVKKLINEKKEDGKVFWQNLAGYKRQEALRPYLSSEEDRKKGKKFARYQLGDLLWHLEKKHGEDWGKVYDEAWERIDKKVEGLSKHIKLEEERRSEDAQSKAALTDWLRAKASFVIEGLKEADKDEFCRCELKLQKWYGDLRGKPFAIEAENSILDISGFSKQYNCAFIWQKDGVKKLNLYLIINYFKGGKLRFKKIKPEAFEANRFYTVINKKSGEIVPMEVNFNFDDPNLIILPLAFGKRQGREFIWNDLLSLETGSLKLANGRVIEKTLYNRRTRQDEPALFVALTFERREVLDSSNIKPMNLIGVDRGENIPAVIALTDPEGCPLSRFKDSLGNPTHILRIGESYKEKQRTIQAKKEVEQRRAGGYSRKYASKAKNLADDMVRNTARDLLYYAVTQDAMLIFENLSRGFGRQGKRTFMAERQYTRMEDWLTAKLAYEGLASKTYLSKTLAQYTSKTCSNCGFTITSADYDRVLEKLKKTATGWMTTINGKELKVEGQITYYNRYKRQNVVKDLSVELDRLSEESVNNDISSWTKGRSGEALSLLKKRFSHRPVQEKFVCLNCGFETHADEQAALNIARSWLFLRSQEYKKYQTNKTTGNTDKRAFVETWQSFYRKKLKEVWKPAV

SEQ ID NO: 46616 - protein, 978 aa, synthetic construct
  REGION 1..978: note = engineered CasX variant
QEIKRINKIRRRLVKDSNTKKAGKTGPMKTLLVRVMTPDLRERLENLRKKPENIPQPISNTSRANLNKLLTDYTEMKKAILHVYWEEFQKDPVGLMSRVAQPASKKIDQNKLKPEMDEKGNLTTAGFACSQCGQPLFVYKLEQVSEKGKAYTNYFGRCNVAEHEKLILLAQLKPEKDSDEAVTYSLGKFGQRALDFYSIHVTKESTHPVKPLAQIAGNRYASYPVGKALSDACMGTIASFLSKYQDIIIEHQKVVKGNQKRLESLRELAGKENLEYPSVTLPPQPHTKEGVDAYNEVIARVRMWVNLNLWQKLKLSRDDAKPLLRLKGFPSFPLVERQANEVDWWDMVCNVKKLINEKKEDGKVFWQNLAGYKRQEALRPYLSSEEDRKKGKKFARYQLGDLLLHLYKKHGEDWGKVYDEAWERIDKKVEGLSKHIKLEEERRSEDAQSKAALTDWLRAKASFVIEGLKEADKDEFCRCELKLQKWYGDLRGKPFAIEAENSILDISGFSKQYNCAFIWQKDGVKKLNLYLIINYFKGGKLRFKKIKPEAFEANRFYTVINKKSGEIVPMEVNFNFDDPNLIILPLAFGKRQGREFIWNDLLSLETGSLKLANGRVIEKTLYNRRTRQDEPALFVALTFERREVLDSSNIKPMNLIGVDRGENIPAVIALTDPEGCPLSRFKDSLGNPTHILRIGESYKEKQRTIQAKKEVEQRRAGGYSRKYASKAKNLADDMVRNTARDLLYYAVTQDAMLIFENLSRGFGRQGKRTFMAERQYTRMEDWLTAKLAYEGLASKTYLSKTLAQYTSKTCSNCGFTITSADYDRVLEKLKKTATGWMTTINGKELKVEGQITYYNRYKRQNVVKDLSVELDRLSEESVNNDISSWTKGRSGEALSLLKKRFSHRPVQEKFVCLNCGFETHADEQAALNIARSWLFLRSQEYKKYQTNKTTGNTDKRAFVETWQSFYRKKLKEVWKPAV

SEQ ID NO: 46617 - protein, 978 aa, synthetic construct
  REGION 1..978: note = engineered CasX variant
QEIKRINKIRRRLVKDSNTKKAGKTGPMKTLLVRVMTPDLRERLENLRKKPENIPQPISNTSRANLNKLLTDYTEMKKAILHVYWEEFQKDPVGLMSRVAQPASKKIDQNKLKPEMDEKGNLTTAGFACSQCGQPLFVYKLEQVSEKGKAYTNYFGRCNVAEHEKLILLAQLKPEKDSDEAVTYSLGKFGQRALDFYSIHVTKESTHPVKPLAQIAGNRYASHPVGKALSDACMGTIASFLSKYQDIIIEHQKVVKGNQKRLESLRELAGKENLEYPSVTLPPQPHTKEGVDAYNEVIARVRMWVNLNLWQKLKLSRDDAKPLLRLKGFPSFPLVERQANEVDWWDMVCNVKKLINEKKEDGKVFWQNLAGYKRQEALRPYLSSEEDRKKGKKFARYQLGDLLLHLYKKHGEDWGKVYDEAWERIDKKVEGLSKHIKLEEERRSEDAQSKAALTDWLRAKASFVIEGLKEADKDEFCRCELKLQKWYGDLRGKPFAIEAENSILDISGFSKQYNCAFIWQKDGVKKLNLYLIINYFKGGKLRFKKIKPEAFEANRFYTVINKKSGEIVPMEVNFNFDDPNLIILPLAFGKRQGREFIWNDLLSLETGSLKLANGRVIEKTLYNRRTRQDEPALFVALTFERREVLDSSNIKPMNLIGVDRGENIPAVIALTDPEGCPLSRFKDSLGNPTHILRIGESYKEKQRTIQAKKEVEQRRAGGYSRKYASKAKNLADDMVRNTARDLLYYAVTQDAMLIFENLSRGFGRQGKRTFMAERQYTRMEDWLTAKLAYEGLASKTYLSKTLAQYTSKTCSNCGFTITSADYDRVLEKLKKTATGWMTTINGKELKVEGQITYYNRYKRQNVVKDLSVELDRLSEESVNNDISSWTKGRSGEALSLLKKRFSHRPVQEKFVCLNCGFETHADEQAALNIARSWLFLRSQEYKKYQTNKTTGNTDKRAFVETWQSFYRKKLKEVWKPAV

SEQ ID NO: 46618 - protein, 978 aa, synthetic construct
  REGION 1..978: note = engineered CasX variant
QEIKRINKIRRRLVKDSNTKKAGKTGPMKTLLVRVMTPDLRERLENLRKKPENIPQPISNTSRANLNKLLTDYTEMKKAILHVYWEEFQKDPVGLMSRVAQPASKKIDQNKLKPEMDEKGNLTTAGFACSQCGQPLFVYKLEQVSEKGKAYTNYFGRCNVAEHEKLILLAQLKPEKDSDEAVTYSLGKFGQRALDFYSIHVTKESTHPVKPLAQIAGNRYASSPVGKALSDACMGTIASFLSKYQDIIIEHQKVVKGNQKRLESLRELAGKENLEYPSVTLPPQPHTKEGVDAYNEVIARVRMWVNLNLWQKLKLSRDDAKPLLRLKGFPSFPLVERQANEVDWWDMVCNVKKLINEKKEDGKVFWQNLAGYKRQEALRPYLSSEEDRKKGKKFARYQLGDLLLHLYKKHGEDWGKVYDEAWERIDKKVEGLSKHIKLEEERRSEDAQSKAALTDWLRAKASFVIEGLKEADKDEFCRCELKLQKWYGDLRGKPFAIEAENSILDISGFSKQYNCAFIWQKDGVKKLNLYLIINYFKGGKLRFKKIKPEAFEANRFYTVINKKSGEIVPMEVNFNFDDPNLIILPLAFGKRQGREFIWNDLLSLETGSLKLANGRVIEKTLYNRRTRQDEPALFVALTFERREVLDSSNIKPMNLIGVDRGENIPAVIALTDPEGCPLSRFKDSLGNPTHILRIGESYKEKQRTIQAKKEVEQRRAGGYSRKYASKAKNLADDMVRNTARDLLYYAVTQDAMLIFENLSRGFGRQGKRTFMAERQYTRMEDWLTAKLAYEGLASKTYLSKTLAQYTSKTCSNCGFTITSADYDRVLEKLKKTATGWMTTINGKELKVEGQITYYNRYKRQNVVKDLSVELDRLSEESVNNDISSWTKGRSGEALSLLKKRFSHRPVQEKFVCLNCGFETHADEQAALNIARSWLFLRSQEYKKYQTNKTTGNTDKRAFVETWQSFYRKKLKEVWKPAV

SEQ ID NO: 46619 - protein, 978 aa, synthetic construct
  REGION 1..978: note = engineered CasX variant
QEIKRINKIRRRLVKDSNTKKAGKTGPMKTLLVRVMTPDLRERLENLRKKPENIPQPISNTSRANLNKLLTDYTEMKKAILHVYWEEFQKDPVGLMSRVAQPASKKIDQNKLKPEMDEKGNLTTAGFACSQCGQPLFVYKLEQVSEKGKAYTNYFGRCNVAEHEKLILLAQLKPEKDSDEAVTYSLGKFGQRALDFYSIHVTKESTHPVKPLAQIAGNRYASTPVGKALSDACMGTIASFLSKYQDIIIEHQKVVKGNQKRLESLRELAGKENLEYPSVTLPPQPHTKEGVDAYNEVIARVRMWVNLNLWQKLKLSRDDAKPLLRLKGFPSFPLVERQANEVDWWDMVCNVKKLINEKKEDGKVFWQNLAGYKRQEALRPYLSSEEDRKKGKKFARYQLGDLLLHLYKKHGEDWGKVYDEAWERIDKKVEGLSKHIKLEEERRSEDAQSKAALTDWLRAKASFVIEGLKEADKDEFCRCELKLQKWYGDLRGKPFAIEAENSILDISGFSKQYNCAFIWQKDGVKKLNLYLIINYFKGGKLRFKKIKPEAFEANRFYTVINKKSGEIVPMEVNFNFDDPNLIILPLAFGKRQGREFIWNDLLSLETGSLKLANGRVIEKTLYNRRTRQDEPALFVALTFERREVLDSSNIKPMNLIGVDRGENIPAVIALTDPEGCPLSRFKDSLGNPTHILRIGESYKEKQRTIQAKKEVEQRRAGGYSRKYASKAKNLADDMVRNTARDLLYYAVTQDAMLIFENLSRGFGRQGKRTFMAERQYTRMEDWLTAKLAYEGLASKTYLSKTLAQYTSKTCSNCGFTITSADYDRVLEKLKKTATGWMTTINGKELKVEGQITYYNRYKRQNVVKDLSVELDRLSEESVNNDISSWTKGRSGEALSLLKKRFSHRPVQEKFVCLNCGFETHADEQAALNIARSWLFLRSQEYKKYQTNKTTGNTDKRAFVETWQSFYRKKLKEVWKPAV

SEQ ID NO: 46620 - protein, 978 aa, synthetic construct
  REGION 1..978: note = engineered CasX variant
QEIKRINKIRRRLVKDSNTKKAGKTGPMKTLLVRVMTPDLRERLENLRKKPENIPQPISNTSRANLNKLLTDYTEMKKAILHVYWEEFQKDPVGLMSRVAQPASKKIDQNKLKPEMDEKGNLTTAGFACSQCGQPLFVYKLEQVSEKGKAYTNYFGRCNVAEHEKLILLAQLKPEKDSDEAVTYSLGKFGQRALDFYSIHVTKESTHPVKPLAQIAGNRYASAPVGKALSDACMGTIASFLSKYQDIIIEHQKVVKGNQKRLESLRELAGKENLEYPSVTLPPQPHTKEGVDAYNEVIARVRMWVNLNLWQKLKLSRDDAKPLLRLKGFPSFPLVERQANEVDWWDMVCNVKKLINEKKEDGKVFWQNLAGYKRQEALRPYLSSEEDRKKGKKFARYQLGDLLLHLYKKHGEDWGKVYDEAWERIDKKVEGLSKHIKLEEERRSEDAQSKAALTDWLRAKASFVIEGLKEADKDEFCRCELKLQKWYGDLRGKPFAIEAENSILDISGFSKQYNCAFIWQKDGVKKLNLYLIINYFKGGKLRFKKIKPEAFEANRFYTVINKKSGEIVPMEVNFNFDDPNLIILPLAFGKRQGREFIWNDLLSLETGSLKLANGRVIEKTLYNRRTRQDEPALFVALTFERREVLDSSNIKPMNLIGVDRGENIPAVIALTDPEGCPLSRFKDSLGNPTHILRIGESYKEKQRTIQAKKEVEQRRAGGYSRKYASKAKNLADDMVRNTARDLLYYAVTQDAMLIFENLSRGFGRQGKRTFMAERQYTRMEDWLTAKLAYEGLASKTYLSKTLAQYTSKTCSNCGFTITSADYDRVLEKLKKTATGWMTTINGKELKVEGQITYYNRYKRQNVVKDLSVELDRLSEESVNNDISSWTKGRSGEALSLLKKRFSHRPVQEKFVCLNCGFETHADEQAALNIARSWLFLRSQEYKKYQTNKTTGNTDKRAFVETWQSFYRKKLKEVWKPAV

SEQ ID NO: 46621 - protein, 978 aa, synthetic construct
  REGION 1..978: note = engineered CasX variant
QEIKRINKIRRRLVKDSNTKKAGKTGPMKTLLVRVMTPDLRERLENLRKKPENIPQPISNTSRANLNKLLTDYTEMKKAILHVYWEEFQKDPVGLMSRVAQPASKKIDQNKLKPEMDEKGNLTTAGFACSQCGQPLFVYKLEQVSEKGKAYTNYFGRCNVAEHEKLILLAQLKPEKDSDEAVTYSLGKFGQRALDFYSIHVTKESTHPVKPLAQIAGNRYASVPVGKALSDACMGTIASFLSKYQDIIIEHQKVVKGNQKRLESLRELAGKENLEYPSVTLPPQPHTKEGVDAYNEVIARVRMWVNLNLWQKLKLSRDDAKPLLRLKGFPSFPLVERQANEVDWWDMVCNVKKLINEKKEDGKVFWQNLAGYKRQEALRPYLSSEEDRKKGKKFARYQLGDLLLHLYKKHGEDWGKVYDEAWERIDKKVEGLSKHIKLEEERRSEDAQSKAALTDWLRAKASFVIEGLKEADKDEFCRCELKLQKWYGDLRGKPFAIEAENSILDISGFSKQYNCAFIWQKDGVKKLNLYLIINYFKGGKLRFKKIKPEAFEANRFYTVINKKSGEIVPMEVNFNFDDPNLIILPLAFGKRQGREFIWNDLLSLETGSLKLANGRVIEKTLYNRRTRQDEPALFVALTFERREVLDSSNIKPMNLIGVDRGENIPAVIALTDPEGCPLSRFKDSLGNPTHILRIGESYKEKQRTIQAKKEVEQRRAGGYSRKYASKAKNLADDMVRNTARDLLYYAVTQDAMLIFENLSRGFGRQGKRTFMAERQYTRMEDWLTAKLAYEGLASKTYLSKTLAQYTSKTCSNCGFTITSADYDRVLEKLKKTATGWMTTINGKELKVEGQITYYNRYKRQNVVKDLSVELDRLSEESVNNDISSWTKGRSGEALSLLKKRFSHRPVQEKFVCLNCGFETHADEQAALNIARSWLFLRSQEYKKYQTNKTTGNTDKRAFVETWQSFYRKKLKEVWKPAV

SEQ ID NO: 46622 - protein, 978 aa, synthetic construct
  REGION 1..978: note = engineered CasX variant
QEIKRINKIRRRLVKDSNTKKAGKTGPMKTLLVRVMTPDLRERLENLRKKPENIPQPISNTSRANLNKLLTDYTEMKKAILHVYWEEFQKDPVGLMSRVAQPASKKIDQNKLKPEMDEKGNLTTAGFACSQCGQPLFVYKLEQVSEKGKAYTNYFGRCNVAEHEKLIKLAQLKPEKDSDEAVTYSLGKFGQRALDFYSIHVTKESTHPVKPLAQIAGNRYASGPVGKALSDACMGTIASFLSKYQDIIIEHQKVVKGNQKRLESLRELAGKENLEYPSVTLPPQPHTKEGVDAYNEVIARVRMWVNLNLWQKLKLSRDDAKPLLRLKGFPSFPLVERQANEVDWWDMVCNVKKLINEKKEDGKVFWQNLAGYKRQEALRPYLSSEEDRKKGKKFARYQLGDLLLHLYKKHGEDWGKVYDEAWERIDKKVEGLSKHIKLEEERRSEDAQSKAALTDWLRAKASFVIEGLKEADKDEFCRCELKLQKWYGDLRGKPFAIEAENSILDISGFSKQYNCAFIWQKDGVKKLNLYLIINYFKGGKLRFKKIKPEAFEANRFYTVINKKSGEIVPMEVNFNFDDPNLIILPLAFGKRQGREFIWNDLLSLETGSLKLANGRVIEKTLYNRRTRQDEPALFVALTFERREVLDSSNIKPMNLIGVDRGENIPAVIALTDPEGCPLSRFKDSLGNPTHILRIGESYKEKQRTIQAKKEVEQRRAGGYSRKYASKAKNLADDMVRNTARDLLYYAVTQDAMLIFENLSRGFGRQGKRTFMAERQYTRMEDWLTAKLAYEGLASKTYLSKTLAQYTSKTCSNCGFTITSADYDRVLEKLKKTATGWMTTINGKELKVEGQITYYNRYKRQNVVKDLSVELDRLSEESVNNDISSWTKGRSGEALSLLKKRFSHRPVQEKFVCLNCGFETHADEQAALNIARSWLFLRSQEYKKYQTNKTTGNTDKRAFVETWQSFYRKKLKEVWKPAV

SEQ ID NO: 46623 - protein, 977 aa, synthetic construct
  REGION 1..977: note = engineered CasX variant
QEIKRINKIRRRLVKDSNTKKAGKTGPMKTLLVRVMTPDLRERLENLRKKPENIPQPISNTSRANLNKLLTDYTEMKKAILHVYWEEFQKDPVGLMSRVAQPASKKIDQNKLKPEMDEKGNLTTAGFACSQCGQPLFVYKLEQVSEKGKAYTNYFGRCNVAEHEKLILLAQLKPEKDSDEAVTYSLGKFGQRALDFYSIHVTKESTHPVKPLAQIAGNRYASPVGKALSDACMGTIASFLSKYQDIIIEHQKVVKGNQKRLESLRELAGKENLEYPSVTLPPQPHTKEGVDAYNEVIARVRMWVNLNLWQKLKLSRDDAKPLLRLKGFPSFPLVERQANEVDWWDMVCNVKKLINEKKEDGKVFWQNLAGYKRQEALRPYLSSEEDRKKGKKFARYQLGDLLLHLYKKHGEDWGKVYDEAWERIDKKVEGLSKHIKLEEERRSEDAQSKAALTDWLRAKASFVIEGLKEADKDEFCRCELKLQKWYGDLRGKPFAIEAENSILDISGFSKQYNCAFIWQKDGVKKLNLYLIINYFKGGKLRFKKIKPEAFEANRFYTVINKKSGEIVPMEVNFNFDDPNLIILPLAFGKRQGREFIWNDLLSLETGSLKLANGRVIEKTLYNRRTRQDEPALFVALTFERREVLDSSNIKPMNLIGVDRGENIPAVIALTDPEGCPLSRFKDSLGNPTHILRIGESYKEKQRTIQAKKEVEQRRAGGYSRKYASKAKNLADDMVRNTARDLLYYAVTQDAMLIFENLSRGFGRQGKRTFMAERQYTRMEDWLTAKLAYEGLASKTYLSKTLAQYTSKTCSNCGFTITSADYDRVLEKLKKTATGWMTTINGKELKVEGQITYYNRYKRQNVVKDLSVELDRLSEESVNNDISSWTKGRSGEALSLLKKRFSHRPVQEKFVCLNCGFETHADEQAALNIARSWLFLRSQEYKKYQTNKTTGNTDKRAFVETWQSFYRKKLKEVWKPAV

SEQ ID NO: 46624 - protein, 978 aa, synthetic construct
  REGION 1..978: note = engineered CasX variant
QEIKRINKIRRRLVKDSNTKKAGKTGPMKTLLVRVMTPDLRERLENLRKKPENIPQPISNTSRANLNKLLTDYTEMKKAILHVYWEEFQKDPVGLMSRVAQPASKKIDQNKLKPEMDEKGNLTTAGFACSQCGQPLFVYKLEQVSEKGKAYTNYFGRCNVAEHEKLILLAQLKPEKDSDEAVTYSLGKFGQRALDFYSIHVTKESTHPVKPLAQIAGNRYASYPVGKALSDACMGTIASFLSKYQDIIIEHQKVVKGNQKRLESLRELAGKENLEYPSVTLPPQPHTKEGVDAYNEVIARVRMWVNLNLWQKLKLSRDDAKPLLRLKGFPSFPLVERQANEVDWWDMVCNVKKLINEKKEDGKVFWQNLAGYKRQEALRPYLSSEEDRKKGKKFARYQLGDLLLHLEKKHPEDWGKVYDEAWERIDKKVEGLSKHIKLEEERRSEDAQSKAALTDWLRAKASFVIEGLKEADKDEFCRCELKLQKWYGDLRGKPFAIEAENSILDISGFSKQYNCAFIWQKDGVKKLNLYLIINYFKGGKLRFKKIKPEAFEANRFYTVINKKSGEIVPMEVNFNFDDPNLIILPLAFGKRQGREFIWNDLLSLETGSLKLANGRVIEKTLYNRRTRQDEPALFVALTFERREVLDSSNIKPMNLIGVDRGENIPAVIALTDPEGCPLSRFKDSLGNPTHILRIGESYKEKQRTIQAKKEVEQRRAGGYSRKYASKAKNLADDMVRNTARDLLYYAVTQDAMLIFENLSRGFGRQGKRTFMAERQYTRMEDWLTAKLAYEGLASKTYLSKTLAQYTSKTCSNCGFTITSADYDRVLEKLKKTATGWMTTINGKELKVEGQITYYNRYKRQNVVKDLSVELDRLSEESVNNDISSWTKGRSGEALSLLKKRFSHRPVQEKFVCLNCGFETHADEQAALNIARSWLFLRSQEYKKYQTNKTTGNTDKRAFVETWQSFYRKKLKEVWKPAV

SEQ ID NO: 46625 - protein, 978 aa, synthetic construct
  REGION 1..978: note = engineered CasX variant
QEIKRINKIRRRLVKDSNTKKAGKTGPMKTLLVRVMTPDLRERLENLRKKPENIPQPISNTSRANLNKLLTDYTEMKKAILHVYWEEFQKDPVGLMSRVAQPASKKIDQNKLKPEMDEKGNLTTAGFACSQCGQPLFVYKLEQVSEKGKAYTNYFGRCNVAEHEKLILLAQLKPEKDSDEAVTYSLGKFGQRALDFYSIHVTKESTHPVKPLAQIAGNRYASHPVGKALSDACMGTIASFLSKYQDIIIEHQKVVKGNQKRLESLRELAGKENLEYPSVTLPPQPHTKEGVDAYNEVIARVRMWVNLNLWQKLKLSRDDAKPLLRLKGFPSFPLVERQANEVDWWDMVCNVKKLINEKKEDGKVFWQNLAGYKRQEALRPYLSSEEDRKKGKKFARYQLGDLLLHLEKKHPEDWGKVYDEAWERIDKKVEGLSKHIKLEEERRSEDAQSKAALTDWLRAKASFVIEGLKEADKDEFCRCELKLQKWYGDLRGKPFAIEAENSILDISGFSKQYNCAFIWQKDGVKKLNLYLIINYFKGGKLRFKKIKPEAFEANRFYTVINKKSGEIVPMEVNFNFDDPNLIILPLAFGKRQGREFIWNDLLSLETGSLKLANGRVIEKTLYNRRTRQDEPALFVALTFERREVLDSSNIKPMNLIGVDRGENIPAVIALTDPEGCPLSRFKDSLGNPTHILRIGESYKEKQRTIQAKKEVEQRRAGGYSRKYASKAKNLADDMVRNTARDLLYYAVTQDAMLIFENLSRGFGRQGKRTFMAERQYTRMEDWLTAKLAYEGLASKTYLSKTLAQYTSKTCSNCGFTITSADYDRVLEKLKKTATGWMTTINGKELKVEGQITYYNRYKRQNVVKDLSVELDRLSEESVNNDISSWTKGRSGEALSLLKKRFSHRPVQEKFVCLNCGFETHADEQAALNIARSWLFLRSQEYKKYQTNKTTGNTDKRAFVETWQSFYRKKLKEVWKPAV

SEQ ID NO: 46626 - protein, 978 aa, synthetic construct
  REGION 1..978: note = engineered CasX variant
QEIKRINKIRRRLVKDSNTKKAGKTGPMKTLLVRVMTPDLRERLENLRKKPENIPQPISNTSRANLNKLLTDYTEMKKAILHVYWEEFQKDPVGLMSRVAQPASKKIDQNKLKPEMDEKGNLTTAGFACSQCGQPLFVYKLEQVSEKGKAYTNYFGRCNVAEHEKLILLAQLKPEKDSDEAVTYSLGKFGQRALDFYSIHVTKESTHPVKPLAQIAGNRYASSPVGKALSDACMGTIASFLSKYQDIIIEHQKVVKGNQKRLESLRELAGKENLEYPSVTLPPQPHTKEGVDAYNEVIARVRMWVNLNLWQKLKLSRDDAKPLLRLKGFPSFPLVERQANEVDWWDMVCNVKKLINEKKEDGKVFWQNLAGYKRQEALRPYLSSEEDRKKGKKFARYQLGDLLLHLEKKHPEDWGKVYDEAWERIDKKVEGLSKHIKLEEERRSEDAQSKAALTDWLRAKASFVIEGLKEADKDEFCRCELKLQKWYGDLRGKPFAIEAENSILDISGFSKQYNCAFIWQKDGVKKLNLYLIINYFKGGKLRFKKIKPEAFEANRFYTVINKKSGEIVPMEVNFNFDDPNLIILPLAFGKRQGREFIWNDLLSLETGSLKLANGRVIEKTLYNRRTRQDEPALFVALTFERREVLDSSNIKPMNLIGVDRGENIPAVIALTDPEGCPLSRFKDSLGNPTHILRIGESYKEKQRTIQAKKEVEQRRAGGYSRKYASKAKNLADDMVRNTARDLLYYAVTQDAMLIFENLSRGFGRQGKRTFMAERQYTRMEDWLTAKLAYEGLASKTYLSKTLAQYTSKTCSNCGFTITSADYDRVLEKLKKTATGWMTTINGKELKVEGQITYYNRYKRQNVVKDLSVELDRLSEESVNNDISSWTKGRSGEALSLLKKRFSHRPVQEKFVCLNCGFETHADEQAALNIARSWLFLRSQEYKKYQTNKTTGNTDKRAFVETWQSFYRKKLKEVWKPAV

SEQ ID NO: 46627 - protein, 978 aa, synthetic construct
  REGION 1..978: note = engineered CasX variant
QEIKRINKIRRRLVKDSNTKKAGKTGPMKTLLVRVMTPDLRERLENLRKKPENIPQPISNTSRANLNKLLTDYTEMKKAILHVYWEEFQKDPVGLMSRVAQPASKKIDQNKLKPEMDEKGNLTTAGFACSQCGQPLFVYKLEQVSEKGKAYTNYFGRCNVAEHEKLILLAQLKPEKDSDEAVTYSLGKFGQRALDFYSIHVTKESTHPVKPLAQIAGNRYASTPVGKALSDACMGTIASFLSKYQDIIIEHQKVVKGNQKRLESLRELAGKENLEYPSVTLPPQPHTKEGVDAYNEVIARVRMWVNLNLWQKLKLSRDDAKPLLRLKGFPSFPLVERQANEVDWWDMVCNVKKLINEKKEDGKVFWQNLAGYKRQEALRPYLSSEEDRKKGKKFARYQLGDLLLHLEKKHPEDWGKVYDEAWERIDKKVEGLSKHIKLEEERRSEDAQSKAALTDWLRAKASFVIEGLKEADKDEFCRCELKLQKWYGDLRGKPFAIEAENSILDISGFSKQYNCAFIWQKDGVKKLNLYLIINYFKGGKLRFKKIKPEAFEANRFYTVINKKSGEIVPMEVNFNFDDPNLIILPLAFGKRQGREFIWNDLLSLETGSLKLANGRVIEKTLYNRRTRQDEPALFVALTFERREVLDSSNIKPMNLIGVDRGENIPAVIALTDPEGCPLSRFKDSLGNPTHILRIGESYKEKQRTIQAKKEVEQRRAGGYSRKYASKAKNLADDMVRNTARDLLYYAVTQDAMLIFENLSRGFGRQGKRTFMAERQYTRMEDWLTAKLAYEGLASKTYLSKTLAQYTSKTCSNCGFTITSADYDRVLEKLKKTATGWMTTINGKELKVEGQITYYNRYKRQNVVKDLSVELDRLSEESVNNDISSWTKGRSGEALSLLKKRFSHRPVQEKFVCLNCGFETHADEQAALNIARSWLFLRSQEYKKYQTNKTTGNTDKRAFVETWQSFYRKKLKEVWKPAV

SEQ ID NO: 46628 - protein, 978 aa, synthetic construct
  REGION 1..978: note = engineered CasX variant
QEIKRINKIRRRLVKDSNTKKAGKTGPMKTLLVRVMTPDLRERLENLRKKPENIPQPISNTSRANLNKLLTDYTEMKKAILHVYWEEFQKDPVGLMSRVAQPASKKIDQNKLKPEMDEKGNLTTAGFACSQCGQPLFVYKLEQVSEKGKAYTNYFGRCNVAEHEKLILLAQLKPEKDSDEAVTYSLGKFGQRALDFYSIHVTKESTHPVKPLAQIAGNRYASAPVGKALSDACMGTIASFLSKYQDIIIEHQKVVKGNQKRLESLRELAGKENLEYPSVTLPPQPHTKEGVDAYNEVIARVRMWVNLNLWQKLKLSRDDAKPLLRLKGFPSFPLVERQANEVDWWDMVCNVKKLINEKKEDGKVFWQNLAGYKRQEALRPYLSSEEDRKKGKKFARYQLGDLLLHLEKKHPEDWGKVYDEAWERIDKKVEGLSKHIKLEEERRSEDAQSKAALTDWLRAKASFVIEGLKEADKDEFCRCELKLQKWYGDLRGKPFAIEAENSILDISGFSKQYNCAFIWQKDGVKKLNLYLIINYFKGGKLRFKKIKPEAFEANRFYTVINKKSGEIVPMEVNFNFDDPNLIILPLAFGKRQGREFIWNDLLSLETGSLKLANGRVIEKTLYNRRTRQDEPALFVALTFERREVLDSSNIKPMNLIGVDRGENIPAVIALTDPEGCPLSRFKDSLGNPTHILRIGESYKEKQRTIQAKKEVEQRRAGGYSRKYASKAKNLADDMVRNTARDLLYYAVTQDAMLIFENLSRGFGRQGKRTFMAERQYTRMEDWLTAKLAYEGLASKTYLSKTLAQYTSKTCSNCGFTITSADYDRVLEKLKKTATGWMTTINGKELKVEGQITYYNRYKRQNVVKDLSVELDRLSEESVNNDISSWTKGRSGEALSLLKKRFSHRPVQEKFVCLNCGFETHADEQAALNIARSWLFLRSQEYKKYQTNKTTGNTDKRAFVETWQSFYRKKLKEVWKPAV

SEQ ID NO: 46629 - protein, 978 aa, synthetic construct
  REGION 1..978: note = engineered CasX variant
QEIKRINKIRRRLVKDSNTKKAGKTGPMKTLLVRVMTPDLRERLENLRKKPENIPQPISNTSRANLNKLLTDYTEMKKAILHVYWEEFQKDPVGLMSRVAQPASKKIDQNKLKPEMDEKGNLTTAGFACSQCGQPLFVYKLEQVSEKGKAYTNYFGRCNVAEHEKLILLAQLKPEKDSDEAVTYSLGKFGQRALDFYSIHVTKESTHPVKPLAQIAGNRYASVPVGKALSDACMGTIASFLSKYQDIIIEHQKVVKGNQKRLESLRELAGKENLEYPSVTLPPQPHTKEGVDAYNEVIARVRMWVNLNLWQKLKLSRDDAKPLLRLKGFPSFPLVERQANEVDWWDMVCNVKKLINEKKEDGKVFWQNLAGYKRQEALRPYLSSEEDRKKGKKFARYQLGDLLLHLEKKHPEDWGKVYDEAWERIDKKVEGLSKHIKLEEERRSEDAQSKAALTDWLRAKASFVIEGLKEADKDEFCRCELKLQKWYGDLRGKPFAIEAENSILDISGFSKQYNCAFIWQKDGVKKLNLYLIINYFKGGKLRFKKIKPEAFEANRFYTVINKKSGEIVPMEVNFNFDDPNLIILPLAFGKRQGREFIWNDLLSLETGSLKLANGRVIEKTLYNRRTRQDEPALFVALTFERREVLDSSNIKPMNLIGVDRGENIPAVIALTDPEGCPLSRFKDSLGNPTHILRIGESYKEKQRTIQAKKEVEQRRAGGYSRKYASKAKNLADDMVRNTARDLLYYAVTQDAMLIFENLSRGFGRQGKRTFMAERQYTRMEDWLTAKLAYEGLASKTYLSKTLAQYTSKTCSNCGFTITSADYDRVLEKLKKTATGWMTTINGKELKVEGQITYYNRYKRQNVVKDLSVELDRLSEESVNNDISSWTKGRSGEALSLLKKRFSHRPVQEKFVCLNCGFETHADEQAALNIARSWLFLRSQEYKKYQTNKTTGNTDKRAFVETWQSFYRKKLKEVWKPAV

SEQ ID NO: 46630 - protein, 978 aa, synthetic construct
  REGION 1..978: note = engineered CasX variant
QEIKRINKIRRRLVKDSNTKKAGKTGPMKTLLVRVMTPDLRERLENLRKKPENIPQPISNTSRANLNKLLTDYTEMKKAILHVYWEEFQKDPVGLMSRVAQPASKKIDQNKLKPEMDEKGNLTTAGFACSQCGQPLFVYKLEQVSEKGKAYTNYFGRCNVAEHEKLIKLAQLKPEKDSDEAVTYSLGKFGQRALDFYSIHVTKESTHPVKPLAQIAGNRYASGPVGKALSDACMGTIASFLSKYQDIIIEHQKVVKGNQKRLESLRELAGKENLEYPSVTLPPQPHTKEGVDAYNEVIARVRMWVNLNLWQKLKLSRDDAKPLLRLKGFPSFPLVERQANEVDWWDMVCNVKKLINEKKEDGKVFWQNLAGYKRQEALRPYLSSEEDRKKGKKFARYQLGDLLLHLEKKHPEDWGKVYDEAWERIDKKVEGLSKHIKLEEERRSEDAQSKAALTDWLRAKASFVIEGLKEADKDEFCRCELKLQKWYGDLRGKPFAIEAENSILDISGFSKQYNCAFIWQKDGVKKLNLYLIINYFKGGKLRFKKIKPEAFEANRFYTVINKKSGEIVPMEVNFNFDDPNLIILPLAFGKRQGREFIWNDLLSLETGSLKLANGRVIEKTLYNRRTRQDEPALFVALTFERREVLDSSNIKPMNLIGVDRGENIPAVIALTDPEGCPLSRFKDSLGNPTHILRIGESYKEKQRTIQAKKEVEQRRAGGYSRKYASKAKNLADDMVRNTARDLLYYAVTQDAMLIFENLSRGFGRQGKRTFMAERQYTRMEDWLTAKLAYEGLASKTYLSKTLAQYTSKTCSNCGFTITSADYDRVLEKLKKTATGWMTTINGKELKVEGQITYYNRYKRQNVVKDLSVELDRLSEESVNNDISSWTKGRSGEALSLLKKRFSHRPVQEKFVCLNCGFETHADEQAALNIARSWLFLRSQEYKKYQTNKTTGNTDKRAFVETWQSFYRKKLKEVWKPAV

SEQ ID NO: 46631 - protein, 977 aa, synthetic construct
  REGION 1..977: note = engineered CasX variant
QEIKRINKIRRRLVKDSNTKKAGKTGPMKTLLVRVMTPDLRERLENLRKKPENIPQPISNTSRANLNKLLTDYTEMKKAILHVYWEEFQKDPVGLMSRVAQPASKKIDQNKLKPEMDEKGNLTTAGFACSQCGQPLFVYKLEQVSEKGKAYTNYFGRCNVAEHEKLILLAQLKPEKDSDEAVTYSLGKFGQRALDFYSIHVTKESTHPVKPLAQIAGNRYASPVGKALSDACMGTIASFLSKYQDIIIEHQKVVKGNQKRLESLRELAGKENLEYPSVTLPPQPHTKEGVDAYNEVIARVRMWVNLNLWQKLKLSRDDAKPLLRLKGFPSFPLVERQANEVDWWDMVCNVKKLINEKKEDGKVFWQNLAGYKRQEALRPYLSSEEDRKKGKKFARYQLGDLLLHLEKKHPEDWGKVYDEAWERIDKKVEGLSKHIKLEEERRSEDAQSKAALTDWLRAKASFVIEGLKEADKDEFCRCELKLQKWYGDLRGKPFAIEAENSILDISGFSKQYNCAFIWQKDGVKKLNLYLIINYFKGGKLRFKKIKPEAFEANRFYTVINKKSGEIVPMEVNFNFDDPNLIILPLAFGKRQGREFIWNDLLSLETGSLKLANGRVIEKTLYNRRTRQDEPALFVALTFERREVLDSSNIKPMNLIGVDRGENIPAVIALTDPEGCPLSRFKDSLGNPTHILRIGESYKEKQRTIQAKKEVEQRRAGGYSRKYASKAKNLADDMVRNTARDLLYYAVTQDAMLIFENLSRGFGRQGKRTFMAERQYTRMEDWLTAKLAYEGLASKTYLSKTLAQYTSKTCSNCGFTITSADYDRVLEKLKKTATGWMTTINGKELKVEGQITYYNRYKRQNVVKDLSVELDRLSEESVNNDISSWTKGRSGEALSLLKKRFSHRPVQEKFVCLNCGFETHADEQAALNIARSWLFLRSQEYKKYQTNKTTGNTDKRAFVETWQSFYRKKLKEVWKPAV

SEQ ID NO: 46632 - protein, 979 aa, synthetic construct
  REGION 1..979: note = engineered CasX variant
QEIKRINKIRRRLVKDSNTKKAGKTGPMKTLLVRVMTPDLRERLENLRKKPENIPQPISNTSRANLNKLLTDYTEMKKAILHVYWEEFQKDPVGLMSRVAQPASKKIDQNKLKPEMDEKGNLTTAGFACSQCGQPLFVYKLEQVSEKGKAYTNYFGRCNVAEHEKLILLAQLKPEKDSDEAVTYSLGKFGQRALDFYSIHVTKESTHPVKPLAQIAGNRYASYPVGKALSDACMGTIASFLSKYQDIIIEHQKVVKGNQKRLESLRELAGKENLEYPSVTLPPQPHTKEGVDAYNEVIARVRMWVNLNLWQKLKLSRDDAKPLLRLKGFPSFPLVERQANEVDWWDMVCNVKKLINEKKEDGKVFWQNLAGYKRQEALRPYLSSEEDRKKGKKFARYQLGDLLLHLEKKHGERDWGKVYDEAWERIDKKVEGLSKHIKLEEERRSEDAQSKAALTDWLRAKASFVIEGLKEADKDEFCRCELKLQKWYGDLRGKPFAIEAENSILDISGFSKQYNCAFIWQKDGVKKLNLYLIINYFKGGKLRFKKIKPEAFEANRFYTVINKKSGEIVPMEVNFNFDDPNLIILPLAFGKRQGREFIWNDLLSLETGSLKLANGRVIEKTLYNRRTRQDEPALFVALTFERREVLDSSNIKPMNLIGVDRGENIPAVIALTDPEGCPLSRFKDSLGNPTHILRIGESYKEKQRTIQAKKEVEQRRAGGYSRKYASKAKNLADDMVRNTARDLLYYAVTQDAMLIFENLSRGFGRQGKRTFMAERQYTRMEDWLTAKLAYEGLASKTYLSKTLAQYTSKTCSNCGFTITSADYDRVLEKLKKTATGWMTTINGKELKVEGQITYYNRYKRQNVVKDLSVELDRLSEESVNNDISSWTKGRSGEALSLLKKRFSHRPVQEKFVCLNCGFETHADEQAALNIARSWLFLRSQEYKKYQTNKTTGNTDKRAFVETWQSFYRKKLKEVWKPAV

SEQ ID NO: 46633 - protein, 979 aa, synthetic construct
  REGION 1..979: note = engineered CasX variant
QEIKRINKIRRRLVKDSNTKKAGKTGPMKTLLVRVMTPDLRERLENLRKKPENIPQPISNTSRANLNKLLTDYTEMKKAILHVYWEEFQKDPVGLMSRVAQPASKKIDQNKLKPEMDEKGNLTTAGFACSQCGQPLFVYKLEQVSEKGKAYTNYFGRCNVAEHEKLILLAQLKPEKDSDEAVTYSLGKFGQRALDFYSIHVTKESTHPVKPLAQIAGNRYASHPVGKALSDACMGTIASFLSKYQDIIIEHQKVVKGNQKRLESLRELAGKENLEYPSVTLPPQPHTKEGVDAYNEVIARVRMWVNLNLWQKLKLSRDDAKPLLRLKGFPSFPLVERQANEVDWWDMVCNVKKLINEKKEDGKVFWQNLAGYKRQEALRPYLSSEEDRKKGKKFARYQLGDLLLHLEKKHGERDWGKVYDEAWERIDKKVEGLSKHIKLEEERRSEDAQSKAALTDWLRAKASFVIEGLKEADKDEFCRCELKLQKWYGDLRGKPFAIEAENSILDISGFSKQYNCAFIWQKDGVKKLNLYLIINYFKGGKLRFKKIKPEAFEANRFYTVINKKSGEIVPMEVNFNFDDPNLIILPLAFGKRQGREFIWNDLLSLETGSLKLANGRVIEKTLYNRRTRQDEPALFVALTFERREVLDSSNIKPMNLIGVDRGENIPAVIALTDPEGCPLSRFKDSLGNPTHILRIGESYKEKQRTIQAKKEVEQRRAGGYSRKYASKAKNLADDMVRNTARDLLYYAVTQDAMLIFENLSRGFGRQGKRTFMAERQYTRMEDWLTAKLAYEGLASKTYLSKTLAQYTSKTCSNCGFTITSADYDRVLEKLKKTATGWMTTINGKELKVEGQITYYNRYKRQNVVKDLSVELDRLSEESVNNDISSWTKGRSGEALSLLKKRFSHRPVQEKFVCLNCGFETHADEQAALNIARSWLFLRSQEYKKYQTNKTTGNTDKRAFVETWQSFYRKKLKEVWKPAV

SEQ ID NO: 46634 - protein, 979 aa, synthetic construct
  REGION 1..979: note = engineered CasX variant
QEIKRINKIRRRLVKDSNTKKAGKTGPMKTLLVRVMTPDLRERLENLRKKPENIPQPISNTSRANLNKLLTDYTEMKKAILHVYWEEFQKDPVGLMSRVAQPASKKIDQNKLKPEMDEKGNLTTAGFACSQCGQPLFVYKLEQVSEKGKAYTNYFGRCNVAEHEKLILLAQLKPEKDSDEAVTYSLGKFGQRALDFYSIHVTKESTHPVKPLAQIAGNRYASSPVGKALSDACMGTIASFLSKYQDIIIEHQKVVKGNQKRLESLRELAGKENLEYPSVTLPPQPHTKEGVDAYNEVIARVRMWVNLNLWQKLKLSRDDAKPLLRLKGFPSFPLVERQANEVDWWDMVCNVKKLINEKKEDGKVFWQNLAGYKRQEALRPYLSSEEDRKKGKKFARYQLGDLLLHLEKKHGERDWGKVYDEAWERIDKKVEGLSKHIKLEEERRSEDAQSKAALTDWLRAKASFVIEGLKEADKDEFCRCELKLQKWYGDLRGKPFAIEAENSILDISGFSKQYNCAFIWQKDGVKKLNLYLIINYFKGGKLRFKKIKPEAFEANRFYTVINKKSGEIVPMEVNFNFDDPNLIILPLAFGKRQGREFIWNDLLSLETGSLKLANGRVIEKTLYNRRTRQDEPALFVALTFERREVLDSSNIKPMNLIGVDRGENIPAVIALTDPEGCPLSRFKDSLGNPTHILRIGESYKEKQRTIQAKKEVEQRRAGGYSRKYASKAKNLADDMVRNTARDLLYYAVTQDAMLIFENLSRGFGRQGKRTFMAERQYTRMEDWLTAKLAYEGLASKTYLSKTLAQYTSKTCSNCGFTITSADYDRVLEKLKKTATGWMTTINGKELKVEGQITYYNRYKRQNVVKDLSVELDRLSEESVNNDISSWTKGRSGEALSLLKKRFSHRPVQEKFVCLNCGFETHADEQAALNIARSWLFLRSQEYKKYQTNKTTGNTDKRAFVETWQSFYRKKLKEVWKPAV

SEQ ID NO: 46635 - protein, 979 aa, synthetic construct
  REGION 1..979: note = engineered CasX variant
QEIKRINKIRRRLVKDSNTKKAGKTGPMKTLLVRVMTPDLRERLENLRKKPENIPQPISNTSRANLNKLLTDYTEMKKAILHVYWEEFQKDPVGLMSRVAQPASKKIDQNKLKPEMDEKGNLTTAGFACSQCGQPLFVYKLEQVSEKGKAYTNYFGRCNVAEHEKLILLAQLKPEKDSDEAVTYSLGKFGQRALDFYSIHVTKESTHPVKPLAQIAGNRYASTPVGKALSDACMGTIASFLSKYQDIIIEHQKVVKGNQKRLESLRELAGKENLEYPSVTLPPQPHTKEGVDAYNEVIARVRMWVNLNLWQKLKLSRDDAKPLLRLKGFPSFPLVERQANEVDWWDMVCNVKKLINEKKEDGKVFWQNLAGYKRQEALRPYLSSEEDRKKGKKFARYQLGDLLLHLEKKHGERDWGKVYDEAWERIDKKVEGLSKHIKLEEERRSEDAQSKAALTDWLRAKASFVIEGLKEADKDEFCRCELKLQKWYGDLRGKPFAIEAENSILDISGFSKQYNCAFIWQKDGVKKLNLYLIINYFKGGKLRFKKIKPEAFEANRFYTVINKKSGEIVPMEVNFNFDDPNLIILPLAFGKRQGREFIWNDLLSLETGSLKLANGRVIEKTLYNRRTRQDEPALFVALTFERREVLDSSNIKPMNLIGVDRGENIPAVIALTDPEGCPLSRFKDSLGNPTHILRIGESYKEKQRTIQAKKEVEQRRAGGYSRKYASKAKNLADDMVRNTARDLLYYAVTQDAMLIFENLSRGFGRQGKRTFMAERQYTRMEDWLTAKLAYEGLASKTYLSKTLAQYTSKTCSNCGFTITSADYDRVLEKLKKTATGWMTTINGKELKVEGQITYYNRYKRQNVVKDLSVELDRLSEESVNNDISSWTKGRSGEALSLLKKRFSHRPVQEKFVCLNCGFETHADEQAALNIARSWLFLRSQEYKKYQTNKTTGNTDKRAFVETWQSFYRKKLKEVWKPAV

SEQ ID NO: 46636 - protein, 979 aa, synthetic construct
  REGION 1..979: note = engineered CasX variant
QEIKRINKIRRRLVKDSNTKKAGKTGPMKTLLVRVMTPDLRERLENLRKKPENIPQPISNTSRANLNKLLTDYTEMKKAILHVYWEEFQKDPVGLMSRVAQPASKKIDQNKLKPEMDEKGNLTTAGFACSQCGQPLFVYKLEQVSEKGKAYTNYFGRCNVAEHEKLILLAQLKPEKDSDEAVTYSLGKFGQRALDFYSIHVTKESTHPVKPLAQIAGNRYASAPVGKALSDACMGTIASFLSKYQDIIIEHQKVVKGNQKRLESLRELAGKENLEYPSVTLPPQPHTKEGVDAYNEVIARVRMWVNLNLWQKLKLSRDDAKPLLRLKGFPSFPLVERQANEVDWWDMVCNVKKLINEKKEDGKVFWQNLAGYKRQEALRPYLSSEEDRKKGKKFARYQLGDLLLHLEKKHGERDWGKVYDEAWERIDKKVEGLSKHIKLEEERRSEDAQSKAALTDWLRAKASFVIEGLKEADKDEFCRCELKLQKWYGDLRGKPFAIEAENSILDISGFSKQYNCAFIWQKDGVKKLNLYLIINYFKGGKLRFKKIKPEAFEANRFYTVINKKSGEIVPMEVNFNFDDPNLIILPLAFGKRQGREFIWNDLLSLETGSLKLANGRVIEKTLYNRRTRQDEPALFVALTFERREVLDSSNIKPMNLIGVDRGENIPAVIALTDPEGCPLSRFKDSLGNPTHILRIGESYKEKQRTIQAKKEVEQRRAGGYSRKYASKAKNLADDMVRNTARDLLYYAVTQDAMLIFENLSRGFGRQGKRTFMAERQYTRMEDWLTAKLAYEGLASKTYLSKTLAQYTSKTCSNCGFTITSADYDRVLEKLKKTATGWMTTINGKELKVEGQITYYNRYKRQNVVKDLSVELDRLSEESVNNDISSWTKGRSGEALSLLKKRFSHRPVQEKFVCLNCGFETHADEQAALNIARSWLFLRSQEYKKYQTNKTTGNTDKRAFVETWQSFYRKKLKEVWKPAV

SEQ ID NO: 46637 - protein, 979 aa, synthetic construct
  REGION 1..979: note = engineered CasX variant
QEIKRINKIRRRLVKDSNTKKAGKTGPMKTLLVRVMTPDLRERLENLRKKPENIPQPISNTSRANLNKLLTDYTEMKKAILHVYWEEFQKDPVGLMSRVAQPASKKIDQNKLKPEMDEKGNLTTAGFACSQCGQPLFVYKLEQVSEKGKAYTNYFGRCNVAEHEKLILLAQLKPEKDSDEAVTYSLGKFGQRALDFYSIHVTKESTHPVKPLAQIAGNRYASVPVGKALSDACMGTIASFLSKYQDIIIEHQKVVKGNQKRLESLRELAGKENLEYPSVTLPPQPHTKEGVDAYNEVIARVRMWVNLNLWQKLKLSRDDAKPLLRLKGFPSFPLVERQANEVDWWDMVCNVKKLINEKKEDGKVFWQNLAGYKRQEALRPYLSSEEDRKKGKKFARYQLGDLLLHLEKKHGERDWGKVYDEAWERIDKKVEGLSKHIKLEEERRSEDAQSKAALTDWLRAKASFVIEGLKEADKDEFCRCELKLQKWYGDLRGKPFAIEAENSILDISGFSKQYNCAFIWQKDGVKKLNLYLIINYFKGGKLRFKKIKPEAFEANRFYTVINKKSGEIVPMEVNFNFDDPNLIILPLAFGKRQGREFIWNDLLSLETGSLKLANGRVIEKTLYNRRTRQDEPALFVALTFERREVLDSSNIKPMNLIGVDRGENIPAVIALTDPEGCPLSRFKDSLGNPTHILRIGESYKEKQRTIQAKKEVEQRRAGGYSRKYASKAKNLADDMVRNTARDLLYYAVTQDAMLIFENLSRGFGRQGKRTFMAERQYTRMEDWLTAKLAYEGLASKTYLSKTLAQYTSKTCSNCGFTITSADYDRVLEKLKKTATGWMTTINGKELKVEGQITYYNRYKRQNVVKDLSVELDRLSEESVNNDISSWTKGRSGEALSLLKKRFSHRPVQEKFVCLNCGFETHADEQAALNIARSWLFLRSQEYKKYQTNKTTGNTDKRAFVETWQSFYRKKLKEVWKPAV

SEQ ID NO: 46638 - protein, 979 aa, synthetic construct
  REGION 1..979: note = engineered CasX variant
QEIKRINKIRRRLVKDSNTKKAGKTGPMKTLLVRVMTPDLRERLENLRKKPENIPQPISNTSRANLNKLLTDYTEMKKAILHVYWEEFQKDPVGLMSRVAQPASKKIDQNKLKPEMDEKGNLTTAGFACSQCGQPLFVYKLEQVSEKGKAYTNYFGRCNVAEHEKLIKLAQLKPEKDSDEAVTYSLGKFGQRALDFYSIHVTKESTHPVKPLAQIAGNRYASGPVGKALSDACMGTIASFLSKYQDIIIEHQKVVKGNQKRLESLRELAGKENLEYPSVTLPPQPHTKEGVDAYNEVIARVRMWVNLNLWQKLKLSRDDAKPLLRLKGFPSFPLVERQANEVDWWDMVCNVKKLINEKKEDGKVFWQNLAGYKRQEALRPYLSSEEDRKKGKKFARYQLGDLLLHLEKKHGERDWGKVYDEAWERIDKKVEGLSKHIKLEEERRSEDAQSKAALTDWLRAKASFVIEGLKEADKDEFCRCELKLQKWYGDLRGKPFAIEAENSILDISGFSKQYNCAFIWQKDGVKKLNLYLIINYFKGGKLRFKKIKPEAFEANRFYTVINKKSGEIVPMEVNFNFDDPNLIILPLAFGKRQGREFIWNDLLSLETGSLKLANGRVIEKTLYNRRTRQDEPALFVALTFERREVLDSSNIKPMNLIGVDRGENIPAVIALTDPEGCPLSRFKDSLGNPTHILRIGESYKEKQRTIQAKKEVEQRRAGGYSRKYASKAKNLADDMVRNTARDLLYYAVTQDAMLIFENLSRGFGRQGKRTFMAERQYTRMEDWLTAKLAYEGLASKTYLSKTLAQYTSKTCSNCGFTITSADYDRVLEKLKKTATGWMTTINGKELKVEGQITYYNRYKRQNVVKDLSVELDRLSEESVNNDISSWTKGRSGEALSLLKKRFSHRPVQEKFVCLNCGFETHADEQAALNIARSWLFLRSQEYKKYQTNKTTGNTDKRAFVETWQSFYRKKLKEVWKPAV

SEQ ID NO: 46639 - protein, 978 aa, synthetic construct
  REGION 1..978: note = engineered CasX variant
QEIKRINKIRRRLVKDSNTKKAGKTGPMKTLLVRVMTPDLRERLENLRKKPENIPQPISNTSRANLNKLLTDYTEMKKAILHVYWEEFQKDPVGLMSRVAQPASKKIDQNKLKPEMDEKGNLTTAGFACSQCGQPLFVYKLEQVSEKGKAYTNYFGRCNVAEHEKLILLAQLKPEKDSDEAVTYSLGKFGQRALDFYSIHVTKESTHPVKPLAQIAGNRYASPVGKALSDACMGTIASFLSKYQDIIIEHQKVVKGNQKRLESLRELAGKENLEYPSVTLPPQPHTKEGVDAYNEVIARVRMWVNLNLWQKLKLSRDDAKPLLRLKGFPSFPLVERQANEVDWWDMVCNVKKLINEKKEDGKVFWQNLAGYKRQEALRPYLSSEEDRKKGKKFARYQLGDLLLHLEKKHGERDWGKVYDEAWERIDKKVEGLSKHIKLEEERRSEDAQSKAALTDWLRAKASFVIEGLKEADKDEFCRCELKLQKWYGDLRGKPFAIEAENSILDISGFSKQYNCAFIWQKDGVKKLNLYLIINYFKGGKLRFKKIKPEAFEANRFYTVINKKSGEIVPMEVNFNFDDPNLIILPLAFGKRQGREFIWNDLLSLETGSLKLANGRVIEKTLYNRRTRQDEPALFVALTFERREVLDSSNIKPMNLIGVDRGENIPAVIALTDPEGCPLSRFKDSLGNPTHILRIGESYKEKQRTIQAKKEVEQRRAGGYSRKYASKAKNLADDMVRNTARDLLYYAVTQDAMLIFENLSRGFGRQGKRTFMAERQYTRMEDWLTAKLAYEGLASKTYLSKTLAQYTSKTCSNCGFTITSADYDRVLEKLKKTATGWMTTINGKELKVEGQITYYNRYKRQNVVKDLSVELDRLSEESVNNDISSWTKGRSGEALSLLKKRFSHRPVQEKFVCLNCGFETHADEQAALNIARSWLFLRSQEYKKYQTNKTTGNTDKRAFVETWQSFYRKKLKEVWKPAV

SEQ ID NO: 46640 - protein, 979 aa, synthetic construct
  REGION 1..979: note = engineered CasX variant
QEIKRINKIRRRLVKDSNTKKAGKTGPMKTLLVRVMTPDLRERLENLRKKPENIPQPISNTSRANLNKLLTDYTEMKKAILHVYWEEFQKDPVGLMSRVAQPASKKIDQNKLKPEMDEKGNLTTAGFACSQCGQPLFVYKLEQVSEKGKAYTNYFGRCNVAEHEKLILLAQLKPEKDSDEAVTYSLGKFGQRALDFYSIHVTKESTHPVKPLAQIAGNRYASYPVGKALSDACMGTIASFLSKYQDIIIEHQKVVKGNQKRLESLRELAGKENLEYPSVTLPPQPHTKEGVDAYNEVIARVRMWVNLNLWQKLKLSRDDAKPLLRLKGFPSFPLVERQANEVDWWDMVCNVKKLINEKKEDGKVFWQNLAGYKRQEALRPYLSSEEDRKKGKKFARYQLGDLLLHLEKKHGEYDWGKVYDEAWERIDKKVEGLSKHIKLEEERRSEDAQSKAALTDWLRAKASFVIEGLKEADKDEFCRCELKLQKWYGDLRGKPFAIEAENSILDISGFSKQYNCAFIWQKDGVKKLNLYLIINYFKGGKLRFKKIKPEAFEANRFYTVINKKSGEIVPMEVNFNFDDPNLIILPLAFGKRQGREFIWNDLLSLETGSLKLANGRVIEKTLYNRRTRQDEPALFVALTFERREVLDSSNIKPMNLIGVDRGENIPAVIALTDPEGCPLSRFKDSLGNPTHILRIGESYKEKQRTIQAKKEVEQRRAGGYSRKYASKAKNLADDMVRNTARDLLYYAVTQDAMLIFENLSRGFGRQGKRTFMAERQYTRMEDWLTAKLAYEGLASKTYLSKTLAQYTSKTCSNCGFTITSADYDRVLEKLKKTATGWMTTINGKELKVEGQITYYNRYKRQNVVKDLSVELDRLSEESVNNDISSWTKGRSGEALSLLKKRFSHRPVQEKFVCLNCGFETHADEQAALNIARSWLFLRSQEYKKYQTNKTTGNTDKRAFVETWQSFYRKKLKEVWKPAV

SEQ ID NO: 46641 - protein, 979 aa, synthetic construct
  REGION 1..979: note = engineered CasX variant
QEIKRINKIRRRLVKDSNTKKAGKTGPMKTLLVRVMTPDLRERLENLRKKPENIPQPISNTSRANLNKLLTDYTEMKKAILHVYWEEFQKDPVGLMSRVAQPASKKIDQNKLKPEMDEKGNLTTAGFACSQCGQPLFVYKLEQVSEKGKAYTNYFGRCNVAEHEKLILLAQLKPEKDSDEAVTYSLGKFGQRALDFYSIHVTKESTHPVKPLAQIAGNRYASHPVGKALSDACMGTIASFLSKYQDIIIEHQKVVKGNQKRLESLRELAGKENLEYPSVTLPPQPHTKEGVDAYNEVIARVRMWVNLNLWQKLKLSRDDAKPLLRLKGFPSFPLVERQANEVDWWDMVCNVKKLINEKKEDGKVFWQNLAGYKRQEALRPYLSSEEDRKKGKKFARYQLGDLLLHLEKKHGEYDWGKVYDEAWERIDKKVEGLSKHIKLEEERRSEDAQSKAALTDWLRAKASFVIEGLKEADKDEFCRCELKLQKWYGDLRGKPFAIEAENSILDISGFSKQYNCAFIWQKDGVKKLNLYLIINYFKGGKLRFKKIKPEAFEANRFYTVINKKSGEIVPMEVNFNFDDPNLIILPLAFGKRQGREFIWNDLLSLETGSLKLANGRVIEKTLYNRRTRQDEPALFVALTFERREVLDSSNIKPMNLIGVDRGENIPAVIALTDPEGCPLSRFKDSLGNPTHILRIGESYKEKQRTIQAKKEVEQRRAGGYSRKYASKAKNLADDMVRNTARDLLYYAVTQDAMLIFENLSRGFGRQGKRTFMAERQYTRMEDWLTAKLAYEGLASKTYLSKTLAQYTSKTCSNCGFTITSADYDRVLEKLKKTATGWMTTINGKELKVEGQITYYNRYKRQNVVKDLSVELDRLSEESVNNDISSWTKGRSGEALSLLKKRFSHRPVQEKFVCLNCGFETHADEQAALNIARSWLFLRSQEYKKYQTNKTTGNTDKRAFVETWQSFYRKKLKEVWKPAV

SEQ ID NO: 46642 - protein, 979 aa, synthetic construct
  REGION 1..979: note = engineered CasX variant
QEIKRINKIRRRLVKDSNTKKAGKTGPMKTLLVRVMTPDLRERLENLRKKPENIPQPISNTSRANLNKLLTDYTEMKKAILHVYWEEFQKDPVGLMSRVAQPASKKIDQNKLKPEMDEKGNLTTAGFACSQCGQPLFVYKLEQVSEKGKAYTNYFGRCNVAEHEKLILLAQLKPEKDSDEAVTYSLGKFGQRALDFYSIHVTKESTHPVKPLAQIAGNRYASSPVGKALSDACMGTIASFLSKYQDIIIEHQKVVKGNQKRLESLRELAGKENLEYPSVTLPPQPHTKEGVDAYNEVIARVRMWVNLNLWQKLKLSRDDAKPLLRLKGFPSFPLVERQANEVDWWDMVCNVKKLINEKKEDGKVFWQNLAGYKRQEALRPYLSSEEDRKKGKKFARYQLGDLLLHLEKKHGEYDWGKVYDEAWERIDKKVEGLSKHIKLEEERRSEDAQSKAALTDWLRAKASFVIEGLKEADKDEFCRCELKLQKWYGDLRGKPFAIEAENSILDISGFSKQYNCAFIWQKDGVKKLNLYLIINYFKGGKLRFKKIKPEAFEANRFYTVINKKSGEIVPMEVNFNFDDPNLIILPLAFGKRQGREFIWNDLLSLETGSLKLANGRVIEKTLYNRRTRQDEPALFVALTFERREVLDSSNIKPMNLIGVDRGENIPAVIALTDPEGCPLSRFKDSLGNPTHILRIGESYKEKQRTIQAKKEVEQRRAGGYSRKYASKAKNLADDMVRNTARDLLYYAVTQDAMLIFENLSRGFGRQGKRTFMAERQYTRMEDWLTAKLAYEGLASKTYLSKTLAQYTSKTCSNCGFTITSADYDRVLEKLKKTATGWMTTINGKELKVEGQITYYNRYKRQNVVKDLSVELDRLSEESVNNDISSWTKGRSGEALSLLKKRFSHRPVQEKFVCLNCGFETHADEQAALNIARSWLFLRSQEYKKYQTNKTTGNTDKRAFVETWQSFYRKKLKEVWKPAV

SEQ ID NO: 46643 - protein, 979 aa, synthetic construct
  REGION 1..979: note = engineered CasX variant
QEIKRINKIRRRLVKDSNTKKAGKTGPMKTLLVRVMTPDLRERLENLRKKPENIPQPISNTSRANLNKLLTDYTEMKKAILHVYWEEFQKDPVGLMSRVAQPASKKIDQNKLKPEMDEKGNLTTAGFACSQCGQPLFVYKLEQVSEKGKAYTNYFGRCNVAEHEKLILLAQLKPEKDSDEAVTYSLGKFGQRALDFYSIHVTKESTHPVKPLAQIAGNRYASTPVGKALSDACMGTIASFLSKYQDIIIEHQKVVKGNQKRLESLRELAGKENLEYPSVTLPPQPHTKEGVDAYNEVIARVRMWVNLNLWQKLKLSRDDAKPLLRLKGFPSFPLVERQANEVDWWDMVCNVKKLINEKKEDGKVFWQNLAGYKRQEALRPYLSSEEDRKKGKKFARYQLGDLLLHLEKKHGEYDWGKVYDEAWERIDKKVEGLSKHIKLEEERRSEDAQSKAALTDWLRAKASFVIEGLKEADKDEFCRCELKLQKWYGDLRGKPFAIEAENSILDISGFSKQYNCAFIWQKDGVKKLNLYLIINYFKGGKLRFKKIKPEAFEANRFYTVINKKSGEIVPMEVNFNFDDPNLIILPLAFGKRQGREFIWNDLLSLETGSLKLANGRVIEKTLYNRRTRQDEPALFVALTFERREVLDSSNIKPMNLIGVDRGENIPAVIALTDPEGCPLSRFKDSLGNPTHILRIGESYKEKQRTIQAKKEVEQRRAGGYSRKYASKAKNLADDMVRNTARDLLYYAVTQDAMLIFENLSRGFGRQGKRTFMAERQYTRMEDWLTAKLAYEGLASKTYLSKTLAQYTSKTCSNCGFTITSADYDRVLEKLKKTATGWMTTINGKELKVEGQITYYNRYKRQNVVKDLSVELDRLSEESVNNDISSWTKGRSGEALSLLKKRFSHRPVQEKFVCLNCGFETHADEQAALNIARSWLFLRSQEYKKYQTNKTTGNTDKRAFVETWQSFYRKKLKEVWKPAV

SEQ ID NO: 46644 - protein, 979 aa, synthetic construct
  REGION 1..979: note = engineered CasX variant
QEIKRINKIRRRLVKDSNTKKAGKTGPMKTLLVRVMTPDLRERLENLRKKPENIPQPISNTSRANLNKLLTDYTEMKKAILHVYWEEFQKDPVGLMSRVAQPASKKIDQNKLKPEMDEKGNLTTAGFACSQCGQPLFVYKLEQVSEKGKAYTNYFGRCNVAEHEKLILLAQLKPEKDSDEAVTYSLGKFGQRALDFYSIHVTKESTHPVKPLAQIAGNRYASAPVGKALSDACMGTIASFLSKYQDIIIEHQKVVKGNQKRLESLRELAGKENLEYPSVTLPPQPHTKEGVDAYNEVIARVRMWVNLNLWQKLKLSRDDAKPLLRLKGFPSFPLVERQANEVDWWDMVCNVKKLINEKKEDGKVFWQNLAGYKRQEALRPYLSSEEDRKKGKKFARYQLGDLLLHLEKKHGEYDWGKVYDEAWERIDKKVEGLSKHIKLEEERRSEDAQSKAALTDWLRAKASFVIEGLKEADKDEFCRCELKLQKWYGDLRGKPFAIEAENSILDISGFSKQYNCAFIWQKDGVKKLNLYLIINYFKGGKLRFKKIKPEAFEANRFYTVINKKSGEIVPMEVNFNFDDPNLIILPLAFGKRQGREFIWNDLLSLETGSLKLANGRVIEKTLYNRRTRQDEPALFVALTFERREVLDSSNIKPMNLIGVDRGENIPAVIALTDPEGCPLSRFKDSLGNPTHILRIGESYKEKQRTIQAKKEVEQRRAGGYSRKYASKAKNLADDMVRNTARDLLYYAVTQDAMLIFENLSRGFGRQGKRTFMAERQYTRMEDWLTAKLAYEGLASKTYLSKTLAQYTSKTCSNCGFTITSADYDRVLEKLKKTATGWMTTINGKELKVEGQITYYNRYKRQNVVKDLSVELDRLSEESVNNDISSWTKGRSGEALSLLKKRFSHRPVQEKFVCLNCGFETHADEQAALNIARSWLFLRSQEYKKYQTNKTTGNTDKRAFVETWQSFYRKKLKEVWKPAV

SEQ ID NO: 46645 - protein, 979 aa, synthetic construct
  REGION 1..979: note = engineered CasX variant
QEIKRINKIRRRLVKDSNTKKAGKTGPMKTLLVRVMTPDLRERLENLRKKPENIPQPISNTSRANLNKLLTDYTEMKKAILHVYWEEFQKDPVGLMSRVAQPASKKIDQNKLKPEMDEKGNLTTAGFACSQCGQPLFVYKLEQVSEKGKAYTNYFGRCNVAEHEKLILLAQLKPEKDSDEAVTYSLGKFGQRALDFYSIHVTKESTHPVKPLAQIAGNRYASVPVGKALSDACMGTIASFLSKYQDIIIEHQKVVKGNQKRLESLRELAGKENLEYPSVTLPPQPHTKEGVDAYNEVIARVRMWVNLNLWQKLKLSRDDAKPLLRLKGFPSFPLVERQANEVDWWDMVCNVKKLINEKKEDGKVFWQNLAGYKRQEALRPYLSSEEDRKKGKKFARYQLGDLLLHLEKKHGEYDWGKVYDEAWERIDKKVEGLSKHIKLEEERRSEDAQSKAALTDWLRAKASFVIEGLKEADKDEFCRCELKLQKWYGDLRGKPFAIEAENSILDISGFSKQYNCAFIWQKDGVKKLNLYLIINYFKGGKLRFKKIKPEAFEANRFYTVINKKSGEIVPMEVNFNFDDPNLIILPLAFGKRQGREFIWNDLLSLETGSLKLANGRVIEKTLYNRRTRQDEPALFVALTFERREVLDSSNIKPMNLIGVDRGENIPAVIALTDPEGCPLSRFKDSLGNPTHILRIGESYKEKQRTIQAKKEVEQRRAGGYSRKYASKAKNLADDMVRNTARDLLYYAVTQDAMLIFENLSRGFGRQGKRTFMAERQYTRMEDWLTAKLAYEGLASKTYLSKTLAQYTSKTCSNCGFTITSADYDRVLEKLKKTATGWMTTINGKELKVEGQITYYNRYKRQNVVKDLSVELDRLSEESVNNDISSWTKGRSGEALSLLKKRFSHRPVQEKFVCLNCGFETHADEQAALNIARSWLFLRSQEYKKYQTNKTTGNTDKRAFVETWQSFYRKKLKEVWKPAV

SEQ ID NO: 46646 - protein, 979 aa, synthetic construct
  REGION 1..979: note = engineered CasX variant
QEIKRINKIRRRLVKDSNTKKAGKTGPMKTLLVRVMTPDLRERLENLRKKPENIPQPISNTSRANLNKLLTDYTEMKKAILHVYWEEFQKDPVGLMSRVAQPASKKIDQNKLKPEMDEKGNLTTAGFACSQCGQPLFVYKLEQVSEKGKAYTNYFGRCNVAEHEKLIKLAQLKPEKDSDEAVTYSLGKFGQRALDFYSIHVTKESTHPVKPLAQIAGNRYASGPVGKALSDACMGTIASFLSKYQDIIIEHQKVVKGNQKRLESLRELAGKENLEYPSVTLPPQPHTKEGVDAYNEVIARVRMWVNLNLWQKLKLSRDDAKPLLRLKGFPSFPLVERQANEVDWWDMVCNVKKLINEKKEDGKVFWQNLAGYKRQEALRPYLSSEEDRKKGKKFARYQLGDLLLHLEKKHGEYDWGKVYDEAWERIDKKVEGLSKHIKLEEERRSEDAQSKAALTDWLRAKASFVIEGLKEADKDEFCRCELKLQKWYGDLRGKPFAIEAENSILDISGFSKQYNCAFIWQKDGVKKLNLYLIINYFKGGKLRFKKIKPEAFEANRFYTVINKKSGEIVPMEVNFNFDDPNLIILPLAFGKRQGREFIWNDLLSLETGSLKLANGRVIEKTLYNRRTRQDEPALFVALTFERREVLDSSNIKPMNLIGVDRGENIPAVIALTDPEGCPLSRFKDSLGNPTHILRIGESYKEKQRTIQAKKEVEQRRAGGYSRKYASKAKNLADDMVRNTARDLLYYAVTQDAMLIFENLSRGFGRQGKRTFMAERQYTRMEDWLTAKLAYEGLASKTYLSKTLAQYTSKTCSNCGFTITSADYDRVLEKLKKTATGWMTTINGKELKVEGQITYYNRYKRQNVVKDLSVELDRLSEESVNNDISSWTKGRSGEALSLLKKRFSHRPVQEKFVCLNCGFETHADEQAALNIARSWLFLRSQEYKKYQTNKTTGNTDKRAFVETWQSFYRKKLKEVWKPAV

SEQ ID NO: 46647 - protein, 978 aa, synthetic construct
  REGION 1..978: note = engineered CasX variant
QEIKRINKIRRRLVKDSNTKKAGKTGPMKTLLVRVMTPDLRERLENLRKKPENIPQPISNTSRANLNKLLTDYTEMKKAILHVYWEEFQKDPVGLMSRVAQPASKKIDQNKLKPEMDEKGNLTTAGFACSQCGQPLFVYKLEQVSEKGKAYTNYFGRCNVAEHEKLILLAQLKPEKDSDEAVTYSLGKFGQRALDFYSIHVTKESTHPVKPLAQIAGNRYASPVGKALSDACMGTIASFLSKYQDIIIEHQKVVKGNQKRLESLRELAGKENLEYPSVTLPPQPHTKEGVDAYNEVIARVRMWVNLNLWQKLKLSRDDAKPLLRLKGFPSFPLVERQANEVDWWDMVCNVKKLINEKKEDGKVFWQNLAGYKRQEALRPYLSSEEDRKKGKKFARYQLGDLLLHLEKKHGEYDWGKVYDEAWERIDKKVEGLSKHIKLEEERRSEDAQSKAALTDWLRAKASFVIEGLKEADKDEFCRCELKLQKWYGDLRGKPFAIEAENSILDISGFSKQYNCAFIWQKDGVKKLNLYLIINYFKGGKLRFKKIKPEAFEANRFYTVINKKSGEIVPMEVNFNFDDPNLIILPLAFGKRQGREFIWNDLLSLETGSLKLANGRVIEKTLYNRRTRQDEPALFVALTFERREVLDSSNIKPMNLIGVDRGENIPAVIALTDPEGCPLSRFKDSLGNPTHILRIGESYKEKQRTIQAKKEVEQRRAGGYSRKYASKAKNLADDMVRNTARDLLYYAVTQDAMLIFENLSRGFGRQGKRTFMAERQYTRMEDWLTAKLAYEGLASKTYLSKTLAQYTSKTCSNCGFTITSADYDRVLEKLKKTATGWMTTINGKELKVEGQITYYNRYKRQNVVKDLSVELDRLSEESVNNDISSWTKGRSGEALSLLKKRFSHRPVQEKFVCLNCGFETHADEQAALNIARSWLFLRSQEYKKYQTNKTTGNTDKRAFVETWQSFYRKKLKEVWKPAV

SEQ ID NO: 46648 - protein, 978 aa, synthetic construct
  REGION 1..978: note = engineered CasX variant
QEIKRINKIRRRLVKDSNTKKAGKTGPMKTLLVRVMTPDLRERLENLRKKPENIPQPISNTSRANLNKLLTDYTEMKKAILHVYWEEFQKDPVGLMSRVAQPASKKIDQNKLKPEMDEKGNLTTAGFACSQCGQPLFVYKLEQVSEKGKAYTNYFGRCNVAEHEKLILLAQLKPEKDSDEAVTYSLGKFGQRALDFYSIHVTKESTHPVKPLAQIAGNRYASYPVGKALSDACMGTIASFLSKYQDIIIEHQKVVKGNQKRLESLRELAGKENLEYPSVTLPPQPHTKEGVDAYNEVIARVRMWVNLNLWQKLKLSRDDAKPLLRLKGFPSFPLVERQANEVDWWDMVCNVKKLINEKKEDGKVFWQNLAGYKRQEALRPYLSSEEDRKKGKKFARYQLGDLLLHLEKKHGEDWGDVYDEAWERIDKKVEGLSKHIKLEEERRSEDAQSKAALTDWLRAKASFVIEGLKEADKDEFCRCELKLQKWYGDLRGKPFAIEAENSILDISGFSKQYNCAFIWQKDGVKKLNLYLIINYFKGGKLRFKKIKPEAFEANRFYTVINKKSGEIVPMEVNFNFDDPNLIILPLAFGKRQGREFIWNDLLSLETGSLKLANGRVIEKTLYNRRTRQDEPALFVALTFERREVLDSSNIKPMNLIGVDRGENIPAVIALTDPEGCPLSRFKDSLGNPTHILRIGESYKEKQRTIQAKKEVEQRRAGGYSRKYASKAKNLADDMVRNTARDLLYYAVTQDAMLIFENLSRGFGRQGKRTFMAERQYTRMEDWLTAKLAYEGLASKTYLSKTLAQYTSKTCSNCGFTITSADYDRVLEKLKKTATGWMTTINGKELKVEGQITYYNRYKRQNVVKDLSVELDRLSEESVNNDISSWTKGRSGEALSLLKKRFSHRPVQEKFVCLNCGFETHADEQAALNIARSWLFLRSQEYKKYQTNKTTGNTDKRAFVETWQSFYRKKLKEVWKPAV

SEQ ID NO: 46649 - protein, 978 aa, synthetic construct
  REGION 1..978: note = engineered CasX variant
QEIKRINKIRRRLVKDSNTKKAGKTGPMKTLLVRVMTPDLRERLENLRKKPENIPQPISNTSRANLNKLLTDYTEMKKAILHVYWEEFQKDPVGLMSRVAQPASKKIDQNKLKPEMDEKGNLTTAGFACSQCGQPLFVYKLEQVSEKGKAYTNYFGRCNVAEHEKLILLAQLKPEKDSDEAVTYSLGKFGQRALDFYSIHVTKESTHPVKPLAQIAGNRYASHPVGKALSDACMGTIASFLSKYQDIIIEHQKVVKGNQKRLESLRELAGKENLEYPSVTLPPQPHTKEGVDAYNEVIARVRMWVNLNLWQKLKLSRDDAKPLLRLKGFPSFPLVERQANEVDWWDMVCNVKKLINEKKEDGKVFWQNLAGYKRQEALRPYLSSEEDRKKGKKFARYQLGDLLLHLEKKHGEDWGDVYDEAWERIDKKVEGLSKHIKLEEERRSEDAQSKAALTDWLRAKASFVIEGLKEADKDEFCRCELKLQKWYGDLRGKPFAIEAENSILDISGFSKQYNCAFIWQKDGVKKLNLYLIINYFKGGKLRFKKIKPEAFEANRFYTVINKKSGEIVPMEVNFNFDDPNLIILPLAFGKRQGREFIWNDLLSLETGSLKLANGRVIEKTLYNRRTRQDEPALFVALTFERREVLDSSNIKPMNLIGVDRGENIPAVIALTDPEGCPLSRFKDSLGNPTHILRIGESYKEKQRTIQAKKEVEQRRAGGYSRKYASKAKNLADDMVRNTARDLLYYAVTQDAMLIFENLSRGFGRQGKRTFMAERQYTRMEDWLTAKLAYEGLASKTYLSKTLAQYTSKTCSNCGFTITSADYDRVLEKLKKTATGWMTTINGKELKVEGQITYYNRYKRQNVVKDLSVELDRLSEESVNNDISSWTKGRSGEALSLLKKRFSHRPVQEKFVCLNCGFETHADEQAALNIARSWLFLRSQEYKKYQTNKTTGNTDKRAFVETWQSFYRKKLKEVWKPAV

SEQ ID NO: 46650 - protein, 978 aa, synthetic construct
  REGION 1..978: note = engineered CasX variant
QEIKRINKIRRRLVKDSNTKKAGKTGPMKTLLVRVMTPDLRERLENLRKKPENIPQPISNTSRANLNKLLTDYTEMKKAILHVYWEEFQKDPVGLMSRVAQPASKKIDQNKLKPEMDEKGNLTTAGFACSQCGQPLFVYKLEQVSEKGKAYTNYFGRCNVAEHEKLILLAQLKPEKDSDEAVTYSLGKFGQRALDFYSIHVTKESTHPVKPLAQIAGNRYASSPVGKALSDACMGTIASFLSKYQDIIIEHQKVVKGNQKRLESLRELAGKENLEYPSVTLPPQPHTKEGVDAYNEVIARVRMWVNLNLWQKLKLSRDDAKPLLRLKGFPSFPLVERQANEVDWWDMVCNVKKLINEKKEDGKVFWQNLAGYKRQEALRPYLSSEEDRKKGKKFARYQLGDLLLHLEKKHGEDWGDVYDEAWERIDKKVEGLSKHIKLEEERRSEDAQSKAALTDWLRAKASFVIEGLKEADKDEFCRCELKLQKWYGDLRGKPFAIEAENSILDISGFSKQYNCAFIWQKDGVKKLNLYLIINYFKGGKLRFKKIKPEAFEANRFYTVINKKSGEIVPMEVNFNFDDPNLIILPLAFGKRQGREFIWNDLLSLETGSLKLANGRVIEKTLYNRRTRQDEPALFVALTFERREVLDSSNIKPMNLIGVDRGENIPAVIALTDPEGCPLSRFKDSLGNPTHILRIGESYKEKQRTIQAKKEVEQRRAGGYSRKYASKAKNLADDMVRNTARDLLYYAVTQDAMLIFENLSRGFGRQGKRTFMAERQYTRMEDWLTAKLAYEGLASKTYLSKTLAQYTSKTCSNCGFTITSADYDRVLEKLKKTATGWMTTINGKELKVEGQITYYNRYKRQNVVKDLSVELDRLSEESVNNDISSWTKGRSGEALSLLKKRFSHRPVQEKFVCLNCGFETHADEQAALNIARSWLFLRSQEYKKYQTNKTTGNTDKRAFVETWQSFYRKKLKEVWKPAV

SEQ ID NO: 46651 - protein, 978 aa, synthetic construct
  REGION 1..978: note = engineered CasX variant
QEIKRINKIRRRLVKDSNTKKAGKTGPMKTLLVRVMTPDLRERLENLRKKPENIPQPISNTSRANLNKLLTDYTEMKKAILHVYWEEFQKDPVGLMSRVAQPASKKIDQNKLKPEMDEKGNLTTAGFACSQCGQPLFVYKLEQVSEKGKAYTNYFGRCNVAEHEKLILLAQLKPEKDSDEAVTYSLGKFGQRALDFYSIHVTKESTHPVKPLAQIAGNRYASTPVGKALSDACMGTIASFLSKYQDIIIEHQKVVKGNQKRLESLRELAGKENLEYPSVTLPPQPHTKEGVDAYNEVIARVRMWVNLNLWQKLKLSRDDAKPLLRLKGFPSFPLVERQANEVDWWDMVCNVKKLINEKKEDGKVFWQNLAGYKRQEALRPYLSSEEDRKKGKKFARYQLGDLLLHLEKKHGEDWGDVYDEAWERIDKKVEGLSKHIKLEEERRSEDAQSKAALTDWLRAKASFVIEGLKEADKDEFCRCELKLQKWYGDLRGKPFAIEAENSILDISGFSKQYNCAFIWQKDGVKKLNLYLIINYFKGGKLRFKKIKPEAFEANRFYTVINKKSGEIVPMEVNFNFDDPNLIILPLAFGKRQGREFIWNDLLSLETGSLKLANGRVIEKTLYNRRTRQDEPALFVALTFERREVLDSSNIKPMNLIGVDRGENIPAVIALTDPEGCPLSRFKDSLGNPTHILRIGESYKEKQRTIQAKKEVEQRRAGGYSRKYASKAKNLADDMVRNTARDLLYYAVTQDAMLIFENLSRGFGRQGKRTFMAERQYTRMEDWLTAKLAYEGLASKTYLSKTLAQYTSKTCSNCGFTITSADYDRVLEKLKKTATGWMTTINGKELKVEGQITYYNRYKRQNVVKDLSVELDRLSEESVNNDISSWTKGRSGEALSLLKKRFSHRPVQEKFVCLNCGFETHADEQAALNIARSWLFLRSQEYKKYQTNKTTGNTDKRAFVETWQSFYRKKLKEVWKPAV

SEQ ID NO: 46652 - protein, 978 aa, synthetic construct
  REGION 1..978: note = engineered CasX variant
QEIKRINKIRRRLVKDSNTKKAGKTGPMKTLLVRVMTPDLRERLENLRKKPENIPQPISNTSRANLNKLLTDYTEMKKAILHVYWEEFQKDPVGLMSRVAQPASKKIDQNKLKPEMDEKGNLTTAGFACSQCGQPLFVYKLEQVSEKGKAYTNYFGRCNVAEHEKLILLAQLKPEKDSDEAVTYSLGKFGQRALDFYSIHVTKESTHPVKPLAQIAGNRYASAPVGKALSDACMGTIASFLSKYQDIIIEHQKVVKGNQKRLESLRELAGKENLEYPSVTLPPQPHTKEGVDAYNEVIARVRMWVNLNLWQKLKLSRDDAKPLLRLKGFPSFPLVERQANEVDWWDMVCNVKKLINEKKEDGKVFWQNLAGYKRQEALRPYLSSEEDRKKGKKFARYQLGDLLLHLEKKHGEDWGDVYDEAWERIDKKVEGLSKHIKLEEERRSEDAQSKAALTDWLRAKASFVIEGLKEADKDEFCRCELKLQKWYGDLRGKPFAIEAENSILDISGFSKQYNCAFIWQKDGVKKLNLYLIINYFKGGKLRFKKIKPEAFEANRFYTVINKKSGEIVPMEVNFNFDDPNLIILPLAFGKRQGREFIWNDLLSLETGSLKLANGRVIEKTLYNRRTRQDEPALFVALTFERREVLDSSNIKPMNLIGVDRGENIPAVIALTDPEGCPLSRFKDSLGNPTHILRIGESYKEKQRTIQAKKEVEQRRAGGYSRKYASKAKNLADDMVRNTARDLLYYAVTQDAMLIFENLSRGFGRQGKRTFMAERQYTRMEDWLTAKLAYEGLASKTYLSKTLAQYTSKTCSNCGFTITSADYDRVLEKLKKTATGWMTTINGKELKVEGQITYYNRYKRQNVVKDLSVELDRLSEESVNNDISSWTKGRSGEALSLLKKRFSHRPVQEKFVCLNCGFETHADEQAALNIARSWLFLRSQEYKKYQTNKTTGNTDKRAFVETWQSFYRKKLKEVWKPAV

SEQ ID NO: 46653 - protein, 978 aa, synthetic construct
  REGION 1..978: note = engineered CasX variant
QEIKRINKIRRRLVKDSNTKKAGKTGPMKTLLVRVMTPDLRERLENLRKKPENIPQPISNTSRANLNKLLTDYTEMKKAILHVYWEEFQKDPVGLMSRVAQPASKKIDQNKLKPEMDEKGNLTTAGFACSQCGQPLFVYKLEQVSEKGKAYTNYFGRCNVAEHEKLILLAQLKPEKDSDEAVTYSLGKFGQRALDFYSIHVTKESTHPVKPLAQIAGNRYASVPVGKALSDACMGTIASFLSKYQDIIIEHQKVVKGNQKRLESLRELAGKENLEYPSVTLPPQPHTKEGVDAYNEVIARVRMWVNLNLWQKLKLSRDDAKPLLRLKGFPSFPLVERQANEVDWWDMVCNVKKLINEKKEDGKVFWQNLAGYKRQEALRPYLSSEEDRKKGKKFARYQLGDLLLHLEKKHGEDWGDVYDEAWERIDKKVEGLSKHIKLEEERRSEDAQSKAALTDWLRAKASFVIEGLKEADKDEFCRCELKLQKWYGDLRGKPFAIEAENSILDISGFSKQYNCAFIWQKDGVKKLNLYLIINYFKGGKLRFKKIKPEAFEANRFYTVINKKSGEIVPMEVNFNFDDPNLIILPLAFGKRQGREFIWNDLLSLETGSLKLANGRVIEKTLYNRRTRQDEPALFVALTFERREVLDSSNIKPMNLIGVDRGENIPAVIALTDPEGCPLSRFKDSLGNPTHILRIGESYKEKQRTIQAKKEVEQRRAGGYSRKYASKAKNLADDMVRNTARDLLYYAVTQDAMLIFENLSRGFGRQGKRTFMAERQYTRMEDWLTAKLAYEGLASKTYLSKTLAQYTSKTCSNCGFTITSADYDRVLEKLKKTATGWMTTINGKELKVEGQITYYNRYKRQNVVKDLSVELDRLSEESVNNDISSWTKGRSGEALSLLKKRFSHRPVQEKFVCLNCGFETHADEQAALNIARSWLFLRSQEYKKYQTNKTTGNTDKRAFVETWQSFYRKKLKEVWKPAV

SEQ ID NO: 46654 - protein, 978 aa, synthetic construct
  REGION 1..978: note = engineered CasX variant
QEIKRINKIRRRLVKDSNTKKAGKTGPMKTLLVRVMTPDLRERLENLRKKPENIPQPISNTSRANLNKLLTDYTEMKKAILHVYWEEFQKDPVGLMSRVAQPASKKIDQNKLKPEMDEKGNLTTAGFACSQCGQPLFVYKLEQVSEKGKAYTNYFGRCNVAEHEKLIKLAQLKPEKDSDEAVTYSLGKFGQRALDFYSIHVTKESTHPVKPLAQIAGNRYASGPVGKALSDACMGTIASFLSKYQDIIIEHQKVVKGNQKRLESLRELAGKENLEYPSVTLPPQPHTKEGVDAYNEVIARVRMWVNLNLWQKLKLSRDDAKPLLRLKGFPSFPLVERQANEVDWWDMVCNVKKLINEKKEDGKVFWQNLAGYKRQEALRPYLSSEEDRKKGKKFARYQLGDLLLHLEKKHGEDWGDVYDEAWERIDKKVEGLSKHIKLEEERRSEDAQSKAALTDWLRAKASFVIEGLKEADKDEFCRCELKLQKWYGDLRGKPFAIEAENSILDISGFSKQYNCAFIWQKDGVKKLNLYLIINYFKGGKLRFKKIKPEAFEANRFYTVINKKSGEIVPMEVNFNFDDPNLIILPLAFGKRQGREFIWNDLLSLETGSLKLANGRVIEKTLYNRRTRQDEPALFVALTFERREVLDSSNIKPMNLIGVDRGENIPAVIALTDPEGCPLSRFKDSLGNPTHILRIGESYKEKQRTIQAKKEVEQRRAGGYSRKYASKAKNLADDMVRNTARDLLYYAVTQDAMLIFENLSRGFGRQGKRTFMAERQYTRMEDWLTAKLAYEGLASKTYLSKTLAQYTSKTCSNCGFTITSADYDRVLEKLKKTATGWMTTINGKELKVEGQITYYNRYKRQNVVKDLSVELDRLSEESVNNDISSWTKGRSGEALSLLKKRFSHRPVQEKFVCLNCGFETHADEQAALNIARSWLFLRSQEYKKYQTNKTTGNTDKRAFVETWQSFYRKKLKEVWKPAV

SEQ ID NO: 46655 - protein, 977 aa, synthetic construct
  REGION 1..977: note = engineered CasX variant
QEIKRINKIRRRLVKDSNTKKAGKTGPMKTLLVRVMTPDLRERLENLRKKPENIPQPISNTSRANLNKLLTDYTEMKKAILHVYWEEFQKDPVGLMSRVAQPASKKIDQNKLKPEMDEKGNLTTAGFACSQCGQPLFVYKLEQVSEKGKAYTNYFGRCNVAEHEKLILLAQLKPEKDSDEAVTYSLGKFGQRALDFYSIHVTKESTHPVKPLAQIAGNRYASPVGKALSDACMGTIASFLSKYQDIIIEHQKVVKGNQKRLESLRELAGKENLEYPSVTLPPQPHTKEGVDAYNEVIARVRMWVNLNLWQKLKLSRDDAKPLLRLKGFPSFPLVERQANEVDWWDMVCNVKKLINEKKEDGKVFWQNLAGYKRQEALRPYLSSEEDRKKGKKFARYQLGDLLLHLEKKHGEDWGDVYDEAWERIDKKVEGLSKHIKLEEERRSEDAQSKAALTDWLRAKASFVIEGLKEADKDEFCRCELKLQKWYGDLRGKPFAIEAENSILDISGFSKQYNCAFIWQKDGVKKLNLYLIINYFKGGKLRFKKIKPEAFEANRFYTVINKKSGEIVPMEVNFNFDDPNLIILPLAFGKRQGREFIWNDLLSLETGSLKLANGRVIEKTLYNRRTRQDEPALFVALTFERREVLDSSNIKPMNLIGVDRGENIPAVIALTDPEGCPLSRFKDSLGNPTHILRIGESYKEKQRTIQAKKEVEQRRAGGYSRKYASKAKNLADDMVRNTARDLLYYAVTQDAMLIFENLSRGFGRQGKRTFMAERQYTRMEDWLTAKLAYEGLASKTYLSKTLAQYTSKTCSNCGFTITSADYDRVLEKLKKTATGWMTTINGKELKVEGQITYYNRYKRQNVVKDLSVELDRLSEESVNNDISSWTKGRSGEALSLLKKRFSHRPVQEKFVCLNCGFETHADEQAALNIARSWLFLRSQEYKKYQTNKTTGNTDKRAFVETWQSFYRKKLKEVWKPAV

SEQ ID NO: 46656 - protein, 978 aa, synthetic construct
  REGION 1..978: note = engineered CasX variant
QEIKRINKIRRRLVKDSNTKKAGKTGPMKTLLVRVMTPDLRERLENLRKKPENIPQPISNTSRANLNKLLTDYTEMKKAILHVYWEEFQKDPVGLMSRVAQPASKKIDQNKLKPEMDEKGNLTTAGFACSQCGQPLFVYKLEQVSEKGKAYTNYFGRCNVAEHEKLILLAQLKPEKDSDEAVTYSLGKFGQRALDFYSIHVTKESTHPVKPLAQIAGNRYASYPVGKALSDACMGTIASFLSKYQDIIIEHQKVVKGNQKRLESLRELAGKENLEYPSVTLPPQPHTKEGVDAYNEVIARVRMWVNLNLWQKLKLSRDDAKPLLRLKGFPSFPLVERQANEVDWWDMVCNVKKLINEKKEDGKVFWQNLAGYKRQEALRPYLSSEEDRKKGKKFARYQLGDLLLHLEKKHGEDWGKVYGEAWERIDKKVEGLSKHIKLEEERRSEDAQSKAALTDWLRAKASFVIEGLKEADKDEFCRCELKLQKWYGDLRGKPFAIEAENSILDISGFSKQYNCAFIWQKDGVKKLNLYLIINYFKGGKLRFKKIKPEAFEANRFYTVINKKSGEIVPMEVNFNFDDPNLIILPLAFGKRQGREFIWNDLLSLETGSLKLANGRVIEKTLYNRRTRQDEPALFVALTFERREVLDSSNIKPMNLIGVDRGENIPAVIALTDPEGCPLSRFKDSLGNPTHILRIGESYKEKQRTIQAKKEVEQRRAGGYSRKYASKAKNLADDMVRNTARDLLYYAVTQDAMLIFENLSRGFGRQGKRTFMAERQYTRMEDWLTAKLAYEGLASKTYLSKTLAQYTSKTCSNCGFTITSADYDRVLEKLKKTATGWMTTINGKELKVEGQITYYNRYKRQNVVKDLSVELDRLSEESVNNDISSWTKGRSGEALSLLKKRFSHRPVQEKFVCLNCGFETHADEQAALNIARSWLFLRSQEYKKYQTNKTTGNTDKRAFVETWQSFYRKKLKEVWKPAV

SEQ ID NO: 46657 - protein, 978 aa, synthetic construct
  REGION 1..978: note = engineered CasX variant
QEIKRINKIRRRLVKDSNTKKAGKTGPMKTLLVRVMTPDLRERLENLRKKPENIPQPISNTSRANLNKLLTDYTEMKKAILHVYWEEFQKDPVGLMSRVAQPASKKIDQNKLKPEMDEKGNLTTAGFACSQCGQPLFVYKLEQVSEKGKAYTNYFGRCNVAEHEKLILLAQLKPEKDSDEAVTYSLGKFGQRALDFYSIHVTKESTHPVKPLAQIAGNRYASHPVGKALSDACMGTIASFLSKYQDIIIEHQKVVKGNQKRLESLRELAGKENLEYPSVTLPPQPHTKEGVDAYNEVIARVRMWVNLNLWQKLKLSRDDAKPLLRLKGFPSFPLVERQANEVDWWDMVCNVKKLINEKKEDGKVFWQNLAGYKRQEALRPYLSSEEDRKKGKKFARYQLGDLLLHLEKKHGEDWGKVYGEAWERIDKKVEGLSKHIKLEEERRSEDAQSKAALTDWLRAKASFVIEGLKEADKDEFCRCELKLQKWYGDLRGKPFAIEAENSILDISGFSKQYNCAFIWQKDGVKKLNLYLIINYFKGGKLRFKKIKPEAFEANRFYTVINKKSGEIVPMEVNFNFDDPNLIILPLAFGKRQGREFIWNDLLSLETGSLKLANGRVIEKTLYNRRTRQDEPALFVALTFERREVLDSSNIKPMNLIGVDRGENIPAVIALTDPEGCPLSRFKDSLGNPTHILRIGESYKEKQRTIQAKKEVEQRRAGGYSRKYASKAKNLADDMVRNTARDLLYYAVTQDAMLIFENLSRGFGRQGKRTFMAERQYTRMEDWLTAKLAYEGLASKTYLSKTLAQYTSKTCSNCGFTITSADYDRVLEKLKKTATGWMTTINGKELKVEGQITYYNRYKRQNVVKDLSVELDRLSEESVNNDISSWTKGRSGEALSLLKKRFSHRPVQEKFVCLNCGFETHADEQAALNIARSWLFLRSQEYKKYQTNKTTGNTDKRAFVETWQSFYRKKLKEVWKPAV

SEQ ID NO: 46658 - protein, 978 aa, synthetic construct
  REGION 1..978: note = engineered CasX variant
QEIKRINKIRRRLVKDSNTKKAGKTGPMKTLLVRVMTPDLRERLENLRKKPENIPQPISNTSRANLNKLLTDYTEMKKAILHVYWEEFQKDPVGLMSRVAQPASKKIDQNKLKPEMDEKGNLTTAGFACSQCGQPLFVYKLEQVSEKGKAYTNYFGRCNVAEHEKLILLAQLKPEKDSDEAVTYSLGKFGQRALDFYSIHVTKESTHPVKPLAQIAGNRYASSPVGKALSDACMGTIASFLSKYQDIIIEHQKVVKGNQKRLESLRELAGKENLEYPSVTLPPQPHTKEGVDAYNEVIARVRMWVNLNLWQKLKLSRDDAKPLLRLKGFPSFPLVERQANEVDWWDMVCNVKKLINEKKEDGKVFWQNLAGYKRQEALRPYLSSEEDRKKGKKFARYQLGDLLLHLEKKHGEDWGKVYGEAWERIDKKVEGLSKHIKLEEERRSEDAQSKAALTDWLRAKASFVIEGLKEADKDEFCRCELKLQKWYGDLRGKPFAIEAENSILDISGFSKQYNCAFIWQKDGVKKLNLYLIINYFKGGKLRFKKIKPEAFEANRFYTVINKKSGEIVPMEVNFNFDDPNLIILPLAFGKRQGREFIWNDLLSLETGSLKLANGRVIEKTLYNRRTRQDEPALFVALTFERREVLDSSNIKPMNLIGVDRGENIPAVIALTDPEGCPLSRFKDSLGNPTHILRIGESYKEKQRTIQAKKEVEQRRAGGYSRKYASKAKNLADDMVRNTARDLLYYAVTQDAMLIFENLSRGFGRQGKRTFMAERQYTRMEDWLTAKLAYEGLASKTYLSKTLAQYTSKTCSNCGFTITSADYDRVLEKLKKTATGWMTTINGKELKVEGQITYYNRYKRQNVVKDLSVELDRLSEESVNNDISSWTKGRSGEALSLLKKRFSHRPVQEKFVCLNCGFETHADEQAALNIARSWLFLRSQEYKKYQTNKTTGNTDKRAFVETWQSFYRKKLKEVWKPAV

SEQ ID NO: 46659 - protein, 978 aa, synthetic construct
  REGION 1..978: note = engineered CasX variant
QEIKRINKIRRRLVKDSNTKKAGKTGPMKTLLVRVMTPDLRERLENLRKKPENIPQPISNTSRANLNKLLTDYTEMKKAILHVYWEEFQKDPVGLMSRVAQPASKKIDQNKLKPEMDEKGNLTTAGFACSQCGQPLFVYKLEQVSEKGKAYTNYFGRCNVAEHEKLILLAQLKPEKDSDEAVTYSLGKFGQRALDFYSIHVTKESTHPVKPLAQIAGNRYASTPVGKALSDACMGTIASFLSKYQDIIIEHQKVVKGNQKRLESLRELAGKENLEYPSVTLPPQPHTKEGVDAYNEVIARVRMWVNLNLWQKLKLSRDDAKPLLRLKGFPSFPLVERQANEVDWWDMVCNVKKLINEKKEDGKVFWQNLAGYKRQEALRPYLSSEEDRKKGKKFARYQLGDLLLHLEKKHGEDWGKVYGEAWERIDKKVEGLSKHIKLEEERRSEDAQSKAALTDWLRAKASFVIEGLKEADKDEFCRCELKLQKWYGDLRGKPFAIEAENSILDISGFSKQYNCAFIWQKDGVKKLNLYLIINYFKGGKLRFKKIKPEAFEANRFYTVINKKSGEIVPMEVNFNFDDPNLIILPLAFGKRQGREFIWNDLLSLETGSLKLANGRVIEKTLYNRRTRQDEPALFVALTFERREVLDSSNIKPMNLIGVDRGENIPAVIALTDPEGCPLSRFKDSLGNPTHILRIGESYKEKQRTIQAKKEVEQRRAGGYSRKYASKAKNLADDMVRNTARDLLYYAVTQDAMLIFENLSRGFGRQGKRTFMAERQYTRMEDWLTAKLAYEGLASKTYLSKTLAQYTSKTCSNCGFTITSADYDRVLEKLKKTATGWMTTINGKELKVEGQITYYNRYKRQNVVKDLSVELDRLSEESVNNDISSWTKGRSGEALSLLKKRFSHRPVQEKFVCLNCGFETHADEQAALNIARSWLFLRSQEYKKYQTNKTTGNTDKRAFVETWQSFYRKKLKEVWKPAV

SEQ ID NO: 46660 - protein, 978 aa, synthetic construct
  REGION 1..978: note = engineered CasX variant
QEIKRINKIRRRLVKDSNTKKAGKTGPMKTLLVRVMTPDLRERLENLRKKPENIPQPISNTSRANLNKLLTDYTEMKKAILHVYWEEFQKDPVGLMSRVAQPASKKIDQNKLKPEMDEKGNLTTAGFACSQCGQPLFVYKLEQVSEKGKAYTNYFGRCNVAEHEKLILLAQLKPEKDSDEAVTYSLGKFGQRALDFYSIHVTKESTHPVKPLAQIAGNRYASAPVGKALSDACMGTIASFLSKYQDIIIEHQKVVKGNQKRLESLRELAGKENLEYPSVTLPPQPHTKEGVDAYNEVIARVRMWVNLNLWQKLKLSRDDAKPLLRLKGFPSFPLVERQANEVDWWDMVCNVKKLINEKKEDGKVFWQNLAGYKRQEALRPYLSSEEDRKKGKKFARYQLGDLLLHLEKKHGEDWGKVYGEAWERIDKKVEGLSKHIKLEEERRSEDAQSKAALTDWLRAKASFVIEGLKEADKDEFCRCELKLQKWYGDLRGKPFAIEAENSILDISGFSKQYNCAFIWQKDGVKKLNLYLIINYFKGGKLRFKKIKPEAFEANRFYTVINKKSGEIVPMEVNFNFDDPNLIILPLAFGKRQGREFIWNDLLSLETGSLKLANGRVIEKTLYNRRTRQDEPALFVALTFERREVLDSSNIKPMNLIGVDRGENIPAVIALTDPEGCPLSRFKDSLGNPTHILRIGESYKEKQRTIQAKKEVEQRRAGGYSRKYASKAKNLADDMVRNTARDLLYYAVTQDAMLIFENLSRGFGRQGKRTFMAERQYTRMEDWLTAKLAYEGLASKTYLSKTLAQYTSKTCSNCGFTITSADYDRVLEKLKKTATGWMTTINGKELKVEGQITYYNRYKRQNVVKDLSVELDRLSEESVNNDISSWTKGRSGEALSLLKKRFSHRPVQEKFVCLNCGFETHADEQAALNIARSWLFLRSQEYKKYQTNKTTGNTDKRAFVETWQSFYRKKLKEVWKPAV

SEQ ID NO: 46661 - protein, 978 aa, synthetic construct
  REGION 1..978: note = engineered CasX variant
QEIKRINKIRRRLVKDSNTKKAGKTGPMKTLLVRVMTPDLRERLENLRKKPENIPQPISNTSRANLNKLLTDYTEMKKAILHVYWEEFQKDPVGLMSRVAQPASKKIDQNKLKPEMDEKGNLTTAGFACSQCGQPLFVYKLEQVSEKGKAYTNYFGRCNVAEHEKLILLAQLKPEKDSDEAVTYSLGKFGQRALDFYSIHVTKESTHPVKPLAQIAGNRYASVPVGKALSDACMGTIASFLSKYQDIIIEHQKVVKGNQKRLESLRELAGKENLEYPSVTLPPQPHTKEGVDAYNEVIARVRMWVNLNLWQKLKLSRDDAKPLLRLKGFPSFPLVERQANEVDWWDMVCNVKKLINEKKEDGKVFWQNLAGYKRQEALRPYLSSEEDRKKGKKFARYQLGDLLLHLEKKHGEDWGKVYGEAWERIDKKVEGLSKHIKLEEERRSEDAQSKAALTDWLRAKASFVIEGLKEADKDEFCRCELKLQKWYGDLRGKPFAIEAENSILDISGFSKQYNCAFIWQKDGVKKLNLYLIINYFKGGKLRFKKIKPEAFEANRFYTVINKKSGEIVPMEVNFNFDDPNLIILPLAFGKRQGREFIWNDLLSLETGSLKLANGRVIEKTLYNRRTRQDEPALFVALTFERREVLDSSNIKPMNLIGVDRGENIPAVIALTDPEGCPLSRFKDSLGNPTHILRIGESYKEKQRTIQAKKEVEQRRAGGYSRKYASKAKNLADDMVRNTARDLLYYAVTQDAMLIFENLSRGFGRQGKRTFMAERQYTRMEDWLTAKLAYEGLASKTYLSKTLAQYTSKTCSNCGFTITSADYDRVLEKLKKTATGWMTTINGKELKVEGQITYYNRYKRQNVVKDLSVELDRLSEESVNNDISSWTKGRSGEALSLLKKRFSHRPVQEKFVCLNCGFETHADEQAALNIARSWLFLRSQEYKKYQTNKTTGNTDKRAFVETWQSFYRKKLKEVWKPAV

SEQ ID NO: 46662 - protein, 978 aa, synthetic construct
  REGION 1..978: note = engineered CasX variant
QEIKRINKIRRRLVKDSNTKKAGKTGPMKTLLVRVMTPDLRERLENLRKKPENIPQPISNTSRANLNKLLTDYTEMKKAILHVYWEEFQKDPVGLMSRVAQPASKKIDQNKLKPEMDEKGNLTTAGFACSQCGQPLFVYKLEQVSEKGKAYTNYFGRCNVAEHEKLIKLAQLKPEKDSDEAVTYSLGKFGQRALDFYSIHVTKESTHPVKPLAQIAGNRYASGPVGKALSDACMGTIASFLSKYQDIIIEHQKVVKGNQKRLESLRELAGKENLEYPSVTLPPQPHTKEGVDAYNEVIARVRMWVNLNLWQKLKLSRDDAKPLLRLKGFPSFPLVERQANEVDWWDMVCNVKKLINEKKEDGKVFWQNLAGYKRQEALRPYLSSEEDRKKGKKFARYQLGDLLLHLEKKHGEDWGKVYGEAWERIDKKVEGLSKHIKLEEERRSEDAQSKAALTDWLRAKASFVIEGLKEADKDEFCRCELKLQKWYGDLRGKPFAIEAENSILDISGFSKQYNCAFIWQKDGVKKLNLYLIINYFKGGKLRFKKIKPEAFEANRFYTVINKKSGEIVPMEVNFNFDDPNLIILPLAFGKRQGREFIWNDLLSLETGSLKLANGRVIEKTLYNRRTRQDEPALFVALTFERREVLDSSNIKPMNLIGVDRGENIPAVIALTDPEGCPLSRFKDSLGNPTHILRIGESYKEKQRTIQAKKEVEQRRAGGYSRKYASKAKNLADDMVRNTARDLLYYAVTQDAMLIFENLSRGFGRQGKRTFMAERQYTRMEDWLTAKLAYEGLASKTYLSKTLAQYTSKTCSNCGFTITSADYDRVLEKLKKTATGWMTTINGKELKVEGQITYYNRYKRQNVVKDLSVELDRLSEESVNNDISSWTKGRSGEALSLLKKRFSHRPVQEKFVCLNCGFETHADEQAALNIARSWLFLRSQEYKKYQTNKTTGNTDKRAFVETWQSFYRKKLKEVWKPAV

SEQ ID NO: 46663 - protein, 977 aa, synthetic construct
  REGION 1..977: note = engineered CasX variant
QEIKRINKIRRRLVKDSNTKKAGKTGPMKTLLVRVMTPDLRERLENLRKKPENIPQPISNTSRANLNKLLTDYTEMKKAILHVYWEEFQKDPVGLMSRVAQPASKKIDQNKLKPEMDEKGNLTTAGFACSQCGQPLFVYKLEQVSEKGKAYTNYFGRCNVAEHEKLILLAQLKPEKDSDEAVTYSLGKFGQRALDFYSIHVTKESTHPVKPLAQIAGNRYASPVGKALSDACMGTIASFLSKYQDIIIEHQKVVKGNQKRLESLRELAGKENLEYPSVTLPPQPHTKEGVDAYNEVIARVRMWVNLNLWQKLKLSRDDAKPLLRLKGFPSFPLVERQANEVDWWDMVCNVKKLINEKKEDGKVFWQNLAGYKRQEALRPYLSSEEDRKKGKKFARYQLGDLLLHLEKKHGEDWGKVYGEAWERIDKKVEGLSKHIKLEEERRSEDAQSKAALTDWLRAKASFVIEGLKEADKDEFCRCELKLQKWYGDLRGKPFAIEAENSILDISGFSKQYNCAFIWQKDGVKKLNLYLIINYFKGGKLRFKKIKPEAFEANRFYTVINKKSGEIVPMEVNFNFDDPNLIILPLAFGKRQGREFIWNDLLSLETGSLKLANGRVIEKTLYNRRTRQDEPALFVALTFERREVLDSSNIKPMNLIGVDRGENIPAVIALTDPEGCPLSRFKDSLGNPTHILRIGESYKEKQRTIQAKKEVEQRRAGGYSRKYASKAKNLADDMVRNTARDLLYYAVTQDAMLIFENLSRGFGRQGKRTFMAERQYTRMEDWLTAKLAYEGLASKTYLSKTLAQYTSKTCSNCGFTITSADYDRVLEKLKKTATGWMTTINGKELKVEGQITYYNRYKRQNVVKDLSVELDRLSEESVNNDISSWTKGRSGEALSLLKKRFSHRPVQEKFVCLNCGFETHADEQAALNIARSWLFLRSQEYKKYQTNKTTGNTDKRAFVETWQSFYRKKLKEVWKPAV

SEQ ID NO: 46664 - protein, 978 aa, synthetic construct
  REGION 1..978: note = engineered CasX variant
QEIKRINKIRRRLVKDSNTKKAGKTGPMKTLLVRVMTPDLRERLENLRKKPENIPQPISNTSRANLNKLLTDYTEMKKAILHVYWEEFQKDPVGLMSRVAQPASKKIDQNKLKPEMDEKGNLTTAGFACSQCGQPLFVYKLEQVSEKGKAYTNYFGRCNVAEHEKLILLAQLKPEKDSDEAVTYSLGKFGQRALDFYSIHVTKESTHPVKPLAQIAGNRYASYPVGKALSDACMGTIASFLSKYQDIIIEHQKVVKGNQKRLESLRELAGKENLEYPSVTLPPQPHTKEGVDAYNEVIARVRMWVNLNLWQKLKLSRDDAKPLLRLKGFPSFPLVERQANEVDWWDMVCNVKKLINEKKEDGKVFWQNLAGYKRQEALRPYLSSEEDRKKGKKFARYQLGDLLLHLEKKHGEDWGKVYDEAWERIDKKVEGLSKHIKLEEERRSEDAQSKAALTDWLRAKASFVIEGKKEADKDEFCRCELKLQKWYGDLRGKPFAIEAENSILDISGFSKQYNCAFIWQKDGVKKLNLYLIINYFKGGKLRFKKIKPEAFEANRFYTVINKKSGEIVPMEVNFNFDDPNLIILPLAFGKRQGREFIWNDLLSLETGSLKLANGRVIEKTLYNRRTRQDEPALFVALTFERREVLDSSNIKPMNLIGVDRGENIPAVIALTDPEGCPLSRFKDSLGNPTHILRIGESYKEKQRTIQAKKEVEQRRAGGYSRKYASKAKNLADDMVRNTARDLLYYAVTQDAMLIFENLSRGFGRQGKRTFMAERQYTRMEDWLTAKLAYEGLASKTYLSKTLAQYTSKTCSNCGFTITSADYDRVLEKLKKTATGWMTTINGKELKVEGQITYYNRYKRQNVVKDLSVELDRLSEESVNNDISSWTKGRSGEALSLLKKRFSHRPVQEKFVCLNCGFETHADEQAALNIARSWLFLRSQEYKKYQTNKTTGNTDKRAFVETWQSFYRKKLKEVWKPAV

SEQ ID NO: 46665 - protein, 978 aa, synthetic construct
  REGION 1..978: note = engineered CasX variant
QEIKRINKIRRRLVKDSNTKKAGKTGPMKTLLVRVMTPDLRERLENLRKKPENIPQPISNTSRANLNKLLTDYTEMKKAILHVYWEEFQKDPVGLMSRVAQPASKKIDQNKLKPEMDEKGNLTTAGFACSQCGQPLFVYKLEQVSEKGKAYTNYFGRCNVAEHEKLILLAQLKPEKDSDEAVTYSLGKFGQRALDFYSIHVTKESTHPVKPLAQIAGNRYASHPVGKALSDACMGTIASFLSKYQDIIIEHQKVVKGNQKRLESLRELAGKENLEYPSVTLPPQPHTKEGVDAYNEVIARVRMWVNLNLWQKLKLSRDDAKPLLRLKGFPSFPLVERQANEVDWWDMVCNVKKLINEKKEDGKVFWQNLAGYKRQEALRPYLSSEEDRKKGKKFARYQLGDLLLHLEKKHGEDWGKVYDEAWERIDKKVEGLSKHIKLEEERRSEDAQSKAALTDWLRAKASFVIEGKKEADKDEFCRCELKLQKWYGDLRGKPFAIEAENSILDISGFSKQYNCAFIWQKDGVKKLNLYLIINYFKGGKLRFKKIKPEAFEANRFYTVINKKSGEIVPMEVNFNFDDPNLIILPLAFGKRQGREFIWNDLLSLETGSLKLANGRVIEKTLYNRRTRQDEPALFVALTFERREVLDSSNIKPMNLIGVDRGENIPAVIALTDPEGCPLSRFKDSLGNPTHILRIGESYKEKQRTIQAKKEVEQRRAGGYSRKYASKAKNLADDMVRNTARDLLYYAVTQDAMLIFENLSRGFGRQGKRTFMAERQYTRMEDWLTAKLAYEGLASKTYLSKTLAQYTSKTCSNCGFTITSADYDRVLEKLKKTATGWMTTINGKELKVEGQITYYNRYKRQNVVKDLSVELDRLSEESVNNDISSWTKGRSGEALSLLKKRFSHRPVQEKFVCLNCGFETHADEQAALNIARSWLFLRSQEYKKYQTNKTTGNTDKRAFVETWQSFYRKKLKEVWKPAV

SEQ ID NO: 46666 - protein, 978 aa, synthetic construct
  REGION 1..978: note = engineered CasX variant
QEIKRINKIRRRLVKDSNTKKAGKTGPMKTLLVRVMTPDLRERLENLRKKPENIPQPISNTSRANLNKLLTDYTEMKKAILHVYWEEFQKDPVGLMSRVAQPASKKIDQNKLKPEMDEKGNLTTAGFACSQCGQPLFVYKLEQVSEKGKAYTNYFGRCNVAEHEKLILLAQLKPEKDSDEAVTYSLGKFGQRALDFYSIHVTKESTHPVKPLAQIAGNRYASSPVGKALSDACMGTIASFLSKYQDIIIEHQKVVKGNQKRLESLRELAGKENLEYPSVTLPPQPHTKEGVDAYNEVIARVRMWVNLNLWQKLKLSRDDAKPLLRLKGFPSFPLVERQANEVDWWDMVCNVKKLINEKKEDGKVFWQNLAGYKRQEALRPYLSSEEDRKKGKKFARYQLGDLLLHLEKKHGEDWGKVYDEAWERIDKKVEGLSKHIKLEEERRSEDAQSKAALTDWLRAKASFVIEGKKEADKDEFCRCELKLQKWYGDLRGKPFAIEAENSILDISGFSKQYNCAFIWQKDGVKKLNLYLIINYFKGGKLRFKKIKPEAFEANRFYTVINKKSGEIVPMEVNFNFDDPNLIILPLAFGKRQGREFIWNDLLSLETGSLKLANGRVIEKTLYNRRTRQDEPALFVALTFERREVLDSSNIKPMNLIGVDRGENIPAVIALTDPEGCPLSRFKDSLGNPTHILRIGESYKEKQRTIQAKKEVEQRRAGGYSRKYASKAKNLADDMVRNTARDLLYYAVTQDAMLIFENLSRGFGRQGKRTFMAERQYTRMEDWLTAKLAYEGLASKTYLSKTLAQYTSKTCSNCGFTITSADYDRVLEKLKKTATGWMTTINGKELKVEGQITYYNRYKRQNVVKDLSVELDRLSEESVNNDISSWTKGRSGEALSLLKKRFSHRPVQEKFVCLNCGFETHADEQAALNIARSWLFLRSQEYKKYQTNKTTGNTDKRAFVETWQSFYRKKLKEVWKPAV

SEQ ID NO: 46667 - protein, 978 aa, synthetic construct
  REGION 1..978: note = engineered CasX variant
QEIKRINKIRRRLVKDSNTKKAGKTGPMKTLLVRVMTPDLRERLENLRKKPENIPQPISNTSRANLNKLLTDYTEMKKAILHVYWEEFQKDPVGLMSRVAQPASKKIDQNKLKPEMDEKGNLTTAGFACSQCGQPLFVYKLEQVSEKGKAYTNYFGRCNVAEHEKLILLAQLKPEKDSDEAVTYSLGKFGQRALDFYSIHVTKESTHPVKPLAQIAGNRYASTPVGKALSDACMGTIASFLSKYQDIIIEHQKVVKGNQKRLESLRELAGKENLEYPSVTLPPQPHTKEGVDAYNEVIARVRMWVNLNLWQKLKLSRDDAKPLLRLKGFPSFPLVERQANEVDWWDMVCNVKKLINEKKEDGKVFWQNLAGYKRQEALRPYLSSEEDRKKGKKFARYQLGDLLLHLEKKHGEDWGKVYDEAWERIDKKVEGLSKHIKLEEERRSEDAQSKAALTDWLRAKASFVIEGKKEADKDEFCRCELKLQKWYGDLRGKPFAIEAENSILDISGFSKQYNCAFIWQKDGVKKLNLYLIINYFKGGKLRFKKIKPEAFEANRFYTVINKKSGEIVPMEVNFNFDDPNLIILPLAFGKRQGREFIWNDLLSLETGSLKLANGRVIEKTLYNRRTRQDEPALFVALTFERREVLDSSNIKPMNLIGVDRGENIPAVIALTDPEGCPLSRFKDSLGNPTHILRIGESYKEKQRTIQAKKEVEQRRAGGYSRKYASKAKNLADDMVRNTARDLLYYAVTQDAMLIFENLSRGFGRQGKRTFMAERQYTRMEDWLTAKLAYEGLASKTYLSKTLAQYTSKTCSNCGFTITSADYDRVLEKLKKTATGWMTTINGKELKVEGQITYYNRYKRQNVVKDLSVELDRLSEESVNNDISSWTKGRSGEALSLLKKRFSHRPVQEKFVCLNCGFETHADEQAALNIARSWLFLRSQEYKKYQTNKTTGNTDKRAFVETWQSFYRKKLKEVWKPAV

SEQ ID NO: 46668 - protein, 978 aa, synthetic construct
  REGION 1..978: note = engineered CasX variant
QEIKRINKIRRRLVKDSNTKKAGKTGPMKTLLVRVMTPDLRERLENLRKKPENIPQPISNTSRANLNKLLTDYTEMKKAILHVYWEEFQKDPVGLMSRVAQPASKKIDQNKLKPEMDEKGNLTTAGFACSQCGQPLFVYKLEQVSEKGKAYTNYFGRCNVAEHEKLILLAQLKPEKDSDEAVTYSLGKFGQRALDFYSIHVTKESTHPVKPLAQIAGNRYASAPVGKALSDACMGTIASFLSKYQDIIIEHQKVVKGNQKRLESLRELAGKENLEYPSVTLPPQPHTKEGVDAYNEVIARVRMWVNLNLWQKLKLSRDDAKPLLRLKGFPSFPLVERQANEVDWWDMVCNVKKLINEKKEDGKVFWQNLAGYKRQEALRPYLSSEEDRKKGKKFARYQLGDLLLHLEKKHGEDWGKVYDEAWERIDKKVEGLSKHIKLEEERRSEDAQSKAALTDWLRAKASFVIEGKKEADKDEFCRCELKLQKWYGDLRGKPFAIEAENSILDISGFSKQYNCAFIWQKDGVKKLNLYLIINYFKGGKLRFKKIKPEAFEANRFYTVINKKSGEIVPMEVNFNFDDPNLIILPLAFGKRQGREFIWNDLLSLETGSLKLANGRVIEKTLYNRRTRQDEPALFVALTFERREVLDSSNIKPMNLIGVDRGENIPAVIALTDPEGCPLSRFKDSLGNPTHILRIGESYKEKQRTIQAKKEVEQRRAGGYSRKYASKAKNLADDMVRNTARDLLYYAVTQDAMLIFENLSRGFGRQGKRTFMAERQYTRMEDWLTAKLAYEGLASKTYLSKTLAQYTSKTCSNCGFTITSADYDRVLEKLKKTATGWMTTINGKELKVEGQITYYNRYKRQNVVKDLSVELDRLSEESVNNDISSWTKGRSGEALSLLKKRFSHRPVQEKFVCLNCGFETHADEQAALNIARSWLFLRSQEYKKYQTNKTTGNTDKRAFVETWQSFYRKKLKEVWKPAV

SEQ ID NO: 46669 - protein, 978 aa, synthetic construct
  REGION 1..978: note = engineered CasX variant
QEIKRINKIRRRLVKDSNTKKAGKTGPMKTLLVRVMTPDLRERLENLRKKPENIPQPISNTSRANLNKLLTDYTEMKKAILHVYWEEFQKDPVGLMSRVAQPASKKIDQNKLKPEMDEKGNLTTAGFACSQCGQPLFVYKLEQVSEKGKAYTNYFGRCNVAEHEKLILLAQLKPEKDSDEAVTYSLGKFGQRALDFYSIHVTKESTHPVKPLAQIAGNRYASVPVGKALSDACMGTIASFLSKYQDIIIEHQKVVKGNQKRLESLRELAGKENLEYPSVTLPPQPHTKEGVDAYNEVIARVRMWVNLNLWQKLKLSRDDAKPLLRLKGFPSFPLVERQANEVDWWDMVCNVKKLINEKKEDGKVFWQNLAGYKRQEALRPYLSSEEDRKKGKKFARYQLGDLLLHLEKKHGEDWGKVYDEAWERIDKKVEGLSKHIKLEEERRSEDAQSKAALTDWLRAKASFVIEGKKEADKDEFCRCELKLQKWYGDLRGKPFAIEAENSILDISGFSKQYNCAFIWQKDGVKKLNLYLIINYFKGGKLRFKKIKPEAFEANRFYTVINKKSGEIVPMEVNFNFDDPNLIILPLAFGKRQGREFIWNDLLSLETGSLKLANGRVIEKTLYNRRTRQDEPALFVALTFERREVLDSSNIKPMNLIGVDRGENIPAVIALTDPEGCPLSRFKDSLGNPTHILRIGESYKEKQRTIQAKKEVEQRRAGGYSRKYASKAKNLADDMVRNTARDLLYYAVTQDAMLIFENLSRGFGRQGKRTFMAERQYTRMEDWLTAKLAYEGLASKTYLSKTLAQYTSKTCSNCGFTITSADYDRVLEKLKKTATGWMTTINGKELKVEGQITYYNRYKRQNVVKDLSVELDRLSEESVNNDISSWTKGRSGEALSLLKKRFSHRPVQEKFVCLNCGFETHADEQAALNIARSWLFLRSQEYKKYQTNKTTGNTDKRAFVETWQSFYRKKLKEVWKPAV

SEQ ID NO: 46670 - protein, 978 aa, synthetic construct
  REGION 1..978: note = engineered CasX variant
QEIKRINKIRRRLVKDSNTKKAGKTGPMKTLLVRVMTPDLRERLENLRKKPENIPQPISNTSRANLNKLLTDYTEMKKAILHVYWEEFQKDPVGLMSRVAQPASKKIDQNKLKPEMDEKGNLTTAGFACSQCGQPLFVYKLEQVSEKGKAYTNYFGRCNVAEHEKLIKLAQLKPEKDSDEAVTYSLGKFGQRALDFYSIHVTKESTHPVKPLAQIAGNRYASGPVGKALSDACMGTIASFLSKYQDIIIEHQKVVKGNQKRLESLRELAGKENLEYPSVTLPPQPHTKEGVDAYNEVIARVRMWVNLNLWQKLKLSRDDAKPLLRLKGFPSFPLVERQANEVDWWDMVCNVKKLINEKKEDGKVFWQNLAGYKRQEALRPYLSSEEDRKKGKKFARYQLGDLLLHLEKKHGEDWGKVYDEAWERIDKKVEGLSKHIKLEEERRSEDAQSKAALTDWLRAKASFVIEGKKEADKDEFCRCELKLQKWYGDLRGKPFAIEAENSILDISGFSKQYNCAFIWQKDGVKKLNLYLIINYFKGGKLRFKKIKPEAFEANRFYTVINKKSGEIVPMEVNFNFDDPNLIILPLAFGKRQGREFIWNDLLSLETGSLKLANGRVIEKTLYNRRTRQDEPALFVALTFERREVLDSSNIKPMNLIGVDRGENIPAVIALTDPEGCPLSRFKDSLGNPTHILRIGESYKEKQRTIQAKKEVEQRRAGGYSRKYASKAKNLADDMVRNTARDLLYYAVTQDAMLIFENLSRGFGRQGKRTFMAERQYTRMEDWLTAKLAYEGLASKTYLSKTLAQYTSKTCSNCGFTITSADYDRVLEKLKKTATGWMTTINGKELKVEGQITYYNRYKRQNVVKDLSVELDRLSEESVNNDISSWTKGRSGEALSLLKKRFSHRPVQEKFVCLNCGFETHADEQAALNIARSWLFLRSQEYKKYQTNKTTGNTDKRAFVETWQSFYRKKLKEVWKPAV

SEQ ID NO: 46671 - protein, 977 aa, synthetic construct
  REGION 1..977: note = engineered CasX variant
QEIKRINKIRRRLVKDSNTKKAGKTGPMKTLLVRVMTPDLRERLENLRKKPENIPQPISNTSRANLNKLLTDYTEMKKAILHVYWEEFQKDPVGLMSRVAQPASKKIDQNKLKPEMDEKGNLTTAGFACSQCGQPLFVYKLEQVSEKGKAYTNYFGRCNVAEHEKLILLAQLKPEKDSDEAVTYSLGKFGQRALDFYSIHVTKESTHPVKPLAQIAGNRYASPVGKALSDACMGTIASFLSKYQDIIIEHQKVVKGNQKRLESLRELAGKENLEYPSVTLPPQPHTKEGVDAYNEVIARVRMWVNLNLWQKLKLSRDDAKPLLRLKGFPSFPLVERQANEVDWWDMVCNVKKLINEKKEDGKVFWQNLAGYKRQEALRPYLSSEEDRKKGKKFARYQLGDLLLHLEKKHGEDWGKVYDEAWERIDKKVEGLSKHIKLEEERRSEDAQSKAALTDWLRAKASFVIEGKKEADKDEFCRCELKLQKWYGDLRGKPFAIEAENSILDISGFSKQYNCAFIWQKDGVKKLNLYLIINYFKGGKLRFKKIKPEAFEANRFYTVINKKSGEIVPMEVNFNFDDPNLIILPLAFGKRQGREFIWNDLLSLETGSLKLANGRVIEKTLYNRRTRQDEPALFVALTFERREVLDSSNIKPMNLIGVDRGENIPAVIALTDPEGCPLSRFKDSLGNPTHILRIGESYKEKQRTIQAKKEVEQRRAGGYSRKYASKAKNLADDMVRNTARDLLYYAVTQDAMLIFENLSRGFGRQGKRTFMAERQYTRMEDWLTAKLAYEGLASKTYLSKTLAQYTSKTCSNCGFTITSADYDRVLEKLKKTATGWMTTINGKELKVEGQITYYNRYKRQNVVKDLSVELDRLSEESVNNDISSWTKGRSGEALSLLKKRFSHRPVQEKFVCLNCGFETHADEQAALNIARSWLFLRSQEYKKYQTNKTTGNTDKRAFVETWQSFYRKKLKEVWKPAV

SEQ ID NO: 46672 - protein, 978 aa, synthetic construct
  REGION 1..978: note = engineered CasX variant
QEIKRINKIRRRLVKDSNTKKAGKTGPMKTLLVRVMTPDLRERLENLRKKPENIPQPISNTSRANLNKLLTDYTEMKKAILHVYWEEFQKDPVGLMSRVAQPASKKIDQNKLKPEMDEKGNLTTAGFACSQCGQPLFVYKLEQVSEKGKAYTNYFGRCNVAEHEKLILLAQLKPEKDSDEAVTYSLGKFGQRALDFYSIHVTKESTHPVKPLAQIAGNRYASYPVGKALSDACMGTIASFLSKYQDIIIEHQKVVKGNQKRLESLRELAGKENLEYPSVTLPPQPHTKEGVDAYNEVIARVRMWVNLNLWQKLKLSRDDAKPLLRLKGFPSFPLVERQANEVDWWDMVCNVKKLINEKKEDGKVFWQNLAGYKRQEALRPYLSSEEDRKKGKKFARYQLGDLLLHLEKKHGEDWGKVYDEAWERIDKKVEGLSKHIKLEEERRSEDAQSKAALTDWLRAKASFVIEGSKEADKDEFCRCELKLQKWYGDLRGKPFAIEAENSILDISGFSKQYNCAFIWQKDGVKKLNLYLIINYFKGGKLRFKKIKPEAFEANRFYTVINKKSGEIVPMEVNFNFDDPNLIILPLAFGKRQGREFIWNDLLSLETGSLKLANGRVIEKTLYNRRTRQDEPALFVALTFERREVLDSSNIKPMNLIGVDRGENIPAVIALTDPEGCPLSRFKDSLGNPTHILRIGESYKEKQRTIQAKKEVEQRRAGGYSRKYASKAKNLADDMVRNTARDLLYYAVTQDAMLIFENLSRGFGRQGKRTFMAERQYTRMEDWLTAKLAYEGLASKTYLSKTLAQYTSKTCSNCGFTITSADYDRVLEKLKKTATGWMTTINGKELKVEGQITYYNRYKRQNVVKDLSVELDRLSEESVNNDISSWTKGRSGEALSLLKKRFSHRPVQEKFVCLNCGFETHADEQAALNIARSWLFLRSQEYKKYQTNKTTGNTDKRAFVETWQSFYRKKLKEVWKPAV

SEQ ID NO: 46673 - protein, 978 aa, synthetic construct
  REGION 1..978: note = engineered CasX variant
QEIKRINKIRRRLVKDSNTKKAGKTGPMKTLLVRVMTPDLRERLENLRKKPENIPQPISNTSRANLNKLLTDYTEMKKAILHVYWEEFQKDPVGLMSRVAQPASKKIDQNKLKPEMDEKGNLTTAGFACSQCGQPLFVYKLEQVSEKGKAYTNYFGRCNVAEHEKLILLAQLKPEKDSDEAVTYSLGKFGQRALDFYSIHVTKESTHPVKPLAQIAGNRYASHPVGKALSDACMGTIASFLSKYQDIIIEHQKVVKGNQKRLESLRELAGKENLEYPSVTLPPQPHTKEGVDAYNEVIARVRMWVNLNLWQKLKLSRDDAKPLLRLKGFPSFPLVERQANEVDWWDMVCNVKKLINEKKEDGKVFWQNLAGYKRQEALRPYLSSEEDRKKGKKFARYQLGDLLLHLEKKHGEDWGKVYDEAWERIDKKVEGLSKHIKLEEERRSEDAQSKAALTDWLRAKASFVIEGSKEADKDEFCRCELKLQKWYGDLRGKPFAIEAENSILDISGFSKQYNCAFIWQKDGVKKLNLYLIINYFKGGKLRFKKIKPEAFEANRFYTVINKKSGEIVPMEVNFNFDDPNLIILPLAFGKRQGREFIWNDLLSLETGSLKLANGRVIEKTLYNRRTRQDEPALFVALTFERREVLDSSNIKPMNLIGVDRGENIPAVIALTDPEGCPLSRFKDSLGNPTHILRIGESYKEKQRTIQAKKEVEQRRAGGYSRKYASKAKNLADDMVRNTARDLLYYAVTQDAMLIFENLSRGFGRQGKRTFMAERQYTRMEDWLTAKLAYEGLASKTYLSKTLAQYTSKTCSNCGFTITSADYDRVLEKLKKTATGWMTTINGKELKVEGQITYYNRYKRQNVVKDLSVELDRLSEESVNNDISSWTKGRSGEALSLLKKRFSHRPVQEKFVCLNCGFETHADEQAALNIARSWLFLRSQEYKKYQTNKTTGNTDKRAFVETWQSFYRKKLKEVWKPAV

SEQ ID NO: 46674 - protein, 978 aa, synthetic construct
  REGION 1..978: note = engineered CasX variant
QEIKRINKIRRRLVKDSNTKKAGKTGPMKTLLVRVMTPDLRERLENLRKKPENIPQPISNTSRANLNKLLTDYTEMKKAILHVYWEEFQKDPVGLMSRVAQPASKKIDQNKLKPEMDEKGNLTTAGFACSQCGQPLFVYKLEQVSEKGKAYTNYFGRCNVAEHEKLILLAQLKPEKDSDEAVTYSLGKFGQRALDFYSIHVTKESTHPVKPLAQIAGNRYASSPVGKALSDACMGTIASFLSKYQDIIIEHQKVVKGNQKRLESLRELAGKENLEYPSVTLPPQPHTKEGVDAYNEVIARVRMWVNLNLWQKLKLSRDDAKPLLRLKGFPSFPLVERQANEVDWWDMVCNVKKLINEKKEDGKVFWQNLAGYKRQEALRPYLSSEEDRKKGKKFARYQLGDLLLHLEKKHGEDWGKVYDEAWERIDKKVEGLSKHIKLEEERRSEDAQSKAALTDWLRAKASFVIEGSKEADKDEFCRCELKLQKWYGDLRGKPFAIEAENSILDISGFSKQYNCAFIWQKDGVKKLNLYLIINYFKGGKLRFKKIKPEAFEANRFYTVINKKSGEIVPMEVNFNFDDPNLIILPLAFGKRQGREFIWNDLLSLETGSLKLANGRVIEKTLYNRRTRQDEPALFVALTFERREVLDSSNIKPMNLIGVDRGENIPAVIALTDPEGCPLSRFKDSLGNPTHILRIGESYKEKQRTIQAKKEVEQRRAGGYSRKYASKAKNLADDMVRNTARDLLYYAVTQDAMLIFENLSRGFGRQGKRTFMAERQYTRMEDWLTAKLAYEGLASKTYLSKTLAQYTSKTCSNCGFTITSADYDRVLEKLKKTATGWMTTINGKELKVEGQITYYNRYKRQNVVKDLSVELDRLSEESVNNDISSWTKGRSGEALSLLKKRFSHRPVQEKFVCLNCGFETHADEQAALNIARSWLFLRSQEYKKYQTNKTTGNTDKRAFVETWQSFYRKKLKEVWKPAV

SEQ ID NO: 46675 - protein, 978 aa, synthetic construct
  REGION 1..978: note = engineered CasX variant
QEIKRINKIRRRLVKDSNTKKAGKTGPMKTLLVRVMTPDLRERLENLRKKPENIPQPISNTSRANLNKLLTDYTEMKKAILHVYWEEFQKDPVGLMSRVAQPASKKIDQNKLKPEMDEKGNLTTAGFACSQCGQPLFVYKLEQVSEKGKAYTNYFGRCNVAEHEKLILLAQLKPEKDSDEAVTYSLGKFGQRALDFYSIHVTKESTHPVKPLAQIAGNRYASTPVGKALSDACMGTIASFLSKYQDIIIEHQKVVKGNQKRLESLRELAGKENLEYPSVTLPPQPHTKEGVDAYNEVIARVRMWVNLNLWQKLKLSRDDAKPLLRLKGFPSFPLVERQANEVDWWDMVCNVKKLINEKKEDGKVFWQNLAGYKRQEALRPYLSSEEDRKKGKKFARYQLGDLLLHLEKKHGEDWGKVYDEAWERIDKKVEGLSKHIKLEEERRSEDAQSKAALTDWLRAKASFVIEGSKEADKDEFCRCELKLQKWYGDLRGKPFAIEAENSILDISGFSKQYNCAFIWQKDGVKKLNLYLIINYFKGGKLRFKKIKPEAFEANRFYTVINKKSGEIVPMEVNFNFDDPNLIILPLAFGKRQGREFIWNDLLSLETGSLKLANGRVIEKTLYNRRTRQDEPALFVALTFERREVLDSSNIKPMNLIGVDRGENIPAVIALTDPEGCPLSRFKDSLGNPTHILRIGESYKEKQRTIQAKKEVEQRRAGGYSRKYASKAKNLADDMVRNTARDLLYYAVTQDAMLIFENLSRGFGRQGKRTFMAERQYTRMEDWLTAKLAYEGLASKTYLSKTLAQYTSKTCSNCGFTITSADYDRVLEKLKKTATGWMTTINGKELKVEGQITYYNRYKRQNVVKDLSVELDRLSEESVNNDISSWTKGRSGEALSLLKKRFSHRPVQEKFVCLNCGFETHADEQAALNIARSWLFLRSQEYKKYQTNKTTGNTDKRAFVETWQSFYRKKLKEVWKPAV

SEQ ID NO: 46676 - protein, 978 aa, synthetic construct
  REGION 1..978: note = engineered CasX variant
QEIKRINKIRRRLVKDSNTKKAGKTGPMKTLLVRVMTPDLRERLENLRKKPENIPQPISNTSRANLNKLLTDYTEMKKAILHVYWEEFQKDPVGLMSRVAQPASKKIDQNKLKPEMDEKGNLTTAGFACSQCGQPLFVYKLEQVSEKGKAYTNYFGRCNVAEHEKLILLAQLKPEKDSDEAVTYSLGKFGQRALDFYSIHVTKESTHPVKPLAQIAGNRYASAPVGKALSDACMGTIASFLSKYQDIIIEHQKVVKGNQKRLESLRELAGKENLEYPSVTLPPQPHTKEGVDAYNEVIARVRMWVNLNLWQKLKLSRDDAKPLLRLKGFPSFPLVERQANEVDWWDMVCNVKKLINEKKEDGKVFWQNLAGYKRQEALRPYLSSEEDRKKGKKFARYQLGDLLLHLEKKHGEDWGKVYDEAWERIDKKVEGLSKHIKLEEERRSEDAQSKAALTDWLRAKASFVIEGSKEADKDEFCRCELKLQKWYGDLRGKPFAIEAENSILDISGFSKQYNCAFIWQKDGVKKLNLYLIINYFKGGKLRFKKIKPEAFEANRFYTVINKKSGEIVPMEVNFNFDDPNLIILPLAFGKRQGREFIWNDLLSLETGSLKLANGRVIEKTLYNRRTRQDEPALFVALTFERREVLDSSNIKPMNLIGVDRGENIPAVIALTDPEGCPLSRFKDSLGNPTHILRIGESYKEKQRTIQAKKEVEQRRAGGYSRKYASKAKNLADDMVRNTARDLLYYAVTQDAMLIFENLSRGFGRQGKRTFMAERQYTRMEDWLTAKLAYEGLASKTYLSKTLAQYTSKTCSNCGFTITSADYDRVLEKLKKTATGWMTTINGKELKVEGQITYYNRYKRQNVVKDLSVELDRLSEESVNNDISSWTKGRSGEALSLLKKRFSHRPVQEKFVCLNCGFETHADEQAALNIARSWLFLRSQEYKKYQTNKTTGNTDKRAFVETWQSFYRKKLKEVWKPAV

SEQ ID NO: 46677 - protein, 978 aa, synthetic construct
  REGION 1..978: note = engineered CasX variant
QEIKRINKIRRRLVKDSNTKKAGKTGPMKTLLVRVMTPDLRERLENLRKKPENIPQPISNTSRANLNKLLTDYTEMKKAILHVYWEEFQKDPVGLMSRVAQPASKKIDQNKLKPEMDEKGNLTTAGFACSQCGQPLFVYKLEQVSEKGKAYTNYFGRCNVAEHEKLILLAQLKPEKDSDEAVTYSLGKFGQRALDFYSIHVTKESTHPVKPLAQIAGNRYASVPVGKALSDACMGTIASFLSKYQDIIIEHQKVVKGNQKRLESLRELAGKENLEYPSVTLPPQPHTKEGVDAYNEVIARVRMWVNLNLWQKLKLSRDDAKPLLRLKGFPSFPLVERQANEVDWWDMVCNVKKLINEKKEDGKVFWQNLAGYKRQEALRPYLSSEEDRKKGKKFARYQLGDLLLHLEKKHGEDWGKVYDEAWERIDKKVEGLSKHIKLEEERRSEDAQSKAALTDWLRAKASFVIEGSKEADKDEFCRCELKLQKWYGDLRGKPFAIEAENSILDISGFSKQYNCAFIWQKDGVKKLNLYLIINYFKGGKLRFKKIKPEAFEANRFYTVINKKSGEIVPMEVNFNFDDPNLIILPLAFGKRQGREFIWNDLLSLETGSLKLANGRVIEKTLYNRRTRQDEPALFVALTFERREVLDSSNIKPMNLIGVDRGENIPAVIALTDPEGCPLSRFKDSLGNPTHILRIGESYKEKQRTIQAKKEVEQRRAGGYSRKYASKAKNLADDMVRNTARDLLYYAVTQDAMLIFENLSRGFGRQGKRTFMAERQYTRMEDWLTAKLAYEGLASKTYLSKTLAQYTSKTCSNCGFTITSADYDRVLEKLKKTATGWMTTINGKELKVEGQITYYNRYKRQNVVKDLSVELDRLSEESVNNDISSWTKGRSGEALSLLKKRFSHRPVQEKFVCLNCGFETHADEQAALNIARSWLFLRSQEYKKYQTNKTTGNTDKRAFVETWQSFYRKKLKEVWKPAV

SEQ ID NO: 46678 - protein, 978 aa, synthetic construct
  REGION 1..978: note = engineered CasX variant
QEIKRINKIRRRLVKDSNTKKAGKTGPMKTLLVRVMTPDLRERLENLRKKPENIPQPISNTSRANLNKLLTDYTEMKKAILHVYWEEFQKDPVGLMSRVAQPASKKIDQNKLKPEMDEKGNLTTAGFACSQCGQPLFVYKLEQVSEKGKAYTNYFGRCNVAEHEKLIKLAQLKPEKDSDEAVTYSLGKFGQRALDFYSIHVTKESTHPVKPLAQIAGNRYASGPVGKALSDACMGTIASFLSKYQDIIIEHQKVVKGNQKRLESLRELAGKENLEYPSVTLPPQPHTKEGVDAYNEVIARVRMWVNLNLWQKLKLSRDDAKPLLRLKGFPSFPLVERQANEVDWWDMVCNVKKLINEKKEDGKVFWQNLAGYKRQEALRPYLSSEEDRKKGKKFARYQLGDLLLHLEKKHGEDWGKVYDEAWERIDKKVEGLSKHIKLEEERRSEDAQSKAALTDWLRAKASFVIEGSKEADKDEFCRCELKLQKWYGDLRGKPFAIEAENSILDISGFSKQYNCAFIWQKDGVKKLNLYLIINYFKGGKLRFKKIKPEAFEANRFYTVINKKSGEIVPMEVNFNFDDPNLIILPLAFGKRQGREFIWNDLLSLETGSLKLANGRVIEKTLYNRRTRQDEPALFVALTFERREVLDSSNIKPMNLIGVDRGENIPAVIALTDPEGCPLSRFKDSLGNPTHILRIGESYKEKQRTIQAKKEVEQRRAGGYSRKYASKAKNLADDMVRNTARDLLYYAVTQDAMLIFENLSRGFGRQGKRTFMAERQYTRMEDWLTAKLAYEGLASKTYLSKTLAQYTSKTCSNCGFTITSADYDRVLEKLKKTATGWMTTINGKELKVEGQITYYNRYKRQNVVKDLSVELDRLSEESVNNDISSWTKGRSGEALSLLKKRFSHRPVQEKFVCLNCGFETHADEQAALNIARSWLFLRSQEYKKYQTNKTTGNTDKRAFVETWQSFYRKKLKEVWKPAV

SEQ ID NO: 46679 - protein, 977 aa, synthetic construct
  REGION 1..977: note = engineered CasX variant
QEIKRINKIRRRLVKDSNTKKAGKTGPMKTLLVRVMTPDLRERLENLRKKPENIPQPISNTSRANLNKLLTDYTEMKKAILHVYWEEFQKDPVGLMSRVAQPASKKIDQNKLKPEMDEKGNLTTAGFACSQCGQPLFVYKLEQVSEKGKAYTNYFGRCNVAEHEKLILLAQLKPEKDSDEAVTYSLGKFGQRALDFYSIHVTKESTHPVKPLAQIAGNRYASPVGKALSDACMGTIASFLSKYQDIIIEHQKVVKGNQKRLESLRELAGKENLEYPSVTLPPQPHTKEGVDAYNEVIARVRMWVNLNLWQKLKLSRDDAKPLLRLKGFPSFPLVERQANEVDWWDMVCNVKKLINEKKEDGKVFWQNLAGYKRQEALRPYLSSEEDRKKGKKFARYQLGDLLLHLEKKHGEDWGKVYDEAWERIDKKVEGLSKHIKLEEERRSEDAQSKAALTDWLRAKASFVIEGSKEADKDEFCRCELKLQKWYGDLRGKPFAIEAENSILDISGFSKQYNCAFIWQKDGVKKLNLYLIINYFKGGKLRFKKIKPEAFEANRFYTVINKKSGEIVPMEVNFNFDDPNLIILPLAFGKRQGREFIWNDLLSLETGSLKLANGRVIEKTLYNRRTRQDEPALFVALTFERREVLDSSNIKPMNLIGVDRGENIPAVIALTDPEGCPLSRFKDSLGNPTHILRIGESYKEKQRTIQAKKEVEQRRAGGYSRKYASKAKNLADDMVRNTARDLLYYAVTQDAMLIFENLSRGFGRQGKRTFMAERQYTRMEDWLTAKLAYEGLASKTYLSKTLAQYTSKTCSNCGFTITSADYDRVLEKLKKTATGWMTTINGKELKVEGQITYYNRYKRQNVVKDLSVELDRLSEESVNNDISSWTKGRSGEALSLLKKRFSHRPVQEKFVCLNCGFETHADEQAALNIARSWLFLRSQEYKKYQTNKTTGNTDKRAFVETWQSFYRKKLKEVWKPAV

SEQ ID NO: 46680 - protein, 979 aa, synthetic construct
  REGION 1..979: note = engineered CasX variant
QEIKRINKIRRRLVKDSNTKKAGKTGPMKTLLVRVMTPDLRERLENLRKKPENIPQPISNTSRANLNKLLTDYTEMKKAILHVYWEEFQKDPVGLMSRVAQPASKKIDQNKLKPEMDEKGNLTTAGFACSQCGQPLFVYKLEQVSEKGKAYTNYFGRCNVAEHEKLILLAQLKPEKDSDEAVTYSLGKFGQRALDFYSIHVTKESTHPVKPLAQIAGNRYASYPVGKALSDACMGTIASFLSKYQDIIIEHQKVVKGNQKRLESLRELAGKENLEYPSVTLPPQPHTKEGVDAYNEVIARVRMWVNLNLWQKLKLSRDDAKPLLRLKGFPSFPLVERQANEVDWWDMVCNVKKLINEKKEDGKVFWQNLAGYKRQEALRPYLSSEEDRKKGKKFARYQLGDLLLHLEKKHGEDWGKVYDEAWERIDKKVEGLSKHIKLEEERRSEDAQSKAALTDWLRAKASFVIEGLKEADDKDEFCRCELKLQKWYGDLRGKPFAIEAENSILDISGFSKQYNCAFIWQKDGVKKLNLYLIINYFKGGKLRFKKIKPEAFEANRFYTVINKKSGEIVPMEVNFNFDDPNLIILPLAFGKRQGREFIWNDLLSLETGSLKLANGRVIEKTLYNRRTRQDEPALFVALTFERREVLDSSNIKPMNLIGVDRGENIPAVIALTDPEGCPLSRFKDSLGNPTHILRIGESYKEKQRTIQAKKEVEQRRAGGYSRKYASKAKNLADDMVRNTARDLLYYAVTQDAMLIFENLSRGFGRQGKRTFMAERQYTRMEDWLTAKLAYEGLASKTYLSKTLAQYTSKTCSNCGFTITSADYDRVLEKLKKTATGWMTTINGKELKVEGQITYYNRYKRQNVVKDLSVELDRLSEESVNNDISSWTKGRSGEALSLLKKRFSHRPVQEKFVCLNCGFETHADEQAALNIARSWLFLRSQEYKKYQTNKTTGNTDKRAFVETWQSFYRKKLKEVWKPAV

SEQ ID NO: 46681 - protein, 979 aa, synthetic construct
  REGION 1..979: note = engineered CasX variant
QEIKRINKIRRRLVKDSNTKKAGKTGPMKTLLVRVMTPDLRERLENLRKKPENIPQPISNTSRANLNKLLTDYTEMKKAILHVYWEEFQKDPVGLMSRVAQPASKKIDQNKLKPEMDEKGNLTTAGFACSQCGQPLFVYKLEQVSEKGKAYTNYFGRCNVAEHEKLILLAQLKPEKDSDEAVTYSLGKFGQRALDFYSIHVTKESTHPVKPLAQIAGNRYASHPVGKALSDACMGTIASFLSKYQDIIIEHQKVVKGNQKRLESLRELAGKENLEYPSVTLPPQPHTKEGVDAYNEVIARVRMWVNLNLWQKLKLSRDDAKPLLRLKGFPSFPLVERQANEVDWWDMVCNVKKLINEKKEDGKVFWQNLAGYKRQEALRPYLSSEEDRKKGKKFARYQLGDLLLHLEKKHGEDWGKVYDEAWERIDKKVEGLSKHIKLEEERRSEDAQSKAALTDWLRAKASFVIEGLKEADDKDEFCRCELKLQKWYGDLRGKPFAIEAENSILDISGFSKQYNCAFIWQKDGVKKLNLYLIINYFKGGKLRFKKIKPEAFEANRFYTVINKKSGEIVPMEVNFNFDDPNLIILPLAFGKRQGREFIWNDLLSLETGSLKLANGRVIEKTLYNRRTRQDEPALFVALTFERREVLDSSNIKPMNLIGVDRGENIPAVIALTDPEGCPLSRFKDSLGNPTHILRIGESYKEKQRTIQAKKEVEQRRAGGYSRKYASKAKNLADDMVRNTARDLLYYAVTQDAMLIFENLSRGFGRQGKRTFMAERQYTRMEDWLTAKLAYEGLASKTYLSKTLAQYTSKTCSNCGFTITSADYDRVLEKLKKTATGWMTTINGKELKVEGQITYYNRYKRQNVVKDLSVELDRLSEESVNNDISSWTKGRSGEALSLLKKRFSHRPVQEKFVCLNCGFETHADEQAALNIARSWLFLRSQEYKKYQTNKTTGNTDKRAFVETWQSFYRKKLKEVWKPAV

SEQ ID NO: 46682 - protein, 979 aa, synthetic construct
  REGION 1..979: note = engineered CasX variant
QEIKRINKIRRRLVKDSNTKKAGKTGPMKTLLVRVMTPDLRERLENLRKKPENIPQPISNTSRANLNKLLTDYTEMKKAILHVYWEEFQKDPVGLMSRVAQPASKKIDQNKLKPEMDEKGNLTTAGFACSQCGQPLFVYKLEQVSEKGKAYTNYFGRCNVAEHEKLILLAQLKPEKDSDEAVTYSLGKFGQRALDFYSIHVTKESTHPVKPLAQIAGNRYASSPVGKALSDACMGTIASFLSKYQDIIIEHQKVVKGNQKRLESLRELAGKENLEYPSVTLPPQPHTKEGVDAYNEVIARVRMWVNLNLWQKLKLSRDDAKPLLRLKGFPSFPLVERQANEVDWWDMVCNVKKLINEKKEDGKVFWQNLAGYKRQEALRPYLSSEEDRKKGKKFARYQLGDLLLHLEKKHGEDWGKVYDEAWERIDKKVEGLSKHIKLEEERRSEDAQSKAALTDWLRAKASFVIEGLKEADDKDEFCRCELKLQKWYGDLRGKPFAIEAENSILDISGFSKQYNCAFIWQKDGVKKLNLYLIINYFKGGKLRFKKIKPEAFEANRFYTVINKKSGEIVPMEVNFNFDDPNLIILPLAFGKRQGREFIWNDLLSLETGSLKLANGRVIEKTLYNRRTRQDEPALFVALTFERREVLDSSNIKPMNLIGVDRGENIPAVIALTDPEGCPLSRFKDSLGNPTHILRIGESYKEKQRTIQAKKEVEQRRAGGYSRKYASKAKNLADDMVRNTARDLLYYAVTQDAMLIFENLSRGFGRQGKRTFMAERQYTRMEDWLTAKLAYEGLASKTYLSKTLAQYTSKTCSNCGFTITSADYDRVLEKLKKTATGWMTTINGKELKVEGQITYYNRYKRQNVVKDLSVELDRLSEESVNNDISSWTKGRSGEALSLLKKRFSHRPVQEKFVCLNCGFETHADEQAALNIARSWLFLRSQEYKKYQTNKTTGNTDKRAFVETWQSFYRKKLKEVWKPAV

SEQ ID NO: 46683 - protein, 979 aa, synthetic construct
  REGION 1..979: note = engineered CasX variant
QEIKRINKIRRRLVKDSNTKKAGKTGPMKTLLVRVMTPDLRERLENLRKKPENIPQPISNTSRANLNKLLTDYTEMKKAILHVYWEEFQKDPVGLMSRVAQPASKKIDQNKLKPEMDEKGNLTTAGFACSQCGQPLFVYKLEQVSEKGKAYTNYFGRCNVAEHEKLILLAQLKPEKDSDEAVTYSLGKFGQRALDFYSIHVTKESTHPVKPLAQIAGNRYASTPVGKALSDACMGTIASFLSKYQDIIIEHQKVVKGNQKRLESLRELAGKENLEYPSVTLPPQPHTKEGVDAYNEVIARVRMWVNLNLWQKLKLSRDDAKPLLRLKGFPSFPLVERQANEVDWWDMVCNVKKLINEKKEDGKVFWQNLAGYKRQEALRPYLSSEEDRKKGKKFARYQLGDLLLHLEKKHGEDWGKVYDEAWERIDKKVEGLSKHIKLEEERRSEDAQSKAALTDWLRAKASFVIEGLKEADDKDEFCRCELKLQKWYGDLRGKPFAIEAENSILDISGFSKQYNCAFIWQKDGVKKLNLYLIINYFKGGKLRFKKIKPEAFEANRFYTVINKKSGEIVPMEVNFNFDDPNLIILPLAFGKRQGREFIWNDLLSLETGSLKLANGRVIEKTLYNRRTRQDEPALFVALTFERREVLDSSNIKPMNLIGVDRGENIPAVIALTDPEGCPLSRFKDSLGNPTHILRIGESYKEKQRTIQAKKEVEQRRAGGYSRKYASKAKNLADDMVRNTARDLLYYAVTQDAMLIFENLSRGFGRQGKRTFMAERQYTRMEDWLTAKLAYEGLASKTYLSKTLAQYTSKTCSNCGFTITSADYDRVLEKLKKTATGWMTTINGKELKVEGQITYYNRYKRQNVVKDLSVELDRLSEESVNNDISSWTKGRSGEALSLLKKRFSHRPVQEKFVCLNCGFETHADEQAALNIARSWLFLRSQEYKKYQTNKTTGNTDKRAFVETWQSFYRKKLKEVWKPAV

SEQ ID NO: 46684 - protein, 979 aa, synthetic construct
  REGION 1..979: note = engineered CasX variant
QEIKRINKIRRRLVKDSNTKKAGKTGPMKTLLVRVMTPDLRERLENLRKKPENIPQPISNTSRANLNKLLTDYTEMKKAILHVYWEEFQKDPVGLMSRVAQPASKKIDQNKLKPEMDEKGNLTTAGFACSQCGQPLFVYKLEQVSEKGKAYTNYFGRCNVAEHEKLILLAQLKPEKDSDEAVTYSLGKFGQRALDFYSIHVTKESTHPVKPLAQIAGNRYASAPVGKALSDACMGTIASFLSKYQDIIIEHQKVVKGNQKRLESLRELAGKENLEYPSVTLPPQPHTKEGVDAYNEVIARVRMWVNLNLWQKLKLSRDDAKPLLRLKGFPSFPLVERQANEVDWWDMVCNVKKLINEKKEDGKVFWQNLAGYKRQEALRPYLSSEEDRKKGKKFARYQLGDLLLHLEKKHGEDWGKVYDEAWERIDKKVEGLSKHIKLEEERRSEDAQSKAALTDWLRAKASFVIEGLKEADDKDEFCRCELKLQKWYGDLRGKPFAIEAENSILDISGFSKQYNCAFIWQKDGVKKLNLYLIINYFKGGKLRFKKIKPEAFEANRFYTVINKKSGEIVPMEVNFNFDDPNLIILPLAFGKRQGREFIWNDLLSLETGSLKLANGRVIEKTLYNRRTRQDEPALFVALTFERREVLDSSNIKPMNLIGVDRGENIPAVIALTDPEGCPLSRFKDSLGNPTHILRIGESYKEKQRTIQAKKEVEQRRAGGYSRKYASKAKNLADDMVRNTARDLLYYAVTQDAMLIFENLSRGFGRQGKRTFMAERQYTRMEDWLTAKLAYEGLASKTYLSKTLAQYTSKTCSNCGFTITSADYDRVLEKLKKTATGWMTTINGKELKVEGQITYYNRYKRQNVVKDLSVELDRLSEESVNNDISSWTKGRSGEALSLLKKRFSHRPVQEKFVCLNCGFETHADEQAALNIARSWLFLRSQEYKKYQTNKTTGNTDKRAFVETWQSFYRKKLKEVWKPAV

SEQ ID NO: 46685 - protein, 979 aa, synthetic construct
  REGION 1..979: note = engineered CasX variant
QEIKRINKIRRRLVKDSNTKKAGKTGPMKTLLVRVMTPDLRERLENLRKKPENIPQPISNTSRANLNKLLTDYTEMKKAILHVYWEEFQKDPVGLMSRVAQPASKKIDQNKLKPEMDEKGNLTTAGFACSQCGQPLFVYKLEQVSEKGKAYTNYFGRCNVAEHEKLILLAQLKPEKDSDEAVTYSLGKFGQRALDFYSIHVTKESTHPVKPLAQIAGNRYASVPVGKALSDACMGTIASFLSKYQDIIIEHQKVVKGNQKRLESLRELAGKENLEYPSVTLPPQPHTKEGVDAYNEVIARVRMWVNLNLWQKLKLSRDDAKPLLRLKGFPSFPLVERQANEVDWWDMVCNVKKLINEKKEDGKVFWQNLAGYKRQEALRPYLSSEEDRKKGKKFARYQLGDLLLHLEKKHGEDWGKVYDEAWERIDKKVEGLSKHIKLEEERRSEDAQSKAALTDWLRAKASFVIEGLKEADDKDEFCRCELKLQKWYGDLRGKPFAIEAENSILDISGFSKQYNCAFIWQKDGVKKLNLYLIINYFKGGKLRFKKIKPEAFEANRFYTVINKKSGEIVPMEVNFNFDDPNLIILPLAFGKRQGREFIWNDLLSLETGSLKLANGRVIEKTLYNRRTRQDEPALFVALTFERREVLDSSNIKPMNLIGVDRGENIPAVIALTDPEGCPLSRFKDSLGNPTHILRIGESYKEKQRTIQAKKEVEQRRAGGYSRKYASKAKNLADDMVRNTARDLLYYAVTQDAMLIFENLSRGFGRQGKRTFMAERQYTRMEDWLTAKLAYEGLASKTYLSKTLAQYTSKTCSNCGFTITSADYDRVLEKLKKTATGWMTTINGKELKVEGQITYYNRYKRQNVVKDLSVELDRLSEESVNNDISSWTKGRSGEALSLLKKRFSHRPVQEKFVCLNCGFETHADEQAALNIARSWLFLRSQEYKKYQTNKTTGNTDKRAFVETWQSFYRKKLKEVWKPAV

SEQ ID NO: 46686 - protein, 979 aa, synthetic construct
  REGION 1..979: note = engineered CasX variant
QEIKRINKIRRRLVKDSNTKKAGKTGPMKTLLVRVMTPDLRERLENLRKKPENIPQPISNTSRANLNKLLTDYTEMKKAILHVYWEEFQKDPVGLMSRVAQPASKKIDQNKLKPEMDEKGNLTTAGFACSQCGQPLFVYKLEQVSEKGKAYTNYFGRCNVAEHEKLIKLAQLKPEKDSDEAVTYSLGKFGQRALDFYSIHVTKESTHPVKPLAQIAGNRYASGPVGKALSDACMGTIASFLSKYQDIIIEHQKVVKGNQKRLESLRELAGKENLEYPSVTLPPQPHTKEGVDAYNEVIARVRMWVNLNLWQKLKLSRDDAKPLLRLKGFPSFPLVERQANEVDWWDMVCNVKKLINEKKEDGKVFWQNLAGYKRQEALRPYLSSEEDRKKGKKFARYQLGDLLLHLEKKHGEDWGKVYDEAWERIDKKVEGLSKHIKLEEERRSEDAQSKAALTDWLRAKASFVIEGLKEADDKDEFCRCELKLQKWYGDLRGKPFAIEAENSILDISGFSKQYNCAFIWQKDGVKKLNLYLIINYFKGGKLRFKKIKPEAFEANRFYTVINKKSGEIVPMEVNFNFDDPNLIILPLAFGKRQGREFIWNDLLSLETGSLKLANGRVIEKTLYNRRTRQDEPALFVALTFERREVLDSSNIKPMNLIGVDRGENIPAVIALTDPEGCPLSRFKDSLGNPTHILRIGESYKEKQRTIQAKKEVEQRRAGGYSRKYASKAKNLADDMVRNTARDLLYYAVTQDAMLIFENLSRGFGRQGKRTFMAERQYTRMEDWLTAKLAYEGLASKTYLSKTLAQYTSKTCSNCGFTITSADYDRVLEKLKKTATGWMTTINGKELKVEGQITYYNRYKRQNVVKDLSVELDRLSEESVNNDISSWTKGRSGEALSLLKKRFSHRPVQEKFVCLNCGFETHADEQAALNIARSWLFLRSQEYKKYQTNKTTGNTDKRAFVETWQSFYRKKLKEVWKPAV

SEQ ID NO: 46687 - protein, 978 aa, synthetic construct
  REGION 1..978: note = engineered CasX variant
QEIKRINKIRRRLVKDSNTKKAGKTGPMKTLLVRVMTPDLRERLENLRKKPENIPQPISNTSRANLNKLLTDYTEMKKAILHVYWEEFQKDPVGLMSRVAQPASKKIDQNKLKPEMDEKGNLTTAGFACSQCGQPLFVYKLEQVSEKGKAYTNYFGRCNVAEHEKLILLAQLKPEKDSDEAVTYSLGKFGQRALDFYSIHVTKESTHPVKPLAQIAGNRYASPVGKALSDACMGTIASFLSKYQDIIIEHQKVVKGNQKRLESLRELAGKENLEYPSVTLPPQPHTKEGVDAYNEVIARVRMWVNLNLWQKLKLSRDDAKPLLRLKGFPSFPLVERQANEVDWWDMVCNVKKLINEKKEDGKVFWQNLAGYKRQEALRPYLSSEEDRKKGKKFARYQLGDLLLHLEKKHGEDWGKVYDEAWERIDKKVEGLSKHIKLEEERRSEDAQSKAALTDWLRAKASFVIEGLKEADDKDEFCRCELKLQKWYGDLRGKPFAIEAENSILDISGFSKQYNCAFIWQKDGVKKLNLYLIINYFKGGKLRFKKIKPEAFEANRFYTVINKKSGEIVPMEVNFNFDDPNLIILPLAFGKRQGREFIWNDLLSLETGSLKLANGRVIEKTLYNRRTRQDEPALFVALTFERREVLDSSNIKPMNLIGVDRGENIPAVIALTDPEGCPLSRFKDSLGNPTHILRIGESYKEKQRTIQAKKEVEQRRAGGYSRKYASKAKNLADDMVRNTARDLLYYAVTQDAMLIFENLSRGFGRQGKRTFMAERQYTRMEDWLTAKLAYEGLASKTYLSKTLAQYTSKTCSNCGFTITSADYDRVLEKLKKTATGWMTTINGKELKVEGQITYYNRYKRQNVVKDLSVELDRLSEESVNNDISSWTKGRSGEALSLLKKRFSHRPVQEKFVCLNCGFETHADEQAALNIARSWLFLRSQEYKKYQTNKTTGNTDKRAFVETWQSFYRKKLKEVWKPAV

SEQ ID NO: 46688 - protein, 979 aa, synthetic construct
  REGION 1..979: note = engineered CasX variant
QEIKRINKIRRRLVKDSNTKKAGKTGPMKTLLVRVMTPDLRERLENLRKKPENIPQPISNTSRANLNKLLTDYTEMKKAILHVYWEEFQKDPVGLMSRVAQPASKKIDQNKLKPEMDEKGNLTTAGFACSQCGQPLFVYKLEQVSEKGKAYTNYFGRCNVAEHEKLILLAQLKPEKDSDEAVTYSLGKFGQRALDFYSIHVTKESTHPVKPLAQIAGNRYASYPVGKALSDACMGTIASFLSKYQDIIIEHQKVVKGNQKRLESLRELAGKENLEYPSVTLPPQPHTKEGVDAYNEVIARVRMWVNLNLWQKLKLSRDDAKPLLRLKGFPSFPLVERQANEVDWWDMVCNVKKLINEKKEDGKVFWQNLAGYKRQEALRPYLSSEEDRKKGKKFARYQLGDLLLHLEKKHGEDWGKVYDEAWERIDKKVEGLSKHIKLEEERRSEDAQSKAALTDWLRAKASFVIEGLKEADKDEFCRCELKLQKWYGDLRGKPFAIEAENSILDISGFSKQYNCAFIWQKDGVKKLNLYLIINYFKGGKLRFKKIKPEAFEANRFYTVINKKSGEIVPMEVNFNFDDPNLIILPLAFGKRQGREFIWNDLLSLETGSLKLANGRVIEKTLYNRRTRQDEPALFVALTFERREVLDSSNIKPMNLIGVDRGENIPAVIALTDPEGCPLSRFKDSLGNPTHILRIGESYKEKQRTIQAKKEVEQRRAGGYSRKYASKAKNLADDMVRNTARDLLYYAVTQDAMLIFENLSRGFGRQGKRTFMAERQYTRMEDWLTAKLAYEGLASKTYLSKTLAQYTSKTCSNCGFTITSADYDRVLEKLKKTATGWMTTINGKELKVEGQITYYNRYKRQNVVKDLSVELDRLSEESVNNDISSWTKGRSGNEALSLLKKRFSHRPVQEKFVCLNCGFETHADEQAALNIARSWLFLRSQEYKKYQTNKTTGNTDKRAFVETWQSFYRKKLKEVWKPAV

SEQ ID NO: 46689 - protein, 979 aa, synthetic construct
  REGION 1..979: note = engineered CasX variant
QEIKRINKIRRRLVKDSNTKKAGKTGPMKTLLVRVMTPDLRERLENLRKKPENIPQPISNTSRANLNKLLTDYTEMKKAILHVYWEEFQKDPVGLMSRVAQPASKKIDQNKLKPEMDEKGNLTTAGFACSQCGQPLFVYKLEQVSEKGKAYTNYFGRCNVAEHEKLILLAQLKPEKDSDEAVTYSLGKFGQRALDFYSIHVTKESTHPVKPLAQIAGNRYASHPVGKALSDACMGTIASFLSKYQDIIIEHQKVVKGNQKRLESLRELAGKENLEYPSVTLPPQPHTKEGVDAYNEVIARVRMWVNLNLWQKLKLSRDDAKPLLRLKGFPSFPLVERQANEVDWWDMVCNVKKLINEKKEDGKVFWQNLAGYKRQEALRPYLSSEEDRKKGKKFARYQLGDLLLHLEKKHGEDWGKVYDEAWERIDKKVEGLSKHIKLEEERRSEDAQSKAALTDWLRAKASFVIEGLKEADKDEFCRCELKLQKWYGDLRGKPFAIEAENSILDISGFSKQYNCAFIWQKDGVKKLNLYLIINYFKGGKLRFKKIKPEAFEANRFYTVINKKSGEIVPMEVNFNFDDPNLIILPLAFGKRQGREFIWNDLLSLETGSLKLANGRVIEKTLYNRRTRQDEPALFVALTFERREVLDSSNIKPMNLIGVDRGENIPAVIALTDPEGCPLSRFKDSLGNPTHILRIGESYKEKQRTIQAKKEVEQRRAGGYSRKYASKAKNLADDMVRNTARDLLYYAVTQDAMLIFENLSRGFGRQGKRTFMAERQYTRMEDWLTAKLAYEGLASKTYLSKTLAQYTSKTCSNCGFTITSADYDRVLEKLKKTATGWMTTINGKELKVEGQITYYNRYKRQNVVKDLSVELDRLSEESVNNDISSWTKGRSGNEALSLLKKRFSHRPVQEKFVCLNCGFETHADEQAALNIARSWLFLRSQEYKKYQTNKTTGNTDKRAFVETWQSFYRKKLKEVWKPAV

SEQ ID NO: 46690 - protein, 979 aa, synthetic construct
  REGION 1..979: note = engineered CasX variant
QEIKRINKIRRRLVKDSNTKKAGKTGPMKTLLVRVMTPDLRERLENLRKKPENIPQPISNTSRANLNKLLTDYTEMKKAILHVYWEEFQKDPVGLMSRVAQPASKKIDQNKLKPEMDEKGNLTTAGFACSQCGQPLFVYKLEQVSEKGKAYTNYFGRCNVAEHEKLILLAQLKPEKDSDEAVTYSLGKFGQRALDFYSIHVTKESTHPVKPLAQIAGNRYASSPVGKALSDACMGTIASFLSKYQDIIIEHQKVVKGNQKRLESLRELAGKENLEYPSVTLPPQPHTKEGVDAYNEVIARVRMWVNLNLWQKLKLSRDDAKPLLRLKGFPSFPLVERQANEVDWWDMVCNVKKLINEKKEDGKVFWQNLAGYKRQEALRPYLSSEEDRKKGKKFARYQLGDLLLHLEKKHGEDWGKVYDEAWERIDKKVEGLSKHIKLEEERRSEDAQSKAALTDWLRAKASFVIEGLKEADKDEFCRCELKLQKWYGDLRGKPFAIEAENSILDISGFSKQYNCAFIWQKDGVKKLNLYLIINYFKGGKLRFKKIKPEAFEANRFYTVINKKSGEIVPMEVNFNFDDPNLIILPLAFGKRQGREFIWNDLLSLETGSLKLANGRVIEKTLYNRRTRQDEPALFVALTFERREVLDSSNIKPMNLIGVDRGENIPAVIALTDPEGCPLSRFKDSLGNPTHILRIGESYKEKQRTIQAKKEVEQRRAGGYSRKYASKAKNLADDMVRNTARDLLYYAVTQDAMLIFENLSRGFGRQGKRTFMAERQYTRMEDWLTAKLAYEGLASKTYLSKTLAQYTSKTCSNCGFTITSADYDRVLEKLKKTATGWMTTINGKELKVEGQITYYNRYKRQNVVKDLSVELDRLSEESVNNDISSWTKGRSGNEALSLLKKRFSHRPVQEKFVCLNCGFETHADEQAALNIARSWLFLRSQEYKKYQTNKTTGNTDKRAFVETWQSFYRKKLKEVWKPAV

SEQ ID NO: 46691 - protein, 979 aa, synthetic construct
  REGION 1..979: note = engineered CasX variant
QEIKRINKIRRRLVKDSNTKKAGKTGPMKTLLVRVMTPDLRERLENLRKKPENIPQPISNTSRANLNKLLTDYTEMKKAILHVYWEEFQKDPVGLMSRVAQPASKKIDQNKLKPEMDEKGNLTTAGFACSQCGQPLFVYKLEQVSEKGKAYTNYFGRCNVAEHEKLILLAQLKPEKDSDEAVTYSLGKFGQRALDFYSIHVTKESTHPVKPLAQIAGNRYASTPVGKALSDACMGTIASFLSKYQDIIIEHQKVVKGNQKRLESLRELAGKENLEYPSVTLPPQPHTKEGVDAYNEVIARVRMWVNLNLWQKLKLSRDDAKPLLRLKGFPSFPLVERQANEVDWWDMVCNVKKLINEKKEDGKVFWQNLAGYKRQEALRPYLSSEEDRKKGKKFARYQLGDLLLHLEKKHGEDWGKVYDEAWERIDKKVEGLSKHIKLEEERRSEDAQSKAALTDWLRAKASFVIEGLKEADKDEFCRCELKLQKWYGDLRGKPFAIEAENSILDISGFSKQYNCAFIWQKDGVKKLNLYLIINYFKGGKLRFKKIKPEAFEANRFYTVINKKSGEIVPMEVNFNFDDPNLIILPLAFGKRQGREFIWNDLLSLETGSLKLANGRVIEKTLYNRRTRQDEPALFVALTFERREVLDSSNIKPMNLIGVDRGENIPAVIALTDPEGCPLSRFKDSLGNPTHILRIGESYKEKQRTIQAKKEVEQRRAGGYSRKYASKAKNLADDMVRNTARDLLYYAVTQDAMLIFENLSRGFGRQGKRTFMAERQYTRMEDWLTAKLAYEGLASKTYLSKTLAQYTSKTCSNCGFTITSADYDRVLEKLKKTATGWMTTINGKELKVEGQITYYNRYKRQNVVKDLSVELDRLSEESVNNDISSWTKGRSGNEALSLLKKRFSHRPVQEKFVCLNCGFETHADEQAALNIARSWLFLRSQEYKKYQTNKTTGNTDKRAFVETWQSFYRKKLKEVWKPAV

SEQ ID NO: 46692 - protein, 979 aa, synthetic construct
  REGION 1..979: note = engineered CasX variant
QEIKRINKIRRRLVKDSNTKKAGKTGPMKTLLVRVMTPDLRERLENLRKKPENIPQPISNTSRANLNKLLTDYTEMKKAILHVYWEEFQKDPVGLMSRVAQPASKKIDQNKLKPEMDEKGNLTTAGFACSQCGQPLFVYKLEQVSEKGKAYTNYFGRCNVAEHEKLILLAQLKPEKDSDEAVTYSLGKFGQRALDFYSIHVTKESTHPVKPLAQIAGNRYASAPVGKALSDACMGTIASFLSKYQDIIIEHQKVVKGNQKRLESLRELAGKENLEYPSVTLPPQPHTKEGVDAYNEVIARVRMWVNLNLWQKLKLSRDDAKPLLRLKGFPSFPLVERQANEVDWWDMVCNVKKLINEKKEDGKVFWQNLAGYKRQEALRPYLSSEEDRKKGKKFARYQLGDLLLHLEKKHGEDWGKVYDEAWERIDKKVEGLSKHIKLEEERRSEDAQSKAALTDWLRAKASFVIEGLKEADKDEFCRCELKLQKWYGDLRGKPFAIEAENSILDISGFSKQYNCAFIWQKDGVKKLNLYLIINYFKGGKLRFKKIKPEAFEANRFYTVINKKSGEIVPMEVNFNFDDPNLIILPLAFGKRQGREFIWNDLLSLETGSLKLANGRVIEKTLYNRRTRQDEPALFVALTFERREVLDSSNIKPMNLIGVDRGENIPAVIALTDPEGCPLSRFKDSLGNPTHILRIGESYKEKQRTIQAKKEVEQRRAGGYSRKYASKAKNLADDMVRNTARDLLYYAVTQDAMLIFENLSRGFGRQGKRTFMAERQYTRMEDWLTAKLAYEGLASKTYLSKTLAQYTSKTCSNCGFTITSADYDRVLEKLKKTATGWMTTINGKELKVEGQITYYNRYKRQNVVKDLSVELDRLSEESVNNDISSWTKGRSGNEALSLLKKRFSHRPVQEKFVCLNCGFETHADEQAALNIARSWLFLRSQEYKKYQTNKTTGNTDKRAFVETWQSFYRKKLKEVWKPAV

SEQ ID NO: 46693 - protein, 979 aa, synthetic construct
  REGION 1..979: note = engineered CasX variant
QEIKRINKIRRRLVKDSNTKKAGKTGPMKTLLVRVMTPDLRERLENLRKKPENIPQPISNTSRANLNKLLTDYTEMKKAILHVYWEEFQKDPVGLMSRVAQPASKKIDQNKLKPEMDEKGNLTTAGFACSQCGQPLFVYKLEQVSEKGKAYTNYFGRCNVAEHEKLILLAQLKPEKDSDEAVTYSLGKFGQRALDFYSIHVTKESTHPVKPLAQIAGNRYASVPVGKALSDACMGTIASFLSKYQDIIIEHQKVVKGNQKRLESLRELAGKENLEYPSVTLPPQPHTKEGVDAYNEVIARVRMWVNLNLWQKLKLSRDDAKPLLRLKGFPSFPLVERQANEVDWWDMVCNVKKLINEKKEDGKVFWQNLAGYKRQEALRPYLSSEEDRKKGKKFARYQLGDLLLHLEKKHGEDWGKVYDEAWERIDKKVEGLSKHIKLEEERRSEDAQSKAALTDWLRAKASFVIEGLKEADKDEFCRCELKLQKWYGDLRGKPFAIEAENSILDISGFSKQYNCAFIWQKDGVKKLNLYLIINYFKGGKLRFKKIKPEAFEANRFYTVINKKSGEIVPMEVNFNFDDPNLIILPLAFGKRQGREFIWNDLLSLETGSLKLANGRVIEKTLYNRRTRQDEPALFVALTFERREVLDSSNIKPMNLIGVDRGENIPAVIALTDPEGCPLSRFKDSLGNPTHILRIGESYKEKQRTIQAKKEVEQRRAGGYSRKYASKAKNLADDMVRNTARDLLYYAVTQDAMLIFENLSRGFGRQGKRTFMAERQYTRMEDWLTAKLAYEGLASKTYLSKTLAQYTSKTCSNCGFTITSADYDRVLEKLKKTATGWMTTINGKELKVEGQITYYNRYKRQNVVKDLSVELDRLSEESVNNDISSWTKGRSGNEALSLLKKRFSHRPVQEKFVCLNCGFETHADEQAALNIARSWLFLRSQEYKKYQTNKTTGNTDKRAFVETWQSFYRKKLKEVWKPAV

SEQ ID NO: 46694 - protein, 979 aa, synthetic construct
  REGION 1..979: note = engineered CasX variant
QEIKRINKIRRRLVKDSNTKKAGKTGPMKTLLVRVMTPDLRERLENLRKKPENIPQPISNTSRANLNKLLTDYTEMKKAILHVYWEEFQKDPVGLMSRVAQPASKKIDQNKLKPEMDEKGNLTTAGFACSQCGQPLFVYKLEQVSEKGKAYTNYFGRCNVAEHEKLIKLAQLKPEKDSDEAVTYSLGKFGQRALDFYSIHVTKESTHPVKPLAQIAGNRYASGPVGKALSDACMGTIASFLSKYQDIIIEHQKVVKGNQKRLESLRELAGKENLEYPSVTLPPQPHTKEGVDAYNEVIARVRMWVNLNLWQKLKLSRDDAKPLLRLKGFPSFPLVERQANEVDWWDMVCNVKKLINEKKEDGKVFWQNLAGYKRQEALRPYLSSEEDRKKGKKFARYQLGDLLLHLEKKHGEDWGKVYDEAWERIDKKVEGLSKHIKLEEERRSEDAQSKAALTDWLRAKASFVIEGLKEADKDEFCRCELKLQKWYGDLRGKPFAIEAENSILDISGFSKQYNCAFIWQKDGVKKLNLYLIINYFKGGKLRFKKIKPEAFEANRFYTVINKKSGEIVPMEVNFNFDDPNLIILPLAFGKRQGREFIWNDLLSLETGSLKLANGRVIEKTLYNRRTRQDEPALFVALTFERREVLDSSNIKPMNLIGVDRGENIPAVIALTDPEGCPLSRFKDSLGNPTHILRIGESYKEKQRTIQAKKEVEQRRAGGYSRKYASKAKNLADDMVRNTARDLLYYAVTQDAMLIFENLSRGFGRQGKRTFMAERQYTRMEDWLTAKLAYEGLASKTYLSKTLAQYTSKTCSNCGFTITSADYDRVLEKLKKTATGWMTTINGKELKVEGQITYYNRYKRQNVVKDLSVELDRLSEESVNNDISSWTKGRSGNEALSLLKKRFSHRPVQEKFVCLNCGFETHADEQAALNIARSWLFLRSQEYKKYQTNKTTGNTDKRAFVETWQSFYRKKLKEVWKPAV

SEQ ID NO: 46695 - protein, 978 aa, synthetic construct
  REGION 1..978: note = engineered CasX variant
QEIKRINKIRRRLVKDSNTKKAGKTGPMKTLLVRVMTPDLRERLENLRKKPENIPQPISNTSRANLNKLLTDYTEMKKAILHVYWEEFQKDPVGLMSRVAQPASKKIDQNKLKPEMDEKGNLTTAGFACSQCGQPLFVYKLEQVSEKGKAYTNYFGRCNVAEHEKLILLAQLKPEKDSDEAVTYSLGKFGQRALDFYSIHVTKESTHPVKPLAQIAGNRYASPVGKALSDACMGTIASFLSKYQDIIIEHQKVVKGNQKRLESLRELAGKENLEYPSVTLPPQPHTKEGVDAYNEVIARVRMWVNLNLWQKLKLSRDDAKPLLRLKGFPSFPLVERQANEVDWWDMVCNVKKLINEKKEDGKVFWQNLAGYKRQEALRPYLSSEEDRKKGKKFARYQLGDLLLHLEKKHGEDWGKVYDEAWERIDKKVEGLSKHIKLEEERRSEDAQSKAALTDWLRAKASFVIEGLKEADKDEFCRCELKLQKWYGDLRGKPFAIEAENSILDISGFSKQYNCAFIWQKDGVKKLNLYLIINYFKGGKLRFKKIKPEAFEANRFYTVINKKSGEIVPMEVNFNFDDPNLIILPLAFGKRQGREFIWNDLLSLETGSLKLANGRVIEKTLYNRRTRQDEPALFVALTFERREVLDSSNIKPMNLIGVDRGENIPAVIALTDPEGCPLSRFKDSLGNPTHILRIGESYKEKQRTIQAKKEVEQRRAGGYSRKYASKAKNLADDMVRNTARDLLYYAVTQDAMLIFENLSRGFGRQGKRTFMAERQYTRMEDWLTAKLAYEGLASKTYLSKTLAQYTSKTCSNCGFTITSADYDRVLEKLKKTATGWMTTINGKELKVEGQITYYNRYKRQNVVKDLSVELDRLSEESVNNDISSWTKGRSGNEALSLLKKRFSHRPVQEKFVCLNCGFETHADEQAALNIARSWLFLRSQEYKKYQTNKTTGNTDKRAFVETWQSFYRKKLKEVWKPAV

SEQ ID NO: 46696 - protein, 978 aa, synthetic construct
  REGION 1..978: note = engineered CasX variant
QEIKRINKIRRRLVKDSNTKKAGKTGPMKTLLVRVMTPDLRERLENLRKKPENIPQPISNTSRANLNKLLTDYTEMKKAILHVYWEEFQKDPVGLMSRVAQPASKKIDQNKLKPEMDEKGNLTTAGFACSQCGQPLFVYKLEQVSEKGKAYTNYFGRCNVAEHEKLILLAQLKPEKDSDEAVTYSLGKFGQRALDFYSIHVTKESTHPVKPLAQIAGNRYASYPVGKALSDACMGTIASFLSKYQDIIIEHQKVVKGNQKRLESLRELAGKENLEYPSVTLPPQPHTKEGVDAYNEVIARVRMWVNLNLWQKLKLSRDDAKPLLRLKGFPSFPLVERQANEVDWWDMVCNVKKLINEKKEDGKVFWQNLAGYKRQEALRPYLSSEEDRQKGKKFARYQLGDLLLHLEKKHGEDWGKVYDEAWERIDKKVEGLSKHIKLEEERRSEDAQSKAALTDWLRAKASFVIEGLKEADKDEFCRCELKLQKWYGDLRGKPFAIEAENSILDISGFSKQYNCAFIWQKDGVKKLNLYLIINYFKGGKLRFKKIKPEAFEANRFYTVINKKSGEIVPMEVNFNFDDPNLIILPLAFGKRQGREFIWNDLLSLETGSLKLANGRVIEKTLYNRRTRQDEPALFVALTFERREVLDSSNIKPMNLIGVDRGENIPAVIALTDPEGCPLSRFKDSLGNPTHILRIGESYKEKQRTIQAKKEVEQRRAGGYSRKYASKAKNLADDMVRNTARDLLYYAVTQDAMLIFENLSRGFGRQGKRTFMAERQYTRMEDWLTAKLAYEGLASKTYLSKTLAQYTSKTCSNCGFTITSADYDRVLEKLKKTATGWMTTINGKELKVEGQITYYNRYKRQNVVKDLSVELDRLSEESVNNDISSWTKGRSGEALSLLKKRFSHRPVQEKFVCLNCGFETHADEQAALNIARSWLFLRSQEYKKYQTNKTTGNTDKRAFVETWQSFYRKKLKEVWKPAV

SEQ ID NO: 46697 - protein, 978 aa, synthetic construct
  REGION 1..978: note = engineered CasX variant
QEIKRINKIRRRLVKDSNTKKAGKTGPMKTLLVRVMTPDLRERLENLRKKPENIPQPISNTSRANLNKLLTDYTEMKKAILHVYWEEFQKDPVGLMSRVAQPASKKIDQNKLKPEMDEKGNLTTAGFACSQCGQPLFVYKLEQVSEKGKAYTNYFGRCNVAEHEKLILLAQLKPEKDSDEAVTYSLGKFGQRALDFYSIHVTKESTHPVKPLAQIAGNRYASHPVGKALSDACMGTIASFLSKYQDIIIEHQKVVKGNQKRLESLRELAGKENLEYPSVTLPPQPHTKEGVDAYNEVIARVRMWVNLNLWQKLKLSRDDAKPLLRLKGFPSFPLVERQANEVDWWDMVCNVKKLINEKKEDGKVFWQNLAGYKRQEALRPYLSSEEDRQKGKKFARYQLGDLLLHLEKKHGEDWGKVYDEAWERIDKKVEGLSKHIKLEEERRSEDAQSKAALTDWLRAKASFVIEGLKEADKDEFCRCELKLQKWYGDLRGKPFAIEAENSILDISGFSKQYNCAFIWQKDGVKKLNLYLIINYFKGGKLRFKKIKPEAFEANRFYTVINKKSGEIVPMEVNFNFDDPNLIILPLAFGKRQGREFIWNDLLSLETGSLKLANGRVIEKTLYNRRTRQDEPALFVALTFERREVLDSSNIKPMNLIGVDRGENIPAVIALTDPEGCPLSRFKDSLGNPTHILRIGESYKEKQRTIQAKKEVEQRRAGGYSRKYASKAKNLADDMVRNTARDLLYYAVTQDAMLIFENLSRGFGRQGKRTFMAERQYTRMEDWLTAKLAYEGLASKTYLSKTLAQYTSKTCSNCGFTITSADYDRVLEKLKKTATGWMTTINGKELKVEGQITYYNRYKRQNVVKDLSVELDRLSEESVNNDISSWTKGRSGEALSLLKKRFSHRPVQEKFVCLNCGFETHADEQAALNIARSWLFLRSQEYKKYQTNKTTGNTDKRAFVETWQSFYRKKLKEVWKPAV

SEQ ID NO: 46698 - protein, 978 aa, synthetic construct
  REGION 1..978: note = engineered CasX variant
QEIKRINKIRRRLVKDSNTKKAGKTGPMKTLLVRVMTPDLRERLENLRKKPENIPQPISNTSRANLNKLLTDYTEMKKAILHVYWEEFQKDPVGLMSRVAQPASKKIDQNKLKPEMDEKGNLTTAGFACSQCGQPLFVYKLEQVSEKGKAYTNYFGRCNVAEHEKLILLAQLKPEKDSDEAVTYSLGKFGQRALDFYSIHVTKESTHPVKPLAQIAGNRYASSPVGKALSDACMGTIASFLSKYQDIIIEHQKVVKGNQKRLESLRELAGKENLEYPSVTLPPQPHTKEGVDAYNEVIARVRMWVNLNLWQKLKLSRDDAKPLLRLKGFPSFPLVERQANEVDWWDMVCNVKKLINEKKEDGKVFWQNLAGYKRQEALRPYLSSEEDRQKGKKFARYQLGDLLLHLEKKHGEDWGKVYDEAWERIDKKVEGLSKHIKLEEERRSEDAQSKAALTDWLRAKASFVIEGLKEADKDEFCRCELKLQKWYGDLRGKPFAIEAENSILDISGFSKQYNCAFIWQKDGVKKLNLYLIINYFKGGKLRFKKIKPEAFEANRFYTVINKKSGEIVPMEVNFNFDDPNLIILPLAFGKRQGREFIWNDLLSLETGSLKLANGRVIEKTLYNRRTRQDEPALFVALTFERREVLDSSNIKPMNLIGVDRGENIPAVIALTDPEGCPLSRFKDSLGNPTHILRIGESYKEKQRTIQAKKEVEQRRAGGYSRKYASKAKNLADDMVRNTARDLLYYAVTQDAMLIFENLSRGFGRQGKRTFMAERQYTRMEDWLTAKLAYEGLASKTYLSKTLAQYTSKTCSNCGFTITSADYDRVLEKLKKTATGWMTTINGKELKVEGQITYYNRYKRQNVVKDLSVELDRLSEESVNNDISSWTKGRSGEALSLLKKRFSHRPVQEKFVCLNCGFETHADEQAALNIARSWLFLRSQEYKKYQTNKTTGNTDKRAFVETWQSFYRKKLKEVWKPAV

SEQ ID NO: 46699 - protein, 978 aa, synthetic construct
  REGION 1..978: note = engineered CasX variant
QEIKRINKIRRRLVKDSNTKKAGKTGPMKTLLVRVMTPDLRERLENLRKKPENIPQPISNTSRANLNKLLTDYTEMKKAILHVYWEEFQKDPVGLMSRVAQPASKKIDQNKLKPEMDEKGNLTTAGFACSQCGQPLFVYKLEQVSEKGKAYTNYFGRCNVAEHEKLILLAQLKPEKDSDEAVTYSLGKFGQRALDFYSIHVTKESTHPVKPLAQIAGNRYASTPVGKALSDACMGTIASFLSKYQDIIIEHQKVVKGNQKRLESLRELAGKENLEYPSVTLPPQPHTKEGVDAYNEVIARVRMWVNLNLWQKLKLSRDDAKPLLRLKGFPSFPLVERQANEVDWWDMVCNVKKLINEKKEDGKVFWQNLAGYKRQEALRPYLSSEEDRQKGKKFARYQLGDLLLHLEKKHGEDWGKVYDEAWERIDKKVEGLSKHIKLEEERRSEDAQSKAALTDWLRAKASFVIEGLKEADKDEFCRCELKLQKWYGDLRGKPFAIEAENSILDISGFSKQYNCAFIWQKDGVKKLNLYLIINYFKGGKLRFKKIKPEAFEANRFYTVINKKSGEIVPMEVNFNFDDPNLIILPLAFGKRQGREFIWNDLLSLETGSLKLANGRVIEKTLYNRRTRQDEPALFVALTFERREVLDSSNIKPMNLIGVDRGENIPAVIALTDPEGCPLSRFKDSLGNPTHILRIGESYKEKQRTIQAKKEVEQRRAGGYSRKYASKAKNLADDMVRNTARDLLYYAVTQDAMLIFENLSRGFGRQGKRTFMAERQYTRMEDWLTAKLAYEGLASKTYLSKTLAQYTSKTCSNCGFTITSADYDRVLEKLKKTATGWMTTINGKELKVEGQITYYNRYKRQNVVKDLSVELDRLSEESVNNDISSWTKGRSGEALSLLKKRFSHRPVQEKFVCLNCGFETHADEQAALNIARSWLFLRSQEYKKYQTNKTTGNTDKRAFVETWQSFYRKKLKEVWKPAV

SEQ ID NO: 46700 - protein, 978 aa, synthetic construct
  REGION 1..978: note = engineered CasX variant
QEIKRINKIRRRLVKDSNTKKAGKTGPMKTLLVRVMTPDLRERLENLRKKPENIPQPISNTSRANLNKLLTDYTEMKKAILHVYWEEFQKDPVGLMSRVAQPASKKIDQNKLKPEMDEKGNLTTAGFACSQCGQPLFVYKLEQVSEKGKAYTNYFGRCNVAEHEKLILLAQLKPEKDSDEAVTYSLGKFGQRALDFYSIHVTKESTHPVKPLAQIAGNRYASAPVGKALSDACMGTIASFLSKYQDIIIEHQKVVKGNQKRLESLRELAGKENLEYPSVTLPPQPHTKEGVDAYNEVIARVRMWVNLNLWQKLKLSRDDAKPLLRLKGFPSFPLVERQANEVDWWDMVCNVKKLINEKKEDGKVFWQNLAGYKRQEALRPYLSSEEDRQKGKKFARYQLGDLLLHLEKKHGEDWGKVYDEAWERIDKKVEGLSKHIKLEEERRSEDAQSKAALTDWLRAKASFVIEGLKEADKDEFCRCELKLQKWYGDLRGKPFAIEAENSILDISGFSKQYNCAFIWQKDGVKKLNLYLIINYFKGGKLRFKKIKPEAFEANRFYTVINKKSGEIVPMEVNFNFDDPNLIILPLAFGKRQGREFIWNDLLSLETGSLKLANGRVIEKTLYNRRTRQDEPALFVALTFERREVLDSSNIKPMNLIGVDRGENIPAVIALTDPEGCPLSRFKDSLGNPTHILRIGESYKEKQRTIQAKKEVEQRRAGGYSRKYASKAKNLADDMVRNTARDLLYYAVTQDAMLIFENLSRGFGRQGKRTFMAERQYTRMEDWLTAKLAYEGLASKTYLSKTLAQYTSKTCSNCGFTITSADYDRVLEKLKKTATGWMTTINGKELKVEGQITYYNRYKRQNVVKDLSVELDRLSEESVNNDISSWTKGRSGEALSLLKKRFSHRPVQEKFVCLNCGFETHADEQAALNIARSWLFLRSQEYKKYQTNKTTGNTDKRAFVETWQSFYRKKLKEVWKPAV

SEQ ID NO: 46701 - protein, 978 aa, synthetic construct
  REGION 1..978: note = engineered CasX variant
QEIKRINKIRRRLVKDSNTKKAGKTGPMKTLLVRVMTPDLRERLENLRKKPENIPQPISNTSRANLNKLLTDYTEMKKAILHVYWEEFQKDPVGLMSRVAQPASKKIDQNKLKPEMDEKGNLTTAGFACSQCGQPLFVYKLEQVSEKGKAYTNYFGRCNVAEHEKLILLAQLKPEKDSDEAVTYSLGKFGQRALDFYSIHVTKESTHPVKPLAQIAGNRYASVPVGKALSDACMGTIASFLSKYQDIIIEHQKVVKGNQKRLESLRELAGKENLEYPSVTLPPQPHTKEGVDAYNEVIARVRMWVNLNLWQKLKLSRDDAKPLLRLKGFPSFPLVERQANEVDWWDMVCNVKKLINEKKEDGKVFWQNLAGYKRQEALRPYLSSEEDRQKGKKFARYQLGDLLLHLEKKHGEDWGKVYDEAWERIDKKVEGLSKHIKLEEERRSEDAQSKAALTDWLRAKASFVIEGLKEADKDEFCRCELKLQKWYGDLRGKPFAIEAENSILDISGFSKQYNCAFIWQKDGVKKLNLYLIINYFKGGKLRFKKIKPEAFEANRFYTVINKKSGEIVPMEVNFNFDDPNLIILPLAFGKRQGREFIWNDLLSLETGSLKLANGRVIEKTLYNRRTRQDEPALFVALTFERREVLDSSNIKPMNLIGVDRGENIPAVIALTDPEGCPLSRFKDSLGNPTHILRIGESYKEKQRTIQAKKEVEQRRAGGYSRKYASKAKNLADDMVRNTARDLLYYAVTQDAMLIFENLSRGFGRQGKRTFMAERQYTRMEDWLTAKLAYEGLASKTYLSKTLAQYTSKTCSNCGFTITSADYDRVLEKLKKTATGWMTTINGKELKVEGQITYYNRYKRQNVVKDLSVELDRLSEESVNNDISSWTKGRSGEALSLLKKRFSHRPVQEKFVCLNCGFETHADEQAALNIARSWLFLRSQEYKKYQTNKTTGNTDKRAFVETWQSFYRKKLKEVWKPAV

SEQ ID NO: 46702 - protein, 978 aa, synthetic construct
  REGION 1..978: note = engineered CasX variant
QEIKRINKIRRRLVKDSNTKKAGKTGPMKTLLVRVMTPDLRERLENLRKKPENIPQPISNTSRANLNKLLTDYTEMKKAILHVYWEEFQKDPVGLMSRVAQPASKKIDQNKLKPEMDEKGNLTTAGFACSQCGQPLFVYKLEQVSEKGKAYTNYFGRCNVAEHEKLIKLAQLKPEKDSDEAVTYSLGKFGQRALDFYSIHVTKESTHPVKPLAQIAGNRYASGPVGKALSDACMGTIASFLSKYQDIIIEHQKVVKGNQKRLESLRELAGKENLEYPSVTLPPQPHTKEGVDAYNEVIARVRMWVNLNLWQKLKLSRDDAKPLLRLKGFPSFPLVERQANEVDWWDMVCNVKKLINEKKEDGKVFWQNLAGYKRQEALRPYLSSEEDRQKGKKFARYQLGDLLLHLEKKHGEDWGKVYDEAWERIDKKVEGLSKHIKLEEERRSEDAQSKAALTDWLRAKASFVIEGLKEADKDEFCRCELKLQKWYGDLRGKPFAIEAENSILDISGFSKQYNCAFIWQKDGVKKLNLYLIINYFKGGKLRFKKIKPEAFEANRFYTVINKKSGEIVPMEVNFNFDDPNLIILPLAFGKRQGREFIWNDLLSLETGSLKLANGRVIEKTLYNRRTRQDEPALFVALTFERREVLDSSNIKPMNLIGVDRGENIPAVIALTDPEGCPLSRFKDSLGNPTHILRIGESYKEKQRTIQAKKEVEQRRAGGYSRKYASKAKNLADDMVRNTARDLLYYAVTQDAMLIFENLSRGFGRQGKRTFMAERQYTRMEDWLTAKLAYEGLASKTYLSKTLAQYTSKTCSNCGFTITSADYDRVLEKLKKTATGWMTTINGKELKVEGQITYYNRYKRQNVVKDLSVELDRLSEESVNNDISSWTKGRSGEALSLLKKRFSHRPVQEKFVCLNCGFETHADEQAALNIARSWLFLRSQEYKKYQTNKTTGNTDKRAFVETWQSFYRKKLKEVWKPAV

SEQ ID NO: 46703 - protein, 977 aa, synthetic construct
  REGION 1..977: note = engineered CasX variant
QEIKRINKIRRRLVKDSNTKKAGKTGPMKTLLVRVMTPDLRERLENLRKKPENIPQPISNTSRANLNKLLTDYTEMKKAILHVYWEEFQKDPVGLMSRVAQPASKKIDQNKLKPEMDEKGNLTTAGFACSQCGQPLFVYKLEQVSEKGKAYTNYFGRCNVAEHEKLILLAQLKPEKDSDEAVTYSLGKFGQRALDFYSIHVTKESTHPVKPLAQIAGNRYASPVGKALSDACMGTIASFLSKYQDIIIEHQKVVKGNQKRLESLRELAGKENLEYPSVTLPPQPHTKEGVDAYNEVIARVRMWVNLNLWQKLKLSRDDAKPLLRLKGFPSFPLVERQANEVDWWDMVCNVKKLINEKKEDGKVFWQNLAGYKRQEALRPYLSSEEDRQKGKKFARYQLGDLLLHLEKKHGEDWGKVYDEAWERIDKKVEGLSKHIKLEEERRSEDAQSKAALTDWLRAKASFVIEGLKEADKDEFCRCELKLQKWYGDLRGKPFAIEAENSILDISGFSKQYNCAFIWQKDGVKKLNLYLIINYFKGGKLRFKKIKPEAFEANRFYTVINKKSGEIVPMEVNFNFDDPNLIILPLAFGKRQGREFIWNDLLSLETGSLKLANGRVIEKTLYNRRTRQDEPALFVALTFERREVLDSSNIKPMNLIGVDRGENIPAVIALTDPEGCPLSRFKDSLGNPTHILRIGESYKEKQRTIQAKKEVEQRRAGGYSRKYASKAKNLADDMVRNTARDLLYYAVTQDAMLIFENLSRGFGRQGKRTFMAERQYTRMEDWLTAKLAYEGLASKTYLSKTLAQYTSKTCSNCGFTITSADYDRVLEKLKKTATGWMTTINGKELKVEGQITYYNRYKRQNVVKDLSVELDRLSEESVNNDISSWTKGRSGEALSLLKKRFSHRPVQEKFVCLNCGFETHADEQAALNIARSWLFLRSQEYKKYQTNKTTGNTDKRAFVETWQSFYRKKLKEVWKPAV

SEQ ID NO: 46704 - protein, 978 aa, synthetic construct
  REGION 1..978: note = engineered CasX variant
QEIKRINKIRRRLVKDSNTKKAGKTGPMKTLLVRVMTPDLRERLENLRKKPENIPQPISNTSRANLNKLLTDYTEMKKAILHVYWEEFQKDPVGLMSRVAQPASKKIDQNKLKPEMDEKGNLTTAGFACSQCGQPLFVYKLEQVSEKGKAYTNYFGRCNVAEHEKLILLAQLKPEKDSDEAVTYSLGKFGQRALDFYSIHVTKESTHPVKPLAQIAGNRYASYPVGKALSDACMGTIASFLSKYQDIIIEHQKVVKGNQKRLESLRELAGKENLEYPSVTLPPQPHTKEGVDAYNEVIARVRMWVNLNLWQKLKLSRDDAKPLLRLKGFPSFPLVERQANEVDWWDMVCNVKKLINEKKEDGKVFWQNLAGYKRQEALRPYLSSEEDRKKGKKFARYQLGDLLLHLEKKHGEDWGKVYDEAWERIDKKVEGLSKHIKLEEERRSEDAQSKAALTDWLRAKASFVIEGLKEADKDEFCRCELKLQKWYGDLRGKPFAIEAENSILDISGFSKQYNCAFIWQKDGVKKLNLYLIINYFKGGKLRFKKIKPEAFEANRFYTVINKKSGEIVPMEVNFNFDDPNLIILPLAFGKRQGREFIWNDLLSLETGSLKLANGRVIEKTLYNRRTRQDEPALFVALTFERREVLDSSNIKPMNLIGVDRGENIPAVIALTDPEGCPLSRFKDSLGNPTHILRIGESYKEKQRTIQAKKEVEQRRAGGYSRKYASKAKNLADDMVRNTARDLLYYAVTQDAMLIFENLSRGFGRQGKRTFMAERQYTRMEDWLTAKLAYEGLASQTYLSKTLAQYTSKTCSNCGFTITSADYDRVLEKLKKTATGWMTTINGKELKVEGQITYYNRYKRQNVVKDLSVELDRLSEESVNNDISSWTKGRSGEALSLLKKRFSHRPVQEKFVCLNCGFETHADEQAALNIARSWLFLRSQEYKKYQTNKTTGNTDKRAFVETWQSFYRKKLKEVWKPAV

SEQ ID NO: 46705 - protein, 978 aa, synthetic construct
  REGION 1..978: note = engineered CasX variant
QEIKRINKIRRRLVKDSNTKKAGKTGPMKTLLVRVMTPDLRERLENLRKKPENIPQPISNTSRANLNKLLTDYTEMKKAILHVYWEEFQKDPVGLMSRVAQPASKKIDQNKLKPEMDEKGNLTTAGFACSQCGQPLFVYKLEQVSEKGKAYTNYFGRCNVAEHEKLILLAQLKPEKDSDEAVTYSLGKFGQRALDFYSIHVTKESTHPVKPLAQIAGNRYASHPVGKALSDACMGTIASFLSKYQDIIIEHQKVVKGNQKRLESLRELAGKENLEYPSVTLPPQPHTKEGVDAYNEVIARVRMWVNLNLWQKLKLSRDDAKPLLRLKGFPSFPLVERQANEVDWWDMVCNVKKLINEKKEDGKVFWQNLAGYKRQEALRPYLSSEEDRKKGKKFARYQLGDLLLHLEKKHGEDWGKVYDEAWERIDKKVEGLSKHIKLEEERRSEDAQSKAALTDWLRAKASFVIEGLKEADKDEFCRCELKLQKWYGDLRGKPFAIEAENSILDISGFSKQYNCAFIWQKDGVKKLNLYLIINYFKGGKLRFKKIKPEAFEANRFYTVINKKSGEIVPMEVNFNFDDPNLIILPLAFGKRQGREFIWNDLLSLETGSLKLANGRVIEKTLYNRRTRQDEPALFVALTFERREVLDSSNIKPMNLIGVDRGENIPAVIALTDPEGCPLSRFKDSLGNPTHILRIGESYKEKQRTIQAKKEVEQRRAGGYSRKYASKAKNLADDMVRNTARDLLYYAVTQDAMLIFENLSRGFGRQGKRTFMAERQYTRMEDWLTAKLAYEGLASQTYLSKTLAQYTSKTCSNCGFTITSADYDRVLEKLKKTATGWMTTINGKELKVEGQITYYNRYKRQNVVKDLSVELDRLSEESVNNDISSWTKGRSGEALSLLKKRFSHRPVQEKFVCLNCGFETHADEQAALNIARSWLFLRSQEYKKYQTNKTTGNTDKRAFVETWQSFYRKKLKEVWKPAV

SEQ ID NO: 46706 - protein, 978 aa, synthetic construct
  REGION 1..978: note = engineered CasX variant
QEIKRINKIRRRLVKDSNTKKAGKTGPMKTLLVRVMTPDLRERLENLRKKPENIPQPISNTSRANLNKLLTDYTEMKKAILHVYWEEFQKDPVGLMSRVAQPASKKIDQNKLKPEMDEKGNLTTAGFACSQCGQPLFVYKLEQVSEKGKAYTNYFGRCNVAEHEKLILLAQLKPEKDSDEAVTYSLGKFGQRALDFYSIHVTKESTHPVKPLAQIAGNRYASSPVGKALSDACMGTIASFLSKYQDIIIEHQKVVKGNQKRLESLRELAGKENLEYPSVTLPPQPHTKEGVDAYNEVIARVRMWVNLNLWQKLKLSRDDAKPLLRLKGFPSFPLVERQANEVDWWDMVCNVKKLINEKKEDGKVFWQNLAGYKRQEALRPYLSSEEDRKKGKKFARYQLGDLLLHLEKKHGEDWGKVYDEAWERIDKKVEGLSKHIKLEEERRSEDAQSKAALTDWLRAKASFVIEGLKEADKDEFCRCELKLQKWYGDLRGKPFAIEAENSILDISGFSKQYNCAFIWQKDGVKKLNLYLIINYFKGGKLRFKKIKPEAFEANRFYTVINKKSGEIVPMEVNFNFDDPNLIILPLAFGKRQGREFIWNDLLSLETGSLKLANGRVIEKTLYNRRTRQDEPALFVALTFERREVLDSSNIKPMNLIGVDRGENIPAVIALTDPEGCPLSRFKDSLGNPTHILRIGESYKEKQRTIQAKKEVEQRRAGGYSRKYASKAKNLADDMVRNTARDLLYYAVTQDAMLIFENLSRGFGRQGKRTFMAERQYTRMEDWLTAKLAYEGLASQTYLSKTLAQYTSKTCSNCGFTITSADYDRVLEKLKKTATGWMTTINGKELKVEGQITYYNRYKRQNVVKDLSVELDRLSEESVNNDISSWTKGRSGEALSLLKKRFSHRPVQEKFVCLNCGFETHADEQAALNIARSWLFLRSQEYKKYQTNKTTGNTDKRAFVETWQSFYRKKLKEVWKPAV

SEQ ID NO: 46707 - protein, 978 aa, synthetic construct
  REGION 1..978: note = engineered CasX variant
QEIKRINKIRRRLVKDSNTKKAGKTGPMKTLLVRVMTPDLRERLENLRKKPENIPQPISNTSRANLNKLLTDYTEMKKAILHVYWEEFQKDPVGLMSRVAQPASKKIDQNKLKPEMDEKGNLTTAGFACSQCGQPLFVYKLEQVSEKGKAYTNYFGRCNVAEHEKLILLAQLKPEKDSDEAVTYSLGKFGQRALDFYSIHVTKESTHPVKPLAQIAGNRYASTPVGKALSDACMGTIASFLSKYQDIIIEHQKVVKGNQKRLESLRELAGKENLEYPSVTLPPQPHTKEGVDAYNEVIARVRMWVNLNLWQKLKLSRDDAKPLLRLKGFPSFPLVERQANEVDWWDMVCNVKKLINEKKEDGKVFWQNLAGYKRQEALRPYLSSEEDRKKGKKFARYQLGDLLLHLEKKHGEDWGKVYDEAWERIDKKVEGLSKHIKLEEERRSEDAQSKAALTDWLRAKASFVIEGLKEADKDEFCRCELKLQKWYGDLRGKPFAIEAENSILDISGFSKQYNCAFIWQKDGVKKLNLYLIINYFKGGKLRFKKIKPEAFEANRFYTVINKKSGEIVPMEVNFNFDDPNLIILPLAFGKRQGREFIWNDLLSLETGSLKLANGRVIEKTLYNRRTRQDEPALFVALTFERREVLDSSNIKPMNLIGVDRGENIPAVIALTDPEGCPLSRFKDSLGNPTHILRIGESYKEKQRTIQAKKEVEQRRAGGYSRKYASKAKNLADDMVRNTARDLLYYAVTQDAMLIFENLSRGFGRQGKRTFMAERQYTRMEDWLTAKLAYEGLASQTYLSKTLAQYTSKTCSNCGFTITSADYDRVLEKLKKTATGWMTTINGKELKVEGQITYYNRYKRQNVVKDLSVELDRLSEESVNNDISSWTKGRSGEALSLLKKRFSHRPVQEKFVCLNCGFETHADEQAALNIARSWLFLRSQEYKKYQTNKTTGNTDKRAFVETWQSFYRKKLKEVWKPAV

SEQ ID NO: 46708 - protein, 978 aa, synthetic construct
  REGION 1..978: note = engineered CasX variant
QEIKRINKIRRRLVKDSNTKKAGKTGPMKTLLVRVMTPDLRERLENLRKKPENIPQPISNTSRANLNKLLTDYTEMKKAILHVYWEEFQKDPVGLMSRVAQPASKKIDQNKLKPEMDEKGNLTTAGFACSQCGQPLFVYKLEQVSEKGKAYTNYFGRCNVAEHEKLILLAQLKPEKDSDEAVTYSLGKFGQRALDFYSIHVTKESTHPVKPLAQIAGNRYASAPVGKALSDACMGTIASFLSKYQDIIIEHQKVVKGNQKRLESLRELAGKENLEYPSVTLPPQPHTKEGVDAYNEVIARVRMWVNLNLWQKLKLSRDDAKPLLRLKGFPSFPLVERQANEVDWWDMVCNVKKLINEKKEDGKVFWQNLAGYKRQEALRPYLSSEEDRKKGKKFARYQLGDLLLHLEKKHGEDWGKVYDEAWERIDKKVEGLSKHIKLEEERRSEDAQSKAALTDWLRAKASFVIEGLKEADKDEFCRCELKLQKWYGDLRGKPFAIEAENSILDISGFSKQYNCAFIWQKDGVKKLNLYLIINYFKGGKLRFKKIKPEAFEANRFYTVINKKSGEIVPMEVNFNFDDPNLIILPLAFGKRQGREFIWNDLLSLETGSLKLANGRVIEKTLYNRRTRQDEPALFVALTFERREVLDSSNIKPMNLIGVDRGENIPAVIALTDPEGCPLSRFKDSLGNPTHILRIGESYKEKQRTIQAKKEVEQRRAGGYSRKYASKAKNLADDMVRNTARDLLYYAVTQDAMLIFENLSRGFGRQGKRTFMAERQYTRMEDWLTAKLAYEGLASQTYLSKTLAQYTSKTCSNCGFTITSADYDRVLEKLKKTATGWMTTINGKELKVEGQITYYNRYKRQNVVKDLSVELDRLSEESVNNDISSWTKGRSGEALSLLKKRFSHRPVQEKFVCLNCGFETHADEQAALNIARSWLFLRSQEYKKYQTNKTTGNTDKRAFVETWQSFYRKKLKEVWKPAV

SEQ ID NO: 46709 - protein, 978 aa, synthetic construct
  REGION 1..978: note = engineered CasX variant
QEIKRINKIRRRLVKDSNTKKAGKTGPMKTLLVRVMTPDLRERLENLRKKPENIPQPISNTSRANLNKLLTDYTEMKKAILHVYWEEFQKDPVGLMSRVAQPASKKIDQNKLKPEMDEKGNLTTAGFACSQCGQPLFVYKLEQVSEKGKAYTNYFGRCNVAEHEKLILLAQLKPEKDSDEAVTYSLGKFGQRALDFYSIHVTKESTHPVKPLAQIAGNRYASVPVGKALSDACMGTIASFLSKYQDIIIEHQKVVKGNQKRLESLRELAGKENLEYPSVTLPPQPHTKEGVDAYNEVIARVRMWVNLNLWQKLKLSRDDAKPLLRLKGFPSFPLVERQANEVDWWDMVCNVKKLINEKKEDGKVFWQNLAGYKRQEALRPYLSSEEDRKKGKKFARYQLGDLLLHLEKKHGEDWGKVYDEAWERIDKKVEGLSKHIKLEEERRSEDAQSKAALTDWLRAKASFVIEGLKEADKDEFCRCELKLQKWYGDLRGKPFAIEAENSILDISGFSKQYNCAFIWQKDGVKKLNLYLIINYFKGGKLRFKKIKPEAFEANRFYTVINKKSGEIVPMEVNFNFDDPNLIILPLAFGKRQGREFIWNDLLSLETGSLKLANGRVIEKTLYNRRTRQDEPALFVALTFERREVLDSSNIKPMNLIGVDRGENIPAVIALTDPEGCPLSRFKDSLGNPTHILRIGESYKEKQRTIQAKKEVEQRRAGGYSRKYASKAKNLADDMVRNTARDLLYYAVTQDAMLIFENLSRGFGRQGKRTFMAERQYTRMEDWLTAKLAYEGLASQTYLSKTLAQYTSKTCSNCGFTITSADYDRVLEKLKKTATGWMTTINGKELKVEGQITYYNRYKRQNVVKDLSVELDRLSEESVNNDISSWTKGRSGEALSLLKKRFSHRPVQEKFVCLNCGFETHADEQAALNIARSWLFLRSQEYKKYQTNKTTGNTDKRAFVETWQSFYRKKLKEVWKPAV

SEQ ID NO: 46710 - protein, 978 aa, synthetic construct
  REGION 1..978: note = engineered CasX variant
QEIKRINKIRRRLVKDSNTKKAGKTGPMKTLLVRVMTPDLRERLENLRKKPENIPQPISNTSRANLNKLLTDYTEMKKAILHVYWEEFQKDPVGLMSRVAQPASKKIDQNKLKPEMDEKGNLTTAGFACSQCGQPLFVYKLEQVSEKGKAYTNYFGRCNVAEHEKLIKLAQLKPEKDSDEAVTYSLGKFGQRALDFYSIHVTKESTHPVKPLAQIAGNRYASGPVGKALSDACMGTIASFLSKYQDIIIEHQKVVKGNQKRLESLRELAGKENLEYPSVTLPPQPHTKEGVDAYNEVIARVRMWVNLNLWQKLKLSRDDAKPLLRLKGFPSFPLVERQANEVDWWDMVCNVKKLINEKKEDGKVFWQNLAGYKRQEALRPYLSSEEDRKKGKKFARYQLGDLLLHLEKKHGEDWGKVYDEAWERIDKKVEGLSKHIKLEEERRSEDAQSKAALTDWLRAKASFVIEGLKEADKDEFCRCELKLQKWYGDLRGKPFAIEAENSILDISGFSKQYNCAFIWQKDGVKKLNLYLIINYFKGGKLRFKKIKPEAFEANRFYTVINKKSGEIVPMEVNFNFDDPNLIILPLAFGKRQGREFIWNDLLSLETGSLKLANGRVIEKTLYNRRTRQDEPALFVALTFERREVLDSSNIKPMNLIGVDRGENIPAVIALTDPEGCPLSRFKDSLGNPTHILRIGESYKEKQRTIQAKKEVEQRRAGGYSRKYASKAKNLADDMVRNTARDLLYYAVTQDAMLIFENLSRGFGRQGKRTFMAERQYTRMEDWLTAKLAYEGLASQTYLSKTLAQYTSKTCSNCGFTITSADYDRVLEKLKKTATGWMTTINGKELKVEGQITYYNRYKRQNVVKDLSVELDRLSEESVNNDISSWTKGRSGEALSLLKKRFSHRPVQEKFVCLNCGFETHADEQAALNIARSWLFLRSQEYKKYQTNKTTGNTDKRAFVETWQSFYRKKLKEVWKPAV

SEQ ID NO: 46711 - protein, 977 aa, synthetic construct
  REGION 1..977: note = engineered CasX variant
QEIKRINKIRRRLVKDSNTKKAGKTGPMKTLLVRVMTPDLRERLENLRKKPENIPQPISNTSRANLNKLLTDYTEMKKAILHVYWEEFQKDPVGLMSRVAQPASKKIDQNKLKPEMDEKGNLTTAGFACSQCGQPLFVYKLEQVSEKGKAYTNYFGRCNVAEHEKLILLAQLKPEKDSDEAVTYSLGKFGQRALDFYSIHVTKESTHPVKPLAQIAGNRYASPVGKALSDACMGTIASFLSKYQDIIIEHQKVVKGNQKRLESLRELAGKENLEYPSVTLPPQPHTKEGVDAYNEVIARVRMWVNLNLWQKLKLSRDDAKPLLRLKGFPSFPLVERQANEVDWWDMVCNVKKLINEKKEDGKVFWQNLAGYKRQEALRPYLSSEEDRKKGKKFARYQLGDLLLHLEKKHGEDWGKVYDEAWERIDKKVEGLSKHIKLEEERRSEDAQSKAALTDWLRAKASFVIEGLKEADKDEFCRCELKLQKWYGDLRGKPFAIEAENSILDISGFSKQYNCAFIWQKDGVKKLNLYLIINYFKGGKLRFKKIKPEAFEANRFYTVINKKSGEIVPMEVNFNFDDPNLIILPLAFGKRQGREFIWNDLLSLETGSLKLANGRVIEKTLYNRRTRQDEPALFVALTFERREVLDSSNIKPMNLIGVDRGENIPAVIALTDPEGCPLSRFKDSLGNPTHILRIGESYKEKQRTIQAKKEVEQRRAGGYSRKYASKAKNLADDMVRNTARDLLYYAVTQDAMLIFENLSRGFGRQGKRTFMAERQYTRMEDWLTAKLAYEGLASQTYLSKTLAQYTSKTCSNCGFTITSADYDRVLEKLKKTATGWMTTINGKELKVEGQITYYNRYKRQNVVKDLSVELDRLSEESVNNDISSWTKGRSGEALSLLKKRFSHRPVQEKFVCLNCGFETHADEQAALNIARSWLFLRSQEYKKYQTNKTTGNTDKRAFVETWQSFYRKKLKEVWKPAV

SEQ ID NO: 46712 - protein, 978 aa, synthetic construct
  REGION 1..978: note = engineered CasX variant
QEIKRINKIRRRLVKDSNTKKAGKTGPMKTLLVRVMTPDLRERLENLRKKPENIPQPISNTSRANLNKLLTDYTEMKKAILHVYWEEFQKDPVGLMSRVAQPASKKIDQNKLKPEMDEKGNLTTAGFACSQCGQPLFVYKLEQVSEKGKAYTNYFGRCNVAEHEKLILLAQLKPEKDSDEAVTYSLGKFGQRALDFYSIHVTKESTHPVKPLAQIAGNRYASYPVGKALSDACMGTIASFLSKYQDIIIEHQKVVKGNQKRLESLRELAGKENLEYPSVTLPPQPHTKEGVDAYNEVIARVRMWVNLNLWQKLKLSRDDAKPLLRLKGFPSFPLVERQANEVDWWDMVCNVKKLINEKKEDGKVFWQNLAGYKRQEALRPYLSSEEDRKKGKKFARYQLGDLLLHLEKKHGEDWGKVYDEAWERIDKKVEGLSKHIKLEEERRSEDAQSKAALTDWLRAKASFVIEGLKEADKDEFCRCELKLQKWYGDLRGKPFAIEAENSILDISGFSKQYNCAFIWQKDGVKKLNLYLIINYFKGGKLRFKKIKPEAFEANRFYTVINKKSGEIVPMEVNFNFDDPNLIILPLAFGKRQGREFIWNDLLSLETGSLKLANGRVIEKTLYNRRTRQDEPALFVALTFERREVLDSSNIKPMNLIGVDRGENIPAVIALTDPEGCPLSRFKDSLGNPTHILRIGESYKEKQRTIQAKKEVEQRRAGGYSRKYASKAKNLADDMVRNTARDLLYYAVTQDAMLIFENLSRGFGRQGKRTFMAERQYTRMEDWLTAKLAYNGLASKTYLSKTLAQYTSKTCSNCGFTITSADYDRVLEKLKKTATGWMTTINGKELKVEGQITYYNRYKRQNVVKDLSVELDRLSEESVNNDISSWTKGRSGEALSLLKKRFSHRPVQEKFVCLNCGFETHADEQAALNIARSWLFLRSQEYKKYQTNKTTGNTDKRAFVETWQSFYRKKLKEVWKPAV

SEQ ID NO: 46713 - protein, 978 aa, synthetic construct
  REGION 1..978: note = engineered CasX variant
QEIKRINKIRRRLVKDSNTKKAGKTGPMKTLLVRVMTPDLRERLENLRKKPENIPQPISNTSRANLNKLLTDYTEMKKAILHVYWEEFQKDPVGLMSRVAQPASKKIDQNKLKPEMDEKGNLTTAGFACSQCGQPLFVYKLEQVSEKGKAYTNYFGRCNVAEHEKLILLAQLKPEKDSDEAVTYSLGKFGQRALDFYSIHVTKESTHPVKPLAQIAGNRYASHPVGKALSDACMGTIASFLSKYQDIIIEHQKVVKGNQKRLESLRELAGKENLEYPSVTLPPQPHTKEGVDAYNEVIARVRMWVNLNLWQKLKLSRDDAKPLLRLKGFPSFPLVERQANEVDWWDMVCNVKKLINEKKEDGKVFWQNLAGYKRQEALRPYLSSEEDRKKGKKFARYQLGDLLLHLEKKHGEDWGKVYDEAWERIDKKVEGLSKHIKLEEERRSEDAQSKAALTDWLRAKASFVIEGLKEADKDEFCRCELKLQKWYGDLRGKPFAIEAENSILDISGFSKQYNCAFIWQKDGVKKLNLYLIINYFKGGKLRFKKIKPEAFEANRFYTVINKKSGEIVPMEVNFNFDDPNLIILPLAFGKRQGREFIWNDLLSLETGSLKLANGRVIEKTLYNRRTRQDEPALFVALTFERREVLDSSNIKPMNLIGVDRGENIPAVIALTDPEGCPLSRFKDSLGNPTHILRIGESYKEKQRTIQAKKEVEQRRAGGYSRKYASKAKNLADDMVRNTARDLLYYAVTQDAMLIFENLSRGFGRQGKRTFMAERQYTRMEDWLTAKLAYNGLASKTYLSKTLAQYTSKTCSNCGFTITSADYDRVLEKLKKTATGWMTTINGKELKVEGQITYYNRYKRQNVVKDLSVELDRLSEESVNNDISSWTKGRSGEALSLLKKRFSHRPVQEKFVCLNCGFETHADEQAALNIARSWLFLRSQEYKKYQTNKTTGNTDKRAFVETWQSFYRKKLKEVWKPAV

SEQ ID NO: 46714 - protein, 978 aa, synthetic construct
  REGION 1..978: note = engineered CasX variant
QEIKRINKIRRRLVKDSNTKKAGKTGPMKTLLVRVMTPDLRERLENLRKKPENIPQPISNTSRANLNKLLTDYTEMKKAILHVYWEEFQKDPVGLMSRVAQPASKKIDQNKLKPEMDEKGNLTTAGFACSQCGQPLFVYKLEQVSEKGKAYTNYFGRCNVAEHEKLILLAQLKPEKDSDEAVTYSLGKFGQRALDFYSIHVTKESTHPVKPLAQIAGNRYASSPVGKALSDACMGTIASFLSKYQDIIIEHQKVVKGNQKRLESLRELAGKENLEYPSVTLPPQPHTKEGVDAYNEVIARVRMWVNLNLWQKLKLSRDDAKPLLRLKGFPSFPLVERQANEVDWWDMVCNVKKLINEKKEDGKVFWQNLAGYKRQEALRPYLSSEEDRKKGKKFARYQLGDLLLHLEKKHGEDWGKVYDEAWERIDKKVEGLSKHIKLEEERRSEDAQSKAALTDWLRAKASFVIEGLKEADKDEFCRCELKLQKWYGDLRGKPFAIEAENSILDISGFSKQYNCAFIWQKDGVKKLNLYLIINYFKGGKLRFKKIKPEAFEANRFYTVINKKSGEIVPMEVNFNFDDPNLIILPLAFGKRQGREFIWNDLLSLETGSLKLANGRVIEKTLYNRRTRQDEPALFVALTFERREVLDSSNIKPMNLIGVDRGENIPAVIALTDPEGCPLSRFKDSLGNPTHILRIGESYKEKQRTIQAKKEVEQRRAGGYSRKYASKAKNLADDMVRNTARDLLYYAVTQDAMLIFENLSRGFGRQGKRTFMAERQYTRMEDWLTAKLAYNGLASKTYLSKTLAQYTSKTCSNCGFTITSADYDRVLEKLKKTATGWMTTINGKELKVEGQITYYNRYKRQNVVKDLSVELDRLSEESVNNDISSWTKGRSGEALSLLKKRFSHRPVQEKFVCLNCGFETHADEQAALNIARSWLFLRSQEYKKYQTNKTTGNTDKRAFVETWQSFYRKKLKEVWKPAV

SEQ ID NO: 46715 - protein, 978 aa, synthetic construct
  REGION 1..978: note = engineered CasX variant
QEIKRINKIRRRLVKDSNTKKAGKTGPMKTLLVRVMTPDLRERLENLRKKPENIPQPISNTSRANLNKLLTDYTEMKKAILHVYWEEFQKDPVGLMSRVAQPASKKIDQNKLKPEMDEKGNLTTAGFACSQCGQPLFVYKLEQVSEKGKAYTNYFGRCNVAEHEKLILLAQLKPEKDSDEAVTYSLGKFGQRALDFYSIHVTKESTHPVKPLAQIAGNRYASTPVGKALSDACMGTIASFLSKYQDIIIEHQKVVKGNQKRLESLRELAGKENLEYPSVTLPPQPHTKEGVDAYNEVIARVRMWVNLNLWQKLKLSRDDAKPLLRLKGFPSFPLVERQANEVDWWDMVCNVKKLINEKKEDGKVFWQNLAGYKRQEALRPYLSSEEDRKKGKKFARYQLGDLLLHLEKKHGEDWGKVYDEAWERIDKKVEGLSKHIKLEEERRSEDAQSKAALTDWLRAKASFVIEGLKEADKDEFCRCELKLQKWYGDLRGKPFAIEAENSILDISGFSKQYNCAFIWQKDGVKKLNLYLIINYFKGGKLRFKKIKPEAFEANRFYTVINKKSGEIVPMEVNFNFDDPNLIILPLAFGKRQGREFIWNDLLSLETGSLKLANGRVIEKTLYNRRTRQDEPALFVALTFERREVLDSSNIKPMNLIGVDRGENIPAVIALTDPEGCPLSRFKDSLGNPTHILRIGESYKEKQRTIQAKKEVEQRRAGGYSRKYASKAKNLADDMVRNTARDLLYYAVTQDAMLIFENLSRGFGRQGKRTFMAERQYTRMEDWLTAKLAYNGLASKTYLSKTLAQYTSKTCSNCGFTITSADYDRVLEKLKKTATGWMTTINGKELKVEGQITYYNRYKRQNVVKDLSVELDRLSEESVNNDISSWTKGRSGEALSLLKKRFSHRPVQEKFVCLNCGFETHADEQAALNIARSWLFLRSQEYKKYQTNKTTGNTDKRAFVETWQSFYRKKLKEVWKPAV

SEQ ID NO: 46716 - protein, 978 aa, synthetic construct
  REGION 1..978: note = engineered CasX variant
QEIKRINKIRRRLVKDSNTKKAGKTGPMKTLLVRVMTPDLRERLENLRKKPENIPQPISNTSRANLNKLLTDYTEMKKAILHVYWEEFQKDPVGLMSRVAQPASKKIDQNKLKPEMDEKGNLTTAGFACSQCGQPLFVYKLEQVSEKGKAYTNYFGRCNVAEHEKLILLAQLKPEKDSDEAVTYSLGKFGQRALDFYSIHVTKESTHPVKPLAQIAGNRYASAPVGKALSDACMGTIASFLSKYQDIIIEHQKVVKGNQKRLESLRELAGKENLEYPSVTLPPQPHTKEGVDAYNEVIARVRMWVNLNLWQKLKLSRDDAKPLLRLKGFPSFPLVERQANEVDWWDMVCNVKKLINEKKEDGKVFWQNLAGYKRQEALRPYLSSEEDRKKGKKFARYQLGDLLLHLEKKHGEDWGKVYDEAWERIDKKVEGLSKHIKLEEERRSEDAQSKAALTDWLRAKASFVIEGLKEADKDEFCRCELKLQKWYGDLRGKPFAIEAENSILDISGFSKQYNCAFIWQKDGVKKLNLYLIINYFKGGKLRFKKIKPEAFEANRFYTVINKKSGEIVPMEVNFNFDDPNLIILPLAFGKRQGREFIWNDLLSLETGSLKLANGRVIEKTLYNRRTRQDEPALFVALTFERREVLDSSNIKPMNLIGVDRGENIPAVIALTDPEGCPLSRFKDSLGNPTHILRIGESYKEKQRTIQAKKEVEQRRAGGYSRKYASKAKNLADDMVRNTARDLLYYAVTQDAMLIFENLSRGFGRQGKRTFMAERQYTRMEDWLTAKLAYNGLASKTYLSKTLAQYTSKTCSNCGFTITSADYDRVLEKLKKTATGWMTTINGKELKVEGQITYYNRYKRQNVVKDLSVELDRLSEESVNNDISSWTKGRSGEALSLLKKRFSHRPVQEKFVCLNCGFETHADEQAALNIARSWLFLRSQEYKKYQTNKTTGNTDKRAFVETWQSFYRKKLKEVWKPAV

SEQ ID NO: 46717 - protein, 978 aa, synthetic construct
  REGION 1..978: note = engineered CasX variant
QEIKRINKIRRRLVKDSNTKKAGKTGPMKTLLVRVMTPDLRERLENLRKKPENIPQPISNTSRANLNKLLTDYTEMKKAILHVYWEEFQKDPVGLMSRVAQPASKKIDQNKLKPEMDEKGNLTTAGFACSQCGQPLFVYKLEQVSEKGKAYTNYFGRCNVAEHEKLILLAQLKPEKDSDEAVTYSLGKFGQRALDFYSIHVTKESTHPVKPLAQIAGNRYASVPVGKALSDACMGTIASFLSKYQDIIIEHQKVVKGNQKRLESLRELAGKENLEYPSVTLPPQPHTKEGVDAYNEVIARVRMWVNLNLWQKLKLSRDDAKPLLRLKGFPSFPLVERQANEVDWWDMVCNVKKLINEKKEDGKVFWQNLAGYKRQEALRPYLSSEEDRKKGKKFARYQLGDLLLHLEKKHGEDWGKVYDEAWERIDKKVEGLSKHIKLEEERRSEDAQSKAALTDWLRAKASFVIEGLKEADKDEFCRCELKLQKWYGDLRGKPFAIEAENSILDISGFSKQYNCAFIWQKDGVKKLNLYLIINYFKGGKLRFKKIKPEAFEANRFYTVINKKSGEIVPMEVNFNFDDPNLIILPLAFGKRQGREFIWNDLLSLETGSLKLANGRVIEKTLYNRRTRQDEPALFVALTFERREVLDSSNIKPMNLIGVDRGENIPAVIALTDPEGCPLSRFKDSLGNPTHILRIGESYKEKQRTIQAKKEVEQRRAGGYSRKYASKAKNLADDMVRNTARDLLYYAVTQDAMLIFENLSRGFGRQGKRTFMAERQYTRMEDWLTAKLAYNGLASKTYLSKTLAQYTSKTCSNCGFTITSADYDRVLEKLKKTATGWMTTINGKELKVEGQITYYNRYKRQNVVKDLSVELDRLSEESVNNDISSWTKGRSGEALSLLKKRFSHRPVQEKFVCLNCGFETHADEQAALNIARSWLFLRSQEYKKYQTNKTTGNTDKRAFVETWQSFYRKKLKEVWKPAV

SEQ ID NO: 46718 - protein, 978 aa, synthetic construct
  REGION 1..978: note = engineered CasX variant
QEIKRINKIRRRLVKDSNTKKAGKTGPMKTLLVRVMTPDLRERLENLRKKPENIPQPISNTSRANLNKLLTDYTEMKKAILHVYWEEFQKDPVGLMSRVAQPASKKIDQNKLKPEMDEKGNLTTAGFACSQCGQPLFVYKLEQVSEKGKAYTNYFGRCNVAEHEKLIKLAQLKPEKDSDEAVTYSLGKFGQRALDFYSIHVTKESTHPVKPLAQIAGNRYASGPVGKALSDACMGTIASFLSKYQDIIIEHQKVVKGNQKRLESLRELAGKENLEYPSVTLPPQPHTKEGVDAYNEVIARVRMWVNLNLWQKLKLSRDDAKPLLRLKGFPSFPLVERQANEVDWWDMVCNVKKLINEKKEDGKVFWQNLAGYKRQEALRPYLSSEEDRKKGKKFARYQLGDLLLHLEKKHGEDWGKVYDEAWERIDKKVEGLSKHIKLEEERRSEDAQSKAALTDWLRAKASFVIEGLKEADKDEFCRCELKLQKWYGDLRGKPFAIEAENSILDISGFSKQYNCAFIWQKDGVKKLNLYLIINYFKGGKLRFKKIKPEAFEANRFYTVINKKSGEIVPMEVNFNFDDPNLIILPLAFGKRQGREFIWNDLLSLETGSLKLANGRVIEKTLYNRRTRQDEPALFVALTFERREVLDSSNIKPMNLIGVDRGENIPAVIALTDPEGCPLSRFKDSLGNPTHILRIGESYKEKQRTIQAKKEVEQRRAGGYSRKYASKAKNLADDMVRNTARDLLYYAVTQDAMLIFENLSRGFGRQGKRTFMAERQYTRMEDWLTAKLAYNGLASKTYLSKTLAQYTSKTCSNCGFTITSADYDRVLEKLKKTATGWMTTINGKELKVEGQITYYNRYKRQNVVKDLSVELDRLSEESVNNDISSWTKGRSGEALSLLKKRFSHRPVQEKFVCLNCGFETHADEQAALNIARSWLFLRSQEYKKYQTNKTTGNTDKRAFVETWQSFYRKKLKEVWKPAV

SEQ ID NO: 46719 - protein, 977 aa, synthetic construct
  REGION 1..977: note = engineered CasX variant
QEIKRINKIRRRLVKDSNTKKAGKTGPMKTLLVRVMTPDLRERLENLRKKPENIPQPISNTSRANLNKLLTDYTEMKKAILHVYWEEFQKDPVGLMSRVAQPASKKIDQNKLKPEMDEKGNLTTAGFACSQCGQPLFVYKLEQVSEKGKAYTNYFGRCNVAEHEKLILLAQLKPEKDSDEAVTYSLGKFGQRALDFYSIHVTKESTHPVKPLAQIAGNRYASPVGKALSDACMGTIASFLSKYQDIIIEHQKVVKGNQKRLESLRELAGKENLEYPSVTLPPQPHTKEGVDAYNEVIARVRMWVNLNLWQKLKLSRDDAKPLLRLKGFPSFPLVERQANEVDWWDMVCNVKKLINEKKEDGKVFWQNLAGYKRQEALRPYLSSEEDRKKGKKFARYQLGDLLLHLEKKHGEDWGKVYDEAWERIDKKVEGLSKHIKLEEERRSEDAQSKAALTDWLRAKASFVIEGLKEADKDEFCRCELKLQKWYGDLRGKPFAIEAENSILDISGFSKQYNCAFIWQKDGVKKLNLYLIINYFKGGKLRFKKIKPEAFEANRFYTVINKKSGEIVPMEVNFNFDDPNLIILPLAFGKRQGREFIWNDLLSLETGSLKLANGRVIEKTLYNRRTRQDEPALFVALTFERREVLDSSNIKPMNLIGVDRGENIPAVIALTDPEGCPLSRFKDSLGNPTHILRIGESYKEKQRTIQAKKEVEQRRAGGYSRKYASKAKNLADDMVRNTARDLLYYAVTQDAMLIFENLSRGFGRQGKRTFMAERQYTRMEDWLTAKLAYNGLASKTYLSKTLAQYTSKTCSNCGFTITSADYDRVLEKLKKTATGWMTTINGKELKVEGQITYYNRYKRQNVVKDLSVELDRLSEESVNNDISSWTKGRSGEALSLLKKRFSHRPVQEKFVCLNCGFETHADEQAALNIARSWLFLRSQEYKKYQTNKTTGNTDKRAFVETWQSFYRKKLKEVWKPAV

SEQ ID NO: 46720 - protein, 978 aa, synthetic construct
  REGION 1..978: note = engineered CasX variant
QEIKRINKIRRRLVKDSNTKKAGKTGPMKTLLVRVMTPDLRERLENLRKKPENIPQPISNTSRANLNKLLTDYTEMKKAILHVYWEEFQKDPVGLMSRVAQPASKKIDQNKLKPEMDEKGNLTTAGFACSQCGQPLFVYKLEQVSEKGKAYTNYFGRCNVAEHEKLIQLAQLKPEKDSDEAVTYSLGKFGQRALDFYSIHVTKESTHPVKPLAQIAGNRYASYPVGKALSDACMGTIASFLSKYQDIIIEHQKVVKGNQKRLESLRELAGKENLEYPSVTLPPQPHTKEGVDAYNEVIARVRMWVNLNLWQKLKLSRDDAKPLLRLKGFPSFPLVERQANEVDWWDMVCNVKKLINEKKEDGKVFWQNLAGYKRQEALRPYLSSEEDRKKGKKFARYQLGDLLLHLEKKHGEDWGKVYDEAWERIDKKVEGLSKHIKLEEERRSEDAQSKAALTDWLRAKASFVIEGLKEADKDEFCRCELKLQKWYGDLRGKPFAIEAENSILDISGFSKQYNCAFIWQKDGVKKLNLYLIINYFKGGKLRFKKIKPEAFEANRFYTVINKKSGEIVPMEVNFNFDDPNLIILPLAFGKRQGREFIWNDLLSLETGSLKLANGRVIEKTLYNRRTRQDEPALFVALTFERREVLDSSNIKPMNLIGVDRGENIPAVIALTDPEGCPLSRFKDSLGNPTHILRIGESYKEKQRTIQAKKEVEQRRAGGYSRKYASKAKNLADDMVRNTARDLLYYAVTQDAMLIFENLSRGFGRQGKRTFMAERQYTRMEDWLTAKLAYEGLASKTYLSKTLAQYTSKTCSNCGFTITSADYDRVLEKLKKTATGWMTTINGKELKVEGQITYYNRYKRQNVVKDLSVELDRLSEESVNNDISSWTKGRSGEALSLLKKRFSHRPVQEKFVCLNCGFETHADEQAALNIARSWLFLRSQEYKKYQTNKTTGNTDKRAFVETWQSFYRKKLKEVWKPAV

SEQ ID NO: 46721 - protein, 978 aa, synthetic construct
  REGION 1..978: note = engineered CasX variant
QEIKRINKIRRRLVKDSNTKKAGKTGPMKTLLVRVMTPDLRERLENLRKKPENIPQPISNTSRANLNKLLTDYTEMKKAILHVYWEEFQKDPVGLMSRVAQPASKKIDQNKLKPEMDEKGNLTTAGFACSQCGQPLFVYKLEQVSEKGKAYTNYFGRCNVAEHEKLIQLAQLKPEKDSDEAVTYSLGKFGQRALDFYSIHVTKESTHPVKPLAQIAGNRYASHPVGKALSDACMGTIASFLSKYQDIIIEHQKVVKGNQKRLESLRELAGKENLEYPSVTLPPQPHTKEGVDAYNEVIARVRMWVNLNLWQKLKLSRDDAKPLLRLKGFPSFPLVERQANEVDWWDMVCNVKKLINEKKEDGKVFWQNLAGYKRQEALRPYLSSEEDRKKGKKFARYQLGDLLLHLEKKHGEDWGKVYDEAWERIDKKVEGLSKHIKLEEERRSEDAQSKAALTDWLRAKASFVIEGLKEADKDEFCRCELKLQKWYGDLRGKPFAIEAENSILDISGFSKQYNCAFIWQKDGVKKLNLYLIINYFKGGKLRFKKIKPEAFEANRFYTVINKKSGEIVPMEVNFNFDDPNLIILPLAFGKRQGREFIWNDLLSLETGSLKLANGRVIEKTLYNRRTRQDEPALFVALTFERREVLDSSNIKPMNLIGVDRGENIPAVIALTDPEGCPLSRFKDSLGNPTHILRIGESYKEKQRTIQAKKEVEQRRAGGYSRKYASKAKNLADDMVRNTARDLLYYAVTQDAMLIFENLSRGFGRQGKRTFMAERQYTRMEDWLTAKLAYEGLASKTYLSKTLAQYTSKTCSNCGFTITSADYDRVLEKLKKTATGWMTTINGKELKVEGQITYYNRYKRQNVVKDLSVELDRLSEESVNNDISSWTKGRSGEALSLLKKRFSHRPVQEKFVCLNCGFETHADEQAALNIARSWLFLRSQEYKKYQTNKTTGNTDKRAFVETWQSFYRKKLKEVWKPAV

SEQ ID NO: 46722 - protein, 978 aa, synthetic construct
  REGION 1..978: note = engineered CasX variant
QEIKRINKIRRRLVKDSNTKKAGKTGPMKTLLVRVMTPDLRERLENLRKKPENIPQPISNTSRANLNKLLTDYTEMKKAILHVYWEEFQKDPVGLMSRVAQPASKKIDQNKLKPEMDEKGNLTTAGFACSQCGQPLFVYKLEQVSEKGKAYTNYFGRCNVAEHEKLIQLAQLKPEKDSDEAVTYSLGKFGQRALDFYSIHVTKESTHPVKPLAQIAGNRYASSPVGKALSDACMGTIASFLSKYQDIIIEHQKVVKGNQKRLESLRELAGKENLEYPSVTLPPQPHTKEGVDAYNEVIARVRMWVNLNLWQKLKLSRDDAKPLLRLKGFPSFPLVERQANEVDWWDMVCNVKKLINEKKEDGKVFWQNLAGYKRQEALRPYLSSEEDRKKGKKFARYQLGDLLLHLEKKHGEDWGKVYDEAWERIDKKVEGLSKHIKLEEERRSEDAQSKAALTDWLRAKASFVIEGLKEADKDEFCRCELKLQKWYGDLRGKPFAIEAENSILDISGFSKQYNCAFIWQKDGVKKLNLYLIINYFKGGKLRFKKIKPEAFEANRFYTVINKKSGEIVPMEVNFNFDDPNLIILPLAFGKRQGREFIWNDLLSLETGSLKLANGRVIEKTLYNRRTRQDEPALFVALTFERREVLDSSNIKPMNLIGVDRGENIPAVIALTDPEGCPLSRFKDSLGNPTHILRIGESYKEKQRTIQAKKEVEQRRAGGYSRKYASKAKNLADDMVRNTARDLLYYAVTQDAMLIFENLSRGFGRQGKRTFMAERQYTRMEDWLTAKLAYEGLASKTYLSKTLAQYTSKTCSNCGFTITSADYDRVLEKLKKTATGWMTTINGKELKVEGQITYYNRYKRQNVVKDLSVELDRLSEESVNNDISSWTKGRSGEALSLLKKRFSHRPVQEKFVCLNCGFETHADEQAALNIARSWLFLRSQEYKKYQTNKTTGNTDKRAFVETWQSFYRKKLKEVWKPAV

SEQ ID NO: 46723 - protein, 978 aa, synthetic construct
  REGION 1..978: note = engineered CasX variant
QEIKRINKIRRRLVKDSNTKKAGKTGPMKTLLVRVMTPDLRERLENLRKKPENIPQPISNTSRANLNKLLTDYTEMKKAILHVYWEEFQKDPVGLMSRVAQPASKKIDQNKLKPEMDEKGNLTTAGFACSQCGQPLFVYKLEQVSEKGKAYTNYFGRCNVAEHEKLIQLAQLKPEKDSDEAVTYSLGKFGQRALDFYSIHVTKESTHPVKPLAQIAGNRYASTPVGKALSDACMGTIASFLSKYQDIIIEHQKVVKGNQKRLESLRELAGKENLEYPSVTLPPQPHTKEGVDAYNEVIARVRMWVNLNLWQKLKLSRDDAKPLLRLKGFPSFPLVERQANEVDWWDMVCNVKKLINEKKEDGKVFWQNLAGYKRQEALRPYLSSEEDRKKGKKFARYQLGDLLLHLEKKHGEDWGKVYDEAWERIDKKVEGLSKHIKLEEERRSEDAQSKAALTDWLRAKASFVIEGLKEADKDEFCRCELKLQKWYGDLRGKPFAIEAENSILDISGFSKQYNCAFIWQKDGVKKLNLYLIINYFKGGKLRFKKIKPEAFEANRFYTVINKKSGEIVPMEVNFNFDDPNLIILPLAFGKRQGREFIWNDLLSLETGSLKLANGRVIEKTLYNRRTRQDEPALFVALTFERREVLDSSNIKPMNLIGVDRGENIPAVIALTDPEGCPLSRFKDSLGNPTHILRIGESYKEKQRTIQAKKEVEQRRAGGYSRKYASKAKNLADDMVRNTARDLLYYAVTQDAMLIFENLSRGFGRQGKRTFMAERQYTRMEDWLTAKLAYEGLASKTYLSKTLAQYTSKTCSNCGFTITSADYDRVLEKLKKTATGWMTTINGKELKVEGQITYYNRYKRQNVVKDLSVELDRLSEESVNNDISSWTKGRSGEALSLLKKRFSHRPVQEKFVCLNCGFETHADEQAALNIARSWLFLRSQEYKKYQTNKTTGNTDKRAFVETWQSFYRKKLKEVWKPAV

SEQ ID NO: 46724 - protein, 978 aa, synthetic construct
  REGION 1..978: note = engineered CasX variant
QEIKRINKIRRRLVKDSNTKKAGKTGPMKTLLVRVMTPDLRERLENLRKKPENIPQPISNTSRANLNKLLTDYTEMKKAILHVYWEEFQKDPVGLMSRVAQPASKKIDQNKLKPEMDEKGNLTTAGFACSQCGQPLFVYKLEQVSEKGKAYTNYFGRCNVAEHEKLIQLAQLKPEKDSDEAVTYSLGKFGQRALDFYSIHVTKESTHPVKPLAQIAGNRYASAPVGKALSDACMGTIASFLSKYQDIIIEHQKVVKGNQKRLESLRELAGKENLEYPSVTLPPQPHTKEGVDAYNEVIARVRMWVNLNLWQKLKLSRDDAKPLLRLKGFPSFPLVERQANEVDWWDMVCNVKKLINEKKEDGKVFWQNLAGYKRQEALRPYLSSEEDRKKGKKFARYQLGDLLLHLEKKHGEDWGKVYDEAWERIDKKVEGLSKHIKLEEERRSEDAQSKAALTDWLRAKASFVIEGLKEADKDEFCRCELKLQKWYGDLRGKPFAIEAENSILDISGFSKQYNCAFIWQKDGVKKLNLYLIINYFKGGKLRFKKIKPEAFEANRFYTVINKKSGEIVPMEVNFNFDDPNLIILPLAFGKRQGREFIWNDLLSLETGSLKLANGRVIEKTLYNRRTRQDEPALFVALTFERREVLDSSNIKPMNLIGVDRGENIPAVIALTDPEGCPLSRFKDSLGNPTHILRIGESYKEKQRTIQAKKEVEQRRAGGYSRKYASKAKNLADDMVRNTARDLLYYAVTQDAMLIFENLSRGFGRQGKRTFMAERQYTRMEDWLTAKLAYEGLASKTYLSKTLAQYTSKTCSNCGFTITSADYDRVLEKLKKTATGWMTTINGKELKVEGQITYYNRYKRQNVVKDLSVELDRLSEESVNNDISSWTKGRSGEALSLLKKRFSHRPVQEKFVCLNCGFETHADEQAALNIARSWLFLRSQEYKKYQTNKTTGNTDKRAFVETWQSFYRKKLKEVWKPAV

SEQ ID NO: 46725 - protein, 978 aa, synthetic construct
  REGION 1..978: note = engineered CasX variant
QEIKRINKIRRRLVKDSNTKKAGKTGPMKTLLVRVMTPDLRERLENLRKKPENIPQPISNTSRANLNKLLTDYTEMKKAILHVYWEEFQKDPVGLMSRVAQPASKKIDQNKLKPEMDEKGNLTTAGFACSQCGQPLFVYKLEQVSEKGKAYTNYFGRCNVAEHEKLIQLAQLKPEKDSDEAVTYSLGKFGQRALDFYSIHVTKESTHPVKPLAQIAGNRYASVPVGKALSDACMGTIASFLSKYQDIIIEHQKVVKGNQKRLESLRELAGKENLEYPSVTLPPQPHTKEGVDAYNEVIARVRMWVNLNLWQKLKLSRDDAKPLLRLKGFPSFPLVERQANEVDWWDMVCNVKKLINEKKEDGKVFWQNLAGYKRQEALRPYLSSEEDRKKGKKFARYQLGDLLLHLEKKHGEDWGKVYDEAWERIDKKVEGLSKHIKLEEERRSEDAQSKAALTDWLRAKASFVIEGLKEADKDEFCRCELKLQKWYGDLRGKPFAIEAENSILDISGFSKQYNCAFIWQKDGVKKLNLYLIINYFKGGKLRFKKIKPEAFEANRFYTVINKKSGEIVPMEVNFNFDDPNLIILPLAFGKRQGREFIWNDLLSLETGSLKLANGRVIEKTLYNRRTRQDEPALFVALTFERREVLDSSNIKPMNLIGVDRGENIPAVIALTDPEGCPLSRFKDSLGNPTHILRIGESYKEKQRTIQAKKEVEQRRAGGYSRKYASKAKNLADDMVRNTARDLLYYAVTQDAMLIFENLSRGFGRQGKRTFMAERQYTRMEDWLTAKLAYEGLASKTYLSKTLAQYTSKTCSNCGFTITSADYDRVLEKLKKTATGWMTTINGKELKVEGQITYYNRYKRQNVVKDLSVELDRLSEESVNNDISSWTKGRSGEALSLLKKRFSHRPVQEKFVCLNCGFETHADEQAALNIARSWLFLRSQEYKKYQTNKTTGNTDKRAFVETWQSFYRKKLKEVWKPAV

SEQ ID NO: 46726 - protein, 979 aa, synthetic construct
  REGION 1..979: note = engineered CasX variant
QEIKRINKIRRRLVKDSNTKKAGKTGPMKTLLVRVMTPDLRERLENLRKKPENIPQPISNTSRANLNKLLTDYTEMKKAILHVYWEEFQKDPVGLMSRVAQPASKKIDQNKLKPEMDEKGNLTTAGFACSQCGQPLFVYKLEQVSEKGKAYTNYFGRCNVAEHEKLIQKLAQLKPEKDSDEAVTYSLGKFGQRALDFYSIHVTKESTHPVKPLAQIAGNRYASGPVGKALSDACMGTIASFLSKYQDIIIEHQKVVKGNQKRLESLRELAGKENLEYPSVTLPPQPHTKEGVDAYNEVIARVRMWVNLNLWQKLKLSRDDAKPLLRLKGFPSFPLVERQANEVDWWDMVCNVKKLINEKKEDGKVFWQNLAGYKRQEALRPYLSSEEDRKKGKKFARYQLGDLLLHLEKKHGEDWGKVYDEAWERIDKKVEGLSKHIKLEEERRSEDAQSKAALTDWLRAKASFVIEGLKEADKDEFCRCELKLQKWYGDLRGKPFAIEAENSILDISGFSKQYNCAFIWQKDGVKKLNLYLIINYFKGGKLRFKKIKPEAFEANRFYTVINKKSGEIVPMEVNFNFDDPNLIILPLAFGKRQGREFIWNDLLSLETGSLKLANGRVIEKTLYNRRTRQDEPALFVALTFERREVLDSSNIKPMNLIGVDRGENIPAVIALTDPEGCPLSRFKDSLGNPTHILRIGESYKEKQRTIQAKKEVEQRRAGGYSRKYASKAKNLADDMVRNTARDLLYYAVTQDAMLIFENLSRGFGRQGKRTFMAERQYTRMEDWLTAKLAYEGLASKTYLSKTLAQYTSKTCSNCGFTITSADYDRVLEKLKKTATGWMTTINGKELKVEGQITYYNRYKRQNVVKDLSVELDRLSEESVNNDISSWTKGRSGEALSLLKKRFSHRPVQEKFVCLNCGFETHADEQAALNIARSWLFLRSQEYKKYQTNKTTGNTDKRAFVETWQSFYRKKLKEVWKPAV

SEQ ID NO: 46727 - protein, 977 aa, synthetic construct
  REGION 1..977: note = engineered CasX variant
QEIKRINKIRRRLVKDSNTKKAGKTGPMKTLLVRVMTPDLRERLENLRKKPENIPQPISNTSRANLNKLLTDYTEMKKAILHVYWEEFQKDPVGLMSRVAQPASKKIDQNKLKPEMDEKGNLTTAGFACSQCGQPLFVYKLEQVSEKGKAYTNYFGRCNVAEHEKLIQLAQLKPEKDSDEAVTYSLGKFGQRALDFYSIHVTKESTHPVKPLAQIAGNRYASPVGKALSDACMGTIASFLSKYQDIIIEHQKVVKGNQKRLESLRELAGKENLEYPSVTLPPQPHTKEGVDAYNEVIARVRMWVNLNLWQKLKLSRDDAKPLLRLKGFPSFPLVERQANEVDWWDMVCNVKKLINEKKEDGKVFWQNLAGYKRQEALRPYLSSEEDRKKGKKFARYQLGDLLLHLEKKHGEDWGKVYDEAWERIDKKVEGLSKHIKLEEERRSEDAQSKAALTDWLRAKASFVIEGLKEADKDEFCRCELKLQKWYGDLRGKPFAIEAENSILDISGFSKQYNCAFIWQKDGVKKLNLYLIINYFKGGKLRFKKIKPEAFEANRFYTVINKKSGEIVPMEVNFNFDDPNLIILPLAFGKRQGREFIWNDLLSLETGSLKLANGRVIEKTLYNRRTRQDEPALFVALTFERREVLDSSNIKPMNLIGVDRGENIPAVIALTDPEGCPLSRFKDSLGNPTHILRIGESYKEKQRTIQAKKEVEQRRAGGYSRKYASKAKNLADDMVRNTARDLLYYAVTQDAMLIFENLSRGFGRQGKRTFMAERQYTRMEDWLTAKLAYEGLASKTYLSKTLAQYTSKTCSNCGFTITSADYDRVLEKLKKTATGWMTTINGKELKVEGQITYYNRYKRQNVVKDLSVELDRLSEESVNNDISSWTKGRSGEALSLLKKRFSHRPVQEKFVCLNCGFETHADEQAALNIARSWLFLRSQEYKKYQTNKTTGNTDKRAFVETWQSFYRKKLKEVWKPAV

SEQ ID NO: 46728 - protein, 978 aa, synthetic construct
  REGION 1..978: note = engineered CasX variant
QEIKRINKIRRRLVKDSNTKKAGKTGPMKTLLVRVMTPDLRERLENLRKKPENIPQPISNTSRANLNKLLTDYTEMKKAILHVYWEEFQKDPVGLMSRVAQPASKKIDQNKLKPEMDEKGNLTTAGFACSQCGQPLFVYKLEQVSEKGKAYTNYFGRCNVAEHEKLILLAQLKPEKDSDEAVTYSLGKFGQRALDFYSIHVTKESTHPVKPLAQIAGNRYASYPVGKALSDACMGTIASFLSKYQDIIIEHQKVVKGNQKRLESLRELAGKENLEYPSVTLPPQPHTKEGVDAYNEVIARVRMWVNLNLWQKLKLSRDDAKPLLRLKGFPSFPLVERQANEVDWWDMVCNVKKLINEKKEDGKVFWQNLAIYKRQEALRPYLSSEEDRKKGKKFARYQLGDLLLHLEKKHGEDWGKVYDEAWERIDKKVEGLSKHIKLEEERRSEDAQSKAALTDWLRAKASFVIEGLKEADKDEFCRCELKLQKWYGDLRGKPFAIEAENSILDISGFSKQYNCAFIWQKDGVKKLNLYLIINYFKGGKLRFKKIKPEAFEANRFYTVINKKSGEIVPMEVNFNFDDPNLIILPLAFGKRQGREFIWNDLLSLETGSLKLANGRVIEKTLYNRRTRQDEPALFVALTFERREVLDSSNIKPMNLIGVDRGENIPAVIALTDPEGCPLSRFKDSLGNPTHILRIGESYKEKQRTIQAKKEVEQRRAGGYSRKYASKAKNLADDMVRNTARDLLYYAVTQDAMLIFENLSRGFGRQGKRTFMAERQYTRMEDWLTAKLAYEGLASKTYLSKTLAQYTSKTCSNCGFTITSADYDRVLEKLKKTATGWMTTINGKELKVEGQITYYNRYKRQNVVKDLSVELDRLSEESVNNDISSWTKGRSGEALSLLKKRFSHRPVQEKFVCLNCGFETHADEQAALNIARSWLFLRSQEYKKYQTNKTTGNTDKRAFVETWQSFYRKKLKEVWKPAV

SEQ ID NO: 46729 - protein, 978 aa, synthetic construct
  REGION 1..978: note = engineered CasX variant
QEIKRINKIRRRLVKDSNTKKAGKTGPMKTLLVRVMTPDLRERLENLRKKPENIPQPISNTSRANLNKLLTDYTEMKKAILHVYWEEFQKDPVGLMSRVAQPASKKIDQNKLKPEMDEKGNLTTAGFACSQCGQPLFVYKLEQVSEKGKAYTNYFGRCNVAEHEKLILLAQLKPEKDSDEAVTYSLGKFGQRALDFYSIHVTKESTHPVKPLAQIAGNRYASHPVGKALSDACMGTIASFLSKYQDIIIEHQKVVKGNQKRLESLRELAGKENLEYPSVTLPPQPHTKEGVDAYNEVIARVRMWVNLNLWQKLKLSRDDAKPLLRLKGFPSFPLVERQANEVDWWDMVCNVKKLINEKKEDGKVFWQNLAIYKRQEALRPYLSSEEDRKKGKKFARYQLGDLLLHLEKKHGEDWGKVYDEAWERIDKKVEGLSKHIKLEEERRSEDAQSKAALTDWLRAKASFVIEGLKEADKDEFCRCELKLQKWYGDLRGKPFAIEAENSILDISGFSKQYNCAFIWQKDGVKKLNLYLIINYFKGGKLRFKKIKPEAFEANRFYTVINKKSGEIVPMEVNFNFDDPNLIILPLAFGKRQGREFIWNDLLSLETGSLKLANGRVIEKTLYNRRTRQDEPALFVALTFERREVLDSSNIKPMNLIGVDRGENIPAVIALTDPEGCPLSRFKDSLGNPTHILRIGESYKEKQRTIQAKKEVEQRRAGGYSRKYASKAKNLADDMVRNTARDLLYYAVTQDAMLIFENLSRGFGRQGKRTFMAERQYTRMEDWLTAKLAYEGLASKTYLSKTLAQYTSKTCSNCGFTITSADYDRVLEKLKKTATGWMTTINGKELKVEGQITYYNRYKRQNVVKDLSVELDRLSEESVNNDISSWTKGRSGEALSLLKKRFSHRPVQEKFVCLNCGFETHADEQAALNIARSWLFLRSQEYKKYQTNKTTGNTDKRAFVETWQSFYRKKLKEVWKPAV

SEQ ID NO: 46730 - protein, 978 aa, synthetic construct
  REGION 1..978: note = engineered CasX variant
QEIKRINKIRRRLVKDSNTKKAGKTGPMKTLLVRVMTPDLRERLENLRKKPENIPQPISNTSRANLNKLLTDYTEMKKAILHVYWEEFQKDPVGLMSRVAQPASKKIDQNKLKPEMDEKGNLTTAGFACSQCGQPLFVYKLEQVSEKGKAYTNYFGRCNVAEHEKLILLAQLKPEKDSDEAVTYSLGKFGQRALDFYSIHVTKESTHPVKPLAQIAGNRYASSPVGKALSDACMGTIASFLSKYQDIIIEHQKVVKGNQKRLESLRELAGKENLEYPSVTLPPQPHTKEGVDAYNEVIARVRMWVNLNLWQKLKLSRDDAKPLLRLKGFPSFPLVERQANEVDWWDMVCNVKKLINEKKEDGKVFWQNLAIYKRQEALRPYLSSEEDRKKGKKFARYQLGDLLLHLEKKHGEDWGKVYDEAWERIDKKVEGLSKHIKLEEERRSEDAQSKAALTDWLRAKASFVIEGLKEADKDEFCRCELKLQKWYGDLRGKPFAIEAENSILDISGFSKQYNCAFIWQKDGVKKLNLYLIINYFKGGKLRFKKIKPEAFEANRFYTVINKKSGEIVPMEVNFNFDDPNLIILPLAFGKRQGREFIWNDLLSLETGSLKLANGRVIEKTLYNRRTRQDEPALFVALTFERREVLDSSNIKPMNLIGVDRGENIPAVIALTDPEGCPLSRFKDSLGNPTHILRIGESYKEKQRTIQAKKEVEQRRAGGYSRKYASKAKNLADDMVRNTARDLLYYAVTQDAMLIFENLSRGFGRQGKRTFMAERQYTRMEDWLTAKLAYEGLASKTYLSKTLAQYTSKTCSNCGFTITSADYDRVLEKLKKTATGWMTTINGKELKVEGQITYYNRYKRQNVVKDLSVELDRLSEESVNNDISSWTKGRSGEALSLLKKRFSHRPVQEKFVCLNCGFETHADEQAALNIARSWLFLRSQEYKKYQTNKTTGNTDKRAFVETWQSFYRKKLKEVWKPAV

SEQ ID NO: 46731 - protein, 978 aa, synthetic construct
  REGION 1..978: note = engineered CasX variant
QEIKRINKIRRRLVKDSNTKKAGKTGPMKTLLVRVMTPDLRERLENLRKKPENIPQPISNTSRANLNKLLTDYTEMKKAILHVYWEEFQKDPVGLMSRVAQPASKKIDQNKLKPEMDEKGNLTTAGFACSQCGQPLFVYKLEQVSEKGKAYTNYFGRCNVAEHEKLILLAQLKPEKDSDEAVTYSLGKFGQRALDFYSIHVTKESTHPVKPLAQIAGNRYASTPVGKALSDACMGTIASFLSKYQDIIIEHQKVVKGNQKRLESLRELAGKENLEYPSVTLPPQPHTKEGVDAYNEVIARVRMWVNLNLWQKLKLSRDDAKPLLRLKGFPSFPLVERQANEVDWWDMVCNVKKLINEKKEDGKVFWQNLAIYKRQEALRPYLSSEEDRKKGKKFARYQLGDLLLHLEKKHGEDWGKVYDEAWERIDKKVEGLSKHIKLEEERRSEDAQSKAALTDWLRAKASFVIEGLKEADKDEFCRCELKLQKWYGDLRGKPFAIEAENSILDISGFSKQYNCAFIWQKDGVKKLNLYLIINYFKGGKLRFKKIKPEAFEANRFYTVINKKSGEIVPMEVNFNFDDPNLIILPLAFGKRQGREFIWNDLLSLETGSLKLANGRVIEKTLYNRRTRQDEPALFVALTFERREVLDSSNIKPMNLIGVDRGENIPAVIALTDPEGCPLSRFKDSLGNPTHILRIGESYKEKQRTIQAKKEVEQRRAGGYSRKYASKAKNLADDMVRNTARDLLYYAVTQDAMLIFENLSRGFGRQGKRTFMAERQYTRMEDWLTAKLAYEGLASKTYLSKTLAQYTSKTCSNCGFTITSADYDRVLEKLKKTATGWMTTINGKELKVEGQITYYNRYKRQNVVKDLSVELDRLSEESVNNDISSWTKGRSGEALSLLKKRFSHRPVQEKFVCLNCGFETHADEQAALNIARSWLFLRSQEYKKYQTNKTTGNTDKRAFVETWQSFYRKKLKEVWKPAV

SEQ ID NO: 46732 - protein, 978 aa, synthetic construct
  REGION 1..978: note = engineered CasX variant
QEIKRINKIRRRLVKDSNTKKAGKTGPMKTLLVRVMTPDLRERLENLRKKPENIPQPISNTSRANLNKLLTDYTEMKKAILHVYWEEFQKDPVGLMSRVAQPASKKIDQNKLKPEMDEKGNLTTAGFACSQCGQPLFVYKLEQVSEKGKAYTNYFGRCNVAEHEKLILLAQLKPEKDSDEAVTYSLGKFGQRALDFYSIHVTKESTHPVKPLAQIAGNRYASAPVGKALSDACMGTIASFLSKYQDIIIEHQKVVKGNQKRLESLRELAGKENLEYPSVTLPPQPHTKEGVDAYNEVIARVRMWVNLNLWQKLKLSRDDAKPLLRLKGFPSFPLVERQANEVDWWDMVCNVKKLINEKKEDGKVFWQNLAIYKRQEALRPYLSSEEDRKKGKKFARYQLGDLLLHLEKKHGEDWGKVYDEAWERIDKKVEGLSKHIKLEEERRSEDAQSKAALTDWLRAKASFVIEGLKEADKDEFCRCELKLQKWYGDLRGKPFAIEAENSILDISGFSKQYNCAFIWQKDGVKKLNLYLIINYFKGGKLRFKKIKPEAFEANRFYTVINKKSGEIVPMEVNFNFDDPNLIILPLAFGKRQGREFIWNDLLSLETGSLKLANGRVIEKTLYNRRTRQDEPALFVALTFERREVLDSSNIKPMNLIGVDRGENIPAVIALTDPEGCPLSRFKDSLGNPTHILRIGESYKEKQRTIQAKKEVEQRRAGGYSRKYASKAKNLADDMVRNTARDLLYYAVTQDAMLIFENLSRGFGRQGKRTFMAERQYTRMEDWLTAKLAYEGLASKTYLSKTLAQYTSKTCSNCGFTITSADYDRVLEKLKKTATGWMTTINGKELKVEGQITYYNRYKRQNVVKDLSVELDRLSEESVNNDISSWTKGRSGEALSLLKKRFSHRPVQEKFVCLNCGFETHADEQAALNIARSWLFLRSQEYKKYQTNKTTGNTDKRAFVETWQSFYRKKLKEVWKPAV

SEQ ID NO: 46733 - protein, 978 aa, synthetic construct
  REGION 1..978: note = engineered CasX variant
QEIKRINKIRRRLVKDSNTKKAGKTGPMKTLLVRVMTPDLRERLENLRKKPENIPQPISNTSRANLNKLLTDYTEMKKAILHVYWEEFQKDPVGLMSRVAQPASKKIDQNKLKPEMDEKGNLTTAGFACSQCGQPLFVYKLEQVSEKGKAYTNYFGRCNVAEHEKLILLAQLKPEKDSDEAVTYSLGKFGQRALDFYSIHVTKESTHPVKPLAQIAGNRYASVPVGKALSDACMGTIASFLSKYQDIIIEHQKVVKGNQKRLESLRELAGKENLEYPSVTLPPQPHTKEGVDAYNEVIARVRMWVNLNLWQKLKLSRDDAKPLLRLKGFPSFPLVERQANEVDWWDMVCNVKKLINEKKEDGKVFWQNLAIYKRQEALRPYLSSEEDRKKGKKFARYQLGDLLLHLEKKHGEDWGKVYDEAWERIDKKVEGLSKHIKLEEERRSEDAQSKAALTDWLRAKASFVIEGLKEADKDEFCRCELKLQKWYGDLRGKPFAIEAENSILDISGFSKQYNCAFIWQKDGVKKLNLYLIINYFKGGKLRFKKIKPEAFEANRFYTVINKKSGEIVPMEVNFNFDDPNLIILPLAFGKRQGREFIWNDLLSLETGSLKLANGRVIEKTLYNRRTRQDEPALFVALTFERREVLDSSNIKPMNLIGVDRGENIPAVIALTDPEGCPLSRFKDSLGNPTHILRIGESYKEKQRTIQAKKEVEQRRAGGYSRKYASKAKNLADDMVRNTARDLLYYAVTQDAMLIFENLSRGFGRQGKRTFMAERQYTRMEDWLTAKLAYEGLASKTYLSKTLAQYTSKTCSNCGFTITSADYDRVLEKLKKTATGWMTTINGKELKVEGQITYYNRYKRQNVVKDLSVELDRLSEESVNNDISSWTKGRSGEALSLLKKRFSHRPVQEKFVCLNCGFETHADEQAALNIARSWLFLRSQEYKKYQTNKTTGNTDKRAFVETWQSFYRKKLKEVWKPAV

SEQ ID NO: 46734 - protein, 978 aa, synthetic construct
  REGION 1..978: note = engineered CasX variant
QEIKRINKIRRRLVKDSNTKKAGKTGPMKTLLVRVMTPDLRERLENLRKKPENIPQPISNTSRANLNKLLTDYTEMKKAILHVYWEEFQKDPVGLMSRVAQPASKKIDQNKLKPEMDEKGNLTTAGFACSQCGQPLFVYKLEQVSEKGKAYTNYFGRCNVAEHEKLIKLAQLKPEKDSDEAVTYSLGKFGQRALDFYSIHVTKESTHPVKPLAQIAGNRYASGPVGKALSDACMGTIASFLSKYQDIIIEHQKVVKGNQKRLESLRELAGKENLEYPSVTLPPQPHTKEGVDAYNEVIARVRMWVNLNLWQKLKLSRDDAKPLLRLKGFPSFPLVERQANEVDWWDMVCNVKKLINEKKEDGKVFWQNLAIYKRQEALRPYLSSEEDRKKGKKFARYQLGDLLLHLEKKHGEDWGKVYDEAWERIDKKVEGLSKHIKLEEERRSEDAQSKAALTDWLRAKASFVIEGLKEADKDEFCRCELKLQKWYGDLRGKPFAIEAENSILDISGFSKQYNCAFIWQKDGVKKLNLYLIINYFKGGKLRFKKIKPEAFEANRFYTVINKKSGEIVPMEVNFNFDDPNLIILPLAFGKRQGREFIWNDLLSLETGSLKLANGRVIEKTLYNRRTRQDEPALFVALTFERREVLDSSNIKPMNLIGVDRGENIPAVIALTDPEGCPLSRFKDSLGNPTHILRIGESYKEKQRTIQAKKEVEQRRAGGYSRKYASKAKNLADDMVRNTARDLLYYAVTQDAMLIFENLSRGFGRQGKRTFMAERQYTRMEDWLTAKLAYEGLASKTYLSKTLAQYTSKTCSNCGFTITSADYDRVLEKLKKTATGWMTTINGKELKVEGQITYYNRYKRQNVVKDLSVELDRLSEESVNNDISSWTKGRSGEALSLLKKRFSHRPVQEKFVCLNCGFETHADEQAALNIARSWLFLRSQEYKKYQTNKTTGNTDKRAFVETWQSFYRKKLKEVWKPAV

SEQ ID NO: 46735 - protein, 977 aa, synthetic construct
  REGION 1..977: note = engineered CasX variant
QEIKRINKIRRRLVKDSNTKKAGKTGPMKTLLVRVMTPDLRERLENLRKKPENIPQPISNTSRANLNKLLTDYTEMKKAILHVYWEEFQKDPVGLMSRVAQPASKKIDQNKLKPEMDEKGNLTTAGFACSQCGQPLFVYKLEQVSEKGKAYTNYFGRCNVAEHEKLILLAQLKPEKDSDEAVTYSLGKFGQRALDFYSIHVTKESTHPVKPLAQIAGNRYASPVGKALSDACMGTIASFLSKYQDIIIEHQKVVKGNQKRLESLRELAGKENLEYPSVTLPPQPHTKEGVDAYNEVIARVRMWVNLNLWQKLKLSRDDAKPLLRLKGFPSFPLVERQANEVDWWDMVCNVKKLINEKKEDGKVFWQNLAIYKRQEALRPYLSSEEDRKKGKKFARYQLGDLLLHLEKKHGEDWGKVYDEAWERIDKKVEGLSKHIKLEEERRSEDAQSKAALTDWLRAKASFVIEGLKEADKDEFCRCELKLQKWYGDLRGKPFAIEAENSILDISGFSKQYNCAFIWQKDGVKKLNLYLIINYFKGGKLRFKKIKPEAFEANRFYTVINKKSGEIVPMEVNFNFDDPNLIILPLAFGKRQGREFIWNDLLSLETGSLKLANGRVIEKTLYNRRTRQDEPALFVALTFERREVLDSSNIKPMNLIGVDRGENIPAVIALTDPEGCPLSRFKDSLGNPTHILRIGESYKEKQRTIQAKKEVEQRRAGGYSRKYASKAKNLADDMVRNTARDLLYYAVTQDAMLIFENLSRGFGRQGKRTFMAERQYTRMEDWLTAKLAYEGLASKTYLSKTLAQYTSKTCSNCGFTITSADYDRVLEKLKKTATGWMTTINGKELKVEGQITYYNRYKRQNVVKDLSVELDRLSEESVNNDISSWTKGRSGEALSLLKKRFSHRPVQEKFVCLNCGFETHADEQAALNIARSWLFLRSQEYKKYQTNKTTGNTDKRAFVETWQSFYRKKLKEVWKPAV

SEQ ID NO: 46736 - protein, 978 aa, synthetic construct
  REGION 1..978: note = engineered CasX variant
QEIKRINKIRRRLVKDSNTKKAGKTGPMKTLLVRVMTPDLRERLENLRKKPENIPQPISNTSRANLNKLLTDYTEMKKAILHVYWEEFQKDPVGLMSRVAQPASKKIDQNKLKPEMDEKGNLTTAGFACSQCGQPLFVYKLEQVSEKGKAYTNYFGRCNVAEHEKLILLAQLKPEKDSDEAVTYSLGKFGQRALDFYSIHVTKESTHPVKPLAQIAGNRYASYPVGKALSDACMGTIASFLSKYQDIIIEHQKVVKGNQKRLESLRELAGKENLEYPSVTLPPQPHTKEGVDAYNEVIARVRMWVNLNLWQKLKLSRDDAKPLLRLKGFPSFPLVERQANEVDWWDMVCNVKKLINEKKEDGKVFWQNLAGYKRQEALRPYLSSEEDREKGKKFARYQLGDLLLHLEKKHGEDWGKVYDEAWERIDKKVEGLSKHIKLEEERRSEDAQSKAALTDWLRAKASFVIEGLKEADKDEFCRCELKLQKWYGDLRGKPFAIEAENSILDISGFSKQYNCAFIWQKDGVKKLNLYLIINYFKGGKLRFKKIKPEAFEANRFYTVINKKSGEIVPMEVNFNFDDPNLIILPLAFGKRQGREFIWNDLLSLETGSLKLANGRVIEKTLYNRRTRQDEPALFVALTFERREVLDSSNIKPMNLIGVDRGENIPAVIALTDPEGCPLSRFKDSLGNPTHILRIGESYKEKQRTIQAKKEVEQRRAGGYSRKYASKAKNLADDMVRNTARDLLYYAVTQDAMLIFENLSRGFGRQGKRTFMAERQYTRMEDWLTAKLAYEGLASKTYLSKTLAQYTSKTCSNCGFTITSADYDRVLEKLKKTATGWMTTINGKELKVEGQITYYNRYKRQNVVKDLSVELDRLSEESVNNDISSWTKGRSGEALSLLKKRFSHRPVQEKFVCLNCGFETHADEQAALNIARSWLFLRSQEYKKYQTNKTTGNTDKRAFVETWQSFYRKKLKEVWKPAV

SEQ ID NO: 46737 - protein, 978 aa, synthetic construct
  REGION 1..978: note = engineered CasX variant
QEIKRINKIRRRLVKDSNTKKAGKTGPMKTLLVRVMTPDLRERLENLRKKPENIPQPISNTSRANLNKLLTDYTEMKKAILHVYWEEFQKDPVGLMSRVAQPASKKIDQNKLKPEMDEKGNLTTAGFACSQCGQPLFVYKLEQVSEKGKAYTNYFGRCNVAEHEKLILLAQLKPEKDSDEAVTYSLGKFGQRALDFYSIHVTKESTHPVKPLAQIAGNRYASHPVGKALSDACMGTIASFLSKYQDIIIEHQKVVKGNQKRLESLRELAGKENLEYPSVTLPPQPHTKEGVDAYNEVIARVRMWVNLNLWQKLKLSRDDAKPLLRLKGFPSFPLVERQANEVDWWDMVCNVKKLINEKKEDGKVFWQNLAGYKRQEALRPYLSSEEDREKGKKFARYQLGDLLLHLEKKHGEDWGKVYDEAWERIDKKVEGLSKHIKLEEERRSEDAQSKAALTDWLRAKASFVIEGLKEADKDEFCRCELKLQKWYGDLRGKPFAIEAENSILDISGFSKQYNCAFIWQKDGVKKLNLYLIINYFKGGKLRFKKIKPEAFEANRFYTVINKKSGEIVPMEVNFNFDDPNLIILPLAFGKRQGREFIWNDLLSLETGSLKLANGRVIEKTLYNRRTRQDEPALFVALTFERREVLDSSNIKPMNLIGVDRGENIPAVIALTDPEGCPLSRFKDSLGNPTHILRIGESYKEKQRTIQAKKEVEQRRAGGYSRKYASKAKNLADDMVRNTARDLLYYAVTQDAMLIFENLSRGFGRQGKRTFMAERQYTRMEDWLTAKLAYEGLASKTYLSKTLAQYTSKTCSNCGFTITSADYDRVLEKLKKTATGWMTTINGKELKVEGQITYYNRYKRQNVVKDLSVELDRLSEESVNNDISSWTKGRSGEALSLLKKRFSHRPVQEKFVCLNCGFETHADEQAALNIARSWLFLRSQEYKKYQTNKTTGNTDKRAFVETWQSFYRKKLKEVWKPAV

SEQ ID NO: 46738 - protein, 978 aa, synthetic construct
  REGION 1..978: note = engineered CasX variant
QEIKRINKIRRRLVKDSNTKKAGKTGPMKTLLVRVMTPDLRERLENLRKKPENIPQPISNTSRANLNKLLTDYTEMKKAILHVYWEEFQKDPVGLMSRVAQPASKKIDQNKLKPEMDEKGNLTTAGFACSQCGQPLFVYKLEQVSEKGKAYTNYFGRCNVAEHEKLILLAQLKPEKDSDEAVTYSLGKFGQRALDFYSIHVTKESTHPVKPLAQIAGNRYASSPVGKALSDACMGTIASFLSKYQDIIIEHQKVVKGNQKRLESLRELAGKENLEYPSVTLPPQPHTKEGVDAYNEVIARVRMWVNLNLWQKLKLSRDDAKPLLRLKGFPSFPLVERQANEVDWWDMVCNVKKLINEKKEDGKVFWQNLAGYKRQEALRPYLSSEEDREKGKKFARYQLGDLLLHLEKKHGEDWGKVYDEAWERIDKKVEGLSKHIKLEEERRSEDAQSKAALTDWLRAKASFVIEGLKEADKDEFCRCELKLQKWYGDLRGKPFAIEAENSILDISGFSKQYNCAFIWQKDGVKKLNLYLIINYFKGGKLRFKKIKPEAFEANRFYTVINKKSGEIVPMEVNFNFDDPNLIILPLAFGKRQGREFIWNDLLSLETGSLKLANGRVIEKTLYNRRTRQDEPALFVALTFERREVLDSSNIKPMNLIGVDRGENIPAVIALTDPEGCPLSRFKDSLGNPTHILRIGESYKEKQRTIQAKKEVEQRRAGGYSRKYASKAKNLADDMVRNTARDLLYYAVTQDAMLIFENLSRGFGRQGKRTFMAERQYTRMEDWLTAKLAYEGLASKTYLSKTLAQYTSKTCSNCGFTITSADYDRVLEKLKKTATGWMTTINGKELKVEGQITYYNRYKRQNVVKDLSVELDRLSEESVNNDISSWTKGRSGEALSLLKKRFSHRPVQEKFVCLNCGFETHADEQAALNIARSWLFLRSQEYKKYQTNKTTGNTDKRAFVETWQSFYRKKLKEVWKPAV

SEQ ID NO: 46739 - protein, 978 aa, synthetic construct
  REGION 1..978: note = engineered CasX variant
QEIKRINKIRRRLVKDSNTKKAGKTGPMKTLLVRVMTPDLRERLENLRKKPENIPQPISNTSRANLNKLLTDYTEMKKAILHVYWEEFQKDPVGLMSRVAQPASKKIDQNKLKPEMDEKGNLTTAGFACSQCGQPLFVYKLEQVSEKGKAYTNYFGRCNVAEHEKLILLAQLKPEKDSDEAVTYSLGKFGQRALDFYSIHVTKESTHPVKPLAQIAGNRYASTPVGKALSDACMGTIASFLSKYQDIIIEHQKVVKGNQKRLESLRELAGKENLEYPSVTLPPQPHTKEGVDAYNEVIARVRMWVNLNLWQKLKLSRDDAKPLLRLKGFPSFPLVERQANEVDWWDMVCNVKKLINEKKEDGKVFWQNLAGYKRQEALRPYLSSEEDREKGKKFARYQLGDLLLHLEKKHGEDWGKVYDEAWERIDKKVEGLSKHIKLEEERRSEDAQSKAALTDWLRAKASFVIEGLKEADKDEFCRCELKLQKWYGDLRGKPFAIEAENSILDISGFSKQYNCAFIWQKDGVKKLNLYLIINYFKGGKLRFKKIKPEAFEANRFYTVINKKSGEIVPMEVNFNFDDPNLIILPLAFGKRQGREFIWNDLLSLETGSLKLANGRVIEKTLYNRRTRQDEPALFVALTFERREVLDSSNIKPMNLIGVDRGENIPAVIALTDPEGCPLSRFKDSLGNPTHILRIGESYKEKQRTIQAKKEVEQRRAGGYSRKYASKAKNLADDMVRNTARDLLYYAVTQDAMLIFENLSRGFGRQGKRTFMAERQYTRMEDWLTAKLAYEGLASKTYLSKTLAQYTSKTCSNCGFTITSADYDRVLEKLKKTATGWMTTINGKELKVEGQITYYNRYKRQNVVKDLSVELDRLSEESVNNDISSWTKGRSGEALSLLKKRFSHRPVQEKFVCLNCGFETHADEQAALNIARSWLFLRSQEYKKYQTNKTTGNTDKRAFVETWQSFYRKKLKEVWKPAV

SEQ ID NO: 46740 - protein, 978 aa, synthetic construct
  REGION 1..978: note = engineered CasX variant
QEIKRINKIRRRLVKDSNTKKAGKTGPMKTLLVRVMTPDLRERLENLRKKPENIPQPISNTSRANLNKLLTDYTEMKKAILHVYWEEFQKDPVGLMSRVAQPASKKIDQNKLKPEMDEKGNLTTAGFACSQCGQPLFVYKLEQVSEKGKAYTNYFGRCNVAEHEKLILLAQLKPEKDSDEAVTYSLGKFGQRALDFYSIHVTKESTHPVKPLAQIAGNRYASAPVGKALSDACMGTIASFLSKYQDIIIEHQKVVKGNQKRLESLRELAGKENLEYPSVTLPPQPHTKEGVDAYNEVIARVRMWVNLNLWQKLKLSRDDAKPLLRLKGFPSFPLVERQANEVDWWDMVCNVKKLINEKKEDGKVFWQNLAGYKRQEALRPYLSSEEDREKGKKFARYQLGDLLLHLEKKHGEDWGKVYDEAWERIDKKVEGLSKHIKLEEERRSEDAQSKAALTDWLRAKASFVIEGLKEADKDEFCRCELKLQKWYGDLRGKPFAIEAENSILDISGFSKQYNCAFIWQKDGVKKLNLYLIINYFKGGKLRFKKIKPEAFEANRFYTVINKKSGEIVPMEVNFNFDDPNLIILPLAFGKRQGREFIWNDLLSLETGSLKLANGRVIEKTLYNRRTRQDEPALFVALTFERREVLDSSNIKPMNLIGVDRGENIPAVIALTDPEGCPLSRFKDSLGNPTHILRIGESYKEKQRTIQAKKEVEQRRAGGYSRKYASKAKNLADDMVRNTARDLLYYAVTQDAMLIFENLSRGFGRQGKRTFMAERQYTRMEDWLTAKLAYEGLASKTYLSKTLAQYTSKTCSNCGFTITSADYDRVLEKLKKTATGWMTTINGKELKVEGQITYYNRYKRQNVVKDLSVELDRLSEESVNNDISSWTKGRSGEALSLLKKRFSHRPVQEKFVCLNCGFETHADEQAALNIARSWLFLRSQEYKKYQTNKTTGNTDKRAFVETWQSFYRKKLKEVWKPAV

SEQ ID NO: 46741 - protein, 978 aa, synthetic construct
  REGION 1..978: note = engineered CasX variant
QEIKRINKIRRRLVKDSNTKKAGKTGPMKTLLVRVMTPDLRERLENLRKKPENIPQPISNTSRANLNKLLTDYTEMKKAILHVYWEEFQKDPVGLMSRVAQPASKKIDQNKLKPEMDEKGNLTTAGFACSQCGQPLFVYKLEQVSEKGKAYTNYFGRCNVAEHEKLILLAQLKPEKDSDEAVTYSLGKFGQRALDFYSIHVTKESTHPVKPLAQIAGNRYASVPVGKALSDACMGTIASFLSKYQDIIIEHQKVVKGNQKRLESLRELAGKENLEYPSVTLPPQPHTKEGVDAYNEVIARVRMWVNLNLWQKLKLSRDDAKPLLRLKGFPSFPLVERQANEVDWWDMVCNVKKLINEKKEDGKVFWQNLAGYKRQEALRPYLSSEEDREKGKKFARYQLGDLLLHLEKKHGEDWGKVYDEAWERIDKKVEGLSKHIKLEEERRSEDAQSKAALTDWLRAKASFVIEGLKEADKDEFCRCELKLQKWYGDLRGKPFAIEAENSILDISGFSKQYNCAFIWQKDGVKKLNLYLIINYFKGGKLRFKKIKPEAFEANRFYTVINKKSGEIVPMEVNFNFDDPNLIILPLAFGKRQGREFIWNDLLSLETGSLKLANGRVIEKTLYNRRTRQDEPALFVALTFERREVLDSSNIKPMNLIGVDRGENIPAVIALTDPEGCPLSRFKDSLGNPTHILRIGESYKEKQRTIQAKKEVEQRRAGGYSRKYASKAKNLADDMVRNTARDLLYYAVTQDAMLIFENLSRGFGRQGKRTFMAERQYTRMEDWLTAKLAYEGLASKTYLSKTLAQYTSKTCSNCGFTITSADYDRVLEKLKKTATGWMTTINGKELKVEGQITYYNRYKRQNVVKDLSVELDRLSEESVNNDISSWTKGRSGEALSLLKKRFSHRPVQEKFVCLNCGFETHADEQAALNIARSWLFLRSQEYKKYQTNKTTGNTDKRAFVETWQSFYRKKLKEVWKPAV

SEQ ID NO: 46742 - protein, 978 aa, synthetic construct
  REGION 1..978: note = engineered CasX variant
QEIKRINKIRRRLVKDSNTKKAGKTGPMKTLLVRVMTPDLRERLENLRKKPENIPQPISNTSRANLNKLLTDYTEMKKAILHVYWEEFQKDPVGLMSRVAQPASKKIDQNKLKPEMDEKGNLTTAGFACSQCGQPLFVYKLEQVSEKGKAYTNYFGRCNVAEHEKLIKLAQLKPEKDSDEAVTYSLGKFGQRALDFYSIHVTKESTHPVKPLAQIAGNRYASGPVGKALSDACMGTIASFLSKYQDIIIEHQKVVKGNQKRLESLRELAGKENLEYPSVTLPPQPHTKEGVDAYNEVIARVRMWVNLNLWQKLKLSRDDAKPLLRLKGFPSFPLVERQANEVDWWDMVCNVKKLINEKKEDGKVFWQNLAGYKRQEALRPYLSSEEDREKGKKFARYQLGDLLLHLEKKHGEDWGKVYDEAWERIDKKVEGLSKHIKLEEERRSEDAQSKAALTDWLRAKASFVIEGLKEADKDEFCRCELKLQKWYGDLRGKPFAIEAENSILDISGFSKQYNCAFIWQKDGVKKLNLYLIINYFKGGKLRFKKIKPEAFEANRFYTVINKKSGEIVPMEVNFNFDDPNLIILPLAFGKRQGREFIWNDLLSLETGSLKLANGRVIEKTLYNRRTRQDEPALFVALTFERREVLDSSNIKPMNLIGVDRGENIPAVIALTDPEGCPLSRFKDSLGNPTHILRIGESYKEKQRTIQAKKEVEQRRAGGYSRKYASKAKNLADDMVRNTARDLLYYAVTQDAMLIFENLSRGFGRQGKRTFMAERQYTRMEDWLTAKLAYEGLASKTYLSKTLAQYTSKTCSNCGFTITSADYDRVLEKLKKTATGWMTTINGKELKVEGQITYYNRYKRQNVVKDLSVELDRLSEESVNNDISSWTKGRSGEALSLLKKRFSHRPVQEKFVCLNCGFETHADEQAALNIARSWLFLRSQEYKKYQTNKTTGNTDKRAFVETWQSFYRKKLKEVWKPAV

SEQ ID NO: 46743 - protein, 977 aa, synthetic construct
  REGION 1..977: note = engineered CasX variant
QEIKRINKIRRRLVKDSNTKKAGKTGPMKTLLVRVMTPDLRERLENLRKKPENIPQPISNTSRANLNKLLTDYTEMKKAILHVYWEEFQKDPVGLMSRVAQPASKKIDQNKLKPEMDEKGNLTTAGFACSQCGQPLFVYKLEQVSEKGKAYTNYFGRCNVAEHEKLILLAQLKPEKDSDEAVTYSLGKFGQRALDFYSIHVTKESTHPVKPLAQIAGNRYASPVGKALSDACMGTIASFLSKYQDIIIEHQKVVKGNQKRLESLRELAGKENLEYPSVTLPPQPHTKEGVDAYNEVIARVRMWVNLNLWQKLKLSRDDAKPLLRLKGFPSFPLVERQANEVDWWDMVCNVKKLINEKKEDGKVFWQNLAGYKRQEALRPYLSSEEDREKGKKFARYQLGDLLLHLEKKHGEDWGKVYDEAWERIDKKVEGLSKHIKLEEERRSEDAQSKAALTDWLRAKASFVIEGLKEADKDEFCRCELKLQKWYGDLRGKPFAIEAENSILDISGFSKQYNCAFIWQKDGVKKLNLYLIINYFKGGKLRFKKIKPEAFEANRFYTVINKKSGEIVPMEVNFNFDDPNLIILPLAFGKRQGREFIWNDLLSLETGSLKLANGRVIEKTLYNRRTRQDEPALFVALTFERREVLDSSNIKPMNLIGVDRGENIPAVIALTDPEGCPLSRFKDSLGNPTHILRIGESYKEKQRTIQAKKEVEQRRAGGYSRKYASKAKNLADDMVRNTARDLLYYAVTQDAMLIFENLSRGFGRQGKRTFMAERQYTRMEDWLTAKLAYEGLASKTYLSKTLAQYTSKTCSNCGFTITSADYDRVLEKLKKTATGWMTTINGKELKVEGQITYYNRYKRQNVVKDLSVELDRLSEESVNNDISSWTKGRSGEALSLLKKRFSHRPVQEKFVCLNCGFETHADEQAALNIARSWLFLRSQEYKKYQTNKTTGNTDKRAFVETWQSFYRKKLKEVWKPAV

SEQ ID NO: 46744 - protein, 978 aa, synthetic construct
  REGION 1..978: note = engineered CasX variant
QEIKRINKIRRRLVKDSNTKKAGKTGPMKTLLVRVMTPDLRERLENLRKKPENIPQPISNTSRANLNKLLTDYTEMKKAILHVYWEEFQKDPVGLMSRVAQPASKKIDQNKLKPEMDEKGNLTTAGFACSQCGQPLFVYKLEQVSEKGKAYTNYFGRCNVAEHEKLILLAQLKPEKDSDEAVTYSLGKFGQRALDFYSIHVTKESTHPVKPLAQIAGNRYASYPVGKALSDACMGTIASFLSKYQDIIIEHQKVVKGNQKRLESLRELAGKENLEYPSVTLPPQPHTKEGVDAYNEVIARVRMWVNLNLWQKLKLSRDDAKPLLRLKGFPSFPLVERQANEVDWWDMVCNVKKLINEKKEDGKVFWQNLAGYKRQEALRPYLSSEEDRKKGKKFARYQLGDLLLHLEKKHGEDWGKVYDEAWERIDKKVEGLSKHIKLEEERRSEDAQSKAALTDWLRAKASFVIEGLKEADKDEFCRCELKLQKWYGDLRGKPFAIEAENSILDISGFSKQYNCAFIWQKDGVKKLNLYLIINYFKGGKLRFKKIKPEAFEANRFYTVINKKSGEIVIMEVNFNFDDPNLIILPLAFGKRQGREFIWNDLLSLETGSLKLANGRVIEKTLYNRRTRQDEPALFVALTFERREVLDSSNIKPMNLIGVDRGENIPAVIALTDPEGCPLSRFKDSLGNPTHILRIGESYKEKQRTIQAKKEVEQRRAGGYSRKYASKAKNLADDMVRNTARDLLYYAVTQDAMLIFENLSRGFGRQGKRTFMAERQYTRMEDWLTAKLAYEGLASKTYLSKTLAQYTSKTCSNCGFTITSADYDRVLEKLKKTATGWMTTINGKELKVEGQITYYNRYKRQNVVKDLSVELDRLSEESVNNDISSWTKGRSGEALSLLKKRFSHRPVQEKFVCLNCGFETHADEQAALNIARSWLFLRSQEYKKYQTNKTTGNTDKRAFVETWQSFYRKKLKEVWKPAV

SEQ ID NO: 46745 - protein, 978 aa, synthetic construct
  REGION 1..978: note = engineered CasX variant
QEIKRINKIRRRLVKDSNTKKAGKTGPMKTLLVRVMTPDLRERLENLRKKPENIPQPISNTSRANLNKLLTDYTEMKKAILHVYWEEFQKDPVGLMSRVAQPASKKIDQNKLKPEMDEKGNLTTAGFACSQCGQPLFVYKLEQVSEKGKAYTNYFGRCNVAEHEKLILLAQLKPEKDSDEAVTYSLGKFGQRALDFYSIHVTKESTHPVKPLAQIAGNRYASHPVGKALSDACMGTIASFLSKYQDIIIEHQKVVKGNQKRLESLRELAGKENLEYPSVTLPPQPHTKEGVDAYNEVIARVRMWVNLNLWQKLKLSRDDAKPLLRLKGFPSFPLVERQANEVDWWDMVCNVKKLINEKKEDGKVFWQNLAGYKRQEALRPYLSSEEDRKKGKKFARYQLGDLLLHLEKKHGEDWGKVYDEAWERIDKKVEGLSKHIKLEEERRSEDAQSKAALTDWLRAKASFVIEGLKEADKDEFCRCELKLQKWYGDLRGKPFAIEAENSILDISGFSKQYNCAFIWQKDGVKKLNLYLIINYFKGGKLRFKKIKPEAFEANRFYTVINKKSGEIVIMEVNFNFDDPNLIILPLAFGKRQGREFIWNDLLSLETGSLKLANGRVIEKTLYNRRTRQDEPALFVALTFERREVLDSSNIKPMNLIGVDRGENIPAVIALTDPEGCPLSRFKDSLGNPTHILRIGESYKEKQRTIQAKKEVEQRRAGGYSRKYASKAKNLADDMVRNTARDLLYYAVTQDAMLIFENLSRGFGRQGKRTFMAERQYTRMEDWLTAKLAYEGLASKTYLSKTLAQYTSKTCSNCGFTITSADYDRVLEKLKKTATGWMTTINGKELKVEGQITYYNRYKRQNVVKDLSVELDRLSEESVNNDISSWTKGRSGEALSLLKKRFSHRPVQEKFVCLNCGFETHADEQAALNIARSWLFLRSQEYKKYQTNKTTGNTDKRAFVETWQSFYRKKLKEVWKPAV

SEQ ID NO: 46746 - protein, 978 aa, synthetic construct
  REGION 1..978: note = engineered CasX variant
QEIKRINKIRRRLVKDSNTKKAGKTGPMKTLLVRVMTPDLRERLENLRKKPENIPQPISNTSRANLNKLLTDYTEMKKAILHVYWEEFQKDPVGLMSRVAQPASKKIDQNKLKPEMDEKGNLTTAGFACSQCGQPLFVYKLEQVSEKGKAYTNYFGRCNVAEHEKLILLAQLKPEKDSDEAVTYSLGKFGQRALDFYSIHVTKESTHPVKPLAQIAGNRYASSPVGKALSDACMGTIASFLSKYQDIIIEHQKVVKGNQKRLESLRELAGKENLEYPSVTLPPQPHTKEGVDAYNEVIARVRMWVNLNLWQKLKLSRDDAKPLLRLKGFPSFPLVERQANEVDWWDMVCNVKKLINEKKEDGKVFWQNLAGYKRQEALRPYLSSEEDRKKGKKFARYQLGDLLLHLEKKHGEDWGKVYDEAWERIDKKVEGLSKHIKLEEERRSEDAQSKAALTDWLRAKASFVIEGLKEADKDEFCRCELKLQKWYGDLRGKPFAIEAENSILDISGFSKQYNCAFIWQKDGVKKLNLYLIINYFKGGKLRFKKIKPEAFEANRFYTVINKKSGEIVIMEVNFNFDDPNLIILPLAFGKRQGREFIWNDLLSLETGSLKLANGRVIEKTLYNRRTRQDEPALFVALTFERREVLDSSNIKPMNLIGVDRGENIPAVIALTDPEGCPLSRFKDSLGNPTHILRIGESYKEKQRTIQAKKEVEQRRAGGYSRKYASKAKNLADDMVRNTARDLLYYAVTQDAMLIFENLSRGFGRQGKRTFMAERQYTRMEDWLTAKLAYEGLASKTYLSKTLAQYTSKTCSNCGFTITSADYDRVLEKLKKTATGWMTTINGKELKVEGQITYYNRYKRQNVVKDLSVELDRLSEESVNNDISSWTKGRSGEALSLLKKRFSHRPVQEKFVCLNCGFETHADEQAALNIARSWLFLRSQEYKKYQTNKTTGNTDKRAFVETWQSFYRKKLKEVWKPAV

SEQ ID NO: 46747 - protein, 978 aa, synthetic construct
  REGION 1..978: note = engineered CasX variant
QEIKRINKIRRRLVKDSNTKKAGKTGPMKTLLVRVMTPDLRERLENLRKKPENIPQPISNTSRANLNKLLTDYTEMKKAILHVYWEEFQKDPVGLMSRVAQPASKKIDQNKLKPEMDEKGNLTTAGFACSQCGQPLFVYKLEQVSEKGKAYTNYFGRCNVAEHEKLILLAQLKPEKDSDEAVTYSLGKFGQRALDFYSIHVTKESTHPVKPLAQIAGNRYASTPVGKALSDACMGTIASFLSKYQDIIIEHQKVVKGNQKRLESLRELAGKENLEYPSVTLPPQPHTKEGVDAYNEVIARVRMWVNLNLWQKLKLSRDDAKPLLRLKGFPSFPLVERQANEVDWWDMVCNVKKLINEKKEDGKVFWQNLAGYKRQEALRPYLSSEEDRKKGKKFARYQLGDLLLHLEKKHGEDWGKVYDEAWERIDKKVEGLSKHIKLEEERRSEDAQSKAALTDWLRAKASFVIEGLKEADKDEFCRCELKLQKWYGDLRGKPFAIEAENSILDISGFSKQYNCAFIWQKDGVKKLNLYLIINYFKGGKLRFKKIKPEAFEANRFYTVINKKSGEIVIMEVNFNFDDPNLIILPLAFGKRQGREFIWNDLLSLETGSLKLANGRVIEKTLYNRRTRQDEPALFVALTFERREVLDSSNIKPMNLIGVDRGENIPAVIALTDPEGCPLSRFKDSLGNPTHILRIGESYKEKQRTIQAKKEVEQRRAGGYSRKYASKAKNLADDMVRNTARDLLYYAVTQDAMLIFENLSRGFGRQGKRTFMAERQYTRMEDWLTAKLAYEGLASKTYLSKTLAQYTSKTCSNCGFTITSADYDRVLEKLKKTATGWMTTINGKELKVEGQITYYNRYKRQNVVKDLSVELDRLSEESVNNDISSWTKGRSGEALSLLKKRFSHRPVQEKFVCLNCGFETHADEQAALNIARSWLFLRSQEYKKYQTNKTTGNTDKRAFVETWQSFYRKKLKEVWKPAV

SEQ ID NO: 46748 - protein, 978 aa, synthetic construct
  REGION 1..978: note = engineered CasX variant
QEIKRINKIRRRLVKDSNTKKAGKTGPMKTLLVRVMTPDLRERLENLRKKPENIPQPISNTSRANLNKLLTDYTEMKKAILHVYWEEFQKDPVGLMSRVAQPASKKIDQNKLKPEMDEKGNLTTAGFACSQCGQPLFVYKLEQVSEKGKAYTNYFGRCNVAEHEKLILLAQLKPEKDSDEAVTYSLGKFGQRALDFYSIHVTKESTHPVKPLAQIAGNRYASAPVGKALSDACMGTIASFLSKYQDIIIEHQKVVKGNQKRLESLRELAGKENLEYPSVTLPPQPHTKEGVDAYNEVIARVRMWVNLNLWQKLKLSRDDAKPLLRLKGFPSFPLVERQANEVDWWDMVCNVKKLINEKKEDGKVFWQNLAGYKRQEALRPYLSSEEDRKKGKKFARYQLGDLLLHLEKKHGEDWGKVYDEAWERIDKKVEGLSKHIKLEEERRSEDAQSKAALTDWLRAKASFVIEGLKEADKDEFCRCELKLQKWYGDLRGKPFAIEAENSILDISGFSKQYNCAFIWQKDGVKKLNLYLIINYFKGGKLRFKKIKPEAFEANRFYTVINKKSGEIVIMEVNFNFDDPNLIILPLAFGKRQGREFIWNDLLSLETGSLKLANGRVIEKTLYNRRTRQDEPALFVALTFERREVLDSSNIKPMNLIGVDRGENIPAVIALTDPEGCPLSRFKDSLGNPTHILRIGESYKEKQRTIQAKKEVEQRRAGGYSRKYASKAKNLADDMVRNTARDLLYYAVTQDAMLIFENLSRGFGRQGKRTFMAERQYTRMEDWLTAKLAYEGLASKTYLSKTLAQYTSKTCSNCGFTITSADYDRVLEKLKKTATGWMTTINGKELKVEGQITYYNRYKRQNVVKDLSVELDRLSEESVNNDISSWTKGRSGEALSLLKKRFSHRPVQEKFVCLNCGFETHADEQAALNIARSWLFLRSQEYKKYQTNKTTGNTDKRAFVETWQSFYRKKLKEVWKPAV

SEQ ID NO: 46749 - protein, 978 aa, synthetic construct
  REGION 1..978: note = engineered CasX variant
QEIKRINKIRRRLVKDSNTKKAGKTGPMKTLLVRVMTPDLRERLENLRKKPENIPQPISNTSRANLNKLLTDYTEMKKAILHVYWEEFQKDPVGLMSRVAQPASKKIDQNKLKPEMDEKGNLTTAGFACSQCGQPLFVYKLEQVSEKGKAYTNYFGRCNVAEHEKLILLAQLKPEKDSDEAVTYSLGKFGQRALDFYSIHVTKESTHPVKPLAQIAGNRYASVPVGKALSDACMGTIASFLSKYQDIIIEHQKVVKGNQKRLESLRELAGKENLEYPSVTLPPQPHTKEGVDAYNEVIARVRMWVNLNLWQKLKLSRDDAKPLLRLKGFPSFPLVERQANEVDWWDMVCNVKKLINEKKEDGKVFWQNLAGYKRQEALRPYLSSEEDRKKGKKFARYQLGDLLLHLEKKHGEDWGKVYDEAWERIDKKVEGLSKHIKLEEERRSEDAQSKAALTDWLRAKASFVIEGLKEADKDEFCRCELKLQKWYGDLRGKPFAIEAENSILDISGFSKQYNCAFIWQKDGVKKLNLYLIINYFKGGKLRFKKIKPEAFEANRFYTVINKKSGEIVIMEVNFNFDDPNLIILPLAFGKRQGREFIWNDLLSLETGSLKLANGRVIEKTLYNRRTRQDEPALFVALTFERREVLDSSNIKPMNLIGVDRGENIPAVIALTDPEGCPLSRFKDSLGNPTHILRIGESYKEKQRTIQAKKEVEQRRAGGYSRKYASKAKNLADDMVRNTARDLLYYAVTQDAMLIFENLSRGFGRQGKRTFMAERQYTRMEDWLTAKLAYEGLASKTYLSKTLAQYTSKTCSNCGFTITSADYDRVLEKLKKTATGWMTTINGKELKVEGQITYYNRYKRQNVVKDLSVELDRLSEESVNNDISSWTKGRSGEALSLLKKRFSHRPVQEKFVCLNCGFETHADEQAALNIARSWLFLRSQEYKKYQTNKTTGNTDKRAFVETWQSFYRKKLKEVWKPAV

SEQ ID NO: 46750 - protein, 978 aa, synthetic construct
  REGION 1..978: note = engineered CasX variant
QEIKRINKIRRRLVKDSNTKKAGKTGPMKTLLVRVMTPDLRERLENLRKKPENIPQPISNTSRANLNKLLTDYTEMKKAILHVYWEEFQKDPVGLMSRVAQPASKKIDQNKLKPEMDEKGNLTTAGFACSQCGQPLFVYKLEQVSEKGKAYTNYFGRCNVAEHEKLIKLAQLKPEKDSDEAVTYSLGKFGQRALDFYSIHVTKESTHPVKPLAQIAGNRYASGPVGKALSDACMGTIASFLSKYQDIIIEHQKVVKGNQKRLESLRELAGKENLEYPSVTLPPQPHTKEGVDAYNEVIARVRMWVNLNLWQKLKLSRDDAKPLLRLKGFPSFPLVERQANEVDWWDMVCNVKKLINEKKEDGKVFWQNLAGYKRQEALRPYLSSEEDRKKGKKFARYQLGDLLLHLEKKHGEDWGKVYDEAWERIDKKVEGLSKHIKLEEERRSEDAQSKAALTDWLRAKASFVIEGLKEADKDEFCRCELKLQKWYGDLRGKPFAIEAENSILDISGFSKQYNCAFIWQKDGVKKLNLYLIINYFKGGKLRFKKIKPEAFEANRFYTVINKKSGEIVIMEVNFNFDDPNLIILPLAFGKRQGREFIWNDLLSLETGSLKLANGRVIEKTLYNRRTRQDEPALFVALTFERREVLDSSNIKPMNLIGVDRGENIPAVIALTDPEGCPLSRFKDSLGNPTHILRIGESYKEKQRTIQAKKEVEQRRAGGYSRKYASKAKNLADDMVRNTARDLLYYAVTQDAMLIFENLSRGFGRQGKRTFMAERQYTRMEDWLTAKLAYEGLASKTYLSKTLAQYTSKTCSNCGFTITSADYDRVLEKLKKTATGWMTTINGKELKVEGQITYYNRYKRQNVVKDLSVELDRLSEESVNNDISSWTKGRSGEALSLLKKRFSHRPVQEKFVCLNCGFETHADEQAALNIARSWLFLRSQEYKKYQTNKTTGNTDKRAFVETWQSFYRKKLKEVWKPAV

SEQ ID NO: 46751 - protein, 977 aa, synthetic construct
  REGION 1..977: note = engineered CasX variant
QEIKRINKIRRRLVKDSNTKKAGKTGPMKTLLVRVMTPDLRERLENLRKKPENIPQPISNTSRANLNKLLTDYTEMKKAILHVYWEEFQKDPVGLMSRVAQPASKKIDQNKLKPEMDEKGNLTTAGFACSQCGQPLFVYKLEQVSEKGKAYTNYFGRCNVAEHEKLILLAQLKPEKDSDEAVTYSLGKFGQRALDFYSIHVTKESTHPVKPLAQIAGNRYASPVGKALSDACMGTIASFLSKYQDIIIEHQKVVKGNQKRLESLRELAGKENLEYPSVTLPPQPHTKEGVDAYNEVIARVRMWVNLNLWQKLKLSRDDAKPLLRLKGFPSFPLVERQANEVDWWDMVCNVKKLINEKKEDGKVFWQNLAGYKRQEALRPYLSSEEDRKKGKKFARYQLGDLLLHLEKKHGEDWGKVYDEAWERIDKKVEGLSKHIKLEEERRSEDAQSKAALTDWLRAKASFVIEGLKEADKDEFCRCELKLQKWYGDLRGKPFAIEAENSILDISGFSKQYNCAFIWQKDGVKKLNLYLIINYFKGGKLRFKKIKPEAFEANRFYTVINKKSGEIVIMEVNFNFDDPNLIILPLAFGKRQGREFIWNDLLSLETGSLKLANGRVIEKTLYNRRTRQDEPALFVALTFERREVLDSSNIKPMNLIGVDRGENIPAVIALTDPEGCPLSRFKDSLGNPTHILRIGESYKEKQRTIQAKKEVEQRRAGGYSRKYASKAKNLADDMVRNTARDLLYYAVTQDAMLIFENLSRGFGRQGKRTFMAERQYTRMEDWLTAKLAYEGLASKTYLSKTLAQYTSKTCSNCGFTITSADYDRVLEKLKKTATGWMTTINGKELKVEGQITYYNRYKRQNVVKDLSVELDRLSEESVNNDISSWTKGRSGEALSLLKKRFSHRPVQEKFVCLNCGFETHADEQAALNIARSWLFLRSQEYKKYQTNKTTGNTDKRAFVETWQSFYRKKLKEVWKPAV

SEQ ID NO: 46752 - protein, 978 aa, synthetic construct
  REGION 1..978: note = engineered CasX variant
QEIKRINKIRRRLVKDSNTKKAGKTGPMKTLLVRVMTPDLRERLENLRKKPENIPQPISNTSRANLNKLLTDYTEMKKAILHVYWEEFQKDPVGLMSRVAQPASKKIDQNKLKPEMDEKGNLTTAGFACSQCGQPLFVYKLEQVSEKGKAYTNYFGRCNVAEHEKLILLAQLKPEKDSDEAVTYSLGKFGQRALDFYSIHVTKESTHPVKPLAQIAGNRYASYPVGKALSGACMGTIASFLSKYQDIIIEHQKVVKGNQKRLESLRELAGKENLEYPSVTLPPQPHTKEGVDAYNEVIARVRMWVNLNLWQKLKLSRDDAKPLLRLKGFPSFPLVERQANEVDWWDMVCNVKKLINEKKEDGKVFWQNLAGYKRQEALRPYLSSEEDRKKGKKFARYQLGDLLLHLEKKHGEDWGKVYDEAWERIDKKVEGLSKHIKLEEERRSEDAQSKAALTDWLRAKASFVIEGLKEADKDEFCRCELKLQKWYGDLRGKPFAIEAENSILDISGFSKQYNCAFIWQKDGVKKLNLYLIINYFKGGKLRFKKIKPEAFEANRFYTVINKKSGEIVPMEVNFNFDDPNLIILPLAFGKRQGREFIWNDLLSLETGSLKLANGRVIEKTLYNRRTRQDEPALFVALTFERREVLDSSNIKPMNLIGVDRGENIPAVIALTDPEGCPLSRFKDSLGNPTHILRIGESYKEKQRTIQAKKEVEQRRAGGYSRKYASKAKNLADDMVRNTARDLLYYAVTQDAMLIFENLSRGFGRQGKRTFMAERQYTRMEDWLTAKLAYEGLPSKVYLSKTLAQYTSKTCSNCGFTITSADYDRVLEKLKKTATGWMTTINGKELKVEGQITYYNRYKRQNVVKDLSVELDRLSEESVNNDISSWTKGRSGEALSLLKKRFSHRPVQEKFVCLNCGFETHADEQAALNIARSWLFLRSQEYKKYQTNKTTGNTDKRAFVETWQSFYRKKLKEVWKPAV

SEQ ID NO: 46753 - protein, 978 aa, synthetic construct
  REGION 1..978: note = engineered CasX variant
QEIKRINKIRRRLVKDSNTKKAGKTGPMKTLLVRVMTPDLRERLENLRKKPENIPQPISNTSRANLNKLLTDYTEMKKAILHVYWEEFQKDPVGLMSRVAQPASKKIDQNKLKPEMDEKGNLTTAGFACSQCGQPLFVYKLEQVSEKGKAYTNYFGRCNVAEHEKLILLAQLKPEKDSDEAVTYSLGKFGQRALDFYSIHVTKESTHPVKPLAQIAGNRYASHPVGKALSGACMGTIASFLSKYQDIIIEHQKVVKGNQKRLESLRELAGKENLEYPSVTLPPQPHTKEGVDAYNEVIARVRMWVNLNLWQKLKLSRDDAKPLLRLKGFPSFPLVERQANEVDWWDMVCNVKKLINEKKEDGKVFWQNLAGYKRQEALRPYLSSEEDRKKGKKFARYQLGDLLLHLEKKHGEDWGKVYDEAWERIDKKVEGLSKHIKLEEERRSEDAQSKAALTDWLRAKASFVIEGLKEADKDEFCRCELKLQKWYGDLRGKPFAIEAENSILDISGFSKQYNCAFIWQKDGVKKLNLYLIINYFKGGKLRFKKIKPEAFEANRFYTVINKKSGEIVPMEVNFNFDDPNLIILPLAFGKRQGREFIWNDLLSLETGSLKLANGRVIEKTLYNRRTRQDEPALFVALTFERREVLDSSNIKPMNLIGVDRGENIPAVIALTDPEGCPLSRFKDSLGNPTHILRIGESYKEKQRTIQAKKEVEQRRAGGYSRKYASKAKNLADDMVRNTARDLLYYAVTQDAMLIFENLSRGFGRQGKRTFMAERQYTRMEDWLTAKLAYEGLPSKVYLSKTLAQYTSKTCSNCGFTITSADYDRVLEKLKKTATGWMTTINGKELKVEGQITYYNRYKRQNVVKDLSVELDRLSEESVNNDISSWTKGRSGEALSLLKKRFSHRPVQEKFVCLNCGFETHADEQAALNIARSWLFLRSQEYKKYQTNKTTGNTDKRAFVETWQSFYRKKLKEVWKPAV

SEQ ID NO: 46754 - protein, 978 aa, synthetic construct
  REGION 1..978: note = engineered CasX variant
QEIKRINKIRRRLVKDSNTKKAGKTGPMKTLLVRVMTPDLRERLENLRKKPENIPQPISNTSRANLNKLLTDYTEMKKAILHVYWEEFQKDPVGLMSRVAQPASKKIDQNKLKPEMDEKGNLTTAGFACSQCGQPLFVYKLEQVSEKGKAYTNYFGRCNVAEHEKLILLAQLKPEKDSDEAVTYSLGKFGQRALDFYSIHVTKESTHPVKPLAQIAGNRYASSPVGKALSGACMGTIASFLSKYQDIIIEHQKVVKGNQKRLESLRELAGKENLEYPSVTLPPQPHTKEGVDAYNEVIARVRMWVNLNLWQKLKLSRDDAKPLLRLKGFPSFPLVERQANEVDWWDMVCNVKKLINEKKEDGKVFWQNLAGYKRQEALRPYLSSEEDRKKGKKFARYQLGDLLLHLEKKHGEDWGKVYDEAWERIDKKVEGLSKHIKLEEERRSEDAQSKAALTDWLRAKASFVIEGLKEADKDEFCRCELKLQKWYGDLRGKPFAIEAENSILDISGFSKQYNCAFIWQKDGVKKLNLYLIINYFKGGKLRFKKIKPEAFEANRFYTVINKKSGEIVPMEVNFNFDDPNLIILPLAFGKRQGREFIWNDLLSLETGSLKLANGRVIEKTLYNRRTRQDEPALFVALTFERREVLDSSNIKPMNLIGVDRGENIPAVIALTDPEGCPLSRFKDSLGNPTHILRIGESYKEKQRTIQAKKEVEQRRAGGYSRKYASKAKNLADDMVRNTARDLLYYAVTQDAMLIFENLSRGFGRQGKRTFMAERQYTRMEDWLTAKLAYEGLPSKVYLSKTLAQYTSKTCSNCGFTITSADYDRVLEKLKKTATGWMTTINGKELKVEGQITYYNRYKRQNVVKDLSVELDRLSEESVNNDISSWTKGRSGEALSLLKKRFSHRPVQEKFVCLNCGFETHADEQAALNIARSWLFLRSQEYKKYQTNKTTGNTDKRAFVETWQSFYRKKLKEVWKPAV

SEQ ID NO: 46755 - protein, 978 aa, synthetic construct
  REGION 1..978: note = engineered CasX variant
QEIKRINKIRRRLVKDSNTKKAGKTGPMKTLLVRVMTPDLRERLENLRKKPENIPQPISNTSRANLNKLLTDYTEMKKAILHVYWEEFQKDPVGLMSRVAQPASKKIDQNKLKPEMDEKGNLTTAGFACSQCGQPLFVYKLEQVSEKGKAYTNYFGRCNVAEHEKLILLAQLKPEKDSDEAVTYSLGKFGQRALDFYSIHVTKESTHPVKPLAQIAGNRYASTPVGKALSGACMGTIASFLSKYQDIIIEHQKVVKGNQKRLESLRELAGKENLEYPSVTLPPQPHTKEGVDAYNEVIARVRMWVNLNLWQKLKLSRDDAKPLLRLKGFPSFPLVERQANEVDWWDMVCNVKKLINEKKEDGKVFWQNLAGYKRQEALRPYLSSEEDRKKGKKFARYQLGDLLLHLEKKHGEDWGKVYDEAWERIDKKVEGLSKHIKLEEERRSEDAQSKAALTDWLRAKASFVIEGLKEADKDEFCRCELKLQKWYGDLRGKPFAIEAENSILDISGFSKQYNCAFIWQKDGVKKLNLYLIINYFKGGKLRFKKIKPEAFEANRFYTVINKKSGEIVPMEVNFNFDDPNLIILPLAFGKRQGREFIWNDLLSLETGSLKLANGRVIEKTLYNRRTRQDEPALFVALTFERREVLDSSNIKPMNLIGVDRGENIPAVIALTDPEGCPLSRFKDSLGNPTHILRIGESYKEKQRTIQAKKEVEQRRAGGYSRKYASKAKNLADDMVRNTARDLLYYAVTQDAMLIFENLSRGFGRQGKRTFMAERQYTRMEDWLTAKLAYEGLPSKVYLSKTLAQYTSKTCSNCGFTITSADYDRVLEKLKKTATGWMTTINGKELKVEGQITYYNRYKRQNVVKDLSVELDRLSEESVNNDISSWTKGRSGEALSLLKKRFSHRPVQEKFVCLNCGFETHADEQAALNIARSWLFLRSQEYKKYQTNKTTGNTDKRAFVETWQSFYRKKLKEVWKPAV

SEQ ID NO: 46756 - protein, 978 aa, synthetic construct
  REGION 1..978: note = engineered CasX variant
QEIKRINKIRRRLVKDSNTKKAGKTGPMKTLLVRVMTPDLRERLENLRKKPENIPQPISNTSRANLNKLLTDYTEMKKAILHVYWEEFQKDPVGLMSRVAQPASKKIDQNKLKPEMDEKGNLTTAGFACSQCGQPLFVYKLEQVSEKGKAYTNYFGRCNVAEHEKLILLAQLKPEKDSDEAVTYSLGKFGQRALDFYSIHVTKESTHPVKPLAQIAGNRYASAPVGKALSGACMGTIASFLSKYQDIIIEHQKVVKGNQKRLESLRELAGKENLEYPSVTLPPQPHTKEGVDAYNEVIARVRMWVNLNLWQKLKLSRDDAKPLLRLKGFPSFPLVERQANEVDWWDMVCNVKKLINEKKEDGKVFWQNLAGYKRQEALRPYLSSEEDRKKGKKFARYQLGDLLLHLEKKHGEDWGKVYDEAWERIDKKVEGLSKHIKLEEERRSEDAQSKAALTDWLRAKASFVIEGLKEADKDEFCRCELKLQKWYGDLRGKPFAIEAENSILDISGFSKQYNCAFIWQKDGVKKLNLYLIINYFKGGKLRFKKIKPEAFEANRFYTVINKKSGEIVPMEVNFNFDDPNLIILPLAFGKRQGREFIWNDLLSLETGSLKLANGRVIEKTLYNRRTRQDEPALFVALTFERREVLDSSNIKPMNLIGVDRGENIPAVIALTDPEGCPLSRFKDSLGNPTHILRIGESYKEKQRTIQAKKEVEQRRAGGYSRKYASKAKNLADDMVRNTARDLLYYAVTQDAMLIFENLSRGFGRQGKRTFMAERQYTRMEDWLTAKLAYEGLPSKVYLSKTLAQYTSKTCSNCGFTITSADYDRVLEKLKKTATGWMTTINGKELKVEGQITYYNRYKRQNVVKDLSVELDRLSEESVNNDISSWTKGRSGEALSLLKKRFSHRPVQEKFVCLNCGFETHADEQAALNIARSWLFLRSQEYKKYQTNKTTGNTDKRAFVETWQSFYRKKLKEVWKPAV

SEQ ID NO: 46757 - protein, 978 aa, synthetic construct
  REGION 1..978: note = engineered CasX variant
QEIKRINKIRRRLVKDSNTKKAGKTGPMKTLLVRVMTPDLRERLENLRKKPENIPQPISNTSRANLNKLLTDYTEMKKAILHVYWEEFQKDPVGLMSRVAQPASKKIDQNKLKPEMDEKGNLTTAGFACSQCGQPLFVYKLEQVSEKGKAYTNYFGRCNVAEHEKLILLAQLKPEKDSDEAVTYSLGKFGQRALDFYSIHVTKESTHPVKPLAQIAGNRYASVPVGKALSGACMGTIASFLSKYQDIIIEHQKVVKGNQKRLESLRELAGKENLEYPSVTLPPQPHTKEGVDAYNEVIARVRMWVNLNLWQKLKLSRDDAKPLLRLKGFPSFPLVERQANEVDWWDMVCNVKKLINEKKEDGKVFWQNLAGYKRQEALRPYLSSEEDRKKGKKFARYQLGDLLLHLEKKHGEDWGKVYDEAWERIDKKVEGLSKHIKLEEERRSEDAQSKAALTDWLRAKASFVIEGLKEADKDEFCRCELKLQKWYGDLRGKPFAIEAENSILDISGFSKQYNCAFIWQKDGVKKLNLYLIINYFKGGKLRFKKIKPEAFEANRFYTVINKKSGEIVPMEVNFNFDDPNLIILPLAFGKRQGREFIWNDLLSLETGSLKLANGRVIEKTLYNRRTRQDEPALFVALTFERREVLDSSNIKPMNLIGVDRGENIPAVIALTDPEGCPLSRFKDSLGNPTHILRIGESYKEKQRTIQAKKEVEQRRAGGYSRKYASKAKNLADDMVRNTARDLLYYAVTQDAMLIFENLSRGFGRQGKRTFMAERQYTRMEDWLTAKLAYEGLPSKVYLSKTLAQYTSKTCSNCGFTITSADYDRVLEKLKKTATGWMTTINGKELKVEGQITYYNRYKRQNVVKDLSVELDRLSEESVNNDISSWTKGRSGEALSLLKKRFSHRPVQEKFVCLNCGFETHADEQAALNIARSWLFLRSQEYKKYQTNKTTGNTDKRAFVETWQSFYRKKLKEVWKPAV

SEQ ID NO: 46758 - protein, 978 aa, synthetic construct
  REGION 1..978: note = engineered CasX variant
QEIKRINKIRRRLVKDSNTKKAGKTGPMKTLLVRVMTPDLRERLENLRKKPENIPQPISNTSRANLNKLLTDYTEMKKAILHVYWEEFQKDPVGLMSRVAQPASKKIDQNKLKPEMDEKGNLTTAGFACSQCGQPLFVYKLEQVSEKGKAYTNYFGRCNVAEHEKLIKLAQLKPEKDSDEAVTYSLGKFGQRALDFYSIHVTKESTHPVKPLAQIAGNRYASGPVGKALSGACMGTIASFLSKYQDIIIEHQKVVKGNQKRLESLRELAGKENLEYPSVTLPPQPHTKEGVDAYNEVIARVRMWVNLNLWQKLKLSRDDAKPLLRLKGFPSFPLVERQANEVDWWDMVCNVKKLINEKKEDGKVFWQNLAGYKRQEALRPYLSSEEDRKKGKKFARYQLGDLLLHLEKKHGEDWGKVYDEAWERIDKKVEGLSKHIKLEEERRSEDAQSKAALTDWLRAKASFVIEGLKEADKDEFCRCELKLQKWYGDLRGKPFAIEAENSILDISGFSKQYNCAFIWQKDGVKKLNLYLIINYFKGGKLRFKKIKPEAFEANRFYTVINKKSGEIVPMEVNFNFDDPNLIILPLAFGKRQGREFIWNDLLSLETGSLKLANGRVIEKTLYNRRTRQDEPALFVALTFERREVLDSSNIKPMNLIGVDRGENIPAVIALTDPEGCPLSRFKDSLGNPTHILRIGESYKEKQRTIQAKKEVEQRRAGGYSRKYASKAKNLADDMVRNTARDLLYYAVTQDAMLIFENLSRGFGRQGKRTFMAERQYTRMEDWLTAKLAYEGLPSKVYLSKTLAQYTSKTCSNCGFTITSADYDRVLEKLKKTATGWMTTINGKELKVEGQITYYNRYKRQNVVKDLSVELDRLSEESVNNDISSWTKGRSGEALSLLKKRFSHRPVQEKFVCLNCGFETHADEQAALNIARSWLFLRSQEYKKYQTNKTTGNTDKRAFVETWQSFYRKKLKEVWKPAV

SEQ ID NO: 46759 - protein, 977 aa, synthetic construct
  REGION 1..977: note = engineered CasX variant
QEIKRINKIRRRLVKDSNTKKAGKTGPMKTLLVRVMTPDLRERLENLRKKPENIPQPISNTSRANLNKLLTDYTEMKKAILHVYWEEFQKDPVGLMSRVAQPASKKIDQNKLKPEMDEKGNLTTAGFACSQCGQPLFVYKLEQVSEKGKAYTNYFGRCNVAEHEKLILLAQLKPEKDSDEAVTYSLGKFGQRALDFYSIHVTKESTHPVKPLAQIAGNRYASPVGKALSGACMGTIASFLSKYQDIIIEHQKVVKGNQKRLESLRELAGKENLEYPSVTLPPQPHTKEGVDAYNEVIARVRMWVNLNLWQKLKLSRDDAKPLLRLKGFPSFPLVERQANEVDWWDMVCNVKKLINEKKEDGKVFWQNLAGYKRQEALRPYLSSEEDRKKGKKFARYQLGDLLLHLEKKHGEDWGKVYDEAWERIDKKVEGLSKHIKLEEERRSEDAQSKAALTDWLRAKASFVIEGLKEADKDEFCRCELKLQKWYGDLRGKPFAIEAENSILDISGFSKQYNCAFIWQKDGVKKLNLYLIINYFKGGKLRFKKIKPEAFEANRFYTVINKKSGEIVPMEVNFNFDDPNLIILPLAFGKRQGREFIWNDLLSLETGSLKLANGRVIEKTLYNRRTRQDEPALFVALTFERREVLDSSNIKPMNLIGVDRGENIPAVIALTDPEGCPLSRFKDSLGNPTHILRIGESYKEKQRTIQAKKEVEQRRAGGYSRKYASKAKNLADDMVRNTARDLLYYAVTQDAMLIFENLSRGFGRQGKRTFMAERQYTRMEDWLTAKLAYEGLPSKVYLSKTLAQYTSKTCSNCGFTITSADYDRVLEKLKKTATGWMTTINGKELKVEGQITYYNRYKRQNVVKDLSVELDRLSEESVNNDISSWTKGRSGEALSLLKKRFSHRPVQEKFVCLNCGFETHADEQAALNIARSWLFLRSQEYKKYQTNKTTGNTDKRAFVETWQSFYRKKLKEVWKPAV

SEQ ID NO: 46760 - protein, 978 aa, synthetic construct
  REGION 1..978: note = engineered CasX variant
QEIKRINKIRRRLVKDSNTKKAGKTGPMKTLLVRVMTPDLRERLENLRKKPENIPQPISNTSRANLNKLLTDYTEMKKAILHVYWEEFQKDPVGLMSRVAQPASKKIDQNKLKPEMDEKGNLTTAGFACSQCGQPLFVYKLEQVSEKGKAYTNYFGRCNVAEHEKLILLAQLKPEKDSDEAVTYSLGKFGQRALDFYSIHVTKESTHPVKPLAQIAGNRYASYPVGKALSDACMGTIASFLSKYQDIIIEHQKVVKGNQKRLESLRELAGKENLEYPSVTLPPQPHTKEGVDAYNEVIARVRMWVNLNLWQKLKLSRDDAKPLLRLKNFPSFPLVERQANEVDWWDMVCNVKKLINEKKEDGKVFWQNLAGYKRQEALRPYLSSEEDRKKGKKFARYQLGDLLLHLEKKHGEDWGKVYDEAWERIDKKVEGLSKHIKLEEERRSEDAQSKAALTDWLRAKASFVIEGLKEADKDEFCRCELKLQKWYGDLRGKPFAIEAENSILDISGFSKQYNCAFIWQKDGVKKLNLYLIINYFKGGKLRFKKIKPEAFEANRFYTVINKKSGEIVPMEVNFNFDDPNLIILPLAFGKRQGREFIWNDLLSLETGSLKLANGRVIEKTLYNRRTRQDEPALFVALTFERREVLDSSNIKPMNLIGVDRGENIPAVIALTDPEGCPLSRFKDSLGNPTHILRIGESYKEKQRTIQAKKEVEQRRAGGYSRKYASKAKNLADDMVRNTARDLLYYAVTQDAMLIFENLSRGFGRQGKRTFMAERQYTRMEDWLTAKLAYEGLPSKVYLSKTLAQYTSKTCSNCGFTITSADYDRVLEKLKKTATGWMTTINGKELKVEGQITYYNRYKRQNVVKDLSVELDRLSEESVNNDISSWTKGRSGEALSLLKKRFSHRPVQEKFVCLNCGFETHADEQAALNIARSWLFLRSQEYKKYQTNKTTGNTDKRAFVETWQSFYRKKLKEVWKPAV

SEQ ID NO: 46761 - protein, 978 aa, synthetic construct
  REGION 1..978: note = engineered CasX variant
QEIKRINKIRRRLVKDSNTKKAGKTGPMKTLLVRVMTPDLRERLENLRKKPENIPQPISNTSRANLNKLLTDYTEMKKAILHVYWEEFQKDPVGLMSRVAQPASKKIDQNKLKPEMDEKGNLTTAGFACSQCGQPLFVYKLEQVSEKGKAYTNYFGRCNVAEHEKLILLAQLKPEKDSDEAVTYSLGKFGQRALDFYSIHVTKESTHPVKPLAQIAGNRYASHPVGKALSDACMGTIASFLSKYQDIIIEHQKVVKGNQKRLESLRELAGKENLEYPSVTLPPQPHTKEGVDAYNEVIARVRMWVNLNLWQKLKLSRDDAKPLLRLKNFPSFPLVERQANEVDWWDMVCNVKKLINEKKEDGKVFWQNLAGYKRQEALRPYLSSEEDRKKGKKFARYQLGDLLLHLEKKHGEDWGKVYDEAWERIDKKVEGLSKHIKLEEERRSEDAQSKAALTDWLRAKASFVIEGLKEADKDEFCRCELKLQKWYGDLRGKPFAIEAENSILDISGFSKQYNCAFIWQKDGVKKLNLYLIINYFKGGKLRFKKIKPEAFEANRFYTVINKKSGEIVPMEVNFNFDDPNLIILPLAFGKRQGREFIWNDLLSLETGSLKLANGRVIEKTLYNRRTRQDEPALFVALTFERREVLDSSNIKPMNLIGVDRGENIPAVIALTDPEGCPLSRFKDSLGNPTHILRIGESYKEKQRTIQAKKEVEQRRAGGYSRKYASKAKNLADDMVRNTARDLLYYAVTQDAMLIFENLSRGFGRQGKRTFMAERQYTRMEDWLTAKLAYEGLPSKVYLSKTLAQYTSKTCSNCGFTITSADYDRVLEKLKKTATGWMTTINGKELKVEGQITYYNRYKRQNVVKDLSVELDRLSEESVNNDISSWTKGRSGEALSLLKKRFSHRPVQEKFVCLNCGFETHADEQAALNIARSWLFLRSQEYKKYQTNKTTGNTDKRAFVETWQSFYRKKLKEVWKPAV

SEQ ID NO: 46762 - protein, 978 aa, synthetic construct
  REGION 1..978: note = engineered CasX variant
QEIKRINKIRRRLVKDSNTKKAGKTGPMKTLLVRVMTPDLRERLENLRKKPENIPQPISNTSRANLNKLLTDYTEMKKAILHVYWEEFQKDPVGLMSRVAQPASKKIDQNKLKPEMDEKGNLTTAGFACSQCGQPLFVYKLEQVSEKGKAYTNYFGRCNVAEHEKLILLAQLKPEKDSDEAVTYSLGKFGQRALDFYSIHVTKESTHPVKPLAQIAGNRYASSPVGKALSDACMGTIASFLSKYQDIIIEHQKVVKGNQKRLESLRELAGKENLEYPSVTLPPQPHTKEGVDAYNEVIARVRMWVNLNLWQKLKLSRDDAKPLLRLKNFPSFPLVERQANEVDWWDMVCNVKKLINEKKEDGKVFWQNLAGYKRQEALRPYLSSEEDRKKGKKFARYQLGDLLLHLEKKHGEDWGKVYDEAWERIDKKVEGLSKHIKLEEERRSEDAQSKAALTDWLRAKASFVIEGLKEADKDEFCRCELKLQKWYGDLRGKPFAIEAENSILDISGFSKQYNCAFIWQKDGVKKLNLYLIINYFKGGKLRFKKIKPEAFEANRFYTVINKKSGEIVPMEVNFNFDDPNLIILPLAFGKRQGREFIWNDLLSLETGSLKLANGRVIEKTLYNRRTRQDEPALFVALTFERREVLDSSNIKPMNLIGVDRGENIPAVIALTDPEGCPLSRFKDSLGNPTHILRIGESYKEKQRTIQAKKEVEQRRAGGYSRKYASKAKNLADDMVRNTARDLLYYAVTQDAMLIFENLSRGFGRQGKRTFMAERQYTRMEDWLTAKLAYEGLPSKVYLSKTLAQYTSKTCSNCGFTITSADYDRVLEKLKKTATGWMTTINGKELKVEGQITYYNRYKRQNVVKDLSVELDRLSEESVNNDISSWTKGRSGEALSLLKKRFSHRPVQEKFVCLNCGFETHADEQAALNIARSWLFLRSQEYKKYQTNKTTGNTDKRAFVETWQSFYRKKLKEVWKPAV

SEQ ID NO: 46763 - protein, 978 aa, synthetic construct
  REGION 1..978: note = engineered CasX variant
QEIKRINKIRRRLVKDSNTKKAGKTGPMKTLLVRVMTPDLRERLENLRKKPENIPQPISNTSRANLNKLLTDYTEMKKAILHVYWEEFQKDPVGLMSRVAQPASKKIDQNKLKPEMDEKGNLTTAGFACSQCGQPLFVYKLEQVSEKGKAYTNYFGRCNVAEHEKLILLAQLKPEKDSDEAVTYSLGKFGQRALDFYSIHVTKESTHPVKPLAQIAGNRYASTPVGKALSDACMGTIASFLSKYQDIIIEHQKVVKGNQKRLESLRELAGKENLEYPSVTLPPQPHTKEGVDAYNEVIARVRMWVNLNLWQKLKLSRDDAKPLLRLKNFPSFPLVERQANEVDWWDMVCNVKKLINEKKEDGKVFWQNLAGYKRQEALRPYLSSEEDRKKGKKFARYQLGDLLLHLEKKHGEDWGKVYDEAWERIDKKVEGLSKHIKLEEERRSEDAQSKAALTDWLRAKASFVIEGLKEADKDEFCRCELKLQKWYGDLRGKPFAIEAENSILDISGFSKQYNCAFIWQKDGVKKLNLYLIINYFKGGKLRFKKIKPEAFEANRFYTVINKKSGEIVPMEVNFNFDDPNLIILPLAFGKRQGREFIWNDLLSLETGSLKLANGRVIEKTLYNRRTRQDEPALFVALTFERREVLDSSNIKPMNLIGVDRGENIPAVIALTDPEGCPLSRFKDSLGNPTHILRIGESYKEKQRTIQAKKEVEQRRAGGYSRKYASKAKNLADDMVRNTARDLLYYAVTQDAMLIFENLSRGFGRQGKRTFMAERQYTRMEDWLTAKLAYEGLPSKVYLSKTLAQYTSKTCSNCGFTITSADYDRVLEKLKKTATGWMTTINGKELKVEGQITYYNRYKRQNVVKDLSVELDRLSEESVNNDISSWTKGRSGEALSLLKKRFSHRPVQEKFVCLNCGFETHADEQAALNIARSWLFLRSQEYKKYQTNKTTGNTDKRAFVETWQSFYRKKLKEVWKPAV

SEQ ID NO: 46764 - protein, 978 aa, synthetic construct
  REGION 1..978: note = engineered CasX variant
QEIKRINKIRRRLVKDSNTKKAGKTGPMKTLLVRVMTPDLRERLENLRKKPENIPQPISNTSRANLNKLLTDYTEMKKAILHVYWEEFQKDPVGLMSRVAQPASKKIDQNKLKPEMDEKGNLTTAGFACSQCGQPLFVYKLEQVSEKGKAYTNYFGRCNVAEHEKLILLAQLKPEKDSDEAVTYSLGKFGQRALDFYSIHVTKESTHPVKPLAQIAGNRYASAPVGKALSDACMGTIASFLSKYQDIIIEHQKVVKGNQKRLESLRELAGKENLEYPSVTLPPQPHTKEGVDAYNEVIARVRMWVNLNLWQKLKLSRDDAKPLLRLKNFPSFPLVERQANEVDWWDMVCNVKKLINEKKEDGKVFWQNLAGYKRQEALRPYLSSEEDRKKGKKFARYQLGDLLLHLEKKHGEDWGKVYDEAWERIDKKVEGLSKHIKLEEERRSEDAQSKAALTDWLRAKASFVIEGLKEADKDEFCRCELKLQKWYGDLRGKPFAIEAENSILDISGFSKQYNCAFIWQKDGVKKLNLYLIINYFKGGKLRFKKIKPEAFEANRFYTVINKKSGEIVPMEVNFNFDDPNLIILPLAFGKRQGREFIWNDLLSLETGSLKLANGRVIEKTLYNRRTRQDEPALFVALTFERREVLDSSNIKPMNLIGVDRGENIPAVIALTDPEGCPLSRFKDSLGNPTHILRIGESYKEKQRTIQAKKEVEQRRAGGYSRKYASKAKNLADDMVRNTARDLLYYAVTQDAMLIFENLSRGFGRQGKRTFMAERQYTRMEDWLTAKLAYEGLPSKVYLSKTLAQYTSKTCSNCGFTITSADYDRVLEKLKKTATGWMTTINGKELKVEGQITYYNRYKRQNVVKDLSVELDRLSEESVNNDISSWTKGRSGEALSLLKKRFSHRPVQEKFVCLNCGFETHADEQAALNIARSWLFLRSQEYKKYQTNKTTGNTDKRAFVETWQSFYRKKLKEVWKPAV

SEQ ID NO: 46765 - protein, 978 aa, synthetic construct
  REGION 1..978: note = engineered CasX variant
QEIKRINKIRRRLVKDSNTKKAGKTGPMKTLLVRVMTPDLRERLENLRKKPENIPQPISNTSRANLNKLLTDYTEMKKAILHVYWEEFQKDPVGLMSRVAQPASKKIDQNKLKPEMDEKGNLTTAGFACSQCGQPLFVYKLEQVSEKGKAYTNYFGRCNVAEHEKLILLAQLKPEKDSDEAVTYSLGKFGQRALDFYSIHVTKESTHPVKPLAQIAGNRYASVPVGKALSDACMGTIASFLSKYQDIIIEHQKVVKGNQKRLESLRELAGKENLEYPSVTLPPQPHTKEGVDAYNEVIARVRMWVNLNLWQKLKLSRDDAKPLLRLKNFPSFPLVERQANEVDWWDMVCNVKKLINEKKEDGKVFWQNLAGYKRQEALRPYLSSEEDRKKGKKFARYQLGDLLLHLEKKHGEDWGKVYDEAWERIDKKVEGLSKHIKLEEERRSEDAQSKAALTDWLRAKASFVIEGLKEADKDEFCRCELKLQKWYGDLRGKPFAIEAENSILDISGFSKQYNCAFIWQKDGVKKLNLYLIINYFKGGKLRFKKIKPEAFEANRFYTVINKKSGEIVPMEVNFNFDDPNLIILPLAFGKRQGREFIWNDLLSLETGSLKLANGRVIEKTLYNRRTRQDEPALFVALTFERREVLDSSNIKPMNLIGVDRGENIPAVIALTDPEGCPLSRFKDSLGNPTHILRIGESYKEKQRTIQAKKEVEQRRAGGYSRKYASKAKNLADDMVRNTARDLLYYAVTQDAMLIFENLSRGFGRQGKRTFMAERQYTRMEDWLTAKLAYEGLPSKVYLSKTLAQYTSKTCSNCGFTITSADYDRVLEKLKKTATGWMTTINGKELKVEGQITYYNRYKRQNVVKDLSVELDRLSEESVNNDISSWTKGRSGEALSLLKKRFSHRPVQEKFVCLNCGFETHADEQAALNIARSWLFLRSQEYKKYQTNKTTGNTDKRAFVETWQSFYRKKLKEVWKPAV

SEQ ID NO: 46766 - protein, 978 aa, synthetic construct
  REGION 1..978: note = engineered CasX variant
QEIKRINKIRRRLVKDSNTKKAGKTGPMKTLLVRVMTPDLRERLENLRKKPENIPQPISNTSRANLNKLLTDYTEMKKAILHVYWEEFQKDPVGLMSRVAQPASKKIDQNKLKPEMDEKGNLTTAGFACSQCGQPLFVYKLEQVSEKGKAYTNYFGRCNVAEHEKLIKLAQLKPEKDSDEAVTYSLGKFGQRALDFYSIHVTKESTHPVKPLAQIAGNRYASGPVGKALSDACMGTIASFLSKYQDIIIEHQKVVKGNQKRLESLRELAGKENLEYPSVTLPPQPHTKEGVDAYNEVIARVRMWVNLNLWQKLKLSRDDAKPLLRLKNFPSFPLVERQANEVDWWDMVCNVKKLINEKKEDGKVFWQNLAGYKRQEALRPYLSSEEDRKKGKKFARYQLGDLLLHLEKKHGEDWGKVYDEAWERIDKKVEGLSKHIKLEEERRSEDAQSKAALTDWLRAKASFVIEGLKEADKDEFCRCELKLQKWYGDLRGKPFAIEAENSILDISGFSKQYNCAFIWQKDGVKKLNLYLIINYFKGGKLRFKKIKPEAFEANRFYTVINKKSGEIVPMEVNFNFDDPNLIILPLAFGKRQGREFIWNDLLSLETGSLKLANGRVIEKTLYNRRTRQDEPALFVALTFERREVLDSSNIKPMNLIGVDRGENIPAVIALTDPEGCPLSRFKDSLGNPTHILRIGESYKEKQRTIQAKKEVEQRRAGGYSRKYASKAKNLADDMVRNTARDLLYYAVTQDAMLIFENLSRGFGRQGKRTFMAERQYTRMEDWLTAKLAYEGLPSKVYLSKTLAQYTSKTCSNCGFTITSADYDRVLEKLKKTATGWMTTINGKELKVEGQITYYNRYKRQNVVKDLSVELDRLSEESVNNDISSWTKGRSGEALSLLKKRFSHRPVQEKFVCLNCGFETHADEQAALNIARSWLFLRSQEYKKYQTNKTTGNTDKRAFVETWQSFYRKKLKEVWKPAV

SEQ ID NO: 46767 - protein, 977 aa, synthetic construct
  REGION 1..977: note = engineered CasX variant
QEIKRINKIRRRLVKDSNTKKAGKTGPMKTLLVRVMTPDLRERLENLRKKPENIPQPISNTSRANLNKLLTDYTEMKKAILHVYWEEFQKDPVGLMSRVAQPASKKIDQNKLKPEMDEKGNLTTAGFACSQCGQPLFVYKLEQVSEKGKAYTNYFGRCNVAEHEKLILLAQLKPEKDSDEAVTYSLGKFGQRALDFYSIHVTKESTHPVKPLAQIAGNRYASPVGKALSDACMGTIASFLSKYQDIIIEHQKVVKGNQKRLESLRELAGKENLEYPSVTLPPQPHTKEGVDAYNEVIARVRMWVNLNLWQKLKLSRDDAKPLLRLKNFPSFPLVERQANEVDWWDMVCNVKKLINEKKEDGKVFWQNLAGYKRQEALRPYLSSEEDRKKGKKFARYQLGDLLLHLEKKHGEDWGKVYDEAWERIDKKVEGLSKHIKLEEERRSEDAQSKAALTDWLRAKASFVIEGLKEADKDEFCRCELKLQKWYGDLRGKPFAIEAENSILDISGFSKQYNCAFIWQKDGVKKLNLYLIINYFKGGKLRFKKIKPEAFEANRFYTVINKKSGEIVPMEVNFNFDDPNLIILPLAFGKRQGREFIWNDLLSLETGSLKLANGRVIEKTLYNRRTRQDEPALFVALTFERREVLDSSNIKPMNLIGVDRGENIPAVIALTDPEGCPLSRFKDSLGNPTHILRIGESYKEKQRTIQAKKEVEQRRAGGYSRKYASKAKNLADDMVRNTARDLLYYAVTQDAMLIFENLSRGFGRQGKRTFMAERQYTRMEDWLTAKLAYEGLPSKVYLSKTLAQYTSKTCSNCGFTITSADYDRVLEKLKKTATGWMTTINGKELKVEGQITYYNRYKRQNVVKDLSVELDRLSEESVNNDISSWTKGRSGEALSLLKKRFSHRPVQEKFVCLNCGFETHADEQAALNIARSWLFLRSQEYKKYQTNKTTGNTDKRAFVETWQSFYRKKLKEVWKPAV

SEQ ID NO: 46768 - protein, 978 aa, synthetic construct
  REGION 1..978: note = engineered CasX variant
QEIKRINKIRRRLVKDSNTKKAGKTGPMKTLLVRVMTPDLRERLENLRKKPENIPQPISNTSRANLNKLLTDYTEMKKAILHVYWEEFQKDPVGLMSRVAQPASKKIDQNKLKPEMDEKGNLTTAGFACSQCGQPLFVYKLEQVSEKGKAYTNYFGRCNVAEHEKLILLAQLKPEKDSDEAVTYSLGKFGQRALDFYSIHVTKESTHPVKPLAQIAGNRYASYPVGKALSDACMGTIASFLSKYQDIIIEHQKVVKGNQKRLESLRELAGKENLEYPSVTLPPQPHTKEGVDAYNEVIARVRMWVNLNLWQKLKLSRDDAKPLLRLKGFPSFPLVERQANEVDWWDMVCNVKKLINEKKEDGKVFWQNLAGYKRQEALRPYLSSEEDRKKGKKFARYQLGDLLNHLEKKHGEDWGKVYDEAWERIDKKVEGLSKHIKLEEERRSEDAQSKAALTDWLRAKASFVIEGLKEADKDEFCRCELKLQKWYGDLRGKPFAIEAENSILDISGFSKQYNCAFIWQKDGVKKLNLYLIINYFKGGKLRFKKIKPEAFEANRFYTVINKKSGEIVPMEVNFNFDDPNLIILPLAFGKRQGREFIWNDLLSLETGSLKLANGRVIEKTLYNRRTRQDEPALFVALTFERREVLDSSNIKPMNLIGVDRGENIPAVIALTDPEGCPLSRFKDSLGNPTHILRIGESYKEKQRTIQAKKEVEQRRAGGYSRKYASKAKNLADDMVRNTARDLLYYAVTQDAMLIFENLSRGFGRQGKRTFMAERQYTRMEDWLTAKLAYEGLPSKVYLSKTLAQYTSKTCSNCGFTITSADYDRVLEKLKKTATGWMTTINGKELKVEGQITYYNRYKRQNVVKDLSVELDRLSEESVNNDISSWTKGRSGEALSLLKKRFSHRPVQEKFVCLNCGFETHADEQAALNIARSWLFLRSQEYKKYQTNKTTGNTDKRAFVETWQSFYRKKLKEVWKPAV

SEQ ID NO: 46769 - protein, 978 aa, synthetic construct
  REGION 1..978: note = engineered CasX variant
QEIKRINKIRRRLVKDSNTKKAGKTGPMKTLLVRVMTPDLRERLENLRKKPENIPQPISNTSRANLNKLLTDYTEMKKAILHVYWEEFQKDPVGLMSRVAQPASKKIDQNKLKPEMDEKGNLTTAGFACSQCGQPLFVYKLEQVSEKGKAYTNYFGRCNVAEHEKLILLAQLKPEKDSDEAVTYSLGKFGQRALDFYSIHVTKESTHPVKPLAQIAGNRYASHPVGKALSDACMGTIASFLSKYQDIIIEHQKVVKGNQKRLESLRELAGKENLEYPSVTLPPQPHTKEGVDAYNEVIARVRMWVNLNLWQKLKLSRDDAKPLLRLKGFPSFPLVERQANEVDWWDMVCNVKKLINEKKEDGKVFWQNLAGYKRQEALRPYLSSEEDRKKGKKFARYQLGDLLNHLEKKHGEDWGKVYDEAWERIDKKVEGLSKHIKLEEERRSEDAQSKAALTDWLRAKASFVIEGLKEADKDEFCRCELKLQKWYGDLRGKPFAIEAENSILDISGFSKQYNCAFIWQKDGVKKLNLYLIINYFKGGKLRFKKIKPEAFEANRFYTVINKKSGEIVPMEVNFNFDDPNLIILPLAFGKRQGREFIWNDLLSLETGSLKLANGRVIEKTLYNRRTRQDEPALFVALTFERREVLDSSNIKPMNLIGVDRGENIPAVIALTDPEGCPLSRFKDSLGNPTHILRIGESYKEKQRTIQAKKEVEQRRAGGYSRKYASKAKNLADDMVRNTARDLLYYAVTQDAMLIFENLSRGFGRQGKRTFMAERQYTRMEDWLTAKLAYEGLPSKVYLSKTLAQYTSKTCSNCGFTITSADYDRVLEKLKKTATGWMTTINGKELKVEGQITYYNRYKRQNVVKDLSVELDRLSEESVNNDISSWTKGRSGEALSLLKKRFSHRPVQEKFVCLNCGFETHADEQAALNIARSWLFLRSQEYKKYQTNKTTGNTDKRAFVETWQSFYRKKLKEVWKPAV

SEQ ID NO: 46770 - protein, 978 aa, synthetic construct
  REGION 1..978: note = engineered CasX variant
QEIKRINKIRRRLVKDSNTKKAGKTGPMKTLLVRVMTPDLRERLENLRKKPENIPQPISNTSRANLNKLLTDYTEMKKAILHVYWEEFQKDPVGLMSRVAQPASKKIDQNKLKPEMDEKGNLTTAGFACSQCGQPLFVYKLEQVSEKGKAYTNYFGRCNVAEHEKLILLAQLKPEKDSDEAVTYSLGKFGQRALDFYSIHVTKESTHPVKPLAQIAGNRYASSPVGKALSDACMGTIASFLSKYQDIIIEHQKVVKGNQKRLESLRELAGKENLEYPSVTLPPQPHTKEGVDAYNEVIARVRMWVNLNLWQKLKLSRDDAKPLLRLKGFPSFPLVERQANEVDWWDMVCNVKKLINEKKEDGKVFWQNLAGYKRQEALRPYLSSEEDRKKGKKFARYQLGDLLNHLEKKHGEDWGKVYDEAWERIDKKVEGLSKHIKLEEERRSEDAQSKAALTDWLRAKASFVIEGLKEADKDEFCRCELKLQKWYGDLRGKPFAIEAENSILDISGFSKQYNCAFIWQKDGVKKLNLYLIINYFKGGKLRFKKIKPEAFEANRFYTVINKKSGEIVPMEVNFNFDDPNLIILPLAFGKRQGREFIWNDLLSLETGSLKLANGRVIEKTLYNRRTRQDEPALFVALTFERREVLDSSNIKPMNLIGVDRGENIPAVIALTDPEGCPLSRFKDSLGNPTHILRIGESYKEKQRTIQAKKEVEQRRAGGYSRKYASKAKNLADDMVRNTARDLLYYAVTQDAMLIFENLSRGFGRQGKRTFMAERQYTRMEDWLTAKLAYEGLPSKVYLSKTLAQYTSKTCSNCGFTITSADYDRVLEKLKKTATGWMTTINGKELKVEGQITYYNRYKRQNVVKDLSVELDRLSEESVNNDISSWTKGRSGEALSLLKKRFSHRPVQEKFVCLNCGFETHADEQAALNIARSWLFLRSQEYKKYQTNKTTGNTDKRAFVETWQSFYRKKLKEVWKPAV

SEQ ID NO: 46771 - protein, 978 aa, synthetic construct
  REGION 1..978: note = engineered CasX variant
QEIKRINKIRRRLVKDSNTKKAGKTGPMKTLLVRVMTPDLRERLENLRKKPENIPQPISNTSRANLNKLLTDYTEMKKAILHVYWEEFQKDPVGLMSRVAQPASKKIDQNKLKPEMDEKGNLTTAGFACSQCGQPLFVYKLEQVSEKGKAYTNYFGRCNVAEHEKLILLAQLKPEKDSDEAVTYSLGKFGQRALDFYSIHVTKESTHPVKPLAQIAGNRYASTPVGKALSDACMGTIASFLSKYQDIIIEHQKVVKGNQKRLESLRELAGKENLEYPSVTLPPQPHTKEGVDAYNEVIARVRMWVNLNLWQKLKLSRDDAKPLLRLKGFPSFPLVERQANEVDWWDMVCNVKKLINEKKEDGKVFWQNLAGYKRQEALRPYLSSEEDRKKGKKFARYQLGDLLNHLEKKHGEDWGKVYDEAWERIDKKVEGLSKHIKLEEERRSEDAQSKAALTDWLRAKASFVIEGLKEADKDEFCRCELKLQKWYGDLRGKPFAIEAENSILDISGFSKQYNCAFIWQKDGVKKLNLYLIINYFKGGKLRFKKIKPEAFEANRFYTVINKKSGEIVPMEVNFNFDDPNLIILPLAFGKRQGREFIWNDLLSLETGSLKLANGRVIEKTLYNRRTRQDEPALFVALTFERREVLDSSNIKPMNLIGVDRGENIPAVIALTDPEGCPLSRFKDSLGNPTHILRIGESYKEKQRTIQAKKEVEQRRAGGYSRKYASKAKNLADDMVRNTARDLLYYAVTQDAMLIFENLSRGFGRQGKRTFMAERQYTRMEDWLTAKLAYEGLPSKVYLSKTLAQYTSKTCSNCGFTITSADYDRVLEKLKKTATGWMTTINGKELKVEGQITYYNRYKRQNVVKDLSVELDRLSEESVNNDISSWTKGRSGEALSLLKKRFSHRPVQEKFVCLNCGFETHADEQAALNIARSWLFLRSQEYKKYQTNKTTGNTDKRAFVETWQSFYRKKLKEVWKPAV

SEQ ID NO: 46772 - protein, 978 aa, synthetic construct
  REGION 1..978: note = engineered CasX variant
QEIKRINKIRRRLVKDSNTKKAGKTGPMKTLLVRVMTPDLRERLENLRKKPENIPQPISNTSRANLNKLLTDYTEMKKAILHVYWEEFQKDPVGLMSRVAQPASKKIDQNKLKPEMDEKGNLTTAGFACSQCGQPLFVYKLEQVSEKGKAYTNYFGRCNVAEHEKLILLAQLKPEKDSDEAVTYSLGKFGQRALDFYSIHVTKESTHPVKPLAQIAGNRYASAPVGKALSDACMGTIASFLSKYQDIIIEHQKVVKGNQKRLESLRELAGKENLEYPSVTLPPQPHTKEGVDAYNEVIARVRMWVNLNLWQKLKLSRDDAKPLLRLKGFPSFPLVERQANEVDWWDMVCNVKKLINEKKEDGKVFWQNLAGYKRQEALRPYLSSEEDRKKGKKFARYQLGDLLNHLEKKHGEDWGKVYDEAWERIDKKVEGLSKHIKLEEERRSEDAQSKAALTDWLRAKASFVIEGLKEADKDEFCRCELKLQKWYGDLRGKPFAIEAENSILDISGFSKQYNCAFIWQKDGVKKLNLYLIINYFKGGKLRFKKIKPEAFEANRFYTVINKKSGEIVPMEVNFNFDDPNLIILPLAFGKRQGREFIWNDLLSLETGSLKLANGRVIEKTLYNRRTRQDEPALFVALTFERREVLDSSNIKPMNLIGVDRGENIPAVIALTDPEGCPLSRFKDSLGNPTHILRIGESYKEKQRTIQAKKEVEQRRAGGYSRKYASKAKNLADDMVRNTARDLLYYAVTQDAMLIFENLSRGFGRQGKRTFMAERQYTRMEDWLTAKLAYEGLPSKVYLSKTLAQYTSKTCSNCGFTITSADYDRVLEKLKKTATGWMTTINGKELKVEGQITYYNRYKRQNVVKDLSVELDRLSEESVNNDISSWTKGRSGEALSLLKKRFSHRPVQEKFVCLNCGFETHADEQAALNIARSWLFLRSQEYKKYQTNKTTGNTDKRAFVETWQSFYRKKLKEVWKPAV

SEQ ID NO: 46773 - protein, 978 aa, synthetic construct
  REGION 1..978: note = engineered CasX variant
QEIKRINKIRRRLVKDSNTKKAGKTGPMKTLLVRVMTPDLRERLENLRKKPENIPQPISNTSRANLNKLLTDYTEMKKAILHVYWEEFQKDPVGLMSRVAQPASKKIDQNKLKPEMDEKGNLTTAGFACSQCGQPLFVYKLEQVSEKGKAYTNYFGRCNVAEHEKLILLAQLKPEKDSDEAVTYSLGKFGQRALDFYSIHVTKESTHPVKPLAQIAGNRYASVPVGKALSDACMGTIASFLSKYQDIIIEHQKVVKGNQKRLESLRELAGKENLEYPSVTLPPQPHTKEGVDAYNEVIARVRMWVNLNLWQKLKLSRDDAKPLLRLKGFPSFPLVERQANEVDWWDMVCNVKKLINEKKEDGKVFWQNLAGYKRQEALRPYLSSEEDRKKGKKFARYQLGDLLNHLEKKHGEDWGKVYDEAWERIDKKVEGLSKHIKLEEERRSEDAQSKAALTDWLRAKASFVIEGLKEADKDEFCRCELKLQKWYGDLRGKPFAIEAENSILDISGFSKQYNCAFIWQKDGVKKLNLYLIINYFKGGKLRFKKIKPEAFEANRFYTVINKKSGEIVPMEVNFNFDDPNLIILPLAFGKRQGREFIWNDLLSLETGSLKLANGRVIEKTLYNRRTRQDEPALFVALTFERREVLDSSNIKPMNLIGVDRGENIPAVIALTDPEGCPLSRFKDSLGNPTHILRIGESYKEKQRTIQAKKEVEQRRAGGYSRKYASKAKNLADDMVRNTARDLLYYAVTQDAMLIFENLSRGFGRQGKRTFMAERQYTRMEDWLTAKLAYEGLPSKVYLSKTLAQYTSKTCSNCGFTITSADYDRVLEKLKKTATGWMTTINGKELKVEGQITYYNRYKRQNVVKDLSVELDRLSEESVNNDISSWTKGRSGEALSLLKKRFSHRPVQEKFVCLNCGFETHADEQAALNIARSWLFLRSQEYKKYQTNKTTGNTDKRAFVETWQSFYRKKLKEVWKPAV

SEQ ID NO: 46774 - protein, 978 aa, synthetic construct
  REGION 1..978: note = engineered CasX variant
QEIKRINKIRRRLVKDSNTKKAGKTGPMKTLLVRVMTPDLRERLENLRKKPENIPQPISNTSRANLNKLLTDYTEMKKAILHVYWEEFQKDPVGLMSRVAQPASKKIDQNKLKPEMDEKGNLTTAGFACSQCGQPLFVYKLEQVSEKGKAYTNYFGRCNVAEHEKLIKLAQLKPEKDSDEAVTYSLGKFGQRALDFYSIHVTKESTHPVKPLAQIAGNRYASGPVGKALSDACMGTIASFLSKYQDIIIEHQKVVKGNQKRLESLRELAGKENLEYPSVTLPPQPHTKEGVDAYNEVIARVRMWVNLNLWQKLKLSRDDAKPLLRLKGFPSFPLVERQANEVDWWDMVCNVKKLINEKKEDGKVFWQNLAGYKRQEALRPYLSSEEDRKKGKKFARYQLGDLLNHLEKKHGEDWGKVYDEAWERIDKKVEGLSKHIKLEEERRSEDAQSKAALTDWLRAKASFVIEGLKEADKDEFCRCELKLQKWYGDLRGKPFAIEAENSILDISGFSKQYNCAFIWQKDGVKKLNLYLIINYFKGGKLRFKKIKPEAFEANRFYTVINKKSGEIVPMEVNFNFDDPNLIILPLAFGKRQGREFIWNDLLSLETGSLKLANGRVIEKTLYNRRTRQDEPALFVALTFERREVLDSSNIKPMNLIGVDRGENIPAVIALTDPEGCPLSRFKDSLGNPTHILRIGESYKEKQRTIQAKKEVEQRRAGGYSRKYASKAKNLADDMVRNTARDLLYYAVTQDAMLIFENLSRGFGRQGKRTFMAERQYTRMEDWLTAKLAYEGLPSKVYLSKTLAQYTSKTCSNCGFTITSADYDRVLEKLKKTATGWMTTINGKELKVEGQITYYNRYKRQNVVKDLSVELDRLSEESVNNDISSWTKGRSGEALSLLKKRFSHRPVQEKFVCLNCGFETHADEQAALNIARSWLFLRSQEYKKYQTNKTTGNTDKRAFVETWQSFYRKKLKEVWKPAV

SEQ ID NO: 46775 - protein, 977 aa, synthetic construct
  REGION 1..977: note = engineered CasX variant
QEIKRINKIRRRLVKDSNTKKAGKTGPMKTLLVRVMTPDLRERLENLRKKPENIPQPISNTSRANLNKLLTDYTEMKKAILHVYWEEFQKDPVGLMSRVAQPASKKIDQNKLKPEMDEKGNLTTAGFACSQCGQPLFVYKLEQVSEKGKAYTNYFGRCNVAEHEKLILLAQLKPEKDSDEAVTYSLGKFGQRALDFYSIHVTKESTHPVKPLAQIAGNRYASPVGKALSDACMGTIASFLSKYQDIIIEHQKVVKGNQKRLESLRELAGKENLEYPSVTLPPQPHTKEGVDAYNEVIARVRMWVNLNLWQKLKLSRDDAKPLLRLKGFPSFPLVERQANEVDWWDMVCNVKKLINEKKEDGKVFWQNLAGYKRQEALRPYLSSEEDRKKGKKFARYQLGDLLNHLEKKHGEDWGKVYDEAWERIDKKVEGLSKHIKLEEERRSEDAQSKAALTDWLRAKASFVIEGLKEADKDEFCRCELKLQKWYGDLRGKPFAIEAENSILDISGFSKQYNCAFIWQKDGVKKLNLYLIINYFKGGKLRFKKIKPEAFEANRFYTVINKKSGEIVPMEVNFNFDDPNLIILPLAFGKRQGREFIWNDLLSLETGSLKLANGRVIEKTLYNRRTRQDEPALFVALTFERREVLDSSNIKPMNLIGVDRGENIPAVIALTDPEGCPLSRFKDSLGNPTHILRIGESYKEKQRTIQAKKEVEQRRAGGYSRKYASKAKNLADDMVRNTARDLLYYAVTQDAMLIFENLSRGFGRQGKRTFMAERQYTRMEDWLTAKLAYEGLPSKVYLSKTLAQYTSKTCSNCGFTITSADYDRVLEKLKKTATGWMTTINGKELKVEGQITYYNRYKRQNVVKDLSVELDRLSEESVNNDISSWTKGRSGEALSLLKKRFSHRPVQEKFVCLNCGFETHADEQAALNIARSWLFLRSQEYKKYQTNKTTGNTDKRAFVETWQSFYRKKLKEVWKPAV

SEQ ID NO: 46776 - protein, 978 aa, synthetic construct
  REGION 1..978: note = engineered CasX variant
QEIKRINKIRRRLVKDSNTKKAGKTGPMKTLLVRVMTPDLRERLENLRKKPENIPQPISNTSRANLNKLLTDYTEMKKAILHVYWEEFQKDPVGLMSRVAQPASKKIDQNKLKPEMDEKGNLTTAGFACSQCGQPLFVYKLEQVSEKGKAYTNYFGRCNVAEHEKLILLAQLKPEKDSDEAVTYSLGKFGQRALDFYSIHVTKESTHPVKPLAQIAGNRYASYPVGKALSDACMGTIASFLSKYQDIIIEHQKVVKGNQKRLESLRELAGKENLEYPSVTLPPQPHTKEGVDAYNEVIARVRMWVNLNLWQKLKLSRDDAKPLLRLKGFPSFPLVERQANEVDWWDMVCNVKKLINEKKEDGKVFWQNLAGYKRQEALRPYLSSEEDRKKGKKFARYQLGDLLWHLEKKHGEDWGKVYDEAWERIDKKVEGLSKHIKLEEERRSEDAQSKAALTDWLRAKASFVIEGLKEADKDEFCRCELKLQKWYGDLRGKPFAIEAENSILDISGFSKQYNCAFIWQKDGVKKLNLYLIINYFKGGKLRFKKIKPEAFEANRFYTVINKKSGEIVPMEVNFNFDDPNLIILPLAFGKRQGREFIWNDLLSLETGSLKLANGRVIEKTLYNRRTRQDEPALFVALTFERREVLDSSNIKPMNLIGVDRGENIPAVIALTDPEGCPLSRFKDSLGNPTHILRIGESYKEKQRTIQAKKEVEQRRAGGYSRKYASKAKNLADDMVRNTARDLLYYAVTQDAMLIFENLSRGFGRQGKRTFMAERQYTRMEDWLTAKLAYEGLPSKVYLSKTLAQYTSKTCSNCGFTITSADYDRVLEKLKKTATGWMTTINGKELKVEGQITYYNRYKRQNVVKDLSVELDRLSEESVNNDISSWTKGRSGEALSLLKKRFSHRPVQEKFVCLNCGFETHADEQAALNIARSWLFLRSQEYKKYQTNKTTGNTDKRAFVETWQSFYRKKLKEVWKPAV

SEQ ID NO: 46777 - protein, 978 aa, synthetic construct
  REGION 1..978: note = engineered CasX variant
QEIKRINKIRRRLVKDSNTKKAGKTGPMKTLLVRVMTPDLRERLENLRKKPENIPQPISNTSRANLNKLLTDYTEMKKAILHVYWEEFQKDPVGLMSRVAQPASKKIDQNKLKPEMDEKGNLTTAGFACSQCGQPLFVYKLEQVSEKGKAYTNYFGRCNVAEHEKLILLAQLKPEKDSDEAVTYSLGKFGQRALDFYSIHVTKESTHPVKPLAQIAGNRYASHPVGKALSDACMGTIASFLSKYQDIIIEHQKVVKGNQKRLESLRELAGKENLEYPSVTLPPQPHTKEGVDAYNEVIARVRMWVNLNLWQKLKLSRDDAKPLLRLKGFPSFPLVERQANEVDWWDMVCNVKKLINEKKEDGKVFWQNLAGYKRQEALRPYLSSEEDRKKGKKFARYQLGDLLWHLEKKHGEDWGKVYDEAWERIDKKVEGLSKHIKLEEERRSEDAQSKAALTDWLRAKASFVIEGLKEADKDEFCRCELKLQKWYGDLRGKPFAIEAENSILDISGFSKQYNCAFIWQKDGVKKLNLYLIINYFKGGKLRFKKIKPEAFEANRFYTVINKKSGEIVPMEVNFNFDDPNLIILPLAFGKRQGREFIWNDLLSLETGSLKLANGRVIEKTLYNRRTRQDEPALFVALTFERREVLDSSNIKPMNLIGVDRGENIPAVIALTDPEGCPLSRFKDSLGNPTHILRIGESYKEKQRTIQAKKEVEQRRAGGYSRKYASKAKNLADDMVRNTARDLLYYAVTQDAMLIFENLSRGFGRQGKRTFMAERQYTRMEDWLTAKLAYEGLPSKVYLSKTLAQYTSKTCSNCGFTITSADYDRVLEKLKKTATGWMTTINGKELKVEGQITYYNRYKRQNVVKDLSVELDRLSEESVNNDISSWTKGRSGEALSLLKKRFSHRPVQEKFVCLNCGFETHADEQAALNIARSWLFLRSQEYKKYQTNKTTGNTDKRAFVETWQSFYRKKLKEVWKPAV

SEQ ID NO: 46778 - protein, 978 aa, synthetic construct
  REGION 1..978: note = engineered CasX variant
QEIKRINKIRRRLVKDSNTKKAGKTGPMKTLLVRVMTPDLRERLENLRKKPENIPQPISNTSRANLNKLLTDYTEMKKAILHVYWEEFQKDPVGLMSRVAQPASKKIDQNKLKPEMDEKGNLTTAGFACSQCGQPLFVYKLEQVSEKGKAYTNYFGRCNVAEHEKLILLAQLKPEKDSDEAVTYSLGKFGQRALDFYSIHVTKESTHPVKPLAQIAGNRYASSPVGKALSDACMGTIASFLSKYQDIIIEHQKVVKGNQKRLESLRELAGKENLEYPSVTLPPQPHTKEGVDAYNEVIARVRMWVNLNLWQKLKLSRDDAKPLLRLKGFPSFPLVERQANEVDWWDMVCNVKKLINEKKEDGKVFWQNLAGYKRQEALRPYLSSEEDRKKGKKFARYQLGDLLWHLEKKHGEDWGKVYDEAWERIDKKVEGLSKHIKLEEERRSEDAQSKAALTDWLRAKASFVIEGLKEADKDEFCRCELKLQKWYGDLRGKPFAIEAENSILDISGFSKQYNCAFIWQKDGVKKLNLYLIINYFKGGKLRFKKIKPEAFEANRFYTVINKKSGEIVPMEVNFNFDDPNLIILPLAFGKRQGREFIWNDLLSLETGSLKLANGRVIEKTLYNRRTRQDEPALFVALTFERREVLDSSNIKPMNLIGVDRGENIPAVIALTDPEGCPLSRFKDSLGNPTHILRIGESYKEKQRTIQAKKEVEQRRAGGYSRKYASKAKNLADDMVRNTARDLLYYAVTQDAMLIFENLSRGFGRQGKRTFMAERQYTRMEDWLTAKLAYEGLPSKVYLSKTLAQYTSKTCSNCGFTITSADYDRVLEKLKKTATGWMTTINGKELKVEGQITYYNRYKRQNVVKDLSVELDRLSEESVNNDISSWTKGRSGEALSLLKKRFSHRPVQEKFVCLNCGFETHADEQAALNIARSWLFLRSQEYKKYQTNKTTGNTDKRAFVETWQSFYRKKLKEVWKPAV

SEQ ID NO: 46779 - protein, 978 aa, synthetic construct
  REGION 1..978: note = engineered CasX variant
QEIKRINKIRRRLVKDSNTKKAGKTGPMKTLLVRVMTPDLRERLENLRKKPENIPQPISNTSRANLNKLLTDYTEMKKAILHVYWEEFQKDPVGLMSRVAQPASKKIDQNKLKPEMDEKGNLTTAGFACSQCGQPLFVYKLEQVSEKGKAYTNYFGRCNVAEHEKLILLAQLKPEKDSDEAVTYSLGKFGQRALDFYSIHVTKESTHPVKPLAQIAGNRYASTPVGKALSDACMGTIASFLSKYQDIIIEHQKVVKGNQKRLESLRELAGKENLEYPSVTLPPQPHTKEGVDAYNEVIARVRMWVNLNLWQKLKLSRDDAKPLLRLKGFPSFPLVERQANEVDWWDMVCNVKKLINEKKEDGKVFWQNLAGYKRQEALRPYLSSEEDRKKGKKFARYQLGDLLWHLEKKHGEDWGKVYDEAWERIDKKVEGLSKHIKLEEERRSEDAQSKAALTDWLRAKASFVIEGLKEADKDEFCRCELKLQKWYGDLRGKPFAIEAENSILDISGFSKQYNCAFIWQKDGVKKLNLYLIINYFKGGKLRFKKIKPEAFEANRFYTVINKKSGEIVPMEVNFNFDDPNLIILPLAFGKRQGREFIWNDLLSLETGSLKLANGRVIEKTLYNRRTRQDEPALFVALTFERREVLDSSNIKPMNLIGVDRGENIPAVIALTDPEGCPLSRFKDSLGNPTHILRIGESYKEKQRTIQAKKEVEQRRAGGYSRKYASKAKNLADDMVRNTARDLLYYAVTQDAMLIFENLSRGFGRQGKRTFMAERQYTRMEDWLTAKLAYEGLPSKVYLSKTLAQYTSKTCSNCGFTITSADYDRVLEKLKKTATGWMTTINGKELKVEGQITYYNRYKRQNVVKDLSVELDRLSEESVNNDISSWTKGRSGEALSLLKKRFSHRPVQEKFVCLNCGFETHADEQAALNIARSWLFLRSQEYKKYQTNKTTGNTDKRAFVETWQSFYRKKLKEVWKPAV

SEQ ID NO: 46780 - protein, 978 aa, synthetic construct
  REGION 1..978: note = engineered CasX variant
QEIKRINKIRRRLVKDSNTKKAGKTGPMKTLLVRVMTPDLRERLENLRKKPENIPQPISNTSRANLNKLLTDYTEMKKAILHVYWEEFQKDPVGLMSRVAQPASKKIDQNKLKPEMDEKGNLTTAGFACSQCGQPLFVYKLEQVSEKGKAYTNYFGRCNVAEHEKLILLAQLKPEKDSDEAVTYSLGKFGQRALDFYSIHVTKESTHPVKPLAQIAGNRYASAPVGKALSDACMGTIASFLSKYQDIIIEHQKVVKGNQKRLESLRELAGKENLEYPSVTLPPQPHTKEGVDAYNEVIARVRMWVNLNLWQKLKLSRDDAKPLLRLKGFPSFPLVERQANEVDWWDMVCNVKKLINEKKEDGKVFWQNLAGYKRQEALRPYLSSEEDRKKGKKFARYQLGDLLWHLEKKHGEDWGKVYDEAWERIDKKVEGLSKHIKLEEERRSEDAQSKAALTDWLRAKASFVIEGLKEADKDEFCRCELKLQKWYGDLRGKPFAIEAENSILDISGFSKQYNCAFIWQKDGVKKLNLYLIINYFKGGKLRFKKIKPEAFEANRFYTVINKKSGEIVPMEVNFNFDDPNLIILPLAFGKRQGREFIWNDLLSLETGSLKLANGRVIEKTLYNRRTRQDEPALFVALTFERREVLDSSNIKPMNLIGVDRGENIPAVIALTDPEGCPLSRFKDSLGNPTHILRIGESYKEKQRTIQAKKEVEQRRAGGYSRKYASKAKNLADDMVRNTARDLLYYAVTQDAMLIFENLSRGFGRQGKRTFMAERQYTRMEDWLTAKLAYEGLPSKVYLSKTLAQYTSKTCSNCGFTITSADYDRVLEKLKKTATGWMTTINGKELKVEGQITYYNRYKRQNVVKDLSVELDRLSEESVNNDISSWTKGRSGEALSLLKKRFSHRPVQEKFVCLNCGFETHADEQAALNIARSWLFLRSQEYKKYQTNKTTGNTDKRAFVETWQSFYRKKLKEVWKPAV

SEQ ID NO: 46781 - protein, 978 aa, synthetic construct
  REGION 1..978: note = engineered CasX variant
QEIKRINKIRRRLVKDSNTKKAGKTGPMKTLLVRVMTPDLRERLENLRKKPENIPQPISNTSRANLNKLLTDYTEMKKAILHVYWEEFQKDPVGLMSRVAQPASKKIDQNKLKPEMDEKGNLTTAGFACSQCGQPLFVYKLEQVSEKGKAYTNYFGRCNVAEHEKLILLAQLKPEKDSDEAVTYSLGKFGQRALDFYSIHVTKESTHPVKPLAQIAGNRYASVPVGKALSDACMGTIASFLSKYQDIIIEHQKVVKGNQKRLESLRELAGKENLEYPSVTLPPQPHTKEGVDAYNEVIARVRMWVNLNLWQKLKLSRDDAKPLLRLKGFPSFPLVERQANEVDWWDMVCNVKKLINEKKEDGKVFWQNLAGYKRQEALRPYLSSEEDRKKGKKFARYQLGDLLWHLEKKHGEDWGKVYDEAWERIDKKVEGLSKHIKLEEERRSEDAQSKAALTDWLRAKASFVIEGLKEADKDEFCRCELKLQKWYGDLRGKPFAIEAENSILDISGFSKQYNCAFIWQKDGVKKLNLYLIINYFKGGKLRFKKIKPEAFEANRFYTVINKKSGEIVPMEVNFNFDDPNLIILPLAFGKRQGREFIWNDLLSLETGSLKLANGRVIEKTLYNRRTRQDEPALFVALTFERREVLDSSNIKPMNLIGVDRGENIPAVIALTDPEGCPLSRFKDSLGNPTHILRIGESYKEKQRTIQAKKEVEQRRAGGYSRKYASKAKNLADDMVRNTARDLLYYAVTQDAMLIFENLSRGFGRQGKRTFMAERQYTRMEDWLTAKLAYEGLPSKVYLSKTLAQYTSKTCSNCGFTITSADYDRVLEKLKKTATGWMTTINGKELKVEGQITYYNRYKRQNVVKDLSVELDRLSEESVNNDISSWTKGRSGEALSLLKKRFSHRPVQEKFVCLNCGFETHADEQAALNIARSWLFLRSQEYKKYQTNKTTGNTDKRAFVETWQSFYRKKLKEVWKPAV

SEQ ID NO: 46782 - protein, 978 aa, synthetic construct
  REGION 1..978: note = engineered CasX variant
QEIKRINKIRRRLVKDSNTKKAGKTGPMKTLLVRVMTPDLRERLENLRKKPENIPQPISNTSRANLNKLLTDYTEMKKAILHVYWEEFQKDPVGLMSRVAQPASKKIDQNKLKPEMDEKGNLTTAGFACSQCGQPLFVYKLEQVSEKGKAYTNYFGRCNVAEHEKLIKLAQLKPEKDSDEAVTYSLGKFGQRALDFYSIHVTKESTHPVKPLAQIAGNRYASGPVGKALSDACMGTIASFLSKYQDIIIEHQKVVKGNQKRLESLRELAGKENLEYPSVTLPPQPHTKEGVDAYNEVIARVRMWVNLNLWQKLKLSRDDAKPLLRLKGFPSFPLVERQANEVDWWDMVCNVKKLINEKKEDGKVFWQNLAGYKRQEALRPYLSSEEDRKKGKKFARYQLGDLLWHLEKKHGEDWGKVYDEAWERIDKKVEGLSKHIKLEEERRSEDAQSKAALTDWLRAKASFVIEGLKEADKDEFCRCELKLQKWYGDLRGKPFAIEAENSILDISGFSKQYNCAFIWQKDGVKKLNLYLIINYFKGGKLRFKKIKPEAFEANRFYTVINKKSGEIVPMEVNFNFDDPNLIILPLAFGKRQGREFIWNDLLSLETGSLKLANGRVIEKTLYNRRTRQDEPALFVALTFERREVLDSSNIKPMNLIGVDRGENIPAVIALTDPEGCPLSRFKDSLGNPTHILRIGESYKEKQRTIQAKKEVEQRRAGGYSRKYASKAKNLADDMVRNTARDLLYYAVTQDAMLIFENLSRGFGRQGKRTFMAERQYTRMEDWLTAKLAYEGLPSKVYLSKTLAQYTSKTCSNCGFTITSADYDRVLEKLKKTATGWMTTINGKELKVEGQITYYNRYKRQNVVKDLSVELDRLSEESVNNDISSWTKGRSGEALSLLKKRFSHRPVQEKFVCLNCGFETHADEQAALNIARSWLFLRSQEYKKYQTNKTTGNTDKRAFVETWQSFYRKKLKEVWKPAV

SEQ ID NO: 46783 - protein, 977 aa, synthetic construct
  REGION 1..977: note = engineered CasX variant
QEIKRINKIRRRLVKDSNTKKAGKTGPMKTLLVRVMTPDLRERLENLRKKPENIPQPISNTSRANLNKLLTDYTEMKKAILHVYWEEFQKDPVGLMSRVAQPASKKIDQNKLKPEMDEKGNLTTAGFACSQCGQPLFVYKLEQVSEKGKAYTNYFGRCNVAEHEKLILLAQLKPEKDSDEAVTYSLGKFGQRALDFYSIHVTKESTHPVKPLAQIAGNRYASPVGKALSDACMGTIASFLSKYQDIIIEHQKVVKGNQKRLESLRELAGKENLEYPSVTLPPQPHTKEGVDAYNEVIARVRMWVNLNLWQKLKLSRDDAKPLLRLKGFPSFPLVERQANEVDWWDMVCNVKKLINEKKEDGKVFWQNLAGYKRQEALRPYLSSEEDRKKGKKFARYQLGDLLWHLEKKHGEDWGKVYDEAWERIDKKVEGLSKHIKLEEERRSEDAQSKAALTDWLRAKASFVIEGLKEADKDEFCRCELKLQKWYGDLRGKPFAIEAENSILDISGFSKQYNCAFIWQKDGVKKLNLYLIINYFKGGKLRFKKIKPEAFEANRFYTVINKKSGEIVPMEVNFNFDDPNLIILPLAFGKRQGREFIWNDLLSLETGSLKLANGRVIEKTLYNRRTRQDEPALFVALTFERREVLDSSNIKPMNLIGVDRGENIPAVIALTDPEGCPLSRFKDSLGNPTHILRIGESYKEKQRTIQAKKEVEQRRAGGYSRKYASKAKNLADDMVRNTARDLLYYAVTQDAMLIFENLSRGFGRQGKRTFMAERQYTRMEDWLTAKLAYEGLPSKVYLSKTLAQYTSKTCSNCGFTITSADYDRVLEKLKKTATGWMTTINGKELKVEGQITYYNRYKRQNVVKDLSVELDRLSEESVNNDISSWTKGRSGEALSLLKKRFSHRPVQEKFVCLNCGFETHADEQAALNIARSWLFLRSQEYKKYQTNKTTGNTDKRAFVETWQSFYRKKLKEVWKPAV

SEQ ID NO: 46784 - protein, 978 aa, synthetic construct
  REGION 1..978: note = engineered CasX variant
QEIKRINKIRRRLVKDSNTKKAGKTGPMKTLLVRVMTPDLRERLENLRKKPENIPQPISNTSRANLNKLLTDYTEMKKAILHVYWEEFQKDPVGLMSRVAQPASKKIDQNKLKPEMDEKGNLTTAGFACSQCGQPLFVYKLEQVSEKGKAYTNYFGRCNVAEHEKLILLAQLKPEKDSDEAVTYSLGKFGQRALDFYSIHVTKESTHPVKPLAQIAGNRYASYPVGKALSDACMGTIASFLSKYQDIIIEHQKVVKGNQKRLESLRELAGKENLEYPSVTLPPQPHTKEGVDAYNEVIARVRMWVNLNLWQKLKLSRDDAKPLLRLKGFPSFPLVERQANEVDWWDMVCNVKKLINEKKEDGKVFWQNLAGYKRQEALRPYLSSEEDRKKGKKFARYQLGDLLLHLYKKHGEDWGKVYDEAWERIDKKVEGLSKHIKLEEERRSEDAQSKAALTDWLRAKASFVIEGLKEADKDEFCRCELKLQKWYGDLRGKPFAIEAENSILDISGFSKQYNCAFIWQKDGVKKLNLYLIINYFKGGKLRFKKIKPEAFEANRFYTVINKKSGEIVPMEVNFNFDDPNLIILPLAFGKRQGREFIWNDLLSLETGSLKLANGRVIEKTLYNRRTRQDEPALFVALTFERREVLDSSNIKPMNLIGVDRGENIPAVIALTDPEGCPLSRFKDSLGNPTHILRIGESYKEKQRTIQAKKEVEQRRAGGYSRKYASKAKNLADDMVRNTARDLLYYAVTQDAMLIFENLSRGFGRQGKRTFMAERQYTRMEDWLTAKLAYEGLPSKVYLSKTLAQYTSKTCSNCGFTITSADYDRVLEKLKKTATGWMTTINGKELKVEGQITYYNRYKRQNVVKDLSVELDRLSEESVNNDISSWTKGRSGEALSLLKKRFSHRPVQEKFVCLNCGFETHADEQAALNIARSWLFLRSQEYKKYQTNKTTGNTDKRAFVETWQSFYRKKLKEVWKPAV

SEQ ID NO: 46785 - protein, 978 aa, synthetic construct
  REGION 1..978: note = engineered CasX variant
QEIKRINKIRRRLVKDSNTKKAGKTGPMKTLLVRVMTPDLRERLENLRKKPENIPQPISNTSRANLNKLLTDYTEMKKAILHVYWEEFQKDPVGLMSRVAQPASKKIDQNKLKPEMDEKGNLTTAGFACSQCGQPLFVYKLEQVSEKGKAYTNYFGRCNVAEHEKLILLAQLKPEKDSDEAVTYSLGKFGQRALDFYSIHVTKESTHPVKPLAQIAGNRYASHPVGKALSDACMGTIASFLSKYQDIIIEHQKVVKGNQKRLESLRELAGKENLEYPSVTLPPQPHTKEGVDAYNEVIARVRMWVNLNLWQKLKLSRDDAKPLLRLKGFPSFPLVERQANEVDWWDMVCNVKKLINEKKEDGKVFWQNLAGYKRQEALRPYLSSEEDRKKGKKFARYQLGDLLLHLYKKHGEDWGKVYDEAWERIDKKVEGLSKHIKLEEERRSEDAQSKAALTDWLRAKASFVIEGLKEADKDEFCRCELKLQKWYGDLRGKPFAIEAENSILDISGFSKQYNCAFIWQKDGVKKLNLYLIINYFKGGKLRFKKIKPEAFEANRFYTVINKKSGEIVPMEVNFNFDDPNLIILPLAFGKRQGREFIWNDLLSLETGSLKLANGRVIEKTLYNRRTRQDEPALFVALTFERREVLDSSNIKPMNLIGVDRGENIPAVIALTDPEGCPLSRFKDSLGNPTHILRIGESYKEKQRTIQAKKEVEQRRAGGYSRKYASKAKNLADDMVRNTARDLLYYAVTQDAMLIFENLSRGFGRQGKRTFMAERQYTRMEDWLTAKLAYEGLPSKVYLSKTLAQYTSKTCSNCGFTITSADYDRVLEKLKKTATGWMTTINGKELKVEGQITYYNRYKRQNVVKDLSVELDRLSEESVNNDISSWTKGRSGEALSLLKKRFSHRPVQEKFVCLNCGFETHADEQAALNIARSWLFLRSQEYKKYQTNKTTGNTDKRAFVETWQSFYRKKLKEVWKPAV

SEQ ID NO: 46786 - protein, 978 aa, synthetic construct
  REGION 1..978: note = engineered CasX variant
QEIKRINKIRRRLVKDSNTKKAGKTGPMKTLLVRVMTPDLRERLENLRKKPENIPQPISNTSRANLNKLLTDYTEMKKAILHVYWEEFQKDPVGLMSRVAQPASKKIDQNKLKPEMDEKGNLTTAGFACSQCGQPLFVYKLEQVSEKGKAYTNYFGRCNVAEHEKLILLAQLKPEKDSDEAVTYSLGKFGQRALDFYSIHVTKESTHPVKPLAQIAGNRYASSPVGKALSDACMGTIASFLSKYQDIIIEHQKVVKGNQKRLESLRELAGKENLEYPSVTLPPQPHTKEGVDAYNEVIARVRMWVNLNLWQKLKLSRDDAKPLLRLKGFPSFPLVERQANEVDWWDMVCNVKKLINEKKEDGKVFWQNLAGYKRQEALRPYLSSEEDRKKGKKFARYQLGDLLLHLYKKHGEDWGKVYDEAWERIDKKVEGLSKHIKLEEERRSEDAQSKAALTDWLRAKASFVIEGLKEADKDEFCRCELKLQKWYGDLRGKPFAIEAENSILDISGFSKQYNCAFIWQKDGVKKLNLYLIINYFKGGKLRFKKIKPEAFEANRFYTVINKKSGEIVPMEVNFNFDDPNLIILPLAFGKRQGREFIWNDLLSLETGSLKLANGRVIEKTLYNRRTRQDEPALFVALTFERREVLDSSNIKPMNLIGVDRGENIPAVIALTDPEGCPLSRFKDSLGNPTHILRIGESYKEKQRTIQAKKEVEQRRAGGYSRKYASKAKNLADDMVRNTARDLLYYAVTQDAMLIFENLSRGFGRQGKRTFMAERQYTRMEDWLTAKLAYEGLPSKVYLSKTLAQYTSKTCSNCGFTITSADYDRVLEKLKKTATGWMTTINGKELKVEGQITYYNRYKRQNVVKDLSVELDRLSEESVNNDISSWTKGRSGEALSLLKKRFSHRPVQEKFVCLNCGFETHADEQAALNIARSWLFLRSQEYKKYQTNKTTGNTDKRAFVETWQSFYRKKLKEVWKPAV

SEQ ID NO: 46787 - protein, 978 aa, synthetic construct
  REGION 1..978: note = engineered CasX variant
QEIKRINKIRRRLVKDSNTKKAGKTGPMKTLLVRVMTPDLRERLENLRKKPENIPQPISNTSRANLNKLLTDYTEMKKAILHVYWEEFQKDPVGLMSRVAQPASKKIDQNKLKPEMDEKGNLTTAGFACSQCGQPLFVYKLEQVSEKGKAYTNYFGRCNVAEHEKLILLAQLKPEKDSDEAVTYSLGKFGQRALDFYSIHVTKESTHPVKPLAQIAGNRYASTPVGKALSDACMGTIASFLSKYQDIIIEHQKVVKGNQKRLESLRELAGKENLEYPSVTLPPQPHTKEGVDAYNEVIARVRMWVNLNLWQKLKLSRDDAKPLLRLKGFPSFPLVERQANEVDWWDMVCNVKKLINEKKEDGKVFWQNLAGYKRQEALRPYLSSEEDRKKGKKFARYQLGDLLLHLYKKHGEDWGKVYDEAWERIDKKVEGLSKHIKLEEERRSEDAQSKAALTDWLRAKASFVIEGLKEADKDEFCRCELKLQKWYGDLRGKPFAIEAENSILDISGFSKQYNCAFIWQKDGVKKLNLYLIINYFKGGKLRFKKIKPEAFEANRFYTVINKKSGEIVPMEVNFNFDDPNLIILPLAFGKRQGREFIWNDLLSLETGSLKLANGRVIEKTLYNRRTRQDEPALFVALTFERREVLDSSNIKPMNLIGVDRGENIPAVIALTDPEGCPLSRFKDSLGNPTHILRIGESYKEKQRTIQAKKEVEQRRAGGYSRKYASKAKNLADDMVRNTARDLLYYAVTQDAMLIFENLSRGFGRQGKRTFMAERQYTRMEDWLTAKLAYEGLPSKVYLSKTLAQYTSKTCSNCGFTITSADYDRVLEKLKKTATGWMTTINGKELKVEGQITYYNRYKRQNVVKDLSVELDRLSEESVNNDISSWTKGRSGEALSLLKKRFSHRPVQEKFVCLNCGFETHADEQAALNIARSWLFLRSQEYKKYQTNKTTGNTDKRAFVETWQSFYRKKLKEVWKPAV

SEQ ID NO: 46788 - protein, 978 aa, synthetic construct
  REGION 1..978: note = engineered CasX variant
QEIKRINKIRRRLVKDSNTKKAGKTGPMKTLLVRVMTPDLRERLENLRKKPENIPQPISNTSRANLNKLLTDYTEMKKAILHVYWEEFQKDPVGLMSRVAQPASKKIDQNKLKPEMDEKGNLTTAGFACSQCGQPLFVYKLEQVSEKGKAYTNYFGRCNVAEHEKLILLAQLKPEKDSDEAVTYSLGKFGQRALDFYSIHVTKESTHPVKPLAQIAGNRYASAPVGKALSDACMGTIASFLSKYQDIIIEHQKVVKGNQKRLESLRELAGKENLEYPSVTLPPQPHTKEGVDAYNEVIARVRMWVNLNLWQKLKLSRDDAKPLLRLKGFPSFPLVERQANEVDWWDMVCNVKKLINEKKEDGKVFWQNLAGYKRQEALRPYLSSEEDRKKGKKFARYQLGDLLLHLYKKHGEDWGKVYDEAWERIDKKVEGLSKHIKLEEERRSEDAQSKAALTDWLRAKASFVIEGLKEADKDEFCRCELKLQKWYGDLRGKPFAIEAENSILDISGFSKQYNCAFIWQKDGVKKLNLYLIINYFKGGKLRFKKIKPEAFEANRFYTVINKKSGEIVPMEVNFNFDDPNLIILPLAFGKRQGREFIWNDLLSLETGSLKLANGRVIEKTLYNRRTRQDEPALFVALTFERREVLDSSNIKPMNLIGVDRGENIPAVIALTDPEGCPLSRFKDSLGNPTHILRIGESYKEKQRTIQAKKEVEQRRAGGYSRKYASKAKNLADDMVRNTARDLLYYAVTQDAMLIFENLSRGFGRQGKRTFMAERQYTRMEDWLTAKLAYEGLPSKVYLSKTLAQYTSKTCSNCGFTITSADYDRVLEKLKKTATGWMTTINGKELKVEGQITYYNRYKRQNVVKDLSVELDRLSEESVNNDISSWTKGRSGEALSLLKKRFSHRPVQEKFVCLNCGFETHADEQAALNIARSWLFLRSQEYKKYQTNKTTGNTDKRAFVETWQSFYRKKLKEVWKPAV

SEQ ID NO: 46789 - protein, 978 aa, synthetic construct
  REGION 1..978: note = engineered CasX variant
QEIKRINKIRRRLVKDSNTKKAGKTGPMKTLLVRVMTPDLRERLENLRKKPENIPQPISNTSRANLNKLLTDYTEMKKAILHVYWEEFQKDPVGLMSRVAQPASKKIDQNKLKPEMDEKGNLTTAGFACSQCGQPLFVYKLEQVSEKGKAYTNYFGRCNVAEHEKLILLAQLKPEKDSDEAVTYSLGKFGQRALDFYSIHVTKESTHPVKPLAQIAGNRYASVPVGKALSDACMGTIASFLSKYQDIIIEHQKVVKGNQKRLESLRELAGKENLEYPSVTLPPQPHTKEGVDAYNEVIARVRMWVNLNLWQKLKLSRDDAKPLLRLKGFPSFPLVERQANEVDWWDMVCNVKKLINEKKEDGKVFWQNLAGYKRQEALRPYLSSEEDRKKGKKFARYQLGDLLLHLYKKHGEDWGKVYDEAWERIDKKVEGLSKHIKLEEERRSEDAQSKAALTDWLRAKASFVIEGLKEADKDEFCRCELKLQKWYGDLRGKPFAIEAENSILDISGFSKQYNCAFIWQKDGVKKLNLYLIINYFKGGKLRFKKIKPEAFEANRFYTVINKKSGEIVPMEVNFNFDDPNLIILPLAFGKRQGREFIWNDLLSLETGSLKLANGRVIEKTLYNRRTRQDEPALFVALTFERREVLDSSNIKPMNLIGVDRGENIPAVIALTDPEGCPLSRFKDSLGNPTHILRIGESYKEKQRTIQAKKEVEQRRAGGYSRKYASKAKNLADDMVRNTARDLLYYAVTQDAMLIFENLSRGFGRQGKRTFMAERQYTRMEDWLTAKLAYEGLPSKVYLSKTLAQYTSKTCSNCGFTITSADYDRVLEKLKKTATGWMTTINGKELKVEGQITYYNRYKRQNVVKDLSVELDRLSEESVNNDISSWTKGRSGEALSLLKKRFSHRPVQEKFVCLNCGFETHADEQAALNIARSWLFLRSQEYKKYQTNKTTGNTDKRAFVETWQSFYRKKLKEVWKPAV

SEQ ID NO: 46790 - protein, 978 aa, synthetic construct
  REGION 1..978: note = engineered CasX variant
QEIKRINKIRRRLVKDSNTKKAGKTGPMKTLLVRVMTPDLRERLENLRKKPENIPQPISNTSRANLNKLLTDYTEMKKAILHVYWEEFQKDPVGLMSRVAQPASKKIDQNKLKPEMDEKGNLTTAGFACSQCGQPLFVYKLEQVSEKGKAYTNYFGRCNVAEHEKLIKLAQLKPEKDSDEAVTYSLGKFGQRALDFYSIHVTKESTHPVKPLAQIAGNRYASGPVGKALSDACMGTIASFLSKYQDIIIEHQKVVKGNQKRLESLRELAGKENLEYPSVTLPPQPHTKEGVDAYNEVIARVRMWVNLNLWQKLKLSRDDAKPLLRLKGFPSFPLVERQANEVDWWDMVCNVKKLINEKKEDGKVFWQNLAGYKRQEALRPYLSSEEDRKKGKKFARYQLGDLLLHLYKKHGEDWGKVYDEAWERIDKKVEGLSKHIKLEEERRSEDAQSKAALTDWLRAKASFVIEGLKEADKDEFCRCELKLQKWYGDLRGKPFAIEAENSILDISGFSKQYNCAFIWQKDGVKKLNLYLIINYFKGGKLRFKKIKPEAFEANRFYTVINKKSGEIVPMEVNFNFDDPNLIILPLAFGKRQGREFIWNDLLSLETGSLKLANGRVIEKTLYNRRTRQDEPALFVALTFERREVLDSSNIKPMNLIGVDRGENIPAVIALTDPEGCPLSRFKDSLGNPTHILRIGESYKEKQRTIQAKKEVEQRRAGGYSRKYASKAKNLADDMVRNTARDLLYYAVTQDAMLIFENLSRGFGRQGKRTFMAERQYTRMEDWLTAKLAYEGLPSKVYLSKTLAQYTSKTCSNCGFTITSADYDRVLEKLKKTATGWMTTINGKELKVEGQITYYNRYKRQNVVKDLSVELDRLSEESVNNDISSWTKGRSGEALSLLKKRFSHRPVQEKFVCLNCGFETHADEQAALNIARSWLFLRSQEYKKYQTNKTTGNTDKRAFVETWQSFYRKKLKEVWKPAV

SEQ ID NO: 46791 - protein, 977 aa, synthetic construct
  REGION 1..977: note = engineered CasX variant
QEIKRINKIRRRLVKDSNTKKAGKTGPMKTLLVRVMTPDLRERLENLRKKPENIPQPISNTSRANLNKLLTDYTEMKKAILHVYWEEFQKDPVGLMSRVAQPASKKIDQNKLKPEMDEKGNLTTAGFACSQCGQPLFVYKLEQVSEKGKAYTNYFGRCNVAEHEKLILLAQLKPEKDSDEAVTYSLGKFGQRALDFYSIHVTKESTHPVKPLAQIAGNRYASPVGKALSDACMGTIASFLSKYQDIIIEHQKVVKGNQKRLESLRELAGKENLEYPSVTLPPQPHTKEGVDAYNEVIARVRMWVNLNLWQKLKLSRDDAKPLLRLKGFPSFPLVERQANEVDWWDMVCNVKKLINEKKEDGKVFWQNLAGYKRQEALRPYLSSEEDRKKGKKFARYQLGDLLLHLYKKHGEDWGKVYDEAWERIDKKVEGLSKHIKLEEERRSEDAQSKAALTDWLRAKASFVIEGLKEADKDEFCRCELKLQKWYGDLRGKPFAIEAENSILDISGFSKQYNCAFIWQKDGVKKLNLYLIINYFKGGKLRFKKIKPEAFEANRFYTVINKKSGEIVPMEVNFNFDDPNLIILPLAFGKRQGREFIWNDLLSLETGSLKLANGRVIEKTLYNRRTRQDEPALFVALTFERREVLDSSNIKPMNLIGVDRGENIPAVIALTDPEGCPLSRFKDSLGNPTHILRIGESYKEKQRTIQAKKEVEQRRAGGYSRKYASKAKNLADDMVRNTARDLLYYAVTQDAMLIFENLSRGFGRQGKRTFMAERQYTRMEDWLTAKLAYEGLPSKVYLSKTLAQYTSKTCSNCGFTITSADYDRVLEKLKKTATGWMTTINGKELKVEGQITYYNRYKRQNVVKDLSVELDRLSEESVNNDISSWTKGRSGEALSLLKKRFSHRPVQEKFVCLNCGFETHADEQAALNIARSWLFLRSQEYKKYQTNKTTGNTDKRAFVETWQSFYRKKLKEVWKPAV

SEQ ID NO: 46792 - protein, 978 aa, synthetic construct
  REGION 1..978: note = engineered CasX variant
QEIKRINKIRRRLVKDSNTKKAGKTGPMKTLLVRVMTPDLRERLENLRKKPENIPQPISNTSRANLNKLLTDYTEMKKAILHVYWEEFQKDPVGLMSRVAQPASKKIDQNKLKPEMDEKGNLTTAGFACSQCGQPLFVYKLEQVSEKGKAYTNYFGRCNVAEHEKLILLAQLKPEKDSDEAVTYSLGKFGQRALDFYSIHVTKESTHPVKPLAQIAGNRYASYPVGKALSDACMGTIASFLSKYQDIIIEHQKVVKGNQKRLESLRELAGKENLEYPSVTLPPQPHTKEGVDAYNEVIARVRMWVNLNLWQKLKLSRDDAKPLLRLKGFPSFPLVERQANEVDWWDMVCNVKKLINEKKEDGKVFWQNLAGYKRQEALRPYLSSEEDRKKGKKFARYQLGDLLLHLEKKHPEDWGKVYDEAWERIDKKVEGLSKHIKLEEERRSEDAQSKAALTDWLRAKASFVIEGLKEADKDEFCRCELKLQKWYGDLRGKPFAIEAENSILDISGFSKQYNCAFIWQKDGVKKLNLYLIINYFKGGKLRFKKIKPEAFEANRFYTVINKKSGEIVPMEVNFNFDDPNLIILPLAFGKRQGREFIWNDLLSLETGSLKLANGRVIEKTLYNRRTRQDEPALFVALTFERREVLDSSNIKPMNLIGVDRGENIPAVIALTDPEGCPLSRFKDSLGNPTHILRIGESYKEKQRTIQAKKEVEQRRAGGYSRKYASKAKNLADDMVRNTARDLLYYAVTQDAMLIFENLSRGFGRQGKRTFMAERQYTRMEDWLTAKLAYEGLPSKVYLSKTLAQYTSKTCSNCGFTITSADYDRVLEKLKKTATGWMTTINGKELKVEGQITYYNRYKRQNVVKDLSVELDRLSEESVNNDISSWTKGRSGEALSLLKKRFSHRPVQEKFVCLNCGFETHADEQAALNIARSWLFLRSQEYKKYQTNKTTGNTDKRAFVETWQSFYRKKLKEVWKPAV

SEQ ID NO: 46793 - protein, 978 aa, synthetic construct
  REGION 1..978: note = engineered CasX variant
QEIKRINKIRRRLVKDSNTKKAGKTGPMKTLLVRVMTPDLRERLENLRKKPENIPQPISNTSRANLNKLLTDYTEMKKAILHVYWEEFQKDPVGLMSRVAQPASKKIDQNKLKPEMDEKGNLTTAGFACSQCGQPLFVYKLEQVSEKGKAYTNYFGRCNVAEHEKLILLAQLKPEKDSDEAVTYSLGKFGQRALDFYSIHVTKESTHPVKPLAQIAGNRYASHPVGKALSDACMGTIASFLSKYQDIIIEHQKVVKGNQKRLESLRELAGKENLEYPSVTLPPQPHTKEGVDAYNEVIARVRMWVNLNLWQKLKLSRDDAKPLLRLKGFPSFPLVERQANEVDWWDMVCNVKKLINEKKEDGKVFWQNLAGYKRQEALRPYLSSEEDRKKGKKFARYQLGDLLLHLEKKHPEDWGKVYDEAWERIDKKVEGLSKHIKLEEERRSEDAQSKAALTDWLRAKASFVIEGLKEADKDEFCRCELKLQKWYGDLRGKPFAIEAENSILDISGFSKQYNCAFIWQKDGVKKLNLYLIINYFKGGKLRFKKIKPEAFEANRFYTVINKKSGEIVPMEVNFNFDDPNLIILPLAFGKRQGREFIWNDLLSLETGSLKLANGRVIEKTLYNRRTRQDEPALFVALTFERREVLDSSNIKPMNLIGVDRGENIPAVIALTDPEGCPLSRFKDSLGNPTHILRIGESYKEKQRTIQAKKEVEQRRAGGYSRKYASKAKNLADDMVRNTARDLLYYAVTQDAMLIFENLSRGFGRQGKRTFMAERQYTRMEDWLTAKLAYEGLPSKVYLSKTLAQYTSKTCSNCGFTITSADYDRVLEKLKKTATGWMTTINGKELKVEGQITYYNRYKRQNVVKDLSVELDRLSEESVNNDISSWTKGRSGEALSLLKKRFSHRPVQEKFVCLNCGFETHADEQAALNIARSWLFLRSQEYKKYQTNKTTGNTDKRAFVETWQSFYRKKLKEVWKPAV

SEQ ID NO: 46794 - protein, 978 aa, synthetic construct
  REGION 1..978: note = engineered CasX variant
QEIKRINKIRRRLVKDSNTKKAGKTGPMKTLLVRVMTPDLRERLENLRKKPENIPQPISNTSRANLNKLLTDYTEMKKAILHVYWEEFQKDPVGLMSRVAQPASKKIDQNKLKPEMDEKGNLTTAGFACSQCGQPLFVYKLEQVSEKGKAYTNYFGRCNVAEHEKLILLAQLKPEKDSDEAVTYSLGKFGQRALDFYSIHVTKESTHPVKPLAQIAGNRYASSPVGKALSDACMGTIASFLSKYQDIIIEHQKVVKGNQKRLESLRELAGKENLEYPSVTLPPQPHTKEGVDAYNEVIARVRMWVNLNLWQKLKLSRDDAKPLLRLKGFPSFPLVERQANEVDWWDMVCNVKKLINEKKEDGKVFWQNLAGYKRQEALRPYLSSEEDRKKGKKFARYQLGDLLLHLEKKHPEDWGKVYDEAWERIDKKVEGLSKHIKLEEERRSEDAQSKAALTDWLRAKASFVIEGLKEADKDEFCRCELKLQKWYGDLRGKPFAIEAENSILDISGFSKQYNCAFIWQKDGVKKLNLYLIINYFKGGKLRFKKIKPEAFEANRFYTVINKKSGEIVPMEVNFNFDDPNLIILPLAFGKRQGREFIWNDLLSLETGSLKLANGRVIEKTLYNRRTRQDEPALFVALTFERREVLDSSNIKPMNLIGVDRGENIPAVIALTDPEGCPLSRFKDSLGNPTHILRIGESYKEKQRTIQAKKEVEQRRAGGYSRKYASKAKNLADDMVRNTARDLLYYAVTQDAMLIFENLSRGFGRQGKRTFMAERQYTRMEDWLTAKLAYEGLPSKVYLSKTLAQYTSKTCSNCGFTITSADYDRVLEKLKKTATGWMTTINGKELKVEGQITYYNRYKRQNVVKDLSVELDRLSEESVNNDISSWTKGRSGEALSLLKKRFSHRPVQEKFVCLNCGFETHADEQAALNIARSWLFLRSQEYKKYQTNKTTGNTDKRAFVETWQSFYRKKLKEVWKPAV

SEQ ID NO: 46795 - protein, 978 aa, synthetic construct
  REGION 1..978: note = engineered CasX variant
QEIKRINKIRRRLVKDSNTKKAGKTGPMKTLLVRVMTPDLRERLENLRKKPENIPQPISNTSRANLNKLLTDYTEMKKAILHVYWEEFQKDPVGLMSRVAQPASKKIDQNKLKPEMDEKGNLTTAGFACSQCGQPLFVYKLEQVSEKGKAYTNYFGRCNVAEHEKLILLAQLKPEKDSDEAVTYSLGKFGQRALDFYSIHVTKESTHPVKPLAQIAGNRYASTPVGKALSDACMGTIASFLSKYQDIIIEHQKVVKGNQKRLESLRELAGKENLEYPSVTLPPQPHTKEGVDAYNEVIARVRMWVNLNLWQKLKLSRDDAKPLLRLKGFPSFPLVERQANEVDWWDMVCNVKKLINEKKEDGKVFWQNLAGYKRQEALRPYLSSEEDRKKGKKFARYQLGDLLLHLEKKHPEDWGKVYDEAWERIDKKVEGLSKHIKLEEERRSEDAQSKAALTDWLRAKASFVIEGLKEADKDEFCRCELKLQKWYGDLRGKPFAIEAENSILDISGFSKQYNCAFIWQKDGVKKLNLYLIINYFKGGKLRFKKIKPEAFEANRFYTVINKKSGEIVPMEVNFNFDDPNLIILPLAFGKRQGREFIWNDLLSLETGSLKLANGRVIEKTLYNRRTRQDEPALFVALTFERREVLDSSNIKPMNLIGVDRGENIPAVIALTDPEGCPLSRFKDSLGNPTHILRIGESYKEKQRTIQAKKEVEQRRAGGYSRKYASKAKNLADDMVRNTARDLLYYAVTQDAMLIFENLSRGFGRQGKRTFMAERQYTRMEDWLTAKLAYEGLPSKVYLSKTLAQYTSKTCSNCGFTITSADYDRVLEKLKKTATGWMTTINGKELKVEGQITYYNRYKRQNVVKDLSVELDRLSEESVNNDISSWTKGRSGEALSLLKKRFSHRPVQEKFVCLNCGFETHADEQAALNIARSWLFLRSQEYKKYQTNKTTGNTDKRAFVETWQSFYRKKLKEVWKPAV

SEQ ID NO: 46796 - protein, 978 aa, synthetic construct
  REGION 1..978: note = engineered CasX variant
QEIKRINKIRRRLVKDSNTKKAGKTGPMKTLLVRVMTPDLRERLENLRKKPENIPQPISNTSRANLNKLLTDYTEMKKAILHVYWEEFQKDPVGLMSRVAQPASKKIDQNKLKPEMDEKGNLTTAGFACSQCGQPLFVYKLEQVSEKGKAYTNYFGRCNVAEHEKLILLAQLKPEKDSDEAVTYSLGKFGQRALDFYSIHVTKESTHPVKPLAQIAGNRYASAPVGKALSDACMGTIASFLSKYQDIIIEHQKVVKGNQKRLESLRELAGKENLEYPSVTLPPQPHTKEGVDAYNEVIARVRMWVNLNLWQKLKLSRDDAKPLLRLKGFPSFPLVERQANEVDWWDMVCNVKKLINEKKEDGKVFWQNLAGYKRQEALRPYLSSEEDRKKGKKFARYQLGDLLLHLEKKHPEDWGKVYDEAWERIDKKVEGLSKHIKLEEERRSEDAQSKAALTDWLRAKASFVIEGLKEADKDEFCRCELKLQKWYGDLRGKPFAIEAENSILDISGFSKQYNCAFIWQKDGVKKLNLYLIINYFKGGKLRFKKIKPEAFEANRFYTVINKKSGEIVPMEVNFNFDDPNLIILPLAFGKRQGREFIWNDLLSLETGSLKLANGRVIEKTLYNRRTRQDEPALFVALTFERREVLDSSNIKPMNLIGVDRGENIPAVIALTDPEGCPLSRFKDSLGNPTHILRIGESYKEKQRTIQAKKEVEQRRAGGYSRKYASKAKNLADDMVRNTARDLLYYAVTQDAMLIFENLSRGFGRQGKRTFMAERQYTRMEDWLTAKLAYEGLPSKVYLSKTLAQYTSKTCSNCGFTITSADYDRVLEKLKKTATGWMTTINGKELKVEGQITYYNRYKRQNVVKDLSVELDRLSEESVNNDISSWTKGRSGEALSLLKKRFSHRPVQEKFVCLNCGFETHADEQAALNIARSWLFLRSQEYKKYQTNKTTGNTDKRAFVETWQSFYRKKLKEVWKPAV

SEQ ID NO: 46797 - protein, 978 aa, synthetic construct
  REGION 1..978: note = engineered CasX variant
QEIKRINKIRRRLVKDSNTKKAGKTGPMKTLLVRVMTPDLRERLENLRKKPENIPQPISNTSRANLNKLLTDYTEMKKAILHVYWEEFQKDPVGLMSRVAQPASKKIDQNKLKPEMDEKGNLTTAGFACSQCGQPLFVYKLEQVSEKGKAYTNYFGRCNVAEHEKLILLAQLKPEKDSDEAVTYSLGKFGQRALDFYSIHVTKESTHPVKPLAQIAGNRYASVPVGKALSDACMGTIASFLSKYQDIIIEHQKVVKGNQKRLESLRELAGKENLEYPSVTLPPQPHTKEGVDAYNEVIARVRMWVNLNLWQKLKLSRDDAKPLLRLKGFPSFPLVERQANEVDWWDMVCNVKKLINEKKEDGKVFWQNLAGYKRQEALRPYLSSEEDRKKGKKFARYQLGDLLLHLEKKHPEDWGKVYDEAWERIDKKVEGLSKHIKLEEERRSEDAQSKAALTDWLRAKASFVIEGLKEADKDEFCRCELKLQKWYGDLRGKPFAIEAENSILDISGFSKQYNCAFIWQKDGVKKLNLYLIINYFKGGKLRFKKIKPEAFEANRFYTVINKKSGEIVPMEVNFNFDDPNLIILPLAFGKRQGREFIWNDLLSLETGSLKLANGRVIEKTLYNRRTRQDEPALFVALTFERREVLDSSNIKPMNLIGVDRGENIPAVIALTDPEGCPLSRFKDSLGNPTHILRIGESYKEKQRTIQAKKEVEQRRAGGYSRKYASKAKNLADDMVRNTARDLLYYAVTQDAMLIFENLSRGFGRQGKRTFMAERQYTRMEDWLTAKLAYEGLPSKVYLSKTLAQYTSKTCSNCGFTITSADYDRVLEKLKKTATGWMTTINGKELKVEGQITYYNRYKRQNVVKDLSVELDRLSEESVNNDISSWTKGRSGEALSLLKKRFSHRPVQEKFVCLNCGFETHADEQAALNIARSWLFLRSQEYKKYQTNKTTGNTDKRAFVETWQSFYRKKLKEVWKPAV

SEQ ID NO: 46798 - protein, 978 aa, synthetic construct
  REGION 1..978: note = engineered CasX variant
QEIKRINKIRRRLVKDSNTKKAGKTGPMKTLLVRVMTPDLRERLENLRKKPENIPQPISNTSRANLNKLLTDYTEMKKAILHVYWEEFQKDPVGLMSRVAQPASKKIDQNKLKPEMDEKGNLTTAGFACSQCGQPLFVYKLEQVSEKGKAYTNYFGRCNVAEHEKLIKLAQLKPEKDSDEAVTYSLGKFGQRALDFYSIHVTKESTHPVKPLAQIAGNRYASGPVGKALSDACMGTIASFLSKYQDIIIEHQKVVKGNQKRLESLRELAGKENLEYPSVTLPPQPHTKEGVDAYNEVIARVRMWVNLNLWQKLKLSRDDAKPLLRLKGFPSFPLVERQANEVDWWDMVCNVKKLINEKKEDGKVFWQNLAGYKRQEALRPYLSSEEDRKKGKKFARYQLGDLLLHLEKKHPEDWGKVYDEAWERIDKKVEGLSKHIKLEEERRSEDAQSKAALTDWLRAKASFVIEGLKEADKDEFCRCELKLQKWYGDLRGKPFAIEAENSILDISGFSKQYNCAFIWQKDGVKKLNLYLIINYFKGGKLRFKKIKPEAFEANRFYTVINKKSGEIVPMEVNFNFDDPNLIILPLAFGKRQGREFIWNDLLSLETGSLKLANGRVIEKTLYNRRTRQDEPALFVALTFERREVLDSSNIKPMNLIGVDRGENIPAVIALTDPEGCPLSRFKDSLGNPTHILRIGESYKEKQRTIQAKKEVEQRRAGGYSRKYASKAKNLADDMVRNTARDLLYYAVTQDAMLIFENLSRGFGRQGKRTFMAERQYTRMEDWLTAKLAYEGLPSKVYLSKTLAQYTSKTCSNCGFTITSADYDRVLEKLKKTATGWMTTINGKELKVEGQITYYNRYKRQNVVKDLSVELDRLSEESVNNDISSWTKGRSGEALSLLKKRFSHRPVQEKFVCLNCGFETHADEQAALNIARSWLFLRSQEYKKYQTNKTTGNTDKRAFVETWQSFYRKKLKEVWKPAV

SEQ ID NO: 46799 - protein, 977 aa, synthetic construct
  REGION 1..977: note = engineered CasX variant
QEIKRINKIRRRLVKDSNTKKAGKTGPMKTLLVRVMTPDLRERLENLRKKPENIPQPISNTSRANLNKLLTDYTEMKKAILHVYWEEFQKDPVGLMSRVAQPASKKIDQNKLKPEMDEKGNLTTAGFACSQCGQPLFVYKLEQVSEKGKAYTNYFGRCNVAEHEKLILLAQLKPEKDSDEAVTYSLGKFGQRALDFYSIHVTKESTHPVKPLAQIAGNRYASPVGKALSDACMGTIASFLSKYQDIIIEHQKVVKGNQKRLESLRELAGKENLEYPSVTLPPQPHTKEGVDAYNEVIARVRMWVNLNLWQKLKLSRDDAKPLLRLKGFPSFPLVERQANEVDWWDMVCNVKKLINEKKEDGKVFWQNLAGYKRQEALRPYLSSEEDRKKGKKFARYQLGDLLLHLEKKHPEDWGKVYDEAWERIDKKVEGLSKHIKLEEERRSEDAQSKAALTDWLRAKASFVIEGLKEADKDEFCRCELKLQKWYGDLRGKPFAIEAENSILDISGFSKQYNCAFIWQKDGVKKLNLYLIINYFKGGKLRFKKIKPEAFEANRFYTVINKKSGEIVPMEVNFNFDDPNLIILPLAFGKRQGREFIWNDLLSLETGSLKLANGRVIEKTLYNRRTRQDEPALFVALTFERREVLDSSNIKPMNLIGVDRGENIPAVIALTDPEGCPLSRFKDSLGNPTHILRIGESYKEKQRTIQAKKEVEQRRAGGYSRKYASKAKNLADDMVRNTARDLLYYAVTQDAMLIFENLSRGFGRQGKRTFMAERQYTRMEDWLTAKLAYEGLPSKVYLSKTLAQYTSKTCSNCGFTITSADYDRVLEKLKKTATGWMTTINGKELKVEGQITYYNRYKRQNVVKDLSVELDRLSEESVNNDISSWTKGRSGEALSLLKKRFSHRPVQEKFVCLNCGFETHADEQAALNIARSWLFLRSQEYKKYQTNKTTGNTDKRAFVETWQSFYRKKLKEVWKPAV

SEQ ID NO: 46800 - protein, 979 aa, synthetic construct
  REGION 1..979: note = engineered CasX variant
QEIKRINKIRRRLVKDSNTKKAGKTGPMKTLLVRVMTPDLRERLENLRKKPENIPQPISNTSRANLNKLLTDYTEMKKAILHVYWEEFQKDPVGLMSRVAQPASKKIDQNKLKPEMDEKGNLTTAGFACSQCGQPLFVYKLEQVSEKGKAYTNYFGRCNVAEHEKLILLAQLKPEKDSDEAVTYSLGKFGQRALDFYSIHVTKESTHPVKPLAQIAGNRYASYPVGKALSDACMGTIASFLSKYQDIIIEHQKVVKGNQKRLESLRELAGKENLEYPSVTLPPQPHTKEGVDAYNEVIARVRMWVNLNLWQKLKLSRDDAKPLLRLKGFPSFPLVERQANEVDWWDMVCNVKKLINEKKEDGKVFWQNLAGYKRQEALRPYLSSEEDRKKGKKFARYQLGDLLLHLEKKHGERDWGKVYDEAWERIDKKVEGLSKHIKLEEERRSEDAQSKAALTDWLRAKASFVIEGLKEADKDEFCRCELKLQKWYGDLRGKPFAIEAENSILDISGFSKQYNCAFIWQKDGVKKLNLYLIINYFKGGKLRFKKIKPEAFEANRFYTVINKKSGEIVPMEVNFNFDDPNLIILPLAFGKRQGREFIWNDLLSLETGSLKLANGRVIEKTLYNRRTRQDEPALFVALTFERREVLDSSNIKPMNLIGVDRGENIPAVIALTDPEGCPLSRFKDSLGNPTHILRIGESYKEKQRTIQAKKEVEQRRAGGYSRKYASKAKNLADDMVRNTARDLLYYAVTQDAMLIFENLSRGFGRQGKRTFMAERQYTRMEDWLTAKLAYEGLPSKVYLSKTLAQYTSKTCSNCGFTITSADYDRVLEKLKKTATGWMTTINGKELKVEGQITYYNRYKRQNVVKDLSVELDRLSEESVNNDISSWTKGRSGEALSLLKKRFSHRPVQEKFVCLNCGFETHADEQAALNIARSWLFLRSQEYKKYQTNKTTGNTDKRAFVETWQSFYRKKLKEVWKPAV

SEQ ID NO: 46801 - protein, 979 aa, synthetic construct
  REGION 1..979: note = engineered CasX variant
QEIKRINKIRRRLVKDSNTKKAGKTGPMKTLLVRVMTPDLRERLENLRKKPENIPQPISNTSRANLNKLLTDYTEMKKAILHVYWEEFQKDPVGLMSRVAQPASKKIDQNKLKPEMDEKGNLTTAGFACSQCGQPLFVYKLEQVSEKGKAYTNYFGRCNVAEHEKLILLAQLKPEKDSDEAVTYSLGKFGQRALDFYSIHVTKESTHPVKPLAQIAGNRYASHPVGKALSDACMGTIASFLSKYQDIIIEHQKVVKGNQKRLESLRELAGKENLEYPSVTLPPQPHTKEGVDAYNEVIARVRMWVNLNLWQKLKLSRDDAKPLLRLKGFPSFPLVERQANEVDWWDMVCNVKKLINEKKEDGKVFWQNLAGYKRQEALRPYLSSEEDRKKGKKFARYQLGDLLLHLEKKHGERDWGKVYDEAWERIDKKVEGLSKHIKLEEERRSEDAQSKAALTDWLRAKASFVIEGLKEADKDEFCRCELKLQKWYGDLRGKPFAIEAENSILDISGFSKQYNCAFIWQKDGVKKLNLYLIINYFKGGKLRFKKIKPEAFEANRFYTVINKKSGEIVPMEVNFNFDDPNLIILPLAFGKRQGREFIWNDLLSLETGSLKLANGRVIEKTLYNRRTRQDEPALFVALTFERREVLDSSNIKPMNLIGVDRGENIPAVIALTDPEGCPLSRFKDSLGNPTHILRIGESYKEKQRTIQAKKEVEQRRAGGYSRKYASKAKNLADDMVRNTARDLLYYAVTQDAMLIFENLSRGFGRQGKRTFMAERQYTRMEDWLTAKLAYEGLPSKVYLSKTLAQYTSKTCSNCGFTITSADYDRVLEKLKKTATGWMTTINGKELKVEGQITYYNRYKRQNVVKDLSVELDRLSEESVNNDISSWTKGRSGEALSLLKKRFSHRPVQEKFVCLNCGFETHADEQAALNIARSWLFLRSQEYKKYQTNKTTGNTDKRAFVETWQSFYRKKLKEVWKPAV

SEQ ID NO: 46802 - protein, 979 aa, synthetic construct
  REGION 1..979: note = engineered CasX variant
QEIKRINKIRRRLVKDSNTKKAGKTGPMKTLLVRVMTPDLRERLENLRKKPENIPQPISNTSRANLNKLLTDYTEMKKAILHVYWEEFQKDPVGLMSRVAQPASKKIDQNKLKPEMDEKGNLTTAGFACSQCGQPLFVYKLEQVSEKGKAYTNYFGRCNVAEHEKLILLAQLKPEKDSDEAVTYSLGKFGQRALDFYSIHVTKESTHPVKPLAQIAGNRYASSPVGKALSDACMGTIASFLSKYQDIIIEHQKVVKGNQKRLESLRELAGKENLEYPSVTLPPQPHTKEGVDAYNEVIARVRMWVNLNLWQKLKLSRDDAKPLLRLKGFPSFPLVERQANEVDWWDMVCNVKKLINEKKEDGKVFWQNLAGYKRQEALRPYLSSEEDRKKGKKFARYQLGDLLLHLEKKHGERDWGKVYDEAWERIDKKVEGLSKHIKLEEERRSEDAQSKAALTDWLRAKASFVIEGLKEADKDEFCRCELKLQKWYGDLRGKPFAIEAENSILDISGFSKQYNCAFIWQKDGVKKLNLYLIINYFKGGKLRFKKIKPEAFEANRFYTVINKKSGEIVPMEVNFNFDDPNLIILPLAFGKRQGREFIWNDLLSLETGSLKLANGRVIEKTLYNRRTRQDEPALFVALTFERREVLDSSNIKPMNLIGVDRGENIPAVIALTDPEGCPLSRFKDSLGNPTHILRIGESYKEKQRTIQAKKEVEQRRAGGYSRKYASKAKNLADDMVRNTARDLLYYAVTQDAMLIFENLSRGFGRQGKRTFMAERQYTRMEDWLTAKLAYEGLPSKVYLSKTLAQYTSKTCSNCGFTITSADYDRVLEKLKKTATGWMTTINGKELKVEGQITYYNRYKRQNVVKDLSVELDRLSEESVNNDISSWTKGRSGEALSLLKKRFSHRPVQEKFVCLNCGFETHADEQAALNIARSWLFLRSQEYKKYQTNKTTGNTDKRAFVETWQSFYRKKLKEVWKPAV

SEQ ID NO: 46803 - protein, 979 aa, synthetic construct
  REGION 1..979: note = engineered CasX variant
QEIKRINKIRRRLVKDSNTKKAGKTGPMKTLLVRVMTPDLRERLENLRKKPENIPQPISNTSRANLNKLLTDYTEMKKAILHVYWEEFQKDPVGLMSRVAQPASKKIDQNKLKPEMDEKGNLTTAGFACSQCGQPLFVYKLEQVSEKGKAYTNYFGRCNVAEHEKLILLAQLKPEKDSDEAVTYSLGKFGQRALDFYSIHVTKESTHPVKPLAQIAGNRYASTPVGKALSDACMGTIASFLSKYQDIIIEHQKVVKGNQKRLESLRELAGKENLEYPSVTLPPQPHTKEGVDAYNEVIARVRMWVNLNLWQKLKLSRDDAKPLLRLKGFPSFPLVERQANEVDWWDMVCNVKKLINEKKEDGKVFWQNLAGYKRQEALRPYLSSEEDRKKGKKFARYQLGDLLLHLEKKHGERDWGKVYDEAWERIDKKVEGLSKHIKLEEERRSEDAQSKAALTDWLRAKASFVIEGLKEADKDEFCRCELKLQKWYGDLRGKPFAIEAENSILDISGFSKQYNCAFIWQKDGVKKLNLYLIINYFKGGKLRFKKIKPEAFEANRFYTVINKKSGEIVPMEVNFNFDDPNLIILPLAFGKRQGREFIWNDLLSLETGSLKLANGRVIEKTLYNRRTRQDEPALFVALTFERREVLDSSNIKPMNLIGVDRGENIPAVIALTDPEGCPLSRFKDSLGNPTHILRIGESYKEKQRTIQAKKEVEQRRAGGYSRKYASKAKNLADDMVRNTARDLLYYAVTQDAMLIFENLSRGFGRQGKRTFMAERQYTRMEDWLTAKLAYEGLPSKVYLSKTLAQYTSKTCSNCGFTITSADYDRVLEKLKKTATGWMTTINGKELKVEGQITYYNRYKRQNVVKDLSVELDRLSEESVNNDISSWTKGRSGEALSLLKKRFSHRPVQEKFVCLNCGFETHADEQAALNIARSWLFLRSQEYKKYQTNKTTGNTDKRAFVETWQSFYRKKLKEVWKPAV

SEQ ID NO: 46804 - protein, 979 aa, synthetic construct
  REGION 1..979: note = engineered CasX variant
QEIKRINKIRRRLVKDSNTKKAGKTGPMKTLLVRVMTPDLRERLENLRKKPENIPQPISNTSRANLNKLLTDYTEMKKAILHVYWEEFQKDPVGLMSRVAQPASKKIDQNKLKPEMDEKGNLTTAGFACSQCGQPLFVYKLEQVSEKGKAYTNYFGRCNVAEHEKLILLAQLKPEKDSDEAVTYSLGKFGQRALDFYSIHVTKESTHPVKPLAQIAGNRYASAPVGKALSDACMGTIASFLSKYQDIIIEHQKVVKGNQKRLESLRELAGKENLEYPSVTLPPQPHTKEGVDAYNEVIARVRMWVNLNLWQKLKLSRDDAKPLLRLKGFPSFPLVERQANEVDWWDMVCNVKKLINEKKEDGKVFWQNLAGYKRQEALRPYLSSEEDRKKGKKFARYQLGDLLLHLEKKHGERDWGKVYDEAWERIDKKVEGLSKHIKLEEERRSEDAQSKAALTDWLRAKASFVIEGLKEADKDEFCRCELKLQKWYGDLRGKPFAIEAENSILDISGFSKQYNCAFIWQKDGVKKLNLYLIINYFKGGKLRFKKIKPEAFEANRFYTVINKKSGEIVPMEVNFNFDDPNLIILPLAFGKRQGREFIWNDLLSLETGSLKLANGRVIEKTLYNRRTRQDEPALFVALTFERREVLDSSNIKPMNLIGVDRGENIPAVIALTDPEGCPLSRFKDSLGNPTHILRIGESYKEKQRTIQAKKEVEQRRAGGYSRKYASKAKNLADDMVRNTARDLLYYAVTQDAMLIFENLSRGFGRQGKRTFMAERQYTRMEDWLTAKLAYEGLPSKVYLSKTLAQYTSKTCSNCGFTITSADYDRVLEKLKKTATGWMTTINGKELKVEGQITYYNRYKRQNVVKDLSVELDRLSEESVNNDISSWTKGRSGEALSLLKKRFSHRPVQEKFVCLNCGFETHADEQAALNIARSWLFLRSQEYKKYQTNKTTGNTDKRAFVETWQSFYRKKLKEVWKPAV

SEQ ID NO: 46805 - protein, 979 aa, synthetic construct
  REGION 1..979: note = engineered CasX variant
QEIKRINKIRRRLVKDSNTKKAGKTGPMKTLLVRVMTPDLRERLENLRKKPENIPQPISNTSRANLNKLLTDYTEMKKAILHVYWEEFQKDPVGLMSRVAQPASKKIDQNKLKPEMDEKGNLTTAGFACSQCGQPLFVYKLEQVSEKGKAYTNYFGRCNVAEHEKLILLAQLKPEKDSDEAVTYSLGKFGQRALDFYSIHVTKESTHPVKPLAQIAGNRYASVPVGKALSDACMGTIASFLSKYQDIIIEHQKVVKGNQKRLESLRELAGKENLEYPSVTLPPQPHTKEGVDAYNEVIARVRMWVNLNLWQKLKLSRDDAKPLLRLKGFPSFPLVERQANEVDWWDMVCNVKKLINEKKEDGKVFWQNLAGYKRQEALRPYLSSEEDRKKGKKFARYQLGDLLLHLEKKHGERDWGKVYDEAWERIDKKVEGLSKHIKLEEERRSEDAQSKAALTDWLRAKASFVIEGLKEADKDEFCRCELKLQKWYGDLRGKPFAIEAENSILDISGFSKQYNCAFIWQKDGVKKLNLYLIINYFKGGKLRFKKIKPEAFEANRFYTVINKKSGEIVPMEVNFNFDDPNLIILPLAFGKRQGREFIWNDLLSLETGSLKLANGRVIEKTLYNRRTRQDEPALFVALTFERREVLDSSNIKPMNLIGVDRGENIPAVIALTDPEGCPLSRFKDSLGNPTHILRIGESYKEKQRTIQAKKEVEQRRAGGYSRKYASKAKNLADDMVRNTARDLLYYAVTQDAMLIFENLSRGFGRQGKRTFMAERQYTRMEDWLTAKLAYEGLPSKVYLSKTLAQYTSKTCSNCGFTITSADYDRVLEKLKKTATGWMTTINGKELKVEGQITYYNRYKRQNVVKDLSVELDRLSEESVNNDISSWTKGRSGEALSLLKKRFSHRPVQEKFVCLNCGFETHADEQAALNIARSWLFLRSQEYKKYQTNKTTGNTDKRAFVETWQSFYRKKLKEVWKPAV

SEQ ID NO: 46806 - protein, 979 aa, synthetic construct
  REGION 1..979: note = engineered CasX variant
QEIKRINKIRRRLVKDSNTKKAGKTGPMKTLLVRVMTPDLRERLENLRKKPENIPQPISNTSRANLNKLLTDYTEMKKAILHVYWEEFQKDPVGLMSRVAQPASKKIDQNKLKPEMDEKGNLTTAGFACSQCGQPLFVYKLEQVSEKGKAYTNYFGRCNVAEHEKLIKLAQLKPEKDSDEAVTYSLGKFGQRALDFYSIHVTKESTHPVKPLAQIAGNRYASGPVGKALSDACMGTIASFLSKYQDIIIEHQKVVKGNQKRLESLRELAGKENLEYPSVTLPPQPHTKEGVDAYNEVIARVRMWVNLNLWQKLKLSRDDAKPLLRLKGFPSFPLVERQANEVDWWDMVCNVKKLINEKKEDGKVFWQNLAGYKRQEALRPYLSSEEDRKKGKKFARYQLGDLLLHLEKKHGERDWGKVYDEAWERIDKKVEGLSKHIKLEEERRSEDAQSKAALTDWLRAKASFVIEGLKEADKDEFCRCELKLQKWYGDLRGKPFAIEAENSILDISGFSKQYNCAFIWQKDGVKKLNLYLIINYFKGGKLRFKKIKPEAFEANRFYTVINKKSGEIVPMEVNFNFDDPNLIILPLAFGKRQGREFIWNDLLSLETGSLKLANGRVIEKTLYNRRTRQDEPALFVALTFERREVLDSSNIKPMNLIGVDRGENIPAVIALTDPEGCPLSRFKDSLGNPTHILRIGESYKEKQRTIQAKKEVEQRRAGGYSRKYASKAKNLADDMVRNTARDLLYYAVTQDAMLIFENLSRGFGRQGKRTFMAERQYTRMEDWLTAKLAYEGLPSKVYLSKTLAQYTSKTCSNCGFTITSADYDRVLEKLKKTATGWMTTINGKELKVEGQITYYNRYKRQNVVKDLSVELDRLSEESVNNDISSWTKGRSGEALSLLKKRFSHRPVQEKFVCLNCGFETHADEQAALNIARSWLFLRSQEYKKYQTNKTTGNTDKRAFVETWQSFYRKKLKEVWKPAV

SEQ ID NO: 46807 - protein, 978 aa, synthetic construct
  REGION 1..978: note = engineered CasX variant
QEIKRINKIRRRLVKDSNTKKAGKTGPMKTLLVRVMTPDLRERLENLRKKPENIPQPISNTSRANLNKLLTDYTEMKKAILHVYWEEFQKDPVGLMSRVAQPASKKIDQNKLKPEMDEKGNLTTAGFACSQCGQPLFVYKLEQVSEKGKAYTNYFGRCNVAEHEKLILLAQLKPEKDSDEAVTYSLGKFGQRALDFYSIHVTKESTHPVKPLAQIAGNRYASPVGKALSDACMGTIASFLSKYQDIIIEHQKVVKGNQKRLESLRELAGKENLEYPSVTLPPQPHTKEGVDAYNEVIARVRMWVNLNLWQKLKLSRDDAKPLLRLKGFPSFPLVERQANEVDWWDMVCNVKKLINEKKEDGKVFWQNLAGYKRQEALRPYLSSEEDRKKGKKFARYQLGDLLLHLEKKHGERDWGKVYDEAWERIDKKVEGLSKHIKLEEERRSEDAQSKAALTDWLRAKASFVIEGLKEADKDEFCRCELKLQKWYGDLRGKPFAIEAENSILDISGFSKQYNCAFIWQKDGVKKLNLYLIINYFKGGKLRFKKIKPEAFEANRFYTVINKKSGEIVPMEVNFNFDDPNLIILPLAFGKRQGREFIWNDLLSLETGSLKLANGRVIEKTLYNRRTRQDEPALFVALTFERREVLDSSNIKPMNLIGVDRGENIPAVIALTDPEGCPLSRFKDSLGNPTHILRIGESYKEKQRTIQAKKEVEQRRAGGYSRKYASKAKNLADDMVRNTARDLLYYAVTQDAMLIFENLSRGFGRQGKRTFMAERQYTRMEDWLTAKLAYEGLPSKVYLSKTLAQYTSKTCSNCGFTITSADYDRVLEKLKKTATGWMTTINGKELKVEGQITYYNRYKRQNVVKDLSVELDRLSEESVNNDISSWTKGRSGEALSLLKKRFSHRPVQEKFVCLNCGFETHADEQAALNIARSWLFLRSQEYKKYQTNKTTGNTDKRAFVETWQSFYRKKLKEVWKPAV

SEQ ID NO: 46808 - protein, 979 aa, synthetic construct
  REGION 1..979: note = engineered CasX variant
QEIKRINKIRRRLVKDSNTKKAGKTGPMKTLLVRVMTPDLRERLENLRKKPENIPQPISNTSRANLNKLLTDYTEMKKAILHVYWEEFQKDPVGLMSRVAQPASKKIDQNKLKPEMDEKGNLTTAGFACSQCGQPLFVYKLEQVSEKGKAYTNYFGRCNVAEHEKLILLAQLKPEKDSDEAVTYSLGKFGQRALDFYSIHVTKESTHPVKPLAQIAGNRYASYPVGKALSDACMGTIASFLSKYQDIIIEHQKVVKGNQKRLESLRELAGKENLEYPSVTLPPQPHTKEGVDAYNEVIARVRMWVNLNLWQKLKLSRDDAKPLLRLKGFPSFPLVERQANEVDWWDMVCNVKKLINEKKEDGKVFWQNLAGYKRQEALRPYLSSEEDRKKGKKFARYQLGDLLLHLEKKHGEYDWGKVYDEAWERIDKKVEGLSKHIKLEEERRSEDAQSKAALTDWLRAKASFVIEGLKEADKDEFCRCELKLQKWYGDLRGKPFAIEAENSILDISGFSKQYNCAFIWQKDGVKKLNLYLIINYFKGGKLRFKKIKPEAFEANRFYTVINKKSGEIVPMEVNFNFDDPNLIILPLAFGKRQGREFIWNDLLSLETGSLKLANGRVIEKTLYNRRTRQDEPALFVALTFERREVLDSSNIKPMNLIGVDRGENIPAVIALTDPEGCPLSRFKDSLGNPTHILRIGESYKEKQRTIQAKKEVEQRRAGGYSRKYASKAKNLADDMVRNTARDLLYYAVTQDAMLIFENLSRGFGRQGKRTFMAERQYTRMEDWLTAKLAYEGLPSKVYLSKTLAQYTSKTCSNCGFTITSADYDRVLEKLKKTATGWMTTINGKELKVEGQITYYNRYKRQNVVKDLSVELDRLSEESVNNDISSWTKGRSGEALSLLKKRFSHRPVQEKFVCLNCGFETHADEQAALNIARSWLFLRSQEYKKYQTNKTTGNTDKRAFVETWQSFYRKKLKEVWKPAV

SEQ ID NO: 46809 - protein, 979 aa, synthetic construct
  REGION 1..979: note = engineered CasX variant
QEIKRINKIRRRLVKDSNTKKAGKTGPMKTLLVRVMTPDLRERLENLRKKPENIPQPISNTSRANLNKLLTDYTEMKKAILHVYWEEFQKDPVGLMSRVAQPASKKIDQNKLKPEMDEKGNLTTAGFACSQCGQPLFVYKLEQVSEKGKAYTNYFGRCNVAEHEKLILLAQLKPEKDSDEAVTYSLGKFGQRALDFYSIHVTKESTHPVKPLAQIAGNRYASHPVGKALSDACMGTIASFLSKYQDIIIEHQKVVKGNQKRLESLRELAGKENLEYPSVTLPPQPHTKEGVDAYNEVIARVRMWVNLNLWQKLKLSRDDAKPLLRLKGFPSFPLVERQANEVDWWDMVCNVKKLINEKKEDGKVFWQNLAGYKRQEALRPYLSSEEDRKKGKKFARYQLGDLLLHLEKKHGEYDWGKVYDEAWERIDKKVEGLSKHIKLEEERRSEDAQSKAALTDWLRAKASFVIEGLKEADKDEFCRCELKLQKWYGDLRGKPFAIEAENSILDISGFSKQYNCAFIWQKDGVKKLNLYLIINYFKGGKLRFKKIKPEAFEANRFYTVINKKSGEIVPMEVNFNFDDPNLIILPLAFGKRQGREFIWNDLLSLETGSLKLANGRVIEKTLYNRRTRQDEPALFVALTFERREVLDSSNIKPMNLIGVDRGENIPAVIALTDPEGCPLSRFKDSLGNPTHILRIGESYKEKQRTIQAKKEVEQRRAGGYSRKYASKAKNLADDMVRNTARDLLYYAVTQDAMLIFENLSRGFGRQGKRTFMAERQYTRMEDWLTAKLAYEGLPSKVYLSKTLAQYTSKTCSNCGFTITSADYDRVLEKLKKTATGWMTTINGKELKVEGQITYYNRYKRQNVVKDLSVELDRLSEESVNNDISSWTKGRSGEALSLLKKRFSHRPVQEKFVCLNCGFETHADEQAALNIARSWLFLRSQEYKKYQTNKTTGNTDKRAFVETWQSFYRKKLKEVWKPAV

SEQ ID NO: 46810 - protein, 979 aa, synthetic construct
  REGION 1..979: note = engineered CasX variant
QEIKRINKIRRRLVKDSNTKKAGKTGPMKTLLVRVMTPDLRERLENLRKKPENIPQPISNTSRANLNKLLTDYTEMKKAILHVYWEEFQKDPVGLMSRVAQPASKKIDQNKLKPEMDEKGNLTTAGFACSQCGQPLFVYKLEQVSEKGKAYTNYFGRCNVAEHEKLILLAQLKPEKDSDEAVTYSLGKFGQRALDFYSIHVTKESTHPVKPLAQIAGNRYASSPVGKALSDACMGTIASFLSKYQDIIIEHQKVVKGNQKRLESLRELAGKENLEYPSVTLPPQPHTKEGVDAYNEVIARVRMWVNLNLWQKLKLSRDDAKPLLRLKGFPSFPLVERQANEVDWWDMVCNVKKLINEKKEDGKVFWQNLAGYKRQEALRPYLSSEEDRKKGKKFARYQLGDLLLHLEKKHGEYDWGKVYDEAWERIDKKVEGLSKHIKLEEERRSEDAQSKAALTDWLRAKASFVIEGLKEADKDEFCRCELKLQKWYGDLRGKPFAIEAENSILDISGFSKQYNCAFIWQKDGVKKLNLYLIINYFKGGKLRFKKIKPEAFEANRFYTVINKKSGEIVPMEVNFNFDDPNLIILPLAFGKRQGREFIWNDLLSLETGSLKLANGRVIEKTLYNRRTRQDEPALFVALTFERREVLDSSNIKPMNLIGVDRGENIPAVIALTDPEGCPLSRFKDSLGNPTHILRIGESYKEKQRTIQAKKEVEQRRAGGYSRKYASKAKNLADDMVRNTARDLLYYAVTQDAMLIFENLSRGFGRQGKRTFMAERQYTRMEDWLTAKLAYEGLPSKVYLSKTLAQYTSKTCSNCGFTITSADYDRVLEKLKKTATGWMTTINGKELKVEGQITYYNRYKRQNVVKDLSVELDRLSEESVNNDISSWTKGRSGEALSLLKKRFSHRPVQEKFVCLNCGFETHADEQAALNIARSWLFLRSQEYKKYQTNKTTGNTDKRAFVETWQSFYRKKLKEVWKPAV

SEQ ID NO: 46811 - protein, 979 aa, synthetic construct
  REGION 1..979: note = engineered CasX variant
QEIKRINKIRRRLVKDSNTKKAGKTGPMKTLLVRVMTPDLRERLENLRKKPENIPQPISNTSRANLNKLLTDYTEMKKAILHVYWEEFQKDPVGLMSRVAQPASKKIDQNKLKPEMDEKGNLTTAGFACSQCGQPLFVYKLEQVSEKGKAYTNYFGRCNVAEHEKLILLAQLKPEKDSDEAVTYSLGKFGQRALDFYSIHVTKESTHPVKPLAQIAGNRYASTPVGKALSDACMGTIASFLSKYQDIIIEHQKVVKGNQKRLESLRELAGKENLEYPSVTLPPQPHTKEGVDAYNEVIARVRMWVNLNLWQKLKLSRDDAKPLLRLKGFPSFPLVERQANEVDWWDMVCNVKKLINEKKEDGKVFWQNLAGYKRQEALRPYLSSEEDRKKGKKFARYQLGDLLLHLEKKHGEYDWGKVYDEAWERIDKKVEGLSKHIKLEEERRSEDAQSKAALTDWLRAKASFVIEGLKEADKDEFCRCELKLQKWYGDLRGKPFAIEAENSILDISGFSKQYNCAFIWQKDGVKKLNLYLIINYFKGGKLRFKKIKPEAFEANRFYTVINKKSGEIVPMEVNFNFDDPNLIILPLAFGKRQGREFIWNDLLSLETGSLKLANGRVIEKTLYNRRTRQDEPALFVALTFERREVLDSSNIKPMNLIGVDRGENIPAVIALTDPEGCPLSRFKDSLGNPTHILRIGESYKEKQRTIQAKKEVEQRRAGGYSRKYASKAKNLADDMVRNTARDLLYYAVTQDAMLIFENLSRGFGRQGKRTFMAERQYTRMEDWLTAKLAYEGLPSKVYLSKTLAQYTSKTCSNCGFTITSADYDRVLEKLKKTATGWMTTINGKELKVEGQITYYNRYKRQNVVKDLSVELDRLSEESVNNDISSWTKGRSGEALSLLKKRFSHRPVQEKFVCLNCGFETHADEQAALNIARSWLFLRSQEYKKYQTNKTTGNTDKRAFVETWQSFYRKKLKEVWKPAV

SEQ ID NO: 46812 - protein, 979 aa, synthetic construct
  REGION 1..979: note = engineered CasX variant
QEIKRINKIRRRLVKDSNTKKAGKTGPMKTLLVRVMTPDLRERLENLRKKPENIPQPISNTSRANLNKLLTDYTEMKKAILHVYWEEFQKDPVGLMSRVAQPASKKIDQNKLKPEMDEKGNLTTAGFACSQCGQPLFVYKLEQVSEKGKAYTNYFGRCNVAEHEKLILLAQLKPEKDSDEAVTYSLGKFGQRALDFYSIHVTKESTHPVKPLAQIAGNRYASAPVGKALSDACMGTIASFLSKYQDIIIEHQKVVKGNQKRLESLRELAGKENLEYPSVTLPPQPHTKEGVDAYNEVIARVRMWVNLNLWQKLKLSRDDAKPLLRLKGFPSFPLVERQANEVDWWDMVCNVKKLINEKKEDGKVFWQNLAGYKRQEALRPYLSSEEDRKKGKKFARYQLGDLLLHLEKKHGEYDWGKVYDEAWERIDKKVEGLSKHIKLEEERRSEDAQSKAALTDWLRAKASFVIEGLKEADKDEFCRCELKLQKWYGDLRGKPFAIEAENSILDISGFSKQYNCAFIWQKDGVKKLNLYLIINYFKGGKLRFKKIKPEAFEANRFYTVINKKSGEIVPMEVNFNFDDPNLIILPLAFGKRQGREFIWNDLLSLETGSLKLANGRVIEKTLYNRRTRQDEPALFVALTFERREVLDSSNIKPMNLIGVDRGENIPAVIALTDPEGCPLSRFKDSLGNPTHILRIGESYKEKQRTIQAKKEVEQRRAGGYSRKYASKAKNLADDMVRNTARDLLYYAVTQDAMLIFENLSRGFGRQGKRTFMAERQYTRMEDWLTAKLAYEGLPSKVYLSKTLAQYTSKTCSNCGFTITSADYDRVLEKLKKTATGWMTTINGKELKVEGQITYYNRYKRQNVVKDLSVELDRLSEESVNNDISSWTKGRSGEALSLLKKRFSHRPVQEKFVCLNCGFETHADEQAALNIARSWLFLRSQEYKKYQTNKTTGNTDKRAFVETWQSFYRKKLKEVWKPAV

SEQ ID NO: 46813 - protein, 979 aa, synthetic construct
  REGION 1..979: note = engineered CasX variant
QEIKRINKIRRRLVKDSNTKKAGKTGPMKTLLVRVMTPDLRERLENLRKKPENIPQPISNTSRANLNKLLTDYTEMKKAILHVYWEEFQKDPVGLMSRVAQPASKKIDQNKLKPEMDEKGNLTTAGFACSQCGQPLFVYKLEQVSEKGKAYTNYFGRCNVAEHEKLILLAQLKPEKDSDEAVTYSLGKFGQRALDFYSIHVTKESTHPVKPLAQIAGNRYASVPVGKALSDACMGTIASFLSKYQDIIIEHQKVVKGNQKRLESLRELAGKENLEYPSVTLPPQPHTKEGVDAYNEVIARVRMWVNLNLWQKLKLSRDDAKPLLRLKGFPSFPLVERQANEVDWWDMVCNVKKLINEKKEDGKVFWQNLAGYKRQEALRPYLSSEEDRKKGKKFARYQLGDLLLHLEKKHGEYDWGKVYDEAWERIDKKVEGLSKHIKLEEERRSEDAQSKAALTDWLRAKASFVIEGLKEADKDEFCRCELKLQKWYGDLRGKPFAIEAENSILDISGFSKQYNCAFIWQKDGVKKLNLYLIINYFKGGKLRFKKIKPEAFEANRFYTVINKKSGEIVPMEVNFNFDDPNLIILPLAFGKRQGREFIWNDLLSLETGSLKLANGRVIEKTLYNRRTRQDEPALFVALTFERREVLDSSNIKPMNLIGVDRGENIPAVIALTDPEGCPLSRFKDSLGNPTHILRIGESYKEKQRTIQAKKEVEQRRAGGYSRKYASKAKNLADDMVRNTARDLLYYAVTQDAMLIFENLSRGFGRQGKRTFMAERQYTRMEDWLTAKLAYEGLPSKVYLSKTLAQYTSKTCSNCGFTITSADYDRVLEKLKKTATGWMTTINGKELKVEGQITYYNRYKRQNVVKDLSVELDRLSEESVNNDISSWTKGRSGEALSLLKKRFSHRPVQEKFVCLNCGFETHADEQAALNIARSWLFLRSQEYKKYQTNKTTGNTDKRAFVETWQSFYRKKLKEVWKPAV

SEQ ID NO: 46814 - protein, 979 aa, synthetic construct
  REGION 1..979: note = engineered CasX variant
QEIKRINKIRRRLVKDSNTKKAGKTGPMKTLLVRVMTPDLRERLENLRKKPENIPQPISNTSRANLNKLLTDYTEMKKAILHVYWEEFQKDPVGLMSRVAQPASKKIDQNKLKPEMDEKGNLTTAGFACSQCGQPLFVYKLEQVSEKGKAYTNYFGRCNVAEHEKLIKLAQLKPEKDSDEAVTYSLGKFGQRALDFYSIHVTKESTHPVKPLAQIAGNRYASGPVGKALSDACMGTIASFLSKYQDIIIEHQKVVKGNQKRLESLRELAGKENLEYPSVTLPPQPHTKEGVDAYNEVIARVRMWVNLNLWQKLKLSRDDAKPLLRLKGFPSFPLVERQANEVDWWDMVCNVKKLINEKKEDGKVFWQNLAGYKRQEALRPYLSSEEDRKKGKKFARYQLGDLLLHLEKKHGEYDWGKVYDEAWERIDKKVEGLSKHIKLEEERRSEDAQSKAALTDWLRAKASFVIEGLKEADKDEFCRCELKLQKWYGDLRGKPFAIEAENSILDISGFSKQYNCAFIWQKDGVKKLNLYLIINYFKGGKLRFKKIKPEAFEANRFYTVINKKSGEIVPMEVNFNFDDPNLIILPLAFGKRQGREFIWNDLLSLETGSLKLANGRVIEKTLYNRRTRQDEPALFVALTFERREVLDSSNIKPMNLIGVDRGENIPAVIALTDPEGCPLSRFKDSLGNPTHILRIGESYKEKQRTIQAKKEVEQRRAGGYSRKYASKAKNLADDMVRNTARDLLYYAVTQDAMLIFENLSRGFGRQGKRTFMAERQYTRMEDWLTAKLAYEGLPSKVYLSKTLAQYTSKTCSNCGFTITSADYDRVLEKLKKTATGWMTTINGKELKVEGQITYYNRYKRQNVVKDLSVELDRLSEESVNNDISSWTKGRSGEALSLLKKRFSHRPVQEKFVCLNCGFETHADEQAALNIARSWLFLRSQEYKKYQTNKTTGNTDKRAFVETWQSFYRKKLKEVWKPAV

SEQ ID NO: 46815 - protein, 978 aa, synthetic construct
  REGION 1..978: note = engineered CasX variant
QEIKRINKIRRRLVKDSNTKKAGKTGPMKTLLVRVMTPDLRERLENLRKKPENIPQPISNTSRANLNKLLTDYTEMKKAILHVYWEEFQKDPVGLMSRVAQPASKKIDQNKLKPEMDEKGNLTTAGFACSQCGQPLFVYKLEQVSEKGKAYTNYFGRCNVAEHEKLILLAQLKPEKDSDEAVTYSLGKFGQRALDFYSIHVTKESTHPVKPLAQIAGNRYASPVGKALSDACMGTIASFLSKYQDIIIEHQKVVKGNQKRLESLRELAGKENLEYPSVTLPPQPHTKEGVDAYNEVIARVRMWVNLNLWQKLKLSRDDAKPLLRLKGFPSFPLVERQANEVDWWDMVCNVKKLINEKKEDGKVFWQNLAGYKRQEALRPYLSSEEDRKKGKKFARYQLGDLLLHLEKKHGEYDWGKVYDEAWERIDKKVEGLSKHIKLEEERRSEDAQSKAALTDWLRAKASFVIEGLKEADKDEFCRCELKLQKWYGDLRGKPFAIEAENSILDISGFSKQYNCAFIWQKDGVKKLNLYLIINYFKGGKLRFKKIKPEAFEANRFYTVINKKSGEIVPMEVNFNFDDPNLIILPLAFGKRQGREFIWNDLLSLETGSLKLANGRVIEKTLYNRRTRQDEPALFVALTFERREVLDSSNIKPMNLIGVDRGENIPAVIALTDPEGCPLSRFKDSLGNPTHILRIGESYKEKQRTIQAKKEVEQRRAGGYSRKYASKAKNLADDMVRNTARDLLYYAVTQDAMLIFENLSRGFGRQGKRTFMAERQYTRMEDWLTAKLAYEGLPSKVYLSKTLAQYTSKTCSNCGFTITSADYDRVLEKLKKTATGWMTTINGKELKVEGQITYYNRYKRQNVVKDLSVELDRLSEESVNNDISSWTKGRSGEALSLLKKRFSHRPVQEKFVCLNCGFETHADEQAALNIARSWLFLRSQEYKKYQTNKTTGNTDKRAFVETWQSFYRKKLKEVWKPAV

SEQ ID NO: 46816 - protein, 978 aa, synthetic construct
  REGION 1..978: note = engineered CasX variant
QEIKRINKIRRRLVKDSNTKKAGKTGPMKTLLVRVMTPDLRERLENLRKKPENIPQPISNTSRANLNKLLTDYTEMKKAILHVYWEEFQKDPVGLMSRVAQPASKKIDQNKLKPEMDEKGNLTTAGFACSQCGQPLFVYKLEQVSEKGKAYTNYFGRCNVAEHEKLILLAQLKPEKDSDEAVTYSLGKFGQRALDFYSIHVTKESTHPVKPLAQIAGNRYASYPVGKALSDACMGTIASFLSKYQDIIIEHQKVVKGNQKRLESLRELAGKENLEYPSVTLPPQPHTKEGVDAYNEVIARVRMWVNLNLWQKLKLSRDDAKPLLRLKGFPSFPLVERQANEVDWWDMVCNVKKLINEKKEDGKVFWQNLAGYKRQEALRPYLSSEEDRKKGKKFARYQLGDLLLHLEKKHGEDWGDVYDEAWERIDKKVEGLSKHIKLEEERRSEDAQSKAALTDWLRAKASFVIEGLKEADKDEFCRCELKLQKWYGDLRGKPFAIEAENSILDISGFSKQYNCAFIWQKDGVKKLNLYLIINYFKGGKLRFKKIKPEAFEANRFYTVINKKSGEIVPMEVNFNFDDPNLIILPLAFGKRQGREFIWNDLLSLETGSLKLANGRVIEKTLYNRRTRQDEPALFVALTFERREVLDSSNIKPMNLIGVDRGENIPAVIALTDPEGCPLSRFKDSLGNPTHILRIGESYKEKQRTIQAKKEVEQRRAGGYSRKYASKAKNLADDMVRNTARDLLYYAVTQDAMLIFENLSRGFGRQGKRTFMAERQYTRMEDWLTAKLAYEGLPSKVYLSKTLAQYTSKTCSNCGFTITSADYDRVLEKLKKTATGWMTTINGKELKVEGQITYYNRYKRQNVVKDLSVELDRLSEESVNNDISSWTKGRSGEALSLLKKRFSHRPVQEKFVCLNCGFETHADEQAALNIARSWLFLRSQEYKKYQTNKTTGNTDKRAFVETWQSFYRKKLKEVWKPAV

SEQ ID NO: 46817 - protein, 978 aa, synthetic construct
  REGION 1..978: note = engineered CasX variant
QEIKRINKIRRRLVKDSNTKKAGKTGPMKTLLVRVMTPDLRERLENLRKKPENIPQPISNTSRANLNKLLTDYTEMKKAILHVYWEEFQKDPVGLMSRVAQPASKKIDQNKLKPEMDEKGNLTTAGFACSQCGQPLFVYKLEQVSEKGKAYTNYFGRCNVAEHEKLILLAQLKPEKDSDEAVTYSLGKFGQRALDFYSIHVTKESTHPVKPLAQIAGNRYASHPVGKALSDACMGTIASFLSKYQDIIIEHQKVVKGNQKRLESLRELAGKENLEYPSVTLPPQPHTKEGVDAYNEVIARVRMWVNLNLWQKLKLSRDDAKPLLRLKGFPSFPLVERQANEVDWWDMVCNVKKLINEKKEDGKVFWQNLAGYKRQEALRPYLSSEEDRKKGKKFARYQLGDLLLHLEKKHGEDWGDVYDEAWERIDKKVEGLSKHIKLEEERRSEDAQSKAALTDWLRAKASFVIEGLKEADKDEFCRCELKLQKWYGDLRGKPFAIEAENSILDISGFSKQYNCAFIWQKDGVKKLNLYLIINYFKGGKLRFKKIKPEAFEANRFYTVINKKSGEIVPMEVNFNFDDPNLIILPLAFGKRQGREFIWNDLLSLETGSLKLANGRVIEKTLYNRRTRQDEPALFVALTFERREVLDSSNIKPMNLIGVDRGENIPAVIALTDPEGCPLSRFKDSLGNPTHILRIGESYKEKQRTIQAKKEVEQRRAGGYSRKYASKAKNLADDMVRNTARDLLYYAVTQDAMLIFENLSRGFGRQGKRTFMAERQYTRMEDWLTAKLAYEGLPSKVYLSKTLAQYTSKTCSNCGFTITSADYDRVLEKLKKTATGWMTTINGKELKVEGQITYYNRYKRQNVVKDLSVELDRLSEESVNNDISSWTKGRSGEALSLLKKRFSHRPVQEKFVCLNCGFETHADEQAALNIARSWLFLRSQEYKKYQTNKTTGNTDKRAFVETWQSFYRKKLKEVWKPAV

SEQ ID NO: 46818 - protein, 978 aa, synthetic construct
  REGION 1..978: note = engineered CasX variant
QEIKRINKIRRRLVKDSNTKKAGKTGPMKTLLVRVMTPDLRERLENLRKKPENIPQPISNTSRANLNKLLTDYTEMKKAILHVYWEEFQKDPVGLMSRVAQPASKKIDQNKLKPEMDEKGNLTTAGFACSQCGQPLFVYKLEQVSEKGKAYTNYFGRCNVAEHEKLILLAQLKPEKDSDEAVTYSLGKFGQRALDFYSIHVTKESTHPVKPLAQIAGNRYASSPVGKALSDACMGTIASFLSKYQDIIIEHQKVVKGNQKRLESLRELAGKENLEYPSVTLPPQPHTKEGVDAYNEVIARVRMWVNLNLWQKLKLSRDDAKPLLRLKGFPSFPLVERQANEVDWWDMVCNVKKLINEKKEDGKVFWQNLAGYKRQEALRPYLSSEEDRKKGKKFARYQLGDLLLHLEKKHGEDWGDVYDEAWERIDKKVEGLSKHIKLEEERRSEDAQSKAALTDWLRAKASFVIEGLKEADKDEFCRCELKLQKWYGDLRGKPFAIEAENSILDISGFSKQYNCAFIWQKDGVKKLNLYLIINYFKGGKLRFKKIKPEAFEANRFYTVINKKSGEIVPMEVNFNFDDPNLIILPLAFGKRQGREFIWNDLLSLETGSLKLANGRVIEKTLYNRRTRQDEPALFVALTFERREVLDSSNIKPMNLIGVDRGENIPAVIALTDPEGCPLSRFKDSLGNPTHILRIGESYKEKQRTIQAKKEVEQRRAGGYSRKYASKAKNLADDMVRNTARDLLYYAVTQDAMLIFENLSRGFGRQGKRTFMAERQYTRMEDWLTAKLAYEGLPSKVYLSKTLAQYTSKTCSNCGFTITSADYDRVLEKLKKTATGWMTTINGKELKVEGQITYYNRYKRQNVVKDLSVELDRLSEESVNNDISSWTKGRSGEALSLLKKRFSHRPVQEKFVCLNCGFETHADEQAALNIARSWLFLRSQEYKKYQTNKTTGNTDKRAFVETWQSFYRKKLKEVWKPAV

SEQ ID NO: 46819 - protein, 978 aa, synthetic construct
  REGION 1..978: note = engineered CasX variant
QEIKRINKIRRRLVKDSNTKKAGKTGPMKTLLVRVMTPDLRERLENLRKKPENIPQPISNTSRANLNKLLTDYTEMKKAILHVYWEEFQKDPVGLMSRVAQPASKKIDQNKLKPEMDEKGNLTTAGFACSQCGQPLFVYKLEQVSEKGKAYTNYFGRCNVAEHEKLILLAQLKPEKDSDEAVTYSLGKFGQRALDFYSIHVTKESTHPVKPLAQIAGNRYASTPVGKALSDACMGTIASFLSKYQDIIIEHQKVVKGNQKRLESLRELAGKENLEYPSVTLPPQPHTKEGVDAYNEVIARVRMWVNLNLWQKLKLSRDDAKPLLRLKGFPSFPLVERQANEVDWWDMVCNVKKLINEKKEDGKVFWQNLAGYKRQEALRPYLSSEEDRKKGKKFARYQLGDLLLHLEKKHGEDWGDVYDEAWERIDKKVEGLSKHIKLEEERRSEDAQSKAALTDWLRAKASFVIEGLKEADKDEFCRCELKLQKWYGDLRGKPFAIEAENSILDISGFSKQYNCAFIWQKDGVKKLNLYLIINYFKGGKLRFKKIKPEAFEANRFYTVINKKSGEIVPMEVNFNFDDPNLIILPLAFGKRQGREFIWNDLLSLETGSLKLANGRVIEKTLYNRRTRQDEPALFVALTFERREVLDSSNIKPMNLIGVDRGENIPAVIALTDPEGCPLSRFKDSLGNPTHILRIGESYKEKQRTIQAKKEVEQRRAGGYSRKYASKAKNLADDMVRNTARDLLYYAVTQDAMLIFENLSRGFGRQGKRTFMAERQYTRMEDWLTAKLAYEGLPSKVYLSKTLAQYTSKTCSNCGFTITSADYDRVLEKLKKTATGWMTTINGKELKVEGQITYYNRYKRQNVVKDLSVELDRLSEESVNNDISSWTKGRSGEALSLLKKRFSHRPVQEKFVCLNCGFETHADEQAALNIARSWLFLRSQEYKKYQTNKTTGNTDKRAFVETWQSFYRKKLKEVWKPAV

SEQ ID NO: 46820 - protein, 978 aa, synthetic construct
  REGION 1..978: note = engineered CasX variant
QEIKRINKIRRRLVKDSNTKKAGKTGPMKTLLVRVMTPDLRERLENLRKKPENIPQPISNTSRANLNKLLTDYTEMKKAILHVYWEEFQKDPVGLMSRVAQPASKKIDQNKLKPEMDEKGNLTTAGFACSQCGQPLFVYKLEQVSEKGKAYTNYFGRCNVAEHEKLILLAQLKPEKDSDEAVTYSLGKFGQRALDFYSIHVTKESTHPVKPLAQIAGNRYASAPVGKALSDACMGTIASFLSKYQDIIIEHQKVVKGNQKRLESLRELAGKENLEYPSVTLPPQPHTKEGVDAYNEVIARVRMWVNLNLWQKLKLSRDDAKPLLRLKGFPSFPLVERQANEVDWWDMVCNVKKLINEKKEDGKVFWQNLAGYKRQEALRPYLSSEEDRKKGKKFARYQLGDLLLHLEKKHGEDWGDVYDEAWERIDKKVEGLSKHIKLEEERRSEDAQSKAALTDWLRAKASFVIEGLKEADKDEFCRCELKLQKWYGDLRGKPFAIEAENSILDISGFSKQYNCAFIWQKDGVKKLNLYLIINYFKGGKLRFKKIKPEAFEANRFYTVINKKSGEIVPMEVNFNFDDPNLIILPLAFGKRQGREFIWNDLLSLETGSLKLANGRVIEKTLYNRRTRQDEPALFVALTFERREVLDSSNIKPMNLIGVDRGENIPAVIALTDPEGCPLSRFKDSLGNPTHILRIGESYKEKQRTIQAKKEVEQRRAGGYSRKYASKAKNLADDMVRNTARDLLYYAVTQDAMLIFENLSRGFGRQGKRTFMAERQYTRMEDWLTAKLAYEGLPSKVYLSKTLAQYTSKTCSNCGFTITSADYDRVLEKLKKTATGWMTTINGKELKVEGQITYYNRYKRQNVVKDLSVELDRLSEESVNNDISSWTKGRSGEALSLLKKRFSHRPVQEKFVCLNCGFETHADEQAALNIARSWLFLRSQEYKKYQTNKTTGNTDKRAFVETWQSFYRKKLKEVWKPAV

SEQ ID NO: 46821 - protein, 978 aa, synthetic construct
  REGION 1..978: note = engineered CasX variant
QEIKRINKIRRRLVKDSNTKKAGKTGPMKTLLVRVMTPDLRERLENLRKKPENIPQPISNTSRANLNKLLTDYTEMKKAILHVYWEEFQKDPVGLMSRVAQPASKKIDQNKLKPEMDEKGNLTTAGFACSQCGQPLFVYKLEQVSEKGKAYTNYFGRCNVAEHEKLILLAQLKPEKDSDEAVTYSLGKFGQRALDFYSIHVTKESTHPVKPLAQIAGNRYASVPVGKALSDACMGTIASFLSKYQDIIIEHQKVVKGNQKRLESLRELAGKENLEYPSVTLPPQPHTKEGVDAYNEVIARVRMWVNLNLWQKLKLSRDDAKPLLRLKGFPSFPLVERQANEVDWWDMVCNVKKLINEKKEDGKVFWQNLAGYKRQEALRPYLSSEEDRKKGKKFARYQLGDLLLHLEKKHGEDWGDVYDEAWERIDKKVEGLSKHIKLEEERRSEDAQSKAALTDWLRAKASFVIEGLKEADKDEFCRCELKLQKWYGDLRGKPFAIEAENSILDISGFSKQYNCAFIWQKDGVKKLNLYLIINYFKGGKLRFKKIKPEAFEANRFYTVINKKSGEIVPMEVNFNFDDPNLIILPLAFGKRQGREFIWNDLLSLETGSLKLANGRVIEKTLYNRRTRQDEPALFVALTFERREVLDSSNIKPMNLIGVDRGENIPAVIALTDPEGCPLSRFKDSLGNPTHILRIGESYKEKQRTIQAKKEVEQRRAGGYSRKYASKAKNLADDMVRNTARDLLYYAVTQDAMLIFENLSRGFGRQGKRTFMAERQYTRMEDWLTAKLAYEGLPSKVYLSKTLAQYTSKTCSNCGFTITSADYDRVLEKLKKTATGWMTTINGKELKVEGQITYYNRYKRQNVVKDLSVELDRLSEESVNNDISSWTKGRSGEALSLLKKRFSHRPVQEKFVCLNCGFETHADEQAALNIARSWLFLRSQEYKKYQTNKTTGNTDKRAFVETWQSFYRKKLKEVWKPAV

SEQ ID NO: 46822 - protein, 978 aa, synthetic construct
  REGION 1..978: note = engineered CasX variant
QEIKRINKIRRRLVKDSNTKKAGKTGPMKTLLVRVMTPDLRERLENLRKKPENIPQPISNTSRANLNKLLTDYTEMKKAILHVYWEEFQKDPVGLMSRVAQPASKKIDQNKLKPEMDEKGNLTTAGFACSQCGQPLFVYKLEQVSEKGKAYTNYFGRCNVAEHEKLIKLAQLKPEKDSDEAVTYSLGKFGQRALDFYSIHVTKESTHPVKPLAQIAGNRYASGPVGKALSDACMGTIASFLSKYQDIIIEHQKVVKGNQKRLESLRELAGKENLEYPSVTLPPQPHTKEGVDAYNEVIARVRMWVNLNLWQKLKLSRDDAKPLLRLKGFPSFPLVERQANEVDWWDMVCNVKKLINEKKEDGKVFWQNLAGYKRQEALRPYLSSEEDRKKGKKFARYQLGDLLLHLEKKHGEDWGDVYDEAWERIDKKVEGLSKHIKLEEERRSEDAQSKAALTDWLRAKASFVIEGLKEADKDEFCRCELKLQKWYGDLRGKPFAIEAENSILDISGFSKQYNCAFIWQKDGVKKLNLYLIINYFKGGKLRFKKIKPEAFEANRFYTVINKKSGEIVPMEVNFNFDDPNLIILPLAFGKRQGREFIWNDLLSLETGSLKLANGRVIEKTLYNRRTRQDEPALFVALTFERREVLDSSNIKPMNLIGVDRGENIPAVIALTDPEGCPLSRFKDSLGNPTHILRIGESYKEKQRTIQAKKEVEQRRAGGYSRKYASKAKNLADDMVRNTARDLLYYAVTQDAMLIFENLSRGFGRQGKRTFMAERQYTRMEDWLTAKLAYEGLPSKVYLSKTLAQYTSKTCSNCGFTITSADYDRVLEKLKKTATGWMTTINGKELKVEGQITYYNRYKRQNVVKDLSVELDRLSEESVNNDISSWTKGRSGEALSLLKKRFSHRPVQEKFVCLNCGFETHADEQAALNIARSWLFLRSQEYKKYQTNKTTGNTDKRAFVETWQSFYRKKLKEVWKPAV

SEQ ID NO: 46823 - protein, 977 aa, synthetic construct
  REGION 1..977: note = engineered CasX variant
QEIKRINKIRRRLVKDSNTKKAGKTGPMKTLLVRVMTPDLRERLENLRKKPENIPQPISNTSRANLNKLLTDYTEMKKAILHVYWEEFQKDPVGLMSRVAQPASKKIDQNKLKPEMDEKGNLTTAGFACSQCGQPLFVYKLEQVSEKGKAYTNYFGRCNVAEHEKLILLAQLKPEKDSDEAVTYSLGKFGQRALDFYSIHVTKESTHPVKPLAQIAGNRYASPVGKALSDACMGTIASFLSKYQDIIIEHQKVVKGNQKRLESLRELAGKENLEYPSVTLPPQPHTKEGVDAYNEVIARVRMWVNLNLWQKLKLSRDDAKPLLRLKGFPSFPLVERQANEVDWWDMVCNVKKLINEKKEDGKVFWQNLAGYKRQEALRPYLSSEEDRKKGKKFARYQLGDLLLHLEKKHGEDWGDVYDEAWERIDKKVEGLSKHIKLEEERRSEDAQSKAALTDWLRAKASFVIEGLKEADKDEFCRCELKLQKWYGDLRGKPFAIEAENSILDISGFSKQYNCAFIWQKDGVKKLNLYLIINYFKGGKLRFKKIKPEAFEANRFYTVINKKSGEIVPMEVNFNFDDPNLIILPLAFGKRQGREFIWNDLLSLETGSLKLANGRVIEKTLYNRRTRQDEPALFVALTFERREVLDSSNIKPMNLIGVDRGENIPAVIALTDPEGCPLSRFKDSLGNPTHILRIGESYKEKQRTIQAKKEVEQRRAGGYSRKYASKAKNLADDMVRNTARDLLYYAVTQDAMLIFENLSRGFGRQGKRTFMAERQYTRMEDWLTAKLAYEGLPSKVYLSKTLAQYTSKTCSNCGFTITSADYDRVLEKLKKTATGWMTTINGKELKVEGQITYYNRYKRQNVVKDLSVELDRLSEESVNNDISSWTKGRSGEALSLLKKRFSHRPVQEKFVCLNCGFETHADEQAALNIARSWLFLRSQEYKKYQTNKTTGNTDKRAFVETWQSFYRKKLKEVWKPAV

SEQ ID NO: 46824 - protein, 978 aa, synthetic construct
  REGION 1..978: note = engineered CasX variant
QEIKRINKIRRRLVKDSNTKKAGKTGPMKTLLVRVMTPDLRERLENLRKKPENIPQPISNTSRANLNKLLTDYTEMKKAILHVYWEEFQKDPVGLMSRVAQPASKKIDQNKLKPEMDEKGNLTTAGFACSQCGQPLFVYKLEQVSEKGKAYTNYFGRCNVAEHEKLILLAQLKPEKDSDEAVTYSLGKFGQRALDFYSIHVTKESTHPVKPLAQIAGNRYASYPVGKALSDACMGTIASFLSKYQDIIIEHQKVVKGNQKRLESLRELAGKENLEYPSVTLPPQPHTKEGVDAYNEVIARVRMWVNLNLWQKLKLSRDDAKPLLRLKGFPSFPLVERQANEVDWWDMVCNVKKLINEKKEDGKVFWQNLAGYKRQEALRPYLSSEEDRKKGKKFARYQLGDLLLHLEKKHGEDWGKVYGEAWERIDKKVEGLSKHIKLEEERRSEDAQSKAALTDWLRAKASFVIEGLKEADKDEFCRCELKLQKWYGDLRGKPFAIEAENSILDISGFSKQYNCAFIWQKDGVKKLNLYLIINYFKGGKLRFKKIKPEAFEANRFYTVINKKSGEIVPMEVNFNFDDPNLIILPLAFGKRQGREFIWNDLLSLETGSLKLANGRVIEKTLYNRRTRQDEPALFVALTFERREVLDSSNIKPMNLIGVDRGENIPAVIALTDPEGCPLSRFKDSLGNPTHILRIGESYKEKQRTIQAKKEVEQRRAGGYSRKYASKAKNLADDMVRNTARDLLYYAVTQDAMLIFENLSRGFGRQGKRTFMAERQYTRMEDWLTAKLAYEGLPSKVYLSKTLAQYTSKTCSNCGFTITSADYDRVLEKLKKTATGWMTTINGKELKVEGQITYYNRYKRQNVVKDLSVELDRLSEESVNNDISSWTKGRSGEALSLLKKRFSHRPVQEKFVCLNCGFETHADEQAALNIARSWLFLRSQEYKKYQTNKTTGNTDKRAFVETWQSFYRKKLKEVWKPAV

SEQ ID NO: 46825 - protein, 978 aa, synthetic construct
  REGION 1..978: note = engineered CasX variant
QEIKRINKIRRRLVKDSNTKKAGKTGPMKTLLVRVMTPDLRERLENLRKKPENIPQPISNTSRANLNKLLTDYTEMKKAILHVYWEEFQKDPVGLMSRVAQPASKKIDQNKLKPEMDEKGNLTTAGFACSQCGQPLFVYKLEQVSEKGKAYTNYFGRCNVAEHEKLILLAQLKPEKDSDEAVTYSLGKFGQRALDFYSIHVTKESTHPVKPLAQIAGNRYASHPVGKALSDACMGTIASFLSKYQDIIIEHQKVVKGNQKRLESLRELAGKENLEYPSVTLPPQPHTKEGVDAYNEVIARVRMWVNLNLWQKLKLSRDDAKPLLRLKGFPSFPLVERQANEVDWWDMVCNVKKLINEKKEDGKVFWQNLAGYKRQEALRPYLSSEEDRKKGKKFARYQLGDLLLHLEKKHGEDWGKVYGEAWERIDKKVEGLSKHIKLEEERRSEDAQSKAALTDWLRAKASFVIEGLKEADKDEFCRCELKLQKWYGDLRGKPFAIEAENSILDISGFSKQYNCAFIWQKDGVKKLNLYLIINYFKGGKLRFKKIKPEAFEANRFYTVINKKSGEIVPMEVNFNFDDPNLIILPLAFGKRQGREFIWNDLLSLETGSLKLANGRVIEKTLYNRRTRQDEPALFVALTFERREVLDSSNIKPMNLIGVDRGENIPAVIALTDPEGCPLSRFKDSLGNPTHILRIGESYKEKQRTIQAKKEVEQRRAGGYSRKYASKAKNLADDMVRNTARDLLYYAVTQDAMLIFENLSRGFGRQGKRTFMAERQYTRMEDWLTAKLAYEGLPSKVYLSKTLAQYTSKTCSNCGFTITSADYDRVLEKLKKTATGWMTTINGKELKVEGQITYYNRYKRQNVVKDLSVELDRLSEESVNNDISSWTKGRSGEALSLLKKRFSHRPVQEKFVCLNCGFETHADEQAALNIARSWLFLRSQEYKKYQTNKTTGNTDKRAFVETWQSFYRKKLKEVWKPAV

SEQ ID NO: 46826 - protein, 978 aa, synthetic construct
  REGION 1..978: note = engineered CasX variant
QEIKRINKIRRRLVKDSNTKKAGKTGPMKTLLVRVMTPDLRERLENLRKKPENIPQPISNTSRANLNKLLTDYTEMKKAILHVYWEEFQKDPVGLMSRVAQPASKKIDQNKLKPEMDEKGNLTTAGFACSQCGQPLFVYKLEQVSEKGKAYTNYFGRCNVAEHEKLILLAQLKPEKDSDEAVTYSLGKFGQRALDFYSIHVTKESTHPVKPLAQIAGNRYASSPVGKALSDACMGTIASFLSKYQDIIIEHQKVVKGNQKRLESLRELAGKENLEYPSVTLPPQPHTKEGVDAYNEVIARVRMWVNLNLWQKLKLSRDDAKPLLRLKGFPSFPLVERQANEVDWWDMVCNVKKLINEKKEDGKVFWQNLAGYKRQEALRPYLSSEEDRKKGKKFARYQLGDLLLHLEKKHGEDWGKVYGEAWERIDKKVEGLSKHIKLEEERRSEDAQSKAALTDWLRAKASFVIEGLKEADKDEFCRCELKLQKWYGDLRGKPFAIEAENSILDISGFSKQYNCAFIWQKDGVKKLNLYLIINYFKGGKLRFKKIKPEAFEANRFYTVINKKSGEIVPMEVNFNFDDPNLIILPLAFGKRQGREFIWNDLLSLETGSLKLANGRVIEKTLYNRRTRQDEPALFVALTFERREVLDSSNIKPMNLIGVDRGENIPAVIALTDPEGCPLSRFKDSLGNPTHILRIGESYKEKQRTIQAKKEVEQRRAGGYSRKYASKAKNLADDMVRNTARDLLYYAVTQDAMLIFENLSRGFGRQGKRTFMAERQYTRMEDWLTAKLAYEGLPSKVYLSKTLAQYTSKTCSNCGFTITSADYDRVLEKLKKTATGWMTTINGKELKVEGQITYYNRYKRQNVVKDLSVELDRLSEESVNNDISSWTKGRSGEALSLLKKRFSHRPVQEKFVCLNCGFETHADEQAALNIARSWLFLRSQEYKKYQTNKTTGNTDKRAFVETWQSFYRKKLKEVWKPAV

SEQ ID NO: 46827 - protein, 978 aa, synthetic construct
  REGION 1..978: note = engineered CasX variant
QEIKRINKIRRRLVKDSNTKKAGKTGPMKTLLVRVMTPDLRERLENLRKKPENIPQPISNTSRANLNKLLTDYTEMKKAILHVYWEEFQKDPVGLMSRVAQPASKKIDQNKLKPEMDEKGNLTTAGFACSQCGQPLFVYKLEQVSEKGKAYTNYFGRCNVAEHEKLILLAQLKPEKDSDEAVTYSLGKFGQRALDFYSIHVTKESTHPVKPLAQIAGNRYASTPVGKALSDACMGTIASFLSKYQDIIIEHQKVVKGNQKRLESLRELAGKENLEYPSVTLPPQPHTKEGVDAYNEVIARVRMWVNLNLWQKLKLSRDDAKPLLRLKGFPSFPLVERQANEVDWWDMVCNVKKLINEKKEDGKVFWQNLAGYKRQEALRPYLSSEEDRKKGKKFARYQLGDLLLHLEKKHGEDWGKVYGEAWERIDKKVEGLSKHIKLEEERRSEDAQSKAALTDWLRAKASFVIEGLKEADKDEFCRCELKLQKWYGDLRGKPFAIEAENSILDISGFSKQYNCAFIWQKDGVKKLNLYLIINYFKGGKLRFKKIKPEAFEANRFYTVINKKSGEIVPMEVNFNFDDPNLIILPLAFGKRQGREFIWNDLLSLETGSLKLANGRVIEKTLYNRRTRQDEPALFVALTFERREVLDSSNIKPMNLIGVDRGENIPAVIALTDPEGCPLSRFKDSLGNPTHILRIGESYKEKQRTIQAKKEVEQRRAGGYSRKYASKAKNLADDMVRNTARDLLYYAVTQDAMLIFENLSRGFGRQGKRTFMAERQYTRMEDWLTAKLAYEGLPSKVYLSKTLAQYTSKTCSNCGFTITSADYDRVLEKLKKTATGWMTTINGKELKVEGQITYYNRYKRQNVVKDLSVELDRLSEESVNNDISSWTKGRSGEALSLLKKRFSHRPVQEKFVCLNCGFETHADEQAALNIARSWLFLRSQEYKKYQTNKTTGNTDKRAFVETWQSFYRKKLKEVWKPAV

SEQ ID NO: 46828 - protein, 978 aa, synthetic construct
  REGION 1..978: note = engineered CasX variant
QEIKRINKIRRRLVKDSNTKKAGKTGPMKTLLVRVMTPDLRERLENLRKKPENIPQPISNTSRANLNKLLTDYTEMKKAILHVYWEEFQKDPVGLMSRVAQPASKKIDQNKLKPEMDEKGNLTTAGFACSQCGQPLFVYKLEQVSEKGKAYTNYFGRCNVAEHEKLILLAQLKPEKDSDEAVTYSLGKFGQRALDFYSIHVTKESTHPVKPLAQIAGNRYASAPVGKALSDACMGTIASFLSKYQDIIIEHQKVVKGNQKRLESLRELAGKENLEYPSVTLPPQPHTKEGVDAYNEVIARVRMWVNLNLWQKLKLSRDDAKPLLRLKGFPSFPLVERQANEVDWWDMVCNVKKLINEKKEDGKVFWQNLAGYKRQEALRPYLSSEEDRKKGKKFARYQLGDLLLHLEKKHGEDWGKVYGEAWERIDKKVEGLSKHIKLEEERRSEDAQSKAALTDWLRAKASFVIEGLKEADKDEFCRCELKLQKWYGDLRGKPFAIEAENSILDISGFSKQYNCAFIWQKDGVKKLNLYLIINYFKGGKLRFKKIKPEAFEANRFYTVINKKSGEIVPMEVNFNFDDPNLIILPLAFGKRQGREFIWNDLLSLETGSLKLANGRVIEKTLYNRRTRQDEPALFVALTFERREVLDSSNIKPMNLIGVDRGENIPAVIALTDPEGCPLSRFKDSLGNPTHILRIGESYKEKQRTIQAKKEVEQRRAGGYSRKYASKAKNLADDMVRNTARDLLYYAVTQDAMLIFENLSRGFGRQGKRTFMAERQYTRMEDWLTAKLAYEGLPSKVYLSKTLAQYTSKTCSNCGFTITSADYDRVLEKLKKTATGWMTTINGKELKVEGQITYYNRYKRQNVVKDLSVELDRLSEESVNNDISSWTKGRSGEALSLLKKRFSHRPVQEKFVCLNCGFETHADEQAALNIARSWLFLRSQEYKKYQTNKTTGNTDKRAFVETWQSFYRKKLKEVWKPAV

SEQ ID NO: 46829 - protein, 978 aa, synthetic construct
  REGION 1..978: note = engineered CasX variant
QEIKRINKIRRRLVKDSNTKKAGKTGPMKTLLVRVMTPDLRERLENLRKKPENIPQPISNTSRANLNKLLTDYTEMKKAILHVYWEEFQKDPVGLMSRVAQPASKKIDQNKLKPEMDEKGNLTTAGFACSQCGQPLFVYKLEQVSEKGKAYTNYFGRCNVAEHEKLILLAQLKPEKDSDEAVTYSLGKFGQRALDFYSIHVTKESTHPVKPLAQIAGNRYASVPVGKALSDACMGTIASFLSKYQDIIIEHQKVVKGNQKRLESLRELAGKENLEYPSVTLPPQPHTKEGVDAYNEVIARVRMWVNLNLWQKLKLSRDDAKPLLRLKGFPSFPLVERQANEVDWWDMVCNVKKLINEKKEDGKVFWQNLAGYKRQEALRPYLSSEEDRKKGKKFARYQLGDLLLHLEKKHGEDWGKVYGEAWERIDKKVEGLSKHIKLEEERRSEDAQSKAALTDWLRAKASFVIEGLKEADKDEFCRCELKLQKWYGDLRGKPFAIEAENSILDISGFSKQYNCAFIWQKDGVKKLNLYLIINYFKGGKLRFKKIKPEAFEANRFYTVINKKSGEIVPMEVNFNFDDPNLIILPLAFGKRQGREFIWNDLLSLETGSLKLANGRVIEKTLYNRRTRQDEPALFVALTFERREVLDSSNIKPMNLIGVDRGENIPAVIALTDPEGCPLSRFKDSLGNPTHILRIGESYKEKQRTIQAKKEVEQRRAGGYSRKYASKAKNLADDMVRNTARDLLYYAVTQDAMLIFENLSRGFGRQGKRTFMAERQYTRMEDWLTAKLAYEGLPSKVYLSKTLAQYTSKTCSNCGFTITSADYDRVLEKLKKTATGWMTTINGKELKVEGQITYYNRYKRQNVVKDLSVELDRLSEESVNNDISSWTKGRSGEALSLLKKRFSHRPVQEKFVCLNCGFETHADEQAALNIARSWLFLRSQEYKKYQTNKTTGNTDKRAFVETWQSFYRKKLKEVWKPAV

SEQ ID NO: 46830 - protein, 978 aa, synthetic construct
  REGION 1..978: note = engineered CasX variant
QEIKRINKIRRRLVKDSNTKKAGKTGPMKTLLVRVMTPDLRERLENLRKKPENIPQPISNTSRANLNKLLTDYTEMKKAILHVYWEEFQKDPVGLMSRVAQPASKKIDQNKLKPEMDEKGNLTTAGFACSQCGQPLFVYKLEQVSEKGKAYTNYFGRCNVAEHEKLIKLAQLKPEKDSDEAVTYSLGKFGQRALDFYSIHVTKESTHPVKPLAQIAGNRYASGPVGKALSDACMGTIASFLSKYQDIIIEHQKVVKGNQKRLESLRELAGKENLEYPSVTLPPQPHTKEGVDAYNEVIARVRMWVNLNLWQKLKLSRDDAKPLLRLKGFPSFPLVERQANEVDWWDMVCNVKKLINEKKEDGKVFWQNLAGYKRQEALRPYLSSEEDRKKGKKFARYQLGDLLLHLEKKHGEDWGKVYGEAWERIDKKVEGLSKHIKLEEERRSEDAQSKAALTDWLRAKASFVIEGLKEADKDEFCRCELKLQKWYGDLRGKPFAIEAENSILDISGFSKQYNCAFIWQKDGVKKLNLYLIINYFKGGKLRFKKIKPEAFEANRFYTVINKKSGEIVPMEVNFNFDDPNLIILPLAFGKRQGREFIWNDLLSLETGSLKLANGRVIEKTLYNRRTRQDEPALFVALTFERREVLDSSNIKPMNLIGVDRGENIPAVIALTDPEGCPLSRFKDSLGNPTHILRIGESYKEKQRTIQAKKEVEQRRAGGYSRKYASKAKNLADDMVRNTARDLLYYAVTQDAMLIFENLSRGFGRQGKRTFMAERQYTRMEDWLTAKLAYEGLPSKVYLSKTLAQYTSKTCSNCGFTITSADYDRVLEKLKKTATGWMTTINGKELKVEGQITYYNRYKRQNVVKDLSVELDRLSEESVNNDISSWTKGRSGEALSLLKKRFSHRPVQEKFVCLNCGFETHADEQAALNIARSWLFLRSQEYKKYQTNKTTGNTDKRAFVETWQSFYRKKLKEVWKPAV

SEQ ID NO: 46831 - protein, 977 aa, synthetic construct
  REGION 1..977: note = engineered CasX variant
QEIKRINKIRRRLVKDSNTKKAGKTGPMKTLLVRVMTPDLRERLENLRKKPENIPQPISNTSRANLNKLLTDYTEMKKAILHVYWEEFQKDPVGLMSRVAQPASKKIDQNKLKPEMDEKGNLTTAGFACSQCGQPLFVYKLEQVSEKGKAYTNYFGRCNVAEHEKLILLAQLKPEKDSDEAVTYSLGKFGQRALDFYSIHVTKESTHPVKPLAQIAGNRYASPVGKALSDACMGTIASFLSKYQDIIIEHQKVVKGNQKRLESLRELAGKENLEYPSVTLPPQPHTKEGVDAYNEVIARVRMWVNLNLWQKLKLSRDDAKPLLRLKGFPSFPLVERQANEVDWWDMVCNVKKLINEKKEDGKVFWQNLAGYKRQEALRPYLSSEEDRKKGKKFARYQLGDLLLHLEKKHGEDWGKVYGEAWERIDKKVEGLSKHIKLEEERRSEDAQSKAALTDWLRAKASFVIEGLKEADKDEFCRCELKLQKWYGDLRGKPFAIEAENSILDISGFSKQYNCAFIWQKDGVKKLNLYLIINYFKGGKLRFKKIKPEAFEANRFYTVINKKSGEIVPMEVNFNFDDPNLIILPLAFGKRQGREFIWNDLLSLETGSLKLANGRVIEKTLYNRRTRQDEPALFVALTFERREVLDSSNIKPMNLIGVDRGENIPAVIALTDPEGCPLSRFKDSLGNPTHILRIGESYKEKQRTIQAKKEVEQRRAGGYSRKYASKAKNLADDMVRNTARDLLYYAVTQDAMLIFENLSRGFGRQGKRTFMAERQYTRMEDWLTAKLAYEGLPSKVYLSKTLAQYTSKTCSNCGFTITSADYDRVLEKLKKTATGWMTTINGKELKVEGQITYYNRYKRQNVVKDLSVELDRLSEESVNNDISSWTKGRSGEALSLLKKRFSHRPVQEKFVCLNCGFETHADEQAALNIARSWLFLRSQEYKKYQTNKTTGNTDKRAFVETWQSFYRKKLKEVWKPAV

SEQ ID NO: 46832 - protein, 978 aa, synthetic construct
  REGION 1..978: note = engineered CasX variant
QEIKRINKIRRRLVKDSNTKKAGKTGPMKTLLVRVMTPDLRERLENLRKKPENIPQPISNTSRANLNKLLTDYTEMKKAILHVYWEEFQKDPVGLMSRVAQPASKKIDQNKLKPEMDEKGNLTTAGFACSQCGQPLFVYKLEQVSEKGKAYTNYFGRCNVAEHEKLILLAQLKPEKDSDEAVTYSLGKFGQRALDFYSIHVTKESTHPVKPLAQIAGNRYASYPVGKALSDACMGTIASFLSKYQDIIIEHQKVVKGNQKRLESLRELAGKENLEYPSVTLPPQPHTKEGVDAYNEVIARVRMWVNLNLWQKLKLSRDDAKPLLRLKGFPSFPLVERQANEVDWWDMVCNVKKLINEKKEDGKVFWQNLAGYKRQEALRPYLSSEEDRKKGKKFARYQLGDLLLHLEKKHGEDWGKVYDEAWERIDKKVEGLSKHIKLEEERRSEDAQSKAALTDWLRAKASFVIEGKKEADKDEFCRCELKLQKWYGDLRGKPFAIEAENSILDISGFSKQYNCAFIWQKDGVKKLNLYLIINYFKGGKLRFKKIKPEAFEANRFYTVINKKSGEIVPMEVNFNFDDPNLIILPLAFGKRQGREFIWNDLLSLETGSLKLANGRVIEKTLYNRRTRQDEPALFVALTFERREVLDSSNIKPMNLIGVDRGENIPAVIALTDPEGCPLSRFKDSLGNPTHILRIGESYKEKQRTIQAKKEVEQRRAGGYSRKYASKAKNLADDMVRNTARDLLYYAVTQDAMLIFENLSRGFGRQGKRTFMAERQYTRMEDWLTAKLAYEGLPSKVYLSKTLAQYTSKTCSNCGFTITSADYDRVLEKLKKTATGWMTTINGKELKVEGQITYYNRYKRQNVVKDLSVELDRLSEESVNNDISSWTKGRSGEALSLLKKRFSHRPVQEKFVCLNCGFETHADEQAALNIARSWLFLRSQEYKKYQTNKTTGNTDKRAFVETWQSFYRKKLKEVWKPAV

SEQ ID NO: 46833 - protein, 978 aa, synthetic construct
  REGION 1..978: note = engineered CasX variant
QEIKRINKIRRRLVKDSNTKKAGKTGPMKTLLVRVMTPDLRERLENLRKKPENIPQPISNTSRANLNKLLTDYTEMKKAILHVYWEEFQKDPVGLMSRVAQPASKKIDQNKLKPEMDEKGNLTTAGFACSQCGQPLFVYKLEQVSEKGKAYTNYFGRCNVAEHEKLILLAQLKPEKDSDEAVTYSLGKFGQRALDFYSIHVTKESTHPVKPLAQIAGNRYASHPVGKALSDACMGTIASFLSKYQDIIIEHQKVVKGNQKRLESLRELAGKENLEYPSVTLPPQPHTKEGVDAYNEVIARVRMWVNLNLWQKLKLSRDDAKPLLRLKGFPSFPLVERQANEVDWWDMVCNVKKLINEKKEDGKVFWQNLAGYKRQEALRPYLSSEEDRKKGKKFARYQLGDLLLHLEKKHGEDWGKVYDEAWERIDKKVEGLSKHIKLEEERRSEDAQSKAALTDWLRAKASFVIEGKKEADKDEFCRCELKLQKWYGDLRGKPFAIEAENSILDISGFSKQYNCAFIWQKDGVKKLNLYLIINYFKGGKLRFKKIKPEAFEANRFYTVINKKSGEIVPMEVNFNFDDPNLIILPLAFGKRQGREFIWNDLLSLETGSLKLANGRVIEKTLYNRRTRQDEPALFVALTFERREVLDSSNIKPMNLIGVDRGENIPAVIALTDPEGCPLSRFKDSLGNPTHILRIGESYKEKQRTIQAKKEVEQRRAGGYSRKYASKAKNLADDMVRNTARDLLYYAVTQDAMLIFENLSRGFGRQGKRTFMAERQYTRMEDWLTAKLAYEGLPSKVYLSKTLAQYTSKTCSNCGFTITSADYDRVLEKLKKTATGWMTTINGKELKVEGQITYYNRYKRQNVVKDLSVELDRLSEESVNNDISSWTKGRSGEALSLLKKRFSHRPVQEKFVCLNCGFETHADEQAALNIARSWLFLRSQEYKKYQTNKTTGNTDKRAFVETWQSFYRKKLKEVWKPAV

SEQ ID NO: 46834 - protein, 978 aa, synthetic construct
  REGION 1..978: note = engineered CasX variant
QEIKRINKIRRRLVKDSNTKKAGKTGPMKTLLVRVMTPDLRERLENLRKKPENIPQPISNTSRANLNKLLTDYTEMKKAILHVYWEEFQKDPVGLMSRVAQPASKKIDQNKLKPEMDEKGNLTTAGFACSQCGQPLFVYKLEQVSEKGKAYTNYFGRCNVAEHEKLILLAQLKPEKDSDEAVTYSLGKFGQRALDFYSIHVTKESTHPVKPLAQIAGNRYASSPVGKALSDACMGTIASFLSKYQDIIIEHQKVVKGNQKRLESLRELAGKENLEYPSVTLPPQPHTKEGVDAYNEVIARVRMWVNLNLWQKLKLSRDDAKPLLRLKGFPSFPLVERQANEVDWWDMVCNVKKLINEKKEDGKVFWQNLAGYKRQEALRPYLSSEEDRKKGKKFARYQLGDLLLHLEKKHGEDWGKVYDEAWERIDKKVEGLSKHIKLEEERRSEDAQSKAALTDWLRAKASFVIEGKKEADKDEFCRCELKLQKWYGDLRGKPFAIEAENSILDISGFSKQYNCAFIWQKDGVKKLNLYLIINYFKGGKLRFKKIKPEAFEANRFYTVINKKSGEIVPMEVNFNFDDPNLIILPLAFGKRQGREFIWNDLLSLETGSLKLANGRVIEKTLYNRRTRQDEPALFVALTFERREVLDSSNIKPMNLIGVDRGENIPAVIALTDPEGCPLSRFKDSLGNPTHILRIGESYKEKQRTIQAKKEVEQRRAGGYSRKYASKAKNLADDMVRNTARDLLYYAVTQDAMLIFENLSRGFGRQGKRTFMAERQYTRMEDWLTAKLAYEGLPSKVYLSKTLAQYTSKTCSNCGFTITSADYDRVLEKLKKTATGWMTTINGKELKVEGQITYYNRYKRQNVVKDLSVELDRLSEESVNNDISSWTKGRSGEALSLLKKRFSHRPVQEKFVCLNCGFETHADEQAALNIARSWLFLRSQEYKKYQTNKTTGNTDKRAFVETWQSFYRKKLKEVWKPAV

SEQ ID NO: 46835 - protein, 978 aa, synthetic construct
  REGION 1..978: note = engineered CasX variant
QEIKRINKIRRRLVKDSNTKKAGKTGPMKTLLVRVMTPDLRERLENLRKKPENIPQPISNTSRANLNKLLTDYTEMKKAILHVYWEEFQKDPVGLMSRVAQPASKKIDQNKLKPEMDEKGNLTTAGFACSQCGQPLFVYKLEQVSEKGKAYTNYFGRCNVAEHEKLILLAQLKPEKDSDEAVTYSLGKFGQRALDFYSIHVTKESTHPVKPLAQIAGNRYASTPVGKALSDACMGTIASFLSKYQDIIIEHQKVVKGNQKRLESLRELAGKENLEYPSVTLPPQPHTKEGVDAYNEVIARVRMWVNLNLWQKLKLSRDDAKPLLRLKGFPSFPLVERQANEVDWWDMVCNVKKLINEKKEDGKVFWQNLAGYKRQEALRPYLSSEEDRKKGKKFARYQLGDLLLHLEKKHGEDWGKVYDEAWERIDKKVEGLSKHIKLEEERRSEDAQSKAALTDWLRAKASFVIEGKKEADKDEFCRCELKLQKWYGDLRGKPFAIEAENSILDISGFSKQYNCAFIWQKDGVKKLNLYLIINYFKGGKLRFKKIKPEAFEANRFYTVINKKSGEIVPMEVNFNFDDPNLIILPLAFGKRQGREFIWNDLLSLETGSLKLANGRVIEKTLYNRRTRQDEPALFVALTFERREVLDSSNIKPMNLIGVDRGENIPAVIALTDPEGCPLSRFKDSLGNPTHILRIGESYKEKQRTIQAKKEVEQRRAGGYSRKYASKAKNLADDMVRNTARDLLYYAVTQDAMLIFENLSRGFGRQGKRTFMAERQYTRMEDWLTAKLAYEGLPSKVYLSKTLAQYTSKTCSNCGFTITSADYDRVLEKLKKTATGWMTTINGKELKVEGQITYYNRYKRQNVVKDLSVELDRLSEESVNNDISSWTKGRSGEALSLLKKRFSHRPVQEKFVCLNCGFETHADEQAALNIARSWLFLRSQEYKKYQTNKTTGNTDKRAFVETWQSFYRKKLKEVWKPAV

SEQ ID NO: 46836 - protein, 978 aa, synthetic construct
  REGION 1..978: note = engineered CasX variant
QEIKRINKIRRRLVKDSNTKKAGKTGPMKTLLVRVMTPDLRERLENLRKKPENIPQPISNTSRANLNKLLTDYTEMKKAILHVYWEEFQKDPVGLMSRVAQPASKKIDQNKLKPEMDEKGNLTTAGFACSQCGQPLFVYKLEQVSEKGKAYTNYFGRCNVAEHEKLILLAQLKPEKDSDEAVTYSLGKFGQRALDFYSIHVTKESTHPVKPLAQIAGNRYASAPVGKALSDACMGTIASFLSKYQDIIIEHQKVVKGNQKRLESLRELAGKENLEYPSVTLPPQPHTKEGVDAYNEVIARVRMWVNLNLWQKLKLSRDDAKPLLRLKGFPSFPLVERQANEVDWWDMVCNVKKLINEKKEDGKVFWQNLAGYKRQEALRPYLSSEEDRKKGKKFARYQLGDLLLHLEKKHGEDWGKVYDEAWERIDKKVEGLSKHIKLEEERRSEDAQSKAALTDWLRAKASFVIEGKKEADKDEFCRCELKLQKWYGDLRGKPFAIEAENSILDISGFSKQYNCAFIWQKDGVKKLNLYLIINYFKGGKLRFKKIKPEAFEANRFYTVINKKSGEIVPMEVNFNFDDPNLIILPLAFGKRQGREFIWNDLLSLETGSLKLANGRVIEKTLYNRRTRQDEPALFVALTFERREVLDSSNIKPMNLIGVDRGENIPAVIALTDPEGCPLSRFKDSLGNPTHILRIGESYKEKQRTIQAKKEVEQRRAGGYSRKYASKAKNLADDMVRNTARDLLYYAVTQDAMLIFENLSRGFGRQGKRTFMAERQYTRMEDWLTAKLAYEGLPSKVYLSKTLAQYTSKTCSNCGFTITSADYDRVLEKLKKTATGWMTTINGKELKVEGQITYYNRYKRQNVVKDLSVELDRLSEESVNNDISSWTKGRSGEALSLLKKRFSHRPVQEKFVCLNCGFETHADEQAALNIARSWLFLRSQEYKKYQTNKTTGNTDKRAFVETWQSFYRKKLKEVWKPAV

SEQ ID NO: 46837 - protein, 978 aa, synthetic construct
  REGION 1..978: note = engineered CasX variant
QEIKRINKIRRRLVKDSNTKKAGKTGPMKTLLVRVMTPDLRERLENLRKKPENIPQPISNTSRANLNKLLTDYTEMKKAILHVYWEEFQKDPVGLMSRVAQPASKKIDQNKLKPEMDEKGNLTTAGFACSQCGQPLFVYKLEQVSEKGKAYTNYFGRCNVAEHEKLILLAQLKPEKDSDEAVTYSLGKFGQRALDFYSIHVTKESTHPVKPLAQIAGNRYASVPVGKALSDACMGTIASFLSKYQDIIIEHQKVVKGNQKRLESLRELAGKENLEYPSVTLPPQPHTKEGVDAYNEVIARVRMWVNLNLWQKLKLSRDDAKPLLRLKGFPSFPLVERQANEVDWWDMVCNVKKLINEKKEDGKVFWQNLAGYKRQEALRPYLSSEEDRKKGKKFARYQLGDLLLHLEKKHGEDWGKVYDEAWERIDKKVEGLSKHIKLEEERRSEDAQSKAALTDWLRAKASFVIEGKKEADKDEFCRCELKLQKWYGDLRGKPFAIEAENSILDISGFSKQYNCAFIWQKDGVKKLNLYLIINYFKGGKLRFKKIKPEAFEANRFYTVINKKSGEIVPMEVNFNFDDPNLIILPLAFGKRQGREFIWNDLLSLETGSLKLANGRVIEKTLYNRRTRQDEPALFVALTFERREVLDSSNIKPMNLIGVDRGENIPAVIALTDPEGCPLSRFKDSLGNPTHILRIGESYKEKQRTIQAKKEVEQRRAGGYSRKYASKAKNLADDMVRNTARDLLYYAVTQDAMLIFENLSRGFGRQGKRTFMAERQYTRMEDWLTAKLAYEGLPSKVYLSKTLAQYTSKTCSNCGFTITSADYDRVLEKLKKTATGWMTTINGKELKVEGQITYYNRYKRQNVVKDLSVELDRLSEESVNNDISSWTKGRSGEALSLLKKRFSHRPVQEKFVCLNCGFETHADEQAALNIARSWLFLRSQEYKKYQTNKTTGNTDKRAFVETWQSFYRKKLKEVWKPAV

SEQ ID NO: 46838 - protein, 978 aa, synthetic construct
  REGION 1..978: note = engineered CasX variant
QEIKRINKIRRRLVKDSNTKKAGKTGPMKTLLVRVMTPDLRERLENLRKKPENIPQPISNTSRANLNKLLTDYTEMKKAILHVYWEEFQKDPVGLMSRVAQPASKKIDQNKLKPEMDEKGNLTTAGFACSQCGQPLFVYKLEQVSEKGKAYTNYFGRCNVAEHEKLIKLAQLKPEKDSDEAVTYSLGKFGQRALDFYSIHVTKESTHPVKPLAQIAGNRYASGPVGKALSDACMGTIASFLSKYQDIIIEHQKVVKGNQKRLESLRELAGKENLEYPSVTLPPQPHTKEGVDAYNEVIARVRMWVNLNLWQKLKLSRDDAKPLLRLKGFPSFPLVERQANEVDWWDMVCNVKKLINEKKEDGKVFWQNLAGYKRQEALRPYLSSEEDRKKGKKFARYQLGDLLLHLEKKHGEDWGKVYDEAWERIDKKVEGLSKHIKLEEERRSEDAQSKAALTDWLRAKASFVIEGKKEADKDEFCRCELKLQKWYGDLRGKPFAIEAENSILDISGFSKQYNCAFIWQKDGVKKLNLYLIINYFKGGKLRFKKIKPEAFEANRFYTVINKKSGEIVPMEVNFNFDDPNLIILPLAFGKRQGREFIWNDLLSLETGSLKLANGRVIEKTLYNRRTRQDEPALFVALTFERREVLDSSNIKPMNLIGVDRGENIPAVIALTDPEGCPLSRFKDSLGNPTHILRIGESYKEKQRTIQAKKEVEQRRAGGYSRKYASKAKNLADDMVRNTARDLLYYAVTQDAMLIFENLSRGFGRQGKRTFMAERQYTRMEDWLTAKLAYEGLPSKVYLSKTLAQYTSKTCSNCGFTITSADYDRVLEKLKKTATGWMTTINGKELKVEGQITYYNRYKRQNVVKDLSVELDRLSEESVNNDISSWTKGRSGEALSLLKKRFSHRPVQEKFVCLNCGFETHADEQAALNIARSWLFLRSQEYKKYQTNKTTGNTDKRAFVETWQSFYRKKLKEVWKPAV

SEQ ID NO: 46839 - protein, 977 aa, synthetic construct
  REGION 1..977: note = engineered CasX variant
QEIKRINKIRRRLVKDSNTKKAGKTGPMKTLLVRVMTPDLRERLENLRKKPENIPQPISNTSRANLNKLLTDYTEMKKAILHVYWEEFQKDPVGLMSRVAQPASKKIDQNKLKPEMDEKGNLTTAGFACSQCGQPLFVYKLEQVSEKGKAYTNYFGRCNVAEHEKLILLAQLKPEKDSDEAVTYSLGKFGQRALDFYSIHVTKESTHPVKPLAQIAGNRYASPVGKALSDACMGTIASFLSKYQDIIIEHQKVVKGNQKRLESLRELAGKENLEYPSVTLPPQPHTKEGVDAYNEVIARVRMWVNLNLWQKLKLSRDDAKPLLRLKGFPSFPLVERQANEVDWWDMVCNVKKLINEKKEDGKVFWQNLAGYKRQEALRPYLSSEEDRKKGKKFARYQLGDLLLHLEKKHGEDWGKVYDEAWERIDKKVEGLSKHIKLEEERRSEDAQSKAALTDWLRAKASFVIEGKKEADKDEFCRCELKLQKWYGDLRGKPFAIEAENSILDISGFSKQYNCAFIWQKDGVKKLNLYLIINYFKGGKLRFKKIKPEAFEANRFYTVINKKSGEIVPMEVNFNFDDPNLIILPLAFGKRQGREFIWNDLLSLETGSLKLANGRVIEKTLYNRRTRQDEPALFVALTFERREVLDSSNIKPMNLIGVDRGENIPAVIALTDPEGCPLSRFKDSLGNPTHILRIGESYKEKQRTIQAKKEVEQRRAGGYSRKYASKAKNLADDMVRNTARDLLYYAVTQDAMLIFENLSRGFGRQGKRTFMAERQYTRMEDWLTAKLAYEGLPSKVYLSKTLAQYTSKTCSNCGFTITSADYDRVLEKLKKTATGWMTTINGKELKVEGQITYYNRYKRQNVVKDLSVELDRLSEESVNNDISSWTKGRSGEALSLLKKRFSHRPVQEKFVCLNCGFETHADEQAALNIARSWLFLRSQEYKKYQTNKTTGNTDKRAFVETWQSFYRKKLKEVWKPAV

SEQ ID NO: 46840 - protein, 978 aa, synthetic construct
  REGION 1..978: note = engineered CasX variant
QEIKRINKIRRRLVKDSNTKKAGKTGPMKTLLVRVMTPDLRERLENLRKKPENIPQPISNTSRANLNKLLTDYTEMKKAILHVYWEEFQKDPVGLMSRVAQPASKKIDQNKLKPEMDEKGNLTTAGFACSQCGQPLFVYKLEQVSEKGKAYTNYFGRCNVAEHEKLILLAQLKPEKDSDEAVTYSLGKFGQRALDFYSIHVTKESTHPVKPLAQIAGNRYASYPVGKALSDACMGTIASFLSKYQDIIIEHQKVVKGNQKRLESLRELAGKENLEYPSVTLPPQPHTKEGVDAYNEVIARVRMWVNLNLWQKLKLSRDDAKPLLRLKGFPSFPLVERQANEVDWWDMVCNVKKLINEKKEDGKVFWQNLAGYKRQEALRPYLSSEEDRKKGKKFARYQLGDLLLHLEKKHGEDWGKVYDEAWERIDKKVEGLSKHIKLEEERRSEDAQSKAALTDWLRAKASFVIEGSKEADKDEFCRCELKLQKWYGDLRGKPFAIEAENSILDISGFSKQYNCAFIWQKDGVKKLNLYLIINYFKGGKLRFKKIKPEAFEANRFYTVINKKSGEIVPMEVNFNFDDPNLIILPLAFGKRQGREFIWNDLLSLETGSLKLANGRVIEKTLYNRRTRQDEPALFVALTFERREVLDSSNIKPMNLIGVDRGENIPAVIALTDPEGCPLSRFKDSLGNPTHILRIGESYKEKQRTIQAKKEVEQRRAGGYSRKYASKAKNLADDMVRNTARDLLYYAVTQDAMLIFENLSRGFGRQGKRTFMAERQYTRMEDWLTAKLAYEGLPSKVYLSKTLAQYTSKTCSNCGFTITSADYDRVLEKLKKTATGWMTTINGKELKVEGQITYYNRYKRQNVVKDLSVELDRLSEESVNNDISSWTKGRSGEALSLLKKRFSHRPVQEKFVCLNCGFETHADEQAALNIARSWLFLRSQEYKKYQTNKTTGNTDKRAFVETWQSFYRKKLKEVWKPAV

SEQ ID NO: 46841 - protein, 978 aa, synthetic construct
  REGION 1..978: note = engineered CasX variant
QEIKRINKIRRRLVKDSNTKKAGKTGPMKTLLVRVMTPDLRERLENLRKKPENIPQPISNTSRANLNKLLTDYTEMKKAILHVYWEEFQKDPVGLMSRVAQPASKKIDQNKLKPEMDEKGNLTTAGFACSQCGQPLFVYKLEQVSEKGKAYTNYFGRCNVAEHEKLILLAQLKPEKDSDEAVTYSLGKFGQRALDFYSIHVTKESTHPVKPLAQIAGNRYASHPVGKALSDACMGTIASFLSKYQDIIIEHQKVVKGNQKRLESLRELAGKENLEYPSVTLPPQPHTKEGVDAYNEVIARVRMWVNLNLWQKLKLSRDDAKPLLRLKGFPSFPLVERQANEVDWWDMVCNVKKLINEKKEDGKVFWQNLAGYKRQEALRPYLSSEEDRKKGKKFARYQLGDLLLHLEKKHGEDWGKVYDEAWERIDKKVEGLSKHIKLEEERRSEDAQSKAALTDWLRAKASFVIEGSKEADKDEFCRCELKLQKWYGDLRGKPFAIEAENSILDISGFSKQYNCAFIWQKDGVKKLNLYLIINYFKGGKLRFKKIKPEAFEANRFYTVINKKSGEIVPMEVNFNFDDPNLIILPLAFGKRQGREFIWNDLLSLETGSLKLANGRVIEKTLYNRRTRQDEPALFVALTFERREVLDSSNIKPMNLIGVDRGENIPAVIALTDPEGCPLSRFKDSLGNPTHILRIGESYKEKQRTIQAKKEVEQRRAGGYSRKYASKAKNLADDMVRNTARDLLYYAVTQDAMLIFENLSRGFGRQGKRTFMAERQYTRMEDWLTAKLAYEGLPSKVYLSKTLAQYTSKTCSNCGFTITSADYDRVLEKLKKTATGWMTTINGKELKVEGQITYYNRYKRQNVVKDLSVELDRLSEESVNNDISSWTKGRSGEALSLLKKRFSHRPVQEKFVCLNCGFETHADEQAALNIARSWLFLRSQEYKKYQTNKTTGNTDKRAFVETWQSFYRKKLKEVWKPAV

SEQ ID NO: 46842 - protein, 978 aa, synthetic construct
  REGION 1..978: note = engineered CasX variant
QEIKRINKIRRRLVKDSNTKKAGKTGPMKTLLVRVMTPDLRERLENLRKKPENIPQPISNTSRANLNKLLTDYTEMKKAILHVYWEEFQKDPVGLMSRVAQPASKKIDQNKLKPEMDEKGNLTTAGFACSQCGQPLFVYKLEQVSEKGKAYTNYFGRCNVAEHEKLILLAQLKPEKDSDEAVTYSLGKFGQRALDFYSIHVTKESTHPVKPLAQIAGNRYASSPVGKALSDACMGTIASFLSKYQDIIIEHQKVVKGNQKRLESLRELAGKENLEYPSVTLPPQPHTKEGVDAYNEVIARVRMWVNLNLWQKLKLSRDDAKPLLRLKGFPSFPLVERQANEVDWWDMVCNVKKLINEKKEDGKVFWQNLAGYKRQEALRPYLSSEEDRKKGKKFARYQLGDLLLHLEKKHGEDWGKVYDEAWERIDKKVEGLSKHIKLEEERRSEDAQSKAALTDWLRAKASFVIEGSKEADKDEFCRCELKLQKWYGDLRGKPFAIEAENSILDISGFSKQYNCAFIWQKDGVKKLNLYLIINYFKGGKLRFKKIKPEAFEANRFYTVINKKSGEIVPMEVNFNFDDPNLIILPLAFGKRQGREFIWNDLLSLETGSLKLANGRVIEKTLYNRRTRQDEPALFVALTFERREVLDSSNIKPMNLIGVDRGENIPAVIALTDPEGCPLSRFKDSLGNPTHILRIGESYKEKQRTIQAKKEVEQRRAGGYSRKYASKAKNLADDMVRNTARDLLYYAVTQDAMLIFENLSRGFGRQGKRTFMAERQYTRMEDWLTAKLAYEGLPSKVYLSKTLAQYTSKTCSNCGFTITSADYDRVLEKLKKTATGWMTTINGKELKVEGQITYYNRYKRQNVVKDLSVELDRLSEESVNNDISSWTKGRSGEALSLLKKRFSHRPVQEKFVCLNCGFETHADEQAALNIARSWLFLRSQEYKKYQTNKTTGNTDKRAFVETWQSFYRKKLKEVWKPAV

SEQ ID NO: 46843 - protein, 978 aa, synthetic construct
  REGION 1..978: note = engineered CasX variant
QEIKRINKIRRRLVKDSNTKKAGKTGPMKTLLVRVMTPDLRERLENLRKKPENIPQPISNTSRANLNKLLTDYTEMKKAILHVYWEEFQKDPVGLMSRVAQPASKKIDQNKLKPEMDEKGNLTTAGFACSQCGQPLFVYKLEQVSEKGKAYTNYFGRCNVAEHEKLILLAQLKPEKDSDEAVTYSLGKFGQRALDFYSIHVTKESTHPVKPLAQIAGNRYASTPVGKALSDACMGTIASFLSKYQDIIIEHQKVVKGNQKRLESLRELAGKENLEYPSVTLPPQPHTKEGVDAYNEVIARVRMWVNLNLWQKLKLSRDDAKPLLRLKGFPSFPLVERQANEVDWWDMVCNVKKLINEKKEDGKVFWQNLAGYKRQEALRPYLSSEEDRKKGKKFARYQLGDLLLHLEKKHGEDWGKVYDEAWERIDKKVEGLSKHIKLEEERRSEDAQSKAALTDWLRAKASFVIEGSKEADKDEFCRCELKLQKWYGDLRGKPFAIEAENSILDISGFSKQYNCAFIWQKDGVKKLNLYLIINYFKGGKLRFKKIKPEAFEANRFYTVINKKSGEIVPMEVNFNFDDPNLIILPLAFGKRQGREFIWNDLLSLETGSLKLANGRVIEKTLYNRRTRQDEPALFVALTFERREVLDSSNIKPMNLIGVDRGENIPAVIALTDPEGCPLSRFKDSLGNPTHILRIGESYKEKQRTIQAKKEVEQRRAGGYSRKYASKAKNLADDMVRNTARDLLYYAVTQDAMLIFENLSRGFGRQGKRTFMAERQYTRMEDWLTAKLAYEGLPSKVYLSKTLAQYTSKTCSNCGFTITSADYDRVLEKLKKTATGWMTTINGKELKVEGQITYYNRYKRQNVVKDLSVELDRLSEESVNNDISSWTKGRSGEALSLLKKRFSHRPVQEKFVCLNCGFETHADEQAALNIARSWLFLRSQEYKKYQTNKTTGNTDKRAFVETWQSFYRKKLKEVWKPAV

SEQ ID NO: 46844 - protein, 978 aa, synthetic construct
  REGION 1..978: note = engineered CasX variant
QEIKRINKIRRRLVKDSNTKKAGKTGPMKTLLVRVMTPDLRERLENLRKKPENIPQPISNTSRANLNKLLTDYTEMKKAILHVYWEEFQKDPVGLMSRVAQPASKKIDQNKLKPEMDEKGNLTTAGFACSQCGQPLFVYKLEQVSEKGKAYTNYFGRCNVAEHEKLILLAQLKPEKDSDEAVTYSLGKFGQRALDFYSIHVTKESTHPVKPLAQIAGNRYASAPVGKALSDACMGTIASFLSKYQDIIIEHQKVVKGNQKRLESLRELAGKENLEYPSVTLPPQPHTKEGVDAYNEVIARVRMWVNLNLWQKLKLSRDDAKPLLRLKGFPSFPLVERQANEVDWWDMVCNVKKLINEKKEDGKVFWQNLAGYKRQEALRPYLSSEEDRKKGKKFARYQLGDLLLHLEKKHGEDWGKVYDEAWERIDKKVEGLSKHIKLEEERRSEDAQSKAALTDWLRAKASFVIEGSKEADKDEFCRCELKLQKWYGDLRGKPFAIEAENSILDISGFSKQYNCAFIWQKDGVKKLNLYLIINYFKGGKLRFKKIKPEAFEANRFYTVINKKSGEIVPMEVNFNFDDPNLIILPLAFGKRQGREFIWNDLLSLETGSLKLANGRVIEKTLYNRRTRQDEPALFVALTFERREVLDSSNIKPMNLIGVDRGENIPAVIALTDPEGCPLSRFKDSLGNPTHILRIGESYKEKQRTIQAKKEVEQRRAGGYSRKYASKAKNLADDMVRNTARDLLYYAVTQDAMLIFENLSRGFGRQGKRTFMAERQYTRMEDWLTAKLAYEGLPSKVYLSKTLAQYTSKTCSNCGFTITSADYDRVLEKLKKTATGWMTTINGKELKVEGQITYYNRYKRQNVVKDLSVELDRLSEESVNNDISSWTKGRSGEALSLLKKRFSHRPVQEKFVCLNCGFETHADEQAALNIARSWLFLRSQEYKKYQTNKTTGNTDKRAFVETWQSFYRKKLKEVWKPAV

SEQ ID NO: 46845 - protein, 978 aa, synthetic construct
  REGION 1..978: note = engineered CasX variant
QEIKRINKIRRRLVKDSNTKKAGKTGPMKTLLVRVMTPDLRERLENLRKKPENIPQPISNTSRANLNKLLTDYTEMKKAILHVYWEEFQKDPVGLMSRVAQPASKKIDQNKLKPEMDEKGNLTTAGFACSQCGQPLFVYKLEQVSEKGKAYTNYFGRCNVAEHEKLILLAQLKPEKDSDEAVTYSLGKFGQRALDFYSIHVTKESTHPVKPLAQIAGNRYASVPVGKALSDACMGTIASFLSKYQDIIIEHQKVVKGNQKRLESLRELAGKENLEYPSVTLPPQPHTKEGVDAYNEVIARVRMWVNLNLWQKLKLSRDDAKPLLRLKGFPSFPLVERQANEVDWWDMVCNVKKLINEKKEDGKVFWQNLAGYKRQEALRPYLSSEEDRKKGKKFARYQLGDLLLHLEKKHGEDWGKVYDEAWERIDKKVEGLSKHIKLEEERRSEDAQSKAALTDWLRAKASFVIEGSKEADKDEFCRCELKLQKWYGDLRGKPFAIEAENSILDISGFSKQYNCAFIWQKDGVKKLNLYLIINYFKGGKLRFKKIKPEAFEANRFYTVINKKSGEIVPMEVNFNFDDPNLIILPLAFGKRQGREFIWNDLLSLETGSLKLANGRVIEKTLYNRRTRQDEPALFVALTFERREVLDSSNIKPMNLIGVDRGENIPAVIALTDPEGCPLSRFKDSLGNPTHILRIGESYKEKQRTIQAKKEVEQRRAGGYSRKYASKAKNLADDMVRNTARDLLYYAVTQDAMLIFENLSRGFGRQGKRTFMAERQYTRMEDWLTAKLAYEGLPSKVYLSKTLAQYTSKTCSNCGFTITSADYDRVLEKLKKTATGWMTTINGKELKVEGQITYYNRYKRQNVVKDLSVELDRLSEESVNNDISSWTKGRSGEALSLLKKRFSHRPVQEKFVCLNCGFETHADEQAALNIARSWLFLRSQEYKKYQTNKTTGNTDKRAFVETWQSFYRKKLKEVWKPAV

SEQ ID NO: 46846 - protein, 978 aa, synthetic construct
  REGION 1..978: note = engineered CasX variant
QEIKRINKIRRRLVKDSNTKKAGKTGPMKTLLVRVMTPDLRERLENLRKKPENIPQPISNTSRANLNKLLTDYTEMKKAILHVYWEEFQKDPVGLMSRVAQPASKKIDQNKLKPEMDEKGNLTTAGFACSQCGQPLFVYKLEQVSEKGKAYTNYFGRCNVAEHEKLIKLAQLKPEKDSDEAVTYSLGKFGQRALDFYSIHVTKESTHPVKPLAQIAGNRYASGPVGKALSDACMGTIASFLSKYQDIIIEHQKVVKGNQKRLESLRELAGKENLEYPSVTLPPQPHTKEGVDAYNEVIARVRMWVNLNLWQKLKLSRDDAKPLLRLKGFPSFPLVERQANEVDWWDMVCNVKKLINEKKEDGKVFWQNLAGYKRQEALRPYLSSEEDRKKGKKFARYQLGDLLLHLEKKHGEDWGKVYDEAWERIDKKVEGLSKHIKLEEERRSEDAQSKAALTDWLRAKASFVIEGSKEADKDEFCRCELKLQKWYGDLRGKPFAIEAENSILDISGFSKQYNCAFIWQKDGVKKLNLYLIINYFKGGKLRFKKIKPEAFEANRFYTVINKKSGEIVPMEVNFNFDDPNLIILPLAFGKRQGREFIWNDLLSLETGSLKLANGRVIEKTLYNRRTRQDEPALFVALTFERREVLDSSNIKPMNLIGVDRGENIPAVIALTDPEGCPLSRFKDSLGNPTHILRIGESYKEKQRTIQAKKEVEQRRAGGYSRKYASKAKNLADDMVRNTARDLLYYAVTQDAMLIFENLSRGFGRQGKRTFMAERQYTRMEDWLTAKLAYEGLPSKVYLSKTLAQYTSKTCSNCGFTITSADYDRVLEKLKKTATGWMTTINGKELKVEGQITYYNRYKRQNVVKDLSVELDRLSEESVNNDISSWTKGRSGEALSLLKKRFSHRPVQEKFVCLNCGFETHADEQAALNIARSWLFLRSQEYKKYQTNKTTGNTDKRAFVETWQSFYRKKLKEVWKPAV

SEQ ID NO: 46847 - protein, 977 aa, synthetic construct
  REGION 1..977: note = engineered CasX variant
QEIKRINKIRRRLVKDSNTKKAGKTGPMKTLLVRVMTPDLRERLENLRKKPENIPQPISNTSRANLNKLLTDYTEMKKAILHVYWEEFQKDPVGLMSRVAQPASKKIDQNKLKPEMDEKGNLTTAGFACSQCGQPLFVYKLEQVSEKGKAYTNYFGRCNVAEHEKLILLAQLKPEKDSDEAVTYSLGKFGQRALDFYSIHVTKESTHPVKPLAQIAGNRYASPVGKALSDACMGTIASFLSKYQDIIIEHQKVVKGNQKRLESLRELAGKENLEYPSVTLPPQPHTKEGVDAYNEVIARVRMWVNLNLWQKLKLSRDDAKPLLRLKGFPSFPLVERQANEVDWWDMVCNVKKLINEKKEDGKVFWQNLAGYKRQEALRPYLSSEEDRKKGKKFARYQLGDLLLHLEKKHGEDWGKVYDEAWERIDKKVEGLSKHIKLEEERRSEDAQSKAALTDWLRAKASFVIEGSKEADKDEFCRCELKLQKWYGDLRGKPFAIEAENSILDISGFSKQYNCAFIWQKDGVKKLNLYLIINYFKGGKLRFKKIKPEAFEANRFYTVINKKSGEIVPMEVNFNFDDPNLIILPLAFGKRQGREFIWNDLLSLETGSLKLANGRVIEKTLYNRRTRQDEPALFVALTFERREVLDSSNIKPMNLIGVDRGENIPAVIALTDPEGCPLSRFKDSLGNPTHILRIGESYKEKQRTIQAKKEVEQRRAGGYSRKYASKAKNLADDMVRNTARDLLYYAVTQDAMLIFENLSRGFGRQGKRTFMAERQYTRMEDWLTAKLAYEGLPSKVYLSKTLAQYTSKTCSNCGFTITSADYDRVLEKLKKTATGWMTTINGKELKVEGQITYYNRYKRQNVVKDLSVELDRLSEESVNNDISSWTKGRSGEALSLLKKRFSHRPVQEKFVCLNCGFETHADEQAALNIARSWLFLRSQEYKKYQTNKTTGNTDKRAFVETWQSFYRKKLKEVWKPAV

SEQ ID NO: 46848 - protein, 979 aa, synthetic construct
  REGION 1..979: note = engineered CasX variant
QEIKRINKIRRRLVKDSNTKKAGKTGPMKTLLVRVMTPDLRERLENLRKKPENIPQPISNTSRANLNKLLTDYTEMKKAILHVYWEEFQKDPVGLMSRVAQPASKKIDQNKLKPEMDEKGNLTTAGFACSQCGQPLFVYKLEQVSEKGKAYTNYFGRCNVAEHEKLILLAQLKPEKDSDEAVTYSLGKFGQRALDFYSIHVTKESTHPVKPLAQIAGNRYASYPVGKALSDACMGTIASFLSKYQDIIIEHQKVVKGNQKRLESLRELAGKENLEYPSVTLPPQPHTKEGVDAYNEVIARVRMWVNLNLWQKLKLSRDDAKPLLRLKGFPSFPLVERQANEVDWWDMVCNVKKLINEKKEDGKVFWQNLAGYKRQEALRPYLSSEEDRKKGKKFARYQLGDLLLHLEKKHGEDWGKVYDEAWERIDKKVEGLSKHIKLEEERRSEDAQSKAALTDWLRAKASFVIEGLKEADDKDEFCRCELKLQKWYGDLRGKPFAIEAENSILDISGFSKQYNCAFIWQKDGVKKLNLYLIINYFKGGKLRFKKIKPEAFEANRFYTVINKKSGEIVPMEVNFNFDDPNLIILPLAFGKRQGREFIWNDLLSLETGSLKLANGRVIEKTLYNRRTRQDEPALFVALTFERREVLDSSNIKPMNLIGVDRGENIPAVIALTDPEGCPLSRFKDSLGNPTHILRIGESYKEKQRTIQAKKEVEQRRAGGYSRKYASKAKNLADDMVRNTARDLLYYAVTQDAMLIFENLSRGFGRQGKRTFMAERQYTRMEDWLTAKLAYEGLPSKVYLSKTLAQYTSKTCSNCGFTITSADYDRVLEKLKKTATGWMTTINGKELKVEGQITYYNRYKRQNVVKDLSVELDRLSEESVNNDISSWTKGRSGEALSLLKKRFSHRPVQEKFVCLNCGFETHADEQAALNIARSWLFLRSQEYKKYQTNKTTGNTDKRAFVETWQSFYRKKLKEVWKPAV

SEQ ID NO: 46849 - protein, 979 aa, synthetic construct
  REGION 1..979: note = engineered CasX variant
QEIKRINKIRRRLVKDSNTKKAGKTGPMKTLLVRVMTPDLRERLENLRKKPENIPQPISNTSRANLNKLLTDYTEMKKAILHVYWEEFQKDPVGLMSRVAQPASKKIDQNKLKPEMDEKGNLTTAGFACSQCGQPLFVYKLEQVSEKGKAYTNYFGRCNVAEHEKLILLAQLKPEKDSDEAVTYSLGKFGQRALDFYSIHVTKESTHPVKPLAQIAGNRYASHPVGKALSDACMGTIASFLSKYQDIIIEHQKVVKGNQKRLESLRELAGKENLEYPSVTLPPQPHTKEGVDAYNEVIARVRMWVNLNLWQKLKLSRDDAKPLLRLKGFPSFPLVERQANEVDWWDMVCNVKKLINEKKEDGKVFWQNLAGYKRQEALRPYLSSEEDRKKGKKFARYQLGDLLLHLEKKHGEDWGKVYDEAWERIDKKVEGLSKHIKLEEERRSEDAQSKAALTDWLRAKASFVIEGLKEADDKDEFCRCELKLQKWYGDLRGKPFAIEAENSILDISGFSKQYNCAFIWQKDGVKKLNLYLIINYFKGGKLRFKKIKPEAFEANRFYTVINKKSGEIVPMEVNFNFDDPNLIILPLAFGKRQGREFIWNDLLSLETGSLKLANGRVIEKTLYNRRTRQDEPALFVALTFERREVLDSSNIKPMNLIGVDRGENIPAVIALTDPEGCPLSRFKDSLGNPTHILRIGESYKEKQRTIQAKKEVEQRRAGGYSRKYASKAKNLADDMVRNTARDLLYYAVTQDAMLIFENLSRGFGRQGKRTFMAERQYTRMEDWLTAKLAYEGLPSKVYLSKTLAQYTSKTCSNCGFTITSADYDRVLEKLKKTATGWMTTINGKELKVEGQITYYNRYKRQNVVKDLSVELDRLSEESVNNDISSWTKGRSGEALSLLKKRFSHRPVQEKFVCLNCGFETHADEQAALNIARSWLFLRSQEYKKYQTNKTTGNTDKRAFVETWQSFYRKKLKEVWKPAV

SEQ ID NO: 46850 - protein, 979 aa, synthetic construct
  REGION 1..979: note = engineered CasX variant
QEIKRINKIRRRLVKDSNTKKAGKTGPMKTLLVRVMTPDLRERLENLRKKPENIPQPISNTSRANLNKLLTDYTEMKKAILHVYWEEFQKDPVGLMSRVAQPASKKIDQNKLKPEMDEKGNLTTAGFACSQCGQPLFVYKLEQVSEKGKAYTNYFGRCNVAEHEKLILLAQLKPEKDSDEAVTYSLGKFGQRALDFYSIHVTKESTHPVKPLAQIAGNRYASSPVGKALSDACMGTIASFLSKYQDIIIEHQKVVKGNQKRLESLRELAGKENLEYPSVTLPPQPHTKEGVDAYNEVIARVRMWVNLNLWQKLKLSRDDAKPLLRLKGFPSFPLVERQANEVDWWDMVCNVKKLINEKKEDGKVFWQNLAGYKRQEALRPYLSSEEDRKKGKKFARYQLGDLLLHLEKKHGEDWGKVYDEAWERIDKKVEGLSKHIKLEEERRSEDAQSKAALTDWLRAKASFVIEGLKEADDKDEFCRCELKLQKWYGDLRGKPFAIEAENSILDISGFSKQYNCAFIWQKDGVKKLNLYLIINYFKGGKLRFKKIKPEAFEANRFYTVINKKSGEIVPMEVNFNFDDPNLIILPLAFGKRQGREFIWNDLLSLETGSLKLANGRVIEKTLYNRRTRQDEPALFVALTFERREVLDSSNIKPMNLIGVDRGENIPAVIALTDPEGCPLSRFKDSLGNPTHILRIGESYKEKQRTIQAKKEVEQRRAGGYSRKYASKAKNLADDMVRNTARDLLYYAVTQDAMLIFENLSRGFGRQGKRTFMAERQYTRMEDWLTAKLAYEGLPSKVYLSKTLAQYTSKTCSNCGFTITSADYDRVLEKLKKTATGWMTTINGKELKVEGQITYYNRYKRQNVVKDLSVELDRLSEESVNNDISSWTKGRSGEALSLLKKRFSHRPVQEKFVCLNCGFETHADEQAALNIARSWLFLRSQEYKKYQTNKTTGNTDKRAFVETWQSFYRKKLKEVWKPAV

SEQ ID NO: 46851 - protein, 979 aa, synthetic construct
  REGION 1..979: note = engineered CasX variant
QEIKRINKIRRRLVKDSNTKKAGKTGPMKTLLVRVMTPDLRERLENLRKKPENIPQPISNTSRANLNKLLTDYTEMKKAILHVYWEEFQKDPVGLMSRVAQPASKKIDQNKLKPEMDEKGNLTTAGFACSQCGQPLFVYKLEQVSEKGKAYTNYFGRCNVAEHEKLILLAQLKPEKDSDEAVTYSLGKFGQRALDFYSIHVTKESTHPVKPLAQIAGNRYASTPVGKALSDACMGTIASFLSKYQDIIIEHQKVVKGNQKRLESLRELAGKENLEYPSVTLPPQPHTKEGVDAYNEVIARVRMWVNLNLWQKLKLSRDDAKPLLRLKGFPSFPLVERQANEVDWWDMVCNVKKLINEKKEDGKVFWQNLAGYKRQEALRPYLSSEEDRKKGKKFARYQLGDLLLHLEKKHGEDWGKVYDEAWERIDKKVEGLSKHIKLEEERRSEDAQSKAALTDWLRAKASFVIEGLKEADDKDEFCRCELKLQKWYGDLRGKPFAIEAENSILDISGFSKQYNCAFIWQKDGVKKLNLYLIINYFKGGKLRFKKIKPEAFEANRFYTVINKKSGEIVPMEVNFNFDDPNLIILPLAFGKRQGREFIWNDLLSLETGSLKLANGRVIEKTLYNRRTRQDEPALFVALTFERREVLDSSNIKPMNLIGVDRGENIPAVIALTDPEGCPLSRFKDSLGNPTHILRIGESYKEKQRTIQAKKEVEQRRAGGYSRKYASKAKNLADDMVRNTARDLLYYAVTQDAMLIFENLSRGFGRQGKRTFMAERQYTRMEDWLTAKLAYEGLPSKVYLSKTLAQYTSKTCSNCGFTITSADYDRVLEKLKKTATGWMTTINGKELKVEGQITYYNRYKRQNVVKDLSVELDRLSEESVNNDISSWTKGRSGEALSLLKKRFSHRPVQEKFVCLNCGFETHADEQAALNIARSWLFLRSQEYKKYQTNKTTGNTDKRAFVETWQSFYRKKLKEVWKPAV

SEQ ID NO: 46852 - protein, 979 aa, synthetic construct
  REGION 1..979: note = engineered CasX variant
QEIKRINKIRRRLVKDSNTKKAGKTGPMKTLLVRVMTPDLRERLENLRKKPENIPQPISNTSRANLNKLLTDYTEMKKAILHVYWEEFQKDPVGLMSRVAQPASKKIDQNKLKPEMDEKGNLTTAGFACSQCGQPLFVYKLEQVSEKGKAYTNYFGRCNVAEHEKLILLAQLKPEKDSDEAVTYSLGKFGQRALDFYSIHVTKESTHPVKPLAQIAGNRYASAPVGKALSDACMGTIASFLSKYQDIIIEHQKVVKGNQKRLESLRELAGKENLEYPSVTLPPQPHTKEGVDAYNEVIARVRMWVNLNLWQKLKLSRDDAKPLLRLKGFPSFPLVERQANEVDWWDMVCNVKKLINEKKEDGKVFWQNLAGYKRQEALRPYLSSEEDRKKGKKFARYQLGDLLLHLEKKHGEDWGKVYDEAWERIDKKVEGLSKHIKLEEERRSEDAQSKAALTDWLRAKASFVIEGLKEADDKDEFCRCELKLQKWYGDLRGKPFAIEAENSILDISGFSKQYNCAFIWQKDGVKKLNLYLIINYFKGGKLRFKKIKPEAFEANRFYTVINKKSGEIVPMEVNFNFDDPNLIILPLAFGKRQGREFIWNDLLSLETGSLKLANGRVIEKTLYNRRTRQDEPALFVALTFERREVLDSSNIKPMNLIGVDRGENIPAVIALTDPEGCPLSRFKDSLGNPTHILRIGESYKEKQRTIQAKKEVEQRRAGGYSRKYASKAKNLADDMVRNTARDLLYYAVTQDAMLIFENLSRGFGRQGKRTFMAERQYTRMEDWLTAKLAYEGLPSKVYLSKTLAQYTSKTCSNCGFTITSADYDRVLEKLKKTATGWMTTINGKELKVEGQITYYNRYKRQNVVKDLSVELDRLSEESVNNDISSWTKGRSGEALSLLKKRFSHRPVQEKFVCLNCGFETHADEQAALNIARSWLFLRSQEYKKYQTNKTTGNTDKRAFVETWQSFYRKKLKEVWKPAV

SEQ ID NO: 46853 - protein, 979 aa, synthetic construct
  REGION 1..979: note = engineered CasX variant
QEIKRINKIRRRLVKDSNTKKAGKTGPMKTLLVRVMTPDLRERLENLRKKPENIPQPISNTSRANLNKLLTDYTEMKKAILHVYWEEFQKDPVGLMSRVAQPASKKIDQNKLKPEMDEKGNLTTAGFACSQCGQPLFVYKLEQVSEKGKAYTNYFGRCNVAEHEKLILLAQLKPEKDSDEAVTYSLGKFGQRALDFYSIHVTKESTHPVKPLAQIAGNRYASVPVGKALSDACMGTIASFLSKYQDIIIEHQKVVKGNQKRLESLRELAGKENLEYPSVTLPPQPHTKEGVDAYNEVIARVRMWVNLNLWQKLKLSRDDAKPLLRLKGFPSFPLVERQANEVDWWDMVCNVKKLINEKKEDGKVFWQNLAGYKRQEALRPYLSSEEDRKKGKKFARYQLGDLLLHLEKKHGEDWGKVYDEAWERIDKKVEGLSKHIKLEEERRSEDAQSKAALTDWLRAKASFVIEGLKEADDKDEFCRCELKLQKWYGDLRGKPFAIEAENSILDISGFSKQYNCAFIWQKDGVKKLNLYLIINYFKGGKLRFKKIKPEAFEANRFYTVINKKSGEIVPMEVNFNFDDPNLIILPLAFGKRQGREFIWNDLLSLETGSLKLANGRVIEKTLYNRRTRQDEPALFVALTFERREVLDSSNIKPMNLIGVDRGENIPAVIALTDPEGCPLSRFKDSLGNPTHILRIGESYKEKQRTIQAKKEVEQRRAGGYSRKYASKAKNLADDMVRNTARDLLYYAVTQDAMLIFENLSRGFGRQGKRTFMAERQYTRMEDWLTAKLAYEGLPSKVYLSKTLAQYTSKTCSNCGFTITSADYDRVLEKLKKTATGWMTTINGKELKVEGQITYYNRYKRQNVVKDLSVELDRLSEESVNNDISSWTKGRSGEALSLLKKRFSHRPVQEKFVCLNCGFETHADEQAALNIARSWLFLRSQEYKKYQTNKTTGNTDKRAFVETWQSFYRKKLKEVWKPAV

SEQ ID NO: 46854 - protein, 979 aa, synthetic construct
  REGION 1..979: note = engineered CasX variant
QEIKRINKIRRRLVKDSNTKKAGKTGPMKTLLVRVMTPDLRERLENLRKKPENIPQPISNTSRANLNKLLTDYTEMKKAILHVYWEEFQKDPVGLMSRVAQPASKKIDQNKLKPEMDEKGNLTTAGFACSQCGQPLFVYKLEQVSEKGKAYTNYFGRCNVAEHEKLIKLAQLKPEKDSDEAVTYSLGKFGQRALDFYSIHVTKESTHPVKPLAQIAGNRYASGPVGKALSDACMGTIASFLSKYQDIIIEHQKVVKGNQKRLESLRELAGKENLEYPSVTLPPQPHTKEGVDAYNEVIARVRMWVNLNLWQKLKLSRDDAKPLLRLKGFPSFPLVERQANEVDWWDMVCNVKKLINEKKEDGKVFWQNLAGYKRQEALRPYLSSEEDRKKGKKFARYQLGDLLLHLEKKHGEDWGKVYDEAWERIDKKVEGLSKHIKLEEERRSEDAQSKAALTDWLRAKASFVIEGLKEADDKDEFCRCELKLQKWYGDLRGKPFAIEAENSILDISGFSKQYNCAFIWQKDGVKKLNLYLIINYFKGGKLRFKKIKPEAFEANRFYTVINKKSGEIVPMEVNFNFDDPNLIILPLAFGKRQGREFIWNDLLSLETGSLKLANGRVIEKTLYNRRTRQDEPALFVALTFERREVLDSSNIKPMNLIGVDRGENIPAVIALTDPEGCPLSRFKDSLGNPTHILRIGESYKEKQRTIQAKKEVEQRRAGGYSRKYASKAKNLADDMVRNTARDLLYYAVTQDAMLIFENLSRGFGRQGKRTFMAERQYTRMEDWLTAKLAYEGLPSKVYLSKTLAQYTSKTCSNCGFTITSADYDRVLEKLKKTATGWMTTINGKELKVEGQITYYNRYKRQNVVKDLSVELDRLSEESVNNDISSWTKGRSGEALSLLKKRFSHRPVQEKFVCLNCGFETHADEQAALNIARSWLFLRSQEYKKYQTNKTTGNTDKRAFVETWQSFYRKKLKEVWKPAV

SEQ ID NO: 46855 - protein, 978 aa, synthetic construct
  REGION 1..978: note = engineered CasX variant
QEIKRINKIRRRLVKDSNTKKAGKTGPMKTLLVRVMTPDLRERLENLRKKPENIPQPISNTSRANLNKLLTDYTEMKKAILHVYWEEFQKDPVGLMSRVAQPASKKIDQNKLKPEMDEKGNLTTAGFACSQCGQPLFVYKLEQVSEKGKAYTNYFGRCNVAEHEKLILLAQLKPEKDSDEAVTYSLGKFGQRALDFYSIHVTKESTHPVKPLAQIAGNRYASPVGKALSDACMGTIASFLSKYQDIIIEHQKVVKGNQKRLESLRELAGKENLEYPSVTLPPQPHTKEGVDAYNEVIARVRMWVNLNLWQKLKLSRDDAKPLLRLKGFPSFPLVERQANEVDWWDMVCNVKKLINEKKEDGKVFWQNLAGYKRQEALRPYLSSEEDRKKGKKFARYQLGDLLLHLEKKHGEDWGKVYDEAWERIDKKVEGLSKHIKLEEERRSEDAQSKAALTDWLRAKASFVIEGLKEADDKDEFCRCELKLQKWYGDLRGKPFAIEAENSILDISGFSKQYNCAFIWQKDGVKKLNLYLIINYFKGGKLRFKKIKPEAFEANRFYTVINKKSGEIVPMEVNFNFDDPNLIILPLAFGKRQGREFIWNDLLSLETGSLKLANGRVIEKTLYNRRTRQDEPALFVALTFERREVLDSSNIKPMNLIGVDRGENIPAVIALTDPEGCPLSRFKDSLGNPTHILRIGESYKEKQRTIQAKKEVEQRRAGGYSRKYASKAKNLADDMVRNTARDLLYYAVTQDAMLIFENLSRGFGRQGKRTFMAERQYTRMEDWLTAKLAYEGLPSKVYLSKTLAQYTSKTCSNCGFTITSADYDRVLEKLKKTATGWMTTINGKELKVEGQITYYNRYKRQNVVKDLSVELDRLSEESVNNDISSWTKGRSGEALSLLKKRFSHRPVQEKFVCLNCGFETHADEQAALNIARSWLFLRSQEYKKYQTNKTTGNTDKRAFVETWQSFYRKKLKEVWKPAV

SEQ ID NO: 46856 - protein, 979 aa, synthetic construct
  REGION 1..979: note = engineered CasX variant
QEIKRINKIRRRLVKDSNTKKAGKTGPMKTLLVRVMTPDLRERLENLRKKPENIPQPISNTSRANLNKLLTDYTEMKKAILHVYWEEFQKDPVGLMSRVAQPASKKIDQNKLKPEMDEKGNLTTAGFACSQCGQPLFVYKLEQVSEKGKAYTNYFGRCNVAEHEKLILLAQLKPEKDSDEAVTYSLGKFGQRALDFYSIHVTKESTHPVKPLAQIAGNRYASYPVGKALSDACMGTIASFLSKYQDIIIEHQKVVKGNQKRLESLRELAGKENLEYPSVTLPPQPHTKEGVDAYNEVIARVRMWVNLNLWQKLKLSRDDAKPLLRLKGFPSFPLVERQANEVDWWDMVCNVKKLINEKKEDGKVFWQNLAGYKRQEALRPYLSSEEDRKKGKKFARYQLGDLLLHLEKKHGEDWGKVYDEAWERIDKKVEGLSKHIKLEEERRSEDAQSKAALTDWLRAKASFVIEGLKEADKDEFCRCELKLQKWYGDLRGKPFAIEAENSILDISGFSKQYNCAFIWQKDGVKKLNLYLIINYFKGGKLRFKKIKPEAFEANRFYTVINKKSGEIVPMEVNFNFDDPNLIILPLAFGKRQGREFIWNDLLSLETGSLKLANGRVIEKTLYNRRTRQDEPALFVALTFERREVLDSSNIKPMNLIGVDRGENIPAVIALTDPEGCPLSRFKDSLGNPTHILRIGESYKEKQRTIQAKKEVEQRRAGGYSRKYASKAKNLADDMVRNTARDLLYYAVTQDAMLIFENLSRGFGRQGKRTFMAERQYTRMEDWLTAKLAYEGLPSKVYLSKTLAQYTSKTCSNCGFTITSADYDRVLEKLKKTATGWMTTINGKELKVEGQITYYNRYKRQNVVKDLSVELDRLSEESVNNDISSWTKGRSGNEALSLLKKRFSHRPVQEKFVCLNCGFETHADEQAALNIARSWLFLRSQEYKKYQTNKTTGNTDKRAFVETWQSFYRKKLKEVWKPAV

SEQ ID NO: 46857 - protein, 979 aa, synthetic construct
  REGION 1..979: note = engineered CasX variant
QEIKRINKIRRRLVKDSNTKKAGKTGPMKTLLVRVMTPDLRERLENLRKKPENIPQPISNTSRANLNKLLTDYTEMKKAILHVYWEEFQKDPVGLMSRVAQPASKKIDQNKLKPEMDEKGNLTTAGFACSQCGQPLFVYKLEQVSEKGKAYTNYFGRCNVAEHEKLILLAQLKPEKDSDEAVTYSLGKFGQRALDFYSIHVTKESTHPVKPLAQIAGNRYASHPVGKALSDACMGTIASFLSKYQDIIIEHQKVVKGNQKRLESLRELAGKENLEYPSVTLPPQPHTKEGVDAYNEVIARVRMWVNLNLWQKLKLSRDDAKPLLRLKGFPSFPLVERQANEVDWWDMVCNVKKLINEKKEDGKVFWQNLAGYKRQEALRPYLSSEEDRKKGKKFARYQLGDLLLHLEKKHGEDWGKVYDEAWERIDKKVEGLSKHIKLEEERRSEDAQSKAALTDWLRAKASFVIEGLKEADKDEFCRCELKLQKWYGDLRGKPFAIEAENSILDISGFSKQYNCAFIWQKDGVKKLNLYLIINYFKGGKLRFKKIKPEAFEANRFYTVINKKSGEIVPMEVNFNFDDPNLIILPLAFGKRQGREFIWNDLLSLETGSLKLANGRVIEKTLYNRRTRQDEPALFVALTFERREVLDSSNIKPMNLIGVDRGENIPAVIALTDPEGCPLSRFKDSLGNPTHILRIGESYKEKQRTIQAKKEVEQRRAGGYSRKYASKAKNLADDMVRNTARDLLYYAVTQDAMLIFENLSRGFGRQGKRTFMAERQYTRMEDWLTAKLAYEGLPSKVYLSKTLAQYTSKTCSNCGFTITSADYDRVLEKLKKTATGWMTTINGKELKVEGQITYYNRYKRQNVVKDLSVELDRLSEESVNNDISSWTKGRSGNEALSLLKKRFSHRPVQEKFVCLNCGFETHADEQAALNIARSWLFLRSQEYKKYQTNKTTGNTDKRAFVETWQSFYRKKLKEVWKPAV

SEQ ID NO: 46858 - protein, 979 aa, synthetic construct
  REGION 1..979: note = engineered CasX variant
QEIKRINKIRRRLVKDSNTKKAGKTGPMKTLLVRVMTPDLRERLENLRKKPENIPQPISNTSRANLNKLLTDYTEMKKAILHVYWEEFQKDPVGLMSRVAQPASKKIDQNKLKPEMDEKGNLTTAGFACSQCGQPLFVYKLEQVSEKGKAYTNYFGRCNVAEHEKLILLAQLKPEKDSDEAVTYSLGKFGQRALDFYSIHVTKESTHPVKPLAQIAGNRYASSPVGKALSDACMGTIASFLSKYQDIIIEHQKVVKGNQKRLESLRELAGKENLEYPSVTLPPQPHTKEGVDAYNEVIARVRMWVNLNLWQKLKLSRDDAKPLLRLKGFPSFPLVERQANEVDWWDMVCNVKKLINEKKEDGKVFWQNLAGYKRQEALRPYLSSEEDRKKGKKFARYQLGDLLLHLEKKHGEDWGKVYDEAWERIDKKVEGLSKHIKLEEERRSEDAQSKAALTDWLRAKASFVIEGLKEADKDEFCRCELKLQKWYGDLRGKPFAIEAENSILDISGFSKQYNCAFIWQKDGVKKLNLYLIINYFKGGKLRFKKIKPEAFEANRFYTVINKKSGEIVPMEVNFNFDDPNLIILPLAFGKRQGREFIWNDLLSLETGSLKLANGRVIEKTLYNRRTRQDEPALFVALTFERREVLDSSNIKPMNLIGVDRGENIPAVIALTDPEGCPLSRFKDSLGNPTHILRIGESYKEKQRTIQAKKEVEQRRAGGYSRKYASKAKNLADDMVRNTARDLLYYAVTQDAMLIFENLSRGFGRQGKRTFMAERQYTRMEDWLTAKLAYEGLPSKVYLSKTLAQYTSKTCSNCGFTITSADYDRVLEKLKKTATGWMTTINGKELKVEGQITYYNRYKRQNVVKDLSVELDRLSEESVNNDISSWTKGRSGNEALSLLKKRFSHRPVQEKFVCLNCGFETHADEQAALNIARSWLFLRSQEYKKYQTNKTTGNTDKRAFVETWQSFYRKKLKEVWKPAV

SEQ ID NO: 46859 - protein, 979 aa, synthetic construct
  REGION 1..979: note = engineered CasX variant
QEIKRINKIRRRLVKDSNTKKAGKTGPMKTLLVRVMTPDLRERLENLRKKPENIPQPISNTSRANLNKLLTDYTEMKKAILHVYWEEFQKDPVGLMSRVAQPASKKIDQNKLKPEMDEKGNLTTAGFACSQCGQPLFVYKLEQVSEKGKAYTNYFGRCNVAEHEKLILLAQLKPEKDSDEAVTYSLGKFGQRALDFYSIHVTKESTHPVKPLAQIAGNRYASTPVGKALSDACMGTIASFLSKYQDIIIEHQKVVKGNQKRLESLRELAGKENLEYPSVTLPPQPHTKEGVDAYNEVIARVRMWVNLNLWQKLKLSRDDAKPLLRLKGFPSFPLVERQANEVDWWDMVCNVKKLINEKKEDGKVFWQNLAGYKRQEALRPYLSSEEDRKKGKKFARYQLGDLLLHLEKKHGEDWGKVYDEAWERIDKKVEGLSKHIKLEEERRSEDAQSKAALTDWLRAKASFVIEGLKEADKDEFCRCELKLQKWYGDLRGKPFAIEAENSILDISGFSKQYNCAFIWQKDGVKKLNLYLIINYFKGGKLRFKKIKPEAFEANRFYTVINKKSGEIVPMEVNFNFDDPNLIILPLAFGKRQGREFIWNDLLSLETGSLKLANGRVIEKTLYNRRTRQDEPALFVALTFERREVLDSSNIKPMNLIGVDRGENIPAVIALTDPEGCPLSRFKDSLGNPTHILRIGESYKEKQRTIQAKKEVEQRRAGGYSRKYASKAKNLADDMVRNTARDLLYYAVTQDAMLIFENLSRGFGRQGKRTFMAERQYTRMEDWLTAKLAYEGLPSKVYLSKTLAQYTSKTCSNCGFTITSADYDRVLEKLKKTATGWMTTINGKELKVEGQITYYNRYKRQNVVKDLSVELDRLSEESVNNDISSWTKGRSGNEALSLLKKRFSHRPVQEKFVCLNCGFETHADEQAALNIARSWLFLRSQEYKKYQTNKTTGNTDKRAFVETWQSFYRKKLKEVWKPAV

SEQ ID NO: 46860 - protein, 979 aa, synthetic construct
  REGION 1..979: note = engineered CasX variant
QEIKRINKIRRRLVKDSNTKKAGKTGPMKTLLVRVMTPDLRERLENLRKKPENIPQPISNTSRANLNKLLTDYTEMKKAILHVYWEEFQKDPVGLMSRVAQPASKKIDQNKLKPEMDEKGNLTTAGFACSQCGQPLFVYKLEQVSEKGKAYTNYFGRCNVAEHEKLILLAQLKPEKDSDEAVTYSLGKFGQRALDFYSIHVTKESTHPVKPLAQIAGNRYASAPVGKALSDACMGTIASFLSKYQDIIIEHQKVVKGNQKRLESLRELAGKENLEYPSVTLPPQPHTKEGVDAYNEVIARVRMWVNLNLWQKLKLSRDDAKPLLRLKGFPSFPLVERQANEVDWWDMVCNVKKLINEKKEDGKVFWQNLAGYKRQEALRPYLSSEEDRKKGKKFARYQLGDLLLHLEKKHGEDWGKVYDEAWERIDKKVEGLSKHIKLEEERRSEDAQSKAALTDWLRAKASFVIEGLKEADKDEFCRCELKLQKWYGDLRGKPFAIEAENSILDISGFSKQYNCAFIWQKDGVKKLNLYLIINYFKGGKLRFKKIKPEAFEANRFYTVINKKSGEIVPMEVNFNFDDPNLIILPLAFGKRQGREFIWNDLLSLETGSLKLANGRVIEKTLYNRRTRQDEPALFVALTFERREVLDSSNIKPMNLIGVDRGENIPAVIALTDPEGCPLSRFKDSLGNPTHILRIGESYKEKQRTIQAKKEVEQRRAGGYSRKYASKAKNLADDMVRNTARDLLYYAVTQDAMLIFENLSRGFGRQGKRTFMAERQYTRMEDWLTAKLAYEGLPSKVYLSKTLAQYTSKTCSNCGFTITSADYDRVLEKLKKTATGWMTTINGKELKVEGQITYYNRYKRQNVVKDLSVELDRLSEESVNNDISSWTKGRSGNEALSLLKKRFSHRPVQEKFVCLNCGFETHADEQAALNIARSWLFLRSQEYKKYQTNKTTGNTDKRAFVETWQSFYRKKLKEVWKPAV

SEQ ID NO: 46861 - protein, 979 aa, synthetic construct
  REGION 1..979: note = engineered CasX variant
QEIKRINKIRRRLVKDSNTKKAGKTGPMKTLLVRVMTPDLRERLENLRKKPENIPQPISNTSRANLNKLLTDYTEMKKAILHVYWEEFQKDPVGLMSRVAQPASKKIDQNKLKPEMDEKGNLTTAGFACSQCGQPLFVYKLEQVSEKGKAYTNYFGRCNVAEHEKLILLAQLKPEKDSDEAVTYSLGKFGQRALDFYSIHVTKESTHPVKPLAQIAGNRYASVPVGKALSDACMGTIASFLSKYQDIIIEHQKVVKGNQKRLESLRELAGKENLEYPSVTLPPQPHTKEGVDAYNEVIARVRMWVNLNLWQKLKLSRDDAKPLLRLKGFPSFPLVERQANEVDWWDMVCNVKKLINEKKEDGKVFWQNLAGYKRQEALRPYLSSEEDRKKGKKFARYQLGDLLLHLEKKHGEDWGKVYDEAWERIDKKVEGLSKHIKLEEERRSEDAQSKAALTDWLRAKASFVIEGLKEADKDEFCRCELKLQKWYGDLRGKPFAIEAENSILDISGFSKQYNCAFIWQKDGVKKLNLYLIINYFKGGKLRFKKIKPEAFEANRFYTVINKKSGEIVPMEVNFNFDDPNLIILPLAFGKRQGREFIWNDLLSLETGSLKLANGRVIEKTLYNRRTRQDEPALFVALTFERREVLDSSNIKPMNLIGVDRGENIPAVIALTDPEGCPLSRFKDSLGNPTHILRIGESYKEKQRTIQAKKEVEQRRAGGYSRKYASKAKNLADDMVRNTARDLLYYAVTQDAMLIFENLSRGFGRQGKRTFMAERQYTRMEDWLTAKLAYEGLPSKVYLSKTLAQYTSKTCSNCGFTITSADYDRVLEKLKKTATGWMTTINGKELKVEGQITYYNRYKRQNVVKDLSVELDRLSEESVNNDISSWTKGRSGNEALSLLKKRFSHRPVQEKFVCLNCGFETHADEQAALNIARSWLFLRSQEYKKYQTNKTTGNTDKRAFVETWQSFYRKKLKEVWKPAV

SEQ ID NO: 46862 - protein, 979 aa, synthetic construct
  REGION 1..979: note = engineered CasX variant
QEIKRINKIRRRLVKDSNTKKAGKTGPMKTLLVRVMTPDLRERLENLRKKPENIPQPISNTSRANLNKLLTDYTEMKKAILHVYWEEFQKDPVGLMSRVAQPASKKIDQNKLKPEMDEKGNLTTAGFACSQCGQPLFVYKLEQVSEKGKAYTNYFGRCNVAEHEKLIKLAQLKPEKDSDEAVTYSLGKFGQRALDFYSIHVTKESTHPVKPLAQIAGNRYASGPVGKALSDACMGTIASFLSKYQDIIIEHQKVVKGNQKRLESLRELAGKENLEYPSVTLPPQPHTKEGVDAYNEVIARVRMWVNLNLWQKLKLSRDDAKPLLRLKGFPSFPLVERQANEVDWWDMVCNVKKLINEKKEDGKVFWQNLAGYKRQEALRPYLSSEEDRKKGKKFARYQLGDLLLHLEKKHGEDWGKVYDEAWERIDKKVEGLSKHIKLEEERRSEDAQSKAALTDWLRAKASFVIEGLKEADKDEFCRCELKLQKWYGDLRGKPFAIEAENSILDISGFSKQYNCAFIWQKDGVKKLNLYLIINYFKGGKLRFKKIKPEAFEANRFYTVINKKSGEIVPMEVNFNFDDPNLIILPLAFGKRQGREFIWNDLLSLETGSLKLANGRVIEKTLYNRRTRQDEPALFVALTFERREVLDSSNIKPMNLIGVDRGENIPAVIALTDPEGCPLSRFKDSLGNPTHILRIGESYKEKQRTIQAKKEVEQRRAGGYSRKYASKAKNLADDMVRNTARDLLYYAVTQDAMLIFENLSRGFGRQGKRTFMAERQYTRMEDWLTAKLAYEGLPSKVYLSKTLAQYTSKTCSNCGFTITSADYDRVLEKLKKTATGWMTTINGKELKVEGQITYYNRYKRQNVVKDLSVELDRLSEESVNNDISSWTKGRSGNEALSLLKKRFSHRPVQEKFVCLNCGFETHADEQAALNIARSWLFLRSQEYKKYQTNKTTGNTDKRAFVETWQSFYRKKLKEVWKPAV

SEQ ID NO: 46863 - protein, 978 aa, synthetic construct
  REGION 1..978: note = engineered CasX variant
QEIKRINKIRRRLVKDSNTKKAGKTGPMKTLLVRVMTPDLRERLENLRKKPENIPQPISNTSRANLNKLLTDYTEMKKAILHVYWEEFQKDPVGLMSRVAQPASKKIDQNKLKPEMDEKGNLTTAGFACSQCGQPLFVYKLEQVSEKGKAYTNYFGRCNVAEHEKLILLAQLKPEKDSDEAVTYSLGKFGQRALDFYSIHVTKESTHPVKPLAQIAGNRYASPVGKALSDACMGTIASFLSKYQDIIIEHQKVVKGNQKRLESLRELAGKENLEYPSVTLPPQPHTKEGVDAYNEVIARVRMWVNLNLWQKLKLSRDDAKPLLRLKGFPSFPLVERQANEVDWWDMVCNVKKLINEKKEDGKVFWQNLAGYKRQEALRPYLSSEEDRKKGKKFARYQLGDLLLHLEKKHGEDWGKVYDEAWERIDKKVEGLSKHIKLEEERRSEDAQSKAALTDWLRAKASFVIEGLKEADKDEFCRCELKLQKWYGDLRGKPFAIEAENSILDISGFSKQYNCAFIWQKDGVKKLNLYLIINYFKGGKLRFKKIKPEAFEANRFYTVINKKSGEIVPMEVNFNFDDPNLIILPLAFGKRQGREFIWNDLLSLETGSLKLANGRVIEKTLYNRRTRQDEPALFVALTFERREVLDSSNIKPMNLIGVDRGENIPAVIALTDPEGCPLSRFKDSLGNPTHILRIGESYKEKQRTIQAKKEVEQRRAGGYSRKYASKAKNLADDMVRNTARDLLYYAVTQDAMLIFENLSRGFGRQGKRTFMAERQYTRMEDWLTAKLAYEGLPSKVYLSKTLAQYTSKTCSNCGFTITSADYDRVLEKLKKTATGWMTTINGKELKVEGQITYYNRYKRQNVVKDLSVELDRLSEESVNNDISSWTKGRSGNEALSLLKKRFSHRPVQEKFVCLNCGFETHADEQAALNIARSWLFLRSQEYKKYQTNKTTGNTDKRAFVETWQSFYRKKLKEVWKPAV

SEQ ID NO: 46864 - protein, 978 aa, synthetic construct
  REGION 1..978: note = engineered CasX variant
QEIKRINKIRRRLVKDSNTKKAGKTGPMKTLLVRVMTPDLRERLENLRKKPENIPQPISNTSRANLNKLLTDYTEMKKAILHVYWEEFQKDPVGLMSRVAQPASKKIDQNKLKPEMDEKGNLTTAGFACSQCGQPLFVYKLEQVSEKGKAYTNYFGRCNVAEHEKLILLAQLKPEKDSDEAVTYSLGKFGQRALDFYSIHVTKESTHPVKPLAQIAGNRYASYPVGKALSDACMGTIASFLSKYQDIIIEHQKVVKGNQKRLESLRELAGKENLEYPSVTLPPQPHTKEGVDAYNEVIARVRMWVNLNLWQKLKLSRDDAKPLLRLKGFPSFPLVERQANEVDWWDMVCNVKKLINEKKEDGKVFWQNLAGYKRQEALRPYLSSEEDRQKGKKFARYQLGDLLLHLEKKHGEDWGKVYDEAWERIDKKVEGLSKHIKLEEERRSEDAQSKAALTDWLRAKASFVIEGLKEADKDEFCRCELKLQKWYGDLRGKPFAIEAENSILDISGFSKQYNCAFIWQKDGVKKLNLYLIINYFKGGKLRFKKIKPEAFEANRFYTVINKKSGEIVPMEVNFNFDDPNLIILPLAFGKRQGREFIWNDLLSLETGSLKLANGRVIEKTLYNRRTRQDEPALFVALTFERREVLDSSNIKPMNLIGVDRGENIPAVIALTDPEGCPLSRFKDSLGNPTHILRIGESYKEKQRTIQAKKEVEQRRAGGYSRKYASKAKNLADDMVRNTARDLLYYAVTQDAMLIFENLSRGFGRQGKRTFMAERQYTRMEDWLTAKLAYEGLPSKVYLSKTLAQYTSKTCSNCGFTITSADYDRVLEKLKKTATGWMTTINGKELKVEGQITYYNRYKRQNVVKDLSVELDRLSEESVNNDISSWTKGRSGEALSLLKKRFSHRPVQEKFVCLNCGFETHADEQAALNIARSWLFLRSQEYKKYQTNKTTGNTDKRAFVETWQSFYRKKLKEVWKPAV

SEQ ID NO: 46865 - protein, 978 aa, synthetic construct
  REGION 1..978: note = engineered CasX variant
QEIKRINKIRRRLVKDSNTKKAGKTGPMKTLLVRVMTPDLRERLENLRKKPENIPQPISNTSRANLNKLLTDYTEMKKAILHVYWEEFQKDPVGLMSRVAQPASKKIDQNKLKPEMDEKGNLTTAGFACSQCGQPLFVYKLEQVSEKGKAYTNYFGRCNVAEHEKLILLAQLKPEKDSDEAVTYSLGKFGQRALDFYSIHVTKESTHPVKPLAQIAGNRYASHPVGKALSDACMGTIASFLSKYQDIIIEHQKVVKGNQKRLESLRELAGKENLEYPSVTLPPQPHTKEGVDAYNEVIARVRMWVNLNLWQKLKLSRDDAKPLLRLKGFPSFPLVERQANEVDWWDMVCNVKKLINEKKEDGKVFWQNLAGYKRQEALRPYLSSEEDRQKGKKFARYQLGDLLLHLEKKHGEDWGKVYDEAWERIDKKVEGLSKHIKLEEERRSEDAQSKAALTDWLRAKASFVIEGLKEADKDEFCRCELKLQKWYGDLRGKPFAIEAENSILDISGFSKQYNCAFIWQKDGVKKLNLYLIINYFKGGKLRFKKIKPEAFEANRFYTVINKKSGEIVPMEVNFNFDDPNLIILPLAFGKRQGREFIWNDLLSLETGSLKLANGRVIEKTLYNRRTRQDEPALFVALTFERREVLDSSNIKPMNLIGVDRGENIPAVIALTDPEGCPLSRFKDSLGNPTHILRIGESYKEKQRTIQAKKEVEQRRAGGYSRKYASKAKNLADDMVRNTARDLLYYAVTQDAMLIFENLSRGFGRQGKRTFMAERQYTRMEDWLTAKLAYEGLPSKVYLSKTLAQYTSKTCSNCGFTITSADYDRVLEKLKKTATGWMTTINGKELKVEGQITYYNRYKRQNVVKDLSVELDRLSEESVNNDISSWTKGRSGEALSLLKKRFSHRPVQEKFVCLNCGFETHADEQAALNIARSWLFLRSQEYKKYQTNKTTGNTDKRAFVETWQSFYRKKLKEVWKPAV

SEQ ID NO: 46866 - protein, 978 aa, synthetic construct
  REGION 1..978: note = engineered CasX variant
QEIKRINKIRRRLVKDSNTKKAGKTGPMKTLLVRVMTPDLRERLENLRKKPENIPQPISNTSRANLNKLLTDYTEMKKAILHVYWEEFQKDPVGLMSRVAQPASKKIDQNKLKPEMDEKGNLTTAGFACSQCGQPLFVYKLEQVSEKGKAYTNYFGRCNVAEHEKLILLAQLKPEKDSDEAVTYSLGKFGQRALDFYSIHVTKESTHPVKPLAQIAGNRYASSPVGKALSDACMGTIASFLSKYQDIIIEHQKVVKGNQKRLESLRELAGKENLEYPSVTLPPQPHTKEGVDAYNEVIARVRMWVNLNLWQKLKLSRDDAKPLLRLKGFPSFPLVERQANEVDWWDMVCNVKKLINEKKEDGKVFWQNLAGYKRQEALRPYLSSEEDRQKGKKFARYQLGDLLLHLEKKHGEDWGKVYDEAWERIDKKVEGLSKHIKLEEERRSEDAQSKAALTDWLRAKASFVIEGLKEADKDEFCRCELKLQKWYGDLRGKPFAIEAENSILDISGFSKQYNCAFIWQKDGVKKLNLYLIINYFKGGKLRFKKIKPEAFEANRFYTVINKKSGEIVPMEVNFNFDDPNLIILPLAFGKRQGREFIWNDLLSLETGSLKLANGRVIEKTLYNRRTRQDEPALFVALTFERREVLDSSNIKPMNLIGVDRGENIPAVIALTDPEGCPLSRFKDSLGNPTHILRIGESYKEKQRTIQAKKEVEQRRAGGYSRKYASKAKNLADDMVRNTARDLLYYAVTQDAMLIFENLSRGFGRQGKRTFMAERQYTRMEDWLTAKLAYEGLPSKVYLSKTLAQYTSKTCSNCGFTITSADYDRVLEKLKKTATGWMTTINGKELKVEGQITYYNRYKRQNVVKDLSVELDRLSEESVNNDISSWTKGRSGEALSLLKKRFSHRPVQEKFVCLNCGFETHADEQAALNIARSWLFLRSQEYKKYQTNKTTGNTDKRAFVETWQSFYRKKLKEVWKPAV

SEQ ID NO: 46867 - protein, 978 aa, synthetic construct
  REGION 1..978: note = engineered CasX variant
QEIKRINKIRRRLVKDSNTKKAGKTGPMKTLLVRVMTPDLRERLENLRKKPENIPQPISNTSRANLNKLLTDYTEMKKAILHVYWEEFQKDPVGLMSRVAQPASKKIDQNKLKPEMDEKGNLTTAGFACSQCGQPLFVYKLEQVSEKGKAYTNYFGRCNVAEHEKLILLAQLKPEKDSDEAVTYSLGKFGQRALDFYSIHVTKESTHPVKPLAQIAGNRYASTPVGKALSDACMGTIASFLSKYQDIIIEHQKVVKGNQKRLESLRELAGKENLEYPSVTLPPQPHTKEGVDAYNEVIARVRMWVNLNLWQKLKLSRDDAKPLLRLKGFPSFPLVERQANEVDWWDMVCNVKKLINEKKEDGKVFWQNLAGYKRQEALRPYLSSEEDRQKGKKFARYQLGDLLLHLEKKHGEDWGKVYDEAWERIDKKVEGLSKHIKLEEERRSEDAQSKAALTDWLRAKASFVIEGLKEADKDEFCRCELKLQKWYGDLRGKPFAIEAENSILDISGFSKQYNCAFIWQKDGVKKLNLYLIINYFKGGKLRFKKIKPEAFEANRFYTVINKKSGEIVPMEVNFNFDDPNLIILPLAFGKRQGREFIWNDLLSLETGSLKLANGRVIEKTLYNRRTRQDEPALFVALTFERREVLDSSNIKPMNLIGVDRGENIPAVIALTDPEGCPLSRFKDSLGNPTHILRIGESYKEKQRTIQAKKEVEQRRAGGYSRKYASKAKNLADDMVRNTARDLLYYAVTQDAMLIFENLSRGFGRQGKRTFMAERQYTRMEDWLTAKLAYEGLPSKVYLSKTLAQYTSKTCSNCGFTITSADYDRVLEKLKKTATGWMTTINGKELKVEGQITYYNRYKRQNVVKDLSVELDRLSEESVNNDISSWTKGRSGEALSLLKKRFSHRPVQEKFVCLNCGFETHADEQAALNIARSWLFLRSQEYKKYQTNKTTGNTDKRAFVETWQSFYRKKLKEVWKPAV

SEQ ID NO: 46868 - protein, 978 aa, synthetic construct
  REGION 1..978: note = engineered CasX variant
QEIKRINKIRRRLVKDSNTKKAGKTGPMKTLLVRVMTPDLRERLENLRKKPENIPQPISNTSRANLNKLLTDYTEMKKAILHVYWEEFQKDPVGLMSRVAQPASKKIDQNKLKPEMDEKGNLTTAGFACSQCGQPLFVYKLEQVSEKGKAYTNYFGRCNVAEHEKLILLAQLKPEKDSDEAVTYSLGKFGQRALDFYSIHVTKESTHPVKPLAQIAGNRYASAPVGKALSDACMGTIASFLSKYQDIIIEHQKVVKGNQKRLESLRELAGKENLEYPSVTLPPQPHTKEGVDAYNEVIARVRMWVNLNLWQKLKLSRDDAKPLLRLKGFPSFPLVERQANEVDWWDMVCNVKKLINEKKEDGKVFWQNLAGYKRQEALRPYLSSEEDRQKGKKFARYQLGDLLLHLEKKHGEDWGKVYDEAWERIDKKVEGLSKHIKLEEERRSEDAQSKAALTDWLRAKASFVIEGLKEADKDEFCRCELKLQKWYGDLRGKPFAIEAENSILDISGFSKQYNCAFIWQKDGVKKLNLYLIINYFKGGKLRFKKIKPEAFEANRFYTVINKKSGEIVPMEVNFNFDDPNLIILPLAFGKRQGREFIWNDLLSLETGSLKLANGRVIEKTLYNRRTRQDEPALFVALTFERREVLDSSNIKPMNLIGVDRGENIPAVIALTDPEGCPLSRFKDSLGNPTHILRIGESYKEKQRTIQAKKEVEQRRAGGYSRKYASKAKNLADDMVRNTARDLLYYAVTQDAMLIFENLSRGFGRQGKRTFMAERQYTRMEDWLTAKLAYEGLPSKVYLSKTLAQYTSKTCSNCGFTITSADYDRVLEKLKKTATGWMTTINGKELKVEGQITYYNRYKRQNVVKDLSVELDRLSEESVNNDISSWTKGRSGEALSLLKKRFSHRPVQEKFVCLNCGFETHADEQAALNIARSWLFLRSQEYKKYQTNKTTGNTDKRAFVETWQSFYRKKLKEVWKPAV

SEQ ID NO: 46869 - protein, 978 aa, synthetic construct
  REGION 1..978: note = engineered CasX variant
QEIKRINKIRRRLVKDSNTKKAGKTGPMKTLLVRVMTPDLRERLENLRKKPENIPQPISNTSRANLNKLLTDYTEMKKAILHVYWEEFQKDPVGLMSRVAQPASKKIDQNKLKPEMDEKGNLTTAGFACSQCGQPLFVYKLEQVSEKGKAYTNYFGRCNVAEHEKLILLAQLKPEKDSDEAVTYSLGKFGQRALDFYSIHVTKESTHPVKPLAQIAGNRYASVPVGKALSDACMGTIASFLSKYQDIIIEHQKVVKGNQKRLESLRELAGKENLEYPSVTLPPQPHTKEGVDAYNEVIARVRMWVNLNLWQKLKLSRDDAKPLLRLKGFPSFPLVERQANEVDWWDMVCNVKKLINEKKEDGKVFWQNLAGYKRQEALRPYLSSEEDRQKGKKFARYQLGDLLLHLEKKHGEDWGKVYDEAWERIDKKVEGLSKHIKLEEERRSEDAQSKAALTDWLRAKASFVIEGLKEADKDEFCRCELKLQKWYGDLRGKPFAIEAENSILDISGFSKQYNCAFIWQKDGVKKLNLYLIINYFKGGKLRFKKIKPEAFEANRFYTVINKKSGEIVPMEVNFNFDDPNLIILPLAFGKRQGREFIWNDLLSLETGSLKLANGRVIEKTLYNRRTRQDEPALFVALTFERREVLDSSNIKPMNLIGVDRGENIPAVIALTDPEGCPLSRFKDSLGNPTHILRIGESYKEKQRTIQAKKEVEQRRAGGYSRKYASKAKNLADDMVRNTARDLLYYAVTQDAMLIFENLSRGFGRQGKRTFMAERQYTRMEDWLTAKLAYEGLPSKVYLSKTLAQYTSKTCSNCGFTITSADYDRVLEKLKKTATGWMTTINGKELKVEGQITYYNRYKRQNVVKDLSVELDRLSEESVNNDISSWTKGRSGEALSLLKKRFSHRPVQEKFVCLNCGFETHADEQAALNIARSWLFLRSQEYKKYQTNKTTGNTDKRAFVETWQSFYRKKLKEVWKPAV

SEQ ID NO: 46870 - protein, 978 aa, synthetic construct
  REGION 1..978: note = engineered CasX variant
QEIKRINKIRRRLVKDSNTKKAGKTGPMKTLLVRVMTPDLRERLENLRKKPENIPQPISNTSRANLNKLLTDYTEMKKAILHVYWEEFQKDPVGLMSRVAQPASKKIDQNKLKPEMDEKGNLTTAGFACSQCGQPLFVYKLEQVSEKGKAYTNYFGRCNVAEHEKLIKLAQLKPEKDSDEAVTYSLGKFGQRALDFYSIHVTKESTHPVKPLAQIAGNRYASGPVGKALSDACMGTIASFLSKYQDIIIEHQKVVKGNQKRLESLRELAGKENLEYPSVTLPPQPHTKEGVDAYNEVIARVRMWVNLNLWQKLKLSRDDAKPLLRLKGFPSFPLVERQANEVDWWDMVCNVKKLINEKKEDGKVFWQNLAGYKRQEALRPYLSSEEDRQKGKKFARYQLGDLLLHLEKKHGEDWGKVYDEAWERIDKKVEGLSKHIKLEEERRSEDAQSKAALTDWLRAKASFVIEGLKEADKDEFCRCELKLQKWYGDLRGKPFAIEAENSILDISGFSKQYNCAFIWQKDGVKKLNLYLIINYFKGGKLRFKKIKPEAFEANRFYTVINKKSGEIVPMEVNFNFDDPNLIILPLAFGKRQGREFIWNDLLSLETGSLKLANGRVIEKTLYNRRTRQDEPALFVALTFERREVLDSSNIKPMNLIGVDRGENIPAVIALTDPEGCPLSRFKDSLGNPTHILRIGESYKEKQRTIQAKKEVEQRRAGGYSRKYASKAKNLADDMVRNTARDLLYYAVTQDAMLIFENLSRGFGRQGKRTFMAERQYTRMEDWLTAKLAYEGLPSKVYLSKTLAQYTSKTCSNCGFTITSADYDRVLEKLKKTATGWMTTINGKELKVEGQITYYNRYKRQNVVKDLSVELDRLSEESVNNDISSWTKGRSGEALSLLKKRFSHRPVQEKFVCLNCGFETHADEQAALNIARSWLFLRSQEYKKYQTNKTTGNTDKRAFVETWQSFYRKKLKEVWKPAV

SEQ ID NO: 46871 - protein, 977 aa, synthetic construct
  REGION 1..977: note = engineered CasX variant
QEIKRINKIRRRLVKDSNTKKAGKTGPMKTLLVRVMTPDLRERLENLRKKPENIPQPISNTSRANLNKLLTDYTEMKKAILHVYWEEFQKDPVGLMSRVAQPASKKIDQNKLKPEMDEKGNLTTAGFACSQCGQPLFVYKLEQVSEKGKAYTNYFGRCNVAEHEKLILLAQLKPEKDSDEAVTYSLGKFGQRALDFYSIHVTKESTHPVKPLAQIAGNRYASPVGKALSDACMGTIASFLSKYQDIIIEHQKVVKGNQKRLESLRELAGKENLEYPSVTLPPQPHTKEGVDAYNEVIARVRMWVNLNLWQKLKLSRDDAKPLLRLKGFPSFPLVERQANEVDWWDMVCNVKKLINEKKEDGKVFWQNLAGYKRQEALRPYLSSEEDRQKGKKFARYQLGDLLLHLEKKHGEDWGKVYDEAWERIDKKVEGLSKHIKLEEERRSEDAQSKAALTDWLRAKASFVIEGLKEADKDEFCRCELKLQKWYGDLRGKPFAIEAENSILDISGFSKQYNCAFIWQKDGVKKLNLYLIINYFKGGKLRFKKIKPEAFEANRFYTVINKKSGEIVPMEVNFNFDDPNLIILPLAFGKRQGREFIWNDLLSLETGSLKLANGRVIEKTLYNRRTRQDEPALFVALTFERREVLDSSNIKPMNLIGVDRGENIPAVIALTDPEGCPLSRFKDSLGNPTHILRIGESYKEKQRTIQAKKEVEQRRAGGYSRKYASKAKNLADDMVRNTARDLLYYAVTQDAMLIFENLSRGFGRQGKRTFMAERQYTRMEDWLTAKLAYEGLPSKVYLSKTLAQYTSKTCSNCGFTITSADYDRVLEKLKKTATGWMTTINGKELKVEGQITYYNRYKRQNVVKDLSVELDRLSEESVNNDISSWTKGRSGEALSLLKKRFSHRPVQEKFVCLNCGFETHADEQAALNIARSWLFLRSQEYKKYQTNKTTGNTDKRAFVETWQSFYRKKLKEVWKPAV

SEQ ID NO: 46872 - protein, 978 aa, synthetic construct
  REGION 1..978: note = engineered CasX variant
QEIKRINKIRRRLVKDSNTKKAGKTGPMKTLLVRVMTPDLRERLENLRKKPENIPQPISNTSRANLNKLLTDYTEMKKAILHVYWEEFQKDPVGLMSRVAQPASKKIDQNKLKPEMDEKGNLTTAGFACSQCGQPLFVYKLEQVSEKGKAYTNYFGRCNVAEHEKLILLAQLKPEKDSDEAVTYSLGKFGQRALDFYSIHVTKESTHPVKPLAQIAGNRYASYPVGKALSDACMGTIASFLSKYQDIIIEHQKVVKGNQKRLESLRELAGKENLEYPSVTLPPQPHTKEGVDAYNEVIARVRMWVNLNLWQKLKLSRDDAKPLLRLKGFPSFPLVERQANEVDWWDMVCNVKKLINEKKEDGKVFWQNLAGYKRQEALRPYLSSEEDRKKGKKFARYQLGDLLLHLEKKHGEDWGKVYDEAWERIDKKVEGLSKHIKLEEERRSEDAQSKAALTDWLRAKASFVIEGLKEADKDEFCRCELKLQKWYGDLRGKPFAIEAENSILDISGFSKQYNCAFIWQKDGVKKLNLYLIINYFKGGKLRFKKIKPEAFEANRFYTVINKKSGEIVPMEVNFNFDDPNLIILPLAFGKRQGREFIWNDLLSLETGSLKLANGRVIEKTLYNRRTRQDEPALFVALTFERREVLDSSNIKPMNLIGVDRGENIPAVIALTDPEGCPLSRFKDSLGNPTHILRIGESYKEKQRTIQAKKEVEQRRAGGYSRKYASKAKNLADDMVRNTARDLLYYAVTQDAMLIFENLSRGFGRQGKRTFMAERQYTRMEDWLTAKLAYEGLPSQVYLSKTLAQYTSKTCSNCGFTITSADYDRVLEKLKKTATGWMTTINGKELKVEGQITYYNRYKRQNVVKDLSVELDRLSEESVNNDISSWTKGRSGEALSLLKKRFSHRPVQEKFVCLNCGFETHADEQAALNIARSWLFLRSQEYKKYQTNKTTGNTDKRAFVETWQSFYRKKLKEVWKPAV

SEQ ID NO: 46873 - protein, 978 aa, synthetic construct
  REGION 1..978: note = engineered CasX variant
QEIKRINKIRRRLVKDSNTKKAGKTGPMKTLLVRVMTPDLRERLENLRKKPENIPQPISNTSRANLNKLLTDYTEMKKAILHVYWEEFQKDPVGLMSRVAQPASKKIDQNKLKPEMDEKGNLTTAGFACSQCGQPLFVYKLEQVSEKGKAYTNYFGRCNVAEHEKLILLAQLKPEKDSDEAVTYSLGKFGQRALDFYSIHVTKESTHPVKPLAQIAGNRYASHPVGKALSDACMGTIASFLSKYQDIIIEHQKVVKGNQKRLESLRELAGKENLEYPSVTLPPQPHTKEGVDAYNEVIARVRMWVNLNLWQKLKLSRDDAKPLLRLKGFPSFPLVERQANEVDWWDMVCNVKKLINEKKEDGKVFWQNLAGYKRQEALRPYLSSEEDRKKGKKFARYQLGDLLLHLEKKHGEDWGKVYDEAWERIDKKVEGLSKHIKLEEERRSEDAQSKAALTDWLRAKASFVIEGLKEADKDEFCRCELKLQKWYGDLRGKPFAIEAENSILDISGFSKQYNCAFIWQKDGVKKLNLYLIINYFKGGKLRFKKIKPEAFEANRFYTVINKKSGEIVPMEVNFNFDDPNLIILPLAFGKRQGREFIWNDLLSLETGSLKLANGRVIEKTLYNRRTRQDEPALFVALTFERREVLDSSNIKPMNLIGVDRGENIPAVIALTDPEGCPLSRFKDSLGNPTHILRIGESYKEKQRTIQAKKEVEQRRAGGYSRKYASKAKNLADDMVRNTARDLLYYAVTQDAMLIFENLSRGFGRQGKRTFMAERQYTRMEDWLTAKLAYEGLPSQVYLSKTLAQYTSKTCSNCGFTITSADYDRVLEKLKKTATGWMTTINGKELKVEGQITYYNRYKRQNVVKDLSVELDRLSEESVNNDISSWTKGRSGEALSLLKKRFSHRPVQEKFVCLNCGFETHADEQAALNIARSWLFLRSQEYKKYQTNKTTGNTDKRAFVETWQSFYRKKLKEVWKPAV

SEQ ID NO: 46874 - protein, 978 aa, synthetic construct
  REGION 1..978: note = engineered CasX variant
QEIKRINKIRRRLVKDSNTKKAGKTGPMKTLLVRVMTPDLRERLENLRKKPENIPQPISNTSRANLNKLLTDYTEMKKAILHVYWEEFQKDPVGLMSRVAQPASKKIDQNKLKPEMDEKGNLTTAGFACSQCGQPLFVYKLEQVSEKGKAYTNYFGRCNVAEHEKLILLAQLKPEKDSDEAVTYSLGKFGQRALDFYSIHVTKESTHPVKPLAQIAGNRYASSPVGKALSDACMGTIASFLSKYQDIIIEHQKVVKGNQKRLESLRELAGKENLEYPSVTLPPQPHTKEGVDAYNEVIARVRMWVNLNLWQKLKLSRDDAKPLLRLKGFPSFPLVERQANEVDWWDMVCNVKKLINEKKEDGKVFWQNLAGYKRQEALRPYLSSEEDRKKGKKFARYQLGDLLLHLEKKHGEDWGKVYDEAWERIDKKVEGLSKHIKLEEERRSEDAQSKAALTDWLRAKASFVIEGLKEADKDEFCRCELKLQKWYGDLRGKPFAIEAENSILDISGFSKQYNCAFIWQKDGVKKLNLYLIINYFKGGKLRFKKIKPEAFEANRFYTVINKKSGEIVPMEVNFNFDDPNLIILPLAFGKRQGREFIWNDLLSLETGSLKLANGRVIEKTLYNRRTRQDEPALFVALTFERREVLDSSNIKPMNLIGVDRGENIPAVIALTDPEGCPLSRFKDSLGNPTHILRIGESYKEKQRTIQAKKEVEQRRAGGYSRKYASKAKNLADDMVRNTARDLLYYAVTQDAMLIFENLSRGFGRQGKRTFMAERQYTRMEDWLTAKLAYEGLPSQVYLSKTLAQYTSKTCSNCGFTITSADYDRVLEKLKKTATGWMTTINGKELKVEGQITYYNRYKRQNVVKDLSVELDRLSEESVNNDISSWTKGRSGEALSLLKKRFSHRPVQEKFVCLNCGFETHADEQAALNIARSWLFLRSQEYKKYQTNKTTGNTDKRAFVETWQSFYRKKLKEVWKPAV

SEQ ID NO: 46875 - protein, 978 aa, synthetic construct
  REGION 1..978: note = engineered CasX variant
QEIKRINKIRRRLVKDSNTKKAGKTGPMKTLLVRVMTPDLRERLENLRKKPENIPQPISNTSRANLNKLLTDYTEMKKAILHVYWEEFQKDPVGLMSRVAQPASKKIDQNKLKPEMDEKGNLTTAGFACSQCGQPLFVYKLEQVSEKGKAYTNYFGRCNVAEHEKLILLAQLKPEKDSDEAVTYSLGKFGQRALDFYSIHVTKESTHPVKPLAQIAGNRYASTPVGKALSDACMGTIASFLSKYQDIIIEHQKVVKGNQKRLESLRELAGKENLEYPSVTLPPQPHTKEGVDAYNEVIARVRMWVNLNLWQKLKLSRDDAKPLLRLKGFPSFPLVERQANEVDWWDMVCNVKKLINEKKEDGKVFWQNLAGYKRQEALRPYLSSEEDRKKGKKFARYQLGDLLLHLEKKHGEDWGKVYDEAWERIDKKVEGLSKHIKLEEERRSEDAQSKAALTDWLRAKASFVIEGLKEADKDEFCRCELKLQKWYGDLRGKPFAIEAENSILDISGFSKQYNCAFIWQKDGVKKLNLYLIINYFKGGKLRFKKIKPEAFEANRFYTVINKKSGEIVPMEVNFNFDDPNLIILPLAFGKRQGREFIWNDLLSLETGSLKLANGRVIEKTLYNRRTRQDEPALFVALTFERREVLDSSNIKPMNLIGVDRGENIPAVIALTDPEGCPLSRFKDSLGNPTHILRIGESYKEKQRTIQAKKEVEQRRAGGYSRKYASKAKNLADDMVRNTARDLLYYAVTQDAMLIFENLSRGFGRQGKRTFMAERQYTRMEDWLTAKLAYEGLPSQVYLSKTLAQYTSKTCSNCGFTITSADYDRVLEKLKKTATGWMTTINGKELKVEGQITYYNRYKRQNVVKDLSVELDRLSEESVNNDISSWTKGRSGEALSLLKKRFSHRPVQEKFVCLNCGFETHADEQAALNIARSWLFLRSQEYKKYQTNKTTGNTDKRAFVETWQSFYRKKLKEVWKPAV

SEQ ID NO: 46876 - protein, 978 aa, synthetic construct
  REGION 1..978: note = engineered CasX variant
QEIKRINKIRRRLVKDSNTKKAGKTGPMKTLLVRVMTPDLRERLENLRKKPENIPQPISNTSRANLNKLLTDYTEMKKAILHVYWEEFQKDPVGLMSRVAQPASKKIDQNKLKPEMDEKGNLTTAGFACSQCGQPLFVYKLEQVSEKGKAYTNYFGRCNVAEHEKLILLAQLKPEKDSDEAVTYSLGKFGQRALDFYSIHVTKESTHPVKPLAQIAGNRYASAPVGKALSDACMGTIASFLSKYQDIIIEHQKVVKGNQKRLESLRELAGKENLEYPSVTLPPQPHTKEGVDAYNEVIARVRMWVNLNLWQKLKLSRDDAKPLLRLKGFPSFPLVERQANEVDWWDMVCNVKKLINEKKEDGKVFWQNLAGYKRQEALRPYLSSEEDRKKGKKFARYQLGDLLLHLEKKHGEDWGKVYDEAWERIDKKVEGLSKHIKLEEERRSEDAQSKAALTDWLRAKASFVIEGLKEADKDEFCRCELKLQKWYGDLRGKPFAIEAENSILDISGFSKQYNCAFIWQKDGVKKLNLYLIINYFKGGKLRFKKIKPEAFEANRFYTVINKKSGEIVPMEVNFNFDDPNLIILPLAFGKRQGREFIWNDLLSLETGSLKLANGRVIEKTLYNRRTRQDEPALFVALTFERREVLDSSNIKPMNLIGVDRGENIPAVIALTDPEGCPLSRFKDSLGNPTHILRIGESYKEKQRTIQAKKEVEQRRAGGYSRKYASKAKNLADDMVRNTARDLLYYAVTQDAMLIFENLSRGFGRQGKRTFMAERQYTRMEDWLTAKLAYEGLPSQVYLSKTLAQYTSKTCSNCGFTITSADYDRVLEKLKKTATGWMTTINGKELKVEGQITYYNRYKRQNVVKDLSVELDRLSEESVNNDISSWTKGRSGEALSLLKKRFSHRPVQEKFVCLNCGFETHADEQAALNIARSWLFLRSQEYKKYQTNKTTGNTDKRAFVETWQSFYRKKLKEVWKPAV

SEQ ID NO: 46877 - protein, 978 aa, synthetic construct
  REGION 1..978: note = engineered CasX variant
QEIKRINKIRRRLVKDSNTKKAGKTGPMKTLLVRVMTPDLRERLENLRKKPENIPQPISNTSRANLNKLLTDYTEMKKAILHVYWEEFQKDPVGLMSRVAQPASKKIDQNKLKPEMDEKGNLTTAGFACSQCGQPLFVYKLEQVSEKGKAYTNYFGRCNVAEHEKLILLAQLKPEKDSDEAVTYSLGKFGQRALDFYSIHVTKESTHPVKPLAQIAGNRYASVPVGKALSDACMGTIASFLSKYQDIIIEHQKVVKGNQKRLESLRELAGKENLEYPSVTLPPQPHTKEGVDAYNEVIARVRMWVNLNLWQKLKLSRDDAKPLLRLKGFPSFPLVERQANEVDWWDMVCNVKKLINEKKEDGKVFWQNLAGYKRQEALRPYLSSEEDRKKGKKFARYQLGDLLLHLEKKHGEDWGKVYDEAWERIDKKVEGLSKHIKLEEERRSEDAQSKAALTDWLRAKASFVIEGLKEADKDEFCRCELKLQKWYGDLRGKPFAIEAENSILDISGFSKQYNCAFIWQKDGVKKLNLYLIINYFKGGKLRFKKIKPEAFEANRFYTVINKKSGEIVPMEVNFNFDDPNLIILPLAFGKRQGREFIWNDLLSLETGSLKLANGRVIEKTLYNRRTRQDEPALFVALTFERREVLDSSNIKPMNLIGVDRGENIPAVIALTDPEGCPLSRFKDSLGNPTHILRIGESYKEKQRTIQAKKEVEQRRAGGYSRKYASKAKNLADDMVRNTARDLLYYAVTQDAMLIFENLSRGFGRQGKRTFMAERQYTRMEDWLTAKLAYEGLPSQVYLSKTLAQYTSKTCSNCGFTITSADYDRVLEKLKKTATGWMTTINGKELKVEGQITYYNRYKRQNVVKDLSVELDRLSEESVNNDISSWTKGRSGEALSLLKKRFSHRPVQEKFVCLNCGFETHADEQAALNIARSWLFLRSQEYKKYQTNKTTGNTDKRAFVETWQSFYRKKLKEVWKPAV

SEQ ID NO: 46878 - protein, 978 aa, synthetic construct
  REGION 1..978: note = engineered CasX variant
QEIKRINKIRRRLVKDSNTKKAGKTGPMKTLLVRVMTPDLRERLENLRKKPENIPQPISNTSRANLNKLLTDYTEMKKAILHVYWEEFQKDPVGLMSRVAQPASKKIDQNKLKPEMDEKGNLTTAGFACSQCGQPLFVYKLEQVSEKGKAYTNYFGRCNVAEHEKLIKLAQLKPEKDSDEAVTYSLGKFGQRALDFYSIHVTKESTHPVKPLAQIAGNRYASGPVGKALSDACMGTIASFLSKYQDIIIEHQKVVKGNQKRLESLRELAGKENLEYPSVTLPPQPHTKEGVDAYNEVIARVRMWVNLNLWQKLKLSRDDAKPLLRLKGFPSFPLVERQANEVDWWDMVCNVKKLINEKKEDGKVFWQNLAGYKRQEALRPYLSSEEDRKKGKKFARYQLGDLLLHLEKKHGEDWGKVYDEAWERIDKKVEGLSKHIKLEEERRSEDAQSKAALTDWLRAKASFVIEGLKEADKDEFCRCELKLQKWYGDLRGKPFAIEAENSILDISGFSKQYNCAFIWQKDGVKKLNLYLIINYFKGGKLRFKKIKPEAFEANRFYTVINKKSGEIVPMEVNFNFDDPNLIILPLAFGKRQGREFIWNDLLSLETGSLKLANGRVIEKTLYNRRTRQDEPALFVALTFERREVLDSSNIKPMNLIGVDRGENIPAVIALTDPEGCPLSRFKDSLGNPTHILRIGESYKEKQRTIQAKKEVEQRRAGGYSRKYASKAKNLADDMVRNTARDLLYYAVTQDAMLIFENLSRGFGRQGKRTFMAERQYTRMEDWLTAKLAYEGLPSQVYLSKTLAQYTSKTCSNCGFTITSADYDRVLEKLKKTATGWMTTINGKELKVEGQITYYNRYKRQNVVKDLSVELDRLSEESVNNDISSWTKGRSGEALSLLKKRFSHRPVQEKFVCLNCGFETHADEQAALNIARSWLFLRSQEYKKYQTNKTTGNTDKRAFVETWQSFYRKKLKEVWKPAV

SEQ ID NO: 46879 - protein, 977 aa, synthetic construct
  REGION 1..977: note = engineered CasX variant
QEIKRINKIRRRLVKDSNTKKAGKTGPMKTLLVRVMTPDLRERLENLRKKPENIPQPISNTSRANLNKLLTDYTEMKKAILHVYWEEFQKDPVGLMSRVAQPASKKIDQNKLKPEMDEKGNLTTAGFACSQCGQPLFVYKLEQVSEKGKAYTNYFGRCNVAEHEKLILLAQLKPEKDSDEAVTYSLGKFGQRALDFYSIHVTKESTHPVKPLAQIAGNRYASPVGKALSDACMGTIASFLSKYQDIIIEHQKVVKGNQKRLESLRELAGKENLEYPSVTLPPQPHTKEGVDAYNEVIARVRMWVNLNLWQKLKLSRDDAKPLLRLKGFPSFPLVERQANEVDWWDMVCNVKKLINEKKEDGKVFWQNLAGYKRQEALRPYLSSEEDRKKGKKFARYQLGDLLLHLEKKHGEDWGKVYDEAWERIDKKVEGLSKHIKLEEERRSEDAQSKAALTDWLRAKASFVIEGLKEADKDEFCRCELKLQKWYGDLRGKPFAIEAENSILDISGFSKQYNCAFIWQKDGVKKLNLYLIINYFKGGKLRFKKIKPEAFEANRFYTVINKKSGEIVPMEVNFNFDDPNLIILPLAFGKRQGREFIWNDLLSLETGSLKLANGRVIEKTLYNRRTRQDEPALFVALTFERREVLDSSNIKPMNLIGVDRGENIPAVIALTDPEGCPLSRFKDSLGNPTHILRIGESYKEKQRTIQAKKEVEQRRAGGYSRKYASKAKNLADDMVRNTARDLLYYAVTQDAMLIFENLSRGFGRQGKRTFMAERQYTRMEDWLTAKLAYEGLPSQVYLSKTLAQYTSKTCSNCGFTITSADYDRVLEKLKKTATGWMTTINGKELKVEGQITYYNRYKRQNVVKDLSVELDRLSEESVNNDISSWTKGRSGEALSLLKKRFSHRPVQEKFVCLNCGFETHADEQAALNIARSWLFLRSQEYKKYQTNKTTGNTDKRAFVETWQSFYRKKLKEVWKPAV

SEQ ID NO: 46880 - protein, 978 aa, synthetic construct
  REGION 1..978: note = engineered CasX variant
QEIKRINKIRRRLVKDSNTKKAGKTGPMKTLLVRVMTPDLRERLENLRKKPENIPQPISNTSRANLNKLLTDYTEMKKAILHVYWEEFQKDPVGLMSRVAQPASKKIDQNKLKPEMDEKGNLTTAGFACSQCGQPLFVYKLEQVSEKGKAYTNYFGRCNVAEHEKLILLAQLKPEKDSDEAVTYSLGKFGQRALDFYSIHVTKESTHPVKPLAQIAGNRYASYPVGKALSDACMGTIASFLSKYQDIIIEHQKVVKGNQKRLESLRELAGKENLEYPSVTLPPQPHTKEGVDAYNEVIARVRMWVNLNLWQKLKLSRDDAKPLLRLKGFPSFPLVERQANEVDWWDMVCNVKKLINEKKEDGKVFWQNLAGYKRQEALRPYLSSEEDRKKGKKFARYQLGDLLLHLEKKHGEDWGKVYDEAWERIDKKVEGLSKHIKLEEERRSEDAQSKAALTDWLRAKASFVIEGLKEADKDEFCRCELKLQKWYGDLRGKPFAIEAENSILDISGFSKQYNCAFIWQKDGVKKLNLYLIINYFKGGKLRFKKIKPEAFEANRFYTVINKKSGEIVPMEVNFNFDDPNLIILPLAFGKRQGREFIWNDLLSLETGSLKLANGRVIEKTLYNRRTRQDEPALFVALTFERREVLDSSNIKPMNLIGVDRGENIPAVIALTDPEGCPLSRFKDSLGNPTHILRIGESYKEKQRTIQAKKEVEQRRAGGYSRKYASKAKNLADDMVRNTARDLLYYAVTQDAMLIFENLSRGFGRQGKRTFMAERQYTRMEDWLTAKLAYNGLPSKVYLSKTLAQYTSKTCSNCGFTITSADYDRVLEKLKKTATGWMTTINGKELKVEGQITYYNRYKRQNVVKDLSVELDRLSEESVNNDISSWTKGRSGEALSLLKKRFSHRPVQEKFVCLNCGFETHADEQAALNIARSWLFLRSQEYKKYQTNKTTGNTDKRAFVETWQSFYRKKLKEVWKPAV

SEQ ID NO: 46881 - protein, 978 aa, synthetic construct
  REGION 1..978: note = engineered CasX variant
QEIKRINKIRRRLVKDSNTKKAGKTGPMKTLLVRVMTPDLRERLENLRKKPENIPQPISNTSRANLNKLLTDYTEMKKAILHVYWEEFQKDPVGLMSRVAQPASKKIDQNKLKPEMDEKGNLTTAGFACSQCGQPLFVYKLEQVSEKGKAYTNYFGRCNVAEHEKLILLAQLKPEKDSDEAVTYSLGKFGQRALDFYSIHVTKESTHPVKPLAQIAGNRYASHPVGKALSDACMGTIASFLSKYQDIIIEHQKVVKGNQKRLESLRELAGKENLEYPSVTLPPQPHTKEGVDAYNEVIARVRMWVNLNLWQKLKLSRDDAKPLLRLKGFPSFPLVERQANEVDWWDMVCNVKKLINEKKEDGKVFWQNLAGYKRQEALRPYLSSEEDRKKGKKFARYQLGDLLLHLEKKHGEDWGKVYDEAWERIDKKVEGLSKHIKLEEERRSEDAQSKAALTDWLRAKASFVIEGLKEADKDEFCRCELKLQKWYGDLRGKPFAIEAENSILDISGFSKQYNCAFIWQKDGVKKLNLYLIINYFKGGKLRFKKIKPEAFEANRFYTVINKKSGEIVPMEVNFNFDDPNLIILPLAFGKRQGREFIWNDLLSLETGSLKLANGRVIEKTLYNRRTRQDEPALFVALTFERREVLDSSNIKPMNLIGVDRGENIPAVIALTDPEGCPLSRFKDSLGNPTHILRIGESYKEKQRTIQAKKEVEQRRAGGYSRKYASKAKNLADDMVRNTARDLLYYAVTQDAMLIFENLSRGFGRQGKRTFMAERQYTRMEDWLTAKLAYNGLPSKVYLSKTLAQYTSKTCSNCGFTITSADYDRVLEKLKKTATGWMTTINGKELKVEGQITYYNRYKRQNVVKDLSVELDRLSEESVNNDISSWTKGRSGEALSLLKKRFSHRPVQEKFVCLNCGFETHADEQAALNIARSWLFLRSQEYKKYQTNKTTGNTDKRAFVETWQSFYRKKLKEVWKPAV

SEQ ID NO: 46882 - protein, 978 aa, synthetic construct
  REGION 1..978: note = engineered CasX variant
QEIKRINKIRRRLVKDSNTKKAGKTGPMKTLLVRVMTPDLRERLENLRKKPENIPQPISNTSRANLNKLLTDYTEMKKAILHVYWEEFQKDPVGLMSRVAQPASKKIDQNKLKPEMDEKGNLTTAGFACSQCGQPLFVYKLEQVSEKGKAYTNYFGRCNVAEHEKLILLAQLKPEKDSDEAVTYSLGKFGQRALDFYSIHVTKESTHPVKPLAQIAGNRYASSPVGKALSDACMGTIASFLSKYQDIIIEHQKVVKGNQKRLESLRELAGKENLEYPSVTLPPQPHTKEGVDAYNEVIARVRMWVNLNLWQKLKLSRDDAKPLLRLKGFPSFPLVERQANEVDWWDMVCNVKKLINEKKEDGKVFWQNLAGYKRQEALRPYLSSEEDRKKGKKFARYQLGDLLLHLEKKHGEDWGKVYDEAWERIDKKVEGLSKHIKLEEERRSEDAQSKAALTDWLRAKASFVIEGLKEADKDEFCRCELKLQKWYGDLRGKPFAIEAENSILDISGFSKQYNCAFIWQKDGVKKLNLYLIINYFKGGKLRFKKIKPEAFEANRFYTVINKKSGEIVPMEVNFNFDDPNLIILPLAFGKRQGREFIWNDLLSLETGSLKLANGRVIEKTLYNRRTRQDEPALFVALTFERREVLDSSNIKPMNLIGVDRGENIPAVIALTDPEGCPLSRFKDSLGNPTHILRIGESYKEKQRTIQAKKEVEQRRAGGYSRKYASKAKNLADDMVRNTARDLLYYAVTQDAMLIFENLSRGFGRQGKRTFMAERQYTRMEDWLTAKLAYNGLPSKVYLSKTLAQYTSKTCSNCGFTITSADYDRVLEKLKKTATGWMTTINGKELKVEGQITYYNRYKRQNVVKDLSVELDRLSEESVNNDISSWTKGRSGEALSLLKKRFSHRPVQEKFVCLNCGFETHADEQAALNIARSWLFLRSQEYKKYQTNKTTGNTDKRAFVETWQSFYRKKLKEVWKPAV

SEQ ID NO: 46883 - protein, 978 aa, synthetic construct
  REGION 1..978: note = engineered CasX variant
QEIKRINKIRRRLVKDSNTKKAGKTGPMKTLLVRVMTPDLRERLENLRKKPENIPQPISNTSRANLNKLLTDYTEMKKAILHVYWEEFQKDPVGLMSRVAQPASKKIDQNKLKPEMDEKGNLTTAGFACSQCGQPLFVYKLEQVSEKGKAYTNYFGRCNVAEHEKLILLAQLKPEKDSDEAVTYSLGKFGQRALDFYSIHVTKESTHPVKPLAQIAGNRYASTPVGKALSDACMGTIASFLSKYQDIIIEHQKVVKGNQKRLESLRELAGKENLEYPSVTLPPQPHTKEGVDAYNEVIARVRMWVNLNLWQKLKLSRDDAKPLLRLKGFPSFPLVERQANEVDWWDMVCNVKKLINEKKEDGKVFWQNLAGYKRQEALRPYLSSEEDRKKGKKFARYQLGDLLLHLEKKHGEDWGKVYDEAWERIDKKVEGLSKHIKLEEERRSEDAQSKAALTDWLRAKASFVIEGLKEADKDEFCRCELKLQKWYGDLRGKPFAIEAENSILDISGFSKQYNCAFIWQKDGVKKLNLYLIINYFKGGKLRFKKIKPEAFEANRFYTVINKKSGEIVPMEVNFNFDDPNLIILPLAFGKRQGREFIWNDLLSLETGSLKLANGRVIEKTLYNRRTRQDEPALFVALTFERREVLDSSNIKPMNLIGVDRGENIPAVIALTDPEGCPLSRFKDSLGNPTHILRIGESYKEKQRTIQAKKEVEQRRAGGYSRKYASKAKNLADDMVRNTARDLLYYAVTQDAMLIFENLSRGFGRQGKRTFMAERQYTRMEDWLTAKLAYNGLPSKVYLSKTLAQYTSKTCSNCGFTITSADYDRVLEKLKKTATGWMTTINGKELKVEGQITYYNRYKRQNVVKDLSVELDRLSEESVNNDISSWTKGRSGEALSLLKKRFSHRPVQEKFVCLNCGFETHADEQAALNIARSWLFLRSQEYKKYQTNKTTGNTDKRAFVETWQSFYRKKLKEVWKPAV

SEQ ID NO: 46884 - protein, 978 aa, synthetic construct
  REGION 1..978: note = engineered CasX variant
QEIKRINKIRRRLVKDSNTKKAGKTGPMKTLLVRVMTPDLRERLENLRKKPENIPQPISNTSRANLNKLLTDYTEMKKAILHVYWEEFQKDPVGLMSRVAQPASKKIDQNKLKPEMDEKGNLTTAGFACSQCGQPLFVYKLEQVSEKGKAYTNYFGRCNVAEHEKLILLAQLKPEKDSDEAVTYSLGKFGQRALDFYSIHVTKESTHPVKPLAQIAGNRYASAPVGKALSDACMGTIASFLSKYQDIIIEHQKVVKGNQKRLESLRELAGKENLEYPSVTLPPQPHTKEGVDAYNEVIARVRMWVNLNLWQKLKLSRDDAKPLLRLKGFPSFPLVERQANEVDWWDMVCNVKKLINEKKEDGKVFWQNLAGYKRQEALRPYLSSEEDRKKGKKFARYQLGDLLLHLEKKHGEDWGKVYDEAWERIDKKVEGLSKHIKLEEERRSEDAQSKAALTDWLRAKASFVIEGLKEADKDEFCRCELKLQKWYGDLRGKPFAIEAENSILDISGFSKQYNCAFIWQKDGVKKLNLYLIINYFKGGKLRFKKIKPEAFEANRFYTVINKKSGEIVPMEVNFNFDDPNLIILPLAFGKRQGREFIWNDLLSLETGSLKLANGRVIEKTLYNRRTRQDEPALFVALTFERREVLDSSNIKPMNLIGVDRGENIPAVIALTDPEGCPLSRFKDSLGNPTHILRIGESYKEKQRTIQAKKEVEQRRAGGYSRKYASKAKNLADDMVRNTARDLLYYAVTQDAMLIFENLSRGFGRQGKRTFMAERQYTRMEDWLTAKLAYNGLPSKVYLSKTLAQYTSKTCSNCGFTITSADYDRVLEKLKKTATGWMTTINGKELKVEGQITYYNRYKRQNVVKDLSVELDRLSEESVNNDISSWTKGRSGEALSLLKKRFSHRPVQEKFVCLNCGFETHADEQAALNIARSWLFLRSQEYKKYQTNKTTGNTDKRAFVETWQSFYRKKLKEVWKPAV

SEQ ID NO: 46885 - protein, 978 aa, synthetic construct
  REGION 1..978: note = engineered CasX variant
QEIKRINKIRRRLVKDSNTKKAGKTGPMKTLLVRVMTPDLRERLENLRKKPENIPQPISNTSRANLNKLLTDYTEMKKAILHVYWEEFQKDPVGLMSRVAQPASKKIDQNKLKPEMDEKGNLTTAGFACSQCGQPLFVYKLEQVSEKGKAYTNYFGRCNVAEHEKLILLAQLKPEKDSDEAVTYSLGKFGQRALDFYSIHVTKESTHPVKPLAQIAGNRYASVPVGKALSDACMGTIASFLSKYQDIIIEHQKVVKGNQKRLESLRELAGKENLEYPSVTLPPQPHTKEGVDAYNEVIARVRMWVNLNLWQKLKLSRDDAKPLLRLKGFPSFPLVERQANEVDWWDMVCNVKKLINEKKEDGKVFWQNLAGYKRQEALRPYLSSEEDRKKGKKFARYQLGDLLLHLEKKHGEDWGKVYDEAWERIDKKVEGLSKHIKLEEERRSEDAQSKAALTDWLRAKASFVIEGLKEADKDEFCRCELKLQKWYGDLRGKPFAIEAENSILDISGFSKQYNCAFIWQKDGVKKLNLYLIINYFKGGKLRFKKIKPEAFEANRFYTVINKKSGEIVPMEVNFNFDDPNLIILPLAFGKRQGREFIWNDLLSLETGSLKLANGRVIEKTLYNRRTRQDEPALFVALTFERREVLDSSNIKPMNLIGVDRGENIPAVIALTDPEGCPLSRFKDSLGNPTHILRIGESYKEKQRTIQAKKEVEQRRAGGYSRKYASKAKNLADDMVRNTARDLLYYAVTQDAMLIFENLSRGFGRQGKRTFMAERQYTRMEDWLTAKLAYNGLPSKVYLSKTLAQYTSKTCSNCGFTITSADYDRVLEKLKKTATGWMTTINGKELKVEGQITYYNRYKRQNVVKDLSVELDRLSEESVNNDISSWTKGRSGEALSLLKKRFSHRPVQEKFVCLNCGFETHADEQAALNIARSWLFLRSQEYKKYQTNKTTGNTDKRAFVETWQSFYRKKLKEVWKPAV

SEQ ID NO: 46886 - protein, 978 aa, synthetic construct
  REGION 1..978: note = engineered CasX variant
QEIKRINKIRRRLVKDSNTKKAGKTGPMKTLLVRVMTPDLRERLENLRKKPENIPQPISNTSRANLNKLLTDYTEMKKAILHVYWEEFQKDPVGLMSRVAQPASKKIDQNKLKPEMDEKGNLTTAGFACSQCGQPLFVYKLEQVSEKGKAYTNYFGRCNVAEHEKLIKLAQLKPEKDSDEAVTYSLGKFGQRALDFYSIHVTKESTHPVKPLAQIAGNRYASGPVGKALSDACMGTIASFLSKYQDIIIEHQKVVKGNQKRLESLRELAGKENLEYPSVTLPPQPHTKEGVDAYNEVIARVRMWVNLNLWQKLKLSRDDAKPLLRLKGFPSFPLVERQANEVDWWDMVCNVKKLINEKKEDGKVFWQNLAGYKRQEALRPYLSSEEDRKKGKKFARYQLGDLLLHLEKKHGEDWGKVYDEAWERIDKKVEGLSKHIKLEEERRSEDAQSKAALTDWLRAKASFVIEGLKEADKDEFCRCELKLQKWYGDLRGKPFAIEAENSILDISGFSKQYNCAFIWQKDGVKKLNLYLIINYFKGGKLRFKKIKPEAFEANRFYTVINKKSGEIVPMEVNFNFDDPNLIILPLAFGKRQGREFIWNDLLSLETGSLKLANGRVIEKTLYNRRTRQDEPALFVALTFERREVLDSSNIKPMNLIGVDRGENIPAVIALTDPEGCPLSRFKDSLGNPTHILRIGESYKEKQRTIQAKKEVEQRRAGGYSRKYASKAKNLADDMVRNTARDLLYYAVTQDAMLIFENLSRGFGRQGKRTFMAERQYTRMEDWLTAKLAYNGLPSKVYLSKTLAQYTSKTCSNCGFTITSADYDRVLEKLKKTATGWMTTINGKELKVEGQITYYNRYKRQNVVKDLSVELDRLSEESVNNDISSWTKGRSGEALSLLKKRFSHRPVQEKFVCLNCGFETHADEQAALNIARSWLFLRSQEYKKYQTNKTTGNTDKRAFVETWQSFYRKKLKEVWKPAV

SEQ ID NO: 46887 - protein, 977 aa, synthetic construct
  REGION 1..977: note = engineered CasX variant
QEIKRINKIRRRLVKDSNTKKAGKTGPMKTLLVRVMTPDLRERLENLRKKPENIPQPISNTSRANLNKLLTDYTEMKKAILHVYWEEFQKDPVGLMSRVAQPASKKIDQNKLKPEMDEKGNLTTAGFACSQCGQPLFVYKLEQVSEKGKAYTNYFGRCNVAEHEKLILLAQLKPEKDSDEAVTYSLGKFGQRALDFYSIHVTKESTHPVKPLAQIAGNRYASPVGKALSDACMGTIASFLSKYQDIIIEHQKVVKGNQKRLESLRELAGKENLEYPSVTLPPQPHTKEGVDAYNEVIARVRMWVNLNLWQKLKLSRDDAKPLLRLKGFPSFPLVERQANEVDWWDMVCNVKKLINEKKEDGKVFWQNLAGYKRQEALRPYLSSEEDRKKGKKFARYQLGDLLLHLEKKHGEDWGKVYDEAWERIDKKVEGLSKHIKLEEERRSEDAQSKAALTDWLRAKASFVIEGLKEADKDEFCRCELKLQKWYGDLRGKPFAIEAENSILDISGFSKQYNCAFIWQKDGVKKLNLYLIINYFKGGKLRFKKIKPEAFEANRFYTVINKKSGEIVPMEVNFNFDDPNLIILPLAFGKRQGREFIWNDLLSLETGSLKLANGRVIEKTLYNRRTRQDEPALFVALTFERREVLDSSNIKPMNLIGVDRGENIPAVIALTDPEGCPLSRFKDSLGNPTHILRIGESYKEKQRTIQAKKEVEQRRAGGYSRKYASKAKNLADDMVRNTARDLLYYAVTQDAMLIFENLSRGFGRQGKRTFMAERQYTRMEDWLTAKLAYNGLPSKVYLSKTLAQYTSKTCSNCGFTITSADYDRVLEKLKKTATGWMTTINGKELKVEGQITYYNRYKRQNVVKDLSVELDRLSEESVNNDISSWTKGRSGEALSLLKKRFSHRPVQEKFVCLNCGFETHADEQAALNIARSWLFLRSQEYKKYQTNKTTGNTDKRAFVETWQSFYRKKLKEVWKPAV

SEQ ID NO: 46888 - protein, 978 aa, synthetic construct
  REGION 1..978: note = engineered CasX variant
QEIKRINKIRRRLVKDSNTKKAGKTGPMKTLLVRVMTPDLRERLENLRKKPENIPQPISNTSRANLNKLLTDYTEMKKAILHVYWEEFQKDPVGLMSRVAQPASKKIDQNKLKPEMDEKGNLTTAGFACSQCGQPLFVYKLEQVSEKGKAYTNYFGRCNVAEHEKLIQLAQLKPEKDSDEAVTYSLGKFGQRALDFYSIHVTKESTHPVKPLAQIAGNRYASYPVGKALSDACMGTIASFLSKYQDIIIEHQKVVKGNQKRLESLRELAGKENLEYPSVTLPPQPHTKEGVDAYNEVIARVRMWVNLNLWQKLKLSRDDAKPLLRLKGFPSFPLVERQANEVDWWDMVCNVKKLINEKKEDGKVFWQNLAGYKRQEALRPYLSSEEDRKKGKKFARYQLGDLLLHLEKKHGEDWGKVYDEAWERIDKKVEGLSKHIKLEEERRSEDAQSKAALTDWLRAKASFVIEGLKEADKDEFCRCELKLQKWYGDLRGKPFAIEAENSILDISGFSKQYNCAFIWQKDGVKKLNLYLIINYFKGGKLRFKKIKPEAFEANRFYTVINKKSGEIVPMEVNFNFDDPNLIILPLAFGKRQGREFIWNDLLSLETGSLKLANGRVIEKTLYNRRTRQDEPALFVALTFERREVLDSSNIKPMNLIGVDRGENIPAVIALTDPEGCPLSRFKDSLGNPTHILRIGESYKEKQRTIQAKKEVEQRRAGGYSRKYASKAKNLADDMVRNTARDLLYYAVTQDAMLIFENLSRGFGRQGKRTFMAERQYTRMEDWLTAKLAYEGLPSKVYLSKTLAQYTSKTCSNCGFTITSADYDRVLEKLKKTATGWMTTINGKELKVEGQITYYNRYKRQNVVKDLSVELDRLSEESVNNDISSWTKGRSGEALSLLKKRFSHRPVQEKFVCLNCGFETHADEQAALNIARSWLFLRSQEYKKYQTNKTTGNTDKRAFVETWQSFYRKKLKEVWKPAV

SEQ ID NO: 46889 - protein, 978 aa, synthetic construct
  REGION 1..978: note = engineered CasX variant
QEIKRINKIRRRLVKDSNTKKAGKTGPMKTLLVRVMTPDLRERLENLRKKPENIPQPISNTSRANLNKLLTDYTEMKKAILHVYWEEFQKDPVGLMSRVAQPASKKIDQNKLKPEMDEKGNLTTAGFACSQCGQPLFVYKLEQVSEKGKAYTNYFGRCNVAEHEKLIQLAQLKPEKDSDEAVTYSLGKFGQRALDFYSIHVTKESTHPVKPLAQIAGNRYASHPVGKALSDACMGTIASFLSKYQDIIIEHQKVVKGNQKRLESLRELAGKENLEYPSVTLPPQPHTKEGVDAYNEVIARVRMWVNLNLWQKLKLSRDDAKPLLRLKGFPSFPLVERQANEVDWWDMVCNVKKLINEKKEDGKVFWQNLAGYKRQEALRPYLSSEEDRKKGKKFARYQLGDLLLHLEKKHGEDWGKVYDEAWERIDKKVEGLSKHIKLEEERRSEDAQSKAALTDWLRAKASFVIEGLKEADKDEFCRCELKLQKWYGDLRGKPFAIEAENSILDISGFSKQYNCAFIWQKDGVKKLNLYLIINYFKGGKLRFKKIKPEAFEANRFYTVINKKSGEIVPMEVNFNFDDPNLIILPLAFGKRQGREFIWNDLLSLETGSLKLANGRVIEKTLYNRRTRQDEPALFVALTFERREVLDSSNIKPMNLIGVDRGENIPAVIALTDPEGCPLSRFKDSLGNPTHILRIGESYKEKQRTIQAKKEVEQRRAGGYSRKYASKAKNLADDMVRNTARDLLYYAVTQDAMLIFENLSRGFGRQGKRTFMAERQYTRMEDWLTAKLAYEGLPSKVYLSKTLAQYTSKTCSNCGFTITSADYDRVLEKLKKTATGWMTTINGKELKVEGQITYYNRYKRQNVVKDLSVELDRLSEESVNNDISSWTKGRSGEALSLLKKRFSHRPVQEKFVCLNCGFETHADEQAALNIARSWLFLRSQEYKKYQTNKTTGNTDKRAFVETWQSFYRKKLKEVWKPAV

SEQ ID NO: 46890 - protein, 978 aa, synthetic construct
  REGION 1..978: note = engineered CasX variant
QEIKRINKIRRRLVKDSNTKKAGKTGPMKTLLVRVMTPDLRERLENLRKKPENIPQPISNTSRANLNKLLTDYTEMKKAILHVYWEEFQKDPVGLMSRVAQPASKKIDQNKLKPEMDEKGNLTTAGFACSQCGQPLFVYKLEQVSEKGKAYTNYFGRCNVAEHEKLIQLAQLKPEKDSDEAVTYSLGKFGQRALDFYSIHVTKESTHPVKPLAQIAGNRYASSPVGKALSDACMGTIASFLSKYQDIIIEHQKVVKGNQKRLESLRELAGKENLEYPSVTLPPQPHTKEGVDAYNEVIARVRMWVNLNLWQKLKLSRDDAKPLLRLKGFPSFPLVERQANEVDWWDMVCNVKKLINEKKEDGKVFWQNLAGYKRQEALRPYLSSEEDRKKGKKFARYQLGDLLLHLEKKHGEDWGKVYDEAWERIDKKVEGLSKHIKLEEERRSEDAQSKAALTDWLRAKASFVIEGLKEADKDEFCRCELKLQKWYGDLRGKPFAIEAENSILDISGFSKQYNCAFIWQKDGVKKLNLYLIINYFKGGKLRFKKIKPEAFEANRFYTVINKKSGEIVPMEVNFNFDDPNLIILPLAFGKRQGREFIWNDLLSLETGSLKLANGRVIEKTLYNRRTRQDEPALFVALTFERREVLDSSNIKPMNLIGVDRGENIPAVIALTDPEGCPLSRFKDSLGNPTHILRIGESYKEKQRTIQAKKEVEQRRAGGYSRKYASKAKNLADDMVRNTARDLLYYAVTQDAMLIFENLSRGFGRQGKRTFMAERQYTRMEDWLTAKLAYEGLPSKVYLSKTLAQYTSKTCSNCGFTITSADYDRVLEKLKKTATGWMTTINGKELKVEGQITYYNRYKRQNVVKDLSVELDRLSEESVNNDISSWTKGRSGEALSLLKKRFSHRPVQEKFVCLNCGFETHADEQAALNIARSWLFLRSQEYKKYQTNKTTGNTDKRAFVETWQSFYRKKLKEVWKPAV

SEQ ID NO: 46891 - protein, 978 aa, synthetic construct
  REGION 1..978: note = engineered CasX variant
QEIKRINKIRRRLVKDSNTKKAGKTGPMKTLLVRVMTPDLRERLENLRKKPENIPQPISNTSRANLNKLLTDYTEMKKAILHVYWEEFQKDPVGLMSRVAQPASKKIDQNKLKPEMDEKGNLTTAGFACSQCGQPLFVYKLEQVSEKGKAYTNYFGRCNVAEHEKLIQLAQLKPEKDSDEAVTYSLGKFGQRALDFYSIHVTKESTHPVKPLAQIAGNRYASTPVGKALSDACMGTIASFLSKYQDIIIEHQKVVKGNQKRLESLRELAGKENLEYPSVTLPPQPHTKEGVDAYNEVIARVRMWVNLNLWQKLKLSRDDAKPLLRLKGFPSFPLVERQANEVDWWDMVCNVKKLINEKKEDGKVFWQNLAGYKRQEALRPYLSSEEDRKKGKKFARYQLGDLLLHLEKKHGEDWGKVYDEAWERIDKKVEGLSKHIKLEEERRSEDAQSKAALTDWLRAKASFVIEGLKEADKDEFCRCELKLQKWYGDLRGKPFAIEAENSILDISGFSKQYNCAFIWQKDGVKKLNLYLIINYFKGGKLRFKKIKPEAFEANRFYTVINKKSGEIVPMEVNFNFDDPNLIILPLAFGKRQGREFIWNDLLSLETGSLKLANGRVIEKTLYNRRTRQDEPALFVALTFERREVLDSSNIKPMNLIGVDRGENIPAVIALTDPEGCPLSRFKDSLGNPTHILRIGESYKEKQRTIQAKKEVEQRRAGGYSRKYASKAKNLADDMVRNTARDLLYYAVTQDAMLIFENLSRGFGRQGKRTFMAERQYTRMEDWLTAKLAYEGLPSKVYLSKTLAQYTSKTCSNCGFTITSADYDRVLEKLKKTATGWMTTINGKELKVEGQITYYNRYKRQNVVKDLSVELDRLSEESVNNDISSWTKGRSGEALSLLKKRFSHRPVQEKFVCLNCGFETHADEQAALNIARSWLFLRSQEYKKYQTNKTTGNTDKRAFVETWQSFYRKKLKEVWKPAV

SEQ ID NO: 46892 - protein, 978 aa, synthetic construct
  REGION 1..978: note = engineered CasX variant
QEIKRINKIRRRLVKDSNTKKAGKTGPMKTLLVRVMTPDLRERLENLRKKPENIPQPISNTSRANLNKLLTDYTEMKKAILHVYWEEFQKDPVGLMSRVAQPASKKIDQNKLKPEMDEKGNLTTAGFACSQCGQPLFVYKLEQVSEKGKAYTNYFGRCNVAEHEKLIQLAQLKPEKDSDEAVTYSLGKFGQRALDFYSIHVTKESTHPVKPLAQIAGNRYASAPVGKALSDACMGTIASFLSKYQDIIIEHQKVVKGNQKRLESLRELAGKENLEYPSVTLPPQPHTKEGVDAYNEVIARVRMWVNLNLWQKLKLSRDDAKPLLRLKGFPSFPLVERQANEVDWWDMVCNVKKLINEKKEDGKVFWQNLAGYKRQEALRPYLSSEEDRKKGKKFARYQLGDLLLHLEKKHGEDWGKVYDEAWERIDKKVEGLSKHIKLEEERRSEDAQSKAALTDWLRAKASFVIEGLKEADKDEFCRCELKLQKWYGDLRGKPFAIEAENSILDISGFSKQYNCAFIWQKDGVKKLNLYLIINYFKGGKLRFKKIKPEAFEANRFYTVINKKSGEIVPMEVNFNFDDPNLIILPLAFGKRQGREFIWNDLLSLETGSLKLANGRVIEKTLYNRRTRQDEPALFVALTFERREVLDSSNIKPMNLIGVDRGENIPAVIALTDPEGCPLSRFKDSLGNPTHILRIGESYKEKQRTIQAKKEVEQRRAGGYSRKYASKAKNLADDMVRNTARDLLYYAVTQDAMLIFENLSRGFGRQGKRTFMAERQYTRMEDWLTAKLAYEGLPSKVYLSKTLAQYTSKTCSNCGFTITSADYDRVLEKLKKTATGWMTTINGKELKVEGQITYYNRYKRQNVVKDLSVELDRLSEESVNNDISSWTKGRSGEALSLLKKRFSHRPVQEKFVCLNCGFETHADEQAALNIARSWLFLRSQEYKKYQTNKTTGNTDKRAFVETWQSFYRKKLKEVWKPAV

SEQ ID NO: 46893 - protein, 978 aa, synthetic construct
  REGION 1..978: note = engineered CasX variant
QEIKRINKIRRRLVKDSNTKKAGKTGPMKTLLVRVMTPDLRERLENLRKKPENIPQPISNTSRANLNKLLTDYTEMKKAILHVYWEEFQKDPVGLMSRVAQPASKKIDQNKLKPEMDEKGNLTTAGFACSQCGQPLFVYKLEQVSEKGKAYTNYFGRCNVAEHEKLIQLAQLKPEKDSDEAVTYSLGKFGQRALDFYSIHVTKESTHPVKPLAQIAGNRYASVPVGKALSDACMGTIASFLSKYQDIIIEHQKVVKGNQKRLESLRELAGKENLEYPSVTLPPQPHTKEGVDAYNEVIARVRMWVNLNLWQKLKLSRDDAKPLLRLKGFPSFPLVERQANEVDWWDMVCNVKKLINEKKEDGKVFWQNLAGYKRQEALRPYLSSEEDRKKGKKFARYQLGDLLLHLEKKHGEDWGKVYDEAWERIDKKVEGLSKHIKLEEERRSEDAQSKAALTDWLRAKASFVIEGLKEADKDEFCRCELKLQKWYGDLRGKPFAIEAENSILDISGFSKQYNCAFIWQKDGVKKLNLYLIINYFKGGKLRFKKIKPEAFEANRFYTVINKKSGEIVPMEVNFNFDDPNLIILPLAFGKRQGREFIWNDLLSLETGSLKLANGRVIEKTLYNRRTRQDEPALFVALTFERREVLDSSNIKPMNLIGVDRGENIPAVIALTDPEGCPLSRFKDSLGNPTHILRIGESYKEKQRTIQAKKEVEQRRAGGYSRKYASKAKNLADDMVRNTARDLLYYAVTQDAMLIFENLSRGFGRQGKRTFMAERQYTRMEDWLTAKLAYEGLPSKVYLSKTLAQYTSKTCSNCGFTITSADYDRVLEKLKKTATGWMTTINGKELKVEGQITYYNRYKRQNVVKDLSVELDRLSEESVNNDISSWTKGRSGEALSLLKKRFSHRPVQEKFVCLNCGFETHADEQAALNIARSWLFLRSQEYKKYQTNKTTGNTDKRAFVETWQSFYRKKLKEVWKPAV

SEQ ID NO: 46894 - protein, 979 aa, synthetic construct
  REGION 1..979: note = engineered CasX variant
QEIKRINKIRRRLVKDSNTKKAGKTGPMKTLLVRVMTPDLRERLENLRKKPENIPQPISNTSRANLNKLLTDYTEMKKAILHVYWEEFQKDPVGLMSRVAQPASKKIDQNKLKPEMDEKGNLTTAGFACSQCGQPLFVYKLEQVSEKGKAYTNYFGRCNVAEHEKLIQKLAQLKPEKDSDEAVTYSLGKFGQRALDFYSIHVTKESTHPVKPLAQIAGNRYASGPVGKALSDACMGTIASFLSKYQDIIIEHQKVVKGNQKRLESLRELAGKENLEYPSVTLPPQPHTKEGVDAYNEVIARVRMWVNLNLWQKLKLSRDDAKPLLRLKGFPSFPLVERQANEVDWWDMVCNVKKLINEKKEDGKVFWQNLAGYKRQEALRPYLSSEEDRKKGKKFARYQLGDLLLHLEKKHGEDWGKVYDEAWERIDKKVEGLSKHIKLEEERRSEDAQSKAALTDWLRAKASFVIEGLKEADKDEFCRCELKLQKWYGDLRGKPFAIEAENSILDISGFSKQYNCAFIWQKDGVKKLNLYLIINYFKGGKLRFKKIKPEAFEANRFYTVINKKSGEIVPMEVNFNFDDPNLIILPLAFGKRQGREFIWNDLLSLETGSLKLANGRVIEKTLYNRRTRQDEPALFVALTFERREVLDSSNIKPMNLIGVDRGENIPAVIALTDPEGCPLSRFKDSLGNPTHILRIGESYKEKQRTIQAKKEVEQRRAGGYSRKYASKAKNLADDMVRNTARDLLYYAVTQDAMLIFENLSRGFGRQGKRTFMAERQYTRMEDWLTAKLAYEGLPSKVYLSKTLAQYTSKTCSNCGFTITSADYDRVLEKLKKTATGWMTTINGKELKVEGQITYYNRYKRQNVVKDLSVELDRLSEESVNNDISSWTKGRSGEALSLLKKRFSHRPVQEKFVCLNCGFETHADEQAALNIARSWLFLRSQEYKKYQTNKTTGNTDKRAFVETWQSFYRKKLKEVWKPAV

SEQ ID NO: 46895 - protein, 977 aa, synthetic construct
  REGION 1..977: note = engineered CasX variant
QEIKRINKIRRRLVKDSNTKKAGKTGPMKTLLVRVMTPDLRERLENLRKKPENIPQPISNTSRANLNKLLTDYTEMKKAILHVYWEEFQKDPVGLMSRVAQPASKKIDQNKLKPEMDEKGNLTTAGFACSQCGQPLFVYKLEQVSEKGKAYTNYFGRCNVAEHEKLIQLAQLKPEKDSDEAVTYSLGKFGQRALDFYSIHVTKESTHPVKPLAQIAGNRYASPVGKALSDACMGTIASFLSKYQDIIIEHQKVVKGNQKRLESLRELAGKENLEYPSVTLPPQPHTKEGVDAYNEVIARVRMWVNLNLWQKLKLSRDDAKPLLRLKGFPSFPLVERQANEVDWWDMVCNVKKLINEKKEDGKVFWQNLAGYKRQEALRPYLSSEEDRKKGKKFARYQLGDLLLHLEKKHGEDWGKVYDEAWERIDKKVEGLSKHIKLEEERRSEDAQSKAALTDWLRAKASFVIEGLKEADKDEFCRCELKLQKWYGDLRGKPFAIEAENSILDISGFSKQYNCAFIWQKDGVKKLNLYLIINYFKGGKLRFKKIKPEAFEANRFYTVINKKSGEIVPMEVNFNFDDPNLIILPLAFGKRQGREFIWNDLLSLETGSLKLANGRVIEKTLYNRRTRQDEPALFVALTFERREVLDSSNIKPMNLIGVDRGENIPAVIALTDPEGCPLSRFKDSLGNPTHILRIGESYKEKQRTIQAKKEVEQRRAGGYSRKYASKAKNLADDMVRNTARDLLYYAVTQDAMLIFENLSRGFGRQGKRTFMAERQYTRMEDWLTAKLAYEGLPSKVYLSKTLAQYTSKTCSNCGFTITSADYDRVLEKLKKTATGWMTTINGKELKVEGQITYYNRYKRQNVVKDLSVELDRLSEESVNNDISSWTKGRSGEALSLLKKRFSHRPVQEKFVCLNCGFETHADEQAALNIARSWLFLRSQEYKKYQTNKTTGNTDKRAFVETWQSFYRKKLKEVWKPAV

SEQ ID NO: 46896 - protein, 978 aa, synthetic construct
  REGION 1..978: note = engineered CasX variant
QEIKRINKIRRRLVKDSNTKKAGKTGPMKTLLVRVMTPDLRERLENLRKKPENIPQPISNTSRANLNKLLTDYTEMKKAILHVYWEEFQKDPVGLMSRVAQPASKKIDQNKLKPEMDEKGNLTTAGFACSQCGQPLFVYKLEQVSEKGKAYTNYFGRCNVAEHEKLILLAQLKPEKDSDEAVTYSLGKFGQRALDFYSIHVTKESTHPVKPLAQIAGNRYASYPVGKALSDACMGTIASFLSKYQDIIIEHQKVVKGNQKRLESLRELAGKENLEYPSVTLPPQPHTKEGVDAYNEVIARVRMWVNLNLWQKLKLSRDDAKPLLRLKGFPSFPLVERQANEVDWWDMVCNVKKLINEKKEDGKVFWQNLAIYKRQEALRPYLSSEEDRKKGKKFARYQLGDLLLHLEKKHGEDWGKVYDEAWERIDKKVEGLSKHIKLEEERRSEDAQSKAALTDWLRAKASFVIEGLKEADKDEFCRCELKLQKWYGDLRGKPFAIEAENSILDISGFSKQYNCAFIWQKDGVKKLNLYLIINYFKGGKLRFKKIKPEAFEANRFYTVINKKSGEIVPMEVNFNFDDPNLIILPLAFGKRQGREFIWNDLLSLETGSLKLANGRVIEKTLYNRRTRQDEPALFVALTFERREVLDSSNIKPMNLIGVDRGENIPAVIALTDPEGCPLSRFKDSLGNPTHILRIGESYKEKQRTIQAKKEVEQRRAGGYSRKYASKAKNLADDMVRNTARDLLYYAVTQDAMLIFENLSRGFGRQGKRTFMAERQYTRMEDWLTAKLAYEGLPSKVYLSKTLAQYTSKTCSNCGFTITSADYDRVLEKLKKTATGWMTTINGKELKVEGQITYYNRYKRQNVVKDLSVELDRLSEESVNNDISSWTKGRSGEALSLLKKRFSHRPVQEKFVCLNCGFETHADEQAALNIARSWLFLRSQEYKKYQTNKTTGNTDKRAFVETWQSFYRKKLKEVWKPAV

SEQ ID NO: 46897 - protein, 978 aa, synthetic construct
  REGION 1..978: note = engineered CasX variant
QEIKRINKIRRRLVKDSNTKKAGKTGPMKTLLVRVMTPDLRERLENLRKKPENIPQPISNTSRANLNKLLTDYTEMKKAILHVYWEEFQKDPVGLMSRVAQPASKKIDQNKLKPEMDEKGNLTTAGFACSQCGQPLFVYKLEQVSEKGKAYTNYFGRCNVAEHEKLILLAQLKPEKDSDEAVTYSLGKFGQRALDFYSIHVTKESTHPVKPLAQIAGNRYASHPVGKALSDACMGTIASFLSKYQDIIIEHQKVVKGNQKRLESLRELAGKENLEYPSVTLPPQPHTKEGVDAYNEVIARVRMWVNLNLWQKLKLSRDDAKPLLRLKGFPSFPLVERQANEVDWWDMVCNVKKLINEKKEDGKVFWQNLAIYKRQEALRPYLSSEEDRKKGKKFARYQLGDLLLHLEKKHGEDWGKVYDEAWERIDKKVEGLSKHIKLEEERRSEDAQSKAALTDWLRAKASFVIEGLKEADKDEFCRCELKLQKWYGDLRGKPFAIEAENSILDISGFSKQYNCAFIWQKDGVKKLNLYLIINYFKGGKLRFKKIKPEAFEANRFYTVINKKSGEIVPMEVNFNFDDPNLIILPLAFGKRQGREFIWNDLLSLETGSLKLANGRVIEKTLYNRRTRQDEPALFVALTFERREVLDSSNIKPMNLIGVDRGENIPAVIALTDPEGCPLSRFKDSLGNPTHILRIGESYKEKQRTIQAKKEVEQRRAGGYSRKYASKAKNLADDMVRNTARDLLYYAVTQDAMLIFENLSRGFGRQGKRTFMAERQYTRMEDWLTAKLAYEGLPSKVYLSKTLAQYTSKTCSNCGFTITSADYDRVLEKLKKTATGWMTTINGKELKVEGQITYYNRYKRQNVVKDLSVELDRLSEESVNNDISSWTKGRSGEALSLLKKRFSHRPVQEKFVCLNCGFETHADEQAALNIARSWLFLRSQEYKKYQTNKTTGNTDKRAFVETWQSFYRKKLKEVWKPAV

SEQ ID NO: 46898 - protein, 978 aa, synthetic construct
  REGION 1..978: note = engineered CasX variant
QEIKRINKIRRRLVKDSNTKKAGKTGPMKTLLVRVMTPDLRERLENLRKKPENIPQPISNTSRANLNKLLTDYTEMKKAILHVYWEEFQKDPVGLMSRVAQPASKKIDQNKLKPEMDEKGNLTTAGFACSQCGQPLFVYKLEQVSEKGKAYTNYFGRCNVAEHEKLILLAQLKPEKDSDEAVTYSLGKFGQRALDFYSIHVTKESTHPVKPLAQIAGNRYASSPVGKALSDACMGTIASFLSKYQDIIIEHQKVVKGNQKRLESLRELAGKENLEYPSVTLPPQPHTKEGVDAYNEVIARVRMWVNLNLWQKLKLSRDDAKPLLRLKGFPSFPLVERQANEVDWWDMVCNVKKLINEKKEDGKVFWQNLAIYKRQEALRPYLSSEEDRKKGKKFARYQLGDLLLHLEKKHGEDWGKVYDEAWERIDKKVEGLSKHIKLEEERRSEDAQSKAALTDWLRAKASFVIEGLKEADKDEFCRCELKLQKWYGDLRGKPFAIEAENSILDISGFSKQYNCAFIWQKDGVKKLNLYLIINYFKGGKLRFKKIKPEAFEANRFYTVINKKSGEIVPMEVNFNFDDPNLIILPLAFGKRQGREFIWNDLLSLETGSLKLANGRVIEKTLYNRRTRQDEPALFVALTFERREVLDSSNIKPMNLIGVDRGENIPAVIALTDPEGCPLSRFKDSLGNPTHILRIGESYKEKQRTIQAKKEVEQRRAGGYSRKYASKAKNLADDMVRNTARDLLYYAVTQDAMLIFENLSRGFGRQGKRTFMAERQYTRMEDWLTAKLAYEGLPSKVYLSKTLAQYTSKTCSNCGFTITSADYDRVLEKLKKTATGWMTTINGKELKVEGQITYYNRYKRQNVVKDLSVELDRLSEESVNNDISSWTKGRSGEALSLLKKRFSHRPVQEKFVCLNCGFETHADEQAALNIARSWLFLRSQEYKKYQTNKTTGNTDKRAFVETWQSFYRKKLKEVWKPAV

SEQ ID NO: 46899 - protein, 978 aa, synthetic construct
  REGION 1..978: note = engineered CasX variant
QEIKRINKIRRRLVKDSNTKKAGKTGPMKTLLVRVMTPDLRERLENLRKKPENIPQPISNTSRANLNKLLTDYTEMKKAILHVYWEEFQKDPVGLMSRVAQPASKKIDQNKLKPEMDEKGNLTTAGFACSQCGQPLFVYKLEQVSEKGKAYTNYFGRCNVAEHEKLILLAQLKPEKDSDEAVTYSLGKFGQRALDFYSIHVTKESTHPVKPLAQIAGNRYASTPVGKALSDACMGTIASFLSKYQDIIIEHQKVVKGNQKRLESLRELAGKENLEYPSVTLPPQPHTKEGVDAYNEVIARVRMWVNLNLWQKLKLSRDDAKPLLRLKGFPSFPLVERQANEVDWWDMVCNVKKLINEKKEDGKVFWQNLAIYKRQEALRPYLSSEEDRKKGKKFARYQLGDLLLHLEKKHGEDWGKVYDEAWERIDKKVEGLSKHIKLEEERRSEDAQSKAALTDWLRAKASFVIEGLKEADKDEFCRCELKLQKWYGDLRGKPFAIEAENSILDISGFSKQYNCAFIWQKDGVKKLNLYLIINYFKGGKLRFKKIKPEAFEANRFYTVINKKSGEIVPMEVNFNFDDPNLIILPLAFGKRQGREFIWNDLLSLETGSLKLANGRVIEKTLYNRRTRQDEPALFVALTFERREVLDSSNIKPMNLIGVDRGENIPAVIALTDPEGCPLSRFKDSLGNPTHILRIGESYKEKQRTIQAKKEVEQRRAGGYSRKYASKAKNLADDMVRNTARDLLYYAVTQDAMLIFENLSRGFGRQGKRTFMAERQYTRMEDWLTAKLAYEGLPSKVYLSKTLAQYTSKTCSNCGFTITSADYDRVLEKLKKTATGWMTTINGKELKVEGQITYYNRYKRQNVVKDLSVELDRLSEESVNNDISSWTKGRSGEALSLLKKRFSHRPVQEKFVCLNCGFETHADEQAALNIARSWLFLRSQEYKKYQTNKTTGNTDKRAFVETWQSFYRKKLKEVWKPAV

SEQ ID NO: 46900 - protein, 978 aa, synthetic construct
  REGION 1..978: note = engineered CasX variant
QEIKRINKIRRRLVKDSNTKKAGKTGPMKTLLVRVMTPDLRERLENLRKKPENIPQPISNTSRANLNKLLTDYTEMKKAILHVYWEEFQKDPVGLMSRVAQPASKKIDQNKLKPEMDEKGNLTTAGFACSQCGQPLFVYKLEQVSEKGKAYTNYFGRCNVAEHEKLILLAQLKPEKDSDEAVTYSLGKFGQRALDFYSIHVTKESTHPVKPLAQIAGNRYASAPVGKALSDACMGTIASFLSKYQDIIIEHQKVVKGNQKRLESLRELAGKENLEYPSVTLPPQPHTKEGVDAYNEVIARVRMWVNLNLWQKLKLSRDDAKPLLRLKGFPSFPLVERQANEVDWWDMVCNVKKLINEKKEDGKVFWQNLAIYKRQEALRPYLSSEEDRKKGKKFARYQLGDLLLHLEKKHGEDWGKVYDEAWERIDKKVEGLSKHIKLEEERRSEDAQSKAALTDWLRAKASFVIEGLKEADKDEFCRCELKLQKWYGDLRGKPFAIEAENSILDISGFSKQYNCAFIWQKDGVKKLNLYLIINYFKGGKLRFKKIKPEAFEANRFYTVINKKSGEIVPMEVNFNFDDPNLIILPLAFGKRQGREFIWNDLLSLETGSLKLANGRVIEKTLYNRRTRQDEPALFVALTFERREVLDSSNIKPMNLIGVDRGENIPAVIALTDPEGCPLSRFKDSLGNPTHILRIGESYKEKQRTIQAKKEVEQRRAGGYSRKYASKAKNLADDMVRNTARDLLYYAVTQDAMLIFENLSRGFGRQGKRTFMAERQYTRMEDWLTAKLAYEGLPSKVYLSKTLAQYTSKTCSNCGFTITSADYDRVLEKLKKTATGWMTTINGKELKVEGQITYYNRYKRQNVVKDLSVELDRLSEESVNNDISSWTKGRSGEALSLLKKRFSHRPVQEKFVCLNCGFETHADEQAALNIARSWLFLRSQEYKKYQTNKTTGNTDKRAFVETWQSFYRKKLKEVWKPAV

SEQ ID NO: 46901 - protein, 978 aa, synthetic construct
  REGION 1..978: note = engineered CasX variant
QEIKRINKIRRRLVKDSNTKKAGKTGPMKTLLVRVMTPDLRERLENLRKKPENIPQPISNTSRANLNKLLTDYTEMKKAILHVYWEEFQKDPVGLMSRVAQPASKKIDQNKLKPEMDEKGNLTTAGFACSQCGQPLFVYKLEQVSEKGKAYTNYFGRCNVAEHEKLILLAQLKPEKDSDEAVTYSLGKFGQRALDFYSIHVTKESTHPVKPLAQIAGNRYASVPVGKALSDACMGTIASFLSKYQDIIIEHQKVVKGNQKRLESLRELAGKENLEYPSVTLPPQPHTKEGVDAYNEVIARVRMWVNLNLWQKLKLSRDDAKPLLRLKGFPSFPLVERQANEVDWWDMVCNVKKLINEKKEDGKVFWQNLAIYKRQEALRPYLSSEEDRKKGKKFARYQLGDLLLHLEKKHGEDWGKVYDEAWERIDKKVEGLSKHIKLEEERRSEDAQSKAALTDWLRAKASFVIEGLKEADKDEFCRCELKLQKWYGDLRGKPFAIEAENSILDISGFSKQYNCAFIWQKDGVKKLNLYLIINYFKGGKLRFKKIKPEAFEANRFYTVINKKSGEIVPMEVNFNFDDPNLIILPLAFGKRQGREFIWNDLLSLETGSLKLANGRVIEKTLYNRRTRQDEPALFVALTFERREVLDSSNIKPMNLIGVDRGENIPAVIALTDPEGCPLSRFKDSLGNPTHILRIGESYKEKQRTIQAKKEVEQRRAGGYSRKYASKAKNLADDMVRNTARDLLYYAVTQDAMLIFENLSRGFGRQGKRTFMAERQYTRMEDWLTAKLAYEGLPSKVYLSKTLAQYTSKTCSNCGFTITSADYDRVLEKLKKTATGWMTTINGKELKVEGQITYYNRYKRQNVVKDLSVELDRLSEESVNNDISSWTKGRSGEALSLLKKRFSHRPVQEKFVCLNCGFETHADEQAALNIARSWLFLRSQEYKKYQTNKTTGNTDKRAFVETWQSFYRKKLKEVWKPAV

SEQ ID NO: 46902 - protein, 978 aa, synthetic construct
  REGION 1..978: note = engineered CasX variant
QEIKRINKIRRRLVKDSNTKKAGKTGPMKTLLVRVMTPDLRERLENLRKKPENIPQPISNTSRANLNKLLTDYTEMKKAILHVYWEEFQKDPVGLMSRVAQPASKKIDQNKLKPEMDEKGNLTTAGFACSQCGQPLFVYKLEQVSEKGKAYTNYFGRCNVAEHEKLIKLAQLKPEKDSDEAVTYSLGKFGQRALDFYSIHVTKESTHPVKPLAQIAGNRYASGPVGKALSDACMGTIASFLSKYQDIIIEHQKVVKGNQKRLESLRELAGKENLEYPSVTLPPQPHTKEGVDAYNEVIARVRMWVNLNLWQKLKLSRDDAKPLLRLKGFPSFPLVERQANEVDWWDMVCNVKKLINEKKEDGKVFWQNLAIYKRQEALRPYLSSEEDRKKGKKFARYQLGDLLLHLEKKHGEDWGKVYDEAWERIDKKVEGLSKHIKLEEERRSEDAQSKAALTDWLRAKASFVIEGLKEADKDEFCRCELKLQKWYGDLRGKPFAIEAENSILDISGFSKQYNCAFIWQKDGVKKLNLYLIINYFKGGKLRFKKIKPEAFEANRFYTVINKKSGEIVPMEVNFNFDDPNLIILPLAFGKRQGREFIWNDLLSLETGSLKLANGRVIEKTLYNRRTRQDEPALFVALTFERREVLDSSNIKPMNLIGVDRGENIPAVIALTDPEGCPLSRFKDSLGNPTHILRIGESYKEKQRTIQAKKEVEQRRAGGYSRKYASKAKNLADDMVRNTARDLLYYAVTQDAMLIFENLSRGFGRQGKRTFMAERQYTRMEDWLTAKLAYEGLPSKVYLSKTLAQYTSKTCSNCGFTITSADYDRVLEKLKKTATGWMTTINGKELKVEGQITYYNRYKRQNVVKDLSVELDRLSEESVNNDISSWTKGRSGEALSLLKKRFSHRPVQEKFVCLNCGFETHADEQAALNIARSWLFLRSQEYKKYQTNKTTGNTDKRAFVETWQSFYRKKLKEVWKPAV

SEQ ID NO: 46903 - protein, 977 aa, synthetic construct
  REGION 1..977: note = engineered CasX variant
QEIKRINKIRRRLVKDSNTKKAGKTGPMKTLLVRVMTPDLRERLENLRKKPENIPQPISNTSRANLNKLLTDYTEMKKAILHVYWEEFQKDPVGLMSRVAQPASKKIDQNKLKPEMDEKGNLTTAGFACSQCGQPLFVYKLEQVSEKGKAYTNYFGRCNVAEHEKLILLAQLKPEKDSDEAVTYSLGKFGQRALDFYSIHVTKESTHPVKPLAQIAGNRYASPVGKALSDACMGTIASFLSKYQDIIIEHQKVVKGNQKRLESLRELAGKENLEYPSVTLPPQPHTKEGVDAYNEVIARVRMWVNLNLWQKLKLSRDDAKPLLRLKGFPSFPLVERQANEVDWWDMVCNVKKLINEKKEDGKVFWQNLAIYKRQEALRPYLSSEEDRKKGKKFARYQLGDLLLHLEKKHGEDWGKVYDEAWERIDKKVEGLSKHIKLEEERRSEDAQSKAALTDWLRAKASFVIEGLKEADKDEFCRCELKLQKWYGDLRGKPFAIEAENSILDISGFSKQYNCAFIWQKDGVKKLNLYLIINYFKGGKLRFKKIKPEAFEANRFYTVINKKSGEIVPMEVNFNFDDPNLIILPLAFGKRQGREFIWNDLLSLETGSLKLANGRVIEKTLYNRRTRQDEPALFVALTFERREVLDSSNIKPMNLIGVDRGENIPAVIALTDPEGCPLSRFKDSLGNPTHILRIGESYKEKQRTIQAKKEVEQRRAGGYSRKYASKAKNLADDMVRNTARDLLYYAVTQDAMLIFENLSRGFGRQGKRTFMAERQYTRMEDWLTAKLAYEGLPSKVYLSKTLAQYTSKTCSNCGFTITSADYDRVLEKLKKTATGWMTTINGKELKVEGQITYYNRYKRQNVVKDLSVELDRLSEESVNNDISSWTKGRSGEALSLLKKRFSHRPVQEKFVCLNCGFETHADEQAALNIARSWLFLRSQEYKKYQTNKTTGNTDKRAFVETWQSFYRKKLKEVWKPAV

SEQ ID NO: 46904 - protein, 978 aa, synthetic construct
  REGION 1..978: note = engineered CasX variant
QEIKRINKIRRRLVKDSNTKKAGKTGPMKTLLVRVMTPDLRERLENLRKKPENIPQPISNTSRANLNKLLTDYTEMKKAILHVYWEEFQKDPVGLMSRVAQPASKKIDQNKLKPEMDEKGNLTTAGFACSQCGQPLFVYKLEQVSEKGKAYTNYFGRCNVAEHEKLILLAQLKPEKDSDEAVTYSLGKFGQRALDFYSIHVTKESTHPVKPLAQIAGNRYASYPVGKALSDACMGTIASFLSKYQDIIIEHQKVVKGNQKRLESLRELAGKENLEYPSVTLPPQPHTKEGVDAYNEVIARVRMWVNLNLWQKLKLSRDDAKPLLRLKGFPSFPLVERQANEVDWWDMVCNVKKLINEKKEDGKVFWQNLAGYKRQEALRPYLSSEEDREKGKKFARYQLGDLLLHLEKKHGEDWGKVYDEAWERIDKKVEGLSKHIKLEEERRSEDAQSKAALTDWLRAKASFVIEGLKEADKDEFCRCELKLQKWYGDLRGKPFAIEAENSILDISGFSKQYNCAFIWQKDGVKKLNLYLIINYFKGGKLRFKKIKPEAFEANRFYTVINKKSGEIVPMEVNFNFDDPNLIILPLAFGKRQGREFIWNDLLSLETGSLKLANGRVIEKTLYNRRTRQDEPALFVALTFERREVLDSSNIKPMNLIGVDRGENIPAVIALTDPEGCPLSRFKDSLGNPTHILRIGESYKEKQRTIQAKKEVEQRRAGGYSRKYASKAKNLADDMVRNTARDLLYYAVTQDAMLIFENLSRGFGRQGKRTFMAERQYTRMEDWLTAKLAYEGLPSKVYLSKTLAQYTSKTCSNCGFTITSADYDRVLEKLKKTATGWMTTINGKELKVEGQITYYNRYKRQNVVKDLSVELDRLSEESVNNDISSWTKGRSGEALSLLKKRFSHRPVQEKFVCLNCGFETHADEQAALNIARSWLFLRSQEYKKYQTNKTTGNTDKRAFVETWQSFYRKKLKEVWKPAV

SEQ ID NO: 46905 - protein, 978 aa, synthetic construct
  REGION 1..978: note = engineered CasX variant
QEIKRINKIRRRLVKDSNTKKAGKTGPMKTLLVRVMTPDLRERLENLRKKPENIPQPISNTSRANLNKLLTDYTEMKKAILHVYWEEFQKDPVGLMSRVAQPASKKIDQNKLKPEMDEKGNLTTAGFACSQCGQPLFVYKLEQVSEKGKAYTNYFGRCNVAEHEKLILLAQLKPEKDSDEAVTYSLGKFGQRALDFYSIHVTKESTHPVKPLAQIAGNRYASHPVGKALSDACMGTIASFLSKYQDIIIEHQKVVKGNQKRLESLRELAGKENLEYPSVTLPPQPHTKEGVDAYNEVIARVRMWVNLNLWQKLKLSRDDAKPLLRLKGFPSFPLVERQANEVDWWDMVCNVKKLINEKKEDGKVFWQNLAGYKRQEALRPYLSSEEDREKGKKFARYQLGDLLLHLEKKHGEDWGKVYDEAWERIDKKVEGLSKHIKLEEERRSEDAQSKAALTDWLRAKASFVIEGLKEADKDEFCRCELKLQKWYGDLRGKPFAIEAENSILDISGFSKQYNCAFIWQKDGVKKLNLYLIINYFKGGKLRFKKIKPEAFEANRFYTVINKKSGEIVPMEVNFNFDDPNLIILPLAFGKRQGREFIWNDLLSLETGSLKLANGRVIEKTLYNRRTRQDEPALFVALTFERREVLDSSNIKPMNLIGVDRGENIPAVIALTDPEGCPLSRFKDSLGNPTHILRIGESYKEKQRTIQAKKEVEQRRAGGYSRKYASKAKNLADDMVRNTARDLLYYAVTQDAMLIFENLSRGFGRQGKRTFMAERQYTRMEDWLTAKLAYEGLPSKVYLSKTLAQYTSKTCSNCGFTITSADYDRVLEKLKKTATGWMTTINGKELKVEGQITYYNRYKRQNVVKDLSVELDRLSEESVNNDISSWTKGRSGEALSLLKKRFSHRPVQEKFVCLNCGFETHADEQAALNIARSWLFLRSQEYKKYQTNKTTGNTDKRAFVETWQSFYRKKLKEVWKPAV

SEQ ID NO: 46906 - protein, 978 aa, synthetic construct
  REGION 1..978: note = engineered CasX variant
QEIKRINKIRRRLVKDSNTKKAGKTGPMKTLLVRVMTPDLRERLENLRKKPENIPQPISNTSRANLNKLLTDYTEMKKAILHVYWEEFQKDPVGLMSRVAQPASKKIDQNKLKPEMDEKGNLTTAGFACSQCGQPLFVYKLEQVSEKGKAYTNYFGRCNVAEHEKLILLAQLKPEKDSDEAVTYSLGKFGQRALDFYSIHVTKESTHPVKPLAQIAGNRYASSPVGKALSDACMGTIASFLSKYQDIIIEHQKVVKGNQKRLESLRELAGKENLEYPSVTLPPQPHTKEGVDAYNEVIARVRMWVNLNLWQKLKLSRDDAKPLLRLKGFPSFPLVERQANEVDWWDMVCNVKKLINEKKEDGKVFWQNLAGYKRQEALRPYLSSEEDREKGKKFARYQLGDLLLHLEKKHGEDWGKVYDEAWERIDKKVEGLSKHIKLEEERRSEDAQSKAALTDWLRAKASFVIEGLKEADKDEFCRCELKLQKWYGDLRGKPFAIEAENSILDISGFSKQYNCAFIWQKDGVKKLNLYLIINYFKGGKLRFKKIKPEAFEANRFYTVINKKSGEIVPMEVNFNFDDPNLIILPLAFGKRQGREFIWNDLLSLETGSLKLANGRVIEKTLYNRRTRQDEPALFVALTFERREVLDSSNIKPMNLIGVDRGENIPAVIALTDPEGCPLSRFKDSLGNPTHILRIGESYKEKQRTIQAKKEVEQRRAGGYSRKYASKAKNLADDMVRNTARDLLYYAVTQDAMLIFENLSRGFGRQGKRTFMAERQYTRMEDWLTAKLAYEGLPSKVYLSKTLAQYTSKTCSNCGFTITSADYDRVLEKLKKTATGWMTTINGKELKVEGQITYYNRYKRQNVVKDLSVELDRLSEESVNNDISSWTKGRSGEALSLLKKRFSHRPVQEKFVCLNCGFETHADEQAALNIARSWLFLRSQEYKKYQTNKTTGNTDKRAFVETWQSFYRKKLKEVWKPAV

SEQ ID NO: 46907 - protein, 978 aa, synthetic construct
  REGION 1..978: note = engineered CasX variant
QEIKRINKIRRRLVKDSNTKKAGKTGPMKTLLVRVMTPDLRERLENLRKKPENIPQPISNTSRANLNKLLTDYTEMKKAILHVYWEEFQKDPVGLMSRVAQPASKKIDQNKLKPEMDEKGNLTTAGFACSQCGQPLFVYKLEQVSEKGKAYTNYFGRCNVAEHEKLILLAQLKPEKDSDEAVTYSLGKFGQRALDFYSIHVTKESTHPVKPLAQIAGNRYASTPVGKALSDACMGTIASFLSKYQDIIIEHQKVVKGNQKRLESLRELAGKENLEYPSVTLPPQPHTKEGVDAYNEVIARVRMWVNLNLWQKLKLSRDDAKPLLRLKGFPSFPLVERQANEVDWWDMVCNVKKLINEKKEDGKVFWQNLAGYKRQEALRPYLSSEEDREKGKKFARYQLGDLLLHLEKKHGEDWGKVYDEAWERIDKKVEGLSKHIKLEEERRSEDAQSKAALTDWLRAKASFVIEGLKEADKDEFCRCELKLQKWYGDLRGKPFAIEAENSILDISGFSKQYNCAFIWQKDGVKKLNLYLIINYFKGGKLRFKKIKPEAFEANRFYTVINKKSGEIVPMEVNFNFDDPNLIILPLAFGKRQGREFIWNDLLSLETGSLKLANGRVIEKTLYNRRTRQDEPALFVALTFERREVLDSSNIKPMNLIGVDRGENIPAVIALTDPEGCPLSRFKDSLGNPTHILRIGESYKEKQRTIQAKKEVEQRRAGGYSRKYASKAKNLADDMVRNTARDLLYYAVTQDAMLIFENLSRGFGRQGKRTFMAERQYTRMEDWLTAKLAYEGLPSKVYLSKTLAQYTSKTCSNCGFTITSADYDRVLEKLKKTATGWMTTINGKELKVEGQITYYNRYKRQNVVKDLSVELDRLSEESVNNDISSWTKGRSGEALSLLKKRFSHRPVQEKFVCLNCGFETHADEQAALNIARSWLFLRSQEYKKYQTNKTTGNTDKRAFVETWQSFYRKKLKEVWKPAV

SEQ ID NO: 46908 - protein, 978 aa, synthetic construct
  REGION 1..978: note = engineered CasX variant
QEIKRINKIRRRLVKDSNTKKAGKTGPMKTLLVRVMTPDLRERLENLRKKPENIPQPISNTSRANLNKLLTDYTEMKKAILHVYWEEFQKDPVGLMSRVAQPASKKIDQNKLKPEMDEKGNLTTAGFACSQCGQPLFVYKLEQVSEKGKAYTNYFGRCNVAEHEKLILLAQLKPEKDSDEAVTYSLGKFGQRALDFYSIHVTKESTHPVKPLAQIAGNRYASAPVGKALSDACMGTIASFLSKYQDIIIEHQKVVKGNQKRLESLRELAGKENLEYPSVTLPPQPHTKEGVDAYNEVIARVRMWVNLNLWQKLKLSRDDAKPLLRLKGFPSFPLVERQANEVDWWDMVCNVKKLINEKKEDGKVFWQNLAGYKRQEALRPYLSSEEDREKGKKFARYQLGDLLLHLEKKHGEDWGKVYDEAWERIDKKVEGLSKHIKLEEERRSEDAQSKAALTDWLRAKASFVIEGLKEADKDEFCRCELKLQKWYGDLRGKPFAIEAENSILDISGFSKQYNCAFIWQKDGVKKLNLYLIINYFKGGKLRFKKIKPEAFEANRFYTVINKKSGEIVPMEVNFNFDDPNLIILPLAFGKRQGREFIWNDLLSLETGSLKLANGRVIEKTLYNRRTRQDEPALFVALTFERREVLDSSNIKPMNLIGVDRGENIPAVIALTDPEGCPLSRFKDSLGNPTHILRIGESYKEKQRTIQAKKEVEQRRAGGYSRKYASKAKNLADDMVRNTARDLLYYAVTQDAMLIFENLSRGFGRQGKRTFMAERQYTRMEDWLTAKLAYEGLPSKVYLSKTLAQYTSKTCSNCGFTITSADYDRVLEKLKKTATGWMTTINGKELKVEGQITYYNRYKRQNVVKDLSVELDRLSEESVNNDISSWTKGRSGEALSLLKKRFSHRPVQEKFVCLNCGFETHADEQAALNIARSWLFLRSQEYKKYQTNKTTGNTDKRAFVETWQSFYRKKLKEVWKPAV

SEQ ID NO: 46909 - protein, 978 aa, synthetic construct
  REGION 1..978: note = engineered CasX variant
QEIKRINKIRRRLVKDSNTKKAGKTGPMKTLLVRVMTPDLRERLENLRKKPENIPQPISNTSRANLNKLLTDYTEMKKAILHVYWEEFQKDPVGLMSRVAQPASKKIDQNKLKPEMDEKGNLTTAGFACSQCGQPLFVYKLEQVSEKGKAYTNYFGRCNVAEHEKLILLAQLKPEKDSDEAVTYSLGKFGQRALDFYSIHVTKESTHPVKPLAQIAGNRYASVPVGKALSDACMGTIASFLSKYQDIIIEHQKVVKGNQKRLESLRELAGKENLEYPSVTLPPQPHTKEGVDAYNEVIARVRMWVNLNLWQKLKLSRDDAKPLLRLKGFPSFPLVERQANEVDWWDMVCNVKKLINEKKEDGKVFWQNLAGYKRQEALRPYLSSEEDREKGKKFARYQLGDLLLHLEKKHGEDWGKVYDEAWERIDKKVEGLSKHIKLEEERRSEDAQSKAALTDWLRAKASFVIEGLKEADKDEFCRCELKLQKWYGDLRGKPFAIEAENSILDISGFSKQYNCAFIWQKDGVKKLNLYLIINYFKGGKLRFKKIKPEAFEANRFYTVINKKSGEIVPMEVNFNFDDPNLIILPLAFGKRQGREFIWNDLLSLETGSLKLANGRVIEKTLYNRRTRQDEPALFVALTFERREVLDSSNIKPMNLIGVDRGENIPAVIALTDPEGCPLSRFKDSLGNPTHILRIGESYKEKQRTIQAKKEVEQRRAGGYSRKYASKAKNLADDMVRNTARDLLYYAVTQDAMLIFENLSRGFGRQGKRTFMAERQYTRMEDWLTAKLAYEGLPSKVYLSKTLAQYTSKTCSNCGFTITSADYDRVLEKLKKTATGWMTTINGKELKVEGQITYYNRYKRQNVVKDLSVELDRLSEESVNNDISSWTKGRSGEALSLLKKRFSHRPVQEKFVCLNCGFETHADEQAALNIARSWLFLRSQEYKKYQTNKTTGNTDKRAFVETWQSFYRKKLKEVWKPAV

SEQ ID NO: 46910 - protein, 978 aa, synthetic construct
  REGION 1..978: note = engineered CasX variant
QEIKRINKIRRRLVKDSNTKKAGKTGPMKTLLVRVMTPDLRERLENLRKKPENIPQPISNTSRANLNKLLTDYTEMKKAILHVYWEEFQKDPVGLMSRVAQPASKKIDQNKLKPEMDEKGNLTTAGFACSQCGQPLFVYKLEQVSEKGKAYTNYFGRCNVAEHEKLIKLAQLKPEKDSDEAVTYSLGKFGQRALDFYSIHVTKESTHPVKPLAQIAGNRYASGPVGKALSDACMGTIASFLSKYQDIIIEHQKVVKGNQKRLESLRELAGKENLEYPSVTLPPQPHTKEGVDAYNEVIARVRMWVNLNLWQKLKLSRDDAKPLLRLKGFPSFPLVERQANEVDWWDMVCNVKKLINEKKEDGKVFWQNLAGYKRQEALRPYLSSEEDREKGKKFARYQLGDLLLHLEKKHGEDWGKVYDEAWERIDKKVEGLSKHIKLEEERRSEDAQSKAALTDWLRAKASFVIEGLKEADKDEFCRCELKLQKWYGDLRGKPFAIEAENSILDISGFSKQYNCAFIWQKDGVKKLNLYLIINYFKGGKLRFKKIKPEAFEANRFYTVINKKSGEIVPMEVNFNFDDPNLIILPLAFGKRQGREFIWNDLLSLETGSLKLANGRVIEKTLYNRRTRQDEPALFVALTFERREVLDSSNIKPMNLIGVDRGENIPAVIALTDPEGCPLSRFKDSLGNPTHILRIGESYKEKQRTIQAKKEVEQRRAGGYSRKYASKAKNLADDMVRNTARDLLYYAVTQDAMLIFENLSRGFGRQGKRTFMAERQYTRMEDWLTAKLAYEGLPSKVYLSKTLAQYTSKTCSNCGFTITSADYDRVLEKLKKTATGWMTTINGKELKVEGQITYYNRYKRQNVVKDLSVELDRLSEESVNNDISSWTKGRSGEALSLLKKRFSHRPVQEKFVCLNCGFETHADEQAALNIARSWLFLRSQEYKKYQTNKTTGNTDKRAFVETWQSFYRKKLKEVWKPAV

SEQ ID NO: 46911 - protein, 977 aa, synthetic construct
  REGION 1..977: note = engineered CasX variant
QEIKRINKIRRRLVKDSNTKKAGKTGPMKTLLVRVMTPDLRERLENLRKKPENIPQPISNTSRANLNKLLTDYTEMKKAILHVYWEEFQKDPVGLMSRVAQPASKKIDQNKLKPEMDEKGNLTTAGFACSQCGQPLFVYKLEQVSEKGKAYTNYFGRCNVAEHEKLILLAQLKPEKDSDEAVTYSLGKFGQRALDFYSIHVTKESTHPVKPLAQIAGNRYASPVGKALSDACMGTIASFLSKYQDIIIEHQKVVKGNQKRLESLRELAGKENLEYPSVTLPPQPHTKEGVDAYNEVIARVRMWVNLNLWQKLKLSRDDAKPLLRLKGFPSFPLVERQANEVDWWDMVCNVKKLINEKKEDGKVFWQNLAGYKRQEALRPYLSSEEDREKGKKFARYQLGDLLLHLEKKHGEDWGKVYDEAWERIDKKVEGLSKHIKLEEERRSEDAQSKAALTDWLRAKASFVIEGLKEADKDEFCRCELKLQKWYGDLRGKPFAIEAENSILDISGFSKQYNCAFIWQKDGVKKLNLYLIINYFKGGKLRFKKIKPEAFEANRFYTVINKKSGEIVPMEVNFNFDDPNLIILPLAFGKRQGREFIWNDLLSLETGSLKLANGRVIEKTLYNRRTRQDEPALFVALTFERREVLDSSNIKPMNLIGVDRGENIPAVIALTDPEGCPLSRFKDSLGNPTHILRIGESYKEKQRTIQAKKEVEQRRAGGYSRKYASKAKNLADDMVRNTARDLLYYAVTQDAMLIFENLSRGFGRQGKRTFMAERQYTRMEDWLTAKLAYEGLPSKVYLSKTLAQYTSKTCSNCGFTITSADYDRVLEKLKKTATGWMTTINGKELKVEGQITYYNRYKRQNVVKDLSVELDRLSEESVNNDISSWTKGRSGEALSLLKKRFSHRPVQEKFVCLNCGFETHADEQAALNIARSWLFLRSQEYKKYQTNKTTGNTDKRAFVETWQSFYRKKLKEVWKPAV

SEQ ID NO: 46912 - protein, 978 aa, synthetic construct
  REGION 1..978: note = engineered CasX variant
QEIKRINKIRRRLVKDSNTKKAGKTGPMKTLLVRVMTPDLRERLENLRKKPENIPQPISNTSRANLNKLLTDYTEMKKAILHVYWEEFQKDPVGLMSRVAQPASKKIDQNKLKPEMDEKGNLTTAGFACSQCGQPLFVYKLEQVSEKGKAYTNYFGRCNVAEHEKLILLAQLKPEKDSDEAVTYSLGKFGQRALDFYSIHVTKESTHPVKPLAQIAGNRYASYPVGKALSDACMGTIASFLSKYQDIIIEHQKVVKGNQKRLESLRELAGKENLEYPSVTLPPQPHTKEGVDAYNEVIARVRMWVNLNLWQKLKLSRDDAKPLLRLKGFPSFPLVERQANEVDWWDMVCNVKKLINEKKEDGKVFWQNLAGYKRQEALRPYLSSEEDRKKGKKFARYQLGDLLLHLEKKHGEDWGKVYDEAWERIDKKVEGLSKHIKLEEERRSEDAQSKAALTDWLRAKASFVIEGLKEADKDEFCRCELKLQKWYGDLRGKPFAIEAENSILDISGFSKQYNCAFIWQKDGVKKLNLYLIINYFKGGKLRFKKIKPEAFEANRFYTVINKKSGEIVIMEVNFNFDDPNLIILPLAFGKRQGREFIWNDLLSLETGSLKLANGRVIEKTLYNRRTRQDEPALFVALTFERREVLDSSNIKPMNLIGVDRGENIPAVIALTDPEGCPLSRFKDSLGNPTHILRIGESYKEKQRTIQAKKEVEQRRAGGYSRKYASKAKNLADDMVRNTARDLLYYAVTQDAMLIFENLSRGFGRQGKRTFMAERQYTRMEDWLTAKLAYEGLPSKVYLSKTLAQYTSKTCSNCGFTITSADYDRVLEKLKKTATGWMTTINGKELKVEGQITYYNRYKRQNVVKDLSVELDRLSEESVNNDISSWTKGRSGEALSLLKKRFSHRPVQEKFVCLNCGFETHADEQAALNIARSWLFLRSQEYKKYQTNKTTGNTDKRAFVETWQSFYRKKLKEVWKPAV

SEQ ID NO: 46913 - protein, 978 aa, synthetic construct
  REGION 1..978: note = engineered CasX variant
QEIKRINKIRRRLVKDSNTKKAGKTGPMKTLLVRVMTPDLRERLENLRKKPENIPQPISNTSRANLNKLLTDYTEMKKAILHVYWEEFQKDPVGLMSRVAQPASKKIDQNKLKPEMDEKGNLTTAGFACSQCGQPLFVYKLEQVSEKGKAYTNYFGRCNVAEHEKLILLAQLKPEKDSDEAVTYSLGKFGQRALDFYSIHVTKESTHPVKPLAQIAGNRYASHPVGKALSDACMGTIASFLSKYQDIIIEHQKVVKGNQKRLESLRELAGKENLEYPSVTLPPQPHTKEGVDAYNEVIARVRMWVNLNLWQKLKLSRDDAKPLLRLKGFPSFPLVERQANEVDWWDMVCNVKKLINEKKEDGKVFWQNLAGYKRQEALRPYLSSEEDRKKGKKFARYQLGDLLLHLEKKHGEDWGKVYDEAWERIDKKVEGLSKHIKLEEERRSEDAQSKAALTDWLRAKASFVIEGLKEADKDEFCRCELKLQKWYGDLRGKPFAIEAENSILDISGFSKQYNCAFIWQKDGVKKLNLYLIINYFKGGKLRFKKIKPEAFEANRFYTVINKKSGEIVIMEVNFNFDDPNLIILPLAFGKRQGREFIWNDLLSLETGSLKLANGRVIEKTLYNRRTRQDEPALFVALTFERREVLDSSNIKPMNLIGVDRGENIPAVIALTDPEGCPLSRFKDSLGNPTHILRIGESYKEKQRTIQAKKEVEQRRAGGYSRKYASKAKNLADDMVRNTARDLLYYAVTQDAMLIFENLSRGFGRQGKRTFMAERQYTRMEDWLTAKLAYEGLPSKVYLSKTLAQYTSKTCSNCGFTITSADYDRVLEKLKKTATGWMTTINGKELKVEGQITYYNRYKRQNVVKDLSVELDRLSEESVNNDISSWTKGRSGEALSLLKKRFSHRPVQEKFVCLNCGFETHADEQAALNIARSWLFLRSQEYKKYQTNKTTGNTDKRAFVETWQSFYRKKLKEVWKPAV

SEQ ID NO: 46914 - protein, 978 aa, synthetic construct
  REGION 1..978: note = engineered CasX variant
QEIKRINKIRRRLVKDSNTKKAGKTGPMKTLLVRVMTPDLRERLENLRKKPENIPQPISNTSRANLNKLLTDYTEMKKAILHVYWEEFQKDPVGLMSRVAQPASKKIDQNKLKPEMDEKGNLTTAGFACSQCGQPLFVYKLEQVSEKGKAYTNYFGRCNVAEHEKLILLAQLKPEKDSDEAVTYSLGKFGQRALDFYSIHVTKESTHPVKPLAQIAGNRYASSPVGKALSDACMGTIASFLSKYQDIIIEHQKVVKGNQKRLESLRELAGKENLEYPSVTLPPQPHTKEGVDAYNEVIARVRMWVNLNLWQKLKLSRDDAKPLLRLKGFPSFPLVERQANEVDWWDMVCNVKKLINEKKEDGKVFWQNLAGYKRQEALRPYLSSEEDRKKGKKFARYQLGDLLLHLEKKHGEDWGKVYDEAWERIDKKVEGLSKHIKLEEERRSEDAQSKAALTDWLRAKASFVIEGLKEADKDEFCRCELKLQKWYGDLRGKPFAIEAENSILDISGFSKQYNCAFIWQKDGVKKLNLYLIINYFKGGKLRFKKIKPEAFEANRFYTVINKKSGEIVIMEVNFNFDDPNLIILPLAFGKRQGREFIWNDLLSLETGSLKLANGRVIEKTLYNRRTRQDEPALFVALTFERREVLDSSNIKPMNLIGVDRGENIPAVIALTDPEGCPLSRFKDSLGNPTHILRIGESYKEKQRTIQAKKEVEQRRAGGYSRKYASKAKNLADDMVRNTARDLLYYAVTQDAMLIFENLSRGFGRQGKRTFMAERQYTRMEDWLTAKLAYEGLPSKVYLSKTLAQYTSKTCSNCGFTITSADYDRVLEKLKKTATGWMTTINGKELKVEGQITYYNRYKRQNVVKDLSVELDRLSEESVNNDISSWTKGRSGEALSLLKKRFSHRPVQEKFVCLNCGFETHADEQAALNIARSWLFLRSQEYKKYQTNKTTGNTDKRAFVETWQSFYRKKLKEVWKPAV

SEQ ID NO: 46915 - protein, 978 aa, synthetic construct
  REGION 1..978: note = engineered CasX variant
QEIKRINKIRRRLVKDSNTKKAGKTGPMKTLLVRVMTPDLRERLENLRKKPENIPQPISNTSRANLNKLLTDYTEMKKAILHVYWEEFQKDPVGLMSRVAQPASKKIDQNKLKPEMDEKGNLTTAGFACSQCGQPLFVYKLEQVSEKGKAYTNYFGRCNVAEHEKLILLAQLKPEKDSDEAVTYSLGKFGQRALDFYSIHVTKESTHPVKPLAQIAGNRYASTPVGKALSDACMGTIASFLSKYQDIIIEHQKVVKGNQKRLESLRELAGKENLEYPSVTLPPQPHTKEGVDAYNEVIARVRMWVNLNLWQKLKLSRDDAKPLLRLKGFPSFPLVERQANEVDWWDMVCNVKKLINEKKEDGKVFWQNLAGYKRQEALRPYLSSEEDRKKGKKFARYQLGDLLLHLEKKHGEDWGKVYDEAWERIDKKVEGLSKHIKLEEERRSEDAQSKAALTDWLRAKASFVIEGLKEADKDEFCRCELKLQKWYGDLRGKPFAIEAENSILDISGFSKQYNCAFIWQKDGVKKLNLYLIINYFKGGKLRFKKIKPEAFEANRFYTVINKKSGEIVIMEVNFNFDDPNLIILPLAFGKRQGREFIWNDLLSLETGSLKLANGRVIEKTLYNRRTRQDEPALFVALTFERREVLDSSNIKPMNLIGVDRGENIPAVIALTDPEGCPLSRFKDSLGNPTHILRIGESYKEKQRTIQAKKEVEQRRAGGYSRKYASKAKNLADDMVRNTARDLLYYAVTQDAMLIFENLSRGFGRQGKRTFMAERQYTRMEDWLTAKLAYEGLPSKVYLSKTLAQYTSKTCSNCGFTITSADYDRVLEKLKKTATGWMTTINGKELKVEGQITYYNRYKRQNVVKDLSVELDRLSEESVNNDISSWTKGRSGEALSLLKKRFSHRPVQEKFVCLNCGFETHADEQAALNIARSWLFLRSQEYKKYQTNKTTGNTDKRAFVETWQSFYRKKLKEVWKPAV

SEQ ID NO: 46916 - protein, 978 aa, synthetic construct
  REGION 1..978: note = engineered CasX variant
QEIKRINKIRRRLVKDSNTKKAGKTGPMKTLLVRVMTPDLRERLENLRKKPENIPQPISNTSRANLNKLLTDYTEMKKAILHVYWEEFQKDPVGLMSRVAQPASKKIDQNKLKPEMDEKGNLTTAGFACSQCGQPLFVYKLEQVSEKGKAYTNYFGRCNVAEHEKLILLAQLKPEKDSDEAVTYSLGKFGQRALDFYSIHVTKESTHPVKPLAQIAGNRYASAPVGKALSDACMGTIASFLSKYQDIIIEHQKVVKGNQKRLESLRELAGKENLEYPSVTLPPQPHTKEGVDAYNEVIARVRMWVNLNLWQKLKLSRDDAKPLLRLKGFPSFPLVERQANEVDWWDMVCNVKKLINEKKEDGKVFWQNLAGYKRQEALRPYLSSEEDRKKGKKFARYQLGDLLLHLEKKHGEDWGKVYDEAWERIDKKVEGLSKHIKLEEERRSEDAQSKAALTDWLRAKASFVIEGLKEADKDEFCRCELKLQKWYGDLRGKPFAIEAENSILDISGFSKQYNCAFIWQKDGVKKLNLYLIINYFKGGKLRFKKIKPEAFEANRFYTVINKKSGEIVIMEVNFNFDDPNLIILPLAFGKRQGREFIWNDLLSLETGSLKLANGRVIEKTLYNRRTRQDEPALFVALTFERREVLDSSNIKPMNLIGVDRGENIPAVIALTDPEGCPLSRFKDSLGNPTHILRIGESYKEKQRTIQAKKEVEQRRAGGYSRKYASKAKNLADDMVRNTARDLLYYAVTQDAMLIFENLSRGFGRQGKRTFMAERQYTRMEDWLTAKLAYEGLPSKVYLSKTLAQYTSKTCSNCGFTITSADYDRVLEKLKKTATGWMTTINGKELKVEGQITYYNRYKRQNVVKDLSVELDRLSEESVNNDISSWTKGRSGEALSLLKKRFSHRPVQEKFVCLNCGFETHADEQAALNIARSWLFLRSQEYKKYQTNKTTGNTDKRAFVETWQSFYRKKLKEVWKPAV

SEQ ID NO: 46917 - protein, 978 aa, synthetic construct
  REGION 1..978: note = engineered CasX variant
QEIKRINKIRRRLVKDSNTKKAGKTGPMKTLLVRVMTPDLRERLENLRKKPENIPQPISNTSRANLNKLLTDYTEMKKAILHVYWEEFQKDPVGLMSRVAQPASKKIDQNKLKPEMDEKGNLTTAGFACSQCGQPLFVYKLEQVSEKGKAYTNYFGRCNVAEHEKLILLAQLKPEKDSDEAVTYSLGKFGQRALDFYSIHVTKESTHPVKPLAQIAGNRYASVPVGKALSDACMGTIASFLSKYQDIIIEHQKVVKGNQKRLESLRELAGKENLEYPSVTLPPQPHTKEGVDAYNEVIARVRMWVNLNLWQKLKLSRDDAKPLLRLKGFPSFPLVERQANEVDWWDMVCNVKKLINEKKEDGKVFWQNLAGYKRQEALRPYLSSEEDRKKGKKFARYQLGDLLLHLEKKHGEDWGKVYDEAWERIDKKVEGLSKHIKLEEERRSEDAQSKAALTDWLRAKASFVIEGLKEADKDEFCRCELKLQKWYGDLRGKPFAIEAENSILDISGFSKQYNCAFIWQKDGVKKLNLYLIINYFKGGKLRFKKIKPEAFEANRFYTVINKKSGEIVIMEVNFNFDDPNLIILPLAFGKRQGREFIWNDLLSLETGSLKLANGRVIEKTLYNRRTRQDEPALFVALTFERREVLDSSNIKPMNLIGVDRGENIPAVIALTDPEGCPLSRFKDSLGNPTHILRIGESYKEKQRTIQAKKEVEQRRAGGYSRKYASKAKNLADDMVRNTARDLLYYAVTQDAMLIFENLSRGFGRQGKRTFMAERQYTRMEDWLTAKLAYEGLPSKVYLSKTLAQYTSKTCSNCGFTITSADYDRVLEKLKKTATGWMTTINGKELKVEGQITYYNRYKRQNVVKDLSVELDRLSEESVNNDISSWTKGRSGEALSLLKKRFSHRPVQEKFVCLNCGFETHADEQAALNIARSWLFLRSQEYKKYQTNKTTGNTDKRAFVETWQSFYRKKLKEVWKPAV

SEQ ID NO: 46918 - protein, 978 aa, synthetic construct
  REGION 1..978: note = engineered CasX variant
QEIKRINKIRRRLVKDSNTKKAGKTGPMKTLLVRVMTPDLRERLENLRKKPENIPQPISNTSRANLNKLLTDYTEMKKAILHVYWEEFQKDPVGLMSRVAQPASKKIDQNKLKPEMDEKGNLTTAGFACSQCGQPLFVYKLEQVSEKGKAYTNYFGRCNVAEHEKLIKLAQLKPEKDSDEAVTYSLGKFGQRALDFYSIHVTKESTHPVKPLAQIAGNRYASGPVGKALSDACMGTIASFLSKYQDIIIEHQKVVKGNQKRLESLRELAGKENLEYPSVTLPPQPHTKEGVDAYNEVIARVRMWVNLNLWQKLKLSRDDAKPLLRLKGFPSFPLVERQANEVDWWDMVCNVKKLINEKKEDGKVFWQNLAGYKRQEALRPYLSSEEDRKKGKKFARYQLGDLLLHLEKKHGEDWGKVYDEAWERIDKKVEGLSKHIKLEEERRSEDAQSKAALTDWLRAKASFVIEGLKEADKDEFCRCELKLQKWYGDLRGKPFAIEAENSILDISGFSKQYNCAFIWQKDGVKKLNLYLIINYFKGGKLRFKKIKPEAFEANRFYTVINKKSGEIVIMEVNFNFDDPNLIILPLAFGKRQGREFIWNDLLSLETGSLKLANGRVIEKTLYNRRTRQDEPALFVALTFERREVLDSSNIKPMNLIGVDRGENIPAVIALTDPEGCPLSRFKDSLGNPTHILRIGESYKEKQRTIQAKKEVEQRRAGGYSRKYASKAKNLADDMVRNTARDLLYYAVTQDAMLIFENLSRGFGRQGKRTFMAERQYTRMEDWLTAKLAYEGLPSKVYLSKTLAQYTSKTCSNCGFTITSADYDRVLEKLKKTATGWMTTINGKELKVEGQITYYNRYKRQNVVKDLSVELDRLSEESVNNDISSWTKGRSGEALSLLKKRFSHRPVQEKFVCLNCGFETHADEQAALNIARSWLFLRSQEYKKYQTNKTTGNTDKRAFVETWQSFYRKKLKEVWKPAV

SEQ ID NO: 46919 - protein, 977 aa, synthetic construct
  REGION 1..977: note = engineered CasX variant
QEIKRINKIRRRLVKDSNTKKAGKTGPMKTLLVRVMTPDLRERLENLRKKPENIPQPISNTSRANLNKLLTDYTEMKKAILHVYWEEFQKDPVGLMSRVAQPASKKIDQNKLKPEMDEKGNLTTAGFACSQCGQPLFVYKLEQVSEKGKAYTNYFGRCNVAEHEKLILLAQLKPEKDSDEAVTYSLGKFGQRALDFYSIHVTKESTHPVKPLAQIAGNRYASPVGKALSDACMGTIASFLSKYQDIIIEHQKVVKGNQKRLESLRELAGKENLEYPSVTLPPQPHTKEGVDAYNEVIARVRMWVNLNLWQKLKLSRDDAKPLLRLKGFPSFPLVERQANEVDWWDMVCNVKKLINEKKEDGKVFWQNLAGYKRQEALRPYLSSEEDRKKGKKFARYQLGDLLLHLEKKHGEDWGKVYDEAWERIDKKVEGLSKHIKLEEERRSEDAQSKAALTDWLRAKASFVIEGLKEADKDEFCRCELKLQKWYGDLRGKPFAIEAENSILDISGFSKQYNCAFIWQKDGVKKLNLYLIINYFKGGKLRFKKIKPEAFEANRFYTVINKKSGEIVIMEVNFNFDDPNLIILPLAFGKRQGREFIWNDLLSLETGSLKLANGRVIEKTLYNRRTRQDEPALFVALTFERREVLDSSNIKPMNLIGVDRGENIPAVIALTDPEGCPLSRFKDSLGNPTHILRIGESYKEKQRTIQAKKEVEQRRAGGYSRKYASKAKNLADDMVRNTARDLLYYAVTQDAMLIFENLSRGFGRQGKRTFMAERQYTRMEDWLTAKLAYEGLPSKVYLSKTLAQYTSKTCSNCGFTITSADYDRVLEKLKKTATGWMTTINGKELKVEGQITYYNRYKRQNVVKDLSVELDRLSEESVNNDISSWTKGRSGEALSLLKKRFSHRPVQEKFVCLNCGFETHADEQAALNIARSWLFLRSQEYKKYQTNKTTGNTDKRAFVETWQSFYRKKLKEVWKPAV

SEQ ID NO: 46920 - protein, 979 aa, synthetic construct
  REGION 1..979: note = engineered CasX variant
QEIKRINKIRRRLVKDSNTKKAGKTGPMKTLLVRVMTPDLRERLENLRKKPENIPQPISNTSRANLNKLLTDYTEMKKAILHVYWEEFQKDPVGLMSRVAQPASKKIDQNKLKPEMDEKGNLTTAGFACSQCGQPLFVYKLEQVSEKGKAYTNYFGRCNVAEHEKLILLAQLKPEKDSDEAVTYSLGKFGQRALDFYSIHVTKESTHPVKPLAQIAGNRYASYPVGKALSGACMGTIASFLSKYQDIIIEHQKVVKGNQKRLESLRELAGKENLEYPSVTLPPQPHTKEGVDAYNEVIARVRMWVNLNLWQKLKLSRDDAKPLLRLKGFPSFPLVERQANEVDWWDMVCNVKKLINEKKEDGKVFWQNLAGYKRQEALRPYLSSEEDRKKGKKFARYQLGDLLLHLEKKHGEDWGKVYDEAWERIDKKVEGLSKHIKLEEERRSEDAQSKAALTDWLRAKASFVIEGLKEADKDEFCRCELKLQKWYGDLRGKPFAIEAENSILDISGFSKQYNCAFIWQKDGVKKLNLYLIINYFKGGKLRFKKIKPEAFEANRFYTVINKKSGEIVPMEVNFNFDDPNLIILPLAFGKRQGREFIWNDLLSLETGSLKLANGRVIEKTLYNRRTRQDEPALFVALTFERREVLDSSNIKPMNLIGVDRGENIPAVIALTDPEGCPLSRFKDSLGNPTHILRIGESYKEKQRTIQAKKEVEQRRAGGYSRKYASKAKNLADDMVRNTARDLLYYAVTQDAMLIFENLSRGFGRQGKRTFMAERQYTRMEDWLTAKLAYEGPLPSKTYLSKTLAQYTSKTCSNCGFTITSADYDRVLEKLKKTATGWMTTINGKELKVEGQITYYNRYKRQNVVKDLSVELDRLSEESVNNDISSWTKGRSGEALSLLKKRFSHRPVQEKFVCLNCGFETHADEQAALNIARSWLFLRSQEYKKYQTNKTTGNTDKRAFVETWQSFYRKKLKEVWKPAV

SEQ ID NO: 46921 - protein, 979 aa, synthetic construct
  REGION 1..979: note = engineered CasX variant
QEIKRINKIRRRLVKDSNTKKAGKTGPMKTLLVRVMTPDLRERLENLRKKPENIPQPISNTSRANLNKLLTDYTEMKKAILHVYWEEFQKDPVGLMSRVAQPASKKIDQNKLKPEMDEKGNLTTAGFACSQCGQPLFVYKLEQVSEKGKAYTNYFGRCNVAEHEKLILLAQLKPEKDSDEAVTYSLGKFGQRALDFYSIHVTKESTHPVKPLAQIAGNRYASHPVGKALSGACMGTIASFLSKYQDIIIEHQKVVKGNQKRLESLRELAGKENLEYPSVTLPPQPHTKEGVDAYNEVIARVRMWVNLNLWQKLKLSRDDAKPLLRLKGFPSFPLVERQANEVDWWDMVCNVKKLINEKKEDGKVFWQNLAGYKRQEALRPYLSSEEDRKKGKKFARYQLGDLLLHLEKKHGEDWGKVYDEAWERIDKKVEGLSKHIKLEEERRSEDAQSKAALTDWLRAKASFVIEGLKEADKDEFCRCELKLQKWYGDLRGKPFAIEAENSILDISGFSKQYNCAFIWQKDGVKKLNLYLIINYFKGGKLRFKKIKPEAFEANRFYTVINKKSGEIVPMEVNFNFDDPNLIILPLAFGKRQGREFIWNDLLSLETGSLKLANGRVIEKTLYNRRTRQDEPALFVALTFERREVLDSSNIKPMNLIGVDRGENIPAVIALTDPEGCPLSRFKDSLGNPTHILRIGESYKEKQRTIQAKKEVEQRRAGGYSRKYASKAKNLADDMVRNTARDLLYYAVTQDAMLIFENLSRGFGRQGKRTFMAERQYTRMEDWLTAKLAYEGPLPSKTYLSKTLAQYTSKTCSNCGFTITSADYDRVLEKLKKTATGWMTTINGKELKVEGQITYYNRYKRQNVVKDLSVELDRLSEESVNNDISSWTKGRSGEALSLLKKRFSHRPVQEKFVCLNCGFETHADEQAALNIARSWLFLRSQEYKKYQTNKTTGNTDKRAFVETWQSFYRKKLKEVWKPAV

SEQ ID NO: 46922 - protein, 979 aa, synthetic construct
  REGION 1..979: note = engineered CasX variant
QEIKRINKIRRRLVKDSNTKKAGKTGPMKTLLVRVMTPDLRERLENLRKKPENIPQPISNTSRANLNKLLTDYTEMKKAILHVYWEEFQKDPVGLMSRVAQPASKKIDQNKLKPEMDEKGNLTTAGFACSQCGQPLFVYKLEQVSEKGKAYTNYFGRCNVAEHEKLILLAQLKPEKDSDEAVTYSLGKFGQRALDFYSIHVTKESTHPVKPLAQIAGNRYASSPVGKALSGACMGTIASFLSKYQDIIIEHQKVVKGNQKRLESLRELAGKENLEYPSVTLPPQPHTKEGVDAYNEVIARVRMWVNLNLWQKLKLSRDDAKPLLRLKGFPSFPLVERQANEVDWWDMVCNVKKLINEKKEDGKVFWQNLAGYKRQEALRPYLSSEEDRKKGKKFARYQLGDLLLHLEKKHGEDWGKVYDEAWERIDKKVEGLSKHIKLEEERRSEDAQSKAALTDWLRAKASFVIEGLKEADKDEFCRCELKLQKWYGDLRGKPFAIEAENSILDISGFSKQYNCAFIWQKDGVKKLNLYLIINYFKGGKLRFKKIKPEAFEANRFYTVINKKSGEIVPMEVNFNFDDPNLIILPLAFGKRQGREFIWNDLLSLETGSLKLANGRVIEKTLYNRRTRQDEPALFVALTFERREVLDSSNIKPMNLIGVDRGENIPAVIALTDPEGCPLSRFKDSLGNPTHILRIGESYKEKQRTIQAKKEVEQRRAGGYSRKYASKAKNLADDMVRNTARDLLYYAVTQDAMLIFENLSRGFGRQGKRTFMAERQYTRMEDWLTAKLAYEGPLPSKTYLSKTLAQYTSKTCSNCGFTITSADYDRVLEKLKKTATGWMTTINGKELKVEGQITYYNRYKRQNVVKDLSVELDRLSEESVNNDISSWTKGRSGEALSLLKKRFSHRPVQEKFVCLNCGFETHADEQAALNIARSWLFLRSQEYKKYQTNKTTGNTDKRAFVETWQSFYRKKLKEVWKPAV

SEQ ID NO: 46923 - protein, 979 aa, synthetic construct
  REGION 1..979: note = engineered CasX variant
QEIKRINKIRRRLVKDSNTKKAGKTGPMKTLLVRVMTPDLRERLENLRKKPENIPQPISNTSRANLNKLLTDYTEMKKAILHVYWEEFQKDPVGLMSRVAQPASKKIDQNKLKPEMDEKGNLTTAGFACSQCGQPLFVYKLEQVSEKGKAYTNYFGRCNVAEHEKLILLAQLKPEKDSDEAVTYSLGKFGQRALDFYSIHVTKESTHPVKPLAQIAGNRYASTPVGKALSGACMGTIASFLSKYQDIIIEHQKVVKGNQKRLESLRELAGKENLEYPSVTLPPQPHTKEGVDAYNEVIARVRMWVNLNLWQKLKLSRDDAKPLLRLKGFPSFPLVERQANEVDWWDMVCNVKKLINEKKEDGKVFWQNLAGYKRQEALRPYLSSEEDRKKGKKFARYQLGDLLLHLEKKHGEDWGKVYDEAWERIDKKVEGLSKHIKLEEERRSEDAQSKAALTDWLRAKASFVIEGLKEADKDEFCRCELKLQKWYGDLRGKPFAIEAENSILDISGFSKQYNCAFIWQKDGVKKLNLYLIINYFKGGKLRFKKIKPEAFEANRFYTVINKKSGEIVPMEVNFNFDDPNLIILPLAFGKRQGREFIWNDLLSLETGSLKLANGRVIEKTLYNRRTRQDEPALFVALTFERREVLDSSNIKPMNLIGVDRGENIPAVIALTDPEGCPLSRFKDSLGNPTHILRIGESYKEKQRTIQAKKEVEQRRAGGYSRKYASKAKNLADDMVRNTARDLLYYAVTQDAMLIFENLSRGFGRQGKRTFMAERQYTRMEDWLTAKLAYEGPLPSKTYLSKTLAQYTSKTCSNCGFTITSADYDRVLEKLKKTATGWMTTINGKELKVEGQITYYNRYKRQNVVKDLSVELDRLSEESVNNDISSWTKGRSGEALSLLKKRFSHRPVQEKFVCLNCGFETHADEQAALNIARSWLFLRSQEYKKYQTNKTTGNTDKRAFVETWQSFYRKKLKEVWKPAV

SEQ ID NO: 46924 - protein, 979 aa, synthetic construct
  REGION 1..979: note = engineered CasX variant
QEIKRINKIRRRLVKDSNTKKAGKTGPMKTLLVRVMTPDLRERLENLRKKPENIPQPISNTSRANLNKLLTDYTEMKKAILHVYWEEFQKDPVGLMSRVAQPASKKIDQNKLKPEMDEKGNLTTAGFACSQCGQPLFVYKLEQVSEKGKAYTNYFGRCNVAEHEKLILLAQLKPEKDSDEAVTYSLGKFGQRALDFYSIHVTKESTHPVKPLAQIAGNRYASAPVGKALSGACMGTIASFLSKYQDIIIEHQKVVKGNQKRLESLRELAGKENLEYPSVTLPPQPHTKEGVDAYNEVIARVRMWVNLNLWQKLKLSRDDAKPLLRLKGFPSFPLVERQANEVDWWDMVCNVKKLINEKKEDGKVFWQNLAGYKRQEALRPYLSSEEDRKKGKKFARYQLGDLLLHLEKKHGEDWGKVYDEAWERIDKKVEGLSKHIKLEEERRSEDAQSKAALTDWLRAKASFVIEGLKEADKDEFCRCELKLQKWYGDLRGKPFAIEAENSILDISGFSKQYNCAFIWQKDGVKKLNLYLIINYFKGGKLRFKKIKPEAFEANRFYTVINKKSGEIVPMEVNFNFDDPNLIILPLAFGKRQGREFIWNDLLSLETGSLKLANGRVIEKTLYNRRTRQDEPALFVALTFERREVLDSSNIKPMNLIGVDRGENIPAVIALTDPEGCPLSRFKDSLGNPTHILRIGESYKEKQRTIQAKKEVEQRRAGGYSRKYASKAKNLADDMVRNTARDLLYYAVTQDAMLIFENLSRGFGRQGKRTFMAERQYTRMEDWLTAKLAYEGPLPSKTYLSKTLAQYTSKTCSNCGFTITSADYDRVLEKLKKTATGWMTTINGKELKVEGQITYYNRYKRQNVVKDLSVELDRLSEESVNNDISSWTKGRSGEALSLLKKRFSHRPVQEKFVCLNCGFETHADEQAALNIARSWLFLRSQEYKKYQTNKTTGNTDKRAFVETWQSFYRKKLKEVWKPAV

SEQ ID NO: 46925 - protein, 979 aa, synthetic construct
  REGION 1..979: note = engineered CasX variant
QEIKRINKIRRRLVKDSNTKKAGKTGPMKTLLVRVMTPDLRERLENLRKKPENIPQPISNTSRANLNKLLTDYTEMKKAILHVYWEEFQKDPVGLMSRVAQPASKKIDQNKLKPEMDEKGNLTTAGFACSQCGQPLFVYKLEQVSEKGKAYTNYFGRCNVAEHEKLILLAQLKPEKDSDEAVTYSLGKFGQRALDFYSIHVTKESTHPVKPLAQIAGNRYASVPVGKALSGACMGTIASFLSKYQDIIIEHQKVVKGNQKRLESLRELAGKENLEYPSVTLPPQPHTKEGVDAYNEVIARVRMWVNLNLWQKLKLSRDDAKPLLRLKGFPSFPLVERQANEVDWWDMVCNVKKLINEKKEDGKVFWQNLAGYKRQEALRPYLSSEEDRKKGKKFARYQLGDLLLHLEKKHGEDWGKVYDEAWERIDKKVEGLSKHIKLEEERRSEDAQSKAALTDWLRAKASFVIEGLKEADKDEFCRCELKLQKWYGDLRGKPFAIEAENSILDISGFSKQYNCAFIWQKDGVKKLNLYLIINYFKGGKLRFKKIKPEAFEANRFYTVINKKSGEIVPMEVNFNFDDPNLIILPLAFGKRQGREFIWNDLLSLETGSLKLANGRVIEKTLYNRRTRQDEPALFVALTFERREVLDSSNIKPMNLIGVDRGENIPAVIALTDPEGCPLSRFKDSLGNPTHILRIGESYKEKQRTIQAKKEVEQRRAGGYSRKYASKAKNLADDMVRNTARDLLYYAVTQDAMLIFENLSRGFGRQGKRTFMAERQYTRMEDWLTAKLAYEGPLPSKTYLSKTLAQYTSKTCSNCGFTITSADYDRVLEKLKKTATGWMTTINGKELKVEGQITYYNRYKRQNVVKDLSVELDRLSEESVNNDISSWTKGRSGEALSLLKKRFSHRPVQEKFVCLNCGFETHADEQAALNIARSWLFLRSQEYKKYQTNKTTGNTDKRAFVETWQSFYRKKLKEVWKPAV

SEQ ID NO: 46926 - protein, 979 aa, synthetic construct
  REGION 1..979: note = engineered CasX variant
QEIKRINKIRRRLVKDSNTKKAGKTGPMKTLLVRVMTPDLRERLENLRKKPENIPQPISNTSRANLNKLLTDYTEMKKAILHVYWEEFQKDPVGLMSRVAQPASKKIDQNKLKPEMDEKGNLTTAGFACSQCGQPLFVYKLEQVSEKGKAYTNYFGRCNVAEHEKLIKLAQLKPEKDSDEAVTYSLGKFGQRALDFYSIHVTKESTHPVKPLAQIAGNRYASGPVGKALSGACMGTIASFLSKYQDIIIEHQKVVKGNQKRLESLRELAGKENLEYPSVTLPPQPHTKEGVDAYNEVIARVRMWVNLNLWQKLKLSRDDAKPLLRLKGFPSFPLVERQANEVDWWDMVCNVKKLINEKKEDGKVFWQNLAGYKRQEALRPYLSSEEDRKKGKKFARYQLGDLLLHLEKKHGEDWGKVYDEAWERIDKKVEGLSKHIKLEEERRSEDAQSKAALTDWLRAKASFVIEGLKEADKDEFCRCELKLQKWYGDLRGKPFAIEAENSILDISGFSKQYNCAFIWQKDGVKKLNLYLIINYFKGGKLRFKKIKPEAFEANRFYTVINKKSGEIVPMEVNFNFDDPNLIILPLAFGKRQGREFIWNDLLSLETGSLKLANGRVIEKTLYNRRTRQDEPALFVALTFERREVLDSSNIKPMNLIGVDRGENIPAVIALTDPEGCPLSRFKDSLGNPTHILRIGESYKEKQRTIQAKKEVEQRRAGGYSRKYASKAKNLADDMVRNTARDLLYYAVTQDAMLIFENLSRGFGRQGKRTFMAERQYTRMEDWLTAKLAYEGPLPSKTYLSKTLAQYTSKTCSNCGFTITSADYDRVLEKLKKTATGWMTTINGKELKVEGQITYYNRYKRQNVVKDLSVELDRLSEESVNNDISSWTKGRSGEALSLLKKRFSHRPVQEKFVCLNCGFETHADEQAALNIARSWLFLRSQEYKKYQTNKTTGNTDKRAFVETWQSFYRKKLKEVWKPAV

SEQ ID NO: 46927 - protein, 978 aa, synthetic construct
  REGION 1..978: note = engineered CasX variant
QEIKRINKIRRRLVKDSNTKKAGKTGPMKTLLVRVMTPDLRERLENLRKKPENIPQPISNTSRANLNKLLTDYTEMKKAILHVYWEEFQKDPVGLMSRVAQPASKKIDQNKLKPEMDEKGNLTTAGFACSQCGQPLFVYKLEQVSEKGKAYTNYFGRCNVAEHEKLILLAQLKPEKDSDEAVTYSLGKFGQRALDFYSIHVTKESTHPVKPLAQIAGNRYASPVGKALSGACMGTIASFLSKYQDIIIEHQKVVKGNQKRLESLRELAGKENLEYPSVTLPPQPHTKEGVDAYNEVIARVRMWVNLNLWQKLKLSRDDAKPLLRLKGFPSFPLVERQANEVDWWDMVCNVKKLINEKKEDGKVFWQNLAGYKRQEALRPYLSSEEDRKKGKKFARYQLGDLLLHLEKKHGEDWGKVYDEAWERIDKKVEGLSKHIKLEEERRSEDAQSKAALTDWLRAKASFVIEGLKEADKDEFCRCELKLQKWYGDLRGKPFAIEAENSILDISGFSKQYNCAFIWQKDGVKKLNLYLIINYFKGGKLRFKKIKPEAFEANRFYTVINKKSGEIVPMEVNFNFDDPNLIILPLAFGKRQGREFIWNDLLSLETGSLKLANGRVIEKTLYNRRTRQDEPALFVALTFERREVLDSSNIKPMNLIGVDRGENIPAVIALTDPEGCPLSRFKDSLGNPTHILRIGESYKEKQRTIQAKKEVEQRRAGGYSRKYASKAKNLADDMVRNTARDLLYYAVTQDAMLIFENLSRGFGRQGKRTFMAERQYTRMEDWLTAKLAYEGPLPSKTYLSKTLAQYTSKTCSNCGFTITSADYDRVLEKLKKTATGWMTTINGKELKVEGQITYYNRYKRQNVVKDLSVELDRLSEESVNNDISSWTKGRSGEALSLLKKRFSHRPVQEKFVCLNCGFETHADEQAALNIARSWLFLRSQEYKKYQTNKTTGNTDKRAFVETWQSFYRKKLKEVWKPAV

SEQ ID NO: 46928 - protein, 979 aa, synthetic construct
  REGION 1..979: note = engineered CasX variant
QEIKRINKIRRRLVKDSNTKKAGKTGPMKTLLVRVMTPDLRERLENLRKKPENIPQPISNTSRANLNKLLTDYTEMKKAILHVYWEEFQKDPVGLMSRVAQPASKKIDQNKLKPEMDEKGNLTTAGFACSQCGQPLFVYKLEQVSEKGKAYTNYFGRCNVAEHEKLILLAQLKPEKDSDEAVTYSLGKFGQRALDFYSIHVTKESTHPVKPLAQIAGNRYASYPVGKALSDACMGTIASFLSKYQDIIIEHQKVVKGNQKRLESLRELAGKENLEYPSVTLPPQPHTKEGVDAYNEVIARVRMWVNLNLWQKLKLSRDDAKPLLRLKNFPSFPLVERQANEVDWWDMVCNVKKLINEKKEDGKVFWQNLAGYKRQEALRPYLSSEEDRKKGKKFARYQLGDLLLHLEKKHGEDWGKVYDEAWERIDKKVEGLSKHIKLEEERRSEDAQSKAALTDWLRAKASFVIEGLKEADKDEFCRCELKLQKWYGDLRGKPFAIEAENSILDISGFSKQYNCAFIWQKDGVKKLNLYLIINYFKGGKLRFKKIKPEAFEANRFYTVINKKSGEIVPMEVNFNFDDPNLIILPLAFGKRQGREFIWNDLLSLETGSLKLANGRVIEKTLYNRRTRQDEPALFVALTFERREVLDSSNIKPMNLIGVDRGENIPAVIALTDPEGCPLSRFKDSLGNPTHILRIGESYKEKQRTIQAKKEVEQRRAGGYSRKYASKAKNLADDMVRNTARDLLYYAVTQDAMLIFENLSRGFGRQGKRTFMAERQYTRMEDWLTAKLAYEGPLPSKTYLSKTLAQYTSKTCSNCGFTITSADYDRVLEKLKKTATGWMTTINGKELKVEGQITYYNRYKRQNVVKDLSVELDRLSEESVNNDISSWTKGRSGEALSLLKKRFSHRPVQEKFVCLNCGFETHADEQAALNIARSWLFLRSQEYKKYQTNKTTGNTDKRAFVETWQSFYRKKLKEVWKPAV

SEQ ID NO: 46929 - protein, 979 aa, synthetic construct
  REGION 1..979: note = engineered CasX variant
QEIKRINKIRRRLVKDSNTKKAGKTGPMKTLLVRVMTPDLRERLENLRKKPENIPQPISNTSRANLNKLLTDYTEMKKAILHVYWEEFQKDPVGLMSRVAQPASKKIDQNKLKPEMDEKGNLTTAGFACSQCGQPLFVYKLEQVSEKGKAYTNYFGRCNVAEHEKLILLAQLKPEKDSDEAVTYSLGKFGQRALDFYSIHVTKESTHPVKPLAQIAGNRYASHPVGKALSDACMGTIASFLSKYQDIIIEHQKVVKGNQKRLESLRELAGKENLEYPSVTLPPQPHTKEGVDAYNEVIARVRMWVNLNLWQKLKLSRDDAKPLLRLKNFPSFPLVERQANEVDWWDMVCNVKKLINEKKEDGKVFWQNLAGYKRQEALRPYLSSEEDRKKGKKFARYQLGDLLLHLEKKHGEDWGKVYDEAWERIDKKVEGLSKHIKLEEERRSEDAQSKAALTDWLRAKASFVIEGLKEADKDEFCRCELKLQKWYGDLRGKPFAIEAENSILDISGFSKQYNCAFIWQKDGVKKLNLYLIINYFKGGKLRFKKIKPEAFEANRFYTVINKKSGEIVPMEVNFNFDDPNLIILPLAFGKRQGREFIWNDLLSLETGSLKLANGRVIEKTLYNRRTRQDEPALFVALTFERREVLDSSNIKPMNLIGVDRGENIPAVIALTDPEGCPLSRFKDSLGNPTHILRIGESYKEKQRTIQAKKEVEQRRAGGYSRKYASKAKNLADDMVRNTARDLLYYAVTQDAMLIFENLSRGFGRQGKRTFMAERQYTRMEDWLTAKLAYEGPLPSKTYLSKTLAQYTSKTCSNCGFTITSADYDRVLEKLKKTATGWMTTINGKELKVEGQITYYNRYKRQNVVKDLSVELDRLSEESVNNDISSWTKGRSGEALSLLKKRFSHRPVQEKFVCLNCGFETHADEQAALNIARSWLFLRSQEYKKYQTNKTTGNTDKRAFVETWQSFYRKKLKEVWKPAV

SEQ ID NO: 46930 - protein, 979 aa, synthetic construct
  REGION 1..979: note = engineered CasX variant
QEIKRINKIRRRLVKDSNTKKAGKTGPMKTLLVRVMTPDLRERLENLRKKPENIPQPISNTSRANLNKLLTDYTEMKKAILHVYWEEFQKDPVGLMSRVAQPASKKIDQNKLKPEMDEKGNLTTAGFACSQCGQPLFVYKLEQVSEKGKAYTNYFGRCNVAEHEKLILLAQLKPEKDSDEAVTYSLGKFGQRALDFYSIHVTKESTHPVKPLAQIAGNRYASSPVGKALSDACMGTIASFLSKYQDIIIEHQKVVKGNQKRLESLRELAGKENLEYPSVTLPPQPHTKEGVDAYNEVIARVRMWVNLNLWQKLKLSRDDAKPLLRLKNFPSFPLVERQANEVDWWDMVCNVKKLINEKKEDGKVFWQNLAGYKRQEALRPYLSSEEDRKKGKKFARYQLGDLLLHLEKKHGEDWGKVYDEAWERIDKKVEGLSKHIKLEEERRSEDAQSKAALTDWLRAKASFVIEGLKEADKDEFCRCELKLQKWYGDLRGKPFAIEAENSILDISGFSKQYNCAFIWQKDGVKKLNLYLIINYFKGGKLRFKKIKPEAFEANRFYTVINKKSGEIVPMEVNFNFDDPNLIILPLAFGKRQGREFIWNDLLSLETGSLKLANGRVIEKTLYNRRTRQDEPALFVALTFERREVLDSSNIKPMNLIGVDRGENIPAVIALTDPEGCPLSRFKDSLGNPTHILRIGESYKEKQRTIQAKKEVEQRRAGGYSRKYASKAKNLADDMVRNTARDLLYYAVTQDAMLIFENLSRGFGRQGKRTFMAERQYTRMEDWLTAKLAYEGPLPSKTYLSKTLAQYTSKTCSNCGFTITSADYDRVLEKLKKTATGWMTTINGKELKVEGQITYYNRYKRQNVVKDLSVELDRLSEESVNNDISSWTKGRSGEALSLLKKRFSHRPVQEKFVCLNCGFETHADEQAALNIARSWLFLRSQEYKKYQTNKTTGNTDKRAFVETWQSFYRKKLKEVWKPAV

SEQ ID NO: 46931 - protein, 979 aa, synthetic construct
  REGION 1..979: note = engineered CasX variant
QEIKRINKIRRRLVKDSNTKKAGKTGPMKTLLVRVMTPDLRERLENLRKKPENIPQPISNTSRANLNKLLTDYTEMKKAILHVYWEEFQKDPVGLMSRVAQPASKKIDQNKLKPEMDEKGNLTTAGFACSQCGQPLFVYKLEQVSEKGKAYTNYFGRCNVAEHEKLILLAQLKPEKDSDEAVTYSLGKFGQRALDFYSIHVTKESTHPVKPLAQIAGNRYASTPVGKALSDACMGTIASFLSKYQDIIIEHQKVVKGNQKRLESLRELAGKENLEYPSVTLPPQPHTKEGVDAYNEVIARVRMWVNLNLWQKLKLSRDDAKPLLRLKNFPSFPLVERQANEVDWWDMVCNVKKLINEKKEDGKVFWQNLAGYKRQEALRPYLSSEEDRKKGKKFARYQLGDLLLHLEKKHGEDWGKVYDEAWERIDKKVEGLSKHIKLEEERRSEDAQSKAALTDWLRAKASFVIEGLKEADKDEFCRCELKLQKWYGDLRGKPFAIEAENSILDISGFSKQYNCAFIWQKDGVKKLNLYLIINYFKGGKLRFKKIKPEAFEANRFYTVINKKSGEIVPMEVNFNFDDPNLIILPLAFGKRQGREFIWNDLLSLETGSLKLANGRVIEKTLYNRRTRQDEPALFVALTFERREVLDSSNIKPMNLIGVDRGENIPAVIALTDPEGCPLSRFKDSLGNPTHILRIGESYKEKQRTIQAKKEVEQRRAGGYSRKYASKAKNLADDMVRNTARDLLYYAVTQDAMLIFENLSRGFGRQGKRTFMAERQYTRMEDWLTAKLAYEGPLPSKTYLSKTLAQYTSKTCSNCGFTITSADYDRVLEKLKKTATGWMTTINGKELKVEGQITYYNRYKRQNVVKDLSVELDRLSEESVNNDISSWTKGRSGEALSLLKKRFSHRPVQEKFVCLNCGFETHADEQAALNIARSWLFLRSQEYKKYQTNKTTGNTDKRAFVETWQSFYRKKLKEVWKPAV

SEQ ID NO: 46932 - protein, 979 aa, synthetic construct
  REGION 1..979: note = engineered CasX variant
QEIKRINKIRRRLVKDSNTKKAGKTGPMKTLLVRVMTPDLRERLENLRKKPENIPQPISNTSRANLNKLLTDYTEMKKAILHVYWEEFQKDPVGLMSRVAQPASKKIDQNKLKPEMDEKGNLTTAGFACSQCGQPLFVYKLEQVSEKGKAYTNYFGRCNVAEHEKLILLAQLKPEKDSDEAVTYSLGKFGQRALDFYSIHVTKESTHPVKPLAQIAGNRYASAPVGKALSDACMGTIASFLSKYQDIIIEHQKVVKGNQKRLESLRELAGKENLEYPSVTLPPQPHTKEGVDAYNEVIARVRMWVNLNLWQKLKLSRDDAKPLLRLKNFPSFPLVERQANEVDWWDMVCNVKKLINEKKEDGKVFWQNLAGYKRQEALRPYLSSEEDRKKGKKFARYQLGDLLLHLEKKHGEDWGKVYDEAWERIDKKVEGLSKHIKLEEERRSEDAQSKAALTDWLRAKASFVIEGLKEADKDEFCRCELKLQKWYGDLRGKPFAIEAENSILDISGFSKQYNCAFIWQKDGVKKLNLYLIINYFKGGKLRFKKIKPEAFEANRFYTVINKKSGEIVPMEVNFNFDDPNLIILPLAFGKRQGREFIWNDLLSLETGSLKLANGRVIEKTLYNRRTRQDEPALFVALTFERREVLDSSNIKPMNLIGVDRGENIPAVIALTDPEGCPLSRFKDSLGNPTHILRIGESYKEKQRTIQAKKEVEQRRAGGYSRKYASKAKNLADDMVRNTARDLLYYAVTQDAMLIFENLSRGFGRQGKRTFMAERQYTRMEDWLTAKLAYEGPLPSKTYLSKTLAQYTSKTCSNCGFTITSADYDRVLEKLKKTATGWMTTINGKELKVEGQITYYNRYKRQNVVKDLSVELDRLSEESVNNDISSWTKGRSGEALSLLKKRFSHRPVQEKFVCLNCGFETHADEQAALNIARSWLFLRSQEYKKYQTNKTTGNTDKRAFVETWQSFYRKKLKEVWKPAV

SEQ ID NO: 46933 - protein, 979 aa, synthetic construct
  REGION 1..979: note = engineered CasX variant
QEIKRINKIRRRLVKDSNTKKAGKTGPMKTLLVRVMTPDLRERLENLRKKPENIPQPISNTSRANLNKLLTDYTEMKKAILHVYWEEFQKDPVGLMSRVAQPASKKIDQNKLKPEMDEKGNLTTAGFACSQCGQPLFVYKLEQVSEKGKAYTNYFGRCNVAEHEKLILLAQLKPEKDSDEAVTYSLGKFGQRALDFYSIHVTKESTHPVKPLAQIAGNRYASVPVGKALSDACMGTIASFLSKYQDIIIEHQKVVKGNQKRLESLRELAGKENLEYPSVTLPPQPHTKEGVDAYNEVIARVRMWVNLNLWQKLKLSRDDAKPLLRLKNFPSFPLVERQANEVDWWDMVCNVKKLINEKKEDGKVFWQNLAGYKRQEALRPYLSSEEDRKKGKKFARYQLGDLLLHLEKKHGEDWGKVYDEAWERIDKKVEGLSKHIKLEEERRSEDAQSKAALTDWLRAKASFVIEGLKEADKDEFCRCELKLQKWYGDLRGKPFAIEAENSILDISGFSKQYNCAFIWQKDGVKKLNLYLIINYFKGGKLRFKKIKPEAFEANRFYTVINKKSGEIVPMEVNFNFDDPNLIILPLAFGKRQGREFIWNDLLSLETGSLKLANGRVIEKTLYNRRTRQDEPALFVALTFERREVLDSSNIKPMNLIGVDRGENIPAVIALTDPEGCPLSRFKDSLGNPTHILRIGESYKEKQRTIQAKKEVEQRRAGGYSRKYASKAKNLADDMVRNTARDLLYYAVTQDAMLIFENLSRGFGRQGKRTFMAERQYTRMEDWLTAKLAYEGPLPSKTYLSKTLAQYTSKTCSNCGFTITSADYDRVLEKLKKTATGWMTTINGKELKVEGQITYYNRYKRQNVVKDLSVELDRLSEESVNNDISSWTKGRSGEALSLLKKRFSHRPVQEKFVCLNCGFETHADEQAALNIARSWLFLRSQEYKKYQTNKTTGNTDKRAFVETWQSFYRKKLKEVWKPAV

SEQ ID NO: 46934 - protein, 979 aa, synthetic construct
  REGION 1..979: note = engineered CasX variant
QEIKRINKIRRRLVKDSNTKKAGKTGPMKTLLVRVMTPDLRERLENLRKKPENIPQPISNTSRANLNKLLTDYTEMKKAILHVYWEEFQKDPVGLMSRVAQPASKKIDQNKLKPEMDEKGNLTTAGFACSQCGQPLFVYKLEQVSEKGKAYTNYFGRCNVAEHEKLIKLAQLKPEKDSDEAVTYSLGKFGQRALDFYSIHVTKESTHPVKPLAQIAGNRYASGPVGKALSDACMGTIASFLSKYQDIIIEHQKVVKGNQKRLESLRELAGKENLEYPSVTLPPQPHTKEGVDAYNEVIARVRMWVNLNLWQKLKLSRDDAKPLLRLKNFPSFPLVERQANEVDWWDMVCNVKKLINEKKEDGKVFWQNLAGYKRQEALRPYLSSEEDRKKGKKFARYQLGDLLLHLEKKHGEDWGKVYDEAWERIDKKVEGLSKHIKLEEERRSEDAQSKAALTDWLRAKASFVIEGLKEADKDEFCRCELKLQKWYGDLRGKPFAIEAENSILDISGFSKQYNCAFIWQKDGVKKLNLYLIINYFKGGKLRFKKIKPEAFEANRFYTVINKKSGEIVPMEVNFNFDDPNLIILPLAFGKRQGREFIWNDLLSLETGSLKLANGRVIEKTLYNRRTRQDEPALFVALTFERREVLDSSNIKPMNLIGVDRGENIPAVIALTDPEGCPLSRFKDSLGNPTHILRIGESYKEKQRTIQAKKEVEQRRAGGYSRKYASKAKNLADDMVRNTARDLLYYAVTQDAMLIFENLSRGFGRQGKRTFMAERQYTRMEDWLTAKLAYEGPLPSKTYLSKTLAQYTSKTCSNCGFTITSADYDRVLEKLKKTATGWMTTINGKELKVEGQITYYNRYKRQNVVKDLSVELDRLSEESVNNDISSWTKGRSGEALSLLKKRFSHRPVQEKFVCLNCGFETHADEQAALNIARSWLFLRSQEYKKYQTNKTTGNTDKRAFVETWQSFYRKKLKEVWKPAV

SEQ ID NO: 46935 - protein, 978 aa, synthetic construct
  REGION 1..978: note = engineered CasX variant
QEIKRINKIRRRLVKDSNTKKAGKTGPMKTLLVRVMTPDLRERLENLRKKPENIPQPISNTSRANLNKLLTDYTEMKKAILHVYWEEFQKDPVGLMSRVAQPASKKIDQNKLKPEMDEKGNLTTAGFACSQCGQPLFVYKLEQVSEKGKAYTNYFGRCNVAEHEKLILLAQLKPEKDSDEAVTYSLGKFGQRALDFYSIHVTKESTHPVKPLAQIAGNRYASPVGKALSDACMGTIASFLSKYQDIIIEHQKVVKGNQKRLESLRELAGKENLEYPSVTLPPQPHTKEGVDAYNEVIARVRMWVNLNLWQKLKLSRDDAKPLLRLKNFPSFPLVERQANEVDWWDMVCNVKKLINEKKEDGKVFWQNLAGYKRQEALRPYLSSEEDRKKGKKFARYQLGDLLLHLEKKHGEDWGKVYDEAWERIDKKVEGLSKHIKLEEERRSEDAQSKAALTDWLRAKASFVIEGLKEADKDEFCRCELKLQKWYGDLRGKPFAIEAENSILDISGFSKQYNCAFIWQKDGVKKLNLYLIINYFKGGKLRFKKIKPEAFEANRFYTVINKKSGEIVPMEVNFNFDDPNLIILPLAFGKRQGREFIWNDLLSLETGSLKLANGRVIEKTLYNRRTRQDEPALFVALTFERREVLDSSNIKPMNLIGVDRGENIPAVIALTDPEGCPLSRFKDSLGNPTHILRIGESYKEKQRTIQAKKEVEQRRAGGYSRKYASKAKNLADDMVRNTARDLLYYAVTQDAMLIFENLSRGFGRQGKRTFMAERQYTRMEDWLTAKLAYEGPLPSKTYLSKTLAQYTSKTCSNCGFTITSADYDRVLEKLKKTATGWMTTINGKELKVEGQITYYNRYKRQNVVKDLSVELDRLSEESVNNDISSWTKGRSGEALSLLKKRFSHRPVQEKFVCLNCGFETHADEQAALNIARSWLFLRSQEYKKYQTNKTTGNTDKRAFVETWQSFYRKKLKEVWKPAV

SEQ ID NO: 46936 - protein, 979 aa, synthetic construct
  REGION 1..979: note = engineered CasX variant
QEIKRINKIRRRLVKDSNTKKAGKTGPMKTLLVRVMTPDLRERLENLRKKPENIPQPISNTSRANLNKLLTDYTEMKKAILHVYWEEFQKDPVGLMSRVAQPASKKIDQNKLKPEMDEKGNLTTAGFACSQCGQPLFVYKLEQVSEKGKAYTNYFGRCNVAEHEKLILLAQLKPEKDSDEAVTYSLGKFGQRALDFYSIHVTKESTHPVKPLAQIAGNRYASYPVGKALSDACMGTIASFLSKYQDIIIEHQKVVKGNQKRLESLRELAGKENLEYPSVTLPPQPHTKEGVDAYNEVIARVRMWVNLNLWQKLKLSRDDAKPLLRLKGFPSFPLVERQANEVDWWDMVCNVKKLINEKKEDGKVFWQNLAGYKRQEALRPYLSSEEDRKKGKKFARYQLGDLLNHLEKKHGEDWGKVYDEAWERIDKKVEGLSKHIKLEEERRSEDAQSKAALTDWLRAKASFVIEGLKEADKDEFCRCELKLQKWYGDLRGKPFAIEAENSILDISGFSKQYNCAFIWQKDGVKKLNLYLIINYFKGGKLRFKKIKPEAFEANRFYTVINKKSGEIVPMEVNFNFDDPNLIILPLAFGKRQGREFIWNDLLSLETGSLKLANGRVIEKTLYNRRTRQDEPALFVALTFERREVLDSSNIKPMNLIGVDRGENIPAVIALTDPEGCPLSRFKDSLGNPTHILRIGESYKEKQRTIQAKKEVEQRRAGGYSRKYASKAKNLADDMVRNTARDLLYYAVTQDAMLIFENLSRGFGRQGKRTFMAERQYTRMEDWLTAKLAYEGPLPSKTYLSKTLAQYTSKTCSNCGFTITSADYDRVLEKLKKTATGWMTTINGKELKVEGQITYYNRYKRQNVVKDLSVELDRLSEESVNNDISSWTKGRSGEALSLLKKRFSHRPVQEKFVCLNCGFETHADEQAALNIARSWLFLRSQEYKKYQTNKTTGNTDKRAFVETWQSFYRKKLKEVWKPAV

SEQ ID NO: 46937 - protein, 979 aa, synthetic construct
  REGION 1..979: note = engineered CasX variant
QEIKRINKIRRRLVKDSNTKKAGKTGPMKTLLVRVMTPDLRERLENLRKKPENIPQPISNTSRANLNKLLTDYTEMKKAILHVYWEEFQKDPVGLMSRVAQPASKKIDQNKLKPEMDEKGNLTTAGFACSQCGQPLFVYKLEQVSEKGKAYTNYFGRCNVAEHEKLILLAQLKPEKDSDEAVTYSLGKFGQRALDFYSIHVTKESTHPVKPLAQIAGNRYASHPVGKALSDACMGTIASFLSKYQDIIIEHQKVVKGNQKRLESLRELAGKENLEYPSVTLPPQPHTKEGVDAYNEVIARVRMWVNLNLWQKLKLSRDDAKPLLRLKGFPSFPLVERQANEVDWWDMVCNVKKLINEKKEDGKVFWQNLAGYKRQEALRPYLSSEEDRKKGKKFARYQLGDLLNHLEKKHGEDWGKVYDEAWERIDKKVEGLSKHIKLEEERRSEDAQSKAALTDWLRAKASFVIEGLKEADKDEFCRCELKLQKWYGDLRGKPFAIEAENSILDISGFSKQYNCAFIWQKDGVKKLNLYLIINYFKGGKLRFKKIKPEAFEANRFYTVINKKSGEIVPMEVNFNFDDPNLIILPLAFGKRQGREFIWNDLLSLETGSLKLANGRVIEKTLYNRRTRQDEPALFVALTFERREVLDSSNIKPMNLIGVDRGENIPAVIALTDPEGCPLSRFKDSLGNPTHILRIGESYKEKQRTIQAKKEVEQRRAGGYSRKYASKAKNLADDMVRNTARDLLYYAVTQDAMLIFENLSRGFGRQGKRTFMAERQYTRMEDWLTAKLAYEGPLPSKTYLSKTLAQYTSKTCSNCGFTITSADYDRVLEKLKKTATGWMTTINGKELKVEGQITYYNRYKRQNVVKDLSVELDRLSEESVNNDISSWTKGRSGEALSLLKKRFSHRPVQEKFVCLNCGFETHADEQAALNIARSWLFLRSQEYKKYQTNKTTGNTDKRAFVETWQSFYRKKLKEVWKPAV

SEQ ID NO: 46938 - protein, 979 aa, synthetic construct
  REGION 1..979: note = engineered CasX variant
QEIKRINKIRRRLVKDSNTKKAGKTGPMKTLLVRVMTPDLRERLENLRKKPENIPQPISNTSRANLNKLLTDYTEMKKAILHVYWEEFQKDPVGLMSRVAQPASKKIDQNKLKPEMDEKGNLTTAGFACSQCGQPLFVYKLEQVSEKGKAYTNYFGRCNVAEHEKLILLAQLKPEKDSDEAVTYSLGKFGQRALDFYSIHVTKESTHPVKPLAQIAGNRYASSPVGKALSDACMGTIASFLSKYQDIIIEHQKVVKGNQKRLESLRELAGKENLEYPSVTLPPQPHTKEGVDAYNEVIARVRMWVNLNLWQKLKLSRDDAKPLLRLKGFPSFPLVERQANEVDWWDMVCNVKKLINEKKEDGKVFWQNLAGYKRQEALRPYLSSEEDRKKGKKFARYQLGDLLNHLEKKHGEDWGKVYDEAWERIDKKVEGLSKHIKLEEERRSEDAQSKAALTDWLRAKASFVIEGLKEADKDEFCRCELKLQKWYGDLRGKPFAIEAENSILDISGFSKQYNCAFIWQKDGVKKLNLYLIINYFKGGKLRFKKIKPEAFEANRFYTVINKKSGEIVPMEVNFNFDDPNLIILPLAFGKRQGREFIWNDLLSLETGSLKLANGRVIEKTLYNRRTRQDEPALFVALTFERREVLDSSNIKPMNLIGVDRGENIPAVIALTDPEGCPLSRFKDSLGNPTHILRIGESYKEKQRTIQAKKEVEQRRAGGYSRKYASKAKNLADDMVRNTARDLLYYAVTQDAMLIFENLSRGFGRQGKRTFMAERQYTRMEDWLTAKLAYEGPLPSKTYLSKTLAQYTSKTCSNCGFTITSADYDRVLEKLKKTATGWMTTINGKELKVEGQITYYNRYKRQNVVKDLSVELDRLSEESVNNDISSWTKGRSGEALSLLKKRFSHRPVQEKFVCLNCGFETHADEQAALNIARSWLFLRSQEYKKYQTNKTTGNTDKRAFVETWQSFYRKKLKEVWKPAV

SEQ ID NO: 46939 - protein, 979 aa, synthetic construct
  REGION 1..979: note = engineered CasX variant
QEIKRINKIRRRLVKDSNTKKAGKTGPMKTLLVRVMTPDLRERLENLRKKPENIPQPISNTSRANLNKLLTDYTEMKKAILHVYWEEFQKDPVGLMSRVAQPASKKIDQNKLKPEMDEKGNLTTAGFACSQCGQPLFVYKLEQVSEKGKAYTNYFGRCNVAEHEKLILLAQLKPEKDSDEAVTYSLGKFGQRALDFYSIHVTKESTHPVKPLAQIAGNRYASTPVGKALSDACMGTIASFLSKYQDIIIEHQKVVKGNQKRLESLRELAGKENLEYPSVTLPPQPHTKEGVDAYNEVIARVRMWVNLNLWQKLKLSRDDAKPLLRLKGFPSFPLVERQANEVDWWDMVCNVKKLINEKKEDGKVFWQNLAGYKRQEALRPYLSSEEDRKKGKKFARYQLGDLLNHLEKKHGEDWGKVYDEAWERIDKKVEGLSKHIKLEEERRSEDAQSKAALTDWLRAKASFVIEGLKEADKDEFCRCELKLQKWYGDLRGKPFAIEAENSILDISGFSKQYNCAFIWQKDGVKKLNLYLIINYFKGGKLRFKKIKPEAFEANRFYTVINKKSGEIVPMEVNFNFDDPNLIILPLAFGKRQGREFIWNDLLSLETGSLKLANGRVIEKTLYNRRTRQDEPALFVALTFERREVLDSSNIKPMNLIGVDRGENIPAVIALTDPEGCPLSRFKDSLGNPTHILRIGESYKEKQRTIQAKKEVEQRRAGGYSRKYASKAKNLADDMVRNTARDLLYYAVTQDAMLIFENLSRGFGRQGKRTFMAERQYTRMEDWLTAKLAYEGPLPSKTYLSKTLAQYTSKTCSNCGFTITSADYDRVLEKLKKTATGWMTTINGKELKVEGQITYYNRYKRQNVVKDLSVELDRLSEESVNNDISSWTKGRSGEALSLLKKRFSHRPVQEKFVCLNCGFETHADEQAALNIARSWLFLRSQEYKKYQTNKTTGNTDKRAFVETWQSFYRKKLKEVWKPAV

SEQ ID NO: 46940 - protein, 979 aa, synthetic construct
  REGION 1..979: note = engineered CasX variant
QEIKRINKIRRRLVKDSNTKKAGKTGPMKTLLVRVMTPDLRERLENLRKKPENIPQPISNTSRANLNKLLTDYTEMKKAILHVYWEEFQKDPVGLMSRVAQPASKKIDQNKLKPEMDEKGNLTTAGFACSQCGQPLFVYKLEQVSEKGKAYTNYFGRCNVAEHEKLILLAQLKPEKDSDEAVTYSLGKFGQRALDFYSIHVTKESTHPVKPLAQIAGNRYASAPVGKALSDACMGTIASFLSKYQDIIIEHQKVVKGNQKRLESLRELAGKENLEYPSVTLPPQPHTKEGVDAYNEVIARVRMWVNLNLWQKLKLSRDDAKPLLRLKGFPSFPLVERQANEVDWWDMVCNVKKLINEKKEDGKVFWQNLAGYKRQEALRPYLSSEEDRKKGKKFARYQLGDLLNHLEKKHGEDWGKVYDEAWERIDKKVEGLSKHIKLEEERRSEDAQSKAALTDWLRAKASFVIEGLKEADKDEFCRCELKLQKWYGDLRGKPFAIEAENSILDISGFSKQYNCAFIWQKDGVKKLNLYLIINYFKGGKLRFKKIKPEAFEANRFYTVINKKSGEIVPMEVNFNFDDPNLIILPLAFGKRQGREFIWNDLLSLETGSLKLANGRVIEKTLYNRRTRQDEPALFVALTFERREVLDSSNIKPMNLIGVDRGENIPAVIALTDPEGCPLSRFKDSLGNPTHILRIGESYKEKQRTIQAKKEVEQRRAGGYSRKYASKAKNLADDMVRNTARDLLYYAVTQDAMLIFENLSRGFGRQGKRTFMAERQYTRMEDWLTAKLAYEGPLPSKTYLSKTLAQYTSKTCSNCGFTITSADYDRVLEKLKKTATGWMTTINGKELKVEGQITYYNRYKRQNVVKDLSVELDRLSEESVNNDISSWTKGRSGEALSLLKKRFSHRPVQEKFVCLNCGFETHADEQAALNIARSWLFLRSQEYKKYQTNKTTGNTDKRAFVETWQSFYRKKLKEVWKPAV

SEQ ID NO: 46941 - protein, 979 aa, synthetic construct
  REGION 1..979: note = engineered CasX variant
QEIKRINKIRRRLVKDSNTKKAGKTGPMKTLLVRVMTPDLRERLENLRKKPENIPQPISNTSRANLNKLLTDYTEMKKAILHVYWEEFQKDPVGLMSRVAQPASKKIDQNKLKPEMDEKGNLTTAGFACSQCGQPLFVYKLEQVSEKGKAYTNYFGRCNVAEHEKLILLAQLKPEKDSDEAVTYSLGKFGQRALDFYSIHVTKESTHPVKPLAQIAGNRYASVPVGKALSDACMGTIASFLSKYQDIIIEHQKVVKGNQKRLESLRELAGKENLEYPSVTLPPQPHTKEGVDAYNEVIARVRMWVNLNLWQKLKLSRDDAKPLLRLKGFPSFPLVERQANEVDWWDMVCNVKKLINEKKEDGKVFWQNLAGYKRQEALRPYLSSEEDRKKGKKFARYQLGDLLNHLEKKHGEDWGKVYDEAWERIDKKVEGLSKHIKLEEERRSEDAQSKAALTDWLRAKASFVIEGLKEADKDEFCRCELKLQKWYGDLRGKPFAIEAENSILDISGFSKQYNCAFIWQKDGVKKLNLYLIINYFKGGKLRFKKIKPEAFEANRFYTVINKKSGEIVPMEVNFNFDDPNLIILPLAFGKRQGREFIWNDLLSLETGSLKLANGRVIEKTLYNRRTRQDEPALFVALTFERREVLDSSNIKPMNLIGVDRGENIPAVIALTDPEGCPLSRFKDSLGNPTHILRIGESYKEKQRTIQAKKEVEQRRAGGYSRKYASKAKNLADDMVRNTARDLLYYAVTQDAMLIFENLSRGFGRQGKRTFMAERQYTRMEDWLTAKLAYEGPLPSKTYLSKTLAQYTSKTCSNCGFTITSADYDRVLEKLKKTATGWMTTINGKELKVEGQITYYNRYKRQNVVKDLSVELDRLSEESVNNDISSWTKGRSGEALSLLKKRFSHRPVQEKFVCLNCGFETHADEQAALNIARSWLFLRSQEYKKYQTNKTTGNTDKRAFVETWQSFYRKKLKEVWKPAV

SEQ ID NO: 46942 - protein, 979 aa, synthetic construct
  REGION 1..979: note = engineered CasX variant
QEIKRINKIRRRLVKDSNTKKAGKTGPMKTLLVRVMTPDLRERLENLRKKPENIPQPISNTSRANLNKLLTDYTEMKKAILHVYWEEFQKDPVGLMSRVAQPASKKIDQNKLKPEMDEKGNLTTAGFACSQCGQPLFVYKLEQVSEKGKAYTNYFGRCNVAEHEKLIKLAQLKPEKDSDEAVTYSLGKFGQRALDFYSIHVTKESTHPVKPLAQIAGNRYASGPVGKALSDACMGTIASFLSKYQDIIIEHQKVVKGNQKRLESLRELAGKENLEYPSVTLPPQPHTKEGVDAYNEVIARVRMWVNLNLWQKLKLSRDDAKPLLRLKGFPSFPLVERQANEVDWWDMVCNVKKLINEKKEDGKVFWQNLAGYKRQEALRPYLSSEEDRKKGKKFARYQLGDLLNHLEKKHGEDWGKVYDEAWERIDKKVEGLSKHIKLEEERRSEDAQSKAALTDWLRAKASFVIEGLKEADKDEFCRCELKLQKWYGDLRGKPFAIEAENSILDISGFSKQYNCAFIWQKDGVKKLNLYLIINYFKGGKLRFKKIKPEAFEANRFYTVINKKSGEIVPMEVNFNFDDPNLIILPLAFGKRQGREFIWNDLLSLETGSLKLANGRVIEKTLYNRRTRQDEPALFVALTFERREVLDSSNIKPMNLIGVDRGENIPAVIALTDPEGCPLSRFKDSLGNPTHILRIGESYKEKQRTIQAKKEVEQRRAGGYSRKYASKAKNLADDMVRNTARDLLYYAVTQDAMLIFENLSRGFGRQGKRTFMAERQYTRMEDWLTAKLAYEGPLPSKTYLSKTLAQYTSKTCSNCGFTITSADYDRVLEKLKKTATGWMTTINGKELKVEGQITYYNRYKRQNVVKDLSVELDRLSEESVNNDISSWTKGRSGEALSLLKKRFSHRPVQEKFVCLNCGFETHADEQAALNIARSWLFLRSQEYKKYQTNKTTGNTDKRAFVETWQSFYRKKLKEVWKPAV

SEQ ID NO: 46943 - protein, 978 aa, synthetic construct
  REGION 1..978: note = engineered CasX variant
QEIKRINKIRRRLVKDSNTKKAGKTGPMKTLLVRVMTPDLRERLENLRKKPENIPQPISNTSRANLNKLLTDYTEMKKAILHVYWEEFQKDPVGLMSRVAQPASKKIDQNKLKPEMDEKGNLTTAGFACSQCGQPLFVYKLEQVSEKGKAYTNYFGRCNVAEHEKLILLAQLKPEKDSDEAVTYSLGKFGQRALDFYSIHVTKESTHPVKPLAQIAGNRYASPVGKALSDACMGTIASFLSKYQDIIIEHQKVVKGNQKRLESLRELAGKENLEYPSVTLPPQPHTKEGVDAYNEVIARVRMWVNLNLWQKLKLSRDDAKPLLRLKGFPSFPLVERQANEVDWWDMVCNVKKLINEKKEDGKVFWQNLAGYKRQEALRPYLSSEEDRKKGKKFARYQLGDLLNHLEKKHGEDWGKVYDEAWERIDKKVEGLSKHIKLEEERRSEDAQSKAALTDWLRAKASFVIEGLKEADKDEFCRCELKLQKWYGDLRGKPFAIEAENSILDISGFSKQYNCAFIWQKDGVKKLNLYLIINYFKGGKLRFKKIKPEAFEANRFYTVINKKSGEIVPMEVNFNFDDPNLIILPLAFGKRQGREFIWNDLLSLETGSLKLANGRVIEKTLYNRRTRQDEPALFVALTFERREVLDSSNIKPMNLIGVDRGENIPAVIALTDPEGCPLSRFKDSLGNPTHILRIGESYKEKQRTIQAKKEVEQRRAGGYSRKYASKAKNLADDMVRNTARDLLYYAVTQDAMLIFENLSRGFGRQGKRTFMAERQYTRMEDWLTAKLAYEGPLPSKTYLSKTLAQYTSKTCSNCGFTITSADYDRVLEKLKKTATGWMTTINGKELKVEGQITYYNRYKRQNVVKDLSVELDRLSEESVNNDISSWTKGRSGEALSLLKKRFSHRPVQEKFVCLNCGFETHADEQAALNIARSWLFLRSQEYKKYQTNKTTGNTDKRAFVETWQSFYRKKLKEVWKPAV

SEQ ID NO: 46944 - protein, 979 aa, synthetic construct
  REGION 1..979: note = engineered CasX variant
QEIKRINKIRRRLVKDSNTKKAGKTGPMKTLLVRVMTPDLRERLENLRKKPENIPQPISNTSRANLNKLLTDYTEMKKAILHVYWEEFQKDPVGLMSRVAQPASKKIDQNKLKPEMDEKGNLTTAGFACSQCGQPLFVYKLEQVSEKGKAYTNYFGRCNVAEHEKLILLAQLKPEKDSDEAVTYSLGKFGQRALDFYSIHVTKESTHPVKPLAQIAGNRYASYPVGKALSDACMGTIASFLSKYQDIIIEHQKVVKGNQKRLESLRELAGKENLEYPSVTLPPQPHTKEGVDAYNEVIARVRMWVNLNLWQKLKLSRDDAKPLLRLKGFPSFPLVERQANEVDWWDMVCNVKKLINEKKEDGKVFWQNLAGYKRQEALRPYLSSEEDRKKGKKFARYQLGDLLWHLEKKHGEDWGKVYDEAWERIDKKVEGLSKHIKLEEERRSEDAQSKAALTDWLRAKASFVIEGLKEADKDEFCRCELKLQKWYGDLRGKPFAIEAENSILDISGFSKQYNCAFIWQKDGVKKLNLYLIINYFKGGKLRFKKIKPEAFEANRFYTVINKKSGEIVPMEVNFNFDDPNLIILPLAFGKRQGREFIWNDLLSLETGSLKLANGRVIEKTLYNRRTRQDEPALFVALTFERREVLDSSNIKPMNLIGVDRGENIPAVIALTDPEGCPLSRFKDSLGNPTHILRIGESYKEKQRTIQAKKEVEQRRAGGYSRKYASKAKNLADDMVRNTARDLLYYAVTQDAMLIFENLSRGFGRQGKRTFMAERQYTRMEDWLTAKLAYEGPLPSKTYLSKTLAQYTSKTCSNCGFTITSADYDRVLEKLKKTATGWMTTINGKELKVEGQITYYNRYKRQNVVKDLSVELDRLSEESVNNDISSWTKGRSGEALSLLKKRFSHRPVQEKFVCLNCGFETHADEQAALNIARSWLFLRSQEYKKYQTNKTTGNTDKRAFVETWQSFYRKKLKEVWKPAV

SEQ ID NO: 46945 - protein, 979 aa, synthetic construct
  REGION 1..979: note = engineered CasX variant
QEIKRINKIRRRLVKDSNTKKAGKTGPMKTLLVRVMTPDLRERLENLRKKPENIPQPISNTSRANLNKLLTDYTEMKKAILHVYWEEFQKDPVGLMSRVAQPASKKIDQNKLKPEMDEKGNLTTAGFACSQCGQPLFVYKLEQVSEKGKAYTNYFGRCNVAEHEKLILLAQLKPEKDSDEAVTYSLGKFGQRALDFYSIHVTKESTHPVKPLAQIAGNRYASHPVGKALSDACMGTIASFLSKYQDIIIEHQKVVKGNQKRLESLRELAGKENLEYPSVTLPPQPHTKEGVDAYNEVIARVRMWVNLNLWQKLKLSRDDAKPLLRLKGFPSFPLVERQANEVDWWDMVCNVKKLINEKKEDGKVFWQNLAGYKRQEALRPYLSSEEDRKKGKKFARYQLGDLLWHLEKKHGEDWGKVYDEAWERIDKKVEGLSKHIKLEEERRSEDAQSKAALTDWLRAKASFVIEGLKEADKDEFCRCELKLQKWYGDLRGKPFAIEAENSILDISGFSKQYNCAFIWQKDGVKKLNLYLIINYFKGGKLRFKKIKPEAFEANRFYTVINKKSGEIVPMEVNFNFDDPNLIILPLAFGKRQGREFIWNDLLSLETGSLKLANGRVIEKTLYNRRTRQDEPALFVALTFERREVLDSSNIKPMNLIGVDRGENIPAVIALTDPEGCPLSRFKDSLGNPTHILRIGESYKEKQRTIQAKKEVEQRRAGGYSRKYASKAKNLADDMVRNTARDLLYYAVTQDAMLIFENLSRGFGRQGKRTFMAERQYTRMEDWLTAKLAYEGPLPSKTYLSKTLAQYTSKTCSNCGFTITSADYDRVLEKLKKTATGWMTTINGKELKVEGQITYYNRYKRQNVVKDLSVELDRLSEESVNNDISSWTKGRSGEALSLLKKRFSHRPVQEKFVCLNCGFETHADEQAALNIARSWLFLRSQEYKKYQTNKTTGNTDKRAFVETWQSFYRKKLKEVWKPAV

SEQ ID NO: 46946 - protein, 979 aa, synthetic construct
  REGION 1..979: note = engineered CasX variant
QEIKRINKIRRRLVKDSNTKKAGKTGPMKTLLVRVMTPDLRERLENLRKKPENIPQPISNTSRANLNKLLTDYTEMKKAILHVYWEEFQKDPVGLMSRVAQPASKKIDQNKLKPEMDEKGNLTTAGFACSQCGQPLFVYKLEQVSEKGKAYTNYFGRCNVAEHEKLILLAQLKPEKDSDEAVTYSLGKFGQRALDFYSIHVTKESTHPVKPLAQIAGNRYASSPVGKALSDACMGTIASFLSKYQDIIIEHQKVVKGNQKRLESLRELAGKENLEYPSVTLPPQPHTKEGVDAYNEVIARVRMWVNLNLWQKLKLSRDDAKPLLRLKGFPSFPLVERQANEVDWWDMVCNVKKLINEKKEDGKVFWQNLAGYKRQEALRPYLSSEEDRKKGKKFARYQLGDLLWHLEKKHGEDWGKVYDEAWERIDKKVEGLSKHIKLEEERRSEDAQSKAALTDWLRAKASFVIEGLKEADKDEFCRCELKLQKWYGDLRGKPFAIEAENSILDISGFSKQYNCAFIWQKDGVKKLNLYLIINYFKGGKLRFKKIKPEAFEANRFYTVINKKSGEIVPMEVNFNFDDPNLIILPLAFGKRQGREFIWNDLLSLETGSLKLANGRVIEKTLYNRRTRQDEPALFVALTFERREVLDSSNIKPMNLIGVDRGENIPAVIALTDPEGCPLSRFKDSLGNPTHILRIGESYKEKQRTIQAKKEVEQRRAGGYSRKYASKAKNLADDMVRNTARDLLYYAVTQDAMLIFENLSRGFGRQGKRTFMAERQYTRMEDWLTAKLAYEGPLPSKTYLSKTLAQYTSKTCSNCGFTITSADYDRVLEKLKKTATGWMTTINGKELKVEGQITYYNRYKRQNVVKDLSVELDRLSEESVNNDISSWTKGRSGEALSLLKKRFSHRPVQEKFVCLNCGFETHADEQAALNIARSWLFLRSQEYKKYQTNKTTGNTDKRAFVETWQSFYRKKLKEVWKPAV

SEQ ID NO: 46947 - protein, 979 aa, synthetic construct
  REGION 1..979: note = engineered CasX variant
QEIKRINKIRRRLVKDSNTKKAGKTGPMKTLLVRVMTPDLRERLENLRKKPENIPQPISNTSRANLNKLLTDYTEMKKAILHVYWEEFQKDPVGLMSRVAQPASKKIDQNKLKPEMDEKGNLTTAGFACSQCGQPLFVYKLEQVSEKGKAYTNYFGRCNVAEHEKLILLAQLKPEKDSDEAVTYSLGKFGQRALDFYSIHVTKESTHPVKPLAQIAGNRYASTPVGKALSDACMGTIASFLSKYQDIIIEHQKVVKGNQKRLESLRELAGKENLEYPSVTLPPQPHTKEGVDAYNEVIARVRMWVNLNLWQKLKLSRDDAKPLLRLKGFPSFPLVERQANEVDWWDMVCNVKKLINEKKEDGKVFWQNLAGYKRQEALRPYLSSEEDRKKGKKFARYQLGDLLWHLEKKHGEDWGKVYDEAWERIDKKVEGLSKHIKLEEERRSEDAQSKAALTDWLRAKASFVIEGLKEADKDEFCRCELKLQKWYGDLRGKPFAIEAENSILDISGFSKQYNCAFIWQKDGVKKLNLYLIINYFKGGKLRFKKIKPEAFEANRFYTVINKKSGEIVPMEVNFNFDDPNLIILPLAFGKRQGREFIWNDLLSLETGSLKLANGRVIEKTLYNRRTRQDEPALFVALTFERREVLDSSNIKPMNLIGVDRGENIPAVIALTDPEGCPLSRFKDSLGNPTHILRIGESYKEKQRTIQAKKEVEQRRAGGYSRKYASKAKNLADDMVRNTARDLLYYAVTQDAMLIFENLSRGFGRQGKRTFMAERQYTRMEDWLTAKLAYEGPLPSKTYLSKTLAQYTSKTCSNCGFTITSADYDRVLEKLKKTATGWMTTINGKELKVEGQITYYNRYKRQNVVKDLSVELDRLSEESVNNDISSWTKGRSGEALSLLKKRFSHRPVQEKFVCLNCGFETHADEQAALNIARSWLFLRSQEYKKYQTNKTTGNTDKRAFVETWQSFYRKKLKEVWKPAV

SEQ ID NO: 46948 - protein, 979 aa, synthetic construct
  REGION 1..979: note = engineered CasX variant
QEIKRINKIRRRLVKDSNTKKAGKTGPMKTLLVRVMTPDLRERLENLRKKPENIPQPISNTSRANLNKLLTDYTEMKKAILHVYWEEFQKDPVGLMSRVAQPASKKIDQNKLKPEMDEKGNLTTAGFACSQCGQPLFVYKLEQVSEKGKAYTNYFGRCNVAEHEKLILLAQLKPEKDSDEAVTYSLGKFGQRALDFYSIHVTKESTHPVKPLAQIAGNRYASAPVGKALSDACMGTIASFLSKYQDIIIEHQKVVKGNQKRLESLRELAGKENLEYPSVTLPPQPHTKEGVDAYNEVIARVRMWVNLNLWQKLKLSRDDAKPLLRLKGFPSFPLVERQANEVDWWDMVCNVKKLINEKKEDGKVFWQNLAGYKRQEALRPYLSSEEDRKKGKKFARYQLGDLLWHLEKKHGEDWGKVYDEAWERIDKKVEGLSKHIKLEEERRSEDAQSKAALTDWLRAKASFVIEGLKEADKDEFCRCELKLQKWYGDLRGKPFAIEAENSILDISGFSKQYNCAFIWQKDGVKKLNLYLIINYFKGGKLRFKKIKPEAFEANRFYTVINKKSGEIVPMEVNFNFDDPNLIILPLAFGKRQGREFIWNDLLSLETGSLKLANGRVIEKTLYNRRTRQDEPALFVALTFERREVLDSSNIKPMNLIGVDRGENIPAVIALTDPEGCPLSRFKDSLGNPTHILRIGESYKEKQRTIQAKKEVEQRRAGGYSRKYASKAKNLADDMVRNTARDLLYYAVTQDAMLIFENLSRGFGRQGKRTFMAERQYTRMEDWLTAKLAYEGPLPSKTYLSKTLAQYTSKTCSNCGFTITSADYDRVLEKLKKTATGWMTTINGKELKVEGQITYYNRYKRQNVVKDLSVELDRLSEESVNNDISSWTKGRSGEALSLLKKRFSHRPVQEKFVCLNCGFETHADEQAALNIARSWLFLRSQEYKKYQTNKTTGNTDKRAFVETWQSFYRKKLKEVWKPAV

SEQ ID NO: 46949 - protein, 979 aa, synthetic construct
  REGION 1..979: note = engineered CasX variant
QEIKRINKIRRRLVKDSNTKKAGKTGPMKTLLVRVMTPDLRERLENLRKKPENIPQPISNTSRANLNKLLTDYTEMKKAILHVYWEEFQKDPVGLMSRVAQPASKKIDQNKLKPEMDEKGNLTTAGFACSQCGQPLFVYKLEQVSEKGKAYTNYFGRCNVAEHEKLILLAQLKPEKDSDEAVTYSLGKFGQRALDFYSIHVTKESTHPVKPLAQIAGNRYASVPVGKALSDACMGTIASFLSKYQDIIIEHQKVVKGNQKRLESLRELAGKENLEYPSVTLPPQPHTKEGVDAYNEVIARVRMWVNLNLWQKLKLSRDDAKPLLRLKGFPSFPLVERQANEVDWWDMVCNVKKLINEKKEDGKVFWQNLAGYKRQEALRPYLSSEEDRKKGKKFARYQLGDLLWHLEKKHGEDWGKVYDEAWERIDKKVEGLSKHIKLEEERRSEDAQSKAALTDWLRAKASFVIEGLKEADKDEFCRCELKLQKWYGDLRGKPFAIEAENSILDISGFSKQYNCAFIWQKDGVKKLNLYLIINYFKGGKLRFKKIKPEAFEANRFYTVINKKSGEIVPMEVNFNFDDPNLIILPLAFGKRQGREFIWNDLLSLETGSLKLANGRVIEKTLYNRRTRQDEPALFVALTFERREVLDSSNIKPMNLIGVDRGENIPAVIALTDPEGCPLSRFKDSLGNPTHILRIGESYKEKQRTIQAKKEVEQRRAGGYSRKYASKAKNLADDMVRNTARDLLYYAVTQDAMLIFENLSRGFGRQGKRTFMAERQYTRMEDWLTAKLAYEGPLPSKTYLSKTLAQYTSKTCSNCGFTITSADYDRVLEKLKKTATGWMTTINGKELKVEGQITYYNRYKRQNVVKDLSVELDRLSEESVNNDISSWTKGRSGEALSLLKKRFSHRPVQEKFVCLNCGFETHADEQAALNIARSWLFLRSQEYKKYQTNKTTGNTDKRAFVETWQSFYRKKLKEVWKPAV

SEQ ID NO: 46950 - protein, 979 aa, synthetic construct
  REGION 1..979: note = engineered CasX variant
QEIKRINKIRRRLVKDSNTKKAGKTGPMKTLLVRVMTPDLRERLENLRKKPENIPQPISNTSRANLNKLLTDYTEMKKAILHVYWEEFQKDPVGLMSRVAQPASKKIDQNKLKPEMDEKGNLTTAGFACSQCGQPLFVYKLEQVSEKGKAYTNYFGRCNVAEHEKLIKLAQLKPEKDSDEAVTYSLGKFGQRALDFYSIHVTKESTHPVKPLAQIAGNRYASGPVGKALSDACMGTIASFLSKYQDIIIEHQKVVKGNQKRLESLRELAGKENLEYPSVTLPPQPHTKEGVDAYNEVIARVRMWVNLNLWQKLKLSRDDAKPLLRLKGFPSFPLVERQANEVDWWDMVCNVKKLINEKKEDGKVFWQNLAGYKRQEALRPYLSSEEDRKKGKKFARYQLGDLLWHLEKKHGEDWGKVYDEAWERIDKKVEGLSKHIKLEEERRSEDAQSKAALTDWLRAKASFVIEGLKEADKDEFCRCELKLQKWYGDLRGKPFAIEAENSILDISGFSKQYNCAFIWQKDGVKKLNLYLIINYFKGGKLRFKKIKPEAFEANRFYTVINKKSGEIVPMEVNFNFDDPNLIILPLAFGKRQGREFIWNDLLSLETGSLKLANGRVIEKTLYNRRTRQDEPALFVALTFERREVLDSSNIKPMNLIGVDRGENIPAVIALTDPEGCPLSRFKDSLGNPTHILRIGESYKEKQRTIQAKKEVEQRRAGGYSRKYASKAKNLADDMVRNTARDLLYYAVTQDAMLIFENLSRGFGRQGKRTFMAERQYTRMEDWLTAKLAYEGPLPSKTYLSKTLAQYTSKTCSNCGFTITSADYDRVLEKLKKTATGWMTTINGKELKVEGQITYYNRYKRQNVVKDLSVELDRLSEESVNNDISSWTKGRSGEALSLLKKRFSHRPVQEKFVCLNCGFETHADEQAALNIARSWLFLRSQEYKKYQTNKTTGNTDKRAFVETWQSFYRKKLKEVWKPAV

SEQ ID NO: 46951 - protein, 978 aa, synthetic construct
  REGION 1..978: note = engineered CasX variant
QEIKRINKIRRRLVKDSNTKKAGKTGPMKTLLVRVMTPDLRERLENLRKKPENIPQPISNTSRANLNKLLTDYTEMKKAILHVYWEEFQKDPVGLMSRVAQPASKKIDQNKLKPEMDEKGNLTTAGFACSQCGQPLFVYKLEQVSEKGKAYTNYFGRCNVAEHEKLILLAQLKPEKDSDEAVTYSLGKFGQRALDFYSIHVTKESTHPVKPLAQIAGNRYASPVGKALSDACMGTIASFLSKYQDIIIEHQKVVKGNQKRLESLRELAGKENLEYPSVTLPPQPHTKEGVDAYNEVIARVRMWVNLNLWQKLKLSRDDAKPLLRLKGFPSFPLVERQANEVDWWDMVCNVKKLINEKKEDGKVFWQNLAGYKRQEALRPYLSSEEDRKKGKKFARYQLGDLLWHLEKKHGEDWGKVYDEAWERIDKKVEGLSKHIKLEEERRSEDAQSKAALTDWLRAKASFVIEGLKEADKDEFCRCELKLQKWYGDLRGKPFAIEAENSILDISGFSKQYNCAFIWQKDGVKKLNLYLIINYFKGGKLRFKKIKPEAFEANRFYTVINKKSGEIVPMEVNFNFDDPNLIILPLAFGKRQGREFIWNDLLSLETGSLKLANGRVIEKTLYNRRTRQDEPALFVALTFERREVLDSSNIKPMNLIGVDRGENIPAVIALTDPEGCPLSRFKDSLGNPTHILRIGESYKEKQRTIQAKKEVEQRRAGGYSRKYASKAKNLADDMVRNTARDLLYYAVTQDAMLIFENLSRGFGRQGKRTFMAERQYTRMEDWLTAKLAYEGPLPSKTYLSKTLAQYTSKTCSNCGFTITSADYDRVLEKLKKTATGWMTTINGKELKVEGQITYYNRYKRQNVVKDLSVELDRLSEESVNNDISSWTKGRSGEALSLLKKRFSHRPVQEKFVCLNCGFETHADEQAALNIARSWLFLRSQEYKKYQTNKTTGNTDKRAFVETWQSFYRKKLKEVWKPAV

SEQ ID NO: 46952 - protein, 979 aa, synthetic construct
  REGION 1..979: note = engineered CasX variant
QEIKRINKIRRRLVKDSNTKKAGKTGPMKTLLVRVMTPDLRERLENLRKKPENIPQPISNTSRANLNKLLTDYTEMKKAILHVYWEEFQKDPVGLMSRVAQPASKKIDQNKLKPEMDEKGNLTTAGFACSQCGQPLFVYKLEQVSEKGKAYTNYFGRCNVAEHEKLILLAQLKPEKDSDEAVTYSLGKFGQRALDFYSIHVTKESTHPVKPLAQIAGNRYASYPVGKALSDACMGTIASFLSKYQDIIIEHQKVVKGNQKRLESLRELAGKENLEYPSVTLPPQPHTKEGVDAYNEVIARVRMWVNLNLWQKLKLSRDDAKPLLRLKGFPSFPLVERQANEVDWWDMVCNVKKLINEKKEDGKVFWQNLAGYKRQEALRPYLSSEEDRKKGKKFARYQLGDLLLHLYKKHGEDWGKVYDEAWERIDKKVEGLSKHIKLEEERRSEDAQSKAALTDWLRAKASFVIEGLKEADKDEFCRCELKLQKWYGDLRGKPFAIEAENSILDISGFSKQYNCAFIWQKDGVKKLNLYLIINYFKGGKLRFKKIKPEAFEANRFYTVINKKSGEIVPMEVNFNFDDPNLIILPLAFGKRQGREFIWNDLLSLETGSLKLANGRVIEKTLYNRRTRQDEPALFVALTFERREVLDSSNIKPMNLIGVDRGENIPAVIALTDPEGCPLSRFKDSLGNPTHILRIGESYKEKQRTIQAKKEVEQRRAGGYSRKYASKAKNLADDMVRNTARDLLYYAVTQDAMLIFENLSRGFGRQGKRTFMAERQYTRMEDWLTAKLAYEGPLPSKTYLSKTLAQYTSKTCSNCGFTITSADYDRVLEKLKKTATGWMTTINGKELKVEGQITYYNRYKRQNVVKDLSVELDRLSEESVNNDISSWTKGRSGEALSLLKKRFSHRPVQEKFVCLNCGFETHADEQAALNIARSWLFLRSQEYKKYQTNKTTGNTDKRAFVETWQSFYRKKLKEVWKPAV

SEQ ID NO: 46953 - protein, 979 aa, synthetic construct
  REGION 1..979: note = engineered CasX variant
QEIKRINKIRRRLVKDSNTKKAGKTGPMKTLLVRVMTPDLRERLENLRKKPENIPQPISNTSRANLNKLLTDYTEMKKAILHVYWEEFQKDPVGLMSRVAQPASKKIDQNKLKPEMDEKGNLTTAGFACSQCGQPLFVYKLEQVSEKGKAYTNYFGRCNVAEHEKLILLAQLKPEKDSDEAVTYSLGKFGQRALDFYSIHVTKESTHPVKPLAQIAGNRYASHPVGKALSDACMGTIASFLSKYQDIIIEHQKVVKGNQKRLESLRELAGKENLEYPSVTLPPQPHTKEGVDAYNEVIARVRMWVNLNLWQKLKLSRDDAKPLLRLKGFPSFPLVERQANEVDWWDMVCNVKKLINEKKEDGKVFWQNLAGYKRQEALRPYLSSEEDRKKGKKFARYQLGDLLLHLYKKHGEDWGKVYDEAWERIDKKVEGLSKHIKLEEERRSEDAQSKAALTDWLRAKASFVIEGLKEADKDEFCRCELKLQKWYGDLRGKPFAIEAENSILDISGFSKQYNCAFIWQKDGVKKLNLYLIINYFKGGKLRFKKIKPEAFEANRFYTVINKKSGEIVPMEVNFNFDDPNLIILPLAFGKRQGREFIWNDLLSLETGSLKLANGRVIEKTLYNRRTRQDEPALFVALTFERREVLDSSNIKPMNLIGVDRGENIPAVIALTDPEGCPLSRFKDSLGNPTHILRIGESYKEKQRTIQAKKEVEQRRAGGYSRKYASKAKNLADDMVRNTARDLLYYAVTQDAMLIFENLSRGFGRQGKRTFMAERQYTRMEDWLTAKLAYEGPLPSKTYLSKTLAQYTSKTCSNCGFTITSADYDRVLEKLKKTATGWMTTINGKELKVEGQITYYNRYKRQNVVKDLSVELDRLSEESVNNDISSWTKGRSGEALSLLKKRFSHRPVQEKFVCLNCGFETHADEQAALNIARSWLFLRSQEYKKYQTNKTTGNTDKRAFVETWQSFYRKKLKEVWKPAV

SEQ ID NO: 46954 - protein, 979 aa, synthetic construct
  REGION 1..979: note = engineered CasX variant
QEIKRINKIRRRLVKDSNTKKAGKTGPMKTLLVRVMTPDLRERLENLRKKPENIPQPISNTSRANLNKLLTDYTEMKKAILHVYWEEFQKDPVGLMSRVAQPASKKIDQNKLKPEMDEKGNLTTAGFACSQCGQPLFVYKLEQVSEKGKAYTNYFGRCNVAEHEKLILLAQLKPEKDSDEAVTYSLGKFGQRALDFYSIHVTKESTHPVKPLAQIAGNRYASSPVGKALSDACMGTIASFLSKYQDIIIEHQKVVKGNQKRLESLRELAGKENLEYPSVTLPPQPHTKEGVDAYNEVIARVRMWVNLNLWQKLKLSRDDAKPLLRLKGFPSFPLVERQANEVDWWDMVCNVKKLINEKKEDGKVFWQNLAGYKRQEALRPYLSSEEDRKKGKKFARYQLGDLLLHLYKKHGEDWGKVYDEAWERIDKKVEGLSKHIKLEEERRSEDAQSKAALTDWLRAKASFVIEGLKEADKDEFCRCELKLQKWYGDLRGKPFAIEAENSILDISGFSKQYNCAFIWQKDGVKKLNLYLIINYFKGGKLRFKKIKPEAFEANRFYTVINKKSGEIVPMEVNFNFDDPNLIILPLAFGKRQGREFIWNDLLSLETGSLKLANGRVIEKTLYNRRTRQDEPALFVALTFERREVLDSSNIKPMNLIGVDRGENIPAVIALTDPEGCPLSRFKDSLGNPTHILRIGESYKEKQRTIQAKKEVEQRRAGGYSRKYASKAKNLADDMVRNTARDLLYYAVTQDAMLIFENLSRGFGRQGKRTFMAERQYTRMEDWLTAKLAYEGPLPSKTYLSKTLAQYTSKTCSNCGFTITSADYDRVLEKLKKTATGWMTTINGKELKVEGQITYYNRYKRQNVVKDLSVELDRLSEESVNNDISSWTKGRSGEALSLLKKRFSHRPVQEKFVCLNCGFETHADEQAALNIARSWLFLRSQEYKKYQTNKTTGNTDKRAFVETWQSFYRKKLKEVWKPAV

SEQ ID NO: 46955 - protein, 979 aa, synthetic construct
  REGION 1..979: note = engineered CasX variant
QEIKRINKIRRRLVKDSNTKKAGKTGPMKTLLVRVMTPDLRERLENLRKKPENIPQPISNTSRANLNKLLTDYTEMKKAILHVYWEEFQKDPVGLMSRVAQPASKKIDQNKLKPEMDEKGNLTTAGFACSQCGQPLFVYKLEQVSEKGKAYTNYFGRCNVAEHEKLILLAQLKPEKDSDEAVTYSLGKFGQRALDFYSIHVTKESTHPVKPLAQIAGNRYASTPVGKALSDACMGTIASFLSKYQDIIIEHQKVVKGNQKRLESLRELAGKENLEYPSVTLPPQPHTKEGVDAYNEVIARVRMWVNLNLWQKLKLSRDDAKPLLRLKGFPSFPLVERQANEVDWWDMVCNVKKLINEKKEDGKVFWQNLAGYKRQEALRPYLSSEEDRKKGKKFARYQLGDLLLHLYKKHGEDWGKVYDEAWERIDKKVEGLSKHIKLEEERRSEDAQSKAALTDWLRAKASFVIEGLKEADKDEFCRCELKLQKWYGDLRGKPFAIEAENSILDISGFSKQYNCAFIWQKDGVKKLNLYLIINYFKGGKLRFKKIKPEAFEANRFYTVINKKSGEIVPMEVNFNFDDPNLIILPLAFGKRQGREFIWNDLLSLETGSLKLANGRVIEKTLYNRRTRQDEPALFVALTFERREVLDSSNIKPMNLIGVDRGENIPAVIALTDPEGCPLSRFKDSLGNPTHILRIGESYKEKQRTIQAKKEVEQRRAGGYSRKYASKAKNLADDMVRNTARDLLYYAVTQDAMLIFENLSRGFGRQGKRTFMAERQYTRMEDWLTAKLAYEGPLPSKTYLSKTLAQYTSKTCSNCGFTITSADYDRVLEKLKKTATGWMTTINGKELKVEGQITYYNRYKRQNVVKDLSVELDRLSEESVNNDISSWTKGRSGEALSLLKKRFSHRPVQEKFVCLNCGFETHADEQAALNIARSWLFLRSQEYKKYQTNKTTGNTDKRAFVETWQSFYRKKLKEVWKPAV

SEQ ID NO: 46956 - protein, 979 aa, synthetic construct
  REGION 1..979: note = engineered CasX variant
QEIKRINKIRRRLVKDSNTKKAGKTGPMKTLLVRVMTPDLRERLENLRKKPENIPQPISNTSRANLNKLLTDYTEMKKAILHVYWEEFQKDPVGLMSRVAQPASKKIDQNKLKPEMDEKGNLTTAGFACSQCGQPLFVYKLEQVSEKGKAYTNYFGRCNVAEHEKLILLAQLKPEKDSDEAVTYSLGKFGQRALDFYSIHVTKESTHPVKPLAQIAGNRYASAPVGKALSDACMGTIASFLSKYQDIIIEHQKVVKGNQKRLESLRELAGKENLEYPSVTLPPQPHTKEGVDAYNEVIARVRMWVNLNLWQKLKLSRDDAKPLLRLKGFPSFPLVERQANEVDWWDMVCNVKKLINEKKEDGKVFWQNLAGYKRQEALRPYLSSEEDRKKGKKFARYQLGDLLLHLYKKHGEDWGKVYDEAWERIDKKVEGLSKHIKLEEERRSEDAQSKAALTDWLRAKASFVIEGLKEADKDEFCRCELKLQKWYGDLRGKPFAIEAENSILDISGFSKQYNCAFIWQKDGVKKLNLYLIINYFKGGKLRFKKIKPEAFEANRFYTVINKKSGEIVPMEVNFNFDDPNLIILPLAFGKRQGREFIWNDLLSLETGSLKLANGRVIEKTLYNRRTRQDEPALFVALTFERREVLDSSNIKPMNLIGVDRGENIPAVIALTDPEGCPLSRFKDSLGNPTHILRIGESYKEKQRTIQAKKEVEQRRAGGYSRKYASKAKNLADDMVRNTARDLLYYAVTQDAMLIFENLSRGFGRQGKRTFMAERQYTRMEDWLTAKLAYEGPLPSKTYLSKTLAQYTSKTCSNCGFTITSADYDRVLEKLKKTATGWMTTINGKELKVEGQITYYNRYKRQNVVKDLSVELDRLSEESVNNDISSWTKGRSGEALSLLKKRFSHRPVQEKFVCLNCGFETHADEQAALNIARSWLFLRSQEYKKYQTNKTTGNTDKRAFVETWQSFYRKKLKEVWKPAV

SEQ ID NO: 46957 - protein, 979 aa, synthetic construct
  REGION 1..979: note = engineered CasX variant
QEIKRINKIRRRLVKDSNTKKAGKTGPMKTLLVRVMTPDLRERLENLRKKPENIPQPISNTSRANLNKLLTDYTEMKKAILHVYWEEFQKDPVGLMSRVAQPASKKIDQNKLKPEMDEKGNLTTAGFACSQCGQPLFVYKLEQVSEKGKAYTNYFGRCNVAEHEKLILLAQLKPEKDSDEAVTYSLGKFGQRALDFYSIHVTKESTHPVKPLAQIAGNRYASVPVGKALSDACMGTIASFLSKYQDIIIEHQKVVKGNQKRLESLRELAGKENLEYPSVTLPPQPHTKEGVDAYNEVIARVRMWVNLNLWQKLKLSRDDAKPLLRLKGFPSFPLVERQANEVDWWDMVCNVKKLINEKKEDGKVFWQNLAGYKRQEALRPYLSSEEDRKKGKKFARYQLGDLLLHLYKKHGEDWGKVYDEAWERIDKKVEGLSKHIKLEEERRSEDAQSKAALTDWLRAKASFVIEGLKEADKDEFCRCELKLQKWYGDLRGKPFAIEAENSILDISGFSKQYNCAFIWQKDGVKKLNLYLIINYFKGGKLRFKKIKPEAFEANRFYTVINKKSGEIVPMEVNFNFDDPNLIILPLAFGKRQGREFIWNDLLSLETGSLKLANGRVIEKTLYNRRTRQDEPALFVALTFERREVLDSSNIKPMNLIGVDRGENIPAVIALTDPEGCPLSRFKDSLGNPTHILRIGESYKEKQRTIQAKKEVEQRRAGGYSRKYASKAKNLADDMVRNTARDLLYYAVTQDAMLIFENLSRGFGRQGKRTFMAERQYTRMEDWLTAKLAYEGPLPSKTYLSKTLAQYTSKTCSNCGFTITSADYDRVLEKLKKTATGWMTTINGKELKVEGQITYYNRYKRQNVVKDLSVELDRLSEESVNNDISSWTKGRSGEALSLLKKRFSHRPVQEKFVCLNCGFETHADEQAALNIARSWLFLRSQEYKKYQTNKTTGNTDKRAFVETWQSFYRKKLKEVWKPAV

SEQ ID NO: 46958 - protein, 979 aa, synthetic construct
  REGION 1..979: note = engineered CasX variant
QEIKRINKIRRRLVKDSNTKKAGKTGPMKTLLVRVMTPDLRERLENLRKKPENIPQPISNTSRANLNKLLTDYTEMKKAILHVYWEEFQKDPVGLMSRVAQPASKKIDQNKLKPEMDEKGNLTTAGFACSQCGQPLFVYKLEQVSEKGKAYTNYFGRCNVAEHEKLIKLAQLKPEKDSDEAVTYSLGKFGQRALDFYSIHVTKESTHPVKPLAQIAGNRYASGPVGKALSDACMGTIASFLSKYQDIIIEHQKVVKGNQKRLESLRELAGKENLEYPSVTLPPQPHTKEGVDAYNEVIARVRMWVNLNLWQKLKLSRDDAKPLLRLKGFPSFPLVERQANEVDWWDMVCNVKKLINEKKEDGKVFWQNLAGYKRQEALRPYLSSEEDRKKGKKFARYQLGDLLLHLYKKHGEDWGKVYDEAWERIDKKVEGLSKHIKLEEERRSEDAQSKAALTDWLRAKASFVIEGLKEADKDEFCRCELKLQKWYGDLRGKPFAIEAENSILDISGFSKQYNCAFIWQKDGVKKLNLYLIINYFKGGKLRFKKIKPEAFEANRFYTVINKKSGEIVPMEVNFNFDDPNLIILPLAFGKRQGREFIWNDLLSLETGSLKLANGRVIEKTLYNRRTRQDEPALFVALTFERREVLDSSNIKPMNLIGVDRGENIPAVIALTDPEGCPLSRFKDSLGNPTHILRIGESYKEKQRTIQAKKEVEQRRAGGYSRKYASKAKNLADDMVRNTARDLLYYAVTQDAMLIFENLSRGFGRQGKRTFMAERQYTRMEDWLTAKLAYEGPLPSKTYLSKTLAQYTSKTCSNCGFTITSADYDRVLEKLKKTATGWMTTINGKELKVEGQITYYNRYKRQNVVKDLSVELDRLSEESVNNDISSWTKGRSGEALSLLKKRFSHRPVQEKFVCLNCGFETHADEQAALNIARSWLFLRSQEYKKYQTNKTTGNTDKRAFVETWQSFYRKKLKEVWKPAV

SEQ ID NO: 46959 - protein, 978 aa, synthetic construct
  REGION 1..978: note = engineered CasX variant
QEIKRINKIRRRLVKDSNTKKAGKTGPMKTLLVRVMTPDLRERLENLRKKPENIPQPISNTSRANLNKLLTDYTEMKKAILHVYWEEFQKDPVGLMSRVAQPASKKIDQNKLKPEMDEKGNLTTAGFACSQCGQPLFVYKLEQVSEKGKAYTNYFGRCNVAEHEKLILLAQLKPEKDSDEAVTYSLGKFGQRALDFYSIHVTKESTHPVKPLAQIAGNRYASPVGKALSDACMGTIASFLSKYQDIIIEHQKVVKGNQKRLESLRELAGKENLEYPSVTLPPQPHTKEGVDAYNEVIARVRMWVNLNLWQKLKLSRDDAKPLLRLKGFPSFPLVERQANEVDWWDMVCNVKKLINEKKEDGKVFWQNLAGYKRQEALRPYLSSEEDRKKGKKFARYQLGDLLLHLYKKHGEDWGKVYDEAWERIDKKVEGLSKHIKLEEERRSEDAQSKAALTDWLRAKASFVIEGLKEADKDEFCRCELKLQKWYGDLRGKPFAIEAENSILDISGFSKQYNCAFIWQKDGVKKLNLYLIINYFKGGKLRFKKIKPEAFEANRFYTVINKKSGEIVPMEVNFNFDDPNLIILPLAFGKRQGREFIWNDLLSLETGSLKLANGRVIEKTLYNRRTRQDEPALFVALTFERREVLDSSNIKPMNLIGVDRGENIPAVIALTDPEGCPLSRFKDSLGNPTHILRIGESYKEKQRTIQAKKEVEQRRAGGYSRKYASKAKNLADDMVRNTARDLLYYAVTQDAMLIFENLSRGFGRQGKRTFMAERQYTRMEDWLTAKLAYEGPLPSKTYLSKTLAQYTSKTCSNCGFTITSADYDRVLEKLKKTATGWMTTINGKELKVEGQITYYNRYKRQNVVKDLSVELDRLSEESVNNDISSWTKGRSGEALSLLKKRFSHRPVQEKFVCLNCGFETHADEQAALNIARSWLFLRSQEYKKYQTNKTTGNTDKRAFVETWQSFYRKKLKEVWKPAV

SEQ ID NO: 46960 - protein, 979 aa, synthetic construct
  REGION 1..979: note = engineered CasX variant
QEIKRINKIRRRLVKDSNTKKAGKTGPMKTLLVRVMTPDLRERLENLRKKPENIPQPISNTSRANLNKLLTDYTEMKKAILHVYWEEFQKDPVGLMSRVAQPASKKIDQNKLKPEMDEKGNLTTAGFACSQCGQPLFVYKLEQVSEKGKAYTNYFGRCNVAEHEKLILLAQLKPEKDSDEAVTYSLGKFGQRALDFYSIHVTKESTHPVKPLAQIAGNRYASYPVGKALSDACMGTIASFLSKYQDIIIEHQKVVKGNQKRLESLRELAGKENLEYPSVTLPPQPHTKEGVDAYNEVIARVRMWVNLNLWQKLKLSRDDAKPLLRLKGFPSFPLVERQANEVDWWDMVCNVKKLINEKKEDGKVFWQNLAGYKRQEALRPYLSSEEDRKKGKKFARYQLGDLLLHLEKKHPEDWGKVYDEAWERIDKKVEGLSKHIKLEEERRSEDAQSKAALTDWLRAKASFVIEGLKEADKDEFCRCELKLQKWYGDLRGKPFAIEAENSILDISGFSKQYNCAFIWQKDGVKKLNLYLIINYFKGGKLRFKKIKPEAFEANRFYTVINKKSGEIVPMEVNFNFDDPNLIILPLAFGKRQGREFIWNDLLSLETGSLKLANGRVIEKTLYNRRTRQDEPALFVALTFERREVLDSSNIKPMNLIGVDRGENIPAVIALTDPEGCPLSRFKDSLGNPTHILRIGESYKEKQRTIQAKKEVEQRRAGGYSRKYASKAKNLADDMVRNTARDLLYYAVTQDAMLIFENLSRGFGRQGKRTFMAERQYTRMEDWLTAKLAYEGPLPSKTYLSKTLAQYTSKTCSNCGFTITSADYDRVLEKLKKTATGWMTTINGKELKVEGQITYYNRYKRQNVVKDLSVELDRLSEESVNNDISSWTKGRSGEALSLLKKRFSHRPVQEKFVCLNCGFETHADEQAALNIARSWLFLRSQEYKKYQTNKTTGNTDKRAFVETWQSFYRKKLKEVWKPAV

SEQ ID NO: 46961 - protein, 979 aa, synthetic construct
  REGION 1..979: note = engineered CasX variant
QEIKRINKIRRRLVKDSNTKKAGKTGPMKTLLVRVMTPDLRERLENLRKKPENIPQPISNTSRANLNKLLTDYTEMKKAILHVYWEEFQKDPVGLMSRVAQPASKKIDQNKLKPEMDEKGNLTTAGFACSQCGQPLFVYKLEQVSEKGKAYTNYFGRCNVAEHEKLILLAQLKPEKDSDEAVTYSLGKFGQRALDFYSIHVTKESTHPVKPLAQIAGNRYASHPVGKALSDACMGTIASFLSKYQDIIIEHQKVVKGNQKRLESLRELAGKENLEYPSVTLPPQPHTKEGVDAYNEVIARVRMWVNLNLWQKLKLSRDDAKPLLRLKGFPSFPLVERQANEVDWWDMVCNVKKLINEKKEDGKVFWQNLAGYKRQEALRPYLSSEEDRKKGKKFARYQLGDLLLHLEKKHPEDWGKVYDEAWERIDKKVEGLSKHIKLEEERRSEDAQSKAALTDWLRAKASFVIEGLKEADKDEFCRCELKLQKWYGDLRGKPFAIEAENSILDISGFSKQYNCAFIWQKDGVKKLNLYLIINYFKGGKLRFKKIKPEAFEANRFYTVINKKSGEIVPMEVNFNFDDPNLIILPLAFGKRQGREFIWNDLLSLETGSLKLANGRVIEKTLYNRRTRQDEPALFVALTFERREVLDSSNIKPMNLIGVDRGENIPAVIALTDPEGCPLSRFKDSLGNPTHILRIGESYKEKQRTIQAKKEVEQRRAGGYSRKYASKAKNLADDMVRNTARDLLYYAVTQDAMLIFENLSRGFGRQGKRTFMAERQYTRMEDWLTAKLAYEGPLPSKTYLSKTLAQYTSKTCSNCGFTITSADYDRVLEKLKKTATGWMTTINGKELKVEGQITYYNRYKRQNVVKDLSVELDRLSEESVNNDISSWTKGRSGEALSLLKKRFSHRPVQEKFVCLNCGFETHADEQAALNIARSWLFLRSQEYKKYQTNKTTGNTDKRAFVETWQSFYRKKLKEVWKPAV

SEQ ID NO: 46962 - protein, 979 aa, synthetic construct
  REGION 1..979: note = engineered CasX variant
QEIKRINKIRRRLVKDSNTKKAGKTGPMKTLLVRVMTPDLRERLENLRKKPENIPQPISNTSRANLNKLLTDYTEMKKAILHVYWEEFQKDPVGLMSRVAQPASKKIDQNKLKPEMDEKGNLTTAGFACSQCGQPLFVYKLEQVSEKGKAYTNYFGRCNVAEHEKLILLAQLKPEKDSDEAVTYSLGKFGQRALDFYSIHVTKESTHPVKPLAQIAGNRYASSPVGKALSDACMGTIASFLSKYQDIIIEHQKVVKGNQKRLESLRELAGKENLEYPSVTLPPQPHTKEGVDAYNEVIARVRMWVNLNLWQKLKLSRDDAKPLLRLKGFPSFPLVERQANEVDWWDMVCNVKKLINEKKEDGKVFWQNLAGYKRQEALRPYLSSEEDRKKGKKFARYQLGDLLLHLEKKHPEDWGKVYDEAWERIDKKVEGLSKHIKLEEERRSEDAQSKAALTDWLRAKASFVIEGLKEADKDEFCRCELKLQKWYGDLRGKPFAIEAENSILDISGFSKQYNCAFIWQKDGVKKLNLYLIINYFKGGKLRFKKIKPEAFEANRFYTVINKKSGEIVPMEVNFNFDDPNLIILPLAFGKRQGREFIWNDLLSLETGSLKLANGRVIEKTLYNRRTRQDEPALFVALTFERREVLDSSNIKPMNLIGVDRGENIPAVIALTDPEGCPLSRFKDSLGNPTHILRIGESYKEKQRTIQAKKEVEQRRAGGYSRKYASKAKNLADDMVRNTARDLLYYAVTQDAMLIFENLSRGFGRQGKRTFMAERQYTRMEDWLTAKLAYEGPLPSKTYLSKTLAQYTSKTCSNCGFTITSADYDRVLEKLKKTATGWMTTINGKELKVEGQITYYNRYKRQNVVKDLSVELDRLSEESVNNDISSWTKGRSGEALSLLKKRFSHRPVQEKFVCLNCGFETHADEQAALNIARSWLFLRSQEYKKYQTNKTTGNTDKRAFVETWQSFYRKKLKEVWKPAV

SEQ ID NO: 46963 - protein, 979 aa, synthetic construct
  REGION 1..979: note = engineered CasX variant
QEIKRINKIRRRLVKDSNTKKAGKTGPMKTLLVRVMTPDLRERLENLRKKPENIPQPISNTSRANLNKLLTDYTEMKKAILHVYWEEFQKDPVGLMSRVAQPASKKIDQNKLKPEMDEKGNLTTAGFACSQCGQPLFVYKLEQVSEKGKAYTNYFGRCNVAEHEKLILLAQLKPEKDSDEAVTYSLGKFGQRALDFYSIHVTKESTHPVKPLAQIAGNRYASTPVGKALSDACMGTIASFLSKYQDIIIEHQKVVKGNQKRLESLRELAGKENLEYPSVTLPPQPHTKEGVDAYNEVIARVRMWVNLNLWQKLKLSRDDAKPLLRLKGFPSFPLVERQANEVDWWDMVCNVKKLINEKKEDGKVFWQNLAGYKRQEALRPYLSSEEDRKKGKKFARYQLGDLLLHLEKKHPEDWGKVYDEAWERIDKKVEGLSKHIKLEEERRSEDAQSKAALTDWLRAKASFVIEGLKEADKDEFCRCELKLQKWYGDLRGKPFAIEAENSILDISGFSKQYNCAFIWQKDGVKKLNLYLIINYFKGGKLRFKKIKPEAFEANRFYTVINKKSGEIVPMEVNFNFDDPNLIILPLAFGKRQGREFIWNDLLSLETGSLKLANGRVIEKTLYNRRTRQDEPALFVALTFERREVLDSSNIKPMNLIGVDRGENIPAVIALTDPEGCPLSRFKDSLGNPTHILRIGESYKEKQRTIQAKKEVEQRRAGGYSRKYASKAKNLADDMVRNTARDLLYYAVTQDAMLIFENLSRGFGRQGKRTFMAERQYTRMEDWLTAKLAYEGPLPSKTYLSKTLAQYTSKTCSNCGFTITSADYDRVLEKLKKTATGWMTTINGKELKVEGQITYYNRYKRQNVVKDLSVELDRLSEESVNNDISSWTKGRSGEALSLLKKRFSHRPVQEKFVCLNCGFETHADEQAALNIARSWLFLRSQEYKKYQTNKTTGNTDKRAFVETWQSFYRKKLKEVWKPAV

SEQ ID NO: 46964 - protein, 979 aa, synthetic construct
  REGION 1..979: note = engineered CasX variant
QEIKRINKIRRRLVKDSNTKKAGKTGPMKTLLVRVMTPDLRERLENLRKKPENIPQPISNTSRANLNKLLTDYTEMKKAILHVYWEEFQKDPVGLMSRVAQPASKKIDQNKLKPEMDEKGNLTTAGFACSQCGQPLFVYKLEQVSEKGKAYTNYFGRCNVAEHEKLILLAQLKPEKDSDEAVTYSLGKFGQRALDFYSIHVTKESTHPVKPLAQIAGNRYASAPVGKALSDACMGTIASFLSKYQDIIIEHQKVVKGNQKRLESLRELAGKENLEYPSVTLPPQPHTKEGVDAYNEVIARVRMWVNLNLWQKLKLSRDDAKPLLRLKGFPSFPLVERQANEVDWWDMVCNVKKLINEKKEDGKVFWQNLAGYKRQEALRPYLSSEEDRKKGKKFARYQLGDLLLHLEKKHPEDWGKVYDEAWERIDKKVEGLSKHIKLEEERRSEDAQSKAALTDWLRAKASFVIEGLKEADKDEFCRCELKLQKWYGDLRGKPFAIEAENSILDISGFSKQYNCAFIWQKDGVKKLNLYLIINYFKGGKLRFKKIKPEAFEANRFYTVINKKSGEIVPMEVNFNFDDPNLIILPLAFGKRQGREFIWNDLLSLETGSLKLANGRVIEKTLYNRRTRQDEPALFVALTFERREVLDSSNIKPMNLIGVDRGENIPAVIALTDPEGCPLSRFKDSLGNPTHILRIGESYKEKQRTIQAKKEVEQRRAGGYSRKYASKAKNLADDMVRNTARDLLYYAVTQDAMLIFENLSRGFGRQGKRTFMAERQYTRMEDWLTAKLAYEGPLPSKTYLSKTLAQYTSKTCSNCGFTITSADYDRVLEKLKKTATGWMTTINGKELKVEGQITYYNRYKRQNVVKDLSVELDRLSEESVNNDISSWTKGRSGEALSLLKKRFSHRPVQEKFVCLNCGFETHADEQAALNIARSWLFLRSQEYKKYQTNKTTGNTDKRAFVETWQSFYRKKLKEVWKPAV

SEQ ID NO: 46965 - protein, 979 aa, synthetic construct
  REGION 1..979: note = engineered CasX variant
QEIKRINKIRRRLVKDSNTKKAGKTGPMKTLLVRVMTPDLRERLENLRKKPENIPQPISNTSRANLNKLLTDYTEMKKAILHVYWEEFQKDPVGLMSRVAQPASKKIDQNKLKPEMDEKGNLTTAGFACSQCGQPLFVYKLEQVSEKGKAYTNYFGRCNVAEHEKLILLAQLKPEKDSDEAVTYSLGKFGQRALDFYSIHVTKESTHPVKPLAQIAGNRYASVPVGKALSDACMGTIASFLSKYQDIIIEHQKVVKGNQKRLESLRELAGKENLEYPSVTLPPQPHTKEGVDAYNEVIARVRMWVNLNLWQKLKLSRDDAKPLLRLKGFPSFPLVERQANEVDWWDMVCNVKKLINEKKEDGKVFWQNLAGYKRQEALRPYLSSEEDRKKGKKFARYQLGDLLLHLEKKHPEDWGKVYDEAWERIDKKVEGLSKHIKLEEERRSEDAQSKAALTDWLRAKASFVIEGLKEADKDEFCRCELKLQKWYGDLRGKPFAIEAENSILDISGFSKQYNCAFIWQKDGVKKLNLYLIINYFKGGKLRFKKIKPEAFEANRFYTVINKKSGEIVPMEVNFNFDDPNLIILPLAFGKRQGREFIWNDLLSLETGSLKLANGRVIEKTLYNRRTRQDEPALFVALTFERREVLDSSNIKPMNLIGVDRGENIPAVIALTDPEGCPLSRFKDSLGNPTHILRIGESYKEKQRTIQAKKEVEQRRAGGYSRKYASKAKNLADDMVRNTARDLLYYAVTQDAMLIFENLSRGFGRQGKRTFMAERQYTRMEDWLTAKLAYEGPLPSKTYLSKTLAQYTSKTCSNCGFTITSADYDRVLEKLKKTATGWMTTINGKELKVEGQITYYNRYKRQNVVKDLSVELDRLSEESVNNDISSWTKGRSGEALSLLKKRFSHRPVQEKFVCLNCGFETHADEQAALNIARSWLFLRSQEYKKYQTNKTTGNTDKRAFVETWQSFYRKKLKEVWKPAV
